United States Patent Application Publication US 2007/0031850 A1 - sequence listing, part 2

SEQ ID NO: 3168 - DNA, 31494 bp, Staphylococcus aureus
gtgaattatcgtgataaaattcaaaagtttagtattcgtaaatatacagttggtacattttcaactgtcattgcgacattggtatttttaggattcaatacatcacaagcacatgctgctgaaacaaatcaaccagcaagcgtggttaaacagaaacaacaaagtaataatgaacagactgagaatcgagaatctcaagtacaaaattctcaaaattcacaaaatggtcaatcattatctgctactcatgaaaatgagcaaccaaatattagtcaagctaatttagtagatcaaaaagtagcgcaatcatctactactaatgatgaacaaccagcatctcaaaatgtaaatacaaagaaagattcggcaacggctgcgacaacacaaccagataaagaacaaagtaagcataaacaaaacgaaagtcaatctgctaataaaaatggaaacgacaatagagcggctcatgtagaaaatcatgaagcaaatgtagtaacagcttcagattcatctgataatggtaacgtacaacatgaccgaaatgaattacaagcgttttttgatgcaaattatcatgattatcgctttattgaccgtgaaaatgcagattctggcacatttaactatgtaaaaggcatttttgataagattaatacgttattaggcagtaatgatccaataaacaataaagacttgcaacttgcatacaaagaattggaacaagctgttgctttaattcgtacaatgcctcaacgtcaacagactagccgacgttcaaatagaattcaaacgcgttcggttgagtcaagagctgcagagcctagatcagtatcagactatcaaaatgcaaattcatcatattatgttgaaaatgctaatgatggttcgggctatcctgttggtacatatatcaatgcttctagtaaaggggcgccatataatttaccaactacaccatggaatacattgaaggcctctgactcaaaggaaattgctcttatgacagcgaaacaaactggagacgggtaccaatgggttattaagtttaataaaggacatgctccacatcaaaatatgatcttttggtttgcattaccagcagaccaagtgccagtaggaagaactgactttgtaacagttaattcagatggaacaaatgtacaatggagtcatggagcaggagcaggtgcaaataaaccacttcaacaaatgtgggaatatggagtaaatgatcctcatcgttcacatgactttaaaataagaaatagaagtggccaagtaatatatgactggccaactgtccatatttattctttagaagatttatctagagcgagtgattattttagtgaagctggagcgacacctgctactaaagcttttggtagacaaaattttgaatatattaatggtcaaaaacctgctgaatcaccgggtgttcctaaagtttatactttcatcggtcaaggtgatgcaagttatacaatttcatttaaaacacaaggtccaactgttaataaattgtactatgcagcaggtgggcgtgctttagagtacaatcaattatttatgtacagtcaactatacgtcgaatcaacgcaagaccatcaacaacgtcttaatggtttaagacaagtggttaatcgtacatatcgcataggtacaactaaacgtgtagaagtgagtcaaggaaatgtacaaacgaaaaaggtattagaaagtacaaacctaaatatagatgattttgttgatgatcctttaagttatgttaagacgccgagtaataaagtgttaggattttattcgaataatgcaaatactaatgcttttagaccgggtggagcccaacaattaaatgaatatcaattaagtcaattatttactgatcaaaaattacaagaagcagcaagaactagaaacccaataagattaatgattggtttcgactatcctgatgcttatggtaatagtgaaactttagttcctgttaacttaacggtattacctgaaatccaacataatattaaattctttaaaaatgacgatactcaaaatattgctgaaaaaccattttcaaaacaagctgggcatccagttttctatgtatatgcaggtaaccaagggaatgcttccgtgaatttaggtggtagcgtaacatctattcaaccattacgtattaatttaacaagtaatgagaattttacagataaagattggcaaattacaggtattccgcgtacattacacattgaaaactcgacaaatagacctaataatgccagagaacgcaatattgaacttgttggtaacttattaccaggggattactttggaacgatacgttttggacgtaaagaacaattattcgaaattcgtgttaaaccacatacaccaacaattacaacgacagctgagcaattaagaggtacagcattacaaaaagtgcctgttaatatttcgggaataccgttggatccatcggcattggtttatttagttgcaccaacaaatcaaactacgaatggtggtagtgaggcagatcaaataccatctggttatacgatacttgcgactggtacacctgatggggtgcataatacaattactatacgaccgcaagattatgttgtattcataccacctgtaggtaaacaaattagagcagtagtttattataataaagtagttgcatctaatatgagtaatgctgttactattttgccagatgacattccaccaacaatcaataatcctgttggaataaatgccaaatactatcgaggcgacgaagtcaactttacaatgggtgtctctgatagacattctggtataaaaaatacaactattacgacattgccgaatggttggacatcaaatttaacaaaagcggataagaataatggctcattatctattacaggtagagtgagtatgaatcaggcatttaacagtgatattacatttaaagtgtcagcgacagacaatgtcaataatacgacaaatgatagtcaatctaaacatgtttcaattcatgtaggtaaaattagtgaagatgctcatccgattgtattaggaaatactgagaaagttgtagtagtcaatccgactgctgtatctaatgatgaaaagcaaagcataattactgcctttatgaataaaaaccaaaatataagaggatatttagcatcaactgatccagtaactgtcgataataatggtaatgtcacattacattaccgtgatggctcatcgacaacgcttgatgctacaaatgtgatgacatacgaaccagttgtgaaacctgaataccaaactgtcaatgctgctaaaacagcaacggtaacgattgctaaaggacaatcatttagtattggtgatattaaacaatattttactttaagtaatggacaacctattccaagtggcacatttacaaatattacatctgatagaactattccaactgcacaagaagttagtcaaatgaacgcaggcacgcagttataccatataactgctacaaatgcgtatcataaagatagtgaagacttctatattagtttgaaaatcatcgatgtgaaacaaccagaaggcgatcaacgtgtatatcgtacatcaacatatgatttaactactgatgaaatctcaaaagtaaaacaagcatttattaatgcaaatagagatgtaattacgcttgccgaaggtgatatttcagttacaaatacacctaatggtgctaatgtaagtactattacagtaaatattaataaaggtcgattaacgaaatcattcgcgtcaaacctagctaatatgaatttcttgcgttgggttaatttcccacaagattatacagtgacatggacgaatgcaaaaattgcaaacagaccaacagatggtggtttatcatggtctgatgaccataaatctttaatttatcgttatgatgctacattaggtactcaaattacgacgaatgatattttaacaatgttaaaagcaacaactacagtgcctggattgcgaaataacattactggtaatgaaaaatcacaagcagaagctggcggaagacctaactttagaacgactggttattcacaatcaaatgcgacaactgatggtcaacgtcaatttacgttgaatggtcaagtgattcaagtgttagacatcatcaacccttcaaacggttatggtgggcaacctgttacaaattcaaatactcgtgcaaaccatagtaactcaactgttgttaacgtaaacgaaccggcagctaatggtgctggcgcatttacaattgaccacgttgtaaaaagtaattctacacataatgcaagtgatgcagtttataaagcacagttatacttaacgccatatggtccaaaacaatatgttgaacatttaaatcaaaatacaggaaatactactgacgctattaacatttattttgtaccaagtgacttagtgaatccaacaatttcagtaggtaattacactaatcatcaagtgttctcaggtgaaacatttacaaatactattacagcgaatgataactttggtgtgcaatctgtaactgtaccaaatacatcacaaattacaggtactgttgataataaccatcaacatgtttctgcaacggcaccaaatgtgacatcagcaactaataagacaatcaatttattagcaactgatacaagcggcaatacagctacaacttcgttcaatgtaacagtgaaacctttgcgtgataaatatcgagttggtacttcatcaacggctgctaatcctgtgagaattgccaatatttcgaataatgcgacagtatcacaagctgatcaaacgacaattattaattcgttaacgtttactgaaacagtaccaaatagaagttatgcaagagcaagtgcgaatgaaatcactagtaaaacagttagtaatgtcagtcgtactggaaataatgccaatgtcacagtaactgttacttatcaagatggaacaacatcaacagtgactgtacctgtaaagcatgtcattccagaaatcgttgcacattcgcattacactgtacaaggccaagacttcccagcaggtaatggttctagtgcatcagattactttaagttatctaatggtagtgacattgcagatgcaactattacatgggtaagtggacaagcgccaaataaagataatacacgtattggtgaagatataactgtaactgcacatatcttaattgatggcgaaacaacgccgattacgaaaacagcaacatataaagtagtaagaactgtaccgaaacatgtctttgaaacagccagaggtgttttatacccaggtgtttcagatatgtatgatgcgaaacaatatgttaagccagtaaataattcttggtcgacaaatgcgcaacatatgaatttccaatttgttggaacatatggtcctaacaaagatgttgtaggcatatctactcgtcttattagagtgacatatgataatagacaaacagaagatttaactattttatctaaagttaaacctgacccacctagaattgacgcaaactctgtgacatataaagcaggtcttacaaaccaagaaattaaagttaataacgtattaaataactcgtcagtaaaattatttaaagcagataatacaccattaaatgtcacaaatattactcatggtagcggttttagttcggttgtgacagtaagtgacgcgttaccaaatggcggaattaaagcaaaatcttcaatttcaatgaacaatgtgacgtatacgacgcaagacgaacatggtcaagttgttacagtaacaagaaatgaatctgttgattcaaatgacagtgcaacagtaacagtgacaccacaattacaagcaactactgaaggcgctgtatttattaaaggtggcgacggttttgatttcggacacgtagaaagatttattcaaaacccgccacatggggcaacggttgcatggcatgatagtccagatacatggaagaatacagtcggtaacactcataaaactgcggttgtaacattacctaatggtcaaggtacgcgtaatgttgaagttccagtcaaagtttatccagttgctaatgcaaaggcgccatcacgtgatgtgaaaggtcaaaatttgactaatggaacggatgcgatgaactacattacatttgatccaaatacaaacacaaatggtatcactgcagcatgggcaaatagacaacaaccaaataaccaacaagcaggcgtgcaacatttaaatgtcgatgtcacatatccaggtatttcagctgctaaacgagttcctgttactgttaatgtatatcaatttgaattccctcaaactacttatacgacaacggttggaggcactttagcaagtggtacgcaagcatcaggatatgcacatatgcaaaatgctactggtttaccaacagatggatttacgtataaatggaatcgtgatactacaggtacaaatgacgcaaactggtcagctatgaataaaccgaatgtggctaaagtcgttaacgcaaaatatgacgtcatctataacggacatacttttgcaacatctttaccagcgaaatttgtagtaaaagatgtgcaaccagcgaaaccaactgtgactgaaacagcggcaggagcgattacaattgcacctggagcaaaccaaacagtgaatacacatgccggtaacgtaacgacatacgctgataaattagttattaaacgtaatggtaacgttgtgacgacatttacacgtcgcaataatacgagtccatgggtgaaagaagcatctgcagcaactgtagcaggtattgctggaactaataatggtattactgttgcagcaggtactttcaaccctgctgatacaattcaagttgttgcaacgcaaggaagcggagagacagtgagtgatgagcaacgtagtgatgatttcacagttgtcgcaccacaaccgaaccaagcgactactaagatttggcaaaatggtcatattgatatcacgcctaataatccatcaggacatttaattaatccaactcaagcaatggatattgcttacactgaaaaagtgggtaatggtgcagaacatagtaagacaattaatgttgttcgtggtcaaaataatcaatggacaattgcgaataagcctgactatgtaacgttagatgcacaaactggtaaagtgacgttcaatgccaatactataaaaccaaattcatcaatcacaattactccgaaagcaggtacaggtcactcagtaagtagtaatccaagtacattaactgcaccggcagctcatactgtcaacacaactgaaattgtgaaagattatggttcaaatgtaacagcagctgaaattaacaatgcagttcaagttgctaataaacgtactgcaacgattaaaaatggcacagcaatgcctactaatttagctggtggtagcacaacgacgattcctgtgacagtaacttacaatgatggtagtactgaagaagtacaagagtccattttcacaaaagcggataaacgtgagttaatcacagctaaaaatcatttagatgatccagtaagcactgaaggtaaaaagccaggtacaattacgcagtacaataatgcaatgcataatgcgcaacaacaaatcaatactgcgaaaacagaagcacaacaagtgattaataatgagcgtgcaacaccacaacaagtttctgacgcactaactaaagttcgtgcagcacaaactaagattgatcaagctaaagcattacttcaaaataaagaagataatagccaattagtaacgtctaaaaataacttacaaagttctgtgaaccaagtaccatcaactgctggtatgacgcaacaaagtattgataactataatgcgaagaagcgtgaagcagaaactgaaataactgcagctcaacgtgttattgacaatggcgatgcaactgcacaacaaatttcagatgaaaaacatcgtgtcgataacgcattaacagcattaaaccaagcgaaacatgatttaactgcagatacacatgccttagagcaagcagtgcaacaattgaatcgcacaggtacaacgactggtaagaagccggcaagtattactgcttacaataattcgattcgtgcacttcaaagtgacttaacaagtgctaaaaatagcgctaatgctattattcaaaagccaataagaacagtacaagaagtgcaatctgcgttaacaaatgtaaatcgtgtcaatgagcgattaacgcaagcaattaatcaattagtacctttagctgataatagtgctttaaaaactgctaagacgaaacttgatgaagaaatcaataaatcagtaactactgatggtatgacacaatcatcaatccaagcatatgaaaatgctaaacgtgcgggtcaaacagaatcaacaaatgcacaaaatgttattaacaatggtgatgcgactgaccaacaaattgccgcagaaaaaacaaaagtagaagaaaaatataatagcttaaaacaagcaattgctggattaactccagacttggcaccattacaaactgcaaaaactcagttgcaaaatgatattgatcagccaacgagtacgactggtatgacaagcgcatctattgcagcatttaatgaaaaactttcagcagctagaactaaaattcaagaaattgatcgtgtattagcctcacatccagatgttgcgacaatacgtcaaaacgtgacagcagcgaatgccgctaaatcagcacttgatcaagcacgtaatggcttaacagtcgataaagcgcctttagaaaatgcgaaaaatcaactacaatatagtattgacacgcaaacaagtacaactggtatgacacaagactctataaatgcatacaatgcgaagttaacagctgcacgtaataagattcaacaaatcaatcaagtattagcaggttcaccgactgtagaacaaattaatacaaatacgtctacagcaaatcaagctaaatctgatttagatcatgcacgtcaagctttaacaccagataaagcgccgcttcaaactgcgaaaacgcaattagaacaaagcattaatcaaccaacggatacaacaggtatgacgaccgcttcgttaaatgcgtacaaccaaaaattacaagcagcgcgtcaaaagttaactgaaattaatcaagtgttgaatggcaacccaactgtccaaaatatcaatgataaagtgacagaggcaaaccaagctaaggatcaattaaatacagcacgtcaaggtttaacattagatagacagccagcgttaacaacattacatggtgcatctaacttaaaccaagcacaacaaaataatttcacgcaacaaattaatgctgctcaaaatcatgctgcgcttgaaacaattaagtctaacattacggctttaaatactgcgatgacgaaattaaaagacagtgttgcggataataatacaattaaatcagatcaaaattacactgacgcaacaccagctaataaacaagcgtatgataatgcagttaatgcggctaaaggtgtcattggagaaacgactaatccaacgatggatgttaacacagtgaaccaaaaagcagcatctgttaaatcgacgaaagatgctttagatggtcaacaaaacttacaacgtgcgaaaacagaagcaacaaatgcgattacgcatgcaagtgatttaaaccaagcacaaaagaatgcattaacacaacaagtgaatagtgcacaaaacgtgcaagcagtaaatgatattaaacaaacgactcaaagcttaaatactgctatgacaggtttaaaacgtggcgttgctaatcataaccaagtcgtacaaagtgataattatgtcaacgcagatactaataagaaaaatgattacaacaatgcatacaaccatgcgaatgacattattaatggtaatgcacaacatccagttataacaccaagtgatgttaacaatgctttatcaaatgtcacaagtaaagaacatgcattgaatggtgaagctaagttaaatgctgcgaaacaagaagcgaatactgcattaggtcatttaaacaatttaaataatgcacaacgtcaaaacttacaatcgcaaattaatggtgcgcatcaaattgatgcagttaatacaattaagcaaaatgcaacaaacttgaatagtgcaatgggtaacttaagacaagctgttgcagataaagatcaagtgaaacgtacagaagattatgcggatgcagatacagctaaacaaaatgcatataacagtgcagtttcaagtgccgaaacaatcattaatcaaacaacaaatccaacgatgtctgttgatgatgttaatcgtgcaacttcagctgttacttctaataaaaatgcattaaatggttatgaaaaattagcacaatctaaaacagatgctgcaagagcaattgatgcattaccacatttaaataatgcacaaaaagcagatgttaaatctaaaattaatgctgcatcaaatattgctggcgtaaatactgttaaacaacaaggtacagatttaaatacagcgatgggtaacttgcaaggtgcaatcaatgatgaacaaacgacgcttaatagtcaaaactatcaagatgcgacacctagtaagaaaacagcatacacaaatgcggtacaagctgcgaaagatattttaaataaatcaaatggtcaaaataaaacgaaagatcaagttactgaagcgatgaatcaagtgaattctgctaaaaataacttagatggtacgcgtttattagatcaagcgaagcaaacagcaaaacagcagttaaataatatgacgcatttaacaactgcacaaaaaacgaatttaacaaaccaaattaatagtggtactactgtcgctggtgttcaaacggttcaatcaaatgccaatacattagatcaagccatgaatacgttaagacaaagtattgccaacaaagatgcgactaaagcaagtgaagattacgtagatgctaataatgataagcaaacagcatataacaacgcagtagctgctgctgaaacgattattaatgctaatagtaatccagaaatgaatccaagtacgattacacaaaaagcagagcaagtgaatagttctaaaacggcacttaacggtgatgaaaacttagctgctgcaaaacaaaatgcgaaaacgtacttaaacacattgacaagtattacagatgctcaaaagaacaatttgattagtcaaattactagtgcgacaagagtgagtggtgttgatactgtaaaacaaaatgcgcaacatctagaccaagctatggctagcttacagaatggtattaacaacgaatctcaagtgaaatcatctgagaaatatcgtgatgctgatacaaataaacaacaagagtatgataatgctattactgcagcgaaagcgattttaaataaatcgacaggtccaaacactgcgcaaaatgcagttgaagcagcattacaacgtgttaataatgcgaaagatgcattgaatggtgatgcaaaattaattgcagctcaaaacgcagcgaaacaacatttaggtactttaacgcatatcactacagctcaacgtaatgatttaacaaatcaaatttcacaagctacaaacttagctggtgttgaatctgttaaacaaaatgcgaatagtttagatggtgctatgggtaacttacaaacggctatcaacgataagtcaggaacattagcgagccaaaacttcttggatgctgatgagcaaaaacgtaatgcatacaatcaagctgtatcagcagccgaaaccattttaaataaacaaactggaccgaatacagcgaaaacagcagtcgaacaagcacttaataatgttaataatgcgaaacatgcattaaatggtacgcaaaacttaaacaatgcgaaacaagcagcgattacagcaatcaatggcgcatctgatttaaatcaaaaacaaaaagatgcattaaaagcacaagctaatggtgctcaacgcgtatctaatgcacaagatgtacagcacaatgcgactgaactgaacacggcaatgggcacattaaaacatgccatcgcagataagacgaatacgttagcaagcagtaaatatgttaatgccgatagcactaaacaaaatgcttacacaactaaagttaccaatgctgaacatattattagcggtacgccaacggttgttacgacaccttcagaagtaacagctgcagctaatcaagtaaacagcgcgaaacaagaattaaatggtgacgaaagattacgtgaagcaaaacaaaacgccaatactgctattgatgcattaacacaattaaatacacctcaaaaagctaaattaaaagaacaagtgggacaagccaatagattagaagacgtacaaactgttcaaacaaatggacaagcattgaacaatgcaatgaaaggcttaagagatagtattgctaacgaaacaacagtcaaaacaagtcaaaactatacagacgcaagtccgaataaccaatcaacatataatagcgctgtgtcaaatgcgaaaggtatcattaatcaaactaacaatccgactatggatactagtgcgattacccaagctacaacacaagtgaataatgctaaaaatggtttaaacggtgctgaaaacttaagaaatgcacaaaacactgctaagcaaaacttaaatacattatcacacttaacaaataaccaaaaatctgccatctcatcacaaattgatcgtgcaggtcatgtgagtgaggtaactgctactaaaaatgcagcaactgagttgaatacgcaaatgggtaacttggaacaagctatccatgatcaaaacacagttaaacaaagtgttaaatttactgatgcagataaagctaaacgtgatgcgtatacaaatgcggtaagcagagctgaagcaattctgaataaaacgcaaggtgcaaatacgtctaaacaagatgttgaagcggctattcaaaatgtttcaagtgctaaaaatgcattgaatggtgatcaaaacgttacaaatgcgaagaatgcagctaaaaatgcattaaataacttaacgtcaattaataatgcacaaaaacgtgacttaacaactaaaattgatcaagcaacaactgtagctggtgttgaagctgtatctaatacgagtacacaattgaatacagcgatggctaacttgcaaaatggtattaatgataaaacaaatacactagcaagtgaaaactatcatgatgctgattcagataagaaaactgcttatactcaagccgttacgaacgcagaaaatattttaaataaaaatagtggatcaaatttagacaaaactgccgttgaaaacgcgttgtcacaagttgctaatgcgaaaggtgccctaaatggtaaccataatttagagcaagctaaatcaaatgcaaacactactataaacggacttcaacatttaacaactgctcaaaaagataaattgaaacaacaagtgcaacaagcacaaaatgttgcaggtgtagatactgttaaatcaagtgccaacacattaaatggtgctatgggtacgttaagaaatagcatacaagataacacagctacgaaaaatggccaaaactatcttgatgctacagaacgtaacaaaacaaactataacaatgctgttgatagtgctaatggtgtcattaatgcaacaagcaatccaaatatggatgctaatgcaattaaccaaatcgctacacaagtgacatcaacgaaaaatgcattagatggtacacataatttaacgcaagcgaaacaaacagcaacaaatgccatcgatggtgctactaacttaaataaagcgcaaaaagatgcgttaaaagcacaagttacaagtgcgcaacgtgttgcaaatgtaacaagtatccaacaaactgcaaatgaacttaatacagctatgggtcaattacaacatggtattgatgatgaaaatgcaacaaaacaaactcaaaaatatcgtgacgctgaacaaagtaagaaaactgcttatgatcaagctgtagctgctgcgaaagcaattttaaataaacaaacaggttcaaattcagataaagcagcagttgaccgtgcattacaacaagtaacaagtacgaaagatgcattgaatggtgatgcaaaactggcagaagcgaaagcggcagctaaacaaaacttaggcactttaaaccatattacgaatgcacaacgtactgacttagaaggccaaaacaatcaagcgacgactgttgatggcgttaatactgtaaaaacaaatgccaatacattagacggcgcaatgaatagcttacaaggttcaatcaatgataaagatgcgacattaagaaatcaaaattatcttgatgcggatgaatcaaaacgaaatgcatatacgcaagctgtcacagcggctgaaggcattttaaataaacaaactggtggtaacacatctaaagcagacgttgataatgcattaaatgcagttacaagagcgaaagcggctttaaatggtgctgacaacttaagaaatgcgaaaacttcagcaacaaatacgattgatggtttacctaacttaacacaattacaaaaagacaacttgaagcatcaagttgaacaagcgcaaaatgtagcaggtgtaaatggtgttaaagataaaggtaatacgttaaatactgccatgggtgcattacgtacaagtatccaaaatgataatacgacgaaaacaagtcaaaattatcttgatgcatctgacagcaacaaaaataattacaatactgctgtaaataatgcaaatggtgttattaatgcaacgaacaatccaaatatggatgctaatgcgattaatggcatggcaaatcaagtcaatacaacaaaagcagcgttaaatggtgcacaaaacttagctcaagctaaaacaaatgcgacgaacacaattaacaacgcacatgacttaaaccaaaaacaaaaagatgcattaaaaacacaagttaacaatgcacaacgtgtatctgatgcaaataacgttcaacacactgcaactgaattgaacagtgcgatgacagcacttaaagcagctattgctgataaagaaagaacaaaagcaagcggtaattatgtcaatgctgatcaagaaaaacgtcaagcgtatgattcaaaagtgactaacgctgaaaatatcattagtggtacaccgaatgcgacattaacagtcaatgacgtaaatagtgcggcatcacaagtcaatgcggctaaaacagcattaaatggtgataacaacttacgtgtagcgaaagagcatgccaacaatacaattgacggcttagcacaattgaataatgcacaaaaagcaaaattaaaagaacaagttcaaagtgcaactacattagatggtgttcaaactgttaaaaatagttctcaaacgttgaatacagcgatgaaaggcttaagagatagtattgcgaatgaagcaacaattaaagcaggtcaaaactacactgacgcaagtccaaataatcgtaacgagtacgacagtgcagttactgcagcaaaagcaatcattaatcaaacatcgaacccaacgatggaaccaaatactattacgcaagtaacatcacaagtgacaactaaagaacaggcattaaatggtgcgcgaaacttagctcaagctaagacaactgcgaaaaacaacttgaataacttaacatcaattaacaatgcacaaaaagatgcgttaacgcgtagcattgatggtgcaacaacagtagctggtgtaaatcaagaaactgcaaaagcaacagaattaaataacgcaatgcatagtttacaaaatggtatcaatgatgagacacaaacaaaacaaactcagaaatacctagatgcagagccaagtaagaaatcagcttatgatcaagcagtaaatgcagcgaaagcaattttaacaaaagctagtggtcaaaatgtagacaaagcagcagttgaacaagcattgcaaaatgtgaacagtacgaagacggcgttgaacggtgatgcgaaattaaatgaagctaaagcagctgcgaaacaaacgttaggtacattaacacacattaataatgcacaacgtacagcgttagacaatgaaattacacaagcaacaaatgttgaaggtgttaatacagttaaagccaaagcgcaacaattagatggtgctatgggtcaattagaaacatcaattcgtgataaagacacgacgttacaaagtcaaaattatcaagatgctgatgatgctaaacgaactgcttattctcaagcagtaaatgcagcagcaactattttaaataaaacagctggcggtaatacacctaaagcagatgttgaaagagcaatgcaagctgttacacaagcaaatactgcattaaacggtattcaaaacttagatcgtgcgaaacaggctgctaacacagcgattacaaatgcttcggacttaaatacaaaacaaaaagaagcattaaaagcacaagtaacaagtgcaggacgtgtatctgcagcaaatggtgttgaacatactgcgactgaattaaatactgcgatgacagctttaaagcgtgccattgctgataaagctgagacaaaagctagtggtaactatgtcaatgctgatgcgaataaacgtcaagcatatgatgaaaaagttacagctgccgaaaatatcgttagtggtacaccaacaccaacgttaacaccagcagatgttacaaatgcagcaacgcaagtaacgaatgctaagacgcagttaaacggtaatcataatttagaagtagcgaaacaaaatgctaacactgcaattgatggtttaacttctttaaatggtccgcaaaaagcaaaacttaaagaacaagtgggtcaagcgacgacgttgccaaatgttcaaactgttcgtgataatgcacaaacattaaacactgcaatgaaaggtctacgagatagcattgcgaatgaagcaacgattaaagcaggtcaaaactacacagatgcaagtcaaaacaaacaaactgactacaacagtgcagtcactgcagcaaaagcaatcattggtcaaacaactagtccatcaatgaatgcgcaagaaattaatcaagcgaaagaccaagtgacagctaaacaacaagcgttaaacggtcaagaaaacttaagaactgcgcaaacaaatgcgaagcaacatttgaacggcttaagtgacttaactgacgctcaaaaagatgcagtgaaacgtcaaatcgaaggtgcaacgcatgttaatgaagtaacacaagcacaaaataatgcggatgcattaaatacagctatgacgaacttgaaaaatggtattcaagatcagaatacgattaagcaaggtgttaacttcactgatgccgacgaagcgaaacgtaatgcatatacaaatgcagtgacgcaagctgaacaaattttaaataaagcacaaggtccaaatacttcaaaagacggtgtcgaaactgcgttagaaaatgtacaacgtgctaaaaacgaattgaacggtaatcaaaatgttgcgaacgctaagacaactgcgaaaaatgcattgaataacctaacatcaattaataatgcacaaaaagaagcattgaaatcacaaattgaaggtgcgacaacagttgcaggtgtaaatcaagtgtctacaacggcatctgaattaaatacagcaatgagcaacttacaaaatggtattaatgatgaagcagctacaaaagcagctcagaaatatactgatgcagatagagaaaaacaaactgcatacaatgacgctgtaacagcagctaaaacgttattagataaaacagctggttcaaatgacaataaagcagctgttgaacaagcattacaacgtgtgaatactgctaaaacagcattaaatggtgacgagcgattaaatgaagcgaagaacacagctaaacaacaagtagcgacaatgtcacacttaactgatgctcaaaaagcaaacttaacatcgcaaatcgaaagtggtacgactgttgcaggtgttcaaggtattcaagctaatgccggtactttagatcaagcaatgaatcaattaagacaaagtattgcttctaaagatgcgactaaatcaagcgaagattatcaagacgcgaatgcagatttacaaaatgcatacaatgatgcggtaactaatgctgaaggtattattagtgcaacgaataaccctgaaatgaatcctgatacaattaaccaaaaagcgagccaagtgaacagtgcgaagtctgcattgaacggtgatgaaaaattagcagcagcaaaacaaactgcgaaatcagatatcggtcgtttgacagacttgaacaatgcacaacgaactgcggcaaatgctgaagtggatcaagcaccaaatcttgcagctgtcacagcggctaaaaataaagcaacatcgttaaatacagcgatgggtaatttgaaacatgcacttgctgaaaaggataatacgaaacgtagtgtcaattacacagatgcggatcaaccaaaacaacaagcgtatgatactgcggttacacaagcagaagcaattactaatgctaatggcagcaacgcgaatgaaacacaagttcaagcagcactaaaccaattgaatcaagctaaaaatgacttgaatggtgataataaagttgctcaagcaaaagagtcagcgaaacgtgcattagcttcatatagtaacttgaataatgcgcaatcaactgcagcaactagtcaaattgacaatgcaacgacagtagcaggcgtaactgctgcacaaaatactgctaatgaattaaatacagcaatgggtcaacttcaaaatggtataaatgaccaaaacactgttaaacaacaagtgaactttacagatgctgaccaaggtaagaaagatgcttacacaaatgctgttacgaatgctcaaggtattttagataaagcacacggtcaaaatatgacgaaagcacaagttgaagctgcattaaatcaagtaacgactgctaagaatgctttaaacggtgacgcaaatgtaagacaagcaaaatcagatgcgaaagcaaacttaggtacattaacacacttaaataatgcacaaaaacaagatttaacatcacaaatcgaaggcgcaacaacagtcaacggtgtaaatggtgttaaaacgaaagcacaagacttagatggtgcaatgcaacgattacaatcagctatagcaaataaagatcaaactaaagcgagcgaaaattacatcgacgcagatccaactaagaaaacagcatttgataatgctatcacacaagctgaatcttacttaaataaagatcacggtgcgaataaagataagcaagctgttgaacaagcaattcaaagtgtaacgtctactgaaaatgctttgaacggtgacgcgaacttacaacgcgctaaaactgaagctatacaagctatcgataacttgacacatttgaatacaccacaaaaaacagcattaaaacaacaagtgaacgctgcgcaacgtgtatcaggtgtaactgatctgaaaaatagtgctacatcacttaataatgcgatggatcaattaaaacaagcaattgctgatcatgacacaattgtagctagtggtaattacactaacgcgagtcctgataagcaaggtgcttatactgatgcatataatgctgcgaaaaacattgtaaatggttcgcctaatgtgattacaaatgcagcagatgttacagcagcaacacaacgtgttaataatgctgaaacaggtttaaacggtgatacaaacttagcaactgcgaagcaacaagctaaagatgcattacgtcaaatgacacatttatctgatgcacaaaaacaaagtattactggtcaaattgatagcgcgacacaagtaactggcgttcaaagtgtgaaagacaacgcgacaaatcttgataatgcaatgaatcaacttcgaaatagtattgcgaataaagatgatgtaaaagcgagtcaaccatatgttgatgcagatagagataaacaaaatgcatacaatacagcagttacaaatgctgaaaatatcattaatgcaacgagtcagccgacacttgatccatctgcagtaacacaagcagctaatcaagtgagcactaacaaaactgcgcttaatggtgcacaaaacttagcgaataaaaagcaagaaacgactgctaacatcaaccaattaagtcatttaaataatgctcaaaagcaagatttaaatacgcaagtgacaaatgcaccaaatattagcacagtaaatcaagtgaaaactaaagctgaacaattagatcaagcaatggaacgtttaatcaacggaatccaagacaaagatcaagtgaaacaaagtgttaactttacagatgcagatccagaaaaacaaacagcatacaacaatgcggtaactgctgctgaaaatattattaatcaagcaaatggtacaaatgcgaaccaatcacaagttgaagcagcactttcaactgtaacaactacgaaacaagcgttgaatggtgatagaaaagtaacagatgctaaaaacaatgcaaaccaaacattatctacgttagataacttaaacaatgcacaaaaaggtgctgttactggaaacatcaatcaagcgcacactgtagctgaagtaacgcaagccattcaaaccgctcaggaactgaatacagcgatgggtaacttgaaaaatagcttgaatgataaagacactacacttggcagtcaaaactttgcagatgcagatccagagaagaaaaatgcatacaatgaagcggttcataatgctgaaaatattttaaataaatctacaggtacgaacgtgcctaaagatcaagttgaagcagctatgaatcaagtgaatgctacaaaagcagcgcttaatggtactcaaaaccttgaaaaagctaaacaacacgcaaatacagcaattgacggtttaagccatttaacaaatgcacaaaaagaggcattaaaacaattggtacaacaatcgactactgttgcagaagcacaaggtaatgagcaaaaagcaaacaatgttgatgcagcaatggacaaattacgtcaaagtattgcagataatgcgacaacaaaacaaaaccaaaattatactgatgcaagtcagaataaaaaggatgcgtacaataatgctgtcacaactgcacaaggtattattgatcaaactacaagtccaactttagatccgactgttatcaatcaagctgctggacaagtaagcacaactaaaaatgcattaaatggtaatgaaaacctagaggcagcgaaacaacaagcgtcacaatcattaggttcattagataacttaaataatgcgcaaaaacaaacagttactgatcaaattaatggcgcgcatactgttgatgaagcaaatcaaattaagcaaaatgcgcaaaacttaaatacagcgatgggtaacttgaaacaagcgatagctgacaaagatgctacgaaagcgacagttaacttcactgatgcagatcaagcaaaacaacaagcatataacactgctgttacaaatgctgaaaatatcatttcaaaagctaatggcggcaatgcaacacaagctgaagttgaacaagcaatcaaacaagttaatgctgcaaaacaagcattaaatggtaatgccaacgttcaacatgcaaaagacgaagcaacagcattaattaatagctctaatgaccttaaccaagcacaaaaagacgcattaaaacaacaagttcaaaatgcaactactgtagctggtgtaaacaatgttaaacaaacagcacaagagttaaacaatgctatgacacaattaaaacaaggcattgcagataaagaacaaacaaaagctgatggtaactttgtcaatgcagatcctgataagcaaaatgcatataatcaagcagtagcgaaagctgaagcattaattagtgctacgcctgatgttgtcgttacacctagcgaaattactgcagcgttaaataaagttacgcaagctaaaaatgatttaaatggtaatacaaacttagcaacggcgaaacaaaatgttcaacatgctattgatcaattgccaaacttaaaccaagcgcaacgtgatgaatacagcaaacaaatcacgcaagcaacacttgtaccaaacgtcaatgctattcaacaagcggcgacaacgcttaatgacgcgatgacacaattgaaacaaggtattgcgaataaagcacaaattaaaggtagcgagaactatcacgatgctgatactgacaagcaaacagcatatgataatgcagtaacaaaagcagaagaattgttaaaacaaacaacaaatccaacaatggatccaaatacaattcaacaagcattaactaaagtgaatgacacaaatcaagcacttaacggtaatcaaaaattagctgatgccaaacaagatgctaagacaacacttggtacactagatcatttaaatgatgctcaaaaacaagcgctaacaactcaagttgaacaagcaccagatattgcaacagttaataatgttaagcaaaatgctcaaaatctgaataatgctatgactaacttaaacaatgcattacaagataaaactgagacattaaatagcattaactttactgatgcagatcaagctaagaaagatgcttatactaatgcggtttcacatgcagaaggtattttatctaaagcaaatggcagcaatgcaagtcaaactgaagtggaacaagcgatgcaacgtgtgaacgaagcgaaacaagcattgaatggtaatgacaatgtacaacgtgcaaaagatgcagcgaaacaagtgattacaaatgcaaatgatttaaatcaagcgcaaaaagatgcattaaaacaacaagtcgatgctgcgcaaactgttgcaaatgtaaacacgattaagcaaacagcacaagatttaaatcaagcaatgacacaattgaaacaaggtattgcagataaagaccaaactaaagcaaatggtaactttgtcaatgctgatactgataagcaaaatgcttacaacaatgcggtagcacatgctgaacaaataattagtggtacaccaaatgcaaacgtggatccacaacaagtggctcaagcgttacaacaagtgaatcaagctaagggtgatttaaacggtaaccataacttacaagttgctaaagacaatgcaaatacagccattgatcagttaccaaacttaaatcaaccacaaaaaacagcattaaaagaccaagtgtcgcatgcagaacttgttacaggtgttaatgctattaagcaaaatgctgatgcgttaaataatgcaatgggtacattgaaacaacaaattcaagcgaacagtcaagtaccacagtcagttgactttacacaagcggatcaagacaaacaacaagcatataacaatgcggctaaccaagcgcaacaaatcgcaaatggcataccaacacctgtattgacgcctgatacagtaacacaagcagtgacaactatgaatcaagcgaaagatgcattaaacggtgatgaaaaattagcacaagcgaaacaagaagctttagcaaatcttgatacgttacgcgatttaaatcaaccacaacgtgatgcattacgtaaccaaatcaatcaagcacaagcgttagctacagttgaacaaactaaacaaaatgcacaaaatgtgaatacagcaatgagtaacttgaaacaaggtattgcaaacaaagatactgtcaaagcaagtgagaactatcatgatgctgatgccgataagcaaacagcatatacaaatgcagtgtctcaagcggaaggtattatcaatcaaacgacaaatccaacgcttaacccagatgaaataacacgtgcattaactcaagtgactgatgctaaaaatggcttaaacggtgaagctaaattggcaactgaaaagcaaaatgctaaagatgccgtaagtgggatgacgcatttaaacgatgctcaaaaacaagcattaaaaggtcaaatcgatcaatcgcctgaaattgctacagtgaaccaagttaaacaaacagcaacgagcctagatcaagcaatggatcaattatcacaagctattaatgataaagctcaaacattagcggacggtaattacttaaatgcagatcctgacaaacaaaatgcgtataaacaggcagtagcaaaagctgaagcattattgaataaacaaagtggtactaatgaagtacaagcacaagttgaaagcatcactaatgaagtgaacgcagcgaaacaagcattaaatggtaatgacaatttggcaaatgcaaaacaacaagcaaaacaacaattggcgaacttaacacacttaaatgatgcacaaaaacaatcatttgaaagtcaaattacacaagcgccacttgttacagatgtcactacgattaatcaaaaagcacaaacgttagatcatgcgatggaattattaagaaatagtgttgcggataatcaaacgacattagcgtctgaagattatcatgatgcaactgcgcaaagacaaaatgactataaccaagctgtaacagctgctaataatatcattaatcaaactacatcgcctacgatgaatccagatgatgttaatggtgcaacgacacaagtgaataatacgaaagttgcattagatggtgatgaaaaccttgcagcagctaaacaacaagcaaacaacagacttgatcaattagatcatttgaataatgcgcaaaagcaacagttacaatcacaaattacgcaatcatctgatattgctgcagttaatggtcacaaacaaacagcagaatctttaaatactgcgatgggtaacttaattaatgcgattgcagatcatcaagccgttgaacaacgtggtaacttcatcaatgctgatactgataaacaaactgcttataatacagcggtaaatgaagcagcagcaatgattaacaaacaaactggtcaaaatgcgaaccaaacagaagtagaacaagctattactaaagttcaaacaacacttcaagcgttaaatggagaccataatttacaagttgctaaaacaaatgcgacgcaagcaattgatgctttaacaagcttaaatgatcctcaaaaaacagcattaaaagaccaagttacagctgcaactttagtaactgcagttcatcaaattgaacaaaatgcgaatacgcttaaccaagcaatgcatggtttaagacagagcattcaagataacgcagcaactaaagcaaatagcaaatatatcaacgaagatcaaccagagcaacaaaactatgatcaagctgttcaagccgcaaataatattatcaatgaacaaactgcaacattagataataatgcgattaatcaagcagcgacaactgtgaatacaacgaaagcagcattacatggtgatgtgaagttacaaaatgataaagatcatgctaagcaaacggttagtcaattagcacatctaaacaatgcacaaaaacatatggaagatacgttaattgatagtgaaacaactagaacagcagttaagcaagatttgactgaagcacaagcattagatcaacttatggatgcattacaacaaagtattgctgacaaagatgcaacacgtgcgagcagtgcatatgtcaatgcagaaccgaataaaaaacaatcctatgatgaagcagttcaaaatgctgagtctatcattgcaggattaaataatccaactatcaataaaggtaatgtatcaagtgcgactcaagcagtaatatcatctaaaaatgcattagatggtgttgaacgattagctcaagataagcaaactgctggaaattctctaaatcatttagatcaattaacaccagctcaacaacaagcgctagaaaatcaaattaataatgcaacaactcgtggcgaagtagcacaaaaattaactgaagcacaagcacttaaccaagcaatggaagctttacgtaatagcattcaagatcaacagcaaacggaagcgggtagcaagtttatcaatgaagataaaccacaaaaagatgcttaccaagcagcagttcaaaatgcaaaagatttaattaatcaaactaacaatccaacgcttgataaagcacaagttgaacaattgacacaagctgttaaccaagctaaagataacctacacggtgatcaaaaacttgcagacgataaacaacatgcggttactgatttaaatcaattaaatggtttgaataatccgcaacgtcaagcacttgaaagccaaataaacaacgcagcaactcgtggcgaagtagcacaaaaattagctgaagcaaaagcgcttgatcaagcaatgcaagcattacgtaatagtattcaagatcaacaacaaacagaatctggtagcaagtttatcaatgaagataaaccgcaaaaagatgcttaccaagcagcagttcaaaatgcaaaagatttaattaaccaaacaggtaatccaacactcgacaaatcacaagtagaacaattgacacaagcagtaacaactgcaaaagataatctacatggtgatcaaaaacttgctcgtgatcaacaacaagcagtaacaactgtaaatgcattgccaaacttaaatcatgcacaacaacaagcattaactgatgctataaatgcagcgcctacaagaacagaggttgcacaacatgttcaaactgctactgaacttgatcacgcgatggaaacattgaaaaataaagttgatcaagtgaatacagataaggctcaaccaaattacactgaagcgtcaactgataaaaaagaagcagtagatcaagcgttacaagctgcagaaagcattacagatccaactaatggttcaaatgcgaataaagacgctgtagaccaagtattaactaagcttcaagaaaaagaaaatgagttaaatggtaatgagagagtcgctgaagctaaaacacaagcgaaacaaactattgaccaattaacacatttaaatgctgatcaaattgcaactgctaaacaaaacattgatcaagcgacgaaacttcaaccaattgctgaattagtagatcaagcaacgcaattgaatcaatctatggatcaattacaacaagcagttaatgaacatgctaacgttgagcaaactgtagattacacacaagcagattcagataaacaaaatgcttataaacaagctattgctgatgctgaaaatgtattgaaacaaaatgcgaataagcaacaagtggatcaagcacttcaaaatattttaaatgcaaaacaagcattaaatggtgatgaacgtgtagcacttgctaaaacaaatggtaaacatgacatcgaccaattgaatgcattaaacaatgctcaacaagatggatttaaaggtcgcatcgatcaatcaaacgatttaaatcaaatccaacaaattgtagatgaggctaaggcacttaatcgtgcaatggatcaattgtcacaagaaatcactgacaatgaaggacgcacgaaaggtagcacgaactatgtcaatgcagatacacaagtcaaacaagtatatgatgaaacggttgataaagcgaaacaagcacttgataaatcgactggtcaaaacttaactgcaaaacaagttatcaaattaaatgatgcagtcactgcagctaagaaagcattaaatggtgaagaaagacttaataatcgtaaagctgaagcattacaaagattggatcaattaacacatctaaacaatgctcaaagacaattagcaatccaacaaattaataatgctgaaacgctaaataaagcatctcgagcaattaatagagcaactaaattagataatgcaatgggtgcagtacaacaatatattgacgaacagcaccttggtgttatcagcagcacaaattacatcaatgcagatgacaatttgaaagcaaattatgataatgcaattgcgaatgcagcacatgagttagataaagtgcaaggtaatgcaattgcaaaagctgaagcagagcaattgaaacaaaatattatcgatgctcaaaatgcattaaatggagaccaaaaccttgcaaatgccaaagataaagcaaatgcgtttgttaattcgttaaatggattaaatcaacagcaacaagatcttgcacataaagcaattaacaatgccgatactgtatcagatgtaacagatattgttaataatcaaattgacttaaatgatgcaatggaaacattgaaacatttagttgacaatgaaattccaaatgcagagcaaactgtcaattaccaaaacgctgacgataatgctaaaacaaacttcgatgatgccaaacgtctagcaaatacattgctaaatagtgataacacaaatgtgaatgatatcaatggcgcaatccaagcagtcaatgatgcaatccataatcttaatggtgatcaacgactacaagatgctaaagacaaggcaattcaatctattaatcaagctttagctaataagctaaaagaaatcgaagcttcaaatgcgacggatcaagacaagcttattgcgaaaaataaagcagaagaattggcaaacagcatcatcaacaacattaataaagcaacaagtaatcaggctgtatctcaagttcaaacagcaggcaaccacgcgattgaacaagtgcatgccaatgaaataccaaaagcaaaaattgatgccaataaagacgttgataagcaagttcaagcattaattgacgaaattgatcgaaatccaaatctaacagataaggaaaaacaagcacttaaagatcgtattaatcaaatacttcaacaaggtcataacggcattaacaatgcgatgactaaagaagaaattgaacaagccaaagcacaacttgcgcaagcattacaagacatcaaagatttagtgaaagctaaagaagatgcgaaacaagatgttgataaacaagttcaagctttaattgacgaaatcgatcaaaatccaaatctaacagataaggaaaaacaagcacttaaagatcgtattaatcaaatacttcaacaaggtcataacgacattaacaatgcgatgacaaaagaagcaattgaacaagcaaaagaacgtttagcgcaagcattgcaagacatcaaagatttagtgaaagctaaagaagatgcgaaaaatgatattgataaacgtgtacaagctttaattgacgaaatcgatcaaaatccaaatctaacagataaggaaaaacaagcacttaaagatcgaattaatcaaatacttcaacaaggtcataacgacattaacaatgcgctgactaaagaagaaattgagcaggcaaaagcacaacttgcacaagcattgcaagacatcaaagatttagtgaaagctaaagaagatgcgaaaaatgcaataaaagccttagctaatgcgaagcgtgatcaaatcaattcaaatccagatttaacacctgagcaaaaagcaaaagcgctcaaagaaattgacgaagctgaaaaacgagcactacaaaacgttgagaatgctcaaactatagatcaattaaatcgaggattaaacttaggtttagatgacattagaaatacacatgtatgggaggttgatgaacaacctgctgtaaatgaaatttttgaagcaacacctgagcaaatcctagttaatggtgaactcattgtacatcgtgatgacatcattacagaacaagatattcttgcacacataaacttaattgatcagctttcagcagaagtcatcgatacaccatcaactgcaacgatttctgatagcttaacagcaaaagttgaagttacattgcttgatggatcaaaagtgattgttaatgttcctgtaaaagttgtagaaaaagaattgtcagtagtcaaacaacaggcaattgaatcaatcgaaaatgcggcacaacaaaagattaatgaaatcaataatagtgtgacattaacactggaacaaaaagaagctgcaattgcagaagttaataagcttaaacaacaagcaattgatcatgttaacaatgcacctgatgttcattcagttgaagaaattcaacaacaagaacaagcgcatattgaacaatttaatccagaacaatttacgattgaacaagcaaaatcaaatgcaattaaatcgattgaagatgcaattcaacatatgattgatgaaatcaaagctcgtactgatctaacagataaagagaagcaagaagctattgctaagttaaatcaattaaaagaacaagcaattcaagcgattcaacgtgcgcaaagcatcgatgaaataagtgagcaattggaacaatttaaagctcaaatgaaagcagctaatccaacagcaaaagaactagctaaacgcaagcaagaagctattagtagaattaaagacttttcaaatgaaaaaataaatagtattcgaaatagtgaaattggcacagctgatgaaaaacaagcagcaatgaatcaaattaacgaaattgtgcttgaaacaattagagatattaataatgcgcatacattacagcaagttgaggctgcattgaacaatggtattgctcgaatttcagcagtacaaattgtaacatctgatcgtgctaaacaatcgtcaagtactggaaatgaatctaatagccatttaacaattggttatggaactgcaaatcatccatttaacagttcgactattggacataaaaagaaacttgatgaagatgatgacattgatccacttcatatgcgtcactttagtaataatttcggtaatgttattaaaaacgctattggtgtggtgggtatctctggtttactagctagtttctggttcttcattgccaaacgtcgtcgtaaagaagatgaagaggaagaattagaaataagagataataataaagattcaataaaagagactttagacgatacaaaacatttaccacttttatttgcgaaacgtcgcagaaaagaagatgaagaagatgttactgttgaagaaaaagattcgctaaataatggcgagtcactcgataaagttaaacatacgccgttcttcttaccaaaacgtcgtcgtaaagaagatgaagaagatgtggaagttacaaatgaaaacacagatgaaaaagtgttgaaagataacgaacattcaccactcttattcgcaaaacgacgcaaagataaagaggaagatgttgaaacaacaactagtattgaatctaaagatgaggacgttcctttattattggctaaaaagaaaaatcaaaaagataaccaatccaaagacaaaaagtcagcatcaaaaaatacttctaaaaaggtagcagctaaaaagaagaaaaagaaagctaagaaaaataaaaaa

SEQ ID NO: 3169 - DNA, 31494 bp, Staphylococcus aureus; identical to SEQ ID NO: 3168

SEQ ID NO: 3170 - DNA, 31494 bp, Staphylococcus aureus; identical to SEQ ID NO: 3168

SEQ ID NO: 3171 - DNA, 31494 bp, Staphylococcus aureus; identical to SEQ ID NO: 3168

SEQ ID NO: 3172 - DNA, 31494 bp, Staphylococcus aureus; identical to SEQ ID NO: 3168

SEQ ID NO: 3173 - DNA, 31494 bp, Staphylococcus aureus; identical to SEQ ID NO: 3168

SEQ ID NO: 3174 - DNA, 99 bp, Staphylococcus aureus
atggaaaacaatgatagcaatgaagtagcttatttgttaaaagatggtaaatttacaaaagtatatgtcaatcaagatagtgtatcttttgtgccaggg

SEQ ID NO: 3175 - DNA, 267 bp, Staphylococcus aureus
atgttacataaccatcctggacagtcaggattttcagaatatgatttatttacattttttaagcatccatcaataaaatcaatgacaatcgttactaataagggacaagtaaaatttattaccaagtcaaataggtttcatggtaaaatagtgagtaaattttgtgctaaatattttacgcatattaatatcattaatgatagccatattgaaaaattattgaaaaaactttatagtataaatatgattaaatataaagtgagatga

SEQ ID NO: 3176 - DNA, 495 bp, Staphylococcus aureus
atgactttcgaagaaaaactaagtcaaatgtataacgagattgcgaataagattagcagtatgataccggtagaatgggaaaaggtatatgcaatggcatatatagatgatgaaggaggcgaagtgttctactattacacagaacctggaagtaatgaattatactattatactagtgtattaaataaatatgatatatcggaatcagaatttatggattcagcgtatgagttgtataaacaatttcaaaagttaagaaatatatttaaaaaagaaggacatgaaccatggacatcatgcgaatttgattttacaaatgaaggtaaattaaaagtttcatttgattatattgattggataaatacagagtttgatcaattgggccgtcaaaattattatatgtacaaaaaatttggggttataccagaaatggaatatgaaatggaggaggttaaacaaatcgagcaatatattaaagagcaagaagaagaatag

SEQ ID NO: 3177 - DNA, 528 bp, Staphylococcus aureus
atgaagctgaaatataggggagataacatggctttcgaagaaaaactaaatgaaatgtacaatgagattgcgaataaaattagcagtatgataccggtagaatgggaaacggtatatgcaatggcttatgtaaatgaaagaagtggagaagtgttttacaattatactgaaccaagcagtgatgaattattttactatacgagcgtgttaaataaatataatataccaagatcagaatttatggactcagtatatgaattatataagcaatttgataatttaagagaattgtttatagaagaaggactcgaaccatggacatcatgtgaatttgactttacaagagatggcaaattgaatgtatcttttgattatattgattgggtgaattcagaatttggaccaatgggaagagaacattattatatgtataaaaaatttggaatttggcctgaaaaagaatatgccataaattgggttaaaaaaataaaagattatgttaaagagcaagatgaagctgaactatag

SEQ ID NO: 3178 - DNA, 543 bp, Staphylococcus aureus
atgttaaagagcaagatgaagctgaactataggggagataatatgactttcgaagaaaaactaagtcaaatgtacaacgagattgcgaataagattagcagtatgataccggtagagtgggaaaaagtatatacaattgcttatgtagatgatcaaggtggagaggtcatttttaattatacaaaacctgaaagtgaagatttgaattattacacggatatatctagagattataatatttcagaagaaatatttgatgatttatggatgaatctttattacttgtttatgaatttgagggatttatttaaaaaagaaggtcttgaaccatggacatcatgtgaatttgattttacaagagagggtaatttgaaagtatcgtttgattatatagattggattaaattaggttttggtccatcaggaaaggaaaactactatatgtataaaaagtttggtgttataccagaaacggaatatgaaattaataaagttaaagaaatcgagcaatttattaaagagcaagatgaagctgaactatag

SEQ ID NO: 3179 - DNA, 528 bp, Staphylococcus aureus
atgaagctgaactataggggcgataacatgactttcgaagaaaagctaagtcaaatgtacaatgaaattgcagatgaaatcagtggaatgataccagtagaatgggaaaatatatatacaattgcctatgtaactgatcaaggtggagaggtcatttttaattatactaaaccaggtagcgatgaattgaattattacacggatatatctagagattataatatttcagaagaaatatttgatgatttatggatgaatctttattacttgtttatgaatttgagggatttatttaaaaaagaaggtcttgaaccatggacatcatgtgaatttgattttacaagcgaaggtaaattaaaagtttcatttgattatattgattggataaatacagagtttgatcaattaggccgtgaaaactattatatgtataaaaagtttggtgttttaccagaaatggaatacgaaattaataaagttaaagaaatcgagcaatatattaaagagcaagatgaagctgaactatag

SEQ ID NO: 3180 - DNA, 813 bp, Staphylococcus aureus
atgaagtataaaacagagagacgtgaaacgatgggatatttaaaagggtttgcattgtacataagtatcttaattttaatagtttttatagcaggttgtggcaaaagtgataaaacaaaagaagattcaaaagaagcacaaattaaaaagagctttgagaaaactttagatatgtatccaatcaaaaatctcgaggatttatacgacaaagaaggctatagagatggtgaatttaaaaagggtgataagggtacatggactttactcacaagttttgctaaaagtaacaaaccaggtgagatagatgatgaaggcatggttttatttttaaatagaaatataaagaaggcaacaggatattattacacgagcaaagttcatgatgaatttaatgaaaaagagcatcaaaaaaaatatcatgttgaacttaaaaataataaaatagttcttttggataatgtagaagattcaaagctcaaaaataaaatagaaaattttaaattctttagtcagtacgctgattttagagattttaaaaactataaaaatggaaatatatcaagtgcagataatgtaccaagtttcgatgcagaatatcaaataagtaatacggataaaaatgtaaaaaaacttagagaggtttatccaatcacaacaaaaaaatctccagtattaaaattacatatagatggtgacataaaaggaagttcaattggatataaaaatatagaatttaatttttcaaaagtaaaagacgaagaaacagctgttagagattttgtgaattttggaccatctgatggagttagctaa

SEQ ID NO: 3181 - DNA, 792 bp, Staphylococcus aureus
atggaatatctaaaaaggcttgcattgttcataagtgttattattttgaccatttttataatgggttgtgatagtcaaagcgatactgcagaaaatccaaaagaaggttcaaaagaagcacaaattaaaaagagtttttcgaaaacgttagatatgtatccaattaagaatctcgaggatttatatgacaaagaaggatatcgtgatggcgaatttaaaaaaggtgataaagggacgtggacaatatcaacagattttgctaaaagcaacaaaccaggtgaaatggatagtgaaggtatggtgctacatttgaatagaaatatgaggacggcaactgggcattatactataagaacaacttatgatgaattgggtaagatgacacgcgaaaaaaattatcgtgttgaacttaaaaataataagatagtagttttagataaagtagaagatgtaaaccttaaacataaaattgaaaattttaaattttttagtcagtatgcagattttaaagatttgaaaaattataaaaatggaagaatatctatcaatgaaaatgttccgtattatgaagcagagtacaaaaggaataatagtgatggaaatgtaaaaaaacttagagaaaagtacccaattacaaccaagcagtctccaatattaaaactgcatatagacggagatattaaaggtagctcagttggatataagcagatagagtacatgttttctaaggagaaagaggatgagacttttatgagtgattttttgaacttcggaccatcacatagtaattag

SEQ ID NO: 3182 - DNA, 282 bp, Staphylococcus aureus
atgacaaggaggactaaaacaatgtattacaaaacgggtgacgtatgtcaaaaaataattaatgtagatggctttgattttcgattaagagttaagaaacgagcgtatagcgtcgaaatagttgttttagatcatgaaggaaattcaattgacgggttactagtttctgatgagaacgatctatacacagctttagatattttaaaacaaacaatttatgaatggattgaattcaacacagatgaacaggacaaattaatcaatttaatcatgaaatggtag

SEQ ID NO: 3183 - DNA, 195 bp, Staphylococcus aureus
gtgacacaatacttagttacaacattcaaagattcaacaggactaccacatgaacatattactgtggctagagataatcagacgtttacagttgttgaggcagagagtaaagaagaagcgaaagagaagtacgaggaacaagttaaaagggatgcagttattaaattaagtagatataggagagggataaactaa

SEQ ID NO: 3184 - DNA, 438 bp, Staphylococcus aureus
atggggaacacaatatatgatatcaagccaggaacatttaaatatattgaatcagaaatatataatttaaatgagaacaagaaagagataaatagattgagaatggagatacttaacccaacgaaagagctagacactaacattgtgtatggaccgttgcaaaaaggtgaaccagttagaacaactgaactaatggcaacaagattattgactaataagatgttacgaaacctagaagaaatggtcgaagcagttgaaagtgaatacttaaagttacctgaagatcataagaaagtaataaggttaaagtattggaatagagataagaagctaaagatagagcaaataggagatgcatgtcacatgcatcgcaatacagttactacaatacgaaagaactttgttaaagcgatagcttatcatgcaggtatcaaataa

SEQ ID NO: 3185 - DNA, 213 bp, Staphylococcus aureus
atggagaaaaatgaaagtaatattactgacgtaactcagaacgaagagcaactagacaacagtgatgaacaatcacaacagaatgagaaaacattttctcaagaagaagtatcacaattgattaaagagcgtatagctagagaacgcaaaaaatcagatgaacgtattaaagatgcggttcaagaagctgagaagttagctaaaatgaagtag

SEQ ID NO: 3186 - DNA, 423 bp, Staphylococcus aureus
atgagtaactcacaagcaattcaagcaattgaaaacgtgttagcaacgtcaaaagttggtgtattatcaactgcatataataayaaacctaatagtagatatatggtcttttataatgatggtcttactttatatactaaaacgaatatccattctgctaaggtcaaagaaattaaagataatccagcagcatatgttttgttaggctayaaygayacracwaatcgyagtttcgttgaaatggaagccacgatagaagtagttactgatcaaaaagtaatcgattggttatgggagactcaagataaaagctttttcagttcaaaagaagayccagaactttgtgttttaaaggtgacaccacaatctgttaaattgatgaatgacaaatcattagatacacctatcaaaatcgatttataa

SEQ ID NO: 3187 - DNA, 549 bp, Staphylococcus aureus
atgagatggaaatcaatgattgttggctatgcgagagtatcatcgaacgatcaaaatttagaaagacaacttgaaaatttaaagacgttttgtgctgaaaaaatatttacagaaaaacagtctgggaaatctattgaaaatagaccagtacttcaagaagcacttaactttttgaggatgggagatcggtttgtagtagaatccattgattgtttaggtcgtaattatgatgaagtggttggcaatccattactggataagtttatgaaagatttaattattcaaatattagcaatggtttcagaacaagagagaaatgaaagtaaacgtcgacaagcgcaaggaattcaagttgcgaaggaaaaaggcgtatataaagggcgccccttactttattcaccaaatgctaaagatccacagaaacgtattatttatcatcgcgttgtagaaatgttagaagaaggccaatcaattagtaaaattgcgaaagaagtaaatataacaaggcagacgatttacagaattaaaaacgataatgatttgatttaa

SEQ ID NO: 3188 - DNA, 297 bp, Staphylococcus aureus
atggcgactaagaaagatgtacatgatttatttttaaatcatgtgaattcaaacgcggttaagacaagaaagatgatgggagaatatattatttattatgatagtgtggttataggtggtttgtatgataatagattattggttaaggcgactaaaagtgtacgtcatcaattgcaagataatacattagtttcgccatatccaggtgccaaagaaatgatattaattccagacattaccgaagcaataaatctcactaatttatttgagctcataaaaaatgatttgaaaaactaa

SEQ ID NO: 3189 - DNA, 771 bp, Staphylococcus aureus
atgataaaacgtgtaaataaattagtgctaggtattagttttctgtttttaatcatcagtatctttgctggttgtggtacagggaaagaagcggaaataaagaaaagttttgaaaaaacgttgagtatgtatccgattaaaaatctagaggatttatacgataaagaaggatatcgtgatgatcaatttgataaaaatgataagggaacatggattgttcgttcgtcaatgtcgattcaatctaatggaaaagatatgaatataaaaggcatggttttatatatgaatagaaatacaagaacaacaaatggctattactatgttgatgttatagaaagagaagataaaggtatacatcgtgataacgaaaaaagatatccggttaaaatggtcgataataaaatcattccaactaaagaaattaaagatgaaaaaataaaaaaagaaatcgaaaactttaagttctttgttcaatatggcgactttaaagatttgtcgaagtacaaagacggcgatatatcatacaatccagaggtgccgagttattcagcaaaatatcaattaactaatgatgactataatgtaaaacaattacgaaaaagatataatataccaacgaataaagcaccaaagctattgttgaaaggtacagggaatttaaaaggttcatcaattggctacaaaaaaattgaatttactttcgtagagaaaaagggagaaaatatatactttagtgatgggctacattttaatccaagtgaggataaataa

SEQ ID NO: 3190 - DNA, 504 bp, Staphylococcus aureus
atgaagaaactatatacatcttatggcacttatggatttttacatcarataaaaatcaataacccgacccatcaactattccaattttcagcatcagatacttcagttatttttgaagaaactgatggtgagactgttttaaaatcacctwcaawatatgawgttatyaaagaaattggtgaattcagtgaacatcatttctattgtgcaatcttcattccwtcaacagaagatcatgcatatcaacttgaaaagaaactgattagtgtagacgataatttcagaaactttggtggctttaaaagctatcgtttgttaagacctgctaaaggtacaacatayaaaatttatttyggatttgctgatcgacatgcatacgaagactttaagcaatctgatgcctttaatgaccatttttcaaaagacgcattaagtcattactttggttcaagcggacaacattcaagttattttgaaagatatctatacccaataaaagaatag

SEQ ID NO: 3191 - DNA, 789 bp, Staphylococcus aureus
atgatgggatattcaaaaaggtttgcattgtacataagcgttatgattttaatatttgcgatagcaggttgtggcaaaagtgatgaaacaaaagaaggttccaaagaagaacaaattaaaaagagctttgcgaaaacgttagatatgtacccaattaagaatctcgaggacttatatgacaaagaaggatatcgagatggcgaatttaaaaagggtgacaaagggacatgggttatcagttcagtaatggttaaacagccaaaaggtgaaattatgaaatcaagagggatgtatctatttttaaatagaaatacaagaaccgcaaaaggatattttattgtagatgaaacaagtaatgatactttaaaaaaaacagaggataaagaaaaacgttatccagtaaagatggtgaataataaaatagtacctattgatccaattaatgataaaggtgtaaaaaaagaaatagaaaattttaagtttttctcacaatatggtgattttaaagaattaaaaaattataaaaatggagaggtttcatacaattctgaagcccctatctactcagcaaaatatcaactgaaaaataatgattataatgtaaagcaattacgtaaaagatatgatatatcaacagaaaaggctcccaaattgttgttgaaaggtactggagatttaaaaggttcatcaatcggacataaggacattgagtttacattcgtggagaatcaagaagagaatatattttttactgatagtttggagtttacctcaagtgagaactattag

SEQ ID NO: 3192 - DNA, 786 bp, Staphylococcus aureus
atgagggattcaaaaagagtagtattgtacataagcattatrgtgttgagtatttttataattggttgtggcaaaggtaatgaaataaaagaagacgcaaaggaagaacaaatcaaaaagagctttgcgaaaacgttagatatgtatccaatcaaaaatctcgaggacctatatgataaagaaggatatcgagatggcgaatttaaaaaaggtgacaaagggatgtggacgatttacacagatttcgccaaaagtaatagaccaggtgtattagataatgaaggtatggttttaaatttggatagaaatacacgaacggccaagggatattattttgtagatactatatatgacaatcatgaaaactcttatagtaaaaattatagagttgagatgaaaaacaataaaattattttattagacaaggtggaagatcaaaaacttaaagaaagaatagaaaactttaaatttttcggacaatatgccgatttcaagagtttgaaaagttacaaccatggcgacgtttcaattaatagtaatgttccaagttatgacgcgaaatttaaaatgagtaataaagatgaaaatgttaagcaattaagaagccgttataacattcctactgataaagctccaatattaaaaatgcatattgatggggacttaaaaggcagttccgttggatataaaaagttagaaatagacttttcaaaagaagaaaatagcgaattatcaatagtcgattcattaaattttcaacctgccaaaaataaagatgatgaatga

SEQ ID NO: 3193 - DNA, 783 bp, Staphylococcus aureus
atgggatattcaaaaaggtttgcattgtacataagtatcttgattttaatagttatggtagcaggttgtggtaaaagtgatgaaacaaaagaagattccaaagaagaacaaattaaaaagagctttgcgaaaacgttagatatgtaccctattaagaatctcgaggatttatacgataaagaaggataccgtgatggcgaatttaaaaagggtgataaggggacgtgggttctgtattcagctatagtatcacaaccaaaaggcgagagtttaaaatcacgaggaatgatattaaagttagatagaaataagagaactgctaaaggaagttatattattagagaattgaaagaagataaaaatcatgatgttcaaaaaaatgaaaagaaatatccagtgaaattggtgaataataggatagttttggtaaaagatgttaaagacaaaaagttaaaaaatgaaatagagtcgtttgaattattttcacaatatggaaactttaatcattttgatcggaatgagattactaatatttcatataatcctaatgctcccaattactctgcagaatataaaatgaagaaaaatgacagaaacattcaacagttgaaaaagagatttaatctaaaaactagcaagacaccaaaattattgtttaagggatctggagatataaaggggtcttctgtaggatataaggaaatagaaatcatatttagtagaagtaaagaagaagcatttattatgttgacagcgttgagttcgttccaagtaacaaaatga

SEQ ID NO: 3194 - DNA, 795 bp, Staphylococcus aureus
atgatgggttatttaaaaagacttgtattgtacatagttattatggttatgagtgtttttataataggttgtgataaatcaagcgatactgcagaaaatccaaaagaaggttcaaaagaagcacaaattaaaaagagtttttcgaaaacgttagatatgtatccaattaagaatctcgagaatctatatgacaaagaaggatatcgtgatggcgaatttaaaaaaggtgataaagggacttggacaatatcaacagattttgctaaaagcaacaagcaaggtgaaatgaatagcgaaggtatggtactacattttaatagaaatacgaggacagcaacaggatattatactgtaagaacaacttatgatgaagtggataagttggcacgcgaaaaaaaatatcgtgttgaatttaaaaacaataagatagttctattggacaaagtagaagatgaaaatcttaaacaaaaaatagaaaattttaaatttttcgggcaatatgccgattttaaagacttgaaaaattataaaaatggaagaatatctagcaatgaaaatgttccttattatgaagcagagtacaaaaggaataatagtgatggaaatgtaaaaaaacttagagaaaagtacccaattacaaccaagcagtctccaatattaaaactgcatatagacggcgatattaaaggtagctcagttggatataaacagatagaatacacattttctaaggagaaagatgatgagacttttatgagtgattttttgaacttcggtccatcacacagtaaatag

SEQ ID NO: 3195 - DNA, 915 bp, Staphylococcus aureus
atgaaaagattaattggaattttattatgtagtttatttattttgactgcgtgttcaacatctgtcgataaaacaagtgactcgacaaagactatagactataaaattgaaaatggtaaaacactgaaagtaccagagaaacctaaaagagttgctgtattaactggattttatgttggtgattttataaagttaggaatcaaaccaattgctgtttcagatataactaaagattcttcaattttaaaaccttatttaaaaggggttgattatattggagaaaatgatgttgaaaaagttgctaaagcaaaacccgatttaatcgttgtagatgctatggataaaaatattaaaaaataccaaaaaatagcgccaacagtcccatatacatataataaatacaatcataaagaaatattaaaagaaataggcaatttgactaataatgaggataaagcaaaaaaatggattgaagagtgggaagataaaactaggaaagataaaaaagaaattcaaagtaaaattggtcaagcaacagcatctgtgtttgaaccagatgaaaagcaaatatacatatataactctacatggggtcgtggtttggatattgttcatgatgcattcggtatgccaatgacaaagcaatataaagataaattacaagaagataaaaaaggttatgcttcgatttcaaaagaaaatattagtaaatatgctggtgattatatatttttaagtaagccttcatacgggaaatttgattttgaaaaaacacatacatggcagaatattgaagctgtaaaaaaaggacatgtaatttcatataaagcagaagattattggttcacagatcctattacattagaacatttgagaagtaaattaaaaaaagaaattttaaataaatctcactag

SEQ ID NO: 3196 - DNA, 249 bp, Staphylococcus aureus
atgcctaaaaccgatagcgcacgcaaagaatacttaaaccaatttttcggatctaagagatatctgtatcaggataacgaacgagtggcacatatccatgtagtgaatggcacttattactttcacgggcatatcgtgccaggttggcaaagcgttaaaaagacatttgatactgctgaagagctcgaaatatatataaagcaacatggtttggaatacgaggaacagaagcaactaactttattttag

SEQ ID NO: 3197 - DNA, 252 bp, Staphylococcus aureus
atgatgaataatcgtgaacaaattgaacaatccgttataagtgctagtgcgtataacggcaatgacacagagggattgctaaaagagattgaggacgtgtataagaaagcgcgagcatttgatgaaatacttgatggaatgacaaatgctattcaacattcagttaaagaaggtattggtcttgatgaagcagtagggattatgacgggtcaagttgtctataaatatgaggaggaacaggaaaatgactaa

SEQ ID NO: 3198 - DNA, 207 bp, Staphylococcus aureus
gtgacgcaatacttagtcacaacattcaaagattcaacaggacaaccacatgaacattttactgctgttagagataatcagacgtttacagttgttgaggcggagagtaaagaagaagcgaaagagaagtacgaggcacaagttaaaagggatgcaattattaaattaggtcagttgtttgaaaatataagggagtgtgggaaatga

SEQ ID NO: 3199 - DNA, 387 bp, Staphylococcus aureus
atgatgattaaaaaacttaaaaatatggattggttcgatatctttattgttggaatactgcgattattcggcgtaatcgcactgatgcttgttgtcatatcgcctatctatacagtggctagttaccaaaacaaagaagtatatcaagggacaattacagataaatataacaagagacaagataaagaagacaagttctatattgtgttagacaacaagcaagtcatcgaaaactctgacttactattcaaaaagaaatttgatagcgcagacatacaagctaggttaaaagtaggcgacaaagtagaagttaaaacgattggttatagaatacactttttaaatttatatccggtcttatacgaagtaaagaaggtagataaataa

SEQ ID NO: 3200 - DNA, 174 bp, Staphylococcus aureus
atgattaaacaaatattaagactattattcttactagcgatgtatgagctaggtaagtatgtaactgagaaagtatatattatgacgacggctaatgatgatgtagaggcgccgagtgacttcgcaaagttgagcgatcagtctgatttgatgagggcggaggtgacagagtag

SEQ ID NO: 3201 - DNA, 1536 bp, Staphylococcus aureus
atgttaaaagtaaacgaatttgaaacagatacagatctacggggaaacataaattacttatttaatgatgaagccaatgttgtttacacatatgacgggacggaatccgatttattacaaaacgttaatgaagtaagtaaatacattgaacatcacatggattaccaacgacctagattaaaagtgttgagtgattactacgaaggtaaaactaagaatctggttgagttaacacgacgcaaagaagagtacatggcagataaccgtgtagcgcatgattacgcatcttatattagtgattttattaacggttatttcttaggtaatccaattcaatatcaagatgatgacaaagatgtattagaagctattgaggcgttcaatgatttgaatgatgttgagtcgcacaatagatctttaggattagatttgtcaatttatggtaaagcttatgaattaatgattagaaaccaagatgatgaaacgcgtttatacaagagtgatgcaatgagtacttttgtcatatacgacaatacaattgaacgtaatagtatcgtaggcgttagatatttaagaactaaaccaatagacaagactgacgaagatgaagtgtttacagttgatttatttacttctcacggtgtttatagatatcttaccagtagaacaaatggattgaagctcacaccacgtgaaaacgtttttgaatcacactctttcgaacgtatgcctattacagaatttagcaataacgaaagaagaaaaggggattacgagaaagtaatcactttaattgatttgtatgataatgctgaatcagatactgctaactatatgagtgatttaaatgacgctatgttacttattaaaggtaatttaaatttagatcctgtagaagttagaaaacaaaaggaagctaacgtgttgtttttagaaccgactgtttatgctgatagcgaaggtagagaaacagaaggttcagttgacggtggttatatttataagcaatacgatgtacaaggtaccgaagcttataaagaccgtttgaacagtgatatacacatgtttaccaacacgcctaacatgaaagatgataactttagtggcactcaatcgggcgaggcaatgaaatacaaattatttggattggaacaacgtactaaaactaaagaaggattgtttactaaagggttaagacgtcgtgctaagttgttagagacaatacttaaaaatacacggtcgattgacgctaacaaagatttcaatactgttagatacgtatacaacagaaacttacctaaatcattgattgaagaattaaaagcttatattgattctggcgggaagattagccaaacaactttaatgtctctattctcgttcttccaagaccctgaattagaagtcaagaaaatagaagaagatgagaaagaatctattaaaaaagctcaaaaaggcatttataaagaccctagagacatcaatgatgacgaacaagatgatgatacaaaagatactgttgataaaaaggaatga

SEQ ID NO: 3202 - DNA, 996 bp, Staphylococcus aureus
ttgcctaacaaaaacactcaagaatattgggaagaacgcggacgcaaagcaatcgagaatgagttgaagcgtgataaaactaaagctgaagaaatagaacgtatattgaatatgatgattaagcgcattgaaaaagagatcaatgcgtttattgttaagtacggagattttgcaggcgttacattacaagaagcacaaaagattattgatgagttcgatgtaaaagcgtttcaagaagaagcaaaaagattggtcgaaaacaaggactttagcgatagagcaaatgaagaattaaagaagtataacactaagatgtatgtatctagagaacagatgttaaagattcaaatagaattcttaattgcttatgcaacagctcaaacagaattatcgatgagggaatatttcgaatcaacagcttatcgtgtgttcagtgatcaagcgggtattttaggtgaaggtgtacaagtagctaaagaagttatagatacaatcgttgatacacaatttcatggtgtcgtttggtcagagcgattatggactaataccgaagcaatgaaacaagaagtagaagaaataattgctaatgtagttattagaggtcgacatcctaatgaatatgttaaagatatgcgcaagcacttaaataaattcgaaggcacagcacgacaaaagaccgcagcaattaaatcattgctttatacggaatcggcacgtgttcacgcacaatcaagcattgacagcatgaaagaaatttcaccggaaggatattatatgtatattgcaaaaatcgataatagaacaactaaagtatgcaaagggcttaatggagaaatattcaaagttaaagacgctaaaattggtgttaatttctatcctatgcatatcaattgtcgttcagattgcgctttactacctaaatctatgtggccgaaaaaaccaagcaagaaacgaaaaacaaaatacttcggagggaaagtgaaaagcggtgattga

SEQ ID NO: 3203 - DNA, 333 bp, Staphylococcus aureus
atgactacgctagctgatgtaaaaaaacgtattggtcttaaagatgaaaagcaagatgaacaattagaagaaatcataaaaagttgtgaaagccagttgttatcaatgttacctattgaagttgaacaaataccggaaaggtttagttacatgattaaagaagttgcagttaaacgctacaacaggattggtgctgaaggtatgacatcagaagcggttgacggacgtagcaatgcgtatgaattgaacgatttcaaggagtatgaagctattattgataattactttaatgctagaacgagaactaaaaaaggaagggctgtgttcttttga

SEQ ID NO: 3204 - DNA, 348 bp, Staphylococcus aureus
atgaatatagatggattagacgcactgttaaaccaatttcatgatatgaaaaccaacattgatgatgatgtagatgatattttacaggaaaacgccaaagaatatgtagtacgagctaaattgaaagctagagaagtaatgaataagggttattggactggtaatttatcacgcaatatcagatataaaaaaactggcgatttgcaatacactatcacatcgcatgcagcttatagtggtttcttagagtttggtactcgatacatggaggcagaaccttttatgtggccagtatatgaggtaataagaaaatcaactgcagaagaattgaaagcgttgtttgaatag

SEQ ID NO: 3205 - DNA, 729 bp, Staphylococcus aureus
gtgttcagaaatatgaacagttttaaggatagattaaagcaaattatgtctgaacggaagatatctcaatcagagctatcaagaaggactggtattggcagaaactcaattagcgattatttaaatggaaaatatgaagcgaaacaagacaaagtctttgaactagcaaaggctttaaacgttaacgaagcgtggcttatgggttttgatatttctaagaatagaaaaattgaaaataacgacatcgcttccatatacagtaaactcacgcctccaagacaaaaaaatgtgcttaactatgcaaacgagcaattagatgaacagaatactaaaggcgataatattgtcgatattaattcatataaacaggatagaattgcagttaacgtcaatggttgtgtctctgctggtgtaggagaacgtctacacggtgaaacattgtttaccgaaatggttaaagcacctatcccaccacatgatttagcattaaaagtaaacggtgattctatggaacctatgtttaaagacggtgaaattatattcgtagagaaaactcataatataaaaaatggccaaattggtatattcattattgaagaagaagcttacgttaagaaagtttttgttgaagatgatagattgactctagtctcactgaacaaagaataccgcgaccttcacttttatagaaatgaaagtgtgaggttagtagggaaagtaattttatag

SEQ ID NO: 3206 - DNA, 561 bp, Staphylococcus aureus
atgaataaaaaactattaacaaaaacattgatagcaagtgctttagttttaacaacagtaggttcaggttttcattcttcttcaaattataatggtattaataacgttgcaaaagctgagcaaacgacagataacgcattgtggaaaaatgtaagagacgctttaaaagacgcgaatattatcgataaaacagataatgaaaatgtcaaggttacgtataaaatagaaaatggtggagaaaataccatagaaggaacagctaatttagaaaatattagtacttcaaacaatcctaaaataaaccctcaaaatgttacaaaaattaatataactagaaaaaattcgaactaccctaatattgatgctaataatacatggaaaaaattaacagaaaaattgaaagaaaaaaatatagtgaacaacggcgacaatgtttcaatcttaagtacagaccctaaagatgagactgtattcggtaaagtaggagaagataaatcaaacgtaagcaatagatacatcaatcctaaagatataaatgaaattcaaatcactaaaaaataa

SEQ ID NO: 3207 - DNA, 492 bp, Staphylococcus aureus
atgattcgatgtgctaaaaaagaagatttaaacgctatattagcgatatacaacgatgccattattaatacaacagctgtttatacttataaaccgcaaaccatagacgaacgtatcgcatggtttgaaacgaaacaacgtaatcatgagcctatctttgtatttgaggaaaatggaagtgtattagggtttgcgacgttcggttcgtttagaccttggccagcatatcaatatactatcgagcattctatttatgtcgatgcttcagctagaggaaaaggtatcgctagtcaattattacagcgtttaattgtagaggcaaaagctaaaggttatcgtacacttgttgctggtattgatgcttctaatgaagcgagtattaaattacatcaaaaattcaatttcaagcatgccggcacactgaccaatgtaggctataaatttgattactggttagatttagctttttatgaattagatttaaaagactag

SEQ ID NO: 3208 - DNA, 423 bp, Staphylococcus aureus
atgagtaactcacaagcaattcaagcaattgaaaacgtgytagyaacgtcaaaagttggtgtattatcaactgcatataataayaaacctaatagtagatatatgrtcttttataatgatggtcttactttatatactaaaacgaatatccattctgctaaggtcaaagaaattaaagataatccagcagcatatgttttrttaggctataacgacacaactaatcgtagtttcgttgaratggaagcgacaatcgaaatcgttacagaacaagaagtgattgattggctatgggaaacacaagacaaaagctttttcagttcaaaagaagacccagagttatgtgttttaagagtagttccrcaatccattaagctaatgaatgataaatcattagatacacctatyaaaatygatttataa

SEQ ID NO: 3209 - DNA, 357 bp, Staphylococcus aureus
atgaaaaagaaaaaaggttttggtcttggtattagtttaatcgccatcatgttaattgtatgtattgtattagtaatcatgatgatgactggcggaaagaaagatacatactatggaattatgaaagataatactactattgaaaaaatgattagtgaaaaagatgaaagyattgaaaaaaatgttaaattaccttcagattcagatgttaaagttaaaaaaggtgattttgtaattgtttataaattagcagattcagataaaattgttaaagttaaaaaagttgaccatgaygaygtmccwcayggtttaatgatgaaaattcatgacatgggcaaaatgcacatgaaacactaa

SEQ ID NO: 3210 - DNA, 204 bp, Staphylococcus aureus
gtgcgtaatcgattgaaagagttacgagcacgagatggcttaaatcaaacgcagcttgccaaactagctggtgtttcaagacaaaccatttcgctaattgagcgaaacaattttatgccatcagtattaacggcaataaagattgctcgcattttcaatgaaacggtggaaacggtttttattattgaggaggatgaagcatga

SEQ ID NO: 3211 - DNA, 93 bp, Staphylococcus aureus
atgcgtcaactaatgggtgattttggcatagatagagaatttaaggcaattaaaaaagcatcaaacagtaatatgctgcttgatgcaaaatgg

SEQ ID NO: 3212 - DNA, 96 bp, Staphylococcus aureus
ttgcaattaaatgtaaacatgatgaaattcgaccgttggcataagggaatttgtaaacaaatcgttttgaatttagtagagaaaggtgaaaagggt

SEQ ID NO: 3213 - DNA, 126 bp, Staphylococcus aureus
atgagtgaagtaattgcagctatcaatgtactattactgcttacagtcacacgagtgtttcagactaaacgtgcaacgaaattctgcacgcggccaatatatcttgcgccagatcaagaagatcat

SEQ ID NO: 3214 - DNA, 195 bp, Staphylococcus aureus
atgacaaatctgaattatgacgaagatcaatcaagaaaaacagcaccaagatcatttcaatttgaaagtaccttactgctgttctttatttattacatttcaatcttaataatgaccgtaatatcacgtgattgtcatttccttgtaatcatacctaaaacaccaattaatcctgtgcgtgtcgctgactttctt

SEQ ID NO: 3215 - DNA, 282 bp, Staphylococcus aureus
rtgacatatcatgagcgtgttttagcattaagagcwgaaagtaaaagaaccgcatttgattttcgattcgaagatttatttagcaaagaagaatggctaagtatgtckcttgcagaaagacaaaaagctgaaaaagcatttcgacacgaagttaaaaatatggacgatgtaagaatgcccttctcaagtgtccatgacgcccaagtaaaattatataatgttgtatattcttataacggcattaaacgtaattttaaacaagttgaaaatgaaggattctaa

SEQ ID NO: 3216 - DNA, 132 bp, Staphylococcus aureus
gtgggccccaacacagaagctgacgaaaagtcagcttacaataatgtgcaagttggggtgggacgacgaaataaatttttcgaaaatatcatttctgtcccactcccatcacaaacgacgttatataaggca

SEQ ID NO: 3217 - DNA, 492 bp, Staphylococcus aureus
atgattagatrcgctaaaaaagaggatttaaacgctatattagcgatatacaatgatgccattatcaatactacagctgtttatacttatgaaccacaaaccatagacgaacgtgtcgcatggtttgaaacgaaacaacgtaagcatgagcctatctttgtatttgaggaaaatggaagtgtcttagggtttgcgacgttcggttcrtttagaccttggccagcatacctatatacaatcgaacattctatttatgtcgatgcttcagctagaggaaaaggtattgctagtcaattrctacaccatttaattgtkgaagcaaaagctaaaggttatcgtgcrctagttgcaggcattgatgcttccaacaaagcgagtattcagttgcatcaaaagtttgcttttaagcatgccggcacactgaccaatgtaggttttaaattyaatmratggttagatttagcattttacgaattagatttacaagactag

SEQ ID NO: 3218 - DNA, 501 bp, Staphylococcus aureus
gtgacaagcatttttgtttttgcgtacttaaacaacacttcaggcaatatgttgtttaggcaacaaatgatatgtgcgtgtttattggcaaacgtacgacatagtagtatagtatgtctaaacaacatatgttgcatagttgatatgcgttgtttaaatactaagataggagggattgacgtgagcgagacagatgaacctcaggggtttgaacgcacgcataatatattaaatattaatcagagtagtctgggtgtagtgacatacattacaaataaattaaagtcgacgttgaagcaacacataataattgctcgtggtaaaaagcgaatcgactatcgactgtcgtataacttttacactacgtattatgataatgtagaaatcaagaaaatcgactgtgaatatacctatgctatgcccattgcaattttaataagacacacgatgtcattcgacaatgctcatttctttgctcagttacgtcatcctgtcttataa

SEQ ID NO: 3219 - DNA, 186 bp, Staphylococcus aureus
gtgcaagttggggatgggccccaacaaagagaaattggattcccaatttctacagacaatgcaagttggcggggccccaacatagaagctggcggaaagtcagtttacaataatgtgcaagttggggtgggacgacgaaataaattttgcgaaaatatcatttctgtcccactcccatcaaaagaa

SEQ ID NO: 3220 - DNA, 795 bp, Staphylococcus aureus
atgaatattgcgaagttagagaattatttacaaattgattcatctcgttataatcgaccgagtattgaagcattaaattattatgcaacacgttttatgttaactgtaccttttgaaaatattgatgttcaaaatagtaagcckatatctataaatatcgatgcactttttaataaaattgttcatgataaacgtggtggtttttgttatgarttaaatacatttttcaaagcmtatttacaacaaaaaggatttaatcctgmattaatgtcagctactattcacacacccggtggcggtcgtagtctgaacggttcacatgcttcacttgttgtttctataaatgatgtattctatgtaactgatgttggctttggagacttacctmtacatgccattcctattacttcatctgagcatacacaaccaattactgatatcagtggtacattccgcgctatttttaacaacgaagacaaggatattttctatgttcaaaaattcgaaaatgatcattggcatacaaaatatgaagctgaattcaaacctaaacaaatagaagattttaatagcaacatcgaatataatcaaacsmayccagattcaatatttgtacagcatttattaattacaatgccacaatcatttggccgtgctacaatgtctgaaaatcatttaactttaacaaggaatggtagctcagaaaarttwgmtgtcactaaarataactataaacattttttagaaaaatattttggactaratrtaactattaatcgtattgaaaaacaataa

SEQ ID NO: 3221 - DNA, 192 bp, Staphylococcus aureus
atgaaatttagagaattagtaaaacaatcataygaggatttgaaaaatttgactgtaacttggtataacgtsattgctttarcaatrmttgttattgtmttaagckyaktyacaacaccaatkataggyattccagctggtttattaggtggckcytattatttaaaacgtcgtgaagaaaaaggyaartaa

SEQ ID NO: 3222 - DNA, 150 bp, Staphylococcus aureus
atgatattttcgcaaaatttatttcgtcgtcccaccccagcaaggttgactagaattgaaaaaagcttgttacaagcgcattttcgttcagtcaactactgccaatataacttcgtagagcatagaacattgatttatgtaccagcctga

SEQ ID NO: 3223 - DNA, 75 bp, Staphylococcus aureus
ggctccttggtcaagcggttaagacaccgccctttcacggcggtaacacgggttcgagtcccgtaggagtcacca

SEQ ID NO: 3224 - DNA, 73 bp, Staphylococcus aureus
ggtctcgtagtgtagcggttaacacgcctgcctgtcacgcaggagatcgcgggttcgattcccgtcgagaccg

SEQ ID NO: 3225 - DNA, 93 bp, Staphylococcus aureus
ggaggaatacccaagtccggctgaagggatcggtcttgaaaaccgacaggggcttaacggctcgcgggggttcgaatccctcttcctccgcca

SEQ ID NO: 3226 - DNA, 75 bp, Staphylococcus aureus
gcagaagtagttcagcggtagaatacaaccttgccaaggttggggtcgcgggttcgaatcccgtcttctgctcca

SEQ ID NO: 3227 - DNA, 89 bp, Staphylococcus aureus
gccggggtggcggaactggcagacgcacaggacttaaaatcctgcggtgagagatcaccgtaccggttcgattccggtcctcggcacca

SEQ ID NO: 3228 - DNA, 99 bp, Staphylococcus aureus
ttgcaattaaatgtaaacatgatgaaattcgaccgttggcataaggggatttgtaaacaaatcgttttgaattcagtagtgataggtggaaagggtaaa

SEQ ID NO: 3229 - DNA, 771 bp, Staphylococcus aureus
atgagagaaaaagtttcaaatagacttaaacacattatgaaaataagaaacttaaaacaagtagatatcattaataaatcgaaaccttatcaaaagaaactaggtatatctttaagtaaaagcactttatctcaatatattaacgacgtacaatcacccgaccaagatagaatttacctactttctaaaactctgaacgttggtgaagcgtggcttatggggtatgatgtagattcttatcgagttcctgatgaagaacgtcaagatgaaacgataatgtcaaaaatcaataacatattttctcaactcacacctccccgccaagaaaacgtacttaactatgcaaatgaacaattggaagaacagaataaagtcacttctatagatggatataaagagtctaaactagtatcgtatattgcatgtggtgcaactggtgctggcataggagaagaattatatgatgacataytrcatgaagaagtattttttaaagaagacgaaacgccatcaaatgctgatttttgtattttagttaatggtgattcaatggaacctatgttaaaacaaggaacatacgcttttattaagaaagaagattctattaaagatggtacaattgcactcgttgtattagatggagtaagtcttatcaagcgtgtagatatatgcgaagactatattaatttggtatctctaaatccgaagtatgatgatatcaaagtcgcttcgtttagtgatattaaagtaatgggcaaagttgtattgtga

SEQ ID NO: 3230 - DNA, 501 bp, Staphylococcus aureus
atgactttcgaagaaaaattaagtgaaatgtatagcgagattgcgaataagattagcagcatgataccggtagagtgggaaaaggtatatgcaatggcatatatagatgacggaggaggagaagtgttctactattacacagaacctggaagtaatgaattatactactatactagtgtattaaataaatatgatatatcggaatcggaatttatggattcagtgtatgagttgtataaacaatttcaaaatytaaggaatttatttaaagaagaaggacwwgaaccatggacatcatgcgaatttgactttacaagagaaggtgaattaaaagtttcatttgattatattgattggataaattcagaatttggtcaagtaggtcgacaaaattactataagtatagaaaatttggaattttaccagaaacggaatatgaaattaataaagttaaagaaatcgagcaatatgttaaagagcaagaagaagctgaacaatag

SEQ ID NO: 3231 - DNA, 492 bp, Staphylococcus aureus
atgactttcgaagaaaaattaagtgaaatgtatagcgagattgcgaataagattattagcatgataccggtagagtgggaaaaagtatatgcaatggcatatatcgatgaagaatgtggagaagtgttttacaattatactgaaccaagcagtgatgaattattttactatacaagtgtgataaagaagtataatttattgaaatcaagctttatggattcagtatatgagttgcatgatcaatttgaggaactaagagaagtatttatagaagaaggtcttgaaccatggacatcatgcgaatttgattttacaaaagaagataaattaaaagtttcatttgattatattgattggataaatacagagtttgatcaattaggccgtgaaaattattatatgtacaaaaaatttggtgttttaccagaaacggaatatgaaatkrakrargttaaagaaatcgagcaatatattaaagagcaagaagaatag

SEQ ID NO: 3232 - DNA, 102 bp, Staphylococcus aureus
gtgaatttgatgcaacattggaaacaaacagggttgaaccytacagckagaarggaaagaggtgttgtatcatttgttgcatcaatgttgcatcaccaaaaa

SEQ ID NO: 3233 - DNA, 714 bp, Staphylococcus aureus
atgaacaaagaaagaaatattattatagccaaaaacattagaaaatttctcaacgattcaaatatgtctcaaaagaaacttgctgaactcattaacataaaaccatctactttaagcgattatttaaatttacgttccaacccctctcacggcgttatacaaaggatagctgatgttttcgaggttggtaaaagcgacatagatactacatacaaagacgataacgacatcacttccatatacaacaaactcacacctccccgccaagaaaacgtacttaactatgcaaatgaacaattggaagaacagaattctaaaggagataacgttgtagatattaattcatataaacaggagaaaactccagttaacgtcaatggttgcgtctctgctggtgtaggagaacgtttacacgatgaaacgctatttactgaaatggttaaaggacctatccccacacacgatttagcgttaaaagtaaatggtgattctatggaacctatgtttaaagatggcgaaatcatatttgtggagaaaactcacaatataaagaatggacaaattggtatattcatcattgaagaagaagcgtaygttaagaaagtctttgttgaagatgatagattgactctagtttcactaaataaagattacgacgatctacacttttatagaaatgaaagtgtgaggttaattggaaaagttattttataa

SEQ ID NO: 3234 - DNA, 501 bp, Staphylococcus aureus
atgactttcgaagaaaaactaagtsaaatrtacaacragattgcgaatragattagyrgkatgataccrgtagartgggammaagtatwtacratwgcttatgtaratgatmraggtggagagrtcgtttttaattatactaaaccaggtagcgakgamttgaattattacacatatatccctagagagtataatgtctctgaaaaagtattttatgatttgtggacggatttatatagattgtttaagaagttaagaaacgcatttaaagaagaagatttagaaccatggacatcatgtgaatttgactttacaagagatggtaaattgaatgttgtatttgattatgttgattggatgaattcagaatttggtccawyagsaaargaaaaytaytatatgtayaaaaagtttggtgttttaccagaaacggaatatgaaattaataaagttaaagaaatcgakcaatatrttaaagagcaagatgaagctgaactatag

SEQ ID NO: 3235 - DNA, 501 bp, Staphylococcus aureus
atgactttcgaagagaaactaagtcaaatgtacaataaaattgcaagtgagatcagtggaatgataccagtagaatgggagcaagtatttacaatagcttatgtaactgatcaagctggggaagtcatttttaattatactaaaccaggtagtgatgaattaaattattattcagacatacctaaagattgcaatgtctcaaaagatatttttaagaattcatggtttaaagtttatcgaatgtttgatgagttaagagaaacttttaaagaagaagagcttgaaccatggacatcatgcgaatttgactttacaagagatggcaaattgaatgtatcttttgattatattgattgggtgaattcagaatttggaccaatgggaagagaacattattatatgtataaaaaatttggaatttggcctgaaaaagaatatgccataaattgggttgaaaaaataaaagattatgttaaagagcaagatgaagctgamctatag

SEQ ID NO: 3236 - DNA, 501 bp, Staphylococcus aureus
atgactttcgaaggaaaactaagtcaaatgtacaacgagattgcgaatgagattagtgggatgataccggtagaatgggagcaagtatttacaatagcttatgtaactgatcaagctggagaagtcatctttaattatactaaaccagatagtgatgaattaaattattattcagacatacctaaagattgcaatgtctcaaaagatatttttaagaattcatggtttaaagtttatcgaatgtttgatgagttaagagaaacttttaaagaagaagggcttgaaccatggacatcatgcgaatttgactttacaagagatggcaaattgaatgtatcttttgattatatagattggataaatacagagtttgatcaattgggccgtcaaaattattatatgtacaaaaaatttggggttataccagaaatggaatatgaaatggaagaagttaaagaaatcgaacaatatattaaagagcaagaagaagctgaacaatag

SEQ ID NO: 3237 - DNA, 501 bp, Staphylococcus aureus
atgamtttygaagaaaaaytaagtcaaatgtacaaygarattgcraatgaratyagtggratgataccagtwgaatgggarmawrtatwtacaatwgcytatgtaactgatcaagstggrgargtcatttttaattatactaaaccaggtagygatgaattgaattattacacatatatccctagagagtataatgtctctgaaaaagtattttatgatttgtggacggatttatatagattgtttaagaagttaagaramrcwtttaaagaagaagrkytwgaaccatggacatcawgtgaatttgactttacaagcgaaggtaaattaaaagtttcatttgattatattgattggataaatacagagtttgatcaattaggccgtgaaaaytattatatgtataaaaartttggkgttwtaccagaaatggaatacgaaatggaagaagttaaagaaatcgagcaatatattaaagagcaagatgaagctgaactatag

SEQ ID NO: 3238 - DNA, 489 bp, Staphylococcus aureus
atgactttcgaagaaaagctaagtcaaatgtacaatgaaattgcaaatgaaatcagtggaatgataccagtagaatgggaaaaagtatatacaattgcctacgtagatgatgaaggtggagaggttgtttttaattatactaaaccaggaagtgaagatttgaattattattcagatattcctaaagattgcaatgtctcaaaagatatttttaagaattcatggtttaaagtttatcgaatgtttgatgagttaagagaaacttttaaaaaagaagatttagaaccgtggacatcatgtgaatttgactttacaagaaagggaaatttaaaagtatcatttgattatatagattggattaaattaggttttggcccatcaggaaaggaaaactactatatgtacaaaaaatttggtattttaccagatatggaatatgaaatggaagaaattcgagcagtagagaagtatgttaaagagcaagagtag

SEQ ID NO: 3239 - DNA, 159 bp, Staphylococcus aureus
atgagcgacacatataaaagctacctagtagcagtactatgcttcacagtcttagcrattgtacttatgccgtttctatacttcactacagcatggtcaattgcrggattcgcaagtatcgcaacattcatattttataaagaatacttttatgaagaa

SEQ ID NO: 3240 - DNA, 120 bp, Staphylococcus aureus
ttgattgaaaggaagcgcaaacattttaataaggaatttgccaaaagtaatttatcgttaaacaatgaaaagtggaaatttgtttgttcaaaatcaaaacatttttttaaaaagagcagt

SEQ ID NO: 3241 - DNA, 219 bp, Staphylococcus aureus
atgccgaaagaaaaatattacttataccgagaagatggcacggaagatatcaaagtcatcaagtataaagacaacgtaaatgaagtttattcgctcacaggagcccatttcagcgacgaaaagaaaattatgactgatagtgacctaaaacgatttaaaggcgctcacgggcttttatatgagcaagagctaggattacaagcaacgatatttgatatt

SEQ ID NO: 3242 - DNA, 372 bp, Staphylococcus aureus
gtggggccccaacacagagaatttcgaaaagaaattctacaaacaatgcaagttggggtggggccacaacagagagaaataggatcaccaattccaacagacaatgcaagttggcggggccccaacatagagaaattggatcaccaatttcaacagacaatgcaagttggggtggggcccaacacagaagctggcgaaaagtcagcatacaaaaatgtgcaagttggcggggccmcaacakagagaaataggatcaccaattccaacaaacaatgcaagttggcggggccccaacatagagaaattgggtcaccaatttcaacagacaatgcaagttggggtaggacatcgataaaaaaatactttttctgt

SEQ ID NO: 3243 - DNA, 207 bp, Staphylococcus aureus
atgaaaatcaaaattgaaaaagaaatgaatttacctgaacttatccaatgggcttgggataaccccaagttatcaggtaataaaagattctattcaaatgatgttgarcgcaactgttktgtgacttttsatgttgatagcatcttatgtaatgtgactggataygtatcaattaacgataaatttactgttcaagaggagatataa

SEQ ID NO: 3244 - DNA, 402 bp, Staphylococcus aureus
atgaaaatcaaagttaaaaaagaaatgagattagatgaattaattaaatgggcgcgagaaaatccggatctatcacaaggaaaaatatttttttcaacaggatttagtgatggattcgttcgttttcatccaaatacaaataagtgttcgacgtcaagttttattccaattgatatccccttcatagttgatattgaaaaagaagtaacggaagagactaaggttgataggttgattgaattattcgagattcaagaaggagactataactctacactatatgagaacactagtataaaagaatgtttatatggcagatgtgtgcctaccaaagcattctacatcttaaacgatgacctaactatgacgttaatctggaaagatggggagttgctagtatga

SEQ ID NO: 3245 - DNA, 405 bp, Staphylococcus aureus
atgaaaatcaaagttaaaaaagaaatgagattagatgaattaattaaatgggcgcgagaaaatccggatctatcacaaggaaaaatatttttttcaacaggatttagtgatggattcgttcgttttcatccaaatacaaataagtgttcgacgtcaagttttattccaattgatatccccttcatagttgatattgaaaaagaagtaacggaagagactaagtttgataggttgttagaggtatatgagattcaagaaggagtctataaatccgcattacacaaaggtatcagtttgaacgaacgttttgaagacgacaatatttttcctactaaagcattctatatcttaaacgatgacatgacgatgacattgatttggaaagatggggagttggtagaatga

SEQ ID NO: 3246 - DNA, 249 bp, Staphylococcus aureus
atgaataatcgcgaaaaaatcgaacagtccgttattagtgctagtgcgtataacggtaatgacacagagggrttrctaaaagagrttgargacgtgtataagaaagcrcaagcgtttgatgaaatacttgagggaatracaaatgctatkcaacattcagttaaagaaggtattgaacttgatgaagcagtagggattatggcaggtcaagttgtctataaatatgaggaggaryaggaaaatgactaa

SEQ ID NO: 3247 - DNA, 207 bp, Staphylococcus aureus
gtgacgcaatacttagtcacaacattcaaagattcaacaggactaccacatgaacatattactgtggctagagataatcagacgtttacagttgttgaggcagagaataaagaagaagcaaaagagaagtatgaggcacaagttaaaagggatgcaattattaaagcgagtcagttgtttgaaaatataagggagtgtgggaaatga

SEQ ID NO: 3248 - DNA, 153 bp, Staphylococcus aureus
atgaytaaacaaataytaagactattattcttactagcaatgtatgagttaggtaagtatgtaactgagcaagtgtatattatgatgacggctaatgatgatgtagaggcgccgagtgattacgaaaaaatcagagctgaagtttcatggtaa

SEQ ID NO: 3249 - DNA, 438 bp, Staphylococcus aureus
atgggaaaggcatcatatgatattaagccaggtacatttaaatatattgagtcagagatatataacctacaagagaacaagaaagagataaatagattgagaatggagatacttaacccaacgaaagaactagacaccaacattgtgtatggaccgttacaaaaaggagagccagttagaacaactgagttaatggcgacaaggttattgactaataagatgttacgtaacttagaagagatggttgaagcagttgaaagtgagtacttaaagttacctgaagatcataagaaagtaataaggttaaagtattggaataaagataagaagctaaagatagaacaaataggggatgcttgtcacatgcatcgcaatacagttactacaatacgaaagaactttgttaaagcgatagcgtatcatgcaggtatcaaataa

SEQ ID NO: 3250 - DNA, 390 bp, Staphylococcus aureus
atgcaaatattagttaacaagcgtaatgagataatttcatacgctatcattggyggctttgaagaaggtattgatattgaaaatttaccagaaaatttctctcaagtttttagacctaaagcctttaaatattcaaatggggaaatagtttttaacgaagattattcagaagaaaaagatgacttgcatcaacagattgacagtgaagaacaaaacacagtcgcttctgatgacatcttacgaaaaatggttgctagtatgcagaaacaagttgttcaaagtacaaagttatcgatgcaagttaataagcaaaatgcactaatggcaaaacaacttgtgacacttaataaaaaattagaagaggttaaaggagagactgaaaatgcytaa

SEQ ID NO: 3251 - DNA, 201 bp, Staphylococcus aureus
gtgcgtaatcgattgaaagaattacgagcacgagatggcttaaaccaaacgcaacttgctaaacaagcgggcgtttcaagacaaaccatatcgctaattgagcgaaacaattttatgccatcagtattaacggcaataaaaattgctcgcattttcaatgaaacggtggaaactgtttttattattgaggaggatgaggca

SEQ ID NO: 3252 - DNA, 204 bp, Staphylococcus aureus
atggcgtcaaaatatggaataaatgatatagtagaaatgaaaaaacaacatgcgtgtggaacaaaccgttttaagattattagaatgggtgcagacataagaattaaatgtgaaaattgtcaaagaagtattatgattccacgtcaaacgtttgataaaaaacttaaaaaaatcatcgaatctcatgatgatacacaaagatag

SEQ ID NO: 3253 - DNA, 699 bp, Staphylococcus aureus
atgaaattdacdrcrwtagcwaaagcaacattagcattaggaatattaactacaggtgtgtttacarcagaaagtmaarctgktcacgcgaaagtagaacttgatgagacacaacgcaaatattatatcaatatgctacatcaatactattctgaagaaagttttgaaycaacaaayattagygttaaaagygaagattactatggytctaacgttttaaactttaamcaacgaaataaarctttyaaagtrtttytrcttggtgacgataaaaataaatataaagaaaaaacacatggccttgatgtctttgcagtacctgaattaatagatataaaaggtggcatatatagcgttggcggtataacaaagaaaaatgtgagatcagtgtttggatttgtaagtaatccaagtctacaagttaaaaaartygatsctaaamatggcttttcgataaaygagttgttytttattcaaaaggaagaagtatcrttgaaggaactggaytttaaaataagaaaamtsttartcgaaaaatatagattgtataaaggmrcgtcwgataaaggtagaatygttatyaatatgaaagacgaaaagaaryatgwaattgatttaagtgaaaaattaagttttgawcgtatgtttgatgtaatggatagtaagcaaattaaaaatattgaagtgaatttgaattar

SEQ ID NO: 3254 - DNA, 684 bp, Staphylococcus aureus
atgaaattwacagcrwtagcwaaagcdrcattagctttaggaattttaacaacaggaactttaacaacagaagttcattcaggtcatgcaaaacaaaatcaaaagtcagtaaataaacatgacaaggargcaytataccgatactacactggaaagactatggaaatgaaaaatattagtgctttgaaacatggtaaaaayaacttrcgttttaagtttagaggtattaagattcaagttttactgcctggaaatgataaaagtaaatttcaacagcgtagttatgaggggttagatgtkttytttgttcaagaaaaaagagataagcacgatatattttatactgttggtggtgtaatacagaataataaaacatctggagttgtcagtgcaccaatattaaatatttcaaaagaaaagggtgaagatgcttttgtgaaaggttacccttattacattaaaaaagaaaaaataacactaaaagarctggattataagttgagaaagcatctaatygaaaaatayggactttataaaacaatctcaaaagatggtagggtcaaaattagcttgaaagatggcagtttttataaccttgatttaagatctaaattaaaattyaaatatatgggggaagtcatagaaagcaaacaaattaaagatattgaagttaacttaaagtaa

SEQ ID NO: 3255 - DNA, 843 bp, Staphylococcus aureus
ttggaccatctgatggaggagctaaagtttattaggtgtagaaataattctaaaacagagagatgtgaaaagatgggatatttaaaaaggattggaatgtgyataagcctrttgattgtaatyatttttgtaacatcttgcggtggtggtaataaratcactggagattcaaaagaaacacaaatcaaaaagagttttgcgaaaacgttagatatgtacccaatcaaaaatctygargayytataygayaaagaaggmtatcgagatggcgaatttraaaaaggtgacaaagggatgtggacgatatayacagatttygctaaaagyaataaaycrgrygaattggatgatgaaggtatggttttaaatctggatagaaatactcgaacggctaagggatattattttgttaagaaattttatgaaaaggataaattwycwgatagaaaaaattataaagttgaaatgaaaaayaataaaaktatyttattagacaaggtaramgatccaaayctwaaararagaatagaaaaytttaartttttyggacaatatgcaaattttaaggatttggaaaattacaacaatggcgaygtgtcaataaattggaatgttccaagttatgacgtggaatataaaatgagcaataaagatgaaaatgttaarcaattaagaagtcgttataacattcctactgataaagctccaatgttaaaaatgcatattgacggggacttaaaaggwagttctgttggatataaaaggttagaaatagayttttcaaaagaagatagggatatttcagtcattgattatttaagttataagccagcgaaaaaatag

SEQ ID NO: 3256 - DNA, 801 bp, Staphylococcus aureus
atgaagtataaaacagagagacgtgaagcgatgggatatttaaaaaggtttgcattgtacataagcgttatgattttaatatttgcgatagcaggttgtggcaaaggtaatgaaacaaaagaagattcaaaggaagaacaaatcaaaaagagctttgcgaaaacgttagatatgtatccaattaagaatctcgaggacttatatgataaagaaggataccgtgatggcgaatttaaaaagggcgacaaaggaatgtggactatatatacagattttgctaaaggcaataaatcagacgaattggatgatgaaggtatggttttaaatctggatagaaatactcgaacggctaagggatattattttgttaagaaattttatgaaaaggataaattacctgatagaaaaaattataaagttgaaatgaaaaataataaaattatcttattagacaaggtagaagatccaaatctaaaaaagagaatagaaaactttaaatttttcggacaatatgcaaattttaaggatttggaaaattacaacaatggcgacgtgtcaataaattggaatgttccaagttatgacgtggaatataaaatgagcaataaagatgaaaatgttaaacaattaagaagtcgttataacattcctactgataaagctccaatgttaaaaatgcatattgacggggacttaaaaggtagttctgttggatataaaaggttagaaatagatttttcaaaagaaggtagggatatttcagtcattgattatttaagttataagccagcgaaaaaatag

SEQ ID NO: 3257 - DNA, 792 bp, Staphylococcus aureus
atggaatatctaaaaaggcttgcattgttaataagtgttattattttgaccatttttataatgggttgtgatagtcaaagcgatactgcagaaaatccaaaagaaggttcaaaagaagcacaaattaaaaagagtttttcgaaaacgttagatatgtatccaattaagaatctcgaggatttttatgacaaagaaggatatcgagatggcgaatttaaaaaagatgataaaggtacttggctaattagatccgaaatagttaaacagccaaagggcaaagtgatgaaaacaagaggtatgcaattatatattaatagaaataccgaaacagccaaaggtttctttgttttgaaagaaataagtgaaaataataatcgtgtaaataaagataaggaggaaaaatacgaagtgaaaatggtaggaaataaaattattcctactgaacaaattaatgacgagaaaataaaaaaagaaattgaaaacttcaagttttttgtgcaatatggaaactttaaaaatttcgaaaaatacaacaatggtgagttttcatataatcctgaagcaccaatttattcggctaaatatcaattacacaacgatgattacaatgtaaggcaactacgtaaaagatatgacatttcaacaaaagaaacaccgaagttacttttgaaaggtggaggagatttaaaaaattcctcagttggtcaaaacgatattgaatttacttttgttgaaagaaaaggtgagaatatttattttaacgatagtgttgaattcataccaagtaagtaa

SEQ ID NO: 3258 - DNA, 801 bp, Staphylococcus aureus
atgrgatatttwaawagagttgtactktacataattgttatggttktgagtgtttttataataggttgyrataaatcaagcgatacttcagaaaagccaaaagaagattcaaaagaarcacaaatyaaaaagagytttgmgaaaacrttagatatgtatccaattaagaatctcgaggayttataygayaaagarggatmycgtgatggygartttaaaaarggygayaaaggratgtggackatatatacagatttygcyaaaagtaataaacaaggtggattgagtaatgaaggtatggtcttatacttagatagaaatacacggacwgcaaagggacattattttgttaagacattytatrawaaggryaaattcccagatagaaaaaawtataaagttgaaatgaaaaayaataaaattatcttattagayaargtagaagatmyaaawctaaaaaagagaatagaaaactttaaatttttyggacaatatgcaaaycttaaagaattgaaaaattacarcaatggtgatgtctcaattaatgagaatgttccaagttatgacgcaaaatttaaaatgagcaataaagatgaaaatgttaagcaattaagaagtcgttataatattcctactgataaagcaccggtattaaaaatgcatattgatggtratttgaaaggaagttctgtgggttataaaaagttggaaattgacttttcaaaaggtgaaaaaagcgatttgtcagtaatagattctttraatttccagccggcgaaggtgratgaagatgatgaatga

SEQ ID NO: 3259 - DNA, 738 bp, Staphylococcus aureus
atgaaagatgaacagaaaaaagaggaacaaacgaataaaacagattcaaaagaagaacaaatcaaaaagagttttgcgaaaacgttagatatgtatccaattaagaatctcgaggatttatacgacaaagaaggatatcgagatggtgagtttaaaaaaggcgataaaggtacgtggactatacttacaggtttttcaaaaagtaacaaaccaggagtattagatgatgaaggcatggtgttatatcttaatagaaataccaaaaaggcaacaggttattattttgtaaataaagtttatgatgatattagcaaaaatcataatgagaaaaaatatcgtgttgaactaaaaaataataagattgttcttttggataatgtagaagacaaaaaacttaaacaaaaaattgaaaattttaaattttttagtcagtatgctgattttaaagatttaaaaaattatcaagatggaaatataacaactaatgaaaacgtaccgagctatgaagcacaatataaaatgaacaatagtgataaaaatgtaaaaaaacttagagaaatttatccaattacaactaataactctccaaatctaaaattatatatagatggtgatataaaaggaagctcagtaggatataaaaaaatagaatataaattttcaaaagataaaggtcaagagacaacattaagagattatttgaattttggaccgtctgaaggtgagaatgttgagtag

SEQ ID NO: 3260 - DNA, 816 bp, Staphylococcus aureus
atgatggrgtatataaaaaraatkgctttrtacatgagtgtattwcttttaatcatttttattgkkggatgtsgaaatatgaaagatgaacagaaaaaagargaacaaacraataaaacagattcaaaagaagaacaaatcaaaaagagttttgmgaaaacrttagatatgtatccaattaagaatctcgaggakytataygacaaagaaggataycgagatggygartttaaaaarggtgataaaggkatgtggacgatatatacagatttygccaaaagtaataaasmagrygrattragtaatgaaggtatggtcttatacttagatagaaatacacggacwgcaaagggacattattttgttaagacattytatrawaaggryaaattcccagatagaaaaaawtataaagttgaaatgaaaaataataaaattatcttattagayaargtagaagatmcaaawctaaaaaagagaatagaaaactttaaatttttyggacaatatgcaaaccttaaagaattgaaaaaytacaacaatggtgatgtctcaattaatgagaatgttccaagttatgacgcaaaatttaaaatgagcaataaagatgaaaatgttaagcaattaagaagtcgttataatattcctactgataaagcaccggtattaaaaatgcatattgatggtaatttgaaaggaagttctgtgggttataaaaagttggaaattgacttttcaaaaggtgraaaaagcgatttgtcagtaatagattcwttraatttccagccggcgaaggtrgatgaagatgawrratra

SEQ ID NO: 3261 - DNA, 819 bp, Staphylococcus aureus
atgaagtataaaacagagagacgtgaagcgatgggatatttaaaaaggtttgcattgtacataagcgttatgattttaatatttgcgatagcaggttgtggcaaaggtaatgaaacaaaagaagattcaaaggaagaacaaatcaaaaagagctttgcgaaaacattagatatgtatccaattaagaatctcgaggacttatacgacaaagaaggataccgagatggcgaatttaaaaagggtgataaagggatgtggacgatatatacagatttcgccaaaagtaataaacaaggtggattgagtaatgaaggtatggtcttatacttagatagaaatacacggactgcaaagggacattattttgttaagacattctataataagggcaaattcccagatagaaaaaattataaagttgaaatgaaaaataataaaattatcttattagataaagtagaagatacaaatctaaaaaagagaatagaaaactttaaattttttggacaatatgcaaaccttaaagaattgaaaaactacaacaatggtgatgtctcaattaatgagaatgttccaagttatgacgcaaaatttaaaatgagcaataaagatgaaaatgttaagcaattaagaagtcgttataatattcctactgataaagcaccggtattaaaaatgcatattgatggtaatttgaaaggaagttctgtgggttataaaaagttggaaattgacttttcaaaaggtggaaaaagcgatttgtcagtaatagattctttgaatttccagccggcgaaggtagatgaagatgatgaatga

SEQ ID NO: 3262 - DNA, 297 bp, Staphylococcus aureus
atggcgactaagaaagatgtacatgatttatttttaaatcatgtgaattcaaacgcggttaagacaagaaagatgatgggagaatatattatttattatgatggcgtggttataggtggtttgtatgataatagattattggtcaaggcgactaaaagtgcccagcagaaattgcaagataatacattagtttcgccatatccaggttctaaagaaatgatattaattctagactttaccgaagcaacaaatctcactgatttatttaagaccataaaaaatgatttgaaaaagtga

SEQ ID NO: 3263 - DNA, 99 bp, Staphylococcus aureus
atgtgtcaatacttatgtttgaaaagtgttgaattaggtgtggttattgtgatgatttattgtttgaaagttgatgcattaacggtgagattgcacaat

SEQ ID NO: 3264 - DNA, 771 bp, Staphylococcus aureus
atgatgaaacgattaaacaaattagtgttaggcattatttttctgtttttagtcattagtatcactgctggttgtggcataggtaaagaagcggaagttaagaaaagctttgaaaaaacattgagtatgtaccctattaaaaatctagaggatttatacgataaggaaggctatcgtgatgatcagtttgataaaaatgataaaggtacatggattataaattctgaaatggttattcaacctaataatgaagatatggtagctaaaggcatggttctatatatgaatagaaataccaaaacaacaaatggttactactatgtcgatgtgactaaggacgaggatgaaggaaaaccgcacgacaatgaaaaaagatatccggttaaaatggtcgataataaaatcattccaacaaaagaaattaaagatraaaamataaaaaaagaaatcgaaaactttaagttctttgttcaatatggmractttaaaratttgwmraaktayaaagayggagatatttcatayaatccagaggtgccragttattcrgcwaaatatcaaktaactaatgatgattataatgtaaaacaattacgyaaaagatatgatataccgacgartaaagcwccaaagttattgttraaaggtwcaggkaatttaaaaggctcatcagttggatataaagatattgaatttackttygtrgagaaaaaagrwgaaaatatatactttagtgatagyytasatywtraammaagygrrgatrwataa

SEQ ID NO: 3265 - DNA, 426 bp, Staphylococcus aureus
atgaaagagaatgatgtcgtgttaagaacggtcacgaaacttgttgtatttattttattgactttcggattctatgtcttcttcgcaggtcataataatcctggtggtggstttattggtggtttaatatttagttcagcgtttattttaatgtttctggcttttaatgttgaagaggttttagaaagtttaccgattgattttagaattttaatgattattggagcattggtatcatctattactgcgataatacctatgttttttggaaaaccatttttgtctcaatatgaaacaacttggatacttccaattttaggrcaaattcatgtaagtacaataacactttttgaattaggtattttattctcagttgttggtgttattgtcacagtgatgttgtcgcttagcggaggtcgatcatga

SEQ ID NO: 3266 - DNA, 345 bp, Staphylococcus aureus
atgaatttaatattattactagttataggatttttagtgtttataggaacatatatgattttatcaatcaatttaattcgtattgtaatcggaatttcaatatatactcatgctggtaatctcattattatgagtatgggaacgtatggttctagtagatcagaaccaytaataactggtggaaaccaattgtttgttgatcccttgttacaagctattgtactaactgcaatagttatagggtttgggatgactgcgtttttacttgtacttgtttatagaacttataaagtaacaaaagaagatgaaattgaaggcctaaggggggaagatgatgctaagtaa

SEQ ID NO: 3267 - DNA, 1041 bp, Staphylococcus aureus
atgaataatttgaaatgggtagcttattttttgaaatctcgcatgaactggatattttggatattgtttttaaacttscttatgttaggcattagtctaatcgattatgattttccaatagacagtttattttatattgtttctttgaatttaagtttaacaatgatttttcttwtattgacatattttaaagaagtaaaattatataagcattttgacaaagataaagaaatagaagaaattaaacataaagatttagcggaaacgccatttcaacgtcatacagttgattatttatatcgtcaaatctcagcgcacaaagaaaaggttgttgagcaacagttrcaattgaacatgcatgaacaaaccattacagaatttgtgcacgacataaaaacacctgtgacagcyatgaaattattaattgatcaagaaaaaaatcaagaaagaaaacargcattactatatgaatggtctcgtataaactcgatgctrgatacacagctgtatattactagattagaatctcaacgyaaagatatgtattttgattacgtgtcacttaaacgcatggtcattgaygaaatacaattaacaagacatattagtcaggttaaaggtattggttttgatgttgactttaaagtggatgattatgtttatacagatayaaaatggtgtcgtatgattattagacarattttgtcaaacgcattgaaatatagtgagaattttaatattgaaattgggacagaattaaatgatcaacatgtttcgttatatattaaagactatggcagaggtattagtaaaaaagatatgccgcgaatatttgaacgaggatttacgtcaacggctaacagaaatgaaacgacgtcttcaggtatgggtctatatttagtaaatagtgtaaaggatcaattaggtattcacctgcaagtcacgtcgactgttggtaaggggacaactgtcagattgattttcccattacaaaatgaaattgttgaacgcatgtcggaagtgacaaatttgtcattttaa

SEQ ID NO: 3268 - DNA, 825 bp, Staphylococcus aureus
ttgaagatacaagtgccaaagcctaaaggaaatgaagttaagataaattataggagtgttaaagtggcaattttagaagtaaaacaattaacaaaaatatatggaactaaaaaaatggcacaagaagtgttgcgagatatcaatatgtctattgaagaaggcgagtttattgctattatgggtycctctggatctgggaaaacgacattattaaatgttttaagttcaattgattatatttcacaaggttctattacattaaaaggaaaaaaattagaaaagctttcaaacaaggaattatctgatatacgcaagcatgatattggttttatttttcaagagtataatttactgcatacattgactgttaaagaaaacataatgttaccactaacggtwcagaagttagataaagaacatatgttaaatcgttatgaaaaagtagcagaagcattaaatatattggatattagtgataaatayccytctgaattgtctggtggacaaagrcaacgaacatcwgctgcmagagcrtttatwacattrccttctattatatttgctgacgaaccaacaggtgcactggattctaaaagtactcaagatttattaaaacgattaacaagaatgaatgaagcatttaagtctacaattattatggtaacgcatgatcctgttgcagcaagytatgcmaatcgagtagtgatgctaaaagatggtcaaattttcactgaattataccaaggggatgacgataaacatacctttttcaaagaaataatacgtgtacaaagtgttttaggtggcgttaattatgacctttaa

SEQ ID NO: 3269 - DNA, 768 bp, Staphylococcus aureus
atgaaacgattaaacaaattggtattgtatattagttttttgatattagtcattagtttcactgctggttgtggcatrggtaaagaagcggaartwaagaaaagytttgaaaaaacattgagtatgtatccgattaaaaatctagaggatttatacgataaagaaggytatcgtgatgaysaatttgataaaaaygataaaggyacatggattattrrttctgaaatggttgttcaacctaaaggggaacgtatgaaatcaaaaggtatggttctatatatgaatagaaacactaagactacaaccgggaagtatatagtgagtgaaacacttcatgatgaagatggtagacctaagagtaaagataaagaatatccsgttaaaatggtagacaataaaatcattccaactaaaggtatcaaagacgaaaatataaaaaaagaaatcgagaattttaagttcttcgcgcaatatggcagctttaaagatttgtcgaagtacaaagacggcgatatatcatataatccagaggtaccgagttattcagcaaaatatcaattaactaatgatgactataatgtaaaacaattacgaaaaagatataaaataccaacgaataaagcaccaaagttattgttgaaaggttcgggagacttaaaaggttcatcagttggatataaagacattgaatttacttttgtggagaaaaaaggtgaaaatactttttttactgatagtctacatcttgaaccragtgaggataaataa

SEQ ID NO: 3270 - DNA, 1023 bp, Staphylococcus aureus
atgaaaaagaaattattagttttaactatgagcacgctatttgctacacaamttatsaattcaaatcacgctaawgcatcagtgacagagagtgttgacaaaaaatttgtagttccagaatcaggaattaataaaattattccarcttacratgaatttaaraawkcrccaaaagtaaatgttrgtaatttarctgacaayaaaaactttgtagyttctgaagayaaattgaawaagattkyrgatycwtcrgcagcwagtaaaattgtagataaaaactttgycgtaccagartcaaagttaggaaacattgtrccagagtacaaagaaatyaataatcgcgtgaatgtagcaacaaacaatccagcttcacaacaagttgataagcattttgttgctaaaggcccagaagtaaatagatttattacgcaaaacaaagtaaaccaccacttcattactacgcaaacccactacaagaaagttattacktcatacaaatcaacacatgtacataaacatgtaaatcatgcaamggattctattaataaacactttattgttaaaccatcagaakcrcctagatatacacayccatctcaatctytaatkatmaakcatyattttgcagtkcctggatatcacgcgcataaattygtwacaccagggcatgctagcattaaaattaatcacttttgtgttgtgccacaaataaatagtttcaaggtaattccaccatatggtcacaattcacatcgtatgcatgtaccaagtttccaaaataayacaacagcaacacatcaaaatgctaaagtaaataaagcatatgactataaatacttctattcttataaagtagttaaaggtgtgaagaaatatttctcattttcacaatcaaatggttataaaattggraaaccatcattaaatatcaaaaatgtaaattatcaatatgctgttccaagttatagccctacmmactacgttcctgaatttaagggtagcttaccagcaccacgagtataa

SEQ ID NO: 3271 - DNA, 210 bp, Staphylococcus aureus
atgaataatgaacaaaaagaagtaatagaacacttggtttatcaacttgagttaagtgtcatgaataatttggaaagttacgaacacacagaatatgttaatggtattgaagtggtttcagagatcagtcgtgaaaagcacttagaattgataatgaaatggtgcgcacaagaattaaagaataattttcaattagagaaaggagaataa

SEQ ID NO: 3272 - DNA, 1347 bp, Staphylococcus aureus
atgaaacgagccattggttatttgcgccaaagtacaacgaaacaacaatcactcccagctcaaaagcaagcaatagaattattagctccaaagcacaatattcaaaatatccaatacattagtgataagcaatcaggcagaacagataatcgaacaggctatcaacaagtcaccgaacgcatccaacaaagacaatgtgacgtattatgttgttatcgcttgaatcgacttcatcgcaacttgaaaaatgcattaaaactcatgaaactctgtcaaaaatatcatgttcatattctaagtgttcatgatggctattttgatatggataaagcgtttgatcgcctaaaactcaatatattcatgagtctggctgaacttgaatccgataatattggagaacaagtcaaaaatggacttagagaaaaggcaaaacaaggtaaactcataacgacccatgcgcctttcggttatcactatcaaaatggtactttcatcattaataatgatgaatcacctaccgtcaaagctgtattcaattattatcttcaaggatatggctacaagaagattgcacaatatttagaagacgataataaacttattacccgcaagccttatcaggtacgaaatataattatgaacccaaattattgtggtcgtgtcatcaatcaatatggtcaatataacaatatggtaccacctattgtttcggcaacgaaatatgaacatgctcaagcaatccgtaataagaagcaacttcactgtataccttcagagaatcagctgaaacaaaagatcaaatgtccttgttgtgactcaacactgacaaatatgacaataagaaaaaaacatacattgcgatattatatttgtcctaaaaatatgaatgaatctcgctttgtctgttcattcaaaggaataaatgcacaaaaattagaagttcaagtcttagctacatgtcagaacttctttcaaaaccaacagctctattcaaaaattaataatgcaattcatcaacgcctcaaaaaacaaagagtgatagaagctaaaagtacgctaactcaagaacaactgatagataaacttgccaaaggtatgattgatgctgaatcattcagaaaacagactcatttgatgaatcaaaagcacaaaaccatatcctccataagtgataatcagttacaaacatcactacaaaaggttatacagaaaagtttcacgttaaacatgctgcatccctatattgatgaaattcgcattacaaaaaataaagcccttgttgggatctatttcaaaaatgaaccattgaacattgtgaaccaaacctcgcaatcatcgattgcttaa

SEQ ID NO: 3273 - DNA, 1629 bp, Staphylococcus aureus
atgcaacaactcaaacaaaaacgtgtcggtatctatgttcgtgtatcaacggaaatccaaagtactgaaggctatagtatcgatggacaaatcaatcaaattcgagaatattgtgatttcaataactttgttgttgtagatgtatacgcggatagaggtatctctggaaaatctatgaaccgaccagaactacaacgtttgttaaaagatgcgaacgaaggtcagattgattctgttatggtctacaaaacaaaccgactagcacgtaacacttctgacttactcaaaattgttgaagaccttcatcgtcaaaatgtcgaattcttcagcttatctgagcgtatggaagtcaatacaagcagtggtaaattgatgctacaaattctagcgagtttttcagaatttgaaagaaataatattgtcgaaaatgtattcatgggtcaaacccgacgcgctcaagaaggctattatcaaggcaatttgccgctgggctatgacaaaataccggatagcaagcatgaactcatgataaaccaacatgaagcgaatattgtcaaatatatatttgagtcatatgctaaaggccacggatatcgtaaaattgcgaatgcactcaatcacaaaggatacgtgactaaaaaaggaaagcctttcagtattggttcagtgacctatatcttatctaatccattctatgttggtaaaattcaattcgcaaagtacaaagattggaatgaaaagcgtcgtaaagggctgaatgataaaccaataatagctgaaggtaagcattcccctattattattcaagacttatgggataaagtccaattacgtaaaaaacaagtcagtcaaaaacctcaagtccacggtaaaggaactaatctattaacaggtatcgttcattgtccacaatgtggtgcaccaatggcagctagtaacacaacgaacacattgaaagatggtaccaagaagcgaatacgttattattcttgcagtaacttccgaaacaaaggctcaaaagtatgttctgcgaatagcgttagagctgatgtgattgagaaatacgtcatggatcaaatactcgaaattgtcaaaagtgataaagtcattaaccaagtcttagaacgtgtcaatcaagaaaataaagtcgatattggtgcattgaaccacgatatcgcttataaacaacaacaatacgatgaagtcagcgggaaactccataatttagttaaaaccattgaagataatccggacctaacatctgcattgaaagcaactattcatcaatatgaaacacaactcaatgacattacaaatcaaatgaatcaactcaaacagcaacaaaatcaagagaaactatcttatgatacgaaacaaatcgctgccctattacaacgaatatttcaaaatatagaatcaatggataaagcacaactcaaagcattatatcttacagtcattgaccgtattgatattcgtaaagacggtaatcataaaaaacagttctacgttacactaaaactcaataatgaaattattaaacaacttttcaataatacccctctcgacgaagtgctcctcagcacttcgtctttatttttgcctcaaacgctctttcttcaaatctaa

SEQ ID NO: 3274 - DNA, 285 bp, Staphylococcus aureus
atgaatgayaaagagaaaatttataatcaacttcatcatgatgcaccaattcaaattatrccagcacccgaaaatttatttgtcgaatatatagaagmtgrygaagtrtggtattcaccagttgtatgtatrgctttaagtaaagcscataatattaatttttatgacagtgatgatgtggggtgcatygataaagcagccacatgtagcattaaaaaatttaatcctgagacaggtgagtttgaacaattcagcaaaatggctcaaaaggagataacrcaatga

SEQ ID NO: 3275 - DNA, 594 bp, Staphylococcus aureus
atgaaaactgaatcgtactttaaagaatacaaccaatttgtaatagatcaacaaaaggctatacaagaattgraacaagagcgtaatgcattggagagtaaaataaagatagataagtccacatataaacagttaatcatggatggacaagatgataaagcagataacctatatcaagcaacagatgctgatgaaaagaaactaaaagcacttaataaacgcttagagacaaagaaaagtgtgtcgaaagaagttaaatatcaaaagacaattgaattattaaaacatcaaagcgagttgtcatcattatacgaatcagaaaagcaatcagctttaggtaaattaaaaaaagtagtcgatgcatataatgagatmattgatgaaatagaagatattaatgatagatatgaagatgagcatcagcaatatgcgagtatttatagtcaagaacaattatatgatgataaagaggctagggaagcattgaatggctactttagagaaaatatatttacatcatatattaatggtaatgatttgccatacgaacacaataacaagttgtttttaaaacgttwaaaaaagaaagggtaa

SEQ ID NO: 3276 - DNA, 225 bp, Staphylococcus aureus
atggaaacaaaatrcgagttaaataatactaaaaaggtcgcaaatgcatttggtttaaatgaagmagatacaaatctattaataaatgcagttgatttggatattaaaaacaatatgcaggagatttcwrgtgagttacaacaatcagaasagtctaagcaaaagcaatwwggtacaacgctacaaaatttagctaagcaaaacaggattattaaatrgcaatga

SEQ ID NO: 3277 - DNA, 528 bp, Staphylococcus aureus
atgaarckgcttaaaacgaagaattgtttatattatcgtaakgscgacaataaactatctgagtatcaactattaacgcaatttaacccagcattkattaataaaaaaattaagatgtgtgaattccaaattgaargtatgtaccatatgagwgcgtcgaccacaacatgtgatgaaataatgggggtcgtgtcygtctcatatccgattgaaaaattagttatcaaaattattgaaacaaaagcagggttacaaaactataaaaatagatctataaataatatggcgttgttgaaaaaggtactaaatcattatacagaaaaagagcagaagcaagttgtaaaatatatgcgttcaaatggacgatataagccctacaacgtcattgaacgcttacaagttgatttgtatcaagcaagtattaaacaacgttcagaacgtcaaaaacaaagaaatacagcraktgaaaacagtaagattgcacgagkaaatgcakatcacsratcttcatatgtaaaagtggtgtaa

SEQ ID NO: 3278 - DNA, 783 bp, Staphylococcus aureus
atgagcaatttgattaacggaaaaataccaaatcaagcgattcaaacattaaaaatcgtaaaagatttatttggaagttcaatagttggagtatatctatttggttcagcagtaaatggtggtttacgcattaacagcgatgtagatgttctagtcgtcgtgaatcatagtttacctcaattaactcgaaaaaaactaacagaaagactaatgactatatcaggaaagattggaaatacggattctgttagaccacttgaagttacrgttataaataggagtgaagttgtcccttggcaatatcctccaaaaagagaatttatatacggtgagtggctcaggggtgaatttgagaatggacaaattcaggaaccaagctatgatcctgatttggctattgttttagcacaagcaagaaagaatagtatttctctatttggtcctgattcttcaagtatacttgtctccgtacctttgacagatattcgaagagcaattaaggattctttgccagaactaattgaggggataaaaggtgatgagcgtaatgtaattttaaccctagctcgaatgtggcaaacagtgactactggtgaaattacctcgaaagatgtcgctgcagaatgggctatacctcttttacctaaagagcatgtaactttactggatatagctagaaaaggctatcggggagagtgtgatgataagtgggaaggactatattcaaaggtgaaagcactcgttaagtatatgaaaaattctatagaaacttctctcaattag

SEQ ID NO: 3279 - DNA, 1893 bp, Staphylococcus aureus
atgaatgcttctagtaaaaggaaaattattagtcagagtgagattagcaaaaaaatagctgtaatgaatgaagaaatgcaggggttttgggctaataatagttgggatataagaaaatgtccacatccttctgccatagaattaagtaagaatcctgctttaaggaatcgttgggttcgttttgaacgtgttaaaaatctgtggttaagaacagaattgaaatatttttatttttaccatttaaacaatggaatatggaatgcaaaaactgtctggattagaaaaggaacagtaattaataaaatgttagatttcttagatttaaagtatcctagcattacttcaattactgaagttcctattgaaaaagcaatgacggagtatagaacttatttgacaaaacggggtgttagaattaccactactaattataagattactgctaatcaagaaaaaacacctgtaaaagctaattcctactatgttactaatctaaaacaatttatggagttttatgagaacttttattttgatggagaggagtgggataaagacgtttgggatagacgtaacttacctttgccagatgataaggttaacccaacacaatatgaatatacaattaactttaaagggtttcggaatacatattttaaacaacttgtaaaaagatattgtaagttgagattgaacgtggatagcttttcctatgtaagtgatattgcccaaagacttaaagagttctttaattttctggacatgaaatttaaacaagttcagagagtacaccaattaacgagagtggaaattgaagcatatttaagtgaactaaacatgatgggaataaaacctagtacaataactgggaggatctctatattggaaggactatttagtacccttcttaggctagaatgggatgatgttccttccaaaatattaatttattctgaggactatccgaaaataccaagagcaaaaccacgctttatagatgaattcgtcctagagcaattgaacagtcatcttgataaattacccgaatatatagctacgatgactatgattgttcaagaatgtggaatgaggataagtgaattgtgcaccttgaaaaaaggctgtctattagaggacaaagatggagatttctttttaaagtattatcaatggaaaatgaaaaaggagcatatagttccaatatctaaagaggtagctttacttattaaagttcgggaagataaagtttcagaggaatttccagatagtgaatacctctttccaagaaaagatggatcgccattaaaacaagaaacatttagaggtgagttaaataaattagcttatgagcaaaatatagtggataaatcaggtgagatttatagattccatgcccatgcctttcgccatacagtaggaacaagaatgattaacaacgggatgccccagcatattgtgcagaaatttttggggcatgaaagcccagaaatgacaagcagatacgctcatatctttgatgaaactctaaaaaatgaatttactaaatttcaggaaaaactggttaccaataatggagatgtgcttgatctagatgaagataatgaagtcgatgatgtagagcttcaatggttcaagaaaaatataaatgcacaagtgcttccaaatggttattgtagattgccagtagtagcaggtggttgtccacatgcgaatgcatgcttagattgcactcacttctgtaccagtaagcaattcttaccacagcacgaagaacagttagagcgtacagaagagttattagccatagctaaggataaacaatggcaaagacaagtagagactaatagccgtgttaaagagcgtttagaacaaatcattggaagtttgacggggtaa

SEQ ID NO: 3280 - DNA, 1086 bp, Staphylococcus aureus
gtgaaggttcaaaggatagaagtggagaataagccgtatccattgtatttattactagataaagaataccagctaatagaaccagtaatgaaatttattaaatacttagataatactggtaagtctcctaataccattaaggcatactgctatcatttaaagttgctgtacgagttcatggaacagagaggtgttattcttaatgatattaactttgagttgttagcagacttcgtaggttggttgagatatccttcagcatcaaatgtaattgatcttcagtcaaaaaaagccataagagaagaaacgacagtgaatacaattttaaatgtagttatgagttttcttgattatttaagtagattaggagaatttaaatcaattgatgtatttaaacaagcaaagggaagaaatttcaaaggatttttacatcatgttaataagggtagataccaaaagaatgtcttaaagttaagggttaaaaagaaacagataagaacattgagatcaaaggaagttaagcaaattattgatgcttgtcatacgaaaagagataaattaattttaatgcttatgtatgagggtggtttaagaatcggtgaagtgttatcgcttaggcttgaagatattgtcacttgggacaatcaaatccatttaacacctagagatgttaatgttaatgaagcttatattaaattaaggaaggaaagaacaatacatgtgagtaaagaacttatgtcactttatacagattacttgatatatgagtatagtgaggaattggagcatgattatgtttttatttccttaaaagaaggctattttgggaaaccactaaagtaccaaagtgttcttgatctagttagaagaatagttaaaaggactggaatagaatttacatcacatatgcttcgccacactcacgcaacgcagctaattagggaaggatgggatgttgcgttcgttcaaaagagattaggtcacgcacatgttcagacaacgttaaatacctatgttcatctttcagatcaggatatgaaaaatgagtttaataaatacctcgagagaaaggagcataagaaatga

SEQ ID NO: 3281 - DNA, 346 bp, Staphylococcus aureus
atggataaamagcrrakaaaagrcttcgtttgtgattatcatragcgaackakaagtgatgtrttratagatgatgawataaatacygatgaattcttttcaatargtgatgaaaattcyaatgaatggatggcagacgataacattgatgatcatattgtaaagaatcacttagaaatsattgttgaccragtagctaatgataaagagttttatattttcgattctttaatacaaggacgtagttwtaaagatattagyartgtcttagagtgttcagaacaatctgtaagattatggtatgaaaccttattagataaaattgtggaggtgatagaatgagtga

SEQ ID NO: 3282 - DNA, 570 bp, Staphylococcus aureus
atgagtgagttaacggcaaaacaagcgcgttttgtgaatgagtatataagaacacttaatgtaacacaaagtgccataaaagcaggctatagcgcaaatagcgcacatgtgacagggtgtaggttattgaagaagccacacatcaagcaatatatacaagaacaaaaagataagattatagatgagaatgtattaaccgcaaaagagttactacatgtgcttacgaatgcggcagtcggtgatgaaacagaaacgaaagaagttgtagtmaagcgtggagaatataaagagaatccamaaagtggcaaagtacaattagtctataatgaacatgttgaactgatagaggtaccaataaaacctagtgatcgtttaaaagctcgtgatatgttgggkaaataccataagttatttacagataagcatgatattaacgggaatgtscctatattcattaayattggtgaatgggayggmgaygatgaggaattagataarrcwgtraaagatgtatctaacgctaatcctaaycatactgtgattgtggatgatatwccgttagaggattga

SEQ ID NO: 3283 - DNA, 111 bp, Staphylococcus aureus
atgacagaacaaatrtatttawtattgtttttattaagcctaccattgttattatttatcgggagaaaaacacatttttattgtttagataaaaagaatggaygtagataa

SEQ ID NO: 3284 - DNA, 807 bp, Staphylococcus aureus
atgggtaacgtcttaaaaatactaagaagtacctattatgattctataaaaagaaaagataataaaatcactaaagatgattcaaacgtagaacgtgccgtcataaatatttttaatgctaatagaaaagtctttgctacaagacgaattaaaaatcatttaaatgacaagggtcatactgtatcaagacgaaagataggtcgtatcatgaaaaaatataatctagtttctgtttatacgaaagctaaatacaaaaatcatccaaaagaaactaatgaaaaactaattaaaaatcatttgaatcgcgcttttaatagagaacaaccaatggagacattagtaagtgatttgacatatgtaaaagtcgcaggaacatggcattacatatgtttatttatagatttatttaatagagaaattgttggttacagtgcaggtaaaaataaggacgcaaatttagtatcaaaagcaatcagcagaataaatcataatcttgaacaaatcaaactattccacactgatagaggcaaagaatttgataatcatttgatagatgaagtcctagaaacatttaaaatcaaacgttcattaagtaccaaaggttgtccttatgataacgcagttgcggaagcaacgatgaaagcaatgaaaaccgaatttgtaaaacaaatgcaatttgaaaacttagaacagttaaaaacagaattatttgattatgtaaattggtacaacaattttagaccacattcttcattacagtatttgacgccagtggcatttaaaaatctacacatgaaaactgtctaa

SEQ ID NO: 3285 - DNA, 675 bp, Staphylococcus aureus
atgaactatttcagatataaacaatttaacaargaygtyatcactgtagcsgttggctactatctaagatatrcrytkagttatcgtgatatatctgaaataytaagrgracgtggtgtmaacgttcatcattcaacrgtctaccgttgggttcaagaatatgcyccmrttttrtatcaaatttggaagaaaaarcataaaaaagcktattayaartggcrtrttgatgagacrtayatcaaaatwaaaggamartggwgytatytrtatcgygcsattgatgcagakggacatacattagatatttggttrcgyaarmaacgagatmatcawtcrgcatatgcgtttatyaarcgyctyattaaacaattyggtaaacctcaaawgrtaattacagatcargcaccttcaacgaargtagcmatrgytaaartaattaaagyktttaarytkaaacckractgycattgyacatckaaatatctsaataacytcattgarcaagatcaycgtcayattaargtragaaagacaarrtatcaaagtrtcaatacrgcaaaraatacwytmaaaggyattgartgtatttacrswytatataaaaagaaccgyagrtckcttcagatctacggattttcrccatgccacgaaattagbatcatgytagcmagttaa

SEQ ID NO: 3286 - DNA, 206 bp, Staphylococcus aureus
gaattcaagttgcgaaggaaaaaggcgtatataaagggcgccccttactttattcaccaaatgcgaaagatcctcaaaaacgtgttatttatcatcgcgtggtggaaatgttagaagaagggcaagcaattagtaaaattgccaaagaagttaatattacaagacaaacagtttatagaattaaacatgataagggattatcttga

SEQ ID NO: 3287 - DNA, 699 bp, Staphylococcus aureus
atgaaattaacagcaatagctaaagcaacattagcattaggaatattaacaacaggtgtgatgacagcagaaagtcaaactgtaaacgcgaaagtaaagttggatgaaacacaacgcaaatattatataaatatgctaaaagattactattctcaagaaagctatgaatcaacaaacattagtgttaaaagtgaagattattatgggtctaacgttttaaactttaaccaacgaaataaaaatttcaaagtatttctaattggcgacgatagaaataaatataaagaactgacgcatggccgtgatgtctttgcagtacctgaattaatagatactaaaggcggcatatatagcgttggcggtataacaaagaaaaatgtgagatccgtgtttggctatgtaagtcatccgggactgcaagttaaaaaagttgatcctaaagatggcttttcgataaaagagttgttctttattcaaaaagaagaagtatcattgaaagaacttgattttaaaatcagaaaaatgttagtcgaaaaatatagattgtataaaggcgcgtcagataaaggtagaattgttatcaatatgaaagacgaaaagaaacatgaaattgatttaagtgaaaaattaagttttgatcgtatgtttgatgtgctggatagtaagcagattaaaaatattgaagtgaatttgaattaa

SEQ ID NO: 3288 - DNA, 684 bp, Staphylococcus aureus
atgaaattgacagcattagcaaaagtaacattagcattagggattttaacaacaggaactttaacaacagaggcccattcaggtcatgctaaacaaaatcaaaagtcagtaaacaaacatgacaaagaagcattacaccgatactacactggaaactttaaggaaatgaaaaacattaatgctttgagacatggtaaaaataacttacgttttaaatatagagggatgaagactcaagtattattgcctggagatgagtaccgtaaatatcaacagcgaagacatacgggcttagatgtgttttttgttcaagaaagaagagacaagcacgacatatcatatactgttggtggtgtaacaaagaccaataaaacatccggctttgtcagcacaccaagattaaatgttacaaaagaaaagggtgaagatgcttttgtgaaaggttacccttatgatattaaaaaagaagaaatatcattgaaagagttagattttaagttgagaaagcatctaattgaaaaatacggtctttataaaacactctcaaaagatggtaggattaaaattagtctgaaagatggtagcttttataaccttgatttaagaactaaattaaaattcaaacatatgggggaagtcatagatagtaaacaaattaaggatattgaagtgaatttaaagtaa

SEQ ID NO: 3289 - DNA, 609 bp, Staphylococcus aureus
atgattataggttatgcgagagtatcatcgatagatcaaaatttagaaagacaattggataatttaaagacgtttggtgtggagaaaatctttacagagaaacagtcgggaaagtcagtggaaaatagacctgtatttcaagaagcactcaattttgtcagaatgggagatcgattcgttgtggaatctattgatcgtttaggacgtaactatgatgaaattattgaaactgtgaattatttaaaagaaaaagacgttcagttaatgattaccagcttacctatgatgaatgaagtaattggcaatccattactggataagtttatgaaagatttaatcattcaaatattagcaatggtttcagaacaagagagaaatgaaagtaaacgtcgacaagcgcaagggattcaagttgcgaaggaaaaaggcgtatataaagggcgccctttactttattcaccaaatgctaaagacccacagaaacgtgttatttatcatcgcgtggtggaaatgttagaagaaggcaaagcgattagtaagattgcgaaagaagttaatatcacaagacaaacagtttatagaattaaacatgataagggattatcttga

SEQ ID NO: 3290 - DNA, 528 bp, Staphylococcus aureus
atgaaactgcttaaaacgaagaattgtttatattatcgtaatggcgacaataaaytatctgagtatcaactattaacgcaatttaacccarcwtttattaataaaaaaattargatgtgtgaattccaaattgaaagtatgtaccatmtgagtgcgtcgaccacaacatgtgatgaaatratggggrtcgtgtctgtctcatatccaattgaaaaactagttatcaaaattattgaaacaaaggcaagattacaaaactataaaaatcgatctataagtaatatggtgttgttgaaaacrgtactaaatcattatacagaaaaagagcagaagmaagttgtaaaatatatgcgttcaaatggacgatataagccctacaaygtcattgaacgcttacaggttgatttgtatcaagcaagtattaaacaacgttcagaacgtcaaaaacaaagaaatatagcaattgaaaatagcaagattgcacgagtaaatgcttatcaycaatcttcayatgtaaaagtggtgtaa

SEQ ID NO: 3291 - DNA, 732 bp, Staphylococcus aureus
atgaaccagaaaaaccctaaagacacgcaaaattttattacttctaaaaagcatgtaaaagaaatattgaatcacacgaatatcagtaaacaagacaacgtaatagaaatcggatcaggaaaaggacattttaccaaagagctagtcaaaatgagtcgatcagttactgctatagaaattgatggaggcttatgtcaagtgactaaagaagcggtaaacccctctgagaatataaaagtgattcaaacggatattctaaaattttccttcccaaaacatataaactataagatatatggtaatattccttataacatcagtacggatattgtcaaaagaattacctttgaaagtcaggctaaatatagctatcttatcgttgagaagggatttgcgaaaagattgcaaaatctgcaacgagctttgggtttactattaatggtggagatggatataaaaatgctcaaaaaagtaccaccactatattttcatcctaagccaagtgtagactctgtattgattgttcttgaacgacatcaaccattgatttcaaagaaggactacaaaaagtatcgatcttttgtttataagtgggtaaaccgtgaatatcgtgttcttttcactaaaaaccaattccgacaggctttgaagcatgcaaatgtcactaatattaataaactatcgaaggaacaatttctttctattttcaatagttacaaattgtttcactaa

SEQ ID NO: 3292 - DNA, 705 bp, Staphylococcus aureus
atgaataaaaaattactaatgaatttttttatcgtaagccctttgttgcttgcgacaayygctacagattttacccctgttcccttatcatctaatcaaataatcaaaactgcaaaagcatctacaaacgataatataaaggatttgctagactggtatagtagtgggtctgacacttttacaaatagtgaagttttagataattccttaggatctatgcgtataaaaaacacagatggcagcatcagcytkataatttttccgagtccttattatagccctgcttttacaaaaggggaaaaagttgacttaaacacaaaaagaactaaaaaaagccaacatactagcgaaggaacttatatccatttccaaataagtggcgttacaaatactgaaaaattacctactccaatagaactacctttaaaagttaaggttcatggtaaagatagccccttaaagtatkggccaaagttcgataaaaaacaattagctatatcaactttagactttgaaattcgtcatcagctaactcaaatacatggattatatcgttcaagcgataaaacgggtggttattggaaaataacaatgaatgacggatccacatatcaaagtgatttatctaaaaagtttgaatacaatactgaaaaaccacctataaatattgatgaaataaaaactatagaagcagaaattaattaa

SEQ ID NO: 3293 - DNA, 438 bp, Staphylococcus aureus
atggatattaactggaaattgagattcaaaaayaaagcagtactaactggtttagttggagcrttgttsstatttatcaagcaartcacggatttrttcggattagatttatcyactcaattaaatcaagctagcgcwattataggcgctatcctcacgttacttacaggtattggygttattactgacccaacgtcaaaaggcgtctcagattcatctatagcacagacatatcaagcgcctagagatagcaaaaaagaagaacaacaagttacgtggaaatcatcacaagacagtagtttaacgccggaattaagcgcgaaagcaccaaaagaatatgatacatcacaacctttcacagacgcctctaacgatgttggctttgatgtgaatgagtatcatcatggaggtggcgacaatgcaagcaaaattaactaa

SEQ ID NO: 3294 - DNA, 300 bp, Staphylococcus aureus
gtggaatttcatttgattatgacaagagaaagaagattatttagttcagagtttaagttacaaatggttagattatatgaaaatggtaagcctaggaatgaaattatacgcgagtatgatttaacaccttcgccgttaggaaaatggataaagcaatatcaaaacacgggtacattcaatcaccaagataacttatcagatgaagaaaaagagctgattaaattacgtaaagaagttcaacatttaaaaatggagaacgatattttaaagcaagcagcgttgatcatgggacgaaaatag

SEQ ID NO: 3295 - DNA, 330 bp, Staphylococcus aureus
gtgattaaacataaaactgaaggagcgattacaatggcgactgagaaagatgtaaatgatttatttttaaatcatgtgaattcaaatgctgttaaaactagaaagatgatgggagaatatattgtttattatgatggtgtggttataggtggtttgtatgataatagattattggtcaaggcgactaaaagtgcacgtcatcaatttcaagataatgcattagtatcgccgtatcctggtgctaaagaaatgatattaattccagactttgccgaagcaacaaatattactaatttatttgagtgcataaaaaatgatttgaaaaactaa

SEQ ID NO: 3296 - DNA, 771 bp, Staphylococcus aureus
atgatgaaacgattaaacaaattagtgctaggtattaatcttctgtttttagtcattagtattactgctggttgcggcatgggtaaagaagcggaaattaagaaaagttttgagaagacattgagtatgtatccgattaaaaatctagaggatttatacgataaagaaggttatcgtgatgatcaatttgataaaaatgataaaggtacatggattgttcgttcgtcaatgtcgattcaacctaatggaaaagatatgaacgtaaaaggtatggttttatatatgaatagaaattcaagaacaacaaatggctattactatgttgatgttatagaaagacaagataaaggtatacatcgtgataacgaaaaaaagtatcctgttaaaatggtcgataataaaatcattccaacaaaagatatcaaagatgagaacataaaaaaagaaatcgagaactttaagttcttcgcgcaatatggcagctttaaagatttgtcgaagtacaaagagggagatatttcatataatccagaggtgccgagttattcagccaaatatcaattaacgaatgatgattataatgtaaagcaattacgtaaaagatatgatataccaacaaataaagcaccaaagttattgttgaaaggtacaggtaatttaaaaggctcatcagttggatataaagatattgaatttacgtttgtagagaaaaaaggagaaaatatttactttagtgatagcctacatcttgaaccaagtgaggataaataa

SEQ ID NO: 3297 - DNA, 501 bp, Staphylococcus aureus
atgactttcgaagaraarttaagtcaaatgtacaacgagattgcgaatragatyagtrgsatgataccrrtagagtgggaaaaagtatatacaatggcttatatagatgatgaaggtggagaagtgttctactattacacagaacctggaagcaatgaattatactactatactagtgtattaaataaatatgatatatcggaatcagaatttatggactcagcgtatgagttgtataaacaatttcaaaatttaagaaatatatttaaagaagaaggatatgaaccatggacatcatgcgaatttgattttacaaaagaaggtgaattaaaagtttcatttgattatatagattggatcaatacagagtttgatcaattgggccgtcaaaattattatatgtacaaaaaatttggggttataccagaaatggaatatgaaatggaagaagttaaagaaatcgarcaatatattaaagagcaagawgaagctgaacaatag

SEQ ID NO: 3298 - DNA, 399 bp, Staphylococcus aureus
atgttaaagagcaagaagaagctgaactataggggagataacatgactttcgaagaaaaactaagtgaaatgtacaacaagattgcaaatgagattgttggcatgatacctgtagaatgggaaaaggtatatacaatagcctatgtaaatgatagaggtggagaggtcgtttttaattatactaaaccaggtagcgatgaattgaattattacatgaatatatctagagattataatgtttcggaagaaatatttgatgatttatggatggaactttatagatcatttaaaaaattaagaaatatatttaaagaagaaggacatgaaccatggacatcatgcgaatttgattttacaaacgaaggtaaattaaaagtttcatttgattatattgattga

SEQ ID NO: 3299 - DNA, 294 bp, Staphylococcus aureus
ctgaactataggggagataacatgactttcgaagaaaaacaaagtgaaatgtacaataaaattgcaaatgagattagtgggatgataccagtagagtgggaaaaggtatatacaattgcctacctagatgatgaaggtggagaagtcgtttttaattatactaaaccaggtagcgatgaattgaattattacacggatatatctagagattataatatttcagaaaaaatatttgatgatttatggatgaatctttattacttgtttatgaatttaagggatttatttaaataa

SEQ ID NO: 3300 - DNA, 486 bp, Staphylococcus aureus
atgaytttcgaagaaaaaytaagtcaaatgtacaaygarattgcraatgaratyagtgggatgataccagtagagtgggaaaaagtatatacaattgcttatgtagatgatgaaggtggagaagtcgtttttaattatactaaaccaggtagtgatgaattgaattattacacatatatccctagagagtataatgtctctgaaaaagtattttatgatttgtggacggatttatatagattgtttaagaagttaagaaacgcatttaaagaagatttagaaccatggacatcatgtgaatttgattttacaagagagggtaatttgaaagtatcgtttgattatatagattggattaaattaggttttggtccatcaggaaaggaaaactactatatgtataaaaagtttggtgttttaccagaaayggaatatgaaatggaagaaattcgagmagtagagaagtatgttaaagascaagagtag

SEQ ID NO: 3301 - DNA, 570 bp, Staphylococcus aureus
atgagtgagttaacggcaaagcaagcgcgttttgtgaatgagtatataagaacacttaatgtgacacaaagtgccataaaagcaggttatagcgcaaatagtgcacatgtgacagggtgtaggttattaaagaagccacacatcaagcaatatatacaagaacaaaaagataagattatagatgagaatgtattaactgcaaaagagttactacatgtgcttacgaatgcggcagtcggtgacgaaacagaaacgaaagaagttgtggtcaagcgtggggaatataaagagaatccacaaagtggcaaagtacagttagtctataatgaacatgttgaactgatagaggtgccaattaagccaagtgatcgtttaaaagctcgtgatatgttgggtaaataccataagttatttacagataagcatgatatcaacggggatgttcctatattcattaacattggtgaatgggacggagacgatgaggaattagataaaactgtaaaagatgtatctaacgctaatcctaaccatactgtgattgtggatgatataccgttagaggattga

SEQ ID NO: 3302 - DNA, 795 bp, Staphylococcus aureus
atgggatatctaaaaaagcttgcactgttcataagtgttattattttgggcatttttataataggttgtgatagttcaagcgatactgcggaaaaagcaaaagaagattcaaaagaagaacaaatcaaaaagagctttgcgaaaacgttagatatgtatccaattaagaatctcgaggatttatacgacaaagaaggatatagagatggtgaatttaaaaagggcgataaggggacttggactttactcacaagtttttcaaaaagtaacaaaccgggtgaaatagatgacgaaggcatggttttatatctaaatagaaataccaaaaaggcaacaggttattattttgtaaataaaatttatgatgatattagcaaaaatcagaatgagaaaaaataccgtgttgaacttaaaaataataagattattcttttggataatgtagaagacgaaaaacttaaacaaaaaattgaaaattttaaattttttagtcagtatgccgattttaaagatttaaaaaattatcaagatggaagtataacaactaatgaaaatgtaccgagatatgaagcagaatacaaattgaataatagtgatacaaatgtaaaaaaacttagagatatttatccaattacaacgaaaaaggctccaatattaaagttacatatagatggtgatataaaaggaagttcagttggatacaaaaaaatagaatataaattttcaaaagttaaagatcaagagacaacattaagagattatttaaattttgggccgtctgatgaagatagctaa

SEQ ID NO: 3303 - DNA, 813 bp, Staphylococcus aureus
atgaagtataaaacagagagacgtgaaatgatgggaaatataaaaagttttgcattgtacataagtatcttgcttttaatagttgttgtagcaggttgtggcaaaagtgataaaacaaaagaagattccaaagaagaacaaattaaaaagagctttgcgaaaacattagatatgtatccaattaagaatctcgaggacctatatgataaagaaggatatcgagatggcgaatttaaaaagggagataaggggacgtggactttactcacaagtttttcaaaaagtaacaaaccggatgaaatagatgacgaaggcatggttttatatctaaatagaaataccaaaaaggcaacaggttattattttgtaaataaaatttatgatgatattagcaaaaatcagaatgagaaaaaataccgtgttgaacttaaaaataataagattgttcttttggataatgtagaagacgaaaaacttaaacaaaaaattgaaaattttaaattttttagtcagtatgcggattttaaagatttaaaaaattatcaagatggaagtataacaactaatgaaaatattcctagttatgaagcagaatacaaattgaataatagtgatgaaaatgtaaaaaaacttagagatatttatccaattacaacgaaaaaggctccaatattaaagttacatatagatggtgatataaaaggaagttcagttggatacaaaaaaatagaatataaattttcaaaagttaaagatcaagagacaacattaagagattatttaaattttgggccgtctgatgaagatagctaa

SEQ ID NO: 3304 - DNA, 804 bp, Staphylococcus aureus
atgaagtataaaacaaagagacgtgaaacgatgsgrtatttaaaaagryttkcatkgtacataagcrtywtrattttaatrkttgykatagcwggttgtggcaaaggtaatgaaacaaaagaaggttcaaaagaarmacaaatcaaaaagagctttgcgaaaacgttagatatgtatccaatcaaaaatctcgaggatttatacgacaaagaaggmtatmgagatrgygaatttraaaaargtgayaaagggayrtggacgatatacacagatttcgctaaaagtaataaaccgggtgaattggatgatgaaggtatggttttaaatctggataggaatactagaaccgctaaaggccattattttgttactacattttaccggaatggtaaactrccagatgaaaagaattataaaattgaaatgaaaaataataagattattttattagatgaagtaaaagatgataagctcaagcagaaaatagaaaaytttaaatttttcggtcaatatgcaaatcttaaagaattgaraaaatataataatggtgatgtttcaattaatgaaaatgttcctagttatgatgttgaatwcaaaatgagcaataaagatgaaawwgttaagsaattaagaagtcgttataatatttcgactgaaaaatcacctatattaaaaatgcatattgatggkgacctgaaaggcagttcygtaggttatagaaagttagaaattgacttttcaaaacgtgaaaacagcaaattatcagtcattgaatttttaagttataaaccagcgaaaaaatag

SEQ ID NO: 3305 - DNA, 411 bp, Staphylococcus aureus
atgggacatctaaaaaagcttgcactgttcataagtgctattattttgagcatttttataataagttgtaatagttcaagcgatactgcggaaaaagcaaaagaagattcaaaagaagaacaaattaaaaagagctttgcgaaaacgttagatatgtatccaatcaaaaatctcgaggatttatacgacaaagaaggttatcgagatgacgaatttaaaaaaggcgataagggtacatggactttactcacaagttttgctaaaagtaacaaaccaggcgagatagatgacgaaggtatggttttattccttaatagaaatacaaagaaggcaacaggatattattatacgagcaaagttcatgatgaatttaatgaaaaagatcaacaaaaaaatatcatgttgaattaa

SEQ ID NO: 3306 - DNA, 372 bp, Staphylococcus aureus
ttggataaagtagaagatccaaatctcaaaaataaaatagaaaattttaaattctttagtcagtatgctgattttagagatcttaaatattataaaaatggaaatatatcaagtacagataatgtgccaagctacgatgcagaatataaaatgagtaatacggataaaaatgtaaaaaaacttagagaagtttatcctattacaaccaaaaagtcgccagtattaaaattacatatagatggcgacataaaaggaagttcagttggttataaaaatatagaatataatttttcaaaagtaaaagaccaagaaacagctgtaagagattttgtgaattttggaccatctgatggaggagctaaagtttattag

SEQ ID NO: 3307 - DNA, 816 bp, Staphylococcus aureus
atgatggagtatataaaaaaaattgctttgtacatgagtgtattacttttaatcatttttattgggggatgtggaaatatgaaagaagaacagaaaaaagaagcaaatacaaataaaacagattcaaaagaagaaaaaatcaaaaagagttttgcgaaaacgttagatatgtatccaattaagaatctcgaggaactatatgacaaagaaggctatcgagatggcgaatttgaaaaaggtgacaaagggatgtggacgatatatacagatttcgccaaaagtaataaaccgggtgaactaagtaatgaaggcatggtcttgtacttagatagaaacacacgcacagctaaggggtactactttgtcaggacgttttatcgcaaggataaattacctgatagaaaaaattataaagttgaaatgaaaaataataaaattatcttattagacaaggtagaagatccaaatctaaaaaagagaatagaaaactttaaatttttcggacaatatgcaaatcttaaagaattgaaaaactacagcaatggtgatgtctcaattaatgagaatgttccaagttatgacgtgaaatataaaatgagtaataaagatgaaaatgttaagcaattaagaagtcgttataatattcctactgataaatcaccggtattaaaaatgcatattgatggtaatttgaaaggaagttccgttggagataggaagttagaaattgatttttcgaaacgtgaaaatagccatttatcagtaatagattctttggattaccagccagcgaaggtggatgaagatgaaagataa

SEQ ID NO: 3308 - DNA, 867 bp, Staphylococcus aureus
atgaaatattcaaatgtgtataaaaataaagcagagagatgtgaaatgatggagtatataaaaaaaattgctttgtacatgagtgtattacttttaatcatttttattgggggatgtggaaatatgaaagatgaacagaaaaaagaggaacaaacaaataaaacagattcaaaagaagaacaaatcaaaaagagttttgcgaaaacgttagatatgtatccaattaagaatctcgaggatttatacgacaaagaaggctatcgagatggcgaatttgaaaaaggtgacaaagggatgtgggttctgtattcatctattgtatcagaattcaaaggcgagagtttaaaatcacgaggaatgatattaaagttagatagaaataagagaactgctaaaggaagttatattataagagaattgaaagaagataaaaatcatgatgttcaaaaaaacgaaaaaaagtatccagttaaattggtgaataataaaataattccaactgaagatgtaaaaaacgaagatttaaaaagagaaattgaaaacttcaaattattttctcaatatggtgaatttaagagtttaaatacggataggataacaaatatttcttataatcctaatgcgcctaactattcagctgaatataaaattaatgatgatgataataacatcaaacaattaaaaaatcgattcaatattaagtctaataaaaatcctaagttattgttcaaaggagcaggtaatataaaagggtcttctgttggatataaggagatacagataattttcaataggaacaaagaagaaagtgtttcttgtattgatagtatagagtttaaaccgagtgaaggagactataatgagtaa

SEQ ID NO: 3309 - DNA, 345 bp, Staphylococcus aureus
atgaatttaattttattactagttataggatttttagtatttatagggacatatatgatattatctataaatttaattcgtattgtcataggtatttcaatttatacacatgctggtaaccttattatcatgagtatgggcacttacggctctaataaatcagaaccgctgattacaggtggaaatcaattgtttgtcgacccactgttgcaagctattgtattaactgcaatagttataggttttgggatgactgcgtttttacttgtcctcgtttatagaacttataaagtaactaaagaagacgaaattgaaggcttaaggggggaagatgatgctaagtaa

SEQ ID NO: 3310 - DNA, 1041 bp, Staphylococcus aureus
atgaataatttgaaatgggtagtttattttctgaaatcaagaaagaattggatattttggatactgtttttaaatattcttatgttaggcattagtcttattgactatgactttccaatcgatagtttgttttatattgtttctttaaatttaagcttaacactgatttttcttatattgactttttttaaagaagtaaaattatatagacattttgaaaaagataaagaaatcgaagaaataaaacataaagatttagcggaaaccccattccaacgtcatacagttgattatttatatcgtcaaattttagcgcataaagataaagtggtcgaccaacagttgcaattaaacatgcatgaacaaaccatcacagaatttgtgcacgacatcaaaacaccagtgactgctatgaaattgttaattgaccaagaagagaatcaagaaagaaaacaagcgctattatttgaatggtcacgtattaactcgatgttagatacgcaattgtatattacgagattagagtcgcaacgtaaagatatgttttttgattatgtctcattgaagcgcatggttattgatgaaattcaattaacaaggcatataagtcaagttaaaggtatcggatttgatattgattttaaagtggataatcatgtgtacacggatataaaatggtgtcgtatgattattagacagattttatcaaatgctttgaaatatagtgagaattataatgttgatatttcaacggaattaattgatcaacatgttgcgttaatcatcaaggatcatggaagaggtattagtaaaaaagatatgcctcgaatatttgaacgtgggtttacgtcaacggctaacagaaatgaaacgacatcatccggcatgggtctatacttagtggatagtgtgaaagatcaattaggaatacaattacaagttacttcgactattggaaaaggaacaacggttaaattgatcttcccattacaaaatgaaattgttgagcgcatgtcagaagtgacaaatctgtcattttaa

SEQ ID NO: 3311 - DNA, 762 bp, Staphylococcus aureus
gtgacaatattagaagtaaaacaattaacaaaaatatatggcaacaagaaaatggcacaagaagttctgcgagatatcaatatgtctgttgaagaaggtgaatttattgccattatgggaccttcaggatctggtaaaacgaccttattaaatgttttgagttcaattgattatatttcgcaaggttctatcacactaaaaggacacaaacttgaaaagctttcaaacaaagcattatctgatattcgaaagcatgatattggttttatttttcaagaatataatttacttcatacattaactgttaaagaaaatatcatgttaccattaacggttcagaaattagataaggacacaatgttagatcgttatgaaaaagtggcagaagcattaaatatattagacatcagtgataaatatccatccgaattgtctggtggtcaaagacaacgaacatcagctgccagagcatttataacattgccttctattatatttgccgatgaacctacaggtgcactcgattcgaaaagtacacaagatttattaaagcgattaatgaaaatgaatgaagagattaagacgacaattattatggtgacacatgatccggttgcagctagctatgcaaatcgagtagtgatgcttaaagatgggcaaatattcacggagttatatcaaggtgatgatgacaaacatactttctttaaagaaatcatacgtgtacaaagtgttttaggtggcattaattatgagttttaa

SEQ ID NO: 3312 - DNA, 336 bp, Staphylococcus aureus
atgataacgagtttacctatgatgaatgaagtcattggaaatccactactagataaatttatgaaagatttaattattcaaattttagcaatgatttcagaacaagaaagaaatgaaagtaaacgtcgacaagctcaagggattcaagtcgccaaagaaaaaggtatatataaagggagacctattctgtattctcccaatgctaaagacccacaaaagcgtttagtttattaccgagttgttgaattacttgaacagggtaaatctataagtactatagctaaagaagttggtattacacgtcaaactatatatagaataaaaaatagtaaataa

SEQ ID NO: 3313 - DNA, 1026 bp, Staphylococcus aureus
atgaaaaagaaattattagttttaactatgagcacgctatttgctacacaatttatgaattcaaatcacgctaatgcatcaacagaaagtgttgataaaaactttgtagttccagaatcgggtattaataaaattattccaacttacgatgaatttaaaaaagcaccaaaagtaaatgttagtaatttagctgacaacaaaaactttgtagcttctgaagataaattgaataagattgcagatccatcggcagctagtaaaattgtagataaaaactttgccgtaccagaatcaaaattaggaatcattgtaccagagtataaagaaatcaataatcgagtgaatgtaacaacaaacaatccagcttcaaaacaagttgacaagcaaattgttgctaaagacccagaggtgaatagatttattacgcaaaataaagtaaaccatcgtttcattactacgcaaacccactataagaaagttattacttcatacaaatcaacacatgtacataaacatgtaaaccatgcaacatcttctatccatcatcactttactattaaaccatcagaagcacctagatatacacacccatctcaatctcaatcgttaattataaatcatcattttgcagttcctggataccatggtcataaagttgtaacaccaggacaagctagtattagaattcatcacttttgtgctgtacctcaaataaatagttttaaggtcattccatcatatggtcacaattcacatcgtatgcatgtaccaagtttccaaaataacacaacagcaacacatcaaaatgcaaaagtaaataaaacttataactataaatatttttatacttataaagtagtcaaaggtgtaaaaaaacatttctcattttcaaaatcacatggttgtaaaattgttaaaccagcattaaacatcaaaaatgtaaattatcaatatgctgttccaagtaatagccctacacacgttgttcctgagtttcagggtatcttaccagcaccacgagtataa

SEQ ID NO: 3314 - DNA, 585 bp, Staphylococcus aureus
atggaaaawaatgaaagtaatattactgatgtaactcagaacgaagagcaactagayaacagtgatgaacaatcacaacagaatgagaaaacattttctcaagargaagtatcacaattgattaaagagcgtatagctagagaacgcaaaaaatcagatgaacgtattaaaratgccaaagaaaacaatgatagcaatgaagtagcttatttattaaaaggtgstaaagttacaaaagtakatggcratcaaaatagtgtatcttttgtgccagggkaaaaagcaaccgaattattatttgacagtaaaccgaattcaattgttatgttacataaccatcctggacagtcaggattttcattgaatgatttagcagtttttactattaataattctattaagactatgacaattgtaactaataaaggacgtattaaatttataagtaagacagaacattttaaagaaaaagtaatgaaaaaaatgatagcaaacttattaatagaaaaatctctagatgtaattagtacaaaagatattgaaaggttattaaaagagttatacaataacgataatataatataa

SEQ ID NO: 3315 - DNA, 300 bp, Staphylococcus aureus
ttgttatttgacagtaaaccgaattcaattgttatgttacataactatcctggccaatcaggattttcagaatatgatttatttacattttttaagcatccatcaataaaatcaatgacaatcgttactaataaggaacaagtaaaatttattaccaagtcagataggtttcaaggtaaaatagtgagtaaattttgtactaaatattttacgcatattaatatcattaatgatagctatattgaaaaattattaaaaaaactttatagtataaatatgattaaatataaagtgagatga

SEQ ID NO: 3316 - DNA, 504 bp, Staphylococcus aureus
atgaagaaattatatacatcttatggcacatatggatttttaaatcagataaaaatcaataatccatctcatcatttattccaattttcaactgctgattcatcggtgatttttgaagagactgaagaaaatactgtactgaaatcaccttcaatatatgaagttattaaagaaataggcgcattcaatgaagatcatttttattgcgcaatttttattccgtcaactgaagaccatgtttatcaacttgaaaagaaattaatcagtgttgatgacaatttcaaaaactttggtggctttaaaagttatcgattgctaagacctgttaaaggtacaacatacaaaatttactttggctttgctgatcgacaaacttatgaagactttaaaaattctgatgcttttaaagatcatttttcaaaagaagcattaagtcattactttggttcaagtggacaacattcaagttattttgaaagatatttatacccaataaaagaatag

SEQ ID NO: 3317 - DNA, 144 bp, Staphylococcus aureus
atgaaactattttatatcgtatttcttattattatatggctgaatatatttttaggaaatgaaatyatccatacactgactgttttaataacaacattrtatattgttaattcaagaaaggggattaaaaatgacagagttgaa

SEQ ID NO: 3318 - DNA, 357 bp, Staphylococcus aureus
gtgaaaaagaaaaaaggttttggtcttggtattagtttaattgccatcatgttgattgtatgtattgtactagtaatcatgatgatgactggtggaaagaaagatacatattatggaattatgaaagacaatgctacaattgaaaaaatgattagtgaaaaagatgaaagcattgagaagaacgttaaattaccttcagatgcagacgtttcagttaaaaaaggcgactttgtaattgtttataaattagccgattctgataaaattattaaagtaaaaaaagttgatcatgacgatgtaccacatggtttaatgatgaaaattcatgacatgggcaaaatgcacatgaaacactaa

SEQ ID NO: 3319 - DNA, 282 bp, Staphylococcus aureus
gtgacatatcatgagcgtgtgttagcactgagagcagaaagtaaaagaactgcatttgattttagattcgaggatttatttagcaaagaagaatggctaagtatgtcgcttgcagaaagacaaaaagccgagaaagcatttcgacacgaaatcaaaaaattagatgatgtaagaatgcccttctcaagtgcacatgatgcccaagtgaaactgtataatgttgtgtattcatacaatggcattaaacgtaatttcaaacaagttgaaaatgaaggattctaa

SEQ ID NO: 3320 - DNA, 801 bp, Staphylococcus aureus
atgaatattgcaaagttagaagattatctacaaattgaaccaactcgttataatcaaccgagtattgaagcattaaattattatgcgactcgctttatgttaacggtgcctttcgaaaatattgatgttcaaaatggtaaaccaatatctgtagatatcgatgcacttttcaataaaattgttcatgataaacgcggtggtttttgttatgagttaaacacatttttcaaagcatatttacaacaaaaaggatttaacccagaattaatgtcggctaccattcatacacccggtggcggtcgtagtcaaaacggttcacatgcatcacttgttgtttctattaataatgtcttttatgtaaccgatgtcggctttggagacttacctctaaatgccataccgattactttaccagatgatacacagcagatcactgatatcagtgggacattccgcgctattttcaacagtgaggataaggacattttctatgttcaaaaatatgaaaataatcattggcatacaaaatacgaagctgaattcaaggctagagaaatagaagaattcgatcaaaacattgaatataatcaaacacatcctgattcagtatttgtaaaacatttattaattacaatgccacaatcatttggacgtgctacaatgtttgaaaaccatttaactttaacaaaagatggaacgccagaaaagttagctatcacaaaagataactataaacaatttttaacaaaatattttggattaaatgtaacaattagtcgacttgaaaacagcgacaattaa

SEQ ID NO: 3321 - DNA, 204 bp, Staphylococcus aureus
atggcgtcaaaatatggaataaatgatatagtagaaatgaaaaaacaacatgcgtgtggaaccaatcgttttaaaattattagaatgggtgctgacattagaattaagtgtgaaaattgtcaacgaagcattatgattccacgtcaaacgtttgataaaaaactaaaaaaaatcatcgtatctcaggatgatacacaaagatag

SEQ ID NO: 3322 - DNA, 114 bp, Staphylococcus aureus
ttgaatgaaaataaaaaaagtttgaaattgtctaataaattgaaaatgatggctagttcattgaaaggaagcgcaaacaytttaawraggaatttgccaaaagtaatttatcgt

SEQ ID NO: 3323 - DNA, 207 bp, Staphylococcus aureus
atgaatgagattgaaactattataagtgaaatagaaaagttattaactaacaatacaccatatagtatttcaaaaaaytcaggtgtaccacgtcaaacagttacwgatttaaaggtaggtaaaactaaaataaaagaagctaaatttaaaacgataatcaagttatatgaatatcaaagaacattagaaaataaaacagaatgttaa

SEQ ID NO: 3324 - DNA, 1020 bp, Staphylococcus aureus
atgagtcaaacggaatatcaaataaaatctggcaatataaaaggtaactctgaagaaacaagtacagtatctaatataagttatgaaatagaaaacgcaaataacagtggtttaaaacaaaataaaattgataaacaaattaaaaagttacaagaaaaaaataaattccctaaaaatctttcatatcttaaaagttatacggaccccaaaacaggcacgactacaagcgcctttttaaataaagacactggcaaagttactttaggtatgacaggtactaatgtacacaaagacgcaatattaaaacaaacatttggtgttccttcttatcaaggatatatagaygtgagtgaaacgctaaargatattggggccgatgtcaatattggccttcattccgtcacagataaagatccacattataaaaatacccaagactttatcaaaaatatcaaaaaagactatgatattgatattattaccggacattcgctgggcggtagagatgcgatgattttaggtatgagtaatgatattaaacatatcgttgtgtataatccagctccattagcgatcaaagatgtgagcggcctttatgccgatcaagaagaacttaaaaaattgattgaaaagtacgatggtcacattgtaagatttgtgtctgatgaagacgaattagatgcaggtgtccgcaatcatttatatgaaactgctggagaaaaaatagtacttaaaaatggagaaggccatgcaatgagtggtattttaatgagcagaacacaggctataatcttagctgaattaaacaaagttaaaggctaccaagacgaaaataataaagcattaaaatccgttcgtaaacaaacgaggcatagattacataaagtagagacgttaagagcgaattggattcaaacaacgggtggatcactctcttcctcccaacaacaattattagaagctttaacagcactaaccattgccgaaggcttaaatcaattagtgaatgaagaaagccaa

SEQ ID NO: 3325 - DNA, 1020 bp, Staphylococcus aureus
atgaacaaaactaaatatcaaataaattctgacaatataaagagtaactctgaagaaacaagcgcaatatctagtataagttatgaaatagaaaacgcaaataataacgatttaaataatgcaagtattcaaacgcaaatagaaatattaaaatcacaaaatagtttccctaaaaatctttcatatcttaaaagttatacggaccccaaaacaggtacgactacaagcgcctttttaaataaagacactggcaaagttactttaggtatgacaggtactaatgtacacaaagacgcaatattaaaacaaacatttggtgttccttcttatcaaggatatatagatgcgagtgaaacgctaaaggatattggggccgatgtcaatattggccttcattccgtcacagataaagatccacattataaaaatacccaagactttatcaaaaatatcaaaaaagactatgatattgatattattaccggacattcgctgggcggtagagatgcgatgattttaggtatgagtaatgatattaaacatatcgttgtgtataatccagctccattagcgatcaaagatgtgagcggcctttatgccgatcaagaagaacttaaaaaattgattgaaaagtacgatggtcacattgtaagatttgtgtctgatgaagacgaattagatgcaggtgtccgcaatcatttatatgaaactgctggagaaaaaatagtacttaaaaatggagaaggccatgcaatgagtggtattttaatgagcagaacacaggctataatcttagctgaattaaacaaagttaaaggctaccaagacgaaaataataaagcattaaaatccgttcgtaaacaaacgaggcatagattacataaagtagagacgttaagagcgaattggattcaaacaacgggtggatcactctcttcctcccaacaacaattattagaagctttaacagcactaaccattgccgaaggcttaaatcaattagtgaatgaagaaagccaa

SEQ ID NO: 3326 - DNA, 234 bp, Staphylococcus aureus
aatgaaattggtgaaaaattaacctctgaagaggttatagatgaattaagaaaaggtggcgcgtatgaaagtaaacttgaaacagatcccaaaagaaaaattgatgataagataaagaaattaaatgatgtttataaaaattgtaatggctatatcgcaaaaattaaacagagtatcgaagcaattgtttctaatgaccaaatgttagcgagccagattgatgggatgatgtaa

SEQ ID NO: 3327 - DNA, 513 bp, Staphylococcus aureus
atgcctatgacaaaaatttttaaaatatcatttttgattttgttagtagtaattgtttctagttattatggtgaaagttttgtcttagctgataataatcctatcgtcaattcagaaaatggtagtgataataattttgaatcaggaacaattgaacgtaatcaaaatgagctttatgaagtaggtgattatagtacgcccttaactgagcgagttttcggtaaagatcaaagaacggttgttaataatattttacaaagaccttataagcagactgtattattaaatatgacgttttcaaataaccgtgtatataaaggcaccggtactatgattggtaaggacattgtattgacagcggctcataatgtctattctaaagacgataagggttgggctaaaaagattgatgtctatgctggagtaaatgggcaaacatatacaataggaaaggccttttcgcataagttttttgtatctaaaacttggattaataatttaaccatagtataa

SEQ ID NO: 3328 - DNA, 567 bp, Staphylococcus aureus
atagcaattattaagttaaatagtaatttaggaaataaaacaggttacttaactttgaacacacacattagcaaaggtgaaaatattgaaatttctggatttccaggagacaagtcagacaacagacaatataaaggtaaagggaaattagaaagttttgatgagaatgaaatgtattatacggtagacacattttcaggacaaagtggtagtgcgataagagattcaaaaaacaatatcatcggagtacatgcatacggcagatataatcataattcaggcgtgagaataaatgatttaaaattagattacataaattattggataggtaagtatagaagtcatccatataataagaaagtgaaagtaattaaaagtaagtatatatattggaaaaacattgaaattacaaaaaagggtgataataaattaattaaaaaagataaagcgtacacagctaaactctattacaatattccaaatgggtataaatattactctttatacgacgaaaaaaatagatggatgggttactttaatagcaatgatattaaggtagtaaaatag

SEQ ID NO: 3329 - DNA, 1149 bp, Staphylococcus aureus
atgataaacttaatatatacaacgaggtgtgcaaaaatgcttgatgttcattttatatacccargaaaattacaaaaygcatgcgaatattttaatttaccgacccaaaaagaaggatttgaagtcacgatkcaygctttacgccctgaaaatatacataaaatttatcatgatatggataagacagaacaaaaatttatagaaacacttatatctaatggtaatcctgtcacaattataaataaacgcgatgttaatattttaaagctaacaaatcatctaggttttgtttatcaamttaaygaagatgagttctttgtaaataatttmtttttaagwtatatcaattcagargtactagatartrcmtatggtgaattcgaatcgttagatacaataaaccatatgaatttaaatgaagaagtgttacgtgtaagacaacatacgcgcttaaacgatgtcacattagaacatgctttactgttaaaaactaatgacgagctaaaaacaatatgcaggcagtatggtatcaaaggattctcaaataaaaacaaacaaaatcttgttgaattaattatgacagcatttttcaataataatcacatcattgaacaagtgttttctaatrctactctatttgagtttgayattctttctagcatacttgaaagtgatgmtaactaccgattaaacaatgaactaaytraatttgaaaagctrcaattaataaattttgayaactttttaactaktcatttttattattattacgactttgaatatgattgtcttattttgccaaatgatgtgcgtaaacatattgaaaatttcgtgaatcaagtcggcaatggtgattttgagaaagctgtaaatcaatttgttratgagcaaacaattgagaatagtttagcagagtttraaaacgcgttagaattatcatttatggaagacgaagttgacttagatatgttacttgaacatgacgattttgaagattttggtacaaccgatagcttaagaagtgatgcaatcactcaattgatttctragattaagaaaggattaatagataaaaaagatattttacctcttcgtattatacttggttctgtaaacttgtatggtattttatcaactaatcatctacta

SEQ ID NO: 3330 - DNA, 294 bp, Staphylococcus aureus
atgataaacttaatatatacaacgagatgtgcgataatgcttaaagtatgtacctctcgcaaacaaatcaatatgaaaaatgatattgagaaagaaaagtatgtgaacgaaattattatgcttttacgtacgatacctacgtctaaattagtacaaccaattatgcagttatttatagataaagctatccttaacaacgtccaaaatgatgcattattgatagaaaaagcaactcatgcacgtaatcatttacgtctatggtcattgcaaggtcatcgtgacattccaaactaa

SEQ ID NO: 3331 - DNA, 282 bp, Staphylococcus aureus
tatttgaaatctgatcaagcaattaaagagwtyaccagttatctacgcaaacaaatcaatatgaaaaatgatattgagaaggaaaagtatgtgaaygaaatcattatgcttttacgtacratacctacgtctaaattrrtacaaccaattatgcagttatttatagataatgctatccttaacaacgttcaaaacgacgcattattgatwgaaaaagcaactcatgcacgtaatcatttacgtctatggtcattgcaaggtcatcgtgacattccaaactaa

SEQ ID NO: 3332 - DNA, 246 bp, Staphylococcus aureus
atgtacctctcgcaaacaaatcaatatgaaaatgatattgagaaggaaaagtatgtgaacgaaatcattatgcttttacgtacgatacctacatctaaattgatacaaccaattatgcagttatttatagataatgctatccttaacattgttcaaaacgacgcattattgatagaaaaagcaactcatgcacgtaatcatttgcgtctatggtcattgcaaggtcatcgtgacattccaaactaa

SEQ ID NO: 3333 - DNA, 774 bp, Staphylococcus aureus
ttgggaggggctaaaatgattaaaaaacgtatcattccatgtttagatgtcaaagatggtcgtgtcgttaaagggattcaatttaaaggattaagggatatwgggaatcctgttgatttagcaatrtattacaatgaagcgggtgctgatgarttagtatttttagacatctctaagacggaagagggtcatagcttaatgctagaagtgattgaacagacagcgtcacgcttgtttatccctcttactgtagggggtgggattcaaagyctygatgatattacccaattgytaaatcatggtgcagataaagtatcattaaattcaagtgctttaaaaaatccacagctmattaaacaagcgagtgataaattcggtagacaatgcatctgyatagcaattgatagctattatgatcctgaaagaaaagcacattattgttgtacgmmtggyggtaaaaaawtgacaaatattaaagtatatgactgggtacagcaagtagaacagttaggtgcaggtgagctcctcgttacaagtatgggrcatgatggtatgaaacaaggmtttgatattgarcayctwgcaaawatwaartcycttgtaaatattccaatcattgcttctggtggtggtggcaatgcacaacactttgtagaaytatttratcagacggatgtttctgcaggtttagctgcaagtatattacatgaycgagaaacgacggttcaatcwattaaagaagygatacggcaaggrggtatagcagtaagatga

SEQ ID NO: 3334 - DNA, 663 bp, Staphylococcus aureus
gtgatacggcaaggggggtatagcagtaagatgaccaahtayaaaattgattttagcaaaggtttagtgccagcaattttacaagataatcaaacaaaacaagtattgatgttrggttatatgaaycaagaagcttttgataaaacgatagaagatggtgtrgtatgtttctattcgcggtcgaaacaacgbctatggacaaaaggtgaaacatctggtcatacgcaacktgttaaagatattcatgtagattgcgayaatgayactattttaattgatgtcataccaaatggaccaacatgtcatacaggcagtcaaagttgtttcaacacagaagttccattttcagtrcaaacattagcgcagacagttcaagatagtgcccaatccaataatgaaaagtcatatacraaatatttattaacagaaggtatagaaaagattacraaaaaatayggtgaagaagcttttgaagtcgtaatygaagcaattaaaggtgacaaaaaagcatttgtaagtgaagtagcagatgaactttatcatttatttgtcttgatgcatgcgctwggcgtygatttttcagaaattgaggcrgaattagcgcgtagacatcataagcgcaataactttaaaggygaacgacaaaatatcgaacagtggtaa

SEQ ID NO: 3335 - DNA, 11701 bp, Staphylococcus aureus
gtgaattatcgtgataaaattcaaaagtttagtattcgtaaatatacagttggtacattttcaactgtcattgcgacattggtatttttaggattcaatacatcacaagcacatgctgctgaaacaaatcaaccagcaagcgtggttaaacagaaacaacaaagtaataatgaacagactgagaatcgagaatctcaagtacaaaattctcaaaattcacaaaatrgtcaatcattatcygctactcatgaaaatgagcaaccaaatawtagtcaagctaatttagtaratcaaaaagtagcgcaatcatctactactaatgatgaacaaccagcatctcaaaatgtaaatacaaagaaagattcggcaacggctgcgacaacacaaccagataaagaasaargtaagcataaacaaaacgaaagtcaatctgctaataaaaatggaaacgacaatagagcggctcatktagaaaatcatgaagcaaatgtagtaacagcttcagattcatctgataatggtaacgtacaacatgaccgaaatgaattacaagcrttttttgatgcaaattatcatgattatcgctttattgaccgtgaaaatgcagattctggcacatttaactatgtaaaaggcatttttgahaagattaatackttattaggcagtaatgatccaatwaacaataaagacttgcaacttgcatacaaagaattggaacaagctgttgctttaattcgtacaatgcctcaacgtcaacaractagccgwcgwtcaaayagaattcaaacgcgttckgttgagtcwagagctgcagagcctagatcagtatcagactatcaaaatgcaaattcatcatattatgttgaaaatgctaatgatggttcrggmtatcctgtwggtacatatatcaatgcttctagtaaaggggcgccatataatttaccaactacaccatggaatacattgaaggcctctgactcaaaggaaattgctcttatgacagcgaaacaaactggagayggstaccaatgggttattaagtttaataaaggacatgctccacatcaaaatatgatyttytggtttgcattaccagcagaccaagtgccagtaggaagaactgactttgtaacagttaattcagatggaacaaatgtacaatggagtcatggagcagragcaggtgcaaataaaccacttcaacaaatgtgggaatatggagtaaatgatcctsatcgttcacatgactttaaaataagaaatagaagtggccaagtaatatatrrctggccaactgtccatrtttattctttagaagatttatctagagcgagtgattattttagtgaagctggagcracasctgctactaaagcwtttggtagacaaaattttgaatatattaatggtcaaaaacctgctgaatcaccgggtgttcctaaagtttatactttcatcggtcaaggtgatgcaagttatacaatttcatttaaaacacaaggtccaactgttaataaattgtaytatgcagcaggtgggcgtgctttagagtacaatcaattatttatgtacagtcaactatacgtcgaatcaacgcaagaccatcaacaacgtcttaatggtttaagacaagtggttaatcgtacatatcgcataggtacaactaaacgtgtagaagtgagtcaaggaaatgtacaaacgaaaaaggtattagaaagtacaaacctaaatatagatgattttgttgatgatccwttaagttatgttaagacgccgagtaataaagtgttaggwttttayycramtaatgcaamtactaaygcttttagaccgggkggmgyycarsaattaaatgaatatcaattaagtcaattatttactgatcaaaaattacaagaagcagcaagaactagaaacccaataagattaatgattggtttcgactatcctgatgsttatggtaatagtgaaactttagttcctgttaacttaacggtattacctgaaatccaacataatattaaattctttaaaaatgacgatactcaaaayattgctgaaaaaccattttcaaaacaagctgggcatccagttttctatgtatatgcaggtaaccaagggaatgcttccgtgaatttaggtggtagcgtaacatctattcaaccattacgtattaatttaacaagtaatgagaattttacagataaagattggcaaattacaggtattccgcgtacattacacattgaaaactcgacaaatagamctaataatgcyagagaacgyaayattgaacttgttggtaayttattaccaggggattactttggwacgatacgttttggacgtaaagaacaattattygaaattcgtgttaaaccacatacaccaacaattacaacgacagctgagcaattaagaggtacagcattacaaaaagtgcctgttaatatttcgggaataccgttggatccatcggcattggtttatttagttgcaccaacaaatcaaactacgaatggtggtagtgaggcagatcaaataccatctggttatacgatacttgcgactggtacacctgatggggtgcataatacaattactatacgaccgcaagattatgttgtattcataccacctgtaggtaaacaaattagagcagtagtttattataataaagtagttgcatctaatatgagtaatgctgttactattttgccagatgacattccaccaacaatcaataatcctgttggaataaatgccaaatactatcgaggcgacgaagtcaactttacaatgggwgtctctgatagacattctggtataaaaaatacaactattackacwttgccrartggttggacatcaaatttaacwaaakcsgayaasaawaayggctcattakctattacaggtagagtswstatgaatcaggcrtttaacagtgatattacatttaaagtrtcagcgacagayaatgtcaataatacgacaaatgatagtcaatctaaacatgtktcaattcatgtaggtaaaattagtgaagatgctcatccgattgtattaggaaatactgagaaagttgtagtagtcaatccgactgctgtatctaatgatgaaaagcaaagcataattactgcctttatgaataaaaaccaaaatataagaggatatttagcatcaactgatccagtaactgtcgataataatggtaaygtcacattacattacygtgatggctcatcracaacgcttgatgctacaaatgtgatgacatacgaaccagttgtgaaayctgaataycaaactgycaatgcwgctaaaacagcaacggtaacgattgctaaaggacaatcatttartattggtgatattaaacaatattttactttaagtaatggacaasctattccaartggcacatttacaaatattacatctgatagaactattcyaactgcacaagaagttagtcaaatgaaygcaggyacgcagttataycatatarytgctwcaaatgcrtatcataaagayastgaagayttctatattagtttraaaatcrtygatgtgaaacaaccwgaaggcgatcaacgtgtmtatcgtacrtcaacatatgatttaachactgatgaaatctcaaaagtaaaacaagcwtttattaatgcaaatagagatgtaattacgcttgccgarggtratatttcagttacaaatacacctaatggtgctaatgtaagtactattacagtaaatattaataaaggtcgattaacgaaatcattcgcgtcwaacctagctaatatgaatttcttgcgttgggttaatttcccrcaagattatacagtgacatggacgaatgcaaaaattgcaaacagaccaacagatggtggtttatcatggtcygatgaccataaatctttaatttatcgttatgatgctacattaggyacwcaaattacrackaatgatattttaacratgytaaaagcracwactacagtgcctggattgcgwaataayattactggtaatgaaaaakcacaagcagaagcwggyggaagaccwaactwtagaacractggttattcacaatcaaatgcgacaactgatggtcaacgtcaatttacgttgaatggtcaagtgattcaartrttagacatcatcaacccttcaaacggttatggtgggcaacctgttacaaattcaaatactcgtgcaaaccatagtaactcaactgttgttaacgtaaacgaaccggcagctaatggtgctrgcgcatttacaattgaccacgttgtaaaaagtaattctacacataatgcaagtgatgcagtttataaagcrcagttatacttaacgccatatggtccaaaacaatatgttgaacatttaaatcaaaatacaggaaatactactgacgctattaacatttattttgtaccaagtgayttagtgaatccaacaatttcagtaggtaattacactaatcatcaagtgttctcaggtgaaacatttacaaatackattacagcgaatgataactttggtgtgcaatckgtaactgtaccaaatacatcacaaattacaggyactgttgataataaccatcaacatgtttctgcaacggcaccaaatgtgacatcagcaactartaagacaatcaatttattagcaactgatacaagyggyaatacagctacaacttcrttcaatgtaacagtgaaacctttgcgtgataaatatcgagttggtacttcatcaacggctgctaatcctgtkagaattgccaatatttcgaataatgcgacagtatcacaagctgatcaaacrrcaattattaattcrttaacgtttacwwgwaayagyaccaaatagaarytatgcaasagcaagygcraatgaaatcactagtaaaacagttagtaatgtcagtcgtactggaaataatgccaatgtyacagtaactgytactyatcaagatggaacaacatcaacagtgactgtacctgtaaagcatgtcattccagaaatcgttgcacattcgcattacactgtacaaggccaagacttcccagcaggtaatggttctagtgcakcagattactttaagttatctaatggtagtgmcattscagatgcaackattacatgggtaagtggacaagcgccaaataaagataatacacgtattggtgaagatataacwgtaactgcacatatcttaattgatggygaaacaacgccgattacgaaaacagcaacatataaagtagtaagwacwgtaccgaarcatgtctttgaracrrmyagaggtgytktrtwcccaggtgtwtcwgatrtgtatgatgcgaaacaatatgttaarccagtwaatrattcttggwcgacaaatgcgcaacrtatgaatttycaatttrywrrwwcatatggwccwaryaaagatgtkgtwggyatwtcwacdmgkswtattmgagtkacwtatgataatmrmcaaacdsaagatttmamkattttakcwaaagttaaaccwgayccaccdmgaattgaygsmaactctgtgacwtataaagcaggtcttacwaaccaasaaattaaarttaataaygtrttaartarytcrtcwrtwaaattatttaaagcagataatacrccattaamkrtyacaaayaykactyatggtagyggtwwtastkcrgttgtracrgtaagtgaygcgttaccaaatggygkrattaargcaarrtcttcwatywcaatgaayaatgtgacgtayackackcaagaygaacatggtcragytgwtasagtaacaagaaatgaatctgttgattcaaatgayagtgcwwcwgtwacagtracaccacaattacaagcaactactgaaggygctgtatttattaaaggtggcgacggttttgatttcggwcaygtagaamgatttattcaaaayccgccacatggggcaacggtygcatggcatgatagtccagatacatggaagaatacagtcggyaacacwcataaaactgcggttgtaacattacctartggtcaaggtacgcgtaatgttgaagttccagtcaaagtttatccagttgctaatgcwaaggcgccatcacgtgatgtgaaaggtcaaaatttgacwmatggwacrraygckatkraytacattacatttgatccaaatacwaayacraatggtatyacwgcagcatgggcaaatagacaacaaccaaataaccarcaagcaggcgtkcaacatttaaatgtcgatgtcacatatccaggtatttcagctgctaaacgagttcctgtwactgtkaaygtatatcaatttgaattccctcaaactacttatacracaacrgttggwggcactttagcaagtggtacgcaagcatcaggatatgcacatatgcaaaaygctwcwggtttaccaacagatggatttacgtataaatggaatcgtgatactacrggtacaaaygaygcaaactggkcagcwatgaataaaccraatrykgcwmaagtcgttaaygcaaaatatgaygtcatctataayggacatacwtttgcaacatctttaccagcgaaatttgtagtaaaagatgtkcaaccagcgaaaccaactgtsactgaaacagcggcaggagcgattacaattgcacctggwgcraaccaaacagtsaatacwcatgchggtaaygtwacgacataygctgayaaattagttattaaacgtaatggwaaygttgtracgacatttacacgtcgyaataatacragyccatgggtgaaagaagcatcwgcagmwamtgtarcaggtattgytggaactaataatggtattactgtkgcagcaggtactttcaaycctgctgatacaattcaagttgttgcaacrcaaggwagyggmgaracartvagtgaygagcaacgtagtgatgatttcacagttgtcgcaccacaaccgaaccaagcgactackaaratttggcaaaatggtcatattgatatcacgcctaataatccatcaggacatttaattaatccaacwcaagcaatggatattgcttacactgaaaaagtgggtaatggtgcagaacatagtaagacaattaatgttgttcgtggtcaaaataatcaatggacaattgcgaataagcctgactatgtaacgttagatgcacaaactggtaaagtgacgttcaatgccaatactataaaaccaaattcatcaatcacaattactccgaaagcaggtacaggtcactcagtaagtagtaatccaagtacattaactgcaccggcagctcatactgtcaacacaactgaaattgtgaaagattatggttcaaatgtaacagcagctgaaattaacaatgcagttcaagttgctaataaacgtactgcaacgattaaaaatggcacagcaatgcctactaatttagctggtggtagcacaacgacgattcctgtgacagtaacttacaatgatggtagtactgaagaagtacaagagtccattttcacaaaagcggataaacgtgagttaatcacagctaaaaatcatttagatgatccagtaagcactgaaggtaaaaagccaggtacaattacgcagtacaataatgcaatkcataatgcgcaacaacaaatcaatacygcraaaacagaagcrcaacaagtgattaataatgakcgtgcaacaccacaacaagtttctgacgcaytaactaaagttcgtgcagcacaaactaagattgatcaagctaaagcattacttcaaaataaagaagataatagccaattagtaacrtctaaaaataacttacaaagttctgtgaaccaagtaccatcaactgctggtatgacgcaacaaagtattgataactataatgcgaagaagcgtgaagcagaaactgaaataactgcagcwcaacgtgttatwgacaatggmgatgcaacwscrcarcaaatttcagakgaaaaacatcgtgtcgataacgcattaacagcattaaaccaagcgaaacawratttaactrcagatacacatrccttagagcaagcagtgcaacaattgaatcgcacaggtacaacgactggtaagaarccrgcaagtattactgcktayaataattcratkcrtgcrcttcaarswgacttaacaagtgctaaaaatagygctaatgctatyattcaraagccaataagawcagtrcaagargtrcaawcwgcrttaacaaatgtaaatcgtgtyaatgagcgattaacgcaagcaattaatcaattagtacctttagctgataatagtgctttaaraactgctaagacgaaacttgatgaagaaatcaataaatcagtaactactgatggtatgacacaatcatcaatccaagcatatgaaaatgctaaacgtgcrggtcaaacagaawcaacaaatgcacaaaatgttattaacaatggtgaygcracwgaccaacaaattgccgmagaaaaaacaaaagtagaagaaaaatataatagcttaaaacaagcaattgctggattaacwccagacttggcaccattacaaactgcaaaaactcagttgcaaaatgatattgatcagccaacgagtacgactggtatgacaagcrcatctrttgcwgcatttaatgamaaactttcagcagctagaactaaaattcaagaaattgatcgygtaytrgcmtcwcatccagatgtwgcracratwcgtcaaaacgtgacagcagcgaatgcygctaaawcagcacttgatcaagcrcgyaatggcttaacagtygataaagcrcctttagaaaatgcgaaaaatcaactacaacatagtattgayacgcaaacaagtacaactggtatgacacaagactctataaatgcatacaatgcgaagttaacagctgcacgtaataagrttcaacaaatcaatcaagtattagcaggttcacckactgtagawcaaattaatacaaatacgtctrcagcaaatcaagckaaatctgatttagatcatgcacgtcaagckttaacaccagataaagcrccgcttcaaamtgcgaaaacgcaattagaacaaagcattaatcaaccaacrgatacaacaggtatgacraccgcttcgttaaatgcrtacaaccaaaaattacaagcagcrcgtcaaaagttaactgaaattaatcaagtgttgaatggcaacccaactgtccaaaatatcaatgataaagtgrcagaggcaaaccaagctaaggatcaattaaatacagcacgtcaaggtttaacattagatagacagccagcgttaacaacattacatggtgcatctaacttaaaccaagcacaacaaaataatttcacgcaacaaattaatgctgctcaaaatcatgctgckcttgaaacaattaagtctaacattacggctttaaatactgcgatgacgaaattaaaagacagtgttgcggataataatacaattaaatcagrtcaaaattacactgacgcaacaccagctaataaacaagcstatgataatgcagttaatgcggctaaaggtgtcattggagaaacgactaatccaacgatggatgttaacacagtgaaccaaaaagcagcatctgttaaatcgacgaaagatgctttagatggtcaacaaaacttacaacgtgcgaaaacagaagcaacaaatgcgattacgcatgcaagtgatttaaaccaagcacaaaagaatgcattaacacaacaagtgaatagtgcacaaaaygtrcawgcagtaaatgatattaaacaaacgactcaaagcttaaatactgctatgacaggtttaaaacgtggcgttgctaatcataaycaagtcgtacaaagtgataattatgtcaacgcagatactaataagaaaaatgattacaacaatgcatacaaccatgcgaatgacattattaatggtaatgcacaacatccagttataacaccaagtgatgttaacaatgctttatcaaatgtcacwagtaaagaacatgcattgaatggtgaagctaagttaaatgctgcgaaacaagaagcgaayactgcattaggtcawttaaayaayttraataatgyrcaacgtcaaaacttacaatcgcaaattaatrgtgcrcatcaaatygakrcagttaatacrattaagcaaaatgcaacaaacttraatagtgcaatgggtaacttaagacaagctgttgcagataaagatcaagtgaaacgtacagaagattatgcggatgcagatacagctaaacaaaatgcatataacagtgcagtttcaagtgcygaaacaatyattaatcaaacarcwaatccracratgtctgttgatgatgttaatcgtgcaacttcagctgttactwctaataaaaatgcattaaatggtkatgaaaaattagyacaatctaaaacagatgctgcaagagcaattgatgcattaccacatttaaataatgcacaaaaagcagatgttaaatctaaaattaatgctgcatcaaatattgctggygtaaatacygttaaacaacaaggtacagatttaaatacagcgatgggtaacttgcarggtgcaatcaatgatgaacaaacgacgcttaatagtcaaaaytatcaagatgcgacacctagtaagaaaacagcatacacaaatgcggtrcaagctgcgaaagatattttaaataaatcaaatggtcaaaataaaacgaaagatcaagttactgaagcgatgaatcaaktgaattckgctaaaaataacttagatggtacgcgtttattagatcaagcgaagcaaacagcraaacagcagttaaataatatgacgcatttaacaactgcacaaaaaacgaatttaacaaaycaaattaatagtggtactactgtygctggtgttcawacggttcaatcaaatgccaayacattagatcaagcsatgaatacgttaagacaaagtattgcyaacaawgatgcgactaaagcaagtgaagattacgtagatgctaataatgataagcaaacagcatataacaacgcrgtagctgctgctgaaacgattattaatgcdaatagtaatccagaaatgaatccaagtacgattacacaaaaagcagagcaagtgaatagttctaaaacggcacttaacggtgatgaaaacttagctrckgcaaaacaaaatgcgaaaacgtacttaaacacattracragtattacagatgctcaaaagaacaatttgattagtcaaattastagtgcgacaagagtkagtggtgttgatactgtaaaacaaaatgcrcaacatytagaycaagctatggctarcttrcarartggtattaacaacgaatctcaagtkaaatcatctgagaaatatcgtgatgctgatacaaataaacaacaagagtatgataatgctattactgcagcgaaagcgattttaaataaatcracaggtccaaacactgcgcaaaatgcagttgaagcagcattrcaacgtgtkaatamtgcgaaagatgcattgaatggygatgcaaaattaattgcagctcaaaacgcagcgaaacaacatttaggtactttaacgcatatcactacagcwcaacgyaatgatttaacaaatcaaatttcayaagctacaaacttagctggtgttgaatct

SEQ ID NO: 3336 - DNA, 11701 bp, Staphylococcus aureus; identical to SEQ ID NO: 3335

SEQ ID NO: 3337 - DNA, 20142 bp, Staphylococcus aureus
atgggtaacttacaaacggctatcaacgataagtcaggaacattagcgagccaaaacttcttggatgctgatgagcaaaaacgtaatgcttacaatcaagctatatcagctgccgaaaccattttaaataaacaaactggaccgaatacagcgaaaacagcggttgaacaagcacttaataatgttaatagtgcgaaacatgcattaaatggtacgcaaaacttaaataatgcgaaacaagcagcgattacagcaattaatggcgcatctgatttaaatcaaaaacaaaaagatgcattaaaagcacaagctaatggtgctcaacgcgtatctaatgcaaatgatgtacaacgtaatgcgactgaactgaacacggcaatgggtcaattacaacatgccatcgcagataagacgaatacgttagcaagcagtaaatatgtcaacgccgatagcactaaacaaaatgcttacacaactaaagttaccaatgctgaacatattattagcggtacgccaacggttgttacaacaccttcagaagtaacagctgcagctaatcaagtaaacagcgcgaaacaagaattaaatggtgacgaaagattacgtgttgcaaaacaaaacgccaatactgctattgatgcattaacgcaattaaatactcctcaaaaagctaaattaaaagaacaagtgggacaagccaatagattagaagacgtacaatctgttcaaacaaatggacaatcattgaacaatgcaatgaaaggcttaagagatagtattgctaacgaaacaacagtcaaagcaagtcaaaactatacagacgcaagtccgaataaccaatcaacatataatagcgctgtgtcaaatgcgaaaggtatcattaatcaaactaacaatccaactatggatactagtgcgattacccaagctacaacacaagtgaataatgctaaaaatggtttaaacggtgctgaaaacttaagaaatgcacaaaacactgctaagcaaaacttaaatacgttatcacacttaacaaataaccaaaaatctgcaatctcatcacaaattgatcgtgcaggtcatgtgagtgaggtaacagctgctaaaaatgcagcaactgagttaaacgcgcaaatgggcaacttggaacaagctatccatgatcaaaacacagttaaacaaggtgttaacttcactgatgcagataaagctaaacgtgatgcktatacaaatgcggtaagcagagcwgaarcaattctgaataaaacgcaaggtgcaaatacgtctaaacaagatgttgaagcggctattcaaaatgttwcaagtgctaaaaatgcattgaatggtgatcaaaacgttacaaatgcgaagaatgcagctaaaaatgcattaaataacttaacgtcaattaataatgcacaaaaacgtgacttaacaactaaaattgatcaagcaacaacwgtagctggtgttgaagckgtatctaatacaggtacacaattgaatacagcgatggctaacttgcaaaatggtattaatgataaagcraatacwytagcragygaaaactatcatgatgctgattcagataagaaaactgcttatactcaagccgttrcgaacgcagaaaatattttaaataaaaatagtggatcaaatttagataaagctgccgttgaaaacgcgttgtcacaagtkrcwaatgcgaaaggtgccctaaatggtaaccataatttagagcaagctaaatcaaatgcaaacactactataaacggmcttcaacatttaacaacwgcwcaaaaagataaattgaaacaacaagtgcaacaagcacaaaatgttgcaggtgtagatactgttaaatcaagtgccaacacattaaatggtgctatgggtacgttaagaaatagcatwcaagataacacagctacgaaaaatggccaaaactatcttgatgctacagramgtaacaaaacaaactataacaatgctgttgatagtgctaatggtgtcattaatgcaacaagcaatccaaatatggatgctaatgcaattaaccaaatcgctacacaagtgacatcaacgaaaaatgcattagatggtacacataatttaacgcaagcgaaacaaacagcaacaaatgccatcgatggtgctactaacttaaataaagcgcaaaaagatgcgttraaagcacaagtkacaagtgcgcaacgtgttgcaaatgtaacaagtatccaacaaactgcaaatgaacttaatacagctatgggtcaattacaacatggtattgatgatgaaaatgcaacaaaacaaactcaaaaatatcgtgacgctgaacaaagtaagaaaactgcttatgatcaagctgtagctgctgcgaaagcaattttaaataaacaaacaggttcmaattcagataaagcagcagttgaccgtgcattacaacaagtaacaagtacgaaagatgcattgaatggkgatgcwaaactggcagaagcgaaagcggcagctaracaaaacttaggyactttaaaccatattacgaatgcacaacgtactgcgttagaaggtcaaatcaatcaagcgacgactgttgatggcgttaatactgtaaaaacaaatgccaatacattagacgrcgcwatgaatagcttacaaggtgcaatcaatgataaagatgckacattaagaaatcaaaattatcttgatgcagatgaatcaaaacgaaatgcatatacgcaagctgtcacagcggctgaaggcattttaaataaacaaacwggtggtaacacatctaaagcagacgttgataatgcattaaatgcagttacaagagcgaaagcggctttaaatggtgctgaaaacttaagaaatgcgaaaacttcagcaacaaatacgattaatggtttacctaacttaacacaattacaaaaagacaacttgaagcatcaagttgaacaagcgcaaaatgtagywggtgtaaatggtgttaaagataaaggtaatacmttaaatactgccatgggtgcattacgtacaagtatccaaaatgataatacgacgaaaacaagtcaaaattatcttgatgcatctgatagcaacaaaaataattacaatactgctgtaaataatgcaaatggtgttattaatgcaacgaacaatccaaatatggatgctaatgcgattaatgrcatggcaaatcaagtcaatacaacaaaagcagcgttaaatggtgyacaaaacttagctcaagctaaaacaaatgcgacgaacacaattaacaacgcrcawgacttaaaccaaaaacaaaaagatgcattaaaaacacaagttaacaatgcacaacgtgtatctgatgcaaataacgttcaacatacagctactgaattgaacggtgcgatgacagcacttaaagcagctattgckgataaagaaagaacaaaagcaagcggtaattatgtcaatgctgatcaagaaaaacgtcaagcgtatgattcaaaagtgactaacgctgaaaatatcattaatggtacaccraatgcgacattaacagtcaatgaygtaaatagtgcgrcwtcacaagtcaatgcggctaaaacagcattaaatggygataacaacttacgtgtwgckaaagarmatgctaayaatacaattgayggcttagcacaattgaataatgyacaaaaagcaaaattaaaagaacaagttcaaagtgcaactacattagawggtgttcaaactgttaaaaatagttctcaaacgttgaatacagcgatgaaaggcttaagagatagtattgcgaatgaagcaacrattaaagcaggtcaaaactacactgacgcaagtccaamtaatcgtaacgagtacgacagcgcagttactgcagcaaaagcaatcattaatcaaacatcgaacccaacgatggaaccaaatactattacgcaagcaacatcacaagtgacaactaaagaacatgcattaaatggtgcgcaaaacttagctcaagctaagacaacwgcgaaaaacaacttraataacttaacatcaattaacaatgcacaaaaagatgcgttaacgcgtarcattgatggtgcaactacagtagctggtgtaaatcaagaaactgcmaaagcaacagaattaaataacgcaatgcayagtttacaaaatggtatcaatgatgagacacaaacaaaacaaactcagaaatacctagatgcwgagccaartaagaaatcagcttatgatcaagcwgtaaatgcagcraaagcaattttaacaaaagctagtggtcaaaatgtagacaaagcagcagttgaacaagcattacaaaatgtgaacagtacgaagacggcgttgaacggtgatgcgaaattaaatgaagctaaagctgctgcgaaacaaacgttaggtacattaacacacattaataatgcacaacgtaatgcgttagataatgaaattacacaagcaacaaatgttgaaggtgttaatacagttaaagccaaagcgcaacaattagatggtgctatgggtcaattagaaacatcaattcgtgataaagacacgacgttacaaagtcaaaattatcaagatgctgatgatgctaaacgaacggcttattctcaagcagtaaatgcagcagcaactattttaaataaaacagctggmggwaatacacctaaagcagatgtygaaagagcaatgcaagctgttrcacaagcmaatactgcattaaacggtattcaaaacttagaacgtgcgaaacaggctgckaacacagcgattacaaaygcttcggacttaaatacaaaacaaaaagaagcattraaagcacaagtaacaagtgcaggacgcgtatctgcagcaaatggtgttgaacatactgcgactgaawtaaatactgcgatgacagctttaaaacgtgcyattgctgataaagctgacacaaaarctagtggtaaytatgtcaatgctgatgcgaataaacgycaagcatatgatgaaaaagtgacagctgcmgaamrtatcgttartggtacaccaacaccaacgttaacaccatcagatgttacaaatgcagcaacgcaagtaacgaatgcgaagacgcagttaaacggtaatcataatttagaagtagcgaaacaaaatgctaacacagcaattgatggtttaacttctttaaatggtccgcaaaaagcaaaacttaaagaacaagtgggtcaagcgacgacgttgccaaatgttcaaactgttcgtgataatgcacaaacattaaacactgcaatgaaaggtctacgagatagcattgcgaatgaagcaacgattaaagcaggtcaaaactacacagatgcaagtcmwaayaawcrwartgamtacrayartgcagtcactgcagcaaaagcaatcattggtcaaacaactagtccatcaatgawtgcgcaagaaattaatcaagcgaaagaccaagtgacagctaaacaacaagcgttaaacggtcaagaaaacttaagaactgcgcaaacaaatgcgaagcaacatttgaatggcttaagtgacttaactaatgcwcaaaaagawgcrgcgaaacgycaaatcgarggtgcaacgcatgttaatgaagtaacacaagcrcaaaataatgcggaygcattaaatacagctatgacgaacttgaaaaatggtattcaagatcaraatacgattaagcaaggtgttaacttcactgatgcagatgaagcgaaacgtaatgcatatacaaatgcagtgacgcaagctgaacaaattttaaataaagcacaaggtccaaatactgcaaaagacrrtgtygaawctgcgttacaaaatgtacaacgtgctaaaaacgaattgaacggtaatcaaaatgttgcgaaygctaagacaactgcgaaaaatgcattgaataacytwacatcaatyaayaaygcacaaaaagmagcrttgaaatcacaaattgaaggtgckacaacagttgcaggtgtaaatcaagtgtctacaayrgcatctgaattaaatactgcaatgagcaacttacaacgtggtattaaygaygaagcagctacaaaagcagctcagaaatatactgawgcagatagagataaacaaactgcatacaatgatgctgtaacrgcagctaaaacgttattagataaaacagctggywcaaatgamaataaagyagccgttgaacaagcattacaacgtgtgaatactgctaaaacwgcattaaatggtgaygcgcgmttaaatgaagcgaagaacacagctaaacaacaaktagcgacaatgtcacayttaactratgctcaaaaagcaaacttaacakmrcaaatygaamgtggtacractgttgcwggtgttcaaggyatycaagcwaatgcyggtactttaratcaagcaatgaatcaattaagacaaagtattgcttctaaagatgcgactaaatcaagcgaagattatcaagacgcgaatgcagatttacaaaatgcatacaatgatgcggtaactaatgctgaaggtattattagtgcaacgaataaccctgaaatgaatcctgatacaattaaccaaaaagcgagccaagtgaacagtgcgaagtctgcattgaacggtgatgaaaaattagcagcagyaaaacaaactgcgaaatcagatatcggtcgtttgacagacttgaacaatgcacaacgaactgcggcaaatgctgaagtggatcaagcaccaaatcttgcagctgtyacagcggctaaaaataaagcaacatcgttaaacacagcgatgggtaatttgaaacatgcacttgctgaaaaggataatacgaaacgtagtgtcaattacacagatgcggatcaaccaaaacaacaagcgtatgatactgcrgttacacaagcagaagcaattactaatgcwaatggcagyaacgcgaatgaaacammagttcaagcagcrctwaaccaattgaatcaagctaaaaaygacttgaatggtgataataaagttgctcaagcraaagarwcagcraaacgtgcattagcttcatatagtaacttgaataaygcgcaatcaactgcagcaactagtcaaattgacaatgcaacgacagtagcagrygtaactgctgcacaaaatactgctaatgaattaaatacagcaatgggtcaacttcaaaatggtattaatgaccaaaacactgttaaacaacaagtgaactttacagatgctgaccaaggtaagaaagatgcttacacaaatgctgttacgaatgctcaaggtattttagataaagcaaacggtcaaaatatgacaaaagcacaagttgaagctgcattaaatcaagtaacgactgctaagaatgctttaaacggtgatgcaaatgtaagacaagcaaaatcagatgcgaaagcaaayttaggtacattaacacacttaaataatgcacaaaaacaagatttaacatcacaaatcgaaggtgcaacaacagtyaacggtgtaaatagtgttaaaacgaaagcacaagacttagatggtgcaatgcaacgattagagtcagcaatcgcaaataaagatcaaactaaagcgagcgaaaactacatygacgcagatccaactaagaaaacagcatttgataatgcyatcacacaagctgaatcttacttaaataaagatcatggtacgaataaagataagcaagctgttgaacaagcaattcaaagtgtaacgtctactgaaaatgctttgaacggtgacgcgaacttacaaygcgctaaaactgaagcwacacaagctatcgataacttgacacawttgaatacaccrcaaaaaacagcattraaacaacaagtgaaygctgcrcaacgygtatcaggtgtaactgatctgaaaaatagtgctacatcacttrataatgcgatggatcaattaaaacaagsaattgstgatcatgacacaattgtwgctggtggtaattacactaacgcaagtcctgataarcaaggtgcttayactgatgcatataatgctgcgaaraayatygtaaatggttcacctaatgtgattacaaatgcagcagatgttactgcggcaacacaacgtgtcaataatgctgaaacaagtttaaatggtgatwcaaacttagcaactgcgaagcaacaagctaaagatgcattacgtcaaatgacacatttatctgatgcacaaaaacaaagtattactggtcaaattgatagcgcgacacaagtaactggtgtacaaagtgtgaaagacaatgcaacaaatcttgacaatgcaatgaatcaacttcgaaatagtattgcgaataaagatgaagtaaaagcgagtcaaccatatgttgatgcagatacagataaacaaaatgcatacaatacagcagttacaagtgctgaaaatatcattaatgcaacgagtcagccaacacttgatccatctgcagtaacacaagcagctaatcaagtgaacactaacaaaactgcgcttaatggtgcgcaaaacttagcaaataaaaagcaagaaacaactgctaacatcaaccrattaagtcatttaaayaatgctcaaaagcaagatttaaatacacaagtgacaaatgcaccaaatattagcacagtaaatcaagtgaaaactaaagctgaacaattagatcaagcaatggaacgtttaatcaacggaatccaagacaaagatcaagtgaaacaaagtgttaactttacagatgcagatccagaaaaacaaacagcatacaacaatgcggtaactgctgctgaaaatattattaatcaagcaaatggtacaaatgcgaaccaatcacaagttgaagcagcactttcaactgtaacaactactaaacaagcgttgaatggtgatagaaaagtaacagatgctaaaaacaatgcaaaccaaacattatctacgttagataacttaaacaatgcacaaaaaggtgctgttactggaaacatcaatcaagcgcacactgtagctgaagtaacgcaagccattcaaaccgctcaggaactgaatacagcgatgggtaacttgaaaaatagcttgaatgataaagacactacacttggcagtcaaaactttgcagatgcagatccagagaagaaaaatgcatacaatgaagcggttcgtaatgctgaaaatattttaaataaatctacaggtacraacgtgcctaaagatcaagttgaagcagctatgaatcaagtgaatactacaaaagcagcgcttaatggtactcaaaaccttgaaaaagckaaacaacacgcaaatacagcaattgacggtttaagccatttaacaaatgcacaaaaagaggcattaaaacaattggtacaacaatcgactactgttgcagaagcacaaggtaatgaacaaaaagcaaacaatgttgatgcagcaatggacaaattacgtcaaagtattgcagataatgcgacaacaaaacaaaaccaaaattatactgatkmaagtccgaataaaaaggatgcgtacaataatgctgtcacaactgcacaaggtattattgatcaaactacaaacccttcattagatccgactgttatcaatcaagctgctggacaagtaagcacgtctaaaaatgctttaaatggtaatgaaaacttagaggcagcgaagcaacaagcaacgcaatctttaggttcattagacaacttaaataatgcgcaaaaacaagctgttactaatcaaattaatggcgcgcatactgttgatgaagcaaatcaaattaagcaaaatgcgcaaaacttaaatactgcgatgggtaacttgaaacaagcgatagctgataaagatgctacgaaagcaacagttaacttcactgatgcagatcaagcaaaacaacaagcatataacactgcagttacaaatgctgaaaatatcatttcaaaagctaatggtggtaatgcaacacaaactgaagttgaacaagcaatccaacaagtaaatgcagcaaaacaagcattaaatggtaatgccaacgttcaacatgcaaaagacgaagcaacagcattaattaataactctaatgatcttaaccaagcacagaaagatgcattaaaacaacaagtacaaaatgcaactactgtagctggtgtaaacaatgttaaacaaacggcgcaagagttaaacaatgcgatgacacaattaaaacaaggcattgcagataaagaacaaacaaaagctgatggtaactttgtcaatgcagattctgacaagcaaaatgcatataatcaagcagtagcgaaagctgaagcattaattagtggtacgcctgatgttgtcgttacacctagcgaaattactgcagcgttaaataaagttacgcaagctaaaaatgatttaaatggtaatacaaacttagcaacggcgaaacaaaatgttcaacatgctattgatcaattgccaaacttaaaccaagcgcaacgtgatgaatacagcaaacaaatcacgcaagcaacacttgtaccaaacgtcaatgctattcaacaagcggcaacaacgcttaatgacgcgatgacacaattgaaacaaggtattgcgaataaagcacaaattaaaggtagcgagaactatcacgatgctgatactgacaagcaaacagcatatgataatgcagtaacaaaagcagaagaattgttaaaacaaacaacaaatccaacaatggatccaaatacaattcaacaagcattaactaaagtgaatgacacaaatcaagcacttaacggtaatcaaaaattagctgatgccaaacaagatgctaagacaacacttggtacactagatcatttaaatgatgctcaaaaacaagcgctaacaactcaagttgaacaagcaccagatattgcaacagttaataatgttaagcaaaatgctcaaaatctgaataatgctatgactaacttaaacaatgcattacaagataaaactgagacattaaatagcattaactttactgatgcagatcaagctaagaaagatgattatactaatgcggtttcacatgcagaaggtattttatctaaagcaaatggcagcaatgcaagtcaaactgaagtggaacaagcgatgcaacgtgtgaacgaagcgaaacaagcattgaatggtaatgacaatgtacaacgtgcaaaagatgcagcgaaacaagtaattacaaatgcaaatgatttaaatcaagcgcaaaaagatgcattaaaacaacaagtcgatgctgcgcaaactgttgcaaatgtaaacacgattaagcaaacagcacaagatttaaatcaagcaatgacacaattgaaacaaggtattgcagataaagaccaaactaaagcaaatggtaactttgtcaatgctgatactgataagcaaaatgcatataacaatgcggtagcgcatgctgaacaaatcattagtggtacaccaaatgcaaacgtggatccacaacaagtggctcaagcgttacaacaagtgaatcaagctaagggtgatttaaacggtaaccayaacttacaagttgctaaagacaatgcaaatacagccattgatcagttaccaaacttaaatcaaccacaaaaaacagcattaaaagaccaagtgtcgcatgcagaacttgttacaggtgttaatgctattaagcaaaatgctgatgcgttaaataatgcaatgggtacgttgaaacaacaaattcaagcgaatagtcaagtaccacaatcagttgactttacacaagcggatcaagacaaacaacaagcttataacaatgcagctaaccaagcgcaacaaatcgcaaatggcacaccaacacctgtattggcgcctgatacagtaacaaaagcagttacaactatgaatcaagcgaaagatgcattaaacggtgatgaaaaattagcgcaagcgaaacaagatgctttagcaaatcttgatacgttacgtgacttaaatcaaccacaacgtgatgcattacgaaaccaaatcaatcaagcacaagctttagctacagttgaacaaactaaacaaaatgcacaaaatgtgaatacagcaatgggtaacttgaaacaaggtattgcaaataaagatactgtgaaagcaagtgagaactaccacgatgctgatgtcgataagcaaacagcatatacaaatgcagtgtctcaagcggaaggtattatcaatcaaacgacaaatccaacgcttaacccagatgacattactcgtgcattaactcaagtgactgatgctaaaaatagcttaaacggtgaagctaaattagccactgaaaagcaaaatgctaaagatgccgtaagtggaatgacgcatttaaacgatgctcaaaaacaagcattaaaaggtcaaatcgatcaatcgcctgaaattgctacagtgaaccaagttaaacaaacagcaacgagcctagatcaagcaatggatcaattatcacaagctattaatgataaagatcaaatattagcggacggtaattacttaaatgcagatcctgacaaacaaaatgcgtataaacaggcagtagcaaaagctgaagcattattgaataaacaaagtggtactaatgaagtacaagcacaagttgaaagcatcactaatgaagtgaacgcagcgaaacaagcattaaatggtaatgacaatttggcaaatgcaaaacaacaagcaaaacaacaattggcgaacttaacacacttaaatgatgcacaaaaacaatcatttgaaagtcaaattacacaagcgccacttgttacagatgtcactacgattaatcaaaaagcacaaacgttagatcatgcgatggaattattaagaaatagtgttgcggataatcaaacgacattagcgtctgaagattatcatgatgcaactgcgcaaagacaaaatgactataacaaagctgtaacagctgctaataatatcattaatcaaactacatcgcctacgatgaatccagatgatgttaatggtgcaacgacacaagtgaataatacgaaagttgcattagatggtgatgaaaaccttgcagcagctaaacaacaagcaaacaacagacttgatcaattagatcatttgaataatgcgcaaaagcaacagttacaatcacaaattacgcaatcatctgatattgctgcagttaatggtcacaaacaaacagcagaatctttaaatactgcgatgggtaacttaattaatgcgattgcagatcatcaagccgttgaacaacgtggtaacttcatcaatgctgatactgataaacaaactgcttataatacagcggtaaatgaagcagcagcaatgattaacaaacaaactggtcaaaatgcgaaccaaacagaagtagaacaagctattactaaagttcaaacaacacttcaagcgttaaatggagatcataatttacaagttgctaaaacaaatgcgacgcaagcaattgatgttttaacaagcttaaatgatcctcaaaaaacagcattaaaagaccaagttacagctgcaactttagtaactgcagttcatcaaattgaacaaaatgcgaatacgcttaaccaagcaatgcatggtttaagacagagcattcaagataacgcagcaactaaagcaaatagcaaatatatcaacgaagatcaaccagagcaacaaaactatgatcaagctgttcaagccgcaaataatattatcaatgaacaaactgcaacattagataataatgcgattaatcaagtagcggcaactgtgaatacaacgaaagcagcattacatggtgatgtgaaattacaaaatgataaagatcatgctaaacaaacggttagccaattagcacatctaaacaatgcacaaaaacatatggaagatacgttaattgatagtgaaacaactagaacagcagttaagcaagatttgactgaagtacaagcattagatcaacttatggatgcattacaacaaagtattgctgacaaagatgcaacacgtgcgagcagtgcatatgtcaatgcagaaccgaataaaaaacaagcctatgatgaagcagttcaaaatgctgagtctatcattgcaggattaaataatccaactatcaataaaggtaatgtatcaagtgcgactcaagcagtaatatcatctaaaaatgcattagatggtgttgaacgattagctcaagataagcaaactgctggaaattctctaaatcatttagatcaattaacaccagctcaacaacaagcgctagaaaatcaaattaataatgcaacaactygtgataaagtggctgaaatcattgcacaagcgcaagcattaaatgaagcgatgaaagcattaaaagaaagtattaaggatcaaccacaaactgaagcaagtagtaaatttattaacgaggatcaagcgcaaaaagatgcatatacgcaagcagtacaacacgcgaaagatttgattaacaaaacaactgatcctacattagctaaatcaatcattgatcaagcgacacaggcagtgactgatgctaaaaacaatttacatggtgatcaaaaactagctcaagataagcaacgtgcaacagaaacgttaaataacttgtctaacttgaatacaccacaacgtcaagcacttgaaaatcaaatcaataatgcagcaactcgtggtgaagtagcacaaaaattaactgaagcacaagcacttaaccaagcaatggaagctttacgtaatagcattcaagatcaacaacaaacagaatctggtagcaagtttattaatgaagataaaccgcaaaaagatgcttaccaagcagcagttcaaaatgcaaaagatttaattaaccaaacaggtaatccaacgcttgataaagcacaagttgaacaattgacacatgcttttaaacaagctaaagataacctacacggtgatcaaaaacttgcagacgataaacaacatgcggttactgatttaaatcaattaaatggtttgaataatccgcaacgtcaagcacttgaaagccaaataaacaacgcagcaactcgtggcgaagtagcgcaaaaattagctgaagcaaaagcgcttgatcaagcaatgcaagcattacgaaatagtattcaagatcaacaacaaacggaagcgggtagcaagtttatcaatgaagataaaccgcaaaaagatgcttaccaagcagcagttcaaaatgcaaaagatttaattaaccaaacaggtaatccaacactcgacaaatcacaagtagaacaattaacacaagcagtaacaactgcaaaagataatctacatggtgatcaaaaacttgctcgtgatcaacaacaagcagtaacaactgtaaatgcattgccaaacttaaatcatgcacaacaacaaacattaactgatgctataaatgcagcgcctacaagaacagaggttgcacaacatgttcaaactgctactgaacttgatcacgcgatggaaacattgaaaaataaagttgatcaagtgaatacagataaggctcaaccaaattacactgaagcgtcaactgataaaaaagaagcagtagatcaagcgttacaagctgcacaaagcattacagatccaactaatggttcaaatgcgaataaagacgctgtagaacaagcattaactaagcttcaagaaaaagtgaatgagttaaatggtaatgagagagtcgctgaagctaaaacacaagcgaaacaaactattgaccaattaacacatttaaatgctgatcaaattgcaactgctaaacaaaatattgatcaagcgacgaaacttcaaccaatcgctgaattagtagatcaagcaacgcaattgaaccaatcaatggatcaattacaacaagcagttaatgaacatgctaacgttgagcaaactatagattacacacaagcagattcagataagcaaaaggcttataaacaagcgattgctgatgctgaaaatgtattgaaacaaaatgcgaataagcaacaagtggatcaagcacttcaaaatattttaaatgcaaaacaagcattaaatggtgatgaacgtgtagcacttgctaaaacaaatggtaaacatgacatcgaccaattgaatgcattaaacaatgctcaacaagatggatttaaaggtcgcatcgatcaatcaaacgatttaaatcaaatccaacaaattgtagatgaggctaaggcacttaatcgtgcaatggatcaattgtcacaagaaatcactggcaatgaaggacgcacgaaaggtagcacgaactatgtcaatgcagatacacaagtcaaacaagtatatgatgaagcggttgataaagcgaaacaagcacttgataaatcgtctgggcaaaacttaactgcagaacaagttatcaaattaaatgatgcagtcactgcagctaagaaagcattaaatggtgaagaaagacttaataatcgtaaagctgaagcattacaaagattggatcaattaacacatctaaacaatgctcaaagacaattagcaatccaacaaattaataatgctgaaacgctaaataaagcatctcgagcaattaatagagcaactaaattagataatgcaatgggtgcagtacaacaatatattgacgaacagcaccttggtgttatcagcagcacaaattacatcaatgcagatgacaatttgaaagcaaattatgataatgcaattgcgaatgcagcacatgagttagataaagtgcaaggtaatgcaattgcaaaagctgaagcagagcaattgaaacaaaatattatcgatgctcaaaatgcattaaatggagaccaaaaccttgcaaatgccaaagataaagcaaatgcgtttgttaattcgttaaatggattaaatcaacagcaacaagatcttgcacataaagcaattaacaatgccgatactgtatcagatgtaacagatattgttaataatcaaattgacttaaatgatgcaatggaaacattgaaacatttagttgacaatgaaattccaaatgcagagcaaactgtcaattaccaaaacgctgacgataatgctaaaacaaacttcgatgatgccaaacgtctagcaaatacattgctaaatagtgataacacaaatgtgaatgatatcaatggcgcaatccaagcagtcaatgatgcaatccataatcttaatggtgatcaacgactacaagatgctaaagacaaggcaattcaatcaattaatcaagctttagctaataagctaaaagaaatcgaagcttcaaatgcgacggatcaagacaagcttattgcgaaaaataaagcagaagaattggcaaacagcatcatcaacaacattaataaagcaacaagtaatcaggctgtatctcaagttcaaacagcaggcaaccacgcgattgaacaagtgcatgctaatgaaataccaaaagcaaaaattgatgccaataaagacgttgataagcaagttcaagcattaattgacgaaattgatcgaaatccaaatctaacagataaggaaaaacaagcacttaaagatcgtattaatcaaatacttcaacaaggtcataacgacattaacaatgcgctgactaaagaagaaattgaacaagctaaagcacaacttgcgcaagcattacaagacatcaaagatttagtgaaagctaaagaagatgcgaaacaagatgttgataaacaagttcaagcattaattgacgaaatcgatcaaaatccaaatctaacagataaggaaaaacaagcacttaaagatcgtattaatcaaatacttcaacaaggtcataacggcattaacaatgcgatgactaaagaagaaattgaacaagccaaagcacaacttgcacaagcattaaaagaaattaaagatttagtgaaagctaaagaaaatgcgaaacaagatgttgataaacaagttcaagcattaattgacgaaatcgatcaaaatccaaatctaacagataaggaaaaacaagcgcttaaagatcgaatcaatcaaatactgcaacaaggtcataacgacattaacaatgcgatgactaaagaagaaattgaacaagccaaagcacaacttgcacaagcattacaagacatcaaagatttagtgaaagctaaagaagatgcgaaaaatgcaataaaagccttagctaatgcgaagcgtgatcaaatcaattcaaatccagatttaacacctgagcaaaaagcaaaagcgctcaaagaaattgacgaagctgaaaaacgagcactacaaaacgttgagaatgctcaaactatagatcaattaaatcgaggattaaacttaggtttagatgacattagaaatacacatgtatgggaggttgatgaacaacctgctgtaaatgaaatttttgaagcaacacctgagcaaatcctagttaatggtgaactcattgtacatcgtgatgacatcattacagaacaagatattcttgcacacataaacttaattgatcagctttcagcagaagttattgatacaccatcaactgcaacgatttctgatagcttaacagcaaaagttgaagttacattgcttgatggatcaaaagtgattgttaatgttcctgtaaaagttgtagaaaaagaattgtcagtagtcaaacaacaggcaattgaatcaatcgaaaatgcggcacaacaaaagattgatgaaatcaataatagtgtgacattaacactggaacaaaaagaagctgcaattgcagaagttaataagcttaaacaacaagcaattgatcatgttaacaatgcacctgatgttcattcagttgaagaaattcaacaacaagaacaagcgtatattgaacaatttaatccagaacaatttacgattgaacaagcaaaatcaaatgcaattaaatcgattgaagatgcaattcaacatatgattgatgaaatcaaagctcgtactgatctaacagataaagagaagcaagaagctattgctaagttaaatcaattaaaagaacaagcaattcaagcgattcaacgtgcgcaaagcatcagtgaaataactgagcaattggaacaatttaaagctcaaatgaaagcagctaatccaacagcaaaagaactagctaaacgcaagcaagaagctattagtagaattaaagacttttcaaatgaaaaaataaatagtattcgaaatagtgaaattggcacagctgatgaaaaacaagcagcaatgaatcaaattaacgaaattgtgcttgaaacaattagagatattaataatgcgcatacattacagcaagttgaggctgcattgaacaatggtattgctcgaatttcagcagtacaaattgtaatatctgatcgtgctaaacaatcgtcaagtactggaaatgaatctaatagccatttaacaattggttatggaactgcaaatcatccatttaacagttcgactattggacataaaaagaaacttgatgaagatgatgacattgatccacttcatatgcgtcactttagtaataatttcggtaatgttattaaaaacgctattggtgtggtgggtatctctggcttactagctagtttctggttcttcattgccaaacgtcgtcgtaaagaagatgaagaggaagaattagaaataagagataataataaagattcaataaaagagactttagacgatacaaaacatttaccacttttatttgcgaaacgtcgcagaaaagaagatgaagaagatgttactgttgaagaaaaagattcgctaaataatggcgagtcactcgataaagttaaacatacgccgttcttcttaccaaaacgtcgtcgtaaagaagatgaagaagatgtggaagttacaaatgaaaacacagatgaaaaagtgttgaaagataacgaacattcaccactcttattcgcaaaacgacgcaaagataaagaggaagatgttgaaacaacaactagtattgaatctaaagatgaggacgttcctttattattggctaaaaagaaaaatcaaaaagataaccaatccaaagacaaaaagtcagcatcaaaaaatacttctaaaaaggtagcagctaaaaagaagaaaaagaaatctaagaaaaataaaaaataa

SEQ ID NO: 3338 - DNA, 20142 bp, Staphylococcus aureus; identical to SEQ ID NO: 3337

SEQ ID NO: 3339 - DNA, 20142 bp, Staphylococcus aureus; identical to SEQ ID NO: 3337

SEQ ID NO: 3340 - DNA, 20142 bp, Staphylococcus aureus; identical to SEQ ID NO: 3337

SEQ ID NO: 3341 - DNA, 15228 bp, Staphylococcus aureus
agtggatcaaatttagacaaaactgccgttgaaaacgcgttgtcacaagttgctaatgcgaaaggtgccctaaatggtaaccataatttagagcaagctaaatcaaatgcaaacactactataaacggacttcaacatttaacaactgctcaaaaagataaattgaaacaacaagtgcaacaagcacaaaatgttgcaggtgtagatactgttaaatcaagtgccaacacattaaatggtgctatgggtacgttaagaaatagcatacaagataacacagctacgaaaaatggccaaaactatcttgatgctacagaacgtaacaaaacaaactataacaatgctgttgatagtgctaatggtgtcattaatgcaacaagcaatccaaatatggatgctaatgcaattaaccaaatcgctacacaagtgacatcaacgaaaaatgcattagatggtacacataatttaacgcaagcgaaacaaacagcaacaaatgccatcgatggtgctactaacttaaataaagcgcaaaaagatgcgttaaaagcacaagttacaagtgcgcaacgtgttgcaaatgtaacaagtatccaacaaactgcaaatgaacttaatacagctatgggtcaattacaacatggtattgatgatgaaaatgcaacaaaacaaactcaaaaatatcgtgacgctgaacaaagtaagaaaactgcttatgatcaagctgtagctgctgcgaaagcaattttaaataaacaaacaggttcaaattcagataaagcagcagttgaccgtgcattacaacaagtaacaagtacgaaagatgcattgaatggtgatgcaaaactggcagaagcgaaagcggcagctaaacaaaacttaggcactttaaaccatattacgaatgcacaacgtactgacttagaaggccaaatcaatcaagcgacgactgttgatggcgttaatactgtaaaaacaaatgccaatacattagacggcgcaatgaatagcttacaaggttcaatcaatgataaagatgcgacattaagaaatcaaaattatcttgatgcggatgaatcaaaacgaaatgcatatacgcaagctgtcacagcggctgaaggcattttaaataaacaaactggtggtaacacatctaaagcagacgttgataatgcattaaatgcagttacaagagcgaaagcggctttaaatggtgctgacaacttaagaaatgcgaaaacttcagcaacaaatacgattgatggtttacctaacttaacacaattacaaaaagacaacttgaagcatcaagttgaacaagcgcaaaatgtagcaggtgtaaatggtgttaaagataaaggtaatacgttaaatactgccatgggtgcattacgtacaagtatccaaaatgataatacgacgaaaacaagtcaaaattatcttgatgcatctgacagcaacaaaaataattacaatactgctgtaaataatgcaaatggtgttattaatgcaacgaacaatccaaatatggatgctaatgcgattaatggcatggcaaatcaagtcaatacaacaaaagcagcgttaaatggtgcacaaaacttagctcaagctaaaacaaatgcgacgaacacaattaacaacgcacatgacttaaaccaaaaacaaaaagatgcattaaaaacacaagttaacaatgcacaacgtgtatctgatgcaaataacgttcaacacactgcaactgaattgaacagtgcgatgacagcacttaaagcagctattgctgataaagaaagaacaaaagcaagcggtaattatgtcaatgctgatcaagaaaaacgtcaagcgtatgattcaaaagtgactaacgctgaaaatatcattagtggtacaccgaatgcgacattaacagtcaatgacgtaaatagtgcggcatcacaagtcaatgcggctaaaacagcattaaatggtgataacaacttacgtgtagcgaaagagcatgccaacaatacaattgacggcttagcacaattgaataatgcacaaaaagcaaaattaaaagaacaagttcaaagtgcaactacattagatggtgttcaaactgttaaaaatagttctcaaacgttgaatacagcgatgaaaggcttaagagatagtattgcgaatgaagcaacaattaaagcaggtcaaaactacactgacgcaagtccaaataatcgtaacgagtacgacagtgcagttactgcagcaaaagcaatcattaatcaaacatcgaacccaacgatggaaccaaatactattacgcaagtaacatcacaagtgacaactaaagaacaggcattaaatggtgcgcgaaacttagctcaagctaagacaactgcgaaaaacaacttgaataacttaacatcaattaacaatgcacaaaaagatgcgttaacgcgtagcattgatggtgcaacaacagtagctggtgtaaatcaagaaactgcaaaagcaacagaattaaataacgcaatgcatagtttacaaaatggtatcaatgatgagacacaaacaaaacaaactcagaaatacctagatgcagagccaagtaagaaatcagcttatgatcaagcagtaaatgcagcgaaagcaattttaacaaaagctagtggtcaaaatgtagacaaagcagcagttgaacaagcattgcaaaatgtgaacagtacgaagacggcgttgaacggtgatgcgaaattaaatgaagctaaagcagctgcgaaacaaacgttaggtacattaacacacattaataatgcacaacgtacagcgttagacaatgaaattacacaagcaacaaatgttgaaggtgttaatacagttaaagccaaagcgcaacaattagatggtgctatgggtcaattagaaacatcaattcgtgataaagacacgacgttacaaagtcaaaattatcaagatgctgatgatgctaaacgaactgcttattctcaagcagtaaatgcagcagcaactattttaaataaaacagctggcggtaatacacctaaagcagatgttgaaagagcaatgcaagctgttacacaagcaaatactgcattaaacggtattcaaaacttagatcgtgcgaaacaggctgctaacacagcgattacaaatgcttcggacttaaatacaaaacaaaaagaagcattaaaagcacaagtaacaagtgcaggacgtgtatctgcagcaaatggtgttgaacatactgcgactgaattaaatactgcgatgacagctttaaagcgtgccattgctgataaagctgagacaaaagctagtggtaactatgtcaatgctgatgcgaataaacgtcaagcatatgatgaaaaagttacagctgccgaaaatatcgttagtggtacaccaacaccaacgttaacaccagcagatgttacaaatgcagcaacgcaagtaacgaatgctaagacgcagttaaacggtaatcataatttagaagtagcgaaacaaaatgctaacactgcaattgatggtttaacttctttaaatggtccgcaaaaagcaaaacttaaagaacaagtgggtcaagcgacgacgttgccaaatgttcaaactgttcgtgataatgcacaaacattaaacactgcaatgaaaggtctacgagatagcattgcgaatgaagcaacgattaaagcaggtcaaaactacacagatgcaagtcaaaacaaacaaactgactacaacagtgcagtcactgcagcaaaagcaatcattggtcaaacaactagtccatcaatgaatgcgcaagaaattaatcaagcgaaagaccaagtgacagctaaacaacaagcgttaaacggtcaagaaaacttaagaactgcgcaaacaaatgcgaagcaacatttgaacggcttaagtgacttaactgacgctcaaaaagatgcagtgaaacgtcaaatcgaaggtgcaacgcatgttaatgaagtaacacaagcacaaaataatgcggatgcattaaatacagctatgacgaacttgaaaaatggtattcaagatcagaatacgattaagcaaggtgttaacttcactgatgccgacgaagcgaaacgtaatgcatatacaaatgcagtgacgcaagctgaacaaattttaaataaagcacaaggtccaaatacttcaaaagacggtgtcgaaactgcgttagaaaatgtacaacgtgctaaaaacgaattgaacggtaatcaaaatgttgcgaacgctaagacaactgcgaaaaatgcattgaataacctaacatcaattaataatgcacaaaaagaagcattgaaatcacaaattgaaggtgcgacaacagttgcaggtgtaaatcaagtgtctacaacggcatctgaattaaatacagcaatgagcaacttacaaaatggtattaatgatgaagcagctacaaaagcagcgcttaatggtactcaaaaccttgaaaaagctaaacaacacgcaaatacagcaattgacggtttaagccatttaacaaatgcacaaaaagaggcattaaaacaattggtacaacaatcgactactgttgcagaagcacaaggtaatgagcaaaaagcaaacaatgttgatgcagcaatggacaaattacgtcaaagtattgcagataatgcgacaacaaaacaaaaccaaaattatactgatgcaagtcagaataaaaaggatgcgtacaataatgctgtcacaactgcacaaggtattattgatcaaactacaagtccaactttagatccgactgttatcaatcaagctgctggacaagtaagcacaactaaaaatgcattaaatggtaatgaaaacctagaggcagcgaaacaacaagcgtcacaatcattaggttcattagataacttaaataatgcgcaaaaacaaacagttactgatcaaattaatggcgcgcatactgttgatgaagcaaatcaaattaagcaaaatgcgcaaaacttaaatacagcgatgggtaacttgaaacaagcgatagctgacaaagatgctacgaaagcgacagttaacttcactgatgcagatcaagcaaaacaacaagcatataacactgctgttacaaatgctgaaaatatcatttcaaaagctaatggcggcaatgcaacacaagctgaagttgaacaagcaatcaaacaagttaatgctgcaaaacaagcattaaatggtaatgccaacgttcaacatgcaaaagacgaagcaacagcattaattaatagctctaatgaccttaaccaagcacaaaaagacgcattaaaacaacaagttcaaaatgcaactactgtagctggtgtaaacaatgttaaacaaacagcacaagagttaaacaatgctatgacacaattaaaacaaggcattgcagataaagaacaaacaaaagctgatggtaactttgtcaatgcagatcctgataagcaaaatgcatataatcaagcagtagcgaaagctgaagcattaattagtgctacgcctgatgttgtcgttacacctagcgaaattactgcagcgttaaataaagttacgcaagctaaaaatgatttaaatggtaatacaaacttagcaacggcgaaacaaaatgttcaacatgctattgatcaattgccaaacttaaaccaagcgcaacgtgatgaatacagcaaacaaatcacgcaagcaacacttgtaccaaacgtcaatgctattcaacaagcggcgacaacgcttaatgacgcgatgacacaattgaaacaaggtattgcgaataaagcacaaattaaaggtagcgagaactatcacgatgctgatactgacaagcaaacagcatatgataatgcagtaacaaaagcagaagaattgttaaaacaaacaacaaatccaacaatggatccaaatacaattcaacaagcattaactaaagtgaatgacacaaatcaagcacttaacggtaatcaaaaattagctgatgccaaacaagatgctaagacaacacttggtacactagatcatttaaatgatgctcaaaaacaagcgctaacaactcaagttgaacaagcaccagatattgcaacagttaataatgttaagcaaaatgctcaaaatctgaataatgctatgactaacttaaacaatgcattacaagataaaactgagacattaaatagcattaactttactgatgcagatcaagctaagaaagatgcttatactaatgcggtttcacatgcagaaggtattttatctaaagcaaatggcagcaatgcaagtcaaactgaagtggaacaagcgatgcaacgtgtgaacgaagcgaaacaagcattgaatggtaatgacaatgtacaacgtgcaaaagatgcagcgaaacaagtgattacaaatgcaaatgatttaaatcaagcaatgacacaattgaaacaaggtattgcagataaagaccaaactaaagcaaatggtaactttgtcaatgctgatactgataagcaaaatgcttacaacaatgcggtagcacatgctgaacaaataattagtggtacaccaaatgcaaacgtggatccacaacaagtggctcaagcgttacaacaagtgaatcaagctaagggtgatttaaacggtaaccataacttacaagttgctaaagacaatgcaaatacagccattgatcagttaccaaacttaaatcaaccacaaaaaacagcattaaaagaccaagtgtcgcatgcagaacttgttacaggtgttaatgctattaagcaaaatgctgatgcgttaaataatgcaatgggtacattgaaacaacaaattcaagcgaacagtcaagtaccacagtcagttgactttacacaagcggatcaagacaaacaacaagcatataacaatgcggctaaccaagcgcaacaaatcgcaaatggcataccaacacctgtattgacgcctgatacagtaacacaagcagtgacaactatgaatcaagcgaaagatgcattaaacggtgatgaaaaattagcacaagcgaaacaagaagctttagcaaatcttgatacgttacgcgatttaaatcaaccacaacgtgatgcattacgtaaccaaatcaatcaagcacaagcgttagctacagttgaacaaactaaacaaaatgcacaaaatgtgaatacagcaatgagtaacttgaaacaaggtattgcaaacaaagatactgtcaaagcaagtgagaactatcatgatgctgatgccgataagcaaacagcatatacaaatgcagtgtctcaagcggaaggtattatcaatcaaacgacaaatccaacgcttaacccagatgaaataacacgtgcattaactcaagtgactgatgctaaaaatggcttaaacggtgaagctaaattggcaactgaaaagcaaaatgctaaagatgccgtaagtgggatgacgcatttaaacgatgctcaaaaacaagcattaaaaggtcaaatcgatcaatcgcctgaaattgctacagtgaaccaagttaaacaaacagcaacgagcctagatcaagcaatggatcaattatcacaagctattaatgataaagctcaaacattagcggacggtaattacttaaatgcagatcctgacaaacaaaatgcgtataaacaggcagtagcaaaagctgaagcattattgaataaacaaagtggtactaatgaagtacaagcacaagttgaaagcatcactaatgaagtgaacgcagcgaaacaagcattaaatggtaatgacaatttggcaaatgcaaaacaacaagcaaaacaacaattggcgaacttaacacacttaaatgatgcacaaaaacaatcatttgaaagtcaaattacacaagcgccacttgttacagatgtcactacgattaatcaaaaagcacaaacgttagatcatgcgatggaattattaagaaatagtgttgcggataatcaaacgacattagcgtctgaagattatcatgatgcaactgcgcaaagacaaaatgactataaccaagctgtaacagctgctaataatataattaatcaaactacatcgcctacgatgaatccagatgatgttaatggtgcaacgacacaagtgaataatacgaaagttgcattagatggtgatgaaaaccttgcagcagctaaacaacaagcaaacaacagacttgatcaattagatcatttgaataatgcgcaaaagcaacagttacaatcacaaattacgcaatcatctgatattgctgcagttaatggtcacaaacaaacagcagaatctttaaatactgcgatgggtaacttaattaatgcgattgcagatcatcaagccgttgaacaacgtggtaacttcatcaatgctgatactgataaacaaactgcttataatacagcggtaaatgaagcagcagcaatgattaacaaacaaactggtcaaaatgcgaaccaaacagaagtagaacaagctattactaaagttcaaacaacacttcaagcgttaaatggagaccataatttacaagttgctaaaacaaatgcgacgcaagcaattgatgctttaacaagcttaaatgatcctcaaaaaacagcattaaaagaccaagttacagctgcaactttagtaactgcagttcatcaaattgaacaaaatgcgaatacgcttaaccaagcaatgcatggtttaagacagagcattcaagataacgcagcaactaaagcaaatagcaaatatatcaacgaagatcaaccagagcaacaaaactatgatcaagctgttcaagccgcaaataatattatcaatgaacaaactgcaacattagataataatgcgattaatcaagcagcgacaactgtgaatacaacgaaagcagcattacatggtgatgtgaagttacaaaatgataaagatcatgctaagcaaacggttagtcaattagcacatctaaacaatgcacaaaaacatatggaagatacgttaattgatagtgaaacaactagaacagcagttaagcaagatttgactgaagcacaagcattagatcaacttatggatgcattacaacaaagtattgctgacaaagatgcaacacgtgcgagcagtgcatatgtcaatgcagaaccgaataaaaaacaatcctatgatgaagcagttcaaaatgctgagtctatcattgcaggattaaataatccaactatcaataaaggtaatgtatcaagtgcgactcaagcagtaatatcatctaaaaatgcattagatggtgttgaacgattagctcaagataagcaaactgctggaaattctctaaatcatttagatcaattaacaccagctcaacaacaagcgctagaaaatcaaattaataatgcaacaactcgtgataaagtggctgaaatcattgcacaagcgcaagcattaaatgaagcgatgaaagcattaaaagaaagtattaaggatcaaccacaaactgaagcaagtagtaaatttattaacgaggatcaagcgcaaaaagatgcttatacgcaagcagtacaacacgcgaaagatttgattaacaaaacaactgatcctacattagctaaatcaatcattgatcaagcgacacaggcagtgacagatgctaaaaacaatttacatggtgatcaaaaactagctcaagataagcaacgtgcaacagaaacgttaaataacttgtctaacttgaatacaccacaacgtcaagcacttgaaaatcaaattaataatgcagcaactcgtggcgaagtagcacaaaaattaactgaagcacaagcacttaaccaagcaatggaagctttacgtaatagcattcaagatcaacagcaaacggaagcgggtagcaagtttatcaatgaagataaaccacaaaaagatgcttaccaagcagcagttcaaaatgcaaaagatttaattaatcaaactaacaatccaacgcttgataaagcacaagttgaacaattgacacaagctgttaaccaagctaaagataacctacacggtgatcaaaaacttgcagacgataaacaacatgcggttactgatttaaatcaattaaatggtttgaataatccgcaacgtcaagcacttgaaagccaaataaacaacgcagcaactcgtggcgaagtagcacaaaaattagctgaagcaaaagcgcttgatcaagcaatgcaagcattacgtaatagtattcaagatcaacaacaaacagaatctggtagcaagtttatcaatgaagataaaccgcaaaaagatgcttaccaagcagcagttcaaaatgcaaaagatttaattaaccaaacaggtaatccaacactcgacaaatcacaagtagaacaattgacacaagcagtaacaactgcaaaagataatctacatggtgatcaaaaacttgctcgtgatcaacaacaagcagtaacaactgtaaatgcattgccaaacttaaatcatgcacaacaacaagcattaactgatgctataaatgcagcgcctacaagaacagaggttgcacaacatgttcaaactgctactgaacttgatcacgcgatggaaacattgaaaaataaagttgatcaagtgaatacagataaggctcaaccaaattacactgaagcgtcaactgataaaaaagaagcagtagatcaagcgttacaagctgcagaaagcattacagatccaactaatggttcaaatgcgaataaagacgctgtagaccaagtattaactaagcttcaagaaaaagaaaatgagttaaatggtaatgagagagtcgctgaagctaaaacacaagcgaaacaaactattgaccaattaacacatttaaatgctgatcaaattgcaactgctaaacaaaacattgatcaagcgacgaaacttcaaccaattgctgaattagtagatcaagcaacgcaattgaatcaatctatggatcaattacaacaagcagttaatgaacatgctaacgttgagcaaactgtagattacacacaagcagattcagataaacaaaatgcttataaacaagctattgctgatgctgaaaatgtattgaaacaaaatgcgaataagcaacaagtggatcaagcacttcaaaatattttaaatgcaaaacaagcattaaatggtgatgaacgtgtagcacttgctaaaacaaatggtaaacatgacatcgaccaattgaatgcattaaacaatgctcaacaagatggatttaaaggtcgcatcgatcaatcaaacgatttaaatcaaatccaacaaattgtagatgaggctaaggcacttaatcgtgcaatggatcaattgtcacaagaaatcactgacaatgaaggacgcacgaaaggtagcacgaactatgtcaatgcagatacacaagtcaaacaagtatatgatgaaacggttgataaagcgaaacaagcacttgataaatcgactggtcaaaacttaactgcaaaacaagttatcaaattaaatgatgcagtcactgcagctaagaaagcattaaatggtgaagaaagacttaataatcgtaaagctgaagcattacaaagattggatcaattaacacatctaaacaatgctcaaagacaattagcaatccaacaaattaataatgctgaaacgctaaataaagcatctcgagcaattaatagagcaactaaattagataatgcaatgggttcagtacaacaatatattgacgaacagcaccttggtgttatcagcagcacaaattacatcaatgcagatgacaatttgaaagcaaattatgataatgcaattgcgaatgcagcacatgagttagataaagtgcaaggtaatgcaattgcaaaagctgaagcagagcaattgaaacaaaatattatcgatgctcaaaatgcattaaatggagaccaaaaccttgcaaatgccaaagataaagcaaatgcgtttgttaattcgttaaatggattaaatcaacagcaacaagatcttgcacataaagcaattaacaatgccgatactgtatcagatgtaacagatattgttaataatcaaattgacttaaatgatgcaatggaaacattgaaacatttagttgacaatgaaattccaaatgcagagcaaactgtcaattaccaaaacgctgacgataatgctaaaacaaacttcgatgatgccaaacgtctagcaaatacattgctaaatagtgataacacaaatgtgaatgatatcaatggcgcaatccaagcagtcaatgatgcaatccataatcttaatggtgatcaacgactacaagatgctaaagacaaggcaattcaatctattaatcaagctttagctaataagctaaaagaaatcgaagcttcaaatgcgacggatcaagacaagcttattgcgaaaaataaagcagaagaattggcaaacagcatcatcaacaacattaataaagcaacaagtaatcaggctgtatctcaagttcaaacagcaggcaaccacgcgattgaacaagtgcatgccaatgaaataccaaaagcaaaaattgatgccaataaagacgttgataagcaagttcaagcattaattgacgaaattgatcgaaatccaaatctaacagataaggaaaaacaagcacttaaagatcgtattaatcaaatacttcaacaaggtcataacggcattaacaatgcgatgactaaagaagaaattgaacaagccaaagcacaacttgcgcaagcattacaagacatcaaagatttagtgaaagctaaagaagatgcgaaacaagatgttgataaacaagttcaagctttaattgacgaaatcgatcaaaatccaaatctaacagataaggaaaaacaagcacttaaagatcgtattaatcaaatacttcaacaaggtcataacgacattaacaatgcgatgacaaaagaagcaattgaacaagcaaaagaacgtttagcgcaagcattgcaagacatcaaagatttagtgaaagctaaagaagatgcgaaaaatgatattgataaacgtgtacaagctttaattgacgaaatcgatcaaaatccaaatctaacagataaggaaaaacaagcacttaaagatcgaattaatcaaatacttcaacaaggtcataacgacattaacaatgcgctgactaaagaagaaattgagcaggcaaaagcacaacttgcacaagcattgcaagacatcaaagatttagtgaaagctaaagaagatgcgaaaaatgcaataaaagccttagctaatgcgaagcgtgatcaaatcaattcaaatccagatttaacacctgagcaaaaagcaaaagcgctcaaagaaattgacgaagctgaaaaacgagcactacaaaacgttgagaatgctcaaactatagatcaattaaatcgaggattaaacttaggtttagatgacattagaaatacacatgtatgggaggttgatgaacaacctgctgtaaatgaaatttttgaagcaacacctgagcaaatcctagttaatggtgaactcattgtacatcgtgatgacatcattacagaacaagatattcttgcacacataaacttaattgatcagctttcagcagaagtcatcgatacaccatcaactgcaacgatttctgatagcttaacagcaaaagttgaagttacattgcttgatggatcaaaagtgattgttaatgttcctgtaaaagttgtagaaaaagaattgtcagtagtcaaacaacaggcaattgaatcaatcgaaaatgcggcacaacaaaagattaatgaaatcaataatagtgtgacattaacactggaacaaaaagaagctgcaattgcagaagttaataagcttaaacaacaagcaattgatcatgttaacaatgcacctgatgttcattcagttgaagaaattcaacaacaagaacaagcgcatattgaacaatttaatccagaacaatttacgattgaacaagcaaaatcaaatgcaattaaatcgattgaagatgcaattcaacatatgattgatgaaatcaaagctcgtactgatctaacagataaagagaagcaagaagctattgctaagttaaatcaattaaaagaacaagcaattcaagcgattcaacgtgcgcaaagcatcgatgaaataagtgagcaattggaacaatttaaagctcaaatgaaagcagctaatccaacagcaaaagaactagctaaacgcaagcaagaagctattagtagaattaaagacttttcaaatgaaaaaataaatagtattcgaaatagtgaaattggcacagctgatgaaaaacaagcagcaatgaatcaaattaacgaaattgtgcttgaaacaattagagatattaataatgcgcatacattacagcaagttgaggctgcattgaacaatggtattgctcgaatttcagcagtacaaattgtaacatctgatcgtgctaaacaatcgtcaagtactggaaatgaatctaatagccatttaacaattggttatggaactgcaaatcatccatttaacagttcgactattggacataaaaagaaacttgatgaagatgatgacattgatccacttcatatgcgtcactttagtaataatttcggtaatgttattaaaaacgctattggtgtggtgggtatctctggtttactagctagtttctggttcttcattgccaaacgtcgtcgtaaagaagatgaagaggaagaattagaaataagagataataataaagattcaataaaagagactttagacgatacaaaacatttaccacttttatttgcgaaacgtcgcagaaaagaagatgaagaagatgttactgttgaagaaaaagattcgctaaataatggcgagtcactcgataaagttaaacatacgccgttcttcttaccaaaacgtcgtcgtaaagaagatgaagaagatgtggaagttacaaatgaaaacacagatgaaaaagtgttgaaagataacgaacattcaccactcttattcgcaaaacgacgcaaagataaagaggaagatgttgaaacaacaactagtattgaatctaaagatgaggacgttcctttattattggctaaaaagaaaaatcaaaaagataaccaatccaaagacaaaaagtcagcatcaaaaaatacttctaaaaaggtagcagctaaaaagaagaaaaagaaagctaagaaaaataaaaaataa

SEQ ID NO: 3342 - DNA, 15228 bp, Staphylococcus aureus; identical to SEQ ID NO: 3341

SEQ ID NO: 3343 - DNA, 15228 bp, Staphylococcus aureus; identical to SEQ ID NO: 3341

SEQ ID NO: 3344 - DNA, 744 bp, Staphylococcus aureus
atgaataaacagaggagcacaaaaatgaataaaaatataatcatcaaaagtattgcrgcattgacgattttaacatcartractggygtcggcacaacartggttgawggtattcaacaaacagccaaagcmgaaaatastgtkaaaywaattacmaayacraatgttgcaccatacagtggtgttacatggatgggcgctggaacaggatttgtagttggraatcawacaatcattaccaataaacatgttacytatcacatgaaagtcggtgatgaaatcaaagcacatcctaatggtttttataataacggtggtggactttataaagttactaagattgtagattatcctggtaaagaagatattgcggtygtacaagttgaagaaaaatcaacrcaaccaaaaggtagaaaattcaaagatttcactagyaaatttaatatagcatcagaagctaaagaaaatgaacctatatcagtcattggttatccaaatcctaatggaaataaactacaaatgtatgaatcaactggtaaagtaytatcagtgaatggraatatagtgwcwtckgatgcrrttrtycarcctggyagctctggttcacctatattaaatagtaarcrmgaagcwattggtgtwatstatgcyrgtrataarccawcaggtgaaagyacaagrksatttgctgtttatttctctcctgaaattaagaaattyattgcagataatttagataaataa

SEQ ID NO: 3345 - DNA, 717 bp, Staphylococcus aureus
atgaataaaaatataatcatcaaaagtattgcagcattgacgattttaacatcagtgactggcgtcggcacaacagtggttgagggtattcaacaaacggctaaagctgaacataatgtgaaactaatcaaaaatactaatgtagcaccatacaatggtgtcgtttcgataggatctggaacaggtttcattgtcggtaaaaatacaattgttaccaacaagcatgtcgttgcaggtatggaaattggtgcacatattatagcgcatcccaatggtgaatataataatggcggattttataaagttaaaaaaattgtccgttattcaggtcaagaagatattgccattctacatgtggaagataaagctgttcatccaaaaaacaggaattttaaagattacacaggcattttaaaaatagcatcagaagctaaagaaaatgaacgcatttcaattgttggctatccagaaccatatataaataaatttcaaatgtatgagtcaacaggaaaagtgctgtcagttaaaggcaacatgattattactgatgctttcgtagaaccaggcaactcaggttcagctgtatttaacagtaaatacgaagttgtaggtgttcactttggtggaaacggccctggaaataaaagtacaaaaggatatggtgtttatttctctcctgaaattaagaaattcattgcagataacacagataaataa

SEQ ID NO: 3346 - DNA, 717 bp, Staphylococcus aureus
atgaataaaaatataatcatcaaaagtatwgcagcattgacgattttaacatcagtgactggtgtyggcacaacaatggttgarggtattcaacaaacagcyaaagccgaamatartgtraaaytaatcaaaaatackaatgtagcaccatacaatggtatcgtttcgataggatctggaacaggtttcattgtcggmaaaaatacaattgtwactaacaagcatgtcgttgcaggtatggarattggsgcacawatyattgcgcatccwaatggtgaatataataatggcggwttttataaagttaaaaaaattgtccgytatgcaggtmaagaagatattgccattctacatgtggaagataaagctrttcatccmaaaaataggaattttaaagattatacaggtattttaaaaatagcatcagaagcsaaagaaaatgaacgcatttcaattgttggctatccagaaccwtatataaataaatttcaaatgtatgaatcaacaggaaaagtgctrtcagtgaaaggcaacatgattatttctgatgctttcgtagaaccaggcaactcaggttcwgctgtatttaatagtaaatacgaagttgtaggtgttcactttggtggaaacggccctgcaaataaaagtacaaaaggatatggygtttatttctctcctgaaattaagaaattcatygcagataatttarwtaaataa

SEQ ID NO: 3347 - DNA, 552 bp, Staphylococcus aureus
atgggcgcaggaacaggatttgtagttggaaatcatacaatcattactaataaacatgttacctatcacatgaaagtcggtgatgaaattaaagcacatcctaatggtttttataataatggtggtggactttataaagttactaagattgtagattatcctggtaaagaagatattgcggttgtgcaagttgaagaaaaatcaacacaaccaaaaggtagaaaattcaaagatttcactagcaaatttaatatagcatcagaggctaaagaaaatgaacctatatcagtcattggttatccaaatcctaatggaaataaactacaaatgtatgaatcaactggtaaagtattatcagtgaatgggaatatagtgtcatcggatgcaataatccagcctggtagctctggatcacctatattaaatagtaagtacgaagctattggtgtaatctatgcaggtaataagccatcaggtgaaagcacaagagcattcgctgtttatttctctcctgaaattaagaaattcattgcagataatttagataaataa

SEQ ID NO: 3348 - DNA, 765 bp, Staphylococcus aureus
atgtatctagatatcaaaataattaaaaragaggaacttaaaatgaacaaaaacgtagtcatcaagagtttagcarcwttaacaattttaacatctgtaacaggtattggaayaacattggttgaggaagtwcaacaaactgccaaagcagaaaataatgtcacaaaarttmaagatacwaatatttttccatatactggtgtagttgcttttaaaagtgcaactggatttgtagttggaaagaatactattttaacaaataaacatgtgtcgaaaaattacaaagtgggcgatmgwattactgcacatccaaatagtgataaaggtaatggtggtatttattcgattaaaaagattattaattatccaggtaaagaagatgtatcagtcattcaagttgaagagcgtgcaatagaacgtggaccaaaaggctttaattttaatgataatgtaacgccattcaaatatgcggcaggggctaaagctggtgagcgaattaaagtgattggttatccacacccatacaaaaataaatatgttttatatgagtcaactggccctgtgatgtcagtagaaggtagcagtattgtatattcagcgcatactgaaagcggaaactctggatcacctgtattaaacagcaacaacgaattagttggtattcattttgcttctgatgtaaaaaatgatgataacagaaatgcatatggcgtctactttacaccagaaattaaaaaattcattgcagaaaacatagataaataa

SEQ ID NO: 3349 - DNA, 165 bp, Staphylococcus aureus
atgatagggagaattgtgacatgcatacacaacctaaatagcaacaacgaactagtaggtattcattttgcttcagatgtgaaagatgatgacaatagaaatgcttatggcgtctacttcacaccagagattaaaaaattcattgcagaaaatatagataaataa

SEQ ID NO: 3350 - DNA, 1770 bp, Staphylococcus aureus
atgaaatttaagtcattgattacaacaacwttagcattaggygttwtagcatcaacaggwgcaaactttaatamtaaygaagcrtctgccgcagctaagccattagataaatcatcaagtwcrttacaccatggayattctaamryccakrttccatatrcaatyactgtgaacggyacaagccaaaayattttatcaagcttaacatttaataagaatcaaaatattagttataaagatwtagagrataragttaaatcagttttawamtywrayagaggtattagtgatatmgatttaagactwtcraagcaagcgraatatackgttyaytttaaaaatggaacaaararagttatcgatttgaaakyaggtayytacacagctgayttaatyaatacaagtgamattaaagctatyartrttaacgtagatactaaaaagcaasytraagataaaaagaaagmtaaagcaaatkwycaagtkccatayacaatcacwgtgarcggyacaagccaaaayattttatcaaacytaacatttaataaraatcaaaatattagytacaaagatttagaggrtaragttaaatcagttttagaatcaaatagaggtattacygatgttgatttaagaytwtcgaagcaagcgaaatatacagttaattttaaaaatggracgaagaaagttatcgatttgaaakcaggtatttacacagcgaatttaatmaattcaagtgatattaaaagtatcaatattaacgtagatacaaaaaaacatatcgaaaataaagctaaaagaaactatcaagttccatattcaattaatytaaatggtacatctacaaacattttatcgaatctttcattttcaaataaaccttggacaaattacaaaaatttaactagtcaaataaaatcagtactgaagcatgatagaggtattagtgaacaagatttaaaatatgctaagaaagcttattatactgtttattttaaaaatggtggtaaaagaatcttacagttraattcaaaaaattacacagcaaacttagttcatgygaaagatgttaagagaattgaaattactgttaaaacaggaactaaagcgaaagcagacagatatgtaccatacacaattgcagtaaatggcacatcaacaccaattttatcagatttaaaatttacaggtgacccacgtgtaggctacaaagatatcwctaaaaaagttaaatcagtaytgaagcatgatagaggtatcggggaacgtgaattaaaatatgcaaaaaaagcwacttacrcagtacattttaaaaatggaamgaaaaaagtgattaaywtaaaytcaaawattagccaactgaatctgctttatgttcaagatattaaaaagatagatatygatgttaaaacaggrwcwaaagcgaaagcggatagctatgtaccatatacaattgcagtaaatggcacatcaacaccaattttatcaaarcttaaaatttcgaataaacaattaattagtyacaaatatttaaaygacaaagtgaaatctgtattaaaaartgaaagaggyatcagtgatcttgacttaaaatttgcgaaacaagcaaaatatacagtatatttcaraaatggaaagaaacaagtagtgaatttaaaatcagacatctttacacctaatttatttagtgccaaagatattaaaaagatwgrtattgatgtaaaacaakrswcwaaakcraaarmrratarmtawgtaccatatacaatt

SEQ ID NO: 3351 - DNA, 1746 bp, Staphylococcus aureus
atgaaatttaagtcattgattacaacaacattagcattaggcgttatagcatcaacaggagcaaactttaatactaacgaagcatctgccgcagctaagccattagataaatcatcaagtacattacaccatggacattctaacatccagattccatatacaattactgtgaacggyacaagccaaaacattttatcaagcttaacatttaataagaatcaaaatattagttataaagatatagagaataaagttaaatcagttttatactttaatagaggtattagtgatatcgatttaagactttcaaagcaagcggaatatacggttcattttaaaaatggaacaaaaagagttatcgatttgaaatcaggtatctacacagctgacttaatcaatacaagtgacattaaagctatcagtgttaacgtagatactaaaaagcaacctaaagataaagctaaagcaaatgttcaagtgccatatacaatcacagtgaacggcacaagccaaaacattttatcaaacctaacatttaataaaaatcaaaatattagttacaaagatttagagggtaaagttaaatcagttttagaatcaaatagaggtattactgatgttgatttaagactttcgaagcaagcgaaatatacagttaattttaaaaatggaacgaagaaagttatmgatttgaaatcaggtatttacacagcgaatttaatcaattcaagtgatattaaaagtatcaatattaacgtagatacaaaaaaacatatcgaaaataaagctaaaagaaactatcaagttccatattcaattaatctaaatggtacatctacaaacattttatcgaatctttcattttcaaataaaccttggacaaattacaaaaatttaactagtcaaataaaatcagtactgaagcatgatagaggtattagtgaacaagatttaaaatatgctaagaaagcttattatactgtttattttaaaaatggtggtaaaagaatcttacagttaaattcaaaaaattacacagcaaacttagttcatgcgaaagatgttaagagaattgaaattactgttaaaacaggaactaaagcgaaagcagacagatatgtaccatacacaattgcagtaaatggcacatcaacaccaattttatcaaaactaaaaatttcgaataaacaattaattagttacaaatatttaaacgacaaagtgaaatctgtattaaaaagtgaaagaggtatcagtgatcttgacttaaaatttgcgaaacaagcaaaatatacagtatatttcaaaaatggaaagaaacaagtagtgaatttaaaatcagacatctttacacctaatttatttagtgccaaagatattaaaaagatwgatattgatgttaaaacakrswcwaaakcraaarmrratarctatgtaccatatacaattgcagtaaatggcacatcaacaccaattttatcaaaactaaaaatttcgaataaacaattaattagttacaaatatttaaatgacaaagtgaaatctgtattaaaaagtgaaagaggcatcagtgatcttgacttaaaatttgcgaaacaagcaaaatatacagtatatttcaaaaatggaaagaaacaagtagtgaatttaaaatcagacatctttacacctaatttatttagtgccaaagatattaaaaagatagatattgatgtaaaacaatacactaaatcaaaaaaaaataaa

SEQ ID NO: 3352 - DNA, 321 bp, Staphylococcus aureus
atcaaaaaaaaaataaataaatctaataatgtgaaattcccagtaacaataaataaatttgaaaacatagtttcaaatgaatttgtgttctataatgcaagcaaaattacaattaatgatttaagtataaaacttaaatcagcaatkgcaaatgatcaagggataactaaacatgacatagracttgctgaacgcgcagtgtataaagtgtattttaaaaatggttcgtcaaaatatgtagacttaaaaactgagtataaagatgaaagagtatttaaagcaactgacattaaaaaggtagatattgaacttaaattctaa

SEQ ID NO: 3353 - DNA, 300 bp, Staphylococcus aureus
gcagtaaatggcacatcaacaccaattttatcaaaactaaaaatttcgaataaacaattaattagttacaaatatttaaatgacaaagtgaaatctgtattaaaaagtgaaagaggcatcagtgatcttsacttaaaatttgcgaaacaagcaaaatatacagtatatttcaaaaatggaaagaaacaagtagtgaatttaaaatcagacatctttacacctaatttatttagtgccaaagatattaaaaagattgatattgatgtaaaacaatacactaaatcaaaaaaaaataaataa

SEQ ID NO: 3354 - DNA, 3057 bp, Staphylococcus aureus
gtgaaaaayaatcttaggtacggcattagaaaacataaattgggagcagcatcagtattcttaggaacaatgatcgttgttgggatgggacaagacaaagaagctgcagcatcagamcaaaagacaactacagtagaagaaaatgggaattcagctactgataataaaacaagtgaaacacaaacaactgcaactaacgttaatcatatagaagaaactcaatcatataacgcaacagtaacagaacaaccgtcaaacgcaacacaagtaacaactgaagaagcaccaaaagcagtacaagcaccacaaactgcacaaccagcaaatatagaaacagttaaagaagaggtagttaaggaagaagcgaaacctcaagttaaggaaacaacacaatctcaagacaatagcggagatcaaagacaagtagatttaacacctaaaaaggctacacaaaatcaagtcgcagaaacacaagttgaagtggcacagccaagaacggcatcagaaagtaagccacgtgtgacaagatcagcagatgtagcggaagctaaggaagctagtaacgcgaaagtggaaacgggtacagatgtaacaagtaaagttacagtagaaattggttctattgaggggcataacaatacaaataaagtagaacctcatgcaggacaacgagcggtactaaaatataagttgaaatttgagaatggtttacatcaaggtgactactttgactttactttatcaaataatgtaaatacgcatggcgtatcaactgctagaaaagtaccagaaattaaaaatggttcagtcgtaatggcgacaggtgaagttttagaaggtggaaagattagatatacatttacaaatgatattgaagataaggttgatgtaacggctgaactagaaattaatttatttattgatcctaaaactgtacaaactaatggaaatcaaactataacttcaacactaaatgaagaacaaacttcaaaggaattagatgttaaatataaagatggtattgggaattattatgccaatttaaatggatcgattgagacatttaataaagcgaataatagattttcgcatgttgcatttattaaacctaataatggtaaaacgacaagtgtgactgttactggaactttaatgaaaggtagtaatcagaatggaaatcaaccaaaagttaggatatttgaatacttgggtaataatgaagacatagcgaagagtgtatatgcaaatacgacagatacttctaaatttaaagaagtcacaagtaatatgagtgggaatttgaatttacaaaataatggaagctattcattgaatatagaaaatctagataaaacttatgttgttcactatgatggagagtatttaaatggtactgatgaagttgattttagaacacaaatggtaggacatccagagcaactttataagtattattatgatagaggatataccttaacttgggataatggtttagttttatacagtaataaagcgaacggaaatgrgaaaaatggtccgattattcaaaataataaatttgaatataaagaagatacaattaaagaaactcttacaggtcaatatgataagaatttagtaactactgttgaagaggaatatgattcatcaactcttgacattgattaccacacagctatagatggtggaggtggatatgttgatggatacattgaaacaatagaagaaacggattcatcagctattgatatcgattaccatactgctgtggatagcgaagcaggtcacgttggaggatacactgagtcctctgaggaatcaaatccaattgactttgaagaatctacacatgaaaattcaaaacatcacgctgatgttgttgaatatgaagaagatacaaacccaggtggtggtcaggttactactgagtctaacttagttgaatttgacgaagagtctacaaaaggtattgtaactggcgcagtgagcgatcatacaacagttgaagatacgaaagaatatacaactgaaagtaatctgattgaattagtggatgaattacctgaagagcatggtcaagcacaaggaccagtcgaggaaattactraaaacaatcatcatatttctcattctggtttaggaactgaaaatggtcacgggaattatgacgtgattgaagaaatcgaagaaaatagccacgttgatattaagagtgaattaggttatgaaggtggccaaaatagcggtaaccagtcattcgaggaagacacagaagaagacaaacctaaatatgaacaaggtggcaatatcgtagatatcgattttgatagtgtacctcaaattcatggtcaaaataaaggtaatcagtcattcgaggaagatacagaaaaagacaaacctaagtatgaacatggcggtaacatcattgatatcgacttcgacagtgtgccacatattcacggattcaataagcacactgaaattattgaagaagatacaaataaagataaaccaagttatcaattcggtggacacaatagtgttgactttgaagaagatacacttccaaaagtaagcggccaaaatgaaggtcaacaaacgattgaagaagatacaacacctccaatcgtgccaccaacgccaccgacaccagaagtaccaagtgagccggaaacaccaacgccaccaacaccagaagtaccaagtgagccggaaacaccaacaccaccgacaccagaagtgccgagtgagccagaaactccaacaccgccaacaccagaggtaccagctgaacctggtaaaccagtaccacctgccaaagaagaacctaaaaagccttctaaaccagtggaacaaggtaaagtagtaacacctgttattgaaatcaatgaaaaggttaaagcagtggcaccaactaaaaaaccacaatctaagaaatctgaactacctgaaacaggtggagaagaatcaacaaacaaaggtatgttgttcggcggattattcagcattctaggtttagcattattacgcagaaataaaaagaatcacaaagcataa

SEQ ID NO: 3355 - DNA, 3117 bp, Staphylococcus aureus
gtgaaaaacaatcttaggtacggcattagaaaacataaattgggagcagcatcagtattcttaggaacaatgatcgttgttgggatgggacaagataaagaagctgcagcatcagaacaaaagacaactacagtagaagaaaatgggaattcagctactgataataaaacaagtgaaacacaaacaactgctactaacgttaatcatatagaagaaactcaatcatataacgcaacagtaacagaacaaccgtcaaacgcaacacaagtaacaactgaagaagcaccaaaagcagtacaagcaccacaaactgcacaaccagcaaatgtagaaacagttaaagaagaagagaaacctcaagttaaggaaacgacacaacctcaagacaatagcggaaatcaaagacaagtagatttaacacctaaaaaggttacacaaaatcaagggacagaaacacaagttgaagtggcacagccaagaacggcatcagaaagtaagccacgtgtgacaagatcagcagatgtagcggaagctaaggaagctagtgacgtttcagaagttaaaggcacagatgttacaagtaaagttacagtagaaagtggttctattgaggcacctcaaggaaataaagtagagccacatgctggtcaacgtgtcgtattgaaatacaaattgaaattcgcagatggattaaaaagaggagattattttgattttacattatcaaataatgtaaatacttatggggtttcaacagctagaaaggtaccagagattaaaaatggctcagttgtaatggctacaggtgagatcttagggaatggtaacataagatatacatttactaacgaaattgaacacaaggtagaggtaacagctaatttagaaatcaacttatttattgaccctaaaactgtacaaagcaatggagaacaaaagattacttctaaattaaatggtgaagaaacagaaaaaacaataccagttgtttataatccaggtgttagcaatagttatacaaatgtaaatggatcaattgaaacatttaataaagaatctaataaatttacacatatagcttatattaagccaatgaatggaaaccagtcaaacactgtatcagtaacagggacgttgactgaaggtagtaatttagctggtggacaacctactgttaaagtatatgaatatctagggaaaaaagatgaattgccacaaagtgtttatgcaaatacatcagatactaacaaattcaaagatgtaacaaaggaaatgaatggaaaattgagtgtgcaagacaatggtagttactcattgaatttagataagttggataaaacgtatgtcattcattatacaggtgaatatttgcaagggtcagatcaggttaattttagaactgaattatatgggtatccagaacgagcatataaatcttactatgtttatgggggatatcgtttaacttgggataatggtttagttttatatagcaataaagctgacggcaatggtaaaaatggacaaattattcaagataatgattttgaatataaagaagatactgcaaaaggaactatgagcgggcagtacgatgccaagcaaattattgaaacagaagaaaatcaagacaatacaccgcttgacattgattaccacacagctatagatggtgagggtggttatgttgatgggtatattgaaacaatagaagaaacggattcatcagctattgatatcgattaccatactgctgtggatagtgaagtgggtcacgttggaggatacactgagtcctctgaggaatcaaatccaattgactttgaagaatcgacacatgaaaattcaaaacatcacgctgatgttgttgaatatgaagaggatacaaatccaggtggtggccaagtaacaactgagtctaacttagttgaatttgacgaagagtctacaaaaggtattgtaactggcgcagtgagcgaccatacaacaattgaagatacgaaagaatatacgactgaaagtaatctgattgaactagtagatgaactacctgaagaacatggtcaagcacaaggaccaatcgaggaaattactgaaaacaatcatcatatttctcattctggtttaggaactgaaaatggtcacggtaattatggcgtgattgaagaaatcgaagaaaatagccacgttgatattaagagtgaattaggttacgaaggtggccaaaatagcggtaaccagtcattcgaggaagacacagaagaagacaaacctaaatatgaacaaggtggcaatatcgtagatatcgatttcgacagtgtacctcaaattcatggtcaaaataaaggtgaccagtcattcgaagaagatacagagaaagacaagcctaaatatgaacatggcggtaatatcattgatatcgacttcgacagtgtgccacaaattcatggattcaataagcataatgaaattattgaagaagatacaaacaaagataaacctaattatcaattcggtggacacaatagtgttgactttgaagaagatacacttccaaaagtaagcggccaaaatgaaggtcaacaaacgattgaagaagatacaacgccgccaacgccaccgacaccagaagtaccgagtgagccggaaacaccaatgccaccgacaccagaagtaccgagtgagccggaaacaccaacgccaccaacaccagaggtaccaagtgagccggaaacaccaacaccaccgactccggaagtaccaagtgagccggaaacaccaacaccaccgacaccagaagtgccgagtgagccagaaacaccaacaccgccaacaccagaggtaccagctgaacctggtaaaccagtaccacccgcaaaagaagaacctaaaaagccttctaaaccagtggaacaaggtaaagtagtaacacctgttattgaaatcaatgaaaaggttaaagcagtggcaccaactaaaaaagcacaatctaagaaatctgaactacctgaaacaggtggagaagaatcaacaaacaaaggtatgttgttcggcggattattcagcattctaggtttagcattattacgcagaaataaaaagaataacaaagcataa

SEQ ID NO: 3356 - DNA, 2847 bp, Staphylococcus aureus
ttgcatttaagggagaatattatagtgaaaagcaatcttagatacggcataagaaaacacaaattgggagcggcctcagtattcttaggaacaatgatcgttgttggaatgggacaagaaaaagaagctgcagcatcggaacaaaacaatactacagtagaggaaagtgggagttcagctactgaaagtaaagcaagcgaaacacaaacaactacaaataacgttaatacaatagatgaaacacaatcatacagcgcgacatcaactgagcaaccatcacaatcaacacaagtaacaacagaagaagcaccgaaaactgtgcaagcaccaaaagtagaaacttcgcgagttgatttgccatcggaaaaagttgctgataaggaaactacaggaactcaagttgacatagctcaaccaagtaacgtctcagaaattaaaccaagaatgaaaagatcaactgacgttacagcagttgcagagaaagaagtagtggaagaaactaaagcgacaggtacagatgtaacaaataaagtggaagtagaagaaggtagtgaaattgtaggacataaacaagatacgaatgttgtaaatcctcataacgcagaaagagtaaccttgaaatataaatggaaatttggagaaggaattaaggcgggagattattttgatttcacattaagcgataatgttgaaactcatggtatctcaacactgcgtaaagttccggagataaaaagtacagatggtcaagttatggcgacaggagaaataattggagaaagaaaagttagatatacgtttaaagaatatgtacaagaaaagaaagatttaactgctgaattatctttaaatctatttattgatcctacaacagtgacgcaaaaaggtaaccaaaatgttgaagttaaattgggtgagactacggttagcaaaatatttaatattcaatatttaggtggagttagagataattggggagtaacagctaatggtcgaattgatactttaaataaagtagatgggaaatttagtcattttgcgtacatgaaacctaacaaccagtcgttaagctctgtgacagtaactggtcaagtaactaaaggaaataaaccaggggttaataatccaacagttaaggtatataaacacattggttcagacgatttagctgaaagcgtatatgcaaagcttgatgatgtcagcaaatttgaagatgtgactgataatatgagtttagattttgatactaatggtggttattctttaaactttaataatttagaccaaagtaaaaattatgtaataaaatatgaagggtattatgattcaaatgctagcaacttagaatttcaaacacacctttttggatattataactattattatacaagtaatttaacttggaaaaatggcgttgcattttactctaataacgctcaaggcgacggcaaagataaactaaaggaacctattatagaacatagtactcctatcgaacttgaatttaaatcagagccgccagtggagaagcatgaattgactggtacaatcgaagaaagtaatgattctaagccaattgattttgaatatcatacagctgttgaaggtgcagaaggtcatgcagaaggtaccattgaaactgaagaagattctattcatgtagactttgaagaatcgacacatgaaaattcaaaacatcatgctgatgttgttgaatatgaagaagatacaaacccaggtggtggtcaggttactactgagtctaacctagttgaatttgacgaagattctacaaaaggtattgtaactggtgctgttagcgatcatacaacaattgaagatacgaaagaatatacgactgaaagtaatctgattgaactagtagatgaactacctgaagaacatggtcaagcgcaaggaccaatcgaggaaattactgaaaacaatcatcatatttctcattctggtttaggaactgaaaatggtcacggtaattatggcgtgattgaagaaatcgaagaaaatagccacgtggatattaagagtgaattaggttacgaaggtggccaaaatagcggtaatcagtcatttgaggaagacacagaagaagataaaccgaaatatgaacaaggtggcaatatcgtagatatcgatttcgatagtgtacctcaaattcatggtcaaaataatggtaaccaatcattcgaagaagatacagagaaagacaaacctaagtatgaacaaggtggtaatatcattgatatcgacttcgacagtgtgccacatattcacggattcaataagcacactgaaattattgaagaagatacaaataaagataaaccaaattatcaattcggtggacacaatagtgttgactttgaagaagatacacttccacaagtaagtggtcataatgaaggtcaacaaacgattgaagaagatacaacacctccaatcgtgccaccaacgccaccgacaccagaagtaccaagcgagccggaaacaccaacaccaccgacaccagaagtaccaagcgagccggaaacaccaacaccgccaacgccagaggtaccaactgaacctggtaaaccaataccacctgctaaagaagaacctaaaaaaccttctaaaccagtggaacaaggtaaagtagtaacacctgttattgaaatcaatgaaaaggttaaagcagtggtaccaactaaaaaagcacaatctaagaaatctgaactacctgaaacaggtggagaagaatcaacaaacaacggcatgttgttcggcggattatttagcattttaggtttagcgttattacgcagaaataaaaagaatcacaaagcataa

SEQ ID NO: 3357 - DNA, 2886 bp, Staphylococcus aureus
gtgaaaagcaatcttagatacggcataagaaaacacaaattgggagcggcctcagtattcttaggaacaatgatcgttgttggaatgggacaagaaaaagaagctgcagcatcggaacaaaacaatactacagtagaggaaagtgggagttcagctactgaaagtaaagcaagcgaaacacaaacaactacaaataacgttaatacaatagatgaaacacaatcatacagcgcgacatcaactgagcaaccatcaaaatcaactcaagtaacaacagaagaagcaccaacaactgtgcaagcaccaaaagtagaaaccgaaatgaaatcacaagaagatttaccatcagaaaaagttgctgataaggaaactacaggaactcaagttgacatagctcaaccaagtaacgtctcagaaattaaaccaagaatgaaaagatcagctgacgttacagcagtttcagagaaagaagtagcggaagaagctaaagcgacaggtacagatgtaacaaataaagtggaagttactgaaagctctttagaaggacataataaagattcgaatattgttaatccgcataatgctcaaagagtaactttaaaatacaaatggaaatttggagaaggaattaaggcaggagattattttgatttcacattaagtgataatgttgaaacacatggtatatcaacactgcgtaaagttccggagataaaaagttcaacagaagataaagttatggcaaatggtcaagttataaatgaacgtacaattcgctatacatttactgattatataaataacaaaaaagatttaactgctgaattaaacttaaacctattcattgacccaacaacagtgacaaagcaagggagtcaaaaagttgaagtaacactaggtcaaaataaagtctcaaaagaatttgatatcaaatatttagacggcgttaaagatagaatgggtgttactgttaatggtcgtattgatactttgaataaagaagagggtaaatttagccattttgcatatgtgaagcctaacaaccagtcgttaacttctgtcacagtaactggtcaagtaacatctggatataaacaaagtgctaataatccaacagtcaaagtatataaacacattggttcagatgaattagctgaaagtgtttatgcaaagcttgatgataccagtaaatttgaagatgtgactgaaaaagtaaatctatcttacacaagtaatggtgggtacacattgaaccttggcgatttagataattcgaaagactatgtaattaaatatgaaggtgaatatgatcaaaatgctaaggatctaaatttccgaacacatctttcaggatatcataaatactacccatactatccttattacccgtattatccagttcaattaacttggaacaacggtgttgcattttactctaataatgctaaaggcgatggtaaagataaaccaaatgatcctatcattgagaagagtgaaccaattgatttagacattaaatcagagccaccagtggagaagcatgaattgactggtacaatcgaagaaagtaacgattctaagccaattgattttgaatatcatacagctgttgaaggtgcagaaggtcatgcagaaggtattattgaaactgaagaagattctattcatgtggattttgaagaatctacacatgaaaattcaaaacatcacgctgatgttgttgaatatgaagaggatacaaacccaggtggtggccaagtaacaactgagtctaacttagttgaatttgacgaagagtctacaaaaggtattgtaactggcgcagtgagcgaccatacaacagttgaagatacgaaagaatatacaactgaaagtaatctgattgaattagtggatgaattacctgaagaacatggtcaagcacaagggccaatcgaggaaattactgaaaacaatcatcatatttctcattctggtttaggaactgaaaatggtcacggtaattatggcgtgattgatgaaatcgaagaaaatagccacgttgatattaagagtgaattaggttatgaaggtggccaaaatagcggtaatcagtcattcgaggaagacacagaagaagataaacctaaatatgaacaaggtggtaatatcgtagatatcgatttcgacagtgtacctcaaattcatggtcaaaataatggtaaccagtcattcgaggaagacacagaagaagacaagcctaagtatgaacaaggtggtaacatcattgatatcgacttcgacagtgtgccacaaattcatggattcaataagcataatgaaattattgaagaagatacaaacaaagataaacctaattatcaatttggtggacacaacagtgttgattttgaagaagatacacttccaaaagtaagtggtcaaaatgaaggtcaacaaacgattgaagaagatacaacgccgccaacaccgccaacaccagaggtaccaagtgagccggaaacaccaacaccaccaacaccagaagtaccgagtgagccaggcgaaccaacgccaccaaaaccggaagtaccaagtgagccggaaacaccagtaccaccaacaccagaggtaccatctgaacctggtaaaccagtaccacctgctaaagaagaacctaaaaaaccttctaaaccagtggaacaaggtaaggtagtaacacctgttattgaaatcaatgaaaaggttaaagcagtggcaccaactaaacaaaaacaatctaagaaatctgaactacctgaaacaggtggagaagaatcaacaaacaaaggtatgttgttcggcggattattcagcattctaggtttagtattattacgcagaaataaaaagaataacaaagcataa

SEQ ID NO: 3358 - DNA, 621 bp, Staphylococcus aureus
gtggaattattaaatagttataattttgttttattcgtattaactcaaatgatattaatgtttacaataccagctataattagtggtattaagtacagtaaacttgattattttttcatyatagkaatttcgacattatcgttatttctatttaaaatgtttgatagcgcgtccttaatcatwttaacttcattyattattataatgtattttgtcaaaatcaaatggtattctattttgttgattatgacttcrcagattattctrtactgtgctaactacatgtatatwgttatatatgcatatatcaccaaratttctgatagtatatttgtaatattccctagcttttttgtagtttatgtgactattagtatactattctcatatataataaatagagttctcaaaaaaatyagcacaccatatctaatactaaacaaaggatttttaatagttatttcgactatcttactgcttactttttcattatttttcttttattcacaaataaactcggatgaagctaaagtaataaggcagtattcttttatttttattggtatcactatatttttaagtatattaacatttgttatttctcaatttctmcttaaagag

SEQ ID NO: 3359 - DNA, 612 bp, Staphylococcus aureus
gtggaagcattaaatgattataattacgttttatttgtaattgttcaagtttcattaatgttctttatatctgcatttattagtggaatamgatacaaaaaatcagattatatatacattattggaatagtgttatcttcagtatatttctttgacaaaatcrgaagtatttcactagttgttataacratttttataataatttttctctattttaaaattagactatattctgtatttttagtaatggttactcaaatcattttatattgtgcaaatttcgtttatatcattattttttcatacattataacaatttcacacagcgtgtttatagttctaccaatctttttggtagtgtatgtatcaatttcttatgcacttgcctacattttaaatagaatattaaaaaggataaatggtacatacctttctcttaataaaaaattccttactgttataactattgttatagtaataacattctctttgttatttgcatattcgcaaattgatgcgagtgatgcatcaacaatcaaacagtattcgcttttattcttgggaattattatattactgagtatcttaatttttatttattctcaatttact

SEQ ID NO: 3360 - DNA, 681 bp, Staphylococcus aureus
cttaaagaaatgaaatataaacgtaatcaagaagaaattgaracctattaygaatacacattaaagattgaagcaattaataatgaaatgcgyaagttccgwcatgattatgtcaatatcttrackacwctttcagaatacatycgwgaagatgacatgmcyggtctwcgwgactatttcaataaaaatatwgtdccwatgaaagataayttacaaatgaaygctmttaagttaaatggtattgagaatcttaaagtacgtgarattaaaggtcttmtmacwgctaaaattttacgtgcacaagaaatgartataccgattagtathgaaataccagatgaagtaactcrcattaatttgaatatgatygatttaartcgcagtattggtattattcttgataacgcaatagaggcatcaastgaaattgatgatcctatcattcgagttgcatttattgaaagcgaaaattcagtaacgtttattgttatgaataaatgtgcagatgatataccacgtattcatgaattgttccaagaaagtttttctactaaaggtgaaggtcgtggtttaggtctatcaactttaaaagaaattgctgataatgcagacaatgtcttrttagatacaattatcgaraatggtttcttyattcaaaargttgaaattattaacaactag

SEQ ID NO: 3361 - DNA, 742 bp, Staphylococcus aureus
gtatttataggattaataatttttatctctgttgtaatacttataatgtcgcttttcacccttaaagagatgaaatayaaacgwaatcaagaagaaattgaracctattaygaatayacattraagattgaagcwatyaayaaygaaatgcgcaagttccgtcaygattatgtcaatatcttaacrmcrctttcagaatwcattcgmgaagatgacatgmytggyctacgygmttatttcaataaaaatattgtacctatgaaagayaatttrcaratgaatgctatwaaattaaatggtatygagaatcttaaagtacgtgaratwaaaggcttaatyacwgckaaaattttacgygcmcaagaaatgaatatwccrattagtatcgaaatacccgatgaagtaagtagcattaayttgaatatgatcgatttaagtcrcagtattggtattattcttgataatgcaattgaggcatcaactgaaattgatgaccctatcattcgcgttgcatttattgaaagtgaaaaytcagtaacgtttattgttatgaataaatgcgctgatgatataccacgcattcatgarttrttccaagaaagtttttctactaaaggtgaaggtcgtggtttaggtctatcaactttaaaagaaattgctgataatgcagacaatgtcttattagatacaattatcgaraatggtttcttttattcaaaargttgaaattattaacaactag

SEQ ID NO: 3362 - DNA, 429 bp, Staphylococcus aureus
atgagcgaaaaacttcaagtaaaacaagaatttaacggcgttacaaggcaatacttgaatttcagaacagatagtatcgatgatctggataagttcaaaaaagaattcaaacctgttatgcacttaaaaggtgatgcattcaatcaacagttacaatctttgattaacaaatatccacaaatacaaaaaaatatgaaatcagagttcattgcttattatgataaagaaaaaaatagagaaacagtaaaaaactatgcttggaaccttcaaaaatctataaatgacattatgcaatcatatcctagcacaaaatttgtacagttttataaagatgatgtttccccgtcaatggtagatggaaatggccgtttaaaatcggatactaatgtaatttccatcgagggaggaaagtatgatgagaacaaatra

SEQ ID NO: 3363 - DNA, 393 bp, Staphylococcus aureus
atgaaaaataaagtagaacatatagaaaatcagtacacgtcgcaagagaacaagaaaaaacaacgtcaaaaaatgaaaatgcgtgttgttcgtaggcgtattacagtatttgcgggygtattacttgcgataattgttgttttatcaatcttgcttgttgtccaaaaacatcgcaatgatattgatgcacaggagcgaaaagcgaaagaagcacagtttcaaaagcaacaaaatgaagaaattgcgttaaaagaaaagttgaataatctgaatgacaaagattayattgaaaaaattgcgcgtgatgattattacttaagcaacaaaggtgaagtgatttttaggttgccagaagacaaagattcgtctagctcaaaatcttcgaaaaaataa

SEQ ID NO: 3364 - DNA, 117 bp, Staphylococcus aureus
ttgattcaaaattatccgagtatagacattgtgaaaaaatccaaacaaggatataataagggaaaatcgaatcaaatcgggaggatttatttaacatatgtcaatcgaagttggaaa

SEQ ID NO: 3365 - DNA, 1431 bp, Staphylococcus aureus
ttgaaaagactaggaatggagagattcaagatgattacattatataatacgcttacacgtcaaaaagaagtgttcaagccwatagaaccaggraargtaaaaatgtatgtatgtggtcctackgtatataactacattcatattggtaaygcaagaccagcaattaattatgacgtagtgagacgttactttgaataccaaggatataatgtagaatatgtatcaaattttacagaygtagatgataaattaattaaacgttctcaagaattaaatcagwctgttcccgaaattgcagaaaaatatatcgctgcttttcatgaagatgttggtgckttaaatgttagaaaagcgacttcaaatccaagggtaatggaccatatggatgacattattcaatttattaaagatttggtkgatcraggttatgcatatgaaagtggtggcgatgtttactttagaacacgtaaatttgaaggttatggtaaattaagtcatcaatccatagatgacttaaaagtgggtgctcgtatagatgcaggagagcataargaagaygcacttgattttacattgtggaaaaaagcgaagcctggcgagattagttggratagcccatttggtgaaggkagaccaggatggcatatwgaatgttctgtaatggcatttcatgagctaggasctacaattgatatacatgcgggtggttcagatttacaatttccacatcatgaaaatgaaatagcacaatcrgaagcacataatcatgcgccattygctaattattggatgcataatggtttyattaatattgataatgaaaaaatgagtaaatcactaggcaactttattttagttcacgatattattaaagaagttgatccagatgtaytaagattctttrtgattagcgtacattatagaagyccaattaactataatctagaattggtwgaatcagcacgtagtggactagagcgtattcgcaatagttatcaattaattgaagagcgcgcacaaattgctactaatattgaaaatcaacagacatatattgatcaaattgatgcgattttaaatcgttttgaaacagttatgaatgatgattttaatacagctaatgcaattacagcttggtatgatttagcaaaacttgcraataaatatgtactagagaacacaacatcaacagaagtaattgataaatttaaagcagtttatcaaattttcagcgatgttttaggtgtaccgttaaaatctaaaaawgcagatgaattattrgatgaagatgttgaaaaattaatcgaagagcgtaatgaagcaaggaaaaacaaagattttgcacgagcagatgarattcgagacatgctgaaatcacaaaacattatattagaagacacacctcaaggggttagatttaaacgtggataa

SEQ ID NO: 3366 - DNA, 405 bp, Staphylococcus aureus
gtggataatcaacaagataatcacattaaattattgaatccattgaccttagcatatatgggagacgcagtcttagatcaatatgtacgtacstatatcgttttaaagcttaaaagtaagcctaataaactacatcaaatgtctaaaaaatatgtatctgccaaaagtcaggcgcaaacgttagaatatttaatggagcaagaatggtttacagacgaagaaatggatattttgaarcgagggcgtaacgcgaaaagtcatactaaagctaaaaayactgatgttcaaacatatcgtaaaagttcagcgatagaagcagtgataggttttctttatttagaaaaaagagaagaacgattagaggcattattaaatraaataataacaatagtaaacgaaaggtag

SEQ ID NO: 3367 - DNA, 2862 bp, Staphylococcus aureus
atgaataataaaaagacagyaacaaatagaaaaggcatgataccaaatcgattaaacaaattttcgataagaaagtattctgtaggtactgcttcaattttagtagggacaacattgatttttgggttaagtggtcatgaagctaaagcggcagaacatacgaatggagaattaaatcaatcaaaaaatgaaacgacagccccaagtgagaataaaacaactgaaaaagttgatagtcgtcaactaaaagacaatacgcaaactgcaactgcagatcagcctaaagtgacaatgagtgatagtgcaacagttaaagaaactagtagtaacatgcaatcaccacaaaacgctacagctagtcaatctactacacaaactagcaatgtaacaacaaatgataaatcatcaactacatatagtaatgaaactgataaaagtaatttaacacargcwaaaraygtttcarctacwcctaaaacaacgactattaaacmaagarcwttaaaycgyatggcwgtgaayacwgtwgcagcwccacaacaaggwacaaatgttaatgataaagtwcattttwcraayattgatattgckattgataaaggacayktwaataaarmwacwggmaawacwgaattttgggcaacttcaagtgatgttttaaaattaaaagcgaattacacaatcgatgattctgttaaagagggcgatacatttacttttaaatatggtcaatatttccgtccaggwtcwgtaagattaccttcacaaactcaaaatttatataatgcccaaggtaatattattgcaaaaggtatttaygayagtamaacaaayacaacaacgtatacttttacgaattatgtagatcaatayacaaatgttagcggtagctttgaacaagtcgcatttgcgaaacgtgaaaatgcaacaactgataaaactgcttataaaatggaagtaastttaggtaatgatacatatagyraagawrtcattgtcgattatggtaatmaaaaagswcaacmrcttatttcragtacaaaytatatyaayaatgaagatttrtcrcgtaatatgactgywtatgtaaatcaacctaaaaakacmtatacwaaasaaacrtttgtwacwaatttaactggwtataaatttaatccaratgcwaaaaacttcaaaatttacgaagtgacagatcaaaatcaatttgtsgayagtttcaccccagatacttcaaaacttaaagatgttactrrtcaattyratrttayttayagyaatgataataagackgcracagtwgatttawtgaatggtcaawcwagtagtrataaacartacatcattcaacaagttgcktatccagataataswtcaacagataatggraaaattgattatactttagamacacaaaatskaaawagtagttggtcaaayagttattcaaatgtgaatggctcatcaactgcwaatggcgaccaaaagaaatataatctaggtgactatgtatgggaagatacaaataaagatggtaaacaagatgccaatgaaaaagggattaaaggtgtttatgtcattcttaaagatagtaacggtaaagaattagatcgtacgacaacagatgaaaatggtaaatatcagttcactggtttaagcaatggaacttatagtgtagagttttcaacaccagccggttatacaccgacaactgcaaatgcaggtacagatgatgctgtagattctgatggactaactacaacaggtgtcattaaagacgctgacaayatgacattagatagtggattctacaaaacrccaaaatatagtttaggtgattatgtttggtacgacagtaataaagatggtaaacaagattcgactgaaaaaggaattaaaggtgttaaagttactttgcaaaacgaaaaaggcgaagtaattggtacaactgaaacagatgaaaatggtaaataccgctttgataatttagatagtggtaaatacaaagttatctttgaaaagcctgctggtttaactcaaacaggtacaaatacaactgaagatgataaagatgccgatggtggcgaagttgatgtaacaattacggatcatgatgatttcacacttgataatggctactacgaagaagaaacatcagatagtgactcagattcrgacagcgaytcagactcagatagcgactcagaytcagatagygactcagaytcrgayagcgactcagaytcagatagcgactcagacagcgaytcagactcagayagygaytcagaytcrgacagygaytcagattcagacagcgawtcagaytcrgatagcgactcagaytcrgayagcgaytcagacagcgactcagattcagacagygactcagactcagacagygaytcagattcagacagcgaytcagattcrgatagcgactcagaytcagayagygattcrgaytcagacarcgaytcagatwcwgayagcgattcagactcrgatagcgactcagaytcrgayagcgaytcagaytcagayagcgattcagaytcagatagcgattcagattcagacagcgactcagattcrgayagcgaytcagactcagayagcgaytcagactcagawagygactcagacagcgattcagatwcrgatagcgattcagattcagatgcaggtaaacatactccgrctaaaccaatgagtacggttaaagatcagcataaaacagctaaagcattaccagaaacaggtagtgaaaataataattcaaataatggcacattattcggtggattattcgcggcattaggatcattattgttattcggtcgtcgtaaaaaacaaaataaataa

SEQ ID NO: 3368 - DNA, 2844 bp, Staphylococcus aureus
atgaataataaaaagacagcaacaaatagaaaaggcatgataccaaatcgattaaacaaattttcgataagaaagtattctgtaggtactgcttcaattttagtagggacaacattgatttttgggttaagtggtcatgaagctaaagcggcagaacatacgaatggagaattaaatcaatcaaaaaatgaaacgacagccccaagtgagaataaaacaactaaaaaagttgatagtcgtcaactaaaagacaatacgcaaactgcaactgcagatcagcctaaagtgacaatgagtgatagtgcaacagttaaagaaactagtagtaacatgcaatcaccacaaaacgctacagctaatcaatctactacaaaaactagcaatgtaacaacaaatgataaatcatcaactacatatagtaatgaaactgataaaagtaatttaacacaagcaaaagatgtttcaactacacctaaaacaacgactattaaaccaagaactttaaatcgcatggcagtgaatactgttgcagctccacaacaaggaacaaatgttaatgataaagtacatttttcaaatattgacattgcgattgataaaggacatgttaatcagactactggtaaaactgaattttgggcaacttcaagtgatgttttaaaattaaaagcaaattacacaatcgatgattctgttaaagagggcgatacatttacttttaaatatggtcaatatttccgtccaggatcagtaagattaccttcacaaactcaaaatttatataatgcccaaggtaatattattgcaaaaggtatttatgatagtacaacaaacacaacaacatatacttttacgaactatgtagatcaatatacaaatgttagaggtagctttgaacaagttgcatttgcgaaacgtaaaaatgcaacaactgataaaacagcttataaaatggaagtaactttaggtaatgatacatatagcgaagaaatcattgtcgattatggtaataaaaaagcacaaccgcttatttcaagtacaaactatattaacaatgaagatttatcgcgtaatatgactgcatatgtaaatcaacctaaaaatacatatactaaacaaacgtttgttactaatttaactggatataaatttaatccaaatgcaaaaaacttcaaaatttacgaagtgacagatcaaaatcaatttgtggatagtttcacccctgatacttcaaaacttaaagatgttactgatcaattcgatgttatttatagtaatgataataaaacagctacagtcgatttaatgaaaggccaaacaagcagcaataaacaatacatcattcaacaagttgcttatccagataatagttcaacagataatggaaaaattgattatactttagacactgacaaaactaaatatagttggtcaaatagttattcaaatgtgaatggctcatcaactgctaatggcgaccaaaagaaatataatctaggtgactatgtatgggaagatacaaataaagatggtaaacaagatgccaatgaaaaagggattaaaggtgtttatgtcattcttaaagatagtaacggtaaagaattagatcgtacgacaacagatgaaaatggtaaatatcagttcactggtttaagcaatggaacttatagtgtagagttttcaacaccagccggttatacaccgacaactgcaaatgtaggtacagatgatgctgtagattctgatggactaactacaacaggtgtcattaaagacgctgacaacatgacattagatagtggattctacaaaacaccaaaatatagtttaggtgattatgtttggtacgacagtaataaagatggtaaacaagattcgactgaaaaaggaattaaaggtgttaaagttactttgcaaaacgaaaaaggcgaagtaattggtacaactgaaacagatgaaaatggtaaataccgctttgataatttagatagtggtaaatacaaagttatctttgaaaaacctgctggcttaactcaaacaggtacaaatacaactgaagatgataaagatgccgatggtggcgaagttgatgtaacaattacggatcatgatgatttcacacttgataatggctactacgaagaagaaacatcagatagcgactcagattctgacagcgattcagactcagatagcgactcagattcagatagcgactcagattcagacagcgattcagacagcgactcagactcagatagcgattcagattcagacagcgactcagactcagacagcrattcagactcggatagcgactcagactcagatagcgactcagattcggatagcgactcagactcagatagcgattcagattcagatagcgattcggactcagacagtgattcagattcagactcagatagcgactcagattctgacagcgattcagactcagacagcgactcagactcagacagtgattcagattcagacagcgactcagattcagatagcgactcagactcagatagcgactcagactcagatagcgactcagactcggatagcgattcagattcagacagcgactcagattcagatagcgattcggactcagacaacgactcagattcagatagcgattcagattcagatgcaggtaaacatactccggctaaaccaatgagtacggttaaagatcagcataaaacagctaaagcattaccagaaacaggtagtgaaaataataattcaaataatggcacattattcggtggattattcgcggcattaggatcattattgtyattcggtcgtcgtaaaaaacaaaataaataa

SEQ ID NO: 3369 - DNA, 4158 bp, Staphylococcus aureus
atgctaaacagagaaaataaaacggcaataacaagaaaaggcatggtatccaatcgattaaataaattttcgattagaaagtacacagtgggaacagcatcaattttagtaggtacaacattaatttttggtctggggaaccaagaagcaaaggctgcagaaagtactaataaagaattgaacgaagcgacaacttcagcaagtgataatcaatcgagtgataaagttgatatgcagcaactaaatcaagaagacaatactaaaaatgataatcaaaaagaaatggtatcatctcaaggtaatgaaacgacttcaaatgggaataaatcaatagaaaaagaaagtgtacaatctaccactggaaataaagttgaagtttcaactgccaaatcagatgagcaagcttcaccaaaatctacgaatgaagatttaaacactaaacaaactataagtaatcaagaagggttacaacctgatttgctagagaataaatcagtggtaaatgttcaaccaactaatgaggaaaacaaaaaggtagatgcgaaaactgaatcaactacattaaatgttaaaagtgatgctatcaagagtaatgctgaaactcttgttgataacaatagtaattcaaataatgaaaataatgcagatatcattttgccaaaaagtacagcacctaaaagtttgaatacaagaatgcgtatggcagcaatacaaccaaactcaacagattctaaaaatgttaatgatttaatcacatcaaatacaacattaactgtcgttgatgcagataatagcaaaacgattgtaccagcccaagattatttatcattaaaatcacaaattacagttgatgacaaagttaaatcaggtgattatttcacaattaaatactcagatacagtacaagtatatggattgaatccggaagatattaaaaatattggtgatattaaagatccaaataatggtgaaacaattgcgactgcaaaacatgatactgcaaataatttaattacatatacatttacagattatgttgatcgatttaattcagtaaaaatgggtattaattactcaatttatatggatgcagatacaattcctgttgacaagaaagatgttccttttagtgtaactattggaaatcaaattacaactacaacagcagatatcacttatccggcttataaagaagctgacaataattcaataggatcagcttttacagagacagtttctcatgtaggaaatgttgaagaccctggttactataaccaggtagtatatgttaatcctatggataaggatttaaaaggtgctaagttaaaagttgaagcgtaccatccgaaatatccaactaatattggtcaaattaatcaaaatgttacaaatataaaaatatatcgtgttcctgaaggatatacattgaataaaggatatgacgttaatactaatgatttggtagacgtaactgatgaatttaaaaataaaatgacgtatggatcaaatcaaagtgttaatcttgattttggtgatattacatcagcatatgttgtaatggttaatacaaaattccaatatacaaatagcgaaagcccaacacttgttcaaatggctactttatcttcaacaggtaataaatccgtttctactggcaatgctttaggatttactaataaccaaagtggcggagctggtcaagaagtatataaaattggtaactacgtatgggaagatactaataaaaacggtgttcaagaattaggagaaaaaggcgttggcaatgtaactgtaactgtatttgataataatacaaatacaaaagtaggagaagcagttactaaagaagatgggtcatacttgattccaaacttacctaatggagattaccgtgtagaattttcaaacttaccaaaaggttatgaagtaaccccttcaaaacaaggtaataacgaagaattagattcaaacggcttatcttcagttattacagttaatggcaaagataacttatctgcagacttaggtatttacaaacctaaatacaacttaggtgactatgtctgggaagatacaaataaaaatggtatccaagaccaagatgaaaaaggtatatctggcgtaacggtaacattaaaagatgaaaacggtaacgtgttaaaaacagttacaacagacgcagatggcaaatataaatttactgatttagataatggtaattataaagttgaatttactacaccagaaggctatacaccgactacagtaacatctggtagcgacattgaaaaagactctaatggtttaacaacaacaggtgttattaatggtgctgataacatgacattagatagtggattctacaaaacaccaaaatataatttaggtaattatgtatgggaagatacaaataaagatggtaagcaggattcaactgaaaaaggtatttcaggcgtaacagttacattgaaaaatgaaaacggtgaagttttacaaacaactaaaacagataaagatggtaaatatcaatttactggattagaaaatggaacttataaagttgaattcgaaacaccatcaggttacacaccaacacaagtaggttcaggaactgatgaaggtatagattcaaatggtacatcaacaacaggtgtcattaaagataaagataacgatactattgactctggtttctacaaaccgacttacaacttaggtgactatgtatgggaagatacaaataaaaacggtgttcaagataaagatgaaaagggtatttcaggtgtaacagttacgttaaaagatgaaaacgacaaagttttaaaaacagttacaacagatgaaaatggtaaatatcaattcactgatttaaacaatggaacttataaagttgaattcgagacaccatcaggttatacaccaacttcagtaacttctggaaatgatactgaaaaagattctaatggtttaacaacaacaggtgtcattaaagatgcagataacatgacattagacagtggtttctataaaacaccaaaatatagtttaggtgattatgtttggtacgacagtaataaagacggcaaacaagattcaactgaaaaaggtatcaaagatgttaaagttattttattaaatgaaaaaggcgaagtaattggaacaactaaaacagatgaaaatggtaaataccgctttgataatttagatagcggtaaatacaaagttatttttgaaaagcctactggcttaacacaaacaggtacaaatacaactgaagatgataaagatgccgatggtggcgaagttgatgtaacaattacggatcatgatgatttcacacttgataatggctactacgaagaagaaacatcagatagcgactcagattcggacagcgattcagactcagacagcgattcagactcagatagtgattcagattcagatagtgattcagattcagatagtgattcagattcagacagcgactcagactcagatagtgactcagactcagatagcgattcagattcagatagcgattcagactcagacagcgattcagattcagacagcgactcagactcagatagcgactcagattcggacagcgattcagactcagatagcgactcagactcagacagcgattcagactcagatagcgactcagactcagatagcgattcagattcagacagcgattcagattcagacagtgattcagattcagacagcgactcagattcagatagcgattcagactcagactcagatagcgattcagattcagacagcgactcagattcggacagcgactcagactcagacagtgattcagattcagatagcgactcagactcagatagcgactcagattcagacagcgattcagactcagatagtgactcagattcggacagcgattcagactcagatagcgactcagattcagacagtgattcagactcagatgcaggtaagcacacacctgttaaaccaatgagtactactaaagaccatcacaataaagcaaaagcattaccagaaacwggtaatgaaaatagtggctcaaataacgcaacgttatttggcggattattcgcagcattaggatcattattgttattcggtcgtcgtaaaaaacaaaataaataa

SEQ ID NO: 3370 - DNA, 3426 bp, Staphylococcus aureus
atgattaacagggataataaaaaggcaataacaaaaaagggtatgatttcaaatcgcttaaacaaattttcgattagaaagtatactgtaggaactgcatcgattttagtaggtacgacattgatttttggtctagggaaccaagaagctaaagctgctgaaaacactagtacagaaaatgcraaacaagatgatgcaacgactagtgataataaagaagtagtgtcrgaarctgaaaataattcgacaacagaaaatgattcaacaaatccaattaagaaagaaacaaatactgattcacaaccagaagctaaagaagaatcaactamatcaagtactcaacaacagcaaaataacgttacagctacaactgaaactaagcctcaaaacattgaaaaagaaaatgttaaaccttcaactgataaaacygcgacagaagatacatctgttattttagaagagaagaaagcaccaaatwatacaaataacgatgtaactacaaaaccatctacaagtgaaattcaaacaaaaccaactacacctcaagaatctacaaatattgaaaattcacaaccgcaaccaacgccttcaaaagtagacaatcaagttacagatgcaactaatccaaaagaaccagtaaatgtgtcaaaagaagaacttaaaaataatcctgagaaattaaaagaattrgttagaaatgatarcaatacagatcrttcaactaaaccagttgctacagctccaacaagtgttgcaccaaaacgwktaaaygcraaaatgcgytttgcagttgcacaaccagcagcagttgcttcaaayaatgtaaatgayttaattamagtkacgaarcaracratcaaagttggcgatggtaaagataatgtggcagcagcgcatgacggtaaagatattgaatatgatacagagtttacaattgacaataaagtcaaaaaaggcgatacaatgacgattaattatgataagaatgtaattccttcggatttaacagataaaaatgatcctatcgatattactgatccatcaggagaggtcattgcyaaaggaacatttgataaagcractaagcaaatcacatatacatttacagaytatgtagataaatatgaagatataaaakcacgyttaactytataytcrtatattgataarmaarcagtwccwaatgaracwagtttgaatttaacrtttgcwacagcaggtaaagaaacwagccaaaaygtywctgttgattatcaagayccaatggtycatggtgattcaaacattcaatctatctttacaaarttagatgaarayaarcaaactattgaacaacaaatttatgttaayccwttgaaaaaawcagcaacyaacactaaagttgatatagctggtagtcaagtagatgattatggaaatattaaactaggaaatggtagyaccattattgaccaaaatacagaaataaargtttataaagttaacyctratcaacaattgcctcaaagtaatagaatctatgattttagtcaatacgaagatgtaacaagtcaatttgataataaaaaatcatttagtaataatgtagcaacattggattttggtgatattaattcagcctatattatcaaagttgttagtaaatatacacctacatcagatggcgaactagatattgcycaaggtactagtatgagaacaactgataaatatggttattataattatgcaggatattcaaacttcatcgtaacttctaatgacwctggyggtggcgacggtactgttaaacctgaagaaaagttatacaaaattggtgactatgtatgggaagacgttgataaagacggtgtycaaggtacagattcraaagaaaarccaatggcaaacgttttagttacattaacttacccggacggtactacaaaatcagtaagaacagatgctaamggtcattaygaattcggtggtttgaaagacggagaaacttatacagttaaattcgaaacgccarctggatatcttccaacaaaagtaaatggaacaactgatggtgaaaaagactcaaatggtagttctrtaactgttaaaattaatggtaaagatgatatgtctttagacactggtttttataaagaacctaaatataatcttggtgactatgtatgggaagatacwaataaagatggtatccaagatgcwaatgarccwggwatcaaagatgttaaggttacattaaaagatagtactggaaaagttattggtacaactactactgatgcctcgggtaaatataaatttacagatttagataatggtaaytatacwgtwgaattygaaacaccagcaggttacacgccaacggttaaaaayactacagctgaagataaagattcyaatggtttaacaacaacaggtgtcattaaagatgcagataatatgacattagacagtggtttctataaaacaccaaaatacagtttaggtgattatgtttggtacgacagtaataaagayggyaaacaagaytcaactgaaaaaggtatyaaagatgtkamagttacwttrywaaaygaaaaaggcgaagtaattggaacaactaaaacagatgaaaatggtaaatatcgtttcgataatttagatagcggtaaatacaaagttatttttgaaaagcctgctggcttaacacaaacagttacaaatacaactgaagatgataaagatgcmgatggtggcgaagttgacgtaacaattacggatcatgatgatttcayacttgataacggatacttcgaagaagatacatcagacagtgattcagactcagacagygattcagactcagayagcgactcagattcagacagtgaytcagactcagatagcgattcagaytcagamagcgaytcagaytcagayagcgactcagactcagayagygaytcagaytcagatagcgactcagaytcrgayagcgaytcagaytcrgayagcgaytcagaytcagayagcgaytcagaytcagayagcgaytcagaytcagayagygactcagaytcagayagygactcagactcagayagygactcagactcagacagygaytcagaytcagayagcgaytcagattcrgayagygaytcagactcagatagcgactcagattcrgacagcgactcagactcagatagcgactcagactcagacagtgattcagactcagatagcgattcggactcggatgcaggaaaacatacacctgttaaaccaatgagtactactaaagaccatcacaataaagcaaaagcattaccagaaacaggtagtgaaaataacggctcaaataacgcaacgttatttggtggattatttgcagcattaggttcattattgttattcggtcgtcgcaaaaaacaaaacaaataa

SEQ ID NO: 3371 - DNA, 3501 bp, Staphylococcus aureus
atgattaacagggataataaaaaggcaataacaaaaaagggtatgatttcaaatcgcttaaacaaattttcgattagaaagtatactgtaggaactgcatcgattttagtaggtacgacattgatttttggtctagggaaccaagaagctaaagctgctgaaaacactagtacagaaaatgcaaaacaagatgatgcaacgactagtgataataaagaagtagtgtcggaaactgaaaataattcgacaacagaaaataattcaacaaatccaattaagaaagaaacaaatactgattcacaaccagaagctaaaaaagaatcaacttcatcaagtactcaaaaacagcaaaataacgttacagctacaactgaaactaagcctcaaaacattgaaaaagaaaatgttaaaccttcaactgataaaactgcgacagaagatacatctgttattttagaagagaagaaagcaccaaataatacaaataacgatgtaactacaaaaccatctacaagtgaaccatctacaagtgaaattcaaacaaaaccaactacacctcaagaatctacaaatattgaaaattcacaaccgcaaccaacgccttcaaaagtagacaatcaagttacagatgcaactaatccaaaagaaccagtaaatgtgtcaaaagaagaacttaaaaawaatcctgagaaattaaaagaattggttagaaatgatagcaatacagatcattcaactaaaccagttgctacagctccaacaagtgttgcaccaaaacgtgtaaacgcaaaaatgcgctttgcagttgcacaaccagcagcagttgcttcaaacaatgtaaatgatttaattaaagtgacgaagcaaacaatcaaagttggcgatggtaaagataatgtggcagcagcgcatgacggtaaagatattgaatatgatacagagtttacaattgacaataaagtcaaaaaaggcgatacaatgacgattaattatgataagaatgtaattccttcggatttaacagataaaaatgatcctatcgatattactgatccatcaggagaggtcattgctaaaggaacatttgataaagcaactaagcaaatcacatatacatttacagactatgtagataaatatgaagatataaaatcacgcttaactctatattcgtatattgataaaaaaacagttccaaatgagacaagtttgaatttaacatttgctacagcaggtaaagaaacaagccaaaatgtcactgttgattatcaagatccaatggtccatggtgattcaaacattcaatctatctttacaaaattagatgaagataagcaaactattgaacaacaaatttatgttaacccattgaaaaaatcagcaaccaacactaaagttgatatagctggtagtcaagtagatgattatggaaatattaaactaggaaatggtagcaccattattgaccaaaatacagaaataaaggtttataaagttaactctgatcaacaattgcctcaaagtaatagaatctatgattttagtcaatacgaagatgtaacaagtcaatttgataataaaaaatcatttagtaataatgtagcaacattggattttggtgatattaattcagcctatattatcaaagttgttagtaaatatacacctacatcagatggcgaactagatattgcccaaggtactagtatgagaacaactgataaatatggttattataattatgcaggatattcaaacttcatcgtaacttctaatgacactggcggtggcgacggtactgttaaacctgaagaaaagttatacaaaattggtgactatgtatgggaagacgttgataaagacggtgttcaaggtacagattcaaaagaaaaaccaatggcaaacgttttagttacattaacttacccggacggtactacaaaatcagtaagaacagatgctaatggtcattatgaattcggtggtttgaaagacggagaaacttatacagttaaattcgaaacgccaactggatatcttccaacaaaagtaaatggaacaactgatggtgaaaaagactcaaatggtagttcggttactgttaaaattaatggtaaagatgatatgtctttagatactggtttttacaaagaacctaaatacaacttaggtgactatgtatgggaagatactaataaagatggtatccaagatgcaaatgagccaggaatcaaagatgttaaggttacattaaaagatagtactggaaaagttattggtacaactactactgatgcctcgggtaaatataaatttacagatttagataatggtaactatacagtagaatttgaaacaccagcaggttacacgccaacggttaaaaatactacagctgatgataaagattctaatggtttaacaacaacaggtgtcattaaagatgcagataatatgacattagacaggggtttctataaaacaccaaaatacagtttaggtgattatgtttggtacgacagtaataaagacggcaaacaagattcaactgaaaaaggtatcaaagatgtgacagttacattgcaaaacgaaaaaggcgaagtaattggaacaactaaaacagatgaaaatggtaaatatcgtttcgataatttagatagcggtaaatacaaagttatttttgaaaagcctgctggcttaacacaaacagttacaaatacaactgaagatgataaagatgcagatggtggcgaagttgacgtaacaattacggatcatgatgatttcacacttgataacggatacttcgaagaagatacatcagacagcgattcagactcagatagtgactcagacagcgactcagactcagacagcgactcagactcagacagtgattcagattcagacagcgactcagattcagatagcgactcagattcggacagcgattcagactcagatagcgactcagattcagatagcgattcagactcagacagcgactcagattcagatagcgattcggactcagacagcgattcagactcagatagcgactcagactcagacagcgactcagattcagatagcgattcggactcagatagcgactcagattcagacagcgattcagactcagatagcgactcagattcagacagcgattcagactcagatagcgactcagactcagacagtgattcagattcagacagcgactcagactcagatagcgactcagattcrgacagcgactcagactcagatagcgactcagactcagacagtgattcagacagcgattcagactcggatgcaggaaaacatacacctgttaaaccaatgagtactactaaagaccatcacaataaagcaaaagcattaccagaaacaggtagtgaaaataacggctcaaataacgcaacgttatttggtggattatttgcagcattaggttcattattgttattcggtcgtcgcaaaaaacaaaacaaataa

SEQ ID NO: 3372 - DNA, 894 bp, Staphylococcus aureus
ttgggggaagttaatatgctaaacattcaagacgttagtcatctttctaaaaaggagcaaaaagcatataaccgtttcgtagaatctgtagaaaacggtaatttaccagtactaccatgtattgaaatggwtytaaaagagatgmaagaagaaacwttaarccagagtaagattggtggaatgccatttttaaaatcttttaaagatataccattagatgaaaataatgtaccaatggtattgytagcacagattaatttgratratcttccagaacaacaagaattatttcctgtaaawgaagggatattgcagttttggattagttcagaagatcaaatgtatggwatgtctgaaaatttaaagggaaacaatataaactcaaggcttgtttatataaaagagccaattacagatttatcactcgaaaatattcaagygcatttgaagtcattagatgctgataatgaggatatcccgttcagtggagcattttctatagaatttagattgtcgaaacaaactattacatgtactgattataagtacgatgaggacgtgcttgcattgtggaataaagtcaatccatccttckygmtaaartcratgtttggtggwtatgatgaattratggaacctgtgtgtaacacatttactgctaaggarccatttaatcaacttggtggttatccatattttgaccaaatagatccaagaacgaacgatcaagaactgaaaatgtatgatagagtcttactgcaaattgattctacaagagatggtaattcttcgattatatggggtgatttaggtattgccaatatcttagtraaatctactgaccttgaggctatgaagtttgatgattacatgtattcatgggattgcagctaa

SEQ ID NO: 3373 - DNA, 636 bp, Staphylococcus aureus
ttgggggaagttaatatgctaaacattcaagacgttagtcatctttctaaaaaggagcaaaaagcatataaccgtttcgtagaatctgtagaaaacggtaatttaccagtactaccatgtattgaaatggatttaaaagagatgcaagaagaaactttaagccagagtaagattggtggaatgccatttttaaaatcttttaaagatataccattagatgaaaataatgtaccaatggtattgttagcacagattaatttgaatgatcttccagaacaacaagaattatttcctgtaaatgaagggatattgcagttttggattagttcagaagatcaaatgtatggtatgtctgaaaatttaaagggaaacaatataaactcaaggcttgtttatataaaagagccaattacagatttatcactcgaaaatattcaagtgcatttgaagtcattagatgctgataatgaggatatcccgttcagtggagcattttctatagaatttagattgtcgaaacaaactattacatgtactgattataagtacgatgaggacgtgcttgcattgtggaataaagtcaatccatccttcgcgctaaaatttaaccatagtataataaataatagtagttaa

SEQ ID NO: 3374 - DNA, 1515 bp, Staphylococcus aureus
atggagtggacattagtggatattggtaaaaaacatgtaattcctaaaagtcagtaccgacgtaagcgtcgtgaattcttccacaacgaagacagagaagaaaatttaaatcaacatcaagataaacaaaatatagataatacaacatcaaaaaaagcagataagcaaatacataaagattcaattgataagcacgaacgttttaaaaatagtttatcatcgcatttagaacagagaaaccgtgatgtkaatgagaayaaagctgaagaaagtaaaagtaatcaggrtagtaagtcagcatataacaragatcattatttaacagacgatgtatctaaaaaacaaaattcattagattcagtrgaccaagatacagagaaatcaaaatattatgagcaaaatwctgaagcgactttatcaactaawtcaaccgataaagtagaatcaactgamatgagaaagctaagttcagataaaaacaaagttggtcatgaagagcaacatgtactttctaaaccttcagaacatgataaagagactagaattgattytgagtcttcaagaactgattcagacagctcgatgcagacagagaaaataaaaaaagacagttcagatggaaataaaagtagtaatctgaaatctgaagtaatatcagacaaatcaaatwcagtaccaawattgtcggaatctgatgatgaagtaaataatcagaagccattaactttrccggaagaacagaaattgaaaagrcagcaaagtcaaaatgagcaaacaaaaacytatacatatggtgatagcgaacaaaatgacaagtctaatyatgaaaatgatttaagtcatcatayrccatcgataagtgatgataaagatwacgtyatgagagaaratcatattgttgacgataatcctgataatgatatcaatacacyatcattatcaaaaayagatgacgatcgaaaacttgatgaaaaaattcatgtygaagataaacataaacaaaatgcagactcrtctgaaacggtgggatatcaaagtcagtcaastgcatctcatcgtakcactgaaaaaagaaatawkkctattaatgaccatgataaattaaacggtcaaaaamcaaatrcaaagacatcggcaaataataatcaaaaaaaggctacatcaaaattgaacaaagggcgcgctacraataataattatagygmcattttgaaaaagttttggatgatgtattggcctaaattagttattctaatgggtattattattctaattgttattttgaatgcyatttttaataatgtgaacaaaaatgatcgcatgaatgataataatgatgcagatgctcaaaaatatacgacaacgatgaaaaatgccaataacrcagttaaatcggtcgttacagttgaaaatgaaacatcaaaagattcatcattacctaaagataaagcatctcaagacgaagtgggatcaggtgttgtatataaaaaatctggagatacgttatatattgtt

SEQ ID NO: 3375 - DNA, 861 bp, Staphylococcus aureus
gtgggatcaggtgttgtatataaaaaatctggagatacgttatatattgttacgaatgcacacgttgtcggtgataaagaaaatcaaaaaataactttytcgaataataaaagtgttgttgggaaagtgcttggtaaagataaatggtcagatttagctgttgttaaagcracttcttcagacagttcagtgaaagagatagctattggagattcaaataatttagtgttaggagagccaatattagtcgtaggtaatccacttggtgtagactttaaaggcactgtgacagaaggtattatttcaggtctgaacagaaatgttccwattgatttcgataaagataataaatatgatatgttgatgaaagctttccaaattgatgcatcagtaaatccaggtaactcgggtggtgctgtmgtcaatagagaaggaaaattaatwggtgtagttgcagctaaaattagtatgccaaacgttgaaaatatgtcatttgcaatacctgttaatgaagtacaaaagattgtaaaagawttagaaacaaaaggtaaaattgactatcccgatgtaggtgttaaaatgaagaatattgccagtctaaatagttttgaaagacaagcagttaaattgcyaggaaaagttaagaacggtgttgttgtagatcaagttgacaacaatggtttagcagatcaatctggtctgaaaaaaggtgatgtaattactgaattagatggcaaacttttagaagatgatttacgctttaggcagattatatttagtcataaagatgacttgaaatcaattacagcgaagatttatagagatggtaaagaraaagaaattaatattaaactaaaataa

SEQ ID NO: 3376 - DNA, 498 bp, Staphylococcus aureus
atgaaaaataaattgatagcaaaatcattactagcgatagcggcaattggtattactacaactacaattgcgtcaactgcagatgcaagcgaaggatacggtccaagagaaaagaaaccagtgagtattaatcacaatatcgtagagtacaatgatggtacttttaaatatcaatctagaccaaaatttaatacaacacctaaatatattaagtttagacatgattataacatcgtggaatataatgacggtacattcgaatatggtgcacgtccacaatttaataaaccagcagcgaaaactgaggcaactattaaaaaagaacaaaaattgattcaagcccaaaatcttgtgagagaatttgaaaaaacacatactgtgagcgcacatagaaaagcacaaaaggcagtcaacttagtatcatttgaatacaatgttaagaaaatgatattgcaagagcgaattgatcaagtattaaagcaaggattagtgagataa

SEQ ID NO: 3377 - DNA, 468 bp, Staphylococcus aureus
gtcttagctaaaaatataggtaaattaattgttatgtatactattgcctatattttaaacatttttctgtttacgttaattacgaatttaacattttatttaataagaagacatgcacatggtgcacatgcaccttcttctttttggtgttatgtagaaagtattatactatttatacttttacctttagtaatagtaaattttcatattaactttttaattatgattattttaacagttatttctttaggtgtaatctcagtatatgctcctgcagcaactaaaaagaagcccattcctgtgcgacttattaaacgaaaaaaatattatgcgattattgttagtttaacccttttcattatcacacttatcatcaaagagccatttgcccaattcattcaattaggcatcataatagaagctattacattattacctattttctttattaaggaggacttaaaatga

SEQ ID NO: 3378 - DNA, 463 bp, Staphylococcus aureus
ttatagttggtaattttttwaaaatacttgtaacatatagtatttctatattcttragtgtatttttgtwtaccttagttacacacttatcctatatgttaatacgctataatgcacatggtgctcatgcaaagtcttcgatactttgttacatacaaagtattttaaccatttgtatttgtaccttcattttctaattaatatagacattaattttacttatttactggccttatctattataggattgatttccgttgttatttatgcacctgcagcaacgaaaaagcaacctataccwataaaattagtaaaacgtaaaaagtatktatctataattatgtatttattagttwtgattctatccttaataatacatccattttatgctcaatttatgttattaggaattttagtrgaatctattacattattacctatttttttccctaaggaggattaa

SEQ ID NO: 3379 - DNA, 461 bp, Staphylococcus aureus
tcttagctaaaaatataggwaaaytrattgttatgtatactmttgcctatattttaaacatttttatcttcactttaattactaatatatcgttttatctaattagaaggtatgcacatggtgcacatgcaccttcwtctttttggtgttatrtagaaagyattacactttttattgtkctacctctattagtaytrcattttcatattaatgaaacactaatgatgtttttagcattawtaagtgttggmgtagtgattaaatatgcacctgcagcyactaagaagaagcctatcccrgcraggcttgtaaagcaaaaaagatatttttcaattataattagtacaattcttttcattatcacactttttgtaaargaaccatatacccaatttattcaactgggtattattatacaagctattacattactaccaatatactattcaaaggaggactaa

SEQ ID NO: 3380 - DNA, 157 bp, Staphylococcus aureus
atgataaaagattgtactaaatcgtataatracagtgaggagagtggtgtaaaattgaattattttgataayaaaattgaccagtttgccacgtatcttcaaaagagaaataacttagatcatattcaatttttgcaagtacgwttagggatgcarr

SEQ ID NO: 3381 - DNA, 318 bp, Staphylococcus aureus
atgaaggaaatcaatattgtttcactacaaatgataaaaacagatacattaagttatctaaaaaatcgtatttcaaaccctgaggatgcggcagaaatcwtgcgttcattcattggaaacagtgaccgagarcatctcattctcatatgtatgaacagtaaaaatgaacctacacatattcaaacactatcgattggatctattaaccaaacrgtgattcaccctagagaaatattcaaaacagcgatactcagtaacgcaaatagtataatgctcggtcataatcatccaagtggrgatrtattaaccatagtataa

SEQ ID NO: 3382 - DNA, 1500 bp, Staphylococcus aureus
atgttaattaaaggagagaatgctatgccatcagatgatattgtaaaaaaactatactcaaaagaggatattcgattagaattaggacttactccgcataagtttaataaaaaaatggaaactattgctaagctttttaaaattgatatgaaaatttttcacaattacaaaggccaagataaaaataatcagtatacatttaatggtgtcgcaaaagaattaatcaaagtgttgctaaaaagtgttgattattacccagtggatatcaattccaaaaaatttaaacaaaatggaaaatctaaaaaagaaatgattgaaaatatagataactctagttacatgaaatatatttatcagttaatgaaatctatcaatgaaattcaatacaaaaggttaattgctgatatacatatgaaagatgtgtaccagaatacaaaagcatggttaaataatggtgaatcaattaataaaaaagaacaagagctataccaatatatgacaattttaccattacataaaagagttgaactgcaaaatgaggtattaaaatctatagacgaaacaatttttcaatttctcgcaaaagaacatagaaataatcaaattgaagaaaataatgaattagaagcatatacaaaagcaataaaagaaggtagaaatcctaaaaatgattatgaattaaatcatctcctatataaaaaaaatcaattacccttagatagtctaatagaagatatatgggactatgaggaaacagagtatactgagcttgattggttaattgcagatatgctaaaacgttcacaaagagctgatagtaattttatcgaaagtttagagaagaaaaacaaattgagaaaaaatattcataaagattccattaaaagtatatctaagttgattgatcatgaattagttaaaaataatagaaagtgggacgtagcagaattttataaaaatcaacaattttggaataatagtacattaagacgtagctctcaaaattttggaattttatattacaaaaagaataggttacatacaatgaatcaaagtaatattattaagaaaataaaaattatcgaagctaatatagagagtgcaaataaacagccgagctatttagatttctttttacaagctaagtttgatttagagaggttagaaagtgaattaatgaaatatagcattaatccgaaatattttaataagataaatagtgattacgtaagatatgctattgaagatgtacataatgcaattattaaaattgacagatatataagtaacgataaagtgaagttaaactattcaaatgtccaaatggtagtgagaaacgaaataacagaacaaggaagctactttgtaacccaggcattgaatacactgtcaaaggtagaagagtctggctacagctttgataatttcatggtaggacctttcgtagaagactttaaaaaagcaattaaaaatcgtagatttggttctaaaaaagattaa

SEQ ID NO: 3383 - DNA, 615 bp, Staphylococcus aureus
ttggggaatttagattttgatcacgaaggatacagaaaactattaccattaaaagatttcaaacattttataaaacatagcgacagcaagactagaaatcattttattggtatggcttttaataataaaacagatgtgtttagtcgtaacttctctaataaaatgataaacatattccctaaaaatgaattttatattcatatacaacaatttccagagaatgatagcccttcttatatggtatacaacactgatattacagcatttattcagtttaggttagttgggcgatcagaaaataagtatttagaaaacattatcagagattatggcgtattaatagaagttgaggccttacattcatttaaaaaaggtatgggggcaatgcttgtaagtcaattggaaaagttatcagataaactgtttatacctatatatctttatgatactaatttaaaagatgaattatattatcargacttaggattctttgatactactaaaaaagggaatcatggagaaccacttttagtatataaacctaaaaatctagaaactaataaaaaagaaaagcctattaaatctttattcaagaaagtattcaatatcaattag

SEQ ID NO: 3384 - DNA, 1272 bp, Staphylococcus aureus
atggattacacaaatcaaaaaagaaaatacataatatttggtattgttcttgctataacacttctaattgttggaattgcttactatttaatcagtttgaataatgctaaaggacaagttaaagaatttgaaaaattagtacagcataatgactacaatagtattgctaaaaagttatctaataaagaagaaactttatctgaaaatgatgctaaaaactttgtgttatttgttaaaagtaaagaaaatcaagaacaatacaatgagcaaatacaaaaaattaaaagtaatattgataaaaataaagacaataataccgtgtatggctctataacagatcaatacggaaataacctaataactattaagaaaaacggaaagactttcttttttatagataaattagaattcaaacctaaacttaccagcgtttatgtgaaagaatttaataacactggaatttacaaatatcagcaagaaaatgctaaaaaggtaatagcagaaagcaatcaaacaacagaattaggcaagttctttattggtaaatatagtattaaaacagataaaacaattgaagattcaattcacaatgggactttgacaggaaaaatagatatagatttaagcaatagaggaaacaataataagatatatgcagatgaagattttaaccaaagctggtttaaggttaagctaaacaatgatagtttattagaaaaaaatagttacaaacttttaattgatgataaagatgttgattataattccaaaaagacatatggaaagtattacaatccaactgaattaagtgtatatgcgattggaaaattagagggtaaagagtttaaaactaacagaataaatataagacgtaattatgataataaacctcaaaatttaaaattaagttttaaggaatctcaaataagagattatgagagtaaaagtaaaaaggttaaagaaaaagctaaaagctatattaaagaatatacgaaagagttaaacaaagcatataaaaagaaagattataaatatatatctgactacgttaaaaataactctcaattagaaaaacaactaaaaaaacaggttaagtctaaatcaaaagttaaatttaaagatgttaagataaacaacgttaaacgtgataaaaacaaaatatatattgagttaagtaaaaccaacaatggtaatgtgtttcaaacgaaatataccttagattacgataatgtatcaaatgaatttctagtagaagattcacatgataattaa

SEQ ID NO: 3385 - DNA, 558 bp, Staphylococcus aureus
atggccaatattggttatgctcgtgtatctaccagagatcaaagtttagatttacaaatagacgctttgagtaattttggttgtgagaaaatatttagcgaaaaagttagtgggcgtaaagtaaatagaactgaactagataaatgtttagattatttacgtgaaggcgacactttagttatttacaagctagatagattaggcaggactactaagcaactgatagatttagcccaatggttagaaaataataatattgaattacaaattattgatatgaatatcaatacaaaagacccaatgggaaagatgttttttacaatgatgagtgcttttgctgaattagaggctaacttattaagcgaaagaactaaaaaaggtttagaatcagctagagcaagaggtaacatgggaggcagaaaagcaatgccacaagaaaaaaaagaatacattaaacatttatacgataccaaagaatatacaggacaagaaattgctaaaaaaacgaatgtaagtagagatactgtatatcgcattttacgagagtttaaaaagtaa

SEQ ID NO: 3386 - DNA, 780 bp, Staphylococcus aureus
atggaagttgttcgtttaaatcaaaacctatttaataaactacgaggaaacgaaatatcaagcaataaaaatggttcaagaccatattattattctttcaaacgtaataataatagagtttgtataccttttagaacaaatgcacaaaaggtacctaataaatataaaattaatttaggaggcgaacagcccgataaacctaattcagctattgatttaacaaagtctatagtaattagtaatgatgaatatcttaataacaggtcaaaagctaaaataccacaaaatgttaataattttttaaagcaacaagcaccagctattgaacaaaaatacgatactatgtctaatgattacataaaagcaaaagctagtttaagtaagatacctttagttaaatattcaactatgcaatacttccacaaagaattgaatattcaagatagtattgataatcaacaaactaaaaatgctattaatgaattaatatctaatgggaaatcaaataaatataataaattacaatcttctctgcctaatgaaaaattaaatttgctagatgattatgaaactctatatgagtttaaaagcctaacagactacccagctaaaataaattctaatgatattgataatcctttcttagaagttgagaaaaataacaaacattttactttgtctgcactaactattaaaaatgaaccagaaaagcatgtaaaagactttttaaattatgatatagagaatgaaaagaataaagatattgatttagatttataa

SEQ ID NO: 3387 - DNA, 1617 bp, Staphylococcus aureus
atgagatttacaccccgaggaattttgaacaacaccgattatgaactaaattctgaattttattatgtgccagcaagtgataaacaaatgaatgatcaaagagatatgactaataaaagcatagtaggtaatttagtctatagaaataatttctataacgaagtgtatactcaaccagtttatgatttagacgattctaacgaaaaatatcaaacaccacatattataagtatagatgattstgaatttgattataacttaactaatttagatgattattttactaaagatacagcaaataaaggttatgaaaagctagtaaatgccattaaatcagaagaaattacctattttgacagtgatattaatgaagttgatgattttacacaacaagatgaatattcaaatgattggtatactaacacttttgtggatttagtattaagtatgaaaggatattcatatcatgtasaaccaaatagagaatctgttattgaggattcacatatcataacagaaaatgatattacttataatgtaagctataaccccgaaaaacatcatttatatattaatgacttcccagcaattccaatagaagaaaacgataatataagattattaaatgataacttaactcaagacatggaaaaaacktwckrtaatryaaastwkaatttttcatacaatgattttaaaacacttgaagatgattcttatatttatattgatttaacagattataaagataacgaaggtaaatttgttaaaaatctaatagaagatataccacctaatgaaattattaaagatagattaaaacaaaatattaatttatttgacgaacgagcaaattataatgccttagctgtttatagaagggatttagaagatttttcagatagaaataatttagatagcttagataaagttaaagatttaaaaacattctatgatacggaaattaatattaaaggattgaacattaacaacgatattgagaaaaaggctttaaataatcaattagcctttaacctttataatgaaccgttaaataacatgtttagagataacaatgttttatatgaagtttatgaaaaagaaatttatgatgaaaaaattcccctttctatagaagatagaaaagaagtgaaaacttatttagatgacgctagaaacaatttttcaaataatttctatgaatatacaacgaacaaatcatctattttagctgaaaatagtttaactgttttagataaagctaaatatgatttagaatttgcccctgtatctaatcatttatacaaagaaagagaaaatttttacgaaggaatgaaacaagctaccctgcccttacacaatattactaaagaacaatataaagaaagagaaaatgatattgaaataatcggtcattttaaaaactatatcaatactgaattacatggaacaaagagttctgaattcaaacctaatttcgtaaatgattctttagaaaatgaaactaactcaatagcttttgaagatattataaatggatcagaagaaacacatagtaatattattaattctattaaaaatgaattaaagcaagaaagagataatttagaaatgtag

SEQ ID NO: 3388 - DNA, 366 bp, Staphylococcus aureus
atgcccttgayatctgatgaatttgatacacttactaaagaccaacaatatatcttgtccgtactctacaaagattatttagaatgtgtaaagttaggttcgrttaaattaacctgcaataattttggaagtgctaaagatatacatacaaagtattttcaaaaactacatttcgaagatgtaaaatacgatttaaataaacttaaaaactctgggttcctaaacggcgtgtatgctagtaacactatttatcatgtaacaatttcagacaagactgttgtttactttgaaaatgagtttaaaaacaatttaaaaagtatcattgatagcatttctawaattgcttcaataattcctggtctctag

SEQ ID NO: 3389 - DNA, 397 bp, Staphylococcus aureus
atggaaacaaatraaacaatcgatttaatgaattatgtggaatttccaaaaagatacacagaggcaaaaggcaaattagttgcmcaaccaataactactataaatagcgcaagaagagttgaaaatgrmgatatgactgtttgctacattttagatcargatgatgatgtaatsgactttatctttgayagagatataatwacygtttwctgtccyrgagaacggaactgmractgatgaatatttttgygaaattatatttaactcagatgacacatttaccctaaagcgattatctaattacgttaccattaaagatagaagctacccaatgtcaaaaataaatgacgtaaacattacgggcaaagtcgtcagattatttagagattttaaataa

SEQ ID NO: 3390 - DNA, 435 bp, Staphylococcus aureus
atgaaaaaagtaatcggactgctactagtaagtacattagctttaacagcttgtggtgaaaaagaaaaaccaaaaaaagaagaaaataaaaagtcrcaaacacaaaarcacaaagatagyaaamcaaaaamkcawcaagaaaaamygaaaaaagttgaagataaaaatccacctawtaatagcrtacaaaayaatkcaamcaatcaaarccaakcacaaaacaatcaayttartaatmattcagaycyrtctaataayrcwcctgcaaatataaatraaaacgattcacaaaatactaatttaaatgatgagtatgtcgtttcgcctggctggactaaagatgaacaggctaaagcttttgaagagtacaaaaaaggaaaagaagasgaagcaagagctggtgctagcgcagtaccaggagccaatattaactaa

SEQ ID NO: 3391 - DNA, 2715 bp, Staphylococcus aureus
gtgaaaggtatgacaacacagttaaatatcaattcagtcattgaaaatgcgaaacgtgttattacaccattatcaccratttcgatttttgcagcacgwaayccmtgggaaggattagaagcggatacgtttgaagatgtygcaaaatggttacgtgaygttcgmgatgtggatattttyccaaataaagcattaatagaaagygctgtggcacgyggtgaattagaygaaagtgtctttaatcaacttgttactgatatgytacttgaacatcactacaatatcccgcaacactacatcaatctttatattgataacattaaaacattaaaagacgtacctgcatcatayatgaatcattcaaatgttgatgttgttgctgatctactattagaaaaatcaaaacgtgatatggctgawtcatatcatcactatgatgtacgtccgatgagtgatgcaataatagatgaacaaggtgagccacttagcgaacaagtgaatcgtcaaatgattaaatggacgaaactttatatcgatcaatttctatcgagttggacaatgccgaagcgtgagcaaagtttttaccatgcatggttgcatttagcgcaacatgaycatagttttactaaagcacagcgccaagtgattaaaggcttrcccaatgatcctraaatgacgatagagtcagtattaamtyatttttcaatagmkcaggaagactaccaagcttatgttgaaggacatcttttggcgttaccgggttgggcaggtatrttrtaytaccgytcacaacagcatcactttgaacaacatttgttaacggattatttggcmattcggttagttgtcgaacaattgctagttggtgatgagtttaagtcagtcrctaaagattgtgaaagyagatcggaaaattggtttaagcaaactgttgcatcatkgtgttactacagtgatatgcctagcgatgtattactacaacatgacgtcaatgaaattcaaacgtttattcattttgcagcaactatgaataaaaatgtatttaaaaatttatggytrattgcctgggaaatgacatacgaatctcagttaaaacaaaaaattaaagcaggtcatgaaagtgtggcgggcgcattagatgtaaaccaagtaaatgtywcwgaaaatgayaacgctaatcagycacattcagtatyrttaaatgmcacacaagcagttgatgaaaataatagcgagctaaatcagrtgggcacatcaacgaaagcgcaaattgcattttgtatagatgttcgttcagaaccatttcgtagacatatcgaagcagcagggccctttgaaacgattggtattgcaggyttytttggattacctattcaaaaagatgccgtagacgaacaattcaaacatgattcattacctgtcatggtaccgccggcatatcgcattaaagaatttgcagaccgctacgatatgaatgtttatcgacaacagcaacagacaatgwmatcgatgttttacacatttaaattgatgaaaaataatgtyatgcctagtctgttattgcctgaattaagtgggccatttttaagcttragtaccattgtcaattcgattatgcctagaaaaagtcgcgygtctttacaaaaaataamacaaaartggttraaaaagcctgaaacaaagttracgattgatcgtgagtttgacmgaacatcagacttacctgttggatttactgarcaagagcaaattgatttcgcgttacaagcgttgaaattgatggatttaaccgaagcatttgcgccgttcgttgtgttagcaggtcatgctagtcattctcacaataatccacatcaygcatcacttgaatgtggggcttgtggtggygcatcaagcggttttaatgctaagttattagcgatgatatgtaatcgtccaaatgtcagacaaggattaaaacaakcaggygtgtatattccagagacwactgtttttgcggyagcagaacatcatacgtctactgatacrttggcatgggtatatgtgccagacacattatcwkctwtwgctytagatgcatatgaatcattgaatgacgysatgccgatgatttctgaacamgcgaatcgcgaacgtttggacaaactgccaacgattggtcgtgtgaatcatccagtggaagaagcrcagcggtttgcragtgattggagtgaggtacgtccagaatggggmttggctaaaaatgcatcatttataattggacgacgccaattaacaaaaggcattgatttagaagggcggacatttttacacaattatgattggcgtaaagataaagatggcamattrttaaatacyatcatttctggtccggcrcttgtggcacaatggattaatttacaatattatgcgtcgacagttgcgccgcatttttacggaagtgggaataaagcgacacaaaccgtcacgtcaggtgttggtgtcatgcaaggtaatgcgagtgatctgatgtatggcttatcatggcaatctgttatggctgctgatcgracgatgtatcattcgccaattcgtttrcttgtcgttrttcaggcacccgaytwtgttgtagcwagactaytcgcgaataatgascatttcgctaggaaggtgtctaatcattggctgcgtttaatgagcgttaatgaggaagggcgttttaaaagttggatttaa

SEQ ID NO: 3392 - DNA, 1050 bp, Staphylococcus aureus
ttgtttatcagtgataaaatatttgcaataaraagagaatggctaaataatctyaattttcagaaaagtaattgtaaccttactggtcttatggtaatatttttcaatattatcgacgaggatgtgttaacaatgtttcaaaaattgagtatatttgccacgaagagttttttggtatggatgttagtagcagctgttattggatttatttycccacaacatgttgcgacattaggtaartgggtmccttatttacttggtattgttatgttaggtatgggattamcaattacacctaatgatttcaaaatggtyyttaaagcacctagagcagtaattattggtgtctgyctacaattcagtattatgcccacattagcatttataattgcaaagtcttttcatttaccacctgatattgctgttggcgtaatattagttggatgttgtccgggtgggacatcaagtaatgtaatgagttatttagccaaagctaacgtagcrctttctgtttctattacgacggtctctacgttgctagcgccattcgttacacctgcgttaatatatytatttgcmaatgaatggktggaartatctttcbtgagtatgttgtggtcagttgttcaagttgtattaattccaattgctttaggtattgttttgyaaattattaatcgtaaaattgctgaaaaagcttctacagctttgccrattatatcagttgttgctatttcattaattttagcaatagttgtaggtggcagtaagcaccaaatcttaactacaggattrttaatatttttagtagttatkttacataacgtattaggrtatacgattggatattggttagctcgtcttttaaaattagatcgacaagatcaaaaagcagtcagtattgaagttggaatgcagaactctggtttagctgtgtcattagcagcattgcattttaatccaattgcagcagtaccaggcgcagtgtttagtttcattcataatataacagggcctattttagcaaagtattggtcaaaaaagttataa

SEQ ID NO: 3393 - DNA, 1467 bp, Staphylococcus aureus
atgtataaatttttccaaaatttarggcgttcgttaatgttaccagttgccattttaccggctgcagcaattattgscggaattggtaatacgttaaatgcacttcatgcgrcgccsaaaatcgcaatgttctttactacrgkaggtactacsattttagagcaattaggtattttatttgcaattggygtakctatakgaatggcaaaraaaaatgatggkgcagtygcgcttgcagctrcsttaggatattttttarttacagktgkattatcaccaatgaaattagcgcctttattasgaatgaaagcttckgaaataaattcarcttttgaaaagatgaataatggcaatgtctttgttggtattgtaataggtttaatagcagcytatgcatacaataagtttagtgaaayagaattaccattagcattatcattttttagtggtaaacgtytagttccaattatgactgcattttactgtacatttttagttgtcatattgttattcttatggccactactttattcatggattgtaaaatttggtgaatctatagtyggtttaggatcrtttggdgctttcrtatatggtgttgcyaayagaytattaattcctacaggattacatcatgcactgaatagtgtgttctggtttgatacgattggtattaatgatattggtaaattccaaagtggcaaagatgctataaaaggtattacaggacgctatcaagcrggattcttcccaatcatgatgttcggtattccagcggctgcgttagcaatgtatcatacagctaaaackactcagaaaaaacaagtttacggttggttcctagcgagttcagttgcagcatttttcgttggtgttacagagccgattgagtttgcatttatgtttgttgygccaatcttatatgttgttcatgcgttattaacaggattatctttatttatcgyagctacattccattggacagctggattttcatttagtgcaggtttgatagattatgtgttatcactaattaatccrgtatcaaatcatccattgatgttgcttgttcaaggtgttgtatttttcatcttatactatgtgattttccgtgtagtaatccaagtatttaacttgaatacgattggtagaggtgaaaatgaattagttgayccaacagttgtaaaagataatattgctcctggtgaaaatgatattaaacaaagtaaatatcatmawcatgctatacaaatattagaaggtttaggyggtcaagagaatattgttaatttaacyaattgtgcaacaaggttrcrtctagagttaaaagacacatctattattgatmaacagaagattaaaaacgccggtgcagttggtgttactgttaatggyaaacattcaactcaagttattgtyggtacacacgtwcagcaggttgctgatgaaattgaaaaacatttataa

SEQ ID NO: 3394 - DNA, 225 bp, Staphylococcus aureus
atggattacgcacatttaaatttagarcatttttttgcacgaaacgacgatttagatgttataagagatcgcgctgakttcgtgatgatarataacttcactaatsaaatgatgtatcgtgatggtcaaattgaaggyacrattgatttaaatcagtactattataaaaatagatcaaatgcagcaagttttattatgatggattataaaaaagaaactaagtaa

SEQ ID NO: 3395 - DNA, 225 bp, Staphylococcus aureus
ttgaaaatggatgcatttgataaatactatctatttgatcatgacggcaacaaaatgttttcagttacaccacattttaaagatgkwcggcatttagttgttggawtaaaasahacaaaattyaatggtcgwcgttggtayttagaygattatgaattaaawacacttattgataatgaacaaatggagttaggacaccaaacaarcttatttgaatatatatga

SEQ ID NO: 3396 - DNA, 1035 bp, Staphylococcus aureus
atgattaatgaggacagtatacarttagawrctttattraaaaaataytatgarcattcaatcgaaaaratagtwtttgcygaygataryggyaaaattattgcratgaatgatgcwgctaaagatatattatcygaagaagataattayagtgcwgtrgcgaatgcgatttgtcacagatgtgaagggtatacraatgcctatgaygtacaatcatgtaaagaytgtttcttagartcsatgcaagtacaagctacgaatttycaagtrtttatgaagacgaaagatcaaaaagtgatgccrtttacwgcaacwtatcagytkattgatcargayagrggrattcatgcatttacgcttcaaaatgtytcatcacaaattgaacarcaagaraaattrcatcaacaacrtatgatgcgtaaaacratytcmgcmcaagaaaatgarmgaaarcgaatttctagrgarttacatgatagtgtgattcaagaaatgytmaatgtagatgttcaattgmgattrttraaatatcaagaagatacarcwaagcttttggaagacgcagaaaayattgaatayattgtcgctaaattaatygatgatatacgtaatatgtcggtkgaattaagaccmgcytctttggatgatytaggccttgargcagcktttaaatcatattttaaacartttgaagaaaattatggrrtwaaaatcatatatacwtcmaatattaaaaatacycgytttgatagtgatattgaaacggttgtttaycgagtagtrcaagaagctattytaaatgcgttgaaatacgctgatgtaaatgaaataaatgtaggtatccgtcaaactgggcgccatttggtwgcwgaagtratagaygcgggaaatggttttgatccaagttctaagcctaaaggttctggactcggtttatatggaatgaatgarcgagctgarttagtcagyggtagcgtcaayatygaaacgaaaattggtgagggyaccaatgttacaytgaacattccaatttga

SEQ ID NO: 3397 - DNA, 453 bp, Staphylococcus aureus
ttgacaccagaagcaatwattgaagatcgtagatttcaagagacattagataaaatacgcaaagaagarggttatgattttgcggcaatcgctttctatgaatctaacaaaccatcatctccaataaaatggcactatgtttcaggtaataaaaataatcgrtttaaattrattattttaagaaaaggycgtggattagctggaactgttatgaaaacaggraagcgtatgrtwatagcyaatgtyggtttagcwttrggrccwgaagaaaagattgactatccaattttattragcgaatcattaacagcagtyttagcwgtrccgctttggtayaaraatcaagtgtatggygtactattatttggtcaaagagatggwcgtyctttaccaaaaatatttgataaygatgatattcaacgyaartttggwattttcaatgatgataaataa

SEQ ID NO: 3398 - DNA, 678 bp, Staphylococcus aureus
atgcttaatcagtttttatgggttatatttccgtatttatgtttagttgtctttgtcgcaggtcatattgcacgttatcgttatgataaattttcktggacagcwaaatctagtgaaytaatwgaaagaaaaagrttgatgtggggwagtttrytatttcacttaggtatyattccrgtrttttttggacaygtwgtwggattrttaatacckaarycrtggatggatgcwgysggkgtrtctgagcatttatatcatatwggygctgtttatatwggkagyatctttggtataatwacwttgrtagggatgtttttattaacagcgagacgtgttactacgaaaagtattcgmagattaagttcagcgtcsgatatmtttgtwaatttcttattattacttatygtatttatgggatgttaygcaacattagtaacmaayrtacarcatccagaytttaactayagaacttcattatcaatttggtttagacaattatttatgttraaaccagatgcrtcattratgagtggtgtrccrattgcatttaaaatkcatatattrttaggtttcactattatggcttgttggccattyacacgtttrgtrcatgtttggagtgtacctttgacatatataaatcgcagatatattatttaccgtaagaataaagtgtaa

SEQ ID NO: 3399 - DNA, 531 bp, Staphylococcus aureus
atgaaaattcaagattatacaaaacaaatggttgatgaaaaatcatttattgatatggcttatacattattgaatgataaaggcgaaacwatgaacttatatgatatcatcgatgartttagagcgttaggtgattatgagtacgaagaaattgaaaatcgygttgtacaattttacacrgatttaaacacagatggtcgttttttaaatgttggagaaaatttatggggattacgtgattggtattcggtagatgatattgaagagaaaatcgcaccaactattcaaaaattcgatattctggatgcagatgatgaagaagatcaaaacttaaaattattgggcgaagatgaaatggatgacgacgatgatattccagctcaaacagatgatcaagaagaactaaatgatccagaagatgagcaggttgaagaagaaatcaatcattcggatatagtcattgaagaagatgaagatgaactagacgaagaygaagaagtgtttgaagacgaagaagacttcaacgattaa

SEQ ID NO: 3400 - DNA, 771 bp, Staphylococcus aureus
atgatttggtatacaatacgtgtgaaagggttggtaaatgtgaatgggaatatcattgttgcacatggcatgaggcacggacgacagaatcaagcgttagaagcatttatttctgaattagtaaaagatgatatacatcactatgatattgcgtttttagaaagtgagcatcaggatttagagacggtaatgacgacgttgattcaaagtggggttgaccattttaaaattgtaccattgctaatctttagtgcaatgcattatctcaaggatataccgaatatcgttcatgaaatgaaacgacggtatccagacataaaggtagaagtaagcgagccacttggcacacatcctttaatgagacgattaattgaacaacgtatttgtgacgcattagcaggtgamgaacaacaagttggagttatggttgttgcacacggcaatattaatggaaaktttactaaggcacacgaagagttacaaatatgcrctcaamatttgcarattaryaarcckacwtatgcgagaacgctatatggagagattagttttacacatgatttagaaagcatctcgaaacggtatcaaaaattgattgtcgtaccattatttttataygacggaagrcttgttaacaaagtgaagcagcaaatgaatgacatggttattaatacagatatacacwtcacaccttcaattaacttcgacccaattttaaagcaaatcattaacgatagattagaaagcttaatgattccratgaaaatataa

SEQ ID NO: 3401 - DNA, 792 bp, Staphylococcus aureus
atgatttggtatacaatacgtgtgaaagggttggtaaatgtgaatgggaatatcattgttgcacatggcatgaggcgcggtcggcagaatcaagcgttagaagcgtttatatctgaattagtaaaagatgacatacatcattaccatattgcatttttagaaagtgagcatcaggatttagaaacagtaatgacaacgttgattcaaagtggcgttaaacagcttaagattgtacctttgcttctctttagtgccatgcactatctcaaggatataccgaatatcgttcatgaaatgaaacgacggtatccagacataaaggtagaagtaagcgagccacttggcacacatcctttaatgacagaaataatcatgcaacgtattgatgaggtgcgcgtggatgaaatgcaacaagtcggtgttgtcgttgttgcgcatggcaacattaatggcaagtttacaaaagcacatgaagagttacagacatgcgttcaacatttgcagattaataaacctacttatgcgagaacgctatatggtgagattagttttatacatgatttagaagatattgcgagacagtatcaaaaattaattgtcgtacctttatttttatatgacggaagacttgttaacaaagtgaagcagcaaatgaatgacatggttattaatacagatatacacatcacaccttcaattaacttcgacccgattttaaaacaaattattaacgatagattagaaagtcttaatgactccaatgaaaacataaaagcactaacgaaaagttaa

SEQ ID NO: 3402 - DNA, 732 bp, Staphylococcus aureus
atgattcaattgamcaatatccataaatcattyaatgatgttgaagtcatcaaaggtattgatttatctgttgrmmaaggtgaggttgtaaccttaatyggycgatctggktcaggtaaaacaacrttgttacgwatgattaatgcrttagaaattccaactgaaggtacagtwtwtgttaacggcaaaacatatacatctaaagataaaaaatcacaaatagaagttcgtaaacartctggyatggtatttcaaagytataayctttttccgcataagacggcattagaaaatgtaatggaaggtcttatyacagttaaaaagttgaaaaaggmtgargcwcgtgrgaaatcwctwgarttacttgagaaagttggtttracacatgtcaaagatcaacgwccwcatgcattatcaggtggtcaacarcaacgtgttgcyattgcragagcaytagcwatgaaycctaaagtgatgttgtttgatgaaccaacatcwgcrcttgatcctgaactygtgaatgatgtkttaaaggtkattaaagatttrgckaatgarggcatgacaatggtcattgtgacacatgaaatgcgttttgcwaragaagtatctaataacattgtattyattcatgaaggyrtratyggagaacaagrggcwccwgaagagatkttyaaymrtccraaaacwgaagaaytaaracgyttyttaaatgttatwaatgaagaataa

SEQ ID NO: 3403 - DNA, 390 bp, Staphylococcus aureus
atggcatttamattatctgcaattcaacaagcacatcaacaatttactggtgttgaytttccaaaactattcaargcttttaaagatatggggatgacttacaatatcgtcaayattcaagatggcacwgcaacatacgtacatcaatcagaagatgatatcgttacgtcatctgtraaaagtamkmwtcctgtygctcmaarwtcaaaymaawcwatmgttcaagaygtmttaactagacatcaacaaggrcaaacagatttygaaacattttgtgatgaaatggctsaagctggcatttataaatggcatatcgatattcaagckggyacttgtacttatatcgacttgmaagamcaagctrttatttcagaattaatmcctcartaa

SEQ ID NO: 3404 - DNA, 816 bp, Staphylococcus aureus
atgactaaaaatcaraatttcattgaaacgaaagagtataaacgmtttgctgaattttgygatgcttgtatyaaatatcartatattggkatmtgytatggtcaacctggtgtcggmaaaactttatcktctaggtattacacaaattggratactattgaaaarcaagttaaycatagaggktgggaagatytagctagtaaaacgacygatgayataytatcggtgrataaratattttatamtssaccrgcwgaaaaacaaacwarattaagkaatgatytatatagtattastgcaakyattgatttgggtcaaaaattacayrtygtaaataagtatggwcatgawcatagtaaacattatagtgatatgtttaaatatattgatttaattatagtagatgagattgatcgccttaaagtgcaacatttagagcaattaagagctatttatgatgaacataatttagcaatgatatttattggtatgccrggtatagagaaaaaactatctcgttatcctcaactatattcgcgtataggttttgcrcatgaatttgataatctaagtaaagaygagacgcatcatatattagaatataagtgkcaagayttaggatttgatytaaaactcgaagaytttactgattatgaggcaataacgacgattattaaaattacaaaagggaattttaggctgattcatcgtttatttgcgcagatagayagaattatggatataaatggyttagataaaatmagtacagaagttgtagaaacagctagagatagtttagtyataggtattcgwtaa

SEQ ID NO: 3405 - DNA, 1443 bp, Staphylococcus aureus
atgaaaaacaaggagaagtatctaactaatttttctgaagccaaacgtaaagaagctactcaaaagtacaatattataaaaccttttatcttgggcaagcaatctttatcaagcatttctaaaagcaaaggtattgcgttaagtacactttataggtggaataaattatataaggaacaaggtcttactggtctaattcataatacaagagttgataaaggtgagcataaattaaaacaaaacataatagacgagattaaacgccttgcactcaagaataaaagaaatagtattgctacgattcataggaaaatcgctaattattgtatagagaataatttttataaaccaagttataaacaagtttatagtattattaaagcaatgcctaagtctgttattgatttctctcaccaaggtgaaaaatactatcaaaataagtacgatttaatacaaataagagaatcctcaagacccaatgaaatatggcaagccgaccatactttgctagatatttatatattagatcaaaaaggtaatatcaatagaccatggctaaccattattatggatgactatagtcgtgcaattgcaggctactttataagttttgatgcyccyaatgctcaaaacacagcattaacactacaccaagcaatatggaataaraatrataccaattggccagtrtgtggtatacccgaaaaattctacacagatcayggragtgactttacytcrcaycayatggaacaagtcgctattgatttgaaaattaacttgatgttttcraaagttggtgtycctcgtggtcgyggraaaatagaacgrttytttcagacagttaaycaaactttcttagaacaactkcctggatatataaacaataatgatactyctagyratytaatarattttcamaatttygaagaaaaattacgwtactttttaattgaagattataatcaaaaagarcayagtrctatycakascackcctatcartcrktggaayagtaatcaytttttycctaatatgccaagyagyttagaacaacttgatttattattrttrgaaatacctaaatctagaaaarttcattcagatggyattcattttcaaggytttmgatacagtaatacwaayctarmwgcttatgtaggtgartatgtaytrattcgttayaayccmaatgatatggctgaaatacgygtkttttatagagatgaatttctttgtacwgcwatatsyccwgawwtagctgattaytcmatwgatataaaagasatacarcacgcwcgtagtcagagaagaaaacacttaaaacaaaayattgctagtccaagyaccackgawttaattaaggaagaaaaaarttrtggttaytcacctcaagaaacgacyaaaaacgtcaaaaaattaaagagrtatcgtaatgactaa

SEQ ID NO: 3406 - DNA, 342 bp, Staphylococcus aureus
atgsarwgwatygmagaaaaaragacgtaymayttaccsamygaacacckscaagtwytcaatgtgataaraaatacgtcyaataartatattactaaaacwaarmtcttaaatcaattgggatatgaatataattcaagcaatgaacgatggttacgaagagtaatcaattcattagtatatgattatggytatcctatcggrtgcagttataaacctagtgaacgtggttattacatcattacgacagaacaagaaaagcaacaagcgatgagaagtattaagaaattagctgatggcagtatgaaacgctatgaagctttgaaacgaattraagtgtaa

SEQ ID NO: 3407 - DNA, 417 bp, Staphylococcus aureus
atgaaaataataaatcctaatatgcccgaaccgtacaaatatgaaactgattatagaaacatacctagggaatacttaaatccacatattccaaaaggtagaggaatagttaaatggaacgcatttaagacgataccccagcaatatgaaatattggaacaacacatagaagatcaamataaaataaatatgcctctattgtctgatgaccagctacaagaaattaatgagaaagtaagtagtaagattagtaaaaatatattaactgatttagattactggaaagacggatatatatattcgattcaatgttacattaacaaaatagatgaatttaatggatttatgattatcactaattccaattcaaacaataaactaaaaatacctttaagtagtattgttagcgtacagtaa

SEQ ID NO: 3408 - DNA, 381 bp, Staphylococcus aureus
atggataaagaacaacttaaaaagtatatatacgawtatgtraaagaatataaggagataccgatatatcagttagaagatttgtttaaagaaatraatcacgactatatagggagaactagtatcacacaygataaggatgagaatrtwgtgttttggagtggrtggaacaaaattacaatgtttgcgytgattgaattagttaaaagtgaacaacttgatttagtgtatagaggtagttttrtaatgcgttatttgttggatggtagagttcctaayttaccattagctatttgttatccagaagatggacaacaaackgacgtgccctcatgggtgcctatggtattaagaataaataaagaggagaaaatcaaatga

SEQ ID NO: 3409 - DNA, 768 bp, Staphylococcus aureus
atgaatattagacatataagaaatgccacggccgtgattgagtatggaggtaaacgcrttttgattgatccaatgytaagtgayaaaggykcatttgamccwtttccaaattcaccgagacaagatsaaaamaatccacttgtagaactaccmwtrgcaattgaagayatyatwaayracatcgatttagtrattttaacrcatttgcatattgatcattttgatccgaaagcrattgaagtattgccraaagatattaaaatttayrcacaaaaygaagmagaygctagtgaagtrgagsgttatgrstttacaaaygtttckgtatttaatgatgtgacacacattggagaaattgagttgattaaaacagatgctcaacatggkcatggtgaaatyttgaaratgacaggacatgttcacggywtrrtkytraaacattctgaagagccracrttatayttagcwgcwgatacrgtttggttygamggkgttgaraarrcwttaaaarcgyatcawccagatrtyrtwgtwcttaatggtggtgcaaatcaattctttgaaggygggccgttagtkatggatgaacatgatgtrttraaagtygctmatacattgycrcttgckcaaatwgttgttgtgmatatggaagcggtcaatcattggcatttatctcgtraagagctgaatgaatttataaattctaacgacttaggtaatagagttgttgtaccaaatgacggggaattattaacctttgaaaaataa

SEQ ID NO: 3410 - DNA, 279 bp, Staphylococcus aureus
atgatgagtacagttcaaagtgatattttyaagacyaatagtgcatcatcatctattaaaagygcygttgaaacatgtaataatgtgtcgaaaccggataaagatgaaagtacaacagtaagtggaaataataatgctcatagtgtgatagaygatttgatkagtaagaatcaatctgttgctgaagcaatamgaamtgcgagcgatartatacaaaaagttggygargmwtttraycaaacwgacgtaatgattggtaatgaaattggtaaaaattaa

SEQ ID NO: 3411 - DNA, 1356 bp, Staphylococcus aureus
gtgaccaaacccaaactaaaggagacaagtgcgcctatgtgtaatgataccttagaattactaagaataaaagatgaaaatataaaatatataaaccaagaaattgacgtcattatcaaaggaaaaaaagcaacagtggttaatgctgtactaacgtataagccttcggcctgttattgttgtggagttaaaaatgaaggacaaattcataaacatggtaagcgtgtttctcgtattactttacttaaaactcaagggtataacacatacctcaacttagctaaacaacgttttaaatgcttagaatgcaatggcacttttactgctaaaacgtcaattgttgatgagtcgtgttttatctcaagatgtgttactcaaaaagttatagaagaagctactaaagttaaaacagagattgatactgcagaagataactgtatctctccatctactgtaagtcgtattagaactaaagcggctaattcattacgaattaaaccstttaattgtttgccagaacacatcgctatggatgaatttaaaagcgttaaaaatgtaactggatcaatgagtttcatttttatagataatgatactcatgatgttatagatattttagaaaatagaactacaagattcttgcgtgcctatttcgagcgattcgatttaaaaaatcgacaacaagttaagacggttactattgacatgtatgaaccctatgtccgattatttcgcgacctatttcctaatgcagctattatttttgacagattccatatcgttcaacatttaaatagrgaacttaataagtatcgtgtacaagttatgaatgaataccgtaataaaaaaggacctrattatacaatttttaagaataactggaaagtyctattgatggatactagtaaaaccatatttagtaaatacagatggaataaatcttttaaggcttataaacgctcatctgacattgtagaattcatgctttcaaaagacgatatactacgacrctcctacgaacttgtccaaggattamgaaaagayctaaggttatgtaattggcctaaatttattaatcgtttaaattcagttagtaaaaagtctgtgagtaarggtgtatggaaagyggttaaatattatagaaaacatcaaaggatgttaagaaatacaatttattacccagcatttaataatggtgctatagaaggaattaataataagataaaattaatcaagcgaatttcttttggttacagaaatttcaacaactttaaagcacgtataatgatgattttcagcttrtacaaaggagaaaaaaagaagacaaccaagcccaataatggactggccgcctaa

SEQ ID NO: 3412 - DNA, 2000 bp, Staphylococcus aureus
atggcaatgtaccattttcaaaataagtttgtatcaaaagcaaatggacaaagtgcaactgcaaaaagtgcctataatagcgctagtaggattaaagattttaaggaaaacgaatttaaagattactcaaataagcaatgtgattatagtgaaattttattacctaataatgctgatgataagtttaaagatagagaatatttgtggaataaagttcatgatgttgagaacagaaaaaatagtcaagttgcacgagaaattataattggtttgccgaatgaatttgatccaaatagtaatattgaattagcaaaagaatttgctgaatccttatctaatgaaggaatgattgttgatctaaatattcataaaataaatgaagaaaatcctcacgcacatttattatgtacattacgtggtttagataaaaataatgaatttgaacctaagcgaaagggcaatgattatattagagattggaatacaaaagaaaaacataatgaatggcgaaaacggtgggaaaatgttcaaaataaacacctagaaaagaatggtttttctgttagagtttctgctgattcatataaaaatcaaaatatagatttagagccaacaaaaaaagaaggttggaaagcacgaaaatttgaagatgaaacaggaaaaaaatcttcaatatcgaaacataatgaaagtattaaaaagagaaatcagcaaaaaattgataagatgtttaatgaagtagatgatatgaaatctcacaaattaaatgcttttagttatatgaataaatcagattctactacattaaaaaatatggccaaagatttaaaaatttatgtaacacctataaatatgtataaggaaaatgaaagactatatgatttaaaacaaaaaacttcattaatcactgatgatgaagatagattaaataaaattgaggatatagaggatagacagaaaaaacttgaatctataaatgaggtatttgaaaaacaagctggaattttctttgataaaaattatcccgatcaatcattaaactatagtgatgatgaaaaaatctttatcacacatgcactatattaaatgatagagatgttttaccagctaataatgaactagaggatatagttaaagagaaacgcataaaagaggctcaaataagccttaatacagttttaggtaacagagatataagtttagaatctattgaaaaagaatcgaatttctttgccgataaactttcaaatattctcgaaaaaaataacttgtcttttgatgatgtgttagagaataaacatgaaggtatggaagatagtttgaaaatagattattatactaacaaattagaagtttttagaaatgctgaaaatatactagaagattattatgatgtacaaataaaggaattatttacagatgatgaagattataaagcttttaatgaagtaactgacattaaagaaaaacaacaattaattgattttaaaacttatcatggtacagaaaacacaattgaaatgttagaaacaggtaattttattcctaaatacagtgatgaagatagaaaatatataactgaacaagttaagttgttacaagaaaaagaatttaaacctaataaaaatcagcatgataaatttgtatttggggctattcaaaagaaattattgagtgaatatgactttgattatagtgataacaatgatttaaaacatttatatcaagaatccaatgaagtaggggacgaaataagcaaagataacattgaagagttttatgaaggtaatgatattctagtagataaagaaacttacaataattacaatagaaaacaacaagcctatggtttaataaatgctggactagattcaatgatatttaattttaatgagatatttagagaacgtatgccgaagtatataaatcatcagtacaaaggtaagaatcacagtaaacagcgccatgagttgaaaaataaaagaggtatgcacttataa

SEQ ID NO: 3413 - DNA, 528 bp, Staphylococcus aureus
atgaataaaaccagtaaagtttgtgtagcagcaacattagcattgggcacactgattggagtaacagttgttgaaaattcggcgccaacaagtaaacaggcacaggcagcaataaccccatattatacttataatggttatattggtaataatgctaattttattctggataagaattttattaacgcgattaagtatgataatgtgaaattcaatggtattaaattagctaaaacgaatacgataaaaaaagtagagaaatatgatcaaacttttaaaggtgtttctgcaaaaggaaacgaagcaagtcaattgcaatttgtagttaaaaataatatttcattaaaagatatccaaaaagcttatggcaaggacttgaaaaaagaaaatggtaaaacaaaggaagctgatagcggtattttttactatcaaaatgctaaaaagacattaggcatctggtttgtcgttgatcataatagagttgtcgaagtaacagttggacatacaccatacaaaacaagtaaataa

SEQ ID NO: 3414 - DNA, 528 bp, Staphylococcus aureus
atgaatcaaacaactaaactttgtgcagcaacgacattagcattaggtactttaattggcgcaacagttgtagggactgcatcaccaatacatcaagaagcacaggcggcaacaacaccttactatacttatcatggatatatcggtcataacgctaattttataatggataagcattttattaacgctattaaatatgacaacgtgacatttaatggtattaaattagcgaagacaaatgcgacaaaaaaagtagagaaatacgatcaaacttttaaaggtgtaactgcaaaaggaaatgaagcgaatcaattacaatttatcgttaaaaataatatatcactaaaagatattcaaaaagcttatggtaaagatttgaaaaaagagaataataaaacgaaagaatctgatagcggtattttttattatcaacattctaaaaagtcattaggcatttggtttgttgttgatcataatagagtggttgaagttacagtgggacatacgccatacaaaacgagtaaataa

SEQ ID NO: 3415 - DNA, 159 bp, Staphylococcus aureus
atgatattttcgcaaaatttatttcgttgtcccaccccaacttgcattgtctgtagaaattgggaatccaatttctctktgttggggcccacaccccaacttgcattgcctgtagaatttcttttcgaaattctctgtgttggggccccatkrytakaa

SEQ ID NO: 3416 - DNA, 76 bp, Staphylococcus aureus
gccggcctagctcaattggtagagcaactgacttgtaatcagtaggttgggggttcaagtcctctggccggcacca

SEQ ID NO: 3417 - DNA, 1050 bp, Staphylococcus aureus
atgccagtatataagratgataatacaggtaaatggtatttttccattagatataaagatgtatacggtaataacaaacgtaagatgcaacgcggtttttcaactaagcgtgaagctaagagagcagaggctatytttttgaatgacgtaaacgaaggatatagcgattcwaaaacatttgattatgtttttcatcactatttagaaaatagcgatttgagacctaaaacaaaacgacgcaaacaaaatgaatatcataaacactttaaagctaagttcgggcacataaaaatgaataagataacrcaaaatcaatgccaagagtttcgtaaatatctaatagagaatgtagcrtcaacaaattctgctcgtacaatttggtcaggttttaaagttgtaattaattatgccaaaaaatactttggattacgtacagatccaacaatatcaattaaacctattccgcgtgtaaarccaaaacctaagtttatgatgcgtgaagaatttgaaraaagaatcaaagacattgaagagcaagattacagagagttatttacattaatgttttatacaggtttraggattggcgaagctatggckcttgtttggacagactacaataaatayaaaaaagagatatccataaataaaacaatggacatctctaatagaactatatatccgagaccaaaaacagatagttcagaggatattgttcctttacctaaattcatcaatacaatgttaactgaacgacatcaacgtgaaaaagagttaaacaaatattttgatgaacgtagttattttattttcggaggaatggctcccaaacattacagtcatgttcaaaagaaatttcaaaaagctttyccccattataacattcacgcgttaagacattcttatgcatcttatcttgcaaataatggtgtagatattttcgttttacagtcactcatgagacatgctcaaatcactgaaacgatgggcacttacagccatttatacactcagaaaaaacacgatgcaatagccatttttgacaagtaa

SEQ ID NO: 3418 - DNA, 74 bp, Staphylococcus aureus
cgggaagtagctcagcttggtagagcacttggtttgggaccaaggggtcgcaggttcgaatcctgtcttcccga

SEQ ID NO: 3419 - DNA, 77 bp, Staphylococcus aureus
gcgcccgtagctcaattggatagagcgtttgactacggatcaagaggttatgggttcgactcctatcgggcgcgcca

SEQ ID NO: 3420 - DNA, 76 bp, Staphylococcus aureus
gagccattagctcagytggtagagcatctgacttttaatcagagggtcagaggttcgaatcctctatggctcacya

SEQ ID NO: 3421 - DNA, 76 bp, Staphylococcus aureus
ggagaattagctcagctgggagagcatctgccttacaagcagagggtcggcggttcgaacccgtcattctccacca

SEQ ID NO: 3422 - DNA, 115 bp, Staphylococcus aureus
tctggtgrctatagcaaggaggtcacacctgttcccatgccgaacacagaagttaagctccttagcgtcgatggtagtcgaacttacgttccgctagagtagaacgttgccaggc

SEQ ID NO: 3423 - DNA, 77 bp, Staphylococcus aureus
gggcctatagctcagctggttagagcgcacgcctgataagcgtgaggtcggtggttcgagtccacttaggcccacca

SEQ ID NO: 3424 - DNA, 1555 bp, Staphylococcus aureus
ttttatggagagtttgatcctggctcaggatgaacgctggcggcstgcctaatacatgcaagtcgagcgaacggaygagaagcttgcttctctgatgttagcggcggacgggtgagtaacacgtggataacctacctataagactgggataacttcgggaaaccggagctaataccggataatattttgaaccgcatggttcaaaagtraaagacggtcttgctgtcacttatagatggatccgcgctgcattagctagttggtaaggtaacggcttaccaaggcaacgatgcatagccgacctgagagggtgatcggccacactggaactgagacacggtccagactcctacgggaggcagcagtagggaatcttccgcaatgggcgaaagcctgacggagcaacgccgcgtgagtgatgaaggtcttcggatcgtaaaactctgttattagggaagaacatatgtgtaagtaactgtgcacatcttgacggtacctaatcagaaagccacggctaactacgtgccagcagccgcggtaatacgtaggtggcaagcgttatccggaattattgggcgtaaagcgcgcgtaggcggttttttaagtctgatgtgaaagcccacggctcaaccgtggagggtcattggaaactggaaaacttgagtgcagaagaggaaagtggaattccatgtgtagcggtgaaatgcgcagagatatggaggaacaccagtggcgaaggcgactttctggtctgtaactgacgctgatgtgcgaaagcgtggggatcaaacaggattagataccctggtagtccacgccgtaaacgatgagtgctaagtgttagggggtttccgccccttagtgctgcagctaacgcattaagcactccgcctggggagtacgaccgcaaggttgaaactcaaaggaattgacggggacccgcacaagcggtggagcatgtggtttaattcgaagcaacgcgaagaaccttaccaaatcttgacatcctttgacaactctagagatagagcyttccycttcgggggacaaagtgacaggtggtgcatggttgtcgtcagctcgtgtcgtgagatgttgggttaagtcccgcaacgagcgcaacccttaagcttagttgccatcattaagttgggcactctaagttgactgccggtgacaaaccggaggaaggtggggatgacgtcaaatcatcatgccccttatgatttgggctacacacgtgctacaatggacaatacaaagggcagcgaaaccgygaggtcaagcaaatcccataaagttgttctcagttcggattgtagtctgcaactcgactacatgaagctggaatcgctagtaatcgtagatcagcatgctacggtgaatacgttcccgggtcttgtacacaccgcccgtcacaccacgagagtttgtaacacccgaagccggtggagtaaccttttaggagctagccgtcgaaggtgggacaaatgattggggtgaagtcgtaacaaggtagccgtatcggaaggtgcggctggatcacctcctttct

SEQ ID NO: 3425 - DNA, 324 bp, Staphylococcus aureus
atgccttatatttatttaataatagccataagtactgaagttattggaagtgcatttcttaaatcttcagaaggcttttcraaatttataccatccttaggaacaataatttcatttggaatttgtttctattttttaagtaaaacaatgcaacacctaccactaaatataacttatgcaacttgggcgggactaggtttagtcttaacaaccgtagtctcaataattattttcaaagaacaaataaatctaataactatagtatctatagttttaatcatagtcggcgtagtttcgttaaacattttcggaacatcgcattaa

SEQ ID NO: 3426 - DNA, 315 bp, Staphylococcus aureus
atgaaaagagtttcttattcagtagaaacaaagtataaagcagttgaaatgaaagcagcaggattttcaacaaaagaaattatgaaagaattaaatattaaaaatagaacacaagtggaaacttggtggcgatggtatcgaaatggggaaagttatagattttcacaacacgttggtaaacaatatacctacggtaaaggattagaagagctgtcagaagtwkaacaattaaaattagaaaataagagaaaagatatagaattggatattttaaaaaagtacaaggcattggaaaggaagtggtaccaacagtag

SEQ ID NO: 3427 - DNA, 201 bp, Staphylococcus aureus
atggaygtagataatatgagtgattataaattaaaaataattgaattgatcaaaagtgatataacaggttaccaaattcacaaacaaactggcgtagcgcaatatgtaatttcacaattaagrcaaggaaagcgcgaagtagataacttaactttaaatacaactgaaaaactatacagttacgcacgacaagtgttataa

SEQ ID NO: 3428 - DNA, 405 bp, Staphylococcus aureus
gtgatttttatggaaggtaattttaaaaatgtaaagaagyttatttacgaaggygaagaatatacaaaartatatgctggaaatatccaartatggaaaaagccttcatcttttgtaataaaacccttacctaaaaataaatatccggatagcatagaagawtcaacagcaaaatggacaataaatggagttgaaccyaataaaagttatcaggtgacaatagaaaatgtacgtagcggtataatgaggrtttcgcaaactaatttagggtcaagtgawttaggaatatcaggagtcaatagcggagttgcaagtaaaaatatcaactttagtaatccttcagggaygttgtaygtcactataagtgatgtttattcaggatctccgacattgaccattgaataa

SEQ ID NO: 3429 - DNA, 1239 bp, Staphylococcus aureus
atgtacaaaataaaagatgttgaaacgagaataaaaaatgatggtgttgacttaggtgacattggctgtcgattttacacygaagatgaaaatacagcatctataagaataggtatcaatgacaaacaaggtcgtatcgatctaaaagcacatggcttaacacctagattrcatttgtttatggaagatggctctatattcaaaaatgagccccttattatcgacgatgttgtaaaaggkttccttacctacaagatayctaaaaaggttatcaaacacgctggttatgtwcgytgtaagctgtttttagagaaagaagaagraaaaatacatgtygcraacttttctttcaatatcgttgatagtggyattgaatctgctgtagcaaaagaaatcgatgttaaattggtagatgatgctattacgagaattttaaaagataacgcgacagatttattgagcaaagactttaaagagaaaatagataaagatgtcatttcttacatcgaaaagaatgaaagtagatttaaaggtgcgaaaggtgataaaggcgaaycgggacaacctggwgcraaaggtgawrcaggtaaaaarggagaacaaggcrcacccggtaaaaacggtactgtagtatcaatcaatcctkacactaaaatgtggcraattgatggtaaagatacagatatcaaagcagaacctgagttrttggayaaaatcaatatcgcaaatgttgaagggttagaarataaattgcaagaagttgaraaaatcaaagatacaactctcaacgactctaaaacgtatacggattcaaaaattgctgaactagttgatagcgcgcctgaatctatgaatacattaagagaattagcagaagcaatacaaaacaactctatttcagaaagtgtattgcaacagattggctcaaaagttagtacagaagattttgagggattcaagcaatcattaaayagtttgtatgcagataaaaatcatagtcatacaatcaarcagattgaaggattagaaaatgctttatcaaaaaaatcagacataaatcacagtcatgatgaacgttatcttttatcatcaaatgcttttacaaaagaggaagcagataaactttatcracctatcggttcttcgcagccgtcactgaatatttggacrggcagtgaaacagaatataattatttgtatcaaaaagaccctaatacactttayttaattaaggggtga

SEQ ID NO: 3430 - DNA, 1173 bp, Staphylococcus aureus
atgtacaaaataaaagatgttgaaacgagaataaaaaatgatggtgttgacttaggtgacattggctgtcgattttacactgaagatgaaaatacagcatctataagaataggtatcaatgacaaacaaggtcgtatcgatctaaaagcacatggcttaacacctagattacatttgtttatggaagatggctctatattcaaaaatgagccccttattatcgacgatgttgtaaaaggtttccttacctacaagatacctaaaaaggttatcaaacacgctggttatgttcgctgtaagctgtttttagagaaagaagaagaaaaaatacatgtcgcaaacttttctttcaatatcgttgatagtggtattgaatctgctgtagcaaaagaaatcgatgttaaattggtagatgatgctattacgagaattttaaaagataacgcgacagatttattgagcaaagactttaaagagaaaatagataaagatgtcatttcttacatcgaaaagaatgaaagtagatttaaaggtgcgaaaggtgataaaggtgaaccgggacaacctggagcaaaaggtgaagcaggtaaaaaaggagaacaaggcgcacccggtaaaaacggtactgtagtatcaatcaatcctgacactaaaatgtggcaaattgatggtaaagatacagatatcaaagcagaacctgagttattggacaaaatcaatatcgcaaatgttgaagggttagaaaataaattgcaagaagttgaaaaaatcaaagatacaactctcaacgactctaaaacgtatacggatacaaaaattgctgaactagttgatagcgcgcctgaatctatgaacacattaagagaattagcagaagcaatacaaaacaactctatttcagaaagtgtattgcaacagattggctcaaaagttaatacagaagattttgaggaattcaaacaaacactaaatgatttatatgctccaaaaaatcataatcatgacgagcggtatgttttgtcatctcaagcttttactaaacaacaagcggataatttatatcaactaaaaagcgcatctcaaccgacggttaaaatttggacaggaacagaaaatgaatataactatatatatcaaaaagacccgaatacgttatatttaattaaagggtga

SEQ ID NO: 3431 - DNA, 1899 bp, Staphylococcus aureus
atgggattacctaatccraaaaayagaaarccyacagctagtgaagtrgtwgartgggckttrtatatcgctaaaaayaaaatagctattgatgtacctggttctggaatgggagcacaatgctgggatttacctaattatttactcgataaatattgggggtttagaacatggggaaatgctgatgctatggctcaaaaatccaattatagaggtagagatttcaagataattagaaatacaaaagattttgtaccacaaccaggcgactggggtgtttggactggtggttgggcaggacatgtaaacattgtagtgggaccatgcacaaaagactattggtatggcgtagatcaaaactggtatacaaataacgcaacaggaagtccaccttataaaattaaacactcttatcatgatggaccaggtggaggggttaaatattttgttagaccaccatatcatccagacaaaactacaccggcacctaaaccagaagatgatagtgatgataacgaaaaaaataataaaaaagttccaatttggaaagatgtaacaactataaagtacactatttctagccaagaggttaattatccagaatatatttatcactttatagtagaaggtaatcgacgactcgaaaaacctaaaggaataatgattagaaacgcacaaacgatgagctcggtagaaagtttatataacagtaggaagaaatacaaacaggatgtagaatatccccacttttatgttgatagacataatatttgggcacctagaagagctgtatttgaagttcctaatgaacctgattatatagttatagacgtatgtgaagattatagtgcgagtaaaaatgaatttatttttaatgagattcacgcaatggttgtagctgtagatatgatggccaaatatgagatacctctaagtattgaaaatttaaaagtagacgacagcatttggcgttcaatgttggaacatgttaattggaatatgattgacaacggtgttcctcctaaagataaatacgaagcattagaaaaggcattacttaatatatttaaaaacagagaaaaattattaaattctataactaagccaacagtaacaaaatctagaataaaagttatggtagataataaaaacgctgatatagctaatgtaagagactcgtcaccaacagccaacaatggttcggcatctaaacaaccgcagatcataacagaaacgagtccttatacattcaaacaagcactggataaacaaatggcaagaggtaacccgaaaaaatctaatgcttggggttgggctaacgctacacgagcacaaacgagttcagcaatgaatgtaaagcgtatatgggaaagtaacacacaatgctaccaaatgcttaatttaggcaagtatcaaggtgtttcagttagcgcacttaataagatacttaaaggtaagggaacattgaataatcaaggtaaagcgttcgcagaagcttgtaaaaagcacaacattaatgaaatttatttaatcgcgcatgctttcttagaaagtggatatggaacaagtaacttcgctaacggaaaagatggagtatacaactacttcggcattggcgcttacgacaacaatcctaactacgcaatgacgtttgcaaggaataaaggttggacatctccagcaaaagcaatcatgggcggtgctagcttcgtaagaaaggattacatcaataaaggtcaaaacacattgtaccgaattagatggaatcctaagaatccagctacccaccaatacgctactgctatagagtggtgccaacatcaagcaartacaatcgctaagttatataaacaaatcggcttaaaaggtatctacttcacaagggataaatataaataa

SEQ ID NO: 3432 - DNA, 453 bp, Staphylococcus aureus
atgttttggatmttaaactttatctttagctttttagcttcaatgttcttctgcgtcatttttgatgcacctagaaaattatatytatcatgtggtttcgttggtacrtgtggatggatggtttacaccttattcttcaacggctttaatgtgcacactatatactctagtttcttyggyagtytwgcmytaggyttrttaagtcaytatatggctcgtaaacaaaaagaacctgcmatcatttttatggtracrggtatcatyccrttagtrccwggtggmttagcwtacgatgcwacraaaaatttagtmttattaaatttcagyacagcaatmaatacmatgytagargtwacacttattgcaggmgcyatcgcattaggtttattattcgccgaccaaatttcyaaattaattgtttctggrttcgtgaaatcttttaaacgattataa

SEQ ID NO: 3433 - DNA, 174 bp, Staphylococcus aureus
atgaagatgatttatccaacttttaaagacattaaaactttttatgtttggggttactataaaaacgagcaaattaagtggtacgtagacaagggtttaatcgataaagaagaatacgctttaatcactggagaaaaatatccagaaacaaaagatgaaaagtcacaggtgtaa

SEQ ID NO: 3434 - DNA, 387 bp, Staphylococcus aureus
gtggaaataatgaaaatcacagtaaacgataaaaacgaagttatcggatwcgttaatactggcggwttacgcaatagtttagatgtagatgataacaatgtgcctattaaatttaaagaagagttcgaacctagaaagtttgttttcactaacggcgaaattaaatacaatagcaatttcgaaaaagaagacgtaccgaatgcatcaaaccaacaaagtgcgtcagatttaagtgatgaggaacttcgcggaatggttgcgagtatgcaaatgcaggtggyacaagtaaacgtattaacaatggaattagctcaacaaaacgctatgttaacacaacagttgactgaactgaaaactaacaaaacaagtactgagggggacgtttaa

SEQ ID NO: 3435 - DNA, 186 bp, Staphylococcus aureus
atggwatcwtatraagaaattgarcaywtacacatyaayactggtrgwaaararcttacwcaagaacaaatagaagaagcyaaakcttttatagacagtcaaggatttaaagatatgattcgagaagctaaagagtcacgtcaaagagttatggagtctaaaattaccgatagaactaaaatgtga

SEQ ID NO: 3436 - DNA, 1911 bp, Staphylococcus aureus
atgrrtaayaaaytaattacagayttaagtagagtyttygaytacagatatgtagatgaaaatgagtataayttyaarcttatttcagacatgctgackgattttaatttctctcttgaataccayagaaataaagaggtattygcacatratggagarcaaataaagtatgarcatttaaatgtyacaagtarcgtctctgaytttttaacrtatytaaacggycgwttyagcaayatggtactaggtcataacggcgacggtatcaacgaagtaaaagacgcgcgygttgataatacwggttatgrtcataagacattgcaagatcgtttgtatcatgattattcaacactagatgytttcactaaaaaggttgagaaagctgtagatgaamactataaagaatatcgagckacagaataccgattcgaaccaaaagagcaagaaccggaattyatcacwgatttatcgccatatacwaaygcagtaatgcaatcattttgggtagaccctagaacgaaaattatttatatgacgcaagctcgtccaggtaatcattacatgttatctagattgaagcccaacggacaatttattgatagattgcttgttaaaaacggcggtcacggtacacacaatgcgtatagatacattgatggagaattatggatttattcagctgtattggacagtaacaaaaacaacaagtttgtacgtttccaatatagaactggagaaataacttatggtaatgaaatgcaagatgtcatgccgaatatatttaacgacagatatacgtcagcgatttataatcckrtagaaaatttaatgattttyagacgtgaatataaascywctgaaagacaasytaagaattcrttgaayttyrttgargtwagaagtgctgacgatattgataaaggtatagacaaagtattgtatcaaatggatatacctatggaatacacttcagatacacaacctatgcaaggtatcacttatgatgcaggtatcttatattggtatacaggtgattcgaatacagccaaccctaactacttacaaggyttcgatatmaaaacraaagaattgttatttaaacgwcgyatcgatataggcggtgtgaataacaactttaaaggagatttccaagaggctgagggtctagatatgtattacgatctagaaacaggacgtaaagcacttytaatyggggtaactattggaccwggtaacaacagacatcaytcaatttattctatcggycaaagaggtgtwaaccaattcttgaaaaacatcgcrcctcaagtatcaatgactgattcaggcggacgtgttaaaccgttaccaatacagaacccagcatatctaagtgatattacggaagttggtcattactatatctatacgcaagacacacaaaatgcrttagatttcccgttaccgaaagcgtttagagatgcaggktggttcttkgatgtactgcctggacactataatggtgctctaagacaagtacttaccagaaacagcacaggtagaaatatgcttaaattcgaacgtgtcattgacattttcaataagaaaaacaacggagcatggaatttctgcccgcaaaacgccggttattgggaacatatccctaagagtattacaaaattatcagatttaaaaatcgttggtttagatttctatatcactactgaagaatcaaaccgatttactgattttcctaaagactttaaaggtattgcaggttggatattagaagtaaaatcgaatacaccaggtaayacaacacaagtattaagacgtaataacttcccgtctgcacatcaatttttagttagaaactttggtactggtggcgttggtaaatggagtttattcgaaggaaaggtggttgaataa

SEQ ID NO: 3437 - DNA, 1902 bp, Staphylococcus aureus
atgacaataactattaaaccacctaaaggtaatggcgcacctgtaccagtagaaacaactttagtaaaaaaagttaatgctgacggtgtattaacttttgatattctagaaaataaatatacttatgaagttattaacgctatagggaaaagatggattgttagtcatgtcgaaggtgaaaacgacaagaaagaatatgtaataactgtcattgataggaaatcagaaggcgacagacaactggttgaatgtactgctagagagattccyatagacaagttaatgattgatagratttatgttaatgtaacaggatcttttacagtagaaagatattttaacattgtgtttcaaggtactggaatgctttttgaagtcgarggyaargttaartcttcraagtttgaaaatggtggtgaaggcgayacaaggttagaaatgtttaaaaagggattagaacatttcggtttagaatataaaataacgtatgacaaaaagaaagacagatataagtttgtattgacgccttttgcaaatcaaaaagcgtcttattttatttctgacgaagtcaacgccaacgctataaaactcgaggaagatgcaagtgatttcgccaccttcattagaggatatggtaattattcaggwgaagaaacattcgaacacgctgggctcgtaatggaagctagaagtgcattagctgaaatatacggcgacatccacgcagaaccatttaaagatggtaaagtgactgaccaagaaactatggataaagaattacaatcgagattgaaaaagtcgttaaaacaatctttgtctttggactttttggtgttaagagaatcatatccagaagcagacccacaacccggagacatagtacaaataaaatctaccaaactaggtttgaatgatttagtccgtatagtacaagttaaaacgattaggggtataaacaatgtaattgttaagcaagatgtaacgcttggtgagtttaatcgagaacaacgatatatgaaaaaagttaatactgcagctaactatgtttctggattaaatgaygttaayctttcyaatcctagtaaagcggcagaaaacttraartctaaagtwgcrtcaatagctaaatcaacactcgatttgatgagtagaactgatttgattgaagataaacaacagaaggtaagctctaaaactgtgactacatctgacggcactatcgttcatgattttatagataaatcaaacattaaagatgtaaaaacrattggaacgattggcgattctgtagctagaggatcacatgcgaaarcwaatttcacwgaaatgttaggcaakaarttaaaagcyaaaacracmaaccttgcaagaggtggcgcwacaatggcaacagttccaataggtaaagaagcggtagaaaacagcatttatagacaagcagagcaaataagaggagacctaatcatattacaaggtacagatgatgactggttacatggttattgggcaggcgtaccgataggcactgataaaacsgayactaaaacgttttayggygccttttgttctgcaattgaagttatymggaaaaataatccarcttcaaaaatacttgtaatgacagctactagrcaatgycctatgagtggyacaacgatacgycgtaaagatackgayaaaaacaaaytagggttaackttagaggattatgtcaaygctcagatattggcttgtagtgaattggatgtaccagtatatgatgcytatcayacagattatttyaarccatataatccagcrttyagaaaatcwagyatgccwgayggattrcatcckaaygaragrggtcatgaagttattatgtaygarcttattaaaaattattaycagttttayggatag

SEQ ID NO: 3438 - DNA, 948 bp, Staphylococcus aureus
atggacatagaattaacaaaaaaagatggtactgtaatcaaattaagtgaatacgggtttatcgttaacgatatagtaattgatagyatgcaaatcaacacaaagtatcaagayaaagaaaatatgaacggtcgtatattaatggggagcaattatatcagtagagatatagttgttccttgtttttgtrwrgtwaaaaatcgttcagacattgcttatatgcgagatatgttgtattcgttaacgacagacatagaacctatgtatttgcgagaaatmagaagaaaagaagagttgaattacaggtttactcaaccaayttctgatgattacgtgaaattagataaaaacaacttcccggattaygaatattcaagacacgatcaacaaawttatgtaaatggtaaacagtataaagttatttttaacggagttataaaccctaaacaaaaaggtaataaagtttcttttgaactaaaattcgaaactacagaattaccatacggtgaaagtattggaacaagcctagagttagaagaaaacaaaaaggttggattgtggtcgtttgattttaatattgattggcatgcaggcggagacaaaagaaagtatacatttgaaaatttgagcaaaggtacagtttactatcatggtagtgctcctaacgaccaattcaacatgtataaaaagataacaattattttaggcgaagatacagaatcgtttgtatggaatttaacgcatgctgaaataatgaaaatcgaagggatcaaactaaaarctggagacagaattgtttatgatagcttccgagtttataaaaacggtgttgaaataagtaccgaaacgaatatagcccaaccaaaatttaaatacggagctaataaatttgagtttaatcaaacggtacaaaaagttcagtttgatttgaaattttattataagtag

SEQ ID NO: 3439 - DNA, 345 bp, Staphylococcus aureus
atgtcaacacttggtattacagatttgaacgttattgagcaaatgacattaacagaatataactatcgaatgtatgcgaaagagtatgaaatgctaacccaagaattcgaacgttacaaacttgcgtttgctattcgtgatgctgcagctactaaaaatgttgggacagaaaataaacctaaagaggaatatgtttttaacaaygcaaacgacgtattgccttatgaagaaaatatccaacggcttaacgaaggtaaagatataagatttagtagcgaacgtgatgaatacgaaccacaaaataatgaattctttaaagttatagcagaatttaataagcaatag

SEQ ID NO: 3440 - DNA, 366 bp, Staphylococcus aureus
atgaatgtagaaattaacggaaagtcattagaattaagttttggttttaaatttttaagagaaatcgataaccgattaggtttaaaagttgarcaagcttctatcggtcaaggtgtatcaatgttgcctgtaggtttagaragtggaaatcckgttgtgattggcgaagttttaatygcakctacatctcacttraaaaaacaagcaattactattaataacattgatgaagcaytagatgaaatcgcagaaaatatyggactagaagaattyggttcggatattttaacggagttgggaaagcgacctatgacccgaaacctagtcgaagtagtggaaacggaagaraaaccagcggaagcctaa

SEQ ID NO: 3441 - DNA, 582 bp, Staphylococcus aureus
atggcraatatgaaaaatagtaatgaycgtattattttrtttagaaaagctggcgaaaaagtagatgctactaaaatgctttttttaactgaatacggcttatcacatgaagctgatacagatacagaggatacratggayggktcttataacactggtggttcwgttgartcaacaatgtctggtactgctaaaatgttttatggtgacgattttgcagatgaaattgaagatgcagttgtagatcgcgtattgtatgargcttgggaagttgaaagtagaataccaggcaaaaatggrgatkcyrctaaatttaaagcgaaatatttccaaggtttccacaataaatttgaattaaaagcagaagctaacggtattgatgaatatgaatatgaatatggagtgaatggtcgtttccaacgtggatttgcaacactacctgaggctgtaacaaagaaacttaaggcgactggatacagattccaygacactacaaaagcagatgcrttaactggcgaagatttaacagcaattccacaacctaargtagattcaycamcggttrcaccargagaggtataa

SEQ ID NO: 3442 - DNA, 384 bp, Staphylococcus aureus
atgacaccgaacttacaactttataataaagcgtatgaaacgctacaaggatatggattccctgttatttctcgtaaagagatgcaacaagagattccgtatcctttttttgtaataaaaatgccggagtcaaatagaagtaagtacacgtttgatagttattctggcgatacgaatttagttattgatatttggagtgtaagcgatgatttaggacatcatgacggacttgttaaaagrtgtatygatgatttaacacctagcgttaaaacaaacgattatgactttgaagaagawgatactaacatcrcacagttagtygatgatactacyaatcaagaattgctacacacatcartaacgatatcttacaaaacattttaa

SEQ ID NO: 3443 - DNA, 975 bp, Staphylococcus aureus
atggaacaaacacaaaaattaaaattaaatttgcaacattttgcaagtaacaatgttaaaccacaagtatttaaccctgacaatgtaatgatgcaygaaaagaaagatggcacgttgttaaacgactttacaacacctatcttacaagaggttatggaaaactctaaaatyatgcaattaggtaagtacgaaccaatggaaggtactgagaagaagtttactttttgggctgataaaccaggtgcttactgggtaggtgaaggtcaaaaaatcgaaacrtctaargctacwtgggttaatgctacwatgagagcgtttaaattaggggttatcttaccagtaacaaaagaattcttgaattacacttattcacaattctttgaagaaatgaaacctatgattgctgaagctttctataaaaagtttgacgaggcaggtattttgaatcaaggtaacaatccgttcggtaaatcaattgcacaatcaattgaaaaaactaataaggttattaaaggtgacttcacacaagataacattattgatttagaggcattgcttgaagatgacgaattagaagcaaatgcatttatctcaaaaacacaaaacagaagcttgttacgtaaaattgtagatcctgaaacgaaagaacgtatttatgaccgtaacagtgattcgttagacggtctacctgtggttaaccttaaatcaagcaacttaaaacgtggtgaattaatcactggtgacttcgacaaattgatttatggtatccctcaattaatcgaatacaaaatcgatgaaactgcacaattatctacagttaaaaacgaagatggcacacctgtaaacttgtttgaacaagacatggtggcattacgtgcaactatgcatgtagcattgcatattgctgatgataaagcgtttgctaagttagttcctgctgacaaaagaacagattcagttccaggagaagtttaa

SEQ ID NO: 3444 - DNA, 186 bp, Staphylococcus aureus
ttggaggatactaatatgagtaatactgacaaataccttagagacatagcaagagaattaaaaggtatacgtaaagagttacaaaagcgaaacgaaacagttattattgatgcaaacttagacagyktaaggtcggcagtattagccgataaagaaaaatcgaaatataatgaacctctcttttaa

SEQ ID NO: 3445 - DNA, 1677 bp, Staphylococcus aureus
atgagtattgtgttgtttttgattgtatttatcttgctctcactcattgtgagccgatatttatattcagttgctttaaatgtgccatctaaaatagatgttgtttttaatccgattgagaaattgatttatcaactgattggcacgaaattagaacacatgtctgggaagacgtatatcaaacattttttgttgtttaacggattgatgggcggattgtcctttgtattattgcttattcaacaatggctgtttttgaatcctaaccataatttaaatcaatctgtatcgttagcctttaatactatggcatcttttttgaccaatactaacttacagcattatgcaggtgaaacagatttaagttatttaacacaaatgtgtgtcatcactttcttaatgttcacgtcagcagcgtcaggttacgccgtatgtattgcgatgttaagacgtttgactggaatgacagatgtgattggtaatttctatcaagatattacgcgttttattgtacgggtgctcatacctttcgcattgatcatcagtttgtttttaatcagtcagggcacaccgcaaacgcttaaaggtaatttggtgattgagacattatcaggtgtgaaacaaacgattgcatatggaccgatggcgtctttagaatctattaaacatttagggacaaatggtggtggtttcttaggtgcgaactcttctacaccttttgaaaatccgacatactggtctaattacgctgaagctttaagtatgatgttgattccaggttcattagtctttctattcggtagaatgttgaaaactaaactacagattcatccgcatgcgattatgattttcgttgcgatgtttgtaatgttcatcggctttttagtgacatgtctctattttgaatttgcggggaatccagtgttgcatcacttaggtattgccggtggcaatatggaaggcaaagaaacacgtttcggtattggcttatccgctttatttacaaccattacgaccgcttttactacaggaacagttaacaatatgcacgatagtcttacaccgctaggcggcatggttccaatggtattaatgatgttgaatgcagtttttggcggtgaaggtgttgggctgatgaacatgttgatttatgtcatgttaacggtctttatctgtagtttgatgattgggaaaacaccaagttatttaggaatgaagattgaaggtaaagagatgaaactcattgcgctttctttcttagtacatcctttacttattttggttttttcagcactagcttttattgtgccaggggcatcagatgcgttaactaatccgcaattccacggtgtatcacaagtgttgtatgagtttacatcatcttcagcgaataatggctctggttttgaaggattaggagacaatacggtattttggaacatttcaacaggcattgtgatgttgcttgcacgawatattccaatcgttttacaaattttgattgtatctagtttggtaaataaaaagacctatcagcaacatactcaagatgtaccgattaataatttatttttcagcagtgtattgattatctttattattttgttgagcggcttaacgttcttacctgacttaatgcttggaccaataggcgaacagcttttgctgcacgcatag

SEQ ID NO: 3446 - DNA, 732 bp, Staphylococcus aureus
gtgcctaatatgaaaaaaagattattatttgtaattgttattactttatttattttttcttctaatcatacagtcttatctaacggcgatgtaggtccaggaaayctaagaaatttttatactaaatatgaatatgtgaatttaaagaatgttaaagacaaaaattcaccagaatcacaccgcttagaatactcgtataaaaatgatacattgtatgctgaatttgacaatgaatatataactagtgatctaaagggaaaaaatgtcgatgtttttggtataagctataaatatggttctaactctcgtactatatatggyggtgttactaaagcagaaaacaataaattagattcgccaagaataatacctataaatttaattatcaatggcaagcatcaaacagttacaactaaaagtgtttctacagataaaaaaatggttaccgcacaagaaatagatgtcaaactaagaaaatacttgcaagatgaatttaatatttatggacacaatgatactggtaaaggtaaagaatacggcacttcttcaaaattttatagcggttttgataaggggagtgtagtattccatatgaatgatggttctaatttctcgtatgatttattttacacaggatacggtcttccagaaagcttcttaaaaatttacaaagataataaaactgttgattcaacacaatttcatctagatgtcgaaatttcaaaaagatga

SEQ ID NO: 3447 - DNA, 1344 bp, Staphylococcus aureus
atggtgcgtatatcgataaaaaagaaattactcagaagaatattgagattaatattggtgagtacgatgacgaaagttaaattaaactttaacaaaccrtctaatgttttcaatagaaacatattcgaaatactaaccaattacgataacttcactgaagtacattacggtggaggttcgagcggtaagtctcacggcgttatacaaaaagttgtactyaaagcattgcaagaytggaaatatcctaggcgtatactrtggcttagaaaagtmcaatcaacaattaaagatagtttrttcgaagatgtyaaagattgtttgataaacttyggtatttgggacatgtgcctttggaataagactgataacaaagttgaattgccaaacggcgcagtttttttgtttaaaggattagataacccagagaaaataaagtcgataaaaggcatatcagacatagtcatggaagaagcgtctgaattcacactaaatgattacacgcaattaacgttgcgtttgagggagcgtaaacacgtgaataagcaaatatttttgatgtttaacccagtatctaaactgaattgggtttataagtatttctttgaacatggtgaaccaatggaaaatgtcatgattagacaatctagttatcgagataataagtttcttgatgaaatgacacgacaaaacttagagttgttagcaaatcgtaatccagcatattacaaaatttatgcgttaggtgaatttgctacactagacaaawtggttttccctaagtatgaaaaacgtttaataaataaagatgagttaagacatttaccttcttattttggattggactttggctacgttaatgatcctagtgcttttatacattctaaaatagatgtaaagaaaaagaagttatacatcattgaagagtatgttaaacaaggtatgctgaatgatgaaatagctaatgtcataaagcaacttggttatgctaaagaagaaattacagcagatagtgcagaacaaaaaagtatagctgaattaaggaatctagggcttaaaaggattttaccaaccaaaaaagggaagggctcggttgtacaagggttacaattcttaatgcaatttgaaatcattgttgatgaacgttgtttcaagactattgaagagtttgacaactacacatggcaaaaggacaaagatacaggtgaatataccaatgaaccagtagatacatacaatcattgtatcgattcgttgcgttattcagtggaacgattctacagaccggttagaaaacgcacaaatstcagttcgaaagttgacacaataaaatctctaggattatag

SEQ ID NO: 3448 - DNA, 516 bp, Staphylococcus aureus
gtgggttggctgattatagccaatcccttttttaattttaaaaagcgtatagcgcgagagttggtggtaaatgaaatgaacgaaaaacaaaagagattcgcagatgaatatataatgaatggatgtaatggtaaaaaagcagcaattwcagcaggttatagtaagaaaacagcagagtctttagcaagtcgattgttaagaaatgttaatgtttcggaatatattaaagaacgattagaacagatacaagaagagcgtttaatgagtattacagaagctttagcgttatctgcttctattgctagaggagaacctcaagaggcttacagtaagaaatatgaccatttaaacgatgaagtggaaaaagaggttacttacacaatcacaccaacttttgaagagcgtcagagatctattgaccacatactaaaagtayatggtgcgtatatcgataaaaaagaaattactcagaagaatattgagattaatattggtgagtacgatgacgaaagttaa

SEQ ID NO: 3449 - DNA, 304 bp, Staphylococcus aureus
atgactaaaaattataaagacatgackcaggamgaaataaaagacttattatctgaaaaaagcggcagaattgtatgaattagcgaaagaaattaagggagaaagtaaatttgatattttgcttttctcatcaataggagttatcgacggagattatttagcaggttcaarttctgtgattggtcatactttygatcttgcttmcttattggatagcactaagagttataaagayattgtcaatgttctccaaatgtgtaaatcacaaaaawttctcggtatwgatgacgacaaggaggactaa

SEQ ID NO: 3450 - DNA, 426 bp, Staphylococcus aureus
ttgatatttagaggtggcacaatgagtaaatacaaygctaagaaagttgagtayaaaggaattgtatttgatagcaaagtagagtgygaatattaccaatatttagaaartaatatgaatggyactaaytatgatcgtatcgaamtacaacckaaattygaaytacaacckaaattygggaarcaaagaccgattacgtatatagccgatttctctttgtggaaggaagggaaactggttgaagttatagacgttaaaggtaaggcgactgaagttgccaacatcaaagcgaagatattcagatatcagtatagagatgtgaatttaacgtggatatgtaaagcgcctaaatacacaggtcaagaatggatggtatatgaggacttagtgaaagtcagacgtaaaagaaaaagagaaatgaagtga

SEQ ID NO: 3451 - DNA, 216 bp, Staphylococcus aureus
atgaayaymatgcaattcaaaagcttattgaaatcgatgtatgaagagacaaagcaaarcgacccgattgtagcaaatgtmtatatmgaractggttgggcrgtyaayagattrttrgacaataacgagttatcgcctttcgatgattaygacaragttgaaaagaaaatyatgaatgaaatcaactggaagaaaacrcacattaaggagtgttaa

SEQ ID NO: 3452 - DNA, 1242 bp, Staphylococcus aureus
atgaattayggacaattygaaattgaaagyacaataatcgctacgctrctyaaacaaccggacgtaytagaaaagatamgagttaaagattayatgtttacgaacgaaaagtttaaaacctttttcaattatgtaatggacgtcggaaagatagatcatcaagaaatytatttaaaagcaactaaagataaagaatttttagatgcagatactataactaaactttayaactccgatttcattggatayggyttctttgaacgttatcaacaagaattattggaaagttatcarctcaacaaagctaacgaattggtaactgagttcaaacaacaacctacgaaycaaaactttaacaacttgattgatgaactcaaggatttaaaaacrattactaacaaaaaagaagatggaaccaagaagtttgttgaggagtttgtcgaagagttatacagcgatagccctaagaagcaaattaagacgggttacaagctaatggattacaaaatagggggattagarccatcacaattaatcgtcatcgcagcgcgtccctcagtgggtaagacaggytttgcattaaacatgatgctgaacatagcacaaaatggatacaaaacatctttctttagtctcgaaacaaccggcacatcggtattgaaacgtatgttatcaacaattactggtattgagttaacaaagataaaagaaatcaggaacttaacgccggatgacttaacaaagttaacgaatgcgatggataaaatcatgaaattaggcatcgatatttctgataaaagtaatatcacaccgcaagatgtgcgagcgcaagcaatgaggcattcagacrggcaacaagttatttttatagattaycttcaactgatggatactgatgcgaaagttgatagacgtgtagcagtagaaaagatatcacgygacttaaagataatcgctaacgagacaggcgcaatcatygtactactttcacaactgaatcgtggwgtcgagtctagrcaggataaamgaccaatgctatcggacatgaaagaatcaggcggaatagargcagatgcgagtttagcratgctactttaccgtgatgattattataaccgtgacgaagatgacagtatcacwggcaaatctattgttgaatgtaacatagccaaaaacaaagacggcgaaaccggaataattgaattygagtattacaagaagackcagaggtttttcacatga

SEQ ID NO: 3453 - DNA, 357 bp, Staphylococcus aureus
atgccgatgagcaaaacacaagcattagaaattattaaaaaagttaggtacgtatacaacatygattttgataaaccraagttagaaatgtggattgatgtattaagtcaaaayggagattatcaaccaactgyaaaagcggtagatgkwtatatcaacagtaacaacccgtayccgcctaacttaccagcaatcatgcgtaaggmacctaaaaaagtatctatcgagccrgtagayaacgaaacygctacacaccaatggaaaatgcagaatgaccccgaatatgtcaracaaagaaaaatagcgctagataasttcatgaataagttggcagaatttgggggcgawaacgaatga

SEQ ID NO: 3454 - DNA, 801 bp, Staphylococcus aureus
atgggagaagtatcgtggataaaacttaaagttggcatgtttgatgacagcaaaatcaaatatatcgaagctttacccgaaagagatacgatcataactatttgggttaagttrctaactttatcaggaaagtacaatgaacaaggttatattatgctatccgaaaacttgccgtacaacgaagaaatgttagcaaatgaatttaatagacctattaactcaataaggttagcaattcaaacttttgagacattgggcatgattgaaaaagttaatggtgtcataaaagtgacaaactgggagaagcatcaaagcttagatagcaaagctaagcataaagaaaaaaataaattgcgacaacaacgctatcgwgagaracagaaaaagttactagaagcaaaacgtaacgttaccgtaacgttacgtaacgatacagaagaagaaagagaagaagaaaaagaagaagaatataagaataaagaagaagaaagagaagccgtcttctcatcttcaataaaatatataattgcaaatttggatgataagttaacrcctaatcaaatggarcaattagggtttgctattgatgatataggtacraacgcttttgaagttgtaaaagtaggtgttgagtacactaaaagcaaaagtgcgcatggtggctayttaattaaagttttraacaactgggctaaagagaatgtcaaaacaaaagaagatgcagaamayaaaatagcrcctagraaaaayacwactgatgatgtcattgcrcaaatggaaaaagaattgagtgatgactaa

SEQ ID NO: 3455 - DNA, 330 bp, Staphylococcus aureus
atgrctraaaatattaaaacwgaacaacattattacactaaagatttytcaggatacagaaatgaagaagataaytttgtagcaaatcaagaattgacagtaacaatcacattgaacgagtacagaaaacttattgaaataaaggctgttaaagataaagaagaagatacttacmkmkgtaagtattttgcggaagaaagaaaaaacgaaaaattggaaaaagaaaatataaaactraaaaacaaaatttatgaattacaaaacgaagaagataacgaggagkrcgaagargaswasgargamkasaasgakgwmttacaaaattggtga

SEQ ID NO: 3456 - DNA, 222 bp, Staphylococcus aureus
atgatraaaaatagtttgcaagctaaagaacttgcrgtaattttatctgtttctaaatccaaagcaggacaaataataagagaactgaataaagagcttgaagaygaaggrtacattgcsatacgaggcagaataccmgtccaattagctaggaaaaaattyccttatcacgacttatcagacsagagaataatggaggagttgaaaaaagaaaatgagtaa

SEQ ID NO: 3457 - DNA, 825 bp, Staphylococcus aureus
atgtgggtgttgaggaaaaaggaggatactcaaatgcaagcattacaaacatttaattttaaagagctaccagtaagaacagtagaaattgaaaacgaaccttattttgtaggaaaagatattgctgagattttaggatatgcaagatcagacaatgccattagaaatcatgttgatagcgaggacaarctgacgcaccaatttagtgcatcaggtcaaaacagaaatatgatcattatcaacgaatcaggattatacagtctaatcttcgatgcttctaaacaaagcaaaaacgaaaaaatyagagaaaccgctmgraaattcaaacgmtgggtaacatcagatgtcctaccagctattcgcaaacacggtatatacgcaacagacaatgtaattgaacaaacattaaaagatccagactacatcattacagtgttgactgagtataagaaagaaaaagagcaaaacttacttttacaacaagaaatyggagarctaaaacccaaagcagaytatgtwgatgaaatcttaaartcaactggcacattagccacaactcaaatcgcggcagactacggtatatcagcacaaaagttaaacaaactactacacgaagctagactacaacgaaaagtaaataaacagtgggtgctttactcagaacacatgggcaagagttacacagawtcagacactatarcaattgtrcgytctgayggyagagaagacacagttttacaaactagatggacacaaaaaggcagattgaaaatacatgaaatcatgactgaattcggttatgaagctaatttagggggagcgtaa

SEQ ID NO: 3458 - DNA, 780 bp, Staphylococcus aureus
atgcaagcattacaaacatttaattttgaagaattaccagtaagaacattagaggttgacggagaaccatattttataggaaaagatgttgctgacattttaggatatgcaaacggacgagatgctttgtcaaaacatgttgatgaagacgacaagaaagttctaacgtcgcgaaatacgactttagaaaatttaccaaatcgaggacttactgcagtcaacgaatcgggtttatacagcctaatcttctcatcaaaactagaatcagctaaacgattcaaacgctgggtaacatcagatgtcctaccagccattcgcaaatatggtatctacgcaacggacaacgtaattgaacaaacattaaaagatccagactacatcattacagtgttgactgagtataagaaagaaaaagagcaaaacttacttttgcaacaagaaatcggagagctaaaacccaaagcagattatgttgatgaaatcttaaaatcaactggcacattagctacaactcaaatcgcggcagactacggtatatcagcacaaaagttaaacaaactactacacgaagctagactacaacgaaaagtaaataaacagtgggtgctttactcagaacacatgggcaagagttacacagattcagacactataacaattgtgcgttctgatggcagagaagacacagttttacaaactagatggacacaaaaaggcagattgaaaatacatgaaatcatgactgaattcggttatgaagctaatttagggggagcgtaa

SEQ ID NO: 3459 - DNA, 309 bp, Staphylococcus aureus
atgcaagaccaatcattaaaattagtaaaactacaactaaaatatcataacctttcaggacaaattgaagcttatgataaatcacttaaagaaataagatacactcgagatcttttcaacaaacatctaagcatgaataacgaagacgcatttgctggtttggaaatggtagaagatgaaattactaaaaagctacgaagtgctatcaaagagttccaaaaagtagtgaaagcgttagacaagcttaacggtgttgaaagcgataacaaagttactgatttaacagagtggcggaaagtgaatcagtaa

SEQ ID NO: 3460 - DNA, 219 bp, Staphylococcus aureus
atgcaatggaatttaataaagttgagaaaagaaagaaagtgtactcaagaagatttagcaaacctcttgaatatatcaactgaaggttatcgtttaaaagaattaggaaagcatcaatttaagaatgatgagatgtttattatcgctgatttttttgacgaaaatattggagatatttttttacccacaaagtacacgaaacgcaaacraacatcttaa

SEQ ID NO: 3461 - DNA, 222 bp, Staphylococcus aureus
atgaakcagactgtaacttatatcatycgtcatagggatatgccaatttatataactaacaaaccaactgataacaattcagatrttagttactccacaaatagaaatagagctagggagtttaacggtatggaagaagcgagtatcaatatggattatcacaaagcaatcaagaaaacagtgacagaaacwattgagtacgaggaggtagaacatgactga

SEQ ID NO: 3462 - DNA, 345 bp, Staphylococcus aureus
ctgatgcatcaaacgaccaaattaaaacattcagcaaacttattgagcgacttactggagaaacatatagcaatatcgaactcatcaaatctktatcaatttaatcaggaggacaywttcatgacyaaaacacttgaattaagttttaaatcttcaytagacaarcctgtmaaaytgcaattaccacaattaaacaacrtmgtraccgagcaagttgcacgtgatagtatgaatgcattagtagatttaaatattwtaaagtcwaatagtggyrctatcaccaaagtacattctgctcaaattattgataaaacracracygttttatttgaagmwaagaaatag

SEQ ID NO: 3463 - DNA, 204 bp, Staphylococcus aureus
atgagtaaaataaaccacatcactattgtattatcatttactaaagtagacgctaacggcaaacaaacagaatttaagcgtcgattcgctaacattaaccctgatgcatcaaacgaccaaattaaaacattcagcaaacttattgagcgacttactggagaaacatatarcaatatcgaactcatcaaatctttatcaatttaa

SEQ ID NO: 3464 - DNA, 204 bp, Staphylococcus aureus
atgagtaaaacaaatcacattacaattgtattatcatttacaaaactagatacaaatggtaaacaaacagaatttaaacgtcgattcgccaatattaatcctgaagtatcaaacgaccaaattaaaacatttagcaaacttatcgagcgacttactggagaaacatacaataacatcgaagtcatcaaatctgtatcaatttaa

SEQ ID NO: 3465 - DNA, 288 bp, Staphylococcus aureus
atggcaaaagaaattatcaacaatacagaaaggtttattttagtacaaatcgacaaagaaggtacagaacgtgtagtatatcaagatttcacaggaagttttacaacttctgaaatggttaaccatgctcaagattttaaatctgaagaaaacgctaagaaaattgcggagacgttaaatttgttatatcaattaactaacaaaaaacaacgtgtgaaagtwgtkaaagaagtwgtkgawagawcwgayttrtcwycwgakrwaacagttrayasygaaacartrtrr

SEQ ID NO: 3466 - DNA, 372 bp, Staphylococcus aureus
ytggaaagatggggagttgstagwatgatgyygaaatttaragcktgggataaagataaaaaagttatgagtwttattgacgaaatcgattttaatagtgggtacattttgatttcaacaggttataaaagtttcaatgaagtaaaactattacaatacacaggatttaaagatgtgcacggtgtggagatttatgarggggatattgttcaagattsttattcsrgagaagtaagttttatcgagtttaaagaaggagccttttatataacttttagcaatgtaactgaattamtaagtgaaaatgacgatattattgaaattrttggaaatatttttgaaaatgagrwgctattggaggttatgagatga

SEQ ID NO: 3467 - DNA, 186 bp, Staphylococcus aureus
atgcaacaacaagcatatataaatgcaacgattgatataagaatacctacagaagttgaatatcatcatttcgatgatgtggatgatgaaaaagatrygctrgcaaagcgcttagatgacaatccggrtgaattactaaagtatgacaryataacaataagacatgcatatatagaggtggaataa

SEQ ID NO: 3468 - DNA, 348 bp, Staphylococcus aureus
gtgcttyggcactggctttttattttggawaaaaggagcaaacaaatggatgcaaaagtaataacaagatacatcgtattgatcttagcattagtmaatcarttyttagcgaayaaaggtatwagyccgatwccagtagaygawgarastrtwtcatcratwatcttaacwgttgttgctttatatactacrtataaagayaatccaacatctcaagaaggkaaatgggcraatcaaaarytaaagaaatataaagctgaaaryaartatagaaaagcaacaggrcaagcrccwattaaagaagtaatgacacctacgaatatgaacgacacaaatgatttagggtag

SEQ ID NO: 3469 - DNA, 336 bp, Staphylococcus aureus
ttgtggctttttaatttgaataaagtgggtggtgtaatgtttgghtttaccaaacgacaygaacaagattggcgtttaacgcgattagaagaaaatgataagactatgtttgaaaaattcgacagaatagaagacagtctgagaacgcaagaaaaaatttatgacaagttagatagaaatttcgaagaactaaggcgtgacaaagaagaagatgaaaaaaataaagagaaaaatgctaaaaatattagagacatcaagatgtggattctaggattaatagggacgattctaagtacatttgttatagccttgttaaaaactatttttggcatttaa

SEQ ID NO: 3470 - DNA, 171 bp, Staphylococcus aureus
ctgaaaatgcytaaattaatttcaccaacattcgaagatattaaaacatggtatcaattgaaagaatatagtaaagaagatatagcgtggtatgtagatatggaagttatagataaagaggaatatgcaattattacaggagaaaagtatccagaaaatctagagtcatag

SEQ ID NO: 3471 - DNA, 2415 bp, Staphylococcus aureus
ttggatagttcaacaaaaacattaacagaagataaacaggtttaccgtgtggagggtttctcgtgtgcgaattgtgctgggaagtttgaaaaaaatgtaaaagaactatcaggggtgcatgatgctaaagtcaatttcggagcttccaaaattgatgtctttggcagtgcaaccgttgaagatctggaaaaggctggtgctttcgagaatcttaaagtggcaccagagawgkctagaaraarggtyraacyartggtaacagaagawawraaygtytaycgkgtssarggatttwcwtgygcaaaytgtgcwggraagtttgaraaaaatgtwaaamarmtwscwggmgttcaggaygcaaaagtraactttggcgcttctaaaattgatgtatatggaaayrcatcggttgaagarcttgaaaaagcaggtgctttygagaatctwaargtawytcctgaaaaactrgcgaatcmawcgatacaarsggtyaaagawgacactaaggctcmtaaagaagagaaaayaccrttttataaaaaacayagyacattgctgtttgccacaytactrattgcttttggttacctttctcactttgtaaatggagaagataacctygtaacktccatgttatttgtargttckattgtaattggcggatattcaytatttaaagtyggttttcaaaatttgatacgctttgatttcgacatgaaaaccctgatgaccgttgcmgttattggagctrccatyattggtraatgggcagaggcatcyattgttgtyattctctttgcaatcagtgaagcacttgaacgyttytctatggayagakcaagacartccatwcgttcattgatggatatygccccaaaagaagcactwgttagrcgraatggtcaggaaataatratccatgtggacgatatygcygtgggtgatatyatgatygtcaaaccaggggagaaaattgccatggatggratcattrtraatggyktgtcggctgtcaaycaggcwgctataacaggagaatctgtyccygtykccaaarcggtagatgaygaagtatttgcaggyacgcttaacgaagagggactamttgaagtaaaaatcaccaaatacgtagargatacaacyatywccaagattattcatctkgttgargaagcacaaggggagcgygctccagcscaagcattcgtwgataaatttgcgaaataytayackccgatcattatggttattgcrgcsytsgttgcagtcgttccwccyytattctttggtggmagttgggatacwtgggtttatcaaggattagcrgtwcttgtagttggatgtccktgtgcattagttattwctactccaatctcgattgtctcggcaattggaaatgcagckaaaaaaggtgtgttgrttaaaggyggtgtctatctmgagraattaggagccattaagrcartcgcatttgataaaacaggaacactgacaaaaggtgtaccagtggtaacagattttraagtrttaaatgaycaagtggaagaaaaagagctrttytcyatyattacagctttagaatatcgwtcacaacatccacttgcttcagcaataatgaaraargcagagcaagataatatymcttattcyratgtwmragtgrargamttcacttckattacwggkcgrggyatwmaagggawtrtarayggaacwacytaytayattggmagyccaarrcttttyaargaattaaatgtttccgattttagccttgrgtttgaaaayaawgtgaaartyytacaaaaccaaggraaaacrgccatgattattggaacggammaaacaatyctcggcgtrattgcygtwgcagatgaggtycgygaaacaagtaaaaatgtgattcwaaaacttcatcagttaggwatcaagcaaacaattatgctgacaggtgataatcaaggtacygcarawgcaatcggtrcwcatgtaggcgtttctgatattcagtcygaattgwtgccacaggataarttrgaytatattaaaaaaatgmaakcsgagyatgrtaatgtagctatgattggcgatggcgtyaatgatgctccwgcacttgctgcatcyactgttggmattgcaatgggcggtgctggaacrgatactgcmatygaracagctgatattgcattaatgggagatgatttaagtaagcttccatttgcagtaagactyagymgraaaackytaaatatcatyaaagckaacatcacktttgcyatcggaattaarataattgccttactattrgttatyccrggmtggytaaccctttggatwgcgattctttccgatatgggagcyactattttggtagcattaaatagtttrcgactgatgagagtgaaggataaatar

SEQ ID NO: 3472 - DNA, 1500 bp, Staphylococcus aureus
atggactttacacgaagggagaattataagttaatgagtaatttagagaaatctgtagctataaatttagaaaacacagcgcattatgraaatatttcaaatctagatataacttttagaacaggagagagtrattcttctgttcttctttttaatatcaytaaaaataatcaaccgttattmytgagtgaagaaaatatcaaagcacgaatagcgattcgaggtaaaggagtyatggtrgttgctccactagaaatattagatccatttaaaggyrtwttaaaatttcaattacctaaygatgtaattaaacgagatggaagttatcaagctcaagtttcggttgcagaattaggkaattcagacgtggtagttgtcgagagaactatcacatttaacgttgaaaaaagyttgtttagcatgattccatctgaaacaaaattacamtatattgttgaatttcaggaattagaaaaaactattatggatcgtgcgaaagcaatggacgaggctataaaaaatggtgaagattatgcgagtctgattgaaaaagctaaagaaaaaggkctatcagatattcaaatagcaaaatcktcaagtatwgatgaattaaagcaacttgcwaatagccrtatawcygatttggaaaataaagcgcaarcwtattcaagarcattcgatgagcaaaagcgwtatatggatgakaaacatgaagcyttyaagcartcwgtgaatagtggtggtttagtcacaagtggttcwacttcaaattggcaaaaagctaagattactaaagatgatggtaagataatgcagattactggatttgattttaataatccagaacaaagaataggygattcracycaatttatttatgtttcgcaagctataaattatccaagagrygywagyactaayggtactgtcgaatatttagtagtaacttcmgaytacaarcgtatgacwtatcgwccraayggtacaaataaagtrtttgttaaragaaaagaarygggttcrtggtctgaktggtcagaattagckmttaatgattacaayacaccttttgaaactgttcaaarygcscaatcaaargctaayayggcygaaagyaaygcyaaaytatacrcagatgacaagtttaataaaagrtattcrgttatttttgatggracrgcaaatggygtkggctcwacattrtacttaaatgaragtttagaycaatttattttrttaattttttatggracttttccaggkggwgaytttacwgagtttggcaryccytttggwggmggaaaratttcattgaayccmtcaaatytwccrgatrrtgayggwrayggtggaggygtttatgagtttggattaactaaatctagtcgtacatcwttaackatatcraacgatgtytatttygayttaggaagtcraagaggytctggtgcvaaygcaaatagaggracaatyaacaaaattataggagtgagaaaataa

SEQ ID NO: 3473 - DNA, 1911 bp, Staphylococcus aureus
atggaaaatttgtatttaataaargatttgggrgctttagcaggwcgagattatagagctaargaaatwcaaaacytrcaaagaatagagcaatttgcgcttggmttgacaacagagtttaagttgcatcagaaagctaaaacaatkcaacacttcgctgagcaaatttattataatggtagatcgcaagcagcagtaaacaaatctttacaaagtcaaattaacgcacttgttgtggcaccacgtaataacagtgctaatgagattgttcaagctcgagttaatgtaaacggcgaaacctttgacacattaaaagaacatttagacgattgggaaaccaaaactcaaattaataaagaggaaactataagagaattaaataagaccaaacaagaaattcttgatatcgagtatcgttttgaacctgataagcaagartttttatttgtgacagaacttgcacctcttacaaatgcagtaatgcaatccttctggtttgataatagaacaggcatagtatacatgacacaagctagaaataatggctatatgctaagtcgtytaagacctaatggtcaatttatagacagctcattgattgtaggtgggggtcatggtacacataacggttatagatatattgatgatgagttatggatttatagttttatcttaaatggtaataatgagaatacattagttcgtttcaagtatacgcctaatgtggaaattagctatggcaagtatggtatgcaagatgtatttacaggacacccagaaaaaccctacatcacccctgtcataaatgaaaaagaaaataaaattctatacagaattgagagacctagaagtcagtgggaacttgaaaactcaatgaattatatagagataagaagtttagacgatgttgataaaaatattgataaagttttgcataaaatcagtatccctatgagactaacaaacgaaacccaaccaatgcagggtgtgacttttgatgaaaaatacttgtattggtatacaggagacagtaatccaaataatagaaactatttaacggctttcgatttagaaacaggagaagaagcgtatcaggttaatgctgactatggtggaacactagattcatttcctggcgaatttgcggaagcagaaggtttgcaaatatactatgacaaagatagtggtaaaaaagctttgatgctaggtgttactgtcggtggtgatggaaatagaacacatcgtattttcatgattgggcaaagaggtattttagaaatacttcactcaagaggcgttccttttatcatgagtgacacaggtggtagagttaaacctttaccaatgaggcctgataaacttaagaatcttgggatgttaacagagccaggtctttactatttatacactgatcatacagttcaaatcgatgatttcccattaccaagagaatggcgtgatgcaggttggttcttggaagttaagccaccacaaactggcggtgatgtaattcagatattgacgcgtaatagttatgcaaggaatatgatgacttttgaaagggtkctttctggaagaactggagacatttcggactggaattatgtgcctaaaaatagtggtaaatgggagagagtaccttcattcatcacaaaaatgtcagatattaacatagtaggyatgtcgttttatttaactacggatgatacaaaacgttttacagattttccaactgaacgtaaaggggtagctggttggaacttatatgtagaagcttcwaayacaggtggytttgttcataggctagttcgtaatagtgttacagcatctkstgarataytattgaaraaytatgatagtaaaayaagttcagggccatggactttacacgaagggagaattataagttaa

SEQ ID NO: 3474 - DNA, 291 bp, Staphylococcus aureus
atggcaacagaagaagttaaaatcaaagcgctacttgaaaacgataaacagtactttccagctacacaytggaaagctataaatgggrtaccttatgcaggcagtagtgatattgatggattgcctcaagacggtatcatttcggtaratgataaaaataaattagayaawttaaaaataggcgaagcaggaattattcaaaatagcattgtacagaaatccccaaacggtaaattgtggaaaataacagttgacgatagtgggaaacttggtacagtgctattttattag

SEQ ID NO: 3475 - DNA, 1584 bp, Staphylococcus aureus
atggattatcatgatcatttatcagtaatggattttaatgaattgatttgtgaaaatttactagatgtagattayggttcttttaaagaatattatgaactgaatgaagctaggtacatcacytttacagtttatagaactactcataatagttttgttttygatttaytratttgtgaaaacttcataatttatcatggtgaaaaatayacaattaagcagacagcgccaaaggttgaaggtgataaagtttttattgaagttacggcatatcacatwatgtatgaatttcaaaatcactcagtggaatcaaataagcttgatgacgacagtagcgaaactggtaaaacgccagaatactctttagatgagtacttaagatatggatttgcaaatcaaaaaacktcrgtcaaratgacctataaaataattggagattttaarmgaaaartaccrattgaygaattaggtaayaaaaayggcttagaataytgtaaagaagcrgtagayytgtttggytgtatwatttayccaaatgatacrgagatwkgtttttattctcctgaaacattytatcaaagaagcgaraaagtratwmgrtatcaatataatactgatactgtrtctgcwactgtcagtacrttggaattaagaacagctataaaartttttggraaaaagtayacagcygaggaaaagaaaaattataaycctattaraacaactgacattaawtattcaaatggtttyataaaagaaggyacttatcgkacygmaacaattggktctaaagctactattaamtttrattgcaagtatggtaatgaaacagttagatttacaatmaaaaarggytcycaaggtggaatatataagttgattttagacggcaarcaaattaagcaaatttcttgytttgctaagtcrgttcagtctgaaacaatagatttaataaaaaatattgataaaggcaagcacgttttagaaatgatatttttaggagaagacccyaaaaayagaattgatatakcttcaaataaaaaagctaagccttgtatgtaygttggaactgaaaaatcaacagtcttaaatttaattgctgayaaytcaggtcgcaatcaatacaaagcaattgtygactacgtcgcagatagtgcaaagcagtttgggattcgatatgctaatacgcaaacaaatgaagatatcgaaacacaggataagctgttagaatttgcaaaaaagcaaataaatgatactcctaagactgaattagatgttaattatataggttatgaaaaaatagagccaagagatagcgtattytttgttcatgaattaatgggatataacactgaattaaaggttgttaaacttgataggtcacatccatttgtaaacgcaatagatgaagtgtctttcagcaatgaaataaargatatggtacaaattcaacaagcrcttaacagacgagttattgcacaagataatagatataactatcaagcaaatcgtataaatcatttatacactagtactttgaattctcctttygagacaatggatatagggagtgtattaatataa

SEQ ID NO: 3476 - DNA, 825 bp, Staphylococcus aureus
atgcaatcttttgtaaaaatcatagatggttacaaggaagaagtaataacagattttaatcagcttatatttttagatgcaagggctgaaagtccaaacaccaatgataacagtgtaactattaacggagtagatggtattttaccgggygcaattagttttgcgcctttttcattagtattaaggtttggctatgatggtatagatgttatagatttaaatttatttgagcattggtttagatctgtgtttaatcgcagacatccttattatgttattacttctcaaatgcctggtgttaaatatgcagtgaatacagctaatgttacatctaatttaaaagatggttcttcaactgaaattgaagtaagtttaaatgtttataaagggtattctgaatcagttaattggaccgatagcgagttcttattcgactctaattggatgtttgaaaatggaattcctcttgatttcacacctaaatatactcatacatcaaatcaatttactatttggaacggttctactgatacgataaatccacgattcaarcacgatttgaaaatattaattaatttaaatgcgagtggaggatttgaactggttaaytatacaacaggtgatatttttaagtacaacaaaagtatagataaaaacactgattttgttttagatggtgtgtatgcatatcgagatataaayagagtgggaattgatacaaatagaggcattataacattagcgccaggtaaaaatgaatttaagattaaaggagacgtcagtgatattaaaactacatttaagtttccttttatttataggtag

SEQ ID NO: 3477 - DNA, 6225 bp, Staphylococcus aureus
ttggaagctagaaaggaggttaatatgaatgaaaaagtagaaggcatgaccttggagctgaaattagaccatttaggtgtccaagaaggcatgaaaggtttaaagcgacaattaggtgttgttaatagtgaaatgaaagctaatctgtcagcatttgataagtctgaaaaatcaatggaaaaatatcaggcgagaattaaggggttaaatgataggcttaaagttcaaaaaaagatgtattctcaagtagaagatgagcttaaacaagttaacgctaattaccaaaaagctaaatccagtgtaaaagatgttgagaaagcatatttaaagttagtagaagccaataaaaaagaaaaattagctcttgataaatctaaagaagccttaaaatcatcgaatacagaacttaaaaaagctgaaaatcaatataaacgtacaaatcaacgtaaacaagatgcgtatcaaaaacttaaacagttgagagatgcagaacaaaagcttaagaatagtaaccaagctactactgcacaactaaaaagagcaagtgacgcagtacagaagcagtccgctaagcataaagcacttgttgaacaatataaacaagaaggcaatcaagttcaaaaactaaaagtgcaaaatgacaatctttcaaaatcaaatgataaaattgaaagttcttacgctaaaactaatactaaattaaagcaaacagaaaaagaatttaatgatttaaacaatactattaagaatcatagcgctaatgtcgcaaaagctgaaacagctgttaataaagaaaaagctgctttaaataatttggagcgttcaatagataaagcttcatccgaaatgaagacttttaacaaagaacaaatgatagctcaaagtcatttcggtaaacttgcaagtcaagcggatgtcatgtcaaagaaatttagttctattggagacaaaatgacttccctgggacgtacaatgacgatgggcgtatctacaccrattactttaggkttaggtgcagcattaaaaacragtgcagactttgaaggscaaatgtctcgagttggagcgattgcrcaagcaagcagtaaagacttraaaagcatgtctaatcaagcrgttgacttaggagctaaaacmagtaaaagtgctaacgaagttgctaaaggtatggaagaattggcagctttaggmtttaatgccaaacaaacaatggaggctatgccaggtgttatcagygcagcagaagcaagtggtgcagaaatggctacaactgcaactgtaatggcttcagcgattaactctttcggtttaaaagcatctgatgcaaatcatgttgctgatttacttgcgagatcagcaaatgatagtgctgcagatattcartayatgggagatgcattraartatgcwggtactccwgcaaaagcattaggagtttcaatagaggacacttcygcagcaattgaagttttatctaactcaggtttagagggktctcaagcaggtactgcmytaagagcttcrtttatyaggctagctaatccaagtaaaartacagctaaggaaatgaaaaaattaggtattcatttgtctgatgctaaaggtsartttgttggmatgggygaattgattagacagttccaagataayatgaaaggcatgacgagagaacaaaaaytagcwacagtggctacaatagttggyactgaagcagcaagtggatttttagccttgattgaagcgggwccagataaaattaatagctatagyaaatcmttraagaaytcyaatggygaaagtaaaaaagcagcwgatttgatgaaagataayctcaaaggygctctggaacaattaggtggcgcttttgaatcrttagcaatygaagtyggtaaagatttaacgcctatgattagagcaggwgcggaaggwttaacaaaattagttgatggatttacacatctycctggttgggttagaaargcttcrgtaggmttagcamtttttggtgcakcwattgghcctgcwgttcttgctggwggsttattaatacgtrcagttggragygckgctaaaggmtatgcrtcattaaatagacgyattgctgaaaatacaathctktcwaatacyaattcaaaagcaatgaaatctttaggtcttcaaacmttatttcttggttctacaacaggaaaaacgtcaaaaggctttaaaggrttagccggagctatgwtgtttaatttaaaacctataaatgttttgaaaaattctgcaaagctagcaattttaccgttcaaacttttgaaaaacggtttaggattagcygcaaaatcyttatttgcagtaagtggaggcgcaagatttgckggtgtagccttaargtttttaacaggacctataggtkctacaataactgctattacaattgcrtataaagtttttaaaaccgcatatgatcgtgtggaatggttcagaaacggtattaacggtttaggagaaactataaagttttttggtggyaaaattattggcggygctgttagraagctaggagagtttaaaaaytatcttggaagtatmggcaaaagcttcaaagaaaagttttcaaargatatgaaagatggttataaatcwttragygacgatgaccttctsaaagtaggagtcaacaagtttaaaggatttatgcaaaccatgggcacagcttctaaaaaagcrtctgatactgtaaaagtgttrgggaaaggtgtttcaaaagaaacagaaaaagctttagaaaaataygtrcaytattctgaagaraayarcagaatcatggaaaaagtacgtttaaactcgggtcaratawcagaagacaaagcaaaaaaacttttgaaaattgaarcggatttatctaataaccttatagctgaaatagaaaaaagaaataaaaaggaactcgaaaaaactcaagaacttattgataagtatagtgcrttcgatgaacaagaaaagcaaaacattttaactmgaactaaagaaaaaaatgacttgcgaattaaaaaagagcaagaactcaatcagaaaatcaaagaattgaaagaaaaagctttragtgatggtcagatttcagaaaatgaaagaaaagaaattgaaaagcttgaaaatcaaagacgtgayatcactgttaaagaattgagtaagactgaaaaagagcaagagcgtattttagtaagaatgcaaagaaacagaaatkcttattcaatagacgaagcgagcaaagcaattaaagaagcagaaaaagcaagaaaagcaaraaaaaaagaagtggayaagcartatgaagatgatgtcattgctataaaaaataacgtcaacctttctaagtctgaaaaagataaattrttagctattgctgatcaaagacataargatgaagtaagaaargcaaaatctaaaaaagatgctgtagtagaygttgttaaaaagcaaaataaagatattgataaagaratggatttatccagtggwcgtgtatataaaaatactgaaaartggtggaatggycttaaaagttggtggtctaacttyagagaagaccaaaagaaraaaagygataartacgctaaagaacaagaagaaacagctcgtagaaacagagaaaatataaagaaatggtttggaaatgcttgggacggcgtaaaaastaaaactggygaagcctttagtaaaatgggcagaaatgctaatcattttggcggcgaaatgaaaaaaatgtggagyggaatcaaaggrattccaagcaaattaagttcargttggagctcagccaaaagttctgtaggataycacactaaggctatagctaatagtactggtaaatggtttggaaaagcttggcaatctgttaaatcgacwacaggaagtatttacaatcaaactaagcaaaagtattcagatgcytcagataaagcttgggcgcattcaaaatctatttggaraggsacatcaaaatggtttagcaaygcatataaaagtgcaaagggytggctaayrgatatggctaataaatckcgckcgaaatgggataatatttctagtacagcwtggtcgaatgcaaaatccgtttggaaaggmacatcgaaatggtttrgtaactcatacaaatctttaaaaggttggactggrgatatgtattcaagagcccacgatcgttttgatgcaatttcaagttcggcatggtctaacgctaaatcagtatttaatggttttagaaaatggctatcmaraacatatgawtggattagagatattggtaaagacatgggaagagctgcggctgatttaggtaaaaatgttgctaataaagctattggcggtttgaatagcatgattggcggtattaataaaatatctaaagccattactgataaaaatctcatcaagccaatacctacattgtctactggtactttagcaggaaagggtgtagctaccgataattcrggagcattaacgcaaccgacatttgctgtattaaatgatagaggttctggaaacgcyccaggyggtggagttcaagaartaattcacagggctgacggaacattccatgcaccccaaggacgagatgtggttgttccactaggagttggrgatagygtaataaatgcyaatgacactctgaagttacagcgkatgggtgttttrccaaarttycatggwggtacgaaaaagaaarawtggmtrgamcaasttamwgrwaatmtwggtaaaaaagcaggrgamttyggwkctamagctaaaaacacagckcataatatcaaaaaaggtgcagaagaaatggttgaagcvgcaggcgataaaatcaaagatggtgcatcttggttaggcgataaaatcggcgatgtgtgggattaygtacaacatccagggaaactagtaaataaagtaatgtcaggtttaaatattaattttggaggcggagctaacgctacagtaaaaattgctaaaggcgcrtactcattgctcaaaaagaaattagtagacaaagtaaaatcgtggtttgaagattttggtggyggaggcgatggaagctatctatttgaccatccaatttggcaaaggtttgggagytacacaggtggacttaactttaatggcggtcgtcactatggtatcgactttsrwatgcctacwggaacgaacatttatgctgttaaaggcggtatagctgataaagtatggactgattacggtggcggtaattctatacaaattaagaccggtgctaacgaatggaactggtatatgcatttatctaagcaattagcaagacaaggccaacgtattaaagctggtcaactgatagggaaatcaggtgctacaggtaatttcgttagaggagcacacttacatttccaattgatgcaagggtcgcatccagggaatgatacagctaaagatccagaaaaatggttgaagtcacttaaaggtagtggcgttcgaagtggttcaggtgttaataaggctgcatctgcttgggcaggcgatatacgtcgtgcagcaaaacgaatgggkgttaatgttacttcggstgaygtaggaaatatyattagcttgattcaacacgaatcaggaggaaatgcaggtataactcaatctagtkcgcttagagacatcaacgttttacagggcaatccagcaaaaggattgcttcaatatatcccacaaacatttagacattatgctgttagaggtcacaacaatatatatagtggttacgatcagttattagcgttctttaacaacagmtattggcgctcacagtttaacccaagaggtggttggtctccaagtggtccaagaagatatgcgaatggtggtttgattacaaagcatcaacttgctgaagtgggtgaaggagataaacaggagatggttatccctttaactagacgtaaacgagcaattcaattaactgaacaggttatgcgcatcatcggtatggatggcaagccaaataacatcactgtaaataatgatacttcwacagttgaaaaattgttraaacaaattgttatgttaagtgataaaggaaataaattaacagatgcrttgattcaaactgtttcttctcaggataataacttaggttctaatgatgcaattagaggtttagaaaaaatattgtcaaaacaaagtgggcatagagcaaatgcaaataattatatgggaggtttgactaattaa

SEQ ID NO: 3478 - DNA, 6225 bp, Staphylococcus aureus; identical to SEQ ID NO: 3477

SEQ ID NO: 3479 - DNA, 159 bp, Staphylococcus aureus
atggagcagtatgggtggacattaactgaagtcagaaaacagccgtatgtaaaacttttagaaatacttaatgaagagaataaagaagagactgaagaaaaacaaagtgaacaaaaagtcattacaggtacggatttaagaaaactttttggaagctag

SEQ ID NO: 3480 - DNA, 351 bp, Staphylococcus aureus
atgattaaatttgaaattaaagatcgtaaaacaggaaaaacagagagctatacaaaagaagatgtaacaatgggcgaagcagaaaaatgctatgagtatttagaattagtaaatcaagagaataaaaaagaagcacctaacgcaacaaaaatgagacaaaaagagcgacagttattagtagatttatttaaagatgaaggattgactgaagaagatgttctgaayaagatgagtactaaaacttatacaaaagccttacaagatatatttcgagaaatcaatggtgaagatgaagaagattcagaaactgaaccagaagagatgggaaagacagaagaacaatctcaataa

SEQ ID NO: 3481 - DNA, 456 bp, Staphylococcus aureus
atgactaaaactttaaaggtttataaaggagacgacgtcgtagcttctgaacaaggtgaaggcaaagtgtcagtaactttatctaatttagaagcggatacaacttatccaaaaggtacttaccaagtggcatgggaagaaaatggtaaagaatctagtaaagttgatgtacctcaattcaaaaccaatccaattctagtctcaggcgtatcatttacaccagaaactaaatcaattatggtaaataccgatgacaatgttgagccaaacattgcaccaagcacagcaacgaataaaatattgaaatatacaagtgaacatccagaatttgttactgtagatgaaaatacaggagcaattcacggtgtagctgaaggtacttcagtaatcactgctaygtctactgatggaagcgataagtcaggacaaatttcagtgacagtaacaaacggatag

SEQ ID NO: 3482 - DNA, 186 bp, Staphylococcus aureus
atgcaacaacaagcatatataaacgcaacgattgatataagaatacctacagaagttgaatatcggtattttgatgatgtggataaagaaaaagaaacgctggcagattacttatataacaatccwracgaaatactagagtatgacaatttaaaaattagaaatgtaaatgtagaggtggaataa

SEQ ID NO: 3483 - DNA, 642 bp, Staphylococcus aureus
atggcagaaggacaaggttcttataaagtaggttttaaaagattatacgttggagtttttaacccagaagcaacaaaagtagttaaacgcatgacatgggaagatgaaaaaggtggtacagttgacctaaatatcacaggtttagcaccagatttagtagatatgtttgcatctaacaaacgtgtatggatgaaaaaacaaggtactaatgaagttaagtctgacatgagtattttcaatattccaagtgatgatttaaacacagttattggacgtactaaagataaaaatggtacatcttgggtaggagagaatacaagagcaccgtatgtaacagtaattggcgaatcggaagatggtttaacaggtcagccggtatatgtagccttacttaaaggtacttttagtttagattcaattgaatttaaaacacgaggtgaaaaagcagaagccccagaacctacaaaattaacaggtgactggatgaatagaaaagttgatgttgatggaacgtcacaaggtattgtatacggttatcatgaaggtaaagaaggagaagcagaattcttcaaaaaagtattcgttggatacacggacagtgaagatcattcagaggattctgcaggttcgttacccagctaa

SEQ ID NO: 3484 - DNA, 396 bp, Staphylococcus aureus
atgaatatattaaacaccataaaaggaattttattatctgatgcagagctcaaaacacatataaattctagaatatactattacaaagtcactgaaaacgctgaaacttccaaaccctttgttgttattacacctgtttatgatttgccttcagactttatgtctgataaatatctcagtgaagaatacttaattcaaatagatgtagaatcttcaaataatcagaaaacaattgatataacaaaacgaataagatacctgttatatcaacaaaatttaattcaagcatctagtcagttagatgcttattttgaagaaactaaacgttatgtgatgtcgagacgatatcaaggcatacccaaaaatatatattataaaaatcagcgcatcgaatag

SEQ ID NO: 3485 - DNA, 402 bp, Staphylococcus aureus
atgagtgtagaaattaaagggatacctgaagtgttgaataaattagaatcggtatacggtaaacaagcaatgcaggctaagagtgataaagctttaaatgaagcatctgaattttttataaaggctttaaagaaagagttcgagagctttaaagatacgggtgccagtatagaagaaatgactaaatctaagccttatacaaaagttggyagtcaagaaagggctgttttaattgaatgggtaggycctatgaatcgcaaaaacattattcacttgaatgaacatggttatacaagagatggaaaaaaatatacaccaagaggttttggagttattgcaaaaacattagctgctagcgaacgtaagtatagagaaattataaaaaaggagttggccagataa

SEQ ID NO: 3486 - DNA, 333 bp, Staphylococcus aureus
atggaatttaatgaatttaaagatcgcgcrtatttttttcaatatrtaaayaaaggrccrtatccagatgaagaggaaaaaatgaaattgtatagttgcttttgtaaaatwtataatccttctatgaaagatagagaaattttaaaagcgactgaatcaaartcaggaytaaccataattrtsaggtcttctaaaaytgaatatctaccacaaacaaatcacttagttaaaattgacagtgcattatattccgataaattattcaacattgtagaaataagaattgatacaccagatattggctataatacagtggttttatcagaaaaatga

SEQ ID NO: 3487 - DNA, 279 bp, Staphylococcus aureus
atgagtttagaagaaattaaattgtggttgagaattgactataatttcgaaaatgatttaattgaaggtctcattcaatcggctaagtctgaattactattaagtggggttccagattatgacaaagatgacttggaatacccgcttttttgtacagcgattaaatatatcattgcaagagattatgaaagtcgtggatactcaaatgaccaatctagaagcaaggtgtttaatgaaaaaggattgcaaaaaatgattttgaaattaaaaaagtggtag

SEQ ID NO: 3488 - DNA, 1209 bp, Staphylococcus aureus
atgcgaaattttaaaaatgacaatgaattattaggaggaaatgaaatgccgacattatatgaattaaaacaatccttaggtatgattggacaacaattaaaaaataaaaatgatgaattgagtcagaaagcaacagatccaaatattgatatggaagacatcaaacaactagaaacagaaaaagcaggtttacaacaaagatttaacattgttgaaagacaagtgcaagacattgaagaraaagaaaaagcgaaagttaaagataaaggagaagcttatcaatctttaagtgataatgagaagatggttaaagctaaggcagagttttatcgtcacgcgattttaccaaatgaatttgaaaaaccttcaatggaggcacaacgtttattacacgctttaccaacaggaaatgattcaggtggagataagctcttaccaaaaacactttctaaagaaattgtttcagaaccatttgctaaaaaccaattacgtgaaaaagctcgtctaactaacattaaaggtttagagattccaagagtttcatacactttagacgatgatgatttcattacagacgtagaaacagcaaaagaattaaaagcaaaaggtgatacagtcaagttcactactaataaattcaaagtatttgctgcaatttcagatactgtaattcatggatcagatgtagatttagtaaactgggttgaaaacgcactacaatcaggattagcagctaaagagcgtaaagatgccttagcagtaagtcctaaatctggattagaacacatgtcattttataatggatctgttaaagaagttgagggagcagacatgtatgatgctattattaacgctttagcagatttacatgaagattatcgtgataacgcaacaatttatatgcgatatgcagattatgtcaaaattattagtgttctttcaaatggaacaacaaatttctttgacacaccagcagaaaaagtatttggcaaaccagtagtatttacagatgcagcagttaaacctattgtgggagatttcaattattttggaattaactatgatggaacaacttatgacactgataaagatgttaaaaaaggcgaatatttgtttgtattaacagcatggtatgatcagcaacgtacattagacagtgcattcagaattgcaaaagcaaaagaaaatacaggtccattacccagctaa

SEQ ID NO: 3489 - DNA, 786 bp, Staphylococcus aureus
gtggtgataaaaatgtcaatgaaagctaagtattttcaaatgaaaagaaaatcaaaaagtaaaggtgaaatattyatttatggtgatattgtaagtgataaatggtttgaaagtgatgtaactgctacagatttcaaaaataaactagatgaactaggagacatcagtgaaatagatgttcatataaattcatctggaggcagtgtatttgaaggrcatgcaatatacaatatgctaaaaatgcatcctgcaaaaattaatatctatgtcgatgcyttagcggcatcaattgctagtgttatcgctatgagtggtgacactatttttatgcacaaaaatagttttttaatgattcataattcatgggttatgactgtaggtaatgcagaagaattaagaaagacagcggatttacttgaaaaaacagatgctgttagtaattcagcttatttagataaagcaaaagatttagatcaagaacacttaaaacagatgttagatrcagaaacttggcttactgcagaagaagccttgtctttcggcttgatagatgaaattttaggagctaatgaaatagctgctagtatctctaaagagcaatataagcgtttcgagaacgtcccagaagatttaaagaaagatgtagacaaaatcactaaaattgatgatgtagatacatctgaattggttgaaacacctaaagaaagtatgtcactagaagaaaaagaaaaaagagaaaaaattaaacgcgaatgcgaaattttaaaaatgacaatgaattattag

SEQ ID NO: 3490 - DNA, 1239 bp, Staphylococcus aureus
gtgaatgttatcgcaaaagagaatattgtcacacgcataaagaaaaaattgatagacaattggattgatcagtcarcttctaagctttatgactttagcccatggaaaaataratctttttggggtgtaatyaataatacgcttgaaactaatgaaacgatattttcagctattacaaagttatctaattcgatggctagtttgcccttgaaaatgtatgaagattataaagtagttaatacagaagtatctgatttacttacagtgtcaccgaataattctctgagcagttttgattttattaatcaaattgaaacaatcagaaatgaaaaaggtaatgcatatgtgctaattgaacgagacatctatcatcaaccatcaaagcttttcttattaaatccagatgttgttgaaatgttaattgaaaaccaatcacgtgaactttattattccattcatgctgcaactggaaataaattgattgttcataatatggacatgttgcattttaaacacatcgtggcatctaatatggtkcaaggyattagtccgattgatgtgttgaagaatacaactgattttgayaatgcagtaagaacctttaatcttacagaaatgcaaaaaccwgattctttyatgcttaaatatggttccaatgtargtamagaaaaaaggcarcaagtgttagaagatttcaaacagtactatgaagaaaacggtggartattattccaagagcctggtgttgaaatcgaacckytacctaaaaaatatgtctctgaagatatagtrgcaagygaraatttaacaagagaaagagtagctaacgtttttcaattgccctcartattyttaaaygcaaratcaaatacaaatttcgcgaaaaatgaagagttaaacagattttacttgcagcataccttattgccaatcgtcaaacagtatgaagaagaatttaatcggaaactacttactaaaacagacagagaaaaaaataggtattttaaatttaacgttaaatcttatttaagggctgatagtgcaacacaagcagaagtgtactttaaagcagttcgtagtggttactacactataaatgacattagagagtgggargatttaccaccagttgaaggtggagataagccgctaataagcggtgatttatacccaattgacacgccacttgaattaagaaaatctttgaaaggtggtgataaaaatgtcaatgaaagctaa

SEQ ID NO: 3491 - DNA, 1701 bp, Staphylococcus aureus
gtggattyggtgactattaaartwttaaatgaaccttcaccaaaactattaacaacatggtatgcagagcaagtcactcaagggaaaataaaaacaagcaaatatgttaraaaagaatgtgadagrcaycttagatatytagaaaatggrggtaaatgggtatttgatgaagaattagcgcaycgtcctattcgwttyatagaaaarttytgtaaaccytccaaaggatctaaacgtcaacttgtattacarccwtggcaacattttattathggyagyytktttggttgggttcataaagaracraaactrmgsmgktttaragaagckytkatwtttatggggcgaaaraatggtaaaacaachactatwtcwggdgtkgctaactatgsygtdtcwcaagatggagaaaayggygcdgaaatycatytkttagcraaygtaatgaaacaagckagratwytattygatgaatctaaggcgatgatwaaagcwagcccaawrctykmkaaraatttyagamcwytragagatgaaatycattaygayrmaackatatcwaaaattatgcchcargcwtcagayagygataarttrgatggwttraatacmcayatrggsattttygatgaaattcatgaatttaaagaytataaaytratwtcwgtwatwaaaaactcaagagcdgcaaggttacaaccycttctyatctacattacracagcaggktaycaaytagatggwccactygttrayatggtwgaarygggamgwgacaymttagaysrwrtcatmgaagaygaaagaactttttaytatttagcwtctytsgatgatgacgatgatatdaatgattcgtcraaytggatwaaagcaaatccyaacytaggtgtytctatmratttagmwgaratgaaagaagagtgggaaaargcwaarmgaacaccagmwgaacgtggagattttatmacmaaamgktttaayatmttygctaataaygaygaratgagttttattgattaycmaacaytbcaraaaaataaygahrtkrttkcyttagawgakytrgaaggyagaccrtgyackatwggttatgatttatcagaaacagaggactttacagccgcrtgtgcyacttttgcrttagataatggyaaagttgcwgtyttawcrcattcwtggattcctaagcayaaagttgaatattctaacgaaaarataccctatakagaatgggaagaagaygghttaytaacartrcaagataakccttatatwgactaccaagatgttttaaattggataatwaagatgaatgagcattatgtwgtmgaaaaaatyacttatgatagrgcgaaygcwttyaaaytaaatcaagagttaaaraattayggstttgaaacrgaagaaacaagacaaggrgctttgaccttgagccctgcattgaaggatytaaaagaaatgtttttagatgggaaaataatatttaataataatcctttaatgaaatggtatatcaataatgttcagytgaaactagacagaaayggraaytggytgccrtctaarcaaagcagatatcgtaaaatagatggytttgcagcatttttaaacacatatacagatattatgaataaagttgtttctgayarkggtgaaggaaacatagartttattagtattaaagayataatgcgttaa

SEQ ID NO: 3492 - DNA, 399 bp, Staphylococcus aureus
ctgcccttcggcttaaaatgttttttcgccgggtaccggagaggcccaaacgctagcaacgcggataaatttttcatgaaagggggtctttatatgaarttaacaaaaaaacagctraaagaatatatagargattayaaaaartctgatgacatattaattaatttrtatatagaaacrtatgaattttattgtcggttaagagatgaacttaaaaatagtgatttratgatagagcatacaaacaaggctggtgcgagcaatattrttaagaatccattaagcatagaactgacaaaaacagttcaaacactaaataacttactcaagtctatgggtttaactgcagcacaaagaaaaaagatagttcaagaagaaggtggattcggtgactattaa

SEQ ID NO: 3493 - DNA, 243 bp, Staphylococcus aureus
atgrgyaataaaagtaattcagaaataatcrmaagagtattagaaaygagcaaaagcgayatawatatttgggatgtactaagcgagtttgacagtgaacaagaggaagaaatactygattttatakatgagaacattgaagaatttgaaatattyctcaataccgcactaattcatattgttgaaagattgaaattgagaatagcgtttgctacagctarggaggagcaggaaaatgactaa

SEQ ID NO: 3494 - DNA, 315 bp, Staphylococcus aureus
atgaccaagcayaataacatttataagcatggtcgtaagtcatatcaatacgattggttctatcattcaaaagcatggaagaagttaagagagatagcattagatagrgataatyatctttgtcaaatgtgtttacgygaagayatwrtaacagatgcaaasatwgtgcatcayattatttatgttgatgaagattttaayaaagctttagacttagataatytratgtcagtttgttatagctgtcataacaaaattcatgcaaatgataatgacaaaagtaatcttaagaaaattagagtwytaaaaatttaa

SEQ ID NO: 3495 - DNA, 1378 bp, Staphylococcus aureus
gtggaacatttggcgattgayttcaaaccacatagctatcaaaagtatgcaatagataaagtkattgataatgagaaatacggtttgtttttagatatggggctagggaaaacagtatcaacacttacagcatttagtgaattgcagttgttagacactaaaaaaatgttagtcatagcacctaaacaagttgctaaagatacatgggttgatgaagttgataagtggaaccatttaaatcatctgaaagtgtctttagtcttaggaacacctaaagaaagaaatgatgcattaaacacagaggctgatatctatgtaaccaataaagaaaatactaaatggttatgcgatcaatataaaaaagaatggccatttgatatggttgtaattgatgaactgtctacatttaaaagtcctaagagtcaaaggtttaaatctatwaaaaagaaattaccactcattaatagatttataggattaacaggaacacctagyccaaatagtttrcaggatttatgggctcaagtttatttgatagacagaggygaaagacttgagtcttcattcagtcgttatcgagaaaggtactttaaaccaacwcatcaagttagcgaacatrtttttaastgggagctaagagacggatctgaagaaaagatatatraacraatagaagatatatgtttaagcatgaaagcgaaagattatctrgatatgcctgacagagttgatactaaacaaacagtagtcttatcwgaaaaagaaagaaaagtatatgmagaattagaaaaaaactatattttagaatcggaagaagaaggaacagttgtagctcaraatggggcatcattaagtcaraaactacttcaactatctaacggygcagtttatacagatgakgaagatgtaagacttatacatgataagaagttagataagttagaggaaattatagaggagtctcaaggccaaccaataytattgttttataacttcaaacaygataaagaaagaatacttcaaakgwwtaakgaagsaacsacattagargattcaaactawaragarcgttggaayagtggagacattaagytgcttatagcacatccagcaagtgcaggrcatggattaaacttacaacaaggtgggcacattattgtttggtttggacttacatggtcmttggaattataccaacaagcaaatgcwagattatayagacaaggacaaaatcatacgactattattcatcayatyatgaccgataacacaatagatcaaagagtatataaagctttacaaaataaagaactaacgcaagaagaattratgaaagctattaaagcwakwawagctaagmataagtaagcataagtaa

SEQ ID NO: 3496 - DNA, 2448 bp, Staphylococcus aureus
atgttagacaaagtcactcaaatagaaacaattaaatatgatcgtgatgtctcatattcttatgctgctagtcgtttatcyacayattggactaatcacaatatggcttggtctgactttatgcagaagctagcacaaacagttagaactaaagaagatttaactgagtacaataaaatgtctaagtctgaacaagcmgatataaaagatgttggyggatttgtcggyggatatttaaaagaaggsaaacgrcgtgctggtcaagtcatgaatcgttcaatgctaacacttgatatcgattatgcwgcycaagatatgacygacatattatctatgttttatgattttgcataytgtttatattcaacacataagcatagagagataagtccaagactgcgtttagtgattcctttaaaacgraatgtaaatgcagatgagtatgaagctattggrcgtaaagtsgcagatatcgttggcatggattacttcgatgatacaacttatcaaccacataggttaatgtattggccttcaactagyaaygatgcrgaatttttctttacctatgaagatttacctttgttarayccagatamaatattaaatgaatatgttgattggactgacacattagaatggccaacgtcttcaagggaagagagtaagactaaaagattagcagataagcaaggygacccagaagaaaagccgggaattgttggtgcattttgtagagcctatacgatagaagaagctatagaaacttttattcctgatttatacgaaaaacattctactaaccgttatacctatcatgaaggttcaactgcaggtggattggtgttatacgaaaataacaagtttgcctattctcatcataatacggatcccgtaagcggtatgcttgtgaacagttttgatttagtacgcatacacttatatggygctcaagatgaagamrctaaaacagatactccggttaatcgactacctagttataaagcaatgcagcaaagagcgcaaaatgatgaggttgttaaaaagcaattaattaaygacaaaatgwctgatgcaatgsaggatttcgaygaaatagaaaatarcgatgatgyatggtctgaracgttagaaattacttcgaaaggtactttcaaagctagtatyccaaatatagaaattatattgcgtaatgatccaaatttaaaaggaaaaatagymtttaaygaatttacraaacaaattgaatgyttagggaaartgccatggaatamtaattttaarayacgtcaatggcaagacggtgatgatagcagtttaagaagttatatcgaaaagatttatgacatacaccattcaggyaaaacaaaagatgccattataagcgtagcaatrcaaaatgcttatcatccagtaagggattatctaaataaaatatcgtgggatggacataaacgycttgaaaagttatttatcaaatacttaggtgttgaagayactgaagtgaatagaacaactaccaaaaargcattgactgctggaatcgctmgagtaatggagccwggatgyaaatttgactatatgcttacactttatggtcctcaaggtgtaggtaaatctgctttgctaaaaaaattaggtggtgcatggttttctgacagtttrgtttctgttacwggtaargaagcwtatgaggcmttacaaggcgtttggytaatggaaatggcagaacttgcagctacaagaaaagctgaagttgaagctattaagcatttcatatctaaacaagttgaccgrtttcgtgttgcttatggrcattatattgaagattttccaaggcaatgyattttcattggyacaactaataaagttgatttcttaagagatgaaactggtggaagacgtttttggccaatgactgyraatccagagagagttgaagtgaactggtctaaactaaccaaagatgagattgaccaaatttgggcagaagctaaatactattatgaacaaggagaagagttattccttaaccctgaactagaagaagaaatgcgttcaatacaaagcaaacatactgaggaatcyccatatacaggyattattgatgaatatcttaacacaccaattcctagcaattgggatgacytaactatctttgaacgaagacgattttatcaaggtgatgttgatatgttaccaacaggaaatgtagattacgttraaagaaataaggtctgtgcgcttgaagtgtttgttgaatgttttggtaargataagggagatagtagaggatctatggaaattagaaagatttcaaacatcttaagacaattagacaattggtctgtatatgatggtaataaaagygggaaaattcgattyggaaaagattatggtgtacagatagcktatgtaagagatgaaagtttagaggatttaatataa

SEQ ID NO: 3497 - DNA, 234 bp, Staphylococcus aureus
gtgtktagcaatagcactggaggtgttgtaamtatgtggattgtcatttcaatygttttakctatatttttattgatcttgttaagtagcatttctcataagatgaaaaccatagaagcattggagtatatgaatkcttatcttttcaagcagttagtaaaaaataatggtgttgaaggtttagaagattatgaaaatgaagttgaacgaattagaaaaagattcaaaagctaa

SEQ ID NO: 3498 - DNA, 405 bp, Staphylococcus aureus
atgatggctagaagaaaagttataagagtgcgtatyaaaggaaaactaatgacattgmgagaagtttcagaaaaatatcatatatctccagaacttcttagatayagatacaaacataaaatgcgcggcgatgaattattgtgtggaagaaargactcaaaatctaaagawgaagttgaatatatgaagagtcaaataaaagatgaagaaaaagrgagagaaaaaatcagaaaaaaagcgattttgaacckataccaacgaaatgtgagagcggaatatgaasargaaagaaagagaagattragaccatggctttatgatggaacgccwcaaaaacattcacgtgatccgtactggttcgatgtcacttataaccaaatgttcaagaaatggagtgaagcataa

SEQ ID NO: 3499 - DNA, 186 bp, Staphylococcus aureus
atgcaacatcaagcttatatcaatgcttctgttgacattagaattcctacagaagtcgaaagtgttaattacaatcagattgataaagaaaaagaraatttggcggactatttatttaataatccaggtgaactattaaaatataacgttataaatatyaaggttttagatttagaggtggaatga

SEQ ID NO: 3500 - DNA, 1962 bp, Staphylococcus aureus
ttgaratttatgaatatagatattgaaacatayagcagtaaygatatttcgaaatgtggtgcctataaatayacagaagctgaagawttcgaaatyttaattatagcttattcratagatggtggagcgattagtgcgattgacatgactaaagtagataatgagcctttccacgctgattwtgagacgtttaaaattgctctwtttgaycctgctgtaaaaaagtatgcattcaatgctaatttcgaaagaacttgtcttgctaaacattttaataaacagatgccacctgaagaatggatttgcacaatggttaattcaatgcgtattggcttacctgcttcgcttgataaagttggagaagttttaagactacaaarccaaaaagataaagcaggtaaaaatttaattcgttatttctctataccttgtaarccaacaaaagttaatggaggaagaacaagaaayytrcctgaacatgatcttgaaaaatggcaacaatttatagattactgtattcgagatgtagaagtagaaatgrcrattgctmataaaattaaagactttccagtaactgcaattgaacaarcatattgggtttttgaccaacatataaacgacagaggtattaagctttctaaatcattgatgttaggagctaatgtgctcgataagcagagtaaagaagaattgcttaawcaagctaaacatataacaggtttagaaaatcctaatagtcctacacarttattggcttggttaaagrmtgamcaaggattagatatacctaatttacaaaagaaaacggttcaggaktacttaaaarragcaacaggaaaagctaaaaaaatgctagaaattagattgcaaatgtctaaaaccagtgtraaaaaatacaacaaaatgcatgacatgatgtgcartgatgaacgrgtaagaggtctgtttcaattytacggtgccggtactggaagatgggcaggtagaggtgtacaacttcagaatttaacaaagcattatatttcagatactgaattagaaatagcaagagatcttattaaagaacaacgttttgaygatttagatttattactcaatgttcatcctcaagacttattaagtcaattagttaggacgacatttactgctgaagaaggtaatgaactagcagtaagtgatttttctgcaatagaggcaagagtcatagcatggtatgcaaaagaacaatggcgtttagatgtrttcaacacacacggaaagatatatgaagcrtcggcttctcaaatgtttaatgtmccggtagaaagcataactaaaggcgaccctctcagacaaaarggaaaagtgtccgaattagctttaggytatcaaggtggcgctggagctttaaaagcratgggtgcattggaaatgggcattgaagaaaaygarttacaaggtttagttgatagttggcgtaacgcaaatcctaacatagttaatttttggaaggcttgccaagaggctgcaattaatactgtraaatcycgaaagacgcaycatacrcatggacttagattttayatgaaaaaaggttttctaatgattgaaytgcctagtggaagagctttagcttatccraaagcttyagttggtgaaaatagttggggtagtcaagttgttgaatttatgggsttagatcttaaccgtaaatggtcaaagttaaaaacgtatggtgggaagttagtcgagaatattgttcaagcaactgcaagggatttacttgcgatttctatagcwaggcttgaagcatyaggwtttaaaatagttggmcatgtycatgatgaagtaattgtagaaatacctaragrttcaaatggacttaaggaaatcgaaactatcatgaataagcctgtygattgggcaaaaggattgaatttgaatagtgacggrtttacttctccgttttatatgaaggattag

SEQ ID NO: 3501 - DNA, 612 bp, Staphylococcus aureus
ctgctgaagatgattttgacaaactataaaaatttaaaaggacggtatataaacatgaaagcaaaagtattaaataaaactaaagtgattacaggaaaagtaagagcatcatatgcamatatttttraaccwcrcagtatgcaagaaggkcaagaakcaaagtattcmatcagtttaatcattcctaartcagatacaagtacgataaaagcyattgaacaagctatagaagctgctaaagaagaaggaaaagttagtaagtttggaggcaaagttcctgcaaatytraaacttccattacgtgayggagayactgaaagagaagatgatgtsaattatcaagaygcttatttyattaacgcatcaagcaaacaagcacctggtattrttgaccaaracmraawtagattaacggattcwggarctrttgtaagtggtgaytatattagagcttcaatyaatytatttccwttcaayacaaatggtaataagggtatygcagttggattgaacaacattcaacttgtagaaaaaggcgaacctcttggcggtgcaagtgcagcagaagatgatttygatgaattagacactgatgatgaggatttcttataa

SEQ ID NO: 3502 - DNA, 405 bp, Staphylococcus aureus
gtgagaatgttacagtctatcccggcattgccagtcggggatattaaaaagagtataggtttttattgsgataaastaggtttcactttggttcaccatgaagatggattcgcagttctaatgtgtaatgaggttcggattcatctatgggaggcaagtgatgaaggctggcgctctcgtagtaatgattcaccggtttgtacaggtgcggagtcgtttattgctggtactgctagttgccgcattgaagtagagggaattgatgaattatatcaacatattaagcctttgggcattttgcaccccaatacatcattaaaagatcagtggtgggatgaacgagactttgcagtaattgatcccgacaacaatttgattagcttttttcaacaaataaaaagctaa

SEQ ID NO: 3503 - DNA, 1167 bp, Staphylococcus aureus
atgaarctagatcactcaaatagagctcatgcaaagcttagtgcaagtggagcraaacaatggctaaactgyccaccgagtattaargcaagtgaaggtattgcagataaaagttcagtttttgctgaagaaggtacattcgcycatgagttaagtgagttatatttcagtcttaaatatgaaggcctaacacagtttgagtttaataaagcttttcaaaattataagcgaaatcaatattayagtgaagarttgcgygaatatgtkgaagagtaygtagctaatgtagaagaaaartataacgargctttgagtagagatgacgatgtaatagctttatttgaaacaaaattggatttaggtaaatacgtccctgaatcttttggyactggtgatgtcattatattttcaggtggtgtacttgaaattattgaccttaaatacggtaaaggcattgaagtttcagctatagataatcctcaacttagattatatggcttgggcgcatatgaactgcttagtttartgtatgacattcatacagttcgcatgactatcatacaaccwcgaatagataacttttctactgaagagttaccaatmtcaagattacttcaatggggaaccgattttgttaaaccmttagccagacttgcttataacggtgaaggtgagtttaaagcaggtagtcattgtagattctgtaagataaagcattcatgtagaacacgtgcagaatacatgcaaratgtgcctcaaaagccaccwcatttgttragtgatgaagagattgcagaactwttatataaactgcctgatatcaaaaaatgggctgatgaagtagarmawtatgcgytagawcaagcgaaagaraatgataaaamstatccwggktggaagctwgtmrmrggwcgytcrmgragartgataactgatacaaaagcarysckwgamargttagttgaagcgggttataaacctgaagatattacagaaaccaagttacttagcattacgaatttagaaaaattaatyggyaaaaaagcattttctaaaattrcagarggytttataraaaagccgcaaggtaaattaacacttgctaccgagtckgataaacgaccagctataaagcaatctgctgaagatgattttgacaaactataa

SEQ ID NO: 3504 - DNA, 363 bp, Staphylococcus aureus
atggcartattagaagrtatttttgaagaattaaaactattaaataagaayttacgygtgttaaayactgaactatcaactgtagattcatcaatwgtacaagagaaagttaaagaagcaccaatgycaaaagaagaaacagctcaacyggaatcaattgaagaagttaaggwaacttctrctgatttractaaagattatgttttatcagtaggaaaagagttccttaaaaaagcagacacttctgataagaaagaatttagaaataaacttaacgaacttggygcggataagctatctactatcraagaagakyattatgaaamaattgttgattttatgaakgcgagaatmaatgcatga

SEQ ID NO: 3505 - DNA, 336 bp, Staphylococcus aureus
gtgatagtagtttttcataatatacacctccttaggtggataactaaattatacacgaaaggagtgatagagatgccaaaaatcatartaccaccaacaccagaaaacacatatmgaggcgaagaaaaatttgtkaaaaagttatacgcaacacctacrcaaatccaycaattrttyggagtatgtagaagyacmgtatacaactggttgaaakattaccgyraagataatttaggtgtagaaaatttatacattgattattcascaayrggmacwytgattaatatttctaaattrgaagagtatttgatcagaaagcataaaaaatggtattag

SEQ ID NO: 3506 - DNA, 246 bp, Staphylococcus aureus
atgaacattcaagaagcaactaagatagctacaaaaaatcttgtctctatgacacggaaagattggaaagaaagtcatcgaactaagatattaccaacaaatgatagttttttacaatgcatcatttcaaatagcgatgggacaaaccttatcagatattggcaaccttcagccgatgacctcatggcaaatgattgggaagttataaacccaactagagaccaggaattattgaagcaattwtag

SEQ ID NO: 3507 - DNA, 867 bp, Staphylococcus aureus
ttgaatcctaaagtaaaaggtatcattgccattttaatttcggctattggtttcagttttatgtcagtgtttttcagacttgcaggtgaycttcctgtttttcaaaaatcattagcacgaaacttagtagcaatgtttattccattattttttwtatataaataycatcarccaatgtttggyaractytcaagycaaccmttattawtaacacgatcaacacttggactyatwggtgtattrttaaatatttaygccattgaycatatggtacttagygatgcygattcaytaatgaaactcaatcctttctggacgattttattaagyattgttttcttacatgaaaaggtaaggaartatcaaatwacagcaatgataattgctattttaggtatgcttttaatagtgaaacctgaattttcatcatctatgattccatcaytagctggmytattytcaggtatttttgcwgcatcrgcatatacrtgtgtwcgmgcacttagtwcwagagaagcaccatatactatagtattttacttctccttattttctgtcatcgttttaatacctttcactgcatatacytatgaaccaatgagtcaraygcaartrctttatctattaggkgctggyttagctgcmgctgtrggtcaaattggygttacwttrgcatatagttttgcwgcwgcraaagatatttctattttyacrtatgcatctataattttcacagcaatacttggatttrttctattyggagaatctccagatttctatgcaacattaggttacgtcgttattatcggtgcaagttattacatgtttgaaaaagcacgccgagacgccaaartaataaaaaaataa

SEQ ID NO: 3508 - DNA, 729 bp, Staphylococcus aureus
atgaaaaaattaataagcatcttattaataaatataataattttaggtgtctctaatartgccagcgctcaaggygatataggaattgataatctcaggaatttttatacaaaaaaagacttyrtaratttaaaagatgtaaaagacaatgatactcctatagctaatcaactacaattttcaaatgaatcytatgatttaatttcagaatcaaaagattttaataaatttagtaatttcaarggaaaaaaacttgatgtttttggtattagttataatggccagtgtaacactaaatacatatatggyggartcacagctactaacgaatatctagataaayctagaaatatacctataaatatatggatyaatggaaatcacaaaactatttctaccaataaagtttcgacaaataaaaaattwgttaccgctcaagagattgatrtcaaattaagaargtaccttcaagaagaatacaacatttatggacataacggcactaaaaaaggagaagaatayggtcataaatcaaaattttattctggrtttaatattggtaaagtaacgttycatttaaataataatgacacyttttcatatgatttattctacacaggagatgatgggytaccaaaaagttttttaaaaatttaygaagacaataaaactgtagagtctgagaaattccatttggatgtcgatatytcttataaagaaacrawataa

SEQ ID NO: 3509 - DNA, 735 bp, Staphylococcus aureus
atgaaaatgaataaaatatttagartwctcactgttagcttgtttttcttcacatttttaataaaaaacaatctagcatatgctgatgtaggggtaatcaaycttagaaacttttatgctaattatsaacctgaaaagcttcaaggagttagttctggaaatttttctacttctcatcaattagagtatattgatggaaaatacactttatattcacagtttcataatgaatatgaagcgaagagattaaaagatcataaagtagatatctttggaataagttactcaggtctttgtaatacaaaatatatgtatggtggaattacgttggcraatcaaaatttagataaacctagaaatatacctattaatctctgggtcaatggtaagcaaaatactatatctacagacaaagtttctactcaaaaaaaagargtaactgctcaagagattgatattaagttacgaaaatacctacaaaacgaatacaatatatatggttttaataaaacaaaraaaggtcaggaatatggatatmagtcaaaatttaattctgggtttaacaaaggaaaaattactttccatttaaataatgaaccttcttttacatacgatttgttttacaccggaactggtcaagcagagagttttttaaaaatttacratgataataaaactatagatrcagagaattttcatttggatgtagagatttcatatgagaaractgaataa

SEQ ID NO: 3510 - DNA, 1413 bp, Staphylococcus aureus
ttgcaatacataattcgttatattatgatgactttacaaatacatacagggggtattaatttgaaaaagaaaaacatttattcaattcgtaaactaggtgtaggtattgcatctgtaactttaggtacattacttatatctggtggcgtaacacctgctgcaaatgctgcgcaacacgatgaagctcaacaaaatgctttttatcaagtgttaaatatgcctaacttaaacgctgatcaacgtaatggttttatccaaagccttaaagatgatccaagccaaagtgctaacgttttaggtgaagctcaaaaacttaatgactctcaagctccaaaagctgatgcgcaacaaaataacttcaacaaagatcaacaaagcgccttctatgaaatcttgaacatgcctaacttaaacgaagcgcaacgtaacggcttcattcaaagtcttaaagacgacccaagccaaagcactaatgttttaggtgaagctaaaaaattaaacgaatctcaagcaccgaaagctgataacaatttcaacaaagaacaacaaaatgctttctatgaaatcttgaatatgcctaacttaaacgaagaacaacgcaatggtttcatccaaagcttaaaagatgacccaagccaaagtgctaacctattgtcagaagctaaaaagttaaatgaatctcaagcaccgaaagcggataacaaattcaacaaagaacaacaaaatgctttctatgaaatcttacatttacctaacttaaacgaagaacaacgtaacggcttcatccaaagccttaaagacgatccttcagtgagcaaagaaattttagcagaagctaaaaagctaaacgatgctcaagcaccaaaagaggaagacaacaaaaaacctggtaaagaagacggcaacaaacctggcaaagaagacggcaacaagcctggtaaagaagacaacaaaaaacctggtaaagaagacggcaacaagcctggtaaagaagacaacaacaaacctggcaaagaagacggcaacaagcctggtaaagaagacaacaacaagcctggtaaagaagacggcaacaagcctggtaaagaagacggcaacaaacctggtaaagaagacggcaacggagtacatgtcgttaaacctggtgatacagtaaatgacattgcaaaagcaaacggcactactgctgacaaaattgctgcagataacaaattagctgataaaaacatgatcaaacctggtcaagaacttgttgttgataagaagcaaccagcaaaccatgcagatgctaacaaagctcaagcattaccagaaactggtgaagaaaatccattcatcggtacaactgtatttggtggattatcattagccttaggtgcagcgttattagctggacgtcgtcgcgaactataa

SEQ ID NO: 3511 - DNA, 1611 bp, Staphylococcus aureus
ttgcaatacataattcgttatattatgatgactttacaaatacatacagggggtattaatttgaaaaagaaaaacatttattcaattcgtaaactaggtgtaggtattgcatctgtaactttaggtacattacttatatctggtggcgtaacacctgctgcaaatgctgcgcaacacgatgaagctcaacaaaatgctttttatcaagtsttaaatatgcctaacttaaaygctgatcaacgyaatggttttatccaaagccttaaagatgatccaagccaaagtgctaacgttttaggtgaagctcaaaaacttaatgactctcaagctccaaaagctgatgcgcaacaaaataasttcaacaaagatcaacaaagcgccttctatgaaatcttgaacatgcctaacttaaacgaagmgcaacgyaayggyttcattcaaagtcttaaagacgayccaagccaaagcactaacgttttaggtgaagctaaaaaattaaacgaatctcaagcaccgaaagctgayaacaatttcaacaaagaacaacaaaatgctttctatgaaatcttgaayatgcctaacttraacgaagaacaacgcaatggtttcatccaaagcttaaaagatgacccaagycaaagtgctaacctwttrkcagaagctaaaaagttaaatgaatctcaagcaccgaaagckgataacaaattcaacaaagaacaacaaaatgctttctatgaaatcttacatttacctaacttaaaygaagaacaacgcaatggtttcatccaaagcytaaaagatgacccaagccaaagcgctaaccttttagcagaagctaaaaagctaaatgatgcwcaagcaccaaaagctgacaacaaattcaacaaagaacaacaaaatgctttctatgaaattttacatttacctaacttaactgaagaacaacgtaacggcttcatccaaagccttaaagacgatccttcagtgagcaaagaaattttagcagaagctaaaaagctaaacgatgctcaagcaccaaaagaggaagacaayaacaagcctggcaaagaagacaayaacaagcctggyaaagaagacrrcaacaarcctggtaaagaagacaacaamaarcctggyaaagaagacrrcaacaarcctggyaaagaagacrrcaamaarcctggyaaagaagayrrcaamaaacctggtaaagaagayggcaacaagcctggtaaagaagayrrcaamaarcctggtaaagaagayggcaacaagcctggyaaagaagatggcaacaarcctggtaaagaagayggyaacggagtacatgtcgttaaacctggtgatacagtaaatgacattgcaaaagcaaacggcactactgctgacaaaattgctgcagataacaaattagctgataaaaacatgatcaaacctggtcaagaacttgttgttgataagaagcaaccagcaaaccatgcagatgctaacaaagctcaagcattaccagaaactggtgaagaaaatccattcatcggtacaactgtatttggtggattatcattagcsttaggtgcagcgttattagctggacgtcgtcgcgaactataa

SEQ ID NO: 3512 - DNA, 1587 bp, Staphylococcus aureus
ttgcaatacataattcgttatattatgatgactttacaaatacatacagggggtattaatttgaaaaagaaaaacatttattcaattcgtaaactaggtgtaggtattgcatctgtaactttaggtacattacttatatctggtggcgtaacacctgctgcaaatgctgcgcaacacgatgaagctcaacaaaatgctttttatcaagtcttaaatatgcctaacttaaatgctgatcaacgcaatggttttatccaaagccttaaagatgatccaagccaaagtgctaacgttttaggtgaagctcaaaaacttaatgactctcaagctccaaaagctgatgcgcaacaaaataacttcaacaaagatcaacaaagcgccttctatgaaatcttgaacatgcctaacttaaacgaagcgcaacgtaacggcttcattcaaagtcttaaagacgacccaagccaaagcactaacgttttaggtgaagctaaaaaattaaacgaatctcaagcaccgaaagctgataacaatttcaacaaagaacaacaaaatgctttctatgaaatcttgaatatgcctaacttaaacgaagaacaacgcaatggtttcatccaaagcttaaaagatgacccaagccaaagtgctaacctattgtcagaagctaaaaagttaaatgaatctcaagcaccgaaagcggataacaaattcaacaaagaacaacaaaatgctttctatgaaatcttacatttacctaacttaaacgaagaacaacgcaatggtttcatccaaagcctaaaagatgacccaagccaaagcgctaaccttttagcagaagctaaaaagctaaatgatgctcaagcaccaaaagctgacaacaaattcaacaaagaacaacaaaatgctttctatgaaattttacatttacctaacttaactgaagaacaacgtaacggcttcatccaaagccttaaagacgatccttcagtgagcaaagaaattttagcagaagctaaaaagctaaacgatgctcaagcaccaaaagaggaagacaataacaagcctggcaaagaagacaataacaagcctggcaaagaagacaacaacaagcctggtaaagaagacaacaacaagcctggcaaagaagacggcaacaagcctggtaaagaagacaacaaaaaacctggtaaagaagatggcaacaagcctggtaaagaagacaacaaaaaacctggtaaagaagacggcaacaagcctggcaaagaagatggcaacaaacctggtaaagaagatggtaacggagtacatgtcgttaaacctggtgatacagtaaatgacattgcaaaagcaaacggcactactgctgacaaaattgctgcagataacaaattagctgataaaaacatgatcaaacctggtcaagaacttgttgttgataagaagcaaccagcaaaccatgcagatgctaacaaagctcaagcattaccagaaactggtgaagaaaatccattcatyggtacaactgtatttggtggattatcattagcsttaggtgcagcgttattagctggacgtcgtcgcgaactataa

SEQ ID NO: 3513 - DNA, 1575 bp, Staphylococcus aureus
ttgaaaaagaaaaacatttattcaattcgtaaactaggtgtaggtattgcatctgtaactttaggtacattacttatatctggtggcgtaacacctgctgcaaatgctgcgcaacacgatgaagctcaacaaaatgctttttatcaagtcttaaatatgcctaacttaaatgctgatcaacgcaatggttttatccaaagccttaaagatgatccaagccaaagtgctaacgttttaggtgaagctcaaaaacttaatgactctcaagctccaaaagctgatgcgcaacaaaataacttcaacaaagatcaacaaagcgccttctatgaaatcttgaacatgcctaacttaaacgaagcgcaacgtaacggcttcattcaaagtcttaaagacgacccaagccaaagcactaacgttttaggtgaagctaaaaaattaaacgaatctcaagcaccgaaagctgataacaatttcaacaaagaacaacaaaatgctttctatgaaatcttgaatatgcctaacttaaacgaagaacaacgcaatggtttcatccaaagcttaaaagatgacccaagccaaagtgctaacctattgtcagaagctaaaaagttaaatgaatctcaagcaccgaaagcggataacaaattcaacaaagaacaacaaaatgctttctatgaaatcttacatttacctaacttaaacgaagaacaacgcaatggtttcatccaaagcctaaaagatgacccaagccaaagcgctaaccttttagcagaagctaaaaagctaaatgatgctcaagcaccaaaagctgacaacaaattcaacaaagaacaacaaaatgctttctatgaaattttacatttacctaacttaactgaagaacaacgtaacggcttcatccaaagccttaaagacgatccttcggtgagcaaagaaattttagcagaagctaaaaagctaaacgatgctcaagcaccaaaagaggaagacaataacaagcctggcaaagaagacaataacaagcctggcaaagaagacaataacaagcctggcaaagaagacaacaacaagcctggcaaagaagacaacaacaagcctggtaaagaagacaacaacaagcctggcaaagaagacggcaacaagcctggtaaagaagacaacaaaaaacctggtaaagaagatggcaacaagcctggtaaagaagacaacaaaaaacctggtaaagaagacggcaacaagcctggcaaagaagatggcaacaaacctggtaaagaagatggtaacggagtacatgtcgttaaacctggtgatacagtaaatgacattgcaaaagcaaacggcactactgctgacaaaattgctgcagataacaaattagctgataaaaacatgatcaaacctggtcaagaacttgttgttgataagaagcaaccagcaaaccatgcagatgctaacaaagctcaagcattaccagaaactggcgaagaaaatccattcatcggtacaactgtatttggtggattatcattagccttaggtgcagcgttattagctggacgtcgtcgcgaactataa

SEQ ID NO: 3514 - DNA, 1002 bp, Staphylococcus aureus
ttgtttcctcaaatcgttwwaaaaaatagaaggatgatgaaaatgaaaacacgtatagtcagctcagtaacaacaacactattgctaggttcyatattratgaatcctgtcgctrrtgccgcagattctgatattaatattaaaaccggtactacagatatwggaagcaatactacagtaaaaacaggtgatttagtcacttatgataaagaaaatggcatgcacaaaaaagtattttatagttttatcgatgataaaaatcayaataaaaaamtrytagtyatyagaacgaaaggtaccattgctggtcartatagagtttatagcgaagaaggygctaayaaaagyggtttagcctggccttcagcmtttaaggtayagttgcaactacctgataatgaagtagcwcaaatwtctgattactayccwagaaattcrattgatacwaaagartatatgagtacwttaacttatggattcaacggtaaygtkactggtgatgatwcwggaaaaattggcggyytkattggtgcaaatgtttcrattggtcatacactsaaatatgttcaaccwgatttcaaaacaattttagaragyccaactgataaaaaagtaggytggaaagtkatatttaacaatatggtgaatcaaaattggggaccatatgayagagattcttggaacccrgtatatggcaatcaacttttcatgaaaacwagaaayggytcwatgaaagcagcagakaacttccttgaycctaacaaagcaagttctytattatcttcaggrttytcaccagacttygctacagttattactatggatagraaagcawccaaacaacaaacaaatatagatgtaatatacgaacgagttcgtgatgaytaycaaytrcaytggacttcaacaaattggaaaggtaccaatactaaagataaatggayagatcgttcttcagaaagatataaaatcgattgggaaaaagaagaaatgacaaattaa

SEQ ID NO: 3515 - DNA, 999 bp, Staphylococcus aureus
atgaccgaaaagattaataaaaargacaattaccatctcatcttcgcgttaatctttttagccatcgtttcagtggtaagtatgatgrktggttcaagctttataccattacaacgcgtactgatgtactttataaatccaaatgacagtatrgatcaattcactttagaagtattacgcttacctcgcattacacttgcgatwttagcwggtgcmgcactaggratgagyggtttaatgttrcaaaatgtmttraaaaatccaattgcctcaccwgatattatcggwatcacaggtggtgctagcttaagtgcygttgtctttattgcatttttcagccatttaacratacatttacttccwctattygcwgtattaggtggcgcarttgcaatgrtgatwctattagtgtttcaaacgaaaggwcamatwcgmccgacaayactcataatcatcggtatttcratgcaaacrttrtttattgcrcttgtmcaaggrytactyattacaacraagcaaytatctgcwgccaaagcttatacwtggytagtcggaagtctttacggtgcwacgtttaaagatacawtcatyttgggtatggtwatyktagctgttrtkccgttgttatttcttgttataccwaaaatgaaaatatctatacttgatgaccctgtagcgattggcttaggyttacatgtacaacgtatgaarctratycaattaatcwcttctacwatactcgtatctatggcaatcagtttagtaggwaayattgggtttgtcggtttaatygcaccacayatcgcgaaaacaatcgttcgcggaagttatgctaaaaagttactaatgtcagcaatgattggtgccatatcaattgttatygcagacttaattggrcgyaccytattcttgcctaaagaagtgccrgcaggtgtattyattgctgcktttggtgcmccattcttcatatacttattattaaccgtgaaaaagttataa

SEQ ID NO: 3516 - DNA, 402 bp, Staphylococcus aureus
atgaaatatcttatccttagtttagttgctaatttattagttttcggtgtattatctgcaattggwttaaatattaatattttagcrgcaatgatgattgtattagtgattccgataatgatttctgggatwbtatttttcaaaactaatattgataaaacatacatattttttaacatcatattyatmgacttttattaytatatttacaatgtacatttaatgactttgccaaagtttaataattatatyaaarcagagatgatggaattagaasatattgatgtattaatwacaagtaaagattttggwtttgatgaaattytrttttwtacaytwtatttgttrttaatycttatcgttttatattatttgaaaaagcaaktaaagmataaaayctaa

SEQ ID NO: 3517 - DNA, 558 bp, Staphylococcus aureus
atgattaattttrataaaaccgctttagtgttaatcgacctgcaasaaggtatwcttaaratggattatgcsccayatacagctgaaaatgtygttcaaaaygctaayaaattaatwgawgyttttagaaaaaacaatggctttatcgcytttgttcgcgtgaatttctatgatggtaaagatgyattgcaaccaaatgyaatgatctcattaccaccaaaagaaggcgaygactacagycrtttccatyatttaytagacaaragagatgacgattttgtcatagayaaacgacawtttagtgcatttgtaggaacrgatttrgacttacarttgmgacgtcgaggaattgatacrattgttcttggyggtgtmgcaacrcatrttggygtagatacgacagcrcgagaygcctatcaattaaactacratcagtwttttgttacagatatgatgagtgcacaaaacgaaacgctacatcaattyccaatagataatgtattcccattratgggacaaacmataacyacaaacgacttkctaaatatattgaactaa

SEQ ID NO: 3518 - DNA, 810 bp, Staphylococcus aureus
atgtcccagcctgtttatcatttatgtctcgctctcaaatgtaaattaataattgttttgggggagtttgaagtwaaatatttaacaggatttattttaatattattgttagaagraattttkacaaattcagcragtgcaatcgaatattcagacttacatcataaaagtaaryttgattcmaagcgtctawrtaatgctaagrtgtcattyryyaatccaactsakcttgaaaataaaaamacaaaygatagactgttgaagcatgatttgttatttcatgacatgttcktaaatgwtgmttsgaaaaargatttwaaagttgaattygaaaatgaggcactttcaaagaaatttataaataagratatygatrtatwtgctggaarytatrgmtaygratgtcatgggggagmaaccaataaaacgcaatgtagttatggtggtgttactttaagtgacaataataartamgatgattataagaatataccttgtaatttatggattgacggacatcaarcagaaatagaaytaacwgcagtraaaacgaaaaagwaaattgttacyattcaagaattagakgttcaattaagaaattatttgaatgagaagtataagttgtacgaacaaggtggcgacattgttaaagggtatgttaaatatyataatgatgatgaamaaaatrtagaatatratttttataatttaaatggtgagtatggtyrtgaggtattaaaaatgtatgctgataataaaactatcaatagwgacaaattgcatttagatatctatttattcaaatcataa

SEQ ID NO: 3519 - DNA, 1401 bp, Staphylococcus aureus
atgggacgacaagccttygaattcggcttaagaccaaaggatcaattcaaagttatgcaacactttgatttaaatacgaatcatttagaggtattgaatcgrctgtatacaccgctaattggaacrcaagcagtgggtttataycattttatgactcaattcgttaaagamagtcataatgaaacattgattctttctcattatatttttatgaatgaacttaaaattaatttactagagtttagacaacaaatggacttacttgaagcgattggattgttaaaggcgtttgtcaaacatgatgaacaagaaacacaatttgtttaccaattaattcaaccgccttcagcacatttattttttaatgatccaatgttgtcaatctttttatatagtgaagtcgagcatcgtcgatttcatgagttgaagaaatactttgagtaycaacaaattgatttgagtgaatttaaacaggtaacragacaatttactgatgtttttaaagtgccgtctacaaaaatagatatcgatacaagtgatattccgattaatgaaccgtaccaaggwatcgatttatcaaatgaatcttttgaytttgaaatgttgagacaaatgttaggtaaacattttattagtcaagacattgttaccaaagatgcaaagcgtttaatwacacaactcgcgactttatatggtttaacagcagatggcatgaagcatgttattttaaattcaattacaagtggacaacagttatcctttgaagaaatgcgtaaacaagcacgctcgtattayttaatggaacacgaaaatcaaatgcctaaattacaggtgaaatctcctgctacatcatcttcgrcggscaaatctwcagaagygaatccaaagccacaaagtgatgaatggtttgarttacttgaacaaacgagtccaattgatatgttagcttcttggtctgaatcagaaccaactatatcgcaaaagrcawtggttgaagaattaattgaacgtgaaaaaatgtcttttggygtcattaatattttgttgcaatttgtcatgttaaaagaagatatgaaacttcctaaagcgtatattttrgaaatagcatcaaattggaagaaaaaaggtattaagacagctaaagaagcatataattacgctaaaaaagttaatcaacctaaaaatgagggttctagcggaaattaccaaaagcgtggttcatactwtgggcarcgtaatcgyatttcaaaagaaaaaacacctaaatggttagaaaatagagataaacctagtgaasaagattcggctaaagataatagcgtagatgatcaacaattagagcaagatcgacaagcatttctagataaattatctaaaaaatgggaggaggacagtcrataa

SEQ ID NO: 3520 - DNA, 213 bp, Staphylococcus aureus
ttggagtttaaacaacaaatgggcttacttgaagcgattgggttggtaaaggggtttggcaaacctggtggaccagaaacaccatttggttaccaattaattcaaccggcttcagcacatttattttttaatggacccatggtggcaatctttttattttggggaggccagccttggcgatttcatgaggtggagaaatactttgaggattaa

SEQ ID NO: 3521 - DNA, 312 bp, Staphylococcus aureus
atgaagtcaattactacagatgaattaaaaamyaaacttttwgaatctaaaccagttcaaattgttgatgttcgtactgaygaagaaacagcaatgggatatatwcctaatgcaaagttrattccaatggataccattccsgayaatttaaatkcatttaayaaaaawgarayataytatattgtatgtgctggtggagttcgaagcgctaaagttgtagaatatttagaggcaaatggcattgatgccgtaaatgtcgaaggcggcatgcacgcwtggggcgatgaaggtttggaaataaaaagtatttaa

SEQ ID NO: 3522 - DNA, 393 bp, Staphylococcus aureus
atgctcactgaatttcataagaaaggagttcacaagatgaccgtagatattggacggatttatgacaataaagataatacmgacgctattcgtatcctagtcgatagagtctggccragaggtatttcgaaaagaactgctaacctagattattggttaaaagacattgccccttctactgagttrcgacaatggttccaacatgatcctaaactttwtggwgcttttaaagaaaaataygaaaaagaattrcgtgaymakgakrcrcaaaaagawgcttttgaaaaattaaaggmwattgtaaatcarcatmatcatgttctattgttatatkcagcaaaagatactaaacataaccaagctgtagtactacagcagttgctcaatacttag

SEQ ID NO: 3523 - DNA, 1005 bp, Staphylococcus aureus
ttggcactttgttgtaagatgttaataaccacaaaaacacatacaaggagtgccaacatgagctataaccatcttacactaactgaacgcgcacgtatagaggttttacgtcaagaaaattattctttaagatctattgcacgtaaattaaaacgatctgtatctactatctcacgtgaaattagtaggaataatttaaatcagtcatatcaagctgaaacagctcaaaaaaattatgaaaccaaaagaaaactttgtggtcgtcctactcgatttactccagaacttggtaatatcattaaatattatttaaaatgccactggtctcctgaacaaatcgtaggtcgtctattacaaaaccaaatctgttttaaaaccatctatcgatggattaactctaatatgattaatttcgaacttatttcatgccttcgtcaaaaaggaaaaagacagaaacctaaagaaactagaggtaagtttaatattggccgtcctatttcacaacgtccwaaggaaataaagaaacgtaatacattcggtcattgggaagctgacacaattgtatccagcagaggcaaaagtaaagggtgcattgctactttcgcagaaagaaaatcacgttattattattgtgtacttatgcctgatcgttcctctaattctatggagacggcaattaataaccttatcaaacatctacctaaaggtgccgttaaaactattactgtcgatagagggaaagagttctcttgttatcaaaatattgaaaaccaatttaatattaatgtctacttcgctgatccatattccgcatggcaaagaggtacaaatgaaaataccaatggtttactaagagaattttyccctaagaaaacagacttagctaaagtaaatcaagagcaacttaactatgcattagactcaattaattatcgaccaagaaagtgtttaaattggaagtttccttatgaagttttatgtgatgaactgttgcacttaaattga

SEQ ID NO: 3524 - DNA, 669 bp, Staphylococcus aureus
atctttttgaatacaatagaatcacagtttgataaggttgcagaagattacgatttcgtgaatgagcttttgaatgattattcattctttgtgtctaatatgtctccaaagaaaggcagagcattagatatcggatgtggctcgggtttgttagtggagaaattagcaagttattatgatgaagtggtagggattgatatttctaatcaaatgctcgatcttgccaaatctaaacgtcaactaacaaatacggtctatctgaatatgaatgcagaacaacttaattttaatgagaagtttgattttattgtaagccgaacaacctttcatcatttggatgatatagccagcgtaatacagcaaatgaaggaactgttgaatgaggaaggaagaatagttattcttgataatgtatctgaagtcgagacaccgcctacctatgtttataaattaggggcaatccaagagtttttaccgcattgtttcaaatttggaataaaaaatgcgattagaatttataatcacaacacatctaaatcatggcttgagcatttagcttcagataagtacctatctgaacaaaattattacgatttatatgaaaagttgttgcctggatgccaattccataaaatgggttgggcaatgggggttgtctggacaaaataa

SEQ ID NO: 3525 - DNA, 726 bp, Staphylococcus aureus
ttgaaaatgaataaaaatwtagtcattaaaagcatggcagcattagccattytaacmtcagyaactggaataartgctgcagtcgttgaagagacacaacaaatagcaaawgcagagaagmatgttacgcaagttaaagatacaaatrwttttccrtatmatggcgtcgttkcatttaargatgcgacaggytttgtaatyggwaaaaatacaattatcacyaataaacatgtatcaaargattataaagttggcgatagaattactgcycatccarayggtgacaaaggaaatggtggtatwtataaaattaaaagyatttcygattatccrggyratgaagayatytcygtcatgaatatwgaagaacaagcrgtygaacgtggaycmaawggctttaattttaatgawaatgtycaagcatthaawtttgcraaagatgctaaagttgatgacaaaattaaagttatyggttacccrttacctgcwcaaaayagttttaaacartttgaatctacaggaactataaaamgaatyaaagacaatattttaaattttgatgcatayatygaaccmggkaattcaggatcaccmgttctaaattctaacaatgargtcataggtgtkgtrtatggcggyattggaaaarttggttctgaatayaatggtgcygtataytttacgcctcaaatyaaagattttattcaaaagcacattgaacaataa

SEQ ID NO: 3526 - DNA, 1411 bp, Staphylococcus aureus
atgacccaagtacattttacactgaaaagcgaagagattcaaagcattattgaatattctgtaaaggatgacgtttctaaaaatattttaacaacggtatttaatcaactaatggaaaatcaacgaacagaatatattcaagcaaaagaatatgaacgaacagaaaaccgacaaagtcaacgaaatggctattatgagcgcagctttacgacacgtgtaggcacgctagaattaaaagtacccagaacacgtgatggccatttttcacccacagtgtttgaacgttatcaacgaaacgaaaaagccctcatggcttcaatgttggaaatgtatgtatcaggcgtttcaactcgtaaagtatcaaaaattgtggaagaactttgtggtaaatccgtctctaagtccttcgtttctagcttaacagaacagctagaacctatggttaacgagtggcagaatcgtttattatcagaaaaaaattatccttacttaatgaccgatgtactctatataaaagtacgagaagaaaatcgagtactctcaaaaagctgtcatatagcgattggaataaccaaagatggcgaccgtgaaattatcggcttcatgattcaaagtggcgaaagcgaagagacctggacaacattttttgaatacctaaaagaacgcggtttacaaggtacggaactcgttatttctgatgcgcacaaaggattagtctctgccattagaaaatccttcaccaacgtaagttggcaaagatgccaagttcacttcctaagaaatatctttaccaccattcctaaaaaaaattcaaaatctttcagagaagctgttaaaggaatttttaagttcacagatattaacttagcgcgtgaggctaaaaatcgattgattcatgattatatcgatcaaccaaaatattcaaaagcttgcgcatcattggatgatggattcgaagacgcctttcaatataccgtacaaggaaattcccacaatcgactaaagagtaccaatctaattgaacgactgaatcaagaagtacgcagaagagaaaagattattcgcatcttccccaatcaaacatcagccaatcgcttaattggagccgttcttatggacctacatgatgaatggatttattcttcaagaaaatacatcaattttgataagtagaaatggtaaaaacattgtatagcattttacacaggagtctggacttgactgagtttatggaagaagttttaattgatgataatatggtttttgatattgataatttaaagaagaaatgcactcaactattatgagaagaaaaaatatggaaaacaatccattatctctatttaattagtttttgaagttaaattttcaaaaaaaagagattatacacctaaaaaggtgtataatcttt

SEQ ID NO: 3527 - DNA, 2022 bp, Staphylococcus aureus
atggctgaaactactaaaatatttgaatcacatttggtcaaacaggctctaaaagacagtgtattgaagctctatcctgtttatatgattaaaaatccgattatgtttgttgtagaagtgggcatgctgcttgccttaggattaaccatttatccggatttatttcaccaagaaagtgtatcacggctatatgtgttcagtatctttatcatattattactgacacttgtctttgcgaacttctctgaagcattagctgaaggtcgcggtaaagcacaagccaacgctttacgccaaacacaaactgaaatgaaggcacgtcgtattaaacaagacggcagttatgaaatgattgacgctagtgacctgaaaaaaggacatatcgtacgtgtcgcgacaggtgaacaaatcccaaatgacggtaaagttattaagggcctcgcaacagtggatgaatctgcgattacaggtgaatctgcacctgtaatcaaagaaagcggtggagatttcgataatgtaattggaggaacttctgtagcttcagactggttagaagttgagattacttcagaaccaggtcattcatttttagataaaatgattggtttggttgaaggggctacaagaaagaaaacacctaatgaaattgcgttatttactttattgatgacattaacgattatcttcttggtcgttattttaacgatgtatccattggcgaaattcctgaatttcaatttatccattgcgatgctgattgctttggctgtgtgtttaattccaacaaccattgggggattattatcggctatagggattgcagggatggatcgtgtgacacagtttaatatcttggctaaaagcggacgttctgtagagacttgtggtgatgtgaatgtcttgattttagataaaacaggtaccattacctacggcaaccgtatggcagatgcgtttattccggtgaaatcatcaagctttgaacgtttagttaaagcggcctatgaaagttctatcgcagatgacacaccagagggacgtagtattgtgaaattagcttataaacaacatatcgacttaccgcaagaggtcggagaatatattccgtttactgctgaaacacgtatgagcggtgtgaaatttacgacacgtgaagtatataaaggtgcaccgaatagtatggttaagcgtgtgaaagaagcagggggacatattccagttgatttagacgctcttgtcaaaggggtgtctaaaaaaggtggcacaccgctggttgtgcttgaagataatgagattttaggtgttatttatttgaaagatgtcattaaagatggactcgtagaacgtttccgtgaattacgtgagatggggattgaaacggtgatgtgtacaggagataacgaattgacagctgcgacaatagcgaaagaagcgggtgtggatcgctttgtggcagagtgtaaacctgaagataaaatcaatgtgattagagaagaacaagcgaaaggtcatattgttgcgatgacgggtgacggtacgaatgacgcgccagctttagcagaagctaatgtaggtttggcaatgaactcaggaaccatgagtgccaaagaagcggcgaatttaattgatttagattctaatccaaccaaactgatggaagtcgttctaattgggaaacaattattaatgacacgtggctcactcactacatttagtattgcgaatgacattgcgaaatactttgcgattttaccagccatgtttatggcggctatgcctgcgatgaatcatttgaatattatgcatctgcattcacctgaatcagcagtattatctgcgttaatctttaatgcgttgattattgtattattgattccgattgcgatgaaaggcgtgaaatttaaaggtgcctcaacgcaaaccatattgatgaaaaatatgttagtttacggcttaggcggtatgatcgtgccatttatcggcattaagctcattgatctcatcatccaactctttgtctaa

SEQ ID NO: 3528 - DNA, 789 bp, Staphylococcus aureus
ttgtgtcgtattttaggcatttctagagcgagttattataagtgggtacattatcaatcgagtgaacttgaattagagaatgaacagcttaagcgagaaatagaatcaatctaycataagtataatggtatttatggctatcgtcgcatttatatctatattcgcttaaaactaggtaaacaagtaaaccgaaagcgaatttatcgtttgatgaaagaacttaatttaaaagcagtaatacgtcaaaagcgaaaaccttatcgacgttcaacgccacaaatcacatcagaaaataagcttaatcgacaatttgacattgatacgccaaataaagtttggttaacagatgtaacagaatttaaaatcaaagaaggtagtaagatatatttgagtgccatttatgacttaggtgctaaacgtattgttagttatgagctaggcccttctaacaataatcaattagtatttaaaacattcaatcaagcgatagaaaaagtagaaaatacaaaaggtattttatttcatagtgaccgaggttttcaatatacatcgaaaacatttaaacatatgttggatgaatgtggcatgattcaaagtatgtcacgtgttagcaaatgtatcgataacggtccaatggaaggtgtatggggtacaataaaaagtgaaatttttagaggaaataagcactttaaatttaatagtgtagaagaagctacaaaaacaattcatgattttattcttttctttaatcatgaaagaattacattaaaaatggctgattctgtataa

SEQ ID NO: 3529 - DNA, 756 bp, Staphylococcus aureus
atgaaaactttgaagggagctttatttatgtcaataaaacctaaagtagacatagatgtactgctatatatgtttcaagaatatgaaaaaggcgtgtcgtttcaatacttaatcgatacattacaattagatattaatgtcaatactttgtatcctaagtataaatattataaaacccatggtattgaaacactacttacacaaaaacaatacaatcactattcaaaggaactaaaattaaaagttgtaaatgaatatttgaattcaaatcaatcaacccaagacatcgcaatcaaatacaatattcgtagttcgacacaagtcaaaaattggataaaaatgtatactgtaggaaaagagattaagaatcaatctcctaaaactggggtgtatatcatgaaagcaagaaaaaccacatttgaagaacgtgtaacaattgttgaatattacttgaatcataaacaatcttatagagaagttgcagaacactttaatatctcatacggtcaaatttaccagtgggttcataagtatcaagcacatggtaaaaatggattagtagatggcagaggcaaaggaaaacccaaatctatgatgacgccagaagaacaaaaagmagctgaaattcaagcattaaaagcacaaaatcgattattagagatggaaaatgacgttttaaaaaagtttcaagcattggaaagagagatgattcaaagagaaaacaaatcacggcatacaaaacgatcgaagcgttaa

SEQ ID NO: 3530 - DNA, 555 bp, Staphylococcus aureus
atgaggaggarcaggaaaatgactaacacattaacaaytgatcagttacaagagttattacaaatacaaaagragttcgacgatagaataccracyagaaatttaaatgacacagtagctagtatgattattgaatttgyrgagtggrttaacacrcttgagttttttaaaaattggaagaaacaaccaggtaagccaytagatacacaattagatgagattgctgattacttagctttcagtttgcaattaactytgactattgttratgaagaagatttggaagaaacyactgaggttatggttgatttgwttgaaaatgaagttactttacctaaactacattcagtttattttgttcatgtaatgcatacactaacrgaacaatttgtaaaaggtattgataatagyattgtacaagttttaataatgccktttttgtacgccaatacttactatwcwatcgaccarctyatygacgcatacaaaaagaaaatgaaaaggaaycaygaaagacaagatggaacagcagacgcaggraaaggatacgtgtaa

SEQ ID NO: 3531 - DNA, 258 bp, Staphylococcus aureus
atgagcataatcagtaacagaaaagtagatatgaatgaaacacaagacaatgttaaacaacctgcgcattacacatacggcgacattgaaattatagatttcatcgaacaagttacggcacagtatccaccacaattagcattcgcaataggtaatgcaatcaaatacttgtctagagcaccgttaaagaatggtcatgaggatttagcaaaggcgaagttttacgtcsawagagyrtttgayttgtgggagkgrtaa

SEQ ID NO: 3532 - DNA, 201 bp, Staphylococcus aureus
atgatgcaagctcaaaacaaaaaagtcatctattactactatgacgaagaaggtaatagrcgaccawtagayattcaaattaatgacggatatgaactkatggtccgatctyatttcatcaacaacaccattgaagaaataccatacktaaataataacttatatgccttggttgatggttatgaatttaagttagattga

SEQ ID NO: 3533 - DNA, 624 bp, Staphylococcus aureus
ttgcaaattttactattgataatwacaactgggataccaggattttatacttactatgctctatccaataagaatttggtgtatttcratagtgataataagaaagttattctcgctttcttttctgtagtttctgtttttatttttttattaactcttagtctgttttcaggacaaaacaacgtaaatcagctatttcaaaaattaacttttacaaaaacattgtctgcactaatagtaagtatattaataatcatcatattaacagaattcgtgtatacaaaaattatagaaatatacaatatttttagtaatcataaccgtaaaagtaataatttaaaaaaagttgaaacgytacctgtacatctattaaagtatgaagataataaatataaaatgttcataactgtaaaagatttcgaaggtaacataattgaaaaaggattccttgataactattcaagaaaacacaatcgaaatatattacttgatactagatttaatgctaattacgaagmcttcaaaacattgtctgaatacaatgattcatatttagattttgaaaacaaagttaaattagaatatctatatatcgataagaaaaaattaattatttcttcttag

SEQ ID NO: 3534 - DNA, 1017 bp, Staphylococcus aureus
atgattaaacaabtatryaaaaayatyacaatytgtaskttagcrmtatcdacwrcwttmactgtattwccrgcwwcttcttatgcaraaattaawtctraaattamwrcwgtttcygagaagaaycttgatggtgatackaaratgtatacacgtacrgctacaacragtgataswsaraaaaawatywcwcaaagcttacaatttaayttcttaactgarccwaattatgataaagaracagtatttattaargcraaaggwacaatwggyagtggwttraraattytarayccaaatggttattggaatagtacattaagatggcctggwtcttattcagtytcrattcaaaaygttgatgayaacaacaatacaaatgtgactgaytttgcrccwaaaaatcargatgaatcaagagaagttaaatatacgtatggytataaaacaggtggagatttttcrattaatcgtggwggbttaactggaaatattacaaaagagarwaattattcagagacrattagttatcaacaaccatcdtaycgyacattacttgatcaayctacrwcamataaaggtgtagsttggaaagtagaagcacattykatmaataatatgggacatgaycatacgagacaaytaactaatgayagtgatratagarykaaaagtgaaatyttttcwttaacwcgaaayggaaayytatgggcgaaagataatttyacdcctaarrayaaratgcctgtaactgtktcwgaaggrtttaatccagaatttttagctgtwatgtcacaygataaaaawgayraaggtmratywmvatkyrwygttsaktataaamgatcaatggatgastttaaawtagattggaaymrhcatggtttctggggctattggtctggtgaaaaccatgtagatmaaaaagaagaaaaattatcagcattatatgaagttgattggaagacacatratgtraarttwrtwaaaryamttaatgataawgaamagaaataa

SEQ ID NO: 3535 - DNA, 850 bp, Staphylococcus aureus
atgaarcractrgwtggaattcccgaatcaatgttaattcctttgatagctcgagcaaaagagtacgaawacgaaaaaccaataataaaagacgcactatcwaaaaaaatatttgatggtttagatgatatrtacaaaaatgttacatgtgatgacatgtctcaaattggaattagtatacgtwctgtgataatagatwgtgttactaaraggcttatcaaggataataaaratttratygtgrtcaatataggttgtggcttagatacaaggtttcaaagatttaataamgaaaaaatatcrtggatagatttagatgtaccwgaatcaatagaaatacgaaaaacattttttaaagaaaswratagttataagatgatakctaaatcwatgctrgattacagttggattgawgatgtyawaaattataaattttttaatagtaagtcaratatattgtttatywttgaaggtgtattgatgtattttgatgagagtgtaatgactmaattattrsayactattatyaaaaagwtkggagatcataatttgacatttgcgattgaattttgctcaaaaacaattgcraataatacaaaragacatmaatckgtatcaaarttatcctcacaacctgtttttaaatatggwtacaatgatttaaawraattgratraarttttaccaaatamaatraragtwatamatgaatataattaytttgactayyataagaawmgrtggggsytmtttggrtattgtagatwtataccttatytraaaaaaaggytaaacaataaaatagtamttatgraatataaasywscwaarwkamwsaswcattaattga

SEQ ID NO: 3536 - DNA, 1032 bp, Staphylococcus aureus
atggctataaaagaawtaagtagccaatctgccatagatcataaaagaaaaagacgcacaacactcacgtatatrgtgagtktgtgctttctttttatttgtrtatatttaaatatggcrattggttcttcraaaattaattttagcgatatcrttcactatgttactggtcatacrgatacraaagcaacgtttttattrcataatgtacgtatgccaaggatgattgcagggttatttattggcggtgcrttagcggtatctggtttgttaatgcaagcaatgacwcgyaayccrctrgcatcwccwaaratttttggtgtyagttctggygcrtcdtttktcattgtattwgtracgattatyattccakcattagaataytaykcaytwtatttaggtgtsatwggygcmtttatwggtggwttaactgtytayacactttcwggtgctacraaaggtatgacrccyattaaattagcrttggctggtatggccatycatttrttttttagtagtatgacygaaggkattatwatyttraatgaraattcwaaygaacaagtgatgttttggcttgtyggttcattatccagtatgaagtgggatgarattttaaccattytaccatggmttattggtgcwttaattgyaacrrtytttattggwcgtcarytaacgatwatggaactwggcgatgayattgctaagggattrggtcaaaatataaataaagttagaatyatcattggrctattagtyattattcttacaggtatgtckgtrtcartrgcaggaccaattggmtttgttggyttaatygtrccrcatatmgtcaarcgctatgtgagtaagaattatttagtcatgattccattaacatttattataggtgcagatttrttactactatcagatgtattaagtcgtttaatyacwtatccttaygaatcaccwgtaggkattgtkacatcattcgtaggtgcactttacttcttatttataacgattaaaggggtgaaaagaatatga

SEQ ID NO: 3537 - DNA, 663 bp, Staphylococcus aureus
atgmawwktgmraaatwkatwgatcacactttattgaagcctgagtcaacacgtacgcaaatcgatcaaatcatcgatgaagcgaaagcatacmattttaaatctgtatgtgtgaatccaacrcatgtwaaatatgcagcagarcgactagctgattcagrkgtgytmgtttgtacggtaataggrttcccattaggtgcrtcgacaactgcracgaaagyatttgaaacagaagatgcrattcaaaatggtgcagatgaaattgacatggtcatcaacatcggcgcattaaaagatggrcgttttgatgatgtacaacaagacattgaagcagtggtkaaagytgcgraaggtcacacagtaaaagtgattattgagacggtattgttggaccatgacgaaatygtaaaagcgagtgaattaacaaaagyggctggtgcggacttcgttaaaacttcaacaggttttgcaggtggcggtgcgactgcagaagacgttaaattaatgaaagatacagtaggtgcwgatrtagaagtaaaagcatcaggtggcgtacgtaatttagaagatttcaataaaatggttgaagcrggtgcgacacgtattggtgcgagcgcaggygttcaaattatgcaaggtttagaagcagattcagattactaa

SEQ ID NO: 3538 - DNA, 228 bp, Staphylococcus aureus
ttgaaaaagacgtctatttcagcagtgtttgaaaggaagtttataatgaaaataamwaattgcaaaataaaaaragaaactrtartataygaagttttaactagtggtaatcaaccattcacttatgagttacctaaagatttatcgtcacataatgcgcgtaaatacttggaatttatttcacaaaaawtagatggmgataagttaamyaaagaagattcattatga

SEQ ID NO: 3539 - DNA, 351 bp, Staphylococcus aureus
atgcttgawatgataagtaatggtaaaatramgatgmaattgaataatgwwaarcaamagcgtcatattttawrcacaaatgaatataataayaagaaaaataattcatctttmttaccmagttataytayaatagattctaatgaaaktgaaaagrtgactaaaaaagaatttattgatwttccagttttgtttgatgatgaagggaatttyagaawaaaacaagttatagattayaaaaagataataggtaaatcttatgtgaatggtaaatatattgaaacgaaattaggtaaggttcattattctaaaactggttttcatgtagttccgtatattaaaaaggagtga

SEQ ID NO: 3540 - DNA, 198 bp, Staphylococcus aureus
atggaacaaattaaacttaaaacttttacagctgagactttagagttattagaaaaaaacattaatgcttttttaagttctgaagaagctacaaatttaaaattagtaaatattactattaaagaaatagaagaaagaacattcccaaataatgaagaagaattcaatgcaattttaactttatctgtgaataaataa

SEQ ID NO: 3541 - DNA, 198 bp, Staphylococcus aureus
atggaacaaattaaacttaaaacttttacatctgagactttagaattattagaatcaaatattaacgaatttttaggttctgaagaagctgcaaatttgaaattagtaaatattacaataaaagaaattgaggaaagaacatttccaaataatgaagaagagtttaatgcaatattaactctatctgtaaataaataa

SEQ ID NO: 3542 - DNA, 735 bp, Staphylococcus aureus
ctgattttcattttcatatacattaaattgtatacactgraaatgaggaggtyrtctataatgataaataaaaatgacatagtagcagatrtagtaaywgattatccgaaagcagcrgatatttttagaagygtrggwatagayttttgttgyggyggacaagtaagtatagaagcagcakccttagraaagaaaaatgtagatttgaacgaattattacagcgtctcaaygamgttgaacaaacgaatacaccaggttcgytwaaycctaaatttttaaatgtttcrtcacttattcaatatattcaakcagcatatcatgaacctctwagagaagaatttaaaaatttaacaccttatgtgacgaarttatcgaaagtacatggacctaaycatccatatttagtygagttaaaagaaacataygatacatttaaaartggcatgttagagcatatgcaaaaagaagaygatgtygattttccaaaactmattaaatatgarcaaggtgargtagtaracgatattaatacwgtgatwgatgatttagtwtcwgaycacattgcaacgggasaattgttagtraaaatgagcgawttaacatctagytatgaaccwccgatagargcrtgtggtacktggcgactygtttatcagagattaaaagcacttgaagtgttaacacatgarcaygtwcatttagagaatcaygtwttatttaaaaaagtatcataa

SEQ ID NO: 3543 - DNA, 567 bp, Staphylococcus aureus
atgatyttagttgtagataattatgattcctttacrtataacctagtggatattgtkgcwcaacayactgaygtcattrttcaataycctgatgatgataatgtgctgaatcaatckgtkgaygctgtyattatwtcwccwggyccwgggcatccattagacgaycaacakttratgaaaatyatmtcawcctatcaasayaaacccattttaggtatwtgyytaggkgctcargcactgacttgttaytacggtggagaagtcattaaaggcgacaargttatgcacggmaaagttgatacrctwaaggttatatcgcatcatcaacatctgttatatcaagatrtaccagaacarttttcwattatgagataycattcattaataagtaaycctgayaattttccagaagaattgaaaattactggacgtacyrawgattgtatacartcattygagcataaagaaagaccgcattayggtattcagtaccatcctgaatcatttgctacagactatggtgtcaaaataattacaaatttyattaatctagtgaagraaggatga

SEQ ID NO: 3544 - DNA, 1008 bp, Staphylococcus aureus
atgaaaaccatgacattactaacaagaataaaaactgaaactatattacttgaaagcgacattaaagagctaatcgatatacttatttctcctagtattggaactgatattaaatatgaattacttagttcctattcggagcgagaaatccaacaacaagaattaacatatattgtacgtagcttaattaatacaatgtatccacatcaaccatgttatgarggsgstatgtgtgtgtgcgkcacaggtggtgacaagtcwaatagyttcaayatwtcaackactgtygcttttgttgtagcaagtgctggcgtaaaagttataaaacatggwaataaaagtrtkacytcaaattcaggtagtacggatttgttaaatcaaatgracatwcaaacwacrwctgttgatgatacrccwaascaattaratgaaaaaracctygtrttyatyggygcaacwgaatcrtatccaatmatgaartatatgcaaccagttagaaaaatgatwggwaagcctacaatattaaaccttgtrggtccattaattaatccmtatcacytaacgtatcaaatggtaggyrtctttgaycctacaaarytaaarytagttgcwaaracrattaaagatttaggtagamracgtgcaatcgtwttacatggtgcraatggtatggatgaagcaacrytrtctggtgataatttgatatatgaattgactgaagatggagaaatcaaaaattacacattaaatgcgactgattatggtttgaaayatgcrcmgaatagtgattttaaaggyggttcrcctgaagaaaayttagcaatcwcmcttaatatcttgaatggtaaagatcagtcaagtcgmcgtgatgttgtcwtactwaatgcrggtttaagyctwtatgttgcagagaaagtggatascatcgcagaaggcatagaactygcaasyacwttgatwgataatggtgaagcwttgraaaaataccatcaaatgagaggtgaataa

SEQ ID NO: 3545 - DNA, 402 bp, Staphylococcus aureus
atggcgaaaataaattttgatgctgcgacgaaaggaaatccaggcataagtacwtgtgccattgtaatcaaagaagatragcagcattatacatatacacatgagttaggygaaatggataaycacacwgcagaatgggcwgcatgtatttatgcactagaacatgcacgtgaattaaatgttmrwaaygcrytrttrtayacwgactcwaaghtaattgcrgatagyrttramgctggttatgtraaaaaygcmaawttcaaaccttattttgatcaawtrgaaatatttgaamaagattttgatttattatttgttaaatggatwccgagagaacaaaacaaagaagcgaatcaacaygcwcarcargcattgtayaaattwattaaaaagaayaaataa

SEQ ID NO: 3546 - DNA, 1362 bp, Staphylococcus aureus
atggctgaaaaattacaaagggaactgagcaatcgccacatwcaattaattgcwattggyggygcaattggtacaggsytattcttaggygctggtcaaacgattgcattaacyggcccttcwatwytaytaacatayatcattatwggatttatgttatttatgtttatgcgaggtttaggwgaaatcatyatwcaraatactgaatttaaatctttcgcagatgtaaccaatacatayattgggccttttgcaggattygthaccggwtggacatactggttctgttggattattacaggyatggctgaagtaacrgctgtrgcaaartatgtwagcttytggttcccagaaattccaaactggatwagtgcactwttttgygtaytgttattaatgtcwttyaacytaytkagygcragactwttyggagarttagaattttggttctctatcattaaaatagcracaatyattggtttaatwgtmgtwggtttcgtyatgattctatttgcatwtaaaactcaattyggrcatgcsagtttcacraayytataygarcacggyrtattcsctaaaggwgcwtctggattctttatgtcwttccaaatggcmytattctcattygtrggaatygaaatgattggtgttacrgcwggkgaaacraaagatccwgttaaaacaatwccaaargcrattaayagtgtwccyattagaattttaatattttaygtyggkgckytagcggttatcatgtckattatyccttggcarcaagttgatcctgataacagtccattcgtaaaattattcgcattratyggwattccrtttgctgcrggcttgattaattttgtagtaytaacygctgctgcttcatcatgtaayagtggtatwttctcraatagycgtatgctkttcggtttatcaagtcaacaacaagcaccwccgaayttytctaagacgaataartatggcgttccacatgtwgcratctttgcttcatcagcattrttactygtggcagcattaytaaactatattttcccwgatgckacwaargtatttacgtatgtgacwacmatctctacagtrttattyttagttgtwtggggwctgattatcatygcwtatatcaattatagtcgtaaaamyccagatctwcataaaaakgctacgtayaaaytattwggygghaaatatatgggctayytmatwtttgtattcttyatwtttgtgttyggsytattrtttatyaatgttgawacaagacgtgcratwtaytttattccgatttggtttatactwttagsatttatgtacttaagatataaacgtatcgctgctaaatcaaataamtaa

SEQ ID NO: 3547 - DNA, 549 bp, Staphylococcus aureus
atgaaagagactgatttacgagttataaagacaaaaaaagcattgtcgagtagcttgctacaattgttagaacagcaattattccaaacgattactgtcaatcaaatttgcgacaaygcactcgtacaccgyacaacattttataaacayttttatgataaataygatcttctagagtayttgttcaatcaattgactaaagactaytttgcyagagayatyagygaycgycttaaycayccattycaaacgatkagygatacrattaayaataaagargatttgmgagawatygcagaattycaagaagaagacgctgaatttaataaagtattaaaaaatgtctgcattaaaattatgcataacgatatcaaaaataatagagaccgtatcgatattgacagcgacatcccagataatctcatattttatatttatgactcgttgattgaaggttttatrcattggataaaagatgaaaaaattgaytggcctggsgaagawattgataamattttccatarrktmathaatattaagattaaatag

SEQ ID NO: 3548 - DNA, 411 bp, Staphylococcus aureus
ctgctatactcctgttatggaggtgataggatgaaacttaatcacgattgcgttagactcttgctcttagaaatagaatctaataagaaaataggtgaaccacttactcgacataatttcaacgataatattatttttgataaatatgattttgaaacagtaatgtactcacttttaaaattagaagaagctaaatttatttgttgcgatctgaaattcatcgaaggcagggtcgtttcttggattattgatgacatcacttggtctggccatgaatttctcgataatattagagacaataaaacttggaacgaagttaaaagwgtcgttaacaaaacatccagtatgtctcttaatcttatggggaaattagcttttcaatatctttctcaaaaattcaatctaacttaa

SEQ ID NO: 3549 - DNA, 345 bp, Staphylococcus aureus
atgataacatttgaraatatacaacaacttgaraaatacaccttaatgactatgcatggtctttttaatcaacttaaactcggyattatttcaatcgamaaygcagagcatacsctytttacaccttatatgwtggaawcrctctctwccctaggyrtgaaascagacattrtcgatttaattcayaaagggacwgarttagaagactttkcrgcatttaatttatcaattgawgayacagttacagtctgtttacaaagaactgaagaactattaaawcaatacaaaaatgtrgaattcaatgacaaaatattaatcaattggcgyattatrcaaragwaatag

SEQ ID NO: 3550 - DNA, 315 bp, Staphylococcus aureus
atgactctaatagaaccagatatgamcttaagaatgccagatataagtactacagtagaaacacttaatctcatatctaaaatgrawgckcaaaaagaaaayattcgywcagttrttgcacctgaacataagcataaatayaaagatattgaaaayggattaaaaggtgaagaaaaagtattrattgaacaaatggcgcadcattgcgargcttttaaagctaattttaaaggygcrgctcaaggagaytgggttaaaagtgcmatgtctgagatagacagyattaargatgayytgaaaaaaattaatagctaa

SEQ ID NO: 3551 - DNA, 624 bp, Staphylococcus aureus
atgactgaacaaacattatttgaacagttgaacagtaaaaacgtgaatgatcatacagaacaaaaaaayggattaacttatctagcatggtcatatgcacaycaagagytraaaaagattgacccwaactacacagtaaaagtrcacgartttccrcatccagatattaacacagaaaattattttgtaccttatttrgctacaccagaaggctattttgtacaggtatctgtgactgtgaaagatagtacagagactgartggcttccagtattggactttagaaayaaatcrcttgctaaaggtagtgcaacaactttygatatyaacaaagcscaaaaacgatgyttcgttaaagcttcggctttacacggtytaggyttatatatytacaacggcgaggaactwccaagtgcaagtgayaaygatattacagaattagaagagcgtatyaatcagttygtgaryttatctcaagaaaarggrcgagatgcaactatcgataaaacgatgagatggctaaaaatctcwaacattaataaattgagtcaaaaacaaatcgcagaagcrcrccaaaaattagatgcgggattaaaacaattggatagtgaggagaaacaataa

SEQ ID NO: 3552 - DNA, 2430 bp, Staphylococcus aureus
atgtcaatgacatatagaataaagaaatggcaaaaattatccaccattacgttattaatggctggtgtgattactttgaatggtggtgaattcagaagtgttgataaacatcaaatcgctgtggctgatacgaatgttcaaacgccagattatgaaaaattgaggaacacatggctggacgttaactatggttatgataagtatgatgagaataatccagatatgaagaagaagtttgatgctacagagaaagaggcgacgaatttactcaaggaaatgaaaactgaaagtggtaggaaatacttgtggtcaggagcggaaacccttgaaactaattcttctcatatgactcgtacctatcgtaatattgagaaaatcgcagaagcgatgaggaatcctaaaaccactttaaatactgacgaaaataagaagaaagtgaaagatgcccttgagtggctgcataaaaatgcatatggaaaagaaccagataaaaaagtaaaagaattaagtgagaattttactaaaacaactggcaagaataccaacttaaattggtgggattatgaaattggaacacctaaatcattaacaaatacgcttatattgctgaatgatcaattttcaaatgaagaaaagaaaaaattcactgcccctattaaaactttcgccccagatagtgacaaaatattatcttctgtaggaaaagctgaacttgctaaaggcggaaatctagtagacatttctaaggtgaaacttttagaatgtattatcgaagaagataaagatatgatgaaaaagtctatagattcatttaataaagtcttcacttacgttcaagattctgccactggtaaagaacgtaatggattttataaagatggctcttacattgatcatcaagacgttccatacactggtgcttatggcgttgtactcttagaggggatttctcaaatgatgccgatgataaaagaaacaccttttaatgataaaacccaaaatgatacaaccttaaagtcatggattgacgacggatttatgccactcatttataaaggtgaaatgatggatttatcacgaggtagagctatcagtcgtgaaaatgaaaccagtcactcagcatctgcaacagtaatgaaatcattgttgagattaagtgatgccatggatgattcaacaaaagctaagtataaaaagattgtcaaatcttcagtagagtcagattcaagttataaacaaaatgattatttaaattcatattcggacatagataaaatgaagtctttaatgacagataacagtatttctaaaaacggattaacacaacaacttaaaatatataatgacatggatcgtgtcacctatcataacaaagacttagactttgcatttggtttaagtatgacgtcgaaaaacgtagcacgctatgaaagtatcaacggagagaatttaaaaggttggcacactggtgctggaatgtcttatttatataacagcgatgtcaaacactatcatgataacttctgggtgacagccgatatgaaacgtttatcaggtacaacaactttagacaatgaaatattaaaagatacggatgataaaaagtcgagtaaaacttttgttggcggaacaaaagttgatgaccaacatgctagtatcggaatggattttgaaaatcaggacaaaactttaactgccaaaaaatcatatttcatattaaacgataaaattgtcttcttaggaactggcattaaaagtactgattcatcaaagaatccagttacaacgattgaaaatcgcaaagcgaatgggtatacgttatatacagacgataaacaaacaaccaattctgataatcaggaaaacaattcagtctttttagagtccacagataccaaaaagaacatcggttatcattttttaaacaaaccgaaaataactgtaaaaaaagaaagtcatactggtaagtggaaagaaataaataaaagtcaaaaggatacacaaaaaactgatgagtattatgaagtaactcaaaagcattctaattctgacaataaatatggatatgtgttgtatccaggcttatctaaagatgtctttaagacaaaaaaagatgaagtaactgtcgttaagcaagaagatgacttccacgttgtgaaagataatgaatcggtttgggctggtgttaattatagtaatagcactcaaacttttgacattaacaacactaaagtcgaagttaaagccaaaggtatgtttatacttaaaaagaaagatgataacacttatgaatgtagcttctataatcctgaatctacaaattccgcttcagatattgaatctaaaatttcaatgaccggttactctattacaaacaaaaatacgtcgacttctaatgaatccggcgtgcactttgaattaactaaataa

SEQ ID NO: 3553 - DNA, 2436 bp, Staphylococcus aureus
atgtcaatgacatatagaatgaagaaatggcaaaaattatccaccattacgttattaatggctggtgtgattactttgaatggtggtgaattcagaagtattgataaacatcaaatcgctgtggctgatacgaatgttcaaacgccagattatgaaaagttgaggaacacatggttagatgttaactacggttatgataagtatgatgagaagaatgacgcaatgaagaagaagtttgatgctacggagaaagaggcagagaaattactcagtagcatgaaaactgaaagtggaaggacttacttgtgggatagtgcaaaagatttagataacaagtctgcggatatgactcgtacctatcgtaatattgagaaaatcgcagaagcgatgaggcatcctaaaaccactttaaatactgacgaaaataagaagaaagtgaaagatgcccttgagtggctgcataaaaatgcatatggaaaagaaccagataataaagtaaaagaattgactgagaattttaaaataactgattcatcaaagaaaaaagctttaaattggtgggattatgaaattggaacacctagatcattaacaaatacgcttatattgctgaatgatcaattttcaaatgaagaaaagaaaaaattcactgcccctattaaaactttcgccccaaaaagtgatgaaatattatcttctgtaggaaaagctgaacctgctaaaggcggaaatttagtagacattgctaaagtaaaacttttagaaagtattatcgaagaagataaagatatgatgaaaaattcaatagattcatttaataaagtcttcacttacgttcaagattctgccactgataaagaacgtaatggattttataaagatggttcatatatcgaccataaagatgtcccatacactggtgcttatggcgttgtactcttagaggggatttctcaaatgatgccgatgataaaagaaacaccttttaatgataaaacccaaaataatacaaccttaaaatcatggattgacgacggatttttaccactcatttataaaggtgaaatgatggatttatcacgtggtagagccattagccgtgaaaatgaaacgagtcactcagcatctgcaactgtaatgaaatcattgttgagattaagtgatgccatggatgattcaacaaaagctaagtataaaaaaattgtcaaaacttcagttaaatctgattcaagttacggccaaaatgatacattaagctcttattcggatataagcaaaatgaagtctttaatggaagacagcactatttctactaacggtttaacacaacaacttaaaatatataatgacatggatcgtgtcacctatcacaataaagacttagactttgcatttggtttaagtatgacgtcgaaaaacgtcgcacgttacgaaagtatcaacggagagaacttaaaaggttggcacactggtgctggaatgtcttatttatacaatagcgatgtgaaacactaccgtgataacttctgggcgacagctgatatgaaacgtttagcaggtacaacaactttagaaaatgaagaacctaaaggtacggatgttaaaaagtcgagtaaaacttttgtaggcggaacaaaattcgatgaccaacatgctagtatcggaatggattttgaaaatcaggacaaaactttaactgccaaaaaatcatatttcatattaaacgataaaattgtcttcttaggaactggcattaaaagtactgattcatcaaagaatccagttacaacgattgaaaatcgcaaagcgaatgggtatacgttatatacagacgataaacaaacaaccgcttccgataatcagggaaccaattccgtctttttagagtcaaccaataaacctaaaaacaatataggctatcattttttaaacgaatcgaaaataactgtaaaaaaagaaagtcatactggtaagtggagtgatataaataaaagtcaaaagcaagacagtaaaactaatcaatattatgaagtaactcaaaagcattctaatacagatagtaaatatgcatatgtgttgtatccaggcttatctaaagatgactttaatacaaaaaaagataaagtaactgtcgttaaacaagatgatgacttccacgttgtgaaagataatgaatcggtttgggctggtgttaattatagtaatagcactcaaacttttgacattaacaacactaaagtcgaagttaaagccaaaggaatgtttattcttaaaaacaaagatgataacacttatgaatgtagcttctataatcccgaatctacaaataccgcttcagatattgaatctaaaatttcaataactggatactctattacaaacaaaaatacatcaacttctaatgaatccggcgtacactttgaattaactaaataa

SEQ ID NO: 3554 - DNA, 2457 bp, Staphylococcus aureus
atgtcaatgacatatagaatraagaaatggcaaaaattrtccaccattacgttattaatggctggtgtgattactttgaatggtggtgaattcagaagtattgataaayatcaaatcgctgtggctgatacgaatgttcaaacgmcagattatgaaaagttgaggaacayatggctggacgttaactatggttatgataagtatgatgagaakaatsmmgmwatgaagaagaagtttgaggctacggagaatgaggcaragaaattactyarkgaratgaaaactgaaagtgataggaaatacttgtgggaaarctcaaaagatttagatacgaagtctgcggatatgactcgtacctatcgtaatattgagaaaatckcagaagcgatgaarcataaaratactaarttaaaaayagatgaaaacaagamraaagtraaagatgcmcttgagtggctgcataaaaatgcatatggaaaagaaccagataaaaaagttgctgatttgacctcaaactttaaaaataaaacttctagaaataccaayttaaattggtgggattatgaaattggaacacctagagcattaacaaatacscttataytgctkacawgawsawttywcwratgamgaaaagaaaaaatayacwgcycctatyaaaactttcgccccagawagtgacaaaatattatcwtcwgtaggamaayctgaacmwgctaaaggsggaaatttagtagacattkctaaagtaaaacttttagaaagtattatcgaagaagayaaagatatraykaaaaaktcwatagatkcatttaatamagtcttcacttacgykcaaartwmtgcmactggwaaagaacgtaatggattctataaagayggctcttayattgatcatcaagacgtcccatacactggtgcttatggcgttgtactmttagagggkatttctcaaatgatgccgatgataaaagaaacaccttttaatgatarwamccaaaatgatacaaccttaaartcatggattgacgacggatttatgccactcatttataaaggtgaaatgatggatttatcaagaggtagagctatcagtcgtgaaaatgaaacgagtcaywcagcrtcwgcracwgtaatgaaatcattgttgagattgagtgatrccatggatraktcwacaaaagctaartataarmaratygtyaaracttcwgtwrartcwgattcaagttayrrmcaaamygatwmwttaagctcttattcggatataagcaaaatgaagtctttaatggaagacagcactatttctactaacggtttaacacaacaacttaaaatatataatgacatggatcgtgtcacctatcacaataaagrcttagactttgcatttggtttaagtatgacgtcgaaaaacgtcgcacgttacgaaagtatcaacggagagaacttaaaaggttggcacactggtgctggaatgtcttatttatacaatagcgatgtgaaacactaccgtgataacttctgggcgacagctgatatgaaacgtttagcaggtacwacaactttagawaatgaagaacctaaargtacggatgttaaaaagtckagtaaaacttttgtaggmggaacaaaattcgatgaccaacatgctagtatcggaatggattttgaaaatcaggacaaaactttaactgccaaaaaatcatatttcatattaaacgataaaattgtcttcttaggaactggcattaaaagtactgattcatcaaagaatccagttacaacgattgaaaatcgcaaagcgaatgrktatamrttatatamagaygatamrcaaacaaccrmttccgataatcaggraaccaattccstctttttagagtcaacsaatarmmctmaaaacaatataggytatcattttttaaacgaatcgaaaataactgtaaaaaaagaaagtcatactggtaagtggagtgatataaataaaagycaaaagsatakacartaaaactratsartattatgaagtaactcaaaagcattctaatacagatagtaaatatgcatatgtgttgtatccaggcttatctaaagatgwctttaaatmcaaarmaagmtaaagtaactgtcgttaarcaagawgatgacttccacgttgtgaaagataatgaatcggtttgggctggtrtyaattayagygatagcrctmaaacttttrwmattaayaacactaaagtcgaagttaaagcmaaaggwatgtttatwcttamaaagaaagatgataamacttatgaatgtagcttctataatcccgaatctacaaatwccgyttcagatattgaatctaaaatttcaatgactggatactctattayaaacaaaaatacgtcgacttctaatgaatccggcgtrcgctttgaattacamyaaayawtaaataaagatgataattaa

SEQ ID NO: 3555 - DNA, 438 bp, Staphylococcus aureus
atggaagtgatgatattgaacttcaatcaattcgagaatcaaaacttttttaacggtaatccaagtgatacatttaaagatttaggtaaacaagtatttaattactttwcaacaccttcatttgtaacgaatatatatgaaacagacgaattatattacttagaagctgarctagcaggtgyaaataaagaagayattagtatcgatttcaataataatrygctyactattcaagctactagaagygcwaaatayaaatcygramaactcattttagatgagcgwaacttcgaatcattaatrcgycaatttgattttgaagctgttgataagcaamatattactgctagttttgaaaatgggytattaaccattacmytgcctaaaatcaaaccaagcaatgamactacttcatcaacatctattccaatttcwtag

SEQ ID NO: 3556 - DNA, 741 bp, Staphylococcus aureus
ttggcatacacatacactttaaaagatattattgaaattacaggtgtaactaaamgaactttacattattacgatgaaataggattattagttccarataaaaatgataaaaattatcgcgtttataaacagcaagacttagaaaaattacaaaarattttaatactcaagtcttttgattttgatatcgctaaaataaaacaatacatttcrtatgataatgaacaattgcgaaagttattatcagagcaartaagcaagttagataaaaagatttcwgacttacaattaattagacgctctgtatgtgaatttattaamggacwctctctaatagataccagcattttaaayaagacactacagtcacaatatgataaagaagcatctataaaatatggtcatacgaaagcatatcaatcatttattagacgtaaagacagcttacaatcgcaggatatcagacataaattgacaaykatcttcaatmaattyaatcawatgtctttragtcattatccaatccaagaytgtartgatmtcgtrkwwgartggaarkcwtttatgaacacwatcgctgattttgatgatgaaacattatgctgtattgctaaaacatatgaaratgatacgcgtttcaaagattactttaattcatatgataatcaaaatttagcatcatayatttcagaagctgttaattattttttgagcaatgwgaataagarmgacaatttttaa

SEQ ID NO: 3557 - DNA, 174 bp, Staphylococcus aureus
atgaaacttaatcaacgttacgtaaaagtatttgcattatatttcgtaagtattgttactgcaaatattattgttaaaaataataatttaattaaaacattgatacaaaccatagccgggtacacggtctttgcagttggtttraagtatttaactaaacgtaaaaataaatga

SEQ ID NO: 3558 - DNA, 306 bp, Staphylococcus aureus
atgatgagaacaaatratcatataaccsatttagatgctattgagttaagtagcggttggaattacaattcgaaattggwrrctggcaaaaatgcactactatcagatagycttttaagagatattaaagtattaagttctaatgctaaaggygacgcygacatrytagaaacrgaacttcrtgctgtwataaackcaatgtctcaaaacgaaggtaaatctgttgatgcacttaaaaatagtaccrctyctctaaaaaacaatctaaccaaattaaaagagcaactcgayaaaactacacattaa

SEQ ID NO: 3559 - DNA, 636 bp, Staphylococcus aureus
ctgtacaaatcagggtatattgccagaaagactaccawacaacataaaggatggatacaaatgactttacctaaaattggaaagcctgcaacacgygcrytaaattcacaaggtatatacacattagaagmwgtatcacaatatacraagtcatctctaatggagatgcatggcgttggtcctaaagctatatcaatattggaacaagctttatttcagcaccaactacattttaaaacggaagttcaktcatcattaccttttwwrttaacaggagaygtgycatgcaatcatgcscctaaacgtcaacaaatgatagattttatagttgytacagcagcattagatattgaattattacgttcactggttacaacagaatttatttggtctgtscctggmcrctttgacatwtayggacctcaaatwttaattcaagaactatctaayyattayaawsagrttgctwskctcaatatycahtccadcatcacacatggstryttmggttccatgcayggtaktsaaatattaaaaactggtaaagagattcattttgctcatttttttgaatttgaaaatcataaaaaggatgccaagttaagcaaagtgacatcttacattgttgttgsttaa

SEQ ID NO: 3560 - DNA, 588 bp, Staphylococcus aureus
atgataatttttattttawtaacartwtttgcwmtytwttatatagckatgattgctagtttrtttaaaagtgaaggtttttcaataataggyttaatattrgatrtwgttatwwtgrsracrttratwttttaytattttrtaggygckmgytttgttgatmatgatttaagyaactttttaryrttyatgratwytggrtcatwtrtktwtatgtactwtgcaattaagwgyttrtgggtgaarcctaagktagtaaattatwtrattgcaaaagaawtrggygaatcwaaagakgtcattgaagarcaggaattagatttacagacatcaaagataagaggtatctactttttcattattkcartwgyswtgttaatwatyactaaattaagaatgcaacctgagttacaggcagatgctatatcgatgaatccwgtwtttatttttrtwggwgttatwatcattttaatttggctagtactggatatatatcgyaagaaaaaatacggtatattcttattcaagacgatagtgccaytagttgttacgacttggattattatagctacwattrtactttcrtaa

SEQ ID NO: 3561 - DNA, 627 bp, Staphylococcus aureus
ttggcaacgamattataccggcgattaaaaagcatttatcaaaataggaggggcgtcatcatgaatattgtattattgtcaggytccacagtaggttctaaaacgagaattgctatggatgatttaaaaaatgaactagaagtcatcaatgagggacaycaaatagmrttgatggatttacgagawctygaattakaatttagcgttggaaagaattatctagatactacaggagatgtatataaattaacgacgtcgttaatgcaggctgatgtgatttttattggttttccaatttttcaagcttccatccctggtkctttgaaaaatgtgtttgatytacttccagtcaatgcktttcrtgayaaggtaataggacttgtagcgacagcaggttctagtaaacattatttaattcctgaaatgcatttaaaaccaatattgagttacatgaaagcacatacgatgcaaacgtatgtattyattgaagagaaagayttttcaaatcaacaaattgtcaatgatgatgttgtatttcgkttaaaagcgttggcacaatycacaatgcgaactgccaaagtacaacaacaagtgyttgaagaagaaaayaaccaatacgacttttaa

SEQ ID NO: 3562 - DNA, 780 bp, Staphylococcus aureus
ctgaatacagctcctataatatgggtgtatgrttcaaattacgtaataaaacaatctaattataatagattggagcatacarytatgaaaatgaaawmwattgyaaaartaagtttrktrttrggwatwttagcwacaggtgtaaayactryaacggaamaaccrgtkcatgccgaaaakaaacmtrttswartaagysaaaatagyaaaaawttaaaagcktaytatamtcaacctagtrttgaatataaaaatgtgacaggttatatcagtttcaytmaaccargyaytaaatttwtgaatatsatagawggtaatwcwgttaataaymtwgctttarttggcaaagataagsaacaytatcatacgggtgtacatcgyaaycttratatattttaygttaatgaggataagagatttgaaggtgcaaagtactcbattggbggtatcacdarwgcaarcgataaagytgtcgaccwartagcagaagcaagagtyattaaagmagatcayaytggtgaatatgattatgactttttcccatttaaaatagwtaaagaagcratgwcattraaagagrttgattttaaawtaagaaaayaycttattgatmattatggtctttayggtgaaatgagtwcaggramarttachgtcmaaawgaaatactayggmaagtatacawttgaattggataaaaagttacaagaagaccgdatgkccgatrtyrtcaawgtcayagatattgatagrattgaartcaaagttadaaaagcwtaa

SEQ ID NO: 3563 - DNA, 171 bp, Staphylococcus aureus
ttggagagtcgttgtaccaaaatattaataaaaattgaatataatcatgaaaacaatatgcaaaagttaatcatgactaaaatccctttcaatgaagcgaagcatggtaataaattaagtttacaatgtttattgttaagtattgaaggggatttcacttattattatatt

SEQ ID NO: 3564 - DNA, 1024 bp, Staphylococcus aureus
atgttatcaatgataatrattatcattaawttaaagggagaaaawtttgtaatgaagtatttattaaagggaaawattttgcttctattactwatattgytracaattatttcgttgttyataggtgysagtgaactrtcwattaaagatwtmytwcatttrwcwgavtcacagcrraatatwttrttctcaagccgaataccragracgatgagtattttaattgctggaagttcrttrgctttagcwggcytratmatgcaacaaatgatgcaaaataagtttgttagtccractacagctggracgatggartgggcwaaaytaggwatyttaattgcyytattrttctttccaacyggtcatattttattaaaactagtatttgctgttatttgyagyatywgcggwacrtttttatttgttaaaatyattgattttatmaaagtgaaagatgtcatytttgtaccrctwytaggrattatgatgggtggsattgtygcwagtttyacaacsttyatctcattrcgyacrarygcwgttcaaagcattggtaaytggcttaacgggaactttgccattatcacaagtggacgytatgaaatyttrtatttaagtattcctcttttagcattgacatatctttttgcwaatcatttcacrattgtaggwatgggtaaagactttacyaataatttaggtttgagttaygaaaaattaatyaayatygcwytrtttattactgcmacwattacrgcattrgtmgtkgtgacwgttggaacwttaccsttcttaggwytagtwatwccaaatattatttcratttatmgaggygatcatttraaaaatgcwatycctcatacgatgatgttaggtgccatctttgtattrttttctgatatagttggcagaattgtwgtttatccatatgaaatwaatattggtttaacaataggtgtatttggaacaatcattttccttatcttrcttatgaaaggtaggaaaaattatgcgcaacaataat

SEQ ID NO: 3565 - DNA, 741 bp, Staphylococcus aureus
atgcarataaarttaccaaarcctttcttttttgargaaggyaaacgtgccgtgttattaytacatggwtttacaggcaattcgtctgatgtwcgtcaattaggtcgatttttacaaaaraarggwtatacwtcrtatgcaccrcaatatgaaggycaygcrgcaccaccagadgaratactkmaatcwagtcctttygtttggtttaaagatgcsttagatggytatgaytaycttgttgaacaaggttatgatgaaatygttgttgctggyytrtcattaggtggsgattttgcwttaaaattaagcttaaatmgagatgtaaagggtattgtaacgatgtgtgcwccwatgggtggcaaaactgaaggtgccatttatgaaggctttttagartatgcacgyaattttaaaaagtatgarggtaaaratcaagarackattgayaawgaaatgsatcatttyaaaccaactgaaactttaaaagaaytaagtgaagcattagatacgattaaagakcaagttgatgargtrytkgayccwattttagtgattcaagyagaaaacgacaatatgattgatccacaatccgcaaattatatatatgamcatgtagaytctgaygamaaarayatcaartggtayagtsartcwggacatgttattacrattgataaagaraaagaacaagtwttygawgatatttatcaatttttagagtcattagactggtcagaataa

SEQ ID NO: 3566 - DNA, 291 bp, Staphylococcus aureus
ttgttttwygcatgtcattttaaartgaaaattggaggtgtaattttgactagaacttataatattattggtatcctttcttgtcttatatcttttattattatggcgttaccaatgatttggtayryagcttcagcattatggttcttcccaggtgcaatcatgatattgytgytatctttagtcattgttttttgctayattaaaacraaaaatcaattacatttattactamtcgtattaaatattattatattgytttttttcagtttrccgttgttactttcataa

SEQ ID NO: 3567 - DNA, 546 bp, Staphylococcus aureus
atgcgattaatttacttcaagcttttcttgmrggtgawmaaaatgtctaaatggattrttgtgagtgataaycatactgaatcwggcrttttataycaaatttaygarryrcacccagatgcwgatrtrtatttrcatttaggmgattcagaatthgmgtatgatgatacrgaacttagcttatttmrtagrgtaaarggcaattgtgatttttayccagaatttgaaaatgaagcggtcgcaaaatrtaatgacgtgaragcattttayactcatggacatttatatcaagtcaatcgaacaagakatttattagctgarmaagsacktgaattaggttgtktrtttgcwttttatggacatacacatgtkgcaaaatatgagtatattaatggtgttcatgytattaatcctggaagtatatctcaatctagaagttcaatggaagaawcrtatgckgaagttwtkattgatgatcaaacwttacawggyacmrtsaatttyaaaaaycgacawcaygaaacaatyagtcatactactttttaa

SEQ ID NO: 3568 - DNA, 201 bp, Staphylococcus aureus
atgacagagttgaatgaaattatcaacgctattcaatctttgtttgagtctcaatcaggctacaaaatatcgaaaaattcaggggtgccgtatcagaccgtacaagatttgaggaatggtaaaacgaaaatagaagatgctagatttagaacaattataaaactatatagttattatacatcattaaaagagcagtcataa

SEQ ID NO: 3569 - DNA, 198 bp, Staphylococcus aureus
atgacagagttgaataatattataaactctcttcaatctttgtttgagtctgaatcaggctataaaatttcgaaaaattcaggagttccatatcaaacagtacaagatttaagaaatgggaaaaccaaactagaagatgctagatttagaacgattattaaactttatagttactatgtctcattaaaagaacaytaa

SEQ ID NO: 3570 - DNA, 598 bp, Staphylococcus aureus
tctcatcatccaactctttgtctaaaaggaggacaaaacaatgcagacaataagaaaaagtttaggactagtactgattatgtttgttttatgcggatttatcttcccgctgactgtcacagcgcttggacaagtattatttccagaacaagcaaacggcagtttagtgaaacaagatggcaaagtaattggttcaaagctcattggacaacaatggacagaacctaaatatttccatggacgtatcagtgcagtcaattacaatatgaatgcgaatgaagtgaaagaaagtggcggacctgcttcaggcggctcaaactacggcaattcaaatcctgaattgaaaaaaagagttcaagagactattaaacaagaaggaaaaaaaatttcaagtgatgcggtgaccgcttctggctctggtttagacccagatattacggttgacaatgcgaaacaacaagtaaaacgcattgcgaaagaaagaaacatagatgcttcaaaaattaatcaccttattgatgaaaacaaacaagcatcaccaatggcagatgattatgttaatgtcttaaaattgaatatcactttagataaactctaa

SEQ ID NO: 3571 - DNA, 291 bp, Staphylococcus aureus
atgaaagaatcgacattagaaaaatatttagtgaaagagataacaaagttaaatggattatgtttaaaatgggtcgcacctggaacaagaggtgtaccagatagaattattattatgccagaaggaaaaacatattttgtagaaatgaagcaagaaaagggaaagttacatcctttacaaaaatatgtgcatcggcaatttgaaaacagagatcatacagtgtatgtgttatggaataaagaacaagtaaatacttttataagaatggtaggtggaacatttggcgattga

SEQ ID NO: 3572 - DNA, 166 bp, Staphylococcus aureus
ctgagtaaaggggggtggtacctatggcattacttaacacttttgaaaggaaaagcctattgtgatatctattgcaaacgcattacatttaatgttaagtttcggtatgtttatcgtcactttcattggtrtagtagtmgcaataatwaatttaarcaataaaaaa

SEQ ID NO: 3573 - DNA, 138 bp, Staphylococcus aureus
ttggaaattttaattattaatttaaaattacagtccgatggttatgatgcatttacatataatatgattgcattaatytttataagtagttggaagtgtattagtgtggggcgtttcatttttgttcgcatttatgaa

SEQ ID NO: 3574 - DNA, 168 bp, Staphylococcus aureus
atgaaaagaattgtamttttkgrgaawgtgattgttgatwrycctatwtggttgaatcmtgttgattatttggttaaaagtgtattattaaaaagtataaaattaagattccaagaagtcaggaaatttgaaattttagttaaaatcatgaatcgtatacatatttaa

SEQ ID NO: 3575 - DNA, 177 bp, Staphylococcus aureus
ttgaaacatctaacaaaaatatttgtagyaytwgcaattattttatttattrttggttattatttacaagcaacwaaycatgaragccaaggtataaaaytattattrgcagcrattatgtttatgatttgtgcttttataagtagaagtaatgatcgacgtaaaaataryaaatag

SEQ ID NO: 3576 - DNA, 282 bp, Staphylococcus aureus
atggctactgaaaaagaacttttcatttttgttacgtcactaagtgggtgtagttataaagagatgagccgagttttgatattttcattagaatcaatatgcctattaacacaatcagcaatagttgacgagacggaaataaaagaagtcgtagttaagaaatgcatttcacaacataccattgtwrccatttttattgttttggatgataaactctttttggaatttttagtttttataatttgcaactacactacttcttttactaatattaatgtctaa

SEQ ID NO: 3577 - DNA, 186 bp, Staphylococcus aureus
ttgagcaagttggatagatggtggctatctgagtataaggaggtggtgcctatggtggcattactgaaatctttagaaaggagacgcctaatgattacaattagtaccatgttgcagtttggtttattccttattgcattgataggtctagtaatcaagcttattgaattaagcaataaaaaataa

SEQ ID NO: 3578 - DNA, 522 bp, Staphylococcus aureus
atgataccaggtgtgaatgcgccacctatgcatccttggtgtagaagtaccacagtgccacatgtyggcaattggcgrgacaagttctttaaagagcgtgaaggtaartatcaagtagaagtaaaagaagcawaattacaggaaaaagctaaaaaccagatgaaagaaatgattgaaagtgrtaaaataaaaatakaaataaatcctgaaaaacagaatagacattctttaggtcataaattatatttaaaaaataaaatttatgcattgcagaatgatgagaggtttcctagctatacaatactctctatagaagaattaaatgatttattaaagaaatactcaatgactggcaaaatattagtggataaatttggatttaatcgtaaggaaataattaatttcgaaaaaactataggaaaagcttatgcaggtggaaaatatattaatactgcatatggtaaaatacattattctaaaactggttctcatatagtaccatttgtaagtaaggagaagtaa

SEQ ID NO: 3579 - DNA, 585 bp, Staphylococcus aureus
atgcttttttcattattcgttgaaaaagaagagtcacaaaagttaacatatttaaaagaacttggtgaagatggcgaatataaatatgttgccaaaatagatagtaaaacatctaaattatgtcattcactcaacggaaaaatatttaaagttaaagatatgataccaggtgtgaatgcgccacctatrcatccttggtgtagaagtaccacagtgccasatgtcggyaattggcgagacaagttctttaaagagcgtgaaggtaaatatcrrgtagaaggttsttttattgaatcrggtgcacttaataataaaagtgatgaatacggtatcaaaaggaacagrcatgctcaaatttattataattcagttagaaatcragataaacagatagagatttctaaaattgctaaaaatactaatataaataaaaatttaattcaaagagtttatgaacatatatttgaaaataagtatttattagaaagtggatttaaacaatttgatcctgacttttatatggctcaaagttggcaacgtttaagagaagggaaaaatattaaaaaaatggatataataatgtag

SEQ ID NO: 3580 - DNA, 462 bp, Staphylococcus aureus
gtgccacatgttggcagttggcgagacaagttctttaaagagcgtgaaggtaaatatcaggtagaagtaaaagaagctaaattacaagaaaaagctaaaaaccagatgaaagaaatgattgaaagttgtaaaatgaaaatagaaataaattgtgaaaaacaaaatggacatatgttaggtcatcayctatataatgaaaataaaaaaagagccattttaaataawaagaaattgcctagctatacaatactttctatagatytattgartgaattgttaagagaaaaaatgtcaacaggcaatctaatattaagtgatgagckatttgatwtgaaagakattattaattttaatcaaattattggaaaartacatatcgrwaatgtgtatattgaaaccakaaargraaaagtgcattattcgaagacaggtgctcatatagtaccttatattgataagtag

SEQ ID NO: 3581 - DNA, 201 bp, Staphylococcus aureus
atgataccaggtgtaaatgcgtcacctatgcatccttggcgtagaagtaccacagtgccacatctcggcaattggcgagacaagttctttaaagagcgtgaaggtaaatatcgggtagagaacaatactgaaatgaaattaggtgaagttcattattctaaaactggttttcatgtagttccgtatattaaaaaggagtga

SEQ ID NO: 3582 - DNA, 453 bp, Staphylococcus aureus
ttgaatagaattgacaccacaaatcgcstatattatcatttagtttgtatgagtggaacggttttcatgattgatatcagtcacacggaggcatataaaatgagtcgtttctacaacatttttaaacagtwcattcaatattatttktatytawtaataatattgggaggattatacctttwtacacaccatgcatttatcttaggattaatcattggtgttactggttctgcaatcaayacatgtatwtttgarwgctayttagcyaaagctaaaagaccagacactatgcatatttcaactggaaatatgtggcgatacttagttgcaattattgcctgtatgatttggtacyttaataaakcgcatgtaagtatmatcggtataattattggtttaatgatttcatatgttgtagttatcatacgtcctttactaaaggtgagcaaataa

SEQ ID NO: 3583 - DNA, 168 bp, Staphylococcus aureus
gtgatrckgaaaatttgggtgatcgatygtttatatgcatcaacattctttgtggattgtttgacagtagacagtcawttgtatacgttaacgaattttgaaaawttgaatcattatttaatcatawtattmattgcgcacgcrcaacayaaaaaggagacatgtcaa

SEQ ID NO: 3584 - DNA, 765 bp, Staphylococcus aureus
atgactgttgaagaaagatccaatacagccaaagttgacattttaggrgtcgattttgataatacaacaatgttgcaaatggttgaaaatattaaaaccttttttgcaaatcaatcaacgaataatctttttatagtaacagccaaccctgaaatagtgaattacgcgacgacacatcaagcgtatttagagttaataaatcaagcgagctatattgttgctgatgggacaggagtagtcaaagcttcgcatcgtttaaagcaacctctagcgcatcgtatacctggtattgagttgatggatgaatgtttgaaaattgctcatgtaaatcatcaaaaagtatttttgctaggggcaactaatgaagttgkagaagcggcacaatatgcattgcaacaaagatatccaaacatatcgtttgcacatcatcayggttatattgatttagaagatgagacagtagtraaacgaattraactgtttaaacctgattacatatttgtaggtatgggattccctaaacaagaagaatggattatgacacaygaaaaycaatttgaatctamagtgatgatgggcgtaggtggttctcttgaagtatttgctggggctaaaaagagagcgccttatatmtttagaaaattaaacattgaatggatatatagagcattaatagattggaaacgtattggtagattraagagtattccwatatttatgtataaaatagccaaagcaaaaagaaaaataaaaaargcraaatar

SEQ ID NO: 3585 - DNA, 702 bp, Staphylococcus aureus
mtggttcactttagcgaactacgccawcggttagtaaaaatwytattgtcgttcgtcrtyrcrgtcatcgtcgtatatgtttcatcwttttggtggatgacaccattcataacgtatattacccgtgcacatgtgtccttacatgcattttcattcacagaaatgatmcaaatatacgtgatgattatatttttcatcgcrttttgtytcatttcaccrgtyatgttttatcaattrtgggcrttyrttgcrcctggwttrcataataatgarcgycaatttatttataaatatagytttttyagcgtrytwttattywktkytggygtcgcttttgcattttatgttggctttccaatratcattcaattcgcgttaaaattatcattaactttaaacatttcgcctgtyattggctttaaagcrtatttrrttgaactyatmcgttggytwttyacwtttggymttytattycaattrccaatattattyatrggwcttgcaaaattcgrtcttatagataycayatcwttgaarcattatcgwaaatatatttatttygcttgctttgtrytrgcragtatcattgcaccaccmgaywtaacattaaatatattactyacattgccactcatattgctctttgagttcagtaygttcatygttaarttyacmwrycgagrcwwaycgccaacacattaa

SEQ ID NO: 3586 - DNA, 996 bp, Staphylococcus aureus
atgtatttacagataaggatttacaactrtataaggaggcatttaaccgtgatgcagagtagtaartggaatgcaatgtctctkttaatggatgamaagacaaagcaggctgaagtattgcgtactgcgattgatgaagcagatgcgatagtgattggaattggtgcaggcatgtctgcatctgacggrtttacatatgtaggagagcgttttacggaaaatttcccagattttattgaaaaatatcgcttctttgatatgttgcaagcgagtttacatccttatggcagttggcaagagtattgggcatttgagagtcgttttattacattaaaytatttagatcaacctgtaggtcagtcttayctcgcwttaaaatccttrgtggaagrtaaacagtaccayatyataactacgaatgcagayaatgctttcgatgywgctgawtatgatatgackcatgtatttcatatacaaggsgagtatatactrcaacagtgtagtcagcattgtcatgctcaaacgtatcgcaatgatgatttaattcgtaaaatggttgttgcgcaacaagatatgcttataccttgggagatgattccaagatgtccmaaatgtgatgcyccaatggaagtgaataaacgtaaagcggaagttggsatggttgaagatgctgaatttcatgcgcaactacawcgttataatgcttttctagagcaacatmaagatgataaagtgttgtatttggaaattggaattggttatactacrccacaatttgtgaarcatccttttcagcgtatgacacgtaaaaatgaaaatgcmmtttatatgacgatgaataaaaaggcatatcgcattccgaattcaattcaagaacgtaccatacatttaactgaggatatctcaacattgattacarcagcactccggaacgayagyacaacgmaaaataacaacattggagagacaraagatgtacttaatagaaccgattag

SEQ ID NO: 3587 - DNA, 744 bp, Staphylococcus aureus
atgactctgaataaactgaaagatgaattacaaattgtttcgcaycgtggattrccgagtgattttcctgaaaatacaatggtcggttatcgagaggtamtggggctcaatgttgctatgttagaaatagatgttcatttgaccaaagaccaacattttgtygtgatacatgatgaaacaattgatagaacatcggatggtaaggggcgtattkctgattacacattatcgcaattaaaatcatttgatttkggtagttataaagatgttgcttttaagggagaacgaatacccacgttagatgaagtactttcattatgcttaaagtwtgataaaaagctattgattgaattgaaaagtccgaatttatatccagraatagaatgtaaattgctggcatttttggaagaaaagaaagtcgatgcgacacaagtagttatacaatcttttgatatcgaatgcatcgaaaagttaaacacattrggcagtatatatgaattaggtgtgctttstagtaaacgtaaktattggtataaaaagccaaacttttcaagaattgctcaaattgctagttatgttaatcctaattatgcattagtgrccagaaaatttgttgatraagcacatcatcatcaattacaggttatgccatacacagttaataaattgaaaactggagaaaaattaagacaaatrggtgtagatggattaattacagatratccgaaattatttattaagtra

SEQ ID NO: 3588 - DNA, 696 bp, Staphylococcus aureus
atgaaattaaaaacgttagctaaagcaacattagcattargtttattaactactggtgtcattacatyagaargtcaagcagtwmaagcggcagaaaarcaagagagagtacaacatttayatgatattaragayttayatcgatactactcakcasmaagtttygaatatagtaatrttagyggtaaggttgaaaactacaatggttctaacgttgtacgctttaaccmaaaagatcaaaaycaycaaytattcttaytaggaaaagataaagaacaatataaagaaggtctwcaaggymaaratgtctttgtagtacaagaattaattgatccaaacggcagactatctactgttggtggtgtaacgaagaaaaayaacaaaacttctgaaactaawacacmtttattwgttaataaagttratggtgraratttagatgcatcaattgactcatttttaatccaaaaagaagaaatctcattaaaagarcttgatttcaaaattagacaacaattagttrawaawtacggwttatatmaaggtacrtctaaatacggtaaratyaytatcaatttgaaagacgaraawaragwagwaattgatttargtgataaattrsaattcgagcgcatgggcgatgtgttgaatagtaaagayattaraggtatatcagtcactattaaccaaatttaa

SEQ ID NO: 3589 - DNA, 624 bp, Staphylococcus aureus
atgaacaaagtaatattagtagatgaccattatattgtgcgacaaggattgcgatttttattatccacgattgaaaacatagaagttttacaagactttgcagatggagaaacatttttagaatatttaaaagagcatgagcaycctgatattgtgctattagatttagtgatgcctggcatgaatggtattgaaattacggaatatattaaggcacattatccggawattaaagttttggtattaacaagttatgttgatgatgaacatgtaatttcagcaatcaataaaggtgctgatggttatgaaatgaaagacgttgagcctcagcaattaattgaaactattagacgagttatgaacggtgaaaaaatgatacatcctaaggcacaagatgtattcgaaacagttagccaaaaaccacactacacgaataagttgtcaaagagagaaattgaagtgttacgtgaaatggttaaaggtaaaacaaataaagagatwgcagaaactttatttgtatctgaaaaaacaattaaaacacatgtcagtcatatatttagtaaattacaagttagcgatcgtacacaagcagcaatttatgcaatggaaaataagttgatttar

SEQ ID NO: 3590 - DNA, 909 bp, Staphylococcus aureus
atggaacaaataatgattaatcactatgttcatttttctaggcttgtacaaggtttttggcgtgcaaatgaatggaagatgactgcgaaagagttaaattattttataaatgaattagttgaacgtggrattacaacgatggatcatgctgatatttatggrgattatcaatgtgaatcactgtttggtaatgctttggatttatcacccgaattaagaaataaaattcaaattgttacgaaatgtggtatcattttgccttctaagcaatttgattttacaaatggacatcgttatgatttgagtagtaagcacatcgtgaaatctgttgaacagtcattaatcaatttgaatgtagrttatttagatagtctactcattcatcgtycttcaycattgatggatccagaacaagttgctgatgcattaactaaacttgttaaacaaggtaagttgaagtcattcggggtgtcgaattttaatcattcacaataccaattgttaaatcaatatattatgaaagaaagactacatattagcatcaatcaattagaattatcgccatatcacgttgatagtttacaagatggaacaatggattcaatgtatcaaaaccatgttcaaatyatggcttggagtccttttgcaggcggtaraattttcgmcaaggaagatattaaagcgcaacgtattatgaaagttrttcaatcaatagctgacaaatatggtgtgagtgacacagctgtgatgatagcrtggttagtaaaaataccgcatmgtatcatgccgatacttggamcaagtcagttaaagcgtattgatcaagcaatcgaagggctrcaacttaatttagatgatcagtcgtggtttgacatttacaccgctattatcggacaagatattccgtaa

SEQ ID NO: 3591 - DNA, 1287 bp, Staphylococcus aureus
atgggctatttgtcgtgcgatgaatttaagtacacttttcatattttgaaaaggcaagttaattattttacctccttcaatagctttctaaaacaaagcaaatttttattaaaatatatagtgcactaygttataatrtttdtatattattgtaaggagtgttycrtcatgaataaacaacaaagtaaagtacgctattcaattagaaaagttagtattggaattttgtcaatttcaataggtatgtttttggcattgggtatgtcgaacaaagcatatgcagatgaaattgataaatctaaagattttacaagagggtatgagcaaaatgtattcgcgaaatcagagttaaatgctaataaaaatacgacaaaagacaaaataaaaaatgaagstgytgttaaaacatcggacacaagtttaaagttagacaacaaatcagcaatttcaaayggaaatgaaattaatcaagatatraagatttcaaatactccgaaaaactcaarccaaggtaacaatctagttrttaataacaatgaacytactaaagaaattaaaattgcaaacttggaagctcaaaattctaatcagaagaaarygaataaagktactaataattactttggttactacagttttagagaagctccaaaaacacaaatctatactgtwaaaaaaggwgacacacttagtgctatagcattaaaatacaaaactacagtttcaaatattcmaaatacaaataatatagcaaatcctaatttaatatttattggtcaaaaattaaaagtgccaatgacaccattagtagaaccaaaaccaaaaacagtgycttcaaataataaaagtaatagtaatarcagtacattaaattatttgaaaacattagagaatagaggatgggatttcgacggtagttatggatggcaatgtttcgatttagtyaatgtrtattggaatcatctttatggtcatggattaaaaggatatggagctaaagatataccatatgcaaataattttaatagtgaagctaaaatttatcacaacacaccaactttcaaagctgaacctggggacttagtggtttttagtggaagatttggtggaggatatggtcatacagctattgtcttaaatggtgattatgatggaaaattaatgaagttccaaagtttagatcaaaactggaataatggtggatggcgtaaagcagaggttgcacataaagttgttcataattatgaaaatgatatgatttttattagaccatttaaaaaagcataa

SEQ ID NO: 3592 - DNA, 282 bp, Staphylococcus aureus
atggaaaaaccttatatgttaacatatgatttaaactcacccggacaaaaatatgaggaattgagaaatgttataaaaaaggaaatttctaatggtcattgcaattattggaaatcttcatttttattccgttcttctttatcaacttcagaaatgatagaaaagttgaaaccttatctcgattctggagataagctgtttgttacagaaatagtcaataacaaacaagggtggttaacaaaagaacaatgggattttatcaaccataatatttttatttag

SEQ ID NO: 3593 - DNA, 702 bp, Staphylococcus aureus
gtggctgtcatgaataaagctgaaaggcaaaatttaataattactgcaattcaacaaaataaaaaaatgaccgctttagaattagctaaatattgcaacgtatccaaacgcacaattttaagagatattgatgatttagaaaatcaaggtgttaaaatttatgcgcattatgggaaaaatggtggttaccaaatacaacaagcacaatctaaaattgcattaaacttatctgaaacacaattatcrgccttatttttagtgcttaatgaaagtcagtcgtactcgacattaccatataaaagcgaaatcaacgcaattataaaacaatgtttaagtcttccacaaacacgcttaagaaarttgcttaarcgcatggacttttatattaaatttgatgacacacaacatatgacactcccaatgytgttttccgacattttaatttattgtacagaacgaaatgtgatgttagtagatcatagggttgatgataatattaaagcygaaaacgttatatttattggccttttgtgtaaacatggacattggcatgcagtcatttatgacattgctcaagacaaaactgccgaactygaaattgaaaatattatagatatttcgtattcattcggtaagacgattcaaaccagagacatatccattgataactatcatcaatttttaaaccccatcgattcctaa

SEQ ID NO: 3594 - DNA, 816 bp, Staphylococcus aureus
gtgaataaggaaggtctacaaatgaacgtttcggtaaacattaaaaatgtaacaaaagaatatcgtatttatcgtacaaataaagaacgtatgaaagatgcgctcattcccaaacataaaaacaaaacatttttcgctttagatgacattagtttaaaagcatatgaaggygacgtcatagggcttgttggcatcaatggttccggcaaatcaacgttgagcaatatcattggsggttcwttgtcgcctactgttggmaaagtggatcgtaatggtgaagtcagcgttatcgcaattagtgctggcttgagtggacaacttacagggattgaaaatatcgaatttaaaatgttatgtatgggctttaagcgwaaagaaattaaagcgatgacacctaagattattgaatttagtgaacttggtgagtttatytatcaaccagttaaaaagtattcaagtggtatgcgtgcaaaacttggtttttcaattaatatcacagttaatccagatatcttagtcattgacgaagctttatctgtaggtgaccaaacttttgcacaaaaatgtttagataawatttacgagtttaaagagcaaaacaaaaccatctttttcgttagtcataacttaggmcaagtgagacaattttgtactaagattgcttggattgaaggcggaaagttaaaagattacggtgaacttgatgatgtattacctaaatatgaagctttcctwaacgattttaaaaagaaatccaaagccgaacaaaaagaatttagaaacaaactcgatgagkcccgcttcgttattaaataa

SEQ ID NO: 3595 - DNA, 288 bp, Staphylococcus aureus
atgcccgaaatcattggaattgttaaagtagattttacagatttagaagataacagacatgtctatatgaaagggcatgtctaccctcgyaaaggttatratcctacagatgaacgtatcaaagctttagctagtgttgaaaataaacgcaacraacaaatgatttacattgtaaatgacaaattaaccaaaaaagaacttgtcgaaatagcaagtgttgctggcttacaagttgatgaaaaacaaacaaaagctgaaattatcaatgcttttgagtcactagagtag

SEQ ID NO: 3596 - DNA, 1656 bp, Staphylococcus aureus
atggaaataggacaaatatataaaaataaggaggaaacaatggaatttgaacataaattagagaaattaatatctgaagtaaataataagactgaaattaataattatgttttttttagtttaggtaagtcaagtgttaaagcacaggttaagttattaaaaaaaactaattatctcaaacaagatatttcaaaattggcacttaaatttaaaaagaaatctggggaatttcctgagtggattaaattagatattgtaacctcgactgaaaaaatattatttaaagaattaaaaaaaacactgatcaatacaagaagaaattatgtagattttggtatagcatttgatagtcaatggaattttgcagtattacctgaagaaattaacgcgaatgcttttgttcgaccagataatactactaaagagttatttctttcggaaaaaaacatcaataattatttacgcaaatatactacaaataaaaaggcattttctagtgagttctataatgaaaaagaagttattaaattctatacacaaggtttctttataggtgatgaagaagtacatgaactatatagcgaaggctataaaaaaggtttaagaaaagtaaatgatttaaataatgaaattgatcaattaattgaaagtagtactaatttcttacaaaatatgttgttagataatggtaaatatatttatggatattttcctcattttgatartgaaattggattctacaatgtttwaagacactcttcttctacttatgccttaattgagggtctgtcctatttaggtaaaagcttacaacctgttgaaaaagcaattgattatatcattttaaatcaactgtttgagattggtgataaagcctatatctttgatgatacagaggaagcaaatgaaatcaaattaggacaaaatgcttcatttatattcgcagtttgtgaatatttaaagcatgaagataatcctaaatttcttgagtcagctcagaaagtggctaaaggtattctttcaatgatagatgaagatacatatgagacaactcacttattgaattatcctgatttaagcgtaaaagagaagtttagaattatttattacgatggtgaagcagcgcttgctttattgagattgtatcaaaaggatgaaaatgaactatggctaaaaactgtagaaaatttgatggaccgtttcattgagaagaaatattggcaatatcatgatcattggttaggatattgtacgaatgaattagttcaaattaatccacaagacaaatattttgaatttggaatcaaaaatgtgaataattacttagattatattaaaaatcgtgaaacaacatttccaacattcttagaaatgttaatggccacatatagattagttcaaaaagcgaaagatacgggtcgcgaggaattggtaaacaatttaatagatgaacaatatttgatagatgtaattaatattagagcagattatcaaagagttggattcttttatcctgaaattgctatgtattttaaaaacccatcaagaatactaggaagtttctttattaaacaccacggttatcgtgttcgaattgatgatatcgaacattatttatctggatatgtacaatatcagcttgcatttaataggtaa

SEQ ID NO: 3597 - DNA, 266 bp, Staphylococcus aureus
atgaagttgaacgaagtattcgcaactaatttaagrgtaatcatggctagagataacgtaagtgtycaagatttgcacaatgaaactggcgtatcaagatcaactattagtggatataaaaacggaaaagctgagatggttaacttaaatgtattagataaattggcagatgctctaggtgttaatgtaagtgaactatttactagaaatcacaacacgcacaaattagaggattggattaaaaaagtaaatgtatagaggtggaa

SEQ ID NO: 3598 - DNA, 816 bp, Staphylococcus aureus
atgaaggagataaaaatgwataagagwykatttatttcaygygtaattttgatattcgcactkatactagttmtttytacacccaacgtwttagcagagagycaaccagaccctaygccagatgakttgcacaaakcragtrarttyactggtwygatggrwaatatgaaakwtttatatgatgatcrttatgtatcagcaactaaagttawgtctgtagataaatttttggcacatgatttaatttataacattartsataaaaractraawaaytatgacaaagtgaaaacagagttattaaatgaagrtttagcaaagaadtacaaagatgaagtagttgatgtrtatggatcaaattactatgtaaactgctrtttttcatccaaagataatgtaggtaargttacargtggyaaaacttgtatgtatggaggaataacaaaacatgaaggaaaccactttgataatgggaamttacaaaatgtacttrtaagagtttatgaaaataaaagaaacacaatttcytttgaagtrcaaactgataagaaaagtgtaacagctcaagaactagacataaaagctaggarttttttaattaataaaaaaaatttgtatgagtttaacagttcaccatatgaaacaggdtatataaaatttattgaaartaacggcaatactttttggtatgatatgatgcctgcaccaggmgataagtttgaccaatctaaatayttaatgatrtacaamgacaataaaayggttgattctaaaagwgtgaagatagaagtccaccttacaacaaagaatggataa

SEQ ID NO: 3599 - DNA, 225 bp, Staphylococcus aureus
atgacaccagaacaaaaagaaaagctaaacaatatagtattaacactttatgcagttaaagaaaacaaaagtcaaacatacacacacaaagatactcttactgtgacatatgcaggcgagattgagcacacttacgaagtcgacagagagaaacaccttgaatcaatgattgagtgggcaattgaccaaatcgaacagcactttgatttagacgaagaagaataa

SEQ ID NO: 3600 - DNA, 297 bp, Staphylococcus aureus
ttggggtggttcaaaaaacacgaacatgaatggcgcatcagaaggttagaagagaatgataaaacaatgctcagcacactcaacgaaattaaattaggtcaaaaaacccaagagcaagttaacattaaattagataaaaccttagatgctattcaaaaagaaagagaaatagatgaaaagaataagaaagaaaatgataagaacatacgtgatatgaaaatgtgggtgcttggtttagttgggacaatatttgggtcgctaattatagcattattgcgtatgcttatgggcatataa

SEQ ID NO: 3601 - DNA, 222 bp, Staphylococcus aureus
atgaagcagactgtaacttatctaatcaagcataaagatgaaaatctatttattacaaaccgaccaactgaagtgaacgacacagtgaagtattcaactgatatgcgagacgcaagagaattcgacggactagacaaaaccgttattgatatgtctaagcacaaagctattaagaaaacagtgacagaaacaattgagtacgagaaggtagaacatgactga

SEQ ID NO: 3602 - DNA, 659 bp, Staphylococcus aureus
attgcgataattataatttttggcatattagcacctgttgtttttttgttacaacaaatatcaagaagtagaattagaaaaaataaattacaggctaagcaaaaagaaaataatggaagtaactctcaaattattagtgaaacatctaataatatgaatccagagaatgaaagttcaagtaataatcaagaaaaaacacaaactacaacccacgaagctacaatgaatcaacaaaaggtaactagagataacatatttgattatgctattgctgctataaataaagtaggaaatgcagatttattaaaatttcaacaacctgaacacaatggttcagaatggacaattaatgcaaataataaatcaggtactggggctaacaccatcgtagttaaagatgatgaaacagttcaaatatggatggacctaaaacatctatgraycatgaaactamacaatcagaytggcgaacggttsctarttgyttagcatckcaaaattatatatckmtcgtaaaaggaytagtacatyatttyacagcgattgaagatgaagaaatacttgataaaatctatgaygattttatgratgatgactctataacaacggtmcttaayaatgatttacagacaatyattaaccattatctatyaaaatra

SEQ ID NO: 3603 - DNA, 208 bp, Staphylococcus aureus
atgctttttagaagtaataaaattttgcgtgtctwtarssttctccttactggttcattataaccttctccttactggttataatgaactgacattaagcgttcattataaccaattaattttgatttggttgataackaactttattaataacaaatatagaaaaagtacccatacttttatctcctttccatttttttcattatga

SEQ ID NO: 3604 - DNA, 1005 bp, Staphylococcus aureus
atgcaatataatactactarawgtatarmcgaaaatcaagataayraaacrytwaaagatatgacgaaaagtgggaaacaacgcccatggagagaaaagaaratagataatgtaagytatgcagatatactkgaaattttaaaaataaaaaaggcttwtaaygtaaaacaatgtggtaacgtcttagarttcaagccracygatgaaggttatttgaarttacataagacrtggttttgtaartcraarytmtgyccagtttgtaattggaggcgtgctatgaaaaatagttatcaagctcaaaaagtgattgaagaagtwrttaargaaaarccaamwgcdcgttggttrtttytwacwytwtcracbaaaaatgcratagayggvgaymmtttagaacaaagtttraarcathtrwckaargcwtttratarrttrarwakrtatamaaargtkaarmaraatytkgtwggdtttwtrcgytcaacdgaagtwacmgttaataaaaatgayggtagttataaycamsatatgcaygttttrttatgtgttgaaaatrswtattttarraawaargmdaaytatatwackcaagamgaatgggtyratttatssvaaaaassattacaagtwrattatcgaccygtwgcaaatattaaakcratyaaaccwaatcaaaaaggcgataaagatattsaakcrgcwatcaaagaracmtcwaaatattcggttaagtcatctgattttttaactgayratgaygaaaraaatcaagaaatygtrarygatttrgaaaaaggtttrtaycgaaaacgtatgttragttatggtggwttgcttaaacaaaarcataarattttaaayttagaygatgcygaagatggyaatttrattaatacaagtgaygaagataaaayracagaygaagaadmaaaagcacattcaattacbgcaatttggaatttysaaaarcaaaattattayttaamasattwgaaacgttag

SEQ ID NO: 3605 - DNA, 981 bp, Staphylococcus aureus
atgcaaaatcaatattttacagtgcaagaaaattacaaagaaagattttatcaaatccctaaagtattctttaccagtgaaaattataaaaatctaactaatgatatgaaaatagcctatgctatcttacgtgatcgcttaaatttatctattaaaaatarctgggttgatgaagatggtaacatttactttgtttattcaaatgaaaagctaatggaaatcttaaattgtaaaaaagaaaagttaacaaaaataaaaaaagggttagaaaacgatggtctactcattcaaaaacgacgtggtttaaataaaccaaatattctatatttaatgaaacctattgtcacagaacgtgatatttacaaaatagaaaaagaagaaaacgatgttgaacyttacggcgagaaggawgttcgaawwtcgracgwsmagaagttcgaaaatcgaacgtccagaagttcgaaaatcgaacryymagaagttcgaaaatcgaacactaatgatactgactttaatgacattgactttaatgatactgagaataatgatatgaatgacttgaatgatataaagtacaaaaatgaaattagtaatcattcaaatcaatttacacataattttgatgataaagaaatgctattgcaagaattcccagaacaactaactaattatttattaaaatatgattatagagatttagaaatcataaaggctgttattcttaaagcaaaaaaatcatttaattcaaggcatgaagatatgcattacatgttagaggacattgaggatgaaatattaacttctttaaaaagacttaaaaaagctatacatgataggggagttaaaggccaaaaggaaacaatmaagtcaatgcaagsttatttaatgcaaacaattytaactgaayttgaagaaacacatgcmctttatatgcgccgtaaaaacatgaaacaatataatatctttaatcaatmattcaaa

SEQ ID NO: 3606 - DNA, 936 bp, Staphylococcus aureus
atgcccaattttgaaaaatataatttatcacaagtaaaaactgaaagattttatcaactgcctaaatatttatttgaagatgcatattttaagaaaatgtctgcagaagccaaaattatgtatgcgttattaaaagatcgttttgaattatccctccaaaatgaatgggtagataaaaataataatatttactttattttcagtaataaacatttgtgtgaatacttaggttatgcagaacaaaaaattataaaattaaaaaaagagttaataaaatttaatttactaactcaagaacgtgttggccttaataaaccaaatagattatacctattaaaacctaattatgacattgaagccagtcatatcaaggaacttccaaattcacagttccagaacaatgaatttggaagttctagaactgtgaatttaagtggtcaagaacttccaaattcacagtctaatgatactgattataatgacactgattatattaagactaattataatgatatgtatgatttgaatgataggaaattaacatattctagtaatcatacaaatcattcaaatcactactattcaaaattcaatgatgaagctttaaaatttcaattacttgaagaactaccacaaagtattcaaagttatttaagtaacttttctgtatctgaaattaaacttattaaatctgtgttattaaaagccaaaacatccttcaacaattctattgatgcatattatttattagaagatatggaatttgaaattgttaatgttcttaagcgttttaaagctacattaattcaaaaaaatgaaaccgttgaagcaatgcaagggtacttaatgaaatctcttaaatctgaatttgcagaagtacatacgcttaataaacgacgtgatcatttaccaatcacttctttatttaatcaataa

SEQ ID NO: 3607 - DNA, 657 bp, Staphylococcus aureus
gtggtaattatgaataatataaatctcactcaacgacagttagatttaataaagaaaaataaagctatcttatctaaattgcctgtcgaagcttacgctaaagccacaaatactatgaataattcgtatgttatgaacgctctggaaattcaatcgacggttaataatgttatgaatagcattagaattaaccaatctaaattatctgattgggcttcctatatgcatcgagtaactaagaatcatccaatgttcaaaactaatttattttctgaaaaaattcttgatgaattcataagttctaacagctttccggaggatgaagtccgcaaagttagcactcatttgagaaattcttttgtcgatactgtcgatgtccctgttcttggtaaaaccgtcgattctgcccatccaatagatgacgtaaatactaagaaatacaatagtgtattcaatgaatcgctcaatcatatttttatttctccttctgcaaaatttataaaaaaggtttctgtcggttctgctatcggagtaacatctccggttatggttagaacgatacttgaccaatatgtgaactactttatgttttttaatgtaatagcaactcttttaacactttacgtaattgctaattacttagatgacgagaactga

SEQ ID NO: 3608 - DNA, 1242 bp, Staphylococcus aureus
atgtcttattccattgttagagtttcaaaagttaaatctggaacaaatacaacgggcatacaaaaacatgttcaaagagaaaataataattatgaaaatgaagatatagaccatagtaaaacttacttaaattatgatttggtaaatgctaataaacagaattttaataacttgattgatgaaaaaatcgaacagaattatacaggcaaaagaaaaattagaacagacgcgattaaacacattgatggtttaattacatcagacaatgatttctttgataatcaaacgccagaagatacaaagcagttttttgaatatgctaaagagtttttagaacaagaatacggtaaagataatttattatatgcaacagttcacatggacgaaaaaacaccacatatgcattatggcgttgttccaataactgatgatggtcgtttaagtgctaaagaagttgtaggtaataaaaaagctttaacagcgtttcaagatagatttaatgagcatgttaaacaacgaggatatgrtttagaacgtgggcaatcaagacaagtaacaaatgctaaacatgagcaaataagtcagtataaacaaaaaacagaatatcataagcaagaatatgaacgtgagagccaaaaaacagaccatataaagcaaaagaacgataaattaatgcaagagtaccaaaaatcgttaaatacgcttaaaaagcctataaatgttccgtatgagcaagaaactgaaaaagtaggtggtttatttagcaaagaratacaagaarctggaaatgttgtaataagccaaaaagatttcaatgaatttcagaaacagataaaagctgctcaagatatttcggaagattacgagtatataaagtctggtagagccttagatgataaagataaggaaatacgagagaaagatgatttattaaataaagcagttgagcgtattgaaaacgcagacgataattttaaccaactttacgaaaatgcaaagccacttaaagagaatatagaaatagcgttaaagcttttaaaaatcttactaaaagagttagaacgagttttaggaagaaatacctttgcggaaagagttaataagttaacagaagatgaaccaaaactaaatggtttagcaggaaacttagataaaaaaatgaatccagaattatattcagaacaggaacagcaacaagaacaacaaaagaatcaaaaacgagatagaggtatgcacttatag

SEQ ID NO: 3609 - DNA, 656 bp, Staphylococcus aureus
atgtcttattcaattattcgagttgttaaagtgaaatcaaaaacaaatacaagaggtattcaaagacatattcaaagagaaaataaaaattatgaaaatatagatattgatttaagtaagtcatatttaaactatgatttagtcaatgatactaagtttgattttaataaaaaaattgatgagaaaatcgaaaaaaattataaagggaaacgcaaaattagaacagatgccattaaacatattgatggattaattacatcagataatgtgtttttaatcaattatctgaagaagagacaaaatagttttttaagcatgctaaagcgttcttggaagaagaatacggtaaagaaaatcttttatatgcgacagtacatatggatgagataacaccacatatgcattatggcgtarttcctattactaaagatggacgtttaagtgcgaaagaagttgtaggtaataaaaaagcattaaccgaattccaagatagattcaatacgtatattaataagcaaggctatgatttaaaacgaggaatttctagacaacttacaaaagaaaaacatgatcaagttagcsgytataaacaaaaaacagaatatcataaacaaatgyatatgcgckagaagcaaatagaggatcatttaaagtga

SEQ ID NO: 3610 - DNA, 423 bp, Staphylococcus aureus
atatatatgagggattrcatggaratagaaattaaatttaaygaarykttyrakgcrcckatgggstcgcctcgwccrcgytttmgyamwamaggyagatwygywcamacwtayatgccwacrwmhtayacararcataaarmrtatwtacaarrkcaaatgccwargytaaatctagarmrygcaytaaaaatygaattagmsttttacttthcwhbrcytdratcatggtcgaagaaaaagaaarsysaarygrttggrcartwwaaagtractaarccrgatatcgayaayttratkaaracrgtwytagaygcttgtaayrryyatktrtggaaagacgataaccaaattacagaaataactagctcaaagcgttatggaattgagcccaaaataatcatacgaatagaagaaatataa

SEQ ID NO: 3611 - DNA, 434 bp, Staphylococcus aureus
ctgtcattcatagacacattaattaaattaagcgattacaaaatcaaaattaaggagaaaaatttgattgaatcgatggtaaaggttatggcgttaccgtttaaaaagaaatatcagcctttgactttaattttcaaccgagcatcaatcaacaagatgttttggattttacggatttacgttttataggaaaatatgaaaacatagtctttttagactcaaatgtcgttagtaaaaatagaataagtacttactttattaagtgtcatcatttgaaagagaatttaagaaaagcaaaacttgagaacagcttagaaaatagattgaagcactatagcaagtataagttattaatcattgatgagattgggtacttacctattggaagtgaagctgccaaaatattcttccaaattaatagatttaaggtatga

SEQ ID NO: 3612 - DNA, 829 bp, Staphylococcus aureus
gtgtataatgaaaatgtaaatattattaaaaawgggggttcactcaatgaaawtgaaacgtttwwtwgctrttgtratkgcawtryttttagtattagctggttgytctaattctaaygataatmawgamaryaaaaaagatgmmgcagacaatggwaaraaacaagarattcaagttgcagcggcagcaagtttaacagatgtwacmaaraaattagcwtcagaatttaaaaaagarcataaaaatgctgatattaaatttaactatggtggatcaggrgcattaagaaaacaaattgaatcaggcgcacctgttgacgtatttatgtctgcaaatactaaagatgtagatgcattaaaagacaagaataaagcrcatgatacatataaatatgcgaaaaatagtctagtattaattggtgataaagattcaaattacacttcagtaaaagacttaaaagrcaatgataaattagcattaggtgaagtgaaaactgtaccagcaggaaaatatgcgaaacagtatttagataacaataacttrtttaaagaagtygaaagtaaaatcgtttatgctaaagatgtaaaacaagtattaaattatgttgaaaarggtaatgcgaaacaaggttttgtrtataaaactgacttatataaacaaaayaaaaaaattgatactgtaaaagtaattaaagaagtagaacttaagaarccaatcacataygaagctggtgckacatcagatagtaaattagcwaaagagtggatggaattcttaaaatcagataaagctaaagaaataytaaaagaataccactttrcagcataa

SEQ ID NO: 3613 - DNA, 1977 bp, Staphylococcus aureus
atgaaaaagcaaataatttcgctaggcgcattagcagttgcatctagcttatttacatgggataacaaagcagatgcgatagtaacaaaggattatagtaaagaatcaagagtgaatgagaaaagtaaaaagggagctactgtttcagattattactattggaaaataattgatagtttagaggcacaatttactggagcaatagacttattggaarattataaatatggagatcctatctataaagaagcgaaagatagattgatgacaagagtattaggagaagaccagtatttattaaagaaaaagattgatgaatatgagctttataaaaagtggtataaaagttcaaataagaacactaatatgcttactttccataaatataatctttacaatttaacaatgaatgaatataacgatatttttaactctttgaaagatgcagtttatcaatttaataaagaagttaaagaaatagagcataaaaatgttgacttgaagcagtttgataaagatggagaagacaaggcaactaaagaagtttatgaccttgtttctgaaattgatacattagttgtaacttattatgctgataaggattatggggagcatgcgaaagagttacgagcaaaactggacttaatccttggagatacagacaatccacataaaattacaaatgagcgtataaaaaaagaaatgatcgatgacttaaattcaattatagatgatttctttatggagactaaacaaaatagaccgaattctataacaaaatatgatccaacaaaacacaattttaaagagaagagtgaaaataaacctaattttgataaattagttgaagaaacaaaaaaagcagttaaagaagcagacgaatcttggaaaaataaaactgtcaaaaaatacgaggaaactgtaacaaaatctcctgttgtaaaagaagagaagaaagttgaagaacctcaattacctaaagttggaaaccagcaagaggttaaaactacggctggtaaagctgaagaaacaacacaaccagtggcacagccattagtaaaaattccacaagaaacaatctatggtgaaactgtaaaaggtccagaatatccaacgatggaaaataaaacgttacaaggtgaaatcgttcaaggtcccgattttctaacaatggaacaaaacagaccatctttaagcgataattatactcaaccgacgacaccgaaccctattttagaaggtcttgaaggtagctcatctaaacttgaaataaaaccacaaggtactgaatcaacgttgaaaggtattcaaggagaatcaagtgatattgaagttaaacctcaagcaactgaaacaacagaagcttctcaatatggtccgagaccgcaatttaacaaaacacctaagtatgtgaaatatagagatgctggtacaggtatccgtgaatacaacgatggaacatttggatatgaagcgagwccaagattcaayaagccawswgaaacaaaygcatacaacgtaacgacaaatcaagwtggcacagtawcatayggmgckmghccaasaywmaacaagscaagyraaacaaaygcatayaacgtaacracamatgcaaayggtcaagtawcataygghgctcgyccracayamaavaagccaagcraaacaaatgcatacaacgtaacaacacatgcaaatggtcaagtatcatatggcgctcgcccgacacaaaamaagccaagcraaacaaaygcatataacgtaacaacacatgcaratggtmmwgyrwcatayggvsctmgmsyracahamwaraagycaagcgaaacaaaygcatayaacgtaacaacacatgcaratggtmmwgyrwcatayggvsctmgmsyracahamwaraagycaagcgaaacwwacgcatataacgtaacaacacatgcasatggtactgcgacatatgggcctagagtaacaaaataa

SEQ ID NO: 3614 - DNA, 1911 bp, Staphylococcus aureus
atgaaaaagcaaataatttcgctaggcgcattagcagttgcatctagcttatttacatgggataacaaagcagatgcgatagtaacaaaggattatagtgggaaatcacaagttaatgctgggagtaaaaatgggacattaatagatagcagatatttaaattcagctctatattatttggaagactatataatttatgctataggattaactaataaatatgaatatggagataatatttataaagaagctaaagataggttgttggaaaaggtattaagggaagatcaatatcttttggagagaaagaaatctcaatatgaagattataaacaatggtatgcaaattataaaaaagaaaatcctcgtacagatttaaaaatggctaattttcataaatataatttagaagaactttcgatgaaagaatacaatgaactacaggatgcattaaagagagcactggatgattttcacagagaagttaaagatattaaggataagaattcagacttgaaaacttttaatgcagcagaagaagataaagcaactaaggaagtatacgatctcgtatctgaaattgatacattagttgtatcatattatggtgataaggattatggggagcacgcgaaagagttacgagcaaaactggacttaatccttggagatacagacaatccacataaaattacaaatgaacgtattaaaaaagaaatgattgatgacttaaattcaattattgatgatttctttatggaaactaaacaaaatagaccgaaatctataacgaaatataatcctacaacacataactataaaacaaatagtgataataaacctaattttgataaattagttgaagaaacgaaaaaagcagttaaagaagcagatgattcttggaaaaagaaaactgtcaaaaaatacggagaaactgaaacaaaatcgccagtagtaaaagaagagaagaaagttgaagaacctcaagcacctaaagttgataaccaacaagaggttaaaactacggctggtaaagctgaagaaacaacacaaccagttgcacaaccattagttaaaattccacagggcacaattacaggtgaaattgtaaaaggtccggaatatccaacgatggaaaataaaacggtacaaggtgaaatcgttcaaggtcccgattttctaacaatggaacaaagcggcccatcattaagcaataattatacaaacccaccgttaacgaaccctattttagaaggtcttgaaggtagctcatctaaacttgaaataaaaccacaaggtactgaatcaacgttaaaaggtactcaaggagaatcaagtgatattgaagttaaacctcaagcaactgaaacaacagaagcttctcaatatggtccgagaccgcaatttaacaaaacacctaaatatgttaaatatagagatgctggtacaggtatccgtgaatacaacgatggaacatttggatatgaagcgagaccaagattcaataagccatcagaaacaaatgcatataacgtaacaacacatgcaaatggtcaagtatcatacggagckmgwccrasatwcaakaagccawsmgaaacraatgcatayaaygtaacaacacatgcaaacggccaagtatcatacggagctcgtccgacacaaaacaagccaagcaaaacaaacgcatataacgtaacaacacatggaaacggccaagtatcatatggcgctcgccmarcacaaaacaagccaagcaaaacaaatgcatacaacgtaacaacacatgcaaacggtcaagtgtcatacggagctcgcccgacatacaagaagccaagtaaaacaaatgcatacaatgtaacaacacatgcagatggtactgcgacatatgggcctagagtaacaaaataa

SEQ ID NO: 3615 - DNA, 2148 bp, Staphylococcus aureus
atgaaaaagcaaataatttcgctaggcgcattagcagttgcatctagcttatttacatgggataacaaagcagatgcgatagtaacaaaggattatagcaaagagtcaagagtgaatgagaacagtaaatatgggacattaatttcagactggtatttaaaagggagattaactagtctagaatctcaatttatcaatgcattggatattttagagacatatcattatggcgaaaaagagtataaagatgcaaaagataaattgatgacaagaattttaggggaagaccaataccttttagaaagaaaaaaagtgcagtatgaggaatacaaaaaattataccaaaaatataaagaagagaatccaacctctaaaggcttaaaactgaaaacattcgatcaatatacaatagaagatttaactatgagggaatataatgagttaacagaatcattaaaaagtgctgtaaaagactttgagaaagatgttgaaaaaatagaaaatcaacatcatgatttgaaaccatttactgatgaaatggaagagaaggctacttctagagttgatgatttagcaaataaagcatatagtgtttattttgcatttgttagggatacacaacataaaactgaggcattagagttaaaagcgaaagtagatttagttttaggtgatgaggataaaccgcatcgtatttctaatgaaagaattgaaaaagaaatgataaaagatttagaatctattattgaagatttctttatagaaactggtttaaataagcctggtaatattacgagttatgatagtagtaaacatcactataaaaatcacagtgaaggttttgaggctctagtcaaagaaacaagagaagcagtagcaaacgctgacgaatcttggaaaactaaaactgtaaaaaaatacggtgaatctgaaacaaaatctcctgttgtaaaagaagagaacaaagttgaagaccctcaatcacctaaatttgataaccaacaagaggttaaaactacggctggtaaagctgaagaaacaacacaaccagttgcacaaccattagttaaaattccacagggcacaattacaggtgaaattgtgaaaggtccggaatatccaacgatggaaaataaaacgttacaaggtgaaatcgttcaaggtccagatttcccaacaatggaacaaagcggtccatctttaagcgacaattatactcaaccgacgacaccgaaccctattttagaaggtcttgaaggtagctcatctaaacttgaaataaaaccacaaggtactgaatcaacgttgaaaggtattcaaggagaatcaagtgatattgaagttaaacctcaagcaactgaaacaacagaagcttctcaatatggtccgagaccgcaatttaacaaaacacctaagtatgtgaaatatagagatgctggtacaggtattcgtgaatacaacgatggaacatttggatatgaagcgagaccaagattcaacaagccatcagaaacaaacgcatacaacgtaaygacaaatcaagatggcacagtatcatacggcgcsmgmccaasaywmaayaagscawswgaaacaaaygcatayaaygtaacracamatgcaaayggcmmagtatcatayggrgckmgmccrasaywmaabaagccawshraaacaaaygcatayaacgtaacracamaysaagayggymmagtrtcatayggvgcycgyccracayamaasaarccaagyraaacaaatgcatayaacgtaacaacacaygsaaayggscaagtatcatayggvgcycgyccracayamaasaarccaagyrawacraaygcatayaacgtaacracamayssarayggbymagtrtcwtayggvgcycgcccracayamaasawrscawshraaacraaygcatayaacgtaacracamaygsaaayggcmmagtrtcatayggmgctcgyccracacamaasaagccaagyraaacraaygcatataacgtaacaacacaygsaaayggbcaagtrtcatayggmgcycgyccracayamaasaagccaagyraaacraatgcatacaaygtaacaacacatgcagatggkactgcgacatatggbcctagagtaacaaaataa

SEQ ID NO: 3616 - DNA, 1939 bp, Staphylococcus aureus
atgaaaaagcaaataatattcctaggcgcattagcagttgcatctagcttatttacatgggataacaaagcagatgcgatagtaacaaaggattatagtgggaaatcacaagttcaaaaaaragagyrccaaaatagtgcttcaatatcagatagttattattgggatatcattaaaaatctagaattacaatttactgctgcattagatttattagaagattatcgatatggtgaaaaagagtatgaaaaagcaaaagatcaactaatgacaaggatattaagtgaagatcaagtatttacttgagmaaaaaattaaagaatatgacaagtataaagatttatataaagaatatatgagtaaaaatccaacgtcaaaggtaaaaagagcaaattttgatcaatataatatcgaagacctaagagaaaaagaatataatgatttactaagttctattaaagatgcggtagaaacatttaaatcagatgtacaaaaaatagaatatgaaaataaagagttaaaatcttattcttacgaagaagaaaagaaggctgcttctagagttgatgatttagcaaataaagcgtatagcgtttattttgcgtttgttagggatacacaacataaaactgaggcattagagttaaaagcgaaagtggatttagttttaggtgatgaggacaaaccacatcgcatctctaataaaagaattgaaaatgaaatgctaaaagatttagaatctattattgaagatttctttatagaaactggtttaaataaacctgataatattacgagttatgatagtagtaaacatgactataaacatcatagagaaggctttgaggctctagttaaagaaacaagagaagccgtcgataaggctgacgaatcttggaaaactaaaactgtcaaaacatatggtgaagctgaaacaaaagcacatgttgtaaaagaagagaagaaagttgaagaacctcaagcacctaaagttggaaaccagcaaggggataaaactacagttgataaagwwgwwgaagcaacacaaccagtggcacagcmwttagttggaattccacagggcacaattacaggtgaaattgtaaaaggtccagactatccaacgatggaaaataaaatgttacaaggtgaaatagttcaaggtccagattttctaacaatggaacaaaacagaccatctttaagtgacaattatacacaaccatctgtgactttaccgtcaattacaggtgaaagtacaccaacgaaccctattttagaaggtcttgaaggtagctcatctaaacttgaaataaaaccacaaggtactgaatcaacgttgaaaggtactcaaggagaatcaagtgatattgaagttaaacctcaagcaactgaaacaacagaagcttctcaatatggtccgagaccgcaatttaacaaaacaccaaagtatgtgaaatatagagatgctggtacaggtatccgtgaatacaacgatggaacatttggatatgaagcgagaccaagattcaayaagccawswgaaacaaaygcatacaacgtaacgacaaatcaagatggcacagtaacatatggcgctcgcccracacaaaamaarccaagcaaaacaaatgcatacaacgtaacaacacatgcaaatggtcarrtatcatatggcgctcgcccgacacaaaamaagccaagcaaaacaaatgcatayaacgtaacaacacatgcaaatggtcaagtatcatayggmgctcgcccgacacaaaamaagccaagcaaaacaaatgcatataacgtaacaacacaygcaaayggtcaagtrtcatacggagctcgcccgacatacaagaagycaagyraaacaaaygcatayaaygtaacaacacatgcagatggtactgcgacatatgggcctagagtaacaaaataa

SEQ ID NO: 3617 - DNA, 1902 bp, Staphylococcus aureus
atgaaaaagcaaataatttcgctaggcgcattagcagttgcatctagcttatttacatgggataacaaagcagatgcgatagtaacaaaggattatagtgggaaatcacaagttaatgctgggagtaaaaatgggaaacaaattgcagatggatattattggggaataattgaaaatctagaaaaccagttttacaatatttttcatttactggatcagcataaatatgcagaaaaagaatataaagatgcagtagataaattaaaaactagagttttagaggaagaccaatacctgctagaaagaaaaaaagaaaaatacgaaatttataaagaactatataaaaaatacaaaaaagagaatcctaatactcaagttaaaatgaaagcatttgataaatacgatcttggcgatttaactatggaagaatacaatgacttatcaaaattattaacaaaagcattggataactttaagttagaagtaaagaaaattgaatcagagaatccagatttaaaaccatattctgaaagcgaagaaagaacagcatatggtaaaatagattcacttgttgatcaagcatatagtgtatattttgcctacgttacagatgcacaacataaaacagaagcattaaatcttagggcgaaaattgatttgattttaggtgatgaaaaagatccaattagagttacgaatcaacgtactgaaaaagaaatgattaaagatttagaatctattattgatgatttcttcattgaaaccaagttgaatagacctaaacacattactaggtatgatggaactaaacatgattaccataaacataaagatggatttgatgctctagttaaagaaacaagagaagcggttgcaaaggctgacgaatcttggaaaaataaaactgtcaaaaaatacgaggaaactgtaacaaaatctccagttgtaaaagaagagaagaaagttgaagaacctcaatcacctaaatttgataaccaacaagaggttaaaattacagttgataaagctgaagaaacaacacaaccagtggcacagccattagttaaaattccacagggcacaattacaggtgaaattgtaaaaggtccggaatatccaacgatggaaaataaaacgttacaaggtgaaatcgttcaaggtccagatttcccaacaatggaacaaaacagaccatctttaagcgataattatactcaaccgacgacaccgaaccctattttagaaggtcttgaaggtagctcatctaaacttgaaataaaaccacaaggtactgaatcaacgttaaaaggtactcaaggagaatcaagtgatattgaagttaaacctcaagcatctgaaacaacagaagcatcacattatccagcaagacctcaatttaacaaaacacctaaatatgttaaatatagagatgctggtacaggtatccgtgaatacaacgatggaacatttggatatgaagcgagaccaagattcaataagccatcagaaacaaacgcatacaacgtaacgacaaatcaagatggcacagtaacatatggcgctcgcccaacacaaaacaaaccaagcaaaacaaatgcatacaacgtaacaacacatgcaaatcgtcaagtatcatatggcgctcgcccgacacaaaacaagccaagcaaaacaaatgcatataacgtaacaacacatgcaaatggtcaagtatcatacggagctcgcccgacacaaaacaagccaagcaaaacaaatgcatataacgtaacaacacacgcaaacggtcaagtgtcatacggagctcgcccgacatacaagaagccaagtaaaacaaatgcatacaatgtaacaacacatgcagatggtactgcgacatatgggcctagagtaacaaaataa

SEQ ID NO: 3618 - DNA, 1830 bp, Staphylococcus aureus
atgaaaaagcaaataatttcgctaggcgcattagcagttgcatctagcttatttacatgggataacaaagcagatgcgatagtaacwaargattatagtaaagaatcaagagtgaatgagaacagtaaatacgatacaccaattccagattggtatctaggtagtattttaaacagattaggggatcaaatatactacgctaaggaattaactaataaatacgaatatggtgagaaagagtataagcaagcgatagataaattgatgactagagttttgggagaagatcattatctattagaaaaaaagaaagcacaatatgaagcatacaaaaaatggtttgaaaaacataaaagtgaaaatccacattctagtttaaaaaagattaaatttgacgattttgatttatatagattaacgaagaaagaatacaatgagttacatcaatcattaaaagaagctgttgatgagtttaatagtgaagtgaaaaatattcaatctaaacaaaaggatttattaccttatgatgaagcaactgaaaatcgagtaacaaatggaatatatgattttgtttgcgagattgacacattatacgcagcatattttaatcatagccaatatggtcataatgctaaagaattaagagcaaagctagatataattcttggtgatgctaaagatcctgttagaattacgaatgaaagaataagaaaagaaatgatggatgatttaaattctattattgatgatttctttatggatacaaacatgaatagaccattaaacataactaaatttaatccgaatattcatgactatactaataagcctgaaaatagagataacttcgataaattagtcaaagaaacaagagaagcartcgcaaacgctgacgaatcttggaaaacaagaaccgtcaaaaattacggtgaatctgaaacaaaatctcctgttgtaaaagaagagaagaaagttgaagaacctcaattacctaaagttggaaaccagcaagaggataaaattacagttggtacaactgaagaagcaccattaccaattgcgcaaccactagttaaaattccacagggcacaattcaaggtgaaattgtaaaaggtccggaatatctaacgatggaaaataaaacgttacaaggtgaaatcgttcaaggtccagatttcccaacaatggaacaaaacagaccatctttaagcgataattatactcaaccgacgacaccgaaccctattttaaaaggtattgaaggaaactcaactaaacttgaaataaaaccacaaggtactgaatcaacgttaaaaggtactcaaggagaatcaagtgatattgaagttaaacctcaagcaactgaaacaacagaagcatcacattatccagcgagacctcaatttaacaaaacacctaagtatgtgaaatatagagatgctggtacaggtatccgtgaatacaacgatggaacatttggatatgaagcgagaccaagattcaacaagccaagcgaaacaaatgcatacaacgtaacgacaaatcaagatggcacagtatcatatggcgctcgcccgacacaaaacaagccaagcgaaacaaacgcatataacgtaacaacacatgcaaacggccaagtatcatacggagctcgtccgacacaaaacaagccaagcgaaacgaacgcatataacgtaacaacacatgcaaacggtcaagtgtcatacggagctcgcccaacacaaaacaagccaagtaaaacaaatgcatacaatgtaacaacacatgcagatggtactgcgacatatggtcctagagtaacaaaataa

SEQ ID NO: 3619 - DNA, 1356 bp, Staphylococcus aureus
acaaaggattatagyaaagartcaagagtgaaagaagagagtaaatatgattcgccaatgtcaaattggtattattggggaaaggttaaatccttggagtcacaatttgcagatgcgatagatattatagaagattatcaatatggggaaaaagagtataaagacgccaaagacaaattgatgactagggtattaggtgaagaccaatacttattaaagaaaaaaatagatgaatataracaatatagagaaagatatttaaaagctggtttaagcccggtgaaattttatgattataacctttatgattttacaatgaaagaatataatgatatccatcactctctaaaaggtgcagtggaagagttctataaagaagttaaacatattcaatcaaagaattcggatttacaaacttatgacaagaaaactgaagatgaagaaactgataaagtatattcattagttagtgaaattgatactcttgttgtaacatattatggagataaggattatggggagcacgctaaagagttgagagctaagctagatattattcttggagaagaaaaaaagcccaatagaataactaatgaacgtattagaaaagaaatgaccgatgatttaaattctattatcgatgacttctttatggaaactggacaaaacagaccggttaaaatcactaaatataatccaaatattcatagtcctaaagataacaaagaaaacttcgatgctttagttaaagaaacaagagaagcggttgcwaaggctgaygawtcttggaaaaataaaactgtcaaaaaatacgaggaaactgtaacaaaatctcctgytgtaaaagaagrgaagaaagttgaagaacctcaattacctaaagttggaaaccagcaagaggttaaaactacggctggtaaagctgaagaaacaacacaaccagttgcacaaccattagttaaaattccacagggcacaattacaggtgaaattgtaaaaggtccggaatatccarcgatggaaaataaaacgttacaaggtgaaatmgttcaaggtcccgattttctaacaatggaacaaaacagaccatctttaagcgataattatactcaaccgacracaccgaaccctattttagaaggtcttgaaggtagctcatctaaacttgaaataaaaccacaaggtactgaatcaacgttraaaggtaytcaaggagaatcaagtgatattgaagttaaacctcaagcaactgaaacaacagaagcttctcaatatggtccgagaccgcaatttaacaaaacacctaagtatgttaaatatagagatgctggtacaggtatccgtgaatacaacgat

SEQ ID NO: 3620 - DNA, 144 bp, Staphylococcus aureus
atgaatacacttgttaatatgttttttgattttataattaaattagctaaagcaatcggaattgtcggtggcgtaaacgcttgcagcrgtttatttgatgaacctaaagtaccmrmwgaattaacrmawttayacgamwaatag

SEQ ID NO: 3621 - DNA, 906 bp, Staphylococcus aureus
atgyttaaaarrrcwaaaytaatcttaatagcaacgmtwctrctatcaggatgttcaactaccaataacgaatcyaayaawgaaacaaaatcwgtrccagaagaaatggaagcttcaaaatatgtaggwcaaggcttccaaccacctgcagaaaaagatgcgrttgaatttkcgaaraagcataaagayaaaattgcyaaacgwggcgaacaattttttatggataacttyrgwctaaaagttaaagctacraatgttgtaggtagtggcgacggygtagaagtatwcgtgcattgtgatgaccacgayatcgtatttaatgcragtattccatttgacaaatcaatwattgasagtgatagctcattaagaagtgaggataaaggcgatgatatgagtactttagttggtacagtgttgagtggctttgaatatcgagcrcaaaaagaaaagtatgayaatttatataaatttttmaaagawaatgaaaagaaataycaatatacaggatttacwaaaraggcaattaacaaracacaaaatartggmtatgaaaatgaatatttttatatagttgcwaatataccgacgctccaagaatatagraaatattacgaacccctaataaagaaraataatctgaattttaaaaaaggtatgaaasaagcaaggaaaggagtaggctataaagctgmaatagaagtacatacwacattgttttcgaraagtagtaacttttcaaaggacaaaaaattagatgatgttwtagatttgtctgaaagtacgaaaaagttacaccttaattttgaaaatacgaaaatatttttacaactagcaaaatctactattagyactaatcgagttaattacagtgataatgagtctataaggattgaggtcgaatga

SEQ ID NO: 3622 - DNA, 924 bp, Staphylococcus aureus
atgaaaaaattcattggatcagttttagctacgacattaattttagggggatgttccatgatggaaaatgaatcaagtaaagacacgaatacagaaacaaaatcagtaccagaagaaatggaagcttcaaaatatgtaggacaaggcttccaaccacctgcagaaaaagatgcgattgaatttgcgaagaagcatcgtaaagaatttgaaaaagtaggtgaacaattctttaaagataactttggactaaaagttaaagctacaaatgttgtaggtaaagatgatggtgtagaagtttatgtgcattgcgaagatcatggcattgtatttaatgcaagtctacctttgtacaaagatgccatccatcaaaaaggatcaatgcgcagtaatgacaatggtgatgatatgagtatgatggtgggtacagtgctgagtggctttgaatatcgagcgcaaaaagaaaagtatgataacttatataaattcttcaaagaaaatgaaaagaaatatcaatatacaggctttacaaaagaggcaattaacaagacacaaaacgttggatatcaaaatgaatacttttatatcacatatttatcaagaaacttaaaagaatatcgtaaatattacgaaccgttgattcataaaaatgataaagaatttaaagagggtatgcaacgagctagaaaagagttagattatactgctaatagtaatacagtagcaacgttgtttagtacgaatgataaaaaaaatagaaaagaaaagataaataatgtaatagatttatccgagaaaattgaaagaacaaaagatatgccaatcaagaatactataactactcaattaggaaataaacttattggcacaaaaaaagctcgttttgatgataagaaagtagtgtcgtttggagcatttgaagatgaa

SEQ ID NO: 3623 - DNA, 951 bp, Staphylococcus aureus
atgtttaaaaaggcgaaattaatcttaatagcaacgctactgttatcaggatgttcagcgatgaataatgaatcraawaawgamwyrrawamwgamwcaartamagamacraatacagaaacaaaatcagtaccagaagaaatggaagcttcaaaatatgtaggacaaggcttycaaccacctgcagaaaaagatgcgattgaatttgygaagaagcatcgtaaagaatttgaaaaagtaggtgaacaattctttaaagataactttggactaaaagttaaagctacaaatgttgtaggtaaagatgatggtgtagaagtttatgtgcattgcgaagatcatggcattgtatttaatgcaagtctacctttgtacaaagatgccatccatcaaaaaggatcaatgcgyagtaatgacaayggtgatgatatgagtatgatggtgggtacagtgctgagtggctttgaatatcgagcgcaaaaagaaaagtatgataayttatataaattyttmaaagaaaatgaaaagmaatatcaatatacaggytttacwaaagargcaattaacaagacrcaaaacgtyggrtatcaaaatgaatayttttatatyacatatttatcaagaaayttaaaagaatatmgwaaatattacgaaccrttgatwcataaaaatgataaagartttaaagarggtatgcaacgagctagaaaagagytaraytatactgctaataswaatacwgtagcaacgttgtttagtacgaatgatraaarraatagaaaagaaaagataaataatgtaatagatttatccgagaaaattgaaagaacaaaagatatgccaatcaagaatactataactactcaattaggaaataaacttattggcacaaaaaaagctcgttttgatgataagaaagtagtgtcgtttggagcatttgaagatgaataa

SEQ ID NO: 3624 - DNA, 919 bp, Staphylococcus aureus
atgtttaaaagaaytaaactaatcttaatagcaacrwtamtrctatcaggatgttcaactaccaataacgaatccaacaatgaaacaaaatcagtaccagaasaaatggaagcttcaaaatatgtwggacaaggcttccaacyacctgcaraaaaagatgcgattgawtttgcgamraagcatcgtraagaatwtgaaaaagtaggtgaacaattctttaaagayaactttggactraaagtwaargctacmaatgytgtaggtaaagatgatggtrtagaagtttatgtgcattgcgawgatcatggcattgtatttaatgcaagtytrccyttgtacaaagatgccatccatcaaaaaggatcaatgcgtagtaatgacaacggtgatgatatgagtatgatggtgggtacagtgctgagtggctttgaatatcgagcgcaaaaagaaaagtatgataayttatataaatttttmaaagaaaatgaaaagaaatatcaatatacaggttttactaaagaagcaattaayaagacrcaaaacgtyggrtatmaaaatgaatatttttatattacataytywtcwagaartttaaaagaatatcgwaartattaygaaccwttgattcawaaaaakgataargaattyaaagaaggwatgsaacgagcwagaaaagarstraaytatrcygctratacwgatgywgtwkckacactktttwstacwaagaaaaaytttactaawgacaatacagwagatgatgtrattgaaytragtrataaattawawratwwammmaatawrccwsawaaatctcaagttacwattcaawtaggwaarccwastatwaatactaaaaaagccttttatgaygatawwmrtccaatwgaakgatgrggtgcacagtaaaggtgaataa

SEQ ID NO: 3625 - DNA, 957 bp, Staphylococcus aureus
atgcttaaaaaagcaaaattaatcttaatagcagtactagtactgtcagggtgctccacgattgaaaatgaatcaaaaaaagacagaaatacagaaacaaatacagaaacgaaatctgtaccagaagaaatggaagcttcaaaatatgtaggycaaggmttccaaccrcctgcagaaaaagatgcgattgaatttkcgaagaagcataaagataaaattgctaaacgtggcgaacaattttttatggataacttyggwctaaaagttaaagctacraatgttgtaggtagtggcgacggygtagaagtatwcgtgcattgtgatgaccacgayatcgtatttaatgcragtattccatttgacaaatcaatwattgasagtgatagctcattaagaagtgaggataaaggcgatgatatgagtactttagttggtacagtgttgagtggytttgaatatcgagcacataaggaagagttggataatttaacagaagttttaaaagaatataaaagtaaatataaatatactggttatactgaaaatgcaattatgaaaacgcagaatagtggttttagaaatgagtattattatttgactgcaattccatatactttagatgaatataaaargtattttcaacccttaatcaaagaggatgataagtcttttagggacggtatsagaaactcaaaaaaacaacttaaagataaatcacgtccatatgttgttacaactttatttagtactaaagataattttactaaagataatacaatagacgagatgattgatttttctgaagtrctaaaaaagaaaaagaatattcctcatgatttgaatgtttctcttcaaatttctaataaatatataaatacaamaagacctaaytatagtaagaaggawgtaatagaagtaggtgtatttaatcatgaawaagctaacacgaatgattaa

SEQ ID NO: 3626 - DNA, 915 bp, Staphylococcus aureus
atgyttaaaararcwaaaytwatcttaatrgcaacrmtactrctatcaggatgttcaactaccaataacgaatccaacaawgaaacaaaatcwgtaccagaagaaatggawgcttcmaaatatgtaggacaaggmttycaaccacctgcagaaaaagatgcgattgaatttgcraagaagcataaagataaaatwgctaarcgwggygaacaattttttatggataacttcggtctaaaagttaaagctacmaatgttrtaggtagtggcgayggtgtagaagtattcgtgcattgtgatgaccacgacatcgtatttaatgcgagtattccatttgayaaatcaattattgacagtratagctcattaagaagtraggayaaaggygatgatatgagtactttagttggtrcagtrytsagtggstttgaatatcgagcacaaaaagaaaartatgayaawttatataaatttttcaaagataatgaaragaaatatcaatatacaggatttacaaaagargcaattaayaagacrcaaaatagtggwtatgaaaatgaatatttttatattwcgrcyataccktataatttarctgagtatagagactattttgaaccattrttaaacaaaagtgacagtgaattttcaaaagaattgtcaaatgttaagaagcaattaaaagataagtctaaastttcggtaactactactctatttagtaaaaaaaagaactatactaaaaaaagtaacagtgaaaatgtaataaaaatggcagaagaaataaaaaaagawaaagagataccaaacggtatagakcttagtataaaattttcggacaataaaataaatacrgttaaaccaaattwtaacggtraaagcacttcagaatatggtgtgtttgayyaagaataa

SEQ ID NO: 3627 - DNA, 918 bp, Staphylococcus aureus
atgtttaaaagaactaaactaatcttaatagcaacattactgctatcaggatgttcaactaccaataacgaatctaataaagaaacaaaatcagtgccagaagaaatggaagcttcaaaatatgtaggtcaaggcttccaaccacctgcagaaaaagatgtggttgaatttgcgaaaaagcataaagataaaattgccaaacgaggcgaacaattttttatggataatttcggtctaaaagttaaagctaccaatgttgtaggtagtggaaaaggcgtagaagtattcgtgcattgtgatgaccacgatatcgtatttaatgcgagtattccatttgataaatcaataattgagagtgatagctcattaagaagtgaggacaaaggcgatgatatgagtactttagttggtacagtgttgagtggctttgaatatcgaacacaaaaagaaaagtatgacaatttatataaatttttcaaagataatgaagagaaataccaatatacaggctttacaaaagaagcaataaacaagacgcaaaatgtcggatataaaaatgaatatttttatatcacttactcgtcaagaagcttaaaagaatatcgtaagtattacgaaccattgattcataaaaatgataaagaatttaaagaaggaatggaacaagccagaaaagaagtgaattacgctgctaatacagatacagtaacaacattgtttagtacaaaggaaaattttactaaagacaatacagttgatgatgtaattgaactgagtgataaactatataattttaaaaataagccagaaaaatctacaattacaattcaaataggaaagcctactattaatactaaaaaagccttttatgatgataatgatccaatagaatatggagtgtatcgtaaagatgaataa

SEQ ID NO: 3628 - DNA, 930 bp, Staphylococcus aureus
atgaaaaaattcattggatcagttttagctacgacattaattttagggggatgttccacgatggaaaatgaatcaaaaaaagacacaaaaacagaaacaaaatctgtaccagaagaaatggaagcttcaaaatatgtaggccaaggcttccaaccgcctgcagaaaaaaatgcgattgaatttgcgaagaagcatcgtaaagaatttgaaaaagtaggtgaacaattctttaaagataactttggactaaaagttaaagctacaaatgttgtaggtaaagatgatggtgtagaagtttatgtgcattgtgaagatcatggcattgtatttaatgcaagtctacctttgtacaaagatgccatccatcaaaaaggatcaatgcgcagtaatgacaatggtgatgatatgagtatgatggtgggtacagtgctgagtggctttgaatatcgagcgcaaaaagaaaagtatgataacttatataaattcttcaaagaaaatgaaaagaaatatcaatatacaggctttacaaaagaggcaattaacaagacacaaaatgtcggatataaaaatgaatatttttatattacatactcttctagaagtttaaaagaatatcgaaagtattatgaaccactgattcgaaaaaatgataaagaatttaaagaaggaatggaacgagcaagaaaagaagtgaattacgctgcaaatacagatgctgttgctacacttttttctactaagaaaaactttactaaagacaatacagtagatgatgtaatcgaactaagtgataaattatataatttaaaaaataaaccagataaatctacaatcacaatacaaatagggaaacccactattaatactaagaaagccttttatgatgataatcgtccaatagaatatggggtgcacagtaaagatgaataa

SEQ ID NO: 3629 - DNA, 909 bp, Staphylococcus aureus
atgaaaaagttcattggatcagttttaaccacgacattaattttagggggatgttccgcgatggaaaatgaatcaaataaagacacaaacacagaaacaaaatctgtaccagaagaaatggaagcttcaaaatatgtaggccaaggcttccaaccgcctgcagaaaaagatgcgattgaatttgcgaagaagcatcgtaaagaatttgaaaaagtaggtgaacaattctttaaagataactttggactaaaagttaaagctacaaatgttgtaggtaaagatgatggtgtagaagtttatgtgcattgtgaagatcatggcattgtatttaatgcaagtctacctttgtacaaagatgccatccatcaaaaaggatcaatgcgcagtaatgacaatggtgatgatatgagtatgatggtgggtacagtgctgagtggctttgaatatcgagcgcaaaaagaaaagtatgataacttatataaattcttcaaagaaaatgaaaagaaatatcaatatacaggctttacaaaagaggcaattaacaagacacaaaacgttggatatcaaaatgaatacttttatatcacatatttatcaagaaacttaaaagaatatcgtaaatattacgaaccgttgattcataaaaatgataaagaatttaaagaaggtatgcaacaagctagaaaagagttagattatactgccaatactgatgcagtttctacacttttttcaactaagaaaaactttactaaagacaatacagtagatgatgtgattgaattgagtaataaattaaaagaaaaacccaatatgcctcaaaaatctcaagttactattcaattaggaaaatctagtataaatactaaaaaaccattttatgacgatataaatccaattgaagggtaa

SEQ ID NO: 3630 - DNA, 768 bp, Staphylococcus aureus
atgaaaaaattcattggatcagttttagctacgacattaattttagggggatgttccacgatggaaaatgaatcaagtaaagacacgaatacagaaacaaaatcagtaccagaagaaatggaagcttcaaaatatgtaggacaaggcttccaaccgcctgcagaaaaagatgcgattgaatttgcgaagaagcataaagataaaattgccaaacgaggcgaacaattttttatggataacttcggtttaaaagttaaagctaccaatgttgtaggtagtggcgacggtgtagaagtattcgtgcattgtgatgaccacgacatcgtatttaatgcgagtattccatttgacaaatcgataatagagagtgatagctcattaagaagtgaggataaaggcgatgatatgagtactttagtaggtacagtgttgagcggctttgaatatagagctcataagcaagagttggatagtttaacagaagttttgaaagaatataaaagtaaatataaatatactggttatacagaaaatgcaattatgaaaacgcagaatagtggttttagaaatgaatattattatttgactgcaattccatatactttagatgaatataaaaagtattttcaacccttaatcaaagaggatgataagacttttagtgatggtatgaaaaactcaaaaaacaacttaaagataaatctcgtccatatgttgttacaactttatttagcactaaagacaattacactaaagataatacaatag

SEQ ID NO: 3631 - DNA, 132 bp, Staphylococcus aureus
atgcgttcaactttatctggatggctaagattatatgcttctggacaggtgtctaatccttcagagtataaaatggttccwatagcgccatcagctactaaaacattatctttcaattgtgtgaggaattga

SEQ ID NO: 3632 - DNA, 618 bp, Staphylococcus aureus
ttgtttctaaaatattggtatataattttcaatggcgaagaaaacagggtgaaaaagtcggtttttaaatcaaagcaaataagggagcataaacaaatgaaaaggaaagtaytagtactaacaatgggtgtaatttgtgcaactcaattatggcattctaatcacgcaaacgcattagtrwcagagagtgttgaaactaattttgttgtaaaagattcggataataaaaatattttacaaacccatactgaaattactactgaggagaaattttcartagtagaaaagagtcaattaaatamaytaaaakcactatctaatgacaactacatagaatatgatttacatactaatcaaacaggyatwaaaaaaggttggttatatggttatagtgaaattgactcatcacatttcacagaccgtgacaaacgcgttattagacgtgatcatgttaaagaagcacaaagcttaattaaygattataaakatacrcaaarmtatgaagatctcgctaaggcaactgcaaaagtaagtacacttagtcagtctcaccaaaattatttraataaacaaattgataaagtgaataataaratagagaaaactgaaaaacgctaa

SEQ ID NO: 3633 - DNA, 567 bp, Staphylococcus aureus
ttgtttctaaaatattggtatataattttcaatggcgaagaaaacagggtgaaaaagtcggtttttatatcaaagcaaataagggagcataaacaaatgaaaaggaaagtattagtactaacaatgggtgtaatttgtgcaactcaattatggcattctaatcacgcaaacgcattagtaacagagagtggcgcaaatgatactaagcaatttactgaaattgtatcggaagagaaagttataacagttgaacatgctcaaattaatatttttcaatctaatagcaattcaaacttgatggagttcaacatattaacaatgggcggtaaatcaggagctatggttggttatagtgaaattgactcatcacatttcacagaccgtgacaaacgcgttattagacgtgatcatgttaaagaagcacaaagcttagtagagaactataaagatacacaaagtgctgatgctaggatgaaagccaaacaaaaagttaacacattaagcaaaccgcatcaaaactatttcaataaacaaattgataaggtttataatggattacaacgctaa

SEQ ID NO: 3634 - DNA, 558 bp, Staphylococcus aureus
atgaaaaggaaagtactagtattaacaatgggcgtactttgtgcgacacaattatggcaaacgaataatgcaaaagctttagtgacagagagtggcgttaatgatactaagcaatttactgaagtaacatcggaagaaaaagttataaaagatgctatttcgaaagtcaatgaaagctttatttactatccccaaaatgatttgaagggattaggtggagaacacaacgattacgaaaaaattacatatagcacttcttctaataatgttttagaattatcaatgagttcaaaatacgtaggcggtaaatcaggagctatggttggttatagtgaaatttactcatcacatttcacagaccgcgacaaacgtgctatcagacgtgatcatgttaaagaagcacaaaacttgattaatgattataaatatacgcaaatatatgaagactttgctaaagctactgcaaaggtaagtacacttagtcagtctcaccaaaattatttaaataaacaaattgataaagtgaataataagatagagaaaactgaaaaacgctaa

SEQ ID NO: 3635 - DNA, 472 bp, Staphylococcus aureus
ttgaagtggtctgatattgattttgaaaacaacacgattagtattactaaaacatattacaatccaaataataacaagaagaaatwtcagatacttccccctaaaactgaaagttctatcggtaagatttccgttgacccaaatgtaataaaggtgttgcgtgattataagataaacgttcaaaataattggaaaaacgaattatataatgataaccattgtaatgaaaaaactatcaatgtggatacaaaccattatgtcacgtaccagcatactcaaaaatatctctacgcactcattcagatacacacattgcgcattgctcatagaatcaggtgtacacattaaagaaatacaagaacgattacggcataaagatatcaataccactatgaatatctatgctaaaatcacaaattcatacaaaaaagacgcctcccataagtttagtcaccaaatggaagacgtctcg

SEQ ID NO: 3636 - DNA, 1227 bp, Staphylococcus aureus
ctgatagccgtttatctagtgatatttttaaagaatattaatcgaggtgatcaaatggcaagttatgaaaaacgcggaaatacatggcgctatcgtatatcactaggaaaagacgcagaaacgggcaaatataaatatatttcaaactcaggttttaaacgcaaatcagacgctaaacatcacgctgaaatggttgagcgtcaattaagaaatggcgattatatcgcaccgtccacatctacatttaaacaggttgctgacgattggatatcacaatatgctaacgaagtaaaagtaagtagtgtcagagcacgcgagaaagccatacatcatgctatagaacgctttaagaacaaaccaatacaaactatcaaaaaacacgattatcaacgttttgtaaacgatataagcatacagtatagcaagaattatgttgatagcattgtaacctctacaaatatgatatttaagtacgcttatgatatgaaattaataagaatattgcctagcgagggtattaaacgacctaaaaagaaagttagtgtggaagaattagaagatactgagatacataaaaagtttcttgaaaaagatgaattatttcaatttctggaaattgccaaaaatcaccattcgccacaaaatagctttgaagtgttttatacattagcatatacaggcatgcgtgcaggtgaattattggcattgaagtggtctgatatagactttgagaataacacaatcaatattacaaagacttattacaatccgaataacaataaaaagcaatatcaaatacttacgccaaaaactgaaagctcaatcggaaaaatttcagttgatcctcatgtgattaaattactcaaaaattataaagtggatgtacaggacacatggaaaaacgagttgtatgtagataacaatttcgtttttactgatgttaacggctatcccctcgtaattaagaaactacagttatggataaaagctatacttaaaaagactaacataactaataaacaaataagcactcattcatttcgtcatactcattgcgcgttacttatagaggctggtgtgcatattaaggaaatacaagaacgcttgcgacacaaagatataaacaccactatgaacatctacgctaagattacgaactcatacaaaaaagacgcttcccaaaagtttagtaaactcatggaaaacgtctcaaaagatttattttaa

SEQ ID NO: 3637 - DNA, 174 bp, Staphylococcus aureus
gtgagagaacgcactaaarttatatatcgtggttggaayaaggagatatttattttacagggtaaaaatatgaatgttattggtttgcgccaaatatttgatgaactcaaaagatygtaygaaggttataaaatcgttgttattccaatagaagttgattttgaaatcaaataa

SEQ ID NO: 3638 - DNA, 537 bp, Staphylococcus aureus
atgamtaacacattaacaaytgatcarttacaagagttattacaaatacaaaargagttcgacgatagaataccgacgctgaacttasgagatagcaagattgcatatgtagttgaattctttgaatggtttaatacattggaaacgtttaagaactggaagaagaaaccaggtaagccgttagacgtacarytwgatgaattrgckgayatgttggcgtttggrttgagtattgcgaaycaagtaggwgtgtcatcagaagagrtaaaagaagcgattgaatcaagttttaaaaataswgaatttcacaamatgtttaattttraagataaagaatttgctcaagacgcagttgttagyacaccacagataatattcaaagaattttatcccgaccaattggcaattgtaatagygatagacatagcttacaacttataywctatcgaccaactcattgacgcatacaaaaagaaaatgaaaaggaaccacgaaagacaagatggaacagcagacgcaggaaaaggatacgtgtaa

SEQ ID NO: 3639 - DNA, 1467 bp, Staphylococcus aureus
atgttratracaaaaaaycaagcagaaaaatggtttgayaattcattagggaarcarttcaayccwgatkgttkkwatggatttcartgttaygattacgcmartatgttytttatgwtrgcracaggcgaaaggytrcaaggtttataygcttataatatyccrtttgataataaagcaargattgaaaaatayggkcaaataattaaaaactatgayagctttttaccgcaaaagttggayattgtcgttttcccgtcaaagtatggtggcggagctggrcaygttgaaattgttgagagcgcwaatytaaayactttcacatcrtwtggbcaaaaytggaayggtaaaggttggacwaatggcgttgcgcaacctggttggggtccygaaacygtkacaagacrtgttcattattaygayrayccaatgtattttattagrttaaayttcccwrayaamktaagygttggmrataaagctaaargyrttattaagcaagcractrcmaaaaarsargcagtaattaaacctaaaaaaattatgcttgtagccggtcatggttataacgatcctggagcagtmggaaacggaacaaaygaacgygattttatmcgtaaatatataacrccwaatatcgctaagtatttaagacatgcaggwcaygaagttgcattatayggtggctcaagtcaatcacaagayatgtatcaagatactgcwtacggtgttaatgtaggmaataawaaagattatggmttatattgggttaaatcacakgggtatgacattgttctagaratwcatttagacgcagcaggagaaarygcaagtggtgggcatgttattatytcaagtcaattcaatgcagatactattgataaaagtatacaagatgttatwaaaaataacttaggacaaataagaggtgtracacctcgtaatgatttactraaygttaatgtatcagcagaaataaatatvaaytatcgtttatctgaattaggttttattactaataaaaawgatatggattggattaagaaraaytatgacttgtattctaaattaatagcyggtgcgattcatggtaagcctataggtggtttggtagctggtaatgttaaaacatcagctaaaaaccaaaaaaatccaccagtgccagcaggttatacactygataaraayaatgtvccktataaaaaararvmwggywattacacagtwgcyaatgttaaaggtaataaygtaagrgacggytattcaactaattcaagaattacwggkgtattaccyaayaacrcaacaatyrmrtatgacggygcatattgyatyaatggytatagatggattacttatatygctaatagtggacaacgtcgttatatmgcgacaggagaggtagayaargcaggtaatagrataagtagttttggtaagtttagcrcgwttkakaattgtatatga

SEQ ID NO: 3640 - DNA, 327 bp, Staphylococcus aureus
atgaatygggaaattaawgatttrtttagcgatttraarttgttgaaagatagwttygargatttaaaggatartmatggttggcattttgakgagytatatccayatgaaccaaatcatrwcttaaataaagatgaattaattrgagagggwkyttcttatcatgagagacgtattcacaataatcaaatgtttgatttattccatctctatatagagcagttcgataatattatcgaaaagttttatgaaatagaaaaagcatcatctgagaactttggcgaggaatcagatgacgcaaagaattcaataaaagtagcagagtaa

SEQ ID NO: 3641 - DNA, 318 bp, Staphylococcus aureus
atgaattgggarattaaagatktratgtgtgayattgaagtgataaaasaaaaaatyaatgatgtagctaycaaacatgsttggtttgttgaagataratttgtmaaaaatgaattagaaacaaaacrggaacatattaatttttctgctagctatttagaacatcgtatacaaaatgaacatacagttgagttattacakgtgtacttaaaagaattcrgtgaacttatacaaaartttcatgaaatagaaaaagcrtcatcwgagaactttgrcgaggwatcagatgacgcamaraawtyaaaaawyacagagtaa

SEQ ID NO: 3642 - DNA, 1474 bp, Staphylococcus aureus
atgagtatcatcatggaggtggcgacaatgcaagcaaaattaactaaaaawgagtttatagagwggttgaaaacttctgagggaaaacaattcaatgtggacttatggtatggatttcaatgctttgattatgccaatgctggttggaaagttttgtttggattacttctraaaggtttaggtgcaaaagatatwccrttygcwaacaayttcgayggaytagctactgtataccaaaatacaccggacttyttrgcacaaccyggcgacatggtkgtattcggtagcaaytacggtgcwggatayggwcacgtwgcatgggtaattgaagcaactttagattayatcattgtatatgagcagaattggctaggcggtggctggactgacrgaatcgaacaacccggctggggttgggaaaaagttacaagacgacaacatgcttaygatttccctatgtggtttatccgtcckaayttyaaaagygaracagckccacgatcartwcaatctcctacrcaagcacyctaaaaargaaacagctaagccacaacctaaagcrgtagaacttaaaatyatcaaagatgtggttaaaggttatgacctwcctaarcgtggtrgtaaycctaarggtatagttatwcayaacgacgcaggragcaaaggggcracwgcwgaagcrtatcgwaacggattagtwaaygcacctttatcaagattagaagcgggyattgcgcatagttaygtatcaggyaacacagtktggcaagcyttagatgaatcrcaagtaggttggcatacygctaaycaawtaggyaataaatattattacggtattgaagtrtgtcaatcaatgggmgcrgataaygcgacrttyttaaaaaatgaacaggcractttccaagaatgcgctagattgttgaaaaaatggggattaccagcaaacagaaatacaatcagattrcacaaygaattyacttcaacatcatgcccwcayagaagytcrgtwttrcacactggttttgacccagtaactcgyggyctattgccrgaagayaarcrrttrcaacttaaagactactttatcaagcarattagrgygtayatggayggtaarataccrgttgccactgtctctaatgagtcaagcgcttcaagtaatacagttaaaccagttgcragtgcatggaaacgtaataaatatggtacttactacatggaagaaagtgctagattcacaaacggyaatcaaccaatcacwgtaagaaaartrggrccattcttatcwtgyccrgtrgsttaycarttccaacctggtggrtattgtgattatacagaagtgatgttacaagatggtcatgtttgggtaggatatacatgggaggggcaacgttattacttgcctattagaacatggaatggttctgccccacctaatcagatattaggtgacttatggggagaaatcagttag

SEQ ID NO: 3643 - DNA, 2834 bp, Staphylococcus aureus
gattaagttattaagggcgcacggtggatgccttggcactagaagccgatgaaggacgttactaacgacgatatgctttggggagctgtaagtaagctttgatccagagatttccgaatggggaaacccagcatgagttatgtcatgttatcgatatgtgaatacatagcatatcagaaggcacacccggagaactgaaacatcttagtacccggaggaagagaaagaaaattcgattcccttagtagcggcgagcgaaacgggaagagcccaaaccaamaagcttgcttgttggggttgtaggacrctctrtacggagttacaaaggacgacattagacgaatcatctggaaagatgaatcaaagaaggtaataatcctgtagtcgaaaatgttgtctctcttgagtggatcctgagtacgacggagcacgtgaaattccgtcggaatctgggaggaccatctcctaaggctaaatactctctagtgaccgatagtgaaccagtaccgtgagggaaaggtgaaaagcaccccggaaggggagtgaaatagaacctgaaaccgtgtgcttacaagtagtcagagcccgttaatgggtgatggcgtgccttttgtagaatgaaccggcgagttacgatttgatgcaaggttaagcagtaaatgtggagccgtagcgaaagcgagtctgaatagggcgtttagtatttggtcgtagacccgaaaccaggtgatctacccttggtcaggttgaagttcaggtaacactgaatggaggaccgaaccgacttacgttgaaaagtgagcggatgaactgagggtagcggagaaattccaatcgaacctggagatagctggttctctccgaaatagctttagggctagcctcaagtgatgattattggaggtagagcactgtttggacgaggggcccctctcgggttaccgaattcagacaaactccgaatgccaattaatttaacttgggagtcagaacatgggtgataaggtccgtgttcgaaagggaaacagcccagaccaccagctaaggtcccaaaatatatgttaagtggaaaaggatgtggcgttgcccagacaactaggatgttggcttagaagcagccatcatttaaagagtgcgtaatagctcactagtcgagtgacactgcgccgaaaatgtaccggggctaaacatattaccgaagctgtggattgtcctttggacaatggtaggagagcgttctaagggcgttgaagcatgatcgtaaggacatgtggagcgcttagaagtgagaatgccggtgtgagtagcgaaagacgggtgagaatcccgtccaccgattgactaaggtttccagaggaaggctcgtccgctctgggttagtcgggtcctaagctgaggccgacaggcgtaggcgatggataacaggttgatattcctgtaccacctataatcgttttaatcgatggggggacgcagtaggataggcgaagcgtgcgattggattgcacgtctaagcagtaaggctgagtattaggcaaatccggtactcgttaaggctgagctgtgatggggagaagacattgwgtcttcgagtcgttgatttcacactgccgagaaaagcctctagatagaaaataggtgcccgtaccgcaaaccgacacaggtagtcaagatgagaattctaaggtgagcgagcgaactctcgttaaggaactcggcaaaatgaccccgtaacttcgggagaaggggtgctctttagggttaacgcccagaagagccgcagtgaataggcccaagcgactgtttatcaaaaacacaggtctctgctaaaccgtaaggtgatgtataggggctgacgcctgcccggtgctggaaggttaagaggagtggttagcttctgcgaagctacgaatcgaagccccagtaaacggcggccgtaactataacggtcctaaggtagcgaaattccttgtcgggtaagttccgacccgcacgaaaggcgtaacgatttgggcactgtctcaacgagagactcggtgaaatcatagtacctgtgaagatgcaggttacccgcgacaggacggaaagaccccgtggagctttactgtagcctgatattgaaattcggcacagcttgtacaggataggtaggagcctttgaaacgtgagcgctagcttacgtggaggcgctggtgggatactaccctagctgtgttggctttctaacccgcaccacttatcgtggtgggagacagtgtcargcgggcagtttgactggggcggtcgcctcctaaaaggtaacggaggcgctcaaaggttccctcagaatggttggaaatcattcatagagtgtaaaggcataagggagcttgactgcgagacctacaagtcgagcagggtcgaaagacggacttagtgatccggtggttccgcatggaagggccatcgctcaacggataaaagctaccccggggataacaggcttatctcccccaagagttcacatcgacggggaggtttggcacctcgatgtcggctcatcgcatcctggggctgtagtcggtcccaagggttgggctgttcgcccattaaagcggtacgcgagctgggttcagaacgtcgtgagacagttcggtccctatccgtcgtgggcgtaggaaatttgagaggagctgtccttagtacgagaggaccgggatggacatacctctggtgtaccagttgtcgtgccaacggcatagctgggtagctatgtgtggacgggataagtgctgaaagcatctaagcatgaagcccccctcaagatgagatttcccaacttcggttataagatc

SEQ ID NO: 3644 - DNA, 327 bp, Staphylococcus aureus
atgttctccaaatgtgtaaatcacaaaaatttctcggtattgatgacgacaaggaggactaaaacaatgtattacgaaataggcgawatcatacgcaaaaatattcatgttaacggattcgattttaarmtattcattttaaaaggtcatatgggcatatcaatacaagttaaagatatgaacaaygtaccaattaaacatgcttatgtcgtagatgagaatgacttagatatggcatcagacttattyaaccaagcratagatgaatggattgaagagaacacagacgaacaggacagactaattaacttagtyatgaratggtag

SEQ ID NO: 3645 - DNA, 334 bp, Staphylococcus aureus
atgaattacaaaacgaagaagataacgaggagtgcgaagaggagtacgaagaatacaaggaggactaaaacaatgtattacaaakykggtgaratmaaaaataaaattatmarctttaacgggttcgaatttaaagtgtctgcgatgaagaracatgacggtatcagtatacaagttaaggatatgaataatgttccacttaaatcatttcatgtcgtagatttaagcgaactatatattgcaatggatgcaatgcrygacgttataaacgaatggattgaagagaacacagaygaacagagacagrctaattaacttagtcatgaratggtag

SEQ ID NO: 3646 - DNA, 270 bp, Staphylococcus aureus
gtgtcaacaatgtactacaaaattggcgatgtatgtcaaaaagtaattaatgtagacggattcgattttaaattagcagttaagaaacaagattacagcattctagtgaatgtcttagatttagaagatagatttatcgacggtataaatataacagatgagaatgatctatacacagcattagacatattaaatcaatctatttatgaatggattgaagagaacacagacgaaagagacaggctaattaacttagtcatgagatggtag

SEQ ID NO: 3647 - DNA, 249 bp, Staphylococcus aureus
gtgaacttgagaggaggtgcttttatgtgttacgactactcacgtttgagygggaaaatagtagaaaagtatggcactcagtacaattttgcaattgctatgaaattgtcagagagaagtttatcsttaaaactcaacggtaaagttggttggaaagacagtgaaatatggaaagctatacaactactagatataccggtagagaaaatacacttatatttttttaaagaaaaagttcatgttatatga

SEQ ID NO: 3648 - DNA, 309 bp, Staphylococcus aureus
atgacgttcaccttatcagatgaacaatataaaaatctttgtactaactytaacaagttatyagataaacttcacaaagcattaaaagatygtgaagagtacaagaagcaacgagatgagcttattggggatatagcgaagttacgagattgtaacaaagaactggagaagaaagcaagcgcatgggataggtattgcaagagcgttgaaaaagatttaataaacgaattcggtaacgatgatgaaagagttaaattcggaatggaattaaacaataaaatttttatggaggatgacacaaatgaataa

SEQ ID NO: 3649 - DNA, 372 bp, Staphylococcus aureus
atgaaagtgaactatgaaacaggattccaaataggcgtaatggaagctaggttgaagaagatgagaaaacaacgtgatgagtacaagaagcaacgtgacgagcttattggggatatagctaagttaagagagcgtaacgaagagctggagaacatgtggcgcacagtcaaaaatgaattgcttggaagatacgaacattgctgttttaaaattagagaactacaccctgagagcaaagcgaacaggataggagctctctatataggaggtaaaagcactgcagatattatactgtcgcgaatggaagaactagacggaacaaatgagttctacgaatttttagggcaaatggaggatgacacaaatgaataa

SEQ ID NO: 3650 - DNA, 432 bp, Staphylococcus aureus
atgatacaaccaacaagagaagaattaattaatttcatgaaaaaacatggagctgaaaatgttgactctatcactgatgagcaaagtgcaataagacactttagagctcaatcaaaagtttttaaagacgaacgtgatgagtacaagaagcaacgagatgagcttatcgaggatatagctaagttaagaaaacgtaacgaagagctggagaacatgtggcgcacagtcaaaaatgaattgcttggaagatacgaacattactgttttaaaattagagaactacaccctgagagcaaagcgaacaggataggagctctctatataggaggtaaaagcactgcagatattatactgtcgcgaatggaagaactagacggaacaaatgagttctacgaatttttagggcaaatggaggaagacacaaatgaataa

SEQ ID NO: 3651 - DNA, 485 bp, Staphylococcus aureus
atgttcaacattaatattgatgaagatgaagcacgtgagttacttgagcaggctatcaatgcacgtgtggacgaattagcgaaagagaaatattttatgacttacaaagagttgtctaactatctgaatttaagtaagcctactattgaagaattacttattaataatggcatgaaatattatatggtcggatctacgtatagattcaaaaagtctgatgtagatgaattcatggaacagcttactgctcatatkaatatccagaataacgactttaaacaagtcaatatcaaawrgwtrtwggaggcaaggcaaatgaaaatgtayttarcttatatytgcttagtttcattgttaacaatwttattactagcaatatckaayatgtatgtygcttttagygtthmkgcwtgrctrrtaacttwwggatktaatttaacaggaggattasaamrtgmrwaaacaagttattattacaaaaacag

SEQ ID NO: 3652 - DNA, 381 bp, Staphylococcus aureus
gtggataaaatggckararmagcaagrattgtaasratamaygataaaccttataggttcagtaaatttgaaatggaattaatwgaaagtcacggtataacmscyggaatggtttctaaragagtaaaagacggttgggaactacatgaagcaatggacgcaccagaaggyaygcgtttaagcgagtacagagaaaagaaaacaatagaaagactggaacaagctagactcgaacgyaaattggaaagamagcgaaagaragaggcwgagctaagaagaaagaagccacayttrtttaatgtrcctcaraaacattcacgtgatccgtactggtttgatamtacttataaccaaatgttyaagaartggcaggaagyataa

SEQ ID NO: 3653 - DNA, 378 bp, Staphylococcus aureus
gtggataaaatggcgagaaaagcaagrattgtaacaataaaygataaaccwtataggttyasyaaatytgaaatggaattaatagaaagtcacggtataaccgctggaatggtttctaagagagtaaaagacggttgggaactacatgaagcaatggacgcaccagaaggtacgcgtttaagcgagtacagagaaaagaaaacaatagaaagactggaacaagctagactcgaacgcaaattggaaagaaagcgaaagaragargctgagctaagaagaaagaagccacryttgtttaatgtwccwcagaaacatycaagaggacgttatgcgtgctacctgwtggaaaacgacatattcgtgaaagttaagaagtag

SEQ ID NO: 3654 - DNA, 324 bp, Staphylococcus aureus
gtggataaaatggcgagaaaagcaaggattgtaacaataaatgataaaccttataggttcagtaaatttgaaatggaattaatagaaagtcacggtataaccgctggaatggtttctaagagagtaaaagacggttgggaactacatgaagcaatggacgcaccagaaggtacgcgtttaagcgagtacagagaaaagaaaacaatagaaagactggaacaagctagactcgaacgcaaattggaaagaaagcgaaagagaggtacgaggcgcaagttaaaagaggtgcagttattaaagtgggtcagttgtttgaaaatataa

SEQ ID NO: 3655 - DNA, 360 bp, Staphylococcus aureus
atgagtatcgtaaagattaacggtaaaccatataaatttaccgaacatgaaaatgaattgataaaaaagaacggtttaactccaggaatggttgcaaaaagagtacgaggtggctgggcgttgttagaagccttacatgcaccttatggtatgcgcttagctgagtataaagaaattgtgttatccaaaatcatggagcgagagagcaaagagcgtgaaatggctaggcaacgacgtaaagaggctgaactacgtaagaagaagccacatttgtttaatgtgcctcaaaaacattcacgtgatccgtactggtttgatactacttataaccaaatgtttaagaaatggcaggaagcataa

SEQ ID NO: 3656 - DNA, 1014 bp, Staphylococcus aureus
ttgctgcaatgcaccttggctataaagaaaaagataataccaaaggtgattaacgtggcaaagttaaacatgaacaatgaaattaagaaagtggaacawcgacttgaaaaggcaataaaaagtaaagattctgtattagaacaggcatcattacacttattgtcttctggtggtaaaagagtacgcccagcatttgtwattctgagtagccaatttggcaaagatgaacaaacgtctgaacaaacgtatcaagttgcagtcgcattagagttaattcatatggcaacacttgttcatgatgacgttattgataaaagcgacaagcgtcgaggcaagttaaccatatcaaagaaatgggatcagacaactgctattttaactgggaattttttattggcattaggacttgaacacttaatggcmgttaaagataatcgtgtacatcaattratatctgaatctatcgttgatgtttgtagaggggaacttttccaatttcaagaccaatttaacagtcaacagacaattatyaattatttacgacgtatcaatcgcaaaacagcactgttaattcaawtatcaactgaagttggtgcaattacwtctcaatctgataaagaractgtacgaaaattgaaaatgattggtcattatataggtatgagcttccaaatcattgatgatgtattagacttcacaagtaccgaaaagaaattaggtaagccggtcggaagtgatttgcttaatggtcatattacgttaccgattttattagaaatgcgtaaaaayccagacttcaaattgaaaatygarcarttacgwcgwgayagygawcgmaaagaatttgaagaatgtatycaaatyattagaaartctgacagyatyratgarkctaargmagtaagttcgaagtatytaagtaaagctttgratttgatttctgagttrccagatggacatccraaatcactacttttaagtttgacgaaaaaaatgggktcaagaaacacrtag

SEQ ID NO: 3657 - DNA, 1675 bp, Staphylococcus aureus
atgtataaaawttataacatgacycaacttacactaccaatagaaacytctgttagaattcctcaaaatgatatttcrcgatatgtwaatgaaattkttgaaackatacctgatagcgaattcgatgaattcagacatcatcgtggygcaacatcctatcatccaaaaatgatgttaaaaatyatcttatatgcatayactcaatctgtattttctggtcgwagaatagaraaattacttcatgacagtattcgawtgatgtggttagctcaaratcaaacaccttcttataaaactattaatcgttttagagtraatcctaatactgatgcrytaattgaatctttatttatycagttycatagtcaatgtttaaagcaaaaycttattgatvatarwtcratttttattgatggtacawaagtagaagctartgccaatagrtatacatttgtgtggaagaaaagtattcmaaatyacgaatcgaaattgaacgaaaattcaaaarcaytatatcgtgacttagtygaagaaaarmtawtwcyasarataaaagaaratggagatagcgatttaacaatagaagaaatagatttaattggtagtcatttagataaagaaatcgaagatttaaatcattctattsagaacgaagattgtrctcaaattagaaaacagacccgtaaaaaaakaactgagattaagaagttcaaaaagaaatttgatgattattccgaaagaaaaartaaatatgaagaacaaaaatcgattcttaaagatagaaatagyttttctaaaactgatcatgatgcaacttttatgagaatgaaggaagaccatatgaaaaatggccaacttaagccargatacaatttacaaatagcgacaaattctcaatttgttttatcctatgacctatttcaaaacccracagatactagaacwttaatyccatttttaacaatgattcaaaataccttcggttatttrycrgagtatattgtagctgatgcaggttatgrtagtgagcaaaactatatggcyattatagatgattttaataaaacgccacttattacgtatggyatgtttattaaagataaaackagaaagtttaaaagtgvcattttyrasactyaaaaytggaaatatgacgaacttaatratgaatttatatgtcctaataacaaaagaataggtttwaaaagrtatsyrwwscdwartkakaratatrgtwtwaaacgwgacttcaarctatatgaatgygatgactrttcakcatgttctttgagrcawcaatgcatgaarccaaattcraaawccaataagaaaakcatgaagaattataattkgraatacwttaaagyccaaattaatcaaaagctttctgaaccagaaacgaaaaamatctatagtcawagaaaaattkatgtagagyytgyttttggatttatgaargytattttgrgtttmaytcgwaygtcagttcgaggaataaataawgttaaacgagagctaggttttgtattratggcamttaatataaggaaaatagyagctcracgagctgtayattatmaaatamatwtmaaaaaagctratttcyatcaaataawtaatagaaawywrcttttttamatygcctaagaacttaatgtcccagcctccttcataa

SEQ ID NO: 3658 - DNA, 1636 bp, Staphylococcus aureus
atgaagtgccttatgtataaaaattataacttgatccaacttacactaccaatagaaacttctgttagaattcctcaaattgatatttcgcgatatgttaatgaaattgttgaaacgatacctgatagcgaattcgataaattcagacatcatcgtggcgcaacatcctatcatccaaaaatgatgttaaaaatcaccttatatgcatatactcaatctgtattttctggtcgtagaatagagaaattacttcatgacagtattcgaatgatgtggttagctcaaaatcaaacaccttcttataaaactattaatcgtattagagtgaatcctaatactgatgcgttaattgaatctttatttatccagtttcatagtcaatgtttaaagcaaaatcttattgatggtacaaaagtagaagctaatgccaataggtatacatttgtgtggaagaaaagtattcaaaatcacgaatcgaaattgaacgaaaattcaaaaacattatatcgtgacttagttgaagaaaaaataataccagagataaaagaagatggagatagcgatttaacaatagaagaaatagatttaattggtagtcatttagataaagaaatcgaaggtttaaatcattctattgagaacgaagatagtactcaaattagaaaacagacccgtaaaaaagaactaagattaagaagttcaaaaakaaatttgatgattattccgaaagaaaaaataaatatgaagaacaaaaatcgattcttaaagatagaaatagcttttctaaaactgatcatgatgcaacttttatgagaatgaaggaagaccatatgaaaaatggccaacttaagccaggatacaatttacaaatagcgacaaattctcaatttttttatcctatgacctatttcaaamcccaacagatactagaactttaattccatttttaacaatgattcaaaataccttcggttatttaccrgagtatattgtagctgatgcaggttatgrtagtgagcaaaactatatggctattatagatgattttaataaaacgccacttattacgtatggyatgtttattaaagataaaackagaaagtttaaaagtgacattttyaacactyaaaaytggaaatatgacgaacttaatgatgaatttatatgtcctaataacaaaagaataggttttaaaagatatgcataccgtaatgatagatatggttttaaacgwgacttcaarctatatgaatgygatgactgttcakcatgttctttgagrcawcaatgcatgaarccaaattcgaaatccaataagaaaatcatgaagaattataattgggaatactttaaagyccaaattaatcaaaagctttctgaaccagaaacgaaaaaaatctatagtcaaagaaaaattgatgtagagcytgtttttggatttatgaaggctattttgggtttcactcgaatgtcagttcgaggaataaataawgttaaacgagagctaggttttgtattaatggcacttaatataaggaaaatagyagctcracgagctgtayattatmaaatacatwtmaaaaaagctgatttctatcaaataattaatagaaatcarcttttttacattgcctaa

SEQ ID NO: 3659 - DNA, 710 bp, Staphylococcus aureus
atgtataaaaattataacatgaccccaacttacactaccaatagaaacttcgttagaatycctcaaaatgatatttcrcgatatgttaatgaaattgttgaaacratacctgatagcgaattcgatgaattcagacatcatcgtggygcaacatcctatcatccaaaaatgatgttaaaaatcatcttatatgcatatactcaatctgtwtwwtctggtcgtagaatagagaaattacttcatgacagtattcgaatgatgtggttagcccaagatcaaacactttcttataaaactattaatcgttttagagtgaatcctaatactgatgcgttaattgaatctttatttattcagttctatagtcaatgtttaaagcaaaatcttattgatgataattcaatttttattgatggtacaaaagtagaagctagtgccaatagatatacattggtgcggaagaaagtattcaaaatcacgaatcgaaattgaacgagaattcaaaaacactatatcgtgacttagttgaagaaaaaataataccagagataaaagaagatggagatagcgatttaacaatagaagaaatagatttaattggtagtcatttagataaagaaatcgaagattgtgctcaaattagaaaacagacccgtaaaaaagaactgaaagatgagacagtagatgctcatctttttttagaacttttt

SEQ ID NO: 3660 - DNA, 357 bp, Staphylococcus aureus
atgattcaaaataccttcggttatttaccggagtatattgtagctgatgcatgttatgatagtgagcaaaactatatggctattatagatgattttaataaaacgccacttattacgtatgkcatgtttattwaagataaaactagaaagtttaaaagtgacattttyaacactcaaaattggaaatatgacgaacttaatgatgaatttatatgtcctaataacaaaagaataggttttaaaagatatgcataccataatgatagatatggttttaaacgtgacttcaagctatatgaatgcaacgagctgtacattataaaatacatatcaaaaaagctgatttctatcaaataa

SEQ ID NO: 3661 - DNA, 405 bp, Staphylococcus aureus
ttgaaatactttaaaaaaataagacactttgcccaacttacactaccaataaaaacttctgttagaattcctcaaaatgatatttcgcgacatgttaatgaaattgttgaaacgatacctgatagcaaattcgatgaattcagacatcatcgtggcgcaacatcctatcatccaaagatgatgttaaaaatcatcttatatgcatatactcaatctgtattttctggtcgtagaatagagaaattacttcatgacagtattcgaatgatgtggttagctcaagatcaaacaccttcttataaaactattaatcgttttagagtgaatcctaatactgatgcgttaattgaatctttatttattcagttcgcttatttttcttggatttcttgtatatcattttaa

SEQ ID NO: 3662 - DNA, 390 bp, Staphylococcus aureus
atgtataaaaattataacatgacccaacttacactaccaatagaaacttctgttagaattcctcaaaatgataatacgcgatatgttaatgaaattgttgaaacgatatctgatagcgaattcgatgaatttatatgtcctaataacaaaagaataggttttaaaagatatgcataccgtaatgatagatatagttttaaacgtgacttcaagctatatgaatgtgatgactgttcatcatgttctttgagacatcaatgcatgaagccaaattcgaaatccaataagaaaattatgaagaattataattgggaatactttaaagcccaaattaatcaaaagctttctgaaccagaaacgaaaaaatctatagtcaaagaaaaattgatg

SEQ ID NO: 3663 - DNA, 243 bp, Staphylococcus aureus
atgaagtgccttatgtataaaaatyataaywtgayccaacttacactaccaatagaaacttctgttagaattcctcaaawtgatatttcgcgatatgttaatgaaattgttgaaacgatacctratagygaattmgatgaattcagacaycatcgtggcgcaacatcytatcatccaaaaatratgttaaaaatcatcttatatgcatatgagcttaatgtcccaagcgcatttttatattga

SEQ ID NO: 3664 - DNA, 153 bp, Staphylococcus aureus
gtgcaacgcttaaygcatatacaaawtgaatgtgctgataatgatttactcaamttaaaaggtgatttttattcaaygatgaatgaaagttgcctttttayttttggtaaaagttcatgcgtcagtgaattgtgtaagtttttcaaaaagtaa

SEQ ID NO: 3665 - DNA, 378 bp, Staphylococcus aureus
atgrataaacaagttagaaatacaacagaaattgtacgtttggcgaagcwgaaatcamaaaagacaagrgaaaaagtagacaaagcgatttctaaattttssattgaaggtwwwgytattaattttaattcaatagcaaaggaasstaatgtttctaaatcatggctttataaggaacacgatattaggcaaagaatcgaatcccttcgtgagcgtcaaataacakcaaatgtagtctcaaaacccaagaaaagttctcgttcggaggaaatccttatwaaaaccttaaaaagaagrgtwatggaattaraaaaagaaaataaaaaattacagaaccaaattcaaaaattatatggagatctgtataataaagartar

SEQ ID NO: 3666 - DNA, 486 bp, Staphylococcus aureus
atgtcatctgacacaaacagtttagcacatacraaatggaattgtaagtawcatattgtctttgcacctaaatacagaagacaagygatatatggaaaaataaaaaaagatatagggattatattrcgtcaattatrtgaaagaaaaggtgtagagataattgaagcagaggyatgtaaagatcatatccatatgttagttagtataccacccaaacttggggtatcatcatttgttggctatttaaaaggaaaaagtartttaatgatatttgatagacatgctaacttaaagtatagatatggaaatagaaagttttggtgtaaaggattttatgtggatacagtaggtagaaataaaaaagtgattgaaaattatattcgtaatcaattacaagaggatatcgttgcagaysaaatytcaatggaagaatatttagatcctttcactggagagaaaaataaaaaaagaaagaaaaaagagtaa

SEQ ID NO: 3667 - DNA, 957 bp, Staphylococcus aureus
atgtataatccattcgacgaagcttatcatggcttatgcgaagagatattagaaatagggaatagacgcgatgatcgcacacataccgggacaatttccaaatttgggcatcaattgcgtttcgatttaaccaaagggtttcctttacttacaaccaaaaaggtttcttttaaattagtagcaactgaattattatggtttattaaaggagatacaaacattcaatacctacttaaatataataacaatatatggaatgaatgggcatttgaaaattatgttcagtctgatgattatcatggaccagacatgacagattttggacatcgttcccagcaagaccctgaatttaacgagcagtataaagaagaaatgaaaaaatttaaagaacgtattctaaacgatgatgcatttgctaaaaaatatggcaacttagggaatgtttatggtaaacaatggagagattgggaagataaaaatggaaatcattacgatcaattaaaatcagttatacaacaaattaaaaccaatccaaactctcgacgtcacattgtttcagcatggaatcctactgaaatcgattcaatggcattaccaccttgccacacaatgtttcaattttacgtacaagagggtaaattaaattgtcaattatatcaaagaagtgctgatatatttttaggtgttcctttcaatattgcaagttatgctttactgacacatcttgttgcaaaagaatgtggacttgaggtgggtgaattcattcatacatttggagatgcacatatttattccaatcatatggatgcaatacatacacaattatcaagagatagttatctaccacctcaattaaaaattaatacagataaatcaatttttgatattaattatgaagatttagaattgataaattatgaatcacaccctgctattaaagcacctattgcggtataa

SEQ ID NO: 3668 - DNA, 108 bp, Staphylococcus aureus
ctgaaaggttatgatattttagttgtagttttactaattttaatgattggtcttgcatttgttatgtctcctttaagatgttygtttgcgtttcgtgtactttgtggg

SEQ ID NO: 3669 - DNA, 516 bp, Staphylococcus aureus
atgacwaactttacttttgatggtgcacacagtagtttagarttccaaattaaacatttaatggtttctaaagtgaaaggttcattygatcaatttgatgtmgctgttgaaggagatattaatgacttcagyactttraaagctactgcaacaattattccaagctcaattaacactaaaaacgaagcacgtgataaccacttaaaatctggtgatttctttggtactgaygaatttgataaaatyacdtttgwracaaaatcartwwcwgaaarcaaagttgtwggtgatttaacaattaaaggyatcactaacgaagaaacattcgaygttgarttyaacggmgtaagtaaraatccwatggatggttctcaagtaacaggtrttattgttactggtayaatcaayagagaaaamtayggcattaactttaaccaarcacttgaaactggtggmgtaatgctaggyaaagatgttaaattcgaagcatcagctgaattctcaatctcagaataa

SEQ ID NO: 3670 - DNA, 118 bp, Staphylococcus aureus
taaataatagtagttaaagtagtttaagaggagatattaaagggatattttactttaaataaaaattaacaaggtttataatttgtagtagttaaagtatttaaagaggtgggaacat

SEQ ID NO: 3671 - DNA, 118 bp, Staphylococcus aureus
atgttcccacctctttaaatactttaactactacaaattataaaccttgttaatttttatttaaagtaaaatatccctttaatatctcctcttaaactactttaactactattattta

SEQ ID NO: 3672 - DNA, 74 bp, Staphylococcus aureus
cgcgggatggagcagttcggtagctcgtcgggctcataacccgaaggtcggtggttcaaatccgcctcccgcaa

SEQ ID NO: 3673 - DNA, 84 bp, Staphylococcus aureus
gccggtgtggcggaattggcagacgcgcgggactcaaaatcccgttccacttgtggagtgtcggttcgaccccgaccaccggta

SEQ ID NO: 3674 - DNA, 75 bp, Staphylococcus aureus
gcgggagtagttcaacttttagaacacgttccttcccggaacgaggtataggtgyaaatcctatcttccgctcca

SEQ ID NO: 3675 - DNA, 74 bp, Staphylococcus aureus
aggggcatagttcaacggtagaatagaggtctccaaaacctttggtgtgggttcgattcctactgcccctgcca

SEQ ID NO: 3676 - DNA, 99 bp, Staphylococcus aureus
atgttaacgtatgtacaattccatttaaacttaaaaaatagattctataatcaaatcggattgatgaaaggttatttacttttcatcaatcygattttt

SEQ ID NO: 3677 - DNA, 117 bp, Staphylococcus aureus
atgccagatttaatagaaatgatcgtttttaaagtttttacaagttggcggggccccaacacagaagctgacagaaagtcagcttacaataatgtgcaagttggcggggccccaaca

SEQ ID NO: 3678 - DNA, 93 bp, Staphylococcus aureus
gtggaagaaaagtattcaaaatcacgagaagaaatagatttaattggtagtcatttagataaagaaatcgaagatttaaatcattctatttag

SEQ ID NO: 3679 - DNA, 99 bp, Staphylococcus aureus
ttgaaaagaaaacacacgtattataaatttaaaataccgaaatatagcattattaaatcaaaaatagaattaaaaaagaaaattaatcgagaaaagtat

SEQ ID NO: 3680 - DNA, 93 bp, Staphylococcus aureus
atgaaaaatgtgtcaatttacaaaacaactcaagaattaagttttgtaagttygttagatttttatttaacgaaacatttaactttaatgctt

SEQ ID NO: 3681 - DNA, 76 bp, Staphylococcus aureus
gggggcttagctcagctgggagagcgcctgctttgcacgcaggaggtcagcggttcgatcccgctagtctccacca

SEQ ID NO: 3682 - DNA, 90 bp, Staphylococcus aureus
gtgtttatttttaaaacaacatctaaaagccattttcataataatgttaaatcattagaatgtataaagattccaattaataaaaataga

SEQ ID NO: 3683 - DNA, 102 bp, Staphylococcus aureus
ttgtattttaaaaatagttctttaaattatatacccaccacatttggtggagaacctaaaaaaaagcacttcccaaaaatggaaagtgcaagtagtgagcca

SEQ ID NO: 3684 - DNA, 99 bp, Staphylococcus aureus
atgtgtaataatcacaaaaaagttaaatattttaaggcttgtttaattattaatgattttatatataaagagcagtataataaagttgttaatatatta

SEQ ID NO: 3685 - DNA, 501 bp, Staphylococcus aureus
ttgaataattttaaacgactaatttttagtcgtttttttattttggataaaaggagcaaacaaatggatattaactggaaattgagattcaaaaacaaagcagtactaactggtttagttggagcattgttgctatttatcaagcaagtcacggatttattcggattagatttatctactcaattaaatcaagctagcgcaattataggcgctatcctcacgttacttacaggtattggcgttattactgacccaacgtcaaaaggcgtctcagattcatctatagcacagacatatcaagcgcctagagatagcaaaaaagaagaacaacaagttacgtggaaatcatcacaagacagtagtttaacgccggaattaagcgcgaaagcaccaaaagaatatgatacatcacaacctttcacagacgcctctaacgatgttggctttgatgtgaatgagtatcatcatggaggtggcgacaatgcaagcaaaattaactaa

SEQ ID NO: 3686 - DNA, 348 bp, Staphylococcus aureus
atgaatatagatggattagacgcactgttaaaccaatttcacgatatgaaaaccaacattgatgatgatgtagatgatattttacaggaaaacgccaaagaatatgtagtacgagctaaattgaaagctagagaagtaatgaataagggttattggactggtaatttatcacgcaatatcagatataaaaaaactggcgatttgcaatacactatcacatcgcacgcagcttatagtggtttcttagaatttggtactcgatacatggaggctgaaccttttatgtggccggtatacgaagtgattaggaaatcaactgtagaagaattgaaagcgttgtttgaatag

SEQ ID NO: 3687 - DNA, 1536 bp, Staphylococcus aureus
atgttaaaagtaaacgaatttgaaacagatacagatctacggggaaacataaattacttatttaatgatgaagccaatgttgtttacacatatgacgggacggaatccgatttattacaaaacgttaatgaagtaagtaaatacattgaacatcacatggattaccaacgacctagattgaaagtgttaagtgattattacgaaggtaaaactaagaacttagttgagttaacacgacgcaaagaagagtacatggcagataaccgtgtagcgcatgattacgcatcttatattagcgattttatcaacggctatttcttgggtaatccaattcaatatcaagatgatgacaaagatgtattagaagttattgaggcgttcaatgatttaaatgatgttgagtcacacaatagatctttaggattagatttgtcaatttatggcaaagcttatgagttaatgattagaaaccaagatgatgaaacgcgtttatacaagagtgatgcaatgagtacttttgtcatatacgacaatacaattgaacgtaatagtatcgcaggcgttagatatttaagaactaaaccaatagacaagactgacgaagatgaagtgtttacagttgatttattcacttcacacggtgtttatagatatcttaccagtagaacaaatggattgaagctcacaccacgtgaaaacggttttgaatcacactctttcgaacgtatgcctattacagaatttagcaacaacgaaagaagaaaaggggattatgagaaagtaatcactttaattgatttgtatgataatgctgaatcagatactgctaactatatgagtgatttaaatgacgctatgttacttattaaaggtaatttaaatttagatcctgtagaagttagaaaacaaaaggaagctaacgtgttgtttttagaaccgactgtttatgctgatagcgaaggtagagaaacagaaggctctgttgatggtggttatatttataagcaatacgatgtacaaggtaccgaagcttataaagaccgtttaaacagtgatatacacatgtttaccaacacgcctaacatgaaagatgataactttagcggcactcaatcgggcgaggcaatgaaatacaaattatttggattggaacaacgtactaaaactaaagaaggattgtttactaaagggttaagacgtcgtgctaagttgttagagacaatacttaaaaatacatggtcgattgacgctaacaaagatttcaatactgttagatacgtatacaacagaaacttacctaaatcattgattgaagaattaaaagcttatattgattctggtgggaagattagccaaacaactttaatgtctctattctcgttcttccaagaccctgaattagaagttaagaaaatcgaagaagatgagaaagaatctattaaaaaagctcaaaaaggtatttataaagaccctagagacatcaatgatgacgaacaagatgatgatacaaaagatactgttgataaaaaggaatga

SEQ ID NO: 3688 - DNA, 190 bp, Staphylococcus aureus
atggggtgtttagtggtggttaaagaaattttgagactattattcttactagcgatgtatgagytaggtaagtatgtaactgagcaagtatatattatgatgacggctaatgatgatgtagaggcgccaagtgacttygmaaarwtsagwgmtgmagtytsatkkratgagggcggaggtgtcggagtag

SEQ ID NO: 3689 - DNA, 231 bp, Staphylococcus aureus
gtgttaaaaatgccgaaagaaaaatattacttataccgagaagatggcacrgaagatattaaggtcatcaagtataaagacaacgtaaatgargtttattckctcacaggagcccatttcagcgacgaaaagaaaatyatgactgatagwgacctaaaacgattyaaaggcgctcacgggcttctatatgagcaagagctaggattrcaagcracgatatttgatatttag

SEQ ID NO: 3690 - DNA, 207 bp, Staphylococcus aureus
gtgacacaatacttagtcacaacattcaaagattcatcaggactaccacatgaacattttactgctgctagagataatcagacgtttacagttgttgaggcggagagtaaagaagaagcgaaagagaagtacgaggcacaagttaaaagggatgcagttattaaattaggtcagttgtttgaaaatataagggagtgtgggaaatga

SEQ ID NO: 3691 - DNA, 189 bp, Staphylococcus aureus
rtgacrcaatacttagtcacaacattcaaagattcaacaggacraccacatgaacatwttactrbkgctagagataatcagacgtttacagttrttgaggcagagagtaaagaagaagctgagcgcaaatacgaggcacaagttaagataaggagagatggagatgccaaagaaaacggtaacgattga

SEQ ID NO: 3692 - DNA, 207 bp, Staphylococcus aureus
atgaaaatcaaaattgaaaaagaaatgaatttacctgaacttatccaatgggcttgggataaccccaagttatcaggtaataaaagattctattcaaatgatgttgaacgcaactgttgtgtgacttttgatgttgatagcatcttatgtaatgtgactggatacgtatcaattaacgataaatttactgttcaagaggagatataa

SEQ ID NO: 3693 - DNA, 159 bp, Staphylococcus aureus
atggtaaaagctatggtacagtttcaaattgctaatgacatgcgtatcggtgagctacttgcaataaagagagtaaatataaactatgaagataaaacgctagatatcgacggtaaagttaattggataactgaaaaawgacgggagcattcggagtaa

SEQ ID NO: 3694 - DNA, 117 bp, Staphylococcus aureus
ctgattaaaattttcaatgatattagtgatacacatcaactaaaacgcgtcattacggcattttcaacattaataatatttacgtatttactatacacgtcgacaataaatacagat

SEQ ID NO: 3695 - DNA, 141 bp, Staphylococcus aureus
atgacaagagaaagaagatcatttagttcagagtttaagttacaaatggttagattatataaaaatggtaagcctaggaatgaaattatacgcgagtatgatttcacaccttcgacgtttgtaaatggcggttataaaatg

SEQ ID NO: 3696 - DNA, 675 bp, Staphylococcus aureus
atgaactatttcagatataaacaatttaacaargaygtyatcactgtagcsgtkggctactatctaagatatrcrytkagytatcgtgatatatctgaaataytaagrgaacgtggtgtmaacgttcatcattcaacrrtctaccgttgggttcaagaatatgchccmrttttrtatcraatttggaagaaaaarcataaaaaagcktattayaartggcgtrttgatgagacrtayatcaaaatwaaaggamartggwgytatytrtatcgygcsattgatrcagakggacatacattagatatttggttrcgyaarmaacgagwtmatcawtcagcatatgcgtttatyaarcgyctyattaaacaattyggtaarcctcaaawgrtarttacagatcargcaccttcaacgaargyagcmatrgctaaartaattaaagyktttwarytkaaacckractgtcattgyacatckaaatatctsaataacytcattgarcaagatcaycgtcayattaargtragaaagacaagrtatcaaagtrtcaatacrgcaaaraatacwytmaaaggyattgaatgtattyacgswytatataaaaagaaccgyagrtctcwtcagatctacggattttcvccatgccacgaaattakbatcatgytagcmagttaa

SEQ ID NO: 3697 - DNA, 507 bp, Staphylococcus aureus
atgaatacaatcaaaagtacgataaacacagaagccatatttagcgatgatgaacaacaccgctatttactcaagaaaacatgggatgaaaagaaacccgcttgtacagtgataacgatgtaccctcatttagatggtgtattatcactcgatctcacaactgttcttatcctcaatcaattagctaatactgaacaatatggtgctgtatatcttgtaaatctattttcaaatattagaacacccgaaaacctcaaacatatcaaaaatccatacgatgagcacactgatattcatttgatgaaagcgattagtgaaagtgacacagtgattcttgcttatggtgcctatgcgaagcgaccagttgttatcgaccgtgtcgaacaagtgatggaaatgttaaaacctcataaaaagaaagtaaaaaagctcatcaatccagtaacaaatgaaattatgcatccactcaaccctaaggcacgtcaaaaatggattttgaaatcatag

SEQ ID NO: 3698 - DNA, 312 bp, Staphylococcus aureus
atgaacatcaatcgatatatcacaagaggcattagtgaacacctatctctagatcttcaaatcttactttggaacatggtaaaagaaagagataatcaacctgatacagattacctacacatttttagactgaaagaagatgagaatatactttcaatcatacatgagcaagaacaacccacgtacaaattggaatatcactatacaaactatataaaaaatcaaaatgcattacctaagaaagtctacgtcatccgagaagatgatgtagatgttttttattatgtgatgcttttaccagaagaatactaa

SEQ ID NO: 3699 - DNA, 297 bp, Staphylococcus aureus
atgtcttacaagcaagaagatgattttaaaaaattaaaaaatagaattttaggtatttcaattaatttaccagaaggacaaacatttactttccatgacttgaaccgtcgtgcaaatgtacaatgctcaaaagctgtacaacaaaatgttggacgttggttcgcatattttgtaaaacaagcgccacgtgttccatttattattatcggtaaaaataccaatggtcatttagtatatatgaaagtcggacctaatccactcaatgatagcaacccttcgaaaggaggtgttcgctaa

SEQ ID NO: 3700 - DNA, 96 bp, Staphylococcus aureus
atgtatgttaaaaatgcttcaaaaaaacacaaaacacaaaaatatatgcaaaaatttcaattgctttattttaaaagattaaaatcacaaaaaata

SEQ ID NO: 3701 - DNA, 720 bp, Staphylococcus aureus
atggataaaaaagaattagcgaaatttataggcaataaaatcagatactatagaaccaaattgaacttaactcaagatcaacttggagaaaaactcaacactaaaaaagctactatttcaaattatgagacagggtacagaactcctaaacaagatgatttgtttgaaattgctcatattttaaatatcagtatcgatgatttgtttcctacaagaaataataaaaaaaacgacatcacttccatatacaacaaactcacacctccccgccaagaaaacgtacttaactacgcaaatgagcaattagatgaacagaataaagtcacttctatagatgaatataaagagtctaaactagtatcgtatattgcatgtggtgcaactggtgctggcataggagaagaattatatgatgacatattgcatgaagaagtattttttaaagaagacgaaacgccatcaaatgctgatttttgtattttagttaatggtgattcaatggaacctatgttaaaacaaggaacatacgcttttattaagaaagaagattctattaaagatggtacaattgcactcgttgtattagatggagtaagtcttatcaagcgtgtagatatatgcgaagactatattaatttggtatctctaaatccgaagtatgatgatatcaaagtcgcttcgtttagtaatattaaagtaatgggcaaagttgtattgtga

SEQ ID NO: 3702 - DNA, 548 bp, Staphylococcus aureus
atggtaaaagctatggtacagtttcaaattgctaatgacatgcgtatcggtgagctacttgcaataaagagagtaaatataaactatgaagataaaacgctagatatcgacggtaaagttaattggataactgaaaaaagacgggagcattcggagtaaaggagacaactgaaagaagtaatagctataaggccacagggctcactacccaaagcatcgacttactaagaacacttatgcttggaatgataagtttattgatagagagtacatattcacaaatacgtctggtagccctatcgactcgaacaaaattagccacattattaaaggggggcgctgatattagttctattaagaaacctataacgacgcatacattacatcattcgcatatatctacacttgctcaattaggaattaacttaaaagcaatgcaagagcatgtaggtcattcagattataaaaaaaatctagagatatacacacatgttactaatcagatggcgaaagatatgatgaataaatttgaacgattggggagttaa

SEQ ID NO: 3703 - DNA, 261 bp, Staphylococcus aureus
ttgagcrctttactttataatrgagacaaagatatatctcacgaragagaatcgaggtgtataaacatgytatttgtcattttagttttatatrtyaytggtattrcatttattctactcagtgtttttggttcaaagactgaaggattatctacgaaacatactttatataccattggcagtgctattataacgattgctattttyatttcaattggctatgccattcaatacttaactgcagcgctttatggtttgtaa

SEQ ID NO: 3704 - DNA, 186 bp, Staphylococcus aureus
atgaataaacatataaataaaaaagcsrcaaaactacttgaagattataaaaaggttcaacaaagaaaatcgraagaaactgatagaggttgtttgaaaagtgtcatcatgcttatcgtcttatttttcttaattatttttggtattgtggcatgttctacaaacgtaaactttttcttccagtaa

SEQ ID NO: 3705 - DNA, 726 bp, Staphylococcus aureus
atgaaaaagaacatcatgaataaattagttttatcaacagcattgttacttttagraacyacatcaacacaacttcctaaaacaccaatcagtttttcatctgaagcaaaagcctataatatcagtgaaaacgagactaatatcaatgarytaatmaartattayacwcagcckcatttwtcaytatcwrrwaaatggytatggcaaaagcccaatggtagcattcatgcaacattgcaaacgtgggtttggtatagtcatattcaagtgtttggatccgagagttggggaaacattaatcagttaagaaataaatacgttgatatatttggaactaaagatgaggacacagttgaaggttactggacttatgatgaaacatttactggtggtgttacgccagcagctacttcatctgataarccttatagactatttttaaaatatagtgataaacaacaaactatcatcggtggacatgaattttacaaaggaaataaaccagtattaactttaaaagaattagatttccgtattcgtcaaacattaataaaraataaaaagttatataacggagaatttaataaaggtcaaattaagataactgctgatggaaataattacacgattgatttaagtaaaaagttaaaattaactgacacaaaccgttatgttaaaaatcctmrwaatgcasaaattgaagtcatactcgaaaaatctaactaa

SEQ ID NO: 3706 - DNA, 201 bp, Staphylococcus aureus
atgaaacaaggtacagttaaatggtttaacgctgaaaaaggattcggctttatcgaagttgaaggagaaaatgacgtattcgtacatttttcagcaattaaccaagatggttacaaatcattagaagaaggtcaagctgttgagtttgaagtagttgaaggcgaccgcggtccacaagctgcaaacgttgttaaactataa

SEQ ID NO: 3707 - DNA, 132 bp, Staphylococcus aureus
gtgggycccaacacagaagatgacgaaaagtcagcttacaataatgtgcaagttkgggatgggccccaacaaagagaaattggattcccaatttctacagacaatgcaagttggggtgggacgacgaaataa

SEQ ID NO: 3708 - DNA, 1041 bp, Staphylococcus aureus
atgacaaccaacacagttacattacaaacagcacatattgtaagtttaggagatatcgaagaagctaaagcaagcattaaaccatttattcgtcgaacacctctaattaaatcaatgtatttaagccaaagtataactaaagggaatgtatttctaaaattagaaaatatgcaattcacaggatcttttaaatttagaggcgctagcaataaaattaatcacttaacrgatgaacaaaaagaaaaaggcattatcgcagcatctgctgggaaccatgcwcaaggtgttgctttaacagctaaattattaggcattgatgcaackatygtaatgcctgaaacagcaccacaagcgaaacaacaagcaacraaaggctatggggcaaaggttattttaaaaggtaaaaactttaacgaaactagactttatatggaagaattagcgaaagaaaatggcatgacaatcgttcatccatatgacgataagtttgtaatggcaggccaaggaacaattggtttagaaattttagatgatatttggaatgtgaatacagtcatcgtaccagttggcggtggaggattaattgcaggtattgccaccgcattaaaatcatttaacccttcaattcatattatcggtgttcaatctgagaatgttcatggtatggctgagtctttctataagagagatttaactgaacatcgagtggatagcacratagcagatggttgtgatgtaaaagttcctggtgaacaaacatatgaagtagttaaacatttagtagatgaatttattcttgttactgaagaagaaattgaacatgctatgaaagatttaatgcagcgtgccaaaattattactgaaggtgcaggcgcattaccaacagctgcaattttaagtggaaaaataaacaataaatggcttgaagataaaaatgttgttgcwttagtttcaggcgggaatgttgacttaactagagtttcaggtgtcattgaacatggactgaatattgcagatacaagcaagggtgtggtaggttaa

SEQ ID NO: 3709 - DNA, 444 bp, Staphylococcus aureus
atgaataaagcatcatttgataaaaaagttaaaaagcaattatggtttttgaacaagaaggagaaacaagcattagatcaacgattrtcttctatatctgatgatgacagcgttaacttaaataagcctgttacctttgctaatgcttacttaagacaaaatgtatttcgaaataaagaaacaaaaagttatagtatgtttgttacattagtagtgatgatgtttgcttatgttgctttattaggyttgtttttatttgggctaattacaagtctatctggcgtacaatttttcgttagtcctaaggtagatttatcwacaactgttgttattttaacaattattggagcgattttattaatgwttgytagcatatattttataaaaattgtgacatcatactttactaagaaacttttagaaattaaatttaattcgaaatag

SEQ ID NO: 3710 - DNA, 186 bp, Staphylococcus aureus
atgaaacaaattagcattggctatgaagaaatctatggggatagaatttttcatagccattttttaaaagagcatgaagtaaaaaattggaaaaccgtcaatcaaataattgaaaaagaacacttggacaaaaatgaatatgaagcggaaccgccgttatttttcttttcaggatcgttagattag

SEQ ID NO: 3711 - DNA, 378 bp, Staphylococcus aureus
ttgaataaaaaatatcttatgattgtaattataattttaatattgattctaggcggaatctttttgaagatgaaatatgacgaaaagaaatattatgatgaacaaaaagaaagaataacgatttatatgaagtacaatgtgaaaggttataaaaatataagcttcgctaattttaaagaaaacccaatggatggttattctattagtggttatataaataatgataaaaagttatcatttacagctggtataagatctgttgatgattttcaatttgataccgatatttcttatacagatgaattgggtagaaaatttaataaaaatcctaagtcagtttctgaaataaaaaaagagcaaaatacgtccaataaataa

SEQ ID NO: 3712 - DNA, 912 bp, Staphylococcus aureus
atgaaaagattaattggaattttattatgtaatttatttattttgactgcgtgttcagcatctgtcgataaaacaagtaactcgacaaagactacagactataaaattgaaaatggtgaaacactgaaagtaccagagaaacctaaaagagttgctgtattaactggattttatgttggtgattttataaagttaggaatcaaaccaattgctgtttcagatataactaaagattcttcaattttaaaaccttatttaaaaggggttgattatattggagaaaatgatgttgaaagagttgctaaagcaaaaccagatttaattgttgtagatgctatggataaaaatataaaaaaataccaaaaaatagcgccaacaatcccatatacatacaataaatacaatcataaagaaatattaaaagaaataggcaagttgactaataatgaagataaagctaaaaaatggattgaagagtgggacgataaaactagaaaagataaaaaagaaattcaaagtaaaattggtcaagcaacagcatctgtgtttgaaccagatgaaaagcaaatatacatatataactctacatggggtcgtggtttggatattgttcatgatgcattcggtatgccaatgacaaagcaatataaagataaattacaagaagataaaaaaggctatgcttccatttcaaaagaaaatattagtaaatatgctggtgattatatatttttaagtaaaccttcgtacggaaaatttgattttgaaaaaacacatacatggcagaatattgaagctgtaaaaaaaggacatgtaatttcatataaagcagaagattattggttcacagatcctattacattagaacatttgagaagtaaattaaaaaaagaaattttaaataaaaaataa

SEQ ID NO: 3713 - DNA, 591 bp, Staphylococcus aureus
atgagtgagttaactgcaaagcaagcacgttttgtgaatgagtatattagaacactgaatgtaacacaaagtgccataaaagcaggatataacgcaaatagcgcacatgtgacagcgtgtaggttattgaaaaagccgcacatcaagcaatatatacaagaacaaaaagataagattatagatgagaatgtattaaccgcaaaagagttattacatgtgctaacgaatgcgrcagtcggtgatgaaacagaaacgaaagaagttgtagtcaagcgtggagaatataaagaaaatccacaaagtggcaaagtacaattagtctataatgaacatgttgaactgatagaggtaccaataaaacctagtgatcgtttaaaagctcgtgawatgttgggtaaatatcataaattatttacagataagcatgatataaacggtaatgtacctatattcattaatattggtgaatgggacggaggtgatgaggggttagataaggcagtgaaagatgtatctaacgataatcctaatcatactgtgattgtggatgatataccgttagaagattatgagtcaattaggtttttataa

SEQ ID NO: 3714 - DNA, 474 bp, Staphylococcus aureus
atgattgtgaatkatcttaaacataagttktataacttgttaactacaatgrwwgttctctttatttttgtactttctggtgcgatttttttaacatttctagggtttggtttatatggattaagtagaatacttatttattttaggttgggtgactttacatataatagaagtatgtacgataacctattatattatggcagttatataatctttgggtacttcatcatatttgcagtcgagcatttaatggattattttagaaaaatgttgcctgaaaatgcatattttagaggcgcgacttttcatttgatttcttacacagttgcaacaacgttattttatttyatyattcatytraaytatgtktatatcaatatcgatttttgggtcatcatggttattatagggttcttatatgtttgtaagcttcaattttaccctgaaagtaaaaatttaaataatagaaaatag

SEQ ID NO: 3715 - DNA, 123 bp, Staphylococcus aureus
atgakatatatacacttttctattattacattaattacaggtatcattatgcatattacaatgtactttgtaccatttgaatctcggaaaatgccactatttatgacgataatttttacaatc

SEQ ID NO: 3716 - DNA, 474 bp, Staphylococcus aureus
atggctgagagaatatcttctaaaattagacgcttagaaaaatcagaagaacaaattaagttagaaagtttaaatgaagttacagaggcaattgcagcgaataaagatagtatattaaaagcaatcaagcttattaaaacattagatgatgcaaaactattagatgctttaaatggtgcaattcgaggacgtcaagtcatcataaataaatttgcagttgaacttaataaagatatttatacagggctattatctaatatggcttcaatggtatttttattaggtgaactcaatgtatcagatttaagcgacttcctaaataaagttaataaaggattacacgttgccaatcaagcgagtccaaatgctaagacaactataagaagtctattgggcgtattgaaagatgacgacatgaaccgtagtttaacatacatgcttaatatgctaaaaggtatgtctcgagaagaataa

SEQ ID NO: 3717 - DNA, 648 bp, Staphylococcus aureus
atgaaaaagatgatattaattaatgtcattacggttgttgtactgttagcaattgggattgctggcttttatttytggaataaaacaacaagctatgtaacaactgataatgcaaaagtaaatggcgatcaaattaaaatagcaagtcctgcatctggacaaattaaatcacttaatgttaaacaaggtgacaaactcgataaaggtgacaaagtagcaaytgttactgtacaaggtcaagatggcgaaacgaaagatatggatcttaaaatgcctcaaaaaggtacaattgccaaattagatggtatggaaggttcaatggtgcaagctggtaacccaatcgcttatgcatacaatttagatgatttatatgtaacagcaaatattgacgaaaaagatattaaagatgttgaagtaggtaaagatgttgatgtgactattgacggtcaaaaagcttctattaaaggtaaagttgatagtattggaaaagcaactgctgcaagcttttcattaatgccatcatcaaatagtgatggtaactacactaaagtttctcaagtaatacctgttaaaatcactctagaatcagaaccgtctaaacaagttgttcctggaatgaacgctgaagtaaaaatccataaaaattaa

SEQ ID NO: 3718 - DNA, 402 bp, Staphylococcus aureus
atggttaaagtgacatatgatattccgacttgcgaggattattgcgcattaaggattaacgcaggtatgagtccaaagacgcgcgaagcagctgaaaaaggattacctaatgccttatttacagtaaccttgtatgataaagatcggttaattggtatgggtagagtgattggcgatggcggaactgtttttcaaattgttgatattgcagttttgaaaagttaccaaggtcaaggttacggcagtctaattatggagcatattatgcaatatattaaaggtgtggctgttgagagtacatacgttagtctgattgcagactacccagcggataaattatatacaaaatttggatttatacctaccgaaccagattcaggcggtatgtatatcaaatactaa

SEQ ID NO: 3719 - DNA, 1443 bp, Staphylococcus aureus
atgaattataagcaatccgcagaagawattttgaacgcgataggcggagaagagaatttagatgcaatggcgcattgtgcaacgagactacgattagttttaaatgatgaaagtttagtaaatgargaggcgctaaacaatatggatgtagttaaagggacrttttctactgggggacaataccaaattattattgggtctggtacagkcaataaagtatttagtgaactgraaaaattaactggaaaagaagcatcaaccacttcggaagtcaaagcacaatctgctaaaaatatgaatccgktacagcgatttgtaaaaatgctttcagatatctttgttccgattataccagccatcgttgctggtggtttattaatggggttaaataacattttgactgcgaaagatttattcttttcaggtaaatcattgatagatgtatatagtcaatttgctggwttagctgaaatgataaatgtttttgcgaatgcaccatttacattattaccaattttaattggatttagtgcagcaaaacgctttggtggcaatccrtttttaggtgctgyattaggtatgataytrgttcatccatcgctaatgagcgcatacgatttcccaaaagcagttgaagcaggtaaggctattccatattgggatgtwtttggtttgcatattaatcaagtaggttatcaaggacaagtsttacctatgcttgtagcagcttatatcttagcctcaattgaaaaagggttacgcaaagttattccaacggtgttagataatttgttaacaccattgttatctatttttataacagcatttctaacattttcatttgtaggtccaatcactcgacaattaggttactggttatcagatggtttaacatggctttatgaatttggtggtgcaattggtggattaatwttcggattattgtatgctccgattgttattacaggtatgcatcatagctttatagctgtagaaacgacattaattgcagatgccactaaaacrggtggatcatttatattcccrattgcgacaatgtctaatgttgcacaaggtggtgcagcaattgcagcgttctttattattaaacaaaataaraagttaaaaggtgtggcatctgccgcaggtatttcagcattacttggtattacagaaccggctatgtttggtgttaacttaaaactaagatatccatttattggcgctatcgttggatcaggtattggttcagcatatattgctttcttcaaggttaaagcaatcgcattaggaactgctggattgccwggatttatttcaatcaatccagtacatgcaggatggttacactactttgttggtatgacaatatcattcatcrttgctataacagttactttaattttatckaaaagaaaagcaaataaagaagttgtagaataa

SEQ ID NO: 3720 - DNA, 315 bp, Staphylococcus aureus
atggaaacaaaagaaaaaattaaagtgacaactatagatgaattaacacccctaattggaaaaaaggttattgtcaaagrcaaagaggtaggrttgtttttaacagaaagtggcaaaattcatgcgattcacaatatctgtccacacaaacaaggaccattgtctgaagggacagtgagtggggaatatgtattttgcccgctccacgatcaaaaaattgatttaaatacaggtattgttcaagaacctgatgaargttgtgtagatgtttatgaggtagaagttacagacgggaacgtatatatatgtctgtag

SEQ ID NO: 3721 - DNA, 825 bp, Staphylococcus aureus
gtgatagaaaataagaaaacagttgaagatacatattcaacaggcgcaattgttgattcaatatcatcttcagtacaaatgaagcaagtaatggtacagcaaacacctggccgatatatgcttaaagcaatgatggccggatttttactctcaatcgttactgtatttatgttcggaataaagacgcagtttgcgartactcacgtagatggacttatcaatttaatgggagccattgcktttagtttaggtttgattttagttgtattaactaactctgaattattaacaagtaacttcatgtactttacagtaggctggtattataaagtcgtttctgttaagaagatgacttggattttattatattgtttcttaggaaatattttaggtgggtttgtgttatttttcttaatgaaatttgcgcatgtcatgacacctgaaatgacacaagctttaacagctttagttcagaaaaagactgttgattcaacatggttgaatatttttacaaaaggtattttctgtaacttctttattaatattggtattttcatctctatgcaattcaaaggcggcttaacaaaggcattcttyatagcttgtggtgtcgtggtctttgtatacatgggatatgagcacgttgtgttcaatgcaggtctatatgcaggtatggtattctttaaccttgatgcagtttcatggttacaygttttaaaaaatatcgtttttgctttcttaggtaactttgtcggtggcggtatttttgtaggtctcgtttatgctttcttaaatggtaagcgtaatcgtttagagcaacaataa

SEQ ID NO: 3722 - DNA, 141 bp, Staphylococcus aureus
gtgaggggatttggtrtatttagatgttcaatttattatgtaactaattatagcattgatgaacaaggcgctcaacgtaatattacaattaatggattgtttcacaasatggtaaagctaggatgtctttttrttaagaaa

SEQ ID NO: 3723 - DNA, 109 bp, Staphylococcus aureus
atggcagtagtgaggggatttggtgtatttagatgttcaatttattatgtaaytaattatagcattgatraacaaggtgtgcaatgtatttttgyaatattacaataaa

SEQ ID NO: 3724 - DNA, 420 bp, Staphylococcus aureus
atgtccaaaaaacatgtttttataattattggtgtcatattgtgtatatgtacagtttctacggtcatgcattttaaaatgaaatatgatgaaaaagaaaaacaaaaagcgatttactacaaagaacaacaagaacgtattacactctatcttaagcataatactaaagaaacgaacacgattaaatctgtacatttcacaaacttggaaacaagtcctatgggaagtgctgtgattgaaggatacatcaatgaaaataaagaagatgattttactgcttatgcatcgcctgaacataattatcaatttggtggcgctatgataaaaagtgaaggagtagataaattattaaaaccagcacatgaaagaaaatcaccagaaaaaatcaaagaagaattagataaaaaagaaggccactag

SEQ ID NO: 3725 - DNA, 420 bp, Staphylococcus aureus
atgtcgaaaaagaaaattttaatattaactagtattatgttaatcatattaattagtgttgcaggtatctatttaaaagtgaaatatgacgaaaaagaaaaacaaaaagcaatatactataaagaacaacaagcgcgcattacactttatctcaagcataacactaaagaaccgaatacaatcaaatctgtacatttcacaaactcggaaacaagtcctatgggaagtgctgtgattgaaggttacataaatgaaaacaaaaaagataattttactgcttatgctacaccagaacataattatcaatttggtggtgctatgatagaaagtgaaaaattaagcgagttactaaagccagccaatcagttaaaatcaccagatgatataaaaaaagaactaaataaaaagaagagtcactaa

SEQ ID NO: 3726 - DNA, 423 bp, Staphylococcus aureus
atgaacaaaaaacatgtttttataattattggtgtcattttatgtatatgtatagttgcatcagtcatttatttaaaagtgaaatatgacgaaaaagaaaaacaaaaagcaatatactataaagaacaacaggagcgtattacactctatcttaakcataatactaaagaacccaataccatcaaaactgtacatttcacaagtttaaaaagaggacctatgggcgatgcagtaattgaaggttacataaatgaaaataaagaagatgattttgttgcatatgggtctccagaacataattatcaatttggtggaagtttaatcaaaagtaaaaatttaagcacgttattaaaaccagtacatcaaaccaaatcacctgatgagataaaaaaggaattagagtctaaaaagaacgaccgctaa

SEQ ID NO: 3727 - DNA, 795 bp, Staphylococcus aureus
atgattcawtcaaagaaattaacgctcggtatatgcttggtattactcattatattgattgtaggttatgtcattatgacaaaaacaaatggtcgaaacgcccaaattaaagacacatttaatcaaacattaaaattatatccaaccaaaaatctcgatgrtttttacgataaagaaggctttcgagatcaagaatttaaaaagggtgataaaggtacttggatagttaattctgaaatggtaatcgagccaaaaggtaaggatatggaaacgagaggaatggtgctctatatcaatcgcaatactagaaccacaaaagggtattattttataagtgaaatgacagatgacagtaacggcagaccaaaggatgatgaaaaaaggtatccggtaaaaatggaacataataaaatcataccaacgaagccactaccgaatgacaagttaaraaaagaratygaaaacyttaarttctttgtacaatayggyractttaaagatattaatgattataaagatggtgayatttcatataatcctaatgtwccaagttattcsgcaaaatatcaattgaawaaygatgaytayaatgtsmarcarytwmgaaaaagatatratattccaaccaammaagckccgaaaytattawtraaaggygatggwgatttaaaagghtcatchgtaggdtcwaraartmtwgaatttacctttgtmgaaaataaagaagaaaacatytattttacrgattctgtacaatatactycaagtgaggatacaagktatgagtcaaactga

SEQ ID NO: 3728 - DNA, 786 bp, Staphylococcus aureus
atgattcattcaaagaaattaacgctcggtatatgtttggtattactcattatattgattggaggttgtgtcattatgacaaaaacaaatggtcgaaacgctcaaattaaagaaaatttcaacaaaacattaagtgtatatcyaaccaagaatctcgatgatttttacgataaggaaggttttcgagatcaagaatttgataaaagagataaagggacttggattatttattctgaaatggttatcgaaccaaaagggaaaaatatggaatcgagaggaatggtgctctatatcaatcgcaatactagaacaacgaagggtaattttattgtcaccgaaataactgaagatagtaaaggatattcacgtagtaaagaaaaaaaatatcctgtcaagatggaaaataatcgaattattccaacaaagcctataccggatgacaagttaaaaaaagagattgaaaactttaagttctttgtacaatatggaaattttaaagattttaaagattataaaaatggtgatatttcatataatcctaatgtgccaagttattctgcaaagtatcaattgaataatgatgactataatgttcaacagttaagaaaacgatatcatattccaaccaaacaagcgcccgaattaaaattgaaaggatccggcaatttaaaaggctcatccgtaggatctaaggatctagaatttacgtttgtagaaaatcaagaagagaatatctatttttcagattcggtcgaatttacacctagcgaggatgataaatcatga

SEQ ID NO: 3729 - DNA, 702 bp, Staphylococcus aureus
atgaaaaaggaagaaagcagtaargataaacaaattaaagaaaacttcaacaaaacgttgagcytrtatccaactaaaaatcttgaagacttttatgataargaaggytttcgagatsaagagtttgaaaarggmgayaaaggsacttggataattcactctaaaatgacaatagaaacaaatggaaagaatatggaatccagaggmttggtcctgtatgtagaccgcaataccagaacgacaaaaggtgaatttattgtgagrgaattatgggaagataaaaaaggatactcacgtagtaaagaaaaagaatatccagtraaaatggaacataataaaattatcccaacyaaaccgatagctgatgataaattaagaaaagaaatygaaractttaarttytttgtacaatacggtgactttaaagatattaatgattataaagatggtgacatttcatataatcckaatgtkccaagttattcmgcaaartatcaattragtaayratgactacaatgtgaagcaacttagaaagaggtatgatataccaactaagaaagcwcckaaaytattrwtaaaaggygatggtgatttaaaaggatcatctataggacacaaaaatttagagtttayatttatagaaaataaagaagaaaacatctattttacggatagtattaatttcaaacctactgaatag

SEQ ID NO: 3730 - DNA, 120 bp, Staphylococcus aureus
atgtatggtttagtatattgttttaaattagatgaatttgaatttaatttaaaaagtaagtataaaaaatacaagcctgttatatcaaggtgttcaagagctttgtatgcaatatatatg

SEQ ID NO: 3731 - DNA, 300 bp, Staphylococcus aureus
ttgcaatatattgccttgaaacacgtttatttttatgcagaaaatcgtctgaaatactcagaatccgaacgatataaaaagtatattgggtattttagagtaatgaaaggcgtttcaagacatgtttttgtgcgtattgtacaggcgataattatgaaacgtttagtatattgttttaaattagataatgatgaatttaatttaaaaaataagtataaaaaatacaagccttgtgtgacaagggtttctgatgacttgaatacaatttataggtatatttcaaataataaaattatcaat

SEQ ID NO: 3732 - DNA, 111 bp, Staphylococcus aureus
atgaatagaaatatcaataagaaaaataatatgattaaaaatgatgaatggcatacttataaagtgtctaaatattggcggtcaatattacttayaaacacgaatgttaag

SEQ ID NO: 3733 - DNA, 1530 bp, Staphylococcus aureus
gtgaggaaattttcaagatatgcatttacaagtatggcagcaktaacmttgttgagcactttatcaccagcagcattagcgattgattcaaamaataaaccagctaattctgatattaaatttgaggtgactcaaaagagtgatgcggtcaaagcattaaaagaattgcctaaatccgaaaatgtaaaaaatatttatcaagattacgctgttactgatgtaaaaactgataaaaaaggatttacgcattayacattgcaaccgagtgttgatggtgttcatgcacctgacaaagaagtgaaagtacacgcagacaaatcaggaaaagtcgttttaatcaatggggatactgatgcgaagaaagtaaagccaacgaataaagtgacattaagtaaagatgacgcagccgacaaagcatttaaagcagttaagattgataagmataaagcgaaaaatcttaaagataaagtcattaaagaaaacaaagttgaaatcgatggtgacagtaataaatacgtttataatgttgagttaattacagtgacaccagaaatttcacattggaaagttaaaattgatgctcaaactggcgaaattttagaaaaaatraacttagttaaagaagctgcagaaactggtaaaggaaaaggtgtacttggcgatacaaaagatatyaatatcaatagtattgacggtggatttagcctagaagatttaacgcatcaaggtaaattatcagcatttagctttaatgatcaaacaggtcaagcaacattgattactaatgaagatgaaaacttcgtaaaagatgagcaacgtgctggygtagatgcaaattattacgctaaacaaacatatgattattacaaagacacatttggtcgtgaatcatatgacaaccaaggtagtccaattgtttcattaacgcatgttaataactacggtggtcaagataacagaaataatgccgcatggatyggtgacaaaatgatctatggtgatggtgatggtcgcacattcacaagtttatcgggtgcaaatgacgtagtrgcacacgaattaacacacggtgtgacacaagagacwgcraacttagaatataaggaccagtcaggcgctctaaatgaaagcttttcagatgtttttggatactttgtagatgacgaggatttcttaatgggtgaagatgtctacacacctggaaaagagggrgacgctttacgcagcatgtcaaacccagaacaatttggtcaaccagctcatatgaaagactatgtattcactgaaaaagataatggtggcgtacatacgaattctggaattccaaataaagcagcttataacgtgattcaagcaatagggaaatctaaatcagaacaaatttactaccgagcattaacggaatacttaacaagtaattcaaacttcaaagattgtaaagatgcattataccaagcggcyaaagatttatatgacgagcaaacagctgaacaggtgtatgaagcatggaatgaagtaggcgtggagtaa

SEQ ID NO: 3734 - DNA, 756 bp, Staphylococcus aureus
atgggtaattcacgcaaaggagattatcatatgaaaaagaacatcacgaacaaaattgttttatcaacagcattgttacttttaggaactacatcaacacaaccgcctaaagcaccaatcagtttttcatctgaagcaaaagcatacaatataagtgaaaacgaaacgaatatcaatgaattaatcaaatattacacgcagccacacctttcattttctggaaaatggctatggcaaaaccctaacggtaccatacatgcaacattacaaacgtgggtttggtacacgcatattcaagtatttggtcctgaaagttggggcaacattaatcaattaagagataaatatgtagatatttttggtaccaaggatgaggatactatagaaggctattggacttatgatgaaacctttactggaggtgtaacaccagcagctacttcatctgataagccttataaattatttttaaaatataaggataaacaacaaactatgattggtggacttgagttttatcaaggtaataaaccagtaataactttaaaagaactagatttccgcgtacgtcaaactttaattaagaacaaaaagctatataatggagaatttaataaaggtcaaattaggattacaggtggtggtaatcattatacgattgatttgagtaaaaagttaaaactaactgacacaaacagttatgttaaaaatcctcgacatgcagaaattgaagtcattcttgaaaaatctcattag

SEQ ID NO: 3735 - DNA, 390 bp, Staphylococcus aureus
atgcaaatattagttaacaagcgtaatgagataatttcatacgctatcattggtggctttgaagaaggtattgatattgaaaatttaccagaaaatttctctcaagtttttagacctaaagcctttaaatattcaaatggggaaatagtttttaacgaagattattcagaagaaaaagatgacttgcatcaacagattgacagtgaagaacaaaacacagtcgcttctgatgacatcttacgaaaaatggttgctagtatgcagaaacaagttgttcaaagtacaaagttatcgatgcaagttaataagcaaaatgcactaatggcaaaacaacttgtgacacttaataaaaaattagaagaggttaaaggagagactgaaaatgcttaa

SEQ ID NO: 3736 - DNA, 438 bp, Staphylococcus aureus
atggggaacacaatatatgatatcaagccaggaacatttaaatatattgaatcagaaatatataatttaaatgagaacaagaaagagataaatagattgagaatggagatacttaacccaacgaaagaactagacaccaacattgtgtatggaccgttacaaaaaggagagccagttagaacaactgagttaatggcgacaaggttattgactaataagatgttacgtaacttagaagagatggttgaagcagttgaaagtgagtacttaaagttacctgaagatcataagaaagtaataaggttaaagtattggaataaagataagaagctaaagatagaacaaataggggatgcttgtcacatgcatcgcaatacagttactacaatacgaaagaactttgttaaagcgatagcgtatcatgcaggtatcaaataa

SEQ ID NO: 3737 - DNA, 174 bp, Staphylococcus aureus
ttgatacaggagatgacaatgatgattaaacaaatattaagactaatattcttactagcaatgtatgagctaggtaagtatgtaacggagcaagtatatattatgatgacggctaatgatgatgtagaggtgccgagtgattttgaaaaaatcagagctgaagtttcatggtaa

SEQ ID NO: 3738 - DNA, 237 bp, Staphylococcus aureus
gtgacacaatacttagtcacaacattcaaagattcatcaggactaccacatgaacattttactgctgctagagataatcagacgtttacagttgttgaggcagagagtaaagaagaagcgaaagagaaatatgagtcacaaaatacacctattgtttactacactaataattctaaagtgaccttattcgaaagacctagtgaagaagtattaggttctttgttcgaaaagaaataa

SEQ ID NO: 3739 - DNA, 249 bp, Staphylococcus aureus
atgaataaccgtaaacaaatagaacaatccgttataagtgctagtgcgtataacggtaatgacacagaggggttactaaaagagattgaagacgtgtataagaaagcacaagcgtttgatgaaatacttgagggtttacctaatgctatgcaagatgcactcaaaggagatatttatcttgatgaagcagtagggattatgacgagtcaagttgtctataaatatgaggaggagcaggaaaatgactaa

SEQ ID NO: 3740 - DNA, 594 bp, Staphylococcus aureus
ttgaaaataggttatgcaagagtttcaactggattacaaaatctgaatttacaggaggaccgattaaacgcatatggttstgaaaagatatttagcgaccatattagtggttcaaaaagtaaaagacctggattagataaagcaattgaatttgcgagatcaggagatacgattgttgtttggagactcgacagactaggacgtaatatggaggatttaatcacattagttaatgagcttaacgaacgaggtgtaagtttccatagtttagaagaaaatataacgatggataaatcaasttctacaggacaattattatttcatttattcgcagcgtttgcagaatttgaacgaaatttaattttagaacgttcttcagctggccgaattgcagcacgtgctagaggacgctatggaggtagacccgaaaaattaaatcaaaaagatttaaacttacttaagacactttatgataatggcacgccaattaagacaattgcagagcagtggcaagtttcacgtacaacgatttatcgttacctcaataaattggaggaaaaggaagatgaaaaacaaggagaagtatctaactaa

SEQ ID NO: 3741 - DNA, 444 bp, Staphylococcus aureus
atgaataaagcatcatttgataaaaaggttaaaaagcaattatggtttttgaacaaaaatgaaaaacaggcattagatcaacggttgtctagtattactgacaaggacaatgtgaactttaataagccaatcacctttgctaatacgtacttaagagaaaatgtatttcgtagtaaagaaactaaaagttatagcatctttgtaacattagtggtgatgatgtttgcatacgttgctttattaggtttgtttttatttggattaattacaagtctatctggtgtgcaatttttcgttaaccctaaagtagaattgtcgacaacggttgttattttaacaatcattggggcgattttattaatgttagttagtatctatttaataaaaatcacaacatcatattttacaaagaaactgttagaacataaatttaatagtcattag

SEQ ID NO: 3742 - DNA, 501 bp, Staphylococcus aureus
ttgactaatgttaaaaccaacagtcatatgatttgcaacgtttatacaatcatcgtaaaactcagtatgcttaatttatttaaaatgtttgtcaataagtccagtgaaaaggagattgattttttgaataaaaaatctcttatgattgtaattataattttaatattgattctaggcggaatctttttgaagatgaaatacgacgaaaagaaatattatgatgaacaaaaagaaagaataacgatttatatgaagcacaatgtgaaaggttataaaaatataagctttactaattgtaaagaaaacccaatggatggctattctattagtggttatataaataatgatagaaagttatcatttacagctggcataagatctattgatgattttcaatttgatactgatatttcttatacagatgaattgggtagaaaatttattaaaaatcctaagtcagtttctgaaataaagaaagagctaaatacgtccaataaataa

SEQ ID NO: 3743 - DNA, 720 bp, Staphylococcus aureus
atgaaaagaatacttatcattgttgttttattgttttgttattcacaaaatcatatcgcaaccgctgatgttggagttttgaatcttaggaactattatggtagctatccaatcgaagaccatcaaaatattaatcctgacaataatcgtctttcacatcaattagttttttctaaggataattcgacagtaacagctgaatttaagaatgttgaagatgtaaaaaaattcaaaaatcgtgctgttgatgtatacggcctaagttatagtggatattgtctaaaaaataaatatatgtacggaggagttactttagcgggtgattatttagagaagtctagatgtattcctattaatctttgggttaatggcaaccttaaaacaatttctactgacaaagtatcaactaataaaaagatagtaacagctcaagaaattgatactaaattaagaagatatctacaagaagaatataacatttatggctttaatgatacaaataaaggaagaaattacggtacaaaatccaagtttttttctggatttaatactgggaaaatatcatttcatttgaatgacggtacatcattctcttatgacttatttgatacaggaacagggcaagctgaaagtttcctaaaaatatataatgacaacaaaactgtcgaaactgataaattccatttagatgtagaaatatcttataaggacgaaagttga

SEQ ID NO: 3744 - DNA, 396 bp, Staphylococcus aureus
gtgtgggaaatgattaaaaaacttaaaaatatggatgggttcgacatctttattgttggaatactgtcattattcggtataaccgcattgctacttgttgtcgcattgcctatctatacagtggctagttaccaaaacaaagaagtacatcaagggacaattacagataaatataacaaaagacaagataaagaggacaaattctatattgtattagatgataaacaagtcatcgaaaactcagacttattcttcaaaggaaagtttgatagcgcagacatacaagctaggttaaaagtaggtgataaagtaaaagttaagacgattggatatagaatacactttttaaatttatatccggtcttatacgaagtaaagaaggtagataaaaaatga

SEQ ID NO: 3745 - DNA, 207 bp, Staphylococcus aureus
gtgacacaatacttagtcacaacattcaaagattcaacaggacgtaaacatacacacataactaaagctaagagtaatcaaaggtttacagttgttgaggcagagagtaaagaagaagcgaaagagaagtacgagaaacaagttaaaagggatgcagttattaaagtgggtcagttgtttgaaaatataagggagtgtgggaaatga

SEQ ID NO: 3746 - DNA, 262 bp, Staphylococcus aureus
atgacactaatgaataatcgcgaacaaatygarcaatcagttatmagtgctagtgcgtataacggyaatgacacagagggattrctaaaagagattgaggacgtktataagaragcrcaagcgtttgatgaaatacttgagggratgacaaatgctattcaayattcagttaaagaaggtrttgaacttgatgaagcagtagggattatggcaggtcaagtkgtctataaatatgaggagrrwswagrawaatgagcattag

SEQ ID NO: 3747 - DNA, 243 bp, Staphylococcus aureus
atgacagataacgcacgcaaagaatacctaaatcaattctttggatttaagagatatctgtatcaggataacgaacgagtggcacatattcatgtagtaaacggcacttattactttcatgggcatatcgtgccaggttggcaaagcgttaaaaagacatttgatactgctgaagagctcgaaatatatataaagcaacatggtttggaatacgaggaacagaagcaactaactttattttag

SEQ ID NO: 3748 - DNA, 264 bp, Staphylococcus aureus
atgatgtattacaaaacgggtgacgtatgtcaaaaaataattaatgtagatggctttgattttcgattaagagttaagaaacgagcatatagcgtcgaaatagttgttttagatcatgaggggaattcaattgacgggatactagtttctgacgagaacgatctatacacagcgttagatattttgaaacaaagtatttatgaatggattgaaaataacacagatgaacaggacaaactaatgaacttagtcatgaaatggtag

SEQ ID NO: 3749 - DNA, 474 bp, Staphylococcus aureus
atggctgagagaatatcttctaaaattagacgcttagaaaaatcagaagaacaaattaagttagaaagtttaaatgaagttacagaggcaattgctgcaaacaaagatagcattttaaaagcaatcaagctcattaaaacattagatgatgcaaaactattagatgctttaaatggcgcagttagaggacgtcaagtgattattaataaatttgctgttgagctcaacaaagatatttatacagggctattatctaatatggcttcaatggtatttttattaggcgaattgaatgtatcagatttaagtgacttccttaataaagttaacaaaggtttacacgttgccaatcaagcgagtcctaatgcgaagacatctgtaagaagtctattaggcgttttaaaagatgacgacatgaaccgtagtttaacatatatgcttaatatgttaaaaggtatgtctcgagaagattaa

SEQ ID NO: 3750 - DNA, 648 bp, Staphylococcus aureus
atgaaaaagatgatattaattaatgtcattacggttgttgtactgctagcaattgggattgctggtttttatttctggaataaaacaacaagttatataacaactgataatgctaaagtaaatggcgatcaaattaaaatagcaagtccagcttctgggcaaatcaaatcactaaatgttaagcaaggtgataaacttgataaaggtgataaagtagcaacagttactgttcaaggtcaagatggcgaaactaaagatatggaacttaaaatgccacaaaaaggtacaattgctaaattagatggcatggaaggttctatggtacaagcaggcaatccaattgcttatgcttacaatttagatgatttatatgtaactgcaaatattgacgaaaaagatattaaagatgttgaagttggtaaagatgttgatgtgactattgacggtcaaaaagcttctgttaaaggtaaagttgatagtattggaaaagctactgctgctagtttttcattaatgccatcatcaaatagtgatggtaactatactaaagtatctcaagttatacctgttaaaattacgttagattcagaaccgtctaaacaagttgttcctggaatgaacgctgaagtaaaaatccataaaaattaa

SEQ ID NO: 3751 - DNA, 402 bp, Staphylococcus aureus
atggttaaagtgacatatgatattccgacttgcgaggattattgcgcattaaggattaatgcaggtatgagtccaaagacgcgcgaagcagctgaaaaaggattacctaatgccttatttacagtaaccttgtatgataaagataggttaattggtatgggtagagtgattggcgatggaggaactgtttttcaaattgttgatattgcagttttgaaaagttaccaaggtcaaggttacggcagtcaaattatggaacatattatgaagtatattaaaaatgtggctgtcgaaagtacctacgtaagtctgatcgcagactacccggcggataaattgtatgcaaaatttggatttatgcctaccgaaccagattcaggcggtatgtatatcaaatactaa

SEQ ID NO: 3752 - DNA, 315 bp, Staphylococcus aureus
atggaaacgaaagagaaaatcaaagtgacaactttagatgaattgacacccttaattggtaaaaaggttattgtcaaaggcaaagaaataggattgtttttaactgaaagtggtacaattcacgcgattcacaatatttgtccgcataaacaagggccattgtcagagggaacagtgagtggtgaatatgtattctgtccactccatgatcaaaagattgatttaaatactgggattgtacaagaacctgatgaaggttgtgtagatgtatatgaggtagaagttacagacgggaacgtatatatatgtctgtaa

SEQ ID NO: 3753 - DNA, 852 bp, Staphylococcus aureus
ttgataatagtaaatgggggaagtgctgtgataaaaaataataaaacagttgaagatacgtattcaactaaagcaatcgtagactcaatatcatcatctgttcaaatgaaacaagtgatggtacagcaaacaccaggacgatacatgcttaaatctatgatggcaggtttcttattgtccattgttactgtttttatgtttggtattaaaacacaattcgcaagtacacatgttgatggtctcattaatttaatgggagcaattgctttcagcttaggattggtcttggttgtactaacgaattctgaattattaacaagtaattttatgtattttacagttggctggtattataaagttgtttctcttaataagatgatgtggattttattatattgtttccttggaaatattttaggtggttttgtattattcttcttaatgaaatatgcacatgttatgacaccagaaatgacacaagccttaactgccttagttcagaaaaagacagtcgattcgacttggttgaatatttttacaaaaggtattttctgtaacttctttattaatatcggtatttttatttctatgcaattcaaaggcggattgacaaaagcattcttcattgcttgtggtgttatagtctttgtatacatgggatatgagcacgttgtattcaatgctggtttatatgcaggtatggtgttcttcaaccttgatgctgtatcttggttacatgtattaaaaaatatcgtttttgcattccttggtaactttgtaggtggcggtatttttgtaggacttgtttatgcatttttaaatggtaaacgcaatcgtttagagcaacagtaa

SEQ ID NO: 3754 - DNA, 414 bp, Staphylococcus aureus
atgtccaaaaaacatgtttttataattattggtgttattttatgtatatgtatagtcgctacggtcatacattttaaaatgaaatatgatgaaaaagaaaagcaaaaagcaatttattataaagaacaacaagcgcgtattacactttatctcaagcataacactaaagaaccgaatacgatcaaatctgtacacttcacaaagttggaaacaagtcctatgggaagtgcagtgattgaaggatacataaacgaaaacaaaaaagatgattttgttgcttatgcatcgcctgaaaataactttcaatttgtaggtgatataatactaagcaaaaatttatcggaaataattaaaataaaaacaaaatcacctgacgaaatcaaagaagaattagacaaaaaagaaggccgctag

SEQ ID NO: 3755 - DNA, 420 bp, Staphylococcus aureus
atgtcgaaaaagaaaattttaatattaactaatattatgttaatcatattaatcagtgttgcaggtatctattttaaaatgaaatatgacgaaaaagaaaaacaaaaatcaatttattataaagaacaacaagagcgcattacactttatctcaagcataatactatagaaccgaacacgatcaaatctgtacatttcactaacttggaaacaagtcctatgggaagtgctatgattgaaggttacataaatgaaaacaaaaaagataattttactgcttatgctacaccagaacataattatcaatttggtggcgctatgatagaaagtgaaagattaagtgaattactaaaaccagcacagaaattaaaatcgcctgatgatataaaaaaagagctaaacaaaaagaagggtcactaa

SEQ ID NO: 3756 - DNA, 423 bp, Staphylococcus aureus
atgaccaaaaaacatgtttttataattattggtgttattttatgtatatgtatagttgctacagtcatttatttaaaagtgaaatatgacgaaaaagaaaagcaaaaatcaatttattataaagaacaacaagagcgtattacactctatctcaagcataacactaaagaaccgaacacgatcaaatctgtacatttcacaagtttaaagacaggacctatgggcgatgccgtaattgaaggttacatcaatgaaaacaaaaaagctgattttgttgcatatgggtctccagaacatcattatcaatttggtggaagtttgatcaaaagtaaaaatttaagcacgttattaaaaccagcacatcaaaccaaatcacctgatgagataaaaaaggaattagagtctaaaaagaacgaccgctaa

SEQ ID NO: 3757 - DNA, 330 bp, Staphylococcus aureus
ttgaaaaaagaaattgaaaactttaaattttttgtacaatatggcaattttaaagatattaatgattataaaaatggtgatatttcatataatcctaatgtgccaagttattccgaaaaatatcaattgaggaatgatgattataatgtgcaacagttaagaaaaagatatgacataccaacgaaacaagcaccgaaaatgttattaaaaggcgatggtgatttaaaaggctcatctgtagggtctaaagagttagaatttacttttgtagaaaataaaaaagaaaacatctatttttctgatagtattaatttcaaacctactgaatag

SEQ ID NO: 3758 - DNA, 429 bp, Staphylococcus aureus
atgatgattcattcaaagaaattaacgctcggtatatgtttggtattactcattatattgattgtaggttatgtcattatgacaaaaataaatagtcgaagcgcccaaattaaagacacatttaatcaaacattaaaattatatccaaccaaaaatctcgatgatttttacgataaagaaggctttcgagatcaagaatttgacaaaggtacatggataatcagctctgaaatgaatattcaattaaagggagaaagtttaaaatcaagaggaatgattctatatatgaatagaaatacaaaaaggacaacaggttatttttttgtaagtgaaacaaaaggaaaaacgtatgaaaaagaaaaaaatatccagtcaaaatggaacataatcaaattatcccaacgaagccaatacaagatgacaagttga

SEQ ID NO: 3759 - DNA, 1530 bp, Staphylococcus aureus
gtgaggaaattttcaagatatgcatttacaagtatggcaacagtaacgttgctgagctctttgacacctgcagcactagcgagtgatacgaatcacaaaccagcaacttcagatattaattttgaaatcacgcaaaagagtgatgcagttaaagcattaaaagagttacctaaatctgaaaatgtgaaaaatcattatcaagattactctgttacagatgtaaaaacagataagaaaggattcacgcattacacgttacaaccgagtgtggatggtgtgcatgcgcctgacaaagaagtgaaagtgcatgcggacaaatcgggtaaagtcgttttaatcaacggtgatactgatgcgaagaaagtaaagccgacaaataaagtgacattaagcaaggatgaagcggctgacaaagcatttaacgcagttaagattgataaaaataaagctaaaaacctccaagatgacgttatcaaagaaaataaagtcgaaatcgatggtgacagtaataaatacatttacaatattgaattaattacagtaacaccagaaatttcacattggaaagttaaaattgatgcagacacaggagcagttgttgaaaaaacgaacttagttaaagaagcagcagcaactggcacaggtaaaggtgtgcttggagatacaaaagatatcaatatcaatagtattgatggtggatttagtttagaggatttgacgcatcaaggtaaattatcagcatacaattttaacgatcaaacaggtcaagcgacattaattactaatgaagatgaaaacttcgtcaaagatgatcaacgtgctggtgtagatgcgaattattatgctaaacaaacatatgattactacaaaaatacatttggtcgtgagtcttacgataaccatggtagtccaatagtctcattaacacatgtaaatcattatggtggacaagataacagaaataacgctgcatggattggagacaaaatgatttatggtgatggcgatggccgcacgtttacaaatttatcaggtgcaaatgacgtagtagcacatgagttaacacatggcgtgacacaagaaacggcgaatttagagtataaagatcaatctggtgckttaaatgaaagcttttcagatgtttttggatactttgtagatgatgaggatttcttgatgggtgaagatgtttacacaccaggaaaagagggagatgctttacgaagcatgtcaaacccagaacaatttggtcaaccatctcatatgaaagactatgtatacactgaaaaagataacggtggtgtgcatacgaattctggcattccaaataaagcagcttataacgtaattcaagcaatagggaaatctaaatcagaacaaatttactaccgagcattaacggaatacttaacaagtaattcaaacttcaaagattgtaaagatgcattataccaagcggctaaagatttatatgacgagcaaacagctgaacaagtatatgaagcatggaacgaagttggcgtcgagtaa

SEQ ID NO: 3760 - DNA, 504 bp, Staphylococcus aureus
atgaatacaattaaaagtacaatacacacagaagccatatttagcgatgacaaacagcaccgctatttactcaagaaaacttgggatgaaaagaaaccagcttgtacagtgataacgatgtacccccatttagatggtgtgttatcactcgatcttactactgttcttattcttaaccaattagcgaattctgaacaatatggtgctgtatatcttgtgaatctattttcaaatattaaaaccccagagaaccttaaacatatcaaagagccttatgacaaacacacagacattcacttgatgaagacgattagtgaaagtgacacagtgattctagcttatggcgcctatgctaagcgaccagttgttatagaacgtgtatcacaggtgatggaaatgttaaaacctcataaaaagaaagtcaaaaagctcataaatccagcaacaaatgaaattatgcatccactcaatcctaaagcgcgtcaaaaatggacattgaaataa

SEQ ID NO: 3761 - DNA, 327 bp, Staphylococcus aureus
atggaggaaaatagtatgaaaatcaatcgatacatcacaaaaggcattagtaaacaactatctctagaccttcaaatcctactttggaatatggtaaaagatcgagacaatcaacttaatacagattacctacacatttttaaactacaagaagatgaaaatatactctcaatcacacatgaacaagaacaacccgcatacaaattggaatatcactatacaaactatataaaaaatcaaaatgcattacctaagaaagtctacgtcatccgagaagatgatgtagacgttttttattatgtgatgcttttaccagaagaatactaa

SEQ ID NO: 3762 - DNA, 327 bp, Staphylococcus aureus
atgatgactaatatacaaaggatgatccaaatgacttacgagcaagaagatgattttaaactgttgaaaagaagaattttaggaattggattcgttttaccggagggacaagtatttactttccatgacttgaaccgtcgtgcaaatgtacaatgctcaaaagctgtacaacaaaatgttggacgttggttcgcatattttgttaaaaatgcgccaagtgttccatttattattatcggtaaaaataccaatggtcatttagtatatatgaaagtcggacctaatccactccaagatagcaacccttcgaaaggaggtgttcgctaa

SEQ ID NO: 3763 - DNA, 120 bp, Staphylococcus aureus
ttgaatggtggtgagaacgtgagcgagaataaaggagaaattagaaatggcgagtccggaagtgatcaaaaattaactagcggtcaagttgaaagtttaatccaagaacctaagaagaaa

SEQ ID NO: 3764 - DNA, 420 bp, Staphylococcus aureus
atgtccaaaaaacatggttttataattattggtgtcattttatgtatatgtatagttgcatccgtcatttatttaaaaatgaaatatgacgaaaaagaaaaacaaaaagcactttactacaaagaacaacaggagcgtattacactctatctcaagcataataccaaagaaccaaacacgattaaatctgtgcatttcacaagtttaaaaagaggacctatgggcgatgccgtaattgaaggttacatcaatgaaaacaaaaaagctgattttgttgcatatgggtctccagaacataattatcagtttggtggtactatgatagaaagtgaaagattaagtgagttactaaaaccagcaaatcaattaaaatctcctgaaaaaattaaagaagaattagacaaaaaagaaggccactag

SEQ ID NO: 3765 - DNA, 420 bp, Staphylococcus aureus
atgaacaaaaaacatgtttttgtaattattggtgtcattttatgtatatgtatagttgttacggccatacattttaaaattaaatatgatgaaaaagaaaaacaaaaagcaatatactataaagaacaacaagagcgcattacactttatctcaagcataataccaaggagccaaacacaatcaaaactgtacatttcactaactttgaaacaagtcctatgggaagtgctgtgattgaaggctacatcaatgaaaacaaaaaagataattttactgcttatgctacacctgaacataattatcagtttggtggtgctatgatagaaagtgaaagattaagtgagttactaaaaccagcgcatcaattaaaatcaccagatgatataaaaaaagaactaaataaaaagaagagtcactaa

SEQ ID NO: 3766 - DNA, 486 bp, Staphylococcus aureus
atgttcataattatagattacaaaaaatttttcattttccaccacattttaggagttactttaatgaacaaaaaacatgtttttgtaattattggtgtcatattatgtatatgtatagttgctacagtcatttatttaaaagtgaaatatgacgaaaaagaaaaacaaaaagcaatttactataaagaacaacaggagcgtattacactttatctcaagcataatactaaagaaccaaacacgattaaatctgtgcatttcacaagtttaaaaagaggacctatgggcgatgccgtaattgaaggttacatcaatgaaaacaaaaaagctgattttgttgcatatgggtctccagaacataattatcaatttggtggaagtttaatcaaaagtaaaaatttaagcacgttattaaaaccagcacatcaaaccaaaacgcctgatgatataaaaaaagaactagattctaaaaagaacgaccgctaa

SEQ ID NO: 3767 - DNA, 825 bp, Staphylococcus aureus
atgatgatgcattcaaagaaattaacgctcggtatatgcttggtattactcattatattgattgtaggttatgtcattatgacaaaagcaaatggtcaaaacgcccaaattaaagacacatttaatcaaacattaaaattatatccaaccaaaaatctcgatgatttttacgataaagaaggctttcgagatcaagaatttaaaaagggtgataaaggtacttggatagttaattctggaatgaacatccaattaaaaggaggagccttaaaatccagagagatggtactttacatcaatcgtaacactagaacaacgaaaggatattttatagtaggtgagataactaaagataaaaaaggatatacacatgataaagataaaaaaggatatacacatgataaagataaaaaataccctgtcaagatggaacataataaaatcataccaacaaaacctataaaagacgagaagttaaaaaaagaaattgaaaacttcaagttttttgtacaatatggcaactttaaagattttaaagattataaaaatggggatatttcatacaatccaaacgtaccaagttattcggcaaaatatcaattaagtaatgatgattataatatccaacaattaagaaaaagatatgatataccgactaaaaaagcaccagaactattgttgaaaggtgatggcgatttaaaaggttcatccataggctctaaagacttagaatttacctttgtacaaaataaaagagagaatatctattttacagattcggttgaatttactccaagcgaggatacaagttatgagtcaaactaa

SEQ ID NO: 3768 - DNA, 594 bp, Staphylococcus aureus
ttgaaaataggttatgcaagagtttcaactggattacaaaatttaaatttacaggaggatcgattaaatacatatggttgtgaaaagatatttaatgaccatatgagtggttcaaaaagtaaaagacctggtttagataaagcaattgaatttgcgaggtcaggagatacgattgttgtttggagattagatagattgggacgtaatatggaggatttaatcacattagttaatgagcttaacgaacgaggtgtaagtttccatagtttagaagaaaatataacaatggataaatcaagttcaactggacaattattatttcatttattcgcagcatttgcagaatttgaacgtaatttaattttagagcgttcttcagctggccgaattgcagcacgtgctagaggccgatatggaggcagaccagaaaaattaaatcaaaaagatttaaacttacttaagaccctttatgataatggcacgccaattaagacaattgcagaacagtggcatgtttcacgtacaacaatttatcgttacctcaataaattggaggacaaggaagatgaaaaacaaggagaagtatctaactaa

SEQ ID NO: 3769 - DNA, 237 bp, Staphylococcus aureus
atgaataaccgcgaacaaatcgaacaatcagttatcagtgctagcgcgtataacggcaatgacacagagggattgctaaaagagattgaagacgtgtataagaaagcgcaagcgtttgatgaaattcgcgaagctattaatgcgcaatgggttgagtatccagaagactgggcgtcagaggttttgagagaagtaagagagcttgaatatgaggaggaacaggaaaatgaaaattaa

SEQ ID NO: 3770 - DNA, 243 bp, Staphylococcus aureus
atgacagataacgcacgcaaagaatacctaaatcaattctttggatctaagagatatctgtatcaggataacgaacgagtggcacatattcatgtagtaaacggcacttattactttcatgggcatatcgtaccaggttggcaaggcgtgaaaaagacatttgatacagctgaagagcttgaaacatatataaagcaacaggatttggaatatgaggaacagaagcaactaactttattttag

SEQ ID NO: 3771 - DNA, 321 bp, Staphylococcus aureus
atgccacatattttaaacgtaacagttccaatacctgaaacacatgtacttatcacaaaagatgaatatgatgagctaattggttattcattagaccctgtatggaacatgagtgacttaaagaagaaattaaaaattgcatctgatgagactatcaaggacagattactatttcatcctagatttgaaaaagaactaagagcgcaaggaattgtgcattacccwgatgagaattttaatcgctggagatttaacgcaagaaagatgaataaattcgtcgatgagcatttcaatgaaatatataaggagagaataaaatga

SEQ ID NO: 3772 - DNA, 1440 bp, Staphylococcus aureus
atgaatatagttgaaaatgaaatatgtataagaactttaatagatgatgattttcctttgatgttaaaatggttaactgatgaaagagtattagaattttatggtggtagagataaaaaatatacattagaatcattaaaaaaacattatacagagccttgggaagatgaagtttttagagtaattattgaatataacaatgttcctattggatatggacaaatatataaaatgtatgatgagttatatactgattatcattatccaaaaactgatgagatagtctatggtatggatcaatttataggagagccaaattattggagtaaaggaattggtacaagatatattaaattgatttttgaatttttgaaaaaagaaagaaatgctaatgcagttattttagaccctcataaaaataatccaagagcaataagggcataccaaaaatctggttttagaattattgaagatttgccagaacatgaattacacgagggcaaaaaagaagattgttatttaatggaatatagatatgatgataatgccacaaatgttaaggcaatgaaatatttaattgagcattactttgataatttcaaagtagatagtattgaaataatcggtagtggttatgatagtgtggcatatttagttaataatgaatacatttttaaaacaaaatttagtactaataagaaaaaaggttatgcaaaagaaaaagcaatatataattttttaaatacaaatttagaaactaatgtaaaaattcctaatattgaatattcgtatattagtgatgaattatctatactaggttataaagaaattaaaggaacttttttaacaccagaaatttattctactatgtcagaagaagaacaaaatttgttaaaacgagatattgccagttttttaagacaaatgcacggtttagattatacagatattagtgaatgtactattgataataaacaaaatgtattagaagagtatatattgttgcgtgaaactatttataatgatttaactgatatagaaaaagattatatagaaagttttatggaaagactaaatgcaacaacagtttttgagggtaaaaagtgtttatgccataatgattttagttgtaatcatctattgttagatggcaataatagattaactggaataattgattttggagattctggaattatagatgaatattgtgattttatatacttacttgaagatagtgaagaagaaataggaacaaattttggagaagatatattaagaatgtatggaaatatagatattgagaaagcaaaagaatatcaagatatagttgaagaatattatcctattgaaactattgtttatggaattaaaaatattaaacaggaatttatcgaaaatggtagaaaagaaatttataaaaggacttataaagattga

SEQ ID NO: 3773 - DNA, 405 bp, Staphylococcus aureus
ttgactgagtttatggaagaagttttaattgatgataatatggtttttgatattgataatttaaaaggatttcttaatgataccagttcatttgggtttatagctaaagaaaataataaaattataggatttgcatattgctatacacttttaagacctgatggaaaaacaatgttttatttacactcaataggaatgttacctaactatcaagacaaaggttatggttcaaaattattatcttttattaaggaatattctaaagagattggttgttctgaaatgtttttaataactgataaaggtaatcctagagcttgccatgtatatgaaaaattaggtggtaaaaatgattataaagatgaaatagtatatgtatatgattatgaaaaaggtgataaataa

SEQ ID NO: 3774 - DNA, 129 bp, Staphylococcus aureus
ctgattaaaattttcaaagatattagtgatacacatcaactaaaacgcgtcattacggtattttcaacattaataacatatacgtatttactatacacagcgataataaatacagattacaatttttta

SEQ ID NO: 3775 - DNA, 177 bp, Staphylococcus aureus
ttgactgaacgaaaatgcgcttgtaacaagcttttttcaattctagtcaggggccccaacacagaagctgacgaaaagtcagcttacaataatgtgcaagttggggatggaccccaacaaagagaaattgtattcccaatttctacagacaatgcaagttggggtgggacgacgaaa

SEQ ID NO: 3776 - DNA, 90 bp, Staphylococcus aureus
atggttagattatatgaaaatggtaagccaagaaatgaaattatacgcgagtatgatttaacacctttgacgttaggaaaatggataaag

SEQ ID NO: 3777 - DNA, 180 bp, Staphylococcus aureus
ttgaaagattytatattttggaagaaagcttttattcctgtttattttattgttgcgatgctggtgtttctactttttaggttttatattaaaacagayaacttttctatrtayttaatgaktatcttcttaatttgtttaggaactgcwtctatcatttataactataaaamyaatcgm

SEQ ID NO: 3778 - DNA, 93 bp, Staphylococcus aureus
ggaggaatacccaagtccggctgaagggatcggtcttgaaaaccgacagggscttaacggsycgcgggggttcgaatccctcttcctccgcca

SEQ ID NO: 3779 - DNA, 76 bp, Staphylococcus aureus
ggtctcgtagtgtagcggttaacacgcctgcctgtcacgcaggagatcgcgggttcgattcccgtcgagaccgcca

SEQ ID NO: 3780 - DNA, 89 bp, Staphylococcus aureus
gccggggtggcggaactggcagacgcacaggacttaaaatcctgcggtgagtgatcaccgtaccggttcgattccggtcctcggcacca

SEQ ID NO: 3781 - DNA, 72 bp, Staphylococcus aureus
ggctccttggtcaagcggttaagacaccgccctttcacggcggtaacacgggttcgagtcccgtaggagtca

SEQ ID NO: 3782 - DNA, 519 bp, Staphylococcus aureus
gtgattatatatatgaatacaatcaaaaatacgatatacacagaagctatatttagcaaggatgaaaaacaccgctatttactcaagaaaacatgggatgaaaagaaacccgcttgtacagtgataacgatgtaccctcatttagatggtgtattatcactcgatctcacaactgttcttatcctcaatcaattagcgaattcagaacgatacggtgctgtatatcttgtaaatctattctctaatattaaaacaccagagaaccttaaacatattaaagaaccttatgataaacacacagacatccacttgatgaaagcaattagcgaaagtgacacagtgattctagcttatggtgcttatgcgaagcggccagttgttgtagaacgtgtcgaacaagtaatggaaatgttgaagcctcataaaaagaaagtcaaaaagctcattaatccagccacaaatgaaatcatgcacccactcaaccctaaagcacgtcaaaaatggactttgaaagcataa

SEQ ID NO: 3783 - DNA, 312 bp, Staphylococcus aureus
atgaaaatcaatcgatacatcacaagaggtattagtgaatacctatctctagaccttcaaatcttactttggaatatggtaaaagaaagagataatcaacctcatacagattacctacacatttttaaactgcaagaagatgagaatatactctcaatcacacatgaacaagaacaacctgcatacaaattggaatatcactatacaaactatgtaaaaaatcaaaatgcattacctaagaaagtctacgtcattcgtgaagatggcgtagacgctttttattatgtgatgcttttaccagaagaatactaa

SEQ ID NO: 3784 - DNA, 297 bp, Staphylococcus aureus
atgtatttcaatcaatcagataaattcgagcagttaaaaaagaaaatattaggtatttcattcaatttacctgaaggagaagaatttacatttcatgacttgaacagtcgtgcaaatgtacaatgttcaaaagctgtacaacaaaatgttggacgttggttcgcatattttgtaaaacatgcgccacgtgttccatttattattatcggtaaggatactcacggtcacttagtttatcttaaaacaggtcctaatccacactataacagcaacccttcgaaaggaggtgttcgctaa

SEQ ID NO: 3785 - DNA, 339 bp, Staphylococcus aureus
ataatgtgcaagttggagtgggacgacgaaataaattttgggaaaatatcatttctgtcccactcccatattcccgatagaaaaacaggacttgaacttgcagaaaaatatggcattgatggcgtcatgattggtagcggcattttccataatccattcgcttttgaaaaagaaccacgcgaacacacaagcaaggaactattagatctgttgagattgcatttatcattgtttaacaaatatgaaaaagatgaaatacgacaattcaagagtttgcgtagattctttaaaatctatgtgcgtggcataagagcgctagcgaacttcgacatcaattga

SEQ ID NO: 3786 - DNA, 255 bp, Staphylococcus aureus
attaatatagggtacatattcacaaatgcagctggtggccctatcgactcgaacaaaattagcaacattattaaagggggcactatcaaagagacaactgagattagttctattaagaaacctgtaacgacgcatacattacatcattcgcatatatctacacttgctcaattaggaattaacttaaaagcaatgcaagagcatgtaggtcattcagattataaaaaatctagagatatacacacatgttactaa

SEQ ID NO: 3787 - DNA, 201 bp, Staphylococcus aureus
ataaacatgttatttgtcattttagttttatatgtcattggcattgcatttattctactaagtgtttttggttctaagacggaaggtttatctacgaaacatactttatatacaattggtagtgccattataacgattgctattttcatttcaattggctatgctattcaatacttaactgcagcgctttatggtttgtaa

SEQ ID NO: 3788 - DNA, 732 bp, Staphylococcus aureus
atgaaccagaaaaaccctaaagacacgcaaaattttattacttctaaaaagcatgtaaaagaaatattgaatcacacgaatatcagtaaacaagacaacgtaatagaaatcggatcaggaaaaggacattttaccaaagagctagtcaaaatgagtcgatcagttaytgctatagaaattgatggaggcttatgtcaagtgactaaagaagcggtaaacccctctgagaatataaaagtgattcaaacggatattctaaaattttccttcccaaaacatataaactataagatatatggtaatattccttataacatcagtacggatattgtcaaaagaattacctttgaaagtcaggctaaatatagctatcttatcgttgagaagggatttgcgaaaagattgcaaaatctgcaacgagctttgggtttactattaatggtggagatggatataaaaatgctcaaaaaagtaccaccactatattttcatcctaagccaagtgtagactctgtattgattgttcttgaacgacatcaaccattgatttcaaagaaggactacaaaaagtatcgatcttttgtttataagtgggtaaaccgtgaatatcgtgttcttttcactaaaaaccaattccgacaggctttgaagcatgcaaatgtcactaatattaataaactatcgaaggaacaatttctttctattttcaatagttacaaattgtttcactaa

SEQ ID NO: 3789 - DNA, 1041 bp, Staphylococcus aureus
atgacaaccaacacagttacattacaaacagcacatattgtaagtttaggagatatcgaagaagctaaagcaagcattaaaccatttattcgtcgaacaccactaattaaatctatgtatttaagtcaaaatatcactaaaggtaacgtatatttaaaacttgaaaatatgcagtttacaggttcatttaaatttagaggtgctagcaataaaattaatcatttgtcagatgaacaaaaagctaaaggtattattggcgcatcagccggaaatcatgcacaaggtgtagctttgacagcaaaactattaggtattgatgcaacgattgtgatgccagaaacagcaccaattgctaaacagaatgctaccaaaggatatggtgcaaaagtcattttaaaaggtaaaaactttaatgaaactagactttatatggaagaattagcgaaagaaaatggtatgacaattgttcatccatatgatgataagtttgtcatggctggtcaaggaacaataggattagaaattttagatgatatatggaatgttaatacggtcattgttccagttggtggaggtggcctaattgcaggtattgccaccgctttaaaatcattcaacccatcaattcatataatcggcgttcaagctgaaaatgtgcatggcatggcagagtcattctataagagagctttaactgaacatcgtgaagatagcacaattgcagatggttgtgatgtaaaagtaccaggtgaaaaaacatacgaagtagtaaaacatttagtagatgaatttattcttgtatcagaagaggaaatagaacatgcaatgcaagatttaatgcaacgtgccaaaatcattacagaaggtgcaggagctttacctacagcagctattttaagtgggaaaattgataaaaaatggctagagggtaaaaatgtcgttgcattagtttcaggaggaaacgttgacttaactagagtttctggtgtcattgaacatggcttaaatatcgcggatacaagtaagggtgtggtaggttaa

SEQ ID NO: 3790 - DNA, 570 bp, Staphylococcus aureus
aygaaagctaaatacaaaaatyatcmaawagaaactaatgaaaaacgaattaaaaatcatttgaatcgcgcttttaatagagaacaaccaatggagacattagtaagtgatttgacatatgtaaaagtcgsaggaacatggcattacatatgtttatttatagatctatttaatagagaaattgttggttacagtgcaggtaaaaataaggacgcmaatttagtatcaaaagcaatcagcagaataaatcataatcttgaacaaatcaamctrttccayacygatagagrcaaagamtttgataatcatttgatagatgaagtcctagaawcmtttaaaatmaaaygttcattaagtaccaaargttgtccttatgataacgcagttgcggaagcaacgatgaaagcaatgarawcwgaatttgtaaaacaaatgyaatttgaaaacttagaacagttagaaacagaattatttgattatgtaaattggtacaacaattttagaccacattcttcattacagtatttgacgccagtggcatttaaaaatatacacatgaaaactgtctaa

SEQ ID NO: 3791 - DNA, 255 bp, Staphylococcus aureus
atagaagtcattcaaaagaatgcacatcaatattcagtaccagcaatgtgtaaagtcctaaaaataccaagaagtacctattatgattctataaaaagaaaagataataaaatcactaaagatgattcaaacgtagaacgtgccgccataaatatttttaattctaatagaaaagtctttagtacaagacgaattaaaaatcatttaaatgacaagggtctcactgtatctggacaaaagataggtcgattatga

SEQ ID NO: 3792 - DNA, 720 bp, Staphylococcus aureus
atgaaaagaatacttatcattgttgttttattgttttgctattcgcaaaatcatatcgcaaccgctgatgtcggagttttgaatcttaggaactattatggtagctatccaattgaagaccaccaaagtattaatcctgaaaataatcatctttcgcatcaattagttttttctatggataattcgacagtaacagctgaatttaagaacgttgatgatgtaaagraattcaaaaatcatgctgtagatgtatatggtctaagttatagtggatattgtttgaaaaacaaatatatatacggtggagttacattagcaggtgattatttagagaaatctagacgtattcctattaatctttgggttaatggagaacatcaaactatatctactgacaaagtatcaactaataaaaagttagtaacagctcaagaaattgatactaaattaagaagatatctacaagaagaatataatatttatggctttaatgatacaaataaaggaagaaattatggtaataagtcaaaatttagttctggatttaatgcaggaaaaatattatttcatttgaatgatggttcatcattttcttatgacttatttgatactggaacaggacaagctgaaagtttcttaaaaatatataatgacaacaaaactgtcgaaactgaaaaattccatttagatgtagaaatatcttataaggacgaaagttga

SEQ ID NO: 3793 - DNA, 150 bp, Staphylococcus aureus
atgattaagcaaataytaagattattattcytactagcratgtaygagytaggtaagtatgtaactgagcaagtatatattatgatgacrgctaatgatgatgtagaggcgccgagtgattacgtctttcgagcggaggtragtgartga

SEQ ID NO: 3794 - DNA, 208 bp, Staphylococcus aureus
rtgacacaatacttagtcacaacattcaaagattcaacaggacaaccacatgaacattttactrctgytagagataatcagacgtttacagttgttgaggcrgagagtaaagaagaagcgwragmgcaartacgaggcacaakttaaaagaggtgcagttattaaattagggcagttgtttgaaaatataagggagtgtgggaaatga

SEQ ID NO: 3795 - DNA, 249 bp, Staphylococcus aureus
atgatgaataatcgtgaacaaattgaacaatccgttataagtgctagtgcgtataacggcaatgacacagagggattgctaaaagagattgaggacgtgtataagaaagcgcgagcatttgatgaaatacttgatggaatgacaaatgctattcaacattcagttaaagaaggtattgaacttgatgaagcagtaggaattatggcaggtcaagttatctataaatatgaggaggaacaaggaaaatga

SEQ ID NO: 3796 - DNA, 249 bp, Staphylococcus aureus
atgactatgacatataacgcgcgcaaagaatacttaaaccaatttttcggatctaagagatatctgtatcaggataacgaacgagtggcacatatccatgtagtgaatggcacttattactttcacgggcatatcgtgccaggttggcaaagcgttaaaaagacatttgatactgctgaagagctcgaaatatatataaagcaacatggtttggaatacgaggaacagaagcaactaactttattttag

SEQ ID NO: 3797 - DNA, 261 bp, Staphylococcus aureus
atgtattacaaaacgggtgacgtatgtcgaaaaatatttaatgtagatggctttgattttcaattaagagttaagaagcgagcatatagtgtcgaaatagtcgttttagatcatgaaggaaattcaattgacgggctactagtttctgacgagaacgatctatacacagctttagatattttgaaacaaagtatttatgaatggattgaaaataacacagatgaacaggacagactaattaacttagtcatgaaatggtag

SEQ ID NO: 3798 - DNA, 162 bp, Staphylococcus aureus
atgagtaamayttataaaagctacctagtagcagtactatgcttcacagtcttagcgattgtacttatgccgtttctatacttcactacagcatggtcaattgcaggattcgcaagtatcgcaacattcatattctataaggaatacttttatgaagaataa

SEQ ID NO: 3799 - DNA, 324 bp, Staphylococcus aureus
atgccacatattttaaacgtaacagttccaatacctgaaacacacgtgcttatcacaaaagatgaatatgaagagttaatagcttactcattagaccctgtatggaacatgagcgacttaaagaagaaattaaaaattgcatctgatgaaacaatcaaagacaggttattatttcaccctagactcgaaaaagagttaagagcacaaggtatcgtacattatcctgatgagaattttaatcgttggaggtttaacgcaagaaggatgcataagtttgtagatgaacattttaatgagatttacaaaggagggcacaacaaatga

SEQ ID NO: 3800 - DNA, 570 bp, Staphylococcus aureus
atgagtgagttaacggcaaaacaagcgcgttttgtgaatgagtatataagaacacttaatgtaacacaaagtgccataaaagcaggctatagcgcaaatagtgcacatgtgacaggatgtaggttattaaagaagccacacatcaagcaatatatacaagaacaaaaagataaggttatagatgagaatgtattaaccgcaaaagagttactacatgtgcttacgaatgcggcagtcggtgatgaaacagaaacgaaagaagttgtggtcaaacgtggagaatataaagagaatccacaaagtggcaaagtacagttagtctataacgaacatgttgaactggtagaggtgccaattaagccaagtgatcgtttaaaagctcgtgatatgttgggtaaataccataagttatttacagataagcatgatattaacgggaatgtgcctatattcattaatattggtgaatgggatggcgatgatgaagatttagataagacggtacaagaggtatctaacgctaatcctaatcatactgtgattgtggatgatataccgttagaggattga

SEQ ID NO: 3801 - DNA, 342 bp, Staphylococcus aureus
atggataaaaagcaaataaaagacttcgtttgtgattatcataagcgaactataagtgatgtgttgatagatgatgaaataaawaccgatgawttcttttcaataggtgatgaaaattctaatgaatggatggcagacgataacattgatgatcatattgtaaagaatcacttagaaatgattgttgaccaagtagctaatgataaagagttttatattttcgattctttaatacaaggacgtagttttaaagatattagcaatgtcttagagtgttcagaacaatctgtaagattatggtatgaaaccttattagataaaattgtggaggtgatagaatga

SEQ ID NO: 3802 - DNA, 528 bp, Staphylococcus aureus
atgaaactgcttaaaacgaagaattgtttatattatcgtaatggcgacaataaactatctgagtatcaactattaacgcaatttaacccagcatttattaataaaaaaattaagatgtgtgaattccaaattgaaagtatgtaccatatgagtgcgtcgaccacaacatgtgatgaaataatgggggtcgtgtctgtctcatatccgattgaaaaattagttatcaaaattattgaaacaaaagcagggttacaaaactataaaaatagatctataaataatatggcgttgttgaaaaaggtactaaatcattatacagaaaaagagcagaagcaagttgtaaaatatatgcgttcaaatggacgatataagccctacaacgtcattgaacgcttacaagttgatttgtatcaagcaagtattaaacaacgttcagaacgtcaaaaacaaagaaatacagcaattgaaaacagtaagattgcacgagtaaatgcatatcaccaatcttcatatgtaaaagtggtgtaa

SEQ ID NO: 3803 - DNA, 219 bp, Staphylococcus aureus
atggaaacaaaatacgagttaaataatactaaaaaggtcgcaaatgcatttggtttaaatgaagcagatacaaatctattaataaatgcagttgatttggatattaaaaacaatatgcaggagatttcaagtgagttacaacaatcagaacagtctaagcaaaagcaatatggtacaacgctacaaaatttagctaagcaaaacaggattattaaatag

SEQ ID NO: 3804 - DNA, 579 bp, Staphylococcus aureus
atgaaaactgaatcgtactttaaagaatacaaccaatttgtaatagatcaacaaaaggctatacaagaattggaacaagagcgtaatgcattggagagtaaaataaagatagataagtccacatataaacagttaatcatggatggacaagatgataaagcagataacctatatcaagcaacagatgctgatgaaaagaaactaaaagcacttaataaacgcttagagacaaagaaaagtgtgtcgaaagaagttaaatatcaaaagacaattgaattattaaaacatcaaagcgagttgtcatcattatacgaatcagaaaagcaatcagctttaggtaaattaaaaaaagtagtcgatgcatataatgagatcattgatgaaatagaagatattaatgatagatatgaagatgagcatcagcaatatgcgagtatttatagtcaagaacaattatatgatgataaagaggctagggaagcattgaatggctactttagagaaaatatatttacatcatatattaatggtaatgatttgccatacgaacacaataacaagttgtttttaaaacgttaa

SEQ ID NO: 3805 - DNA, 642 bp, Staphylococcus aureus
atgaacttagaaactatcgtaaaccaatttgaaacacgagcaggcacgttactaaggtactacacaggattattagaacatagtaaagtgcaaccgtgttgctttaagttatacaatgatccatttgatatggtatacgtgatgatgaacagcaagctattcggtcatgtatatattaaagattgtaaagtaaggcaatcatttgaattagcgtcacctaagcacactgaggggcttataagaagcatagaggggcattatgtaggttatgaattacatgacggtaaacatctttctattagtgatatgatggctagtcatttgtttgaagatgagtattttatgtatggattacaaacatatgcagaatcaaataatagtgatgtgtttgagtacctagaaaatggatttgatacagatacacttgagggcattcaatcaagtaatactgatgtgatagcgaatattgaaatgttgtatcagttagctacgggaatcaatgaaccagcaccagagttagttgagggattaaaattagtaactgagtttgtacaagatgagaatgcgacacaagaggattacaaggctttagaacgtaaattgaatgatctaaaagcgtcttactatagcttgagtaaataa

SEQ ID NO: 3806 - DNA, 210 bp, Staphylococcus aureus
atgaataatgaacaaaaagaagtaatagaacacgtggtttatcaacttgagttaagtgtcgtgaataatttggaaagttatgaacacacagaatatgttaatggtattgaagtggtttcagagatcagtcgtgaaaagcacttagaattgataatgaaatggtgcgcacaagaattaaagaataattttcaattagagaaaggagaataa

SEQ ID NO: 3807 - DNA, 402 bp, Staphylococcus aureus
atggttaaagtgacatatgatattccgacttgcgaggattattgcgcattaaggattaacgcaggtatgagtccaaagacgcgcgaagcagctgaaaaaggattacctaatgccttatttacagtaaccttgtatgataaagatyggttaattggtatgggtagagtrattggcgatggcggaactgyttttcaaattgttgatattgctgtttcgaaaagttatcaaggtcaagrttacggcagtcwaattatggaacatattatgaagtatattaaaaatgtatctgtcgaaagtgcatacgttagtctgatcgcagactacccrgcggataaattatatrcaaaatttggatttatrcctacsgaaccagattcaggyggwatgtatatyaartwytaa

SEQ ID NO: 3808 - DNA, 315 bp, Staphylococcus aureus
atggaaacaaaagaaaaaattaaagtgacaactatagatgaattaacacccctaattggaaaaaaggttattgtcaaaggcaaagaggtaggattgtttttaactgaaagtggtacaattcacgcgattcacaatatttgtccgcataaacaaggaccattgtcagagggaacagtgagtggtgaatatgtattctgtccacttcatgatcaaaagattgatttaaatactgggattgtacaagaacctgatgaaggttgtgtagatgtttatgaggtagaagttacagacgggaacgtatatatatgtctgtag

SEQ ID NO: 3809 - DNA, 420 bp, Staphylococcus aureus
atgaacaaaaaacatgtttttgtaattattggtgtcattttatgtatatgtatagttgcatcagtcatttatttaaaagtgaaatatgacgaaaaagaaaaacaaaaagcaatatactataaagaacaacaggagcgtattacactctatctccagcataataccaaagaacccaataccatcaaatctgtgcatttcacaagtttaaaaagaggacccatgggcgatgccgtaattgaaggctacatcaatgaaaacaaaaaagataattttactgcttatgctacaccagaacataattatcagtttggtggtgctatgatagaaagtgaaagattaagtgagttactaaaaccagcgcatcaattaaaatcacctgacgaaatcaaagaagaattagacaaaaaagaaggccactag

SEQ ID NO: 3810 - DNA, 411 bp, Staphylococcus aureus
atgtygaaaaagaaaattttaatrttaactagtattatrttaatcatattaattagtgttgcaagtatctattttaaaatgaaatatgaygaaaaagaaaaacaaaaakcaatttattataaagaacaacaagcgcgcattacactttatctyaagcataayactawagaaccgaacacratyaaatctgtrcatttcacaaamttggaaacaagtcctatgggaagtgctgtgattgaaggttacataaatgaaaayaaaraagatgattttgttgcctatgyatcacctgaaaataactttcaatttgtaggtgatttaattaaaagtgaaagattaagtgagttactaaaaccagcrmatcaattaaaatcaccagatgatataaaaaaagaactaaataaaaagtag

SEQ ID NO: 3811 - DNA, 774 bp, Staphylococcus aureus
atgatgcattcaaagaaattaatgctcggtatatgtttggtattactcattatattgattgtaggttatgtcattatgacaaaaataaatagtcgaagcgcccaaattaaagacacatttaatcaaacattaaaattatatccaaccaaaaatcttgaagacttttatgataaggaaggctttcgagatcaagagtttgaaaagggcgacaaaggcaattggattgttgattctgagatggtaattgagctgaaggataaaaaaatggaatctagaagtatggtgctctatataaatcgtaatactagaacaacgaaaggtaattttattgttagagaattgtgggaagatagtaaagggtatgcacaaagtaaagatacaaaatatccagtgaaaatggaacataatcgaattatcccaacgaaaccgatagctgatgataaattaagaaaagaaatagaaaactttaaattctttgtacaatacggtgactttaaagatattaatgattataaagatggtgacatttcatataatcctaatgttccaagttattccgcaaaatatcaattgaaaaacgatgattacaatgtgaagcaacttcgaaaaagatataatattccaaccaacaaagctccgaaactattattgaaaggtgatggtgatttaaaaggttcatcaataggatcaaaaaatctagaatttacctttgtagaaaataaagaagagaacatttatttttctgatagtattaatttcaaacctactgaatag

SEQ ID NO: 3812 - DNA, 201 bp, Staphylococcus aureus
atgaaaggcgtttcaagacatgtttttgtgcgtattgtacaggcgataattatgaaacryttagtatrttgttttaaattagataatgatgaatttaatttraaaaataagtataaaaaatacaagccttgtgtgacaagggtttmtgaygacttgratacaatttatargtatatttcaaataataaaattatcaattaa

SEQ ID NO: 3813 - DNA, 159 bp, Staphylococcus aureus
atgatattttcgmaaaatttatttcgtcgtcccaccccggcaaggttgactagaattgaaaaaagcttgttacaagcgcattttcrttcagtcaactactgccaatataacttygtagagcatwgaacattgatttatgtcccagcctggacacattag

SEQ ID NO: 3814 - DNA, 783 bp, Staphylococcus aureus
atgagcaatttgattaacggaaaaataccaaatcaagcgattcaaacattaaaaatcgtaaaagatttatttggaagttcaatagttggagtatatctatttggttcagcagtaaatggtggtttacgcattaacagcgatgtagatgttctagtcgtcgtgaatcatagtttacctcaattaactcgaaaaaaactaacagaaagactaatgactatatcaggaaagattggaaatacggattctgttagaccacttgaagttacggttataaataggagtgaagttgtcccttggcaatatcctccaaaaagagaatttatatacggtgagtggctcaggggtgaatttgagaatggacaaattcaggaaccaagctatgatcctgatttggctattgttttagcacaagcaagaaagaatagtatttctctatttggtcctgattcttcaagtatacttgtctccgtacctttgacagatattcgaagagcaattaaggattctttgccagaactaattgaggggataaaaggtgatgagcgtaatgtaattttaaccctagctcgaatgtggcaaacagtgactactggtgaaattacctcgaaagatgtcgctgcagaatgggctatacctcttttacctaaagagcatgtaactttactggatatagctagaaaaggctatcggggagagtgtgatgataagtgggaaggactatattcaaaggtgaaagcactcgttaagtatatgaaaaattctatagaaacttctctcaattag

SEQ ID NO: 3815 - DNA, 1893 bp, Staphylococcus aureus
atgaatgcttctagtaaaaggaaaattatyagtcagagtgagatyagcaaaaaaatagctgtaatgaatgaagaaatgcargggttttgggctaataatagttgggatataagaaaatgtccacatccttctgccatagaattaagtaagaatcctgctttaagraatcgttgggttcgttttgaacgtgttaaaaatctgtggttaagaacagaattgaaatatttttatttttaccatttaaacaatggaatatggaatgcaaaaactgtctggattagaaaaggaacagtaattaataaaatgttrgatttyttagatttaaagtatccyagcattacttcaattactgaagttcctattgawaaagcaatgacggagtatagaacwtatttgacaaaacrgggtgttagaattaccacyactaattataagattactgctaatcaagaaaaaacacctgtaaaagctaattcytactatgttactaatctwaaacaatttatkgagtttwwtgagrayttttattttgatggagaggagtgggataaagacgtttgggatagacgwaacttacctttgccagatgataaggttaacccaacacaatatgaatatacaattaactttaaagggtttcggaatacatattttaaacarcttgtaaaaagatattgtaagttragattgaacrtggatagcttttcctatgtaagtgatattgcccaaaracttaaagagttctttaattttctggacatraartttaaacamgttcagagagtacaccaattaacgagagtggaaattgaagcatatttaagtgaactaaacatgatgggrataaaacctagtacaataactgggaggatctctatattggaaggactatttagtacccttcwtaggctagaatgggatgatgttccttccaaawtattaatttatycygaggactatccgaaaataccaagagcaaaaccwcgctttatagaygaattcgtyctagagcaattgaacagtcatcttgataaattacccgaatatatagctacgatgactatgattgttcaagaatgtggaatgaggataagtgaattgtgcaccttgaaaaaaggctgtytattagaggacaaagatggakattwctttttaaagtattatcaatggaaaatgaaaaaggagcatatagttccaatatctaaagaggtagytttacttattaaagttcgggaagataaagtttcagaggaatttccagatagtgaatacctctttccaagaaaagatggatcgccattaaaacaagaaacatttagaggygarttaaataaattagcttatgagcaaaatatagtggataaatyaggygagatttatagattccatgcccatgcctttcgccatwcagtaggaacaagaaygattaacaacgggrtgccccagcatattgtgcagaaatttttgggrcatgaaagcccagaaatgacaagcagatacgctcatatctttgatgaaactctaaaaaatgaatttactaaatttcargaaaaactggttaccaataatggagatgtgctyratctagatgawgatartgaagtcgatgatgtagagcttcaatggttcaagaaaaatataaatgcacaagtgcttccaaatggttattgtagattgccagtartagcaggtggttgtccacatgcgaatgcatgcttagattgcactcacttctgtaccagtaagcaattcttaccacagcacgaagaacagttagagcgtacagaagagttattarccatagcwaaggataaacaatggcaaagacaartagagactaatagccgtgttaaagagcgtttagaacaaatcattggaagtttracggggtaa

SEQ ID NO: 3816 - DNA, 1085 bp, Staphylococcus aureus
tgarggttcaaaggatagaagtggagaataagccgtatccattgtatttattactagataaagaataccagctaawwgaaysmktmwwgaaatttattaaatacttagataatactggtaagtctcctaataccattaaggcatactgctatcatttaaagttgctgtacgagttcatggaacagagaggtgttattcttaatgatattaactttgagttgttagcagacttcgtaggttggttgagatatccttcagcatcaaatgtaattgatcttcagtcaaaaaaagccataagagaagaaacgacagtgaatacaattttaaatgtagttatgagttttcttgattatttaagtagattaggagaatttaaatcaattgatgtatttaaacaagcaaagggaagaaatttcaaaggatttttacatcatgttaataagggtagataccaaaagaatgtcttaaagttaagggttaaaaagaaacagataagaacattgagatcaaaggaagttaagcaaattattgatgcttgtcatacgaaaagagataaattaattttaatgcttatgtatgagggtggtttaagaatcggtgaagtgttatcgcttaggcttgaagatattgtcacttgggacaatcaaatccatttaacacctagagatgttaatgttaatgaagcttatattaaattaaggaaggaaagaacaatacatgtgagtaaagaacttatgtcactttatacagattacttgatatatgagtatagtgaggaattggagcatgattatgtttttatttccttaaaagaaggctattttgggaaaccactaaagtaccaaagtgttcttgatctagttagaagaatagttaaaaggactggaatagaatttacatcacatatgcttcgccacactcacgcaacgcagctaattagggaaggatgggatgttgcgttcgttcaaaagagattaggtcacgcacatgttcagacaacgttaaatacctatgttcatctttcagatcaggatatgaaaaatgagtttaataaatacctcgagagaaaggagcataagaaatga

SEQ ID NO: 3817 - DNA, 153 bp, Staphylococcus aureus
atggctcgtaggtgccatatgggcgcttgtaacaattgttatgattgcagtcattactgcatcaattactgcgttattaccttaagggaggtggacaaaatgagttgggcaagatggttgtcatgctatttgtatggtcgtaaatgtaaataa

SEQ ID NO: 3818 - DNA, 132 bp, Staphylococcus aureus
atgattaaaaagttgttatggtcaactatatcgtggttttatgtttattatcaatcaaaatataaattatttataatttgtttggtaatgaacgggttttttcgaaataatagtaaaaaaacacatttgtag

SEQ ID NO: 3819 - DNA, 240 bp, Staphylococcus aureus
atgaaagcgaagaattcgggttttaaaggtggtgacaaaatggacttgaataaaataaatgtcttttttaatttcttggttgctaatttggttagcatcctttttttattaggtttgtttgtggttaatgtttctgtgtataaagcattcggtcaaaatataggacttttatgcattggtataacactgattgttatttcgttgattttaaatcatgaaagcaatcaagaaaggagttag

SEQ ID NO: 3820 - DNA, 162 bp, Staphylococcus aureus
atgagcgacacatataaaagctacctattagcagtactatgcttcacagtcttagcgattgtactcatgccgtttctatacttcactacagcatggtcaatcgcgggattcgcaagtatagcgacattcatattttataaggaatacttttatggagaataa

SEQ ID NO: 3821 - DNA, 249 bp, Staphylococcus aureus
atgaataaccgcgaacaaattgaacaatcagtgatcagtgctagtgcgtataacggcaatgacacagagggattgctaaaagagattgaggacgtgtataagaaagcacaagcgtttgatgaaatacttgagggtttacctaatgctatgcaagatgcactcaaagaagatattggtcttgatgaagcagtagggattatgacggggcaagtggtctataaatatgaggaggagcaggaaagtgactaa

SEQ ID NO: 3822 - DNA, 165 bp, Staphylococcus aureus
atggggtgtttagtggtggttaaagaaattttgagactattattcttactagcgatgtatgagttaggtaagtatgtaactgagcaagtatatattatgatgacggctaatgatgatgtagaggcgccgagtgattacgtctttcgagcggaggtgagtgaataa

SEQ ID NO: 3823 - DNA, 153 bp, Staphylococcus aureus
atgagaatatttatttatgatttgatcgttttgctgtttgctttcttaatatccatatatattattgatgatggagtgataataaatgcattaggaatttttggtatgtataaaattatagattccttttcagaaaatattataaagaggtag

SEQ ID NO: 3824 - DNA, 228 bp, Staphylococcus aureus
gtgttcgaattattaatattatatttatttaatttctcaggtaattcttttgctaattttggaaattctgtaccacctgctgatgattttaatagagttaatgaatctggtttatttaggtacaataaatctttttctaatagatgtctattagaataccatgttatatttttgctttttactcctgtaacgacactctttaaagcatcatccatacatagaatataa

SEQ ID NO: 3825 - DNA, 150 bp, Staphylococcus aureus
atgatacccatcaagcgttggagtgaactctttgatgcacttatttgtgtaatgacatctttacagtcttttccttcctccatcattttaataattccatttagttgcccttgtattctattaatacgattaatcatttttttatcataa

SEQ ID NO: 3826 - DNA, 168 bp, Staphylococcus aureus
atgaatgcaattacaatactatttgtaacaaccatattcattggtaatttaaatataacaagtagtactggaataataatgaatgctccaccagctcctacaataccagatactaaaccgatgataccacctattgtaattaaaagtacgcgattaaacttaatatga

SEQ ID NO: 3827 - DNA, 213 bp, Staphylococcus aureus
ttgaagaaattaatcatgctgatgactaataataacgcccaacaccagcaggtgttgggctcatctataaattcgttcataaatatatattatcactttggaaggaggaaatacgatgaaacaagcaataggttacttacgacagagcactacaaagcaacaatccttagcagcacaaaaacaaaccatcgaggcattagccaaaaaacataa

SEQ ID NO: 3828 - DNA, 201 bp, Staphylococcus aureus
ttgcgcaatttttttataaccataaccttgaaggtaataattgaacacagcttttactgttggtgcttttactgtgtctatcgtgaaagtaccattatgatagtgatacccaaagggtgcatgtgttgtaatcattttaccttgtttcgctttttctttgattccatttttgacttgttcgcctatattatcagattctag

SEQ ID NO: 3829 - DNA, 339 bp, Staphylococcus aureus
atgacaaaagcaccaattgaagatataaaagcaattactatactattagcgactacagtattcattggtaatttgaataaaaccaataatataggaataataatgaaggcaccacctgcacctactatacctgaaataataccaatgaaaaggccaatgataactaataaatatttattaaatgaagacttttcggaactaggtttcactttaataaacattaatgttaatgcaagtaaagcaataatgatatataccgtatttacaaatgtagcatcaaataaatttgctagaaatgcacctaacatactccctataatcatgccgccacccatataa

SEQ ID NO: 3830 - DNA, 195 bp, Staphylococcus aureus
atgctctttgttttgcagcatttttatcccgcggaaacatatcacttatctttgaccatccttgattcaaagataagtatatgccttctccttccggatgaaaaagatataccaaataatatccatcctttgtttcttttgttatattctcatcatatattgaaatccaaggaactttactatagttcccagtag

SEQ ID NO: 3831 - DNA, 315 bp, Staphylococcus aureus
ttgaattgtcgtatttcatctttctcatatttgttaaacaatgatagatgcaatctcaacaaatctaatagttctttgcttgtgtgttcgcgtggttctttttcaaaagtgaatggattgtggaaaatgcctctaccaatcatgatgccatcaataccatatttttctgcaagttcaagtcctgtttttctatcgggaatatcatcgttaattgttaacaatgtgtttggtgcaatttcgtcacgtaaatttttaatagcttcgattaattcccaatgtgcatctactttactcatgcgtttgataaaaacttaa

SEQ ID NO: 3832 - DNA, 225 bp, Staphylococcus aureus
gtgaaaagctctttgtttttaatattgtataagtctgccaactctattccatttccttttactataaaattcttatttattggttttatgaattttttatgtaacattaaatattcttctggcaatcttcctactatttcttttatatatccttcttctccttctttaaatactaaacctgtgggagttagtgtgttatacctaatttctatctcattcaaatga

SEQ ID NO: 3833 - DNA, 351 bp, Staphylococcus aureus
atgacactagaaaaacaactcaaagagtatataactaacttattcaatctgccaaaggacgaaaaatgggaatgtgaatctatcgaggaagtggcagataatatccttcctgatcaatatatcagacttggtccgcttaccaacaaaatccttcatacgtatacttactactctgacacacttcatgaaaggcatatatacccctttatcctctactatcaaaaacaacttattgcgattggttatattgatgaaacaaacgatatggacttcttatatcttcataacacagttatgccactactagatcaaagacacttacttgaaaaggagaattataataatgaataa

SEQ ID NO: 3834 - DNA, 156 bp, Staphylococcus aureus
atgcctttcatgaagtgtgtcagagtagtaagtatacgtatgaaggattttgttggtaagcggaccaagtctgatatattgatcaggaaggatattatctgccacttcctcgatagattcacattcccatttttcgtcctttggcagattgaataa

SEQ ID NO: 3835 - DNA, 123 bp, Staphylococcus aureus
atgaaaggcatatatacccctttatcctctactatcaaaaacaacttattgcgattggttatattgatgaaacaaacgatatggacttcttatatcttcataacacagttatgccactactag

SEQ ID NO: 3836 - DNA, 393 bp, Staphylococcus aureus
ttgcacacatatagtacttatttatccttcactctcatcagtcgcaaactatttaatgctaccaaaatagtggctcccatatcggaaagaatcgcaatccaaagggttagccagcctggaataaccaatagtaaggcaattatcttaattccgatggcaaacgtgatgttcgctttgatgatatttagcgttttcctgctaagtcttactgcaaatggaagcttacttaaatcatctcccattaatgcaatatcagctgtctcgatggcagtatctgttccagcaccgcccattgcaatgccaacagtggatgcagcaagtgcaggagcatcattgacgccatcgccaatcatagctacattaccatgctcggctttcatttttttaatatag

SEQ ID NO: 3837 - DNA, 522 bp, Staphylococcus aureus
atgatgggcattatattatatgaccacataatattttcagaaaatgatcatcattcaattatcaaaaaaattgcactttctactggtatatatccttgcattaattttataaaaaatgcccctactgaagatataaaagcaattgctatgctattgttcactaccgtattcattggtaatttaaataatgctaataatacaggaatgatgataaatgctccacctgcacccacaattcccgaaattacaccaattccaaatccaactataataaatagcaaaggtttagatttcgtctcttgtgtagtaggtttaactttaataaacatcaatattaaagcaagtatggcgattattacatataccgtatttacaaaagtagcattaaacaaactagctaaaattgcccctaacatgcttccaatcaacataccccctcccatatatataacaagtttaggagagaaagctggttgttttcttgcatttaatgatccactaagtgtactgaaaaatacttga

SEQ ID NO: 3838 - DNA, 129 bp, Staphylococcus aureus
atgaagtcaccgctaaataatcccattggtatactggaacccccaccttcgtcagtaagtaaaaaactaatactctcagggggatggcctggagtgtgtaagacttctaatttaatctttcctaaatag

SEQ ID NO: 3839 - DNA, 213 bp, Staphylococcus aureus
atgcaagtcttgattaaatcaataatgcttgtaataacaccagtgaaatccatatgcataccctctttctatttaagatacattaagtataatatcaaacaaataaaaaatgttaaaaattccctaattggctatttagattgcataaatgtcaaaaatttgaaaaacatacaacgactttgcataaaaaatcgtcatattggaaatacgtaa

SEQ ID NO: 3840 - DNA, 1626 bp, Staphylococcus aureus
atgttataatttttgtgatatggaggtgtagaaggtgttatcatcttttttaatgttaagtataatcagttcattgctcacgatatgtgtaatttttttagtgagaatgctctatataaaatatactcaaatgttacgaaagacttagcaattaatgttaatcagtttgagacctcaaatataacgtatatgattcttttgatatgggtatttggtagtttgttgtgcttattttatatgattaaggcattccgacaaattgatgttattaaaagttcgtcattggaatcgtcatatcttaatgaacgacttaaagtatgtcaaagtaagatgcagttctacaaaaagcatataacaattagttatagttcaaacattgataatccgatggtatttggtttagtgaaatcccaaattgtactaccaactgtcgtagtcgaaaccatgaatgacaaagaaattgaatatattattctacatgaactatcacatgtgaaaagtcatgacttaatattcaaccagctttatgttgtttttaaaatgatattctggtttaatcctgcactatatataagtaaaacaatgatggacaatgactgtgaaaaagtatgtgatagaaacgttttaaaaattttgaatcgccatgaacatatacgttatggtgaatcgatattaaaatgctctattttaaaatctcagcacataaataatgtggcagcacaatatttactaggttttaattcaaatattaaagaacgtgttaagtatattgcactttatgattcaatgcctaaacctaatcgaaacaagcgtattgttgcgtatattgtatgtagtatatcgcttttaatacaagcaccgttactatctgcacatgttcaacaagacaaatatgaaacaaatgtatcatataaaaaattaaatcaactagctccgtatttcaaaggatttgatggaagttttgtgctttataatgaacgggagcaagcttattctatttataatgaaccagaaagtaaacaacgatattcacctaattctacttacaaaatttatttagcgttaatggcattcgaccaaaatttactctcattaaatcatactgaacaacaatgggataaacatcaatatccatttaaagaatggaaccaagatcaaaatttaaattcttcaatgaaatattcagtaaattggtattacgaaaatttaaacaaacatttaagacaagatgaggttaaatcttatttagatctaattgaatatggtaatgaagaaatatcagggaatgaaaattattggaatgaatcttcattaaaaatttctgcaatagaacaggttaatttgttgaaaaatatgaaacaacataacatgcattttgataataaggctattgaaaaagttgaaaatagtatgactttgaaacaaaaagatacttataaatatgtaggtaaaactggaacaggaatcgtgaatcacaaagaagcaaatggatggttcgtaggttatgttgaaacgaaagataatacgtattattttgctacacatttaaaaggcgaagacaatgcgaatggcgaaaaagcacaacaaatttctgagcgtattttaaaagaaatggagttaatataa

SEQ ID NO: 3841 - DNA, 207 bp, Staphylococcus aureus
atgcatgccagatgcaatgatacctttaaatctactttgttctgctttttctttatctatatgcatatattgaggatcaaaagttgttgcaaattggataatttcttcttctgtaatatgaaggctttttgttttgaatgtttctcctactataaaatcatcgtatttcatatatgtctctctttcttattcaaattaattttttag

SEQ ID NO: 3842 - DNA, 243 bp, Staphylococcus aureus
atgaataataaagctttaaaactttatcagcgactttaccaaattgaagagcttgtcggttcaatattcgtgcgtatttcaaaatcagaaattatcaatctaaattacattgatcacttgaagttagaaacaaatggaatggtccatctcactatgaaaaaattattccacgctgttcaaaaaggtgcgttcactggtcttatgatttctgtcattacttcacttatttttttcaagggataa

SEQ ID NO: 3843 - DNA, 333 bp, Staphylococcus aureus
atgggtaaaatttattatgaaaactttaatgaagcggttattatgctaatatgtgtagcactatgggcattgattggaattttgtttacttatggtaatttgatatttacagataccgattggagtataacaaaacagactgtagttcactttatattgatgataatcctattcttcccactcgctattctagcaggttggttccatctgaactttgagaatattattagtttcatcataatatttattgtagtgtatatcacgatgtggtttgggacatatcaaagaaataaaaagataattcatgaggcaaataataaattaggtcattaa

SEQ ID NO: 3844 - DNA, 414 bp, Staphylococcus aureus
atgagacgattaatttggtacaatagcgggccatggaaacgcacgatagtatataaggatccagtccctcataacttccctacccctcaccttgatttccttaagcagaccatcgattataaagtgcccgtacacttatatgatgcgattgccgcttttgatggaagtgtctacttagatcgaactacaggtgaggcatcagcaaagtgtcatgaggaagcgatgaattttttatctttaaacttgttaaatgacattgtaactggcaaacgtgatgttcaaggagcaaaagctttctacgcccaaactgccgaacagtttaccaaatatcatataacatctccttatacagaaggttttctttttccaatgcaatataatacggcagaccttggcgttacatattttaaataa

SEQ ID NO: 3845 - DNA, 1644 bp, Staphylococcus aureus
atgactcaaaattcatataaaatacccattcaaggcatgacatgcacaggctgtgaagaacatgtaaccgaagcattggaacaagccggagctaaagatgtttcggccgatttccgacgcggtgaggccatttttgaactcagcgatgatcagatcgaaaaggctaagcaaaatatttcggcagccggctatcaacccggagaggaagaaagccagccctctgaaaacagtgtagatttcaatcgggatggcgattacgatcttctgattattggttccggcggtgcggcgttttctgcagctatcaaggccaatgaaaacggggcgaaagtggccatggtagaacggggaaccgtcggggggacctgcgttaacatcggttgtgtaccgtcaaaaaccatgcttcgtgccggtgaaataaacggtctcgcccaaaacaatccgtttaccggacttcaaacgagtaccggtgctgcggaccttgcccaattgaccgaacaaaaagatggattagtcagtcaaatgcgtcaagaaaaatatatagacttgatcgaagaatatggatttgatctcattcgtggcgaggcctcgtttatcgacgataagacgatacaagtgaatggacaaaacatcacgtctaaaagctttttaatcgcaacgggggcttctccggctgttccggaaatcccgggaatgaatgaggttgattatttaacaagtacatccgcactcgaattaaaagaggttccacaacgattggcagtgatcggttctggctatatcgcagcggaattaggtcaaatgtttcacaacctcggaacagaagtgactctcatgcaaagaagcgagcgtctgtttaaaacctacgatcctgaaatttccgaagccatcgatgaatccttaactgagcaaggacttaacctgatcactggggtcacttatcaaaaggttgagcaaaacggtaagtcgacaagcatttatattgaagtgaacggtcaagaacaagtcatcgaagccgatcaagtcctcgtggcaacaggaagaaagccgaacacagagactttaaaccttgaatcagcaggtgtgaaaacagggaaaaaaggcgaagtgctgaccaatgaatatttgcaaacgtcgaataaccgaatatatgccgcgggcgatgtgaccctcggtccgcaattcgtttatgttgcagcttatgaaggcgggattgtggcaaataatgcgttgggtctagcgaaacgcaaaatcgatcttcgctttgttcccggcgtaaccttcaccaatccatcgatcgccacagtcggcttgactgaacaacaggcaaaagaaaaaggttacgatgtcaaaacatcggtccttccgttggacgctgtaccgcgggccttagtcaatcacgaaacaacaggggtctataaacttgtagtcaacgcccaaacccagaaattgatcggagcgcacattgtgagtgaaaatgctggagatgtgatttatgcggcaacgttagcggttcaatttggattgaccattgaagaccttacggatagctttgcgccttatttaacgatggctgaaggattaaagcttgcagccttgacgtttgataaagacgtatcgaaattatcttgttgtgcaggctaa

SEQ ID NO: 3846 - DNA, 339 bp, Staphylococcus aureus
atgatggatgagaatcgctcgaaaggtaaccgctggggtgtttgggcctttttcggaatattattggttcctttattggttcctttactttgttgcgcaggaccgattctccttgttgcattagggagcacaggtattggtgccctctttgctggtgcgacaggaaattggtggttgaccggcatttttgcagcattggccattgttatgattgctctgatcctcagcaagttgttgaagaacaaatacaattctcctgaaggcaatggaaaaacaaaaaataaaacggattgctgtacgcctccagagagcgtggatcggaaacatgagacaagataa

SEQ ID NO: 3847 - DNA, 681 bp, Staphylococcus aureus
atgagtttttcgtttctcttcattctgaccgctggaatggttgcggcctttaatccttgtggtatcgccttgcttccttcttatatctcctatttaattggaggcgaaacaaaggatcattcgttccgctatgcaatttttaaaggattagggcttggtggagcgatgaccacggggtttttaacgatttttgtattggctggtttgttgataggaggattgggaagcgcactaacagggatttttccgattctttcattggttatgggtatactcattgctttattggggttgggcatgctatttgggaagcatttgccgattaaaataggatcttttcaagtcaagccagggaaatggtctatctatttttacggaatagcctatgccgtgacatcacttggttgtaccttgccagcctttatgttggtggtctctgcatcgctgaatgacaatagcgtaacggccgtgatcatcaagttcatcatctactcccttggtatgggaattgtggtgacagcgatcacgatggtctcattgatttcacgacaattggtacagaagtttctgcacaactatatgggttctatccaaaaaatagcagctgttgtgattttcctctccggtttgtacatgacttattactggtatttcggttctggtggcatttgtacattttaa

SEQ ID NO: 3848 - DNA, 354 bp, Staphylococcus aureus
atgaaaaaacgcatttccttcaccgctataatgacggtgttgttaatcggtttaacagcttgtggagcagaatctgataccgcgaatgaatcaaaggttcaagacattcaaggaaatccagtcagcctacctaatgagaaacccacactcatttattttatggcaacctggtgtccatcttgtatatacaatgaggaaatctttaaggaaattcatcaactaaacccgaacgatgttcaatttatcacagttagtttagaccctaacacagatacaaaagaaagctttgcgaaatttaaacaggattatggcggggattggccccatgttttaaagataggagtggaattatga

SEQ ID NO: 3849 - DNA, 408 bp, Staphylococcus aureus
atggagatgaaaatcagtgaattggctaaagcgtgtgatgtgaataaagaaaccgttcggtattacgagcggaaaggattgatagccgggcctcccagaaacgaatcagggtatcgaatatattcagaggaaacagcagatcgggtacggtttattaaacgaatgaaggaattggatttctcgctaaaggaaatccacctgttgtttggtgtggttgatcaagatggggagagatgtaaagatatgtacgcctttaccgttcaaaaaaccaaagaaatcgagcggaaagtgcaggatttgttacgaatccaacggttattagaggaattaaaagaaaagtgtccagatgaaaaggcgatatatacctgtcctattattgaaacgttaatgggagggcctgataaataa

SEQ ID NO: 3850 - DNA, 1350 bp, Staphylococcus aureus
atgatgacaaagaaatacgatcttattgtgattggtacaggttctgcggggtcaatcacagcagcaaaatgtaataaagccggctggaatgtagctatggtagatgacaggccgtttggaggcacgtgtgcactacgtggatgtgacccaaaaaaggttctacatggtgctgccgagcttattgattggaacaaacggatggttaagaatggagtaccgtctgaagtctccatcaactggaaagatcttatgaattttaaaagaacctttacagatgatgtcccggaaaaaaaagaggaagcattgaataaacagggaatcgatacgtatcatggcaatgcatctttcgtgagtgaggacaaacttgaagtgaataaagaagtgctcgaggggagtcatttcttgatcgctagtggtgcgaaacctacccctttacccataaaaggagaagaacatcttacttatagtgatgagtttttggagttggatgaattaccacaaagaatcgtctttgttggtggtgggtatatttcgtttgaatttgctcatatcgcggcacgtgctggatcagaagttcatattatccatcgaggtcaaagacctttggagaattttgatatagatcttgtagatatccttttagaaaagtcgaaagagattggcatacaggtacatcttcaacattccgttgaatccattgaaaaagaacaaggaaagtttcatgtgtacgctcgaaaaaaagaggatataacgcggtttgaagcagacattgttattcatggtgctggacgggtccctgccttagatatgaatcttgaaaaagggaatatagaaaggaaaaaacatggtgtccatgttaatgagtatttgcaaagtgtaagtaacccgaatgtctatgcagctggagatgctgcagcaacggatggcttgcccctcacacctgtagccagtgcagattctcatgtcgtagcatctaatttattgaaagggaacagcaaaaaaattgaatatcccgtgattccatctgctgtatttaccgtacctaaaatggcatcggtaggtatgagcgaggaggaagccaaaaactctggccggaatattaaagtaaagcagaaaaacatctccgactggtttacgtataaacggacaaatgaggactttgctgcgtttaaagtgctaattgacgaggatagtgatcaagttgtcggtgctcatttgattagtaatgaagccgatgaactaattaaccactttgcaacagccattcgctttggaatttcaaccaaagaattgaaacaaatgatatttgcctatccaacggcagcttcggacattgcacacatgttgtaa

SEQ ID NO: 3851 - DNA, 2244 bp, Staphylococcus aureus
ctatatttttttactttgcaacagaaccctcaagggtctggtaaaagtttaaccatggtctttttctctggaaaattaattcaaatgcttaataatcctaccttagttgtcgtaacagatcgtaatgatttagataaccaactatacagtacgtttgttaaatcgaaaggacggtctggtaaaggtttattaagacaaacaccaaaacaagctgaaacacgtaaagaattaaaatcgttattatctgttgagtcgggcggtattgtatttacaacgatgcaaaaatttgaacctgaacaaaacgaaacgaccatgtctgctctaacagaacgtaaaaatgtgattgttatggcagatgaagcgcatcgtacacaatatggttttaatgcaaaatacgatgataaagggggaggcattaaatatggttatgcgaagtatttaagagatgctttaccgaatgcgacgtttgtaggatttacgggcacgcccgtagcttcaacggataaaaatacgcaaatggtctttgggaactatatcgatgtttatgatatgacacaagccgtagctgatggaagtacggtgaaaatttactatgaaagtcgcataattccattaaatttacctcaaaatttagacttagacgaagcatataatgacattacagaggatcaagaagaggatgtaaaacagcgtttaaaatcaaaatggtcacgaattgaagccttagcaggcgcaaaacctcgtgtagaagctttagccaaagacatcatccaacattttgaaacacgtcagcaagcgatgaaaggtaaaggaatgatcgtaacgatgagtcgtcgaattgctgttgatttatacgatgaaatcattcgtctaaaaccagaatggcattcagatgatgatgataaaggggtcattaaagtggtgatgactggctcatctagtgacccaacttctttccaaagacatattggtcctaaaaaacgtcgtaatttattagaaaaacgtatgaaagatatgaatgatgaattacaactcgtgattgttcgagatatgtggctcacaggatttgatgtaccttccatgcataccatgtatatcgataaaccgatgaaaggtcataatttaatgcaagcgattgctcgtgtcaatcgagtgtttaaagataaaccgggtggattgattgtcgattatgtgggtatcgctgaaagtttaaaagaggcacttaaagaatatacagaatctgatcaagcacaaacggcgatagatacagataaagcggttgaattgatgttattgaaatatgatgtgattcaagatatgttatataatcttgactattctaagtttaattcagagaaaaagtctgaacgttattatgcgatttcagatacgatggattatgtgattggtttaggcgaagatgaacgccagcgttttattaaaacggtcacagagttagggaaagcttttgcgctttgtgcgactgaacctacagcccaagaactcaatgatgaaattgccttctttaaagcagttaaagcaggacttgttaaattgttacaaccgccaaaagaaggaaaaacacgtaaaacacctgcagaagttgaagcagagattaatcaacttgtgtcacaatctgttgtgacagaagatgtgattgatgtttaccaaacactaggtcttgaacaacccgatttatcaatcctatcagatgacttcctaaaagatgtcgaaggattgaaacaaaaaaatgttgcggtagaattattaaatcgattactcaaagggcaagtaaaatcattaatgaaaacgaacgcgacagtatctaagcgtttctctgaaatgttaggaaattcgattaataaatataatagccgttctattgaaacatcaaaagtgattgaagaactcattcaactcgctaaagatattaaacaagaacaacaacgaggaaatgaattaggcctgaattcagatgagattgcgttttacgatgctttagcttcacatgaaacagcaaaagaagccatgggagataaagaactacgtgcgattgctcatgagctaactaaaacagtgaaagaaaacatgggtgttgattggtctaaacgcgatagcgcaaaagctaaaatgcgcgtagctgttagacgattgcttaaaaaatatggctatccaccagatttacaaaaaatggctgtagagcaggttgtagagcaagcagaacttatggcgagtaatcagtaa

SEQ ID NO: 3852 - DNA, 135 bp, Staphylococcus aureus
atggtacgtacattcaaaccatcattacgtgcactattattgaaaatactgtgttcggcagtactaattactgaggttccccagttttttagtgacttgacttctccgtgtatattagaacgttgtcttccttga

SEQ ID NO: 3853 - DNA, 303 bp, Staphylococcus aureus
atggtatgcatggaaggtacatcaaatcctgtgagccacatatctcgaacaatcacgagttgtaattcatcattcatatctttcatacgtttttctaataaattacgacgttttttaggaccaatatgtctttggaaagaagttgggtcactagatgagccagtcatcaccactttaatgacccctttatcatcatcatctgaatgccattctggttttagacgaatgatttcatcgtataaatcaacagcaattcgacgactcatcgttacgatcattcctttacctttcatcgcttgctga

SEQ ID NO: 3854 - DNA, 249 bp, Staphylococcus aureus
atgagttcttcaatcacttttgatgtttcaatagaacggctattatatttattaatcgaatttcctaacatttcagagaaacgcttagatactgtcgcgttcgttttcattaatgattttacttgccctttgagtaatcgatttaataattctaccgcaacatttttttgtttcaatccttcgacatcttttaggaagtcatctgataggattgataaatcgggttgttcaagacctagtgtttggtaa

SEQ ID NO: 3855 - DNA, 324 bp, Staphylococcus aureus
ttgcaactaataacagaaaatgaagctattcaaaaagtaaaagatgagtttccacctatacgaacaggaaatgactatcgtatagatactactagaactgataataatgtgtacgctatcaaatttacttctcaagatgcagaaggttatcctatgaaagctgctgtcactattgataagcgaacaggagaatttattgattatattgatgatagaagcgatgaagataaagagcgtcatgtccaacatgctaaagaaagtactctttataaaggtccatacgatgctttcagaaaagattttagtcataaaataaatgaatga

SEQ ID NO: 3856 - DNA, 303 bp, Staphylococcus aureus
atgactaaaatcttttctgaaagcatcgtatggacctttataaagagtactttctttagcatgttggacatgacgctctttatcttcatcgcttctatcatcaatataatcaataaattctcctgttcgcttatcaatagtgacagcagctttcataggataaccttctgcatcttgagaagtaaatttgatagcgtacacattattatcagttctagtagtatctatacgatagtcatttcctgttcgtataggtggaaactcatcttttactttttgaatagcttcattttctgttattag

SEQ ID NO: 3857 - DNA, 528 bp, Staphylococcus aureus
gtgaagaaaatttttgcaagcttaggtgttattttattagttgcaatattgggagttgctgttgtatttgcatatgggagttacaaagatttagaactaaaaaaagaagaagctaaactaaaggataagaagaataagaaaatcgataaaaacaaaactacagaaaatgaaaatcaagaccagattaataatcaaacaattacagcaccaaatgaaaaagcacaatatggcaataacctaggagttcaagaaaaaagtacggataaaaatgatcctaatagtgtgcttagatttgatacaaacggagatggacttatcttcactagtgaagtaacaccagaagctcaaaaattagttgatgaaggtaaactacagccatcttcagatagaatggttgaagagtggactaagaataaaaataatgtagataatacatatgactatgatgaatcatataaaaaacaacaagaaatgtacaaaaaagctgctcgtggcgaagttcctgaacctggagaaacaataaaataa

SEQ ID NO: 3858 - DNA, 489 bp, Staphylococcus aureus
atggaatttgcatattatgaagcgaaatctttaaatgattttgaaaatgaactaaaaacacttgctttaaataaaaaatatacatttagtaaagaaaccgaagtccttaaagaagaagaaattcttgaaaaatcgaatagccatgagcgcgaactattaaaagtatttaaagataatgcgcagataacaacgtatcattttaagagtcataaaagtaattatttaattattattggagagacaaaaacacctaatatcattggtctaacagtgatatttgataaaaaaccttttaaacaaatagggaaagttgcgttaggatggctaattgctttgacttcaggtggaagtatattagccattggagcagtatttggaatacttacctcagttgcaagacgtacacttgtaatcaaaggaccattaggaaaagaaatttcacaaattatagaaaatgaattaggagaaccgatagaaattaaaaaataa

SEQ ID NO: 3859 - DNA, 144 bp, Staphylococcus aureus
atggctaatatacttccacctgaagtcaaagcaattagccatcctaacgcaactttccctatttgtttaaaaggttttttatcaaatatcactgttagaccaatgatattaggtgtttttgtctctccaataataattaaataa

SEQ ID NO: 3860 - DNA, 309 bp, Staphylococcus aureus
atgaaaggaatgggaattatgagtaacatcataaaaacaataggcaaaggtattggaaaaggtgtcggtgcagcagcatattattcagttgcgactgttggtgctgccatcggtgcgatttgggaaacaacaggcgatagaggtttgatgagagacgctttaagtgatagctctaaccaagacttaatagaaatatatgagatacaaaagaaagatgatggggattatgatacttatattgcggctaaatccttattacaagagagaggattcacttataatcatgaaacgaataaatgggaaaaataa

SEQ ID NO: 3861 - DNA, 345 bp, Staphylococcus aureus
ataaatttgctacaacacctatttaaaggtgttgtagcacaaatattaaatcaatggaggaattgtactatgaatacagtagcactagctcacgaaattgaagatgaaagatttgaatacttagaaagcacacccctagatactgtgaaggaatgctgtaaacaagaaggtcgtcaaataagtaacacttacactgaggagtacaagttaataaatgacattttggagaaagtaatcaaacctacgtccattgttgcatatggagaatatgaagattacattcatttaaaaaaatttgctcaaagaagaatatcgaattcgttactacttttgagatgcaactaa

SEQ ID NO: 3862 - DNA, 873 bp, Staphylococcus aureus
ttggatcgtgcatttcgaatacttacgatatacaatcgtttactacaaaataaatccgtcaacaagcaatcactcacattagaactcgatacaagtcctcggacgatacaaagagatatcgacgatataagaaacttcttatatgaaagtaaatcatggataagcgcacctaaagaaattacgtacgattataaatcagaaagttataagctcgaacaaaataaaagtgaaaatatgtattttatgtatgatattttgactgctttatacctaacaacaccaaaattaagccattacttttatcaatatcttaaattattaatcgtcaaacatcattcaaattatcgaactacattattaaaatatcttgagcgttttgaaattgataagaatcaaacaggtatttcgacatcatcattagttgttcaagcaatgaacgaaaatcaatatcttcaatacaatcaaaatctattattacctttatcgatgtactatcaaatgcatgcttttcacttggtatatcgaatgaacgatgaaattcatatcgatgatattaatcaaatgaatctgagtttgtctgaaaaatctgtggacacacatgaaaaatcaaaggtacaaacctatatcacgtttgaaatttctaaagatgtgtggtcaaaaatgcatcgatattatcaaattcatgtgatagaaaaatatgatgcgcattatcttatcgtcacttttaagatgacaaggattgaagcgattcaactctgttttatgtatcgatccaatatacgtatcatttcaccccctgatttgaaggaacaagtgattgatgaattacttttattacaaacaacctatttaaaacaacaggttcaaaagtag

SEQ ID NO: 3863 - DNA, 312 bp, Staphylococcus aureus
atgaatagatatattactcaaggtattgccaataacttacctatcatcttacaacaacaattatggaaaatagtagcacaacgtgaaaacgaacagtccaaggaactagaagcaatagattactttcatatcttccagttcaacatgcataatgatcaattatatatcaaacacaaacaagaacgtcctgagtacatcaaaacacataaagctaattattcaaaagctatcaatataaataaggtctatattatccgagaagatgatgtagacctttcttattacgtcatgttactaccggaagaatactag

SEQ ID NO: 3864 - DNA, 342 bp, Staphylococcus aureus
atgatgacattagaacaacaactcaaacactatataactaacttattcaatctgccaaaggatgaaaaatgggaatgtgaatccatcgaagaagccgctgatgatattctacctgaacaacacgtaagacttggtccacttagtaataaaatacttcagactaatacctactactcatacacacttcacaaaagtaatatctatcccttcatcctctactatcagaaacaactcatagccatcggttatattgatgaaaaccacgataaggatttcttgtatctacacaacactatcatgccccttttggatcaacgatacttactaacaggaggacaataa

SEQ ID NO: 3865 - DNA, 231 bp, Staphylococcus aureus
ttgttcacttcaatttcatacgtgaattggtgctttatttcacctgagaaatctgtttggatcacagaatgtaacgtagctacatatatattattttctttgattggtgtactacttgggatgtgtaggctttgtcctctatcattattcatgatctacgcctcctatttcttccactgtcacatgtgcaaattcaccattgaacaactggttagccgtatctttcattaa

SEQ ID NO: 3866 - DNA, 234 bp, Staphylococcus aureus
gtgcttgaaaatataactcgctacagtttgtacgtagattgccataatactgctaccttgaaatgcgctcatatcatgctcaatactataaggcataggcatggaattactcttttcaacgtgcttcttaagttcaatgacttttgtaaattggctgaccgcatccaaccattgtacttcacttacatattgattcagcttgaatttaggatttttgaagttacctccaaatag

SEQ ID NO: 3867 - DNA, 318 bp, Staphylococcus aureus
atgaaggaaatcaatattgtttcactacaaatgataaaaacagacacattaagttatctaaaaaatcgtatttcaaaccctgaggatgcggcagaaatcttgcgttcattcattggaaacagtgaccgagaacatctcattctcatatgtatgaatagtaaaaatgaacctacacacattcaaatactatcgattggatctattaaccaaacagtgattcatcccagagaaatattcaaaacagcaatactcagtaacgccaacagtattatgctcggtcataatcatccaagtggggatatattaaccatagtataa

SEQ ID NO: 3868 - DNA, 327 bp, Staphylococcus aureus
atggaggggaatagtatgcaaatcaatcgatacattacacgaggcattagtgaacacctatctctagaccttcaaatcttactttggaatatggtaaaagaaagagataatcaacctgatacagattacctacacatttttagactgcaagaagatgagaatatactctcaatcacacatgaacaagaacaacctgcatacaaattggaatatcactatacaaactatgaaaaaaatcaaaacgcattacctaagaaagtctacgtcattcgagaagatgatgtagacctttcttattatgtcatgttactaccagaagaatactag

SEQ ID NO: 3869 - DNA, 375 bp, Staphylococcus aureus
atggagtacacattattaattaaggaggtcattataatgacgctaagcaaacaacttaaaacgtatattactgaacgatttaaattaaattatcaagaaacttgggctcgtgaaaccgtagatgcggtggctgaagatgtattacctgaaaaatatattaaaaatagtccacttgaaaataaaattttaaatacttttacctattacaatgatgaattacatgaaatcagcatttacccttttttatgttatctagataaagaattagtagcaataggttatttagataattttgatttagactttatatttttaaatgacactcatcaagtcattattgatgaacgctacttgttacaaaaagggggtgagtaa

SEQ ID NO: 3870 - DNA, 636 bp, Staphylococcus aureus
atgttagatatcagatatactattagaactgaaacaaaaattaaaaaattcgtcttattctataagtatgaaatagatatatccgaaaaatatttagaaattgctacttctcctgacttaaaatacatcttaaattcaattacagataattttactaaattcgaattaaaagagatgacacaccttaaatctacctattcaaaaaatatgtttagattacttaaacaatataagcataccggctatatgaagattaaaattgaagactttagagaacgactagatattccagaatcctatagaatgtctaatattaatcaatttgttttaacaccgattatcaaggagctttctccaatatttagtaatcttaatatcaataaagtaaaggcaaaaaaaggacgtaagattgagtggttagagtttacttttgacgctgagaaacgcattcacaataaacgacaaccacaaatggcgaatataggtaagtcacgacaatacataagtcgtgaaaaaacgccaaaatggttggaagaacgcacatatgaaaaaccaacacaaaatgagtatgatccgcaattagaaaaagaacgagaagcatttttaaaacaacttcaagttgattgggaagaatag

SEQ ID NO: 3871 - DNA, 234 bp, Staphylococcus aureus
atgattttattatcaacagctggcgaaaatgctgttcatattaaccctatttttagattttttctatattttattatgtgtgttcctatgacagttgctttatgtacaatattccttaaatttatctcaatttttattcttccatggaaagtatgtttgtatattggtattgctttaggtattattgttactatttttcttttggttataacaattggtatagaaatgacataa

SEQ ID NO: 3872 - DNA, 1041 bp, Staphylococcus aureus
atgagtaacgtatatgtaatggctttagattttggtaatggatttgtaaaagggaagattaatgatgaaaaatttgtaatcccttcaagaatcggaagaaaaactaatgaaaacaatcaattaaaaggatttgttgataataaattagatgtatcagaatttattatcaatgggaacaatgatgaagtattactatttggtaatgatttagataaaactacaaatactggtaaagatactgcctcaacaaatgatagatatgatattaaatctttcaaagatttggttgaatgttctataggattattagcaagagaagtaccagaagaagttgtcaacgttgtaattgctactggtatgccaagtaatgaaataggaactgataaacaagctaagtttgaaaaacttttaaataaaagtcgtttaattgaaattgacggtatcgctaaaacaattaatgttaaaggcgttaagatagtagctcaacctatgggaactttacttgatcttaatatggaaaatggaaaagtattcaaagcatttacagaaggcaagtacagtgttcttgactttggtagtggtactacaattattgatacttatcaaaatatgaaacgtgtagaggaagaaagttttgttataaacaaaggtactattgatttttataaacgaattgctagtcacgtatctaaaaaatcagaaggtgcctcaatcacaccacgtatgattgaaaaaggattagaatacaagcaatgtaaacttaatcaaaaaacagttattgactttaaagatgaattttataaggaacaggatagtttgatagaagaagttatgagtaactttgaaatcactgtaggtaatataaattcaattgacagaattattgttactggtggtggtgcaaacattcattttgattcattaagtcattattattcagatgtgttcgagaaagcagatgatagccagtttagtaatgttcgtggatatgaaaaattgggggaattgttaaaaaacaaagtagagcaagaaagtaaataa

SEQ ID NO: 3873 - DNA, 330 bp, Staphylococcus aureus
atggataagaaagaaactaaacatcttctgaaaataaaaaaagaagattaccctcaaatcttcgattttttagaaaatgttcctagaggtactaaaacagcccacataagagaggcattgaggcgctatattgaagaaataggggaaaaccctccaataccttcaaaagaacacacagcgcccttaaaagagcatacagaacctattaaacgtaataaagaaagttttaaagacgcaatggaacgtaaggatcaattaaaacaagctgaaatgcctaaaatagaagaaaaagatgaagaaatggtagatattagtattgatgacctttaa

SEQ ID NO: 3874 - DNA, 261 bp, Staphylococcus aureus
atgaatgaataccgtatacaaaaactatatagatacatttgtttagaatttaaaaaccagcgtcaactcataggcaagcgacaagaagaagttgcatttgatttgagtgtgactgctggtcatctttcacgtatcgagaatggtaaaaaacctagaatagcattacatacatttttagtaatgtctgaatactatggtgtagactttcataaggtagttaaaaatgcagaagaaaaaatggaattggatgaaggaatatag

SEQ ID NO: 3875 - DNA, 960 bp, Staphylococcus aureus
atgtctaaacaattttttacagtagaagaaaattataaagaacgcttttaccaattacctaaagtattttttactaatcctaattataaagatttatcgaatgacgctaaaattgcttacgcaatattgagagatcgtttacaattatctattaaaaataactggatagatacagaaggtaacatatatttcatttatacagttgctgatttagaagtgatattaaattgtgggaacaaaaaaatcactaaaattaaaaaagaattagaaaatgtagatttactaatccaaaaaaggcagggtttaaacaaaccaaatctactttatttattaaaaccagccataactaaaaatgatatttatgaaatagataaggctgaaaatgaagttgaggccttacaagacaaggaagtgtcaaaaggacacgtccagaaatgtcaaaaggacacgtctagaaatgtcaaaaggacacgtctagaaatgtcaaaaggacacacaaatgatactgattttattgatactgattttattgatactgaaagtaatgatatgaataatatgaatgatacaaatcaacattcaaatcattcaaatcacttttcaaatattcatgataaagaatctcttaaatatatagaacttcaagaactccccgaattaattaaaagttatattaataatttcagctatgaagaagttaaaagtattaaatctgttattttaaaagctaaaaaatcatttaataacaaatacgatactttctatatgttagaagatatagatgaagaattactattggttttaaaacgatttaaaggttatcttgttaaaaaacaagaaaaagtagctaatatggaaggttatttaatgagaagtatcattgctgaacttgaagaaatgcactcaactattatgagaagaaaaaatatggaaaacaatccattatctctatttaattag

SEQ ID NO: 3876 - DNA, 747 bp, Staphylococcus aureus
atggattttttgtttttaatttacatactcttagctatttttttaggagcattagttagaagttacttcggttttggagaagctttagtaagtatgcctcttttgtctattattggattagatttcaatagttctatatctattgttggactagctggtctatgtgttgctattttttataccatttcaggatttaaaaacattaaattataccctttagtaattatgttaacaagcagcataattggcatacccatcggtatttttattcttcacaactttgatacaaacaaaatacaagaaattttagctatttttttaatcctatacggctttctaaaattaattaaaaatatgtttttaaaaaatacaagaaattttaaactcctctcccctatttggagttctctcgcgggtcttatatctggaatattaggcagtttatataatacccatggtgtacctatcgtcatatatgcaactttaagtaaatggaaaacaaaagaatttcaaaacacaatacaagcccatttcttatttacctctatatttgtcgttttaggacaagctacaggtaacgtatggacagacaaaaccattccgatttttttaatcactttaccatttttaataacagcaacatttataggtaaaaaattagcgaaaaaaacttcaaatcataactttgaaaattggatttatttactaataggaattttaggtatattactttttatttctaaataa

SEQ ID NO: 3877 - DNA, 168 bp, Staphylococcus aureus
atgaaagtaacaaatacaattagatttgaagaagaaaagaaaaacttaattgataatgtagtaaatacactagaagaatataaagatgttatcgacagtgaattgcgtactattagaaacactaatcatttagttatgagaaataatttggttctgttgcaaagttga

SEQ ID NO: 3878 - DNA, 924 bp, Staphylococcus aureus
atggaaaagtatactgagaaaaaacggagaaatcaagtatttcagaaatttattgaacgacatgtcaaagaaggacaaatggatttgataagggagtgcaacacattcttgagttttgtggcagataaaacattagagaaacagaaattgcataaatctaatttatgtaaaaatcgattttgtcctgtatgtgcatggcgaaaagcgagaaaagatgcgttaggtttatcattgatgatgcaatatattaagcaaaaagaagataaacaatttatctttttaacacttacgacaccaaatgtaacagttgagcatttagaaagtgagattaaagcttataatcactcttttcaaaagatgtttaagcgtaaaaaggtaatttctgctacgaaaggttatgtaagaaaattagaaattacttacaataaagaacgtgatgactataacccgcattttcatgttttaattgctgttaacaaatcgtattttacagacaaacgatattatattagtcaaaaagaatggctgaatttatggcgagatgtcactggaattgatgaaatcacacaagtacatgctcaaaaaatcaaacagaacaacaacaaagaattatacgaaatggcgaagtattctggtaaagatagcgactatttaattaatcaaaaagtgttcgatacattttataaatctcttaagggaaaacaaattcttgtttattctggactgtttaaagaggcaagaaagaaattaaaaaatggagatttagattatcttaaagaagtagatccaacagaatatatttatcaaattttttatcattggaaccaaaaagaatacttagcgagtgaaatttttgatttgactgaagaagaaaaaagtaaaattaatcatcaaatgattgatgaaattgacgaagaaaaataa

SEQ ID NO: 3879 - DNA, 393 bp, Staphylococcus aureus
atggaagaagttttaattgatgataatatggtttttgatattgataatttaaaaggatttcttaatgataccagttcatttgggtttatagctaaagaaaataataaaattataggatttgcatattgctatacacttttaagacctgatggaaaaacaatgttttatttacactcaataggaatgttacctaactatcaagacaaaggttatggttcaaaattattatcttttattaaggaatattctaaagagattggttgttctgaaatgtttttaataactgataaaggtaatcctagagcttgccatgtatatgaaaaattaggtggtaaaaatgattataaagatgaaatagtatatgtatatgattatgaaaaaggtgataaataa

SEQ ID NO: 3880 - DNA, 1725 bp, Staphylococcus aureus
atggcttattcaaaaggaaattataaaaagaaaaaaatagattcaataatagaagaattgaataataagctagatgacttcaaaaacaatgacaaaacctataaggaatttttagatactacagcgaaatttcacaactattcaattaataatattattctaattgctggccaaaatccagaggctacagctgtagctggttataaagcatggaaaaataaatttgatagacaagtgcaaaaaggtgcaaaaagtatgaatataattgcccctattgtacaaaaacgaaatgtagaaattaaagatgataacggtaatatagtacgtgataataacggtaatcctaaaactgaacgaaaacccgtaattactggatatagagcgcataatgtgtttgatgtggcagatacgaaaggcaagcctttaataacagcaaaagacctaataaaaaccgaatttgaaaactctaacgactataaagacttatataatgaatttaaagattatattaatgaagaattaacacctagtgtagaggaaaaacattttcttgatgatcctactttatctaatggcgctaaaggttattatagtcctaaatctgatgaaattgtaatctctgatgatttgtcatatgatatgcgctttaaaactttaatacatgaatatgcacactctcaattacacaataatgatataggtaaaacgcaaatatctgaacatagtagatcattaaaagaaatcgaggctgaaagttctgcttatgtagtagctaattattacggtttagacactagcgattattctttaggttatttaagtggctgggggcataatataagtgatgatgaattaaaagcccacataaaaaatatacattcgttcgcaaaaactacaattgaagaaataaattcattgccagagttttctcaatatatagataaaaaattagaatcagaaatgaacaaagatgtatataaagacctttcaacaatgatagataccaatctaaaaaatggttttgataaaataactattatcaaaggtaatttagttaatgattatggacttaatgaaatttctgagaatagttatgaaaatgatgattttaaagtgaatattgattacaaaggatttaatactaataattcgcaagatcaagctaaaattgagttaattaataagcatgatgattcattgaatagagattacaacttcacgcaaacttataaccgaaatgtaattaataacaccacaactatttttgtacaagatgatgataatgaagataaaaacaaaaaatatatccatgaacgagatatagacggtaatatattagaagaaaaacataaattaagcccacaagatgaaatagtatcatttgaaaactttgtaaataaatcagttgaagaaaatggcctaaaagatacattacgccaatttgtaagtaatggtgtattaatgggctatgaattaaatgttgataatattgataatacaaatgaaacttacttttcaatgaataaaaatcaacaaaatggccaacgatcaaatatgactgctaaattagaacatgatactaacgaaaatgtttatatagattttaaaattaaaaattcagctggtattaaaaacatatcctatactgaaagtaatgaagaatttaataaagatgaacagaataaagaaattgaaaacaaacaagaagaagaaattgatatataa

SEQ ID NO: 3881 - DNA, 273 bp, Staphylococcus aureus
atggctgatattcaaaaaatgttagaacaaaaagaaaaacttcaagaaaaaattaaagaagaaaagaaaaaagaatatgaaaaatttggaagatggttcttcaataaatttaaagtaaatagatcagcagacgcaaagaaaattataaataaaaatttgcttaatattgaagatactaaagaacacaatttagaaagaaatgaaattatagaagaaactaaaaattccaatgaagaaaacaaagaaataaatgaaataaaccacaatatttaa

SEQ ID NO: 3882 - DNA, 807 bp, Staphylococcus aureus
atgaaaaaaacaatatttatactgattttctccctgacgttaacactactaataacccctttagtttacagcgatagcaaaaatgaaacaattaaagaaaagaatttgcacaaaaaatcagagttaagtagtattactttaaataacctcagacatatatacttctttaacgaaaagggtatctctgaaaagataatgacagaagatcaatttttagattacacactattatttaaaagttttttcataagtcattcacagtataacgacttattggtacaattcgattcaaaagaaacagttaataagtttaaaggcaaacaagtagatctatacggatcttattatggttttcaatgttctggtggtaaaccaaataaaacagcatgtatgtatggtggagtaacactgcatgaaaacaatcaactttatgatactaaaaaaatacctattaatttatggattgatagcatcagaactgttgttccgctagatatagttaaaacaaataagaaaaaagtaaccattcaagaactagatcttcaggcaagatattatttacataaacaatataatttatacaaccctagtacctttgatggtaaaattcagaaaggactaatcgtgtttcatacctcaaaagaaccgttggttagttatgatttatttaatgttataggtcaatatccagacaaattattaaaaatataccaagataataaaatcatagaatctgaaaacatgcatatcgatatatatttatatacaagcctaattgtattaataagtctacctttggttctgtag

SEQ ID NO: 3883 - DNA, 555 bp, Staphylococcus aureus
atgaataaaaaactattaacaaaaacattgatagcaagtgctttagttttaacaacagtaggttcaggttttcattcttcttcaaattataatggtattaataacgttgcacaagctgctgaaacaacagacggacagttgtggaaaaatgtaagagacgctttgaaagaggctaatataattgatggaaatgaaaatgaaacaatagatgttaattataaattgaaaaatggtagcgaaaataaaatttcagcaaatgggaactctaatggagatttttccaaacaaaatatagatattgaaagtttaactactattaatatcaaaaaagtaaatattagtaatttcaacgaaagaattgatgctaataatacatggaagaatttaactaacaaattaaaaggacagaaaattattaaagatggtgataaagtaaccattcatagtaaagaccaaaaagatcctaaaatctctggaatagttggacaagattttactgagcataagaattatatgttatacaagaaagacatagataaaataactataaactag

SEQ ID NO: 3884 - DNA, 4914 bp, Staphylococcus aureus
atgaataaaaattcgaagaagaagctcgattttcttccaaacaagcttaataagtactcaattagacgtttcactgtagggacagcttcgattttagtaggagctactttaattttcggtgttgcaaatgatcaagcagaagccgctgagaataacacaactcaaaagcaagatgatagttcagatgcaagtaaagtaaaaggtaatgttcaaactattgaacaatcttctgcaaattcaaatgaatctgatattcctgaacaagttgatgtaactaaagatacaactgaacaagcatcaacagaagaaaaagcaaatacaactgaacaagcatcaacagaagaaaaagcagatacaactgaacaagcaacaacagaagaagcgccaaaagctgaaggaacagacaaagtagaaacagaagaagcgccaaaagctgaagaaacagacaaagcaacaacagaagaagcgccaaaagctgaagaaacagacaaagcaacagaagaagcaccaaaaactgaagaaacagacaaagcaacaacagaagaagcgccagcagctgaagaaacaagcaaagcagcaacagaagaagcgccaaaagctgaagaaacaagcaaagcagcaacagaagaagcgccaaaagctgaagaaacagaaaaaacagcaacagaagaagcaccaaaaactgaagaaacagacaaagtagaaacagaagaagcgccaaaagctgaagaaacaagcaaagcagcaacagaaaaagcaccaaaagctgaagaaacaaacaaagtagaaacagaagaagcgccagcagctgaagaaacaaacaaagcagcaacagaagaaacaccagcagttgaagacacaaatgctaagagcaattcaaatgctcaaccatcagaaactgagagaactcaagttgtagatacagttgctaaagatttatataaaaaatctgaagttacagaagcagaaaaagctgaaattgaaaaagtattaccaaaagatatttcaaacttatctaatgaagaaattaaaaaaatagctttaagtgaagtacttaaagaaacagctaacaaagaaaacgcacaaccaagagcaacattccgttcagtaagcagcaatgctagaacaacaaatgttaactattcagcaacagcattaagagcagctgcacaagacacagttactaaaaaaggaactggtaactttactgcgcatggagatataatccataaaacttataaagaagaattccctaatgaaggcacgctaactgcattcaatacaaacttcaatcctaatacaggaactaaaggcgcattagaatataatgataaaatagattttaataaagactttacaattactgttccagtagcaaacaacaaccaaggtaatacaacaggagcagatggctggggcttcatgtttactcaagggaatggccaagacttcttaaaccaaggtggtattttaagagacaaaggtatggcaaatgcatctggttttaaaattgatacggcatataataatgttaatggtaaagtcgataaactcgatgcagataaaacaaacaatctaagtcaaattggcgcagcaaaagttggttacggtacatttgttaaaaatggtgcagatggtgtgactaaccaagttggtcaaaatgccctaaatacaaaagataaacctgtaaataaaataatttatgcagataatacaactaatcatcttgatggtcaattccatggccaaagattaaatgatgtagtattaaattatgatgcagcaacaagtacaataactgctacatatgcaggaaaaacatggaaagctactacagatgatttaggaattgataaatcacaaaaatataatttcttaattacttcaagtcatatgcaaaatagatattctaatggaattatgagaacaaatcttgaaggtgtaacaattacaacgcctcaagctgatttaattgatgatgtggaagtaacgaaacaaccaattcctcataaaactattcgtgagtttgatccaactctagaaccaggctcacctgatgttattgtacaaaaaggtgaagatggagagaaaacaacaactacaccaactaaagttgaccctgatacaggagatgtagttgaacgtggtgaaccaacaacagaagttacaaaaaatccagttgacgagattgtacactttacacctgaagaagtaccacaaggtcataaagatgagttcgatccaaacttaccaattgacggtacagaagaagtaccaggtaaaccaggcatcaagaatcctgaaacaggtgaagtagtaacacctccggttgacgatgtcacaaaacatggtccaaaagcaggcgaaccagaggttactaaagaagaaataccattcgagaaaaaacgtgagttcaatccagacttaaaaccaggtgaagagaaagtaacgcaagaaggacaaactggagagaaaacaacaacaacgccaacaacaattaatccattaacgggagaaaaagtaggcgaaggtgaaccaacaacagaagtaacaaaagaaccagtagatgaaatcacacaattcggtggagaagaagtaccacaaggtcataaagatgagttcgatccaaacttaccaattgacggtacagaagaagtaccaggtaaaccaggcatcaagaatcctgaaacaggtgaagtagtaacacctccggttgacgatgtcacaaaacatggtccaaaagcaggcgaaccagaggttactaaagaagaaataccattcgagaaaaaacgtgagttcaatccagacttaaaaccaggtgaagagaaagtaacgcaagaaggacaaactggagagaaaacaacaacaacgccaacaacaattaatccattaacgggagaaaaagtaggcgaaggtgaaccaacaacagaagtaacaaaagaaccagtagatgaaatcacacaattcggtggagaagaagtaccacaaggtcataaagatgagttcgatccaaacttaccaattgacggtacagaagaagtaccaggtaaaccaggcatcaagaatcctgaaacaggtgaagtagtaacacctccggttgacgatgtcacaaaacatggtccaaaagcaggcgaaccagaggttactaaagaagaaataccattcgagaaaaaacgtgagttcaatccagacttaaaaccaggtgaagagaaagtaacgcaagaaggacaaactggagagaaaacaacaacaacgccaacaacaattaatccattaacgggagaaaaagtaggcgaaggtgaaccaacaacagaagtaacaaaagaaccagtagatgaaatcacacaattcggtggagaagaagtaccacaaggtcataaagatgagttcgatccaaacttaccaattgacggtacagaagaagtaccaggtaaaccaggcatcaagaatcctgaaacaggtgaagtagtaacaccaccagtagacgatgtcacaaaacatggtccaaaagcaggcgaaccagaggttactaaagaagaaattccatatgaaactaaacgcgtattagatccaacaatggaaccaggtagtcctgataaagtagctcaaaaaggtgaaaatggtgaaaaaacaacaacaacaccaactacaattaatccattaacgggagaaaaagtaggcgaaggcgaaccaacaacggaagtaacgaaagaaccaatagacgaaattgttaactatgcacctgaaattattcctcatggtacacgtgaagaaattgatccaaacttaccagaaggtgaaactaaagttatcccaggtaaagatggcttgaaagatcctgaaactggagaaatcattgaagaaccacaagatgaagtaatcatccatggtgctaaagatgattcagatgcggacagcgattcagacgcagatagcgattctgatgcagacagcgactcagacgcagatagcgactctgatgcggacagcgattcagacagcgatagcgattcagattcagatagcgactctgatgcggacagcgattcagacagcgatagcgattcagacgcagatagcgattctgatgcagacagcgactcagacgcagatagcgactcagattcagacgcagatagcgactcagattcagacgcagatagcgactcagattcagacagcgactcagacgcagacagcgactcagattcagacagcgattcagacgcagacagcgactcagacgcagatagcgactcagattcagacagcgattcagacgcagatagcgattcagattcagatagtgactctgatgcggacagcgactcagacgcagatagcgactctgatgcggacagcgactcagacgcagatagcgattctgattcagacagcgattcagacgcagatagcgactcagacgcagatagcgattcagacgcagatagcgactcagacgcagatagcgattcagattcagatagcgactctgatgcggacagcgatagcgattcagattcagacagcgactcagacgcagatagcgactcagacgcagatagcgatagcgattctgatgcagacagcgactcagacgcagatagcgactctgatgcggacggcgactcagacgcagatagcgattctgatgcagacagcgactcagacagcgatagcgattctgattcagacagcgattcagacgcagatagcgactcagattcagacagcgattcagacgcagatagagatcataatgacaaaacagataaaccaaataataaagagttaccagatactggtaatgatgctcaaaataatggcacattatttggttcactattcgctgcgcttggaggattattcttagttggcagacgtcgtaaaaacaaaaataatgaagaaaaataa

SEQ ID NO: 3885 - DNA, 456 bp, Staphylococcus aureus
gatttatttgtccgtcaagggtggtttaaattcaagaaaaaaagaagcgaacgtcaacgtgttcatttgtcagaatggaaagaagatttaatggcttatattagcgaaaaaagcgatgtatacaagccttatttagtgacgaccaaaaaagagattagagaagtgctaggcattcctgaacggacattagataaattgctgaaggtactgaaggcgaatcaggaaattttctttaagattaaaccaggaagaaatggtggcattcaacttgctagtgttaaatcattgttgctatcgatcattaaagtaaaaaaagaagaaaaagaaagctatataaaggcgctgacaaattcttttgatttagagcatacattcattcaagagactttaaacaagctagcagaacgccccaaaacggatacacaactcgatttgtttagctacgatacaggctga

SEQ ID NO: 3886 - DNA, 372 bp, Staphylococcus aureus
atgaaatatattatagatgcaatcataaggggaattattccctttgtaattatgagcggaatatctttaataatggtttatcagaagttgaactcatttcaaataaaaagcacttttctagtaggaataattattacattagtttcagctgctagcgtgatttatgagattgataatttaactttaacacagcaatctattattcacttttttgtaatgctgataacagtttttccttgtttgataattagtgggtggtttccattgtcaaatatctttgatttcttaaagttattggcgatcttcttggtagttggcgttgttttatggataatttcattttttatttttggaaagctactaaataaataa

SEQ ID NO: 3887 - DNA, 618 bp, Staphylococcus aureus
atgactaaaatagggtatgcacgagtaagtagcaaagaacagaacttagatcggcaattacaagcgttacagggcgtttctaaggtcttttcagacaaattaagcggtcaatcggtcgaacgcccacaattacaagctatgcttaactatattcgtgaaggggatattgttattgttactgaattagatcgattaggacgaaataataaagaattaacagaattgatgaatcaaattcaaattaagggggcaaccctggaagtcttaaatttaccctcaatgaatgggattgaagatgaaaatttaaggcgtttgattaataaccttgtcattgaattgtacaagtatcaagcagaatcagaacgaaaaaaaattaaggaacgtcaggcacagggaatcgaaattgctaagaaaaaaggcaaattcaaaggtcggcaactgaaatttaaaaaaaatgatccacgtttaaagcatgctttcgatttgtttttgaatggtttatccgataaagaagttgaagaacaaactggaatcaatcgccgaacgtttagaaggtatcgagcaagatataacgtgacagtagatcaaagaaaaaacaaagaaaagagggatagttaa

SEQ ID NO: 3888 - DNA, 912 bp, Staphylococcus aureus
atgctacataaagcattatttgttaacgaaaaatataaaaaattaagtgatagtgccaaagtcacttatgcaattctcaatgatagagtgagtttatccattaaaaataattggatcgatgagaacggagatatatattttatttttacaaatgaaagtctccaaaatatactagacaaaagtaaaaatacaattactaaaataaaaaaagaactgcaagaagtagggttacttgaacaaattcgtacaggctttaataagcctaaccttttatatttgcatgatatagaaactaatattggtgtggaaaaaaatattcaaaaatcctatgagaccgatgatatcaaggagtcccaaaatttgggactccagaatcccgaattttgggactccagaatcctaaaatttgggactccagaatcccaaattttaggccctaatgatactgattatattaaaactaattatattaagactgagaataatgatacggatgattcgcatgataaaaaattaacatatcataataatcatacacatcattcaaatcactacaattcaaactttaatgatgaggctttaaaattccaattactcgaagaattaccacaaaatattcaaaattatttaaacaacttttctgtacttgaaattaagattatcaaatctgtactcttaaaagccaagacttcttttaacaattcgattgattcatattacttattggaagatatggagttagaagtgatttatgtacttaaacgttttaaagctatgcttattcaaaaaaatgaaagcgtccaagcaatgcaaggttatcttatgacatctctcaaatctgaattcgcagagatgcatacacttaataaacgacgtgagcatttaccaatcacttctttatttaatcaataa

SEQ ID NO: 3889 - DNA, 573 bp, Staphylococcus aureus
atgaagagtgtcaaagaactcagtgaaaaattagaagttagtaaacaaactgtatttaataatataaaaagactgaatatagaaacaataaaaaaggataatacttcattcataaaaaatgatgttgatgtagaaaagattattcaaagagtaaccaaaaacaaaaaaaaatatgggtttgaaagtactaatacaaactcagaaaaagttaaaacgagtaatcaaaaaaatgaatctaaacataatgttcaaataattgaactgcttgaaaagcaaatagacactttaaataaacaacttgaaaaacaagaaaagcgtcatgaagtgacaatagaattttataggaaagaattgcaagaaaggtcaaaattacttgaaaaccaacaagtattaacattagaaagtaacaaaaaaatacaaaggttggagtctgagttagaagaagaaaaacaacttaattattcttttgatacgtctgctaatgagagacaaaatgttaatgtacaagaaccagtaaagatatacctgaagagaaagaggatgaaattattaacgaagaaccatccacaatag

SEQ ID NO: 3890 - DNA, 189 bp, Staphylococcus aureus
atgaaaagttcttttttagaaaaagatatagaagaacaagtgacatggttcgaggaagtttcagaacaagaatttgacgatgatatttttggagcttgtagtacaaacactttttctttgagtgactattggggtaataaaggaaattggtgtactgctactcacgaatgtatgtcttggtgtaaataa

SEQ ID NO: 3891 - DNA, 204 bp, Staphylococcus aureus
atgaaaaatgaattaggtaagtttttagaagaaaacgaattagagttaggtaaattttcagaatcagacatgctagaaattactgatgatgaagtatatgcagctggaacacctttagccttattgggtggagctgccaccggggtgataggttatatttctaaccaaacatgtccaacaactgcttgtacacgcgcttgctag

SEQ ID NO: 3892 - DNA, 2898 bp, Staphylococcus aureus
atggttttattctacaagaaagaagtatatccagaactaaataaatcagattttaaagaacatattttaccattaaatgattttattgaagaattatctgaacctttttcagaatttatattagaagatagtgacttaattgagaaggaagaattgtatccttatcataatgcttgtagaataattgctgaaggtgtctggagacatacttgggatactaagctaaataaatatacattaaatcctagcgaatttaaaaaagcgacttgcgaattttattcgcaagtcgctttttcttatttgataagaagctttgctaaagatataaaattatttaaattaagtaatgattctaacacagattatgacatttacacaaaatatttgatagaaaataaatttcaggatttttcacaaacgtataatgtggtgtggggacgatgtttaaaattattaattaatagagcaaaatcgatagttaaaaccattgaattaataaatcaaaaccgtaatgaaattgaaagaatatttgatatacctaatagtcataagatagtatcaattaatacaagtggtgatacgcataataacggttcttctgtttcagtagtaaattttgagaaagaattaaagcttatttataagcctagacctatttcaggagaagttggatattcaaaattaatagaaaagttgaattgcttagttagttctaaattttcatctttaaaggttttagatttagggggatttggtttcacttcttatatcgaaaaaaatgaaatgaacaaaaatatgaaagaagccggtagaattgctgctttaatgtattttttaaatagttctgatatgcattatagcaatatttactggactaataacggccctattcctattgatttagaaactttatttcaccctaaaagaatagctgacagtaatttagaaaattttaataatgcttattataaaattgagaagtctgtatatggaacaggaatccttcctatacatttaactaaaaaatcgagtgatgtttcggtagatgtaggttttactggagtaagagacgaaaacagcaactctccctttaaaacttttaatattgaagatggtttcacttcaaatataaaagtagtttggcaaaagcaaattgagatagataattctttgtataatgatgaaaattatgaaaaatttatatatagcaattgtaaggatttaattgaaggttttacagaaatatatatgattattttgaataataaccactattttataaactgtgttttagaaacatttgataattctaaattaaggtatatacataacatgacgtataggtacgaacaaattttacgaatacttacggactccgaaccatcaaaaaatatagatttagctcatatgttgctttctcgtattggaattttaagtatgacaagtaataaaaatattgtttcatcagagtgtacacagctttggaatggagatatcccttatttttctataagttttgatcaaaaagcagtagaatcagaaaataaatttgtcacttggttacctaaatctcccaaagaagaatttatgataaaaatgaattcgatttctttagaagacttaaatagacaaattgagataataaaattagcgtttgttgctaaattagcagatcctcatagagacgaacaaattttagaaagtgaaattaatgaggacgtttatatagataaaaaaactatagagcattctatctcatattttatgaattcattgactgaaagaataatgaatgaccggtataaccatttgcctaaaacttggataggacctgtctctcaatatggtaagggatggactccaggagttttaggctatgatttatatagtggcagaactggcccctttctagctttattattatctggaaaacaattaaaaaaccaaaaggtaatagatgttgcttatgagttttttgataaagttactaaaatatttgaggagaaaacatacgacttaagaaatttacttatgtctgggataggagctttttctggaatgtcaggcattatatggagcctttatactgctggaaagatcactgaaaattctaaatggaaaaatacagctttaaaagtctttgatttaattgatgaagaaataaagaaagaagagaaaggcgacttttttgatatgatttcagggagtagcggagcaattattatgagatataaaatccaagaagattactcgttatctgaaaatttcataaaagaaaaggttaaagaagcttataatattataaataataagaaaaatctatcctctggattagctcatggaataagccagattatgtatttttttgcaattatttataaaaaacaaaagctagtatatataagaagaataatagaagatattcataaaattatcaaatcaaattttactaatgtgcaaaatttaattgaaatttataggtcggaagacaaaaataatatttcatcgtcttggtgcaatggtttatccggactactagtttcatattacgaaggatataaagctggaattttttcaaaagatgaagttatagatataattaagcaaattgaaattatacctttatctgtagttccgatactctgtcatggtagtttaggtgtttatgattctttgaaatatgtaagcaaagactttgaaaaagaaacacgttatttattaatgaaattagaaaaaactacttgtagtcctgcgtatatagtaaattactttaaagaaggaagaggtagatatacacttagcccaggactaatgacaggtaaaaccggagctctattacatttatgtaaattgctagatggtgaaattgatgtctctcccctaacttttgaggtgtaa

SEQ ID NO: 3893 - DNA, 2163 bp, Staphylococcus aureus
atggctaaattgaaaatatttaataaaaaaagagttccaccatctttacaaattgctcaaacagaatgcggattgtgttgtgtgaaaagtatactgaattattatgattttagtgtttctttaccagaacttagaaaaattaaagaaccaggaagagatggtttagggttaaaacagattaaaggtttgttggaatgttataatttcaaagtgaagaattttaaggttaaagataataaagctttcgatatgttgaattttccgttaatagccttttggaaaggctgtcattacgttgttttagagtcttataatgataaaaacgtagttattatggatccatcagtagggagaataaaaataagtactttagaatttaatgctaattttgatagatacgtgattttatgtactccaaatgataattttcaaaaacgtaatatttcaacggtatctaaatttaaaaaaacatatatttggccaaacaatatgataagtatatatgtaaaattagcacttttgagtttgatagcaattactattacattgtcaattcccatagccacacaaaaattaatagactttagtctacaaactcaaaaatctttaatttttatagttattatcattattttctcaatgataatagcagtgttcttgtcatttttgagaaacttgtattctatacaaatgattttaaaatttaattggtttttaatgaatggtgcttttaaacgtttattatatttgcctgcaaaatacttcagcgttcgttctccaggagaaattacgtatagaattaatgcattaactcgcattcaagatattataggccctacattggtacgttctatcttagatttttttagtagttgcactttattaggttatgttttttttattaatccactaattgcaatattaattttaacctttttgttattgaattttatctttttagctattatgcaaaaacacattaacttttcaaaggacagagagttacatgaaggaagtagtgctcaaagtatccaactagatgctttagtatctataaatagtgttaagataggtggatacatgaaacgttacatagatgattgggctaacaggtatcaaaatttactgaaagctatggaaaaaagaatgaaattacaagatggtttggttggttcaatattgaacggctttcaaacttttgctccactgctaattttatctattaatatttatttatctcaagtgggatatatgactttaggacaggcgattgcagtacagtctgttgtttctatgttgttcacatatactaattctatatttactactatttctgaagctttgacggcaacgaaatatattgaattatcagaagatatttttgaataccctgaggagaatcgtattaatagcatgattcaaatgcagtcaggagatgtagaaattaagaatttgcactttagttacacaccagaaagccctttagcaataaaatctattaatttaagtataaaagagggtgacactatagctttagtgggcatgtcgggatcaggtaaaactacattaggtaaacttattagtactcttttcgaaccttctagtggcagcattttatatgggggtgtagagaaaacaaaatataacattgataatttaagatcatctattagttacataccacaagaagcataccttcataatagaacaattttggaaaatttgaagttgggttgtaactacaatgaatacgaaataatcaaacgttgccaatctatgccatttttaaactttattaatagcttgcctatgggatatagtacagtagtttctgaaatgggtgctaatttgtcaggaggtcaacgacaaagaatacatatagcaaaagttcttctgcaatctcctaaattattagttatggatgaagctacttcttcacttgataatgtgtcgcagtcacatgtatatgacgaactatcgagattaaaatgcaccaaaatcgtaattgctcatcgatttgctactgtatttaatgcagataaaatagttgttatggatcatggagaaattgttgaagttggcgcacataatgaattgttaaataaaaatggtttatatagaaaactatttaatgctgaatttaaaaaggagtgtggagtttga

SEQ ID NO: 3894 - DNA, 602 bp, Staphylococcus aureus
attggataatctactccgtacagaatttattaagttaaaaagatcatatatgtttctaataagtattttaggtacatgcgtagcaccttttatggtggttgtagcttcttttattagtatgcggacgaaagtaccgactcctaatattgtatttaaacagttatttgaagaagtcagtttatatcatatgctaattattggacctcctctatatggggttataatagcctatttgtttggaagagaatatatagaagatactttaaaaaacttattaattatacctatatctagagaaagttttttagtaagtaaaataatattattattcttgtggattcaaacactatctgttattgcatggttgctaactttaatgctaggtatgctattgcattttcaagggttaagccagagtttaataattgattcattctttacatttgttattggcggagtgttattatggatattatctccaccaataattattttgtcgatatattttaaaaattatgttcccacaattgttttaaccataataattactttgataaatttaatgactgctaattctgaacatagaggattatttccttggg

SEQ ID NO: 3895 - DNA, 930 bp, Staphylococcus aureus
gtgaaaaatttgaataatataattgaaataaataacttaacaaagcaatatggaagtcagatagcagttaataatttgagtataactgttgaaagtggacaaatttatggttttttaggaagaaatggtgcaggcaaaacaactactataagaatgcttttaggcttaattaaacctacgaaaggtaatattaaaatatttgaaaaagagttcgaaagtaataaaactgaaattttaaaaaatattggtgctatggttgaaacgccaggtttttatagtaatttgacagctaaagagaacttaactataaatgctaaaatattaggtatacaaaaagaaaatgcaattgaagaagtgttagaaatagtaggactagcttctgaaaaagtaaaattgtttaaaaattattctttaggtatgaagcaacgtttagggattgcgagagctttattgcacaatcccgaattattgatacttgatgagccgacgaatggattagatcctattggcataaaagaaattagaaagttgattaaggatctggctcaatctagaaatataaccattttaatttcaagtcatatattgtcagaaatagagcagttagtagacaaggtgggtattattcataacggagttttgttagaagaaattatgtatgaagatttaaaaaaaaagaacagacaatttataagtatatcagtatcagatgaagaaaaagttgcatgtttgttggaaactaacttcggaatttatgactataaaattaaagaaaatggcgaatttaaaatttattcacatattgatagacaacaagaaattaatagattattagtattaaacaatattgatgttttccagatgagagtgatagaagattatctagaaacttatttcgaagacttagtaggaggtggcacaattggataa

SEQ ID NO: 3896 - DNA, 339 bp, Staphylococcus aureus
atgaatttaattccttttattattattttaattttttcttgtttatggacggctataactaacaaatatttaccttcagaaacattagataaaaaaggacaacaagatcgatacgatgaaagacaacgtaaaatgtttattgaaatactggctaaaagttttatttggattgtatattgtatgttatttacactagtgcttaaatttacaggtttgtcaccaagtattgaaggatcttggttttctcaatatccagaaattttctttataattgtagcactatttcttatgctgtttaattactatactacaaataaaaaatatacatctaaaggttaa

SEQ ID NO: 3897 - DNA, 1575 bp, Staphylococcus aureus
atgaaaatattgttagaggctcttcgtataaaaccctatgttcaagatcgtttactgttgaacatagatcaattacagatttatcagaatgaccgaattgggttagttggtggaaatggcagtggaaaaacaacgttacttcacatattggatgaaaagctttttcctgaagaaggtactgtaactcagtattcacggtgcgaactcattccacaattgaaacatatggaaacaacaaaaagtggtggtgaagtaacacgaaaatatattcagcaagcacttgataaaaacccagaactgttactagcagatgaaccgacaactaaccttgatacaaattatatagaaaacttagagcgaaaattaaaggactggcatggagcatttatcatcgtttcacatgatcgtgctttcttagatactctttgtacgagtatatgggaaatcaaagacgggggtataaccgaatacaaagggaactatagtgactatattgagcagaaagaattagaaaatcgccaagagcaattagcacatgaaaaatatgaaaaagaaaagaaacagttagaagaggccataaagttaaaagaagagaaagctcaacgagctactaagaaaccgaaaaatataagttcatcggaagcaaggctaaaaggagcgaagccatacttcgcaaataaacagaagaagttacggaaaacggcaaaagctctagaaactagactggataagcttgaaaaggtagaaaaaacaaaagaactacccccacttaaaatggatttattgaattcagagacttttaaaaatcggattatactccgtgttgaagatgtttcgggtgtaattgaggaacgagtattgtggaaagcagctagtttttacgttcgaggaggagataagctggcaattatcggctctaacggtacgggcaagaccacctttattaaaaaaattgttcaggataagccaggtatttcattttcaccatctgttaaaattggttactttagccagaatctagacatattagagctcgacaagactattttagaaaacgtccaatcttcttcacggcaaaatgaaactcttattcgaaccattctagcgagaatgcattttttcagagatgatgttcataaaccagtaaatgtcttaagtgggggagagcgagttaaggtagcactaactaaagtgttcttaagtgatgttaatacgttagtattagatgaaccaacaaactttcttgatatggaggctatagaggcgtttgaatccttattagaggagtatgaaggaagcgtaatttttgtctcccatgatcgtaggtttatcgaaaaaatagctacccgaatcatgatgattgataataaagaaattaaaatatttgaaggaacatatgaccaatttaaagctaaacaagctagggaggaaacacgggatataaaagaggataaaaaacttttacttgaaacaaggattactgagatactcagtcgattgagtattgaaccttcggaggaattagaaaaagagttccaaaacctaattaacgagaaaagaaatttagataattga

SEQ ID NO: 3898 - DNA, 738 bp, Staphylococcus aureus
atgaaaactataaaaatggttgctgatgaattgaatgtaactaaacaaactgttgttaataatgctaaaaatttgaatatatcttttgaaaaagaaaatggagtgaattatattgatgataatgattatttgaaaatagtagaaaaaatcactaagaaagaaagaacaactcaaaataaagaaaataaaaaatcagaaataacttatgaaaacactgaaaagaatagatataataattcagatggctttgagacattaaaaacaaaagtaaacgaattagaaaagcaggtagaaatctttgaaactagagctaaaaatgatgaaaagtatattgagaatttaactaaacaactagaccaacaaaatagcaatgttaatacattaaataaattattagagaatcaacaaattttagctttagaaagcaataaaaaaattcaaaaattggaacatcaattagaggaagagagacaattaagttattcctttgataaatctactaatgatcgagaaaactttgatgtacaagaagcatcatatacttcggattctgtaaatactgatcaatatcagaaagaagaaaagaaaccagaggttcaacctaaagatatatctgagagtcaacaagatgaaaaatcacaacaacaagatgattcatttaatcaaaatgataaagatattgctatagaagaaacccaaactaaaaaaggcttctggagtcgtttgtttggtggctaa

SEQ ID NO: 3899 - DNA, 921 bp, Staphylococcus aureus
atgtctaaatttaaaaaaatatctgcaagtgaattcgaaacattacgtttttatcaattacccaaatttttatttgaagatgaatacttttctaaaatgcccacagatgcaaaagttatgtatgctttattaaaagatcgctttgaactatcaagattaaataactgggtagattcagaaaataatatttatcttttatataccaataaacagttatgctcaattttaaattatgcagaaccaaaaatcattaaattaaaaaaagaattagaaaaatacaatttgattataaacgaaagacaaggtttaaataaacctaacaaaatttatttactcgaacccacatatgacaaggaactaataaattctaagttccagaacaaagaatttattagttccagaactaataaatcatcagttcaagaactaataaattctaagtcaagtgatactgattttaataatactgaatatatagagactaagaataatgatacgaattatacgaatgatacatctaacatgatttctaagaattctcattcgaatcatacaaatcatcaacaaaccgaatttaataatgatgccttaaaattccaggcgcttgaagaattaccttcgcaaatcaaatcttatgtaagtaattttgaaattaaagacatccgtattattaaaagtatcttactcaaggggaaaaagtcatttaataatacacatgatacatattaccgtttagaagacgtcgaatttgaacttgtaagtgttttaaaacgttttaaagccatgttgctacaaaaaaatgaaaccgttgaaactatgcaaggctatttaatgcaatcaattaaagctgaacttgaagaaatacatgcattaaatatgcgtcgtcaaaacatacctcaatacaatatctttaatcaataa

SEQ ID NO: 3900 - DNA, 771 bp, Staphylococcus aureus
atgaaaactattaaaatggttgctgatgaattgaatgtaactaaacaaactattgttaataatgctaaaaacttaaatatatcttttaaaaaagaaaatggaattaattatattaatgataatgattgtttaaaaattatagaaaagatcactaagaaagaaaggacaatgcaaaataaagaatcaataaaaaaagaaagatttaatgaaaatactgcagagtttgaaaagcatatatacaataattcaaatggttttgagtcattaaaaacaaaagtaaatgaattagaaaagcaaatagaaatctttgaaactagagctaaaaatgacgaaaaatatattgagaatttaactaaacaactagatcaacaaaatagcaatgttaatacattaaataaactgttggagaatcaacaaatattagctttagaaagtaataaaaagattcaaaaactagaaaaccaattagaagaagaaagacagcttaattactcttttgatacagcgactaatgatagacaaagcattaatccgcaagaagcaacttttactgaagaatatcaaaatagcaaccaacaacaaaagaaaatacaaccaatagaagcagaattaaatcataagggcataactaaagcgaaaaaggatgacagttcaaacgaagacgtattaaagagagatgataaactatctgaagaaatagagagtggacctgaggacagggaagtagaaacacctaaaaaggggttttggagtcgtttgtttggtagctaa

SEQ ID NO: 3901 - DNA, 945 bp, Staphylococcus aureus
atgcccaattttgagaaatacaatttatcacaagtaaaaactgaaagattttaccaacttcctaaatatttgttcgaagatgcatattttaagaaaatgtcagcagaagccaaaattatgtatgcattattaaaagatcgtttcgaattatccatccaaaatgaatgggtagatagaaataataacatttactttattttcagtaataaacatttgtgcgagtacttaggttatggagaacaaaaaatcataaaattgaaaaaagagttagtaaattttaatttattaactcaagagcgtgttggccttaataaaccaaatagattatatttattaaaaccaaattatgatattgaagcaagtcttaccaaggaacttccaaattcacagttccagaacaatgaatttggaagttctagaactgtgaatttaagtggtcaagaacttccaaattcacagtctaatgatactgagttaaataatactaattatatagaaaatgaggataatgatacgtatgatatgaatgatattatatctaatactttaataaataataatcatcattcgaatcatacaaatcatcaaaaaactgaatttaataatgacgcccttaagttccaagtactcgaagaattgccacaacaatttcaagactatttaagtaaatttgaaattagagaaattcggattattaaaagcgtattactcaaagggaaaaagtcatttaatacttcacatgatacttattatcgtttagaagatgttgagtttgaaattgtaagtgtattgaaacgttttaaagcgatgttgctacaaaagaatgaaaccgttgaagctatgcaaggttatttaatgcaatccattaaagctgaacttgaagaaacacatgccctttatatgcgccgtaaaaacatgaaacaatataatatctttaatcaataa

SEQ ID NO: 3902 - DNA, 470 bp, Staphylococcus aureus
aggtcttagctaaaaatataggaaaactgattgttatgtatacgattgcctatattttaaacatttttctctttacgttaattacgaatttaacattttatttaataagaagacatgctcatggtgcccatgcaccttcttccttttggtgttatgtagaaagtattatattatttatacttttacctttagtaatagtaaattttcatattaactttttaattatgactattttgacgtttattgctattggtttgataattaaatatgctcctgcagcaactaaaaagaaacctattcccgttcgacttattaagcgaaaaaaatattacgcaattattgttagtttaatctttttcattatcacacttatcatcaaagaaccatttgcccaatttattcaattaggcatcataatagaagccattactttactacctattttctttattaaggaggacttaaaatga

SEQ ID NO: 3903 - DNA, 642 bp, Staphylococcus aureus
atgaacatagaaactattgtaaatcaatttgaaacacgagcaggcacgttactaaggtactacacggggttattagaacatagtaaagtacaaccatgttgctttaagttatacaatgatccatttgatatggtttatgtgatgatgaacagcaagttattcggtcatgtatatattaaagattgtaaagtaaggcaatcatttgaattagcgtcacctaagcacactgaggggcttataagaagcatagaggggcattatgtaggttatgaattgcatgatggcaaacagctttctattagtgatgtgatggctagtcaattgtttgaagatgagtattttatgtatggattacaaacatatgcagaatcaaataatagtgatgtgtttgagtacctagaaaatggatttgatacagatacacttgagggcattcagtcaagtaatactgatgtgatatcgaatattgaaatgttgtatcagatagctacgggaatcaatgaaccagcaccagagttagttgagggggtgagattagtaactgagtttgtgcaagacgagaaggctacacaagaggattacaaggctttagaacgtaaattgaatgatctaaaaacgtcttattatagcttgagtaaataa

SEQ ID NO: 3904 - DNA, 261 bp, Staphylococcus aureus
atgagccaactacttagtgaacaggctagtcaacagttagttaatagtatagttgatattgccgaaaaaatagctttagaaaaagttaagcaatcacgtaagcgatatctcattcaaaaagaagtcatggaagaatacaacgtgactcacaaggttataaccgagtgggaaatgatgggacttcgtaaagttaagattggtaaaacaattcgctatgatcgacaagatatcgaaaatgtaattgaacaaatgaaaaattga

SEQ ID NO: 3905 - DNA, 228 bp, Staphylococcus aureus
atgtttacgaaaaaatcagaattaaaacaacaatttttaaaacctaaaaccaaattgaaagaggagaggttaaaacgaggtctttctgctacttatttagctcaattaataggtattgatagaaggcaatatgaatctaaagaaaaagggttgttctcatttcatgactatgagataaaaattatttctgagttccttgatattgataaagaagtgttttttatctga

SEQ ID NO: 3906 - DNA, 804 bp, Staphylococcus aureus
atggaaggagctggtcaaatggcagaattaccaacacattacggcacaattattaaaactcttagaaaatacatgaaattaactcaaagcaaattgagtgaaaggacaggatttagtcaaaacaccatttcaaatcacgagaacggcaacagaaacattggagtaaatgaaattgaaatctacggtaaaggtttaggtatacccagctatattctacacagaatatcagatgagtttaaagaaaaaggttatagtccaacattaaatgattttggaaaatttgataaaatgtatagttatgttaataaagcctattataatgacggcgacatttattattcatcatacgatttatatgatgaaacaatcaaattgttggaattgttgaaagaatctaaaatcaatgtaaatgacatagattatgattacgtacttaagttgtacaaacaaatcctttccactgatacagaaaaatcaataataaattacgagactttagcaaatactcgaaaatcaagcgataaaaaaagagaagtaacaatagaagaaattggtgaatttcacgaaaaatatttaaaactattattcaccaacttagaaactcataacgatagaaaaaaagcattagcagaaatagaaaaactaaaagaagaatccatttatttaggtgaaaagttacgcttggttcctaaccatcattatgatgctattaaaggtaagccaatgtataaattatacttatatgaatatcctgatagactagaacatcaaaaaaaaatcatacttgaaaaagacactaattaa

SEQ ID NO: 3907 - DNA, 1137 bp, Staphylococcus aureus
atgattaaaaaatataagaagaaagacggttcgactgcctatatgtttgtcgcatatttaggtactgatccaattactggtaagcaaaagagaaccactagacgaggctttaagactgaaagagaagctaaaattgctgaggcaaaacttcaaacagaagtaagtcaaaatggctttctaaacaacgatataacgacgtttaaagaagtatatgagttgtggcttgaacagtatcaaaatactgtaagagaaagcacatatcaacgtgttttaactttatttgatacagctatattagaacatttccaagatgtacctattaagaaaataaccgttccatattgccaaaaagttattaataaatggaacaaaaagtattctgatattaaagctatacgaatatacacatctaatgtgtttaaatatgccgtaagccttaagataatcgttgataatccgtttgcacatacaaaagcacctagaaaaaaagaagcgcaacaagacgcatctacaaagtattattcaagtgatgaattgaaacagtttttaacttttgttgaagatgacccattatattatgctatttttcgaacattagcttttactggctttagacgtggagaattaatggctttaacatggaacgatattgattttactaaacaaaccatatctattaataagacttgcgcaagaggtgcaaattataaactggtaatacaagagcctaaaacaaaatcatctcacagaacaataagtattgatgataaaactgcaagtgtattgaaatcatggcgcactcatcaaagagtggagtcccttaaatatggtcacaatacctctgataaacatcaacatgttttcactactgtacgtgataataaaccactatatcccgagcattgcaataaagcattggacttaatttgtgagaagaatagttttaagagaattaaagttcatggttttagacacactcattgttctcttttgttcgaggctggcctttctattcaagaagtacaagacagattaggtcacggggacatcaagacaactatggatatttacgctcacgtaactgaaaaacaacgtgatcaggtggctgataaattcgcaaaatacatcaatttttaa

SEQ ID NO: 3908 - DNA, 570 bp, Staphylococcus aureus
atgagtgagttaacggcaaaacaagcgcgttttgtgaatgagtatattagaacacttaatgttacacaaagtgctataaaagcgggctatagtgcaaatagcgcacatgtgacagggtgtaggttattgaagaaaccgcatattaagcaatatatacaagaacaaaaagataagattatagatgagaatgtattaactgcaaaagagttactacatgtacttaccaatgcggcagtcggtgatgaaacagaaacgaaagaagttgtagtcaagcgtggggaatataaagagaatccacaaaatggcaaagtacagttagtctataatgaacatgttgaactgatagaggtgccaattaagccaagtgatcgtttaaaagctcgtgatatgttgggtaaataccataagttatttacagataagcatgatattaacgggaatgtgcctatgttcattaatattggtgaatgggacggagacgatgaggagttagataaggcagtgaaagatgtatctaacgctaatcctaatcatactgtgattgtggatgatattccgttagaggattga

SEQ ID NO: 3909 - DNA, 342 bp, Staphylococcus aureus
atggataaacagcaaataaaagacttcgtttgtgattatcatgagcgaactagaagtgatgtattaatagatgatgatataaatactgatgaattcttttcaatagctgatgaaaattccaatgaatggatggcagacgataacattgatgatcatattgtaaagaatcacttagaaatgattgttgaccgagtagctaatgataaagagttttatatttttgattcccttatacaaggacgtagttatcaagatattagtggtgtcttagattgttcagaacaatctgtaagattttggtatgaaaccttattagataaaattgtagaggtgatagaatga

SEQ ID NO: 3910 - DNA, 219 bp, Staphylococcus aureus
atgaaaacaaaatatgagttgaataatactaaaaaggtcgcaaacgcattttgtttaaatgaagaagatacaaatctattaataaatgctgttgatttggatattaaaaacaatatgcaggagatttcaagtgagttacaacaagcagaacagtctaagcaaaagcaatatggtacaacgctacaaaatttagctaagcaaaacaggattattaaatag

SEQ ID NO: 3911 - DNA, 579 bp, Staphylococcus aureus
atgaaaactgaatcgtattttaaagaatataatcaatttgtattagatcaacacaaagctatacaagaattggaacaagagcgtaatgcattggaaagcaaaataaagttagataagtccacatacaagcagttaatcatggatggacaagatgataaggcagataacctatatcaagcaacagatgctgatgaaaagaaactaaaagcacttaataaacgcttagagacaaagaaaagtgtatctaaggaagttaaatatcaaaagacaattgaattattaaaacatcaaagtgaattgtcatcgttatatgaatcagaaaagcaatcagccatagaaaaattaaaaaaagcagttgatgcatataatgagatcattgatgaaatagaagatattaatgatagatatgaagatgagcaccagcaatatgcgagtgtgtatagtcaagaacaattatatgatgacaaagaggctagaaaagcgttgaatggccactttaaagaaaatatatttacatcatttattaatggtaatgatttgccatacgagcacaataacaagttgtttctaaaatgttaa

SEQ ID NO: 3912 - DNA, 462 bp, Staphylococcus aureus
gtcttagctgtaaatataggtaaattaattgttatgtatactattgcctatattttaaacatttttctgtttacgttaattacgaatttaacattttacttaataagaagacatgcacatggtgcacatgcaccttcttcattttggtgttatgtggaaagtatttttttattcacactcttgcctttaatattagtaaactatcatattaactttttaattatgactattatgacagttatcgccataggtatgataattagatatgctcctgcagcaactaaaaagaagcctattcctgtgcgacttattaagcggaaacgaaattatgcgattattgttagtctaatctttttcattatcacacttatcatcaaagaaccatttgctcaattcatgcaattaggcatcataatagaagctattacattattacctattttctttgttaggaggacttaa

SEQ ID NO: 3913 - DNA, 586 bp, Staphylococcus aureus
atgtttacagtaccatcaattattagtggtatcaaatacagtaaatctgactatttgtatatcacgggtattacggcattatcgttaattctatttaattttatcgatagcgtaaccttaataatactaactatattcataattatattatatttcagcaaaatcaaatggtattctattttgctgataatgacctcgcagattattttatactgtgcaaattacatgtatatagttatattcacatatattgtcaaaatcgttgatagtatatttgtaatatttcccatcttctttgtagtttatgtgacaatcagtatactattttcttatataataaatagagttctcaaaaagattagctcatcatatctaatactaaacaaaggttttttaatagttatttcaaccattctactgcttactttttcattgtttttcttttattctcaaataaactcggatgaagctaaagtaataaggcagtattcttttatttttattggaatcactatatttttaagtatattaacatttgttatttcacaatttctccttaaagagatgaaatacaaaagaaatcaag

SEQ ID NO: 3914 - DNA, 6831 bp, Staphylococcus aureus
atgggaaataaacaaggttttttaccaaacaagttaaataagtactctatcagaaaattcacagtgggtactgcgtcgttgcttgtgggaacaacacttttttttggaattggaagtgaggcgcaagcagcagaattagatacgatcacaaaagaagatgttaagagccaagacaaaggtgaagcattagacataaaaaatattaaagaatcagaaaaagatgttactactgaagatgacaacaatgcggaagtacaaaatagtgctcagacagttgacaaatcagaaaattccaatgacactgctgttgaatctacgaatgacagtgtgaaaacagatgaaacaaaagaaacatcggaaaataaatctgcacaagatgatgataacattaaagaggactcaaatactcaagaagaatcaacgaatacatcatcacaatcttctgaagttcctcaaactaaaaaagacacaaatgaaacatcagaaacagcaatagatgaagatgcatctaccaaagaacaaaataataaagacaacgatactgcacaagatgatgataacattaaagaggactcaaatactcaagaagaatcaacgaatacatcatcacaatcttctgaagttcctcaaactaaaaaagaacaaccagacaaatcatctaattcaattaaagagccagataaacaacaagaagaagtagcaaaagaagaaaaagctattactgaaatagctgataaaaataaagaattagaattaaagaataataaaactgataaaaatgaagaatctgaattagaaagtaacttatcttcttcagaaaataagaaggatacagttgaatctttcttaaatagtcaactgtccgattcagaaaccaaaaaaatcatggaaaatgctaacattgactatgataaagcaacagatgaagaaattaatacagaaattttaagagcgtcattaattgaaatggcgaacaataagaaaaaaacagaaactttagcaacaccacaaagaactatgttccgtgctatggctacaccaacagcattgcgtgcagcagttaaccaagatgaagaactacaaaaatctttaggttacacagataattatacatttgcttcaatgttatttgatccaggtaaattagattctgatgacgcattaaatagtaatataattccatttgacctacatagttacatgtcaggagcaaactctggaaacagatataaaattgatttgaaattagatccaattattgctgagcatgtcactaaaatttcagcgaatccttctggaagcaataaacccgttgagtttgtaagaaataaagatgaaaatggtaatctaacagatacttgggaagtcaactttattcgtgcaaatgatggtttatttggaggtgcagaaattctttcacaatatactgctaagaatggcaaaatagaattggacgatacagttggtaatatcatatctaacgctggcaatttatctaataataaattgaatcatcaggtgtttgttcgagattctagagaaaataaaattgttcgtacttctgaaagcagtggttatttcttaacaaaagctgatgatgatttagttaatttagaaaataatgtatctacagaaaataataatgcatttaaagcaagtagcggttcagctacatataatgaaaacgttggagaatttggtggtattttaattgaccaacaaatcatgaagaacggtattttctcatatagtaaaacaaaagctaaccaatgggcatacaattatcaaattgataaagacttactaccctatatcgaaggtgtagaattgcaccaatacgattataaaggcttaaatggttttgacaaaaattatgatgcaaaaaataaagttgctgacttaaccattgacgaggttggtaatggcacaattacgagtgacaatttaaataaactaatcgaatttaataatgcattaccagaaactgtaggcgttagagtcgtacttaaattgaataaaagcgtaaataacattttaacaaaagatgcaaaatatgattcagaaggtaatttgattagagaaacaacaaaacaaaaagaagatttcacatttgctggttatttaacagatagtaaaggggcattaattaataatactttaggcacttcaacactagcgctacaagattatgataaagatggtttattagatagatatgaacgtcaattatcattatctgatgcagaaaacgaagatactgatggcgatggtaagaatgatggcgatgaagttgtaaattataaaacatcgccacttgtaggcaaaccgcaagcagcagatattacaacagaagacacagtcgtttctggttctgttcctcttaaagaaggtgcagcaacacaaacagctaaagtaattaatgcagagggtacaacagttggtacagcaactgtaaattcagatggtcattctcagtgtcaattccaaattcaccagaaggcacctatactattgcaattgattcaccaaattatgataatggatgaagtaaacacttttgaaattgttgataattctaaactaccagcaccatctattaatcctgttgacgataacgatcaacaaattgttgtaaatggtacgtcaggttcaactgtgacagtaacagatagtaataataatgttttaggtactgtaacaattccagcagatgatacaagtgcagcaattaatgttgatactcctttagaagcaggtacagtattaacttcaacagctagtaaggacggcaaaacaagtgatgtatctgatcaaatcacagtaacagatgcgacagcgccagatgcaccaacattagatgaagtaaatacagatgcaacacaagttacaggtcaagcagaaccaaattcaacagttaaattaacgttccctgatggcacaactgctacgggtactgcagatgatcaagggaattacacaattgatattccatccaatgttgacctaaacggtggcgaagagctacaagtaacggcaactgacaaagacggcaatacttctgaaccaagctcagcgaacgttacagacacaactgctcctgatgcaccaacggtgaatgatgtgactagtgacgctactcaagttacaggtcaagcagaaccaaattcaacagttaaattaacgttccctgatggcacaactgctacgggtactgcagatgatcaagggaattacacaattgatattccatccaatgttgacctaaacggtggcgaagagctacaagtaacggcaactgacaaagacggcaatacttctgaaccaagctcagcgaacgttacagacacaactgctcctgatgcaccaacggtgaatgatgtgactagtgacgctactcaagttacaggtcaagcagaaccaaattcaacagttaaattaacgttccctgatggcacaactgctacaggtactgcagatgatcaagggaattacacaattgatattccatccaatgttgacctaaacggtggcgaagagctacaagtaacggcaactgacaaagacggcaatacttctgaaccaagctcagcgaacgttacagacacaactgctcctgatgcaccaacggtgaatgatgtgactagtgacgctactcaagttacaggtcaagcagaaccaaattcaacagttaaattaacgttccctgatggcacaactgctacgggtactgcagatgatcaagggaattacacaattgatattccatccaatgttgacctaaacggtggcgaagagctacaagtaacggcaactgacaaagacggcaatacttctgaaccaagctcagcgaacgttacagacacaactgctcctgatgcaccaacggtgaatgatgtgactagtgacgctactcaagttacaggtcaagcagaaccaaattcaacagttaaattaacgttccctgatggcacaactgctacgggtactgcagatgatcaagggaattacacaattgatattccatccaatgttgacctaaacggtggcgaagagctacaagtaacggcaactgacaaagacggcaatacttctgaaccaagctcagcgaacgttacagacacaactgctcctgatgcaccaacggtgaatgatgtgactagtgacgctactcaagttacaggtcaagcagaaccaaattcaacagttaaattaacgttccctgatggcacaactgctacgggtactgcagatgatcaagggaattacacaattgatattccatccaatgttgacctaaacggtggcgaagagctacaagtaacggcaactgacaaagacggcaatacttctgaaccaagctcagcgaacgttacagacacaactgctcctgatgcaccaacggtgaatgatgtgactagtgacgctactcaagttacaggtcaagcagaaccaaattcaacagttaaattaacgttccctgatggcacaactgctacgggtactgcagatgatcaagggaattacacaattgatattccatccaatgttgacctaaacggtggcgaagagctacaagtaacggcaactgacaaagacggcaatacttctgaaccaagctcagcgaacgttacagacacaactgctcctgatgcaccaacggtgaatgatgtgactagtgacgctactcaagttacaggtcaagcagaaccaaattcaacagttaaattaacgttccctgatggcacaactgctacgggtactgcagatgatcaagggaattacacaattgatattccatccaatggtgacctaaacggtggcgaagagctacaagtaacggcaactgacaaagacggcaatacttctgaaccaagctcagcgaacgttacagacacaactgcttctgatgcaccaacggtgaatgatgtgactagtgacgctactcaagttacaggtcaagcagaaccaaattcaacagttaaattaacgttccctgatggcacaactgctacgggtactgcagatgatcaagggaattacacaattgatattccatccaatgttgacctaaacggtggcgaagagctacaagtaacggcaactgacaaagacggcaatacttctgaaccaagctcagcgaacgttacagacacaactgctcctgatgcaccaacggtgaatgatgtgactagtgacgctactcaagttacaggtcaagcagaaccaaattcaacagttaaattaacgttccctgatggcacaactgctacgggtactgcagatgatcaagggaattacacaattgatattccatccaatgttgacctaaacggtggcgaagagctacaagtaacggcaactgacaaagacggcaatacttctgaaccaaagctcacgaacgttacagacacaactgcttctgatgcaccaacggtgaatgatgtgactagtgacgcttctcaagttacaggtcaagcagaaccaaattcaacagttaaattaacgttccctgatggcacaactgctacgggtactgcagatgatcaagggaattacacaattgatattccatccaatgttgacctaaacggtggcgaagagctacaagtaacggcaactgacaaagacggcaatacttctgaaccaagctcagcgaacgttacagacacaactgctcctgatgcaccaacggtgaatgatgtgactagtgacgctactcaagttacaggtcaagcagaaccaaattcaacagttaaattaacgttccctgatggcacaactgctacgggtactgcagatgatcaagggaattacacaattgatattccatccaatggtgacctaaacggtggcgaaaagctacaagtaacggcaactgacaaagacggcaatacttctgaaccaagctcagcgaacgttacagacacaactgctcctgatgcaccaacggtgaatgatgtgactagtgacgctactcaagttacaggtcaagcagaaccaaattcaacagttaaattaacgttccctgatggcacaactgctacgggtactgcagatgatcaagggaattacacaattgatattccatccaatgttgacctaaacggtggcgaagagctacaagtaacggcaactgacaaagacggcaatacttctgaaccaagctcagcgaacgttacagacacaactgctcctgatgcaccaacggtgaatgatgtgactagtgacgctactcaagttacaggtcaagcagaaccaaattcaacagttaaattaacgttccctgatggcacaactgctacgggtactgcagatgatcaagggaattacacaattgatattccatccaatgttgacctaaacggtggcgaagagctacaagtaacggcaactgacaaagacggcaatacttctgaaagtaccaatacgactataatcgattctgatgacaactctgataacggaaataattcaggtgctggagacacttcagattctgatgacaactctggtaacggagataattcaggtgctggagacaattcagattctgatgacaactctgataacggaaataattcaggtgctggagacaattcagattctgatgacaactctgataacgaagataattcaagctctaacaaagattcaattaatcaagactcaaatgtaaatagtaatgatagtaaacatgataaacaaaatgaattaccagaaacgggtgaaaaagaagtacgtaatggtacattatttggaacgttatttgctggtttaggttctctattattatttaccaaacgtcgtagaaaagaaaatgataaaaaataa

SEQ ID NO: 3915 - DNA, 6831 bp, Staphylococcus aureus; identical to SEQ ID NO: 3914

SEQ ID NO: 3916 - DNA, 144 bp, Staphylococcus aureus
gtgagaaaaatacctttaaattgtgaagcttgtggcaatagaaattataatgttcctaagcaagaaggctcggcaacaagattaaccttaaagaaatattgtccaaaatgtaacgcgcacacaattcataaagaatcgaaataa

SEQ ID NO: 3917 - DNA, 3948 bp, Staphylococcus aureus
atgctaaacagagaaaataaaacggcaataacaaggaaaggcatggtatccaatcgattaaataaattttcgattagaaagtacacagtgggaacagcatcaattttagtaggtacaacattaatttttggtctggggaaccaagaagcaaaggctgcagaaagtactaataaagaattgaacgaagcgacaacttcagcaagtgataatcaatcgagtgataaagttgatatgcagcaactaaatcaagaagacaatactaaaaatgataatcaaaaagaaatggtatcatctcaaggtaatgaaacgacttcaaatgggaataaattaatagaaaaagaaagtgtacaatctaccactggaaataaagttgaagtttcaactgccaaatcagatgagcaagcttcaccaaaatctacgaatgaagatttaaacactaaacaaactataagtaatcaagaagcgttacaacctgatttgcaagagaataaatcagtggtaaatgttcaaccaactaatgaggaaaacaaaaaggtagatgccaaaactgaatcaactacattaaatgttaaaagtgatgctatcaagagtaatgatgaaactcttgttgataacaatagtaattcaaataatgaaaataatgcagatatcattttgccaaaaagtacagcacctaaacgtttgaatacaagaatgcgtatagcagcagtacagccatcatcaacagaggctaaaaatgttaatgatttaatcacatcaaatacaacattaactgtcgttgatgcagataaaaacaataaaatcgtaccagcccaagattatttatcattaaaatcacaaattacagttgatgacaaagttaaatcaggtgattatttcacaattaaatactcagatacagtacaagtatatggattgaatccggaagatattaaaaatattggtgatattaaagatccaaataatggtgaaacaattgcgactgcaaaacatgatactgcaaataatttaattacatatacatttacagattatgttgatcgatttaattctgtacaaatgggaattaattattcaatttatatggatgctgatacaattcctgttagtaaaaacgatgttgagtttaatgttacgataggtaatactacaacaaaaacaactgctaacattcaatatccagattatgttgtaaatgagaaaaattcaattggatcagcgttcactgaaacagtttcacatgttggaaataaagaaaatccagggtactataaacaaacgatttatgtaaatccatcggaaaattctttaacaaatgccaaactaaaagttcaagcttaccactcaagttatcctaataatatcgggcaaataaataaagatgtaacagatataaaaatatatcaagttcctaaaggttatacattaaataaaggatacgatgtgaatactaaagagcttacagatgtaacaaatcaatacttgcagaaaattacatatggcgacaacaatagcgctgttattgattttggaaatgcagattctgcttatgttgtaatggttaatacaaaattccaatatacaaatagcgaaagcccaacacttgttcaaatggctactttatcttcaacaggtaataaatccgtttctactggcaatgctttaggatttactaataaccaaagtggcggagctggtcaagaagtatataaaattggtaactacgtatgggaagatactaataaaaacggtgttcaagaattaggagaaaaaggcgttggcaatgtaactgtaactgtatttgataataatacaaatacaaaagtaggagaagcagttactaaagaagatgggtcatacttgattccaaacttacctaatggagattaccgtgtagaattttcaaacttaccaaaaggttatgaagtaaccccttcaaaacaaggtaataacgaagaattagattcaaacggcttatcttcagttattacagttaatggcaaagataacttatctgcagacttaggtatttacaaacctaaatacaacttaggtgactatgtctgggaagatacaaataaaaatggtatccaagaccaagatgaaaaaggtatatctggcgtaacggtaacattaaaagatgaaaacggtaacgtgttaaaaacagttacaacagacgctgatggcaaatataaatttactgatttagataatggtaattataaagttgaatttactacaccagaaggctatacaccgactacagtaacatctggtagcgacattgaaaaagactctaatggtttaacaacaacaggtgttattaatggtgctgataacatgacattagatagtggattctacaaaacaccaaaatataatttaggtaattatgtatgggaagatacaaataaagatggtaagcaggattcaactgaaaaaggtatttcaggcgtaacagttacattgaaaaatgaaaacggtgaagttttacaaacaactaaaacagataaagatggtaaatatcaatttactggattagaaaatggaacttataaagttgaattcgaaacaccatcaggttacacaccaacacaagtaggttcaggaactgatgaaggtatagattcaaatggtacatcaacaacaggtgtcattaaagataaagataacgatactattgactctggtttctacaaaccgacttacaacttaggtgactatgtatgggaagatacaaataaaaacggtgttcaagataaagatgaaaagggcatttcaggtgtaacagttacgttaaaagatgaaaacgacaaagttttaaaaacagttacaacagatgaaaatggtaaatatcaattcactgatttaaacaatggaacttataaagttgaattcgagacaccatcaggttatacaccaacttcagtaacttctggaaatgatactgaaaaagattctaatggtttaacaacaacaggtgtcattaaagatgcagataacatgacattagacagtggtttctataaaacaccaaaatatagtttaggtgattatgtttggtacgacagtaataaagacggcaaacaagattcaactgaaaaaggtatcaaagatgttaaagttactttattaaatgaaaaaggcgaagtaattggaacaactaaaacagatgaaaatggtaaatactgctttgataatttagatagcggtaaatacaaagttatttttgaaaagcctgctggcttaacacaaacaggtacaaatacaactgaagatgataaagatgcagatggtggcgaagttgacgtaacaattacggatcatgatgatttcacacttgataatggctactacgaagaagaaacatcagatagcgactcagattcggacagcgactcagattcagacagagactcagactcagatagtgattcagactcggatagcgattcagattcagacagcgattcagattcagatagcgattcagattcagacagagactcagatagtgattcagactcagatagcgactcagattcagacagcgactcagattcagacagcgactcagactcagatagtgattcagactcagatagcgactcagattcggatagcgactcagattcagacagcgactcagactcggatagtgattcagactcagatagcgactcagactcagatagcgattcagattcagatagcgactcagactcagacagcgattcagactcagacagcgactcagactcagatgcaggtaagcacacacctgttaaaccaatgagtactactaaagaccatcacaataaagcaaaagcattaccagaaacaggtaatgaaaatagcggctcaaataacgcaacgttatttggcggattattcgcagcattaggatcattattgttattcggtcgtcgtaaaaaacaaaataaataa

SEQ ID NO: 3918 - DNA, 1755 bp, Staphylococcus aureus
atgaaatttcatggatcccgagcaacaacattagcattaggcgttatagcatcaacaggagcaaactttaatactaacgaagcatctgccgcagctaagcaaatagataaatcatcaagttcattacaccatggatattctaaaatacagattccatatacaatcactgtgaatggtacaagccaaaacattttatcaagcttaacatttaataagaatcaacaaattagttataaagatatagagaataaagttaaatcagttttatactttaatagaggtattagtgatatcgatttaagactttctaagcaagcaaaatacacggttcattttaagaatggaacaaaaagagttgtcgatttgaaagcaggcattcacacagctgacttaatcaatacaagtgacattaaagcaattagtgttaacgtagatactaaaaagcaagtgaaagataaagaggcaaaagcaaatgttcaagtgccgtatacaatcactgtgaatggtacaagccaaaacattttatcaaacttaacatttaaaaagatcagcaaattagttataaagattttagagaataatgtaaaatcagttttaaaatcaaacagaggtataactgatgtagatttaagactttcaaaacaagcgaaatttacagttaattttaaaaatggcacgaaaaaagttatcgatttgaaagcaggcatttatacagcgaacttaatcaatacaggcgatattaaaaatatcaatataaatgtagaaactaaaaagcaagcgaaagataaagaagcaaaagtaaataatcaagtgccatattcaattaatttaaatggtacaacaactaatattcaatctaatttagcattttcaaataaaccttggacaaattacaaaaatttaacaacaaaggtaaaatcagtattgaaatctgacagaggcgttagtgaacgtgatttgaaacacgcaaagaaagcgtattacactgtttactttaaaaatggtggtaaaagagtgatacatttaaactcgaatatttatacagctaacttagttcatgcgaaagatgttaagagaattgaagttactgtaaaaacagtttcgaaagtaaaagcggagcgttatgtaccatatacaattgcagtaaatggagcatcaaatccaactttatcagatttaaaatttacaggtgactcacgtgtaagctacagtgatatcacgaaaaaagttaaatcagtattgaaacatgatagaggtatcaatgatattgaattgaaatttgcgaaacaagcaaagtatactatacactttaaaaatggaaagacacaagtcgttgaccttaaatcagatatctttacaagaaatttattcagtgtcaaagatattaaaaagattgatattaatgtgaaacaacacactaaatctaataaagcgcttaataaagtgactaacaaagcgactaaagtgaagtttccagtaacgataaatggattttcaaatttagtttcaaatgaatttgcgtttttacatccacataaaataacaacaaacgacttgaatgctaaacttagactagcgttagcaagcgatcaaggtattactaaacatgatattggactttctgaacgcactgtgtataaagtgtattttaaagacgggtcatcaaaatttgttgacttaaaagctgcgaaacaagattcaaaagtatttaaagcaactgacattaaaaaagtagacattgaaattaaattttaa

SEQ ID NO: 3919 - DNA, 639 bp, Staphylococcus aureus
gccgagactaaaaattttacagacttagttgaagctactaaatggggaaactcattaataaagtcagccaagtattcttctaaagataagatggctatttataattatacaaaaaatagttcacccataaatactcctctaagatcagcaaatggtgacgtgaacaaattatccgaaaacattcaagagcaggttagacaattagactcaacgatatctaaatctgtaacaccagattcagtctatgtatacagattattaaatttagactacttatcaagtataactggctttacgcgagaagatttacatatgttacaacaaactaacaatggtcaatataatgaagcgcttgtgtcaaaactaaataatcttatgaatagtagaatttacagagaaaatggctactctagtacacaactagttagtggtgcagcactagcaggtaggccaattgaattaaaattagaattacctaaaggtactaaagcagcatatattgattctaaagagttaacagcatacccaggtcaacaagaagttcttttgcctagagggacagaatatgctgtaggcagtgttaaactttctgataacaaaagaaagataattataactgctgtagtttttaaaaaataa

SEQ ID NO: 3920 - DNA, 114 bp, Staphylococcus aureus
ttggttaaacgaaaaagacacaatatcttgtgttttgtatgcaaatgctttatttatgaagaaattacatttaaaagtaatttaacacagaaatttaatagttattatcaatga

SEQ ID NO: 3921 - DNA, 1405 bp, Staphylococcus aureus
acaaaggattatagtgggaaatcacaagttaatgctgggagtaaaaatgggaaacaaattgcagatggatattattggggaataattgaaaatctagagaaccagttttacaatatttttcatttattggatcagcataaatatgcagaaaaagaatataaagatgcattagataaattaaaaactagagttttagaggaagaccaatacctgctagaaagaaaaaaagaaaaatacgaaatttataaagaactatataaaaaatacaaaaaagagaatcctaatactcaggttaaaatgaaagcatttgataaatacgatcttggcgatttaactatggaagaatacaatgacttatcaaaattattaacaaaagcattggataactttaagttagaagtaaagaaaattgaatcagagaatccagatttaagaccatattctgaaagtgaagagagaacagcatatggtaaaatagattcacttgttgatcaagcatatagtgtatattttgcctacgttacagatgctcaacataaaacagaagcattaaatcttagggcaaaaatagatttgattttaggtgatgaaaaagatccaattagagtgacgaatcaacgtactgaaaaagaaatgattaaagatttagaatctattattgatgatttcttcattgaaacaaagttgaatagacctcaacacattactagatatgatggaactaaacatgattaccataaacataaagatggatttgatgctttagttaaagaaacaagagaagcggtttctaaggctgacgaatcttggaaaactaaaactgtcaaaaaatacggggaaactgaaacaaaatatcctgttgtaaaagaagagaagaaagttgaagaacctcaatcacctaaagtttctgaaaaagtggatgttcaggaaacggttggtacaactgaagaagcaccattaccaattgcgcaaccactagttaaattaccacaaattgggactcaaggcgaaattgtaaaaggtcccgactatccaactatggaaaataaaacgttacaaggtgtaattgttcaaggtccagatttcccaacaatggaacaaaacagaccatctttaagtgacaattatacacaaccatctgtgactttaccgtcaattacaggtgaaagtacaccaacgaaccctattttaaaaggtattgaaggaaactcatctaaacttgaaataaaaccacaaggtactgaatcaacgttgaaaggtattcaaggagaatcaagtgatattgaagttaaacctcaagcaactgaaacaacagaagcatcacattatccagcgagaccgcaatttaacaaaacacctaaatatgtgaaatatagagatgctggtacaggtattcgtgaataca

SEQ ID NO: 3922 - DNA, 1431 bp, Staphylococcus aureus
acaaaggattatagcaaagagtcaagagtgaaagaagatagtaaatatgatacaccaatttcagacacttattactggggagtaataaaaaatctagagtcacaatttgctgaagcaattgatttattagaggattatcaatatggagaaaaagaatataaagatgccaaagacaaactgatgactaggattttaggtgaagatcaatatttattgaagaaaaaaatcgatgagtatgaagtatacaaaaaaatgtataaaaagtttaaagaaaaaaatcctgatgacaattcgaaaatgagttctttctataattataatttatataattttactatgaaagaatataatgatataagactttctttaaaagaagcgatagatcagtttcgtaaagatgtagatgatatacagtcgaaaaagttagagttaaaaacatacagtaaagaagcagaagaaaaagctacagatgaagtttatagtcttgtctgtgaagttgacacactttttgcatcatactatggtcatgacaaatatgatcaaaatgctaaggatttacgtgctaaattagatttgatacttggtgataaagagaatccatataaaattacaaatgaacgtattaaaaaagatatgatggatgatttaaattctattattgatgatttctttatggaaactgatcaaaatagaccatcaaacataactaaatttaatccagatatacatgattataaagagcatagagaaggctttgatgctctagtcaaagaaacaagagaagcagtcgcaaaggctgacgaatcttggaaaaataaaactgtcaaaaaatacggggaaactgaaacaaaatctccagttgtaaaagaagagaagaaagttgaagaacctcaagcacctaaagtttctgaaaaagtaggtgttcaggaaacagttggtacaactgaagaagcaccattaccaattgcgcaaccactagttaagattccagaaggtacaattcaaggtgtaactgcagaaggaccaaaatacccaacgatggaacagcacacaatctatggtgaaactgtaaaaggtccggaatatccaactatggaaaataaaacgttacaaggtgaaatcgttcaaggtccaggttttctaacaatggaacaaagcggcccatcattaagtaataattatacaaacccaccgttaacgaaccctattttaaaaggtattgaaggtagctcatctaaacttgaaataaaaccacaaggtactgaatcaacgttgaaaggtattcaaggagaatcaagtgatattgaggttaaacctcaagcatctgaaacaacagaagcatcacattatccagcgagaccgcaatttaacaaaacaccaaagtatgtgaaatatagagatgctggtacaggtattcgtgaatacaacgat

SEQ ID NO: 3923 - DNA, 1365 bp, Staphylococcus aureus
acaaaggattataatgggaaatcacaagttaaaaaagagagtaaaaatgggacattaatagatagcagatattattgggaaaaaatagaagctctagaaaagcagttttcaagtgcattggcattaacagatgagtatcaatatggtggtaatgaatataaagaggcaaaagataaattaatggaaaggatattaggagaagatcaatatttattaaagaaaaaaatagatgaatacgattattataaaaaatggtataaagcaacttacccaaacgataattcaaaaatgtattcatttcataagtataatgtttactatttaacaatgaatgaatataatgaaatctcaaattcattaaaagacgctgtggaaaaatttaataatgaagtaagagatattcaatctaaaaatgaagacttaaagccttatgacgaaaatactgaaaaacaagaaactgataaaatatatgaatttgttagtgaaatagatacagtttttgcagcgtattatagtcatgaaaaatttggtatacatgctaaagaattacgagcaaaattagacataatactaggtgacgtgcataacccgaatagaatcactaatgaacgtataaaaaaagaaatgatggaagacttaaattcaatagtcgatgatttctttatggaaacaaatcagaatagacctacaacaataaagaaatatgaccccaatattcatgattatacaaagaaaaaagagaataaagaaaattttgataagttagttaaagaaacaagagaagcagttgaaaaagcagacgaatcttggaaaaataaaactgtcaaaaaatacgaggaaactgtaacaaaatctccttttgtaaaagaagagaagaaagttgaagaacctcaattacctaaagttgggaaccagcaagaggttaaaactacggctggtaaagctgaagaaacaacacaaccattagttaaaattccacagggcacaattacaggtgaaattgtaaaaggtccagactatccaactatggaaaataaaacgttacaaggtgaaatcgttcaaggtccagatttcccaacaatggaacaaaacagaccatctttaagcgataattatactcaaccgacgacaacgaaccctattttagaaggtcttgaaggtagctcatctaaacttgaaataaaaccacaaggtactgaatcaacgttacaaggtactcaaggagaatcaagtgatattgaagttaaacctcaagcaactgaaacaacagaagcttctcaatatggtccgagaccgcaatttaacaaaacacctaaatatgttaaatatagagatgctggtacaggtatccgtgaatacaacgat

SEQ ID NO: 3924 - DNA, 1470 bp, Staphylococcus aureus
acaaaggattataatgggaaatcacaagttaaaaaagagagtaaaaatgggacattaatagatagcagatattattgggaaaaaatagaagctctagaaaagcagttttcaagtgcattggcattaacagatgagtatcaatatggtggtaatgaatataaagaggcaaaagataaattaatggaaaggatattaggagaagatcaatatttattaaagaaaaaaatagatgaatacgattattataaaaaatggtataaagcaacttacccaaacgataattcaaaaatgtattcatttcataagtataatgtttactatttaacaatgaatgaatataatgaaatctcaaattcattaaaagacgctgtggaaaaatttaataatgaagtaagagatattcaatctaaaaatgaagacttaaagccttatgacgaaaatactgaaaaacaagaaactgataaaatatatgaatttgttagtgaaatagatacagtttttgcagcgtattatagtcatgaaaaatttggtatacatgctaaagaattacgagcaaaattagacataatactaggtgacgtgcataacccgaatagaatcactaatgaacgtataaaaaaagaaatgatggaagacttaaattcaatagtcgatgatttctttatggaaacaaatcagaatagacctacaacaataaagaaatatgaccccaatattcatgattatacaaagaaaaaagagaataaagaaaattttgataagttagttaaagaaacaagagaagcggttgcaaatgcagatgcatcttggaaaaagaaaactgtcaaaaaatacggagaaactgaaacaaaatcgccagtagtaaaagaagagaagaaagttgaagaacctcaagcacctcaagcacctaaagttgataaccaacaagaggttaaaactacggctggtaaagctgaagaaacaacacaaccagttgcacaacctctagttaagattccagaaggtacaattcaaggtgtaactgtagaagggccaaaatacccaacgatggaacagcacacaatctatggtgaaattgtaaaaggtccggaatatccaacgatggaaaataaaacgttacaaggtgaaatcgttcaaggtccagattttctaacaatggaacaaaacagaccatctttaagtgacaattatacacaaccatctgtgactttaccgtcaattacaggtgaaagtacaccaacgaaccctattttagaaggtcttgaaggtagctcatctaaacttgaaataaaaccacaaggtactgaatcaacgttgaaaggtactcaaggagaatcaagtgatattgaagttaaacctcaagcaactgaaacaacagaagcttctcaatatggtccgagaccgcaatttaacaaaacaccaaagtatgtgaaatatagagatgctggtacaggtatccgtgaatacaac

SEQ ID NO: 3925 - DNA, 1410 bp, Staphylococcus aureus
acaaaggattatagtaaagaatcaagagtgaatgagaacagtaaatatgattcgccaatgtcaaattggtattattggggaaaggttaaatccttggagtcacaatttgcagatgcaatagatattatagaagattatcaatatggtgaaaaagaatataaagatgcaaaagataaactaatgactagaatactaggtgaggaccaatacttattaaagaaaaaaatagaagaatataaacaatatagagaaagatatttaaaagctggattaagtcctgtgaaattttatgattacaatctttatgattttacaatgaaagaatataatgatatccatcagtctttaaaagatgcagtagaagagttctatcaagaagttaaacatattcaatcaaagaattcggatttacaaacttatgataagaaaactgaagataaagaaactgataatgtatactctttagttagtgaaattgatactattgttgcaacatattatggagataaaaatcatggagagcatgctaaagagttgagagctaagctagatattattcttggagaagaaaaaaagccaaatagaataactaatgaacgtattagaaaagaaatgactgatgatttgaattctattatcgatgacttctttatggaaactgggcaaaacagaccggttaaaatcactaaatataatccaaatattcatagccctaaagataacaaagaaagcttcgataaattagttgaagaaacgaaaaaagcagttaaagaagcagatgagtcttggaaaactaaaactgtcaaaacatacggtgaaactgaaacaaaagcacatgttgtaaaagaagagaagaaagttgaagaacctcaattacctaaagttggaaaccagcaagaggataaaactacagttggtacaactgaaaaagcaccattaccaattgcgcaaccactagttaaattaccacaaattgggactcaaggtaaaattgtagaagggtcaaaatacccaacgatggaacagcacacaatctatggtgaaattgtaaaaggtcccgactatctaacgatggaaaataaaacgttacaaggtgaaatcgttcaaggtccagatttcccaacaatggaacaaaacagaccagcactaagcgataattatacaaacccaacgttaacgaaccctattttaaaaggtattgaaggaaactcaactaatcttgaaataaaaccacaaggtactgaatcaacgttgaaaggtattcaaggagaatcaagtgatattgaagttaaacctcaagcaactgaaacaacagaagcatcacattatccagcgagaccgcaatttaacaaaacacctaagtatgtgaaatatagagatgctggtacaggtatccgtgaatacaacgat

SEQ ID NO: 3926 - DNA, 1383 bp, Staphylococcus aureus
acaaaggattatagtgggaaatcacaagttaatgctgggagtaaaaatgggacaccgatttctaatggttacttttgggggaaaatcgatagtctagaatcacaattttctaaagcattagcaataattgaagagtatcaatatggtgagaaagaatataaagatgcaaaagataagtttatggatagaattttgtcagaagatcaatatcttttggagaaaaagaaagctctgtatgagaaatataaagagtggtataaaaagcacaaagagataaacccaacttatccaaaaatgcaaacattccatgaatttagtgtatataatctaactatggaagaatacaatgagatttctaaatctttgaaagatgcggaagaagagtttcgtaaaaatgtaagagaagttcaagagaaagaagtcaaattaaaaacatatagcgaagatgaagaagaaaaggcaactaaagaagtatacgatcttgtagccgaagttgatactatatatgtatcttattttggacatgataaacatggtcaaagtgctaaagaattgcgtgcgaaattagatttaataattggagaggaaaaaaacgcctttcgtattactaatgaacgtataaaaaatgaaatgatttatgacttaaattctattattgacgatttctttatggaaactaaccaaaatagaccggaaaatataacaaaatttgattgggataagcatgattatagaaataaaccagaaaacaaagcaaattttgaggctctagttaaagaaactaaaggtgcggtcgataaggcagatgattcttggaaaactaaaactgtcaaaaattacggtgaatctgaaacaaaatcgccagtagtaaaagaagagaagaaagttgaagaacctcaagcacctaaagttgataaccaacaagaagttaaaactactgctggtaaagctgaagaaacaacacaaccagtggcacagccattagtaaaaattccacaaggaacaatctatggtgaaactgtaaaaggtccagactatccaactatggaaaataaaacgttacaaggtgtaattgttcaaggtccagatttcccaacaatggaacaaagcggcccatcattaagcaataattatacaaacccaccgttaacgaaccctattttagaaggtcttgaaggtagctcatctaaacttgaaataaaaccacaaggtactgaatcaacgttaaaaggtactcaaggagaatcaagtgatattgaagttaaacctcaagcatctgaaacaacagaagcatcacattatccagcgagacctcaatttaacaaaacacctaaatatgttaaatatagagatgctggtacaggtatccgtgaatacaacgat

SEQ ID NO: 3927 - DNA, 1467 bp, Staphylococcus aureus
acaaaggattatagtaaagaatcaagagtgaatgagaacagtaaaaagggagctactgtttcagattattactattggaaaataattgatagtttagaggcacaatttactggagcaatagacttattggaagattataaatatggagatcctatctataaagaagcgaaagatagattgatgacaagagtattaggagaagaccagtatttattaaagaaaaagattgatgaatatgagctttataaaaagtggtataaaagttcaaataagaacactaatatgcttactttccataaatataatctttacaatttaacaatgaatgaatataacgatatttttaactctttgaaagatgcagtttatcaatttaataaagaagttaaagaaatagagcataaaaatgttgacttgaagcagtttgataaagatggagaagacaaggcaactaaagaagtttatgaccttgtttctgaaattgatacattagttgtaacttattatgctgataaggattatggggagcatgcgaaagagttacgagcaaaactggacttaatccttggagatacagacaatccacataaaattacaaatgagcgtataaaaaaagaaatgatcgatgacttaaattcaattatagatgatttctttatggagactaaacaaaatagaccgaattctataacaaaatatgatccaacaaaacacaattttaaagagaagagtgaaaataaacctaattttgataaattagttgaagaaacaaaaaaagcagttaaagaagcagacgaatcttggaaaaataaaactgtcaaaaaatacgaggaaactgtaacaaaatctcctgttgtaaaagaagagaagaaagttgaagaacctcaagcacctcaagcacctaaagttgataaccaacaagaggttaaaactacggctggtaaagctgaagaaacaacacaaccagttgcacaacctctagttaagattccagaaggtacaattcaaggtgtaactgtagaagggccaaaatacccaacgatggaacagcacacaatctatggtgaaattgtaaaaggtccggaatatccaacgatggaaaataaaacgttacaaggtgaaatcgttcaaggtccagattttctaacaatggaacaaaacagaccatctttaagtgacaattatacacaaccatctgtgactttaccgtcaattacaggtgaaagtacaccaacgaaccctattttagaaggtcttgaaggtagctcatctaaacttgaaataaaaccacaaggtactgaatcaacgttgaaaggtactcaaggagaatcaagtgatattgaagttaaacctcaagcaactgaaacaacagaagcttcgcaatatggtccgagaccgcaatttaacaaaacaccaaagtatgtgaaatatagagatgctggtacaggtatccgtgaatacaacgat

SEQ ID NO: 3928 - DNA, 1431 bp, Staphylococcus aureus
acaaaggattataatgggaaatcacaagttaaaaaagagagtaaaaatggagcgcttatagatagcagatattattgggagaaaatagaagctttagaaaagcagttctcaagtgcattggcattaacagatgagtatcaatatggtggaaatgaatataaagatgcaaaagataaattaatggaaaggatattaggggaagaccaatatttattaaagaaaaagattgatgaatatgactattataaaaaatggtataaagcaacgtaccctaacgataattcgaaaatgtattcatttcataagtacaatgtttattatttaacaatgaatgaatataatgaaatttccaattcattaaaagacgctgtggaaaaatttaagaatgaagtaagtgatattcaatctaaaaatgaagacttaaagccttatgacgaaaatactgaaaaacaagtaactgataaaatatatgaatttgttagtgaaatagatacaatttttgcagcgtattatggacatgaaaaatttggtatacatgctaaagaactacgagcaaaattagatataatactaggtgatgcgcaaaacccgaatagaataactaatgaacgtattaaaaaagaaatgatggaagacttaaattcaattgttgatgatttctttgtggaaacaaaccagaatagaccttcaactataaagaaatatgaccctaatattcatgattatacaaagaaaaaagagaacaaagaaaacttcgatgctctagtcaaagaaacaagagatgctgttgctaaggctgacgaatcttggaaaactaaaactgtcaaaaaatacggggaaactgtaacaaaatctcctgttgtaaaagaagagaagaaagttgaagaacctcaattacctaaagttggtaaccaacaagaggttaaaactacggctggtaaagctgaagaaacaatacaaccagttgcacaacctctagttaagattccagaaggtacaattcaaggtgtaactgtagaaggaccaaaatactcaacgatggaacagcacacaatctatggtgaaactgtaaaaggtccggaatatccaacgatggaaaataaaacgttacaaggtgaaatcgttcaaggtccagatttcccaacaatggaacaaagcggcccatcattaagcaataattatacaaacccaccgttaacgaaccctattttagaaggtcttgaaggtagctcatctaaacttgaaataaaaccacaaggtactgaatcaacgttgaaaggtattcaaggagaatcaagtgatattgaagttaaacctcaagcaactgaaacaacagaagcttctcaatatggtccgagaccgcaatttaacaaaacacctaaatatgtgaaatatagagatgctggtacaggtattcgtgaatacaacgat

SEQ ID NO: 3929 - DNA, 1377 bp, Staphylococcus aureus
acaaaggattatagtgggaaatcacaagttaatgctgggagtaaaaatgggaaacaaattgcagatggatattattggggaataattgaaaatctagagaaccagttttacaatatttttcatttattggatcagcataaatatgcagaaaaagaatataaagatgcagtagataaattaaaaactagagttttagaggaagaccaatacctgctagaaagaaaaaaagaaaaatacgaaatttataaagaactatataaaaaatacaaaaaagagaatcctaatactcaagttaaaatgaaagcatttgataaatacgatcttggcgatttaactatggaagaatataatgacttatcaaaattattaacaaaagcattggataactttaagttagaagtaaagaaaattgaatcagagaatccagatttaagaccatattctgaaagagaagaaagaacagcatatggtaaaatagattcacttgttgatcaagcatatagtgtatattttgcctacgttacagatgctccacataaaacagaagcattaaatcttagggcaaaaattgatttgattttaggtgatgaaaaagatccaattagagtgacgaatcaacgtactgaaaaagaaatgattaaagatttagaatctattattgatgatttcttcattgaaacaaagttgaatagacctcaacacattactaggtatgatggaactaaacatgattaccataaacataaagatggatttgatgctctagttaaagaaacaagagaagcggtttctaaggctgacgaatcttggaaaactaaaactgtcaaaaaatacggggaaactgtaacaaaatctcctgttgtaaaagaagagaagaaagttgaagaacctcaagcacctaaagtttctgaaaaagtagatgttcaggaaacagttggtacaactgaagaagcaccattaccaattgcgcaaccactagttaaattaccacaaattgggactcaaggtgaaattgtaaaaggtcccgactatccaacgatggaaaataaaacgttacaaggtgaaatcgttcaaggtcctgatttcccaacaatggaacaaaacagaccatctttaagcgataattatactcaaccatcgttaacgaaccctattttagaaggtcttgaaggtagctcatctaaacttgaaataaaaccacaaggtactgaatcaacgttgaaaggtattcaaggagaatcaagtgatattgaagttaaacctcaagcaactgaaacaacagaagcttctcaatatggtccgagaccgcaatttaacaaaacacctaagtatgtgaaatatagagatgctggtacaggtatccgtgaatacaacgat

SEQ ID NO: 3930 - DNA, 1359 bp, Staphylococcus aureus
acaaaggattatagcgggaaatcacaagttaatgctgggagtaaaaatgggacaccgatttctaatggttacttttgggggaaaatcgatagtctagaatcacaattttctaaagcattagcaataattgaagagtatcaatatggtgagaaagaatataaagatgcaaaagataagtttatggatagaattttgtcagaagatcaatatcttttggagaaaaagaaagctctgtatgagaaatataaagagtggtataaaaagcacaaagagataaacccaacttatccaaaaatgcaaacattccatgaatttagtgtatataatctaactatggaagaatacaatgagatttctaaatctttgaaagatgcggaagaagagtttcgtaaaaatgtaagcgaagttcaagagaaagaagtcaaattaaaaacatatagcgaagatgaagaagaaaaggcaactaaagaagtatacgatcttgtagccgaagttgatactatatatgtatcttattttggacatgataaacatggtcaaagtgctaaagaattgcgtgcgaaattagatttaataattggagaggaaaaaaacgcctttcgtattactaatgaacgtataaaaaatgaaatgatttatgacttgaattctattattgacgatttctttatggaaactaaccaaaatagaccggaaaatataacaaaatttgattgggataagcatgattatagaaataaactagaaaacaaagcacattttgaggctctagttgaagaaacgaaaaaagcagttaaagaagcagatgcatcttggaaaaagaaaactgtcaaaaattacgatgaatctgtaacaaaagcacatgttgtaaaagaagagaagaaagttgaagaacctcaatcacctaaagttgataaccaacaagatgacaaagcaacacaaccagtggcacagccattagtaaaaattccacaagggacaatctatggtgaaactgtaaaaggtccggaatatccaacgatggaaaataaaacgttacaaggtgaaatcgttcaaggtcctgatttcccaacaatggaacaaaacagaccatcattaagcgataattatactcaaccatcgttaacgaaccctattttagaaggtcttgaaggtagctcatctaaacttgaaataaaaccacaaggtactgaatcaacgttgaaaggtattcaaggagaatcaagtgatattgaagttaaacctcaagcaactgaaacaacagaagcttctcaatatggtccgagaccgcaatttaacaaaacacctaagtatgtgaaatatagagatgctggtacaggtatccgtgaatacaacgat

SEQ ID NO: 3931 - DNA, 1386 bp, Staphylococcus aureus
acaaaggattatagcaaagagtcaagagtgaatgagaacagtaaatatgattcgccaatttcagactggtatttaagtagtgttttgaataggttaggggatcaaatttactacgctaaggaattaactaataaatatgaatatggtgagaaagagtataagaaagcaatagataaattgatgactagagttttgggagaagatcaatatctattagaaaaaaagaaagcacaatatgaagtatacaaaaaatggtttgaaaagcataaaagtgaaaatccaaattctgatttaaaaatgactaaattccatgactttgatatatatagactaagtatgaaagaatacaatgagatacatcaatctataaaagaagctgttgacgattttaatagtgaagtaaaagaaattcaatataaagaaaaagatttagtaccatacaatgaagaaactgaaaagcgtgtaactaacggtatatatgactttgtttgtgagatagatacactatacgcagcatatttcaatcataatcaatatggtcataatgcgaaagagttaagagcgaagttagatattattcttggtgatgtaaaagatcctattagaattacaaatgaaagaataagaaaagaaatgatggatgacttaaattcgattattgatgatttctttatggatacaaatatgaatagaccattaaatataagtaaatataatcctgatattcatgattataccaacaagcctgaaaatagagctaacttcgataaattagttaaagaaacaagagaagcggtcgataaggcagatgattcttggaaaactaaaactgtcaaaaaatacggggaaactgtaacaaaatctcctgttgtaaaagaagagaagaaagttgaagaccctcaatcacctaaatttgataaccaacaagaggttaaaactacggctggtaaagctgaagaaacaacacaaccagttgcacaaccattagttaaaattccacagggcacaattacaggtgaaattgtaaaaggtcccgactatctaacgatggaaaataaaacgttacaaggtgaaatcgttcaaggtcctgatttcccaacaatggaacataacagaccatcactaagcaataattatacacacccaccgttagcgaaccctattttaaaaggtattgaaggtagctcatctaaacttgaaataaaaccacaaggtactgaatcaacgttgaaaggtattcaaggagaatcaagtgatattgaagttaaacctcaagcaactgaaacaacagaagcttctcaatatggtccgagaccgcaatttaacaaaacaccaaagtatgtgaaatatagagatgctggtacaggtattcgtgaatacaacgat

SEQ ID NO: 3932 - DNA, 1383 bp, Staphylococcus aureus
acaaaggattataatgggaaatcacaagttaatgctgggagtaaaaatgggacaccgatttctaatggttacttttgggggaaaatcgatagtctagaatcacaattttctaaagcattagcaataattgaagagtatcaatatggtgagaaagaatataaagatgcaaaagataagtttatggatagaattttgtcagaagatcaatatcttttggagaaaaagaaagctctgtatgagaaatataaagagtggtataaaaagcacaaagagataaacccaacttatccaaaaatgcaaacattccatgaatttagtgtatataatctaactatggaagaatacaatgagatttctaaatctttgaaagatgcggaagaagagtttcgtaaaaatgtaagcgaagttcaactacaaaattctgatttgaagtcttttgacaaaactagagaaactaaggctacagatgatatatacgattttgtttgtgaaatagacacacttgtagctacgtattatggcgaccagaattatagagaaaatgcgaaagaacttagaatgaaaatggatttaatacttggagattctgataaccctaaccgaattacgaatgaaagaattaaaaatgaaatgatgaaagatttaaattcaatcattgatgatttctttatagatactaatcaaaacagacctacaacgataaagaaatacgatcctagaattcatgactttactaagaaaaaagagaataaaagtaacttcgatgctttagttaaagaaactaaagatgcggttgctaaggctgataattcttggaaaactaaaactgtcaaaacatatggtgaagctgaaacaaaagcacatgttgtaaaagaagagaagaaagttgaagaacctcaattacctaaagttggaaaccagcaagaggataaaactacagttgataaagctgaagaaacaacacaaccagtggcacagccattagttaaaattccacagggcacaattacaggtgaaattgtaaaaggtccagactatccaactatggaaaataaaacgttacaaggtgaaatcgttcaaggtccagatttcccaacaatggaacaaagcggcccatcattaagcaataattatacaaacccaccgttaacggaccctattttagaaggtcttgaaggtagctcatctaaacttgaaataaaaccacaaggtactgaatcaacgttgaaaggtactcaaggagaatcaagtgatattgaagttaaacctcaagcaactgaaacaacagaagcttcaaaatatggtccgagaccgcaatttaacaaaacacctaagtatgtgaaatatagagatgctggtacaggtatccgtgaatacaacgat

SEQ ID NO: 3933 - DNA, 186 bp, Staphylococcus aureus
atgctgaacttaaaagaattgagagaagaaaaggggataacacgctatcaactagcgaagctaacggaattacaaaactcgacaattcgatctatcgaaacagaggttaaaaaccccggtttcctcacagtaaaaaaaatatgcgatgcactacaagttgatatcgctaatgtaaaggagaaataa

SEQ ID NO: 3934 - DNA, 753 bp, Staphylococcus aureus
atgcaagcattacaaacaaaatcgagcatcggagaaatgttcaatattcaagaaaaagaaaatggagaaatcgcaatcagcggtcgagaacttcatcaagcattagaagttaagacggcatataaagattggtttccaagaatgcttaaatacggatttgaagaaaatacagattacacagctatcgctcaaaaaagagcaacagctcaaggcaatatgactcactatattgaccacgcactcacactagacactgcaaaagaaatcgcaatgattcaacgtagtgaacccggtaaacgtgcaagacaatatttcatccaagttgaaaaagcatggaacagcccagaaatgattatgcaacgtgctttaaaaattgctaacaacacaatcaatcaattagaaacaaagattgaacgtgacaaaccaaaaattgtatttgcagatgcagtagctactactaagacatcaattttagttggagagttagcaaagatcattaaacaaaacggtataaacatcgggcaacgcagattgtttgagtggttacgtcaaaacggattccttattaaacgcaagggtgtggattataacatgcctacacagtactcaatggaacgtgagttattcgaaattaaagaaacatcaattacacattcagacggtcacacatcaattagtaagacgccaaaagtaacaggcaaaggacaacaatactttgttaataagtttttaggtgaaactcaaactacttaa

SEQ ID NO: 3935 - DNA, 666 bp, Staphylococcus aureus
atgaataatataaatttcactcaacgacagttagatttaataaagaaaaatcaagctatcttatctaaattgcctgtcgaagcttacgctaaagccgcaaatactatgaataattcgtatgttatgaacgctctggaaattcaatcgaccgttaataatgttatgaatagcattagaattaaccaatctaaattatctgattgggcttcctatatgcatcaagtaactaagaatcatccaatgttcaaatctaatttattttctgaaaaaattcttgatgaattcataagttctaacagctttccggatgatgaagtccgcaaagttagcactcatttgagaaagtcttttgtcgatactgtcgatgtccctgttcttggtaaaaccgtcaattctgcccatccaatagatgacgtaaataccaaagaaagtgataagatattctataaatctatcaatcaatattttttggctccttcctcatcgtttgttcacgatgtttcattaactgttgctaaaagtgttgctgttaatatgtttgtcaggactgctaatgatgattacgtgaattacttcttttcaactgcggtaatagctgtatgctatgtcgcttcgtgtcttgctaatgcttttgatttaaagaataaaagaaaagattttaaatag

SEQ ID NO: 3936 - DNA, 162 bp, Staphylococcus aureus
atgagtaaaacttataaaagctacctattagcagtgctatgcttcacagtcttagcgattgtactcatgccgtttctatacttcaccacagcgtggtcaattgcaggattcgcaagcatagcgacattcatattttataaggaatacttttatgaagaataa

SEQ ID NO: 3937 - DNA, 321 bp, Staphylococcus aureus
atgaagatgaaggtaagtattttacggatttttcatttattaaaccttacaaaaagggcgatgatgttgttaacaaacctattccgaagacagataagcaaaaagctgaagaaaataacggggcacaacaacaaacatcaatgtctcaacaaagcaatccatttgaaagcagtggccaatttggatatgacgaccatgatttaccgttctaggacgtggtttaaatgcaatacattacaagataccagaaagacaatgacggtacttattccgtcgttgctactggtgttgaacttgaacaaagtcacattgacttactag

SEQ ID NO: 3938 - DNA, 372 bp, Staphylococcus aureus
atggaaaataaaaagtatcacactgacgcagctagacctaattttcaagttgtagatgataaatataaagaatctttacttaacaacattcgccagaataatggtaaaatgaaagaaaaaggtaactattctggaggtggtaagatgaatggaaaatatattaccaaagaagtatttgaacagtttgaaaagcgtatagacaataagttagattctttacctgacagaatggctgataaaatggatgctaaaataagcggtttagaagctaggcagacaaaatggtttgtaggaatagctataagtacagctattggtggtttaagtctgatagtaggagcagtaggattgatcgtcaacttatttatatag

SEQ ID NO: 3939 - DNA, 756 bp, Staphylococcus aureus
atgtataaggactattcttcgttagtacaatttcagttagacaaaattactaaagtgcctgatattaaagtaaatatacctactccagctctaaaactgactaacatcgagcatttaacaactcttagtcgtactataaatactttggagcgccaaattaaagttgctacaagcttttctaacagcccttaccttagaaaaaatattgagattgctcgtaaaatttcagagcgtagttccgttattcaaaatttacctaagttaaatatagagaagataaaaagcgcaaccgaattaaaacccattaatataaaaatccctgaattttcaaactcattattttctgaagaaacctctgactttgttaaaaaatctatagatgtagatagcaatactatagatacggctttcagccttttgcgttacgaatatatcaaaaacacgcttattaacgctaaatctatccgtcgaatcaaatgggaacctgtaacggccggattcggaaaacacatgacacaagtacagacctataatgttcaaagtgattctaataagaacaaagaaatccaagagttatcacacccgctttctgaattaataacattgttatttttagataatttatgtgaagatttaaagccttttataacttttcttgcaaatgaacttttaccttttatgccttccggaattagaaacaccatgttgttattcataatttttatagttgctcgtaataagttagacaaaggttaa

SEQ ID NO: 3940 - DNA, 528 bp, Staphylococcus aureus
atggcgggcataaaaacgaaagtgagaatagacggtaagatgatgatgcttattgatgcatctgataaatacgacatcaaagtatcgacactaattactaggtacgacagaggggcgagggggaaagacttaatacaaaatgtagtaaagcctaagaaagtaaaggttgacggcaaattgatgactgttagcgaaatggttaaaaagtacaacctaagcaaaggactacttaattacaggatagcaaaagggttaacgggcgatgcgcttattgcgccaccacaagaaaaccccccttctaaatacactgaatatgaaaatgagcagatgaaaaagaaaggactcacgcccgaaatagttagaaacagagttgcgaagggttgggagttgtcagaagcaattgatgcacctttcggcatgaagctaaacgactatagagaaatgaaacaaatggaaaagattaaacaagcgagactcgaacgtgaattggaaagagagcgaaagaaagaggctgagttgaatatgtga

SEQ ID NO: 3941 - DNA, 426 bp, Staphylococcus aureus
atgacaaatatagattggataatcacctctaatagagtattcaacaatccaagtaacaatttattaatcgatgagcctataacaagcatttcgctgtttaatgttcctagtcaatataccttcacaatatcttttggaatctcaaatatagatctaaatgatgtacaaactataaatcttagaattggaaatttagatacggaaaaagaaattgttaacgcacctttatatatagataaagcaaaggaaaacgaagtgaaaaacaaacgtgctaacggacttgtagattttgtttcaaccgttacattgaataatttccttttcgaagaaacaggtaatcattatataacaatgaagttgggcgaaagcactcagacttgttattttaacgtcatgttaaatcaggagttagaagatggaaaataa

SEQ ID NO: 3942 - DNA, 153 bp, Staphylococcus aureus
atggataaccgtgaacaaatagaacaatccgttataagtgctagtgcgtataacggcaatgacgacagatgtttccctatcaaaggattctacatcttaaacgacgacttaactatgacgttaatctggaaagatggggagttggtagtatga

SEQ ID NO: 3943 - DNA, 285 bp, Staphylococcus aureus
atgaactatgaaacagggttccaaataggcgtaatggaagctaggttgaagaagatgagaaaacaacgtgatgcgtacaagaagcaacgtgatgagcttatcgtggatataggtaagttaagagagcgtaacaaagagctggagaagaaagcgagcgcatgggataggtattgcaagagcgttgaaacagatttaataaacgaatttggcaaagatgatgaaagagttaagtttggaatggaattaaacaataaaatttttatggaggaagacactaatgaataa

SEQ ID NO: 3944 - DNA, 174 bp, Staphylococcus aureus
atgattaagcaaatactaagattattattcttactagcgatgtatgagttaggtaagtatgtaactgagcaagtatatattatgatgacggctaatgatgatgtagaggcgccgagtgacttcgcaaagttgagcgatcagtctgatttgatgagggcggaggtgtcagagtag

SEQ ID NO: 3945 - DNA, 402 bp, Staphylococcus aureus
atgtatagcaaagagtcaattgttaatatgataggcacacataaaatgaagtgtaatgtattagctgatgtaataccggaatatgatagcaattcaattgcacagtatggcatacaagcaacgttgccgaaaccacaaggggaaaactcaagtaaagttgaagatgttgttgtgaggcttgagagagcaaataaaaggtatgctcagatgttaaaagaggttgagtttataaatcaatcgcaacagagattgggacacgttgacttttgtttcttagagttattgaagaaaggttataacagggatgcgattatcaagaagatgcctaactctaaattaaacagaaacaacttcttagcacgccgtgatgagttggcagaaaagatttatctactacagtga

SEQ ID NO: 3946 - DNA, 372 bp, Staphylococcus aureus
atgcaagcgagcacggtagctaaaaataataaggttttaataaggtacgaagaacttcgtcaagaagtagctgagcaatcaaaatggacacgccaaaaggcttttgaagagtatgagtggctaaagaatacagcgaagaacgatattgaaatagagggagtgaagaaagcgacagctgatgcattcctcgctagtttggacggcatgaatagaatgacgttaggcaatgaagttctgactaataaaaagattgaaactgaaatcaagatgcttgagaaaaaaatcgatcaaatggataaatcagaaaataattcacaagaagcagaagttgctaaagcacttattaagttagcgggtgttaatgatgattaa

SEQ ID NO: 3947 - DNA, 1218 bp, Staphylococcus aureus
gtgttaatgatgattaatgaaatgttaaacccgaaacaacaagaagtctggaactgcttcataaacgataaacccaaagtattaatagcgagtggtgcgaagagggcaggtaaaacatatgtatttatcctgctttttttaatgcacatagctacttataaagacaaggggcttaacttcattatcggaggagcgacacaagcatctatcagacgtaacatactagatgatatggagttaatactaggtagagagttgacacttgataaatctaacgcagtcaaaatatttggtaataaagtgtatgtattcgacggacaaaactcggatgcatggaaaaaagcacgtggttttacttcagcaggtgcttttttaaacgaggggacagcattacacaatatgtttattaaagaggtattctcacgttgtagttacaaaggcgcgaggatattaattgataccaaccccgaaaacccgatgcatccagttaaaaaagattacattgataagagtggtcaacggttatcgaatggaagactaaatatcaaagcattccaatttactttgtttgacaatacatttttagatgaagaatatattgaatcgattatcgcaagtacaccaacaggaatgttcacagatcgtgatatttatggtaagtgggtttctgctgaaggtgttgtatataaagatttcaaagaaaaagttcattacatcaaagaagaagaatttaaaactaaacaaataaaaaggaaatatgcaggcgtcgactggggatatgagcattatggttctattatggttgtagcggaagactttgacggaaacaagtacgttattgaagaacacgcacacagacataaagagatagatgactgggtagctattgctaaaggagttataaaaaggcatggcgatattcttttttattgtgatacagctagacctgaacatattgaacgatttagaagagagaagataaaagcaagatatgctgacaaagccgttattgctggcattgaagttatttctaggttattcaagttaaataaaatattcattatcaaagaaaaagttagtttgtttaaagaagaaatatacaactacgtttggaaagataatgcagacgaaccagttaaattaaacgatgacacattagatgcgttaagatatgcagtttatacagctaataagccaagtggcacaggctttaattaa

SEQ ID NO: 3948 - DNA, 1452 bp, Staphylococcus aureus
gtggcacaggctttaattaaaggaggtaatattttgtaccctagccaaccaacacaaacagaaatatttgatgctattgtgaggactaacaataagccagaaacactagaagaaatgattgtcagatatataaaacaacatttggagaagttacctgaaatctcaataggtcaagaatattatgagcaacgccctgatattgttaaggaacccaagccggttgatgctacaggagcagttgacccattgaaaccagatgacagaatgattaccaacttccatgctaacctagtagatcaaaaagtttcttatattgtagggaagcctatcgcttttaaacatacagatgatgaagtagttaaacgtattgatgaagttttaggtaatagatttgatgataagttacacagtgtactaacaggagctagcaataaaggtattgaatggttgcatccttaccttgatgaagagggagaatttaagctatttagagtaccggcggaacaaggtattcctatatggactgataaagagcacgaagaattagaggcgtttatcaggatgtataaattggaaaatgaaactaaagttgaatactgggataaagtaactgttaattactacgtttatgaaaacggctcgcttattccggattactctaacaatttggagaattcaaaaacacattttagtacagggtcatggggtaagattccatttattccattcaaaaataacgatttagaaatatcagatatatttatgtataaaacattgattgatgcttataacaggcgattatccgatttatccaatacttttaaagattcaaacgaattaacgtatgtattaacgaactatgatgaccaagagttgccagaattcaaacggttactacgttattacggggcgataaaagtatcggataacgggggtgtcgacacaatacaggtagaagtaccagttgaaaacagtaaaaagtatttagatgagttatatcaaaaaataatgttgtttggtcaagcggttgactttagttctgacaaattcggttcggctccaagtggggttgcgttggagtttttatatactaacttaaacttgaaagcagataagttagcgcgcaaagctaaagttgctatacaggagttgctttggtttgtgtttgagcacttcgatatcaaaggagaacataaagatgtcgatattagtttcaactacaacaaagtagcgaacacagaattacaagtacaaacagctcaacaatctatgggaattgtaagccatgaaacagtattagaaaatcacccgtttgtcgaagatttgcaagcagaactcgaacgaatagaacaagaacaaatggagtacaacaagcaactgcctaatttagatgacggaggtgctgacggtgcccaacaacaagaaagatctaacaataaagaatcagaatga

SEQ ID NO: 3949 - DNA, 963 bp, Staphylococcus aureus
gtgcccaacaacaagaaagatctaacaataaagaatcagaatgatattgatgagtatatcgacagtctaatctctaaagctgagaagcctatagaacaactatttgccaatcgacttaaagaaataaaacaaatcatcgcagatatgtttgagaagtatcaaagtgatgatgtatatgttacatggactgaatttaataaatacaacaggctcaataaggagttaactcgtataggcacaatgttgactgatgactataggcaagtagctaagatgattcagaagtcgcaggaagacgcttatatagaaaagttccttatgagcctttatttatatgagacggcgagtcaaacatctatgcaatttgatgttcctagcaaagaagttatcacatcagctattgaacaacctattgagttcattcgattagtgccgacgttacagaagcatcgtgatgaagtactgaaaaagatacgcttacacatcacacaaggcattatgagcggagagggctactctaagatagcgaaagcaatccgtgatgatattggtatgtctaaagctcaatcgttgcgtgtagctcgtacagaagcgggtagagcgatgtctcaagctggacttgatagtgcattagtagctcaaaagaatggcttacagatgtataagtattggcatgccactaaagatacacgtacaagagacacacacaggcatctagacggtgctaagaagaaaatagacgaaccgttcaagtcgagtggttgcgttggacaagcgcccaagttattcgttggtgtgaatagtgcaaaggaaaatatcaactgtcgttgtaagcttatgtattacattgacgaagatgatttgcctagtacaacaagagtacgtaaagatgatggcacaaccgaagtaataccacaaatgacttatcgtgagtgggagaaatataaacgtaaaagaaagtag

SEQ ID NO: 3950 - DNA, 597 bp, Staphylococcus aureus
atggatttatacacgttgttaggacaatttaaagacggagaaatcgacaagcagaaagtaattgatgcgattgacgaatcgaaatcgggaatggtaccacgttcaagattgaacgacaagaataccgaaatcgaagagttaaaagaagagatttctaaacgtgatgaacaaattgtcaaattgcaagactctgttaaagatgatagcgagattcaaaaagaactcgaagaattaaagaatcaaaattcagagtgggagacaaagtataaagaaacacaacttaataacgcagttaagttagcggttgctaaagaagcaaatgacgctaacgacattctagcattcatcaataaagatgaactggaattagtagacgacggcactgtaaaaggtttagatgaagcgattaaaacacttaaagagtctaaaccttatttatttgcgtcgtctaagcctgtaggtaaaacaccacaaggcggaggtaatccagactcaggtgtaacgaaagaaaagtttgacaacatgagtgtcgctgaacgtaacgaattgtatttgaacgatcgtgagacattcgaaaaattagttaatcaaaattaa

SEQ ID NO: 3951 - DNA, 825 bp, Staphylococcus aureus
atggcacaaggacttactaaaacaagtaatcaaatcattccagaagtattagcgcctatgatgcaagcgcaactcgaaaagaaattgcgtttcgcttcatttgcagaagtagatagcacattacaaggacaaccgggagacactttgacattcccagcattcgtttatagcggagatgcacaagtagttgcagagggagaaaaaatcccaactgatatcttagaaactaaaaaacgtgaggctaaaattcgtaaaattgctaaaggtacatctatcacagatgaggctttattaagtggttacggagaccctcaaggcgaacaagtgcgtcaacacggtttagcacacgctaacaaagttgataatgacgtattagaggctttaatgggagctaaacttactgttaatgcggacatcactaaattaaacggcttacaatcagcaatcgacaaatttaacgatgaagacttagaaccaatggttttatttatcaatccacttgatgctggtaaattgcgtggagatgcatcaactaactttacacgcgcaactgaattaggagatgacatcatcgttaaaggtgcgtttggcgaagctctaggcgctatcattgtgcgttctaataagttagaagctggcacggctattttagctaaaaaaggtgcagttaaattaatcttgaaacgtgatttcttcttagaagtagctcgtgacgcatcaacaaaaacaactgcattatacagtgataagcactatgtagcttatttatatgatgaatctaaagcagtgaaaatcactaaaggttctggaagcttagaaatgtaa

SEQ ID NO: 3952 - DNA, 327 bp, Staphylococcus aureus
atgtataaagtaatcgaacgttttgaagatgcacaagacaacggacatgaatatcaagtgggggacatatacccacgtgatgggttagaagtatcagaagaacgattcactgaattatctacaacaaacaaccgccgtaatttaatcgctatcaaacttgttgaagacaagcaagtagaacagtctgaggcgaacgctgacgagcaaaaaagtttatctgatatgaaagtagcagaattaaaagaacttgctaaaaagcgtgaaattaaaggctatagtgatatgaaaaaagatgagcttatcaaagctttagagggtgttaagtaa

SEQ ID NO: 3953 - DNA, 315 bp, Staphylococcus aureus
atggacgcaaaagacgtcaaaatgattaatggactttcactcaatgattcgtctgacgatgaacagatcgaatatcttattgaagaatataaaagtgttgcagaagattattgtaatcagaagtttgatgacaaagaagtgccgtcgggtgttaagaagtttattgctgaatgtatcaagtttggtacaactggcaatatctcagcgcgcacgatgggcactgtgagttatacctatgtaaccgacatacctagtagtgcttatgcatatttattgccttatcgtaagttaagttggggcaagcgatatgtttaa

SEQ ID NO: 3954 - DNA, 336 bp, Staphylococcus aureus
atgtttaatccgtttgatgagtttccacacacaattgaaattggagaggttgaagtcgtaggaacacatcccaaagaatacgagcgttttaaaagtaacgaaacaattaaagggtttatggacacgcctacatcaagtgagacactcaaatttcatcagatgagcaaagatttcgaccgaaacctatatacgccgtaccacataccaataacaaacaaaactttatttaattacgagggtaaaacgtacgaagttgtaggcgaaccggtcgaccaaggcggacaacatgaaatcaatttaactagattgagggtgcgatctattggcaaaggttaa

SEQ ID NO: 3955 - DNA, 351 bp, Staphylococcus aureus
atggagcgatgggtcaaacgaggtatagcaaagacaactgctaagattcacaatacaatcatttcattaatgccagttgataccggatatcttagagaaagtgtaacaatggactttaaagacggcggttttactggagttattaacattggtagtgaatacgcaatatatgtcaattatggtactggtatatatgcaacaggtgctggaggtagtagagcgaaaaagataccgtggtcgtacaaagatgcgaacggtaagtggcacactactaaaggacaacatgctcaacctttttgggaaccggcaatagacgctggacgagcattctttaataagtatttttcatga

SEQ ID NO: 3956 - DNA, 438 bp, Staphylococcus aureus
atgtgggtatcagtcgaacggtacttatttaacaaagtatataacaaattaaaaagtaaccctattatccaaaaacaattgggtggtagggtttttgattgcgttcagaaagacgctgtttacccatatatcgttgtgggtgaaacaaacgtcactaacaaagaaacgaccacgagcatggtcgaagatgtcggcatcacgttgcatgtttatagtcaagcacgtaatagagatgaggcatcacaaataattcaatttttaggcttcgttttaaataacgaaatagaaattgattattattcattcattaaaagtcgaattgatacacaagaagtgattactgacatagatcagtacactaaacacggtatcattcggcttgtttttaaatacagacataacacattacaaaggagtgtaacgaatggcgcaggataa

SEQ ID NO: 3957 - DNA, 147 bp, Staphylococcus aureus
atgaatttaaaagaagttgacattaacattgaagagtgggaaatggttgaaatccccttttatacagaagaagaactgacttataggttgaataatggtttacctataactaaaagtgaacttgaagaacaggagtcgaaaaaatga

SEQ ID NO: 3958 - DNA, 561 bp, Staphylococcus aureus
atggcgcaggataaatatattgtcgctctccaaatcgctgataaggatttagctaagaagctaactatcgaagaagcaacgcttttaggtagtttagcagagggtggacacactatcagtaatgaccttgctgaaatcattcaaggcggtaagaaagattatagccgtaattctgtcgaagaagaaatcaagttgacgcttgatgtcgttccgggagataaaggtcaattagcattaaaagaatcagttaaacaattcaaacagttacgtgtttggatttgggaaactaaaaaacgcgatggcaaacatcacggtgtattcgcatatgtagttatcgaagagcacgaatggtcattcgatgatgaagataacaaaatcgaaatcacagcgaaagttaagttcaatagtgcagacggtacaatcaatgatttaccaaaagaatggcttaaccctagcgcattggctccagttgttgaattcgaagacatgaacgcttacgaagatagttatgaaaaccgaactaaaaaaacaactgctggcagtagcgatttaagtatgtaa

SEQ ID NO: 3959 - DNA, 495 bp, Staphylococcus aureus
atgactgaaacaacttttaatccaattacatcattaacaattaacaacgaagaagtgaaagcaaaagcaacatttatgttcgataaaaccgctaaaaagtttgcaactgaacaagaagataataaaggcagaaaacaaacgatttcaggatttactaatgtttacaatgctttattagaacgtgacacagtggcaattgtagacttttgggaatgtgcaacggcttatctaggtaaaagtgcacctaaaagagaagatattgaagcggaaatcatggaaatcatcgaaagagaaaacgacacgctaaatctattacagggtgcgttggacgtaatgaataatagcggttttttcaagcagaaatcacgtctattctggacacagatgaaccaagcaccatcgttagccaaagaagacgagaaagagggcgcgaaagctggtatcgagatgatgaagaacaactacaaagaaatcatgaccgtagcaccttattag

SEQ ID NO: 3960 - DNA, 342 bp, Staphylococcus aureus
atgacaagtcgttacataggttatatgagtaatgacgagctaatgagcatgctacctgccgaatggaatgactggattattggcgctagacaagcattgattgaccaaagagacattgcgttgtacggcgctcaatataatgcggttgctcaagctggtaaatcactaaaacgttttgttaggcagaacgaaagagaacattacattattcgtggtcaagaagatgaatacgaaagaatgaaacagcgtgagctagctaaaaacaaacgtaaaagagaaatacaaaaacaagggactcgcaagttccttaacagcttaaaaacaagtcataaaggaggttag

SEQ ID NO: 3961 - DNA, 2970 bp, Staphylococcus aureus
atggagaagaattttctggctcgtgttacagctataatcagtgattttaaaaggaatattagaactgctcaacgtatggctaaaactgatataccggacgaaatcaagacagaagttacagcaaacataagagactaccaaagagagctaacgcgagccaaatcgatggctcaacgttggcgagaacataaagttaatattgatgcagacgctagcaaagtaaaacaagtcatatcgtttgttaaagcagaactatcgaatatcagacgtaaaaaagttgaaattgacggcgacgcaagcggattaaaaagaaatgttgcgacttctaaagcgatgttagctggttggcgcaaacacactgttaaattagattttgatacaaccggaatgacgaaaatgcaagtagcattgactgcaggtaaaagagcattagatcagtatcaatcaacaatggatggcatcgcatcaaatattagaactttcggtactatcttcgcgcaacaagtcaaaggtttaatgattgctagtatacaagcgttaataccagtaattgctggattagttccagctattatggcagtacttaatgccgttggtgtattaggtggtggtgttattgggcttgctggtgcgttctctgtagctggtgttggagcggttggcttcggtgcaatggctattactgcactaaaaatggtaaaagatggcacattggcagtaacaaaagaagttcaaaactttagagatgcgagcgatcagttaaaaactacatggcaaggcattgttaaagagaatcaagcaagtatctttaatgcgatgtcagcaggtatcagaggcgttacaagtgcgatgtctcaattaaaaccattcttatccgaagtatctatgctggttgaagcaaacgcacgcgagtttgagaattgggttaaacattccgaaacagctaagaaagcgtttgaagcattgaatagcataggtggcgcaatcttcggagatttattgaacgctgcaggacgatttggcgacggattagttaacatttttactcaattaatgccgttgttcaaatttgtgtctcaaggactacagaacatgtctatagctttccaaaattgggctaatagtgtagctggtcagaatgctattaaagcgtttattgactacactaccactaacctacctaagattggtcagatatttggtaatgtattcgctggtattggtaatttaatgattgcttttgtacaaaacagttccaacatttttgattggttagttaaattaacttctcaatttagagcatggtcagaacaagtaggacaatcacaagggttcaaagactttataagttacgttcaagagaatggtcctactattatgcaattaatcggtaacatcataaaagcattagtagcatttggcactgcaatggcacctatagctagtaaattgttagactttatcactaatctggctggatttatcgctaaactattcgagacacacccagctatagcacaagttgctggcgttatgggtattttaggcggtgtattttgggctttaatggctccaattgttgctataagtagtgtgcttacaaatgtgtttggtttgagtttatttggcgttatcaaacaaattttaagtttcgttagaacatcaagcctagttactggagctatgcaattgttaatgggtgttttcggttcgatttcagcgcctattttagcagttatagcagtgattggtgcattcattggtgtcctagtttatttatggaaaacaaacgagaatttcagaaacactattactgaagcgtggaacggtgttaaaacggcggtttctggtgcgattcaaggtgtagttggctggttaactgaattgtggggcaaaatccaatctaccttacaaccgataatgcctatattgcaagtgttagggcaaatattcatgcaagttttaggtgttttggtaataggtatcattacaaacgttatgaacatcatacaaggtttgtggacgttaattacaattgcgttccaagccataggaacagtgatatccgtagcagtccaaatcatagtaggtttattcactgctttaattcagttgcttactggcgacttatcaggtgcttgggagacaatcaaaacaacgattacaaatgtgcttgatacgatttggcaatacatgcaatcagtttgggagtcgataatcggctttttaactggcgtaatgaatcgaacactttctatgtttggtacaagttggtcacagatatggagtacaatcactaattttgttagcagtatttggaacagtgttacaagttggtttagtcgtgttgcttcgagtgtggccgaaaaaatgggacaagcactaaactttattatcacgaaaggttctgaatgggtttctaatatttggaatactgttacaaatttcgcaagtaaagtagctgatggatttaaaagagttgtctcaaatgtaggcgacggcatgaaaaacgcgcttgataagattaaaagctttttcagcgattttttaaatgccggagcagaattaataggcaaagtagctgagggtgtagctaacgccgcgcacaaagtagtaagtgcggtaggcgatgcgatttcatcagcttgggactcagtaacttcatttgtaagtggacatggtggaggtagtggtttaggtaaaggtttagcggtatcacaagctaaagtaatggctactagcttcggtaaaacgttcacaagtgagttaggttcaacgttgacagatggattcaacgacagtttaacaccaagcgttgacggtcatatgacaaacgatgtgcaacatagcatgaaagaaaataacagacctattgttaatgtaactgttagaaacgagggcgatctaaatatgattaaatctcacattgacgatatggatgcaaaagatggtagtttcaacttaatgtaa

SEQ ID NO: 3962 - DNA, 936 bp, Staphylococcus aureus
ttgatagcccatgatgtagaaattattaaaaatggtgtgaagtatcgagtcagtgacaatcctcacacctacaaacacttaagagtgcttgattacaatgttatcggttctggttacaaaaggaattattcgcctttagatggtgttgacgggcgttttcacaattatgctaaagaagaatataaaaaagttgaattaagattgaggtatgaagtacctaaaattgcttatgcctcacatcttaaatcagacatacaaacattgttttatggtcgtttttacctaagagaattggcaacgccggataacactatcaaattcgaagatatgttcgaaccattagagcaagaattcgaattagattatgttgacggtagacaactattcgttggattagttagcgaagtatctttcgacacgactaagacatcaggagaaatcacgttgacctttgagacaacagaattgcctttctttgaaagtatcggctatagcactgatttagaaagtgataacgatttagaaaaatggtcagttccggacagaatagcactaaatgaaaatgatagaagtagacaaatgacattctataatacgagttctggagatgtttattacaacggagatgtagcattaacacagttcaaccaattcaatgtagttgaaattgaattagccgaagatgttaaagctgatgataaagacggtttcactttctatatggataaaggaaacgtatcagtaattaaagatgtcgatttaaaaacaggcgataaaatcatttttgataacaagcacacatatagaggcaatttaaatatcgatctatacaacaagacgttagaacaaccggtgttgtatcccggttggaatcattttaaagccaacagacttatgaaaaagatagtctttagacacaaattatattacagataa

SEQ ID NO: 3963 - DNA, 1887 bp, Staphylococcus aureus
atgccggtattattaaaaagtttacaaggcgtcggtcatgcgatttatgttaatacaaaattaaatgaaaaattgaatgaagatagcacgttagacattgatatgatagaaaatgccagcactttcgacgcaatcggcgctattacaaagatgtggactatcacaaatgtaaagggggaagatgacctcaatgaatatgtgatagtaatgcttgataaatcaacgattggaaacaaaatcaaacttagtatcaaagcgagacaaaaagaattagatgatctaaacaattctaggatttaccaagaatataacgaaagtttcacaggtgtagagttttttaacactgtatttaaaggaactagttataagtacgtattgcacactaaggttgacgcatcaaagttcgagggattaggcaagggagacacaagacttgagatattcaaaaaaggacttgaacgctatcatctcgaatatgagtacgacgctaaaacaaaaacatttcacttgtatgacgaattatcaaaagtagcaaactactatattaaatcaggtgtaaatgctgataacgtcaaaattcaagaagatgcttctaaatgctacacatatataagaggttatggcgactttgacggccaacaaacttttacagaggctggattacaattcgaattcacacacccattagcacaactgattggtaaaagggaagcgcctccgttaatagatggacgtataaaaaaagaagatgttttgaaaaaatcaatggagctagtgataaagaaaagtgtcactgcttctatttctttggacttcgtagcacagcctgagcattttccagaggctaaccctagaattggcgatgtcgcaagagttggcgaaccaactataggctataacgacttagtaagaatagtcgagattactacacatagagatgcatataacaacatcatcaaacaagatgtagtattaggcgattttacaatgcgtgacagatatagaaaagctatccatgaagctacgaactatgttaagaatgtaaaaacaactaagtcagacccagctaagtacttgagagaactaaacgcaaaagttaacgcaagtttatctataaataatgaattggttaagcagaatgaaaaaataaacgctaaagtcgataagatgaatactaaaacagttacaactgctaatggtacgatcatgtacgactttactagtcaatcaagtataagaaacatcaaatcaattggaacgattggcgactctgtagctagagggtcgcacgcaaaaactaatttcacagaaatgttaggcaagaaattgaaagctaaaacgactaatcttgcaagaggtggcgcaacaatggcaacagttccaataggtaaagaagcggtagaaaacagcatttatagacaagcagagcaaataagaggagacctaatcatattacaaggcactgatgatgactggttacacggttattgggcaggcgtaccgataggcactgataaaacggatacaaaaacgttttacggtgccttttgttctgcaattgaagttatacggaagaataatccagattcaaaaatactagtgatgacagctacaaggcaatgcccaatgagtggcacaacgatacgccgtaaagacacggacaaaaacaaactagggttaacacttgaggactatgtaaacgctcaaatattagcttgtagtgagttagatgtgccagtgtttgacgcatatcacacagattactttaagccatacaatccagcttttaggaaagcgagcatggaggacggcttacaccctaacgaaaaaggtcacgaggttattatgtacgagttaatcaaggattattacagtttttacgactaa

SEQ ID NO: 3964 - DNA, 1899 bp, Staphylococcus aureus
atggcttacggattaataacaagtttgcattctatcactggcgaaaaagtagttgctcagcacgagtacaactatcgattacttgataatggaatgagcaaacttgagaaaatgtttatatatcatcaaaaagaagaaatatacgcacactcagcaaaacaaattaaatacttgaatgacagtgttgaagattatttaacgtatttaaatggccgttttagcaacatgataataggtcataacggcgacggtatcaacgaggtaaaagacgcgcgtgttgataatactggttatgatcataagacattgcaagatcgtttgtatcatgattattcaacactagatgctttcactaaaaaggttgagaaagctgtagatgaacactataaagaatatcgagcgacagaataccgattcgaaccaaaagagcaagaaccggaattcatcacagatttatcgccatatactaacgcagtaatgcaatcattttgggtagaccctagaacgaaaattatttatatgacgcaagctcgtccaggtaatcattacatgttatctagattgaagcccaacggacaatttattgatagattgcttgttaaaaacggcggacacggcacacacaatgcgtatagatacattgatggagaattatggatttattcagctgtattggacagtaacaaaaacaacaagtttgtacgtttccaatatagaactggagaaataacttatggtaatgaaatgcaagatgtcatgccgaatatatttaacgacagatatacgtcagcgatttataatccggtagaaaatttaatgatttttagacgtgaatataaaacttctgaacaacaagctaagaacgcattaaattttgttgaagtaagaagtgctgacgatattgataaaggtatagacaaagtactgtaccaaatggatatccctatgcaatacacttcagatacacaacctatgcaaggtatcacttatgatgcaggtatcttatattggtatacaggtgattcgaatacagccaaccctaactacttacaaggttttgatataaaaacaaaagaattgttatttaaacgacgtatcgatattggcggtgtgaataataactttaaaggagatttccaagaggctgagggtctagatatgtattacgatctagaaacaggacgtaaagcacttttaatcggggtaactattggacctggtaacaacagacatcattcaatttattctatcggtcaaagaggtgttaaccaattcttaaaaaacattgcacctcaagtatcgatgactgattcaggcggacgtgttaaaccgttaccaatacagaacccagcatatctaagtgatattacggaagttggtcattactatatctatacgcaagacacacaaaatgcgttagatttcccgttaccgaaagtgtttagagatgcaggttggttctttgatgtactgcctggacactataatggtgctctaagacaagtacttaccagaaacagcacaggtagaaatatgcttaaattcgaacgtgtcattgacattttcaataagaaaaacaacggagcatggaatttctgtccgcaaaacgccggttattgggaacatatccctaagagcatcacgaaattgtctgatttaaaaattgttggtttagacttctatatcaccactgaagaatcaaaacgtttttctgacttccctaaagattacaaaggtattgcaggctgggtgttagaagtaaaatcaaatacaccgggtaacacaacacaagtgctaagacgtaataactttgcttctgctcaccagtttttcgttagaaactttggtactggtggtaatagtggttggagcataatagaaggtaaggaggttgaataa

SEQ ID NO: 3965 - DNA, 1824 bp, Staphylococcus aureus
atggtagtagataatttttcaaaagatgataacttaatcgagttacaaacaacatcacaatataatccagttattgacacaaacatcagtttctatgaatcagatagaggaactggtgttttaaattttgcagtaactaagaataataagccgttatcaatcagcaaacataatgcgatgactagtattgtgcttaagacggataacttcgacgatgaacacggcgcttatattagtgatgaacttacaattgttgatgcaattaatggacgaatgcaatacgttatcccaaacgagttcttaaaatacactggtcgagtacatgcgcaagcatattttactcaaaacggtagcaataacgtaattgtagagcgtcaatttagcttcaatatcgaaaatgatttaattagtaacttcgacggcaaaacaaagttggtttatatcaaatcaattcaggacttaacagaaagtgttaaagaagaagttgaggacttaaagaaaagtttaagtgatacaaaatcgttggttactgaaattgatagtcgtattaatcaaggtattcaaagattagaaatcaaacaaaatgaagcggtacagatgattacaacaacacaagacaaagccgttcaatatataaatagcgagttccagaaaattgttgataaagagcaagcgatttttgaacgtgttaacgaagttgaacaacaaatcaatggtgcagacctaatcaaaggtaattcaacaacaaattggcaaaagtctaaaattactgatgattacggtaaagcaatcgaatcgtctgagcagtccatagatagcgttttaagcgcagttaacacatctaggattattcatatcactagcgcgacagatgcgccctcatttaaagatataggtactgtcgatacacctaaagaagatggcgttgacgatggttcagatattccggtagctcctaacactttaggaaaatcaggcgtgttagttgtctatgttgttgatgatagtacggcacgtgcaacatggtatccagatgattcaaacgacgaatatacaaaatataaaattagtggcacatggtacccgttttacaaaaaaaatgacggcgatttaactaaggaattcgtcgaagaaacatcaaacaacgctttaaatcaagccaagcagtatgtagatgataaattcggaacaacgagttggcaacaacataagttaacagaacataacggtcaatcaatccaaaagaacttatataacgccaaaggtaatttagaagcattgggcgctgggaattattacgtaacaagtgtgcctgatttaccaggtattgttgaaagttacgaaggctacttatcagtatttgttaaagatgatgcaaataagttattcaacttcacaccttcaaactctaaaaaagtttatacacgatcaatcacaaatggtcgattagactcacaatgggctacacctaacgaacataaaacagccgtgttattcgacggtgctgcaaacggtgtaggaacaaggattaatttaaccgaagcttatacaaattatgcaattctattcataagcggtacttatccaggtggtgttattgaagcattcagtttaacctctataccaaatgcgattcaattaagtaaaacaaatgtagttgactcagacggtaacggtggtggtagttatgaatgcttaataactaaagaaagtggtacgacgttaaaaatcgataacgatgtgtaccttgatttaggcagtaaaacaggttctggtgctaatgcaaacagagttacgataaataaaattgtggggtggaaataa

SEQ ID NO: 3966 - DNA, 717 bp, Staphylococcus aureus
atgaacagttttaaggatagattaaagcaaattatgtctgaacggaagatatctcaatcagagctatcaagaaggactggtattggcagaaactcaattagcgattatttaaatggaaaatatgaagcgaaacaagacaaagtctttgaactagcaaaggttttaaacgttaacgaagcgtggcttatgggttttgatatttctaagaatagaaaaattgaaaataacgacatcacttccatatacaataaactcacacctccacgacaaaacaatgtactaaactacgcaaatagtcaattagatgaacagaattctaaaggagataacattgtagatattaattcatataaacaggataaaactccggttaatgtcaatggttgcgtctctgccggtgtgggagaacgtctacacgatgaaacgctattcactgaaatggttaaagctcctgttcctccacatgatttagcattaaaagttaatggagattctatggaacctatgtttaaagatggcgaaatcatatttgtggagaaaacgcacaatataaagaatggtcagattggtatattcatcattgaagaagaagcgtacgttaagaaagtttttgttgaagatgatagattaactttagtttcactgaacaaaaagtaccgtgaccttcacttttatagaaacgaaagcgtgaggttggttgggaaagttattttatag

SEQ ID NO: 3967 - DNA, 1875 bp, Staphylococcus aureus
atgggattacctaatccaaagactagaaagcctacagctagtgaagtggtggagtgggcaaagtcgaatattggtaagaggattaatatagataattatcggggcagtcaatgttgggatacacctaactttatttttaaaagatattggggttttgtaacatggggcaatgctaaggatatggctaattacagatatcctaagggtttccgattctatcgttattcatctggatttgttccggaacccggagacatagcagtttggcaccctggcaacggaataggttcggacggacacaccgcaatagtagtaggaccatctaataaaagttatttttatagcgttgaccaaaactgggttaattctaatagttggacaggttctccaggaagattagtaagacacccttatgtaagtgttacaggctttgtcagacctccatattcaaaagatactagcaaacctagtagtactgatacaagttcagcatcaaaagccaatgactcaacaattactggcgaagcgaagaaaccgcaatttaaagaagttaaaacagtaaagtacactgcttacagcaatgttttagataaagaagagcacttcattgatcatatagttgtaatgggtgatgaacgctcagatattcaaggattatatataaaagaatcaatgcatatgcgttctgtagacgaactttatacgcaaagaaataagtttataagcgattatgaaataccgcatttatatgtcgatagagaggctacatggcttgctagaccaaccaattttgatgacccgcgtcaccctaattggctagttattgaagtatgtggtggtcaaacagatagtaagcgtcaattcttaatgaaccaaatacaagctttaatacggggtgtatggttgttgtcaggaacagataaagaattatctgaaacgacgttaaaggtagaccctaatatttggcgtagtatgaaagatttaattaattacgacttgattaagcaaggtataccggatgacgcaaagtatgagcaagtcaaaaagaaaatgcttgagacgtacatcaaacgagatatattgacacgagaaaatattaaagaagtaactacaaaaacaacaataagaattagtgataaaacatcggttgacagtgcgtcaacaagaggacccactgcatcagacgaaaaaccaagcatcgttactgaaaaaagtccgttcacgttccagcaagcactggatagacaaatgtctaggggtaacccgaaaaaatctcatacatggggctgggctaatgcaacacgagcacaaacgagctcagcaatgaatgttaagcgaatatgggaaagtaacacacaatgctatcaaatgcttaatttaggcaagtatcaaggcgtttcagttagtgcgcttaataagatactcaaagggaaaggaacgctagacggacaaggcaaagcatttgcagaagcctgtaagaaaaacaacattaacgaaatctatttgatcgcgcacgctttcttagaaagtggatacggaacaagtaacttcgctagtggtagatacggtgcatataattacttcggtattggtgcattcgacaacgaccctgattatgcaatgaaatttgctaagaataaaggttggacaactccagcaaaagcaatcatgggcggtgctagcttcgtaagaaaggattacatcaacaaagggcagaatacactgtaccgaattagatggaatcctaaaaatccagctacacatcaatatgctactgctatagagtggtgccaacatcaagcaagtacaatcgctaagctatataaaaaaatcggcttaaaaggtatctactttataagagataaatataaataa

SEQ ID NO: 3968 - DNA, 276 bp, Staphylococcus aureus
atggatatcggtacaatcgtaagaacaattttattaatagtcgcatggatcaatcagtttttagcaatcaaacatatttctccaatcccagttgacgaagtgtttataagcacagtcgttactgggattgtttcaatttggacgtggtggaagaataacaactttactcacgcatctaaaaaaggacaacaaaaaatctatgaagtaaaagctggtattcagtcaactggtggcgcacctaaagtgaacggagatgataacaatgccgtcggttag

SEQ ID NO: 3969 - DNA, 1413 bp, Staphylococcus aureus
atgccgtcggttagaacatacagtcaagctattagctaccttaaaagcctagagggtaaggcgtggaatccagacaatgcatttggatgtcaatgcttcgatactgccaaccaatattggctttacttatttaatcataggttgaaaggtgtgggcgctgcggacattcctacatggaatgatttcactaacgaagcaaccgtttacgaaaatactgtgtcgtttcaagcattgccgggcgacgtcgttatttttaaccgtaattatggcggtggttatggtcatgtaggtattgtaataagcgctacgttagattctataactattttagagcagaactggctaggcggtgcttactggagcccaccagaagttactacaagacgcacacacggctatgattttcctatgtggttcattcgtccattctatgcaaaagaaacgactgctaataagctaagaagcgcagtaacaccagttaaacaagataagttatcaaaaggcaaaaaaatcatgcttgtagctggtcatggtattggcgcatactctaacgacccaggtgccgttgcgaatggagaaaacgaaagagattttaaccgtaaaaatattatccctagagtgaaaaagtatcttgagtcagtaggtaacacagtattgttatacggtggcaactcgatgaatcaagatttatatcaagatacattgtacggtcaacgtgttggaaactataaagattatggcatgtactggattaaaagcgaagtcaaaccggatgcaatcatagagtttcatttagattctgctagcccacaagcaagtggcgggcatgtaatcattagcgatcgtttcccagctgatgacattgacaaggcattaagtagtgcattagataaaacagtgggtaaaataagaggtgtgacacctagaggggatttattgaacgctaacgtgtctgctgatcttaatcttaattatcgtttaatcgaattaggttttatcacatctacgaaagatttaaactacattaaaaacaatttagacagcttcacgaagcggattgctgaagccattaacggcagacaaattgatgcgccaagtagtaagccaagcactgacaaaataacatggaattggaaaggtgtattttatcctaatccagaaaaagctataagagtcagaaaaacagcaggattaaccggcactgtcgttgaagaagattcatggctatacacaaaagatgattgggtaaaattcgatcaagtaattaaaaaagatggctactggtggattagattcaaatatcaacgtgagggctctagtactaacgattttttttgtgcagtatgtagaatcactgacaaggaacaaaagattaaaaatgaaaaatattggggaactattgagtggaattaa

SEQ ID NO: 3970 - DNA, 180 bp, Staphylococcus aureus
atggaagaaacaatcaaacattttttagaatttagaaagcaattcacacctgcacagtggcacgaaatcaacagaattattgacggacaatttagtaaaaaagccgccgagctacgactcgacgaccaagatgttgaggttattaaaaatattattactcaacaaaagattatgaagtaa

SEQ ID NO: 3971 - DNA, 483 bp, Staphylococcus aureus
atggaattcatacaatctactttgttttcaaacgttgtagcttttctagctttaggtctatctgcatactcaattttttatactcgttctcaaaataagttcagttttgttattagcgatcttaatttctactatgaaaataattttgtagaattaaattttgtcgtcgctaatgactcgtctagaactcatactttagaagaattaatatttttagataaaaacaaaaatgttttaacacctattaacgtagtattggaatctgatgaatattcatctctcggtatatataatccaagttatttgcatgctccaatcgataaacaattagataaaccagaagttatgatagctaattcgtcatcagagtttttatataaattcgaattagaacctgcgtttataaagattgtttctaatcaacgaataaacaaacttaaaaagtataagttaatctctaccgattcttacgagcataattaa

SEQ ID NO: 3972 - DNA, 456 bp, Staphylococcus aureus
caaaatactggcaatcaatcatttgaagaagacacagaagaagataagcctaaatatgaacaaggtggcaatatcgtagatatcgatttcgatagtgtacctcaaattcaaggtcaaaataaaggtgatcagtcattcgaggaagatacagaaaaagacaagcctaaatatgaacaaggtggcaatatcgtagatatcgacttcgatagcgtacctcaaattcaaggtcaaaatattggcaatcaatcatttgaagaagatacagaaaaagacaaacctaagtatgaacatggcggtaacattattgatatcgacttcgacagtgtgccacatatacacggattcaataagcacactgaaattattgaagaagatacaaataaagataaaccaagttatcaatttggcggacacaatggcattgactttgtagaagatacacttccaaaagtaagc

SEQ ID NO: 3973 - DNA, 969 bp, Staphylococcus aureus
atgaaatttaagaatatagtcaaatcatcagtcgctacatcaattacattaatcatgctatcaaatacagttgatgcagctcaacatatcacacctgtcagcgagaaaaaagtggatgacaaaatcactttgtacaaaacgactgctacatcagattctgacaaattaaaaatttctcaaattctaacttttaattttattaaagacaaaagttatgataaagacacattaatactaaaagctgccggaaacatttactcaggctatacccaacccacttctgatagtagtataaattcacaattttattggggagctaagtataatgtttttgttagctcggagtccaaagattctgtaaatattgttgactacgcgcctaaaaatcaaaatgaagaatttcaagttcaacaaacattaggttattcatatggcggagatattaatataataaatggattaactggtggattgaatgggtcaaaatcattttcagaaacgattaattataagcaagaaagctacagaactacgattgataggaaaacaaatcataaatcaatcggctggggtgtcgaggcacataaaatcatgaataatggttggggaccatatggcagagatagtagtgattcattatatggaaacgaactatttttaggtggcagacagagtagctcgaatgctaatcaaaatttcttaccaacacatcaaatgcccatattagcacgtggtaatttcaatccagaatttataagcgtactttctcacaaacaaaaggatgttaaaaaatctaaaattaaagtgacttatcaaagagaaatggatcggtatgaaaatttttggaacaacttgcactggataggttataatattaagaatcaaaagagagcaacacacacatcaatttatgaaattgattgggaaaaacacacggttaaattagtagcttcgcaatctagcgaataa

SEQ ID NO: 3974 - DNA, 486 bp, Staphylococcus aureus
atgaaaattgataatgtaacagaaaaggatttattttatattttagacttatttgaaaaaatggaagtaactcattggttagatggaggctggggcgtagatgtattaactggaaaacaacaaagagaacacagagatatagatatagattttgacgctcaacacactcaaaaagttataaaaaaattagaagatataggatacaaaatagaagttgattggatgccttcacgtatggaacttaaacataaagaatatggatatttagatattcatcctataaatttaaatgatgatggttccattactcaagcaaacccagaaggtggcaattacatctttcaaaatgaatggttttcagaaactaattataaaggtcgaaaaataccatgcatttccaaagaagctcaacttctttttcattccggttatgaattaacagaaaaagaccattttgatataaaaaatttaaaatcaataacttaa

SEQ ID NO: 3975 - DNA, 369 bp, Staphylococcus aureus
atgaaaaagaaagatacttgtgaaattttttgttatgacgaagaaaaggttaatcgaatacaaggggatttacaaacagttgatatttctggtgttagccaaattttaaaggctattgccgatgaaaatagagcaaaaattacttacgctctgtgtcaggatgaagagttgtgtgtttgtgatatagcaaatatcttaggtgttacgatagcaaatgcatctcatcatttacgtacgctttataagcaaggggtggtcaactttagaaaagaaggaaaactagctttatattctttaggtgatgaacatatcaggcagataatgatgatcgccctagcacataagaaagaagtgaaggtcaatgtctga

SEQ ID NO: 3976 - DNA, 582 bp, Staphylococcus aureus
atgccaaaaataattaatcataaagaaaagaaaaaacaaatcattcaatacgctttcgactccattgtagaaaaaggagttaagggatctactgtaagacaaattgcgaaattagctgatatgacacctggacagattagatattattttccgaatcattcagagttattaaatgctgtaatgtctacagtagaattaaaagtaaggaggagaattgaagcaatatttaaatctgaaaaccttactacaatagataaagcaaaagcgagtttattaacagtactaccattggataaagagagactagctgatatggaagtttggatggcgtttcgcaatgacatacatgagtatggtcaaagtacacttgatgatgggttagatcaattatgtaatagtattttgacattattaaaaaacgatcatttgctgaagaacaatgtgaatattcatcttaattcgatgaaattacatgcattaattgacggtttagctttacataaattgcttaatccaaacggtgtttcaaacgatgatattcaaatcattgttgatgaagaaatagttagattaacgaaataa

SEQ ID NO: 3977 - DNA, 834 bp, Staphylococcus aureus
atggataaaaatatgtttaaaaaaattattttagcagcgtcaatttttactatttccttacctgtgattccttttgaaagtacattacaagcaaaagaatacagcgcagaagaaatcagaaaattaaaacaaaaatttgaggttccacctacagataaagagctttatacacacattacggataatgcaagaagtccttataattctgttggtacagtgtttgtcaaaggtagtacattagctaccggagttttaattggtaaaaatacaattgttactaattaccacgttgcaagagaagcagccaaaaacccatcgaatattatttttacacccgctcaaaatagagatgcagaaaaaaatgaattccctactccgtatggaaaatttgaagctgaagaaattaaagaatctccgtatggacaaggactcgatttagctataataaaattaaaaccaaacgaaaaaggggaatcagcgggagatttaattcaaccagctaatatacctgatcatattgatatacaaaaaggagacaaatattctttattaggatatccttataattattcagcttactctttatatcaaagtcagattgaaatgttcaatgattctcaatattttggatatactgaggtaggaaactctggatcaggtatatttaatttaaaaggagaattaataggtattcacagtggtaaaggcggacaacataatcttccaataggagtgtttttcaatagaaagataagttcactctattcggttgataatacttttggagacactttggggaacgatttgaaaaagagagcaaaattagataaataa

SEQ ID NO: 3978 - DNA, 774 bp, Staphylococcus aureus
atgaaaaaaacagcatttatactacttttattcattgccctaacgttgacaacaagtccacttgtaaatggtagcgagaaaagcgaagaaataaatgaaaaagatttgcgaaaaaagtctgaattacaaagaaatgctttaagcaatcttaggcaaatttattattataatgaaaaagctataactgaaaacaaagagagtgatgatcagtttttagagaatactttgttatttaaaggttttttcacaggtcatccatggtataacgatttattagtagatcttggttcaaaagatgctactaataaatataaagggaaaaaagtagacttatatggtgcttattatggatatcaatgtgctggaggcacaccaaataaaacagcatgtatgtacgggggtgtaacattacatgataataaccgattgaccgaagaaaaaaaagtaccaattaacttgtggatagacggaaaacaaactacagtacctatagataaagttaaaacaagcaaaaaagaagtaactgttcaagagctagatcttcaggcaaggcattatttacacggaaaatttggtttatataactcagacagctttggcggtaaggtgcaaagaggcttgattgtgtttcattcttctgaagggtccacggtaagttatgatttgtttgatgctcaagggcaatatccagatacattattaagaatttacagagataataaaactattaattcagagaacctccatattgatttgtatttatacacaacttga

SEQ ID NO: 3979 - DNA, 1470 bp, Staphylococcus aureus
ttggaaagttatttgacaaaacaagccgtacataatcgcgcaaaagaagctgttggtaaaagtgtattagaattaaatggtggtgaatcgattaaacaaagtaagagttcagttggtgatgcatttgaaaattggtttggtaagaaaaaagacagtgatagtaaaccagatatggcagaagctggggtggaacttaaggcaacgccatttaaaaagttgaaaaacggaaagtatagctccaaagaaagattagtattaaatattataaactatgagaaagtggcaaatgaaaattttgaaactagtagttttttatctaagaataatactatagaattagctttctatgaatatatcaagggaacacctagtgataattggattattaaagaagcggtgctttatgaaatgcataaaaacccgattgattatgaaataattaaacaagattgggaaataataaatcaatatattaatgaaggaaaggcacatgaattgagtgaaggtttgacaagttatttagcgccatgtacaaagggtgcgaatgctagttctttaagaaatcagccttattcagacataaaagcaaagcaaagagcattttctttgaagtctgggtatatgacatctattttacgcaaatatgttctaggtgatgaaaaaatagattcaattgtcaaagacccatttgaaataaaagaaaaatcaatagaggacatagtctttgaaaaatttcagccatatataaactggtcaatcgataaattatgcgaacatttttctatcaataaaggtgagaaaggtttaaattatagaatagcctctgccattttaaatctaaaaggtaaaactactaaaagtaaaccattcccggaagttgaagagtttgaaaaatcatctatagtagtcaaaacagttcattttaataaaaagaatgtgaataaagaaagtatgtcatttggagcttttaaatttgaagaactagctaatgaggaatgggaagatagtgaaggatatcctagtgcacaatggcgaaactttttgttagaaacaaggtttttattttttgttgttaaagaagatgaagatggtgtagacatattcaaaggaataaaattttttagtatgcctgaagaagacataaacggacctgtcaaaagaatgtgggatgatacagtgaagaaattaaaagagggtgtcacattagaagctgtaccggacaaaagtacaaaggatggttggagaataaaaaataattttgtagataaaagtgatgatttaatttgccatgttagaccacacactaataacagagactatcgtggaggaagtaatgcagataagcttcctaaaaagattaactggattaatagacctgactcagatgattattcggatgagtggatgactaaacaaagtttttggataaataatgactacataaaaaagcaagttgaagatttattgtag

SEQ ID NO: 3980 - DNA, 1239 bp, Staphylococcus aureus
atgaataaaattaaagtagtagaattgtttgcgggtgtaggcgggtttcgtttaggtttagaaaatacgaaaaatggtatatttgacataacttgggcaaatcaatgggagccctcacgaaaaatccaacatgcatttgattgttatagtaaaagatttaagaacggcatccatagtaataaggatattgcccaggtatctgatgaagaaatggcaaatactgaagctgatatgattgtaggaggatttccttgccaagattattcagttgcaaggagtttaaatggagaattaggaatacaaggaaaaaagggcgttttattctggcaaattattagatatattcaaaatacatttcctaaatacttgttgcttgaaaatgttgatagattattgaaatcaccttcgagtcagagagggagagactttgctgtaatgttatcaaccttaaatgagttaggctataatgttgaatggcgcgtgattaatgctgctgattatggcaatgctcaaagacgtagaagggtatttatatttggatataagcaagatttaaactatagcaaagctatggaagaaagtccgttggataaaattatatatcacaatggtttgtttgctgaagcttttccgattgaagattatgccaataaaaatagagtaaataggactcatattactcatgatatagtcgatatttcagataatttcagttttcaattttataatagtggaatcatgaaaaatggagaaattttaactattgacacaataccaaaatatgaaaaatcagtaaccttaggagaaattattgaaagtaatgtagatgatggtttttcattaaatcaagatcaaattgataaatttaaatatttaagaggacccaaaaagattaaacgaactactaaagatggtcatgaatattatttttcagaaggtggtatgtctgaaacagattcattagagttacctgcaagaacaatgcttacaagtgaatcatctattaatagaagtactcattttttaaacgtagatggtgtttatagaactttgacacctattgaagcagaaaggttgaatgggtttccagataattggacagaaggtatgccaattaagatgagatacttttgtatgggcaatgctcttgttgtgcctttgattactagaataggtaatcaaattgaaaaaattgatagtattacaaatgatgaattcagtcagctacgtttattttaa

SEQ ID NO: 3981 - DNA, 744 bp, Staphylococcus aureus
atgaaaaacaaattactttttaaaatttttttgagtttatctttagcattaagcgtttattcaattaatgataaaatcatagaagtatctaatacttctttagcagctgatgttaaaaatttcactgatttagatgaggcaactaaatgggggaataaacttataaaacaagctaagtatagttcggatgataaaatagctctatacgaatatacaaaagatagttctaagataaatggtccattaagactcgcaggtggagatattaataagctagattcaacaactcaagacaaagtaagaagattagattcatctatttctaaatctactactcctgaatctgtatacgtttatagacttttaaatttagattatttgacaagtatcgttggatttacaaatgaagatttatataaattacaacagaccaataatggccagtatgatgaaaatctagttagaaagcttaataacgttatgaatagcagaatatatagagaagacggatactctagtacacaattagttagtggagcagctgtaggtggtagacctattgaattaaggttagaattaccaaaagggactaaagctgcgtatcttaattctaaagatttaactgcttactatggtcaacaagaagttttattacctagaggcacagaatacgctgttggaagtgtagaattgtcaaatgataaaaagaaaatcataataacagctattgtttttaaaaaatag

SEQ ID NO: 3982 - DNA, 666 bp, Staphylococcus aureus
atggaaagtacaattgatttatctgaattattaggaagagtaagaaaaaatatgaaattattaataatattaccacttttaggtctgctaattagtgcaataatttcttttttctttttagatgtaaagtaccaagcttctactcaaatattagtgaatcaaaaaggaaatgactcacaaattatggcacaagaagttcaaagtaatattcaactagtaaacacatattcagagatagttaaaagcccacgtattctagataaggtttctaaagaattagatgataaatattcacgtagtgagatatcaagtatgttaaccgttaccaaccaagcagagtctcaagtattaaatattgatgttgaaagtaaaagtggtagtaattcagaaaaaattgctaataaaatagcagaagtatttagtgatgaagtgcctgatattatgaatgttgataatgtttctgttttatctacagcggataatacaggaaaacaagttgcaccaaaacctatggttaatttagttgttggtttagtaataggattggttatcgcattattaataatttttataaaagaagtgtttgataaacgtattaaaacagaagaagaagttgaaaatgaattggtgatacctgtactgggttcaatccaaaaatttgattaa

SEQ ID NO: 3983 - DNA, 1176 bp, Staphylococcus aureus
atgcaattactctttgtacatgatttcccagttgaaaaatataaagataattattactcaataggcttctctcacaaaatttggaatcgatatttaaccatttttgataaaatgctcataaattcaagagtgaaaaatgtagataatggggaaattattaataaatcgaatggagaaaaagtgaatttcaaaacaatagatagctataaatcacctaaatctctaatttttaaacataaaaaaatatttgaagcccttacaatttctatcaagaaaagtgatggtgttttaattagggtaccaagtgttttaggatttattgcagctctaatatgtaaaaaaatcaataaaccttatatggtggaagtagttggtgcagcatttgacgcatattggtttcatggatcaatatttggaaaaattttatcgttacctatggaatatttacaaaaaaatgcagtgaaaaatgctagcatagcgatttatgtaactaagaaatatttgagtaacaaatatccttgtaacgggaaagagtttaaaggcatttcaaacgtacaatctgtagaaaaatttaataagaatttagatattgggaataaaattaaaattggacttattggatctacgtttgttgattataaaggacataacgtagctataaaatcaataagtaatttggtgaatgaaggttataacattgaattagaatttgtgggtgatgggcccagtaagaaatttatggaaatggctaaaaaatacaatgttgaaaataatgttatatttaaaggtaaaatttatgacaagacagcgttaaataattggtttagaaatttagatttgtatattcaaccaagtttaacagagggacattgtcgagcaattgtggaagcaataggaaatggagtgcctacattagcgtctaatgctggtggtaattcggatagtgttaacaaagaatatttgtttaaaccaaaagatgtagttaaattaacaaaactaattaatagatctattttgtctaagcaatatcgagaagaaaatgttttagaaaacaaaaaaaatatttcaggttacaacctggaaaatattcaaatagaaagagaaaaagcactacttaattataaaaaaataataaatgatttttatttagcgaaaggaataaataaaaatgcttaa

SEQ ID NO: 3984 - DNA, 1350 bp, Staphylococcus aureus
atgcttaattatatatataatcattcaccaataattttccaaaatttaatggtttcaataaagggtaaaatattcatgaaacaaagatatactaaacattattatgaagaaataaagagacttagagagtgtaatgatttatttgaacttcaaaatcaaagatttgaagaattttataattatatcaaaaaaaatagtgaattttattctgaaataattaaaaaaaataatctaagcggtaaaaaaatcactgttgcaaatataaaccaattgcctgaaattacgaaagatgatattagaaaaaatgttgataaaattattactaaaaagaaaaataaacttataaaaatgggcactggcggttcgactggtaaaagtatggttttttatactaatgcatatgatatgtctagaaaaatagcttaccttgattattttaaagaacaacatggggtatataaaggtatgaaaagagttagtgtaggtggtagaaaaattgtaccaattaaacaaaaaaagaaagtattttggcgatataataaaccactaaatcaattaatgatatctgcttatcatgctgatggtgaaaatcttaaatactacattaaaaaattaaataaatttcagcctgaaactttggatggctatactacagttattcataggattgcgagatatattttagataacaatatagaattaagttttacaccaattgctatttttcctaatgcagaaactttaactgatttaatgagggatgatattgaaaaagcttttaattgtccagtgcgtaatcaatatgcttcttctgaaggagcaccttttattacagaaaacaaagaaggcgaactagaaattaatgtagctactggagtgtttgagtgtaaacaaattcatggtaatatctatgaattaatagtgacaggtttttatactactactacaccattattgaggtataaaatcggagattcagtagaattagaaaatgagcttcccgtaaattatcaacaaaaagatataaaaattaaaagaattatcggtcgtaacaatgattttttacagtctagagaaaaaggaattgtaactaatgtgaatttgtcaacagcaataagatttgttgagaatgatgttattgaatcgcaatttgtacagaatgatattgataacattattgtgtatttagtaattagtaatgatgcggataaaaataatattataaagaaattaaaatatgagttgaaattcaggtttggtacaaatactaatttccattttgaatttgttaataagataccatcaacacctggtggaaaaaaaagatttgcaattaataacattaaataa

SEQ ID NO: 3985 - DNA, 1275 bp, Staphylococcus aureus
atgaatagaaatattgcagtagtaggtttaggttatgtaggtttaccagtagctgtaacttttgggaataaacataaagtaatcggatttgatattaatgaatcaagaattaaagaattaaaaaataattatgatagaacaaatgaagtaacagaaaataaattaaaaaacacgaatatagaatatacttcaaatgcagaagatttgaaaaaggctgattttattattatagctgtgccaacaccaatcgataagcataataaacctgatttattaccattattaaaagccagtgaaactgttgggaaggtaattactccagacacaatcgttgtatatgaatctacagtttatcctggcgcaacagaagaagaatgtgtacctgtattggaaaaatattctggactcgtttgtggtaaagatttttttgttggttactcacctgaaagaattaatcctggggataaggtacatacttttgaaaccattactaaggttgtatctggccaaacgcttgaagtattagaaatagttgcagacgtatatagttcagtagtcacagcaggagttcataaagcatcttctattaaagtagcagaagcagcaaaagtcattgaaaacacacaacgtgatgtaaatattgccctaatgaatgaattggcaattatttttgataaattagatatagatactaacgaggtattaaaagcttcaggaacaaaatggaacttcttgaattttaaaccaggattagtagggggacattgcattggtgtggacccatattatttaacacataaagctcaggaagttgggcaccatcctgaagtgattttagcaggtagaagaataaatgataatatggctaaatatattgcttctaacgttattaaagagttattgaagcaaggattagaagtacaaggagcaacagttaatgtgctaggtcttacatttaaagagaattgtccggatttaagaaatacaaaggttattcatattattgaagaactgaaagagtatggattaaacgtaacagtgaatgatgttgaagcggataaaaatgaagctaaaaagttctttggtttagatttgatagatacaaaagaattaaaaatggtggatgtagtgttatttgcagtgccacataaagactatatggaaaataaaaaggattatatcaatttagttaaagattgtggcatagtgtttgacattaaaggcataatcaatagtgatgaacttaatgtaagtcaacgattatggagattataa

SEQ ID NO: 3986 - DNA, 1143 bp, Staphylococcus aureus
atgaaaaatcaaaaaatatttcatttagttactgtttctaagagtattccacttatgagaggacaaatagaatttttaagaaaaaaaaatatggatgttcacattgtttcgagtgatggtaaggaattaaagcagtatgataatgaaatagctcatgttatacctatgaaaagagatatagcattattcagtgatttaaagtcattattaaaaatgatattactatttcacaaagaaaaaccatttattgttaattctggtactccaaaagcaggattaataggaacaatagctgcgtttattacccaaagacctattagaatatatactgtgagaggtttaaggcttgaaacagttaaaggattcaaatattttgtattgtatttgatggaaaagatagcaatgttttgtgcaactgatataatagcaatttctgaaagtttaaagcataaaattattacatctaatttggctaaggaaaataaaattactgttttgggatttggtagttctaatggtatacaatttgaaaaattccaattagataacaataaattagaagaaaaataccataaattattaaatgataattttgttattggctatgtaggaagaattgtaaaagataaaggtatacatgaattaattcagtcatttaaaattattgtaagtaaaggatataatgtcaaattgcttgttattggtagtttagagacagaaaattctattgatgaatctgactatttatttttaactcaaaatcctaatgtagtactaatcaagcatgtttcagatccaatttcattttataataatatgaatgtatttgtttttccaactcatagagaagggtttggaaatgttagtatagaggctcaagcacttgaagtgccagtaattactactaatgttacaggcgctattgatactgtagtaaatggagaaactggatttattgttgaaaaaggtgactttaaagcaatcgctgaaaaaattgaaaaattaattaatgacgagagtttaagagaaactattggtcataatggaagaaagagagtggaaaataaattttcaagccaaattatatgggaagaattggaaagtatgtacaatacttttctaaaagaaagtgagggaaagtaa

SEQ ID NO: 3987 - DNA, 687 bp, Staphylococcus aureus
atggcaaaaaagaaaagcactatatcaccactatatgttcatgataaacctaaatcgacgataagtgaaaaatttagaggtattcgatcaaatatcatgttttctaatgctgaaaatgaaataaaaagcttgttgataacttctgaaaaatccgcatctggtaagagcatactttcggcaaacattgcagtaacatatgcacaggcaggttacaaaacattaattatagatggagatatgagaaagcctacacaacattatatctttgatttgcctaataatagtgggctatctaatttaattattaataaaactacatatagcgattcaattaaagaaactagagtagagaatttaaacgttttaacagcaggaccaacaccgcctaatccttcagaattaattgcttctagcaaatttgcaactatatttaatgaacttttgaatcattatgacttcattgtgatagacacacctccgattaatacagtaacggatgctcaagtatatgcgcgaatagtaaaaaattgtgtgcttgtcatagatgctgaaaaaaataataagagtgaagttaagaaagcgaaaggtttacttactaaagccggtgggaaagtattaggcgcagttttaaataaaatgccaattgataaaaattctagctactattactactatggagaagattaa

SEQ ID NO: 3988 - DNA, 768 bp, Staphylococcus aureus
atggttgatatacataatcatattttggttgatgtagatgatggaccaaaaagcattaatgaagcaattgagttgcttaaacaagcccaaagtgaaaatgtaacagatatagttgcaacacctcaccatcttcataagagatatagtaatgatattgaaaaagtgaaaataaaattaaatgaattaaaaaataactcagaaataaaaaaattaggacttaatttatatgttggacaagagattcgtataacggatcaaattatagaaggtataaaaaataaagagattgaaggaattaatgaatctaggtatttgttaatagaatttcctagcaatgagattccttattatacgaatcaattattctatgagttacaaacaatgggatatattccaatcattgcgcatccagaacggaataaagcgatagttcaaaatttagatttactatttgaattaataaatggtggtgcattaagtcagattacagcttcttcattattgggagattttgggaataacataagaaaattatcattaaaaatgatagatagtaatttagcacattttattgcatcagatgcacatagtataacaaatcgaccttttatgctaaaacagttgtttaatgatagaaagttaaaagcttattatgaggaattagaaagttatttaaaaaacgggaagttagttttaacaaatgaaagaatttccaaacagataccaactcaagattataagcagaaaaaatggtttggtcttttatag

SEQ ID NO: 3989 - DNA, 1800 bp, Staphylococcus aureus
gtgacaagtatttctgcgaaattgcgatttttaatattaattattatagattcgtttattgttacattttcagtatttttaggatatgcaatattagaaccgtattttaaaggatattcaatagatttattagtattatcatctgttatattgttggtatcacatcatatattcgcatatgtatttaatttatatcatcgagcgtgggagtatgcgagtgtaagtgaattgatgtcagttttaaaagcggttacaagttcaatagtggtaacacttttattagtttcattacttataagtgaaagtccatttctaaggttatattttataacgtggatgatgcatttgctattgattggtggctctagattgttttggcgggtttatagaaggtattttattgataacgctgtcgaaaaaaaagccacattagtagtaggggctggacaaggcggatctgttttaattcgtgaaatgttaagaagccaagatatgcgtatgcaaccagttttagctgttgatgacgataaaaacaaacaaaaaatgactattactgaacgtgttaaagttcaaggttatgttgaagatataccggaactagtaaaaaaatttagaataaaaaagattattattgctataccgacattaagccaaaaaaggttaaatgaaattaataaaatatgtaatattgagggcgttgaattatttaaaatgcctaatatagaagatgtgttatctggagaattagaagtcaataatttgaaaaaagtagaagtagaagatttacttggaagagatccagttgaactagacatggcattaatttcaagagaattaacgaataaaacaatattggtaactggagctggaggatcaataggttcagaaatttgcagacaagtaagtaaatttgatcctcaaaaaattattttgttaggacatggagagaacagtatttattcaattcatcaagaattaagtaaaacttatggaaatagaattgaatttgttcctgttatagctgatgtacaaaataaaacacgtattttagaagtcatgaatgaatttaagccatatgctgtttatcatgctgcagcacataagcatgtaccattaatggaatacaaccctcatgaagctattagaaataatattttaggtactaaaaatgtagctgagtctgcaaaagaaggagaagtaagtaaatttgtaatgatttcaacagataaagctgtaaatccatctaatgtaatgggagcaacaaaacgcattgctgaaatggtaatacaaagtttaaatgaagataattctaagacaagttttgtagcagtaagatttggaaatgtgcttggatcaagaggatcggtcatacctctatttaaaaatcaaattgaatcaggtggtccggttacagtaactcaccctgaaatgacacgatatttcatgactataccagaagcatcaagacttgtattacaggccggggcattggcacaaggtggcgaagtatttgtgctagacatgggtaaaccagttaaaatagttgatttagctaagaatttaatacggttgagcggtaaaaaagaagaagatattggtattgaattttcagggattagaccaggagaaaaattatatgaagaattattaaataaaaatgaaattcatccgcagcaggtatatgaaaaaatttatagaggcaaagttgaccactatattaaaacggaagttgatttgattgtggaagatttaataaataatttctcaaaagagaagctcttaaagatagcaaatagataa

SEQ ID NO: 3990 - DNA, 1323 bp, Staphylococcus aureus
atgaaactaaagtacaaagtaattttaattataaattttgttacagtattatttagtatatttacattcatcggttatttaaataacttgataggttttagagttgttacaatatcattatgtataactatagctatgaccgtgtacttactttacaaaaaaagaaaaggttttttattagtttatttaatatatttatttttaactaattttggtgtatttgtaacaaatatatttttagccaatcctttagtggagtatcacggtgatttatcttggtattatataaatacatctaatttgtttagcattgctacttttgcgatattaacttttacaattttaagtaattttattagtgtgtttagcaaaataaatccaagtagaaagtttgatattaaaagtaaaggaaataatttattctactacacaggaatattatttatcattggatttactatacaatttcttttttatattataactggtcgattagcaattaatacttatggagattatgtaagtagcatacaagaattaccaatgtatacgtacggtatattctttttttcaattgggattgcatttgcattttctaatgtaaaaaaaacacatattaaatatctagtaattatattaactccccaagtgttattttttttaataaccggaaataggggagaagtattttatccaattctatctgcacttggagtgttaatagtaaggaattataaaattaaatggtggatgataattacaattgtttttacattattttttgtaataccatttattaaagtctttagaaatatggatagtagctcaattgaaaaggttgatataaattggttttcttcacttgttgaaataggctacacactgcgccctttaggttatgtaactaggtggattgacggtggggaaagcatagtttatggcaaaagttacttagcacctattcaaaatatattttcatatattataccagggttacaacctgtaaactatgaaatggttggttacggttttaggtatagactacctggtatgggttttaatgtaatagcagaagcgtattacaatggtgcaattgttggagtattgattgtaatggtgttattagtgcttttactttggaaatttacaaattttaaatcttttgaaatgctgtcaatgggtactgcaattgtaagtgtattaatcaataatataagaaacgcattttcattcgtacctgcatacatattaattatcattgtaatagtgattatattgctgtttatagatagttatttaaaaaaagaaacgaaggccgattaa

SEQ ID NO: 3991 - DNA, 1191 bp, Staphylococcus aureus
gtggttaaaaattttaattatatgtttgttgctaatatactgtctgcattgtgcaaatttttaattttactagtaatagttagattaggaacacctgaggatgtaggacgttataattatgctttagttataactgctccaatttttttatttatatccctgaaaataaggtctgtaattgtcacgaatgataaatatagtccaaatgaatatatatcagcaattttatcattaaatattattactttaatatttgttgcaatttttgtttatgtattaggaaatggtgatttaactactatattaatagtatcgttaataaaattatttgaaaatataaaagaagtaccttatggaatatatcaaaaaaatgagagtctcaaattactcggaatctcaatgggtatttataatatactaagtttaattttgttttatattatatattctttttcacacaacttgaatatggcacttttatttttagtaatatcctgtatattctcatttgctattatcgatagatggtatctaagtaagtattataatataaaactacactataataacaacattgcaaagtttaaggagatttttattcttacaatacctcttgctttttcaagtgcgttaggatcattaaatacaggaattcctagaatagtattagaaaatctatttggaaaatatacattaggtatattttctacaattgcgtatgtactggtaatcggtgggttattcgcaaattcaatcagtcaagtttttttacccaaattaagaaaattatataaagatgaaaaaaaaattgaatttgaaaagttaactagaaaaatggtgtttattggaatttttattggtatgtgctcggtaatattgagtttgtttttaggtgaggccttgttatcattgttatttggtaaagaatatggtgaaaataatataatattaatcattctttcttttggtttgctttttatactcagtggtatttttttggggacaactataatagccactggaaagtataatgtgaattacaaaatttctctaatactattgttttgtattttgatatttagtttcttattaataccaaaatattctttattaggtgctgctttaactattactatttcacaattcgttgctttaataagctattactatttttacaaaaggatattttga

SEQ ID NO: 3992 - DNA, 519 bp, Staphylococcus aureus
atgaaaaaattatttttaaagttaatgaaaaggaatctatctgaagataagataaggaaattgggtgtacaagttggaaatgattgtaggtttttaagtgttgatagatcaacatttggatctgagccttacctgattcaaataggaaatcatgtaacaataactagtggtgtaaaatttgctacccatgatggtggggtatggatttttagaaaaaaatatcctgagatagataattttcatagaatatttatcggtaataatgttttcatagggattaattcaataattttgccaggagtaacaataggaaataatgttgtagtaggtgctgggagtgtggtaacgaaagatgtacctgataatgtaattattggtggtaatcctgccaaaaaaattaaaagtatagaggcctatgaaactaaaatattagaaaatgcggattacacaaaaaaacttaattataatgaaaagaagatatatttattaaataaattcaaagagaataggtataattaa

SEQ ID NO: 3993 - DNA, 1068 bp, Staphylococcus aureus
atgattaaagttatgcatatatttagcagaatgaatcgtggcggtgcagaattaagaactatggatacaatgaaactattaaatagggagtttgagtttcatgtatgtgctacatcaggaaaaaggggcgaattagatgatgaattagaatctatgggtattacgatacattatttagatattaaaaaatttagttttcctttcaagttcataaagttattgaaaaagaaaaatatagatgttgtacatagtcacatactttttatgagtggattgattcaattactttctttttcagcaaatgtaagaaatagaataacacactttagaacttccaaagatagtaaagaacaatataataaaataagaaaagctagaaataaagtactgaaagccattatagaaatctttagtacgaaaatcttatatgtaagtaatatagcaaataggaatttaatctcaatgaaactttttccgaaaaaacataaaactatttacaatggatttgaaataagtaatataaacaaaaattttaaaaaagaggaaaatagttttatttatgtcggtaggttcattcatactaagaaccaattatttttgttagatgtaatagaaattttaaaaaaagaatttaatactaacattgaaattacttttgttggcaatattcaaactgattatggaaaaaaattcttgagtatagcaaatgaaagaggtttaaataaaaatattaaggttattggagaagtgaataacccattagattatttaaaaacgagtgaatattttttgtttcctagtgaattagagggattaccgggagcattgatagaagcgcatcatcacaattgtattgttatatcttcgaatataaaagaaaattctgaagtaaatcaatattttaaagactcttcatttgaattagaattaattccaaaaacttgggcctcaactatcaaaaagctaatttcaaggaaaaagcatataagttttaatgattctaatgtttttgatatcaatatgactacacaagaattaaaagaaatttatatgagtaaaactttatag

SEQ ID NO: 3994 - DNA, 1005 bp, Staphylococcus aureus
atgaaaatattaatcacaggtacagcaggttttattgggtcacatcttgcgaaaaaactaattaaacaaggtcattacgttataggtgtagatagcataaatgattattattcagtttctttgaaagaggatagattaaaatcaatagggaaagagaatttcacttttaataaagtgaaattagaaaattatgacgatttatctaaagtatttgtagatgaacaaccagaagtagtagttaatttagctgctcaagcaggtgttagatacagtattgagaatccaaggacgtatattgattctaatattgtcggttttatgaacattttagaatgcagtaggcattttaatattcaaaatttaatttatgcttcatctagttctgtttatggtgcaaatacttctaaaccatttagcacttcggataatattgatcatccgttaagtttatatgcagcaactaaaaaatcaaatgagctaatggcacatacgtatagtcatttatacaatttacctacaacaggattgagatttttcacagtatatggtccatgggggagaccagatatggcgctatttaaatttacaaaagcaatcgtaaatgatcaagctatagacgtctataatcacggaaatatgatgagagactttacttacgtggatgatattgttgaagcaattagtaggcttgttaagaaaccagcgtcccctaataaagaatggtcaggggccgaccctgaccctggttcctcatatgcaccatataaagtctacaatattgggaacaacagtccagttagattgatggaatttgtagaggctatagagaataaattaggcaaagaagctaggaaaaactacatggatttacaaccaggagatgtacctgaaacttatgcaaatgtagatgacttgtttagagatattgatttcaaaccagaaactacaattcaagatggtgtaaataaatttgttgattggtacttagaatattataaaaaatga

SEQ ID NO: 3995 - DNA, 639 bp, Staphylococcus aureus
atgaaatatggccctgatccaaatagcatatatccacatgaagaaataaaaagtgtttgttttattaaaaatacaattaccaatccaaatattatagttggagattatacttactattccgatgttaacggagctgaaaaatttgaagaacatgtgacacatcattatgaatttaggggtgataaacttgtaattggcaagttttgtgcaatagctgaaggtatagaatttattatgaatggagcaaaccatagaatgaattcaataacaacttatccttttaatataatgggaaatggttgggaaaaagcaactccatctcttgaagatttaccatttaagggagatactgttgttggaaatgatgtgtggattggtcagaatgttactgttatgccaggaattcaaataggagatggagcaattgttgctgcgaattcagttgttacaaaagatgtaccaccatatcgtattattggtggaaatccgagtagaattataaagaaaaggtttgaagatgaattgatagattatttattgcaaataaaatggtgggattggtcagcacaaaaaatattttctaatcttgaaacactttgtagctctgatttagagaaaataaaatctattcgagattag

SEQ ID NO: 3996 - DNA, 169 bp, Staphylococcus aureus
atgaaattacaaacaacatacccttcaaacaattatccaatatatgttgaacacggtgcaatcaagtatataggcacatatttaaatcaatttgaccaaagtttcttgttaattgatgaatatgtaaatcaatattttgcgaataaatttgatgatattttatcatatg

SEQ ID NO: 3997 - DNA, 1269 bp, Staphylococcus aureus
atggcgtattctattatcagagttgctaaagtgaaatcaaaaacgaatacaaaaggcattcaaaaacatgtacaaagacaaaataaaaattatgaaaatatggatattgatttagaaaaatcatacttaaattacgatttagtcaatgatagtccgattgattataatcaaaaaatcgaagagaaaattgaacaaaattataatgggaaacgcaaaattagaaaagacgcagtaaaacatattgatggtttaattacatctggtaatgaattttctaaaaatcaaacgcttgaagaaacaaagcagttttttgaacatgctaaaacgtttttagaacaagagtatggaaaagataatttattatatgcaacagtgcatatggacgaaaaaacacctcatatgcattatggggtagttccgattacagaagatggtcgattgagtgcaaaagaagttttaggtaataaaaaggcactaactgaatttcaagatagatttaacgaacatatcaatagttgtggttatgacttgagtagaggtataacaaggggcgttacaccgagacgacatgagcagataagtcgttataaaaatttaacagattatcacaaagaagaatatgagcatgagagccgaaaattagaccgtataaagcaagaaagcgaagaagtaatggaacagtatcaaaatgctttagatgttctaaaaaagcctataaatgtcccatatgagcttgaaattgaaaaagttggtggactgttcaacaaagaaacacaggaaacaggtaacgtcgttattgataaaaatgaatttgatttattgcaggaacaagtaaaagcttctcaactcattactgatgattatgaatatattaaaagcggaaaagctttaaaagattttgaagaaaaaaacaaaagattagaagatagattattagacgaacagattaaaaatggaaaagtaatagatgaatacaatgatttagcggatagttataataatttattggaacaaaatcaagaaaaagaaaaagagttaaaccgttcgtataaactatttaacaatgtgtttaagttgattaaaggtgtgatgaaagaagaaacatatcattcgttgattaaccatattgataatcacttagaaagctcaaaaatgcgagaaacaatgattgtagatgataacgatgaacaattctttaagaaaaaatatcaaaggcatgaaccagaaattatttttgaagatgaacgagatgatggctacactttataa

SEQ ID NO: 3998 - DNA, 1212 bp, Staphylococcus aureus
atgtcttattccattgttagagtttcaaaagtaaaatctggaacaaatacaacaggtattcaaaaacatgttcaaagagaaaataataattatgaaaacgaagatatagaccatagtaaaacacatttaaattatgctttagtaaatgacaataaacgaaactttaataacttgattgatgaaaaaatagaacagaattatacaggtaaaagaaaaataagaacagacgcagttaaacatattgatggcttgataacgtcagatagtgagttttttgataatcaaactccagaagatacaaagcagttttttgaacacgctaaagaatttttagaacaagaatacggtaaagataatttgctatatgcaacggtgcatatggacgaaaaaacaccacatatgcattatggtgtcgttccaataactgatgacggtcgtttaagtgctaaagaagttgtaggtaataaaaaagtcttaacagagtttcaggatagatttaacgaatatgttaatcaacgtggttatgatctggaacgtgggcaatcaagacaagttacaaatgcaaagcatgagcaaataagtcagtataagcagaaaacagaatatcataaacaagaatatgagcgtgagagccaaaaaacagactatataaagcaaaaaaacgataaattgatgcaagagtatcaaaaatcattaaatacgcttaaaaagcctataaatgttccgtataagcaagaaactgaaaaagtaggtggtttgtttagcaaagaaacacaagaaactggaaatgttgtaataagccaagaagattttgatgcctttcagaagcaaatagaagcagcacaattggtaacagaagattatgagtatattaagtcagaaaaagctttaaatgaccttaaaaacgaaaatagtgagcttaaagaagaaaatagaaatttatctgagaatcttgaacaaataaacgatattgctaaagaacagcaaaagcaacttaacgaagggaataaacttattaaagttattaaagagtttcttaagaaactcgaacaagccattggcagaaaatcatatataactttaatgaacgatgttactaaagataataatcaaatgaaagacgtattaagggggatagataagcagataaatccagaaaactatcaagaacaaaaacatgatattaagaaagatagaggtcatgaaagataa

SEQ ID NO: 3999 - DNA, 180 bp, Staphylococcus aureus
atgccttatatttatttaataatagccataagtactgaagttattggaagtgcatttcttaaatcttcagaaggcttttcaaaatttataccatcctttagaataaaattaaataaaatacgaaaattaaaaggagttaaaaatgccttatatttatttaataatagccataagtactga

SEQ ID NO: 4000 - DNA, 136 bp, Staphylococcus aureus
tgaaaaaggattcggctttatcgaagttgaaggagaaaatgacgtattcgtacatttttcagcaattaaccaagatggttacaaatcattagaagagggtcaagctgttgagtttgaagtagttgaaggcgaccgc

SEQ ID NO: 4001 - DNA, 870 bp, Staphylococcus aureus
atggtagataatattattaaatcagtagcagagaaattatcctctctgtcttatatagaaggtattgttttaggtggttcacgtgcaaggggcacccatacagaggattcggatatagatatcggcatctattacaattcagaatcatttgacataaatactattaatcaattcgctacaaagctggatgatgagcatagaaataaccttgttgtacctcccggagcatggggtgattggattaatggcggcggatggttagtcataaacgggtatcatgtggatttaattttacgtgatattaaacgtgtggaacaaataatgaaagatacagagcacggaattgttactgccaattatcagactgggcatccccatggttatattagtgcaatgtatcgaggagaattagcgattagcaaaatactatatgctaagaatgaaagcttatgcgaattaaaaaaacaggcagaaacttatcccaatgctttgcagaaaagtttagttaacttttttatgtttgaagcagggttctctttaatgtttgtaaaagcaaattcgggaacagacgataaatattatattgcgggtcatgtttttcgtatagtttcatgtttaaatcaagtgttatttgcatgtaataatgcttattgtatcaacgaaaagaaagctataaaactgcttgaaacttttgaacataaacctgaaaaatataccgagaaggtaaatcatatttttgaagtactcggtatctcactttttgaatgctacgacatgaccgagaagctttataatgaagtgaatgaaattgtatcggagataaataactttttaaacgaggagagttcagatgaaagaaaacaaatatga

SEQ ID NO: 4002 - DNA, 536 bp, Staphylococcus aureus
gtgattacagaaatgaaagcagggcacctgaaagatatcgataaacccagcgaaccatttgaggtgataggtaagattataccgaggtatgaaaacgagaattggacctttacagaattactctatgaagcgccatatttaaaaagctaccaagacgaagaggatgaagaggatgaggaggcagattgccttgaatatattgacaatactgataagataatataatatatctttactaccaagacgataaatgcgtcggaaaagttaaactgcgaaaaaattggaaccggtacgcttatatagaagatatcgccgtatgtaaggatttcagggggcaaggcataggcagcgcgcttatcaatatatctatagaatgggcaaagcataaaaacttgcatggactaatgcttgaaacccaggacaataaccttatagcttgtaaattctatcataattgtggtttcaaaatcggctccgtcgatactatgttatacgccaactttgaaaaagctgttttctggtatttaaggttttag

SEQ ID NO: 4003 - DNA, 465 bp, Staphylococcus aureus
atgaaaccaaagataattatgcacacacaaattagccttgatggccgcattaaaggctttgataatccggaagtttactaccaggttgccgggggaattcattcggatgcggtgctgtttgggtccaatactgtttttactgcatttgaaaaatatcctgctgaaacagaggctgattttgagaaaatcataacaagcccggaggaccccagaccaataggagtcatacctgacagcagaggtatcttgagaagtcttcattgcttaagaaatcttggatatctgaaggaaattgtcattctggtatcaactgccactccgaaggaatatttgaattatttggaggaaggcattacccatatattgtgtcaggaaatgatcatgtggactatgaaaaagcctttcagatcctgcatgagcaatatgggtgtaaatacatgcggacagacagtggcggtggattaa

SEQ ID NO: 4004 - DNA, 324 bp, Staphylococcus aureus
atgccatatatatatttacttatagcaataataaccgaaataatagggacaagttttttaaaatcagcagaaggttttacaaaactatggccaacactaggaacacttatttcgttcggaatatgtttttactttttaagtacagccatgaaatatttaccactaaatatttcatatgcaacatgggcaggattaggtttagtacttacaactctagtttcagtcattatttttaaagaaaatattaatctaattagtatattttcaataaccctaattattattggagtagtacttctgaatgtttttggatcaggacactaa

SEQ ID NO: 4005 - DNA, 1659 bp, Staphylococcus aureus
atgcttaaaatcgacatgaagaatgtaaaaaaatattatgcagataaattaattttaaatataaaagaactaaagatttatagtggggataaaataggtattgtaggtaagaatggagttggcaaaacaacacttttaaaaataataaaaggactaatagagattgacgaaggaaatataattataagtgaaaaaacaactattaaatatatctctcaattagaagaaccacatagtaagataattgatggaaaatatgcttcaatatttcaagttgaaaataagtggaatgacaatatgagtggtggtgaaaaaactagatttaaactagcagagggatttcaagatcaatgttctttaatgctcgtagatgaacctacaagtaatttagatatcgaaggaatagagttgataacaaatacttttaaagagtaccgtgatacttttttggtagtatctcatgatagaatttttttagatcaagtttgtacaaaaatttttgaaattgaaaatggatatattagagaattcatcggtaattatacaaactatatagagcaaaaagaaatgcttctacgaaagcaacaagaagaatacgaaaagtataattctaaaagaaagcaattggagcaagctataaagctaaaagagaataaggcgcaaggaatgattaagcccccttcaaaaacaatgggaacatctgaatctagaatatggaaaatgcaacatgctactaaacaaaaaaagatgcatagaaatacgaaatcgttggaaacacgaatagataaattaaatcatgtagaaaaaataaaagagcttccttctattaaaatggatttacctaatagagagcaatttcatggtcgcaatgtaattagtttaaaaaacttatctataaaatttaataatcaatttctttggagagatgcttcatttgtcattaaaggtggagaaaaggttgctataattggtaacaatggtgtaggaaaaacaacattgttgaagctgattctagaaaaagtagaatcagtaataatatcaccatcagttaaaattggatacgtcagtcaaaacttagatgttctacaatctcataaatctatcttagaaaatgttatgtctacctccattcaagatgaaacaatagcaagaattgttctagcaagattacatttttatcgcaatgatgttcataaagaaataaatgttttgagtggtggagaacaaataaaggttgcttttgccaagctatttgttagcgattgtaatacattaattcttgatgaaccaacaaactatttggatatcgatgctgttgaggcattagaagaattgttaattacctatgaaggtgttgtgttatttgcttcccatgataaaaaatttatacaaaacctagctgaacaattgttaataatagaaaataataaagtgaaaaaattcgaaggaacatatatagaatatttaaaaattaaagataaaccaaaattaaatacaaatgaaaaagaactcaaagaaaaaaagatgatactagaaatgcaaatttcatcattattaagtaaaatctcaatggaagaaaatgaagaaaaaaacaaagaattagatgaaaagtacaaattgaaattaaaagaattgaaaagcctaaataaaaatatttaa

SEQ ID NO: 4006 - DNA, 459 bp, Staphylococcus aureus
atgaataaaaaactattaacaaaaacattgatagcaagtgctttagttttaacaacagtaggttcaggttttcattcttcttcaaattataatggtattaataacgttgaaaaagctgagcaaacgacagataacgcattgtggaaaaatgtaagagacgctttaaaagacgcgaatattatcgataaaacagataatgaaaatgtcaaggttacgtataaaatagaaaatggtggagaaaataccatagaaggaacagttaatttagaaaatattagtacttcaaacaatcctaaaataaaccctcaaaatgttacaaaaattaatataactagaaaaaatccgaactaccctaatattgatgctaataatacatggaaaaaattaccagaaaaattgaaagaaaaaaatatagtggaacaacggcgacaatgtttcaatcttaagtacagaccctaa

SEQ ID NO: 4007 - DNA, 270 bp, Staphylococcus aureus
atgaatttctttttacgcttactccctcaagggcttcacttaatctgtctcactgtctcactgtttacgacctacatttatatattttgtatattgtgtaaaataatttctgtaaaactttaccctaaaaaccatcaagacaccaagacacttatagcgtggcatatactgccacaagggattgcgggtgtcttaaacttgtcttataagtgtcttactgtcctaaaaataagatgtttaaactttaagattcttataataagaagctaa

SEQ ID NO: 4008 - DNA, 249 bp, Staphylococcus aureus
atgttttgcattaccagttattcaaaaagacacatatttattaagcgagtgaatgactgtccaattatggatgttgatatgctcgaacagtggtcaaaggagtataaacaatcaaatggtagtcctaatatcaaagggtacacacgacgtgatagtgcgtattggcgagatatagcttttggtgtagtgagggagagcgcaattcaacattggcttcaattacaggttatcttttgcgtaggtatgtag

SEQ ID NO: 4009 - DNA, 549 bp, Staphylococcus aureus
atgggcagtgaaagcccgttttatgaaatcaataatagttacttagatgaaattctcataatgtttataaactcatctaatagtactattagcgatagagaccccaatgaacttattacacaattcaatgaatattatgatgttacaattaaaaaaaaacagaacgaaaactcaaaaattgaaagtgatatatttagtaataaaatcaaattggttaaagggactacaaaaaaagaagttatagaaaagccttattttgacttaaattggctacttactcaaaatgaatatgaagtgttttttgacagaagctttctcttagataataattttttaaataagaagcatttcacagaaaaagatatgtattattacaacgttttaaatgataacgatttaaagacaattaaagatttaatcgttgtatttttacttaataaatacaattacattaaaaacaaggatgatttttttaatatctttacaaactcggaagatgataaaactaaaagagacgccttatataaaattttatatgaaacagattaa

SEQ ID NO: 4010 - DNA, 285 bp, Staphylococcus aureus
atgaatgacaaagagaaaatttataatcaacttcatcatgatgcaccaattcaaattatgccagcacccgaaaatttatttgtcgaatatatagaagatggcgaagtgtggtattcaccagttgtatgtatggctttaaataaagcgcataatattaatttctatgatagtgatgatgtgggatgcatcgataaagcgggtacatttagtattaaaaaatttaatcctgagacaggtgagtttgaacaattcagcaaaatggctcaaaaggaggtaacacaatga

SEQ ID NO: 4011 - DNA, 255 bp, Staphylococcus aureus
atgatctgttttaatgtttttcgaccttacaataggcaaatccaaacctttaccatcaaccatataaacaattgggctcaacaaatatccatctcaataacgtctgtcttttttaagttcagcgataacatcaaacgcttcttgattccacccaatccaaaacacaacattgggatgttgaccacttgtatatgcgccgtcacctttataatcaaagttattttcttcaaatacacgttctatttctacaaatga

SEQ ID NO: 4012 - DNA, 11484 bp, Staphylococcus aureus
gtgaaagacaacgcgacaaatcttgataatgcaatgaatcaacttcgaaatagtattgcgaataaagatgatgtaaaagcgagtcaaccatatgttgatgcagatagagataaacaaaatgcatacaatacagcagttacaaatgctgaaaatatcattaatgcaacgagtcagccgacacttgatccatctgcagtaacacaagcagctaatcaagtgagcactaacaaaactgcgcttaatggtgcacaaaacttagcgaataaaaagcaagaaacgactgctaacatcaaccaattaagtcatttaaataatgctcaaaagcaagatttaaatacgcaagtgacaaatgcaccaaatattagcacagtaaatcaagtgaaaactaaagctgaacaattagatcaagcaatggaacgtttaatcaacggaatccaagacaaagatcaagtgaaacaaagtgttaactttacagatgcagatccagaaaaacaaacagcatacaacaatgcggtaactgctgctgaaaatattattaatcaagcaaatggtacaaatgcgaaccaatcacaagttgaagcagcactttcaactgtaacaactacgaaacaagcgttgaatggtgatagaaaagtaacagatgctaaaaacaatgcaaaccaaacattatctacgttagataacttaaacaatgcacaaaaaggtgctgttactggaaacatcaatcaagcgcacactgtagctgaagtaacgcaagccattcaaaccgctcaggaactgaatacagcgatgggtaacttgaaaaatagcttgaatgataaagacactacacttggcagtcaaaactttgcagatgcagatccagagaagaaaaatgcatacaatgaagcggttcataatgctgaaaatattttaaataaatctacaggtacgaacgtgcctaaagatcaagttgaagcagctatgaatcaagtgaatgctacaaaagcagcgcttaatggtactcaaaaccttgaaaaagctaaacaacacgcaaatacagcaattgacggtttaagccatttaacaaatgcacaaaaagaggcattaaaacaattggtacaacaatcgactactgttgcagaagcacaaggtaatgagcaaaaagcaaacaatgttgatgcagcaatggacaaattacgtcaaagtattgcagataatgcgacaacaaaacaaaaccaaaattatactgatgcaagtcagaataaaaaggatgcgtacaataatgctgtcacaactgcacaaggtattattgatcaaactacaagtccaactttagatccgactgttatcaatcaagctgctggacaagtaagcacaactaaaaatgcattaaatggtaatgaaaacctagaggcagcgaaacaacaagcgtcacaatcattaggttcattagataacttaaataatgcgcaaaaacaaacagttactgatcaaattaatggcgcgcatactgttgatgaagcaaatcaaattaagcaaaatgcgcaaaacttaaatacagcgatgggtaacttgaaacaagcgatagctgacaaagatgctacgaaagcgacagttaacttcactgatgcagatcaagcaaaacaacaagcatataacactgctgttacaaatgctgaaaatatcatttcaaaagctaatggcggcaatgcaacacaagctgaagttgaacaagcaatcaaacaagttaatgctgcaaaacaagcattaaatggtaatgccaacgttcaacatgcaaaagacgaagcaacagcattaattaatagctctaatgaccttaaccaagcacaaaaagacgcattaaaacaacaagttcaaaatgcaactactgtagctggtgtaaacaatgttaaacaaacagcacaagagttaaacaatgctatgacacaattaaaacaaggcattgcagataaagaacaaacaaaagctgatggtaactttgtcaatgcagatcctgataagcaaaatgcatataatcaagcagtagcgaaagctgaagcattaattagtgctacgcctgatgttgtcgttacacctagcgaaattactgcagcgttaaataaagttacgcaagctaaaaatgatttaaatggtaatacaaacttagcaacggcgaaacaaaatgttcaacatgctattgatcaattgccaaacttaaaccaagcgcaacgtgatgaatacagcaaacaaatcacgcaagcaacacttgtaccaaacgtcaatgctattcaacaagcggcgacaacgcttaatgacgcgatgacacaattgaaacaaggtattgcgaataaagcacaaattaaaggtagcgagaactatcacgatgctgatactgacaagcaaacagcatatgataatgcagtaacaaaagcagaagaattgttaaaacaaacaacaaatccaacaatggatccaaatacaattcaacaagcattaactaaagtgaatgacacaaatcaagcacttaacggtaatcaaaaattagctgatgccaaacaagatgctaagacaacacttggtacactagatcatttaaatgatgctcaaaaacaagcgctaacaactcaagttgaacaagcaccagatattgcaacagttaataatgttaagcaaaatgctcaaaatctgaataatgctatgactaacttaaacaatgcattacaagataaaactgagacattaaatagcattaactttactgatgcagatcaagctaagaaagatgcttatactaatgcggtttcacatgcagaaggtattttatctaaagcaaatggcagcaatgcaagtcaaactgaagtggaacaagcgatgcaacgtgtgaacgaagcgaaacaagcattgaatggtaatgacaatgtacaacgtgcaaaagatgcagcgaaacaagtgattacaaatgcaaatgatttaaatcaagcgcaaaaagatgcattaaaacaacaagtcgatgctgcgcaaactgttgcaaatgtaaacacgattaagcaaacagcacaagatttaaatcaagcaatgacacaattgaaacaaggtattgcagataaagaccaaactaaagcaaatggtaactttgtcaatgctgatactgataagcaaaatgcttacaacaatgcggtagcacatgctgaacaaataattagtggtacaccaaatgcaaacgtggatccacaacaagtggctcaagcgttacaacaagtgaatcaagctaagggtgatttaaacggtaaccataacttacaagttgctaaagacaatgcaaatacagccattgatcagttaccaaacttaaatcaaccacaaaaaacagcattaaaagaccaagtgtcgcatgcagaacttgttacaggtgttaatgctattaagcaaaatgctgatgcgttaaataatgcaatgggtacattgaaacaacaaattcaagcgaacagtcaagtaccacagtcagttgactttacacaagcggatcaagacaaacaacaagcatataacaatgcggctaaccaagcgcaacaaatcgcaaatggcataccaacacctgtattgacgcctgatacagtaacacaagcagtgacaactatgaatcaagcgaaagatgcattaaacggtgatgaaaaattagcacaagcgaaacaagaagctttagcaaatcttgatacgttacgcgatttaaatcaaccacaacgtgatgcattacgtaaccaaatcaatcaagcacaagcgttagctacagttgaacaaactaaacaaaatgcacaaaatgtgaatacagcaatgagtaacttgaaacaaggtattgcaaacaaagatactgtcaaagcaagtgagaactatcatgatgctgatgccgataagcaaacagcatatacaaatgcagtgtctcaagcggaaggtattatcaatcaaacgacaaatccaacgcttaacccagatgaaataacacgtgcattaactcaagtgactgatgctaaaaatggcttaaacggtgaagctaaattggcaactgaaaagcaaaatgctaaagatgccgtaagtgggatgacgcatttaaacgatgctcaaaaacaagcattaaaaggtcaaatcgatcaatcgcctgaaattgctacagtgaaccaagttaaacaaacagcaacgagcctagatcaagcaatggatcaattatcacaagctattaatgataaagctcaaacattagcggacggtaattacttaaatgcagatcctgacaaacaaaatgcgtataaacaggcagtagcaaaagctgaagcattattgaataaacaaagtggtactaatgaagtacaagcacaagttgaaagcatcactaatgaagtgaacgcagcgaaacaagcattaaatggtaatgacaatttggcaaatgcaaaacaacaagcaaaacaacaattggcgaacttaacacacttaaatgatgcacaaaaacaatcatttgaaagtcaaattacacaagcgccacttgttacagatgtcactacgattaatcaaaaagcacaaacgttagatcatgcgatggaattattaagaaatagtgttgcggataatcaaacgacattagcgtctgaagattatcatgatgcaactgcgcaaagacaaaatgactataaccaagctgtaacagctgctaataatatcattaatcaaactacatcgcctacgatgaatccagatgatgttaatggtgcaacgacacaagtgaataatacgaaagttgcattagatggtgatgaaaaccttgcagcagctaaacaacaagcaaacaacagacttgatcaattagatcatttgaataatgcgcaaaagcaacagttacaatcacaaattacgcaatcatctgatattgctgcagttaatggtcacaaacaaacagcagaatctttaaatactgcgatgggtaacttaattaatgcgattgcagatcatcaagccgttgaacaacgtggtaacttcatcaatgctgatactgataaacaaactgcttataatacagcggtaaatgaagcagcagcaatgattaacaaacaaactggtcaaaatgcgaaccaaacagaagtagaacaagctattactaaagttcaaacaacacttcaagcgttaaatggagaccataatttacaagttgctaaaacaaatgcgacgcaagcaattgatgctttaacaagcttaaatgatcctcaaaaaacagcattaaaagaccaagttacagctgcaactttagtaactgcagttcatcaaattgaacaaaatgcgaatacgcttaaccaagcaatgcatggtttaagacagagcattcaagataacgcagcaactaaagcaaatagcaaatatatcaacgaagatcaaccagagcaacaaaactatgatcaagctgttcaagccgcaaataatattatcaatgaacaaactgcaacattagataataatgcgattaatcaagcagcgacaactgtgaatacaacgaaagcagcattacatggtgatgtgaagttacaaaatgataaagatcatgctaagcaaacggttagtcaattagcacatctaaacaatgcacaaaaacatatggaagatacgttaattgatagtgaaacaactagaacagcagttaagcaagatttgactgaagcacaagcattagatcaacttatggatgcattacaacaaagtattgctgacaaagatgcaacacgtgcgagcagtgcatatgtcaatgcagaaccgaataaaaaacaatcctatgatgaagcagttcaaaatgctgagtctatcattgcaggattaaataatccaactatcaataaaggtaatgtatcaagtgcgactcaagcagtaatatcatctaaaaatgcattagatggtgttgaacgattagctcaagataagcaaactgctggaaattctctaaatcatttagatcaattaacaccagctcaacaacaagcgctagaaaatcaaattaataatgcaacaactcgtggcgaagtagcacaaaaattaactgaagcacaagcacttaaccaagcaatggaagctttacgtaatagcattcaagatcaacagcaaacggaagcgggtagcaagtttatcaatgaagataaaccacaaaaagatgcttaccaagcagcagttcaaaatgcaaaagatttaattaatcaaactaacaatccaacgcttgataaagcacaagttgaacaattgacacaagctgttaaccaagctaaagataacctacacggtgatcaaaaacttgcagacgataaacaacatgcggttactgatttaaatcaattaaatggtttgaataatccgcaacgtcaagcacttgaaagccaaataaacaacgcagcaactcgtggcgaagtagcacaaaaattagctgaagcaaaagcgcttgatcaagcaatgcaagcattacgtaatagtattcaagatcaacaacaaacagaatctggtagcaagtttatcaatgaagataaaccgcaaaaagatgcttaccaagcagcagttcaaaatgcaaaagatttaattaaccaaacaggtaatccaacactcgacaaatcacaagtagaacaattgacacaagcagtaacaactgcaaaagataatctacatggtgatcaaaaacttgctcgtgatcaacaacaagcagtaacaactgtaaatgcattgccaaacttaaatcatgcacaacaacaagcattaactgatgctataaatgcagcgcctacaagaacagaggttgcacaacatgttcaaactgctactgaacttgatcacgcgatggaaacattgaaaaataaagttgatcaagtgaatacagataaggctcaaccaaattacactgaagcgtcaactgataaaaaagaagcagtagatcaagcgttacaagctgcagaaagcattacagatccaactaatggttcaaatgcgaataaagacgctgtagaccaagtattaactaagcttcaagaaaaagaaaatgagttaaatggtaatgagagagtcgctgaagctaaaacacaagcgaaacaaactattgaccaattaacacatttaaatgctgatcaaattgcaactgctaaacaaaacattgatcaagcgacgaaacttcaaccaattgctgaattagtagatcaagcaacgcaattgaatcaatctatggatcaattacaacaagcagttaatgaacatgctaacgttgagcaaactgtagattacacacaagcagattcagataaacaaaatgcttataaacaagctattgctgatgctgaaaatgtattgaaacaaaatgcgaataagcaacaagtggatcaagcacttcaaaatattttaaatgcaaaacaagcattaaatggtgatgaacgtgtagcacttgctaaaacaaatggtaaacatgacatcgaccaattgaatgcattaaacaatgctcaacaagatggatttaaaggtcgcatcgatcaatcaaacgatttaaatcaaatccaacaaattgtagatgaggctaaggcacttaatcgtgcaatggatcaattgtcacaagaaatcactgacaatgaaggacgcacgaaaggtagcacgaactatgtcaatgcagatacacaagtcaaacaagtatatgatgaaacggttgataaagcgaaacaagcacttgataaatcgactggtcaaaacttaactgcaaaacaagttatcaaattaaatgatgcagtcactgcagctaagaaagcattaaatggtgaagaaagacttaataatcgtaaagctgaagcattacaaagattggatcaattaacacatctaaacaatgctcaaagacaattagcaatccaacaaattaataatgctgaaacgctaaataaagcatctcgagcaattaatagagcaactaaattagataatgcaatgggtgcagtacaacaatatattgacgaacagcaccttggtgttatcagcagcacaaattacatcaatgcagatgacaatttgaaagcaaattatgataatgcaattgcgaatgcagcacatgagttagataaagtgcaaggtaatgcaattgcaaaagctgaagcagagcaattgaaacaaaatattatcgatgctcaaaatgcattaaatggagaccaaaaccttgcaaatgccaaagataaagcaaatgcgtttgttaattcgttaaatggattaaatcaacagcaacaagatcttgcacataaagcaattaacaatgccgatactgtatcagatgtaacagatattgttaataatcaaattgacttaaatgatgcaatggaaacattgaaacatttagttgacaatgaaattccaaatgcagagcaaactgtcaattaccaaaacgctgacgataatgctaaaacaaacttcgatgatgccaaacgtctagcaaatacattgctaaatagtgataacacaaatgtgaatgatatcaatggcgcaatccaagcagtcaatgatgcaatccataatcttaatggtgatcaacgactacaagatgctaaagacaaggcaattcaatctattaatcaagctttagctaataagctaaaagaaatcgaagcttcaaatgcgacggatcaagacaagcttattgcgaaaaataaagcagaagaattggcaaacagcatcatcaacaacattaataaagcaacaagtaatcaggctgtatctcaagttcaaacagcaggcaaccacgcgattgaacaagtgcatgccaatgaaataccaaaagcaaaaattgatgccaataaagacgttgataagcaagttcaagcattaattgacgaaattgatcgaaatccaaatctaacagataaggaaaaacaagcacttaaagatcgtattaatcaaatacttcaacaaggtcataacggcattaacaatgcgatgactaaagaagaaattgaacaagccaaagcacaacttgcgcaagcattacaagacatcaaagatttagtgaaagctaaagaagatgcgaaacaagatgttgataaacaagttcaagctttaattgacgaaatcgatcaaaatccaaatctaacagataaggaaaaacaagcacttaaagatcgtattaatcaaatacttcaacaaggtcataacgacattaacaatgcgatgacaaaagaagcaattgaacaagcaaaagaacgtttagcgcaagcattgcaagacatcaaagatttagtgaaagctaaagaagatgcgaaaaatgatattgataaacgtgtacaagctttaattgacgaaatcgatcaaaatccaaatctaacagataaggaaaaacaagcacttaaagatcgaattaatcaaatacttcaacaaggtcataacgacattaacaatgcgctgactaaagaagaaattgagcaggcaaaagcacaacttgcacaagcattgcaagacatcaaagatttagtgaaagctaaagaagatgcgaaaaatgcaataaaagccttagctaatgcgaagcgtgatcaaatcaattcaaatccagatttaacacctgagcaaaaagcaaaagcgctcaaagaaattgacgaagctgaaaaacgagcactacaaaacgttgagaatgctcaaactatagatcaattaaatcgaggattaaacttaggtttagatgacattagaaatacacatgtatgggaggttgatgaacaacctgctgtaaatgaaatttttgaagcaacacctgagcaaatcctagttaatggtgaactcattgtacatcgtgatgacatcattacagaacaagatattcttgcacacataaacttaattgatcagctttcagcagaagtcatcgatacaccatcaactgcaacgatttctgatagcttaacagcaaaagttgaagttacattgcttgatggatcaaaagtgattgttaatgttcctgtaaaagttgtagaaaaagaattgtcagtagtcaaacaacaggcaattgaatcaatcgaaaatgcggcacaacaaaagattaatgaaatcaataatagtgtgacattaacactggaacaaaaagaagctgcaattgcagaagttaataagcttaaacaacaagcaattgatcatgttaacaatgcacctgatgttcattcagttgaagaaattcaacaacaagaacaagcgcatattgaacaatttaatccagaacaatttacgattgaacaagcaaaatcaaatgcaattaaatcgattgaagatgcaattcaacatatgattgatgaaatcaaagctcgtactgatctaacagataaagagaagcaagaagctattgctaagttaaatcaattaaaagaacaagcaattcaagcgattcaacgtgcgcaaagcatcgatgaaataagtgagcaattggaacaatttaaagctcaaatgaaagcagctaatccaacagcaaaagaactagctaaacgcaagcaagaagctattagtagaattaaagacttttcaaatgaaaaaataaatagtattcgaaatagtgaaattggcacagctgatgaaaaacaagcagcaatgaatcaaattaacgaaattgtgcttgaaacaattagagatattaataatgcgcatacattacagcaagttgaggctgcattgaacaatggtattgctcgaatttcagcagtacaaattgtaacatctgatcgtgctaaacaatcgtcaagtactggaaatgaatctaatagccatttaacaattggttatggaactgcaaatcatccatttaacagttcgactattggacataaaaagaaacttgatgaagatgatgacattgatccacttcatatgcgtcactttagtaataatttcggtaatgttattaaaaacgctattggtgtggtgggtatctctggtttactagctagtttctggttcttcattgccaaacgtcgtcgtaaagaagatgaagaggaagaattagaaataagagataataataaagattcaataaaagagactttagacgatacaaaacatttaccacttttatttgcgaaacgtcgcagaaaagaagatgaagaagatgttactgttgaagaaaaagattcgctaaataatggcgagtcactcgataaagttaaacatacgccgttcttcttaccaaaacgtcgtcgtaaagaagatgaagaagatgtggaagttacaaatgaaaacacagatgaaaaagtgttgaaagataacgaacattcaccactcttattcgcaaaacgacgcaaagataaagaggaagatgttgaaacaacaactagtattgaatctaaagatgaggacgttcctttattattggctaaaaagaaaaatcaaaaagataaccaatccaaagacaaaaagtcagcatcaaaaaatacttctaaaaaggtagcagctaaaaagaagaaaaagaaagctaagaaaaataaaaaataa

SEQ ID NO: 4013 - DNA, 11484 bp, Staphylococcus aureus; identical to SEQ ID NO: 4012

SEQ ID NO: 4014 - DNA, 11304 bp, Staphylococcus aureus
gtgtctaaagatcaagttgaagcagctatgaatcaagtgaatactacaaaagcagcgcttaatggtactcaaaaccttgaaaaagctaaacaacacgcaaatacagcgattgacggtttaagccatttaacaaatgcacaaaaagaggcattaaaacaattggtacaacaatcgactactgttgcagaagcacaaggtaatgaacaaaaagcaaacaatgttgatgcagcaatggacaaattacgtcaaagtattgcagataatgcgacaacaaaacaaaaccaaaattatactgattcaagtccgaataaaaaggatgcgtacaataatgctgtcacaactgcacaaggtattattgatcaaacgacaagtccaactttagatccgactgttatcaatcaagctgctggacaagtaagcacaactaaaaatgcattaaatggtaatgaaaacctagaggcagcgaaacaacaagcgacacaatcattaggttcattagacaacttaaataatgcgcaaaaacaagcagttactgatcaaattaatggcgcgcatactgttgatgaagcaaatcaaattaaacaaaatgcgcaaaacttaaatacagcgatgggtaacttgaaacaagcgattgctgacaaagatgctacgaaagcaacagtaaacttcactgatgcagatcaagcaaaacaacaagcatataacactgctgttacaaatgctgaaaacatcatttcaaaagctaatggtggcaatgcaacacaaactgaagttgaacaagcaatccaacaagttaatgctgcaaaacaagcattaaatggtaatgccaacgttcaacatgcgaaagacgaagcaacagcattaattaatagctctaatgaccttaaccaagcacaaaaagacgcattaaaacagcaagttcaaaatgcaactactgtagctggtgtaaacaatgttaaacaaacagcgcaagagttaaacaatgcaatgacacaattaaaacaaggcattgcagataaagaacaaacaaaagctgatggtaactttgtcaatgcagatcctgacaaacaaaatgcatataaacaagcagtagcaaaagctgaagcattaattagcggcacacctgatgttgtcgttacacctagcgaaattactgcagcgttaaataaagttacacaagctaaaaatgatttaaatggtaatacgaacttagcaacaacgaaacaaaatgttcaacatgctattgatcaattgccaaacttgaatcaagcgcaacgtgatgaatacagcaaacaaattacgcaagcaacacttgtaccaaacgtcaatgctattcaacaagcggcaactacgcttaatgatgcgatgacacaattgaaacaaggtattgcgaataaagcacaaattaaaggtagcgagaactatcacgatgctgatactgacaagcaaacagcatatgataatgcagtaacaaaagcagaagaattgttaaaacaaacaacaaatccaacaatggatccaaatacaattcaacaagcattaactaaagtgaatgatacaaatcaagcacttaacggtaatcaaaaattagctgatgctaaacaagctgctaagacaaatcttggcacattagatcatttaaatgatgcgcaaaaacaagcgttaacaacacaagttgaacaagcaccagatattgcaacagttaataatgttaagcaaaatgctcaaaatctgaataatgctatgactaacttaagtaatgcattacaagataaaactgagacattaaatagcattaactttactgatgcagatcaagctaagaaagatgcttatactaatgcggttgcacatgcagaaggtattttatctaaagcaaatggcagcaatgcaagtcaaaccgaagtggaacaagcgatgcaacgcgtgaacgaagcgaaacaagcattgaatggtaatgacaatgtacaacgtgcaaaagatgcagcgaaacaagtgattacaaatgcgaatgatttaaatcaagcgcaaaaagatgcgttaaaacaacaagtcgatgctgcgcaaactgttgcaaatgtaaacacgattaagcaaacagcacaagatttaaatcaagcaatgacacaattgaaacaaggtattgcagataaagaccaaactaaagcaaatggtaactttgtcaatgctgatactgataagcaaaatgcatacaacaatgcggtagcacatgctgaacaaatcattagtggtacaccaaatgcaaacgtggatccacaacaagtggctcaagcgttacaacaagtgactcaagctaagggtgatttaaacggtaaccataacttacaagttgctaaagacaatgcgaatactgccattgatcagttaccaaacttaaatcaaacacaaaaaacagcattaaaagaccaagtgtcacatgcagaacttgttacaggtgttaatgctattaagcaaaatgctgatgcattaaataatgcaatgggtacgttgaaacaacaaattcaagcaaacagtcaagtaccacaatcagttgactttacacaagcggatcaagacaaacaacaagcatataacaatgcagctaaccaagcgcaacaaattgcaaatggcacaccaacacctgtattgacgcctgacgcagtaacacaagcagttactacaatgaatcaagcgaaagatgcattaaacggtgatgaaaaattagcgcaagcgaaacaagatgcaatagcaaatctagatacgttgcgtgacttaaatcaaccacaacgtgatgcgttacgtaatcaaatcaatcaagcacaagcgttagctacagttgaacaaactaaacaaaatgcacaaaatgttaatacagcaatgagtaacttgaaacaaggtattgcaaataaagataccgtcaaagcaagtgaaaactatcacgatgctgatgccgataagcaaacagcatatacaaatgcagtgtctcaagcggaaggtattatcaatcaaacgacaaatccaatgcttaacccagatgatattactcgtgcattaactcaagtgactgatgctaaaaatggcttaaacggtgaagctaaattggcaactgaaaagcaaaatgctaaagatgctgtcaatgcaatgacgcatttgaacgatgctcaaaaacaagcattaaaaggacaaatcgatcaatcgcctgaaattgctatagtgaaccaagttaaacaaacagcaacgagcctagatcatgcaatggatcaattatcacaagctattaatgataaagctcaaacattagcggacggtaattacttaaatgcagatcctgacaaacaaaatgcgtataaacaggcagtagcaaaagctgaagcattattgaataaacaaagtggtactaatgaagtacaagcacaagttgaaagcatcactaatgaagtgaacgcagcgaaacaagcattaaatggtaatgataatttagcgaatgctaagcaacaagcgaaacaacaactggcgaatctaacacacttaaatgatgcacaaaaacaatcatttgaaagtcaaattacacaagcgccacttgttacagatgtcactacaattaatcaaaaagcacaagcgttagatcatgcaatggatcaattatcacaagctattaatgataaagctcaaacattagcggacggtaattacttaaatgcagatcctgacaaacaaaatgcgtataaacaggcagtagcaaaagctgaagcattattgaataaacaaagtggtactaatgaagtacaagcacaagttgaaagcatcactaatgaagtgaacgcagcgaaacaagcattaaatggtaatgataatttagcgaatgctaagcaacaagcgaaacaacaactggcgaatctaacacacttaaatgatgcacaaaaacaatcatttgaaagtcaaattacacaagcgccacttgttacagatgtcactacaattaatcaaaaagcacaagcgttagatcatgcgatggaattattaagaaatagtgttgcggataatcaagcgacattagcgtctgaagattatcatgatgcaactgcgcaaagacaaaatgactataaccaagcagtaacagctactaataatatcattaaccaaacaacatcacctacaatgaatccagatgaagttaatcgtgcaacgacacaagtgaataacacgaaagttgcattagatggtgatgaaaaccttgtagcagctaagcaacaagcgaacaatagacttgatcaattagatcatttaaataatgcgcaaaagcaacagttacaatcacaaattacgcaatcatctgatattgctgcagttaatggtcacaaacaaacagcagaatctttaaatacagcaatgggtaacttaattaatgcgattgcagatcatcaaaccgttgaacaacttggtaacttcgtcaatgctgatactgataaacaaactgcttatactacagcggtaaatgaagcagaagccatgattaacaaacaaactggtcaaaatgcgaaccaaacagaagtagaacaagctattactaaagttcaaacaacacttcaagcgttaaatggagatcataatttacaagttgctaaagcaaatgcgacgcaagcaattgatgctttaacaagcttaaatgatcctcaaaaaacagcattaaaagaccaagttactgctgcaactttagtaactgcagttcatcaaattgaacaaaatgcgaatacgcttaaccaagcaatgcatggcttaagagaaagtattcaagataacgcagcaactaaagcaaatagcaaatatatcaacgaagatcaatcagaacaacaaaactacgatcaagcagtgcaagccgcaaataatattatcaatgaacaaacagcaacattagataataatgcaattaatcaagcagcgacaactgtgaatacaacgaaagcagcattacatggtgatgtgaaattacaaaatgataaagatcatgcgaaacaaacagttagtcaattaacacatttaaacaatgctcaaaaacatatggaagatacgttgattgatagtgaaacaactagaacagccgttaaccatgatttgactgaagcacaagcattagatcaacttatggatgcattacaacaaagtattgctgacaaagatgcaacacgtgcgagcagtgcatatgtcaatgcagaaccgaataaaaaacaatcatatgatgaagcagttcaaaatgctgagtctatcattgcgggattaaataatccgactatcaataaaggtaatgtaacaagtgcgacacaagctgtaacatcatctaaaaatgcattagacggtgttgaacgattagcgcaagataagcaaactgctggaaattctctaaatcatttagaccaattaacaccagcacaacaacaagcactagaaaatcaaattaataatgcaacaactcgtgataaagtggctgaaattattgcacaagcgcaagcattaaatgaagcgatgaaagcattaaaagaaagtattaaagatcaaccacaaactgaagcaagtagtaaatttattaatgaagatcaagcacaaaaagatgcttatacgcaagctgtacaacacgcgaaagatttgattaacaaaacaactgatcctacattagctaaatcaatcattgatcaagcgacacaggcagtgactgatgctaaaaataatttacatggtgatcaaaaactagatcaagataagcaacgtgcaacagaaacgttaaataacttgtctaacttgaatacaccacaacgtcaagcacttgaaaatcaaatcaataatgcagcaactcgtggcgaagtagcacaaaaattaactgaagcagaagcacttaaccaagcaatggaagctttacgtaatagcattcaagatcaacagcaaacggaagcgggtagcaagtttatcaatgaagataaaccacaaaaagatgcttaccaagcagcagttcaaaatgcaaaagatttaattaatcaaactaacaatccaacgcttgataaagcacaagttgaacaattgacacaagctgttaaccaagctaaagataacctacacggtgatcaaaaacttgcagacgataaacaacatgcggttactgatttaaatcaattaaatggtttgaataatccgcaacgtcaagcacttgaaagccaaataaacaacgcagcaactcgtgatgaagtagcgcaaaaattagctgaagcaaaagcgcttgatcaagcaatgcaagcattacgtaatagtattcaagatcaacaacaaacagaatctggtagcaagtttatcaatgaagataaaccgcaaaaagatgcttaccaagcagcagttcaaaatgcaaaagatttaattaaccaaacaggtaatccaacactcgacaaatcacaagtagaacaattgacacaagcagtaacaactgcaaaagataacctacatggtgatcaaaaacttgctcgtgatcaactacaagcagtaacaactgtaaatgcattgccaaacttaaatcatgcacaacaacaagcattaactgatgctataaatgcagcgcctacaagaacagaggttgcacaacatgttcaaactgctactgaacttgatcacgcgatggaaacattgaaaaataaagttgatcaagtgaatacagataaggctcaaccaaattacactgaagcgtcaactgataaaaaagaagcagtagatcaagcgttacaagctgcagaaagcattacagatccaactaatggttcaaatgcgaataaagacgctgtagaccaagcattaactaagcttcaagaaaaagtgaatgagttaaatggtaatgagagagtcgctgaagctaaaacacaagcgaaacaaactattgaccaattaacacatttaaatgctgatcaaattgcaactgctaaacaaaatattgatcaagcgacgaaacttcaaccaatcgctgaattagtagatcaagcaacgcaattgaaccaatcaatggatcaattacaacaagcagttaatgaacatgctaacgttgagcaaactgtagattacacacaagcagatttagataagcaaaatgcttataaacaagctattgctgatgccgaaaatgtattgaaacaaaatgcgaataagcaacaagtggatcaagcacttcaaaatattttaaatgcaaaacaagcattaaatggtgatgaacgtgtagcacttgctaaaacaaatggtaaacatgatatagagcaattgaatgcattaaacaatgctcaacaagatggatttaaaggtcgcatcgatcaatcaaacgatttaaatcaaatccaacaaattgtagatgaggctaaggcacttaatcgtgtaatggatcaattgtcacaaggaatcactggcaatgaaggacgcacgaaaggtagcacgaactatgtcaatgcagatacacaagttaaacaagtgtatgatgaagcggttgataaagcgaaacaagcacttgataaatcgacaggtcaaaacttaactgcagaacaagttatcaaattaaatgatgcagtcactgcagcaaagaaagcattaaatggtgaagaaaaacttaataatcgtaagtctgaagcattacaaagattggatcaattaacacatctaaacaatgctcaaagacaattagcaatccaacaaattaataatgctgaaacgctaaataaagcatctcgagcaattaatagagcaactaaattagataatgcaatgggtgcagtacaacaatatattgacgaacagcaccttggtgttatcagcagcacaaattacatcaatgcagatgataatttgaaagcaaattatgataatgcaattgcgaatgcagcacatgagttagataaagtgcaaggtaatgcaattgcaaaagctgaagcagagcaattgaaacaaaatattattgatgctcaaaatgcattaaatggagaccaaaaccttgcaaatgccaaagataaagcaaatgcgtttgttaattcgttaaatggattaaatcaacagcaacaacatcttgcacataatgcaattaacaatgccgatactgtatcagatgtaacagatattgttaataatcaaattgacttaaatgatgcaatggaaacattgaaacatttagttgacaatgaaattccaaatgcagagcaaactgtcaattaccaaaacgctgaagataatgctaaaacaaacttcgatgatgctaaacgtctagcaaatacattgctaaatagtgataacacaaatgtgaatgatattaacggcgcaattcaaacagtcaatgatgcaatccaaaatcttaatggtgatcaacgactacaagatgctaaagacaaggcaattcaatctattaatcaagctttagctaataagctaaaagaaatcgaagcttcaaatgcgacggatcaagacaagcttattgcgaaaaataaagcagaagaattggcaaacagcatcatcaacaacattaataaagcaacaagtaatcaggatgtatctcaagttcaaacagctggcaaccatgcgattgaacaagtgcatgccaatgaaataccgaaagctaaaattgatgcgaataaagatgttgacaagcaagttcaagcattaattgacgaaattgatcgaaatccaattctaacagataaggaaaaacaagcgcttaaagatcgaattaaccaaatacttcaacaaggtcataacgacattaacaatgcgatgactaaagaagaaattgaacaagccaaagcacaacttggacaagcgttacaagacattaaagatttagtgaaagctaaagaaagcgcgaaacaagatattgataagcaagttcaagcattaattgacgaaattgatcgaaatccaattctaacagataaggaaaaacaagcgcttaaagatcgaataaatcaaatcctgcaacaaggtcataacggcattaacaatgcgatgactaaagaagaaattgaacaagccaaagcacaacttggacaagcgttacaagacattaaagatttagtgaaagctaaagaaagcgcgaaacaagatattgataagcaagttcaagcattaattgacgaaattgatcgaaatccaaatctaacagataaggaaaaacaagcgcttaaagatcgaataaatcaaatcttgcaacaaggtcataacggcattaacaatgcgatgactaaagaagaaattgagcatgccaaagcgcagcttgcacaagcattacaagacattaaagatttagtgaaagctaaagaagatgcgaaaaatgcaattaaagcattagcaaatgcgaagcgtgatcaaatcaattcaaaccctgatttaacacttgaacaaaaagcaaaagcgctcaaagaaattgacgaagctgaaaaacgagcactagaaaacattgaaaatgctcaaactaaagatcaattaaatcaaggattaaatttaggattagatgatattagaaatacacatgtatgggaagttgatgcacaacctgctgtaaatgaaatttttgacgcaactcctgaacaaatccttgtaaatggcgaactcattgtccatcgtgatgacatcattacagaacaagatattcttgcacacatcaacttaattgatcaacttacagcggaaattattgatacaccgtcaactgcaacaatttctgatagtttaacagcaaaagttgaagtaacattgcttgatggatcaaaagtgattgttaatgttcctgtgaaagtagtagaaaaagaattgacagtagttaaacagcaggcgattgaatcaattgaaaatgcggcacaacaaaagattaatgaaatcaataatcacgcaacattaacacctgaacaaaaagaagctgcgattgcggaagttaataagcttaaacaacaagctattgagcaaattaacaacgcagcagatgttcatacggtggaagaagttcaacaccaagaacaggcgcatattgaacaattcaatccagatcaatttacaattgaccaagccaaatcaaatgccattaaatcaatttctgatgctatccaacatatgattgatgaaattaatgctagtaaggatttaactgataaagagaagcaagaagctatatctaaattaaatcagttaaaagatcaatcaattcaggcgattcaacgtgcgcaaagcatcgatgaaattgcgcaacaattagagcaatttaaagcgcaactaaaagcggccaatccatttgctaaagaattggaaaaccgtaaaaaagctgcgatttcaaaaattaaagatatttctacagataaaattgatcgcattagaaatagcacaattggaactgctgaagaaagacaagcagcaatgaatcgaattaacgaaattgtgcttgaaacaatcaaagatattaataatgcgcaaacgccacaacaagttgaggctgcattgaataatggtatcgcacgaattttagcagtacaaattgtaacatcagatcatagcaaaccttcatcaaattcagatggtcaatctaatagtcatttacacgttggttatggcactgtaaatcatccattcaatagttcgcctattggacataagaagaaattggatcaagatgatgaaatcgatccacttcatatgcgtcatttcggtgaccgaattggtaatgttatcaaaaacgcacttggcgttgttggtatttctggattacttgctagcttctggttcttcattgcgaaacgtcgtcgtaaagaggatgaagaggaagaattggaaattagagataatagcaaagacaagaagaaaggttcaatagaaggtactaaacatttaccacttttatttgcgaaacgtcgtagaaaagaagatgaagaagatgctattgttgaagaaaaagattcgctaaacaatgacgagtcactcgataaagttaaacatacgccgttcttcttacctaaacgtcgcagaaaagaagatgaagaagatgtggaagttacaaatgaaaacacagatgaaaaagtgttgcaagataacgaacattcaccggtcttaatcgcaaaacgactcaaagataaagatggaaatgttgaaacaacaactagtattgaatctaaagatgaagacgttcctttattattggctaaaaagaaaaatcaaaaagataaccaatccaaagggaaaaagtcggcatcaaaaaaaccttctaaaaaggtagcagctaaaaagaagaaaaagaaatctaaaaaaaataaaaaataa

SEQ ID NO: 4015 - DNA, 11304 bp, Staphylococcus aureus; identical to SEQ ID NO: 4014

SEQ ID NO: 4016 - DNA, 1065 bp, Staphylococcus aureus
atggttaattacggaagcattaatattaacctgagaagctataaagaattatttttaaaagcgacaatattaaatacgacgcatttatttaggagtggcaaacgtatgaatgggaaaaaggcgaatacgataaacagatacaaatattttcatcatgtcaatcatcaaaaaattcaacaaagttctaaaaagacgctgtgggcatcactaatcatcacattgttatttacagtgattgaatttgtcggaggtttagtatctaattcattggcattactgtcagattcatttcatatgcttagtgatgtattagcacttggtttatctatgttggccatttattttgcaagtaaaaagccgactgcacgatacacatttggatatttaagatttgagatattagctgcatttttaaatggtttagcattaattgtaatttcaatctggattttatatgaagctattgtacgtattatttatccgcaaccaattgaaagtggcattatgtttatgattgctagtattggtttactcgtcaatattattttgactgttatccttgtaaggtctttaaaacaagaagacaatatcaatattcaaagtgcattatggcatttcatgggagacttattgaactctattggtgtcatcgttgcagttgtattgatttactttacaggatggcgcatcatcgacccaatcattagtattgtaatttcactcatcattttacgtggtggttataaaattacgcgtaatgcgtggttaattttaatggaaagtgtgcctcaacatttggatactgatcaaattatggcagatattaaaaacatagatggcatattagatgtacatgaatttcatttgtggagtattacaacagagcattattcattaagtgcccatgttgtgttagataaaaaatatgagggtgatgattatcaagcgattgatcaagtatcatcattgttgaaagaaaaatatggcattgcacattcaacgttgcaaattgaaaacttgcaattgaatccattagatgagccatacttcgacaaattaacataa

SEQ ID NO: 4017 - DNA, 231 bp, Staphylococcus aureus
atgtttgaaaaattcgacagaatagaagatagtcttagagcgcaagaaaagatttatgacaaattagatagaaattttgaagaattaaagcgcgacaaggtagaagatgaaaagaataaagaaaagaatgccaagaatattagagacataaaaatgtggattctaggtttgatagggactatcttcagtacgattgtcatagctttactaagaactgtttttggtatttaa

SEQ ID NO: 4018 - DNA, 132 bp, Staphylococcus aureus
atgacatcagaagcggttgacggacgtagcaatgcgtatgaattgaacgatttcaaggagtatgaagctattattgataattactttaatgctagaacgagaactaaaaaaggaagggctgtgttcttttga

SEQ ID NO: 4019 - DNA, 222 bp, Staphylococcus aureus
atgaaagggcatgtctaccctcgtaaaggttataatcctacagatgaacgtatcaaagctttagctagtgttgaaaataaacgcaacaaacaaatgatttacattgtaaatgacaaattaaccaaaaaagaacttgtcgaaatagcaagtgttgctggcttacaagttgatgaaaaacaaacaaaagctgaaattatcaatgcttttgagtcactagagtag

SEQ ID NO: 4020 - DNA, 222 bp, Staphylococcus aureus
atgtatattgcaaaaatcgataatagaacaactaaagtatgcaaagggcttaatggagaaatattcaaagttaaagacgctaaaattggtgttaatttctatcctatgcatatcaattgtcgttcagattgcgctttactacctaaatctatgtggccgaaaaaaccaagcaagaaacgaaaaacaaaatacttcggagggaaagtgaaaagcggtgattga

SEQ ID NO: 4021 - DNA, 135 bp, Staphylococcus aureus
atggttaacttaaatgtattagataaattggcagatgctctaggtgttaatgtaagtgaactatttactagaaatcacaacacgcacaaattagaggattggattaaaaaaagtaaatgtatagaggtggaataa

SEQ ID NO: 4022 - DNA, 117 bp, Staphylococcus aureus
atgaaacaaaaagaacagcaagcaaatgggaaacagacgccaatgagtcaacaatcaaacccattcgctaatgctaatggtccaatagaaatcaatgatgatgatttaccgttctag

SEQ ID NO: 4023 - DNA, 189 bp, Staphylococcus aureus
atgaagagacatgacggtatcagtatacaaatcaaggatatgaataatgttccacttaaatcgtttcatgtcatagatttaagcgaactatatattgcgacggatgcaatgcgtgacgttataaacgaatggattgaaaataacacagatgaacaggacaaactaattaacttagtcatgaaatggtag

SEQ ID NO: 4024 - DNA, 201 bp, Staphylococcus aureus
atgacatttaaaaacaatcataatttcaatgaattagttttaacgaatgaagacattagaattttaaaaaatgtcttagaagatgcagtcagtgtttatgatgaatattcggtatgtaatgaagaatccgattttgcttactgtttattaagagacttatatacattagacagcttagctatttcgtcaaataatgtttga

SEQ ID NO: 4025 - DNA, 120 bp, Staphylococcus aureus
atgacaaatgctattcaacattcagttaaagaaggtattgaacttgatgaagcaatagggattatggtaagtcaagttatctatgaatacaaggaggaactggagaatgaaaaaatttaa

SEQ ID NO: 4026 - DNA, 198 bp, Staphylococcus aureus
gtgcacggtgtggagatttatgagggggatattgttcaagattcttattccggagaagtaagttttatcgagtttaaagaaggagccttttatataacttttagcaatgtaactgaattaataagtgaaaatgacgatattattgaaattattggaaatatttttgaaaatgaggagctattggaggttatgagatga

SEQ ID NO: 4027 - DNA, 129 bp, Staphylococcus aureus
atgatagaaaagttgaaaccttatctcgattctggagataagctgtttgttacagaaatagtcaataacaaacaagggtggttaacaaaagaacaatgggattttatcaaccataatatttttatttag

SEQ ID NO: 4028 - DNA, 165 bp, Staphylococcus aureus
atgattgctaatataaattgtgtaaacagtgtattaattaatacaaatgatcctgccaaaatagcaattaaaggtatgatcggatataacggtactttatatggtcgttccatatttggttcacgttttcttaaaattattaccgcaacaaatgacatacaatag

SEQ ID NO: 4029 - DNA, 219 bp, Staphylococcus aureus
atgttacgaaacctagaagaaatggtcgaagcagttgaaagtgaatacttaaagttacctgaagatcataagaaagtaattaggctaaagtattggaatagagataagaagctaaagatagagcaaataggagatgcatgtcacatgcatcgtaatacagttactactatacgaaagaactttgttaaagcggtagcgtatcatgcaggtatcaaataa

SEQ ID NO: 4030 - DNA, 147 bp, Staphylococcus aureus
atgaagcaagaaaaaggaaagttgcatcctttacaaaaatatgtgcatagacaatttgaaaatagagatcataaagtatatgtgttatggaataaagaacaagtaaatacttttatcagaatggtaggtggaacatttggcgattga

SEQ ID NO: 4031 - DNA, 198 bp, Staphylococcus aureus
gtgcacggtgtggagatttatgaaggggatattgttcaagattgttattcgagagaagtaagttttatcgagtttaaagaaggagccttttatataacttttagcaatgtaactgaattactaagtgaaaatgacgatattattgaaattgttggaaatatttttgaaaatgagatgctattggaggttatgagatga

SEQ ID NO: 4032 - DNA, 600 bp, Staphylococcus aureus
atggggtataaaaaatataatgaatattttacaaacagagatgatactacattaaaaattactaatttatatattgggcaatcttttggtacagagggtaatagaaatgtcattgatagaatagggaaaggtcatgaaaaattacaagaaattatgacttatcagccagaaaatagaaagactgtcttaatattttacaagatacagcctgacaatatttatattacaaaccaatatggtaaagaggctgtgtctcgattaaaaagaattttagagcaaagtatacctaataaagaatatattgatttatcagagatatcattaattacattttttaaaccagaatataataaacaacatgtgaatgaggagtttaattctttatcttcttcgaaaataaagaatttagccaaagaaaatgatggtattattatttatttaaattttaaggatgttaattatcaactgataagtgaaggcaatacttttttttctgcaaaaccatatttgcattgtgtgttcaataaagatattttaaatatggataaagttgatatagaaaattttttcaaaagtatagaagtcaaatacagtaaataa

SEQ ID NO: 4033 - DNA, 207 bp, Staphylococcus aureus
atgagtgccacaatagttaaaattgtgaaaatagaacgccatgttgctacggataaagctaatccaccggctaatggtgcaagaatagtgatgatgccattaactaccattaaagatgctaaaaatttagcgagtgcgttgccactaaatttatcaccagcagaggcttttgcaatcacgatgacgccaccaccagttaaaccttga

SEQ ID NO: 4034 - DNA, 42 bp, Staphylococcus aureus
atgaatgaacttttagtcattcgtagtgcgtatgcgaagtag

SEQ ID NO: 4035 - DNA, 120 bp, Staphylococcus aureus
ctgtttgatgcctttttaattgccttaaattctctatctatgccaaaattcccattagttgacgcatttgactatatacctaacatattccatacttatattgactctataaacaaagga

SEQ ID NO: 4036 - DNA, 99 bp, Staphylococcus aureus
atgcgtttttttgccttttttattttccttattttttctgttttacaacaaaatggtatcaaaaatggtatcatttgtagttattttagcttcacatat

SEQ ID NO: 4037 - DNA, 108 bp, Staphylococcus aureus
atgacagaacaaatgtatttaatattgtttttattaagcctaccattgttattatttatcgggagaaagacacatttttattgtttagataaaaagaatggacgtaga

SEQ ID NO: 4038 - DNA, 333 bp, Staphylococcus aureus
ttgtggctttttaatttgaataaagtgggtggcataatgtttggatttaccaaacgacatgaacaagattggcgtttaacgcgattagaagaaaatgataagactatgtttgaaaaattcgacagaatagaagatagtcttagagcgcaagaaaagatttatgacaaattagatagaaattttgaagaattaaagcgcgacaaggtagaagatgaaaagaataaagaaaagaatgccaagaatattagagacataaaaatgtggattctaggtttgatagggactatcttcagtacgattgtcatagctttactaagaactgtttttggtatt

SEQ ID NO: 4039 - DNA, 114 bp, Staphylococcus aureus
ttgatacaaggatatacagacacgaaacgtcatattatatcgaagaggtcaattgatgaatatagatggattagacgcactgttaaaccaatttcacgatatgaaaaccaacat

SEQ ID NO: 4040 - DNA, 330 bp, Staphylococcus aureus
atgactacgctagctgatgtaaaaaaacgtattggtcttaaagatgaaaagcaagatgaacaattagaagaaatcataaaaagttgtgaaagccagttgttatcaatgttacctattgaagttgaacaaataccggaaaggtttagttacatgattaaagaagttgcagttaaacgctacaacaggattggtgctgaaggtatgacatcagaagcggttgacggacgtagcaatgcgtatgaattgaacgatttcaaggagtatgaagctattattgataattactttaatgctagaacgagaactaaaaaaggaagggctgtgttcttt

SEQ ID NO: 4041 - DNA, 993 bp, Staphylococcus aureus
ttgcctaacaaaaacactcaagaatattgggaagaacgcggacgcaaagcaatcgagaatgagttgaagcgtgataaaactaaagctgaagaaatagaacgtatattgaatatgatgattaagcgcattgaaaaagagatcaatgcgtttattgtcaagtacggagattttgcaggcgttacattacaagaagcacaaaagattattgatgagttcgatgtaaaagcgtttcaagaagaagcaaaaagattggtcgaaaacaaggagtttagcgatagagcaaatgaagaattaaagaagtataacacgaaaatgtatgtatctagagaacagatgttaaagattcaaatagaattcttaattgcttatgcaacagctcaaacagaattatcgatgagggaatatttcgaatcaacagcttatcgtgtgttcagtgatcaagcgggtattttaggtgaaggtgtacaagtagctaaagaagttatagatacaatcgttgatacacaatttcatggtgtcgtttggtcagagcgattatggactaataccgaagcaatgaaacaagaagtagaagaaataattgctaatgtagttattagaggtcgacatcctaatgaatatgttaaagatatgcgcaagcacttaaataaattcgaaggcacagcacgacaaaagaccgcagcaattaaatcattgctttatacggaatcggcacgtgttcacgcacaatcaagcattgacagcatgaaagaaatttcaccggaaggatattatatgtatattgcaaaaatcgataatagaacaactaaagtatgcaaagggcttaatggagaaatattcaaagttaaagacgctaaaattggtgttaatttctatcctatgcatatcaattgtcgttcagattgcgctttactacctaaatctatgtggccgaaaaaaccaagcaagaaacgaaaaacaaaatacttcggagggaaagtgaaaagcggtgat

SEQ ID NO: 4042 - DNA, 420 bp, Staphylococcus aureus
atgactaaaaagaaatacggattaaaattatcaacagttcgaaagttagaagatgagttgtgtgattatcctaattatcataaacaacttgaagatttaagaagtgaaataatgacaccgtggattccaacagatacaaatataggcggggagtttgtaccgtctaatacatcgaaaacagaaatggcagtaactaattatctttgtagtatacgaagaggtaaaatccttgagtttaagagcgctattgaacgtataatcaacacatcaagcaggaaagaacgcgaattcattcaagagtattattttaataaaaaggaattagtgaaagtttgtgttgacatacacatttctgatagaactgctcatagaatcaaaagaaaaatcatatctagattggcggaagagttaggggaagac

SEQ ID NO: 4043 - DNA, 144 bp, Staphylococcus aureus
atgatgtggttaatcatagcaattatattactagtcatcttattgtttggtgtgatgttacaagcggaacagttaaaaggtgatgtaaaagttaaagagcgagagatagagatattaagaagtagattgagacactttgaagat

SEQ ID NO: 4044 - DNA, 243 bp, Staphylococcus aureus
gtgagttacatcattacattagttccaatacttgtattcatagtaatatttaacaatttacttaacagatatatggttttgtacaaagaattagatttatttacatgcagaattggaatgttattagtcttaatcgttatagtagattttgcaaagcaaaaaaatatgttggctacattgagtgttgtactaatacttttattcgtagaaaaacttagaatcattcaaaggagtgataagaag

SEQ ID NO: 4045 - DNA, 252 bp, Staphylococcus aureus
atggaaatgatgaataaccgcgaacaaattgaacaatcagtgatcagtgctagtgcgtataacggtaatgacacagagggattactaaaagagattgaggacgtgtataagagagcacaagcgtttgatgaaatacttgagggaatgacaaatgctattcaacattcagttaaagaaggtattgaacttgatgaagcagtagggattatggcaggtcaagttgtctataaatatgaggaggaacaaggaaaa

SEQ ID NO: 4046 - DNA, 552 bp, Staphylococcus aureus
atgaaaatcactggtagaacacaatacattcaagaaactaatcaagaggcattcatgaaaggtggggactttttaggagctggagaatttacagtaaaagttgcaaatgtcgagtttaacgacagagaaaacagatacttcacgattgtttttgaaaacaacgaaggtaaacaatacaaacacaaccaattcgtcccaccattccaacaagattatcaagaaaaacaatatatcgagttacttagtagattaggaattaaattgaacttaccagatttaacttttgacacagatcaattaattaacaaaatcggaactattgtacttaaaaataaatttaacgaggaacaaggcaagtattttgtaagactctcatatgtaaaagtttggaataaagacgatgaagtagttaataaaccagaacctaaaactgatgagatgaaacaaaaagaacagcaagcaaatgggaaacagacgccaatgagtcaacaatcaaacccattcgctaatgctaatggtccaatagaaatcaatgatgatgatttaccgttc

SEQ ID NO: 4047 - DNA, 258 bp, Staphylococcus aureus
atgtattacaaaattggtgagataaaaaacaaaattataagctttaacgggtttgaatttaaagtgtctgtgatgaagagacatgacggtatcagtatacaaatcaaggatatgaataatgttccacttaaatcgtttcatgtcatagatttaagcgaactatatattgcgacggatgcaatgcgtgacgttataaacgaatggattgaaaataacacagatgaacaggacaaactaattaacttagtcatgaaatgg

SEQ ID NO: 4048 - DNA, 105 bp, Staphylococcus aureus
ttgatatttatattatggtgtgttaatttatatatagaaaaagggcaacatgcgcaaacatgttaccctaatgagcccgttaaaaagacggtggctattttagat

SEQ ID NO: 4049 - DNA, 252 bp, Staphylococcus aureus
atgaataaccgtgaacaaatagaacaatccgttataagtgctagtgcgtataacggcaatgacacagagggattactaaaagagattgaggacgtatataagaaagcgcaagcgtttgatgaaatacttgagggaatgacaaatgctattcaacattcagttaaagaaggtattgaacttgatgaagcaatagggattatggtaagtcaagttatctatgaatacaaggaggaactggagaatgaaaaaatt

SEQ ID NO: 4050 - DNA, 387 bp, Staphylococcus aureus
atgacggtcaccttatcagatgaacaatataaaaacctttgtactaaattaaacaagttattaggtaaatttcacaaagcattaaaagaacgtgatgagtacaagaagcaacaagatgagcttatcgtggatataggtaagttaagagaacgtaacaaagagttggagaacatgtggcgcactcttaaaaatgaattgcttggaagatacgaacattactgttttaaatttagagaactacaccctgagagcaaagcgaacaggataggagctctctatataggaggtaaaagcactgcagatattataatgtcgcgaatggaagaactagacggaacaaatgagttctacgaatttttagggcaaatggaggaagacacaaatgaa

SEQ ID NO: 4051 - DNA, 345 bp, Staphylococcus aureus
gtgtttttttttcggggcgaaaaaagggcaaattatttaaataagggcaaacatgcgtggaaaacacagaggtttaaaaatgccaaaaccgttgatatgacaaggtttttatacgtttgtatacaacgacgaattatctattcgccatcacattatgacgatatgtttattttaaacacacaagctcatgcgcgtcttgatcaaatggcacaacagtttgaagttgtttgtaatggcttgaacgaaaatgaaggacaagcaattcaaacgatggatcaatctgcctctctaatacggtcaaacttaattcaagttaaagaacaattagaaaaactagctgtatac

SEQ ID NO: 4052 - DNA, 930 bp, Staphylococcus aureus
ctgggtggttgtttttgttcgccattatgttctgtctacatctttttgcgcaagttgtgtatcataatacttaattgtgttaaaagaggtggaaatatgaaaggtgatatatacataccgataatatcatctattttatctggtgggatatcgtattatgctgcaacggtggttcataaatttaacaaaaggtataaaaggaaagaaaaggctgttgaaatggcagacgagttttcaaaattaatttcgaaaaggagttttgatataggggagataaacaagaaaattttagaaaatgttggtttgcaagataaaattaatgaattagagaataagatgaatttaagttttgataatcacgaactaagaacagtctttactgataaagagattgcaaaatatcacacttataaaaaagtcaccaataccgaatttataaaaattttgcttcgtactttcaagaacgagaattataaagaagagtgtttacgggctataattttagaatttgacaacaagaaaacaattaaagaaaatataggagataaacagtggactttttcgacaggtgaaaaagaaattgttattaaaagtaatgacgtattgcaaggtataaatacactcattaagaagtataatgaaacccatatatattgcatgaataaattagaatatttttctatgcattttaccaataacatagcagatagtaatacggtttatcagtcgttgcatcaaatctatttaaaaacaatattgagtctttacattgatatctcatcaacaaataaaatagggcatgaaaaattttatgttaatttaatagaattttacaatgaatggaataacaaaaagataaaatttaaaaagaaaacagaaaagcgtataaataaaaacagaaactcatttttaaaaactgaaaaattgaaa

SEQ ID NO: 4053 - DNA, 435 bp, Staphylococcus aureus
atgggaaaggcatcatacgatattaagccaggtacatttaaatatattgagtcagagatatataacctacaagagaacaagaaagagataaatagattgagaatggagatacttaacccaacgaaagagctagacactaacattgtgtatggaccgttgcaaaaaggtgaaccagttagaacaactgaactaatggcaacaaggttattgactaataagatgttacgaaacctagaagaaatggtcgaagcagttgaaagtgaatacttaaagttacctgaagatcataagaaagtaattaggctaaagtattggaatagagataagaagctaaagatagagcaaataggagatgcatgtcacatgcatcgtaatacagttactactatacgaaagaactttgttaaagcggtagcgtatcatgcaggtatcaaa

SEQ ID NO: 4054 - DNA, 288 bp, Staphylococcus aureus
atgaaagaatcgacattagaaaaatatttagtgaaagagataacaaagctaaacggtttatgtttaaaatgggtcgcacctggaacaagaggtgtgccagatagaattattattatgccagaaggaaaaacatattttgtagaaatgaagcaagaaaaaggaaagttgcatcctttacaaaaatatgtgcatagacaatttgaaaatagagatcataaagtatatgtgttatggaataaagaacaagtaaatacttttatcagaatggtaggtggaacatttggcgat

SEQ ID NO: 4055 - DNA, 243 bp, Staphylococcus aureus
atgacacaaatgaataatcgcgaaaaaatcgaacagtccgttattagtgctagtgcgtataacggtaatgacacagaggggttgctaaaagagattgaggacgtgtataagaaagcgcaagcgtttgatgaaatacttgagggaatgacaaatgctattcaacattcagttaaagaaggtattgaacttgatgaagcagtagggattatggcaggtcaagttgtctataaatatgaggaggaa

SEQ ID NO: 4056 - DNA, 399 bp, Staphylococcus aureus
atgaaaatcaaagttaaaaaagaaatgagattagatgaattaattaaatgggcgcgagaaaatccggatctatcacaaggaaaaatatttttttcaacaggatttagtgatggattcgttcgttttcatccaaatacaaataagtgttcgacgtcaagttttattccaattgatatccccttcatagttgatattgaaaaagaagtaacggaagagactaaggttgataggttgattgaattattcgagattcaagaaggagactataactctacactatatgagaacactagtataaaagaatgtttatatggcagatgtgtgcctaccaaagcattctacatcttaaacgatgacctaactatgacgttaatctggaaagatggggagttgctagta

SEQ ID NO: 4057 - DNA, 159 bp, Staphylococcus aureus
atgagcgacacatataaaagctacctattagcagtgttgtgcttcacggtcttagcgattgtactcatgccattgctgtacttcactacagcatggtcaattgcaggattcgcaagtatagtgacattcatattttataaggaatacttttatgaagaa

SEQ ID NO: 4058 - DNA, 99 bp, Staphylococcus aureus
ttgtttaaaagcaagttctcagagcagtatcgtttaatgtttttaattcttatttttatattattaagagtagtcaactttgaacctgatgtttttata

SEQ ID NO: 4059 - DNA, 2985 bp, Staphylococcus aureus
atgaataataaaaagacagcaacaaatagaaaaggcatgataccaaatcgattaaacaaattttcgataagaaagtattctgtaggtactgcttcaattttagtagggacaacattgatttttgggttaagtggtcatgaagctaaagcggcagaacatacgaatggagaattaaatcaatcaaaaaatgaaacgacagccccaagtgagaataaaacaactaaaaaagttgatagtcgtcaactaaaagacaatacgcaaactgcaactgcagatcagcctaaagtgacaatgagtgatagtgcaacagttaaagaaactagtagtaacatgcaatcaccacaaaacgctacagctaatcaatctactacaaaaactagcaatgtaacaacaaatgataaatcatcaactacatatagtaatgaaactgataaaagtaatttaacacaagcaaaagatgtttcaactacacctaaaacaacgactattaaaccaagaactttaaatcgcatggcagtgaatactgttgcagctccacaacaaggaacaaatgttaatgataaagtacatttttcaaatattgacattgcgattgataaaggacatgttaatcagactactggtaaaactgaattttgggcaacttcaagtgatgttttaaaattaaaagcaaattacacaatcgatgattctgttaaagagggcgatacatttacttttaaatatggtcaatatttccgtccaggatcagtaagattaccttcacaaactcaaaatttatataatgcccaaggtaatattattgcaaaaggtatttatgatagtacaacaaacacaacaacatatacttttacgaactatgtagatcaatatacaaatgttagaggtagctttgaacaagttgcatttgcgaaacgtaaaaatgcaacaactgataaaacagcttataaaatggaagtaactttaggtaatgatacatatagcgaagaaatcattgtcgattatggtaataaaaaagcacaaccgcttatttcaagtacaaactatattaacaatgaagatttatcgcgtaatatgactgcatatgtaaatcaacctaaaaatacatatactaaacaaacgtttgttactaatttaactggatataaatttaatccaaatgcaaaaaacttcaaaatttacgaagtgacagatcaaaatcaatttgtggatagtttcacccctgatacttcaaaacttaaagatgttactgatcaattcgatgttatttatagtaatgataataaaacagctacagtcgatttaatgaaaggccaaacaagcagcaataaacaatacatcattcaacaagttgcttatccagataatagttcaacagataatggaaaaattgattatactttagacactgacaaaactaaatatagttggtcaaatagttattcaaatgtgaatggctcatcaactgctaatggcgaccaaaagaaatataatctaggtgactatgtatgggaagatacaaataaagatggtaaacaagatgccaatgaaaaagggattaaaggtgtttatgtcattcttaaagatagtaacggtaaagaattagatcgtacgacaacagatgaaaatggtaaatatcagttcactggtttaagcaatggaacttatagtgtagagttttcaacaccagccggttatacaccgacaactgcaaatgtaggtacagatgatgctgtagattctgatggactaactacaacaggtgtcattaaagacgctgacaacatgacattagatagtggattctacaaaacaccaaaatatagtttaggtgattatgtttggtacgacagtaataaagatggtaaacaagattcgactgaaaaaggaattaaaggtgttaaagttactttgcaaaacgaaaaaggcgaagtaattggtacaactgaaacagatgaaaatggtaaataccgctttgataatttagatagtggtaaatacaaagttatctttgaaaaacctgctggcttaactcaaacaggtacaaatacaactgaagatgataaagatgccgatggtggcgaagttgatgtaacaattacggatcatgatgatttcacacttgataatggctactacgaagaagaaacatcagatagcgactcagattctgacagcgattcagactcagatagcgactcagattcagatagcgactcagattcagacagcgattcagacagcgactcagactcagatagcgattcagattcagacagcgactcagactcagacagcgattcagactcggatagcgactcagactcagatagcgactcagattcggatagcgactcagactcagatagcgattcagattcagatagcgattcggactcagacagtgattcagattcagactcagatagcgactcagattctgacagcgattcagactcagacagcgactcagactcagacagtgattcagattcagacagcgactcagattcagatagcgactcagactcagatagcgactcagattcagatagcgattcggactcagacaacgactcagattcagatagcgattcagattcagatagcgactcagattcggacagcgattcagactcagatagcgattcagactcagacagcgattcagattcagatagcgactcagactcagatagcgactcagactcggatagcgattcagattcagacagcgactcagattcagatagcgattcggactcagacaacgactcagattcagatagcgattcagattcagatgcaggtaaacatactccggctaaaccaatgagtacggttaaagatcagcataaaacagctaaagcattaccagaaacaggtagtgaaaataataattcaaataatggcacattattcggtggattattcgcggcattaggatcattattgttattcggtcgtcgtaaaaaacaaaataaa

SEQ ID NO: 4060 - DNA, 4047 bp, Staphylococcus aureus
atgctaaacagagaaaataaaacggcaataacaaggaaaggcatggtatccaatcgattaaataaattttcgattagaaagtacacagtgggaacagcatcaattttagtaggtacaacattaatttttggtctggggaaccaagaagcaaaggctgcagaaagtactaataaagaattgaacgaagcgacaacttcagcaagtgataatcaatcgagtgataaagttgatatgcagcaactaaatcaagaagacaatactaaaaatgataatcaaaaagaaatggtatcatctcaaggtaatgaaacgacttcaaatgggaataaattaatagaaaaagaaagtgtacaatctaccactggaaataaagttgaagtttcaactgccaaatcagatgagcaagcttcaccaaaatctacgaatgaagatttaaacactaaacaaactataagtaatcaagaagcgttacaacctgatttgcaagagaataaatcagtggtaaatgttcaaccaactaatgaggaaaacaaaaaggtagatgccaaaactgaatcaactacattaaatgttaaaagtgatgctatcaagagtaatgatgaaactcttgttgataacaatagtaattcaaataatgaaaataatgcagatatcattttgccaaaaagtacagcacctaaacgtttgaatacaagaatgcgtatagcagcagtacagccatcatcaacagaggctaaaaatgttaatgatttaatcacatcaaatacaacattaactgtcgttgatgcagataaaaacaataaaatcgtaccagcccaagattatttatcattaaaatcacaaattacagttgatgacaaagttaaatcaggtgattatttcacaattaaatactcagatacagtacaagtatatggattgaatccggaagatattaaaaatattggtgatattaaagatccaaataatggtgaaacaattgcgactgcaaaacatgatactgcaaataatttaattacatatacatttacagattatgttgatcgatttaattctgtacaaatgggaattaattattcaatttatatggatgctgatacaattcctgttagtaaaaacgatgttgagtttaatgttacgataggtaatactacaacaaaaacaactgctaacattcaatatccagattatgttgtaaatgagaaaaattcaattggatcagcgttcactgaaacagtttcacatgttggaaataaagaaaatccagggtactataaacaaacgatttatgtaaatccatcggaaaattctttaacaaatgccaaactaaaagttcaagcttaccactcaagttatcctaataatatcgggcaaataaataaagatgtaacagatataaaaatatatcaagttcctaaaggttatacattaaataaaggatacgatgtgaatactaaagagcttacagatgtaacaaatcaatacttgcagaaaattacatatggcgacaacaatagcgctgttattgattttggaaatgcagattctgcttatgttgtaatggttaatacaaaattccaatatacaaatagcgaaagcccaacacttgttcaaatggctactttatcttcaacaggtaataaatccgtttctactggcaatgctttaggatttactaataaccaaagtggcggagctggtcaagaagtatataaaattggtaactacgtatgggaagatactaataaaaacggtgttcaagaattaggagaaaaaggcgttggcaatgtaactgtaactgtatttgataataatacaaatacaaaagtaggagaagcagttactaaagaagatgggtcatacttgattccaaacttacctaatggagattaccgtgtagaattttcaaacttaccaaaaggttatgaagtaaccccttcaaaacaaggtaataacgaagaattagattcaaacggcttatcttcagttattacagttaatggcaaagataacttatctgcagacttaggtatttacaaacctaaatacaacttaggtgactatgtctgggaagatacaaataaaaatggtatccaagaccaagatgaaaaaggtatatctggcgtaacggtaacattaaaagatgaaaacggtaacgtgttaaaaacagttacaacagacgctgatggcaaatataaatttactgatttagataatggtaattataaagttgaatttactacaccagaaggctatacaccgactacagtaacatctggtagcgacattgaaaaagactctaatggtttaacaacaacaggtgttattaatggtgctgataacatgacattagatagtggattctacaaaacaccaaaatataatttaggtaattatgtatgggaagatacaaataaagatggtaagcaggattcaactgaaaaaggtatttcaggcgtaacagttacattgaaaaatgaaaacggtgaagttttacaaacaactaaaacagataaagatggtaaatatcaatttactggattagaaaatggaacttataaagttgaattcgaaacaccatcaggttacacaccaacacaagtaggttcaggaactgatgaaggtatagattcaaatggtacatcaacaacaggtgtcattaaagataaagataacgatactattgactctggtttctacaaaccgacttacaacttaggtgactatgtatgggaagatacaaataaaaacggtgttcaagataaagatgaaaagggcatttcaggtgtaacagttacgttaaaagatgaaaacgacaaagttttaaaaacagttacaacagatgaaaatggtaaatatcaattcactgatttaaacaatggaacttataaagttgaattcgagacaccatcaggttatacaccaacttcagtaacttctggaaatgatactgaaaaagattctaatggtttaacaacaacaggtgtcattaaagatgcagataacatgacattagacagtggtttctataaaacaccaaaatatagtttaggtgattatgtttggtacgacagtaataaagacggcaaacaagattcaactgaaaaaggtatcaaagatgttaaagttactttattaaatgaaaaaggcgaagtaattggaacaactaaaacagatgaaaatggtaaatactgctttgataatttagatagcggtaaatacaaagttatttttgaaaagcctgctggcttaacacaaacagttacaaatacaactgaagatgataaagatgcagatggtggcgaagttgacgtaacaattacggatcatgatgatttcacacttgataacggatacttcgaagaagatacatcagacagcgattcagactcagatagtgactcagacagcgactcagactcagacagcgactcagactcagacagtgattcagattcagacagcgactcagattcagatagcgactcagattcggacagcgattcagactcagatagcgactcagattcagatagcgattcagactcagacagcgactcagattcagatagcgattcggactcagacagcgattcagactcagatagcgactcagactcagacagcgactcagattcagatagcgattcggactcagatagcgactcagattcagacagcgattcagactcagatagcgactcagattcagacagcgattcagactcagatagcgactcagactcagacagtgattcagattcagacagcgactcagactcagatagcgactcagattcggacagcgactcagactctgatagcgactcagactcagacagtgattcagacagcgattcagactcggatgcaggaaaacatacacctgttaaaccaatgagtactactaaagaccatcacaataaagcaaaagcattaccagaaacaggtagtgaaaataacggctcaaataacgcaacgttatttggtggattatttgcagcattaggttcattattgttattcggtcgtcgcaaaaaacaaaacaaa

SEQ ID NO: 4061 - DNA, 1014 bp, Staphylococcus aureus
atgtttgtcatctggagccatagaacagggttcatcatgagtcatcaacttaccttcgccgacagtgaattcagcagtaagcgccgtcagaccagaaaagagattttcttgtcccgcatggagcagattctgccatggcaaaacatggtggaagtcatcgagccgttttaccccaaggctggtaatggccggcgaccttatccgctggaaaccatgctacgcattcactgcatgcagcattggtacaacctgagcgatggcgcgatggaagatgctctgtacgaaatcgcctccatgcgtctgtttgcccggttatccctggatagcgccttgccggaccgcaccaccatcatgaatttccgccacctgctggagcagcatcaactggcccgccaattgttcaagaccatcaatcgctggctggccgaagcaggcgtcatgatgactcaaggcaccttggtcgatgccaccatcattgaggcacccagctcgaccaagaacaaagagcagcaacgcgatccggagatgcatcagaccaagaaaggcaatcagtggcactttggcatgaaggcccacattggtgtcgatgccaagagtggcctgacccacagcctggtcaccaccgcggccaacgagcatgacctcaatcagctgggtaatctgctgcatggagaggagcaatttgtctcagccgatgccggctaccaaggggcgccacagcgcgaggagctggccgaggtggatgtggactggctgatcgccgagcgccccggcaaggtaagaaccttgaaacagcatccacgcaagaacaaaacggccatcaacatcgaatacatgaaagccagcatccgggccagggtggagcacccatttcgcatcatcaagcgacagttcggcttcgtgaaagccagatacaaggggttgctgaaaaacgataaccaactggcgatgttattcacgctggccaacctgtttcgggcggaccaaatgatacgtcagtgggagagatctcac

SEQ ID NO: 4062 - DNA, 126 bp, Staphylococcus aureus
atgtctatcattctcatttttatcatccttttcttaaaaagcttaggacaaagcatctgcgctttctctagtccatttttaaaagcacaagcgaaaattattatagcaagctatcgatttcatttt

SEQ ID NO: 4063 - DNA, 237 bp, Staphylococcus aureus
ttgtgcgttgtgattatgagggatgttggattgattgatgtagaggattgttacgatatttttgggatgtggtgtttagtcaatggcgggctgaaattgtcgttttatggtgggctgaaaatgctgttttatgtcgggcttgaatttgtcgttttatggagatataaaaagccacagcaagacttagatctaactgtgacttatacatttcatacttatatttatcgattggtttta

SEQ ID NO: 4064 - DNA, 600 bp, Staphylococcus aureus
atgaataatagtaattttttaaatgtagagttaataggtactaaaataataacaatggaagacttttataaaatgaaggaagaagaatttttcttaaaatctaagctacctttatatttatattccttcaactatgtagatgaatatacaatgaaattacttgatagaggaagaatatctatattaaatacgaaaacaaataaagattgtatatttgacatttcaaagtatatacatgagaatattatattcagaagagatatatttgaattaaatgatataagagatgatgatttgaagtataaaattaatggttacaatattgaggtatacttaagtggtgaattggagaaaattgtaaaacatttattcgaaaacaagtttgatgtagagtatggtttttatattttatttattaaaccaatatttgaaattgttttttcttctaactatgttaaagaagaattcaatacaaaaatcgaatcatcagaatatagagagagcttagatagttttaatgaaattttaatgaaatatctagaaaatgaaataaatttcaaagaagtatggaaaaaatatattgatgaattatttaaaaaa

SEQ ID NO: 4065 - DNA, 126 bp, Staphylococcus aureus
atggattttaaaaatgaagataaaataaaagtgtattgtaacaatatgtttgaaaaattgccaatttatttatctaaaaattcagaattttgtgatatactatttttcatagtcttgagttataga

SEQ ID NO: 4066 - DNA, 114 bp, Staphylococcus aureus
atgatgaatggcatacttataaagtgtctaaatattggcggtcaatattacttacaaacacgaatgttaagtaatgtagacaatgctgaaaaaacaataagtagaaactctata

SEQ ID NO: 4067 - DNA, 162 bp, Staphylococcus aureus
gtgccatctttaagtgtgtttgtggtgttactcgcagccataggtgcagaacattggggacacgaaattattccagttaaaatattggttcctttaccatggacttgtggtttttcacttacttgtttcttacgtgcttgcactttatcccataatgattga

SEQ ID NO: 4068 - DNA, 105 bp, Staphylococcus aureus
ttgtctgtttgcacaccgacgattgagcgcatttatttgactaattcaaaaaacattgttgttttcctagaaaaaagtaaacatgataataaaaatgtgaaagtg

SEQ ID NO: 4069 - DNA, 165 bp, Staphylococcus aureus
ctgaatctgaatgtgctaaacatgttagcaaatgatatgagtacaagtgcaatcgacacgggatatattaaagtcaataatgggacagcaatttttaaaatcatttctaaaccaagtgttgtaaataagaaccctatgatagagaaaataagtgcgaatatttta

SEQ ID NO: 4070 - DNA, 108 bp, Staphylococcus aureus
atggggattgaatataaaattatcgtaatgggggtcaatggttatggatttattgataggtactttatttttatttttggtcttagtgatttttacattatttacata

SEQ ID NO: 4071 - DNA, 174 bp, Staphylococcus aureus
atgaataacgaagacgcatttgctggtttggaaatggtagaagatgaaattactaaaaagctacgaagtgctatcaaagagttccaaaaagtagtgaaagcgttagacaagcttaacggtgttgaaagcgataacaaagttactgatttaacagagtggcggaaagtgaatcag

SEQ ID NO: 4072 - DNA, 117 bp, Staphylococcus aureus
atgaaattgaaagaagttaattttaaggttgtcgaatgtaaaaacatattgattaaccataaaagagaaattatttttgtagatttcggcataaacgtcattaaagaattttctata

SEQ ID NO: 4073 - DNA, 93 bp, Staphylococcus aureus
ttgccaggcagttttttaatcaaattttggttaaaaaataaaatggacaagataaaaaaagttattgacttaaatgttaataaaatgtataat

SEQ ID NO: 4074 - DNA, 114 bp, Staphylococcus aureus
atgattttaaatcgaggagctatcttagagcagggaaataaaacagccaaagttataaaaagtgaattaataactaattatattatgttagccacgcttcaaataaaaaataat

SEQ ID NO: 4075 - DNA, 99 bp, Staphylococcus aureus
ttgaaatttgcagcaaataaattaaccttgactattttcagaaaattctgtataaataacgaaaaagagatatggattaaatatgaagaggtgttttta

SEQ ID NO: 4076 - DNA, 90 bp, Staphylococcus aureus
gtgttaattcttggtaatagtgttactgagacgcattacgaagaaatttatcttgtttttccttttttaaaaagaagtgaagatatccta

SEQ ID NO: 4077 - DNA, 129 bp, Staphylococcus aureus
gtgtttatttattatttaatgcgttcattgaaacgaagtatcgtgtttttaaataacgtatcatcatttaagttacaaattatctttgtgattttaaaaatgagtgaaactaaaatgctaatgtgtact

SEQ ID NO: 4078 - DNA, 90 bp, Staphylococcus aureus
gtgtctaacgaattgtcttttgttgcgtatactacttttgctatcttacaatcaattattttgttaacacagggtggtgttgaaccaaaa

SEQ ID NO: 4079 - DNA, 99 bp, Staphylococcus aureus
atgttggaaaaggtcaaaaaattaatcaatttaattaagaaaatcattcatttgcaaagggcgaaatgggttcttactgagttatctattataaaaaaa

SEQ ID NO: 4080 - DNA, 114 bp, Staphylococcus aureus
atgaataaacatatcgatgcatacttctgcccatcaccttatgatagggagttattttttgtcggaatagtcaaaatttttagaaacaaaattccgcaaattattaattatatc

SEQ ID NO: 4081 - DNA, 90 bp, Staphylococcus aureus
ttgttacactttaaatatttaacaaaggggggaataattgatgacatcaaaacatcaacaaaaggggtctatcgtcaatcgtttcttgaa

SEQ ID NO: 4082 - DNA, 159 bp, Staphylococcus aureus
ttggcaattattgaatatttatataatttttcccgtaataaacaaaaccttaatagcgctaaaataacagtgttaagttacgatttaacgaatttaacaaattttactagaatggcatttaagaatatttatacgttattaacgaatatttatttattg

SEQ ID NO: 4083 - DNA, 105 bp, Staphylococcus aureus
atgccgacacctatacataatcctaaaatgaatagtagtgatatcgctagaaagaccattgtattatctcaaatatatttgtatatgcaaacaatgagtctagaa

SEQ ID NO: 4084 - DNA, 90 bp, Staphylococcus aureus
atgttaagtttgtgtattgaaagtgataaattagtactgtcaacgcctctgttaaagggttttaaggacgttgaaaacgatttgttaaaa

SEQ ID NO: 4085 - DNA, 126 bp, Staphylococcus aureus
atgagttcggcaaactctaatgctgccgttccattagcagtaactaaatttcgatctttttctgtaataattcaacaaatttatgctttaacaactttaaaaaagacaatttcactattgagctct

SEQ ID NO: 4086 - DNA, 90 bp, Staphylococcus aureus
ttgacaaaaaatagtaaatataccaatgaagtttcaaaagaacaattccaagaaattgagaatgtaaataataaggtcaaagaattttat

SEQ ID NO: 4087 - DNA, 120 bp, Staphylococcus aureus
atgcctaaaaatgtcatatatgtaatcagagtagaaagtgttgaggcgtttcagaagttgtttagaaaagtaagtaaaataaaaaatgcactgagcaacaaaagatgttgctcgtgcatt

SEQ ID NO: 4088 - DNA, 192 bp, Staphylococcus aureus
atgagacaacttctacaatggttgaaggaagacgtttttgtaagtagctatgctgataaagaatgtgatgtcttgttaaaggtggggttccaatatcatcatttagctgatgttgaatgggttattatttgctacttgcatatgaatatgagtcttttcaaatttttattgaccctgagtaatgaaaaatat

SEQ ID NO: 4089 - DNA, 138 bp, Staphylococcus aureus
ttgttcaatcactatatttcacacagcttcattaataaaacgaaattgcttcaacccgcttcaacttcaactggcttcaacttcagcctacttcattcaataacaaaacgaatccgcttcatccaaaatcaaccattc

SEQ ID NO: 4090 - DNA, 108 bp, Staphylococcus aureus
ttgaatatcgaaatttttagtagaataatcaaaatatacagattaaaggaggagtatcatgcttacagaacaagagaaagacattatcaaacaaacggtgcctttact

SEQ ID NO: 4091 - DNA, 144 bp, Staphylococcus aureus
atggtagaatcaatgctaacttttatgcttgggccattaagacaaatcactgatttttatatggaacatttactcgtaagtaattccattgtcattgcaggttattttgcgacaggtatttttaaaaagaaaaaagttgtgaat

SEQ ID NO: 4092 - DNA, 108 bp, Staphylococcus aureus
atgcaacaatgctcatgttatacacctcatgatttgtttttagtaaaacgttttaccagtgccatcgtaccatttttatttgtaaaatgcatgcgttttcataaaaac

SEQ ID NO: 4093 - DNA, 429 bp, Staphylococcus aureus
atgataccggtagagtgggaaaaagtatatacaatggcttatatagatgatggaggaggtgaagtattctttaattatactaaaccaggtagtgatgacttgaattattacaccaatatacctaaggagtataacatttctgtgcaagtatttgatgatttatggatggatttatatgatttatttgaggagttaagagatttatttaaagaagaagatttagaaccatggacatcatgcgaatttgattttacaagagaaggtgaattaaaagtttcatttgattatattgattggataaattcagaatttggtcaaataggtcgacaaaattactataagtatagaaaatttggaattttaccagaaacggaatatgaaattaataaagttaaagaaatcgagcaatatattaaagagctagaagaa

SEQ ID NO: 4094 - DNA, 438 bp, Staphylococcus aureus
atgataccggtagagtgggaaaaagtatatacaatggcttatatagatgatggaggaggtgaagtattctttaattatactaaaccaggtagtgatgacttgaattattacaccgatatacctaaggagtataacatctctgtgcaagtatttgatgatttatggatggatttatatgatttgtttgaggaattaagagatttatttaaagaagaaggacttgaaccatggacatcatgtgaatttgactttacaagcgaaggtaaattaaaagtttcatttgattatatagattggataaatacagagtttgatcaattaggccgtgaaaattattatatgtataaaaaatttggggttttaccagaaatggaatatgaaatggaagaaattaaagaaatcgatcaatatattaaagagcaagatgaagctgaaata

SEQ ID NO: 4095 - DNA, 171 bp, Staphylococcus aureus
atgcacgtacgtcgtgttgcgctctgtaatgttatacatacacttatccttcattatacccgaactttttatattaaaagcaaatttatggaaaatgcaattaattgtctattatttttgtacggtacatttaaaattaaggatcaatttaaaaacgcctacatatacctt

SEQ ID NO: 4096 - DNA, 150 bp, Staphylococcus aureus
ttgagtatcctcctttttcctcaacacccacattcagcagacggttatcgcaatgactatcgaatgtatttaaacgcggctcatatcatcgccagctctcgctcacatctgctcaatgtggatgttgataagcgtggttatattaagaag

SEQ ID NO: 4097 - DNA, 90 bp, Staphylococcus aureus
atggaaagtatttttaaaattaaactaatgaatggcatttgtaggtctgaaaatatgaatatgaaaaagaaaaataaaggcgaaaagata

SEQ ID NO: 4098 - DNA, 294 bp, Staphylococcus aureus
gtgataggaaacttggacatcaatcaaagtaataggcactacaacgcttattggcggggccccaacaaagaagctgacgaaaagtcagcttacaataatgtgcaagttggggatgggccccaacatagagaaattgggtccgtaatttctacagacaatgcaagttggcggggccccaacatagagaatttcgaaaagaaattctacaagcaatgcaagttggcggggccccaacatagagaatttcgaaaagaaattctacaagcaatgcaagttggggaaggacaacaaatt

SEQ ID NO: 4099 - DNA, 879 bp, Staphylococcus aureus
atgaatcaagtcatgaatattatttcatctctatttgagccattaacaaaaatagaaacatatgaaaacattgcaactaaaatcgctatgattgttatttatattatcgtagccctcatagttattaaaatactgaataaaatgattgaacagggatttaagattcaaaataaaagtaaaaagagtaacaaaaagcgctctaaaactttaatatctcttgttcaaaatgtagtgaagtatatcgtttggtttatagttattacgacgattttaagtaaatttggcattagtgttgaaggggtaattgccagtgctggtgtcgtaggcttagcagtaggttttggtgctcaaactatagttaaagacgtaattacaggattctttattatatttgaaagccaatttgatgtaggtgattatgttaagataaataacggtggtacaactgtagcagagggaacagttaaatcaattggacttcgttcaacacgaatcaatacaatttcaggagaattaacaattttaccaaatagtagtatgggtgaaataacgaactactcaattacaaatggtacagctatcgttaaaattccagtgtctgtcgaagaaaacattgataatgttgataaaaaactaaacaaactatttacttctttacgtagtaaatattacttatttgttagtgatccggttgttattggtattgatgctattgaagatacaagagtaatattgagaatatctgcagaaacaattccaggtgaaggatttgctggagctcgaattattcgcaaagaagtacaaaaaatgtttttacaagaaggtattaaaacacctcaaccaattatgactgcttataatcatagtgaaaacggtgtt

SEQ ID NO: 4100 - DNA, 150 bp, Staphylococcus aureus
atggtaccagaagaaaaaggttctattactttgtcaaaagaagcagctatcatatttgcaatcgcaaaattcaaaccatttaagaacagaattaaaaataacccacaaaaaacaaatccatttcttaaattacatgaaaacaaaaaatct

SEQ ID NO: 4101 - DNA, 99 bp, Staphylococcus aureus
gtggagaattttgatgttggtggtggaaattttacctttatggagattgggataggattcatgacacacaaaccaaaacggcttaacgacgatatcgat

SEQ ID NO: 4102 - DNA, 114 bp, Staphylococcus aureus
gtgatgtcgtggaaatattatggagttataccagaagttgatttgtattgtaatgtcgtggaaattttatgggcattgcacctgaagttgttatgtggcgagatgttggggata

SEQ ID NO: 4103 - DNA, 153 bp, Staphylococcus aureus
atgttaaggtatttattactttcaatgtatttattttacattaaaaaacgtcgatgtcatcatttttttatcatagtcaacatcattttatcagtatcaatgcaaaatgataacttaccatttaaaattacagcttgcgtttataaaatcgtt

SEQ ID NO: 4104 - DNA, 4143 bp, Staphylococcus aureus
atgctaaacagagaaaataaaacggcaataacaaggaaaggcatggtatccaatcgattaaataaattttcgattagaaagtacacagtgggaacagcatcaattttagtaggtacaacattaatttttggtctggggaaccaagaagcaaaggctgcagaaagtactaataaagaattgaacgaagcgacaacttcagcaagtgataatcaatcgagtgataaagttgatatgcagcaactaaatcaagaagacaatactaaaaatgataatcaaaaagaaatggtatcatctcaaggtaatgaaacgacttcaaatgggaataaattaatagaaaaagaaagtgtacaatctaccactggaaataaagttgaagtttcaactgccaaatcagatgagcaagcttcaccaaaatctacgaatgaagatttaaacactaaacaaactataagtaatcaagaagcgttacaacctgatttgcaagagaataaatcagtggtaaatgttcaaccaactaatgaggaaaacaaaaaggtagatgccaaaactgaatcaactacattaaatgttaaaagtgatgctatcaagagtaatgatgaaactcttgttgataacaatagtaattcaaataatgaaaataatgcagatatcattttgccaaaaagtacagcacctaaacgtttgaatacaagaatgcgtatagcagcagtacagccatcatcaacagaggctaaaaatgttaatgatttaatcacatcaaatacaacattaactgtcgttgatgcagataaaaacaataaaatcgtaccagcccaagattatttatcattaaaatcacaaattacagttgatgacaaagttaaatcaggtgattatttcacaattaaatactcagatacagtacaagtatatggattgaatccggaagatattaaaaatattggtgatattaaagatccaaataatggtgaaacaattgcgactgcaaaacatgatactgcaaataatttaattacatatacatttacagattatgttgatcgatttaattctgtacaaatgggaattaattattcaatttatatggatgctgatacaattcctgttagtaaaaacgatgttgagtttaatgttacgataggtaatactacaacaaaaacaactgctaacattcaatatccagattatgttgtaaatgagaaaaattcaattggatcagcgttcactgaaacagtttcacatgttggaaataaagaaaatccagggtactataaacaaacgatttatgtaaatccatcggaaaattctttaacaaatgccaaactaaaagttcaagcttaccactcaagttatcctaataatatcgggcaaataaataaagatgtaacagatataaaaatatatcaagttcctaaaggttatacattaaataaaggatacgatgtgaatactaaagagcttacagatgtaacaaatcaatacttgcagaaaattacatatggcgacaacaatagcgctgttattgattttggaaatgcagattctgcttatgttgtaatggttaatacaaaattccaatatacaaatagcgaaagcccaacacttgttcaaatggctactttatcttcaacaggtaataaatccgtttctactggcaatgctttaggatttactaataaccaaagtggcggagctggtcaagaagtatataaaattggtaactacgtatgggaagatactaataaaaacggtgttcaagaattaggagaaaaaggcgttggcaatgtaactgtaactgtatttgataataatacaaatacaaaagtaggagaagcagttactaaagaagatgggtcatacttgattccaaacttacctaatggagattaccgtgtagaattttcaaacttaccaaaaggttatgaagtaaccccttcaaaacaaggtaataacgaagaattagattcaaacggcttatcttcagttattacagttaatggcaaagataacttatctgcagacttaggtatttacaaacctaaatacaacttaggtgactatgtctgggaagatacaaataaaaatggtatccaagaccaagatgaaaaaggtatatctggcgtaacggtaacattaaaagatgaaaacggtaacgtgttaaaaacagttacaacagacgctgatggcaaatataaatttactgatttagataatggtaattataaagttgaatttactacaccagaaggctatacaccgactacagtaacatctggtagcgacattgaaaaagactctaatggtttaacaacaacaggtgttattaatggtgctgataacatgacattagatagtggattctacaaaacaccaaaatataatttaggtaattatgtatgggaagatacaaataaagatggtaagcaggattcaactgaaaaaggtatttcaggcgtaacagttacattgaaaaatgaaaacggtgaagttttacaaacaactaaaacagataaagatggtaaatatcaatttactggattagaaaatggaacttataaagttgaattcgaaacaccatcaggttacacaccaacacaagtaggttcaggaactgatgaaggtatagattcaaatggtacatcaacaacaggtgtcattaaagataaagataacgatactattgactctggtttctacaaaccgacttacaacttaggtgactatgtatgggaagatacaaataaaaacggtgttcaagataaagatgaaaagggcatttcaggtgtaacagttacgttaaaagatgaaaacgacaaagttttaaaaacagttacaacagatgaaaatggtaaatatcaattcactgatttaaacaatggaacttataaagttgaattcgagacaccatcaggttatacaccaacttcagtaacttctggaaatgatactgaaaaagattctaatggtttaacaacaacaggtgtcattaaagatgcagataacatgacattagacagtggtttctataaaacaccaaaatatagtttaggtgattatgtttggtacgacagtaataaagacggcaaacaagattcaactgaaaaaggtatcaaagatgttaaagttactttattaaatgaaaaaggcgaagtaattggaacaactaaaacagatgaaaatggtaaatactgctttgataatttagatagcggtaaatacaaagttatttttgaaaagcctgctggcttaacacaaacaggtacaaatacaactgaagatgataaagatgcagatggtggcgaagttgacgtaacaattacggatcatgatgatttcacacttgataatggctactacgaagaagaaacatcagatagcgactcagattcggacagcgactcagattcagacagagactcagactcagatagtgattcagactcggatagcgattcagattcagacagcgattcagattcagatagcgattcagattcagacagagactcagatagtgattcagactcagatagcgactcagattcagacagcgactcagattcagacagcgactcagactcagatagtgattcagactcagatagcgactcagattcagacagcgactcagactcagacagcgactcagactcagatagtgactcagattcagatagcgactcagattcggacagcgattcagactcagatagcgactcagattcagatagcgattcggactcagatagcgactcagattcagatagtgattcagactcagatagcgactcagattcagacagcgactcagattcggatagcgactcagattcagacagcgactcagactcggatagtgattcagactcagatagcgactcagactcagatagcgattcagattcagatagcgactcagactcagacagcgattcagactcagacagcgactcagactcagatgcaggtaagcacacacctgttaaaccaatgagtactactaaagaccatcacaataaagcaaaagcattaccagaaacaggtaatgaaaatagcggctcaaataacgcaacgttatttggcggattattcgcagcattaggatcattattgttattcggtcgtcgtaaaaaacaaaataaa

SEQ ID NO: 4105 - DNA, 105 bp, Staphylococcus aureus
atgaaagatagtgaaaatctcgtgttttttggttttgaggtgttgtttgtattttataaaatggcttacatatatgaagcgttgattaagtatggaattgttaat

SEQ ID NO: 4106 - DNA, 147 bp, Staphylococcus aureus
ttgatttgggtagtatgctttgacacaacaaattttaatttagcaaattcgatagtcaactcattcttaagacctaaattaatgttattttttaataatttacaccaaattaatagcaaaaattatgttattcgtgctaatatttca

SEQ ID NO: 4107 - DNA, 222 bp, Staphylococcus aureus
ttgtccccttttaatttattaattaggggctcttatgcagttggtgcgttagcatccaactgtattcctttgtccccttttaatttattaattaggggctcttttgctgttggtgcattagcaaccaactgtattcctttgtccccttttaatttattaattaggggctcttttgctgttggtgcattagcaaccaactacgttcaatttaaccgaatagtt

SEQ ID NO: 4108 - DNA, 159 bp, Staphylococcus aureus
ttgactgcggggccccaacatagagaaattggattcccaatttctacagacaatgcaagttggcggggccccaacatagagaaattggaacgccaatttctacagacaatgcaagttggggtgggccccaacataaagaaatactttttctttagaaat

SEQ ID NO: 4109 - DNA, 102 bp, Staphylococcus aureus
gtgttatgggaggagtctttttattttacaagcgttaaatactttaaaaaatgtgaagaagttgttaaacgttgttatgtacttagttttaaaaaatcggtt

SEQ ID NO: 4110 - DNA, 105 bp, Staphylococcus aureus
ttgtgtttgttaaaacaacatatgcagtgtgcatttagtaatattacctatggcgattttcaaggtattgaattaattattgaaaacgttctcaattacatggta

SEQ ID NO: 4111 - DNA, 144 bp, Staphylococcus aureus
atgcgagttggggtggggccccaacatagtgaaattggctcctcccaatttctacaggcaatgcaagttggggtggggccccaacatagagaaattggatttccaatttctacaggcaatggaagttggggtgggacgacgaaa

SEQ ID NO: 4112 - DNA, 102 bp, Staphylococcus aureus
gtgttcggccaatataccaaatggtgtgttatcattttgaaaacccatgatgaaattgtaaaacgtcataagacttgcccccttcatttattaagcgctatt

SEQ ID NO: 4113 - DNA, 111 bp, Staphylococcus aureus
atgaaagaaaaattattaggtactattatttggagtattgctacattttattattcaagaatgatggaaataatgaatttagctattttaaaaataaaaattgggggaagt

SEQ ID NO: 4114 - DNA, 132 bp, Staphylococcus aureus
ttgtacttaatcaataaaattgatatttatgtgacgtttcacacctatttttcaacaaacatttcaaactggcgtcaaacactcaaacattttttatacaatttgcatgtttttttaaatacttttaaacat

SEQ ID NO: 4115 - DNA, 105 bp, Staphylococcus aureus
ttgaaaatgagttgtgttcattctgctacaaggactttgcacttaatcgaaattattttttattcttttgaaaatcaaaatactatagttgcaatgtaccaaatt

SEQ ID NO: 4116 - DNA, 93 bp, Staphylococcus aureus
gtgatttatgaaaaatggattttgaagaatgtgaatcaaaagatgcgatatagtattaagaaaatgtgccttttatatttagcattttttcaa

SEQ ID NO: 4117 - DNA, 132 bp, Staphylococcus aureus
atgtctaatgaaaatcaaaataaaaaagcagcagaaaaagctaaagaagttgaagaaaaattaaaagataaaaaagaagaaaaaacagaagatattaatcaaacaaaacaagatatccaagatacactaaat

SEQ ID NO: 4118 - DNA, 177 bp, Staphylococcus aureus
ttgactgaacgaaaatgcgcttgtaacaagcttttttcaattctagtcaggggccccaacatagagaatttcgaaaagaaattctacaggcaatgcgagttggggtgtgggccccaacaaagagaaattggattcccaatttctacagacaatgtaagttggggtgggacgacgaaa

SEQ ID NO: 4119 - DNA, 201 bp, Staphylococcus aureus
atgcctgaagatgattttgttttatcgaaacgacacagttatgtcagtgttgaaaatttgctaattaatgtgttgttttttacaatagtattaatactttttaggtggttgattgatgaaaaagttaattataagagtcgtcggtgtattatttttagttggatttttaatatatcttttttattcaccgagattaaaatt

SEQ ID NO: 4120 - DNA, 243 bp, Staphylococcus aureus
ttggggtggggcccaacacagaagctggcgaaaagtcagcatacaaaaatgtgcaagttggcggggccacaacagagagaaataggatcaccaattccaacaaacaatgcaagttggcgggggccccaacatagaagctggcgaaaagtcagcttacaaaaatgtgcaagttggcggggccccaacatagagaaattggaaccccaatttctacagacaatgcaagttggggtaggacatcga

SEQ ID NO: 4121 - DNA, 246 bp, Staphylococcus aureus
ttggggccccgccaacttgcacattattgtaagctgacttttcgtcagcttctgtgttggggcccaccccaacttgcattgtctgtagaatttctttttgaaattctctatgttggggccccgcctataattgaaaaatgcttgttacatgggcattttcattcggtcaactactaccaatataatattgtagagcctaagacattgatttattatgtcttaggctctattccttcatttaatgat

SEQ ID NO: 4122 - DNA, 129 bp, Staphylococcus aureus
atgtgcaagttggcggggccccaacatagtgaaattggattcccaatttctacagacaatgcaagttggcggggccccaacatagaagctggcggaaagtcagcttacaataatgtgcaagttggggag

SEQ ID NO: 4123 - DNA, 96 bp, Staphylococcus aureus
atgcctatacatagactactatattttcccattttaaattctaaaaaacaagtagaaattttagaaacacttatcaatttattgattagtgtttct

SEQ ID NO: 4124 - DNA, 123 bp, Staphylococcus aureus
ttgagcaaacacgttatgaataaagaaggaataaacaattacattatcaactttacattaactaaacagcaaaaaaagccatctatatcactccataaaagtgacctagatggctttattgtt

SEQ ID NO: 4125 - DNA, 135 bp, Staphylococcus aureus
ttgcccgtatcatttaataattatattaaatttaactataaagtgcaaaaacagttaaagttatacgtcatctctaacaagccaattcaaatccagtttacttcacttttaatgttattcatcatatttttcagt

SEQ ID NO: 4126 - DNA, 159 bp, Staphylococcus aureus
ttgcattttttactaataaacacctctaaaactttaatgattttaatcgttttagaggtgctaattattttatttgattattttttgtttgatacctactgcatatcccatatgaaaacggcttttttattatgttatatgactaaatctcgtgaaaaa

SEQ ID NO: 4127 - DNA, 111 bp, Staphylococcus aureus
atgggatttcacttgaccacttttgttaaaaaatggatttggtcaagttttggtcaagtaaatgttttatgtatttatttttttaaagctggggaagaccattttatattt

SEQ ID NO: 4128 - DNA, 108 bp, Staphylococcus aureus
atgaagatgactattaaagtgcgaaaaacaaataaaaaagagaaaatagaatttttaatagggacgtttataattattttagtaatattagggttcaaaattatgaaa

SEQ ID NO: 4129 - DNA, 93 bp, Staphylococcus aureus
ttgatgaataagtataatttcaactatgattatgcacataaaattgtatcaaaaaaatacgattattcaatttttataaaaaagaaggtggat

SEQ ID NO: 4130 - DNA, 135 bp, Staphylococcus aureus
atgattttaattatgttagattcacaattagatggaaatgtaactgcaaaagaattgagtgaatcttttaaagaattagttgaagaatttgaaagtatagaaaaagcgaaaaagaattcaaattcaaaagataaa

SEQ ID NO: 4131 - DNA, 105 bp, Staphylococcus aureus
gtgactgtattttcatttgaaatgttcatttattttcactccttaacaataacattatatcatgctatagctttccaaaatattgaaatatgtagatatggctat

SEQ ID NO: 4132 - DNA, 93 bp, Staphylococcus aureus
gtgttaacctcttttttaaaattttttagcattaaagttatagatttgggtaaacaattaccaattggaaacatatatcacgttacgatgggg

SEQ ID NO: 4133 - DNA, 162 bp, Staphylococcus aureus
gtgttatctgttaaatcaagtaaatctaaaaacttcctatataaatacaaaattttatcgtgtatgttgttatacgatgaaaatacttttaatctaataaaatcatttaaatcaaatacacctctgctgattaacaacacatacttgtacttgcctcaaaaa

SEQ ID NO: 4134 - DNA, 123 bp, Staphylococcus aureus
ttggtgtattgtgtctttcgcatttatactaatttaagtttggtgtttcactataatgttgtgtataataaacaacgtttactaccaaacttgtgtggtgaaatttatgaattatccaaatgg

SEQ ID NO: 4135 - DNA, 123 bp, Staphylococcus aureus
atgtggttagtcattatgattatacataacaaggcccgttttttatgttgtagtaaattacttgaaaaattttatagttttttggtaacacgtattaaaaagagaggaatattctttatcaaa

SEQ ID NO: 4136 - DNA, 114 bp, Staphylococcus aureus
ttgttatttaacaaggtcttttctcgaatattggcatatcaatttaactttttaaatagtcatcaaaaagataaaacaccacaatcaacaaatttaacgaggaagaataaaaaa

SEQ ID NO: 4137 - DNA, 96 bp, Staphylococcus aureus
atgaaaacatgtgaacaaattagttaccatgattttaagcacaataatgtttggtatattgttaaaattgtgtctaaatataggtgtgattcagat

SEQ ID NO: 4138 - DNA, 144 bp, Staphylococcus aureus
atgagttttatggataaagctaaagacgcagtagaaaaatttaaaaatagcgataatgaacaagttaaaaatgtaaaagataagataaatgaatatacaggatcgaataacgaagagaaaaaagaaaatgaagataaagagaaa

SEQ ID NO: 4139 - DNA, 141 bp, Staphylococcus aureus
ttgattgaccatgaaatgataacttcatttgagcatcctcctatcaattactatataaatttagtacccttttgccacttaattataacaaattctcaaattttaaaaattgaaaatctagttaatgtattagctcgattt

SEQ ID NO: 4140 - DNA, 775 bp, Staphylococcus aureus
atgacaagagaaagaagatcatttagttcagagtttaagttacaaatggttagattatataaaaatggtaagcctaggaatgaaattatacgcgagtatgatttcacaccttcgacgtttgtaaatggcggttataaaatgtaggaaaatggataaagcaacatcaaaacacgggtacattcaatcaccaagataacttatcggatgaagaaaaagagctgattaaattacgcaaagaagttcaacatttaaaaatggagaacgatattttaaagcaagtagcgctgattatggggcaaaaatagaagtcattcaaaagaatgcacatcaatattcagtatcagcaatgtgtaaagtcctgataatactaagaagtacctattatgattctataaaaagaaaagataataaaatcactaaagatgattcaaacatagaacatgccgtcataaatatttttaattctaatagaaaagtctttggtacaagacgaattaaaaatcatttaaatgacaagggtctcactgtatctggacaaaagataggtcgatcatgaaaaaatctagtttctgtttatacgaaatctaaatacaaaaatcatctaaaagaaactaatgaaaaacgaattaaaaatcatttaaatgacaagggtctcactgtatctggacaaaagataggtcgatcatgaaaaaatctagtttctgtttatacgaaatctaaatacaaaaatcatctaaaagaaactaatgaaaaacgaattaaaaatctttattat

SEQ ID NO: 4141 - DNA, 132 bp, Staphylococcus aureus
ttgcattatttaatatgcatcaaagccaatcaacgattgattttcaccaactcaattgttgattggttttatttatgtatgaatgaacaactttttgacatcattaagaatataaatgattttgaaagcatt

SEQ ID NO: 4142 - DNA, 114 bp, Staphylococcus aureus
gtgattaaagtttcaatgatatttgatttattagaccatttcaaaatcgcaaggttctcatgttctgctacagtttgcggtctttggaagatatatcatttactattattaaca

SEQ ID NO: 4143 - DNA, 225 bp, Staphylococcus aureus
atgttatatcgcaaagtgacatttctaattaaagtgtattgtcatcatttcaatatcattcaaaaacagctaaacctttgtctctgcttcaatttcacaaaaataattcccgctgaaagtatctatatttacacattacttccaccattatataacttaaaaatgactatatttcatcaaacattatctaaaggcgtcgcacctacaccaacaccatccaacaat

SEQ ID NO: 4144 - DNA, 360 bp, Staphylococcus aureus
atgtctggagtaattaattatcaattccgtttaaatggtgttttaatatttaaaattgaacttttgatatattactatgtctggtacacaaatcaatgttttatgctttacaaagttatattggcagtagttgactgcagtccacaacatagaggcttcggaatgtcagcttctatttcatgcaagttggtggagctccaacatagtggaattggattcccaatttctacagacattgcaaattggggaaacgggccacaaactcagaaactggtggaaagtcagcttaaaataacatgcaagttggcgaggccccaaaatagtgagatcggatttctaatttctacagacattgcaaat

SEQ ID NO: 4145 - DNA, 150 bp, Staphylococcus aureus
atgtctaaagacaaagatccaaaattaaattatcatgaagaagaaaacagtatggtaacggattttgaagatttaaaagaattaggtaaagaaatggaacaaatctctgatcaaaatgatcaagaaaagaattctgaagaagacagtcag

SEQ ID NO: 4146 - DNA, 120 bp, Staphylococcus aureus
ttgcttggacgagtggtaacgaaacgtataccgcagcatcgtgtaaaaacaatacaaacaaaagaaagtcaaccaaggatggattcctattttaatccttggttgactctttattttatt

SEQ ID NO: 4147 - DNA, 138 bp, Staphylococcus aureus
atgaatacattatttaacttattttttgattttattactgggattttaaaaaacattggtaacatcgcagcttatagtacttgtgacttcataatggatgaagttgaagtaccaaaagaattaacacaattacacgaa

SEQ ID NO: 4148 - DNA, 123 bp, Staphylococcus aureus
atgaaatcatttttatatagtgtggcacattttattccaaaagatgtaataaaacttaacgcatttttgctttttataaattgtcagattattatgaaaaaagggagtggtaagtatgaatct

SEQ ID NO: 4149 - DNA, 114 bp, Staphylococcus aureus
ttgattatagatgaaaggcatcatgttgataaaattataacatggtgtctttttagcaattcaagcactttctgcttaattaaatttttagatgtacctttaggaagaataaat

SEQ ID NO: 4150 - DNA, 114 bp, Staphylococcus aureus
ttgtttgtttatgtttataatttaaacgtaatcaaattgaaagccttttctcaagattttcataacctacaaataaatatgtcacattttaagaaaggtatttcaaaattaaag

SEQ ID NO: 4151 - DNA, 597 bp, Staphylococcus aureus
atggggtataaaaaatataatgaatattttacaaacagagatgatactacattaaaaattactaatttatatattgggcaatcttttggtacagagggtaatagaaatgtcattgatagaatagggaaaggtcatgaaaaattacaagaaattatgacttatcagccagaaaatagaaagactgtcttaatattttacaagatacagcctgacaatatttatattacaaaccaatatggtaaagaggctgtgtctcgattaaaaagaattttagagcaaagtatacctaataaagaatatattgatttatcagagatatcattaattacattttttaaaccagaatataataaacaacatgtgaatgaggagtttaattctttatcttcttcgaaaataaagaatttagccaaagaaaatgatggtattattatttatttaaattttaaggatgttaattatcaactgataagtgaaggcaatacttttttttctgcaaaaccatatttgcattgtgtgttcaataaagatattttaaatatggataaagttgatatagaaaattttttcaaaagtatagaagtcaaatacagtaaa

SEQ ID NO: 4152 - DNA, 771 bp, Staphylococcus aureus
atgaataatagtaattttttaaatgtagagttaataggtactaaaataataacaatggaagacttttataaaatgaaggaagaagaatttttcttaaaatctaagctacctttatatttatattccttcaactatgtagatgaatatacaatgaaattacttgatagaggaagaatatctatattaaatacgaaaacaaataaagattgtatatttgacatttcaaagtatatacatgagaatattatattcagaagagatatatttgaattaaatgatataagagatgatgatttgaagtataaaattaatggttacaatattgaggtatacttaagtggtgaattggagaaaattgtaaaacatttattcgaaaacaagtttgatgtagagtatggtttttatattttatttattaaaccaatatttgaaattgttttttcttctaactatgttaaagaagaattcaatacaaaaatcgaatcatcagaatatagagagagcttagatagttttaatgaaattttaatgaaatatctagaaaatgaaataaatttcaaagaagtatggaaaaaatatattgatgaattatttaaaaaattaaatgttcaaaaattgttaattcataaaaaaatagaaagtttaatatcctcgtatgataaaaaaatatctgatgattgtagtatgtactcaaaagtatttgaacaatataaaaaaacgttgtattggataaagtatattactctgaagtttataaatatagtgataatt

SEQ ID NO: 4153 - DNA, 111 bp, Staphylococcus aureus
atgaaagtaagaccatcagtaaaacctatttgcgaaaaatgtaaagtcattaaacgtaaaggtaaagtaatggtaatttgtgaaaatccaaaacacaaacaaagacaaggt

SEQ ID NO: 4154 - DNA, 117 bp, Staphylococcus aureus
atgacaagcacaatggaaagaatcgttaatatattatttaatcgtgatgacttaattaaaatgaaaaagattgataatataaatgtgaaaaagataagtataacccgtaaactaaag

SEQ ID NO: 4155 - DNA, 141 bp, Staphylococcus aureus
atgtgcaagttggcggggccccaacatagagaatttcaaaaagaaattctacagacaatgcaagttggggaacggggccccaacacagaaggtgacgaaaagtcagcatacaataatgtgcaagttggcggggccccaaca

SEQ ID NO: 4156 - DNA, 126 bp, Staphylococcus aureus
atggaatacaaacaacatcctttcaaagtatttacaattagtgtgaattactttgaagggattgttttttgtggaaaaatttatgaagtgctgaggtttatatcattttataccttttataagttg

SEQ ID NO: 4157 - DNA, 114 bp, Staphylococcus aureus
atggctaactatgcgatttattttaacaatataaatattaatagtataatggctttaaatgataataattatcaatttgagcacgttaatgaaagaaatgaatatagagagtca

SEQ ID NO: 4158 - DNA, 120 bp, Staphylococcus aureus
gtgcaacagtttgcaaatgcagtatttatattacataaaattaatttaaaaagacacaccctaatcacgttaaatgtgaataaagtgtgtctaaaaaacaatacattgcaaattgaattg

SEQ ID NO: 4159 - DNA, 102 bp, Staphylococcus aureus
atgaaattagatttacagactgctcgtcgtaatttaaatagccctaacattaaaacaagaaagcgtgctttaaagattattaagcaacataaaagagcgaaa

SEQ ID NO: 4160 - DNA, 138 bp, Staphylococcus aureus
atgagtaaagcataccggttatacaacaacatacaagatgacacgaaacaaccaatggctcatgctgttggttgtttttttaggtgtgtctgtcatgggcaacactttgacgttggaattccgttacaggcttgggag

SEQ ID NO: 4161 - DNA, 168 bp, Staphylococcus aureus
ttgccaaaaatacaaaaaataatatgcgacaattatacgcttattataataatagtcaaatgcattttttgtaagaacgcaaaagcatttgtaaaattagttttttataaaattaggatatataatacaatgtgtattgaaaaacaaaatggaagtgatgactatgag

SEQ ID NO: 4162 - DNA, 96 bp, Staphylococcus aureus
ttgaaagcagcggattttagcgttactgcaaataattttatattagtagtggatgctggtcacacaagaacttcaaatattaaagccctcagaata

SEQ ID NO: 4163 - DNA, 129 bp, Staphylococcus aureus
gtgaatgtagttaacggacaactgcattcgcttgtagagccacaagaagcaactttaaataaggtttacggttgcattttgatacaacaaccgattactaagtcatgctttccactttgcgggttagca

SEQ ID NO: 4164 - DNA, 99 bp, Staphylococcus aureus
ttgcttttaaaaaccgaacaatatagacttgcatttattaagtttaaaaaattaatgaattttgcatttaaagggagatattatagtgaaaaacaatct

SEQ ID NO: 4165 - DNA, 105 bp, Staphylococcus aureus
atgttacaaacattgaaattagaggtatataaaaaatgcttctgcaatagatgcaataaacatgcaatacaatatggaggcgaagtaaatgaaaagtattacgtt

SEQ ID NO: 4166 - DNA, 123 bp, Staphylococcus aureus
atgcacagatatttttacaatgagaagcgatacagctgcctcaataaaaatatttgtgcgtttttattgttggaaaataaaattttaatcgctattgttaatttctgtaatgtaaaacaaggt

SEQ ID NO: 4167 - DNA, 90 bp, Staphylococcus aureus
gtgtcagttattaatgcatacagtaatgcatcgttgttattttttatttatttactatttattatgtaccaaatcagcctttcagtaaaa

SEQ ID NO: 4168 - DNA, 99 bp, Staphylococcus aureus
atgaaaaaattagcagttattttaacattagttggcggtttatacttcgcatttaaaaaataccaagaacgtgttaaccaagcacctaacattgagtac

SEQ ID NO: 4169 - DNA, 108 bp, Staphylococcus aureus
atgaaaatgttaaagcaatatgtcgtggtatttatatttttaaagaagaatcttttagaattacacatatattacactaggtttattgaaaaaatattggtattactt

SEQ ID NO: 4170 - DNA, 63 bp, Staphylococcus aureus
atgactgcagacttctttcaattaatcggatcattatttagaattctaaaagaattattcaag

SEQ ID NO: 4171 - DNA, 966 bp, Staphylococcus aureus
ttgagattaaggagtcgattttttatgtataaaaacaatcatgcaaatcattcaaatcatttggaaaatcacgatttagacaatttttctaaaaccggctactctaatagccggttggacgcacatactgtgtgcatatctgatccaaaattaagttttgatgcaatgacgatcgttggaaatctcaaccgagacaacgctcaagccctttctaaatttatgagtgtagagccccaaataagactttgggatattcttcaaacaaagtttaaagctaaagcacttcaagaaaaagtttatattgaatatgacaaagtgaaagcagatagttgggatagacgtaatatgcgtattgaatttaatccaaacaaacttacacgagatgaaatgatttggttaaaacaaaatataataagctacatggaagatgacggttttacaagattagatttagcctttgattttgaagatgatttgagtgactactatgcaatgtctgataaagcagttaagaaaactattttttatggtcgtaatggtaagccagaaacaaaatattttggcgtgagagatagtaatagatttattagaatttataataaaaagcaagaacgtaaagataatgcagatgctgaagttatgtctgaacatttatggcgtgtagaaatcgaacttaaaagagatatggtggattactggaatgattgctttagtgatttacatatcttgcaaccagattggaaaactatccaacgcactgcggatagagcaatagtttttatgttattgagtgatgaagaagaatggggaaagcttcacagaaattctagaacaaaatataagaatttgataaaagaaatttcgccagtcgatttaacggacttaatgaaatcgactttaaaagcgaacgaaaaacaattgcaaaaacaaatcgatttttggcaacatgaatttaaattttggaaa

SEQ ID NO: 4172 - DNA, 1377 bp, Staphylococcus aureus
ttgtttagtttatataaaaaatttaaaggtttgttttatagcgttttattttggctttgtattctttcattttttagtgtattaaatgaaatggttttaaatgtttctttacctgatattgcaaatcattttaatactactcctggaattacaaactgggtaaacactgcatatatgttaactttttcgataggaacagcagtatatggaaaattatctgattatataaatataaaaaaattgttaattattggtattagtttgagctgtcttggttcattgattgcttttattggtcacaatcacttttttattttgatttttggtaggttagtacaaggagtaggatctgctgcattcccttcactgattatggtggttgtagctagaaatattacaagaaaaaaacaaggcaaagcctttggttttataggatcaattgtagctttaggtgaagggttaggtccttcaatagggggaataatagcacattatattcattggtcttacctacttatacttcctatgattacaatagtaactataccttttcttattaaagtaatggtacctggtaaatcaacaaaaaatacattagatatcgtaggtattgttttaatgtctataagtattatatgttttatgttatttacgacaaattataattggacttttttaatactcttcacaatcttttttgtgatttttattaaacatatttcaagagtttctaacccttttattaatcctaaactagggaaaaacattccgtttatgcttggtttgttttctggtgggctaatattttctatagtagctggttttatatcaatggtgccttatatgatgaaaactatttatcatgtaaatgtagcgacaataggtaatagtgttatttttcctggaaccatgagtgttattgtttttggttattttggtggttttttagtggatagaaaaggatcattatttgtttttattttaggatcattgtctatctctataagttttttaactattgcattttttgttgagtttagtatgtggttgactacttttatgtttatatttgttatgggcggattatcttttactaaaacagttatatcaaaaatagtatcaagtagtctttctgaagaagaagttgcttctggaatgagtttgctaaatttcacaagttttttatcagagggaacaggtatagcaattgtaggaggtttattgtcactacaattgattaatcgtaaactagttctggaatttataaattattcttctggagtgtatagtaatattcttgtagccatggctatccttattattttatgttgtcttttgacgattattgtatttaaacgttctgaaaagcagtttgaa

SEQ ID NO: 4173 - DNA, 270 bp, Staphylococcus aureus
atgtattatctaaaactaacacggtggaaaaatgatggtttagctggatttactgcgagttctgtttcgtcaatacttgtatattggaccaatcaaagaaatgaatttggaataaaaggtaaaaacgattggataggacataaactagacgatggtatcgatagtgttaaaaaatctacagaaaaagccgtagatagtgttgggaatgttgttggtgaaggttcaaaaagtatttctaatcatataagccctaagaaatggagctggtaa

SEQ ID NO: 4174 - DNA, 342 bp, Staphylococcus aureus
atgaaggctagtcataaggatcatacacagcttgttggcagacgagttgttgaattagaaaaaggtcaatttgtgttcgggagaaagcgagcaagcgaagagttacgtctcaaagaatccacagtaagagactacataaagcttttagaaaaccttggaactatcgtcgtaaagtccgacaacaaattttctgttataaccgttgtcaattgggcgatttatcaaagtatggaagaaaattccgacagcaaaaacgacaacaaatcaacaacaaatggacaacaaatggacaacaaatcaacaacaaatcaacacaaacaagaatgtaaagaatggggataa

SEQ ID NO: 4175 - DNA, 96 bp, Staphylococcus aureus
atgggcgttaaacaagcatctaagacagagactggttctgcaatcccactacattcaataaatacaatgtctggttgctcttttaaatataattga

SEQ ID NO: 4176 - DNA, 123 bp, Staphylococcus aureus
atgacaccgaaaacaatacctaataaattaaaaatcactgaaattagttttaagctaccactacctgaaaacgtaaataatccagcaatagaactaaaaataaaccaaaatgcaaacatgtag

SEQ ID NO: 4177 - DNA, 120 bp, Staphylococcus aureus
atgtctgcccttgaatattatcaagaatacaaacaaagaaagtctaattgtgggagacatagaatagtgcttccagaagaacagtcagattatatccgagagaacgtagctgatggatag

SEQ ID NO: 4178 - DNA, 159 bp, Staphylococcus aureus
ttgaaggatagcttttcatttagagtaaaagaaattgcaacgattattctcaatgagatagcatattctgttaacagatatcatgctcaaagattaattaaagatattatatctattggaattaaaccaataattgaggatattttaaaaggagataaa

SEQ ID NO: 4179 - DNA, 96 bp, Staphylococcus aureus
ttgttaaatcatcattttcaaaagtttattagcgaaatagatacgttagtcttaaaagtgattagtcgtataacagtaattgcaatttgtgaaagt

SEQ ID NO: 4180 - DNA, 93 bp, Staphylococcus aureus
atggaagatttaaagcaatctttaaaaggtttaggttggtatgactttttttatagtacctatgtttctactattcgtgtatctgccgaatta

SEQ ID NO: 4181 - DNA, 93 bp, Staphylococcus aureus
atggctaagacgattaatatgataaacgcagtcttagaccccgttgtagttaaagaccatagcaaaataccacatgcaaggaccttgaatatg

SEQ ID NO: 4182 - DNA, 90 bp, Staphylococcus aureus
atgcatcttgcatataatgcctcaaaaaaattagcactatatgactatatattattccaaatgagtgaaatttatcaacatttgcgtaag

SEQ ID NO: 4183 - DNA, 102 bp, Staphylococcus aureus
atgcccaaaacagtatttattccggaattttcaaaaaatttagtatttattacaaaattatgtatcactttaggtttaatttttgatattatcttaattaag

SEQ ID NO: 4184 - DNA, 138 bp, Staphylococcus aureus
atgagtatgaagggggatttaattgatgattttaaaattcaaaatttaaggggagagcgaactatcaatgatgctgcaaaacacaatcgcaatgaaaaaacaggcgcgtcaccttatgaaggtatacgcacctgttta

SEQ ID NO: 4185 - DNA, 165 bp, Staphylococcus aureus
atgagacaagtccaacaatggttgaaggaagacgcatttgtaagtagctatgctgataaagaatgtgatgccttgttaaagatggggttccaatatcatcgaatgggttattatttgctacttgcatacgaatatgagtcttttcaaatttttattgaccctgag

SEQ ID NO: 4186 - DNA, 195 bp, Staphylococcus aureus
ctgagaaaagaggttagtgctcatatgaaacttaatcaacgttacgttaaagtatttgcattatatttcgcgagtattgttaccgcaaatattgttgtcaaaaataacaatttaatcaaaacattgattcaaacacttgccggttacaccgtctttgcagttggtttgaagtatttaactaaacgtaaaaataaa

SEQ ID NO: 4187 - DNA, 135 bp, Staphylococcus aureus
atgtgttttcacatttatgaattagataacgattggattgattattttattttacaaaatgacaattcagttggaacaggctgggacataaatcaatgttctatgctctacgaagttatattggcagtagttgac

SEQ ID NO: 4188 - DNA, 132 bp, Staphylococcus aureus
ttgataattattatcattaatatagcatatttatatgcgataatttggaagttaacaagattacaaaaaattgtcacttcatttataactaaacatgagtcttcaagcataggtttagtggaaaattatttc

SEQ ID NO: 4189 - DNA, 96 bp, Staphylococcus aureus
atggaaagcatttttaaaattaaaattgaactaatgaatgtcatttgtaggtctgaaaatatgaatatgaaaaagaaaaatacaagcgaaaagata

SEQ ID NO: 4190 - DNA, 114 bp, Staphylococcus aureus
ttgagttcagtatgttcatcgttaaattcaccagtcgaaatgacttatcgtcgcaatgaccttatacgaatcaatactgcaatactcacaatgcaacaacatcacaatagccaa

SEQ ID NO: 4191 - DNA, 201 bp, Staphylococcus aureus
gtgcgtaatcgattgaaagaattacgagcacgagatggcttaaaccaaacgcagcttgctaaacaagcgggtgtttcaagacaaactatttcgctaattgagcgaaacaactttatgccatcggtattaactgcaataaagattgctcgtatcttcaatgaaaaggtggaaactatttttattattgaggaggatgaggtt

SEQ ID NO: 4192 - DNA, 144 bp, Staphylococcus aureus
gtgcgaaaacaagttattattacaaaaacagtagttggctggtacaacattaaagatactcaacataatttaatgttaaatataccgccaaaagtatttgaacagtactttcctgatgttagtaaagatgtcaagttgcgtgtt

SEQ ID NO: 4193 - DNA, 1005 bp, Staphylococcus aureus
atgaacagaaaaacacctaaaactactgatggtttaatgagacatataagagacaataaaggtatccaaataaatggtagcacggaaaaaaaccagttacgaaacatcggctattttcatggattcaaagggtataatttctttttaaacaaagaagaagaacttaattttgaaaaattcagcgaattacacgctttatacagttttgatacagaaattaaaaaccttttctataaacacgttatgttctgtgaaacggctattaaaaatagattgctagaaatagtttgtgtaaactctggctttgatttagatagtttatttcaaaaatcattaacatattataaaagttatagtcccggtagttcaaaatataaaaaacatttaaaaaatactactagactaagaagagatatttacgacatgatccatgaacattgtaattcaaaaccttacatttatcattacatacatcaagatagaaccgtgccactatatgccgtatttgaattattcactttaggaaatctggtatttttcactcgttgcatgtcccaaaatttaaatatagaagctcaaaaacaactaaaattatactccccagcatttgatcaaagtaaagatatactaggtgacatcattgattgtatgaaaggcttaagaaatgctatagctcacaatggtgtactttatgactgtagatttaaaactggagagacaagtaatagattaaaagaatatttagcagtaaaaatggatatacacaatttagatttcgacagaataattgattatctcattttattaattctaatttgttctggtctctcttattctaaagcagaactccaaagaattataaggcaattcgaacaaaaccttgattttttacgatcaaagataagcgagtcgacttatgataaaattataggcgttcgagcaagacctaaattaagaagtttaaagaactttatcaataaccttgatttttatctaaaaacagat

SEQ ID NO: 4194 - DNA, 246 bp, Staphylococcus aureus
ttgaatgataagtttattaatatagggtacatattcacaaatgcagctggtggtcctatcgatttaaacaaaataaataacattattaaagggggggctatcaaagagacaactgagattagttctattaagaaacctgcaacgacgcatacattacatcattcgcatatatctacacttgctcaattaggaattaacttaaaagcaatgcaagagcatgtaggtcattcagattataaaaaaatc

SEQ ID NO: 4195 - DNA, 99 bp, Staphylococcus aureus
atgcgtcaactaatggggattttaggatggatagagaatttaaggcaattaaaaaagcatcaaacagtaatatgctgcttgatgcaatatggtattggt

SEQ ID NO: 4196 - DNA, 174 bp, Staphylococcus aureus
gtgtatatatatggcagcaacaaaattgattgtgaaactatttatgaaataaaaaattttctaacttcaaatattagagttgatttagaaactgaactttttaaagacacattacttgaagattctaatttatctgattatataaagaaccaacttccaacgatatggagagac

SEQ ID NO: 4197 - DNA, 114 bp, Staphylococcus aureus
atgcgatatacatgtttcagtggtgttgctgtgtatggtgatattaaagtctgtgaaaataatcatggcgaattaatcaaaaagcactgcaattataaaaatattatatatatg

SEQ ID NO: 4198 - DNA, 150 bp, Staphylococcus aureus
atgttgaatcgtgcttgttatggaaatatatggaagttaagcgacgtactgttgcttagcttcttttttgagggcaaagttacaaaactcacacaaacagtcgcagcacgcattatcttttacttaactagcttaatcatattttatgaa

SEQ ID NO: 4199 - DNA, 123 bp, Staphylococcus aureus
gtgtctaaaaataccaatctatcaagcgttgaagtacaacaaaagtcatttttatttaacgaacattatggattccttaatttaattaacgatgattcaaatatagttaaacaaggtttaata

SEQ ID NO: 4200 - DNA, 90 bp, Staphylococcus aureus
atgtatttaacacagttcttattcaaaggtacgggtgtcaatgcacattttatcgttaagccgctttttaattttttatactatcatctt

SEQ ID NO: 4201 - DNA, 129 bp, Staphylococcus aureus
ttgaataagaactgtgttaaatacattattgttgttaagttgttttttgcgtttcaaagagtagaaataacacaattagttgtagaaaacgatgatccggaaaaacaacgacatgtaaagcgtgaaagt

SEQ ID NO: 4202 - DNA, 126 bp, Staphylococcus aureus
atgagtgaagcaaatgcagctatcaatgtactattactgcttacagtcacacgagtgtttcagcctaaacgtgcaatgaaattctgcacgcgtccaatatatcatgcgctagatcatgaagatcat

SEQ ID NO: 4203 - DNA, 93 bp, Staphylococcus aureus
gtgtttaaatctttttataaaataaaacgtttagcagacaatgagttaaattattttaaagcagagtttacttatgtaaatgagtatttaaaa

SEQ ID NO: 4204 - DNA, 2718 bp, Staphylococcus aureus
atgaataataaaaagacagcaacaaatagaaaaggcatgataccaaatcgattaaacaaattttcgataagaaagtattctgtaggtactgcttcaattttagtggggacaacattgatttttgggttaagtggtcatgaagctaaagcggcagaacatacgaatggagaattaaatcaatcaaaaaatgaagcgacagctccaagtgagaataaaacaactgaaaaagttgatagtcgtcaacaaaataatgttgaacaaagtacaacgtcaaaccaaccaaaagtaaatgagtctgataatacttcagttaaagaaactactgaagaacctcaaaatacaacttctacacaaccaactaaaaaaaataacgatgcgacagcaaataaagataatttagcggctcaaaatatttcaacgcaggctaatgatgtttcagctactcctaaaacaacgactattaaaccaagaacattaaaccgtatggctgtgaacacagtagcagcaccacaacaaggtacaaatgtaaatgataaagttcatttttcaaatattgatattgctattgataaaggacatgtcaattctacaacaggtaaaactgaattttgggcgacttctagtgatgttttaaaattaaaagcgaattacacaatcgatgattctgttaaagagggcgatacatttacatttaaatatggacagtatttccgtccgggttctgtaagattaccttcacaaactcaaaatttatataatgcccaaggtaatattattgcaaaaggtatttatgatagtacaacaaacacaacaacatatacttttacgaactatgtggatcaatatacaaatgttagtggtagctttgaacaagttgcatttgcgaaacgtgaaaatgcaacaactgataaaactgcttataaaatggaagtaactttaggtaatgatgcgtatagcgaagaaatcatcgtcgattatggtaataaaaaagcacaaccgcttatttcaagtacaaactatatcaataatgaagatttatcacgaaatatgactgtttatgtaaatcaacctaaaaatacatacacaaaagaaacatttgttagtactttaacaggttataaatttaatccagatgcaaaaaactttaaaatttatgaagtgacagatcaaaatcaatttgttgatagctttacacctgatacttcaaaacttatagatgttactgataaattcaaaatcacatacagcaatgataataagactgcaacagttgatttaatgaatggtcaaacaaatagtaataaacaatatattattcaacaagttgcttatccagataatacatcaacagataatggaaaaattgattatacattagatacagacaaaactaaatacagttggtcgaacagttattcaagtgtaaacggctcatcaactgctaatggcgaccaaaagaaatataatctaggtgactatgtatgggaagatacaaataaagatggtaaacaagatgccaatgaaaaagggattaaaggtgtttatgtcattcttaaagatagtaacggtaaagaattagatcgtactactactgatgaaaatggtaaatatcagtttacaggattgggaaatgggacttacagtgtagaattttcaacgctagcagggtacacaccaactactgtaaatgcaggaactgatgatgctgtagattctgatggactaactacaacaggtgtcattaaagacgctgataacatgacattagacagtggtttctataaaacgccaaaatacagtttaggtgattatgtttggtacgacagtaataaagatggcaaacaagattcaactgaaaaaggaattaaaggtgttaaagttactttgcaaaatgaaaaaggcgaagtcattggtacaactgaaacagatgaaaatggtaaataccgctttgataatttagatagcggtaaatacaaagttatttttgaaaagcctgctggcttaaaacaaacaggtacaaatacaactgaagatgataaagatgcagatggtggcgaagttgacgtaacaattacggatcatgatgatttcacacttgataacggatacttcgaagaagaaacatcagacagtgactcagacagtgattcagattcagatagcgattcagactcagatagcgattcagactcagacagtgaatcagactcagacagcgactcagattcagacagcgactcagactcagacagcgattcagactcagatagcgactcagattcagaaagcgactcagactcagacagcgattcagactcagacagtgactcagattcagatagcgactcagattcagatagcgactcagactcagatagtgactcagactcagatagtgactcagactcagacagtgactcagattcagacagcgattcagactcagatagcgactcagattcagacagtgactcagactcagatagcgattcagattcagacagtgactcagactcagatagcgattcagattcagatgcaggaaaacatacacctgtgaaaccgatgagtgctactaaagaccatcacaataaagcaaaagcattaccagaaacaggtagtgaaaataacggctcaaataacgcaacgttatttggcggattattcgcagcattaggttcattattgttatttggtcgtcgtaaaaaacagaataag

SEQ ID NO: 4205 - DNA, 3411 bp, Staphylococcus aureus
atgattaacagggataacaaaaaggcaataacaaaaaagggtatgatttcgaatcgcttaaacaaattctcgattagaaagtatactgtaggaactgcatcgattttagtaggtacgacattgatttttggtctagggaaccaagaagctaaagctgctgaaaacactagtacagaaaatgctaagcaagatgaggcatcggctagtgataataaagaagtagtgtcagaaactgaaaataattcgacacaaaaaaatgatttaacaaatccaattaagaaagaaacaaatactgattcacaccaagaagctaaagaagcaccaactacatctagtactcaacaacagcaaaataatgctacaacttcaactgaaactaagcctcaaaacattgaaaaagaaaatgttaaaccttcaactgataaaactgcgacagaagatacatctgttattttagaagagaagaaagcgccaaataatacaaataacgatgtaactacaaaaccatctacaagtgaaattcaaacaacaccaactacacctcaagaatctacaaatattgaaaattcacaaccgcaaccaacgccttcaaaagtagacaatcaagttacagatgcaactaatccaaaagaaccagtaaatgtgtcaaaagaagaacttaaaaataatcctgagaaattaaaagaattagttagaaatgatagcaatacagatcgttcaactaaaccagttgctacagctccaacaagtgttgcaccaaaacgtgtaaacgcaaaaatacgctttgcagttgcacaaccagcagcagttgcttcaaacaatgttaatgatttaattacagtgacgaaacagatgattactgaaggtattaaagatgatggtgttattcaagcacatgacggtgaacatattatttatacatccgattttaaaattgataatgctgtaaaagctggggatacaatgacagtaaagtatgataagcatacaattccttcagatattacggatgatttcacaccagttgatattacagatccatcaggtgaagtaatagcgaagggaacatttgatttaaatacgaaaacaattacttacaaatttactgattatgttgatagatatgagaatgtcaatgcaaaattagaactaaactcatatattgataagaaagaagtcccaaatgaaacaaatttaaatttaacatttgctacagcagataaagaaactagtaaaaatgttaaagttgaatatcaaaaacctattgtaaaagatgagtcaaatattcaatctatatttagccatttagatactactaagcatgaggtagaacagactatttatgtgaatccattaaaattaaatgctaaaaacacaaatgttactataaaaagtggtggtgtagcagataatggtgattattatactggagacggtagtactataattgatagtaatacggaaattaaagtctataaagttgcatcgggtcaacaattacctcaaagtaataaaatttatgattatagtcaatatgaagatgttaccaattcagtaactattaataaaaattatggtactaacatggctaatattaattttggtgacattgattctgcatatatagttaaagttgttagtaaatatacaccgggtgctgaggatgacttagcagttcaacagggtgtaagaatgactacaacaaataaatataattattcatcatatgcaggttacactaatactattttatcaactactgactctggtggtggtgacggtactgttaaacctgaagaaaagttatacaaaattggtgactatgtatgggaagacgttgataaagacggtgttcaaggtacagattcaaaagaaaagccaatggcaaacgttttagttacattaacttacccggacggtactacaaaatcagtaagaacagatgctaacggtcattatgaattcggtggtttgaaagacggagaaacttatactgttaaattcgaaacgccagctggatatcttccaacaaaagaaaatggaacaactgatggtgaaaaagactcaaatggtagttctgtaactgttaaaattaatggtaaagatgatatgtctttagacactggtttttataaagaacctaaatataatcttggtgactatgtatgggaagatacgaataaagatggtatccaagatgctaatgaacctggtatcaaagatgttaaggttacattaaaagatagtactggaaaagttattggtacaactactactgatgcctcgggtaaatataaatttacagatttagataatggtaactatacagtagaatttgaaacaccagcaggttacacgccaacggttaaaaacactacagctgaagataaagattctaatggtttaacaacaacaggtgttattaaagatgcagataattggacattagacagtggtttctataaaacaccaaaatatagtttaggtgattatgtttggtacgacagtaataaagacggcaaacaagattcaactgaaaagggtattaaagatgtgacagttacattgcaaaacgaaaaaggcgaagtaattggaacaactaaaacagatgaaaatggtaaatatcatttcgataatttagatagcggtaaatacaaagttatttttgaaaagcctgctggcttaacacaaacaggtacaaatacaactgaagatgataaagatgcagatggtggcgaagttgacgtaacaattacggatcatgatgatttcacacttgataatggatacttcgaagaagatacatcagacagtgactcagactcagattcagacagcgattcagattcagacagtgattcagactcagacagcgactcagactcagacagcgactcagactcagacagtgattcagactcagacagtgactcagactcagacagtgattcagattcagacagcgattcagattcagatagcgactcagattcagacagcgattcagattcagacagtgattcagactcagacagcgactcagattcagacagtgattcagactcagacagcgactcagactcagacagtgactcagattcagatagcgactcagactcagacagtgactcagactcagatagcgactcagattcagacagtgactcagactcagatagcgattcagattcagatagcgactcagattcggatagcgactcagattcagatgcaggaaaacatacacctgtgaaaccaatgagtgctactaaagaccatcacaataaagccaaagcattaccagaaacaggtagtgaaaataacggctcaaataacgcaacgttatttggtggattattcgcagcattaggttcattattgttattcggtcgtcgcaaaaaacaaaacaaa

SEQ ID NO: 4206 - DNA, 201 bp, Staphylococcus aureus
ttgccaagagttaaggctgaggcatttctaacaaatatttataatcgtttaaaagatttcacgaatccagaaacaattaatttggaaatttggtcggcgaataataaacctaatgcgatagctcctgcaataagtgtaacctctagcatggtattgattgctgtactgaaatttaataatactaaatttttcgttgcatcg

SEQ ID NO: 4207 - DNA, 96 bp, Staphylococcus aureus
atgttaaattctaaattcaatggttctcacctcgtaattgtaactgtattagttacaattaaaaatcattttgctcaatgtgtcaatacttatgtt

SEQ ID NO: 4208 - DNA, 99 bp, Staphylococcus aureus
atgtgtcaatacttatgtttgaaaagtgttgaattaggtgtgattattatgatgatttattatttgaaagttgttgcattaacggtgagattgcgtaat

SEQ ID NO: 4209 - DNA, 99 bp, Staphylococcus aureus
ttgttagcctttaaattacatgtacttttgaatcagaaattgaaaaatcatttaagaacgacaacattaaagccattgcaaattcaattagaaatacta

SEQ ID NO: 4210 - DNA, 423 bp, Staphylococcus aureus
atgaaagagaatgatgtcgttttaagaacggtcacgaaactcgttgtatttattttattgactttcggattctacgtcttcttcgctggccacaataacccaggtggtggctttataggtggtttaatatttagttccgcgtttattttaatgtttctagcttttaatgtcgaagaagtattagaaagcttaccgatagattttagaattttaatgattattggtgcattagtttcatctattactgcgataatgccaacattttttggaaaaccttttttgtcgcaatatgaaacaacattgacactaccaattttagggcacattcatgtaacgacaataacactgtttgaattgggcattttgttctcggttgtcggggttattgtaacggtgatgctgtctcttagtggaggtcgatca

SEQ ID NO: 4211 - DNA, 300 bp, Staphylococcus aureus
atgatacaaacaatcacacatattatgattattagttcactcattatttttggaattgcattaatcatctgtttatttagattaatcaagggacctacaacagcagatcgtgtcgttacatttgatacaacaagtgctgttgtcatgtctattgtgggtgtcttaagtgtactaatgggcaccgtttctttcctagattcaatcatgctcattgccattatatcttttgtaagctctgtatcgatttcaagatttattggtggggggtatgtgtttaatggaaataacaaaagaaatctt

SEQ ID NO: 4212 - DNA, 333 bp, Staphylococcus aureus
ctgtgtttttggtgtacatggccacaaaaaagaggtttgaatatacctagcgatgaacaaatagaatattatatgggtattccgattgaaaaatcttttaatttaatgagtgattttaagctaaatgacaaagaactcaccgaactaatgacattgtttagagaaaattataaagaaactgaagcaaaacatttaaaaatatatgacggaatgcaagaacagctcaaaacacttcatcaaaaccataagttattcgttgtttctagtaaaaaaacaaatgtattagaaagaaatctttctaaattaggtgttgataatctatttgttgaagta

SEQ ID NO: 4213 - DNA, 132 bp, Staphylococcus aureus
atgattgacaatcattttaaaatcatgatttatatttttatagaaattcagaaaattgttattgataaaaaagacattgccattttcaggaatgtaattgtttttatcgggattggctatattattattctt

SEQ ID NO: 4214 - DNA, 102 bp, Staphylococcus aureus
gtgcgatttatgaatgaaattcttgttcacatcatgacaacggcaatcagtggttgtctcgttacgttatttggttattggctccataaacgtgataaaaaa

SEQ ID NO: 4215 - DNA, 141 bp, Staphylococcus aureus
ctgtttttaatgattaaaccattatgtgcgcctatagaggtagaacgtgctgtaactaaaggtattgccaagcctaatgcatgtggacaagcaatgactaatacggttactagccgttcaagtgcgaaatcgacgttgttt

SEQ ID NO: 4216 - DNA, 2187 bp, Staphylococcus aureus
ttgctagtattggatagttcagcaaaaacattaacagaagataaacaggtttaccgtgtggagggtttctcgtgtgcgaattgtgctgggaagtttgaaaaaaatgtaaaacaactagctggagttcaggatgcaaaagtgaactttggcgcttccaaaattgatgtatatggaaatgcatcggttcaagagcttgaaaaagcaggtgctttcgagaatcttaaggtatttcccgaaaaactagcgaattcatcgatgcaagcggtcaaagaagacactaaggctcctaaagaagagaaaataccgttttataaaaaacacagcacattgctgtttgccacattactgattgcttttggttacctttctcactttgtaaatggagaagataaccttgtaacttccatgttatttgtaggttcgattgtaattggcggatattcactatttaaagttggttttcaaaatttgatacgctttgatttcgacatgaaaaccctgatgaccgtagcagttattggagctgccatcattggtgaatgggcagaggcatccattgttgtcgttctctttgcaatcagtgaagcacttgaacgtttttctatggatagagcaagacagtccattcgttcattgatggatattgccccaaaagaagcacttgttatgcggaatggtcaggaaataatgatccatgtggacgatattgccgtgggtgatattatgatcgtcaaaccaggggagaaaattgccatggatgggatcattataaatggtgtgtcggctgtcaaccaggctgctataacaggagaatctgtccctgttgccaaaacggtagatgatgaagtatttgcaggtacgcttaacgaagagggactacttgaagtaaaaatcaccaaatacgtagaggatacaactatctccaagattattcatctggttgaggaagcacaaggggagcgcgctccagcgcaagcattcgtagataaatttgcgaaatattatacgccgatcattatggttattgcggcgctcgttgcagtcgttccacctttattctttggtggaagttgggatacttgggtttatcaaggattagcggtacttgtagttggatgtccgtgtgcattagttatttctactccaatctcgattgtctcggcaattggaaatgcagctaaaaaaggtgtgttgattaaaggcggtgtctatctagaggaattaggagccattaaggcaatcgcatttgataaaacaggaacactgacaaaaggtgtaccagtggtaacagattttaaagtgttaaatgatcaagtggaagaaaaagagctgttttccattattacagctttagaatatcgatcacaacatccacttgcttcagcaataatgaagaaagcagagcaagataatattacttattccgatgttagagtggaggacttcacttctattacaggtcggggcattcaagggaatatagatggaacaacctattacattggcagtccaaggctttttaaagaattaaatgtttccgattttagccttgagtttgaaaataaagtgaaagttttacaaaaccaagggaaaacggccatgattattggaacggaccaaacaatcctcggcgtgattgctgtagcagatgaggtccgcgaaacaagtaaaaatgtgattcaaaaacttcatcagttaggaatcaagcaaacaattatgctgacaggtgataatcaaggtaccgcagaagcaatcggtgctcatgtaggcgtttctgatattcagtccgaattgatgccacaggataagttggactatattaaaaaaatgaaagccgagcatggtaatgtagctatgattggcgatggcgtcaatgatgctcctgcacttgctgcatccactgttggcattgcaatgggcggtgctggaacagatactgccatcgagacagctgatattgcattaatgggagatgatttaagtaagcttccatttgcagtaagacttagcaggaaaacgctaaatatcatcaaagcgaacatcacgtttgccatcggaattaagataattgccttactattggttattccaggctggctaaccctttggattgcgattctttccgatatgggagccactattttggtagcattaaatagtttgcgactgatgagagtgaaggataaa

SEQ ID NO: 4217 - DNA, 96 bp, Staphylococcus aureus
atgaaacgacggacatttccagtaaatgaaaaatatattattttcattggatcaccttctttcttcaacccttttaaattaagtagtcattacaat

SEQ ID NO: 4218 - DNA, 123 bp, Staphylococcus aureus
atgatgccaatgaggctagaaagtatacaagatactgcattacaaaagggtgtgctattttactatatacatctaaattacacatttacaaaaaatgatttctattttaattgcaaatatcaa

SEQ ID NO: 4219 - DNA, 93 bp, Staphylococcus aureus
atggcacctacaaatccacatgctactaagagacgtttgggtgcattgaaaatgatagagaaaagtactgttgatataaagctgattgtaaaa

SEQ ID NO: 4220 - DNA, 612 bp, Staphylococcus aureus
atgaatgacttgagtttatcttcatttttgaaacgcagtaacaaatttatgcaattcaattgttttatttgtttgattctaataatagtattttacataattggtatgaatatacaggactttagtgattttcctagtaaagatttaaatcataaagtgacttataatcttaatgggtttttggagatatttgttaataatgcttttatagttccttttgtgtcacttatattatcgataataccaataccatatttgtattttattcctacaatatctacaatttattcattgtcggttattattggggttacattttcatataaattaaacgaagggatagctatttttattggtattttgcctcatggtattttagaaatatacttaacaagcattgaactatcaatgttattcttattaaatgcgtacatcagaaaaaattcaatgaatttatttagaaaaagaaaagagacattgccaaatttttttgttttattaaaatcaatagtaaagtgttacctgctaatatttttacctgtggcatttttatgcgctttaattgaaattactgttacaccaactgtttacaaatttttaactaatataata

SEQ ID NO: 4221 - DNA, 1614 bp, Staphylococcus aureus
ctgaaaagtagtaatgaacctaatgatgctaataatccccaaattagtgacgtattagcttcatcttcagaacctgtatctggtaatggttctttactttctttagcctcatttttatttgaagcattagtaccacttttaggtgaattaggcggcactacattattgttagaacctgaatcggaatcgctattcgaatcactttctgagtctgagtcgttatctgatcctgtgtcactcgttgaatctgaatcggaatcactcgctgaatccgagtcactatctgaatctgaggcactgtctgagtcggaatcgctatctgaatctgagtcactatctgattctgaatcgctgtctgagtctgagtcgctatctgaatctgaggcactatctgagtcggaatcgctatctgaatccgagtcactgtctgagtctaaatcactgtctgaatctgaatcgctgtcggaatccgagtcactgtctgagtcggaatcgctatctgaatccgagtcactgtctgagtctaaatcactgtctgaatctgaatcgctgtcggaatctgagtcgctatctgagtcggaatcgctatctgaatctgagtcactatctgattctgaatcgctatccgagtcggaatcgctatctgagtctgagtcgctatccgagtcggaatcgctatctgagtctgagtcgctgtctgagtctgaatcgctatctgaatctgagtcgctatctgagtctgagtcgctgtctgagtctgagtcactgtctgagtctgattcactatccgagtctgagtcgctgtctgaatctgagtcgctgtctgagtctgattcactatccgagtctgagtcactgtctgaatctgaaacactgtctgagtcgctgtctgaatctgaatcactatctgagtcggaatcgctgtctgaatctgagtcgctttctgagtctgagtcgctatctgaatctgagtcactgtctgagtcggaatcgctatctgaatccgagtcactgtcggaatctgaatcgctatctgagtctgagtcactatctgaatctgaatcgctgtctgagtctgagtcactatctgaatctgaatcgcttgctgaatcggaatcactcgttgaatctgaatcactcgttgaatctgaatcactcgctgaatctgaatcacttgctgaatctgaatcactcgctgaatctgaatcacttgctgaatctgaatcactcgctgaatctgaatcacttgctgaatctgaatcgctcgctgaatctgaaccactatctgatgtagaatcactacccgaatctgaaccgctatctgaattagaatcgctgccagaatctgaaccactatctgaacctgggtcagaatctgaatcctctggaattggttcaatttcacccggctcatcaggttgttcaggaacaacaggtttatcgataccgtcaccagaacctgatccgttattaaatgctacttcattatcccatgacattgatcgccaaattatattcgaattatatccatataaagttgaacgtaaagctaaatcacctttactattaggatcaatatgcccattaacaactacaatatatggtgttgttatt

SEQ ID NO: 4222 - DNA, 93 bp, Staphylococcus aureus
ctgactattaatagtattttaaatgatcgtgataacggatacatttttaatcgaaatcaggttacgaaaaaattaattaattttttcacaatc

SEQ ID NO: 4223 - DNA, 723 bp, Staphylococcus aureus
gtgaataataagcttatatatacctcttatgatggtgataacatactattgatagatagttttattaaacttgttattgattttaaatatattccaataaatccaactaaatcattaggatattatatatctacatcgattcatgacaatgacaaaggtgagtgtttaagagactgcttgtctttggaaatgatttgtgatgaactttgggtattcatagacaataataaatatattccagaaggagttcggttagaaatagcctcatggttaaaatataaatcctctccagttaagtatataagcataccttctttattagagaattcgagtataaatgacgatttatttttagactttgatgattcaaatatacttaaagaaaaggaaatttccgaaccagtaccgaaaaaaagtgagttaagacctgtaaattgtattaatatactaccggaacaccataaatatatagactggataaagtatcatttattttataacaaattcgtaccattggattatttaagtataaagccatatatttattttgataatatagaacattataaaagtgagttatcgctattgaatgaacgatgtaataacatttctgttatgccatattatgtgagtgaagataattttaatttatctttttcagaatgcaaaatacctaaatatattaagaaagattgggctataacaacaatggagaataaaaat

SEQ ID NO: 4224 - DNA, 105 bp, Staphylococcus aureus
atgatagatgaatttgaaattaaattgaattggcttatcattcgtaaacattattatgacgtaacaattcttataagtggaacgagtgtaattataccatctgta

SEQ ID NO: 4225 - DNA, 90 bp, Staphylococcus aureus
atgaagaaaatattactaagtagtataacgtataagtgggtgacagatgaaattgtaagttatattataacgaagttaagtttattgttt

SEQ ID NO: 4226 - DNA, 348 bp, Staphylococcus aureus
atgcaagttggggtgtgggccccaacacagagaatttcaaaaagaaattctacaggcaatgcaagttggggtgtgggccccaacacagaagctgacgaaaagtcagcttacaataatgtacaagttgaggatgggccccaacacagagaaattggattcccaatttctacagacaatgcaagtcagcgagtccccaacacagaagctgtgactaatgataaaatactactacataataaatcattagtggttctttattatttttgcctcccttttcttattgttatgatgcacaacaatttaagttcaaactgtcgaataaagttatatttgatttcaaattatccc

SEQ ID NO: 4227 - DNA, 132 bp, Staphylococcus aureus
gtgaaagtaacaggaactgatagcattaaaacactttttcaaatattatatgccaaaagagaagctaagcaactttcatcgctcagcttctcttttattatgttaattattcattttcttgcatcatttgtt

SEQ ID NO: 4228 - DNA, 102 bp, Staphylococcus aureus
ttgtacccttctaaatcaaatacttctgtagtagttacatctagtgggactttaactggtacaagagtacgtgcacaaggcattgtatacgttccagtaatg

SEQ ID NO: 4229 - DNA, 102 bp, Staphylococcus aureus
atgataaataaattgggagttgcagcatataaaaaagcacgccaaaacgttagcattgttttccaacgtttggcgtgcaactatttaattcagtgtgtttat

SEQ ID NO: 4230 - DNA, 183 bp, Staphylococcus aureus
atgaataaacatataaataaaaagaccacaaagcatcttgaagattataaaaaggttcaacaaagaaattcggaggaaacaaatagaggttgtttaaaaagcgccgccatgcttattgtcttatttctattcattatatttggcatcgtggcatgttcgacacacgttaactttttcttccaa

SEQ ID NO: 4231 - DNA, 144 bp, Staphylococcus aureus
atgaaactattttatatcgcatttctaattattatatggctgaatatatttttaggaaatgaagtcattcatacactgactgttttaataacaacattgtatattgttaatagaagaaagagggttaaaaatgacagagttgaa

SEQ ID NO: 4232 - DNA, 132 bp, Staphylococcus aureus
atgatagctcgtaccatagccataataagttggtttgtcggccaaaaatgtattgttgtcggattaaatataccaacagtttctcctattttaatgaatagaaaattgagccacattaaaggtgacagcgaa

SEQ ID NO: 4233 - DNA, 90 bp, Staphylococcus aureus
gtgtctaaagcaaatgtttttcaagcattttttcataaatttaaaggtaattctatcatgttaatgcggaatatcaatttgattgaaaat

SEQ ID NO: 4234 - DNA, 204 bp, Staphylococcus aureus
atgaatgagattgaaactattataagtgaaatagaaaagttattaactaacaatacaccatatagtatttcaaaaaactcaggtgtaccacgtcaaacagttactgatttaaaggtaggtaatactaaaataaaggatgccaaatttaaaacaataatcaagttatatgagtatcaaaagtcgtcagaaaataattcagagtgc

SEQ ID NO: 4235 - DNA, 132 bp, Staphylococcus aureus
atgatttttaaaattaatagatttgaaaagtatactttatttcatgaaagtttttggtacatttatttgaaaatgtttttattacaaagttacatgcctaaatgtttcttaacaaaattaattcatcaagtg

SEQ ID NO: 4236 - DNA, 108 bp, Staphylococcus aureus
ttggaaagagaagaaaaaatgacaaatatcgcaaaagccaaaagcgaaatcttccgcaactacactttaggctttgcaacacttgccacaataataaaatgtttttta

SEQ ID NO: 4237 - DNA, 204 bp, Staphylococcus aureus
atgtcactaaggtatgaatggaaatcaacaataattacgactaatattccattttcgagttggggagagtcatttagtaataagattgtatcagcagctataattgatcggttagttcaccattcaaaagtatttaaaattactggagaatcatatcgattaaaagattataaaaccgaaaaatcattaaatatacgacaatct

SEQ ID NO: 4238 - DNA, 201 bp, Staphylococcus aureus
ttgaagaaaagacaacaaaataagaaagcatcaaagctagattcatttaaagaaattaataataaaaaaattgaattaggatatacagctatggccatttttaaatatatggagaaaaagggttatgaaggtaaatataatattctagaagaatactgtaaaaataaaatacaaaatgagactaaaaaaataacatttttt

SEQ ID NO: 4239 - DNA, 102 bp, Staphylococcus aureus
gtgacaatgatgttagacggtaagttatctaaaaaagaattgctcaggttgttaactgaaaaaaacgatgaaaaaaataagggaaaagagaaacaatctaaa

SEQ ID NO: 4240 - DNA, 123 bp, Staphylococcus aureus
gtgtttaaaattgagcttaggaaatcgataggtttagatgaggatattgttgaaggtatgtgtcttgtatccttagttgttaaaaaagtgtataaaaatagcaccgctttctctttatctgtg

SEQ ID NO: 4241 - DNA, 123 bp, Staphylococcus aureus
atgtttcctgataaattttccaaatttaaatatgaacacaaaaaatggacagatgaaattaaaaatctacttcatctgtccgatttaatattgaataaaaaaacacgcatcctacgatacgtg

SEQ ID NO: 4242 - DNA, 32737 bp, Staphylococcus aureus
gtgaattatcgtgataaaattcaaaagtttagtattcgtaagtataccgttggaacattctcgacggtcattgcgacgttagtatttctaggattaaacacatcacaagcacaagctgctgagacaaatcaaccagctagtgcattaaaacagaaacaacaaaatggtgatacgcagactgagaatcgagaagtagaagttcaaaattcacaaaatggtcaatcattatctgcgcctattgaaaatgaacaaccaaataataatcaaacaaaccatgtagatgctagtgcagtacaatcatctacaacagaacatgaccaaccagtatctcaaaatgagcaagcaaagaaagatacggcagctgctacgccaacacaatcggctaaagcggcaagtaagcatgaacaaagcgaaagtcgcgctgctaacaaaaaggaaaacgacaataaagcgacacatgtagaaagtcatgaagcaaatgtagtcacagcttcagattcatcagatagtggtaacgtacaacacgatcgtaatgaattacaagcattttttgatgctaattaccatgattatcgctttattgaccgcgaaaatgcagattctgggacatttaactatgtaaaaggcatttttgacaagatcaatacgttattaggtagtaatgatccaataaacaataaagacttgcaacttgcatacaaagaattagaacaagctgttgctttaattcgtacaatgcctcaacgtcaacaaacaagtcgacgctcaagtagaattcaaacgcgttcgattgaatcaagagctgcagaaccaagatcagtatcagactatcaaaacgcaaactcatcatattacgttgaaaatgctaatgatggttctgggtatcctgtaggtacatatattaatgcttctagtaagggggcaccatataatttacctactacgccatggaatacgttaaaagcatcagacgcaaaagaaatcgcacttattacagcaaagcaaactggagacggttatcaatgggtgattaagtttaacaaaggtcatgcaccacatgaaaatatgatctactggtttgcactaccggccggacaaactccagttggtcgaacggagtttgtaacagtgaatgcagacggcacaaatgtacaatggagtaacggtgcaggagccggtgcgaacaaaccacttccagaaatgtggccatatggggtaaacgactcacgttcgtgggactacaaaattagaaataggagtgggcaggtgatttatgattggccaactgtccatattaatagcttaaaggatttagcacgtgcaagtgactattttagtgaagctggagcaacacctgctacaaaagcttttggtagacaaacattcgaatatattaatggtgaaaggccgacagaatcacctggtgtaccaaaagtttatacatttattggtaaaggtgatgcaagttatacgatttcatttaaaacgcaaggtccaacaattgataagctgtactatgcagcaggtgggcgtgctttagaatacaatcaattatttatgtatagtcagttatatgtcgaatcaacacaagactatcaacaacgtcttaatggtttaagacaagtggttaatcgtacttatcgtataggtacaactaaacgagtagaagtgagtcaaggaaatgtacaaacaaaaaaggtattagaaagtacgaacctaaatatagatgactttatggatgatccattaagttatgttaagacaccaagtaataaagtattaggtttttatccaactagtgcaaacactaacgcttttagaccgggtggagtcaatccattaaatgaatatcaattaagtcaattatttactgatgataaattgcaacaggcagctagaactggcagcccaatacgattaatgattggtttcgactatcctgatgcttttggtaacggtgaaactttagtgcctgttaacttaacagtattacctgaaattcaacataacattaaattctttaaaaatgatgacggtcaaaatattgctgataaacctgcttcaaaacaagctggacatccggttttctatgtatatgcaggtaatcaagggaatgcttcagtaaacttaggtggtagtgtaacatctatacaaccgttacgtattaatttaacaagtaatgaaaactttacagataaagattggcaaattacaggtattccacgtacattacacattgagaattcaacaaatagaactaataatgctagagaacgtaatattgaactggttggtaatttattaccaggcgattactttggaacaatacgatttggacgtaaagaacaattattcgagattcgtgttaagccacatacgcctagaattactacaacagcagaagaattaagaggtacagcattacaaaaggtacctgtaaccgttacggatattccattggatccatctgcattagtatatttagttatacctacgtctcaaacaagagatggtggttctgaggcagatcaaataccatcaggttatacaaaaattgcgacgggtacacctgatggggttcattcaacgataacgatacgaccagaagattatgtagtatttatacctccggtaggtaatcaaattagggcgttaatattttacaataatgtagttgcctcaaatatgagtaatgcagtaactattttacctgatgatattccaccgacaattaataacccagttggattaaatgcgaaatattatcgtggcgatgaagttagctttactatgggggtttcagatagacattctggattaaaaagtacaactattacgacattgccaagtggttggacatcaaatttaactaaatccgacaagaaaaacggctcattagctatttcaggtagagtctctatgaatcaggcctataatagtgatattacattcaaagtgtcagcaaccgacaatgtcaataatacgacgaatgatagtcagtctaaacatgtgacagtgcatgtaggtaaaattagtgatgatgcgcatccaattgtcttaggaaattctgaaaaagttgtcgttgtaaatccgactgctttaactggtgatgaaaagcaacgtattactactgcgtttatgaataaaaaccaaaatataagaggttatttagcttcatcaaatccagttacagtagataatcatggtaatgtcacattgcaatatcgtgatgggtcatcaactacgcttgatgcgacaaacgtgatgacatacgaaccagttgttaagcctgaatatcaaactgctaatgctgctaaaacggcaacggttacaattgctaaagggcaatcttttaatattggagatatcaaacaatatttcactttaagtaatggacaagcgattccaagcagttcatttacaaacattacatcggatagaacgattccaactgcgcaagaagttagtcaaatgaacgctggcacacagctatatcatatagttgctacaaatgcgtatcataaagacactgaagatttctatatcactttgaaaatcattgatgtgaaacaaccagaaggtgatcaacgtgtatatcgtatgtcaacatatgatataactactgatgaaatttcaaaagtgaaacaagcatttatcaatgccaatagagatgcgatttcatttgcagaaggagatatttcagtaacaaatacaccgaatggttctaatgtgagtaccattactgtcaatataaataaaggtcgattaacgaaatcgttcacatcaaatcttaataatatgaacttcttacgttgggttaacttccctcaagattatacagtgacatggacaaacgcaaaaattgcaaatagaccgactgatggtggtttatcatggtctgatgatcataaatcattaatttatcgctatgatgcaacattaggtacgcaaattacgacgaatgatattttaactttgttaaaagcgacaacaacggtgcctggattacgtaataacattgctggtaatgaaaaagcacaagcagaagctggtggtagaccaaactataaaacaactggttattcacaatcaaatccaacatctgatggtcaacgacaatttacgttgaatggtcaagtcattcaaataatggatattattaatccttcaaatggatttggtgggcaacctgttacaaattcaaatgtccgtgcgaaccacagtaactcgactgtcgttagtgttaatgaatcagcagctaatggtgcgggtgcatttacaatagatcatgtagtaaaaaataattctacgcataatgcagctgatgcagtttataaagcgcagttatacttatcgccatatggaccaaaacaatatgttgaacatttaaatcaaaatacggacaatacgaatgaagcaattaacatttattttgtacctagtgatctagtaaatccaacgatttcagtaggtaattacacaaatcatcaagtattctctggtgaaacatttaccaatacgattacagcgaatgataattttggtgtgcaatctgtaacagtaccaacgacatcacaattgacaggcactgttgataataatcatcaacatgtttcagcaacagcaccaaatgtgacatctactacaaataaaacaattaatttggttgcaactgatacaagcggtaatactgcaacaacgtcattcaatgtcacaattaaacctttacgtgataaatatcgagttggaacatcatcaacggctgctaatccagtgagaattgccaatatttcgaataatgcgacagtatcgcaagctgatcaaacagcaattattaattcattaacgtttacaagcaatgcaccaaatagaaactatgcaacagcaagtgcaaatgaaatcactagtaaaacagtgagtaatgtgagtcgtacaggaaataacgcacaagtaactgtaactgttacttatcaagatggaacaacatcaacagtgacagtacctgtaaagcgtgttattccagaaatcgttgcacattcgcattacactgtacaagggcaagacttcccaacaggtaatggagcaagtgcatctgattactttaaattatcgaatggtagtgccattccagatgcgacgataacatgggtaagtggtcaagcgccaaacaaaaataatacaactataggtcaagatatcaatgtaactgcacatatcttaattgatggtgaaacaaccccaattacgaaaacagcaacatataaagtggtaagaactgtaccaaagcaagtctttgaaacagccagaggtgtcttatacccaggtgtttcagatatgtatgatgcgaaacaatatgttaagccagtaaataattcttggtcgacaaatgcgcaacatatgaatttccaatttacaaattcatatggaccaagtaaagatgtagtaggtatttcaacaagggatatccgagttacttatgataatcaccaaacacaaattatcaagattttatctaaagttaagcctgatccaccgagaattgacggaaactctgtgacatacaaagcaggcttaactaaccaacaaatcaagattaataatgttttaagtagttcttctattaaattatttaaagcagataatacaccattaacaattactaacacgacttatggtagtggaaatactgcagtagttactgtaagtgatgcgttaccaaatggtgaaattaaagcaagatcttcgatttcaatgaataatgtaacttatacgacacaagacgaacatggacgagctatagatgtaacaagaaatgaatctgttgattcaaatgacagtgcttctgtacatgtgacacctcaattacaagcgactactgaaggcgctgtatttattaaaggtggcgacggttttgatttcggtcatgtagaacgatttattcaaaatccaccacatggggcaacggttgcatggcatgataatccagatacatggaagaatacagtcggaaacactcataaaactgcggttgtaacattaccaaatggtcaagggacacgtaatgtagaagtacctgtcaaagtttatccagttgctaatgccaaagcgccatctcgtgatgttaaaggtcaaaatttgactaatggaacggatgcgataaactacattacatttgatccaaatacaaacacaaatggtatcactgcagtatgggcaaatagacaacaaccaaataaccaacaagcaggcgttcaacatttaaatgtcgatgtaacatatccaggtatttcagctgcaaaacgtgtacctgttactgtgaatgtatatcaatttgaattccctcaaacttcttatacaacaacagttggtggcactttagcaagtggtacgcaagcatcaggatatgcacatatacaaaatgctactggtttaccaacagatggatttacgtataaatggaataatgcagcaacaggtacaaacgatgcaaactgggcagcaatgaataaaccaaatactgcacaagtcattaatgcaaaatatgatgtcatctataatggacatacatttgcaacatctctaccagcgaagtttgtagtaaaagatgttcaaccagcgaaaccaactgttacagaaacggcagcaggagtaattacgattgcacctggagcaaaccaaacagtgaatacacatgccggtaacgtaacgacatacgctgataaattagttattaaacgtaatggtaatgttgtgacgacatttactcgtcataataatacgagtccatgggtgaaagaagcatctgcagcaaatgtagcaggtattgctggaacgaataatggtattactgttgcagctggtactttcaatcctgctgatacaattcaagctgttgcaacacaaggtagtggtgaaacaatcagtgacgaacaacgtagtgatgatttcacagttgtcgcacctcaaccgaaccaagcgactactaagatttggcaaaatggtcatgttgatatcacgcctaataacccgtctggacatttaattaatccaactcaagcaatggatattgcttacactgaaaaagtgggtaatggtgcagaacatagtaagacacttaatgctgttcgtggtcaaaataatcaatggacaatcgccaataaacctgactatgtaacgctagatgcacatactggtaaagtgacgttcaatgccaatactattaagccaaattcagcaatcaccattacaccgaaagcaggtactggtcactcagcaagcagtaatccaagtacattaactgcaccggcagcacatactgtcaacacaactgaaattgtaaaagattatggttcaaatgtaacagcagctgaaattaacaatgcagttcaagttgctaataaacgtactgcaacgattaaaaatggcacagcaatgcctactaatttagctggtggtagtacaacgacgatccctgtgacagtaacttacaatgatagcagtactgaagaagtacaagagtccattttcacaaaagcggataaacgtgagttaatcacagctaaaaatcatttagatgatccagtgagtacagatggtaaaaagccaggtacaattacgcagtacaataatgcaattcataatgcgcaacaacaaatcaatactgcgaaaacagaagcgcaacaagtgattaatgatgagcgtgcaacaccacaacaagtgaacgcagcattatctaaagttcaagctgcacaaactaagataaatgaagctaaagcattacttcaaaataaagaagataatagccaattagtaacatctaaaaataacttacaaagttctgtgaaccaagtaccatcaactactggtatgacgcaacaaagtattgataactataatgcgaagaaacgtgaagcagaatctgaaattacagcagctcaacgtgtcattgataatggtgacgcaacagcacaacaaatttcagatgaaaaacatcgtgtcgataacgcattaacagcattaaaccaagcgaaacaaaatttaacagcagatacacatgaattagagcaagcagtacatcaattgaatcgtacaggtacaacgacaggtaagaaaccagcaagtatcactgcatacaataattcgattcgtgcacttcaaagtgacttaacaagtgctaaaaatagtgccaacgctattattcagaagccaattagatcagtgcaagaggtacaaacagcattaacgaatgtaaatcgtgtaaatgaccgattaacgctagctattaatcaattagtacctttagctgataatagtgctttaagaactgctaaaacgaaacttgatgaagaaatcaataaatcagtaactactgatggtatgacacaatcatcaatccaagcatatgaaaatgctaaacgtgcgggtcaaacagaatcaacaaatgcacaaaatgttattaacaatggtgacgcaacagaccaacaaattgccgcaaaaaaaactaaagtagaagaaaaatataatggcttaaaacaagctattgccggattaacaccagacttggcaccattacaagctgcgaaaactcagttgcaaaatgatattgatcaaccaacgagcacgacaggtatgacaagtgcatcagttgctgcatttaatgacaaactttcagcagctagaactaaaattcaagaaattgatcgcgtactagcatcgcatccagatgttgcaacaattcgacaaaacgtgacagcagcgaatgctactaaaacagcacttgatcaagcacgcaatggcttaacagtagataaggcgcctttagaaaatgcgaaaaatcaactacaacaaagtattgatacgcaaacaagtacaactggtatgacgcaagattctattaatgcatacaatgcgaagttaacagctgcacgtaataagattcaacaaatcaatcaagtattagctggttcacctactgtagatcaaattaatacaaatacgtctgcagcaaatcaagcgaaatctgatttggatcatgcgcgtcaagctttaacaccagataaagcaccgcttcaaactgcgaaaacgcaattagaacaaagcattaatcaaccaacggatacaacaggtatgacgaccgcttcgttaaatgcgtacaaccaaaaattacaagcagcgcgtcaaaagttaactgaaattaatcaagtgttgaatggcaacccaacggtccaaaatatcaatgataaagtggcagaggcaaaccaagctaaggatcaattaaatacagcacgtcaaggtttaacattagatagacaaccagcgtttacaacattacatggtgcatctaacttaaaccaagcacaacaaaataatttcacgcaacaaattaatgctgcaccaaatcatgctgcacttgaaacgatcaagtctaacattacagctttaaataatgcgatgacaaaattaaaagacagtgttgcggataataattcgattaaatcaggtcaaaattacactgacgcaacaacggctaataaacaagcgtatgacaatgcagttaatgcagctaaaggtgtcattggagaaacgactaatccaacgatggatgttaatacagtgaaccaaaaagcagaaacagtgaaatctacaaaaggcgctttagatggtcaacaaaacttacaacgtgcgaaaacagaagcaacaaatgcgattacgcatgcaagtgatttaaaccaaacacaaaagaatgcattaacacaacaagtaaataatgcacaaaatgtacaagcagtaaatgatattaaacaaacgactcaaagcttaaatactgctatgacaggtttaaaacgtggcgttgctaatcataaccaagtcgtacaaagtgataattatgtcaacgcagatactaataagaaaaatgattacaacaatgcatacaaccatgcgaatgacattattaatggtaatgcacaacatccagttataacaccaagtgatgttaacaatgctttatcaaatgtcacaagtaaagaacaggcattgaatggtgaagctaagttaaatgctgcgaagcaagaagcgaacacagcattaggtcaattaaataacttgaataatgcacaacgtcaaaacttacaatcgcaaattaatggtgcgcatcaaatcgagacagttaatacgattaagcaaaatgcaactaacttaaatagtgcaatgggtaacttaagacaagctgttgcagataaagagcaagtgaaacgtacagaagattatgcggatgcagatacagctaaacaaaatgcatataatagcgccgtttcaagtgctgaaacaatcattaatcaaacaacaaatccaacgatgtctgttaatgatgttaacagtgcaacttcagctgttactactaataaaaatgcattaaatggtgatgaaaaattagcacaatctaaaacagatgctgcaagtgcaattgatgcattaccacatttaaataatgctcaaaaagcagatgttaaatctaaaattaatgctgcatcaaatattgctggtgtaaatactgttaaacaacaaggtacagatttaaatacagcgatgggtaacttgcaaggtgcaatcaatgatgaacaaacgacattaaatagtcaaaattatcaagatgcgacaccaagtaagaaaacagcatacacaaatgcggtacaagcagcgaaagatattttaaacaaatcaaatggtcaaaataaaacgaaggatcaagttacagaagcgatgaatcaagtgaattcggctaaaaataacttagatggtacgcgtttattagatcaagcaaagcaaacagcgaaacagcagttaaataatatgacgcatttaacaactgctcaaaaaacgcatttaacaaatcaaattaatagtggtactactgtcgctggtgttcatacggctcaatcaaatgcgaatacattagatcaagcgatgaatacgttaagacaaagtattgccaacaaagatgcgactaaagcaagtgaagattacgtagatgctaataatgataagcaaacagcatataacaacgcagtagctgctgccgaaacgattattaatgcgaatagtaatccagaaatgaatccaagtacgattacacaaaaagcagagcaagtgaatagttctaaaacggcacttaacggtgatgaaaacttagctacggcaaaactaaatgcaaaaacatacttaaacacattgacaagtattactgatgctcaaaagaacaatttgattagtcaaattagtagtgcgacaagagtgagtagtgttgatactgtaaaacaaaatgcgcaacatctagaccaagctatggctagcttgcaaaatggtattaacaacgaatctcaagtgaaatcatctgagaaatatcgtgatgctgacacaaataaacaacaagagtatgataatgctattactgcagctaaagcgattttaaataaacaacatggtccaaacactgcgcaaaatgcagttgaagcagcattgcaacgtgtgaaaactgcgaaaaatgcattgaatggtgatgccaaattaattgcagctcaaaacgcagcgaaacaacatctaggtactttaacgcatatcactacagcacaacgcaatgatttaacaaatcaaatttcacaagctacaaacttagctggtgttgaatctgttaagcaaagtgcgaatagtttagatggtgctatgggtaacttacaaacggctatcaacgataagtcaggaacattagcgagccaaaacttcctagatgctgatgagcaaaaacgtaatgcttacaatcaagctgtatcaaatgccgaaacaattttaaataaacaaactggaccgaatacagcgaaaactgcagtcgaacaagcacttaataatgttaatagtgcgaaacatgcattaaatggtacgcaaaacttaaataatgcgaaacaagcagcgattacagcaatcaatggcgcatctgatttaaatcaacatcaaaaagatgcattaaaagcacaagctaatggtgctcaacgcgtatctaatgcacaagatgtacaacgtaatgcgactgaactgaacacggcaatgggtcaattacaacatgccatcgcagataagacgactacgttagcaagcagtaaatttgttaacgccgatagcactaaacaaaatgtttacacaactaaagttaccaatgctgaacatattattagcggtacgccaacggttgttacgacaccttcagaagtaacagctgcagctaatcaagtaaacagcgcaaaacaagaattaaatggtgacgaaagattacgtgttgcaaaacaaaacgccaatactgctattgatgcattaacgcaattaaatacacctcaaaaagctaaattaaaagaacaagtgggacaagccaatagattagaagacgtacaatctgttcaaacaaatggacaatcattgaacaatgcaatgaaaggcttaagagatagtattgctaacgaaacaacagtcaaagcaagtcaaaactatacagacgcaagtccgaataaccaatcaacatacaatagcgctgtgtcaaatgcgaaaggtatcattaatcaaactaacaatccgactatggatgctagtgcgattacccaagctacaacacaagtgaataatgctaaaaatggtttaaacggtgctgaaaacttaagaaatgcacaaaacactgctaagcaaaacttaaatacgttatcacacttaacaaataaccaaaaatctgcaatctcatcacaaattgatcgtgcaggtcatgtgagtgaggtaacagctgctaaaaatgcagcaactgagttaaacacgcaaatgggcaacttggaacaagctatccatgatcaaaacacagttaaacaaggtgttaacttcactgatgcagataaagccaaacgtgatgcgtatacaaatgcggtaagcagagcagaaacaattctgaacaaaacgcaaggtgcaaatacgcctaaacaagatgtagaagcggctattcaaagtgttactagcgctaaaaatgcattgaatggtgatcaaaatgtcacaaatgcgaagaatgcagctaaacatgcattaaataatttaacttcaattaataatgcacaaaaacgtgacttaacaactaaaattgatcaagcaacaacagtatctggtgttgaagcggtatctaatacaggtacgcaattgaatacagcgatggctaacttgcaaaatggtattaatgataaaacgaatactttagcgagcgaaaactatcatgatgctgattcagataagaaaactgcttatactcaagccgttacgaacgcagaaaatattttaaataaaaatagtggatcaaatttagacaaagctgccgttgaaaacgcgttgtcacaagtgacaaatgcgaaaggtgccctaaatggtaaccataatttagagcaagctaaatcaaatgcaaacactactataaacggacttcaacatttaacaactgctcaaaaagataaattgaaacaacaagtgcaacaagcacaaaatgttgcaggtgtagatactgttaaatcaagtgccaacacattaaatggtgctatgggtacgttaagaaatagcattcaagataacgcagctacgaaaaatggccaaaactatcttgatgctacagaaagtaacaaaacaaactataacaatgctgttgatagtgctaatggtgtcattaatgcaacaagcaatccaaatatggatgctaatgcaattaaccaaatcgctacacaagtgacatcaacgaaaaatgcattagatggtacacataatttaacgcaagcgaaacaaacagcaacaaatgcgattgatggtgctactaacttaaataaagcgcaaaaagatgcgttaaaagcacaagttacaagtgcgcaacgtgttgcaaatgtaacaagtatccaacaaactgcaaatgaacttaatacagctatgggtcaattacaacatggtattgatgatgaaaatgcaacaaaacaaactcaaaaatatcgtgatgcagagcaaagtaagaaaactgcttatgatcaagctgtagctgctgcgaaagcaattttaaataaacaaactggatcaaattcagataaagcagcagttgaccgtgcattacaacaagtaacaagtacgaaagatgcattgaatggggatgctaaactggcagaagcgaaagcggcagctaaacaaaacttaggcactttaaaccatattacgaatgcacaacgtactgacttagaaggccaaatcaatcaagcgacgactgttgatggcgttaatactgtgaaaacaaatgccaatacattagacggcgcaatgaatagcttgcaaggttcaatcaatgataaagatgcgacattaagaaatcaaaattatcttgatgcggatgaatcaaaacgaaatgcatatacgcaagctgtcacagcggctgaaggcattttaaataaacaaactggtggtaacacatctaaagcagacgttgataatgcattaaatgcagttacaagagcgaaagcggctttaaatggtgctgacaacttaagaaatgcgaaaacttcagcaactaatacgattaatggtttaccacacttaacacaattacaaaaagacaacttgaagcatcaagttgaacaagcgcaaaatgtagctggtgtaaatggtgttaaagataaaggtaatacattaaatactgccatgggtgcattacgtacaagtatccaaaatgataatacgacgaaaacaagtcaaaattatcttgatgcatctgatatcaacaaaaataattacaatactgctgtaaataatgcaaatggtgttattaatgcaacgaacaatccaaatatggatgctaatgcgattaatggcatggcaaatcaagtcaatacaacaaaagcagcgttaaatggtgtacaaaacttagctcaagctaaaacaaatgcgacgaacacaattaataacgcacatgacttaaatcaaaaacaaaaagatgcattaaaaacacaagttaacaatgcacaacgtgtatctgatgcaaataacgttcaacatacagctactgaattgaacggcgcgatgacagtacttaaagcagctattgctgataaagaaagaacaaaagcaagcggaaattatgtcaatgctgatcaagaaaaacgtcaagcgtatgattcaaaagtgactaacgccgaaaatatcattaatggtacaccgaatgcgacattaacagtcaatgacgtaaatagtgcaacttcacaagtgaatgcagctaaaacagtattaaatggtgataacaacttacgtgttgcgaaagagcatgccaacaatacaattgatggcttagcgcaattgaataatgcacaaaaagcaaaattaaaagaacaagttcaaagtgcaactacattagatggcgttcaaactgttaaaaatagttctcaaacgttgaatacagcgatgaaaggcttaagagatagtattgcgaatgaagcaacaattaaagcaggtcaaaactacactgacgcaagtccaaataatcgtaacgagtacgacagcgcagttactgcagcaaaagcaatcattaatcaaacatcgaacccaacgatggaaccaaatactattacgcaagcaacatcgcaagtgacaactaaagaacaagcattaaatggtgcgcaaaacttagctcaagctaagacaactgcgaaaaacaacttgaataacttaacatcaattaacaatgcacaaaaagatgcgttaacgcgtagcattgatggtgcaacaacagtagctggtgtaaatcaagaaactgtcaaagcaactgaattaaataacgcaatgcacagtttacaaaatggtatcaatgatgagacacaaacaaaacaaactcagaaatacctagatgcagagccaagtaagaaatcagcttatgatcaagcagtaaatgcagcgaaagcaattttaacaaaagctagtggtcaaaatgtagacaaagcagcagttgaacaagcattacaaaatgtgaatagtactaagacagcgttgaacggtgatgctaaattaaatgaagctaaagccgctgcgaaacaaacgttaggtacattaacacacattaataatgcacaacgtacagcgttagataatgaaattacacaagcaacaaatgttgaaggtgttaatacagttaaagccaaagcgcaacaattagatggtgctatgggtcaattagaaacatcaattcgtgataaagacacgacgttacaaagtcaaaattatcaagatgctgatgatgcgaaacgaactgcttattctcaagcagtaaatgcagcagctacaattttaaataaaacatctggcggtaatacacctaaagcagatgtcgaaagagcaatgcaagctgttacacaagccaatactgcattaaacggtattcaaaacttagaacgtgcgaaacaggctgctaacacagcgattacaaatgcttcggacttaaatacaaaacaaaaagaagcattgaaagcacaagtaacaagtgcaggacgcgtatctgtagcaaatggtgttgaacatactgctactgaattaaatactgcgatgacagctttaaaacgtgccattgctgataaagctgacacaaaagctagtggtaactatgtcaatgctgatgcgaataaacgccaagcatatgatgaaaaagtgacagctgcagaaaatatcgttagtggtacaccaacaccaacgttaacaccatcagatgttacaaacgcagcaacgcaagtaacgaatgcgaagacgcagttaaacggtaatcataatttagaagtagcgaaacaaaatgccaacacagcaattgatggtttaacttctttaaatggtccgcaaaaagcaaaacttaaagaacaagtgggtcaagcgacaacgttgccaaatgttcaaactgttcgtgataatgcacaaacattaaacactgcaatgaaaggtctacgagatagcattgcgaatgaggcgacgattaaagcagaacaaaactacacggatgcaagtcctaataatcgtagtgaatacgatagtgcagtcactgcagcaaaagcaatcattggtcaaacatcaagtccaacaatgaatgctcaagaaatcaatcaagcgaaagaccaagtgacagctaaacaacaagcgttaaacggtcaagaaaacttaacaaacgcacaaataaatgcgaaacaacatttgaatggcttaagtgacttaactaatgcacaaaaagatgcagcaaaacgccaaatcgaaggtgcaacgcatgttagtgaagtaacacaagcgcaaaataatgcggacgcattaaatacagctatgacgaacttgaaaaatggtattcaagatcaaaatacgattaagcaaggtgttaacttcactgatgcagatgaagcgaaacgtaatgcatatacaaatgcagtgacgcaagctgaacaaattttaaataaagtacaaggtccaaatactgcaaaagacaatgttgaatctgcgttacaaaatgtacaacgtgctaaaaacgatttgaacggtaatcaaaatgttgcaaatgctaagacaactgcgaaaaatgcattaaataatttaacatcaattaataatgcacaaaacgaagcgttgaaatcacaaattgatagtgcgacaacagttgcaggtgtaaatcaagtgtctgcaacggcatctgaattaaatacagcaatgagcaacttacaaaatggtattaatgatgaagcagctacaaaagcagctcagaaatatactgatgcagatagtgataaacaaactgcatacaatgatgctgtaacagcagctaaaacgttattagataaaacagctggcacaaatgacaataaagcagccgttgaacaagcattacaacgtgtgaatactgctaaaactgcattaaatggtgacgcgcgattaaatcaagcgaagaacacagctaaacaacaattagcgacaatgtcacatttaactgatgctcaaaaagcaaacttaacatcgcaaatcgaacgcggtacgactgttgcaggtgttcaaggtattcaagctaatgccggtactttaaatgaagcaatgaatcaattgagacaaagcattgcttctaaagatgcgactaaagcgagcgaagattatcatgatgcgaatacagatttacaaaatgcatacaatgatgcggtaactaatgctgaaggtattattagtgcaacgaataaccctgaaatgaatccagatacgattaatcaaaaagcgagccaagtgaacagtgcgaagtctgcattgaacggtgatgaaaaattagcagcagcaaaacaaactgcgaaatcagacatcggtcgtttaacagacttgaacaatgcacaacgaactgcggcaaatgctgaagtggatcaagcaccaaatcttgcagctgtcacagcggctaaaaataaagcaacatcgttaaatacagcgatgggtaatttgaaacatgcacttgctgaaaaggataatacgaaacgtagtgtcaattacacagatgcggatcaacctaaacaacaagcgtatgatactgcggttacacaagcagaagcaattactaatgctaatggcagcaacgcgaatgaaacacaagttcaagcagcgcttaaccaattgaatcaagctaaaaatgacttgaatggtgataataaagttgctcaagctaaagaaactgcgaaacgtgcattagcttcatatagtaacttgaataatgcgcaatcaactgcagcaactagtcaaattgacaatgcaacgacagtagcaggcgtaactgctgcacaaaatactgctaatgagttaaatacagcaatgggtcaacttcaaaatggtattaatgaccaaaacactgttaaacaacaagtgaactttacagatgctgaccaaggtaagaaagatgcttacacaaatgctgttacgaatgctcaaggtattttagataaagcacacggtcaaaatatgacgaaagcacaagttgaagctgcattaaatcaagtaacgactgctaagaatgctttaaacggtgacgcaaatgtaagacaagcaaaatcagatgcgaaagcaaacttaggcacattaacacacttaaataatgcacaaaaacaagatttaacatcacaaatcgaaggcgcaacaacagtcaacggtgtaaatggtgttaaaacgaaagcacaagacttagatggtgcaatgcaacgattacaatcagcaatcgcaaataaagatcaaactaaagcgagcgaaaattacatcgacgcagatccaactaacaaaacagcatttgataatgccatcacacaagcagaatcatacttaaataaagatcacggtgcgaataaagataagcaagctgttgaacaagcaattcaaagtgtaacgtctactgaaaatgctttgaacggtgacgcaaacttacaacgtgctaaaactgaagctacgcaagctatcgataacttgacacatttgaatacaccacaaaaaacagcattaaaacaacaagtgaatgctgcgcaacgtgtatcaggtgtaactgatctgaaaaatagtgctacatcacttaataatgcgatggatcaattaaaacaagcaattgctgatcatgacacaattgtagctggtggtaattacactaacgcgagtcctgataagcaaggtgcttatactgatgcatataatgctgcgaaaaacattgtaaatggttcacctaatgtgattacaaatgcagcagatgttacagcagcaacacaacgtgtcaataatgctgaaacaggtttaaacggtgatacaaacttagcaactgcgaagcaacaggctaaagatgcattacgtcaaatgacacatttatctgatgcacaaaaacaaagtattactgttcaaattgataatgcgacacaagtaactggcgttcaaagtgtgaaagacaacgcgacaaatcttgataatgcaatgaatcaacttcgaaatagtattgcgaataaagatgaagtaaaagcgagtcaaccatatgttgatgcagatagagataaacaaaatgcatacaacacagctgttacaagtgctgaaaatatcattaatgcaacgagtcagccgacacttgatccatctgcagtaacacaagcagctaatcaagtgaacactaacaaaactgcgcttaatggtgcacaaaacttagcaaataaaaagcaagaaacaactgccaacatcaaccaattaagtcatttaaataatgctcaaaagcaagatttaaatacgcaagtgacaaatgcaccaaatattagcacagtaagtcaagtgaaaactaaagctgaacaattagatcaagcaatggaacgtttaatcaacggaatccaagacaaagatcaagtgaaacaaagtgttaactttacagatgcagatccagaaaaacaaacagcatacaacaatgcggtaactgctgctgaaaatattattaatcaagcaaatggtacaaatgcgaaccaatcacaggttgaagcagcactttcaactgtaacaactactaaacaagcattgaatggtgatagaaaagtaacagatgctaaaaacaatgcaaaccaaacattatctacgttagataacttaaacaatgcgcaaaaaggtgctgttactggaaacatcaatcaagcgcacactgttgctgaagtaacgcaagccattcaaacagctcaggaactaaatacagcgatgggtaacttgaaaaatagcttgaatgataaagacactacacttggcagtcaaaactttgcagatgcagatccagagaagaaaaatgcatacaatgaagcggttcgtaatgctgaaaatattttaaataaatctacaggtacaaacgtgtctaaagatcaagttgaagcagctatgaatcaagtgaatactacaaaagcagcgcttaatggtactcaaaaccttgaaaaagctaaacaacacgcaaatacagcgattgacggtttaagccatttaacaaatgcacaaaaagaggcattaaaacaattggtacaacaatcgactactgttgcagaagcacaaggtaatgaacaaaaagcaaacaatgttgatgcagcaatggacaaattacgtcaaagtattgcagataatgcgacaacaaaacaaaaccaaaattatactgattcaagtccgaataaaaaggatgcgtacaataatgctgtcacaactgcacaaggtattattgatcaaacgacaagtccaactttagatccgactgttatcaatcaagctgctggacaagtaagcacaactaaaaatgcattaaatggtaatgaaaacctagaggcagcgaaacaacaagcgacacaatcattaggttcattagacaacttaaataatgcgcaaaaacaagcagttactgatcaaattaatggcgcgcatactgttgatgaagcaaatcaaattaaacaaaatgcgcaaaacttaaatacagcgatgggtaacttgaaacaagcgattgctgacaaagatgctacgaaagcaacagtaaacttcactgatgcagatcaagcaaaacaacaagcatataacactgctgttacaaatgctgaaaacatcatttcaaaagctaatggtggcaatgcaacacaaactgaagttgaacaagcaatccaacaagttaatgctgcaaaacaagcattaaatggtaatgccaacgttcaacatgcgaaagacgaagcaacagcattaattaatagctctaatgaccttaaccaagcacaaaaagacgcattaaaacagcaagttcaaaatgcaactactgtagctggtgtaaacaatgttaaacaaacagcgcaagagttaaacaatgcaatgacacaattaaaacaaggcattgcagataaagaacaaacaaaagctgatggtaactttgtcaatgcagatcctgacaaacaaaatgcatataaacaagcagtagcaaaagctgaagcattaattagcggcacacctgatgttgtcgttacacctagcgaaattactgcagcgttaaataaagttacacaagctaaaaatgatttaaatggtaatacgaacttagcaacaacgaaacaaaatgttcaacatgctattgatcaattgccaaacttgaatcaagcgcaacgtgatgaatacagcaaacaaattacgcaagcaacacttgtaccaaacgtcaatgctattcaacaagcggcaactacgcttaatgatgcgatgacacaattgaaacaaggtattgcgaataaagcacaaattaaaggtagcgagaactatcacgatgctgatactgacaagcaaacagcatatgataatgcagtaacaaaagcagaagaattgttaaaacaaacaacaaatccaacaatggatccaaatacaattcaacaagcattaactaaagtgaatgatacaaatcaagcacttaacggtaatcaaaaattagctgatgctaaacaagctgctaagacaaatcttggcacattagatcatttaaatgatgcgcaaaaacaagcgttaacaacacaagttgaacaagcaccagatattgcaacagttaataatgttaagcaaaatgctcaaaatctgaataatgctatgactaacttaagtaatgcattacaagataaaactgagacattaaatagcattaactttactgatgcagatcaagctaagaaagatgcttatactaatgcggttgcacatgcagaaggtattttatctaaagcaaatggcagcaatgcaagtcaaaccgaagtggaacaagcgatgcaacgcgtgaacgaagcgaaacaagcattgaatggtaatgacaatgtacaacgtgcaaaagatgcagcgaaacaagtgattacaaatgcgaatgatttaaatcaagcgcaaaaagatgcgttaaaacaacaagtcgatgctgcgcaaactgttgcaaatgtaaacacgattaagcaaacagcacaagatttaaatcaagcaatgacacaattgaaacaaggtattgcagataaagaccaaactaaagcaaatggtaactttgtcaatgctgatactgataagcaaaatgcatacaacaatgcggtagcacatgctgaacaaatcattagtggtacaccaaatgcaaacgtggatccacaacaagtggctcaagcgttacaacaagtgactcaagctaagggtgatttaaacggtaaccataacttacaagttgctaaagacaatgcgaatactgccattgatcagttaccaaacttaaatcaaacacaaaaaacagcattaaaagaccaagtgtcacatgcagaacttgttacaggtgttaatgctattaagcaaaatgctgatgcattaaataatgcaatgggtacgttgaaacaacaaattcaagcaaacagtcaagtaccacaatcagttgactttacacaagcggatcaagacaaacaacaagcatataacaatgcagctaaccaagcgcaacaaattgcaaatggcacaccaacacctgtattgacgcctgacgcagtaacacaagcagttactacaatgaatcaagcgaaagatgcattaaacggtgatgaaaaattagcgcaagcgaaacaagatgcaatagcaaatctagatacgttgcgtgacttaaatcaaccacaacgtgatgcgttacgtaatcaaatcaatcaagcacaagcgttagctacagttgaacaaactaaacaaaatgcacaaaatgttaatacagcaatgagtaacttgaaacaaggtattgcaaataaagataccgtcaaagcaagtgaaaactatcacgatgctgatgccgataagcaaacagcatatacaaatgcagtgtctcaagcggaaggtattatcaatcaaacgacaaatccaatgcttaacccagatgatattactcgtgcattaactcaagtgactgatgctaaaaatggcttaaacggtgaagctaaattggcaactgaaaagcaaaatgctaaagatgctgtcaatgcaatgacgcatttgaacgatgctcaaaaacaagcattaaaaggacaaatcgatcaatcgcctgaaattgctatagtgaaccaagttaaacaaacagcaacgagcctagatcatgcaatggatcaattatcacaagctattaatgataaagctcaaacattagcggacggtaattacttaaatgcagatcctgacaaacaaaatgcgtataaacaggcagtagcaaaagctgaagcattattgaataaacaaagtggtactaatgaagtacaagcacaagttgaaagcatcactaatgaagtgaacgcagcgaaacaagcattaaatggtaatgataatttagcgaatgctaagcaacaagcgaaacaacaactggcgaatctaacacacttaaatgatgcacaaaaacaatcatttgaaagtcaaattacacaagcgccacttgttacagatgtcactacaattaatcaaaaagcacaagcgttagatcatgcaatggatcaattatcacaagctattaatgataaagctcaaacattagcggacggtaattacttaaatgcagatcctgacaaacaaaatgcgtataaacaggcagtagcaaaagctgaagcattattgaataaacaaagtggtactaatgaagtacaagcacaagttgaaagcatcactaatgaagtgaacgcagcgaaacaagcattaaatggtaatgataatttagcgaatgctaagcaacaagcgaaacaacaactggcgaatctaacacacttaaatgatgcacaaaaacaatcatttgaaagtcaaattacacaagcgccacttgttacagatgtcactacaattaatcaaaaagcacaagcgttagatcatgcgatggaattattaagaaatagtgttgcggataatcaagcgacattagcgtctgaagattatcatgatgcaactgcgcaaagacaaaatgactataaccaagcagtaacagctactaataatatcattaaccaaacaacatcacctacaatgaatccagatgaagttaatcgtgcaacgacacaagtgaataacacgaaagttgcattagatggtgatgaaaaccttgtagcagctaagcaacaagcgaacaatagacttgatcaattagatcatttaaataatgcgcaaaagcaacagttacaatcacaaattacgcaatcatctgatattgctgcagttaatggtcacaaacaaacagcagaatctttaaatacagcaatgggtaacttaattaatgcgattgcagatcatcaaaccgttgaacaacttggtaacttcgtcaatgctgatactgataaacaaactgcttatactacagcggtaaatgaagcagaagccatgattaacaaacaaactggtcaaaatgcgaaccaaacagaagtagaacaagctattactaaagttcaaacaacacttcaagcgttaaatggagatcataatttacaagttgctaaagcaaatgcgacgcaagcaattgatgctttaacaagcttaaatgatcctcaaaaaacagcattaaaagaccaagttactgctgcaactttagtaactgcagttcatcaaattgaacaaaatgcgaatacgcttaaccaagcaatgcatggcttaagagaaagtattcaagataacgcagcaactaaagcaaatagcaaatatatcaacgaagatcaatcagaacaacaaaactacgatcaagcagtgcaagccgcaaataatattatcaatgaacaaacagcaacattagataataatgcaattaatcaagcagcgacaactgtgaatacaacgaaagcagcattacatggtgatgtgaaattacaaaatgataaagatcatgcgaaacaaacagttagtcaattaacacatttaaacaatgctcaaaaacatatggaagatacgttgattgatagtgaaacaactagaacagccgttaaccatgatttgactgaagcacaagcattagatcaacttatggatgcattacaacaaagtattgctgacaaagatgcaacacgtgcgagcagtgcatatgtcaatgcagaaccgaataaaaaacaatcatatgatgaagcagttcaaaatgctgagtctatcattgcgggattaaataatccgactatcaataaaggtaatgtaacaagtgcgacacaagctgtaacatcatctaaaaatgcattagacggtgttgaacgattagcgcaagataagcaaactgctggaaattctctaaatcatttagaccaattaacaccagcacaacaacaagcactagaaaatcaaattaataatgcaacaactcgtgataaagtggctgaaattattgcacaagcgcaagcattaaatgaagcgatgaaagcattaaaagaaagtattaaagatcaaccacaaactgaagcaagtagtaaatttattaatgaagatcaagcacaaaaagatgcttatacgcaagctgtacaacacgcgaaagatttgattaacaaaacaactgatcctacattagctaaatcaatcattgatcaagcgacacaggcagtgactgatgctaaaaataatttacatggtgatcaaaaactagatcaagataagcaacgtgcaacagaaacgttaaataacttgtctaacttgaatacaccacaacgtcaagcacttgaaaatcaaatcaataatgcagcaactcgtggcgaagtagcacaaaaattaactgaagcagaagcacttaaccaagcaatggaagctttacgtaatagcattcaagatcaacagcaaacggaagcgggtagcaagtttatcaatgaagataaaccacaaaaagatgcttaccaagcagcagttcaaaatgcaaaagatttaattaatcaaactaacaatccaacgcttgataaagcacaagttgaacaattgacacaagctgttaaccaagctaaagataacctacacggtgatcaaaaacttgcagacgataaacaacatgcggttactgatttaaatcaattaaatggtttgaataatccgcaacgtcaagcacttgaaagccaaataaacaacgcagcaactcgtgatgaagtagcgcaaaaattagctgaagcaaaagcgcttgatcaagcaatgcaagcattacgtaatagtattcaagatcaacaacaaacagaatctggtagcaagtttatcaatgaagataaaccgcaaaaagatgcttaccaagcagcagttcaaaatgcaaaagatttaattaaccaaacaggtaatccaacactcgacaaatcacaagtagaacaattgacacaagcagtaacaactgcaaaagataacctacatggtgatcaaaaacttgctcgtgatcaactacaagcagtaacaactgtaaatgcattgccaaacttaaatcatgcacaacaacaagcattaactgatgctataaatgcagcgcctacaagaacagaggttgcacaacatgttcaaactgctactgaacttgatcacgcgatggaaacattgaaaaataaagttgatcaagtgaatacagataaggctcaaccaaattacactgaagcgtcaactgataaaaaagaagcagtagatcaagcgttacaagctgcagaaagcattacagatccaactaatggttcaaatgcgaataaagacgctgtagaccaagcattaactaagcttcaagaaaaagtgaatgagttaaatggtaatgagagagtcgctgaagctaaaacacaagcgaaacaaactattgaccaattaacacatttaaatgctgatcaaattgcaactgctaaacaaaatattgatcaagcgacgaaacttcaaccaatcgctgaattagtagatcaagcaacgcaattgaaccaatcaatggatcaattacaacaagcagttaatgaacatgctaacgttgagcaaactgtagattacacacaagcagatttagataagcaaaatgcttataaacaagctattgctgatgccgaaaatgtattgaaacaaaatgcgaataagcaacaagtggatcaagcacttcaaaatattttaaatgcaaaacaagcattaaatggtgatgaacgtgtagcacttgctaaaacaaatggtaaacatgatatagagcaattgaatgcattaaacaatgctcaacaagatggatttaaaggtcgcatcgatcaatcaaacgatttaaatcaaatccaacaaattgtagatgaggctaaggcacttaatcgtgtaatggatcaattgtcacaaggaatcactggcaatgaaggacgcacgaaaggtagcacgaactatgtcaatgcagatacacaagttaaacaagtgtatgatgaagcggttgataaagcgaaacaagcacttgataaatcgacaggtcaaaacttaactgcagaacaagttatcaaattaaatgatgcagtcactgcagcaaagaaagcattaaatggtgaagaaaaacttaataatcgtaagtctgaagcattacaaagattggatcaattaacacatctaaacaatgctcaaagacaattagcaatccaacaaattaataatgctgaaacgctaaataaagcatctcgagcaattaatagagcaactaaattagataatgcaatgggtgcagtacaacaatatattgacgaacagcaccttggtgttatcagcagcacaaattacatcaatgcagatgataatttgaaagcaaattatgataatgcaattgcgaatgcagcacatgagttagataaagtgcaaggtaatgcaattgcaaaagctgaagcagagcaattgaaacaaaatattattgatgctcaaaatgcattaaatggagaccaaaaccttgcaaatgccaaagataaagcaaatgcgtttgttaattcgttaaatggattaaatcaacagcaacaacatcttgcacataatgcaattaacaatgccgatactgtatcagatgtaacagatattgttaataatcaaattgacttaaatgatgcaatggaaacattgaaacatttagttgacaatgaaattccaaatgcagagcaaactgtcaattaccaaaacgctgaagataatgctaaaacaaacttcgatgatgctaaacgtctagcaaatacattgctaaatagtgataacacaaatgtgaatgatattaacggcgcaattcaaacagtcaatgatgcaatccaaaatcttaatggtgatcaacgactacaagatgctaaagacaaggcaattcaatctattaatcaagctttagctaataagctaaaagaaatcgaagcttcaaatgcgacggatcaagacaagcttattgcgaaaaataaagcagaagaattggcaaacagcatcatcaacaacattaataaagcaacaagtaatcaggatgtatctcaagttcaaacagctggcaaccatgcgattgaacaagtgcatgccaatgaaataccgaaagctaaaattgatgcgaataaagatgttgacaagcaagttcaagcattaattgacgaaattgatcgaaatccaattctaacagataaggaaaaacaagcgcttaaagatcgaattaaccaaatacttcaacaaggtcataacgacattaacaatgcgatgactaaagaagaaattgaacaagccaaagcacaacttggacaagcgttacaagacattaaagatttagtgaaagctaaagaaagcgcgaaacaagatattgataagcaagttcaagcattaattgacgaaattgatcgaaatccaattctaacagataaggaaaaacaagcgcttaaagatcgaataaatcaaatcctgcaacaaggtcataacggcattaacaatgcgatgactaaagaagaaattgaacaagccaaagcacaacttggacaagcgttacaagacattaaagatttagtgaaagctaaagaaagcgcgaaacaagatattgataagcaagttcaagcattaattgacgaaattgatcgaaatccaaatctaacagataaggaaaaacaagcgcttaaagatcgaataaatcaaatcttgcaacaaggtcataacggcattaacaatgcgatgactaaagaagaaattgagcatgccaaagcgcagcttgcacaagcattacaagacattaaagatttagtgaaagctaaagaagatgcgaaaaatgcaattaaagcattagcaaatgcgaagcgtgatcaaatcaattcaaaccctgatttaacacttgaacaaaaagcaaaagcgctcaaagaaattgacgaagctgaaaaacgagcactagaaaacattgaaaatgctcaaactaaagatcaattaaatcaaggattaaatttaggattagatgatattagaaatacacatgtatgggaagttgatgcacaacctgctgtaaatgaaatttttgacgcaactcctgaacaaatccttgtaaatggcgaactcattgtccatcgtgatgacatcattacagaacaagatattcttgcacacatcaacttaattgatcaacttacagcggaaattattgatacaccgtcaactgcaacaatttctgatagtttaacagcaaaagttgaagtaacattgcttgatggatcaaaagtgattgttaatgttcctgtgaaagtagtagaaaaagaattgacagtagttaaacagcaggcgattgaatcaattgaaaatgcggcacaacaaaagattaatgaaatcaataatcacgcaacattaacacctgaacaaaaagaagctgcgattgcggaagttaataagcttaaacaacaagctattgagcaaattaacaacgcagcagatgttcatacggtggaagaagttcaacaccaagaacaggcgcatattgaacaattcaatccagatcaatttacaattgaccaagccaaatcaaatgccattaaatcaatttctgatgctatccaacatatgattgatgaaattaatgctagtaaggatttaactgataaagagaagcaagaagctatatctaaattaaatcagttaaaagatcaatcaattcaggcgattcaacgtgcgcaaagcatcgatgaaattgcgcaacaattagagcaatttaaagcgcaactaaaagcggccaatccatttgctaaagaattggaaaaccgtaaaaaagctgcgatttcaaaaattaaagatatttctacagataaaattgatcgcattagaaatagcacaattggaactgctgaagaaagacaagcagcaatgaatcgaattaacgaaattgtgcttgaaacaatcaaagatattaataatgcgcaaacgccacaacaagttgaggctgcattgaataatggtatcgcacgaattttagcagtacaaattgtaacatcagatcatagcaaaccttcatcaaattcagatggtcaatctaatagtcatttacacgttggttatggcactgtaaatcatccattcaatagttcgcctattggacataagaagaaattggatcaagatgatgaaatcgatccacttcatatgcgtcatttcggtgaccgaattggtaatgttatcaaaaacgcacttggcgttgttggtatttctggattacttgctagcttctggttcttcattgcgaaacgtcgtcgtaaagagatgaagaggaagaattggaaattagagataatagcaaagacaagaagaaaggttcaatagaaggtactaaacatttaccacttttatttgcgaaacgtcgtagaaaagaagatgaagaagatgctattgttgaagaaaaagattcgctaaacaatgacgagtcactcgataaagttaaacatacgccgttcttcttacctaaacgtcgcagaaaagaagatgaagaagatgtggaagttacaaatgaaaacacagatgaaaaagtgttgcaagataacgaacattcaccggtcttaatcgcaaaacgactcaaagataaagatggaaatgttgaaacaacaactagtattgaatctaaagatgaagacgttcctttattattggctaaaaagaaaaatcaaaaagataaccaatccaaagggaaaaagtcggcatcaaaaaaaccttctaaaaaggtagcagctaaaaagaagaaaaagaaatctaaaaaaaataaaaaaatgaagaggaagaattggaaattagagataatagcaaagacaagaagaaaggttcaatagaaggtactaaacatttaccacttttatttgcgaaacgtcgtagaaaagaagatgaagaagatgctattgttgaagaaaaagattcgctaaacaatgacgagtcactcgataaagttaaacatacgccgttcttcttacctaaacgtcgcagaaaagaagatgaagaagatgtggaagttacaaatgaaaacacagatgaaaaagtgttgcaagataacgaacattcaccggtcttaatcgcaaaacgactcaaagataaagatggaaatgttgaaacaacaactagtattgaatctaaagatgaagacgttcctttattattggctaaaaagaaaaatcaaaaagataaccaatccaaagggaaaaagtcggcatcaaaaaaaccttctaaaaaggtagcagctaaaaagaagaaaaagaaatctaaaaaaaataaaaaa

SEQ ID NO: 4243 - DNA, 32737 bp, Staphylococcus aureus; identical to SEQ ID NO: 4242

SEQ ID NO: 4244 - DNA, 32737 bp, Staphylococcus aureus; identical to SEQ ID NO: 4242

SEQ ID NO: 4245 - DNA, 32737 bp, Staphylococcus aureus; identical to SEQ ID NO: 4242

SEQ ID NO: 4246 - DNA, 32737 bp, Staphylococcus aureus; identical to SEQ ID NO: 4242

SEQ ID NO: 4247 - DNA, 32737 bp, Staphylococcus aureus; identical to SEQ ID NO: 4242

SEQ ID NO: 4248 - DNA, 312 bp, Staphylococcus aureus
atgaccaagcataataacatttataagcatggtcgtaagtcatatcaatacgattggttctatcattcaaaagcatggaagaagttaagagagatagcattagatagagataattatctttgtcaaatgtgcttggagcaggggaagataacggacgctaagattgtgcaccatatagtttatctagacaatgactttaataaagcattatatttgaataacttgatgtctgtttgtcatgcttgtcacaataaaattcacgcaaacgacaacaaaaaagcagttaaaacgaaaataaaatttgttaaaatt

SEQ ID NO: 4249 - DNA, 120 bp, Staphylococcus aureus
gtgttgtatcatttgttgcatcaatgttgcatcaccaaaaatgatacaacacctacgattactttttacactcacgtgttgcatcactcaaaaaatgatgcaacatctgatacaacactc

SEQ ID NO: 4250 - DNA, 234 bp, Staphylococcus aureus
atgtttaatacacctaaaatgaaattaccagaaaagcacaccgaggtatttaagacgtataaaaatggaacgccagaagaaaaagctgagattgaaggctgttttattaaaactgttaaagatgaagatagtgaattttacagccctatgttagccagtctaaatgaacaacagttaaagagtatgttgagacaggtactttttttgattgatacaggagatgacaatgatgat

SEQ ID NO: 4251 - DNA, 213 bp, Staphylococcus aureus
ttggaaagatggggagttggtagtatgatgcaaacctataaagtatgtctttgtatcaagttctttgcatctaaatgtgattataaattaaagaaacattatttcgtgaaaagtacgaatgaggaaaaagccacgaacatggtattaaaactgattcgtaaaaagctcccgttcgaaactgcaagcatagaagtcgaaaaagtggaggcaata

SEQ ID NO: 4252 - DNA, 108 bp, Staphylococcus aureus
atgaatgttgcgatacttgcgaatcctgcaatggaccacgctgtagtgaagtatagaaacggcatgagtacaatcgctaagaccgtgaagcatagcactgctattagg

SEQ ID NO: 4253 - DNA, 165 bp, Staphylococcus aureus
atgaaggaggaactacaaatgaaactactaagaaggctattcaataaaaaacacgaaaacttaattgacgtgtggcatggaaatcaatggttaaaagtgaaagaaagcaaattaaaaaaatataaagtggtctcggatagagaaggtaagaaatatctaattaaa

SEQ ID NO: 4254 - DNA, 117 bp, Staphylococcus aureus
ttgaaaacaagcactatcgtaatggtagttgcttgtttttttacgttaagaaaaattgaaaatcaaagagaatctttcgagaaatatgagttgtttaaattacaacaaaaaattgat

SEQ ID NO: 4255 - DNA, 108 bp, Staphylococcus aureus
atgaaattaatattaaaaaaatgccaagaagcaatggaagtaatccaatgtcttcttggcattttgaatttatataaattgtttatgactgtaccgtcaattcagttg

SEQ ID NO: 4256 - DNA, 90 bp, Staphylococcus aureus
ttgcatcgctttcctattcttcaagcccactttttatcttggaatacattaattaaccatcttcaaacattgccgttagattcgccaaat

SEQ ID NO: 4257 - DNA, 636 bp, Staphylococcus aureus
atgaatttattttacaatcctaaatatgtaggagatgtcgcatttttacaaattgaaccagttgaaggtgaattaaactacaataaaaaaggtaacgttgttgaaattactaatgaaggtaatgttgtaggttataatatttttgaaattactaatgaaggtaatgttgtaggttataatatttttgaaatttcaaaagatataacaattgaagaaacaggtcatattaaattaactgatgaacttgtaaatgtattccaaaagcgtatttcagaagctggttttgattataaattaaatgctgatctatcaccgaaatttgtagttggctacgttgaaactaaagacaaacatcctgatgcagataaattaagtgtactaaatgtaaatgttggaaatgacacattacaaattgtatgtggcgcgcctaacgttgaagctggacagaaagttgttgttgctaaagtaggtgcagtgatgcctagcggtatggtaattaaagatgctgaattacgtggtgttgcctcaagcggtatgatttgttcaatgaaagaattgaatttacctaatgcacctgaagaaaaaggtattatggtattaaatgacagctatgaaattggacaagcattttttgaa

SEQ ID NO: 4258 - DNA, 156 bp, Staphylococcus aureus
ttgttatctgtattattaggcacgtttaatgtattgttatttgatgctaaattattatttgtattcgccgctggctctgttgctgttgaattagcattagaattattattattttgcgcaggcgacgcgctaggctgtattggagcaggcccgact

SEQ ID NO: 4259 - DNA, 93 bp, Staphylococcus aureus
atgaacatctttaaaacgaatcataattatgatgaagtaatgaagtatgacaatggtgaattcataaaatatggcaaattgttaaaaatattt

SEQ ID NO: 4260 - DNA, 441 bp, Staphylococcus aureus
ttgcaagacatttctacaaaacacctactttatatccaaaccgcaacttcgaaccatcttgagacaaaatgtgtctttctgtaccatgaatacaatctcgaattccctattactaaagccattccttattatgctaaattgcattttacatcagcatcaattttaatcgatgcggcaaaaagcatactcaacattaacaagctggtgcctatttaccttaatccgaaaacgattcttttcccaataaaacaaaagcgtgcaccgatacaaacatatatcaatgcacactatataattggtatgacggaaatgggcaattcgactatgctccatttcaaaaatggcaaaacattagaagtcgatgaacccatgtctcttatttccaaaaaatgctatgaaagtttagcattgaagcatttcattgaaaatactaatgactat

SEQ ID NO: 4261 - DNA, 633 bp, Staphylococcus aureus
atgcagaaattcaaggatttgttttatgatgatttatcagttgcacgtggaaattattttctaactttattatccgcattcttgattactattattctactaattggtttcgttgtcagtgatacacacatactttatggcgtgtttatagtgctcatcggtattgtgttattacggttattcaaaattaatttactctcatttaaaaaattaacaatgtcacaagtgatttatatcatcggtggtgcattgctaatttatgggttagatcatctttatttacattttcatgacgtaccgacaaatgaacaagaattagatcgagaattacaacatatgcctttgtatatgtctattgtcacaattgctattatccctgccattgtagaagaaatcgtttttcgaggcatgataataagagttgtatttagaaagcatttatttattggattagttgtgtctagtctagtgtttgcatcattgcatgaatcggatacttggattgggtacttaccttatttatattctggagtgatttttggcctaatatatttaaaaacaaagcgattagaagtcgttattttaatccactttataaataacctatcctcattactcattctgatatgggga

SEQ ID NO: 4262 - DNA, 618 bp, Staphylococcus aureus
atgttttcgaggaataacaatatttttgttgatgatttgtctgtaacaaaggacaattatttaattgcagttttaaaaatgttgatcatttttttagtaattaattatggaacagacatcagttatgaccatgagtatgttgggctatttattatattactaggtgttgtacttcttaaagttttaaacatcaatttattatctttcaaaaaattaaaattccctcatatgctttatattatatttggatttttgttgatgtatggattagattacttatatgatacgttcgcaccgcctacattaaatgaaatattgatagatgaagagtctgaagatgcaccttaccacatagctctgcttagtactgctatcattccaccaattacagaagaaatcatctgtcgtggattgattatacgaattttattcagaaatcatcttttcttaggttttatagtttcaactgtattcttcacgctaatacatgaatcaaacacgctgattggttatcttccgtatttttattcaggtttaatttttggctatacttacttaaaaacaaaacgattagaggtaccgattttaatacattttatcaataacctcttagccatg

SEQ ID NO: 4263 - DNA, 135 bp, Staphylococcus aureus
ttgtatggtgtaataaaaattattattatcctcacaatcattaaaggacaagagtattttaaaaaatcattacataacatacaaattttggttatggaagttacaatcatttgcgcaatcgaatattattatgtt

SEQ ID NO: 4264 - DNA, 222 bp, Staphylococcus aureus
atgtttgaatcaacaggaaagatattatccatcgatggtaatcaaatgacttcagatgcatttgctgaaggtggcaattcaggatccccagtgtttaattcaaatcatgaggtcattgcaattgcatatgctgtcgatgtcaaaaatgatgcaacaaaaaaatcatatttagtttatttcacacccgagatcaagaaattcattgcagataacacagaaaaa

SEQ ID NO: 4265 - DNA, 339 bp, Staphylococcus aureus
atgaataaaaatataatcatcaaaagtattgcggcattgacgattttaacatcagtgactggcgtcggcacaaccattgttgaaggtattcaacaaacagcaaaagccgaacataatgtgaagcaagtacaaaacacaaatatttctccgtataaaggaattgttagaattggatcagctacaggatttgtggtaggaaaaaatacaattttaacaaataagcatgtattacctggtgttcaagttggtagcacaattcttgctcatccaaatggcgaaaatgataccggtggatactataaagtaaaaaaatcattccatacgcaggatctgaagatt

SEQ ID NO: 4266 - DNA, 738 bp, Staphylococcus aureus
atgaataaacagaggagcacaaaaatgaataaaaatataatcatcaaaagtattgcggcattgacgatattaacatcagtgactggtgttagcacaacaatggttgaagggattcaacaaacagccaaagccgaacataatgtaacgaagataacaaatactagtatttcgccatacaaaggcatactaagagtaggcgcagctacaggatttgtagtaggtaaaaacactattttaacaaatagacatgtcgttaaagatgtgcaagtaggtagtacagtgcttgcccatccaaatggcgaaaatgatactggcggatactataaagtcaaaaaagttatcccatatgcaggctcggcagatttagctatcgttgaagttgaagaagattcagtttacccaaaaaataaaaagttcagtgaaaatactgaaatcctaacgttggcatcggaagctaaagcgaatgaaagagttgcaatcgttggctatccagcgccatataaaaataaacatcatatgtatcaatcaacaggaacagtactatcaattaatggagataaattagtatcagatgcatttgctgaaggtggcaattcagggtcaccggtctttaacaataaaaatgaagttgtgggcgttttatatagtggagaccaaattggtcattctaaaaaagagtcatacagcgtatatttaacgcctgaaattaagaaattcatcgcagataacacagaaaaa

SEQ ID NO: 4267 - DNA, 243 bp, Staphylococcus aureus
atgtcaaataatgctaattatggtaagttaatattacatttagtaacatcaaagttaacaaatatagaagaaaatcctcaactttctaattatgaatcagaatattatcttcttgaaaaaaatttaattaagacacaatttatcaaaagtactaaaagtagatgtctatatgaagaaaccacttatcacatattgacgaatggagacatcttaaaccaacccggaaatttgaaattatggacg

SEQ ID NO: 4268 - DNA, 513 bp, Staphylococcus aureus
atgataaaacaggttctaagaaaaagtttacatacagtaaaagaacatatcgataaaagtaacttccaaaaaaacttaatattttcacttgtcatattcccattcttatttgtgccttacattataatagatatactcgttcatttatctaataatcaagaatactttaagttattatcatctatttcacatatatttttaatgttctttgtaacagcaataagtttatacgctatactttctatacctttaacatctaattcatgtaggaaatcaagctttagaaagattagtaaagtaataatttattttttagtatttttttatatcctaagccatcatatcaatatagatatttctaaaatggactcttcttggcatttttatgcgctttttttatgtttttttattatttcatataaattaactgaaaaaataatgaaggtatgcaaatggatatttaatgaagaatcaaataacgatgaaggtttaagaactcaaaaattattttta

SEQ ID NO: 4269 - DNA, 204 bp, Staphylococcus aureus
ctgagcacgtatagagaaaattattctttaagacctattgcacgtaaattagaccgatccgcatctactatcttacgtgaaattagcagaaataatgtaaataagttatatcaatctgaaacggctcaaaagaattatgtaactacaagaaaactttgtggtcatcctactggatttactccagaacttagcaatatcattaag

SEQ ID NO: 4270 - DNA, 186 bp, Staphylococcus aureus
ttgtcatcatttcaatatcattcaataatagctaaaccttcttcttcgattcagtttcatgaaataattcccgctgaaagtatcatgatttacacattacttccaccattatataacttaaaaatgactatatttcatcaaacattatctaaaggcgtcgcacctacaccaactccatccaacaat

SEQ ID NO: 4271 - DNA, 117 bp, Staphylococcus aureus
atgaatcctaagcaatattttcaatcaattcataaatatgatttaagggaaaatcactacaaacaacgtcttactgtaattggtaatcaaacattcattcgagccataaaaaagaga

SEQ ID NO: 4272 - DNA, 195 bp, Staphylococcus aureus
ctgacgaaaagtcagcttacgataatgtgcaggttggcggggccccaacatagagaaattggatctacaatttctacaggcaatgcaagttggggtgtgggccccaacacagagaatttcgaaaaaagaaattctacaggcaatgcaggttggggtgtaggccccaacacagagaaattggaacaccaatttcta

SEQ ID NO: 4273 - DNA, 150 bp, Staphylococcus aureus
ttgtcgaatgaacttgatgcacttacctcattagtaattgaagaaaatgagaataataacaataaaacagttaaaaataataaacctcttttgagcatggcgcttcctccaaatataatatatttgtttttatttatctctttttatagc

SEQ ID NO: 4274 - DNA, 96 bp, Staphylococcus aureus
ttgcagtcattactgcatcaattactgcgttattaccttaagggaggtggacaaaatgagttgggcaagatggttgtcatgttatttgtatggtcg

SEQ ID NO: 4275 - DNA, 579 bp, Staphylococcus aureus
ttgtcaattgggcgatttatcaaagtatggaagaaaattccgacagcaaaaacgacaacaaatcaacaacaaatggacaacaaatggacaacaaatcaacaacaaatcaacacaaacaagaatgtaaagaatggggataatgtaaagaatggtgagaatgagaagaagaaggtaaccgccttcgacttcttccaagataacggattcggtttcataactccttacaatttagacgatttaaattattatcttgattcatttgaaaatgattcagatcaaatagttaccgcatcacttaaaatcgctaaagacagaaataaagttacttggggatatgctaaaagcattttgaatacatggcttaatgcaaacttgaaatctattgaacaagtacgtgcatttgaaaagcaacaacttgaaagcaaaaaacaaaattataaacctttcgttaaacaatcaaaagaaaaaacacccaaatggctcacagacagcacgagagaaacgaaaacgccggaagtagatgaaaaccttgagaaagacagagaagcttttattaagcgtctaaatagcaaatgggag

SEQ ID NO: 4276 - DNA, 99 bp, Staphylococcus aureus
atgaaaaaactgctacttgcgccaacaagtaacagtgacaaacgattaacaaaattaattcattttcaatataaaacgaaaaacggaggaagtcaacta

SEQ ID NO: 4277 - DNA, 159 bp, Staphylococcus aureus
atgagcaacatttataaaagctacctattagcagtactgtgcttcacagtcttagcgattgtgcttatgccattgctgtacttcactacagcatggtcaattgcaggattcgcaagtatcgcaacattcatattctataaggaatacttttatgaagaa

SEQ ID NO: 4278 - DNA, 99 bp, Staphylococcus aureus
ttgatattgttaggtgcatatgaggcatgtagaggtatagtggaagttaaagaaatgaaaacgatgagatatcagtttaaagttagtcaattcaaattt

SEQ ID NO: 4279 - DNA, 96 bp, Staphylococcus aureus
atgtacatgtttaaacaatcaaaagtatacattattaaattatcattttcattcatcttttcaacaattgaggttaacgtagtaaaaaataagttt

SEQ ID NO: 4280 - DNA, 294 bp, Staphylococcus aureus
ttgactgtaaaagtaatatcactttcagaattgttaacaggtgataagcaagaggttaagcgaaagataccttcagttttaaatatactaaattcatttgagacaatatcaatttcaggaagtgaatcagcacacgatgttgatttatttttgaaaaataagtctatagcatttgatagacaaaacctgtctagaactcatttagttttttcacaattcaaaaacaaacaaatactagttggctattttacaattagcaataaacccttagttttttacaaaacgtatgttaga

SEQ ID NO: 4281 - DNA, 186 bp, Staphylococcus aureus
gtgagtagtatggctacaataagtattactactgattataaattcacaaaaaaatcagcgcaaaaactaatagatgcaatggagattaacgaaaataatagtaatgtgaacaaaacaaacataaaagcgactaaaataaaatcaacttgtgagattgaaaatctattgaaggattatcgaagtaat

SEQ ID NO: 4282 - DNA, 1224 bp, Staphylococcus aureus
gtgtctcgtgaaatgtcatatcattggtttaagaaaatgttactttcaacaagtatgttaattttaagtagtagtagtagtttagggcttgcaacgcacacagttgaagcaaaggataacttaaatggagaaaagccaacgactaatttgaatcataatgtaacttcaccatcagtaaatagtgaaatgaataataatgagactgggacacctcacgaatcaaatcaagctggtaatgaaggaactggttcgaatagtcgtgatgctaatcctgattcgaataatgtgaagccagactcaaacaaccaaaacccaagtccagattcaaaacctgacccaaataacccaaacccaggtccgaatccgaagccagacccagataagccgaaaccaaatccggaaccaaagccagacccagataagccgaaaccaaatccggatccaaaaccagatccagacaaaccgaagccaaatccggatccaaaaccagatccaaatccgaatccgaatccaaaaccagaccctaataagccaaatccaaatccgtctccaaatcccaatcaacctggggattccaatcaatctggtggctcgaaaaatggggggacatggaacccaaatgcttcagatggatctaatcaaggtcaatggcaaccaaatggaaatcaaggaaactcacaaaatcctactggtaatgattttgtatcccaacgatttttagccttggcgaatggggcttacaagtataatccgtatattttaaatcaaattaatcaattggggaaagaatatggtgaggtaactgatgaagatatctacaatatcatccgtaaacaaaacttcagcggaaatgcatatttaaatggattacaacagcaatcgaattactttagattccaatatttcaatccattgaaatcagaaaggtactatcgtaatttagatgaacaagtactcgcattaattactggcgaaattggatcaatgccagatttgaaaaagcccgaagataagccggattcaaaacaacgttcatttgagcctcatgaaaaagatgattttacagttgtaaaaaaacaagaagataataagaaaagtgcgtcaactgcatatagtaaaagttggctagcaattgtatgttctatgatggtggtattttcaatcatgctattcttatttgtaaagcgaaataaaaagaaaaataaaaacgaatcacagcgacga

SEQ ID NO: 4283 - DNA, 297 bp, Staphylococcus aureus
atgatgtggcgttgcggtgttatgggtggcatagcccgtggtattgatgccatgccgttacaattctatgatatgtcgttgggacgttgcaatgtgtattatgccgttgtgacgttattatttcacactgttacatgtatttgtgaattgctgtggaaatgttgcgacatatactgctacactgatgaatcattgtgtcaagatgacattgcaatgaagaatagcaactctgttattaaccactttttacatggtgaaatctcgttaatattatttcaaataaaaacagcagtagga

SEQ ID NO: 4284 - DNA, 159 bp, Staphylococcus aureus
ttgacggggccccaacataaagaaattggattcccaatttctacagacaatgcaagttgggggcggggccccaacacaaaagctggcggaaagtcagcttacattaatgtgcaagttggggtgggccccaacataaagaaatactttttctttagaaat

SEQ ID NO: 4285 - DNA, 147 bp, Staphylococcus aureus
atggctgtatataaatatgcaagacaaatttataaaataattgttcatgtacaatatcgatataattatgaaaaagacatttatgaatatttgaaatatgatataataaagcgattatgttttgaaaaaggtggaactctcaatgta

SEQ ID NO: 4286 - DNA, 96 bp, Staphylococcus aureus
atgactaaaaaacaagtaataatagtaattattaacaaatttgatgccattgtatttcaacattgtaagcgtatcgcaattaatgtattacaaacg

SEQ ID NO: 4287 - DNA, 465 bp, Staphylococcus aureus
ttgagtttgtgcgtttgctgctacaggtgctgctggttgcgctgctgctggagcattcgctggctgtgtttgatttgccggtgttgtattattattaggtgttgcttggttatttccttgacctgcttggttggcaggtgctgcttgatttccaggttgtgcttgtgcagcgttattcggatcagcttgattaccttgtccagctggttgtgctgtacctgctgccggttgtgctgcgcctcctgctggattagcctgtccaccttggtttgctggttgtgctgctggttgtccttggttggcaggtgcagctggctgtgctgtaggattagcttgagcaccagcatttgcgttaggctgtgcattggcatcagctggttgtgctggttgattttgtgcaggctgattttactctgctgcagacgctgttgtcgggttaatagatataaatgtaacagtggcaat

SEQ ID NO: 4288 - DNA, 114 bp, Staphylococcus aureus
gtgccatgtgagatttcttcatttttcaaagaattaattcctgtagtatttatcggcatcatgagtaaagaaactgaaaacattctaattgcatatacgactattaaatacgta

SEQ ID NO: 4289 - DNA, 486 bp, Staphylococcus aureus
atggtaaggaggacaatagttatgaattatcttaaacataagttttataatttattaacaacaattattgttctctttatctttgtgctttctggtgcgatattcttaacgtttttagggttcggactatatggattaagtagaattcttatttattttaggttaggtgacttcacatataacagaagtatgtacgacaatttgctatattatggtagttatattatatttggctactttatcgtatttgcagttgaacatttgatggattattttagaaaaatgttacctgaaaatgcttattttagaggtgcaacttttcatttaatctcttatatggttgcaacaacgttattttattttattattcatctgaactatgtgtatatcaacattgatttttgggtcatcatggttattataggctttttatatgtttgtaagctgcagttttaccctgaaagtaaaaatctaaataatagaaaa

SEQ ID NO: 4290 - DNA, 123 bp, Staphylococcus aureus
atgacatatatacccttttctattattacattaattacaggtatcattatgcatatgacaatgtactttgtaaaatttgaatgtcggaaaatgccattattcatgacgattatttttacaatc

SEQ ID NO: 4291 - DNA, 114 bp, Staphylococcus aureus
ttgttagcatatttgagaatgaggtctttagtcaatgacggtttgaaattgtcgttttatggcgggctgaaaatgctgttttatgacggtttgaaaatgctgtttttggcgatt

SEQ ID NO: 4292 - DNA, 180 bp, Staphylococcus aureus
ttgatagattctgtattttggaagaaagcttttattcctgtttattttattgttgcaatgctggtgtttctactttttaggttttatattaaaacaaataacttttctatatacttaatgattatcttcttaatgtgtttaggaactgcatctatcatttataactataaaaacaatcga

SEQ ID NO: 4293 - DNA, 285 bp, Staphylococcus aureus
ttggtcatcgaaagtccacctcctaaaattgtctattataatttgatttcgatgtctacaccagatggtaagtttaagcccattaaagcgtcaactgtttttggtgttgggtttacaatatcgattaaacgtttatgtgtacgttgttcgaattgttcacgtgaatctttatacttatgcacggcacggatgattgtgtataccgatttctcagttggtaacggaattggtccagaaacatctgcaccagaacgtttcgctgtttctacaatcttctctgctgat

SEQ ID NO: 4294 - DNA, 90 bp, Staphylococcus aureus
atggaatacaaacaacatcctttcaaagtatttacaattagtgtgaattactttgaagggattgttttttgtgaaaaaattatggagtgc

SEQ ID NO: 4295 - DNA, 195 bp, Staphylococcus aureus
atgaagggtgattcgatggcacaacgttacattaaagtattaatattatatatttttactacgcttttatcttcaattactgttacttcgaaatgtgtaccaaataaagttgttagatttattttgcgtacagtcgtaggctacggtatatttgcatatggtttacattacttttcaaatttaaaaaagaataag

SEQ ID NO: 4296 - DNA, 144 bp, Staphylococcus aureus
ctgggacacttcatacttgtctcaggattttttaacatattgaatcagcctcataacattaaattattttatcgtacaactgatttttataagagcaaagtatcgcatcatagtagatacacaaataataaaaatgaaacaatt

SEQ ID NO: 4297 - DNA, 90 bp, Staphylococcus aureus
ttgtcagggttcttctttatgaattatgagattgaatcttcaactaaaattacgccttcatatcaagtacatttctattcaatcaccctt

SEQ ID NO: 4298 - DNA, 111 bp, Staphylococcus aureus
ttgctagacagtttttacgacgacactttgaaaaaaattgaggcaaatcatttggaagtcttacgtgaattttgtacactcatcaagcaagtaattatattaaaagacaaa

SEQ ID NO: 4299 - DNA, 192 bp, Staphylococcus aureus
atgctagtagtatgtcgtagacctatgacaaatctgaattatgacgaagaccaatcaagaaaaacagcaccaagatcatttcaatttgaaagtactttactgctgttctttatttattacatttcaattttaataatgaccgtaatatcacgtgattgtcatttccttgcaatcacacctaaaaacactaat

SEQ ID NO: 4300 - DNA, 105 bp, Staphylococcus aureus
ttgaaaatgaaggattctaatatcatttcgtttatatatcgtggacatgatacagttatatataatcttgtaggtaatcatactaaaattcaatatagacatgac

SEQ ID NO: 4301 - DNA, 2919 bp, Staphylococcus aureus
ttgcatttaaagggagatattatagtgaaaaacaatcttaggtacggcattagaaaacataaattgggagcagcatcagtattcttaggaacaatgatcgttattgggatgggacaagataaagaagctgcagcatcagaacaaaagacaactacagtagaagaaaatgggaattcagctactgataataaagtaagcgaaacacaaacaactacaactaacgttaatactatagatgaaacacaatcatacagcgcaacagcaacagaacaaccgtcaaacgcaacacaagtaacaactgaagaagcaccaaaagcagtacaagcgccacaaactgcacaaccagcaaatgtagaaacagttaaagaagaggtagttaaggaagaagcgaaccctcaagttaaggaaacgacacaatctcaagacaatagcggagatcaaagacaagtagatttaacacctaaaaaggctacacaaaatcaagtagcagaaacacaagttgaagtggcacagccaagaacggcattagaaagtaagccacgtgtgacaagatcaacagatgtagcggaagctaaggaagctagtgacgcgaaagtggaaacgggtacagatgtgacaagtaaagttacagtggaagatgaaagtaaaattgaagcgccaaaaggaaataatgttcagcctcatgaagggcaacgtgtagtattaaagtataaactgaaatttcaagatgggttgaaaacaggcgattattttgattttacattatcaaataatgtaaatacacatggtgtagcaactacaagaaaagttccagatattaaaaatggatcattagttatggctaaaggtcaggtattagataatggccgaattagatatacatttactgattacatcaaagataaagtaaatgttacagctaatttagaaataaacttattcatagatcctaaaactgtacaaagcaatggacaacaaacaataacttcaaaattaaatggcaaagaaacatcaggaactatgcaaataacatataaagatggtgttaaaaatcaatatacaaatgtaaatggttcgattgaaacgtttgacaaagaaaaaaataaatttacacacgtagcatatattaagcctataaatggaaacaattcagatagtgttactgtaacgggtatgttgacacaaggaagtaatgagaatggaacacaaccaaatgttaaaatatatgagtatgttggagttgaaaatgggctaccacaaagtgtttatgcaaatacagtggacagcacacaattgaaagatgtaacgaatcaaatgggtgataaattgaaagtacaaaacaatggtagctactcattaaattttgacaaattagataaaacatatgtaattcattacaccggagattacttaaatggtacgagtgaagtgaactttagaactcaattaactggataccctgaaaatcgctataaaacatattattattataacaatggctatacattaacatgggataatggattagttttatatagtaataaagctaatggtgatggaaaatatggtccaatcgtagactccaataactttgagttctctgaagatagtggtaatggttcaatcagcggacaatacgatgcgaagcaaattattgaaacagaagaaaatcaagacaatacaccgcttgacattgattaccacacagctatagatggtgaaggtggttatgttgatggatacattgaaacaatagaagaaacggattcatcagctattgatatcgattaccatactgctgtggatagcgaagcgggtcacgttggaggatacactgagtcctctgaggaatcaaatccaattgactttgaagaatctacacatgaaaattcaaaacatcacgctgatgttgttgaatatgaagaagatacaaacccaggtggcggtcaggttactactgaatctaacttagttgaatttgacgaagagtctacaaaaggtattgtaactggcgcagtgagcgaccatacaacagttgaagatacgaaagaatatacaactgaaagtaatctgattgaactagtagatgaactacctgaagaacatggtcaagcacaagggccagtcgaggaaatcactgaaaacaatcatcatatttctcattctggtttaggaactgaaaatggtcacggtaattatggcgtgattgaagaaatcgaagaaaatagccatgttgatattaagagtgaattaggttacgaaggtggccaaaatagcggtaatcagtcattcgaggaagacacagaagaagacaaacctaagtatgaacaaggtggtaacatcattgatatcgacttcgacagtgtgccacaaattcatggattcaataagcataatgaaattattgaagaagatacaaacaaagataaacctaattatcaattcggtggacacaacagtgttgattttgaagaagatacacttccaaaagtaagcggtcaaaacgaaggtcaacaaacgattgaagaagatacaacgccgccaacaccaccgacaccagaggtaccaagtgagccaggcacaccaacaccgccaacgccagaagtgccaagtgagccaggtaagccaacaccaccaacaccagaggtaccagctgaacctggtaaaccagtaccacctgctaaagaagaacctaaaaagccttctaaaccagtggaacaaggtaaagtagtaacacctgttattgaaattaatgaaaaggttaaagcagtggcaccaactaaacaaaaacaagctaagaaatctgaactacctgaaacaggtggagaagaatcaacaaacaaaggtatgttgttcggcggattattcagcattctaggtttagcgttattacgcagaaataaaaagaatcacaaagca

SEQ ID NO: 4302 - DNA, 111 bp, Staphylococcus aureus
atgaaatctgctgagaaaaggactgcaaaagcaattagtaaacgaaaaagtatctttttatatttcatttttatctcccaagttaattttttctttattcaacgttattta

SEQ ID NO: 4303 - DNA, 138 bp, Staphylococcus aureus
atgacatttgaagtgggggtttttgcatggaagcgattatacaaaacatttttgcaatgtcacaaattttacatgaaaaatgaaaattatttaaataaagtattgcgagctacaattttaagggttatgatttttaag

SEQ ID NO: 4304 - DNA, 498 bp, Staphylococcus aureus
gtgacaagcatttttgtttttgcgtacttaaacaacacttcaggcaatatgttgtttaggcaacaaatgatatgtccgtgtttattggcaaacgtacgacatagtagtatagtatgtctaaacaacacatgtcgcatagttgatacgcgttgtttaaatactaagataggagggattggcgtgagcgagacagatgaacctcaagggtttgaacacacgcataacagattaaatattaatcagaatagtcagagtctaatgacattcattacaagtaaattgaagtcgaagttgaagcagcacataataattgctcgtggtaataagcgaatcgactatcgactgtcgtataacttttacactacgtattatgataatgtagaaatcaagaaaatcgactgtgaatatacctatgcgatggccattgcaattttaataagacacacgatgtcattcgacaatgctcatttctttgctcagttacgtcatcctgtctta

SEQ ID NO: 4305 - DNA, 111 bp, Staphylococcus aureus
atgtcaaacaacatggtcatccatagcaacatgaatgatatgaaaatagcagcaatgaaatggaacaatacctttaaacgcattcatatcacctcagagtcaaatggaata

SEQ ID NO: 4306 - DNA, 111 bp, Staphylococcus aureus
atgtatagaaatatcaatatgaaaaataatatgattaaaaataatgaatggcatacttataaagtgtctaaatattggtggtcaatattacttgcaaatacgaatgttaag

SEQ ID NO: 4307 - DNA, 471 bp, Staphylococcus aureus
ttgaaaaaatttcttattactgttgttatcatcttgttaattggtgcacttggattcgctatttatgctgcaataaatcattctacatcatcaaatcataataatgagcaagataataaagctacccatcaaaagaaagatactgaagtaaatcatcaaaaagacgagaatacaaacaacacaaatgaaaatcaaaacagcaacaacggtgttactaatggcaatcaatcatctacgccatcaactgtccaaaataacggttcaacagcaccagcgaatacacaaccatctaatccgaatcaatcaaattcaaatcaatcaaattcaaatcagggcggtagcagtcaaccttcaacgaataaccaaaatcataaacaacagaatacaccggccccaaacaaatctaataatgctaatacaaacgagtcttctaagcaggcatcaccatcacaaccgcaatcatctaaaaat

SEQ ID NO: 4308 - DNA, 1887 bp, Staphylococcus aureus
atgttgatggctaaatatcgagggaaaccgtttcaattatatgtaaagttatcgtgttcgacaatgatggcgactagtatcattttaacgaatatcttgccgtacgatgcccaagctgtatctgaaaaggatactgaaatttcaaaagagctattatctaagcaagatttattagacaaagttgacaaagcaaatcgtcaaattgagcaattaaaacagttatcggcttcatctaaagcacattataaagcacaactaaatgaagcgaaaacagcatcgcaaatagatgaaatcataaaacgagctaatgagttggatagcaaagacaataaaggttctcaaattgaaatgaacggtcgaagtgatatagacagtaaattagatcaattgcttaaagatttaaatgaggtttcttcaaaggttgataggggtcaacaaagtgacgaggacgatcttaatgcaatgaaaaatgatatgtcacaaacggctacaacaaaacatggagaaaaagatgataaaaatgatgaagcaatggtaaataaggcgttagaagacttagaccatttgagtcagcaaatacacaaatcggaagattcagcagtgtctacaacagataataatcatgaagtagctaaaacgccaaataatgatggttctggacatgttgtgttaaataaatttctttcaaatgaagagaatcaaagccatagtaatcgactcactgataaattacaaggaagcgataaaattaatcatgctatgattgaaaaattggccaaaagtaatgcctcaacgcaacattacacatatcataaactgaatacattacaatctttagatcaacgtattgcaaatacgcaacttcctaaaaatcaaaaatcagacttaatgagcgaagtaaataagacgaaagagcgtataaaaagtcaacgaaatattattttggaagaacttgcacgtactgatgataaaaagcatgctacacaacgcattttagaaagtatatttaataaagacgaggcagataaaattctaaaagatatacgtgttgatggtaaaacagatcaacaaattgcagatcaaattactcgtcatattgatcaactatctctgacaacgagtgatgatttattaacgtcattgattgatcaatcacaagataagtcgctattgatttctcaaattttacaaacgaaattaggaaaagctgaagcagataaattggctaaagattggacgaataaaggattatcaaatcgccaaatcgttgaccaattgaagaaacattttgcatcaactggcgacacgtcttcagatgatatattaaaagcaattttgaataatgccaaagataaaaaacaagcaattgaaacgattttagcaacacgtatagaaagacaaaaggcaaaattactggcagatttaattactaaaatagaaacagatcaaaataaaatttttaatttagttaaatcggcattgaatggtaaagcggatgatttattgaatttacaaaagagactcaatcaaacgaaaaaagatatagactatgttttatcaccaatagtaaatcgtccaagtttactagatcgattgaataaaaatgggaaaacgacagatttaaataagttagcaaatttaatgaatcaaggatcaaatttattagacagtattccagatatacccacaccaaagccagaaaagacgttaacacttggtaaagggaatggattgttaagtggattattaaatgctgatggtaatgtatctttgcctaaagcgggggaaacgataaaagaacattggttgccgatatctgtaattgttggtgcaatgggtgtactaatgatttggttatcacgacgcaataagttgaaaaataaagca

SEQ ID NO: 4309 - DNA, 420 bp, Staphylococcus aureus
ttgctcattgaagtcgagttagacatacttgttgatgttgagtcagaaatgctttgtgaaccagacatagatgtactcagcgattcggatgtgcttgtcgaatcggatgtgctcaatgacattgatgtgcttgttgacactgattctgagtcgctaattgatgttgaatcggatttgtcttgtgacattgaaacacttgttgaatcggattcactcattgatgttgagtcagatacgctcgttgaatctgaaccagacatacttagcgattcagatgtgcttgttgatgttgaaccacttgttgagccagatgtacttgttgagacactttgtgatattgattcactcgatgcagttgatgctgatttgctatcacttgttgaatcactaaacgacgttgatatgcttgttgaatcgaat

SEQ ID NO: 4310 - DNA, 189 bp, Staphylococcus aureus
atgaaatttagagaattagtaaaacaatcatacgaggatttaaaaaacttgactgtaacttggtataacgttattgctttagcaattattgttattgtcttaagcaccgttacaacaccaattataggtattccagctggtttattaggtggcgcttattatttaaaacgccgcgaagaaaaaggtaaa

SEQ ID NO: 4311 - DNA, 126 bp, Staphylococcus aureus
atgatatttgctaatgcaccaagcttaggtatacaaccacatataagtaataacacgaccatgccgtatataacattatttttcttagcgccggataaagaaacaagtcctacattttgcgaatag

SEQ ID NO: 4312 - DNA, 120 bp, Staphylococcus aureus
atggcagcagtcgtaccaattgaagtacctactactaattttgtgaatggtacaatcgcaattaacaaaataataaatggtagtgaccttaaaatattgattataggatttaaaacttga

SEQ ID NO: 4313 - DNA, 165 bp, Staphylococcus aureus
atgattgctagtataaattgtgtaaacagtgtattaattaatacaaatgaccctgccaaaattgcaattaaaggtatgattggatataacggtactttatatggtcgctccatatttggttcgcgtttccttaaaattattaccgcaacaaatgacatacaatag

SEQ ID NO: 4314 - DNA, 111 bp, Staphylococcus aureus
atgatcaaaatggatacagcaatccgtttgcgaccaaaagcatcggataaaggtccaaagataaattggcctagtgcaagaccaatcattgtgaatgataatgttaattga

SEQ ID NO: 4315 - DNA, 129 bp, Staphylococcus aureus
atgtattccccaataggccaaagccatggtttaggaataggtgaaaaggccgacccttggttggtggccggtaaaaatttaaaaaataatgttttaaatgtagaccaagaatccctccccaagccataa

SEQ ID NO: 4316 - DNA, 99 bp, Staphylococcus aureus
atgtatggagatgcggggcatttatcgagtagattacaattagagcatgtaggtgatttgctttttcatgcaagtaaagataaacttttaaaaatccta

SEQ ID NO: 4317 - DNA, 123 bp, Staphylococcus aureus
atgattcaagatgatattgagggaaggatgagaatgtgtctttcaggtagctcatttgatgataaccttaaacataatatttactttcatcctgctgaaaaagaggttacagtttcaagccga

SEQ ID NO: 4318 - DNA, 189 bp, Staphylococcus aureus
ctggatataaatggaattcaacagttactcccgcttctgttaatgctcattgtcttatctcgaaaccgatcaagtgatccgactgtcgtatgtgtagatggtaaatcactaaagtctgtttcaagaattggtactgcatacttcggtgtatctccttcaacacctttaagatacatagaccatgcaaac

SEQ ID NO: 4319 - DNA, 108 bp, Staphylococcus aureus
atggttagattatataaaaatggtaagcctaggaatgaaattatacgcgagtatgatttaacaccttccgcgttagggaaatggataaagcaacatcaaaacacaggt

SEQ ID NO: 4320 - DNA, 138 bp, Staphylococcus aureus
gtgatattcccgatagaaaaacaggacttgaacttgcagaaaaatatggcattgatgaacacacaatcaattgcagaagcacgagcactactagatgaatttgaagcccaaatggacgaagacgttaaaatagaatta

SEQ ID NO: 4321 - DNA, 1536 bp, Staphylococcus aureus
ttgcaatacataattcgttatattatgatgactttacaaatacatacagggggtattaatttgaaaaagaaaaacatttattcaattcgtaaactaggtgtaggtattgcatctgtaactttaggtacattacttatatctggtggcgtaacacctgctgcaaatgctgcgcaacacgatgaagctcaacaaaatgctttttatcaagtgttaaatatgcctaacttaaacgctgatcaacgtaatggttttatccaaagccttaaagatgatccaagccaaagtgctaacgttttaggtgaagctcaaaaacttaatgactctcaagctccaaaagctgatgcgcaacaaaataacttcaacaaagatcaacaaagcgccttctatgaaatcttgaacatgcctaacttaaacgaagcgcaacgcaatggtttcattcaaagtcttaaagacgatccaagccaaagcactaacgttttaggtgaagctaaaaaattaaacgaatctcaagcaccgaaagctgacaacaatttcaacaaagaacaacaaaatgctttctatgaaatcttgaacatgcctaacttgaacgaagaacaacgcaatggtttcatccaaagcttaaaagatgacccaagtcaaagtgctaacctattgtcagaagctaaaaagttaaatgaatctcaagcaccgaaagcggataacaaattcaacaaagaacaacaaaatgctttctatgaaatcttacatttacctaacttaaacgaagaacaacgcaatggtttcatccaaagcttaaaagatgacccaagccaaagcgctaaccttttagcagaagctaaaaagctaaatgatgcacaagcaccaaaagctgacaacaaattcaacaaagaacaacaaaatgctttctatgaaattttacatttacctaacttaactgaagaacaacgtaacggcttcatccaaagccttaaagacgatccttcagtgagcaaagaaattttagcagaagctaaaaagctaaacgatgctcaagcaccaaaagaggaagacaacaacaaacctggtaaagaagacggcaacaaacctggtaaagaagacggcaacaaacctggcaaagaagacaacaacaagcctggcaaagaagacggcaacaaacctggtaaagaagacaacaaaaaacctggtaaagaagatggcaacaagcctggcaaagaagacaacaacaaacctggtaaagaagacggcaacggagtacatgtcgttaaacctggtgatacagtaaatgacattgcaaaagcaaacggcactactgctgacaaaattgctgcagataacaaattagctgataaaaacatgatcaaacctggtcaagaacttgttgttgataagaagcaaccagcaaaccatgcagatgctaacaaagctcaagcattaccagaaactggtgaagaaaatccattcattggtacaactgtatttggtggattatcattagcgttaggtgcagcgttattagctggacgtcgtcgcgaacta

SEQ ID NO: 4322 - DNA, 108 bp, Staphylococcus aureus
gtgatattttcagataaaatgtctctattaattaataagtttaaaacaaggaacattcgttatattcttgataagatgaatttaacaaatgagccttttctaatgaaa

SEQ ID NO: 4323 - DNA, 753 bp, Staphylococcus aureus
ttgaggcgtaaaaggaaatggctaattgttatttgtgtattattagtattgattacgatatcacaaattttgaaacattttaactatggaactgagagtaaagaagcatacaatacatatacggttgaaaaagaaagacaattagatttacaaggtaaggcatatccacgtgaagttaaaacatattataaaaataatcaggttggaacatatttgggtgtgcaagtagcggacgggcaaacagtcaaaaaaggagacaaagttaacttaagtattacgagtacgggtaaaacaggagcggggattataaaacaaatctctgagttgcctattagttatgaagagaatttaagtcttcacgaaaatgatgccctgcatttaccagaaagtaacaacgatggggaattagcaaattcaaaatcgatttcggcatctccaatatttaagagtaataacaactctgaattatcaaagtatggagttataattgatgatcttagtctaccaatacgtgcaggttattcgttggaaattaaagtcccattaaatgcgattaaaatacctaaatcagtattaacaaaaggcaataatgtttttattgttaataaaaatagtattgtggaaaaacggaatattcgtataaaaagaatcaatggtgacattattgtagaaaaggggttaaaacctggagacaagttaattaaacaacctaaaagtacaatgaatgatggtgataaggttgagatttcgtca

SEQ ID NO: 4324 - DNA, 132 bp, Staphylococcus aureus
atgttaatacgtagtattaatggcaagactcctgagggagcagtgccagtcgaagacaggggccccaacacagaagctgacgaaaagtcagcttacaataatgtgcaagttggggtggctgagacggcaccc

SEQ ID NO: 4325 - DNA, 156 bp, Staphylococcus aureus
ttggaaaaactatgggaaaaagcaatcaagtctgggaagtcaatagaaaatgttaaagttgaagttaaatataaaggtaatagtcaaaggccaaccgaattttcagttagatataatattaatggtgagcagtttttaaaaaatataattaataaa

SEQ ID NO: 4326 - DNA, 525 bp, Staphylococcus aureus
atgaagctgaacaatagaggcgataacatgactttcgaagaaaaacaaagtgaaatgtacaataaaattgcaaatgagattagtggaatgataccggttgagtgggaaaaggtatatacaattgcttatgtagataatcaaggtggagaggtcatttttaattatactaaacctggaagtgaagaattgaattattattcagatattcctaaagattgcaatgtctcaaatgatatttttatggatttatggatgaaagtttatcgaatgtttgatgagttaagagaaacttttaaaaaagaaggacatgaaccatggacatcatgtgaatttgattttacaagagatggtaaattgaaagtatcttttgattatatagattggttaaatacagaatttgatcaattgagtcttgaaaattattatatgtacaaaaaattcgaggttataccagaaatggaatataaaatggaagaaattaaagaaatcgaacaatatattaaagagcaagaagaagctgaaata

SEQ ID NO: 4327 - DNA, 201 bp, Staphylococcus aureus
gtgcgtaatcgattgaaagaattacgagcacgagatggcttaaaccaaacgcagcttgccaaactagcgggtgtttcaagacaaaccatttcgctaattgagcgaaataactttatgccatcggtattaactgcaataaagattgctcgtatcttcaatgaaacggtggaaactgtttttattattgaggaggatgaggta

SEQ ID NO: 4328 - DNA, 96 bp, Staphylococcus aureus
atggatagtgaatttaaggcaattaaaaaagcatcaaacagtaatatgctgcttgatgcccaaatgatgactttagctaaattgattagtcacttt

SEQ ID NO: 4329 - DNA, 102 bp, Staphylococcus aureus
atgtttgcgagccatcatgtgcaatattacgatgaaaatcaccaatacaataatattaatcagtgtaagaaaagcattcatgaacgtcactcctcaaatttt

SEQ ID NO: 4330 - DNA, 183 bp, Staphylococcus aureus
ttggtgcgattggtatgggcaacatcatgtgatgaaatgatgggagttatatctgtagaaattggcgtaccaatttctttatgttggggctccgcagtcaactactaccaatataagattgtagagcctacgatttggattttatgtcctgggatcggtttcctattcttattaaatagtatt

SEQ ID NO: 4331 - DNA, 150 bp, Staphylococcus aureus
ttgtttgtctgtatttcatttgcgttagttaaaggtgaaacagacgttaataaaacggcagtcaagactagtgaaccaatagcttttgtgattttcattatacatttatctcctttaatagtgaatttgcaaaaccaaatgtttgaaata

SEQ ID NO: 4332 - DNA, 129 bp, Staphylococcus aureus
atgccacttaacacaattattaaaagtaatgtaactatgaaagaagtccaagctaatacaagtgaacatattaaaagtactaatgaagtgactgtttgtaagaacccaaaaagtaaagattccattata

SEQ ID NO: 4333 - DNA, 255 bp, Staphylococcus aureus
gtgaaaaatttattagttactggctacacaactggaattttgaaaatcatagggcaaatgttacttgctgtagcaattttttcactaactatttattttgcttatataatggaatctttactttttgggttcttacaaacagtcacttcattagtacttttaatatgttcacttgtattagcttggacttctttcatagttacattacttttaataattgtgttaagtggcattttctattttggtgaaaacgat

SEQ ID NO: 4334 - DNA, 96 bp, Staphylococcus aureus
ctgttaagagtcgttaatttatttaaatctattaagattgttagagattattatgcgctgggaaacgccactgttacagtggaagaggaatttgga

SEQ ID NO: 4335 - DNA, 96 bp, Staphylococcus aureus
gtgtggagcacaacggaatcagttttatttaacgaacattatagattccttaatttacttaataatgattcaatgattattaaacatggtttaatg

SEQ ID NO: 4336 - DNA, 108 bp, Staphylococcus aureus
gtgctatcacagtgcctaaatttaatgttcgtttttgatttcattgaactttatttcttatttgtaaaagttacgcaatatgatggtgaaacatctgaaataaacaaa

SEQ ID NO: 4337 - DNA, 147 bp, Staphylococcus aureus
atggcacctttagaatatgacacaactacagctagatcattattaagcaaattattagttcgagcaactaagaaatggccaaccgataagtcgtttaataatcacttagctcacatctcctttaaagcgttaaagcgtctacgtgtt

SEQ ID NO: 4338 - DNA, 117 bp, Staphylococcus aureus
gtgtttgaagcagtgaatgtagatccaaatgatgggttcgcaatgttagattggacatcatggcgattaagttacactataatgttagaacgtcacacattgacttacacaagttta

SEQ ID NO: 4339 - DNA, 216 bp, Staphylococcus aureus
atgctttcagcacttatcccgtccatggaacatacaatagcggtcattctgggtagttttgaccccattacttatggtcatttagacattattgagagaagtacagatagatttgatgggattcatgtctgtgttcttaagaatagtaaaaaagaaggtacgtttagtttagaagagcgtatggatttaattgaacgtctgttaaacctaattagt

SEQ ID NO: 4340 - DNA, 4095 bp, Staphylococcus aureus
atgctaaacagagaaaataaaacggcaataacaagaaaaggcatggtatccaatcgattaaataaattttcgattagaaagtacacagtgggaacagcatcaattttagtaggtacaacattaatttttggtctggggaaccaagaagcaaaggctgcagaaagtactaataaagaattgaacgaagcgacaacttcagcaagtgataatcaatcgagtgataaagttgatatgcagcaactaaatcaagaagacaatactaaaaatgataatcaaaaagaaatggtatcatctcaaggtaatgaaacgacttcaaatgggaataaatcaatagaaaaagaaagtgtacaatctaccactggaaataaagttgaagtttcaactgccaaatcagatgagcaagcttcaccaaaatctacgaatgaagatttaaacactaaacaaactataagtaatcaagaagcgttacaacctgatttgcaagagaataaatcagtggtaaatgctcaaccaactaatgaggaaaacaaaaaggtagatgccaaaactgaatcaactacattaaatgttaaaagtgatgctatcaagagtaatgctgaaactcttgttgataacaatagtaattcaaataatgaaaataatgcagatatcattttgccaaaaagtacagcacctaaacgtttgaatacaagaatgcgtatagcagcagtacagccatcatcaacagaggctaaaaatgttaatgatttaattacatcaaatacaacattaactgtcgttgatgcagataaaaacaataaaatcgtaccagcacaagattatctagaattaaaatcacaaattaaagttgatgacaaagttaaatcaggtgattatttcacaataaaatactcagatacagtacaagtatatggattgaatccggaagatattaaaaatattggagatattaaagatccaaataatggtgaaacaattgcgactgcaaaacatgatactgcaaataatttaattacatatacatttacagattatgtcgatagatttaattctgtacaaatgggaattaattattcaatttatatggatgctgatacaattcctgttagtaaaaacgatgttgagtttaatgttacgataggtaatactacaacaaaaacaactgctaacattcaatatccagattatgttgtaaatgagaaaaattcaattggatcagcgttcactgaaacagtttcacatgttggaaataaagaaaatccagggtactataaacaaacgatttatgtaaatccatcggaaaattctttaacaaatgccaaactaaaagttcaagcttaccactcaagttatcctaataatatcgggcaaataaataaagaggtaacagatataaaaatatatcaagttcctaaaggttatacattaaataaaggatacgatgtgaatactaaagagcttacagatgtaacaaatcaatacttgcagaaaattacatatggcgacaacaatagcgctgttattgattttggaaatgcagattctgcttatgttgtaatggttaatacaaaattccaatatacaactagcgaaagcccaacacttgttcaaatggttacattaagttcaaacaatagtaaatctgcctcaatgggtaatgctttaggattcactaataaccaaagtggcggagctggtcaagaagtatataaaattggtaactacgtatgggaagatactaataaaaacggtgttcaagaattaggagaaaaaggcgttggcaatgtaactgtaactgtatttgataataatacaaatacaaaagtaggagaagcagttactaaagaagatgggtcatacttgattccaaacttacctaatggagattaccgtgtagaattttcaaacttaccaaaaggttatgaagtaaccccttcaaaacaaggtaataacgaagaattagattcaaacggcttatcttcagttattacagttaatggcaaagataacttatctgcagacttaggtatttacaaacctaaatacaacttaggtgactatgtctgggaagatacaaataaaaatggtatccaagaccaagatgaaaaaggtatatctggcgtaacggtaacattaaaagatgaaaacggtaacgtgttaaaaacagttacaacagacgcagatggcaaatataaatttactgatttagataatggtaattataaagttgaatttactacaccagaaggctatacaccgactacagtaacatctggtagcgacattgaaaaagactctaatggtttaacaacaacaggtgttattaatggtgctgataacatgacattagatagtggattctacaaaacaccaaaatataatttaggtaattatgtatgggaagatacaaataaagatggtaagcaggattcaactgaaaaaggtatttcaggcgtaacagttacattgaaaaatgaaaacggtgaagttttacaaacaactaaaacagataaagatggtaaatatcaatttactggattagaaaatggaacttataaagttgaattcgaaacaccatcaggttacacaccaacacaagtaggttcaggaactgatgaaggtatagattcaaatggtacatcaacaacaggtgtcattaaagataaagataacgatactattgactctggtttctacaaaccgacttacaacttaggtgactatgtatgggaagatacaaataaaaacggtgttcaagataaagatgaaaagggtatttcaggtgtaacagttacgttaaaagatgaaaacgacaaagttttaaaaacagttacaacagatgaaaatggtaaatatcaattcactgatttaaacaatggaacttataaagttgaattcgagacaccatcaggttatacaccaacttcagtaacttctggaaatgatactgaaaaagattctaatggtttaacaacaacaggtgtcattaaagatgcagataacatgacattagacagtggtttctataaaacaccaaaatatagtttaggtgattatgtttggtacgacagtaataaagacggcaaacaagattcaactgaaaaaggtatcaaagatgttaaagttactttattaaatgaaaaaggcgaagtaattggaacaactaaaacagatgaaaatggtaaatatcgtttcgataatttagatagcggtaaatacaaagttatttttgaaaagcctgctggcttaacacaaacaggtacaaatacaactgaagatgataaagatgcagatggtggcgaagttgacgtaacaattacggatcatgatgatttcacacttgataacggatacttcgaagaagatacatcagatagcgactcagattcagatagcgactcagactcagacagcgactcagattcagacagcgactcagactcggatagcgattcagattcagacagtgattcagattcagacagcgattcggattcagacagcgactcagactcggatagcgactcagactcagatagcgattcagattcagatagcgattcggactcagacagtgattcagattcagacagcgactcagattcagatagcgattcagactcagacagtgattcagattcagatagcgactcagactcagatagcgattcagaatcagacagcgattcagacagcgactcagactcggatagcgactcagactcagacagcgattcagactcggatagcgattcagattcggacagcgactcagactcagacagtgattcagattcagatagcgactcagactcagatagcgactcagattcagacagcgattcagactcagatagtgactcagattcggacagcgattcagactcagatagcgactcagattcagactcagatgcaggtaagcacacacctgttaaaccaatgagtactactaaagaccatcacaataaagcaaaagcattaccagaaacaggtaatgaaaatagcggctcaaataacgcaacgttatttggcggattattcgcagcattaggatcattattgttattcggtcgtcgtaaaaaacaaaataaa

SEQ ID NO: 4341 - DNA, 159 bp, Staphylococcus aureus
ctggaagatgtgtttatttataaaacaacaagttttgatatttataatggtagtagttattcagtcaactacgaccaatatatcattgtagagtttaggaaattgatttatgactcaggcacatcaaatgagaagatttataaaagagatatacaactc

SEQ ID NO: 4342 - DNA, 99 bp, Staphylococcus aureus
atgtgtcaatacttatgtttgagaactattgaattaggtgtgtttattgtgatgatttattgtttgaaagttgttgcattaacggtgagattgcacaat

SEQ ID NO: 4343 - DNA, 144 bp, Staphylococcus aureus
gtgtcatcaaacaaaattcaaactattattgtgttcaatgtgaaagtacaaatccaaagcatttttatcagtatgattcctcagtacattccaagaaaattgtatattgcagaaattgtatatcactgggtcgaatggataatg

SEQ ID NO: 4344 - DNA, 108 bp, Staphylococcus aureus
atgaatgtcactatgcttgcgaatcccgcaattgaccatgctgtagtgaagtatagaaacggcatgagtacaattgctaagactgtgaagcacagtactgctattaag

SEQ ID NO: 4345 - DNA, 102 bp, Staphylococcus aureus
gtgaatttgatgcaacattggaaacaaacaggattgaaccttacagcgagaagggaaagaggtgttgtatcatttgttgcatcaatgttgcatcaccaaaaa

SEQ ID NO: 4346 - DNA, 3750 bp, Staphylococcus aureus
atggcgaaaaaattcaattacaaactaccatcaatggttgcattaacgcttgtaggttcagcagtcactgcacatcaagttcaagcagctgagacgacacaagatcaaactactaataaaaacgttttagatagtaataaagttaaagcaactactgaacaagcaaaagctgaggtaaaaaatccaacgcaaaacatttctggcactcaagtatatcaagaccctgctattgtccaaccaaaaacagcaaataacaaaacaggcaatgctcaagtaagtcaaaaagttgatactgcacaagtaaatggtgacactcgtgctaatcaatcagcgactacaaataatacgcagcctgttgcaaagtcaacaagcactacagcacctaaaactaacactaatgttacaaatgctggttatagtttagttgatgatgaagatgataattcagaaaatcaaattaatccagaattaattaaatcagctgctaaacctgcagctcttgaaacgcaatataaagccgcagcacctaaagctgcaactacatcagcacctaaagctaaaactgaagcgacacctaaagtaactacttttagcgcttcagcacaaccaagatcagttgctgcaacaccaaaaacgagtttgccaaaatataaaccacaagtaaactcttcaattaacgattacattcgtaaaaataacttaaaagcacctaaaattgaagaagattatacatcttacttccctaaatacgcataccgtaacggcgtaggtcgtcctgaaggtatcgtagttcatgatacagctaatgatcgttcgacgataaatggtgaaattagttatatgaaaaataactatcaaaacgcattcgtacatgcatttgttgatggggatcgtataatcgaaacagcaccaacggattacttatcttggggtgtcggtgcagtcggtaaccctagattcatcaatgttgaaatcgtacacacacacgactatgcttcatttgcacgttcaatgaataactatgctgactatgcagctacacaattacaatattatggtttaaaaccagacagtgctgagtatgatggaaatggtacagtatggactcactacgctgtaagtaaatatttaggtggtactgaccatgccgatccacatggatatttaagaagtcataattatagttatgatcaattatatgacttaattaatgaaaaatatttaataaaaatgggtaaagtggcgccatggggtacgcaatctacaactacccctactacaccgtcgaaaccatcaactggtaaattaacagttgctgcaaacaatggtgtcgcacaaatcaaaccaacaaatagtggtttatatactactgtatacgacaaaactggtaaagcaactaatgaagttcaaaaaacatttgctgtatctaaaacagctacattaggtaatcaaaaattctatcttgttcaagattacaattctggtaataaatttggttgggttaaagaaggcgatgtggtttacaacacagctaaatcacctgtaaatgtaaatcaatcatattcaatcaaacctggtacgaaactttatacagtaccttggggtacatctaaacaagttgctggtagtgtgtctggctctggaaaccaaacatttaaggcttcaaagcaacaacaaattgataaatcaatttatttatatggctctgtgaatggtaaatctggttgggtaagtaaagcatatttagttgatactgctaaacctacgcctacaccaacacctaagccatcaacacctacaacaaataataaattaacagtttcatcattaaacggtgttgctcaaattaatgctaaaaacaatggcttattcactacagtttatgacaaaactggtaagccaacgaaagaagttcaaaaaacatttgctgtaacaaaagaagcaagtttaggtggaaacaaattctacttagttaaagattacaatagtccaactttaattggttgggttaaacaaggtgacgttatttataacaatgcaaaatcacctgtaaatgtaatgcaaacatatacagtaaaaccaggcactaaattatattcagtaccttggggcacttataaacaagaagctggtgcagtttctggtacaggtaaccaaacttttaaagcgactaagcaacaacaaattgataaatctatctatttatttggaactgtaaatggtaaatctggttgggtaagtaaagcatatttagctgtacctgctgcacctaaaaaagcagtagcacaaccaaaaacagctgtaaaagcttatactgttactaaaccacaaacgactcaaacagttagcaagattgctcaagttaaaccaaacaacactggtattcgtgcttctgtttatgaaaaaacagcgaaaaacggtgcgaaatatgcagaccgtacgttctatgtaacaaaagagcgtgctcatggtaatgaaacgtatgtattattaaacaatacaagccataacatcccattaggttggttcaatgtaaaagacttaaatgttcaaaacttaggcaaagaagttaaaacgactcaaaaatatactgttaataaatcaaataacggcttatcaatggttccttggggtactaaaaaccaagtcattttaacaggcaataacattgctcaaggtacatttaatgcaacgaaacaagtatctgtaggcaaagatgtttatttatacggtactattaataaccgcactggttgggtaaatgcaaaagatttaactgcaccaactgctgttaaaccaactacatcagctgccaaagattataactacacttatgtaattaaaaatggtaatggttattactatgtaacaccaaattctgatacagctaaatactcattaaaagcatttaatgaacaaccattcgcagttgttaaagaacaagtcattaatgaacaaacttggtactatggtaaattatctaacggtaaattagcatggattaaatcaactgatttagctaaagaattaattaagtataatcaaacaggtatgacattaaaccaagttgctcaaatacaagctggtttacaatataaaccacaagtacaacgtgtaccaggtaagtggacagatgctaactttaatgatgttaagcatgcaatggatacgaagcgtttagctcaagatccagcattaaaatatcaattcttacgcttagaccaaccacaaaatatttctattgataaaatcaatcaattcttaaaaggtaaaggtgtattagaaaaccaaggtgctgcatttaacaaagctgctcaaatgtatggcattaatgaagtttatcttatctcacatgccctattagaaacaggtaacggtacttctcaattagcgaaaggtgcagatgtagtgaacaacaaagttgtaactaactcaaacacgaaataccataacgtatttggtattgctgcatatgataacgatcctttacgtgaaggtattaaatatgctaaacaagctggttgggacacagtatcaaaagcaatcgttggtggtgctaaattcatcggcaactcatatgtaaaagctggtcaaaatacactttacaaaatgagatggaatcctgcacatccaggaacacaccaatatgctacagatatagattgggctaacatcaatgctaaaatcatcaaaggctactatgataaaattggcgaagtcggcaaatacttcgacatcccacaatataaa

SEQ ID NO: 4347 - DNA, 117 bp, Staphylococcus aureus
ttgtacatcattttaatgtatacatgtgcatacgtattaattcgtatgtttaaaaataaaccggcgtatgaagatgtaaatcgtttagccaagaagcaaggaggagaaatagaaaaa

SEQ ID NO: 4348 - DNA, 159 bp, Staphylococcus aureus
ttggctaaacgatttacatcttcatacgccggtttatttttaaacatacgaattaatacgtatgcacatgtatacattaaaatgatgtacaatatgccaaataaaattgtaacgaaggttattccgcctgcttgtgttgctgattatgccacgcgcata

SEQ ID NO: 4349 - DNA, 108 bp, Staphylococcus aureus
gtgtctcatcagcacttatacactagtcaaaaaattcatgcctctactttttcgaatttcaaaaataaaaccacacaacaaaaaagacaccatttgaatgttggtgtc

SEQ ID NO: 4350 - DNA, 90 bp, Staphylococcus aureus
atgaattttagtacacttttcatattttggaaagacaagttaattattttacctcctacaatagctttacaaaacaaagaaaattttaat

SEQ ID NO: 4351 - DNA, 117 bp, Staphylococcus aureus
ttgtctcaccaattgccaacatgtggcactgtggtacttctacaccaaggatgcataggtggcgcattcacacctggtatcatatctttaactttaaatactttgccgttgagcgaa

SEQ ID NO: 4352 - DNA, 138 bp, Staphylococcus aureus
gtgtttaaaattgaacttaggaaatcgataggtttagatgaagattttgttgaaggtatgtgtcttgtatccttagttgttataaaagcgcaaaaaatggcatcactttatctttatctgtgtagaaaggatgctatt

SEQ ID NO: 4353 - DNA, 102 bp, Staphylococcus aureus
gtgaatgatgtggatgcatatgttttaaaagaacgttctatagaagaattggtggaaaccattaataaagtaaatacggagagaaagaatatagcgccacat

SEQ ID NO: 4354 - DNA, 237 bp, Staphylococcus aureus
ttgatgagatttgtctttgatattgatggtacgctttgttttgacggccgattaattgaccagactattattgatacattgttacaattacaacatgatggtcatgaacttatatttgcatcagcacacattaattggcgcaaatggtgctatgatttcacagcaatcaaagatttctgttatcaaaccaattcatacagatacatatcaccatatcttaaaaataattcaaaagta

SEQ ID NO: 4355 - DNA, 102 bp, Staphylococcus aureus
gtgttagtaattataattggtgaaattacagatttagcgttattattaatatattcaaggttgaatcttactaatggatctccgacgttaactcgtcaccac

SEQ ID NO: 4356 - DNA, 5736 bp, Staphylococcus aureus
ctgttgcagaagcacaaggtaatgaacaaaaagcaaacaatgttgatgcagcaatggacaaattacgtcaaagtattgcagataatgcgacaacaaaacaaaaccaaaattatactgattaataatgcaacaactcgtgataaagtggctgaaatcattgcacaagcgcaagcattaaatgaagcgataaaagcattaaaagaaagtattaaggatcaaccacaaactgaagcaagtagtaaatttattaacgaggatcaagcgcaaaaagatgcttatacgcaagcagtacaacacgcgaaagatttgattaacaaaacaactgatcctacattagccaaatcaatcattgatcaagcgacacaggcagtgactgatgctaaaaacaatttacatggtgatcaaaaactagctcaagataagcaacgtgcaacagaaacgttaaataacttgtctaacttgaatacaccacaacgtcaagcacttgaaaatcaaatcaataatgcagcaactcgtgtcgaagtagcacaaaaattaactgaagcacaagcacttaaccaagcaatggaagctttacgtaatagcattcaagatcaacagcaaacggaagcgggtagcaagtttatcaatgaagataaaccacaaaaagatgcttaccaagcagcagttcaaaatgcaaaagatttaattaatcaaactaacaatccaacgcttgataaagcacaagttgaacaattgacacaagctgttaaccaagctaaagataacctacacggtgatcaaaaacttgcagacgataaacaacatgcggttactgatttaaatcaattaaatggtttgaataatccgcaacgtcaagcacttgaaagccaaataaacaacgcagcaactcgtgatgaagtagcgcaaaaattagctgaagcaaaagcgcttgatcaagcaatgcaagcattacgtaatagtattcaagatcaacaacaaacagaatctggtagcaagtttatcaatgaagataaaccgcaaaaagatgcttaccaagcagcagttcaaaatgcaaaagatttaattaaccaaacaggtaatccaacgcttgataaagcacaagttgaacaattgacacaagcagtaacaactgcaaaagataacctacatggtgatcaaaaacttgctcgtgatcaacaacaagcagtaacaactgtaaatgcattgccaaacataaatcatgcacaacaacaagcattaactgatgctataaatgcagcgcctacaagaacagaggttgcacaacatgttcaaactgctactgaacttgatcacgcgatggaaacattgaaaaataaagttgatcaagtaaatacagataaggctcaaccaaattacactgaagcgtcaactgataaaaaagaagcagtagaccaagcgttacaagctgcagaaagcattacagatccaactaatggttcaaatgcgaataaagacgctgtagaacaagcattaactaagcttcaagaaaaagtaaatgagttaaatggtgatgagagagtcgctgaagctaaaacacaagcgaaacaaaatattgaccaattaacacatttaaatgctgatcaaatcgcaactgctaaacaaaacattgatcaagcgacgcaacttcaaccaatcgctgaattagtagatcaagcaacgcaattgaaccaatcaatggatcaattacaacaagctgttaatgatcatacaaatgttgagcaaacagttgattacacgcaagcagattcagataagcaaaaggcttataaacaagcgattgctgatgctgaaaatgtattgaaacaaaatgcgaataagcaacaagtggatcaagcacttcaaaatattttaaatgcaaaacaagcattaaatggtgatgaacgtgtagcacttgctaaaacaaatggtaaacatgacatcgaccaattgaatgcattaaacaatgctcaacaagatggatttaaaggtcgcatcgatcaatcaaacgatttaaatcaaatccaacaaattgtagatgaggctaaggcacttaatcgtgcaatggatcaattgtcagaagaaatcactggcaatgaaggacgcacgaaaggtagcacgaactatgtcaatgcagatacacaagtcaaacaagtatatgatgaagcggttgataaagcgaaacaagcacttgataaatcgactggtcaaaacttaactgcagaacaagttatcaaattaaatgatgcagtaacggcagcgaaacaggcattaaatggtgaagaaagacttaataatcgtaagtctgaagcattacaaagattggatcaattaacacatctaaacaatgctcaaagacaattagcaatccaacaaattaataatgctgaaacgctaaataaagcatctcgagcaattaatagagcaactaaattagataatgcaatgggtgcagtacaacaatatattgacgaacagcaccttggtgttatcagcagcacaaattacatcaatgcagatgacaatttgaaagcaaattatgataatgcaattgcgaatgcagcacatgagttagataaagtgcaaggtaatgcaattgcaaaagctgaagcagagcaattgaaacaaaatattatcgatgctcaaaatgcattaaatggagaccaaaaccttgcaaatgccaaagataaagcaaatgcgtttgttaattcgttaaatggattaaatcaacagcaacaagatcttgcacataaagcaattaacaatgccgatactgtatcagatgtaacagatattgttaataatcaaattgacttaaatgatgcaatggaaacattgaaacatttagttgacaatgaaattccaaatgcagagcaaactgtcaattaccaaaacgctgacgataatgctaaaacaaacttcgatgatgccaaacgtctagcaaatgcattgctaaatagtgataacacaaatgtgaatgatatcaatggcgcaatccaagcagtcaatgatgcaatccataatcttaatggtgatcaacgactacaagatgctaaagacaaggcaattcaatctattaatcaagctttagctaataagctaaaagaaatcgaagcttcaaatgcgacggatcaagacaagcttattgcgaaaaataaagcagaagaattggcaaacagcatcatcaacaacattaataaagcaacaagtaatcaggatgtatctcaagttcaaacagctggcaaccatgcgattgaacaagtgcatgccaatgaaataccgaaagctaaaattgatgcgaataaagatgttgacaagcaagttcaagcattaattgacgaaattgatcgaaatccaaatctaacagataaggaaaaacaagcacttaaagatcgtattaatcaaatacttcaacaaggtcataacgacattaacaatgcgctgactaaagaagaaattgaacaagccaaagcacaacttgcgcaagcattacaagaaattaaagatttagtgaaagctaaagaaaatgcgaaacaagatgttgacaagcaagttcaagctttaattgacgaaatcgatcaaaatccaaatctaacagataaggaaaaacaagcacttaaagatcgaattaaccaaatacttcaacaaggtcataacgacattaacaatgcgatgactaaagaagaaattgaacaagccaaagcacaacttgcacaagcattacaagacatcaaagatttagtgaaagctaaagaagatgcgaaaaatgcaataaaagccttagctaatgcgaagcgtgatcaaatcaattcaaatccagatttaacacctgagcaaaaagcaaaagcgctcaaagaaattgacgaagctgaaaaacgagcactacaaaacgttgagaatgctcaaactatagatcaattaaatcgaggattaaacttaggtttagatgacattagaaatacacatgtatgggaggttgatgaacaacctgctgtaaatgaaatttttgaagcaacacctgagcaaatcctagttaatggtgaactcattgtacatcgtgatgacatcattacagaacaagatattcttgcacacataaacttaattgatcagctttcagcagaagttattgatacaccatcaactgcaacgatttctgatagcttaacagcaaaagttgaagttacattgcttgatggatcaaaagtgattgttaatgttcctgtaaaagttgtagaaaaagaattgtcagtagtcaaacaacaggcaattgaatcaatcgaaaatgcggcacaacaaaagattaatgaaatcaataatagtgtgacattaacactggaacaaaaagaagctgcaattgcagaagttaataagcttaaacaacaagcaattgatcatattaacaatgcacctgatgttcattcagttgaagaaattcaacaacaagaacaagcgcatattgaacaatttaatccagaacaatttacgattgaacaagcaaaatcaaatgcaattaaatcgattgaagatgcaattcaacatatgattgatgaaatcaaagctcgtactgatctaacagataaagagaagcaagaagctattgctaagttaaatcaattaaaagaacaagcaattcaagcgattcaacgtgcgcaaagcatcgatgaaataactgagcaattggaacaatttaaagctcaaatgaaagcagctaatccaacagcaaaagaactagctaaacgcaagcaagaagctattagtagaattaaagacttttcaaatgaaaaaatgaatagtattcgaaatagtgaaattggcacagctgatgaaaaacaagcagcaatgaatcaaattaacgaaattgtgcttgaaacaattagagatattaataatgcgcatacattacagcaagttgaggctgcattgaacaatggtattgctcgaatttcagcagtacaaattgtaatatctgatcgtgctaaacaatcttcaagtactggaaatgaatctaatagccatttaacaattggttatggaactgcaaatcatccatttaacagttcgactattggacataaaaagaaaattgatgaagatgatgacattgatccacttcatatgcgtcactttagtaataatttcggtaatgttattaaaaacgctattggtgtggtgggtatctctggcttactagctagtttctggttcttcattgccaaacgtcgtcgtaaagaagatgaagaggaagaattagaaataagagataataataaagattcaataaaagagactttagacgatacaaaacatttaccacttttatttgcgaaacgtcgcagaaaagaagatgaagaagatgttactgttgaagaaaaagattcgctaaataatggcgagtcactcgataaagttaaacatacgcctttcttcttaccaaaacgtcgtcgtaaagaagatgaagaagatgtggaagttacaaatgaaaacacagatgaaaaagtgttgaaagataacgaacattcaccactcttattcgcaaaacgacgcaaagataaagaggaagatgttgaaacaacaactagtattgaatctaaagatgaggacgttcctttattattggctaaaaagaaaaatcaaaaagataaccaatccaaagacaaaaagtcagcatcaaaaaatacttctaaaaaggtagcagccaaaaagaagaaaaagaaatctaagaaaaataaaaaa

SEQ ID NO: 4357 - DNA, 114 bp, Staphylococcus aureus
ttggtagttgaacatcctgatagtattatcgttgctattaagattagtttaattcttttaaacatagctcatctcccatttatgtgtttgtttagaatattaaaagcaattttt

SEQ ID NO: 4358 - DNA, 2160 bp, Staphylococcus aureus
gtgaataaaataaatgatagggacatagcagaattgagcagttattgggtttatcaagatataaatgaaaaaaaagattttaaagtaaatggaaaacggttcaaacaaatagataattataatgataatagtaatgataatatgaatggtgctgctgatattaaaacatacgagttacttaatgatcaggggaatccaactggtcaacagacaataatttatcaaggaacatctaatgaggcaattaacccaaataatccattaaaatcatcgggttttggagatgattggctccaaaatgctaaattaatgaataatgataatgaaagcacagattatttaaagcaagtagaagaattcgcaaatagttatcgacaaaaaattaaagatgcttctgttcttgatgaaaatgaatttagaagaaaatacaaaactaaaccttataattacaaaaacaaaacaattgtggcggatggtggtaattcggaaggtggtgcaggagcaaaatatcaaggagcgaaacatccgaatgaaaaagttgttgctactgactcagcaatgattccttatgctgcttggcagaaatttgctagaccacgctttgataatatgattagttttaatagtaccaacgatttattaacatggttacaagatccattcatcaaagatatgccaggaaaacgcgttaacattagtgatggtgtgcccaggttagatgctttaatagacagccatgtaggttataaaaggaagttaaatagaaaagataacacatacgatactgtaccactaatcaaaattaagtcggtaaaagatacagaaattaaaaatggaaaaaaagtaaaaaagactattaacataacattagatatggatgggcgaattccaataaatgtttggacaggagattcgattgcacgttccggaaaaggaactttaattaaacttaatttagaaaatcttgatgcgttgagtaaactgattactggtgaaacaagtggtatgttagcagaatgcgtaatctttttaaatgaaagttttaacatctcagaaaatgaaaataaaaattttgcagatagaaagaaacaattatcagaaggatttaaggataagattaacttatttcaattagaagaaatggaaagaactttaattagtaaaataaacgcacttgaagaagttgcagatgaaacaatagaaagtattagtgctgttaaacacttattacctgattttgcattggatgcattaaaagaaagaattaatgagttgtttaaaggtataaaatcttttatagaaaaagtgtatgatagtatagataatgaaattttagaaattttcaaaaatatagatcacgacttcagagatggagtatctgaagaaatgatgaaacatttgaaagtagtgaaacagaatatagagcaaataaaaaatcaaaatgatatttatggtaggcaaattgcagatattagaagtattatgaagcaacaagatgcaacaattttagatggaaattatcaaattaattatagcggtgaaaatatggtgcagggtctagctttaccttctaattatttaggaagaaaaatgaaaatattaaaagaccatatcgatgatggtattaaaaaaatagcagactatgttcaaggtatatatgatgaatatgcatcgaaaattgtcgatgtaataaaatatttgattaatacaattcccaaaatacgtaagaatttaagacatgcaattgaaatgttaaatgtaaaaaagaaagaatttttgtccctgattcctaatgtaacttgtaattatattaaaactaaattagaagaattagataatactttaggcaaatgggagccttttcttaatgatttaaaagcagtgtcaccaattttagataaccatttagatgatattgttaagaacatgaagcctttgattgtacaaatgatatttgaaccatcacattatgacgatatgtttattttaaacacacaagctcatgcgcgtcttgatcaaatggcacaacagtttgaagttgtttgtaatggcttgaacgaaaatgaaggacaagcaattcaaacgatggatcaatctgcctctctaatacggtcaaacttaattcaagttaaagaacaattagaaaaactagctgtatac

SEQ ID NO: 4359 - DNA, 126 bp, Staphylococcus aureus
gtgcaagttggggtggggccccaacatagagaatttcgaaaagaaattctacaggcaatgcaagttggggtgggacaacgaaataaattttgcgaaaatatcatttctgtcccactcccttatgca

SEQ ID NO: 4360 - DNA, 159 bp, Staphylococcus aureus
ttgaaaaatagacaaattagaagcatcgaattcactgttatgagttcaaaaataattatttatgataccaagttattgaaagagctttttataaaaataaagcaaaagttttatacagtaatgaaaatcatgatacttgtcgttgtagtgattaaaatg

SEQ ID NO: 4361 - DNA, 108 bp, Staphylococcus aureus
atgcaaaaattcaaagactttttttacgatgatttatcggttacacgaggaaattattttttaactttaatggcagcatttttattactatcattttatttatcggca

SEQ ID NO: 4362 - DNA, 168 bp, Staphylococcus aureus
ttggctatgaagaaatctatgaggatagaatttttcatagccatttttttaaaagagcaagaagtaaaaaattggaaaaccgtcgatcaaataattaaaaatgaacacttagttaaaagtgattatgaagcagaaccaccgttgttcctcttttcgggatcgttggat

SEQ ID NO: 4363 - DNA, 213 bp, Staphylococcus aureus
atgaaagcaattggccaaatattaaatagtaaagttatatatggtgacacactattcgctgttcccgtattacttttggcgaataagactgtgaaaatagcaaaacaaagaaataccagcggacttattaataaaacatacatactgaaagaatttttaaatttgataccttctatctttaaatgtatcatttgtaatcacctttcgttattt

SEQ ID NO: 4364 - DNA, 102 bp, Staphylococcus aureus
atgatatatatcttccaaagaccgcaaactgtagcagaaaatgagaaccttgcgtttttgaaatggtctaataaatcaaatatcattgaaactttaatcaca

SEQ ID NO: 4365 - DNA, 105 bp, Staphylococcus aureus
ttggttgactttcttttgtttgtattgtttttacacgatgctgctgtatacgtttcattaccactcgttcaagcaattgctaatgtaaccttttatttttcgttc

SEQ ID NO: 4366 - DNA, 1152 bp, Staphylococcus aureus
gtgtctcgtgaaatgtcatatcattggtttaagaaaatgttactttcaacaagtattttaattttaagtagtagtagtttagggcttgcaacgcacacagttgaagcaaaggataacttaaatggagaaaaaccaactactaatttgaatcataatataacttcaccatcagtaaatagtgaaatgaataataatgagactgggacacctcacgaatcaaatcaaacgggtaatgaaggaacaggttcgaatagtcgtgatgctaatcctgattcgaataatgtgaagccagactcaaacaaccaaaacccaagtacagattcaaaaccagacccaaataaccaaaacccaagtccgaatcctaaaccagatccagataacccgaaaccaaaaccggatccaaaaccagacccagataaaccaaagccaaatccgaatccaaaaccagaccctaataagccaaatcctaacccgtcaccagatcccgatcaacctggggattccaatcattctggtggctcgaaaaatggggggacatggaacccaaatgcttcagatggatctaatcaaggtcaatggcaaccaaatgggaatcaaggaaactcacaaaatcctactggtaatgattttgtatcccaacgatttttagccttggcaaatggggcttacaagtataatccgtatattttaaatcaaattaataagttgggcaaagattatggagaagttactgatgaagacatttataatattattcgaaaacaaaatttcagcggaaatgcatatttaaatggattacaacagcaatcgaattactttagattccaatatttcaatccattgaaatcagaaaggtactatcgtaatttagatgaacaagtactcgcattaattactggtgaaattggatcaatgccagatttgaaaaagcccgaagataagccggattcaaaacaacgctcatttgaaccgcatgaaaaagacgattttacagtagttaaaaaacaagaagataataagaaaagtgcgtcaactgcatatagtaaaagttggctagcaattgtatgttctatgatggtggtattttcaatcatgctattcttatttgtaaagcgaaataaaaagaaaaataaaaacgaatcacagcgacga

SEQ ID NO: 4367 - DNA, 105 bp, Staphylococcus aureus
atgattggcagtgatcttttttatattcaacttattatttatcgcgcactagcgtcagcaaaaagccctattatttttttacaagaacatgatactgaaatttca

SEQ ID NO: 4368 - DNA, 102 bp, Staphylococcus aureus
atgatgatgcgatgtaatggcgtgttgttgtggaagcttggtgtcatgccatgttactttgatgtgttgttgtggaagcttggtgttgatgccatgttactt

SEQ ID NO: 4369 - DNA, 96 bp, Staphylococcus aureus
atgccacatcatagcactacatcaagtcgcatcgtagcaccagcacatcaaagtaacatggcatcaacaccaagcttccacaacaacacatcaaag

SEQ ID NO: 4370 - DNA, 93 bp, Staphylococcus aureus
atgactataagtactattaaaggagcgaataaattatgccaatcgtatattatgatggaaactgtatatattgttataactatgtcatttggt

SEQ ID NO: 4371 - DNA, 129 bp, Staphylococcus aureus
gtgattatgagtgatggaggattgattgatgtgaagaattgttacaataatttttggatgtcgtgtttagtcaatggcgatttgaaattgttgttttatggcggactgaaaatgttgtttttggcgatt

SEQ ID NO: 4372 - DNA, 108 bp, Staphylococcus aureus
ttgatctatgaaactgactcacaaaatgtcaaaactcaagaagaattgtttactgaatacaaaaattttaaacaaaaaatcactaatgatttattagataaaactagt

SEQ ID NO: 4373 - DNA, 123 bp, Staphylococcus aureus
atgaattataagcaatccgcagaagaaattttgaacgcgataggcggagaagagaatttagatgcaatggcacattgtgcaacgagactacgattagttttaaatgatgaaagttttagtaaa

SEQ ID NO: 4374 - DNA, 117 bp, Staphylococcus aureus
atgttatttaaaaatgctttcatttatatgaaatcattcaatatagacaaagtattgactacatatatattttattatgattgtgaaaaagtgaacataaggattttcccttattta

SEQ ID NO: 4375 - DNA, 183 bp, Staphylococcus aureus
ttgatggaaaatgaaaaaagaaccgtagattcgattgagaatcagcggttctttttaatcacggtttattacgaaaattatttaaaaaatgatgtaaaactagagaagatatttttgattgattatttccagaatgagttaaataatccagttattgtatttttgattgatgatgcagtttct

SEQ ID NO: 4376 - DNA, 2871 bp, Staphylococcus aureus
gtgaaaagcaatcttagatacggcataagaaaacacaaattgggagcggcctcagtattcttaggaacaatgatcgttgttggaatgggacaagaaaaagaagctgcagcatcggaacaaaacaatactacagtagaggaaagtgggagttcagctactgaaagaaaagcaagcgaaacacaaacaactacaaataacgttaatacaatagatgaaacacaatcatacagcgcgacatcaactgagcaaccatcacaatcaacacaagtaacaacagaagaagcaccaacaactgtgcaagcaccaaaagtagaaacttcgcgagttgatttgccatcggaaaaagttgctgataaggaaactacaggaactcaagttgacacagctcaaccaagtaacgtctcagaaattaaaccaagaatgaaaagatcaactgatgttacagcagttacagagaaagaagtagtggaagaagctaaagcgacaggtacagatgtaacaagtaaagtggaagtagaagaaggtagtgaaatagtagggcataacaataaagagacaaatgttgttaatcctcataatgcagaaagagtaaccttgaaatataaatggaaattcgaggatggtattaaaccgggggactactttgatttcacattaagtaataatgtagaaactcatggtatctcgcctcttcgtaaagttccagatataaaaagtaaagatgataatattttggctgttggcaaagtgatggatgaaagaaaaattagatatacgtttactgattatataaataacaaaaataatttaatggctgaattaaacttaaatttgtttattgatccaactacagttacgaagcaaggaaagcaaactgttgaggttaaattaggtgaaaataagatttcaaaagaatttgatatcaaatatctagacggtgttaaagataactggggagtaactgtaaatggacgtataactttattagataaagaaaatagtaaaatacatcatttagcttatataaaccctaaaaaaagcgatatgacctcaataactataaatgggttttttgctaaaggtggattgtatacaggaaatgttccaacagtgaaagtttatgagtatttgagaagtgatgaattaccagaaagcgtctatgctaacacaaatgatcaagagaaatttaaagatgttaccaatgacatgagtgataaattaacgctaagtgaaaacggtagctataaattaactttagatgcactaaataagaaaagttatgttgtaagttttgaaggtaaatataatgaaaatgacaaggagttattattcagaactaatttgcatggctatcatgctaattacggttattactattattatccagtaagtttaacatgggacaatggcgttgcattctactctaataacgctcaaggcgacggtaaagataagccaaatgatcctatcattgagaagagtgaaccaattgaattagacattaaatcagagccgccagtggagaagcatgaattgactggtacaatcgaagaaagtaacgattctaagccaattgattttgaatatcatacagctgttgaaggtgtagaaggtcatgcagaaggtattattgaaactgaagaagattctattcatgtggattttgaagaatctacacatgaaaattcaaaacatcacgctgatgttgttgaatatgaagaggatacaaacccaggtggtggccaagtaataactgagtctaacttagttgaatttgacgaagagtctacaaaaggtattctaactggcgcagtgagcgaccatacaacagttgaagatacgaaagaatatacgactgaaagtaatctgattgaactagtagatgaattacctgaagagcatggtcaagcacaaggaccaatcgaggaaattactgaaaacaatcatcatatttctcattctggtttaggaactgaaaatggtcacgggaattatggtgtgattgaagaaatcgaagaaaatagccacgttgatattaagagtgaattaggttatgaaggtggccaaaatagcggtaaccagtcattcgaggaagacacagaagaagataaacctaaatatgaacaaggtggcaatatcgtagatatcgatttcgatagtgtacctcaaattcatggtcaaaataaaggtgatcagtcattcgaagaagatacagagaaagacaagcctaaatatgaacatggtggtaatatcattgatatcgacttcgacagcgtgccacatattcatggattcaataagcacactgaaattattgaagaagatacaaacaaagataaaccaaattatcaattcggtggacacaatagtgttgactttgaagaagatacacttccacaagtaagtggtcataatgaaggtcaacaaacgattgaagaagatacaacgccgccaacaccaccaacaccagaagtaccaagtgagccggaaacaccaacaccaccgacaccagaagtaccaagtgagccggaaacaccaacaccgccaacaccagaggtaccaagtgagccggaaacaccaacaccaccaacgccagaggtaccagctgaacctggtaaaccagtaccacctgccaaagaagaacctaaaaagccttctaaaccagtggaacaaggtaaggtagtaacacctgtcattgaaatcaatgaaaaggttaaagcagtggcaccaactaaaaaagcacaatctaagaaatctgaactacctgaaacaggtggagaagaatcaacaaacaaaggtatactgttcggaggattgtttagtattttaggatttgcattattacgcagaaataaaaagaatcacaaagca

SEQ ID NO: 4377 - DNA, 3069 bp, Staphylococcus aureus
ttgcatttaaagggagatattatagtgaaaaacaatcttaggtacggcattagaaaacataaattgggagcagcatcagtattcttaggaacaatgatcgttgttgggatgggacaagataaagaagctgcagcatcagaacaaaagacaactacagtagaagaaaatgggaattcagctactgaaaataaagtaaacgaaacacaaacaactacaactaacgttaatactatagatgaaacacaatcatacagcgcaacagcaacagaacaaccgtcaaacgcaacacaagtaacaactgaagaagcaccaaaagcagtacaagcaccacaaactgcacaaccagcaaatttagaaacagttaaagaagaggtagttaaggaagaagcgaaacctcaagttaaggaaacaacacaatctcaagacaatagcggagatcaaagacaagtagatttaacacctaaaaaggccacacaaaatcaagtcgcagaaacacaagttgaagtggcacagccaagaacggcatcagaaagtaaaccacgtgtgacaagatcagcagacgtagttgaagctaaggaagctagtgacgagaaagtggaaacgggtacagatgtgacaagtaaagttacagtagaaagtggttctattgaggcacctcaaggaaataaagtagagccacatgctggtcaacgtgtcgtattgaaatacaaattgaaattcgcagatggattaaaaagaggagattattttgattttacattatcaaataatgtaaatacttatggggtttcaacagctagaaaggtaccagagattaaaaatggctcagttgtaatggctacaggtgagatcttagggaatggtaacataagatatacatttactaacgaaattgaacacaaggtagaggtaacagctaatttagaaatcaacttatttattgaccctaaaactgtacaaagcaatggagaacaaaagattacttctaaattaaatggtgaagaaacagaaaaaacaataccagttgtttataatccaggtgttagcaatagttatacaaatgtaaatggatcaattgaaacatttaataaagaatctaataaatttacacatatagcttatattaagccaatgaatggaaaccagtcaaacactgtatcagtaacagggacgttgactgaaggtagtaatttagctggtggacaacctactgttaaagtatatgaatatctagggaaaaaagatgaattgccacaaagtgtttatgcaaatacatcagatactaacaaattcaaagatgtaacaaaggaaatgaatggaaaattgagtgtgcaagacaatggtagttactcattgaatttagataagttggataaaacgtatgtcattcattatacaggtgaatatttgcaagggtcagatcaggttaattttagaactgaattatatgggtatccagaacgagcatataaatcttactatgtttatgggggatatcgtttaacttgggataatggtttagttttatatagcaataaagctgacggcaatggtaaaaatggacaaattattcaaaataatgattttgaatataaagaagatactgcaaaaggaactatgagcgggcagtacgatgccaagcaaattattgaaacagaagaaaatcaagacaatacaccgcttgacattgattaccacacagctatagatggtgagggtggttatgttgatgggtatattgaaacaatagaagaaacggattcatcagctattgatatcgattaccatactgctgtggatagtgaagcgggtcacgttggaggatacactgagtcctctgaggaatcaaatccaattgactttgaagaatcgacacatgaaaattcaaaacatcacgctgatgttgttgaatatgaagaggatacaaatccaggtggtggtcaggttactactgagtctaacttagttgaatttgacgaagagtctacaaaaggtattgtaactggcgcagtgagcgatcatacaacaattgaagatacgaaagaatatacgactgaaagtaatctgattgaactagtggatgaactaccagaagaacatggtcaagctcaaggtccaatcgaggaaatcactgaaaacaatcatcatatttctcattctggtttaggaactgaaaatggtcacggtaattatggcgtgattgaagaaatcgaagaaaatagtcatgttgatattaagagtgaattaggttatgaaggtggccaaaatagcggtaaccagtcattcgaggaagacacagaagaagacaaacctaaatatgaacaaggtggcaatatcgtagatatcgatttcgacagtgtacctcaaatccaaggtcaaaataatggtaaccagtcattcgaagaagatacagagaaagacaaacctaagtatgaacaaggtggtaatatcattgatatcgacttcgacagtgtgccacaaattcatggattcaataagcacactgaaattattgaagaagatacaaacaaagataaaccaaattatcaattcggtggacacaacagtgttgattttgaagaagatacacttccaaaagtaagcggtcaaaatgaaggtcaacaaacgattgaagaagatacaacgccgccaacaccaccgacaccagaagtaccaagtgagccggaaacaccaacaccaccgactccggaagtaccaagtgagccggaaacaccaacaccaccgacaccagaagtgccgagtgagccagaaacaccaacaccgccaacaccagaggtaccagctgaacctggtaaaccagtaccacccgcaaaagaagaacctaaaaagccttctaaaccagtggaacaaggtaaagtagtaacacctgttattgaaatcaatgaaaaggttaaagcagtggcaccaactaaaaaagcacaatctaagaaatctgaactacctgaaacaggtggagaagaatcaacaaacaaaggtatgttgttcggcggattattcagcattctaggtttagcattattacgcagaaataaaaagaataacaaagca

SEQ ID NO: 4378 - DNA, 498 bp, Staphylococcus aureus
gtgacaagcatttttgtttttgcgtacttaaacaacacttcagacaatatgttgtttaggcaacaaatgatatgtgcgtgtttattggcaaacgtacaacatagtagtatagtatgtctaaacaacacatgttgcatagttgatatacgttgtttaaatactaagataggagggattgacgtgagcgagacagatgaacctcaggggtttgaacgcacgcataatatattaaatattaatcagaataggcagagtctaatgacattcattataagtaaattgaagtcgacgttgaagcaacgcataataaatgctcgtggtaaaaagcgaatcgactatcgactgtcgtataacttttacattacgtattatgatactgtagaaatcaagaaaatcgactgtgaatatacctatgctatgcccattgcaattttaataagacacacgatgtcattcgacaatgctcatttctttgctcagttacgtcatcctgtctta

SEQ ID NO: 4379 - DNA, 171 bp, Staphylococcus aureus
ttgtttattttggctatttatattttttgtacaatactagttttagttgcagttggagcacttttgacaaatagaataagggataaaaaagataaaaggctagatattttatctagtgtattacttttaatttcatcaatatcattgttactttatggtgttattatcaat

SEQ ID NO: 4380 - DNA, 96 bp, Staphylococcus aureus
atgagggcatacgtaatgttaatcaacgaagcgcgtttatacagaaatgtattttctgtgatgttacgcaatgatttaaagcgttatatagatttt

SEQ ID NO: 4381 - DNA, 111 bp, Staphylococcus aureus
ttgaaaggcaaaaattggttttgcatgggccctggttcaacaacttccattggcaaggggattaaaacctcccttaatggtggtgaaattaccggtggcttaccaccagaa

SEQ ID NO: 4382 - DNA, 171 bp, Staphylococcus aureus
atggaaacgggacctgttgggtttttatttccaggtagccaatatgttgaggattattattctggtggtaagccaccggtaatttcaccaccattaagggaggttttaatccccttgccaatggaagttgttgaaccagggcccatgcaaaaccaatttttgcctttcaat

SEQ ID NO: 4383 - DNA, 111 bp, Staphylococcus aureus
atggattacaaaaagcaatacttaaaagcaccatttaatttagggaaaagatgggaagaaaaactgaaaaaatcggttaaaaaaacccacccaagggaggggctggattta

SEQ ID NO: 4384 - DNA, 156 bp, Staphylococcus aureus
atgaagttaccagaagtgggcttaggtaaaatgggtttcccaccaccaataaggtttccaaagcagggggccaaggggctgggggttaaaattaaccaccaaccgattaataagttccaaaggggccaaataagaattaaagaccttggttctaat

SEQ ID NO: 4385 - DNA, 279 bp, Staphylococcus aureus
atgggactttggctaataccaggatttttggcggaagaattctatggtctacattttggtcaagataatcatggttatttattaccggacccgttaaagccaatattaccatggttattaaacctattattccggccaccggttacttattttggtttaaccggacccaaaccttttggccaaaggttttggttttttggtggatttcaaggttctggatcaaaactaaatcttttattattaaatccaattaagaaaatgcggcaaaaggattccgca

SEQ ID NO: 4386 - DNA, 612 bp, Staphylococcus aureus
ttggcattttcgacggtggaacttcaaattaggaatttattggtggccttggttattccacattatttaattggcctttatttttggaccccttggcaattggtggttcacccaggacccaccttaccttggttaaaaacaactggttggcccggggggattggttttactggcttaacaaaaggaacaccgagtggctgggcggtttcacggttcacaaaaacttttggatttttttggcgatatttaaatttaactggaccttcaaaaccttggtctaaggcattattttttggatttaccaatggattggctggagccattaaggaattactggattatggcttggggagggattcttggtctacatttaaaacattattttttaaatttttaccggccaccaaccaagggtcggccttttcacctattcctaaaccatggctttggcctattggggaatacattaacccactttggttacccattttcttaccattaaggggtattatattacccgggtgggccaggagatattgggaaaaaaatggtttaaaggtttttttggccgttaaacaaatacctggagaatctttttttttaacaagaact

SEQ ID NO: 4387 - DNA, 135 bp, Staphylococcus aureus
ttggttggcgtttggttagttttaagcttaccgttgctattatcatctccaccaaatccaccggaagaacccattccggaaggtattgttttttattttccaagttcaattttaccagttatccaaccggcattt

SEQ ID NO: 4388 - DNA, 183 bp, Staphylococcus aureus
atgggacctttaattaaccaaaaaggttccaaattatttaaaaagaaaccacctttaatggccccaatggtcttaattcaacaaagggtggcccaaggtaaaatggctccaaaatccaataaaatttttcccccccaggattctttcccatcggctaaaaagggttttccagggttggcattt

SEQ ID NO: 4389 - DNA, 111 bp, Staphylococcus aureus
ttgattgacccaatgaaggctttggatccaaaacctgtccaagatgttcgtaaattaatggtccaaaaggcgcaagaagttgtcctttcttattccaagccatattttaag

SEQ ID NO: 4390 - DNA, 273 bp, Staphylococcus aureus
ttggcccaaaaattggtttttattccaatggcttattttttacctttcgaggtaatggacccatttgggcttatggaaaatccaaaaccacttattccaattgaaattccccaaccgtttgtgggtttattcccgccaccgccccattttccagccggtggcttattggaccaactggggcttgaccttaacttaatgggtcttaacccagttgcactggttgtggaaaatccacctgagaaacaactgggaccggtttattggccaaagggg

SEQ ID NO: 4391 - DNA, 90 bp, Staphylococcus aureus
ttggcagctgctaccataaaaattgaaaacatggtacttggtcaacaaggcgcacgcattgttggtaaatccagcatgtcccggttgatt

SEQ ID NO: 4392 - DNA, 285 bp, Staphylococcus aureus
atggattttatttattcaaattgggaagggggatggatgggaaccttatttactttaccaaggtggacattttggccgaaagggaaaggctgggtaccagaacctggcctttcggattccggggggaatattttttctggacatttaacaattggtgaaattaaaccaattttaaaaatgactggagaccggactggtgaaattatttcttccccgtctaaaaccttccaaaaattaaatggtggttttggttcacttcccttaccagaattattttcaattatt

SEQ ID NO: 4393 - DNA, 165 bp, Staphylococcus aureus
ttggggggatttaaaccgggtacaagaccatttactggtggttttaaaggggcagcttccaaaattgattttggttccaggggtatttccattaatggacccgacccagggattgatttattaaatgaatcttttgactttgaaatggtgagaccaatggtaggg

SEQ ID NO: 4394 - DNA, 144 bp, Staphylococcus aureus
ttggtagcttcttgggctggattaaaacccacttttttggaaaagggaatgggtggagaattaattggacctgaaaaaatggtttttggcgttattaatattttggtggaatttggcatggtaaaagaagaatttaaacttcct

SEQ ID NO: 4395 - DNA, 708 bp, Staphylococcus aureus
atgcaaatggctagaaaagttgttgtagttgatgatgaaaaaccgattgctgatattttagaatttaacttaaaaaaagaaggatacgatgtgtactgtgcatacgatggtaatgatgcagtcgacttaatttatgaagaagaaccagacatcgtattactagatatcatgttacctggtcgtgatggtatggaagtatgtcgtgaagtgcgcaaaaaatacgaaatgccaataataatgcttactgctaaagattcagaaattgataaagtgcttggtttagaactaggtgcagatgactatgtaacgaaaccgtttagtacgcgtgaattaatcgcacgtgtgaaagcgaacttacgtcgtcattactcacaaccagcacaagacactggaaatgtaacgaatgaaatcacaattaaagatattgtgatttatccagacgcatattctattaaaaaacgtggcgaagatattgaattaacacatcgtgaatttgaattgttccattatttatcaaaacatatgggacaagtaatgacacgtgaacatttattacaaacagtatggggctatgattactttggcgatgtacgtacggtcgatgtaacgattcgtcgtttacgtgaaaagattgaagatgatccgtcacatcctgaatatattgtgacgcgtagaggcgttggatatttcctccaacaacatgagtag

SEQ ID NO: 4396 - DNA, 348 bp, Staphylococcus aureus
atgatgtatgacatcaaagattatttaatttggtataaagagaataacatatacaaggacgactatgtattgtttggcacattctataaagcttacagcgagtctactattgatcgttggtttactaacgcattaaaagtgttggatgagcaattaccaaacggacaaaatttccctagaatcgttatacacgagttaagacatagccatgcatctatgctagttaatctaggggctagtgtaatgattatagctcagcgtttaggtcacagcgatacgactgaagtatataaccgatatggtcatttatatcctagtacacagaaagaaatagttaaatacttataa

SEQ ID NO: 4397 - DNA, 987 bp, Staphylococcus aureus
atgaaattcattagtaataataatattacagatccaactttaaacttagcaatggaagaatatgttttaaaaaatttaccagcagaagaaagttactttttattttacataaatagaccatctatcattgttggaaagaatcaaaatacgatagaggaagtaaatcagacatatatagatgctcataacatcgatgtagttagaagaatttctggtggtggcgctgtttatcatgatactggcaatttaaactttagttttataacagatgatgatggtaacagtttccacaatttccaaaaattcactgaaccaattgttcaagcattacaatctttaggcgtaaatgctgaattaactggtcgtaacgatattcaagttggacaagcgaaaatctcagggaatgctatggttaaagttaaaaatagaatgtttagtcatggtacgttgatgttaaatagtgatttagacgaagttcagaatgcactaaaagttaatccagctaagattaaatcaaaaggtattaaatctgttcgtaaacgagtagcaaacattcaagaatttttaaatgaccctttagaaattgaagaatttaaaaaaatcatcttgaaaactatctttggagaaactgaagtagaagaatataaattaacggatgaagattgggaaaatattgaaaagttaagtaacgacaaatatagaacttgggcatggaattatggtagaaaccctaaatataactttgaacgcgaggaaaaatttgaaaaaggatttgtacaaattaagtttgatgttaaacgaggtaaaatcgaacatgcaaaaattttcggtgatttctttggtgtcggagatgtcactgatcttgaaaatgcattagttggctgtctacacgactttgagcacatagaagaagcactatcagaatatgatttatatcattatttcggtgacatagatagacatgaattaattagattaatgtcataa

SEQ ID NO: 4398 - DNA, 2763 bp, Staphylococcus aureus
gtgaaaaaaatggattacaaagaaacgttattaatgcctaaaacagatttcccaatgcgaggtggtttaccaaacaaggaaccgcaaattcaagaaaaatgggatgcagaagatcaataccataaagcgttagaaaaaaataaaggtaacgaaacattcattttacatgatggcccaccatacgcgaatggtaacttacatatgggacatgccttgaacaaaattttaaaagactttattgtacgttataaaactatgcaagggttctatgcaccatacgtaccaggttgggatacacatggtttaccaattgaacaagcattaacgaaaaaaggtgttgaccgaaagaaaatgtcaacagctgaattccgtgagaaatgtaaagaatttgctttagaacaaattgaattacagaaaaaagattttagacgtttaggtgttcgtggtgactttaatgatccatatattacattaaaacctgaatacgaagctgcacaaattcgtatttttggagaaatggcagataaaggtttaatttataaaggtaaaaagccagtttattggtctccttcaagtgagtcttcattagcagaagcagaaattgaatatcacgataaacgttcagcatcaatttacgttgcatttgacgttaaagatgacaaaggtgtcgttgatgcagatgctaaatttattatctggacaacaacgccatggacaattccatcaaatgttgcgattaccgttcatcctgaattaaaatatggtcaatacaatgtaaatggcgaaaaatatattattgcagaagccttgtctgacgctgtagcagaagcactggattgggataaagcatcaatcaaattagaaaaagaatacacaggtaaagaattagagtatgttgtagcacaacatccattcttagacagagaatcgttagtgattaatggtgatcatgttactacagatgctggtacaggttgtgtacatacagcaccaggtcacggggaagatgactatattgttggtcaaaaatatgaattgccagtaattagtccaatcgatgataaaggtgtatttactgaagaaggcggccaatttgaagggatgttctatgataaagctaataaagccgttactgatttattaacagaaaaaggtgcactattaaaattagactttattacacatagctatccacacgactggagaacaaaaaaacctgtaatcttccgtgctacaccacaatggtttgcctcaatcagtaaagtaagacaagatattttagatgcaatcgaaaatacaaacttcaaagtaaattggggtaaaacacgtatttacaatatggttcgtgaccgtggcgaatgggttatttctcgtcaacgtgtgtggggtgtaccgttaccagtattttatgctgaaaatggcgaaattatcatgacgaaagaaacagtgaatcatgttgctgatttatttgcagaacacggttcaaatatttggtttgaaagagaagcgaaagacttactaccagaaggatttacacatccaggcagccctaacggtacatttactaaagaaacagacattatggacgtttggtttgattctggttcatcacaccgtggcgtgttggaaacaagaccggaattaagtttcccagcggatatgtatttagaaggtagtgaccaatatcgtggttggttcaactcttctatcacaacttcagttgctacaagaggagtatcaccttataaattcttactttctcatggttttgttatggacggtgaaggtaagaaaatgagtaaatctttaggtaatgtgattgtacctgaccaagtggttaaacaaaaaggtgctgatattgcgagactttgggtaagtagtacggactatttagctgatgttagaatttctgatgaaattttaaaacaaacatctgatgtttatcgtaaaatcagaaatacattaagatttatgttaggtaacattaacgatttcaatcctgacacagatagcattcctgaatcagagttattagaagtggatcgttacttgctaaatcgtttacgtgaatttactgcaagtacgattaacaactatgaaaactttgactacttaaatatttatcaagaagttcaaaactttatcaatgttgagttaagtaatttctatttggattacggtaaagatattttatatattgaacaacgtgattctcatatccgtcgtagtatgcaaacagtgttatatcaaattttagttgatatgacgaagttgttagcaccaatcttagtgcatacagctgaagaagtttggtctcatacaccacatgttaaagaagaaagtgttcacttagcagacatgcctaaagttgtagaagtagatcaagctttattggataaatggcgtacatttatgaatttacgtgatgatgtgaaccgtgcattagaaactgctcgtaatgaaaaagttattggtaaatcattagaagctaaagttacgattgctagtaacgataaatttaatgcatctgaattcttaacttcatttgatgcattacatcaattatttatcgtgtcacaagttaaagttgtagataagttagatgatcaggcaacagcttatgaacatggtgatattgtcatcgaacatgcagatggtgaaaaatgtgaaagatgttggaactattcagaggatcttggtgctgttgatgaattgacgcatctatgtccacgatgccaacaagttgtaaaatcactggtataa

SEQ ID NO: 4399 - DNA, 192 bp, Staphylococcus aureus
gtgaaagaagtagccaatgaacaaaatatagaagtaaaacgtatggaaggatacaatgaagcgcgttggatattaattgacttagctgatgttgtggtacatgttttccataaagacgaaagaaattattataatattgaaaagttatatcaagatgcaccattagaatcatatggtcaggttgcgtattaa

SEQ ID NO: 4400 - DNA, 279 bp, Staphylococcus aureus
atgccagacgaacaacggcaaatgggttacatgatgatggtcatttcaccaattatgattatctggatttcattaagctcagcatcagcacttggtttgtactggtctgtcagtgcggcgttccttgtagttcaaacacactttgcgaacatttattatgaaaaagtcgctaaaaaagaagtacaacctttcattgaagcgtatgaaagagagcacaacggcggcagcaataaaaaaggcaaaaacacacaagtagtgtctaaaaagaaaaagaaataa

SEQ ID NO: 4401 - DNA, 324 bp, Staphylococcus aureus
atgttacgtgacttagctacatcacttattattagtgaacgtattgaaactacagaagctcgtgcaaaagaagttcgcagtgttgttgagaaattaatcactttaggtaaaaaaggagatttagcttctcgtcgtaatgcagctaaaactttacgtaatgttgaaatcttaaacgaagatgaaactacacaaactgcacttcaaaaattatttggtgaaatcgcagagcgttacacagaacgtcaaggtggttacactcgtatccttaaacaaggccctcgtcgcggtgacggtgctgaatcagtaattatcgaattagtataa

SEQ ID NO: 4402 - DNA, 177 bp, Staphylococcus aureus
atgagttttccaaaagagaattggtgggtatttatcgtcttactactcttagtcggcaatgtcgaagtgacaggatttaaaatgcttaaaaaagatctaaaaggtgtaaacatcttgaatttaatgtcattatttatctttgtcatatatttcatcttaaccatcgtattattctaa

SEQ ID NO: 4403 - DNA, 216 bp, Staphylococcus aureus
gtgaactgtgtagcacctggtccattctggtcaccattacaaatttctggtgggcaacctcaaagtaaaatcccaacatttggtcaaaaaacacctttaggtcgtgcaggtcaacctgttgagttatgtggaacttatgtgctattagcgtcagaggaatcaagttatacaactggacaagtgttcggtgttagcggtggagtgcaaatagattag

SEQ ID NO: 4404 - DNA, 2106 bp, Staphylococcus aureus
atgacatgccaacttaaaatacatcatacattatcgacaataccaagtcgtaatattaataatattatggtgctattttcacttacaagtaaactcaatattacgattaatggtgaaaccaaagacgtaagtaattatattatcttaattaaccatggtgatatttataatattaaccacggcgaaaatataatcgaattaatgatacccgttttttatttttatcaacaagatgatgatttctttaatggttatttagatcgtcatttattacaatcaagtaattatattaagtcattaattgccgatttaatcagtacaccaacaagttcttctttaatggggaaaaatataggtcaaagtattatagacactttacttaaagaagcttttataagaatagatcatgaatatttaccaaatattgctttaagcaatccggtgttcatagactgtgtaaactatattcatgacaatattgatgcgcacttgtctttaaaagatatagcgatgcattgcaacatctctgaatcatattgttctaatctttttgttcgatatttgagtatgaattttaaagattattttacaagtattaaacttgttaacgccatcaatttattactttctacaaaacattctattacaactgtttctgaattggccggttttaacagtcatacaaattttgcaaatcaatttaagaattacttgcattttagtcctaaacagttccgttcactcgtttccaagattactgaaccaccacaaatacacttccaacaagataacgtatcacaattcactgagttaatttcaacaattgatttaacagctcaactggctacaaatacaacagatattcatatagatgattttaatccgaaagatcgaagtcagcgtgccaaagtatttgttcgatttagtaatttcaatgaactatttcaatttattttcaatgaatattacgatattaactttgagcacttaccaaaacctgtcgttttcattgacgatattcacgatattgagattagccaaacgaattacaacctgttaaatagatgttttgaaaagcttttcgaaaaaaatataggtttagcaatcgctattaaatcaacacaacaattcgaaacgatgaagcagttaatactaacatttttacaaggcaatcaagactataagacaagcaagaaattagttaaatttatgctcgtattttgctctaattctatgacagcagaagaaattcatttatgtcatcttaaaattaaaaacaaaaataaagaaattaaatatagtgtgacagtcgatggctttttagaaacttattcaaccgtggaacaagtttatgatgtcatgcagcgtcttaaattccattattactttattgatattgaaaattcaaaaactgcaacacatcttatcactaaaaaccaacactatcatcaaactgacactcattttgaacagtataagaaatttattttagattcaggtatatcatcaacacaatttgtatataataacctgtctgtaagcggatttaaatatactaatgatggtaagaatccaattcaattatctgacatagtgtatcacttaatcgcattattacgatatggcggtggcattagctatcaattattagatgaccattcaaattatatttccttgtacaacaaatatggtagccccctaccattaatgcatttatataaaatgtttagaccttttgttaatgaagatattgaaattacaaataattatgtattgagtcgtaaagataataactaccatttcttattattcaataaaattaatgatcgatatatgtcagacgtaaaacaagatttcattttccataatgaattacctcaagactctttgatgattattaaaacattgaatcatgaacatggttcaattcaacatttgcttccaataagcgatcaacttgtttatatagaaaaagaaattttagatgaattagacaaaacgaattaccctaaaacggagcttgcagttcaagaagaaactggtcgtacatttgaactcaagttaaatcacgacgaggttaaatatatttgctttaaaccaagctaa

SEQ ID NO: 4405 - DNA, 105 bp, Staphylococcus aureus
atgccaactagcgataaaccacatacggcaatcacaactgtcacaccagcaaaaacaactgcactacctgctgttcctattgcaagaccaatgcctttaatgtaa

SEQ ID NO: 4406 - DNA, 501 bp, Staphylococcus aureus
gtgatttcaacagaacatcgtaataagatcgaatcttatatggatgtagctaaagcagaaggcgcaacaattgctgttggtggtaaacgtccagatagagacgatttaaaagatggtctattcttcgagccaacagtcattacaaattgtgatacgtcaatgcgtattgtacaagaagaggttttcggacctgtcgttactgtagaaggctttgaaactgaacaagaagcgattcaattagcgaatgattctatatatggtttagcaggtgctgtattttctaaagatattggaaaagcacaacgcgttgctaacaagttgaaacttggaacggtgtggattaatgatttccatccatattttgcacaagcgccatggggtggatacaaacaatcaggtatcggtagagaattaggcaaagaaggcttagaagagtaccttgtttcaaaacacattttaacaaatacaaatccacaattagtgaattggtttagcaaataa

SEQ ID NO: 4407 - DNA, 93 bp, Staphylococcus aureus
atgatgtctgctgaaaaagaagttccatatcctagctcaactaaatccttttttgtgaccgttatcattattactcctttcccaattataggc

SEQ ID NO: 4408 - DNA, 156 bp, Staphylococcus aureus
atggcgtatgaagttgatagaaaaatgtatctaactgaactgcttgccagttcaccgattgtaacgctctccaatgaaaagggagtaggacgactagaaaaactaccagcaatgaaattagtacaaaatgatagaccaagtgcttatcgttggctt

SEQ ID NO: 4409 - DNA, 111 bp, Staphylococcus aureus
ttgtatccatatttaaaaacaggttgtgaggataattttgatacagatttatgtctttttgtattatttgcaattgtttttgagcaaaattcaatcgcaaatgtcaaatta

SEQ ID NO: 4410 - DNA, 108 bp, Staphylococcus aureus
atgaatgttgctatacttgcgaatcccgcaattgaccatgctgtagtgaagtacaaaagtggcattaaacaaattgctaagactgtgaagcataatactgctattaag

SEQ ID NO: 4411 - DNA, 159 bp, Staphylococcus aureus
atgagtaacatttataaaagctacttaatagcagtattatgcttcacagtcttagcaatttgtttaatgccacttttgtacttcactacagcatggtcaattgcgggattcgcaagtatagcaacattcatattctataaagaatacttttatgaagaa

SEQ ID NO: 4412 - DNA, 144 bp, Staphylococcus aureus
atgatgtggttagtcatagcaattatattactagtcatcttattgtttggtgtgatgttgcaagctgaacagttaaaaggcgatgtgaaagttaaagagcgggagatagagatattaagaagtagattgagacattttgaaggt

SEQ ID NO: 4413 - DNA, 162 bp, Staphylococcus aureus
atgccagttgatgatccactgaatgcattcatcaaattgttaattccaacgaaaacatttttgaaaatattaccaatgataggtaagtttgtttttgtgtattcaataaaacgagttatcgaattttctccagctgcactattagcccagttagagaaagat

SEQ ID NO: 4414 - DNA, 216 bp, Staphylococcus aureus
atgaccaaaagtattgaaagtaaaaatagtaggattaatattaattttaaacaagatataattaatggtaaacatctgacaactggttttcgttcttttaataaagaacacgaaaagaataaccacattattatagaaaagttacacactagatatgtactaaaagaaataccaccttcttgtatgacatatctaaataagttcacagcaaattca

SEQ ID NO: 4415 - DNA, 162 bp, Staphylococcus aureus
atgtgtttcaatactttttggatagattgcgaaattgtattgaatcgtcatcgttttaaatttttaaatgagaatggaatgagcattacaatatacaagcaatcaaaagtaaatacattcacaacacaacagagacataacaacaagataaggagtgaacaa

SEQ ID NO: 4416 - DNA, 114 bp, Staphylococcus aureus
gtgattgctaagtttttttgtgcttatttttctaatggtagattattcattatattattttattgtagtggtacgaatcataaagttataatcccaatttcaattgatttaatt

SEQ ID NO: 4417 - DNA, 96 bp, Staphylococcus aureus
ttgagaaagccttttcaaacatcaattgcatttgttgaaaaatgttcacatttcagcaacaaatgtgtgaatctattatattttacagataattca

SEQ ID NO: 4418 - DNA, 93 bp, Staphylococcus aureus
atgatgcacatcatatttgtaactcatagaaaattttataatttttatcattatatttcaactgaaaatgagaaacaaaatggcactttttac

SEQ ID NO: 4419 - DNA, 105 bp, Staphylococcus aureus
atgcgcttaccattatcaagcaatagctacacatataatctgtttatcttattacttcataaaaaaaagcacttcccaaaaatggaaagtgcaagtagtgagcca

SEQ ID NO: 4420 - DNA, 102 bp, Staphylococcus aureus
atggtaggagatcatattataccatggagtaaaggtggaaaaacagagcgtggaaacttacagatgctttataaacatcataatagtctaaaatccaattac

SEQ ID NO: 4421 - DNA, 138 bp, Staphylococcus aureus
atgcgattggatagttttatgatgaataattcaacgaattataagcgcttaaaagcaaatttagaatatttgaaaatgaatcagatgattaaccatcttgatgatgttatcgattttataaacacaacctgtcattca

SEQ ID NO: 4422 - DNA, 75 bp, Staphylococcus aureus
ggtctcgtagtgtagcggttcacacgccctgccctgtcacgcaggatatcgcgggttcgattcccgtcgagaccg

SEQ ID NO: 4423 - DNA, 111 bp, Staphylococcus aureus
atgagaaagataatctgtcatctagttctcttaattaagttcttatcaaaaaaacttatccacctgtactggatagatatgaccatcaatgtggttttgcagattacatag

SEQ ID NO: 4424 - DNA, 285 bp, Staphylococcus aureus
atttattttacgtgttcatattttgaaacatcaaagccgtcttgcttagctttgttgataatgtctttgattgaatgtagtcctttatcggcgaagtatgatcttaagttgtcttttgtagcttgtcagcattcttatctaataacacatcgatatagcttaattcatgttctaagaagtttgcgtcatcatgtagtacgagtccattttgagaataaactttcgcatctgcttgattaccatatccaacaacgccagttgctaatacacctaccattgccgtag

SEQ ID NO: 4425 - DNA, 141 bp, Staphylococcus aureus
gtgtcaaataagtgtcaaaaaagttggattctgagttttacattcaacattgttcatgaagaaacttctttatacgcaaaaaattctccatgttatatatgtcaatataaaaatgtgaatcgtctacacttaattggataa

SEQ ID NO: 4426 - DNA, 135 bp, Staphylococcus aureus
atagcaacctcctaccatctcatgactaagttaattagtctgtcctgttcgtctgtgttctcttcaatccattcatctattgcttggttgaataagtctgatgccatatctaagtcattctcatctacgacataa

SEQ ID NO: 4427 - DNA, 159 bp, Staphylococcus aureus
atgattaccaaagaatttttaaaaactaaacttgagtgttcagatatgtacgctcagaaactcatagacgagacacaaggcaatgaaaataagttatatgacctatttatccgaaaacttgcagaacgtcatacacgccccgctatcgtcgaatattaa

SEQ ID NO: 4428 - DNA, 90 bp, Staphylococcus aureus
ttgcaagctgaacagttaaaaggcgatgtgaaagttaaagagcgggagatagagatattaagaagtagattgagacattttgaaggttaa

SEQ ID NO: 4429 - DNA, 450 bp, Staphylococcus aureus
atccccttacaacttttagttgttaggggcttttatgcatgtgctcggcgcatgtgttcctcttcttccttacaacttttagttgttaggggattttatgcatgtgctcggcgcatgtatccctcttttaccttacaacttttagttgttaggggattttatgcatgtgctcggtgcatgtatccctcttcttccttacaacctttagttgttaggggcttttttgcttgcgctcggtgcatgtatccctcttttaccttacaacttttagttgttaggggcttttttgcatgtgctcggcgcatgtatccctcttttaccttacaacttttagttgttaggggcttttttgcatgtgctcggcgcatgtatccctcttttaccctacaaactataattcgtaagccattatgcacgggttcttcactgttgttaaagaggtatgattga

SEQ ID NO: 4430 - DNA, 240 bp, Staphylococcus aureus
atatattactatacactttttatatttgtctataataaaaagatttcatttttactctattatacatttcagatatcttacttacttggtattaacaacacttcccaacttcacttgcagtatgcttcctgtcttttgagctgtgtaataccatgtacgtacctcttttcaatcaaaataaaaagccagtgccgatgcactgaccaaaaacattatttacatttacgaccatacaaataa

SEQ ID NO: 4431 - DNA, 162 bp, Staphylococcus aureus
atgagcaacatttataaaagctacctagtagcagtactgtgctttacagtcttagcaattgtacttatgccttttctgtacttcactacagcatggtctcttgcaggattcgcaagtatcgcaatactcatattttttaaagaatacttttatggaaagtaa

SEQ ID NO: 4432 - DNA, 123 bp, Staphylococcus aureus
atcacctccacaattttatctaataaggtttcataccataatcttacagattgttctgaacactctaagacattgctaatatctttaaaactacgtccttgtattaaagaatcgaaaatataa

SEQ ID NO: 4433 - DNA, 96 bp, Staphylococcus aureus
atgttatcgtctgccatccattcattagaattttcatcacctattgaaagaaatcatcggtttttatttcatcatctatcaacacatcacttatag

SEQ ID NO: 4434 - DNA, 213 bp, Staphylococcus aureus
ttgatatccaaaaaggtgttaagtcaggcatggattacaactccttatgctgcaaagtggtattcttttaatatttctttagctttatctgattttaagaattccatccactcttttgctaatttactatctgatgtagcaccagcttcgtatgtgattggtttcttaagttctacttctttaattacttttacagtatcaatttttttgtga

SEQ ID NO: 4435 - DNA, 120 bp, Staphylococcus aureus
atgataaatactactaatgaaacgaaccacatcacgatattagttggtaaacctggaaatactgcaaagagggagccaacaacaaaaccaatgattaatgcaaaagtcattagtttatga

SEQ ID NO: 4436 - DNA, 96 bp, Staphylococcus aureus
ttgcaaatcatcttactgctgtttttaattatgctaatttgcgatgcagctattataaggacagagttgtttatgaattgtggtgatttagaaata

SEQ ID NO: 4437 - DNA, 402 bp, Staphylococcus aureus
atgaaaatgcgcttgcaacaagcttttttcaactctagtcaggggccccaacacagagaaattggatttccaatttctacagacaatgcaagttggggtgtgggccccaacacagagaatttcgaaaagaaattctacaggcaatgcgagttggggtgtgggccccaacacagagaaattggatttccaatttctacagacaatgcaagttggggtgtgggccccaacacagagaaattggatttccaatttctacagacaatgcaagttggggtgtgggccccaacaaagagaatttcgaaaagaaattctacaggcaatgcgagttggggtgtgggccccaacacagaagcttacgataagtcagcttacgataatgtgcaagttggggtggtacaacga

SEQ ID NO: 4438 - DNA, 111 bp, Staphylococcus aureus
ttgaatgtacgtttctctattttactattagctttttcaactttagcatttggcgtttttgatgcattggatgatttagcatttgttgtttttgaattcttattactagtt

SEQ ID NO: 4439 - DNA, 96 bp, Staphylococcus aureus
ttgatttttatagcgaaaaagttgagcatcggcaattttatcatattgttcgagtataaagggaactatttaaatgtaatgaaggttgcgccaaaa

SEQ ID NO: 4440 - DNA, 99 bp, Staphylococcus aureus
ttgttttttattcatttacatcgatatgagtttctggatattttaattcatttattaataattttacgtgctcatcgtcaagactatttaaatcaagtt

SEQ ID NO: 4441 - DNA, 102 bp, Staphylococcus aureus
gtgcaaatagaaaagcagataacttttttatttgcacgttttattttagaacaagaaagaacaaggtcaacgagtcagaaaaactttttcttgatacgtatt

SEQ ID NO: 4442 - DNA, 90 bp, Staphylococcus aureus
ctgctacttgcgccaacaagtaacagtaacaaacatttaagaaataaaattcaagttaaatataaaacgaaaaacggaggaagtcaacca

SEQ ID NO: 4443 - DNA, 117 bp, Staphylococcus aureus
gtgaatgtgaatttgcattcatttatgggttatttttttgcaaatttatgtaaacgggaacatcgacaaagttttactacaatttcagacgaatacctaattaaaacaacaccacaa

SEQ ID NO: 4444 - DNA, 210 bp, Staphylococcus aureus
atgcgccgagcacatgcaaaaaagcccctaacaactaaaagttgtaaggtaaaagagggatacatgcgccgagcacatgcaaaaaagcccctaacaactaaaagttgtaaggtaaaagagggatacatgcaccgagcgcaagcaaaaaagcccctaacaactaaaggttgtaaggaagaagagggatacatgcaccgagcacatgcataa

SEQ ID NO: 4445 - DNA, 177 bp, Staphylococcus aureus
atggtattacacagctcaaaagacaggaagcatactgcaagtgaagttgggaagtgttgtcaataccaagtaagtaagatatctgaaatgtataatagagtaaaaatgaaatctttttattatattatagacaagtataaaaaaggtatagtaatatatgtatgtataagtaaataa

SEQ ID NO: 4446 - DNA, 375 bp, Staphylococcus aureus
ttgattccaactttttcatctatcatatttttattctttaaattaaagtactatgcaatagtaacaattttagtgaccatgatcataatgtatttgagtaattttgcaacagtaggtttgtttttaactttaagaaaatacactactgatcctgcaatactcttaccattatatatactttctttttcatcagtttcattattagcgacatatttggtaagaatatctctaaagaaatttaaaaaatcatacttatctttaaataaaacttatatgattataatttcattcgtattatttgcaacatttgcatttttttatatttattctacaaatacaagttcaaacggtgatagcttaattccatatgcactt

SEQ ID NO: 4447 - DNA, 277 bp, Staphylococcus aureus
gtaggaaactttgggaaatgtaatctgttatataacagcactaataataactgtcattttttacatttctatatactaatgtgacaagatgagcaaaactcattttgtggataatgtttaaaagtcatacacaccatacacaagttatcaacatgtgtataacttcgccaaatctatgtttttacgacttatccaccaatccacagcacctactactattactaagaacttaaaacctatataattatatataaacgactggaaggagttttaatta

SEQ ID NO: 4448 - DNA, 277 bp, Staphylococcus aureus
taattaaaactccttccagtcgtttatatataattatataggttttaagttcttagtaatagtagtaggtgctgtggattggtggataagtcgtaaaaacatagatttggcgaagttatacacatgttgataacttgtgtatggtgtgtatgacttttaaacattatccacaaaatgagttttgctcatcttgtcacattagtatatagaaatgtaaaaaatgacagttattattagtgctgttatataacagattacatttcccaaagtttcctac

SEQ ID NO: 4449 - DNA, 380 bp, Staphylococcus aureus
aaataaatataaataaaggatgacgtgattaattaaaacgtcatcctttattttttggcaaaaataattctagatgcgtatgtaaaataaatttgacagcattttaaacagcaaataaaagacgccaattaaatttatgacaaatgtatccaaaatttaataagtgtgcttatatgccctttaaatttaaaattttaatagtcaataacaagttgaatattaaagttaaacgccgttaaatagcgttaaaaaattgaaaatgacagtattgccaaaaaataagaattaattatttatatgtaaacggtttctacctctattttaaatgaaatttgtgacaaaaaaaggtataatatattaatgacacacaaagaaatgga

SEQ ID NO: 4450 - DNA, 380 bp, Staphylococcus aureus
tccatttctttgtgtgtcattaatatattatacctttttttgtcacaaatttcatttaaaatagaggtagaaaccgtttacatataaataattaattcttattttttggcaatactgtcattttcaattttttaacgctatttaacggcgtttaactttaatattcaacttgttattgactattaaaattttaaatttaaagggcatataagcacacttattaaattttggatacatttgtcataaatttaattggcgtcttttatttgctgtttaaaatgctgtcaaatttattttacatacgcatctagaattatttttgccaaaaaataaaggatgacgttttaattaatcacgtcatcctttatttatatttattt

SEQ ID NO: 4451 - DNA, 87 bp, Staphylococcus aureus
taaaaaaataagacttccctatatgtaggggagtcttatttttatgctagaaagtaatgctgtactatattcaatgattagtaatga

SEQ ID NO: 4452 - DNA, 87 bp, Staphylococcus aureus
tcattactaatcattgaatatagtacagcattactttctagcataaaaataagactcccctacatatagggaagtcttattttttta

SEQ ID NO: 4453 - DNA, 286 bp, Staphylococcus aureus
gtaaaagccttttccaaatttattcaattttaaaaatatatagtaacttttaacaaaatgtattataaatttctgaattcattattatttgtcgttaaatacaatagaaaatactatacctgtatatgcaattcgtcaatagataaattattaaatatgcttacaacaatcttaatatcctttaacgcactacaatagtgctctgataataggttataaatgtacgtaaaaccattgtttcaataaaaatgaaaacgtatacttcaagaaggatgggttacttaat

SEQ ID NO: 4454 - DNA, 286 bp, Staphylococcus aureus
attaagtaacccatccttcttgaagtatacgttttcatttttattgaaacaatggttttacgtacatttataacctattatcagagcactattgtagtgcgttaaaggatattaagattgttgtaagcatatttaataatttatctattgacgaattgcatatacaggtatagtattttctattgtatttaacgacaaataataatgaattcagaaatttataatacattttgttaaaagttactatatatttttaaaattgaataaatttggaaaaggcttttac

SEQ ID NO: 4455 - DNA, 378 bp, Staphylococcus aureus
atcgacatgagtgatgtttgaaatcgttacttgaaaaagcaaatatagtttgctatattaaaattaacttaataagacattgttcgtaggacaagtaatatatagtgttcgatatcagagagcttgtggttagtgtgaacaagaatcaacatatatatgaatctacctacttaatttaaaagaacaatcggtgataaccgttattttagtgaagtgcaatttaggtttagtgtatctttataacttaaattgttaaatagggtggcaacgcgtagaccacgtcccttgtagggatgtggtctttttttattttctaaaaaataaagacgtacgtcattccataataaatgataattatttgggaaaggatgaaggtta

SEQ ID NO: 4456 - DNA, 378 bp, Staphylococcus aureus
taaccttcatcctttcccaaataattatcatttattatggaatgacgtacgtctttattttttagaaaataaaaaaagaccacatccctacaagggacgtggtctacgcgttgccaccctatttaacaatttaagttataaagatacactaaacctaaattgcacttcactaaaataacggttatcaccgattgttcttttaaattaagtaggtagattcatatatatgttgattcttgttcacactaaccacaagctctctgatatcgaacactatatattacttgtcctacgaacaatgtcttattaagttaattttaatatagcaaactatatttgctttttcaagtaacgatttcaaacatcactcatgtcgat

SEQ ID NO: 4457 - DNA, 650 bp, Staphylococcus aureus
aggctttagctacaagctttaaaaagtatatattctacgtatacttaaagcaagggcaagatactttaaataatattttaaaaagtggtgacgaagctgtcgccactttttttgtgctgtaaaagtataatagtgagccaatgcacataacaacaataaattaagtttgtggtttaatggggtgaacgcatttcattatagcaacaatacgggataattatgatgaactaaaacaatctaaaacgtaacaattttgagcatcactattataggaaattaagtgataaaaaactgatttcgttgatgtagtatgagtaatatcgatggagtagggtagggggagaggatgatgattataagggagtgttacatgaatcaatatcccagactcatcattagatataaaaaattataaaattagtacttaaaaacaactacaaatccgtagaaaatatggaggtagtcttaaataaaaattgaaaattatcaaaaataaaaagttgatatgaagatgattgaagacgccagtatgtctaacctcagacaaactggtgtctaatgttattgcttagggtatagaactgtattagactaggtatattattttttcgtaattatataaatataaagtggcaaaggaggtaattgag

SEQ ID NO: 4458 - DNA, 650 bp, Staphylococcus aureus
ctcaattacctcctttgccactttatatttatataattacgaaaaaataatatacctagtctaatacagttctataccctaagcaataacattagacaccagtttgtctgaggttagacatactggcgtcttcaatcatcttcatatcaactttttatttttgataattttcaatttttatttaagactacctccatattttctacggatttgtagttgtttttaagtactaattttataattttttatatctaatgatgagtctgggatattgattcatgtaacactcccttataatcatcatcctctccccctaccctactccatcgatattactcatactacatcaacgaaatcagttttttatcacttaatttcctataatagtgatgctcaaaattgttacgttttagattgttttagttcatcataattatcccgtattgttgctataatgaaatgcgttcaccccattaaaccacaaacttaatttattgttgttatgtgcattggctcactattatacttttacagcacaaaaaaagtggcgacagcttcgtcaccactttttaaaatattatttaaagtatcttgcccttgctttaagtatacgtagaatatatactttttaaagcttgtagctaaagcct

SEQ ID NO: 4459 - DNA, 269 bp, Staphylococcus aureus
aaataactgaaaatcattgaacagatatttaaacttaggtaaactgttagtaatcagaaaattctgatatacaaatcgtctatggtatgactgggaatcgtatacacgaaagcgatttggctaacgtatgacaatgataacaatattttaaatgataaaagtaattcatcactgaatctcaactaacacataacaatttcatatttcttattgtgagaagttgagggacttggccctgtgatacttcagcaaccgactttatagcacgg

SEQ ID NO: 4460 - DNA, 269 bp, Staphylococcus aureus
ccgtgctataaagtcggttgctgaagtatcacagggccaagtccctcaacttctcacaataagaaatatgaaattgttatgtgttagttgagattcagtgatgaattacttttatcatttaaaatattgttatcattgtcatacgttagccaaatcgctttcgtgtatacgattcccagtcataccatagacgatttgtatatcagaattttctgattactaacagtttacctaagtttaaatatctgttcaatgattttcagttattt

SEQ ID NO: 4461 - DNA, 235 bp, Staphylococcus aureus
taatgtatatatttttaaagaatgaagctactaaatcacagttatcatattcaaagacatctagagtacatgagagtggaaatgaattgtaaatctaaatcaagcttgattgctatgtagtgggattaaataatcatgttgaaaatgaaagcacacaaaagcgattcaaatgagtatgttaattacttataaaacatgaaagttattattcaattaaatgaaatagaagcataca

SEQ ID NO: 4462 - DNA, 235 bp, Staphylococcus aureus
tgtatgcttctatttcatttaattgaataataactttcatgttttataagtaattaacatactcatttgaatcgcttttgtgtgctttcattttcaacatgattatttaatcccactacatagcaatcaagcttgatttagatttacaattcatttccactctcatgtactctagatgtctttgaatatgataactgtgatttagtagcttcattctttaaaaatatatacatta

SEQ ID NO: 4463 - DNA, 76 bp, Staphylococcus aureus
aaaagtttttccgtacaataatcattaagatgataaaattgtacggtttttattttgttctgaacgggttgatata

SEQ ID NO: 4464 - DNA, 76 bp, Staphylococcus aureus
tatatcaacccgttcagaacaaaataaaaaccgtacaattttatcatcttaatgattattgtacggaaaaactttt

SEQ ID NO: 4465 - DNA, 112 bp, Staphylococcus aureus
tgatttttcttttaaaaaggccgaaaatcaatgttcgatttttatttgcattatggtctcgatattggtagaatatcaaatggttaaatgagaaaaacttggaggtgctcac

SEQ ID NO: 4466 - DNA, 112 bp, Staphylococcus aureus
gtgagcacctccaagtttttctcatttaaccatttgatattctaccaatatcgagaccataatgcaaataaaaatcgaacattgattttcggcctttttaaaagaaaaatca

SEQ ID NO: 4467 - DNA, 429 bp, Staphylococcus aureus
aactttatataagtcatacgcaatgattataaatacatgagccttctatctttattggtaggaggcttttgctttgtttgcttctgtatcgattcgattatttagataaaaattactaacgtaaaggtgatatttgctagtcataatttaaaagattagatgatatttaacaaaattaagaagaaatacttgaatttaataagtctgatgtcgaaaatagctattaaaatagagtagacgtaagtgtaaatgaaagtacctaaaatagaaaaatttcaaaaatagcgtaattattataataaatagactgccaataaaatgcaatttttcacttataacattcttcaaaaaataatagcaaaattatgtaaaaaatatcttgtcatggcaagattggctgtgctataatctatcttgtgcttaagaacg

SEQ ID NO: 4468 - DNA, 429 bp, Staphylococcus aureus
cgttcttaagcacaagatagattatagcacagccaatcttgccatgacaagatattttttacataattttgctattattttttgaagaatgttataagtgaaaaattgcattttattggcagtctatttattataataattacgctatttttgaaatttttctattttaggtactttcatttacacttacgtctactctattttaatagctattttcgacatcagacttattaaattcaagtatttcttcttaattttgttaaatatcatctaatcttttaaattatgactagcaaatatcacctttacgttagtaatttttatctaaataatcgaatcgatacagaagcaaacaaagcaaaagcctcctaccaataaagatagaaggctcatgtatttataatcattgcgtatgacttatataaagtt

SEQ ID NO: 4469 - DNA, 613 bp, Staphylococcus aureus
tacaaatgcctatccaagaggataggcatttttttgcgtttaatattatattaataaaagatatatggacgaatgataatcatattgatttatctgttcgtccattttctttataatgtatgaacctcaagtaacttagtggttggatatgaaagataaacgtagacaataaaatctttattagacgtacaaacatatgctactgtcaacatatttcttcgttgtgatatgccaccaatcctccataacatcaattgttaaagtaacgaataacgaataatgatatttattttctgagcaatgacgtgcaactagaagttgccattaccctaattttattattggaatagagacctcatcattgtgttaaatatcattatcataatccgccgtgagaaactaataaaaaatattaatatataagtttatattggaaaatagaattaatagcttataaatggtaaattatataataggttactatacgttataagacggaaaatgcgcacaataacaaaaatagtaagcgacatcctgtgattttttacacaaacataaacgataaagaacaaaaaatgataaaataatattaatgatttaagaaaagaggttt

SEQ ID NO: 4470 - DNA, 613 bp, Staphylococcus aureus
aaacctcttttcttaaatcattaatattattttatcattttttgttctttatcgtttatgtttgtgtaaaaaatcacaggatgtcgcttactatttttgttattgtgcgcattttccgtcttataacgtatagtaacctattatataatttaccatttataagctattaattctattttccaatataaacttatatattaatattttttattagtttctcacggcggattatgataatgatatttaacacaatgatgaggtctctattccaataataaaattagggtaatggcaacttctagttgcacgtcattgctcagaaaataaatatcattattcgttattcgttactttaacaattgatgttatggaggattggtggcatatcacaacgaagaaatatgttgacagtagcatatgtttgtacgtctaataaagattttattgtctacgtttatctttcatatccaaccactaagttacttgaggttcatacattataaagaaaatggacgaacagataaatcaatatgattatcattcgtccatatatcttttattaatataatattaaacgcaaaaaaatgcctatcctcttggataggcatttgta

SEQ ID NO: 4471 - DNA, 388 bp, Staphylococcus aureus
tatgaatcgtaataagctagtattgcaagctcatcatatgtgagaagcggtgctagctttttgctggtatgggttttcatggatgacatttctgcgtctctaatgtgcgcatttattcatattttaagtagaaccgcattttaaaattaacgtaactgctattttaaaaactttagtatttgtctaatcattgttataataattaagaaattcattgcacgtgattatcaaaatttaaatataagaaaccggtcgatgaactaaagttacataataggaaaggtatacaaaacagctaatatactgatagtttctgtagggaaaatcgtatatttgcactgatgtatattgcagtcatatagagagattgactgtttaaagagaaagg

SEQ ID NO: 4472 - DNA, 388 bp, Staphylococcus aureus
cctttctctttaaacagtcaatctctctatatgactgcaatatacatcagtgcaaatatacgattttccctacagaaactatcagtatattagctgttttgtatacctttcctattatgtaactttagttcatcgaccggtttcttatatttaaattttgataatcacgtgcaatgaatttcttaattattataacaatgattagacaaatactaaagtttttaaaatagcagttacgttaattttaaaatgcggttctacttaaaatatgaataaatgcgcacattagagacgcagaaatgtcatccatgaaaacccataccagcaaaaagctagcaccgcttctcacatatgatgagcttgcaatactagcttattacgattcata

SEQ ID NO: 4473 - DNA, 185 bp, Staphylococcus aureus
atgagagtcaccctataaagttcggcactgctgtgagacgactttatcgggtgcttttttatgttattggtgggaaatggctgttgttggaattaaggttctatttgaaatgtaaaaaataattcgatattaaatgtaatttataaataatttacataaaatcaatcattttaatataaggatta

SEQ ID NO: 4474 - DNA, 185 bp, Staphylococcus aureus
taatccttatattaaaatgattgattttatgtaaattatttataaattacatttaatatcgaattattttttacatttcaaatagaaccttaattccaacaacagccatttcccaccaataacataaaaaagcacccgataaagtcgtctcacagcagtgccgaactttatagggtgactctcat

SEQ ID NO: 4475 - DNA, 178 bp, Staphylococcus aureus
aatatattgaaaacaatactactgtatttcttaaataagaggtacggtagtgtttttttatggaaaaaagctataaacgttgataaacatgggatataaaaacggggataagtaataagacatcaaggtgtttatccacagaaatggggatagttatccagaattgtgtacaatttaa

SEQ ID NO: 4476 - DNA, 178 bp, Staphylococcus aureus
ttaaattgtacacaattctggataactatccccatttctgtggataaacaccttgatgtcttattacttatccccgtttttatatcccatgtttatcaacgtttatagcttttttccataaaaaaacactaccgtacctcttatttaagaaatacagtagtattgttttcaatatatt

SEQ ID NO: 4477 - DNA, 282 bp, Staphylococcus aureus
tgcggttttttcagccgcttcataaagggattttgaatgtatcagaacatatgaggtttatgtgaattgctgttatgtttttaagaagcttatcataagtaatgaggttcatgatttttgacatagttagcctccgcagtctttcatttcaagtaaataatagcgaaatattctttatactgaatacttatagtgaagcaaagttctagctttgagaaaattctttctgcaactaaatatagtaaattacggtaaaatataaataagtacatattgaagaaa

SEQ ID NO: 4478 - DNA, 282 bp, Staphylococcus aureus
tttcttcaatatgtacttatttatattttaccgtaatttactatatttagttgcagaaagaattttctcaaagctagaactttgcttcactataagtattcagtataaagaatatttcgctattatttacttgaaatgaaagactgcggaggctaactatgtcaaaaatcatgaacctcattacttatgataagcttcttaaaaacataacagcaattcacataaacctcatatgttctgatacattcaaaatccctttatgaagcggctgaaaaaaccgca

SEQ ID NO: 4479 - DNA, 185 bp, Staphylococcus aureus
ttacttgaacaagagctaaaataaaattgtgatctaataaaaatagaaactgtaatttaaataaaactttctaaataagctaactgataaaaaatcagtttgtccacagtctgaaacaagattcctatattctttaggaatcttgttttttctatttttatggtgataaagagcagataagataa

SEQ ID NO: 4480 - DNA, 185 bp, Staphylococcus aureus
ttatcttatctgctctttatcaccataaaaatagaaaaaacaagattcctaaagaatataggaatcttgtttcagactgtggacaaactgattttttatcagttagcttatttagaaagttttatttaaattacagtttctatttttattagatcacaattttattttagctcttgttcaagtaa

SEQ ID NO: 4481 - DNA, 131 bp, Staphylococcus aureus
tgaataatattcaagtaattttattgttttttaatttgtcgatatttaagttgagttaaatttaaagggtgtaatttgttttacaatgatgaagataattagtctatcaaaagaaaggggttgggactgtt

SEQ ID NO: 4482 - DNA, 131 bp, Staphylococcus aureus
aacagtcccaacccctttcttttgatagactaattatcttcatcattgtaaaacaaattacaccctttaaatttaactcaacttaaatatcgacaaattaaaaaacaataaaattacttgaatattattca

SEQ ID NO: 4483 - DNA, 90 bp, Staphylococcus aureus
acagaagactcctttttgttaaaattatactataaattcaactttgcaacagaaccatctaatcttcaacaaactggcccgtttgttgaa

SEQ ID NO: 4484 - DNA, 90 bp, Staphylococcus aureus
ttcaacaaacgggccagtttgttgaagattagatggttctgttgcaaagttgaatttatagtataattttaacaaaaaggagtcttctgt

SEQ ID NO: 4485 - DNA, 118 bp, Staphylococcus aureus
ttcaacgcacctttcagcaactaaaataaaaatgacgttatttctatatgtatcaagataagaaagaacaagttcaaaaccatcaaaaaaagacaccttttcaggtgctttttttatt

SEQ ID NO: 4486 - DNA, 118 bp, Staphylococcus aureus
aataaaaaaagcacctgaaaaggtgtctttttttgatggttttgaacttgttctttcttatcttgatacatatagaaataacgtcatttttattttagttgctgaaaggtgcgttgaa

SEQ ID NO: 4487 - DNA, 216 bp, Staphylococcus aureus
gcataaaatcccctttcattttctaatgtaaatctattaccttattattaattcaattcgctcataattaatcctttttcttattacgcaaaatggcccgatttaagcacaccctttattccgttaatgcgccatgacagccatgataattactaatactaggagaagttaataaatacgtaaccaacatgattaacaattattagaggtcatcgt

SEQ ID NO: 4488 - DNA, 216 bp, Staphylococcus aureus
acgatgacctctaataattgttaatcatgttggttacgtatttattaacttctcctagtattagtaattatcatggctgtcatggcgcattaacggaataaagggtgtgcttaaatcgggccattttgcgtaataagaaaaaggattaattatgagcgaattgaattaataataaggtaatagatttacattagaaaatgaaaggggattttatgc

SEQ ID NO: 4489 - DNA, 123 bp, Staphylococcus aureus
ctattaataactcgtcttcctaagcatcctccaatccttttaataacaattatagcatctaatcggttctgttgcaaagtaaaaaaatatagctaaccactaatttatcatgtcagtgttcgc

SEQ ID NO: 4490 - DNA, 123 bp, Staphylococcus aureus
gcgaacactgacatgataaattagtggttagctatatttttttactttgcaacagaaccgattagatgctataattgttattaaaaggattggaggatgcttaggaagacgagttattaatag

SEQ ID NO: 4491 - DNA, 83 bp, Staphylococcus aureus
acagaagactcctttttgttaaaattatactataaattcaactttgcaacagaaccgtattatggaatagagatgttggtaac

SEQ ID NO: 4492 - DNA, 83 bp, Staphylococcus aureus
gttaccaacatctctattccataatacggttctgttgcaaagttgaatttatagtataattttaacaaaaaggagtcttctgt

SEQ ID NO: 4493 - DNA, 112 bp, Staphylococcus aureus
actagtggccgattgtgcttgatgagcttgggacataaatcctaactcgaaataaataagcatatcactaaactgattttttaaagtttacagtgatatgcttattttttta

SEQ ID NO: 4494 - DNA, 112 bp, Staphylococcus aureus
taaaaaaataagcatatcactgtaaactttaaaaaatcagtttagtgatatgcttatttatttcgagttaggatttatgtcccaagctcatcaagcacaatcggccactagt

SEQ ID NO: 4495 - DNA, 228 bp, Staphylococcus aureus
aattgcagataaggggtacagaaaaactagacttgattacaaaatggagcttgggacataaatgattttttaaaaatgagatgagacgtagattaactccataatcaatacgaatctatcgacttctttatttatgatattcatctctttttaatggaaataaaagtgcgattaatgtgataatacagttacgttaattaaaaaaataaaaatgcaaggagaggtaat

SEQ ID NO: 4496 - DNA, 228 bp, Staphylococcus aureus
attacctctccttgcatttttatttttttaattaacgtaactgtattatcacattaatcgcacttttatttccattaaaaagagatgaatatcataaataaagaagtcgatagattcgtattgattatggagttaatctacgtctcatctcatttttaaaaaatcatttatgtcccaagctccattttgtaatcaagtctagtttttctgtaccccttatctgcaatt

SEQ ID NO: 4497 - DNA, 96 bp, Staphylococcus aureus
aaagttagaggtgagtcttacgtttcagtgacggtagacttacctttaacatgttacatactaaaaaattaatttgaataagaaagagagacatat

SEQ ID NO: 4498 - DNA, 96 bp, Staphylococcus aureus
atatgtctctctttcttattcaaattaattttttagtatgtaacatgttaaaggtaagtctaccgtcactgaaacgtaagactcacctctaacttt

SEQ ID NO: 4499 - DNA, 99 bp, Staphylococcus aureus
caatatcctccttatataagactacatttgtagtatattacaaatgtagtatttatgtcaaaataatgttataatttttgtgatatggaggtgtagaag

SEQ ID NO: 4500 - DNA, 99 bp, Staphylococcus aureus
cttctacacctccatatcacaaaaattataacattattttgacataaatactacatttgtaatatactacaaatgtagtcttatataaggaggatattg

SEQ ID NO: 4501 - DNA, 101 bp, Staphylococcus aureus
aattgttgtgtttacaacaatacatagaaaacagaggaaacaatcaagtcgttgaatatttcctctgttttttagttgaaaaaattaaccgaaagcctgaa

SEQ ID NO: 4502 - DNA, 101 bp, Staphylococcus aureus
ttcaggctttcggttaattttttcaactaaaaaacagaggaaatattcaacgacttgattgtttcctctgttttctatgtattgttgtaaacacaacaatt

SEQ ID NO: 4503 - DNA, 173 bp, Staphylococcus aureus
tttattgaaataataaaaaaaataaaagaacgaagatgataacctaagtgaggttttaagttgttctaaggtttaatttaatttatgttaaaatagttggtataaaaatacatgataaactataaactaaattcaaaataacttatggggtaggcaattatggaaaataaaat

SEQ ID NO: 4504 - DNA, 173 bp, Staphylococcus aureus
attttattttccataattgcctaccccataagttattttgaatttagtttatagtttatcatgtatttttataccaactattttaacataaattaaattaaaccttagaacaacttaaaacctcacttaggttatcatcttcgttcttttattttttttattatttcaataaa

SEQ ID NO: 4505 - DNA, 113 bp, Staphylococcus aureus
aaaactaattcaaatgaataatcaaagttcgtaattgtctttataaaaaaatccctcaatccgaattgaattttcggattgagggatttttatagttctattgcagaagaaaa

SEQ ID NO: 4506 - DNA, 113 bp, Staphylococcus aureus
ttttcttctgcaatagaactataaaaatccctcaatccgaaaattcaattcggattgagggatttttttataaagacaattacgaactttgattattcatttgaattagtttt

SEQ ID NO: 4507 - DNA, 135 bp, Staphylococcus aureus
acttacctcctataaatacctatgagggtataataaaacggatagaatcatttgccaaatacctataggggtatttgacaattttgttttaatttattattattaacttaatcaatttatgtggaggaaatgaat

SEQ ID NO: 4508 - DNA, 135 bp, Staphylococcus aureus
attcatttcctccacataaattgattaagttaataataataaattaaaacaaaattgtcaaatacccctataggtatttggcaaatgattctatccgttttattataccctcataggtatttataggaggtaagt

SEQ ID NO: 4509 - DNA, 288 bp, Staphylococcus aureus
ttcactaatctcttttattctctgagttattttgatatctcctggagaaggtgtgatgtcttatcaagagtaaattacaaaagaatcatttaaatcaatactttcactttgaatacatgtatttgaagtggaaggtacttatttcaaaaatagtaaaacctgtatcttaaattacttaatagtaacataagatacaggctgattttttattcattgttatttatactaaagcacccgatagctctgaaaacaatcacaaattcaacttttcaaagccacagctttaag

SEQ ID NO: 4510 - DNA, 288 bp, Staphylococcus aureus
cttaaagctgtggctttgaaaagttgaatttgtgattgttttcagagctatcgggtgctttagtataaataacaatgaataaaaaatcagcctgtatcttatgttactattaagtaatttaagatacaggttttactatttttgaaataagtaccttccacttcaaatacatgtattcaaagtgaaagtattgatttaaatgattcttttgtaatttactcttgataagacatcacaccttctccaggagatatcaaaataactcagagaataaaagagattagtgaa

SEQ ID NO: 4511 - DNA, 517 bp, Staphylococcus aureus
atcattgcctcctagatagtgttatagtgatgtagtttatgtacatcattgggataatatatatttgatttgtcatttattacgcatcccggtgagaatgagagaaaattccatatgaaaaaccgcttcaaaccttggtatgacaaggaaatcccgaaattccgcctattttgacgaacaatcaactcattctttataactattgatgttagggtggggctctgctttcttatatattatttatttataaagaataacgggattttgggattgtgcttgcacaatccttctgcttcttcgaatctgcaaatcccaatcatttcccgataaaaaatcattgtgggatgttctttagcaatttcaatataagcatcgtgtagttatgaaaaaaattacgacaatgactgtttcattagataagtgttattgaaattgataaagagaattttaaaaatggttagataaaataaatgaaagaatataatgaaaattattgttataacaatgattctattag

SEQ ID NO: 4512 - DNA, 517 bp, Staphylococcus aureus
ctaatagaatcattgttataacaataattttcattatattctttcatttattttatctaaccatttttaaaattctctttatcaatttcaataacacttatctaatgaaacagtcattgtcgtaatttttttcataactacacgatgcttatattgaaattgctaaagaacatcccacaatgattttttatcgggaaatgattgggatttgcagattcgaagaagcagaaggattgtgcaagcacaatcccaaaatcccgttattctttataaataaataatatataagaaagcagagccccaccctaacatcaatagttataaagaatgagttgattgttcgtcaaaataggcggaatttcgggatttccttgtcataccaaggtttgaagcggtttttcatatggaattttctctcattctcaccgggatgcgtaataaatgacaaatcaaatatatattatcccaatgatgtacataaactacatcactataacactatctaggaggcaatgat

SEQ ID NO: 4513 - DNA, 192 bp, Staphylococcus aureus
ttaacttcctcctactaatgaactaagataggaaaattaaatatgcgcacaattaactttcttaagttcattttagccaagaagttatcatttgaaagcttgtaaaaatatgttagaaattccgtactaaattaagatggatttttgttgacaaaataaaaaacgctgatttaacagcgctttaaataaaaa

SEQ ID NO: 4514 - DNA, 192 bp, Staphylococcus aureus
tttttatttaaagcgctgttaaatcagcgttttttattttgtcaacaaaaatccatcttaatttagtacggaatttctaacatatttttacaagctttcaaatgataacttcttggctaaaatgaacttaagaaagttaattgtgcgcatatttaattttcctatcttagttcattagtaggaggaagttaa

SEQ ID NO: 4515 - DNA, 250 bp, Staphylococcus aureus
agtgtcactacctttatttttaataacactatatattatatcttataaacctaataccatgaagaataaaaagaatgattcaaattttatatttaatccatagttggctgctatggttagtgtactagtctagttttactagtatataaaacagtactcaatttttattttttcaaaattataaaaaagaacacctatcatcgataggcactgaacccctaaaacgggaacttaataaaaacaccatgtt

SEQ ID NO: 4516 - DNA, 250 bp, Staphylococcus aureus
aacatggtgtttttattaagttcccgttttaggggttcagtgcctatcgatgataggtgttcttttttataattttgaaaaaataaaaattgagtactgttttatatactagtaaaactagactagtacactaaccatagcagccaactatggattaaatataaaatttgaatcattctttttattcttcatggtattaggtttataagatataatatatagtgttattaaaaataaaggtagtgacact

SEQ ID NO: 4517 - DNA, 66 bp, Staphylococcus aureus
agaatgatcaaatggtaaataagtaatatcggttgttaatacttctatgggacaattcgctttaaa

SEQ ID NO: 4518 - DNA, 66 bp, Staphylococcus aureus
tttaaagcgaattgtcccatagaagtattaacaaccgatattacttatttaccatttgatcattct

SEQ ID NO: 4519 - DNA, 170 bp, Staphylococcus aureus
agaaaaaacacctccgtatgattcattttaatatgaattcaacgaaagtgtttttatataattcccactaattggggtcagtctactatatgatacggttttttaatttaaagtatcaataataattggatatagagggaaagaagctataatgatatttgcttactaag

SEQ ID NO: 4520 - DNA, 170 bp, Staphylococcus aureus
cttagtaagcaaatatcattatagcttctttccctctatatccaattattattgatactttaaattaaaaaaccgtatcatatagtagactgaccccaattagtgggaattatataaaaacactttcgttgaattcatattaaaatgaatcatacggaggtgttttttct

SEQ ID NO: 4521 - DNA, 209 bp, Staphylococcus aureus
tagtcgatattaaaacaatttatcgaaaacgatggttttccatatcctctttagtagcaattttctaacaatatataattaattatatacaaattaagaataattaagaagtatatattaattagagatagtttaaaaattagatttcaatcaattaattaaaacaggttagactattaatttatactaacctgttaaaagtaacaaaa

SEQ ID NO: 4522 - DNA, 209 bp, Staphylococcus aureus
ttttgttacttttaacaggttagtataaattaatagtctaacctgttttaattaattgattgaaatctaatttttaaactatctctaattaatatatacttcttaattattcttaatttgtatataattaattatatattgttagaaaattgctactaaagaggatatggaaaaccatcgttttcgataaattgttttaatatcgacta

SEQ ID NO: 4523 - DNA, 745 bp, Staphylococcus aureus
agagcttgctaagaaaattgcaccgaaagtaagactttagaatctatgggaaagataataaggtttaatagaaatacaagaagtgtaaatagtaagcatataatttatacattttaatataatataacaagaaaggtaaacacaaagataataaaaataaaaatttaataaagatagagaattattaaattgtttttgatataaaacaacttaataaaaaatttaattttaggggaggataattataatataaagaaacatagaatggaattgcaattgggaagtatacgattttaactgcgaatcatatgttcaacgacttacaaatgcgtaaatcgataacacattcaaaaatatataatctgaaaattgatttactaagagaggattattgtagttacaggtgttaagttgctccaatatggagttgtcgtcttgttttatattaaacaagttttattcaaatacatgacaatacgtaaaataacactagaattatcaatcactaaaattaaaacaaatgtatctattcaaacttttctttagggtttacttgctgaataatttaaaaatgaagtattaggtgtacatgctttcagaattgcttttgaagaatattaaaagtataatctgaatacgatgacagaatgaataggtaaactatgacaagaagtcatcaaggttatcaaataaatatatcccagcggttgagacgactcactgctgggattttattgttagttat

SEQ ID NO: 4524 - DNA, 745 bp, Staphylococcus aureus
ataactaacaataaaatcccagcagtgagtcgtctcaaccgctgggatatatttatttgataaccttgatgacttcttgtcatagtttacctattcattctgtcatcgtattcagattatacttttaatattcttcaaaagcaattctgaaagcatgtacacctaatacttcatttttaaattattcagcaagtaaaccctaaagaaaagtttgaatagatacatttgttttaattttagtgattgataattctagtgttattttacgtattgtcatgtatttgaataaaacttgtttaatataaaacaagacgacaactccatattggagcaacttaacacctgtaactacaataatcctctcttagtaaatcaattttcagattatatatttttgaatgtgttatcgatttacgcatttgtaagtcgttgaacatatgattcgcagttaaaatcgtatacttcccaattgcaattccattctatgtttctttatattataattatcctcccctaaaattaaattttttattaagttgttttatatcaaaaacaatttaataattctctatctttattaaatttttatttttattatctttgtgtttacctttcttgttatattatattaaaatgtataaattatatgcttactatttacacttcttgtatttctattaaaccttattatctttcccatagattctaaagtcttactttcggtgcaattttcttagcaagctct

SEQ ID NO: 4525 - DNA, 146 bp, Staphylococcus aureus
ttatctttctgttttgttaatcatctttatagtttctttataactttccttaaatgttaatacttcgattagataactcttgttaagattttgatgaaagtaaggagggagcgcaatgattacactattagctgtcgttgtcatcg

SEQ ID NO: 4526 - DNA, 146 bp, Staphylococcus aureus
cgatgacaacgacagctaatagtgtaatcattgcgctccctccttactttcatcaaaatcttaacaagagttatctaatcgaagtattaacatttaaggaaagttataaagaaactataaagatgattaacaaaacagaaagataa

SEQ ID NO: 4527 - DNA, 543 bp, Staphylococcus aureus
ataaacagggagtgaggtgagacatccatgtggttcattagcattattattttaatagcattcctaattatattaatgattgacgatttaattaaaacatgacaacttcacgcaaaacaatatgaattggatgtaatagagaagggagtaccaagaaatactcagtttattgaggataattattaggggagattagagaagaattctctattcacgaaattactttaacagttgtaatcattggtttcatcatatcgattaatagtacagtcatcttgagattttcaacacactattatagctagctaagatacttttaaattatgacttatttttcatcatttacgatacatcattctcgataacttactatttgttatggtatttatagatttaaagaaagtgaaggagattaagcaatgtaacttggcttaatctctttttgattatatttattaaggcaaagcttcatttcccttaaatcaagtatatcttctgaataagcaaatgaaatcgtgacgccaactacagtgataacttcgc

SEQ ID NO: 4528 - DNA, 543 bp, Staphylococcus aureus
gcgaagttatcactgtagttggcgtcacgatttcatttgcttattcagaagatatacttgatttaagggaaatgaagctttgccttaataaatataatcaaaaagagattaagccaagttacattgcttaatctccttcactttctttaaatctataaataccataacaaatagtaagttatcgagaatgatgtatcgtaaatgatgaaaaataagtcataatttaaaagtatcttagctagctataatagtgtgttgaaaatctcaagatgactgtactattaatcgatatgatgaaaccaatgattacaactgttaaagtaatttcgtgaatagagaattcttctctaatctcccctaataattatcctcaataaactgagtatttcttggtactcccttctctattacatccaattcatattgttttgcgtgaagttgtcatgttttaattaaatcgtcaatcattaatataattaggaatgctattaaaataataatgctaatgaaccacatggatgtctcacctcactccctgtttat

SEQ ID NO: 4529 - DNA, 62 bp, Staphylococcus aureus
cttggtctttgaaaaatcatcgtgaccatttgtcttattacttagatgtagttgttcgtatt

SEQ ID NO: 4530 - DNA, 62 bp, Staphylococcus aureus
aatacgaacaactacatctaagtaataagacaaatggtcacgatgatttttcaaagaccaag

SEQ ID NO: 4531 - DNA, 114 bp, Staphylococcus aureus
atactacccaactttcttatttactttaaaacaaatataagctaaagtagttattatcataaagggaacgtacgttcttatttagctgatttctatgaagagaggttatggata

SEQ ID NO: 4532 - DNA, 114 bp, Staphylococcus aureus
tatccataacctctcttcatagaaatcagctaaataagaacgtacgttccctttatgataataactactttagcttatatttgttttaaagtaaataagaaagttgggtagtat

SEQ ID NO: 4533 - DNA, 348 bp, Staphylococcus aureus
aaaaacctcatcattaactgatacgcagaggcgtatcataagtaaaactaaaaaattctgtatgaggagataataatttggagggtgttaaatggtggacattaaatccacgttcattcaatatataagatatatcacgataattgcgcatataacttaagtagtagctaacagttgaaattaggccctatcaaattggtttatatctaaaatgattaatatagaatgcttctttttgtccttattaaattataaaagtaactttgcaatagaaacagttatttcataatcaacagtcattgacgtagctaagtaatgataaataatcataaataaaattacagatat

SEQ ID NO: 4534 - DNA, 348 bp, Staphylococcus aureus
atatctgtaattttatttatgattatttatcattacttagctacgtcaatgactgttgattatgaaataactgtttctattgcaaagttacttttataatttaataaggacaaaaagaagcattctatattaatcattttagatataaaccaatttgatagggcctaatttcaactgttagctactacttaagttatatgcgcaattatcgtgatatatcttatatattgaatgaacgtggatttaatgtccaccatttaacaccctccaaattattatctcctcatacagaattttttagttttacttatgatacgcctctgcgtatcagttaatgatgaggttttt

SEQ ID NO: 4535 - DNA, 161 bp, Staphylococcus aureus
taagatttgaaagagtatcaatcaagaaagatgtagttttttaataaactatttggaaaataattatcataatttaaaaactgacaatttgcgagactcataaaatgtaataatggaaatagatgtaaaatataattaaggggtgtaatatgaagattaat

SEQ ID NO: 4536 - DNA, 161 bp, Staphylococcus aureus
attaatcttcatattacaccccttaattatattttacatctatttccattattacattttatgagtctcgcaaattgtcagtttttaaattatgataattattttccaaatagtttattaaaaaactacatctttcttgattgatactctttcaaatctta

SEQ ID NO: 4537 - DNA, 98 bp, Staphylococcus aureus
acttttattttaaatcaccctagttcatacctaaaagactttcacacaaacaaacaaaggaggaaacttaaattcctcctttcccttattactcatac

SEQ ID NO: 4538 - DNA, 98 bp, Staphylococcus aureus
gtatgagtaataagggaaaggaggaatttaagtttcctcctttgtttgtttgtgtgaaagtcttttaggtatgaactagggtgatttaaaataaaagt

SEQ ID NO: 4539 - DNA, 97 bp, Staphylococcus aureus
gaatttttaatcatataaatccgaactgcatacatatttgttgaaataagaggtattatttttcgggaaattgctgtctgagttataagtattagtt

SEQ ID NO: 4540 - DNA, 97 bp, Staphylococcus aureus
aactaatacttataactcagacagcaatttcccgaaaaataatacctcttatttcaacaaatatgtatgcagttcggatttatatgattaaaaattc

SEQ ID NO: 4541 - DNA, 136 bp, Staphylococcus aureus
agtcatacctccacttttaattgaataaaaatatattaatagataaacacaaatgtgtcaaatacccctagaggtatttgacaagttccattcaaccgtttagaatacccctacaggtatttttagggaggttatt

SEQ ID NO: 4542 - DNA, 136 bp, Staphylococcus aureus
aataacctccctaaaaatacctgtaggggtattctaaacggttgaatggaacttgtcaaatacctctaggggtatttgacacatttgtgtttatctattaatatatttttattcaattaaaagtggaggtatgact

SEQ ID NO: 4543 - DNA, 270 bp, Staphylococcus aureus
taaagtacagaaaagaataaatttttaatgaaaaatcttttactataaaagattaagtatttaaatgacgtgtcagtgttgtgtttatatgtcgtgaatttttagctctaaatagtataagattgaaaaagttgttactgttttaaatgatcacgatgaagtcattcaataagaatgattatgaaaatagaaacagcagtaagatattttctaattgaaaatcatctcactgctgttttttaaaggtttatacctcatcctctaaattat

SEQ ID NO: 4544 - DNA, 270 bp, Staphylococcus aureus
ataatttagaggatgaggtataaacctttaaaaaacagcagtgagatgattttcaattagaaaatatcttactgctgtttctattttcataatcattcttattgaatgacttcatcgtgatcatttaaaacagtaacaactttttcaatcttatactatttagagctaaaaattcacgacatataaacacaacactgacacgtcatttaaatacttaatcttttatagtaaaagatttttcattaaaaatttattcttttctgtacttta

SEQ ID NO: 4545 - DNA, 298 bp, Staphylococcus aureus
aatgatagcttggtatgtacctccaatagtaatttcaataactttgtctgttgaacactaagagcaattttaatttcataatgtgttgtaaacattttttttgattggagtttttttctgagttaaacgatatcctgatgtatttttaattttgcaccatttccaaaaggataagtgacataagtaaaaaggcatcatcgggagttatcctatcaggaaaaccaagataatacctaagtagaaagtgttcaatccgtgttaaattgggaaatatcatccataaactttattactcata

SEQ ID NO: 4546 - DNA, 298 bp, Staphylococcus aureus
tatgagtaataaagtttatggatgatatttcccaatttaacacggattgaacactttctacttaggtattatcttggttttcctgataggataactcccgatgatgcctttttacttatgtcacttatccttttggaaatggtgcaaaattaaaaatacatcaggatatcgtttaactcagaaaaaaactccaatcaaaaaaaatgtttacaacacattatgaaattaaaattgctcttagtgttcaacagacaaagttattgaaattactattggaggtacataccaagctatcatt

SEQ ID NO: 4547 - DNA, 308 bp, Staphylococcus aureus
aatatatttataccctctttataattagtatctcgattttttatgcatgatgatattaccacaaaagcctaacttatacaaaaggaatttcaatagttgcaaccatttgaaagggaagtctaagagtagtctaaaataaatgttgtggtaagttgatcaatacaaagatcaaggattatagtattaaattgttcattattaatgatacactacttatgaatatgattcagaattttctttggctacttttacagtaaagcgattttttagttatcttataacaaagacaaatttataaaggtgatatt

SEQ ID NO: 4548 - DNA, 308 bp, Staphylococcus aureus
aatatcacctttataaatttgtctttgttataagataactaaaaaatcgctttactgtaaaagtagccaaagaaaattctgaatcatattcataagtagtgtatcattaataatgaacaatttaatactataatccttgatctttgtattgatcaacttaccacaacatttattttagactactcttagacttccctttcaaatggttgcaactattgaaattccttttgtataagttaggcttttgtggtaatatcatcatgcataaaaaatcgagatactaattataaagagggtataaatatatt

SEQ ID NO: 4549 - DNA, 198 bp, Staphylococcus aureus
tcataaattgccatactcaactattttgaaaagtatcaatttcatattatcaaattattgagtatctcgatttattgttatacacaaacagtatttttgctatgatagagttaataaatataataaattgaataagtaactttacaaaactagaatgattcaattcaatcacaattatttgaaaatagaggtgagcag

SEQ ID NO: 4550 - DNA, 198 bp, Staphylococcus aureus
ctgctcacctctattttcaaataattgtgattgaattgaatcattctagttttgtaaagttacttattcaatttattatatttattaactctatcatagcaaaaatactgtttgtgtataacaataaatcgagatactcaataatttgataatatgaaattgatacttttcaaaatagttgagtatggcaatttatga

SEQ ID NO: 4551 - DNA, 266 bp, Staphylococcus aureus
ttaagggagtgctcattcaggagtgctcttttttgatgtccaaatttagttgcaaatgaaggcatagaagaaatttttatagtcatttattggataataaattatggtcatatcgattaattttattagtgaggattttacaaacatttgttgaataaatatggtaatgataatatatgaatatttttgaaaaaacactaatatgattaaattatttgttaaaatagcattaagtaaaaaacaaatagggaacaaggtgggatttc

SEQ ID NO: 4552 - DNA, 266 bp, Staphylococcus aureus
gaaatcccaccttgttccctatttgttttttacttaatgctattttaacaaataatttaatcatattagtgttttttcaaaaatattcatatattatcattaccatatttattcaacaaatgtttgtaaaatcctcactaataaaattaatcgatatgaccataatttattatccaataaatgactataaaaatttcttctatgccttcatttgcaactaaatttggacatcaaaaaagagcactcctgaatgagcactcccttaa

SEQ ID NO: 4553 - DNA, 56 bp, Staphylococcus aureus
catacaaaaaagtatatagaggaagttatacattttaaaaggagcaaaattgaata

SEQ ID NO: 4554 - DNA, 56 bp, Staphylococcus aureus
tattcaattttgctccttttaaaatgtataacttcctctatatacttttttgtatg

SEQ ID NO: 4555 - DNA, 205 bp, Staphylococcus aureus
cgataaggagctggcgattataaagctagctccttttttaacttatatatgtaaagcactatcctaagggtctttaatcatatgtcaataattcctataattaatactcttaaatattgtttaaataagttttaaaattttacacatatttttatttaaaaaagatgtataattaatgtattaaatatagaaagaagttgatatt

SEQ ID NO: 4556 - DNA, 205 bp, Staphylococcus aureus
aatatcaacttctttctatatttaatacattaattatacatcttttttaaataaaaatatgtgtaaaattttaaaacttatttaaacaatatttaagagtattaattataggaattattgacatatgattaaagacccttaggatagtgctttacatatataagttaaaaaaggagctagctttataatcgccagctccttatcg

SEQ ID NO: 4557 - DNA, 220 bp, Staphylococcus aureus
ggattcaataatgatattaagacgagtatgaaaatagttagattctaattattttcactactcgtttttattttgaaaataagtaataattcaacaatattataaattgaacagattgtttgtgaaatttttgataatattaaagtgaaaaagtgttataaattgataaatatatgtaattaacaaaaacaaatcattttaaaaagaagagagttgtaag

SEQ ID NO: 4558 - DNA, 220 bp, Staphylococcus aureus
cttacaactctcttctttttaaaatgatttgtttttgttaattacatatatttatcaatttataacactttttcactttaatattatcaaaaatttcacaaacaatctgttcaatttataatattgttgaattattacttattttcaaaataaaaacgagtagtgaaaataattagaatctaactattttcatactcgtcttaatatcattattgaatcc

SEQ ID NO: 4559 - DNA, 51 bp, Staphylococcus aureus
acgtgaccaataaagagtatgaaatcgaacccggaaaaagagagtgatgaa

SEQ ID NO: 4560 - DNA, 51 bp, Staphylococcus aureus
ttcatcactctctttttccgggttcgatttcatactctttattggtcacgt

SEQ ID NO: 4561 - DNA, 67 bp, Staphylococcus aureus
tcatgattcgatcaaattatgaaatcgatccaggaaaaacaataaaaagaaataggattgtgaaatt

SEQ ID NO: 4562 - DNA, 67 bp, Staphylococcus aureus
aatttcacaatcctatttctttttattgtttttcctggatcgatttcataatttgatcgaatcatga

SEQ ID NO: 4563 - DNA, 64 bp, Staphylococcus aureus
tcgtgactaataaagagtatgaaatcgattcaaggaaacaaaataaaaagaagagagttgtaag

SEQ ID NO: 4564 - DNA, 64 bp, Staphylococcus aureus
cttacaactctcttctttttattttgtttccttgaatcgatttcatactctttattagtcacga

SEQ ID NO: 4565 - DNA, 66 bp, Staphylococcus aureus
tcatgactcgattaaaatatgaaatcaatccaggaaagataataataagaataggattgtgaaatt

SEQ ID NO: 4566 - DNA, 66 bp, Staphylococcus aureus
aatttcacaatcctattcttattattatctttcctggattgatttcatattttaatcgagtcatga

SEQ ID NO: 4567 - DNA, 96 bp, Staphylococcus aureus
tctcctgcctcccacacgattcaacacgaatttcaaatatgttgctgtaaaataatgtaaaataaacgtattcatattactgaattgagggatagt

SEQ ID NO: 4568 - DNA, 96 bp, Staphylococcus aureus
actatccctcaattcagtaatatgaatacgtttattttacattattttacagcaacatatttgaaattcgtgttgaatcgtgtgggaggcaggaga

SEQ ID NO: 4569 - DNA, 150 bp, Staphylococcus aureus
aatgatcacaaatcacaaattttgatatacataatttgtgattttttatattcaaagctaaaattgcaaaaaattaatggttaacatctctgttgttggcaatataaataatgattaatcatttatgatgtaactaaggagatgaaggat

SEQ ID NO: 4570 - DNA, 150 bp, Staphylococcus aureus
atccttcatctccttagttacatcataaatgattaatcattatttatattgccaacaacagagatgttaaccattaattttttgcaattttagctttgaatataaaaaatcacaaattatgtatatcaaaatttgtgatttgtgatcatt

SEQ ID NO: 4571 - DNA, 162 bp, Staphylococcus aureus
taacgatgacacgccaagtgttttgataatgatataaatgaaagtaaagcaaattaaatgaggaaatgtatagagcagtgcatatagataaatctatgattggattaacactaatataaatataaatgaaaaaccatccacttaaacttttgataagttagg

SEQ ID NO: 4572 - DNA, 162 bp, Staphylococcus aureus
cctaacttatcaaaagtttaagtggatggtttttcatttatatttatattagtgttaatccaatcatagatttatctatatgcactgctctatacatttcctcatttaatttgctttactttcatttatatcattatcaaaacacttggcgtgtcatcgtta

SEQ ID NO: 4573 - DNA, 202 bp, Staphylococcus aureus
tgattcgatgtcagactccgagaacagtgtccgtcatgcttaccgcatactaatgaagcattattatatcagtgtttatagccgatttaagataataaagtttgctaaacaaaaaagccaatccattgatgttggattgaccttgtatatgcctctgaatctctaattttaaaaaatatgaatataaataagacattaaaaa

SEQ ID NO: 4574 - DNA, 202 bp, Staphylococcus aureus
tttttaatgtcttatttatattcatattttttaaaattagagattcagaggcatatacaaggtcaatccaacatcaatggattggcttttttgtttagcaaactttattatcttaaatcggctataaacactgatataataatgcttcattagtatgcggtaagcatgacggacactgttctcggagtctgacatcgaatca

SEQ ID NO: 4575 - DNA, 91 bp, Staphylococcus aureus
tatttcacctcaaataagctttatatttagattatcgcttataattgtaaatttaatgttaagattaggtaaaattatttaacaatatatg

SEQ ID NO: 4576 - DNA, 91 bp, Staphylococcus aureus
catatattgttaaataattttacctaatcttaacattaaatttacaattataagcgataatctaaatataaagcttatttgaggtgaaata

SEQ ID NO: 4577 - DNA, 56 bp, Staphylococcus aureus
ttctatcccactccatgatttgaaatcaccaaataaaaatctattaatggttttcg

SEQ ID NO: 4578 - DNA, 56 bp, Staphylococcus aureus
cgaaaaccattaatagatttttatttggtgatttcaaatcatggagtgggatagaa

SEQ ID NO: 4579 - DNA, 173 bp, Staphylococcus aureus
atccaccaagtcctttcgtattagaatacactcagactatacccctttgtgaattgtaaatattagtatttatattggtaaatttgacgaaattagatcatttttatatttttgatttttaaaattttatcactcgaatgtttttggattctgaggtgcgggacttggaataa

SEQ ID NO: 4580 - DNA, 173 bp, Staphylococcus aureus
ttattccaagtcccgcacctcagaatccaaaaacattcgagtgataaaattttaaaaatcaaaaatataaaaatgatctaatttcgtcaaatttaccaatataaatactaatatttacaattcacaaaggggtatagtctgagtgtattctaatacgaaaggacttggtggat

SEQ ID NO: 4581 - DNA, 189 bp, Staphylococcus aureus
ttaaaacaataattcgaatcattatgtggcatgttaaacagctaaatataagctatgcacatttaacaagcggatactcctgacgcaattatagtatcattacatattgtttaatcgtttggggtaatgtaattaaaaggtaaaataggcagagtgttatacataaaatgtaaagaaagaggcgataga

SEQ ID NO: 4582 - DNA, 189 bp, Staphylococcus aureus
tctatcgcctctttctttacattttatgtataacactctgcctattttaccttttaattacattaccccaaacgattaaacaatatgtaatgatactataattgcgtcaggagtatccgcttgttaaatgtgcatagcttatatttagctgtttaacatgccacataatgattcgaattattgttttaa

SEQ ID NO: 4583 - DNA, 261 bp, Staphylococcus aureus
aaatataaactgtcatgatgcatttttgaagcggattcctgatattattataaataatatctagtatttataattaaaatgatatattatttattatagttaaatattgtgtatattttgtgaactttttgtaaaaattcgattgcctgtcacatataggagtgttacattttaaatatgtgatcatcgcaaaatataagttgaaataggttgtagattaatcagaatgataaatattttatataaagagagggagtcatt

SEQ ID NO: 4584 - DNA, 261 bp, Staphylococcus aureus
aatgactccctctctttatataaaatatttatcattctgattaatctacaacctatttcaacttatattttgcgatgatcacatatttaaaatgtaacactcctatatgtgacaggcaatcgaatttttacaaaaagttcacaaaatatacacaatatttaactataataaataatatatcattttaattataaatactagatattatttataataatatcaggaatccgcttcaaaaatgcatcatgacagtttatattt

SEQ ID NO: 4585 - DNA, 112 bp, Staphylococcus aureus
atataaataatgttgtcacttggattcaaatgacattttaaatctaattattcatgaatcgaactagtacgaaatgcaatgagcatcttgtctagttcgattttttaatgtc

SEQ ID NO: 4586 - DNA, 112 bp, Staphylococcus aureus
gacattaaaaaatcgaactagacaagatgctcattgcatttcgtactagttcgattcatgaataattagatttaaaatgtcatttgaatccaagtgacaacattatttatat

SEQ ID NO: 4587 - DNA, 101 bp, Staphylococcus aureus
tagatgattcttatcatttcaaataagaatgtgttaatcaacgtatataagttaaaattggtttggataaaatgatatctatcgttgtgtattgtttgttt

SEQ ID NO: 4588 - DNA, 101 bp, Staphylococcus aureus
aaacaaacaatacacaacgatagatatcattttatccaaaccaattttaacttatatacgttgattaacacattcttatttgaaatgataagaatcatcta

SEQ ID NO: 4589 - DNA, 360 bp, Staphylococcus aureus
tactaaaatctatatttataattaaatttaaatgtaagttttacaacttataaaataaatattttgctgaaagatttattcaggaagtaaaaggcttaaaaccgcaaaatcacgctatttcgattaataaaaacagataaaatatagagatattttttataatgaaagcggtttaatacatatgagttaaaaaatatttttaagaataaagtggggctttgaatgtgctgaggtttaatttcggaaatggttttaagtgatatagaaaatagaaagttgttcattatgtgctgaggttttattaaaaaatagaaaacacaagtgcactttagaatacagcacacttgcgtaatagagata

SEQ ID NO: 4590 - DNA, 360 bp, Staphylococcus aureus
tatctctattacgcaagtgtgctgtattctaaagtgcacttgtgttttctattttttaataaaacctcagcacataatgaacaactttctattttctatatcacttaaaaccatttccgaaattaaacctcagcacattcaaagccccactttattcttaaaaatattttttaactcatatgtattaaaccgctttcattataaaaaatatctctatattttatctgtttttattaatcgaaatagcgtgattttgcggttttaagccttttacttcctgaataaatctttcagcaaaatatttattttataagttgtaaaacttacatttaaatttaattataaatatagattttagta

SEQ ID NO: 4591 - DNA, 368 bp, Staphylococcus aureus
tgttttatctccttgtatatgcactttattttaatataacacaatataataagaaaaataatccataatttacaattaaaaataatatgatatttttattaaaatttgtgtttttgaataaatgacattatcaaacactatatttaaataagaaatagttatcgatatttgaaaaatcgaagaatattgattgatattatagaatatgagtcggtgttatttgtatataaagtattaatatgtaattaagaaagtcgacgcttgttaacaataacaacaactatatgtataaaaaaacctcgcaactgttagttaactgaatcatttagctaacttcgttgtgaggtcattttgttttaataatatcg

SEQ ID NO: 4592 - DNA, 368 bp, Staphylococcus aureus
cgatattattaaaacaaaatgacctcacaacgaagttagctaaatgattcagttaactaacagttgcgaggtttttttatacatatagttgttgttattgttaacaagcgtcgactttcttaattacatattaatactttatatacaaataacaccgactcatattctataatatcaatcaatattcttcgatttttcaaatatcgataactatttcttatttaaatatagtgtttgataatgtcatttattcaaaaacacaaattttaataaaaatatcatattatttttaattgtaaattatggattatttttcttattatattgtgttatattaaaataaagtgcatatacaaggagataaaaca

SEQ ID NO: 4593 - DNA, 230 bp, Staphylococcus aureus
tgactaattagcctccttcgtgatgtatgacaatgagaatcattatcacgatttagtatgaattaaattttttcctaagtcaataaaatatttatgatttacatgcaacttataattatttgacatataaatgcataaaaaatataatcctaattacttgatagtgagaatcattatcaattaggtaacacacaatattatagaattttaaatttgaggaggaagcgctt

SEQ ID NO: 4594 - DNA, 230 bp, Staphylococcus aureus
aagcgcttcctcctcaaatttaaaattctataatattgtgtgttacctaattgataatgattctcactatcaagtaattaggattatattttttatgcatttatatgtcaaataattataagttgcatgtaaatcataaatattttattgacttaggaaaaaatttaattcatactaaatcgtgataatgattctcattgtcatacatcacgaaggaggctaattagtca

SEQ ID NO: 4595 - DNA, 195 bp, Staphylococcus aureus
ttttactgtgatgttgagggaaatatgatgatttagcgtattgatagcgaaaatataataaaacaatatagtgtggagaacttttgatattttataaatattgaagttctccatttttgtattttgcatataaaaattaaataaaataaggtatattaaggtaaagtataaatattaaataaatggggaatagac

SEQ ID NO: 4596 - DNA, 195 bp, Staphylococcus aureus
gtctattccccatttatttaatatttatactttaccttaatataccttattttatttaatttttatatgcaaaatacaaaaatggagaacttcaatatttataaaatatcaaaagttctccacactatattgttttattatattttcgctatcaatacgctaaatcatcatatttccctcaacatcacagtaaaa

SEQ ID NO: 4597 - DNA, 211 bp, Staphylococcus aureus
tgacaaactaatcgagagacttaaaaaaataatattcaacataagaacttttaaaacgacatttaaacgcattgccaatcactaatggtagtgcgtttaactataccttaaatatctgaatattttgttaaatggagctacctttgttgtactattcaaatgaagaggagtaaaatgtaattaaaggaaagaaatttgaggagtgatcttt

SEQ ID NO: 4598 - DNA, 211 bp, Staphylococcus aureus
aaagatcactcctcaaatttctttcctttaattacattttactcctcttcatttgaatagtacaacaaaggtagctccatttaacaaaatattcagatatttaaggtatagttaaacgcactaccattagtgattggcaatgcgtttaaatgtcgttttaaaagttcttatgttgaatattatttttttaagtctctcgattagtttgtca

SEQ ID NO: 4599 - DNA, 81 bp, Staphylococcus aureus
taaataaaaaatatagataaaaagcttacaatactttatgtttttatgatatatttttaatgtataaatgaggtggaagat

SEQ ID NO: 4600 - DNA, 81 bp, Staphylococcus aureus
atcttccacctcatttatacattaaaaatatatcataaaaacataaagtattgtaagctttttatctatattttttattta

SEQ ID NO: 4601 - DNA, 209 bp, Staphylococcus aureus
tcttaatttacttaataagttcaaataaaagttatattttaaagattgtgaccaattgttacagtataacgaggaatcccttgagacagtatcaaatggcattaagaaatatgtgccatcattgatttgcatggctataaatactattcatctgatgagatagccatgttaagaaattgaaagtatagcattaaaggggtttgtaacag

SEQ ID NO: 4602 - DNA, 209 bp, Staphylococcus aureus
ctgttacaaacccctttaatgctatactttcaatttcttaacatggctatctcatcagatgaatagtatttatagccatgcaaatcaatgatggcacatatttcttaatgccatttgatactgtctcaagggattcctcgttatactgtaacaattggtcacaatctttaaaatataacttttatttgaacttattaagtaaattaaga

SEQ ID NO: 4603 - DNA, 267 bp, Staphylococcus aureus
gtatcggtaacgctatactttagaaatttaagattaagaagaaaaggcaatttcttattgaaaaatggaagttgtcttttttaattctctttaaaagcgggaaacaaaagcagttaaatgcctttttgcattcaatattaaatattatatcaatttcgaatatttaaattttatataattggatataacaaataaataataattattgcaaaacacacccgaaattaattattataaaagtatattcataaaaggaggaatatactt

SEQ ID NO: 4604 - DNA, 267 bp, Staphylococcus aureus
aagtatattcctccttttatgaatatacttttataataattaatttcgggtgtgttttgcaataattattatttatttgttatatccaattatataaaatttaaatattcgaaattgatataatatttaatattgaatgcaaaaaggcatttaactgcttttgtttcccgcttttaaagagaattaaaaaagacaacttccatttttcaataagaaattgccttttcttcttaatcttaaatttctaaagtatagcgttaccgatac

SEQ ID NO: 4605 - DNA, 366 bp, Staphylococcus aureus
tataacttaatataattgaggtggagcatttacaaggtgttccacttttttgtacttaatatctttacttatttgtttttgtgtaatgggatagcacgtaaaagtggcaaaataataagataaatttcaactcgaaataccttattattgttgactataatgatgacctaaatgttatatacatcagacaacactattaattaatcaacatattgacattaaataaattgacaaaataagtaattattgtgaatctaaagtgaaatttttataaaaaattgtaacgattcaaaaattttgttgcatttcttttgtaatcatatgataatgtaaatgtaatcaaattgtaatataagggaaaagaca

SEQ ID NO: 4606 - DNA, 366 bp, Staphylococcus aureus
tgtcttttcccttatattacaatttgattacatttacattatcatatgattacaaaagaaatgcaacaaaatttttgaatcgttacaattttttataaaaatttcactttagattcacaataattacttattttgtcaatttatttaatgtcaatatgttgattaattaatagtgttgtctgatgtatataacatttaggtcatcattatagtcaacaataataaggtatttcgagttgaaatttatcttattattttgccacttttacgtgctatcccattacacaaaaacaaataagtaaagatattaagtacaaaaaagtggaacaccttgtaaatgctccacctcaattatattaagttata

SEQ ID NO: 4607 - DNA, 52 bp, Staphylococcus aureus
acataatacgattaataatagaaaaatcgtgtgattatctgagcgagcctag

SEQ ID NO: 4608 - DNA, 52 bp, Staphylococcus aureus
ctaggctcgctcagataatcacacgatttttctattattaatcgtattatgt

SEQ ID NO: 4609 - DNA, 57 bp, Staphylococcus aureus
ccatttcttaccaactccctaaatagtcatcaaaaaatttcttatattttaataatt

SEQ ID NO: 4610 - DNA, 57 bp, Staphylococcus aureus
aattattaaaatataagaaattttttgatgactatttagggagttggtaagaaatgg

SEQ ID NO: 4611 - DNA, 167 bp, Staphylococcus aureus
gtagacaacctccataaagttacttaatcactctcatcatacaataatttttactcgaattggaaaaattataaaaattaaatatagataggctttgaaaattagttttatacaaggttagtagctgtaactgtaaaatgttcttaatattgtcaaaatgtaatgct

SEQ ID NO: 4612 - DNA, 167 bp, Staphylococcus aureus
agcattacattttgacaatattaagaacattttacagttacagctactaaccttgtataaaactaattttcaaagcctatctatatttaatttttataatttttccaattcgagtaaaaattattgtatgatgagagtgattaagtaactttatggaggttgtctac

SEQ ID NO: 4613 - DNA, 80 bp, Staphylococcus aureus
atagatataaattcgcgagatatattcgtatttatagtaaaattaaataaagagattatataacacgaggagtagtaagt

SEQ ID NO: 4614 - DNA, 80 bp, Staphylococcus aureus
acttactactcctcgtgttatataatctctttatttaattttactataaatacgaatatatctcgcgaatttatatctat

SEQ ID NO: 4615 - DNA, 128 bp, Staphylococcus aureus
aataaatttagatattataaaaacagcagtgaagttaactataacaatagttttcttcactgctgtttttattataatagagaaacgtgacggtaggacctcttatttaggagtatcctgatttaatg

SEQ ID NO: 4616 - DNA, 128 bp, Staphylococcus aureus
cattaaatcaggatactcctaaataagaggtcctaccgtcacgtttctctattataataaaaacagcagtgaagaaaactattgttatagttaacttcactgctgtttttataatatctaaatttatt

SEQ ID NO: 4617 - DNA, 194 bp, Staphylococcus aureus
gtttgacacctttctttaataaagaaaagccaaggtaaactgaaatatcatagacattgggtttctgtgtacaaatggtttcaaatgtacagcgacacctttctatatctgtttcagtttagcgcctagcttttcaatatttatctagaatatatctattgaacgaaagcttttaataccaaattcgataatga

SEQ ID NO: 4618 - DNA, 194 bp, Staphylococcus aureus
tcattatcgaatttggtattaaaagctttcgttcaatagatatattctagataaatattgaaaagctaggcgctaaactgaaacagatatagaaaggtgtcgctgtacatttgaaaccatttgtacacagaaacccaatgtctatgatatttcagtttaccttggcttttctttattaaagaaaggtgtcaaac

SEQ ID NO: 4619 - DNA, 228 bp, Staphylococcus aureus
ttgataactgtccccttcacattcttaatcgtgtaatatgtatgcaatgaaattacacttatagcgtaccacatttaaatgtgaaaaagtattttataaaaatgaattttaataactttctttaagagtttgataagattttgtaaacttttcgttaaattgctcatatgcaacgaatttttatcctataattcaagaacaaatttattttaaaaggagcctcacaaa

SEQ ID NO: 4620 - DNA, 228 bp, Staphylococcus aureus
tttgtgaggctccttttaaaataaatttgttcttgaattataggataaaaattcgttgcatatgagcaatttaacgaaaagtttacaaaatcttatcaaactcttaaagaaagttattaaaattcatttttataaaatactttttcacatttaaatgtggtacgctataagtgtaatttcattgcatacatattacacgattaagaatgtgaaggggacagttatcaa

SEQ ID NO: 4621 - DNA, 50 bp, Staphylococcus aureus
atatataatagaaataagaaagatgtttgtgattgaaggagtgagtgagg

SEQ ID NO: 4622 - DNA, 50 bp, Staphylococcus aureus
cctcactcactccttcaatcacaaacatctttcttatttctattatatat

SEQ ID NO: 4623 - DNA, 156 bp, Staphylococcus aureus
cggatatatgaaaaacttacttgattttaatcgggtaagtttttgtttttgtttaaactaaccactcttaaacgtcaatatactttaagaaaaatgttgattttacaaaaaatgaggcttatattttatataacttaatattatgaagtgattaat

SEQ ID NO: 4624 - DNA, 156 bp, Staphylococcus aureus
attaatcacttcataatattaagttatataaaatataagcctcattttttgtaaaatcaacatttttcttaaagtatattgacgtttaagagtggttagtttaaacaaaaacaaaaacttacccgattaaaatcaagtaagtttttcatatatccg

SEQ ID NO: 4625 - DNA, 384 bp, Staphylococcus aureus
ggcaccaatatttaaaactcgagctgaaaagatcatcatttcagttcgagtttttttgtgtaacatctgttgataggtagcgacaaggaccttttaatgttgtgttttgtgcgatataacaagctttttaggctattaaagaatattcagaattaaatataaaattatgaataaattatgtcattgaaaaaattatgattataaaatcattctaaaaacaccgaaataacaatgatttcatgaaaacatttattttaaaatttgatatttgttcaaataatattcgaaattaaacttttttgtatagaattttctttatatcctgagagacatgtactataatgtttgtgaaataattcacaaagtataaaggagtggttgtat

SEQ ID NO: 4626 - DNA, 384 bp, Staphylococcus aureus
atacaaccactcctttatactttgtgaattatttcacaaacattatagtacatgtctctcaggatataaagaaaattctatacaaaaaagtttaatttcgaatattatttgaacaaatatcaaattttaaaataaatgttttcatgaaatcattgttatttcggtgtttttagaatgattttataatcataattttttcaatgacataatttattcataattttatatttaattctgaatattctttaatagcctaaaaagcttgttatatcgcacaaaacacaacattaaaaggtccttgtcgctacctatcaacagatgttacacaaaaaaactcgaactgaaatgatgatcttttcagctcgagttttaaatattggtgcc

SEQ ID NO: 4627 - DNA, 342 bp, Staphylococcus aureus
tctatctgataataatcatataactcacctgaaattacaaaagtaaaaaatgccacataaactttaagtcgataatcattttacggttatcggcttttatttattgccaaatcttcagagatacaaactagacaatcatttttttaaataaagaaaatattaagattgatactcatttcgcaaactattactactttagagtataattatttttaatttcatataaatgaatatgcgtaaataatgcggtttaaaagtaattaattgtttaaacgatatgtaatatgtaaatactatatatataataccaattttaatgaaaatttttaagggaggtaaata

SEQ ID NO: 4628 - DNA, 342 bp, Staphylococcus aureus
tatttacctcccttaaaaattttcattaaaattggtattatatatatagtatttacatattacatatcgtttaaacaattaattacttttaaaccgcattatttacgcatattcatttatatgaaattaaaaataattatactctaaagtagtaatagtttgcgaaatgagtatcaatcttaatattttctttatttaaaaaaatgattgtctagtttgtatctctgaagatttggcaataaataaaagccgataaccgtaaaatgattatcgacttaaagtttatgtggcattttttacttttgtaatttcaggtgagttatatgattattatcagataga

SEQ ID NO: 4629 - DNA, 53 bp, Staphylococcus aureus
gtcatctattaaataaaatcaacatacaaatcgttttatttggaggttatagt

SEQ ID NO: 4630 - DNA, 53 bp, Staphylococcus aureus
actataacctccaaataaaacgatttgtatgttgattttatttaatagatgac

SEQ ID NO: 4631 - DNA, 64 bp, Staphylococcus aureus
taaaaaacccctaatcatgaagttggtttagacaaccagcggtgactaggggtttttaatatat

SEQ ID NO: 4632 - DNA, 64 bp, Staphylococcus aureus
atatattaaaaacccctagtcaccgctggttgtctaaaccaacttcatgattaggggtttttta

SEQ ID NO: 4633 - DNA, 426 bp, Staphylococcus aureus
tgaaaaaactccattctagtactaatgcgcatgtaatattgttttagtaatataactcatgctaaatataatgtgtatgataagtgcaatgactcagtaaaatgaaacgttgttgaattattcttgtcccattaacgcattttaagcgcgactttcataacaaccaaactatttaatgagaattattctcaagtattatagttatattatgtgttttatttttgaaaagtgcaatatgttttcgaaaataagattatttttatgtgcaaaaacgacgcaaaagttttaaaaatgagacttctgtgagctgattattttataaaatgtaaacgcttactatataatgtgaatcatatcgtttaaaagcattattaaatatgatgctaagagatttatattatagccaataaacaaaggagagataat

SEQ ID NO: 4634 - DNA, 426 bp, Staphylococcus aureus
attatctctcctttgtttattggctataatataaatctcttagcatcatatttaataatgcttttaaacgatatgattcacattatatagtaagcgtttacattttataaaataatcagctcacagaagtctcatttttaaaacttttgcgtcgtttttgcacataaaaataatcttattttcgaaaacatattgcacttttcaaaaataaaacacataatataactataatacttgagaataattctcattaaatagtttggttgttatgaaagtcgcgcttaaaatgcgttaatgggacaagaataattcaacaacgtttcattttactgagtcattgcacttatcatacacattatatttagcatgagttatattactaaaacaatattacatgcgcattagtactagaatggagttttttca

SEQ ID NO: 4635 - DNA, 161 bp, Staphylococcus aureus
aataaatatcgtttctgaagcgtgtttgtaggtcagtctagcggtaagtcttaacatttaacggcgttgtttagattttaagcaaaacaaaatatataggaacacgtatcatgatattaggatataatgactaaaataatagcagtaggatggtttttaat

SEQ ID NO: 4636 - DNA, 161 bp, Staphylococcus aureus
attaaaaaccatcctactgctattattttagtcattatatcctaatatcatgatacgtgttcctatatattttgttttgcttaaaatctaaacaacgccgttaaatgttaagacttaccgctagactgacctacaaacacgcttcagaaacgatatttatt

SEQ ID NO: 4637 - DNA, 286 bp, Staphylococcus aureus
tgaagttcaatatgcaaagtcatcgtttgttttaatatgtggaacaatcattaaagttattgtgattttttgaacttaatgaaactaaacaataaatttgagatacttttttgtcatttttatgtaactaacacaataatctcgtacattattaaaattttctatatgatagggataaagtaaagagcgaatgtgctgtaaaagtttttccaaggtgatattacataaaggtataaagggtaaagattaattagttgtcatgtaaaggacgatgatgtataaatca

SEQ ID NO: 4638 - DNA, 286 bp, Staphylococcus aureus
tgatttatacatcatcgtcctttacatgacaactaattaatctttaccctttatacctttatgtaatatcaccttggaaaaacttttacagcacattcgctctttactttatccctatcatatagaaaattttaataatgtacgagattattgtgttagttacataaaaatgacaaaaaagtatctcaaatttattgtttagtttcattaagttcaaaaaatcacaataactttaatgattgttccacatattaaaacaaacgatgactttgcatattgaacttca

SEQ ID NO: 4639 - DNA, 178 bp, Staphylococcus aureus
aatgatagccccctatatatatgtttatttacttataccctaacatgatttttatactctttgaaaatatattttacagaattttatctaaatatttaaaaaaatcgctcaatatccttgtaatccgataagaattatagtaatattttttcaaccattgttataggaggtcttatta

SEQ ID NO: 4640 - DNA, 178 bp, Staphylococcus aureus
taataagacctcctataacaatggttgaaaaaatattactataattcttatcggattacaaggatattgagcgatttttttaaatatttagataaaattctgtaaaatatattttcaaagagtataaaaatcatgttagggtataagtaaataaacatatatatagggggctatcatt

SEQ ID NO: 4641 - DNA, 341 bp, Staphylococcus aureus
taagacaacaagttgatgagatatatgtatataggtttgacgtggatttcgattgcagttaattagaatagctcaatgctataaatgtaagtagttgatatgaagaaactaatgaactaaatgcaagtattttctaaaacaatcattttattgaaatttagtagagctgaaattaatataacgtcgttaattgaataacgcttatgttataagagcactcataccaaaccataatcatctatagatataacaattcacgatataagggctgtgtttggcatagccctttagatatacacttaattcctattaaaatagtagggattaaaagggggcttgtc

SEQ ID NO: 4642 - DNA, 341 bp, Staphylococcus aureus
gacaagcccccttttaatccctactattttaataggaattaagtgtatatctaaagggctatgccaaacacagcccttatatcgtgaattgttatatctatagatgattatggtttggtatgagtgctcttataacataagcgttattcaattaacgacgttatattaatttcagctctactaaatttcaataaaatgattgttttagaaaatacttgcatttagttcattagtttcttcatatcaactacttacatttatagcattgagctattctaattaactgcaatcgaaatccacgtcaaacctatatacatatatctcatcaacttgttgtctta

SEQ ID NO: 4643 - DNA, 225 bp, Staphylococcus aureus
gtgtgataagctgattttttgtttagatgcgtttgttgaaacattttttaaaataatataaatcttagtttataaacattttctgttaatttgttatatccttttaactaggaaaatatacatttcgtaataataataatcgttatcattgaaaaagtgttaataaggtgtataatgaaaatgtgaacaattaatgaacttcttattttaaagaaggtgaatact

SEQ ID NO: 4644 - DNA, 225 bp, Staphylococcus aureus
agtattcaccttctttaaaataagaagttcattaattgttcacattttcattatacaccttattaacactttttcaatgataacgattattattattacgaaatgtatattttcctagttaaaaggatataacaaattaacagaaaatgtttataaactaagatttatattattttaaaaaatgtttcaacaaacgcatctaaacaaaaaatcagcttatcacac

SEQ ID NO: 4645 - DNA, 166 bp, Staphylococcus aureus
aataaggatgctgggctagcgattaacgctttcaattttatataaatgaatcatataagcactactgctgttgtaaagatggcagtagtttttttatgattacatctaagtatagtcacggctatgttaggacaatgatttaacatttacgcacatatgtgttcac

SEQ ID NO: 4646 - DNA, 166 bp, Staphylococcus aureus
gtgaacacatatgtgcgtaaatgttaaatcattgtcctaacatagccgtgactatacttagatgtaatcataaaaaaactactgccatctttacaacagcagtagtgcttatatgattcatttatataaaattgaaagcgttaatcgctagcccagcatccttatt

SEQ ID NO: 4647 - DNA, 130 bp, Staphylococcus aureus
tgtaaaatcgatgcatttgtttgttaaataactttgtataactaaaaattctttgtttcaacgtataatctaataatagattttatataaatggtagtgtgtatatatgtggataggggtgtagttatta

SEQ ID NO: 4648 - DNA, 130 bp, Staphylococcus aureus
taataactacacccctatccacatatatacacactaccatttatataaaatctattattagattatacgttgaaacaaagaatttttagttatacaaagttatttaacaaacaaatgcatcgattttaca

SEQ ID NO: 4649 - DNA, 446 bp, Staphylococcus aureus
atttatttaaatatttattttatgcatctttttatattgaaaacctattaatttggtcgtaattaaaatagagataaatttattaagaatttgttaaaatttaaggataacaattgttttatgcgagttgtttgtttaatataaacttgcttcatggatattttgtaacaacaatattgaatttgcaatgagatatgaacaacagaaagtgattaacgagttgtagtgtgctatttatcgaagatgtatgtaatttacattgaaaaatataccaattgtaacgatgatacaagatgtattttagggtagaatatatcgctcatatgttgcgaatggtgttttatattaatcattacataacgagttaattaacatttcgtcggttatcatatcatcatgcaattttagtaagtaatgagtattatgatatgaaagaaggacttttt

SEQ ID NO: 4650 - DNA, 446 bp, Staphylococcus aureus
aaaaagtccttctttcatatcataatactcattacttactaaaattgcatgatgatatgataaccgacgaaatgttaattaactcgttatgtaatgattaatataaaacaccattcgcaacatatgagcgatatattctaccctaaaatacatcttgtatcatcgttacaattggtatatttttcaatgtaaattacatacatcttcgataaatagcacactacaactcgttaatcactttctgttgttcatatctcattgcaaattcaatattgttgttacaaaatatccatgaagcaagtttatattaaacaaacaactcgcataaaacaattgttatccttaaattttaacaaattcttaataaatttatctctattttaattacgaccaaattaataggttttcaatataaaaagatgcataaaataaatatttaaataaat

SEQ ID NO: 4651 - DNA, 327 bp, Staphylococcus aureus
tatgacgtctgacagtatcattgcgcagtgattttaaactatactgcctaaatgtttactgttagatgtatttttattggaaaaatgaaaggtgaatacacgatggcatcattcaaaatcatgacgagattaatgtaagtgataaggtgaaaatatactgagcaatattgaaattgccaaaaataatatcttgttacgacgcatttgagactttaatgctcacgtaagttggctggaatcatatcatgtcagttaataaaataacgtgagcatcaatcatcatactcaaacgatgatttaaaactcacgttaatgttagtcagtgta

SEQ ID NO: 4652 - DNA, 327 bp, Staphylococcus aureus
tacactgactaacattaacgtgagttttaaatcatcgtttgagtatgatgattgatgctcacgttattttattaactgacatgatatgattccagccaacttacgtgagcattaaagtctcaaatgcgtcgtaacaagatattatttttggcaatttcaatattgctcagtatattttcaccttatcacttacattaatctcgtcatgattttgaatgatgccatcgtgtattcacctttcatttttccaataaaaatacatctaacagtaaacatttaggcagtatagtttaaaatcactgcgcaatgatactgtcagacgtcata

SEQ ID NO: 4653 - DNA, 254 bp, Staphylococcus aureus
cttaaggactcctctctatttactatcctcattatagtattttgtgaaaataatcacaataaaaagctttgcaaaacttaaaatattttgataaacaaatttgtaaaaggttattagttttttacatctcatattgtatcgtactgtattcaaaattgttaacgagatgaacggtaaataaatgttttagcgcaatggataatcgaactggaatcatctcgcgtgtcaaaacttgttaggccttaatttcatag

SEQ ID NO: 4654 - DNA, 254 bp, Staphylococcus aureus
ctatgaaattaaggcctaacaagttttgacacgcgagatgattccagttcgattatccattgcgctaaaacatttatttaccgttcatctcgttaacaattttgaatacagtacgatacaatatgagatgtaaaaaactaataaccttttacaaatttgtttatcaaaatattttaagttttgcaaagctttttattgtgattattttcacaaaatactataatgaggatagtaaatagagaggagtccttaag

SEQ ID NO: 4655 - DNA, 258 bp, Staphylococcus aureus
cggtctccctcctttatatttatacaatttaaagaattaatattaatatattacagttgttcaatataagtgtcaaatgtaaatttaataatataaagataaggttgtgtttgtattaatgtgatttgtaaaatgaaagtactaatattttttgtggataatcagtgatatgtatgtatacgattgcagtttaatgtagtatgaataaaaaatgccacaagcatatgtttaacatatgactgtggcatagtattatgc

SEQ ID NO: 4656 - DNA, 258 bp, Staphylococcus aureus
gcataatactatgccacagtcatatgttaaacatatgcttgtggcattttttattcatactacattaaactgcaatcgtatacatacatatcactgattatccacaaaaaatattagtactttcattttacaaatcacattaatacaaacacaaccttatctttatattattaaatttacatttgacacttatattgaacaactgtaatatattaatattaattctttaaattgtataaatataaaggagggagaccg

SEQ ID NO: 4657 - DNA, 142 bp, Staphylococcus aureus
ttatgtagtaggggcgtaagttaagaacgatttaatagatataggctaagtttatagataggaggttagacaacccgacgtattaatactttgtaaaataaagatacccccttcaacatgatcgaagggggtaagtgtatgt

SEQ ID NO: 4658 - DNA, 142 bp, Staphylococcus aureus
acatacacttacccccttcgatcatgttgaagggggtatctttattttacaaagtattaatacgtcgggttgtctaacctcctatctataaacttagcctatatctattaaatcgttcttaacttacgcccctactacataa

SEQ ID NO: 4659 - DNA, 66 bp, Staphylococcus aureus
cttatatcagagtccttttcgtttaataaagtattcgcttaaacttataccctgtatacgatgaaa

SEQ ID NO: 4660 - DNA, 66 bp, Staphylococcus aureus
tttcatcgtatacagggtataagtttaagcgaatactttattaaacgaaaaggactctgatataag

SEQ ID NO: 4661 - DNA, 584 bp, Staphylococcus aureus
ttgtccaacctccaaagttgtatgtaatatttaagattcaataaaaaagacacgagcaaatagactgtgttggtaaccatcacagcttaatttaactcatgcctaatcttacttagtaacacgttggtgtatgtaattaatgtaaaagaagcaattgactaagtagtatataaaactgatacgttagtttatctagcttaccatcacatcttattgaatcttatttgtttgcgactcctattttagcatggtgaagtatgcgttttcaatacaattattaaattcaatttcaaatctcttaaatgttcacagattattattaaaacataatataagataatcctgaataaaatgtataaaagttgttgtaataatccagcagtagcagctattatcagcacttaaaagaaaggataatctttgatggtgtaataattaacttgtgacagaaatatgtaagattattacaatgaacaggctttaactgattaatattgtaatgtgttttctcttatagtaaaatgtaagcgattacacaactcaactatattttcctaataattatattgataaggagggctact

SEQ ID NO: 4662 - DNA, 584 bp, Staphylococcus aureus
agtagccctccttatcaatataattattaggaaaatatagttgagttgtgtaatcgcttacattttactataagagaaaacacattacaatattaatcagttaaagcctgttcattgtaataatcttacatatttctgtcacaagttaattattacaccatcaaagattatcctttcttttaagtgctgataatagctgctactgctggattattacaacaacttttatacattttattcaggattatcttatattatgttttaataataatctgtgaacatttaagagatttgaaattgaatttaataattgtattgaaaacgcatacttcaccatgctaaaataggagtcgcaaacaaataagattcaataagatgtgatggtaagctagataaactaacgtatcagttttatatactacttagtcaattgcttcttttacattaattacatacaccaacgtgttactaagtaagattaggcatgagttaaattaagctgtgatggttaccaacacagtctatttgctcgtgtcttttttattgaatcttaaatattacatacaactttggaggttggacaa

SEQ ID NO: 4663 - DNA, 193 bp, Staphylococcus aureus
atattgtgagcgttctaatataaagttagttgcaacgtaaacaattgaagtttttgatgtgattcagttgtttgatgaaaaattgttgctacaagtttgtaaaactggcatagaggctattttgaaaatgataaaggcgtgacaaattaaagcaaagttcaggtttgagctttgcttttttcatagatggaaa

SEQ ID NO: 4664 - DNA, 193 bp, Staphylococcus aureus
tttccatctatgaaaaaagcaaagctcaaacctgaactttgctttaatttgtcacgcctttatcattttcaaaatagcctctatgccagttttacaaacttgtagcaacaatttttcatcaaacaactgaatcacatcaaaaacttcaattgtttacgttgcaactaactttatattagaacgctcacaatat

SEQ ID NO: 4665 - DNA, 212 bp, Staphylococcus aureus
tcaagtccctccattaatcgtagacaaaaaatttatcaatgatttgattatttgtattcaaattttagtatacgacttacctcaaagacaaatattaaaagataagacaataaaattagaataaatttacgtttgaagataaaaaacaaacatttttcattaaagtttatgatatatttagagcaatagaaagtgtatggaaggggatatga

SEQ ID NO: 4666 - DNA, 212 bp, Staphylococcus aureus
tcatatccccttccatacactttctattgctctaaatatatcataaactttaatgaaaaatgtttgttttttatcttcaaacgtaaatttattctaattttattgtcttatcttttaatatttgtctttgaggtaagtcgtatactaaaatttgaatacaaataatcaaatcattgataaattttttgtctacgattaatggagggacttga

SEQ ID NO: 4667 - DNA, 125 bp, Staphylococcus aureus
atagacctcctaatgatataattctcctatattttatcataaaaataatataaaaaatatattttattaaaactaagtataaaaaatggtttgaagagtatttaacatttataggaggacataaa

SEQ ID NO: 4668 - DNA, 125 bp, Staphylococcus aureus
tttatgtcctcctataaatgttaaatactcttcaaaccattttttatacttagttttaataaaatatattttttatattatttttatgataaaatataggagaattatatcattaggaggtctat

SEQ ID NO: 4669 - DNA, 206 bp, Staphylococcus aureus
taaatttaaaatggtaaaagtactgaagactaattatcatattaaactgactatcaacaccaacgatggaaatgcgtattagaataaaagtaagatatgtattacaaaatgtaaattatatattgaatttacgcaaaaaataacatattacttttaagatataaaaaaatattatataatatttttgagaaggaggtggaaggcct

SEQ ID NO: 4670 - DNA, 206 bp, Staphylococcus aureus
aggccttccacctccttctcaaaaatattatataatatttttttatatcttaaaagtaatatgttattttttgcgtaaattcaatatataatttacattttgtaatacatatcttacttttattctaatacgcatttccatcgttggtgttgatagtcagtttaatatgataattagtcttcagtacttttaccattttaaattta

SEQ ID NO: 4671 - DNA, 58 bp, Staphylococcus aureus
tattaaatacaaaaaaatttttatttttaatatattggtgttaataataggcggatta

SEQ ID NO: 4672 - DNA, 58 bp, Staphylococcus aureus
taatccgcctattattaacaccaatatattaaaaataaaaatttttttgtatttaata

SEQ ID NO: 4673 - DNA, 373 bp, Staphylococcus aureus
aagtgaaaaataatttgaaaatagctagagtttcactatctatgactcaaaaggagctagcaaataaagttggagtaactagacaaacaatatctcttatagaaaagggtgtacataacccctctctatcactatgtaaaaatatttgttcggtgttgaataaaaatttggatgagatatttggagagaaaccacaataaaagagcttattgaaagataatctaaaagtcgacaatatatttcttctcagaaactgctattattttgaaaagaaaacacacgtattataaatttaaaataccgaaatatagcattattaaatcaaaaatagaattaaaaaagaaaattaatcgagaaaagtattaaatgtcat

SEQ ID NO: 4674 - DNA, 373 bp, Staphylococcus aureus
atgacatttaatacttttctcgattaattttcttttttaattctatttttgatttaataatgctatatttcggtattttaaatttataatacgtgtgttttcttttcaaaataatagcagtttctgagaagaaatatattgtcgacttttagattatctttcaataagctcttttattgtggtttctctccaaatatctcatccaaatttttattcaacaccgaacaaatatttttacatagtgatagagaggggttatgtacacccttttctataagagatattgtttgtctagttactccaactttatttgctagctccttttgagtcatagatagtgaaactctagctattttcaaattatttttcactt

SEQ ID NO: 4675 - DNA, 264 bp, Staphylococcus aureus
cacactcgaaaatctgaatattctaataaaatataaataatcccccgcacttcacatagtggcgggggatttattctggcgtcaaaatgcccagagtatgggtgtgacccttaaatcatggcaaggcacttaaaacttgatatggtgccgagccctaacttagcacaatatagttagtatgacaaagtcatctaacataacacatcagaggttgcccgatttattccagaccatacagtgataaagttacacaacgcatgactt

SEQ ID NO: 4676 - DNA, 264 bp, Staphylococcus aureus
aagtcatgcgttgtgtaactttatcactgtatggtctggaataaatcgggcaacctctgatgtgttatgttagatgactttgtcatactaactatattgtgctaagttagggctcggcaccatatcaagttttaagtgccttgccatgatttaagggtcacacccatactctgggcattttgacgccagaataaatcccccgccactatgtgaagtgcgggggattatttatattttattagaatattcagattttcgagtgtg

SEQ ID NO: 4677 - DNA, 312 bp, Staphylococcus aureus
tttatgtatttgatatatagtttgaagtggattttgatttttgttgaacgaaagggttcgatttcaaactttagagtgatgcttgagtgtagtaatgttgaagttgttataagaaacgctagtcgcctttgtaaaatataaaacgccccacaaattcgtttttgatgtacaccacaatagttagtctaaaatctaacttgatgtgattcggtacaattaaatgaatgatgtgaggcgtttttataatgtgtgattttaatatgttaaacgataataaatgatttggttatttctataattacatcataagta

SEQ ID NO: 4678 - DNA, 312 bp, Staphylococcus aureus
tacttatgatgtaattatagaaataaccaaatcatttattatcgtttaacatattaaaatcacacattataaaaacgcctcacatcattcatttaattgtaccgaatcacatcaagttagattttagactaactattgtggtgtacatcaaaaacgaatttgtggggcgttttatattttacaaaggcgactagcgtttcttataacaacttcaacattactacactcaagcatcactctaaagtttgaaatcgaaccctttcgttcaacaaaaatcaaaatccacttcaaactatatatcaaatacataaa

SEQ ID NO: 4679 - DNA, 188 bp, Staphylococcus aureus
acattcccaccgtttctcaaaatacttcattaacactataataatatattttgaaaaatatttacatcagtattaaagtgaatatcaaattttaaatttatgaaaataatagatatttataaaaagcggaaaagagatacaataaaaaactgcatgacgttgaggagtcacacagtgtaattaaaaat

SEQ ID NO: 4680 - DNA, 188 bp, Staphylococcus aureus
atttttaattacactgtgtgactcctcaacgtcatgcagttttttattgtatctcttttccgctttttataaatatctattattttcataaatttaaaatttgatattcactttaatactgatgtaaatatttttcaaaatatattattatagtgttaatgaagtattttgagaaacggtgggaatgt

SEQ ID NO: 4681 - DNA, 136 bp, Staphylococcus aureus
tcaaaatattcaaattaccatcattttcttcatctatatttggcagtactactaaagtatgagtgcatttaattatgaaatagttgatttagaatatatacttaatacccaaaatatatgaaggatggatgccact

SEQ ID NO: 4682 - DNA, 136 bp, Staphylococcus aureus
agtggcatccatccttcatatattttgggtattaagtatatattctaaatcaactatttcataattaaatgcactcatactttagtagtactgccaaatatagatgaagaaaatgatggtaatttgaatattttga

SEQ ID NO: 4683 - DNA, 383 bp, Staphylococcus aureus
ttatagaagagtgcccgcagtctaaaaaattaagcaatcattgtgtgagtatgatacttacataatggttgcttttttcaatgaaaatcgtaatgctaagtcatacttgtttgatttagatattacttaaaatgtaagacaaggttgttagcattggcagtgaaatatcgcacataaaaaaacattattgtcacactagaaaatagttgtgtactatatcaattttctgtataaaagtttaattctgacagtaatgtaaacgtttacaatttatgattgacattaataatgactgaatatatgatttatgtaagtatttgtgcaaacgttttcacaaagtgtattgcacaatcaaactgtaaacaaagtatgggaggcataac

SEQ ID NO: 4684 - DNA, 383 bp, Staphylococcus aureus
gttatgcctcccatactttgtttacagtttgattgtgcaatacactttgtgaaaacgtttgcacaaatacttacataaatcatatattcagtcattattaatgtcaatcataaattgtaaacgtttacattactgtcagaattaaacttttatacagaaaattgatatagtacacaactattttctagtgtgacaataatgtttttttatgtgcgatatttcactgccaatgctaacaaccttgtcttacattttaagtaatatctaaatcaaacaagtatgacttagcattacgattttcattgaaaaaagcaaccattatgtaagtatcatactcacacaatgattgcttaattttttagactgcgggcactcttctataa

SEQ ID NO: 4685 - DNA, 70 bp, Staphylococcus aureus
tttgaaattaggagtggggcagaattgataaagaaccactaatgacgataaagattaaaaggaggacgtt

SEQ ID NO: 4686 - DNA, 70 bp, Staphylococcus aureus
aacgtcctccttttaatctttatcgtcattagtggttctttatcaattctgccccactcctaatttcaaa

SEQ ID NO: 4687 - DNA, 54 bp, Staphylococcus aureus
tgattattatatataatacaaaattctcaatataaaaagaaggagtgcttttca

SEQ ID NO: 4688 - DNA, 54 bp, Staphylococcus aureus
tgaaaagcactccttctttttatattgagaattttgtattatatataataatca

SEQ ID NO: 4689 - DNA, 360 bp, Staphylococcus aureus
tacgaactcgaggttagtctgaagtttgtctgaagtaagactggtggcagtgttgaatgaatgcatatgtcgccaagccattgccaaaaatttcacaccttaaatcatgtcattgtttgtaaagaaggtgtactttatataagtgtttagcgatggtcatacccattcacagtaacaatcctcaccattgaaaagagtatataaccttttcgatagtgaggtatatgataataaaaaaagcctgttgtcacaatggtcatagacacgacatactttaaaggcttctgaatataatatttcagaacgcactttaaagatggacgtcgatgtcgactaatgtgatgacaggctttcatcttt

SEQ ID NO: 4690 - DNA, 360 bp, Staphylococcus aureus
aaagatgaaagcctgtcatcacattagtcgacatcgacgtccatctttaaagtgcgttctgaaatattatattcagaagcctttaaagtatgtcgtgtctatgaccattgtgacaacaggctttttttattatcatatacctcactatcgaaaaggttatatactcttttcaatggtgaggattgttactgtgaatgggtatgaccatcgctaaacacttatataaagtacaccttctttacaaacaatgacatgatttaaggtgtgaaatttttggcaatggcttggcgacatatgcattcattcaacactgccaccagtcttacttcagacaaacttcagactaacctcgagttcgta

SEQ ID NO: 4691 - DNA, 154 bp, Staphylococcus aureus
atactattaactatttattaattttagtacataaatatgtttctaagtatgtgtttatgttcagtattttggataatttaataattttaaggatattaagcgcttacaccgacgtgatatatttggcttaacgaaaatgattgaggtgacagag

SEQ ID NO: 4692 - DNA, 154 bp, Staphylococcus aureus
ctctgtcacctcaatcattttcgttaagccaaatatatcacgtcggtgtaagcgcttaatatccttaaaattattaaattatccaaaatactgaacataaacacatacttagaaacatatttatgtactaaaattaataaatagttaatagtat

SEQ ID NO: 4693 - DNA, 358 bp, Staphylococcus aureus
tataaatcggattaaaagtatcgccaatctattgcaatatagttggcaatcctgccccgacggcatgtgcgtgaagagatgaaagatactgcttctacccttgcaaatatatcatctctatgtctcggggcagatcataattccctgttatgaagtatccttatttgcccgacttagggtgactcaatgaatttactccttacaataaagacatatagcggtgtcaatattgtagggagtattgttttatatttaaactctctaaaaagcggactgaaagaaaagtgaaaacttctctatcagtccgctttttcatagaacaaaatgtaggcgccataatcattagttatgtgctaat

SEQ ID NO: 4694 - DNA, 358 bp, Staphylococcus aureus
attagcacataactaatgattatggcgcctacattttgttctatgaaaaagcggactgatagagaagttttcacttttctttcagtccgctttttagagagtttaaatataaaacaatactccctacaatattgacaccgctatatgtctttattgtaaggagtaaattcattgagtcaccctaagtcgggcaaataaggatacttcataacagggaattatgatctgccccgagacatagagatgatatatttgcaagggtagaagcagtatctttcatctcttcacgcacatgccgtcggggcaggattgccaactatattgcaatagattggcgatacttttaatccgatttata

SEQ ID NO: 4695 - DNA, 441 bp, Staphylococcus aureus
gacgatttaccgaggctgtaaaatcaaactgttatattttatttgtagctgttatataaaaatcggcaagatattgaacggttcaaaagtgaatttttacgtcaataaaagtatttaatccagtctcttcatatataaaagtaaatctttctaagtgttgatttaacgcttatcaacaatcattttttataaacaaatatatactcctaaattaacttttaaagcaatgaaaatagtgaacattataactgttgtgtaacagaatgcaattagcatattactgttacacaaattagtacagtttctatgttttgacatacatttgatgaaaattgtacataatttatgtgaaaaaaatcacaacaaacatgctacaatgactatgaaaacgttaacatagcatttcaaattcacaacattatacagatggaggcgtttagt

SEQ ID NO: 4696 - DNA, 441 bp, Staphylococcus aureus
actaaacgcctccatctgtataatgttgtgaatttgaaatgctatgttaacgttttcatagtcattgtagcatgtttgttgtgatttttttcacataaattatgtacaattttcatcaaatgtatgtcaaaacatagaaactgtactaatttgtgtaacagtaatatgctaattgcattctgttacacaacagttataatgttcactattttcattgctttaaaagttaatttaggagtatatatttgtttataaaaaatgattgttgataagcgttaaatcaacacttagaaagatttacttttatatatgaagagactggattaaatacttttattgacgtaaaaattcacttttgaaccgttcaatatcttgccgatttttatataacagctacaaataaaatataacagtttgattttacagcctcggtaaatcgtc

SEQ ID NO: 4697 - DNA, 104 bp, Staphylococcus aureus
atacaattcagaccgaaaagaaagcatatgcaacttcaagagtgaaggggcatatgcttctttttcaattgagtattgagtattagcaagacgtagtaagtata

SEQ ID NO: 4698 - DNA, 104 bp, Staphylococcus aureus
tatacttactacgtcttgctaatactcaatactcaattgaaaaagaagcatatgccccttcactcttgaagttgcatatgctttcttttcggtctgaattgtat

SEQ ID NO: 4699 - DNA, 163 bp, Staphylococcus aureus
tataaacaaagacctctaaagttatcaagatgataccttcagaggtctttttaatgttgccatctatgggataggcaatcgtttcattcgtttatattcatatgacaagtatttgtatggcaatttggcgtcacaaacacttacatgatttattggtgaatta

SEQ ID NO: 4700 - DNA, 163 bp, Staphylococcus aureus
taattcaccaataaatcatgtaagtgtttgtgacgccaaattgccatacaaatacttgtcatatgaatataaacgaatgaaacgattgcctatcccatagatggcaacattaaaaagacctctgaaggtatcatcttgataactttagaggtctttgtttata

SEQ ID NO: 4701 - DNA, 189 bp, Staphylococcus aureus
gctttgttactcctttgatgtacattaatcaaaaaaattatacactattgtatattgcaaagctaattaactataacaaaaagatagttaatgctttgtttattctagttaatatatagttaatgtcttttaatattttgtttctttaatgtagattgggcaattacattttggaggaattaaaaaatt

SEQ ID NO: 4702 - DNA, 189 bp, Staphylococcus aureus
aattttttaattcctccaaaatgtaattgcccaatctacattaaagaaacaaaatattaaaagacattaactatatattaactagaataaacaaagcattaactatctttttgttatagttaattagctttgcaatatacaatagtgtataatttttttgattaatgtacatcaaaggagtaacaaagc

SEQ ID NO: 4703 - DNA, 185 bp, Staphylococcus aureus
atttataactctatccaaagacatacagtcaatacaaagaattatgtatctatacaacagtaatcatgcattctatgatgcttctaactgaattaaagcatcgaacaatcggaagcatatttctaaattatttattcattatagtcttaaacataacatgacctaatatattactaacctattaa

SEQ ID NO: 4704 - DNA, 185 bp, Staphylococcus aureus
ttaataggttagtaatatattaggtcatgttatgtttaagactataatgaataaataatttagaaatatgcttccgattgttcgatgctttaattcagttagaagcatcatagaatgcatgattactgttgtatagatacataattctttgtattgactgtatgtctttggatagagttataaat

SEQ ID NO: 4705 - DNA, 86 bp, Staphylococcus aureus
taaaatttaaaacaatgattaaaattagacgtgtaaatgttaaattctaaaacggaaataaccaccatcccattaaaccacttttt

SEQ ID NO: 4706 - DNA, 86 bp, Staphylococcus aureus
aaaaagtggtttaatgggatggtggttatttccgttttagaatttaacatttacacgtctaattttaatcattgttttaaatttta

SEQ ID NO: 4707 - DNA, 185 bp, Staphylococcus aureus
agtgattcctccaatttagttgaggataagataaccattaagataattggaataacgttgctattttataaaattaattaagtatctttgacagtcatcttagcctcttatttaaggaaaaagctttatgcttaaaataagtcttttttagtgaaattaatgcatctcatataattatttgctat

SEQ ID NO: 4708 - DNA, 185 bp, Staphylococcus aureus
atagcaaataattatatgagatgcattaatttcactaaaaaagacttattttaagcataaagctttttccttaaataagaggctaagatgactgtcaaagatacttaattaattttataaaatagcaacgttattccaattatcttaatggttatcttatcctcaactaaattggaggaatcact

SEQ ID NO: 4709 - DNA, 66 bp, Staphylococcus aureus
ttaattcaaaaacaacacgctttatttgtaaacgcttacactaaatgtcaaaaatttttatcacct

SEQ ID NO: 4710 - DNA, 66 bp, Staphylococcus aureus
aggtgataaaaatttttgacatttagtgtaagcgtttacaaataaagcgtgttgtttttgaattaa

SEQ ID NO: 4711 - DNA, 351 bp, Staphylococcus aureus
gcaagtcacctccatcacatttgataaaatatagcgtttttacactttgtgtaaacccttacaagaaatataacataacgacgtttaaaatcaattagaaatatctttttattctgataatagacacagtatagacacattttaatggttgataacaattgtaatatcaagggtttgtaatgaattgaatatcattaaaatacttatataaaaatattgctcggaatataaaaagttaaataggttttgagttttaaatatgaaatacaaagcgcccaatcgaacaaagtatttatattaaaatatggaaaatccatcaatattaaattaaaatagttttattatgaaaag

SEQ ID NO: 4712 - DNA, 351 bp, Staphylococcus aureus
cttttcataataaaactattttaatttaatattgatggattttccatattttaatataaatactttgttcgattgggcgctttgtatttcatatttaaaactcaaaacctatttaactttttatattccgagcaatatttttatataagtattttaatgatattcaattcattacaaacccttgatattacaattgttatcaaccattaaaatgtgtctatactgtgtctattatcagaataaaaagatatttctaattgattttaaacgtcgttatgttatatttcttgtaagggtttacacaaagtgtaaaaacgctatattttatcaaatgtgatggaggtgacttgc

SEQ ID NO: 4713 - DNA, 313 bp, Staphylococcus aureus
taattaaagcttatgttgctcatatgtttgtgacataagctatttttataatttgtctttaaaagagtggaataggaatactttttggagttaaaaaagtgtttcacgttaaacaaatagtgacaattagatttatataaaatgaacatgattcattgaaagtatgtaataatcattttattgaaattcatcaaacagaaattaatacaatcatataagcaaattaaaccacgccataatcatattggatgacttcggcgtggtttttatagttgaagcagggctgagacataaatcaatgtcccacactccc

SEQ ID NO: 4714 - DNA, 313 bp, Staphylococcus aureus
gggagtgtgggacattgatttatgtctcagccctgcttcaactataaaaaccacgccgaagtcatccaatatgattatggcgtggtttaatttgcttatatgattgtattaatttctgtttgatgaatttcaataaaatgattattacatactttcaatgaatcatgttcattttatataaatctaattgtcactatttgtttaacgtgaaacacttttttaactccaaaaagtattcctattccactcttttaaagacaaattataaaaatagcttatgtcacaaacatatgagcaacataagctttaatta

SEQ ID NO: 4715 - DNA, 197 bp, Staphylococcus aureus
ttcattaacactctctttctaattactatgtaaaacccaacaattaatattttaaaactttattttgttaaagtaaaatgttgttcaagtttagtaattattaaagttcaattaattgtagtaattatgctttttaaaaataaatattagaaatgaagttagcgacatttatagtgattcacgataaacatatataa

SEQ ID NO: 4716 - DNA, 197 bp, Staphylococcus aureus
ttatatatgtttatcgtgaatcactataaatgtcgctaacttcatttctaatatttatttttaaaaagcataattactacaattaattgaactttaataattactaaacttgaacaacattttactttaacaaaataaagttttaaaatattaattgttgggttttacatagtaattagaaagagagtgttaatgaa

SEQ ID NO: 4717 - DNA, 51 bp, Staphylococcus aureus
attaaaaaacagccatgacaaagtaaagtcatagctgttttggtatagatg

SEQ ID NO: 4718 - DNA, 51 bp, Staphylococcus aureus
catctataccaaaacagctatgactttactttgtcatggctgttttttaat

SEQ ID NO: 4719 - DNA, 97 bp, Staphylococcus aureus
ttaattggtttgagaaaatataaataaaatggcaaatttgataattgtatgacatttttaattttttaaatacttatcaataagcattgtgtacaat

SEQ ID NO: 4720 - DNA, 97 bp, Staphylococcus aureus
attgtacacaatgcttattgataagtatttaaaaaattaaaaatgtcatacaattatcaaatttgccattttatttatattttctcaaaccaattaa

SEQ ID NO: 4721 - DNA, 313 bp, Staphylococcus aureus
taaataatcactggcgaagtacgaagactaaagacacctaagatgtaatcgtatacaaattaaaaaggtgtaaaaattaaaataaaatgtgaaataaatcacaatttaatattgacccagtacttaatgcatgttacattttatatgtgaaataaatcacaaacttaaaagcggatgacacatgaccttttaagttatgcgttgaaaataaaagagatgtttatttgcttttgtatcgccaataagcagcattaaactaacatatttgaagctacacgtatgttagtgaattaatcataagggagtttttgta

SEQ ID NO: 4722 - DNA, 313 bp, Staphylococcus aureus
tacaaaaactcccttatgattaattcactaacatacgtgtagcttcaaatatgttagtttaatgctgcttattggcgatacaaaagcaaataaacatctcttttattttcaacgcataacttaaaaggtcatgtgtcatccgcttttaagtttgtgatttatttcacatataaaatgtaacatgcattaagtactgggtcaatattaaattgtgatttatttcacattttattttaatttttacacctttttaatttgtatacgattacatcttaggtgtctttagtcttcgtacttcgccagtgattattta

SEQ ID NO: 4723 - DNA, 171 bp, Staphylococcus aureus
ctttttataaaatctataccattccaaaaattgtaaaaccttacccaaaaaattgtataaagggctatttgatacaactatatgtgtcgagtagccctatttttaatgtagtgaaagtcgttgttgaaattaaattcaaatctggcacttaagctttaatcatagcattaa

SEQ ID NO: 4724 - DNA, 171 bp, Staphylococcus aureus
ttaatgctatgattaaagcttaagtgccagatttgaatttaatttcaacaacgactttcactacattaaaaatagggctactcgacacatatagttgtatcaaatagccctttatacaattttttgggtaaggttttacaatttttggaatggtatagattttataaaaag

SEQ ID NO: 4725 - DNA, 361 bp, Staphylococcus aureus
caacatccctcctaattattctcaatatagcttttgagaaatttaatatcaatatatattctgtgtatgaaaatatttttcataaaaattgtttgaatcatgtaacaatcatataaattgctgtttatattgttgtgaaaatgagttgacaaaagtcggtatagatatgtagacatcctatttttagcgaggtaggttgataaggcatatcggataaatttataagccataaaatagataaatagtgtttgtatccaaaaatatgagaaagttaaaactatttttcaaaataaacatgattcaccacataaataaatatacataagctatcgataacaacttaagaaaggtggatatataa

SEQ ID NO: 4726 - DNA, 361 bp, Staphylococcus aureus
ttatatatccacctttcttaagttgttatcgatagcttatgtatatttatttatgtggtgaatcatgtttattttgaaaaatagttttaactttctcatatttttggatacaaacactatttatctattttatggcttataaatttatccgatatgccttatcaacctacctcgctaaaaataggatgtctacatatctataccgacttttgtcaactcattttcacaacaatataaacagcaatttatatgattgttacatgattcaaacaatttttatgaaaaatattttcatacacagaatatatattgatattaaatttctcaaaagctatattgagaataattaggagggatgttg

SEQ ID NO: 4727 - DNA, 219 bp, Staphylococcus aureus
taatacttaattaaatagatacagttaaccctaaggcgcctgatataagcgtccttagggtttttatagtggattacattggtcatgacaatttgataatgattgagatatgtatgttaaaaatgcttcaaaaaacataaaacacaaaaatatatgtaaaaatttcaattgctttattttaaaagattaaaatcacaaaaaatatagatataattgaaa

SEQ ID NO: 4728 - DNA, 219 bp, Staphylococcus aureus
tttcaattatatctatattttttgtgattttaatcttttaaaataaagcaattgaaatttttacatatatttttgtgttttatgttttttgaagcatttttaacatacatatctcaatcattatcaaattgtcatgaccaatgtaatccactataaaaaccctaaggacgcttatatcaggcgccttagggttaactgtatctatttaattaagtatta

SEQ ID NO: 4729 - DNA, 68 bp, Staphylococcus aureus
cggaattgatatgtaacgtgggtcaataacatataaatatatgcaaattgcatataaatgactatcac

SEQ ID NO: 4730 - DNA, 68 bp, Staphylococcus aureus
gtgatagtcatttatatgcaatttgcatatatttatatgttattgacccacgttacatatcaattccg

SEQ ID NO: 4731 - DNA, 527 bp, Staphylococcus aureus
tatgcacctttgaggacgaaaacgctggtatagttatagctatgaaagtgcgaatgccgtctggtctacagatactatcgaaataattcatcttcgaatatacgttgataaatagccggtttacttgtgtgaaatatgcttgtgaatcggttgttttgcattttgtatacttaaaatgagatggcaatatttgataatttttaaagtgaaaatcaagtacagccacttaataagataaatttattataatatatggtaaaatgatggcagtaataatgaatttgaaaaagagtaaacattaatacctttaacaatttaatatcgtcagagttaatgattaactgcatggcaaaacaacttagaatggtcagttacaaaaatacatttttataaaaaattatcacactattgtgacaactatctttggattaataaaagaggcaagtgagcaataggttaggcttatgtgcgggcataggtcagtaatgtataaatggaaatgatgtaatgacagaatggaggacaac

SEQ ID NO: 4732 - DNA, 527 bp, Staphylococcus aureus
gttgtcctccattctgtcattacatcatttccatttatacattactgacctatgcccgcacataagcctaacctattgctcacttgcctcttttattaatccaaagatagttgtcacaatagtgtgataattttttataaaaatgtatttttgtaactgaccattctaagttgttttgccatgcagttaatcattaactctgacgatattaaattgttaaaggtattaatgtttactctttttcaaattcattattactgccatcattttaccatatattataataaatttatcttattaagtggctgtacttgattttcactttaaaaattatcaaatattgccatctcattttaagtatacaaaatgcaaaacaaccgattcacaagcatatttcacacaagtaaaccggctatttatcaacgtatattcgaagatgaattatttcgatagtatctgtagaccagacggcattcgcactttcatagctataactataccagcgttttcgtcctcaaaggtgcata

SEQ ID NO: 4733 - DNA, 166 bp, Staphylococcus aureus
tgttggcatatattacttgccatgcaaatgagtcataaggcatagttttcaagaagggttctgacaatgaagtgagcaacatgtcatgatgagaagcaggactatacaatgagaataaccttttgatttttcatgcataaggcgattcaatcaaaagcaatcacct

SEQ ID NO: 4734 - DNA, 166 bp, Staphylococcus aureus
aggtgattgcttttgattgaatcgccttatgcatgaaaaatcaaaaggttattctcattgtatagtcctgcttctcatcatgacatgttgctcacttcattgtcagaacccttcttgaaaactatgccttatgactcatttgcatggcaagtaatatatgccaaca

SEQ ID NO: 4735 - DNA, 124 bp, Staphylococcus aureus
acgttatgaatggataacgattttttgttatgttaaagtggtacattaatcatgtatttcgtatgataattaacgacaagtgtaatggttaaatgtattttatgatgaaatgctataataggca

SEQ ID NO: 4736 - DNA, 124 bp, Staphylococcus aureus
tgcctattatagcatttcatcataaaatacatttaaccattacacttgtcgttaattatcatacgaaatacatgattaatgtaccactttaacataacaaaaaatcgttatccattcataacgt

SEQ ID NO: 4737 - DNA, 275 bp, Staphylococcus aureus
taacttaaaaacaataaaaaattataaattaattagttaagtgatataaataataaacgaaatgtttgcttgtatgttattatttgtgtatgaaaacgtctgatataatgtaatataggtttaaacaaaatatgctaaaatataagcaaaatatgtataattttaagtaatacacagacatttagagttttgattttaaaatgagttttcaattggaaaatgcaacgaaatttaaataattaaatatagatatagttgaatggaggaagtatttt

SEQ ID NO: 4738 - DNA, 275 bp, Staphylococcus aureus
aaaatacttcctccattcaactatatctatatttaattatttaaatttcgttgcattttccaattgaaaactcattttaaaatcaaaactctaaatgtctgtgtattacttaaaattatacatattttgcttatattttagcatattttgtttaaacctatattacattatatcagacgttttcatacacaaataataacatacaagcaaacatttcgtttattatttatatcacttaactaattaatttataattttttattgtttttaagtta

SEQ ID NO: 4739 - DNA, 84 bp, Staphylococcus aureus
ataataaatgccctcaaatctatgtgaactaacataatttgagggttttattttgctatttatgaaatgattatgacatttccc

SEQ ID NO: 4740 - DNA, 84 bp, Staphylococcus aureus
gggaaatgtcataatcatttcataaatagcaaaataaaaccctcaaattatgttagttcacatagatttgagggcatttattat

SEQ ID NO: 4741 - DNA, 244 bp, Staphylococcus aureus
ataacgcgattagaaactgttggcaaagtaatgtcagcagtttttcgctatacttaacagaaatttagtgatatgaacagcattatttgaaaagaaaaatggtcaacttagcataaaaattgatatgaaaatttaatggtatagataattaaatagtagcgtgtttttttaataatttattcatgaattttacatgcactattatgataaaataaacataattataattcactgaggtgctatc

SEQ ID NO: 4742 - DNA, 244 bp, Staphylococcus aureus
gatagcacctcagtgaattataattatgtttattttatcataatagtgcatgtaaaattcatgaataaattattaaaaaaacacgctactatttaattatctataccattaaattttcatatcaatttttatgctaagttgaccatttttcttttcaaataatgctgttcatatcactaaatttctgttaagtatagcgaaaaactgctgacattactttgccaacagtttctaatcgcgttat

SEQ ID NO: 4743 - DNA, 118 bp, Staphylococcus aureus
cagtaatccttttttttatgcattttacctatgatattttgtatttcggactaaaaatcacgcaaatcgaagtgagccatctatactttagttaaatcaaacgtaggaggcaatggtc

SEQ ID NO: 4744 - DNA, 118 bp, Staphylococcus aureus
gaccattgcctcctacgtttgatttaactaaagtatagatggctcacttcgatttgcgtgatttttagtccgaaatacaaaatatcataggtaaaatgcataaaaaaaaggattactg

SEQ ID NO: 4745 - DNA, 107 bp, Staphylococcus aureus
aacgaaaaacctaagcaagataatagcaatttgagccattgttattatcgtaaaaaaacgtctatactccagtttataactgggatatagacgtttttatgtattta

SEQ ID NO: 4746 - DNA, 107 bp, Staphylococcus aureus
taaatacataaaaacgtctatatcccagttataaactggagtatagacgtttttttacgataataacaatggctcaaattgctattatcttgcttaggtttttcgtt

SEQ ID NO: 4747 - DNA, 148 bp, Staphylococcus aureus
tattctgtcctcgtttcactttgtctgtaattattatagcacaaaatattataattgtatcggcgtttacaaattgaaccggtacaattataattggaggtaagtaaatacattttcattctactatcaagttgagggggtaatattt

SEQ ID NO: 4748 - DNA, 148 bp, Staphylococcus aureus
aaatattaccccctcaacttgatagtagaatgaaaatgtatttacttacctccaattataattgtaccggttcaatttgtaaacgccgatacaattataatattttgtgctataataattacagacaaagtgaaacgaggacagaata

SEQ ID NO: 4749 - DNA, 109 bp, Staphylococcus aureus
aggtatattataagtattttagggttagagcccgagacataaattaatatagtaggacctacagtgttataatggcgggcccccaacacaaagaatttcgaaaagaaat

SEQ ID NO: 4750 - DNA, 109 bp, Staphylococcus aureus
atttcttttcgaaattctttgtgttgggggcccgccattataacactgtaggtcctactatattaatttatgtctcgggctctaaccctaaaatacttataatatacct

SEQ ID NO: 4751 - DNA, 237 bp, Staphylococcus aureus
ggaataaattttgcgaaaatatcatttctgttccaatcccgtgatgttaaaatttttaaaaaaataatgccactaactaagtatagtgttaatgtttgagtgtttatgaaagtctttaacccaaattgatgacttactaatcaacgataacgatattgttaagtagatgattagtgtcacaaagaaattaaagtagcagtcaaacatagatacaaagtacagttagtggcattatat

SEQ ID NO: 4752 - DNA, 237 bp, Staphylococcus aureus
atataatgccactaactgtactttgtatctatgtttgactgctactttaatttctttgtgacactaatcatctacttaacaatatcgttatcgttgattagtaagtcatcaatttgggttaaagactttcataaacactcaaacattaacactatacttagttagtggcattatttttttaaaaattttaacatcacgggattggaacagaaatgatattttcgcaaaatttattcc

SEQ ID NO: 4753 - DNA, 100 bp, Staphylococcus aureus
taatagatgatgttttataaagataaaaaagcacagccatgatatacgaatgttgcatgttatatgctaaaccttcatatcatagctgtgtttgattcat

SEQ ID NO: 4754 - DNA, 100 bp, Staphylococcus aureus
atgaatcaaacacagctatgatatgaaggtttagcatataacatgcaacattcgtatatcatggctgtgcttttttatctttataaaacatcatctatta

SEQ ID NO: 4755 - DNA, 139 bp, Staphylococcus aureus
tgaaaacgtttaaatcatatttaaaaattcatacattattattttaatttcttagtgaaataattatgattaaaaaccctcagcattaaagcaacgctaagggcctaacaatgatgagtatatttcggaagatacgtag

SEQ ID NO: 4756 - DNA, 139 bp, Staphylococcus aureus
ctacgtatcttccgaaatatactcatcattgttaggcccttagcgttgctttaatgctgagggtttttaatcataattatttcactaagaaattaaaataataatgtatgaatttttaaatatgatttaaacgttttca

SEQ ID NO: 4757 - DNA, 139 bp, Staphylococcus aureus
attatattccttctctttattgtgtaattaatcatacagttatatacccgattattatattcatcatatcatgataaacatttgatgacatatgaagacgtgaatgacttttattgtctacaaacagacgtctgaagta

SEQ ID NO: 4758 - DNA, 139 bp, Staphylococcus aureus
tacttcagacgtctgtttgtagacaataaaagtcattcacgtcttcatatgtcatcaaatgtttatcatgatatgatgaatataataatcgggtatataactgtatgattaattacacaataaagagaaggaatataat

SEQ ID NO: 4759 - DNA, 127 bp, Staphylococcus aureus
ttgatagtgaatataattagagtaagcgaagaacagagaaaaacgttcttcgcttatttttcttgaatttcttgtatatcattttaaagtgataaagatatttcgaaacataattcttctattatat

SEQ ID NO: 4760 - DNA, 127 bp, Staphylococcus aureus
atataatagaagaattatgtttcgaaatatctttatcactttaaaatgatatacaagaaattcaagaaaaataagcgaagaacgtttttctctgttcttcgcttactctaattatattcactatcaa

SEQ ID NO: 4761 - DNA, 233 bp, Staphylococcus aureus
agatgtcactccttgtaaaaattaaatatagaaagtcatgagatgaagtgaacggatgtatagatgatcgttcactcacacataagtcatgatttccttacatatcataccacagttattgagaatgaatatcaattaattgcttgtatgattgattttttatagtatgtttaagtgaaacagctttatttgaaagtgattaaagtaaatgaaggtacagaggagtgagaaca

SEQ ID NO: 4762 - DNA, 233 bp, Staphylococcus aureus
tgttctcactcctctgtaccttcatttactttaatcactttcaaataaagctgtttcacttaaacatactataaaaaatcaatcatacaagcaattaattgatattcattctcaataactgtggtatgatatgtaaggaaatcatgacttatgtgtgagtgaacgatcatctatacatccgttcacttcatctcatgactttctatatttaatttttacaaggagtgacatct

SEQ ID NO: 4763 - DNA, 325 bp, Staphylococcus aureus
cgattgagaatggaatttggttgatatgatttgatggatgattactatcatacattagcgttgaaccgcgaacatggacgaatgattagttgttaattttgaaaatttataaaagcttaagcgaatgcagtgagagatgtcattttaatatcaatgtatggctattttgtaatgacaatgtaatgagtttagtaaaacatttcgggaatattaaatagttggaaaatgagaattaaatcctttactcagttgtctaattcttttagtatgtgcagtacagtttaattgaaaactaactttaactttaatggaggatgttttatac

SEQ ID NO: 4764 - DNA, 325 bp, Staphylococcus aureus
gtataaaacatcctccattaaagttaaagttagttttcaattaaactgtactgcacatactaaaagaattagacaactgagtaaaggatttaattctcattttccaactatttaatattcccgaaatgttttactaaactcattacattgtcattacaaaatagccatacattgatattaaaatgacatctctcactgcattcgcttaagcttttataaattttcaaaattaacaactaatcattcgtccatgttcgcggttcaacgctaatgtatgatagtaatcatccatcaaatcatatcaaccaaattccattctcaatcg

SEQ ID NO: 4765 - DNA, 51 bp, Staphylococcus aureus
tacagtaaatcccaagttacaatatcatacgcaacttgggattttttcgtt

SEQ ID NO: 4766 - DNA, 51 bp, Staphylococcus aureus
aacgaaaaaatcccaagttgcgtatgatattgtaacttgggatttactgta

SEQ ID NO: 4767 - DNA, 67 bp, Staphylococcus aureus
ttaaccactcctccaatgataagattgaaaggcaagatgacctttcaatcttatttttatattttag

SEQ ID NO: 4768 - DNA, 67 bp, Staphylococcus aureus
ctaaaatataaaaataagattgaaaggtcatcttgcctttcaatcttatcattggaggagtggttaa

SEQ ID NO: 4769 - DNA, 330 bp, Staphylococcus aureus
tttgcttcctcccaattatttatgagttaatcatatcagaacaatacattttattaaatggtttattttaaattttgtttaaattaatagaattttagttataataatgtttaataagttattgaaaatctaataaactacaaaaaatagtttgattacataatgattcttgaaaaatgtcggttaactttaaggtgacaagttattgcaattttgaaggtaaacatcatatttaataatcgaataacatacaaaataaagcgaccaattttgcagtgttacgaattgtaaactgcgaactggtcgctttttattgatgtcatgattaat

SEQ ID NO: 4770 - DNA, 330 bp, Staphylococcus aureus
attaatcatgacatcaataaaaagcgaccagttcgcagtttacaattcgtaacactgcaaaattggtcgctttattttgtatgttattcgattattaaatatgatgtttaccttcaaaattgcaataacttgtcaccttaaagttaaccgacatttttcaagaatcattatgtaatcaaactattttttgtagtttattagattttcaataacttattaaacattattataactaaaattctattaatttaaacaaaatttaaaataaaccatttaataaaatgtattgttctgatatgattaactcataaataattgggaggaagcaaa

SEQ ID NO: 4771 - DNA, 197 bp, Staphylococcus aureus
aataaccatttaatcctttatgtatttaatttaattttagtatacacatttatattacaaaaatgaatggttaattaaaaatatatgggtatattcaatatatttatttaaaaaaagctaaaaatacttaaaaaactatatacatatactaataatttatatattatttgagtaaggagcactttttcaaaaaatag

SEQ ID NO: 4772 - DNA, 197 bp, Staphylococcus aureus
ctattttttgaaaaagtgctccttactcaaataatatataaattattagtatatgtatatagttttttaagtatttttagctttttttaaataaatatattgaatatacccatatatttttaattaaccattcatttttgtaatataaatgtgtatactaaaattaaattaaatacataaaggattaaatggttatt

SEQ ID NO: 4773 - DNA, 82 bp, Staphylococcus aureus
gcattctgaaattggcaaagtcacattttctaatgtggctttgcttatcattttttaagaaaacaactgaaaggaaataagc

SEQ ID NO: 4774 - DNA, 82 bp, Staphylococcus aureus
gcttatttcctttcagttgttttcttaaaaaatgataagcaaagccacattagaaaatgtgactttgccaatttcagaatgc

SEQ ID NO: 4775 - DNA, 202 bp, Staphylococcus aureus
acaatcttaatgtgagactaaacaataaagctttgtttagtcttttttggcggttaagtaaaaagcaatagataccgtaaagttgatgctcgtcaaataataatataaagatagttttatgctttgtatagataaaaacctaagtacttataactttaaatacgtaatatgctatttaaaagataatgtataggagacagat

SEQ ID NO: 4776 - DNA, 202 bp, Staphylococcus aureus
atctgtctcctatacattatcttttaaatagcatattacgtatttaaagttataagtacttaggtttttatctatacaaagcataaaactatctttatattattatttgacgagcatcaactttacggtatctattgctttttacttaaccgccaaaaaagactaaacaaagctttattgtttagtctcacattaagattgt

SEQ ID NO: 4777 - DNA, 145 bp, Staphylococcus aureus
atgattttgtaaatactgtgaagtatacttaaattaagaaaatcaacttcaacgtatatcaccatattattttatactcaatgatgtgaatggatttaagtggattgatattaaagtaaaagttatggaatattgaggtgcgaat

SEQ ID NO: 4778 - DNA, 145 bp, Staphylococcus aureus
attcgcacctcaatattccataacttttactttaatatcaatccacttaaatccattcacatcattgagtataaaataatatggtgatatacgttgaagttgattttcttaatttaagtatacttcacagtatttacaaaatcat

SEQ ID NO: 4779 - DNA, 134 bp, Staphylococcus aureus
ttgtattacatataggtgtgggtaaattttatttatgaaatgatgaaaaagtatatactattaatatcttttttactataattataaatagttaaataaattgaaagacaaaataatgagtaggagttaatgag

SEQ ID NO: 4780 - DNA, 134 bp, Staphylococcus aureus
ctcattaactcctactcattattttgtctttcaatttatttaactatttataattatagtaaaaaagatattaatagtatatactttttcatcatttcataaataaaatttacccacacctatatgtaatacaa

SEQ ID NO: 4781 - DNA, 131 bp, Staphylococcus aureus
gtaaaacgaatttgaagaagcattaagcgacatttgggtgttgtttaatgctttttatttaacggaaataagtgtagagaataaattaatagtttaatcaagagatatttcgaacacataggggcgataac

SEQ ID NO: 4782 - DNA, 131 bp, Staphylococcus aureus
gttatcgcccctatgtgttcgaaatatctcttgattaaactattaatttattctctacacttatttccgttaaataaaaagcattaaacaacacccaaatgtcgcttaatgcttcttcaaattcgttttac

SEQ ID NO: 4783 - DNA, 500 bp, Staphylococcus aureus
atgtataaatgagtttaactaattaataaatcacgatataaatttaaaattgccattaattgaaaaggttattgtagtgtattttataaagttgatgcacatcgacttattttttaaaacttatatcaaaaaaatatgagaaaagtatatactattaaaatgttttttactataattataaatagttaaatatttggttatgaaataaatgtgtgggaggcaatttttagagatacatagcaatgtaaagatatcaaatagttattgcataatttattatgatgacataattttcagtagatagttgtaaattaacactgaaatagatgtttatattaagaagactttaatatcataattaatcaaaatcttgcgtcaaacatttaaacgaattttaagttgataacaattggttaaacattgttcaaacatcacaatgataaagcatattatcagtattgtagtgtgtggaaaatgacagccatctaaggagaaaaatg

SEQ ID NO: 4784 - DNA, 500 bp, Staphylococcus aureus
catttttctccttagatggctgtcattttccacacactacaatactgataatatgctttatcattgtgatgtttgaacaatgtttaaccaattgttatcaacttaaaattcgtttaaatgtttgacgcaagattttgattaattatgatattaaagtcttcttaatataaacatctatttcagtgttaatttacaactatctactgaaaattatgtcatcataataaattatgcaataactatttgatatctttacattgctatgtatctctaaaaattgcctcccacacatttatttcataaccaaatatttaactatttataattatagtaaaaaacattttaatagtatatacttttctcatatttttttgatataagttttaaaaaataagtcgatgtgcatcaactttataaaatacactacaataaccttttcaattaatggcaattttaaatttatatcgtgatttattaattagttaaactcatttatacat

SEQ ID NO: 4785 - DNA, 149 bp, Staphylococcus aureus
cgtaggctttctttaaaacttttaaccagtttcaaaaagtaaatgagctttagcgacaataatttttaaaataaacacgatataaatttaaacatttatatataagaacacaaacgtaagtttgtaaataataataaaggagtaagtca

SEQ ID NO: 4786 - DNA, 149 bp, Staphylococcus aureus
tgacttactcctttattattatttacaaacttacgtttgtgttcttatatataaatgtttaaatttatatcgtgtttattttaaaaattattgtcgctaaagctcatttactttttgaaactggttaaaagttttaaagaaagcctacg

SEQ ID NO: 4787 - DNA, 215 bp, Staphylococcus aureus
acatcgtatattgaaatttcaagatttcttaagtaattaaataaagtgctctcttagaagtagattttcagtcaataactgcttttaagagagcattttgtatttgataatgctcatagcatcggacaaaaaccattgacgaacttaaaaaaaatacgttagacaatgcacttctaaatatttaaggcatcgactaacgcattgttcaaatatag

SEQ ID NO: 4788 - DNA, 215 bp, Staphylococcus aureus
ctatatttgaacaatgcgttagtcgatgccttaaatatttagaagtgcattgtctaacgtattttttttaagttcgtcaatggtttttgtccgatgctatgagcattatcaaatacaaaatgctctcttaaaagcagttattgactgaaaatctacttctaagagagcactttatttaattacttaagaaatcttgaaatttcaatatacgatgt

SEQ ID NO: 4789 - DNA, 236 bp, Staphylococcus aureus
aatgacatcctcgcttttcatttgttaatcagagtatactatgaatcgtcttatttgtgaataatttcacaaaattaattttaaaaactaatatttttgaataactgataggattttttggtaaatcaattattttaaaataatcaatagacagacagtatcgctgaaaatccatgaatttcatataaaaaagcctagtaacgagggggcaatcattactaggcagtgagcattta

SEQ ID NO: 4790 - DNA, 236 bp, Staphylococcus aureus
taaatgctcactgcctagtaatgattgccccctcgttactaggcttttttatatgaaattcatggattttcagcgatactgtctgtctattgattattttaaaataattgatttaccaaaaaatcctatcagttattcaaaaatattagtttttaaaattaattttgtgaaattattcacaaataagacgattcatagtatactctgattaacaaatgaaaagcgaggatgtcatt

SEQ ID NO: 4791 - DNA, 583 bp, Staphylococcus aureus
tgtaatttccttcctaaaactagatattcataataatttaaaaaatctgaaaaataaaaacgttcttactttatctttaaatgacaatactatgattctattattttataaaaaagattgcaataataacgtcttgctattattggataatgacaattaaagtgtcgtttttatgaattaaaataggtgaaagtaagttggaaatacgttggagcgttgtgatttttatgagaaattgtatgagtgaggactgctatttataaaaggtaaactatggatgagtttatggttgttccaataggtaaataagagatagcacactgtacacataatgatacgtggatgagtgaatatgtctgataggaaggcctagtcactcaaatgaatttaagtttattacgtgataaatcacaaatctctctcatgtgataggtctcccattaaatcatgcttatatgaaatgttcacatatttgttagcttttcaagaaataatattaaatatcttttcatagtatagcaatattaaataaatgcatttataattttaactgtattttaaatattaatcatgaggtgataag

SEQ ID NO: 4792 - DNA, 583 bp, Staphylococcus aureus
cttatcacctcatgattaatatttaaaatacagttaaaattataaatgcatttatttaatattgctatactatgaaaagatatttaatattatttcttgaaaagctaacaaatatgtgaacatttcatataagcatgatttaatgggagacctatcacatgagagagatttgtgatttatcacgtaataaacttaaattcatttgagtgactaggccttcctatcagacatattcactcatccacgtatcattatgtgtacagtgtgctatctcttatttacctattggaacaaccataaactcatccatagtttaccttttataaatagcagtcctcactcatacaatttctcataaaaatcacaacgctccaacgtatttccaacttactttcacctattttaattcataaaaacgacactttaattgtcattatccaataatagcaagacgttattattgcaatcttttttataaaataatagaatcatagtattgtcatttaaagataaagtaagaacgtttttatttttcagattttttaaattattatgaatatctagttttaggaaggaaattaca

SEQ ID NO: 4793 - DNA, 165 bp, Staphylococcus aureus
ttttattaagccggtacatcatgtgccggtatttttatgtttatgtattatttgaataaactttcacattcaattaataataattattatcgaaaattagaaatattccgtgaaatataatattttttgtagtaaaatggcctctaagtattcaatatttaaata

SEQ ID NO: 4794 - DNA, 165 bp, Staphylococcus aureus
tatttaaatattgaatacttagaggccattttactacaaaaaatattatatttcacggaatatttctaattttcgataataattattattaattgaatgtgaaagtttattcaaataatacataaacataaaaataccggcacatgatgtaccggcttaataaaa

SEQ ID NO: 4795 - DNA, 342 bp, Staphylococcus aureus
catcatcatattgaatagtaaaaacaaataaaacatagtaacgtgattcagtcgatgaaaaaatcgataatgagtcacgtttttttatagaaaaatataagacataaaaatgtcataatttattgtcgacaaatatcatactgtataaacatttatcattttctcaagtaccttttacacgatggaatgaacttactttttacgaaattatgcgtattttataaacaaatatcattgatataacggcaaatgtaagcgtttacaacagaaataacagcatgctacgatatttttgtaaattcactgattcaagtattttaagtcaatatgaggagggatgtt

SEQ ID NO: 4796 - DNA, 342 bp, Staphylococcus aureus
aacatccctcctcatattgacttaaaatacttgaatcagtgaatttacaaaaatatcgtagcatgctgttatttctgttgtaaacgcttacatttgccgttatatcaatgatatttgtttataaaatacgcataatttcgtaaaaagtaagttcattccatcgtgtaaaaggtacttgagaaaatgataaatgtttatacagtatgatatttgtcgacaataaattatgacatttttatgtcttatatttttctataaaaaaacgtgactcattatcgattttttcatcgactgaatcacgttactatgttttatttgtttttactattcaatatgatgatg

SEQ ID NO: 4797 - DNA, 104 bp, Staphylococcus aureus
attaatcgaagtatctaaattaaattcatggcaaagctaaaccccatcaccaagttggcgcaacagcgcatcataacttggtgatgggattttatcataacaat

SEQ ID NO: 4798 - DNA, 104 bp, Staphylococcus aureus
attgttatgataaaatcccatcaccaagttatgatgcgctgttgcgccaacttggtgatggggtttagctttgccatgaatttaatttagatacttcgattaat

SEQ ID NO: 4799 - DNA, 116 bp, Staphylococcus aureus
tatgaagtccctccaaaaatcatttgataatatagtttacagctataattgtaaacgctatcataaaatgtaacaatatctttttgaaaattgtagtcatatttatgtataattaa

SEQ ID NO: 4800 - DNA, 116 bp, Staphylococcus aureus
ttaattatacataaatatgactacaattttcaaaaagatattgttacattttatgatagcgtttacaattatagctgtaaactatattatcaaatgatttttggagggacttcata

SEQ ID NO: 4801 - DNA, 276 bp, Staphylococcus aureus
tagttgaaagaaggagtcattctaaaatagaatttgaaaccgttacgagagatgagagctgttgttagttccacacatcacactctatctaggaccaatctaaactatatcaaccaacagtgtgccacgggcatattaaattgaagacggttgaacgtatagatctcaaaaatgtaaaaaagtatttggtattgaaattaaaaaagcacctagcaactcgttaggacaatcacgatgattgtctacagttgcaggtggatttgaatatactactag

SEQ ID NO: 4802 - DNA, 276 bp, Staphylococcus aureus
ctagtagtatattcaaatccacctgcaactgtagacaatcatcgtgattgtcctaacgagttgctaggtgcttttttaatttcaataccaaatacttttttacatttttgagatctatacgttcaaccgtcttcaatttaatatgcccgtggcacactgttggttgatatagtttagattggtcctagatagagtgtgatgtgtggaactaacaacagctctcatctctcgtaacggtttcaaattctattttagaatgactccttctttcaacta

SEQ ID NO: 4803 - DNA, 139 bp, Staphylococcus aureus
tgtgtcaccccttcatcttaatgattactattatatatgaaaaatattttcaagatagtaaaaagcattgataaaaattatcttaatgatatattgtaaatgactttacgtgaaaaaacgacttatggagtgaggaata

SEQ ID NO: 4804 - DNA, 139 bp, Staphylococcus aureus
tattcctcactccataagtcgttttttcacgtaaagtcatttacaatatatcattaagataatttttatcaatgctttttactatcttgaaaatatttttcatatataatagtaatcattaagatgaaggggtgacaca

SEQ ID NO: 4805 - DNA, 130 bp, Staphylococcus aureus
atgataacgataaaaaaacgagatgaccatcattaattaaaggtacctaattatcttaggtggctgaatgaatgtaatgggttcatctcgttttgtttgtttacgatagtgattttattttcaatttgaa

SEQ ID NO: 4806 - DNA, 130 bp, Staphylococcus aureus
ttcaaattgaaaataaaatcactatcgtaaacaaacaaaacgagatgaacccattacattcattcagccacctaagataattaggtacctttaattaatgatggtcatctcgtttttttatcgttatcat

SEQ ID NO: 4807 - DNA, 345 bp, Staphylococcus aureus
tattttaatttagaaaaatctgaaaacttactataattgtatagtttgaattattttcataccaatacaaattaactaattatatatagattgaaactatattacttaataaaatatttatcttaaatgttgttgtgttgattcaacgccacaactaaaagtgtttataaattatttggaaatgcacatatttgtaaatgattagtatcgatttaatatcgtattattaaatttttattaattttgtagtcttaatcaaaaaataatatatgtcatgttatattgaaggtgcagttgtttttcattctcaagagggggtcaaaaaaatacttttgaggtgattat

SEQ ID NO: 4808 - DNA, 345 bp, Staphylococcus aureus
ataatcacctcaaaagtatttttttgaccccctcttgagaatgaaaaacaactgcaccttcaatataacatgacatatattattttttgattaagactacaaaattaataaaaatttaataatacgatattaaatcgatactaatcatttacaaatatgtgcatttccaaataatttataaacacttttagttgtggcgttgaatcaacacaacaacatttaagataaatattttattaagtaatatagtttcaatctatatataattagttaatttgtattggtatgaaaataattcaaactatacaattatagtaagttttcagatttttctaaattaaaata

SEQ ID NO: 4809 - DNA, 241 bp, Staphylococcus aureus
attcatcttctgaatttaataggctatgtaaatcgtgctgttatcatggcacatcagatataagtagcatcacagtgttgaatttcaaaatagtaaagtgaaataaagcgcctgtctcattagcgaaaactaaagggacaggcgtatctgtttatgagcttaataaattgtatgaataatatggttgatcgaataactgtttatcatgatgataaattgagttttttaaaataatgatata

SEQ ID NO: 4810 - DNA, 241 bp, Staphylococcus aureus
tatatcattattttaaaaaactcaatttatcatcatgataaacagttattcgatcaaccatattattcatacaatttattaagctcataaacagatacgcctgtccctttagttttcgctaatgagacaggcgctttatttcactttactattttgaaattcaacactgtgatgctacttatatctgatgtgccatgataacagcacgatttacatagcctattaaattcagaagatgaat

SEQ ID NO: 4811 - DNA, 72 bp, Staphylococcus aureus
gatttaataggctccttatttttgatattgatgtcattataacactgtcttaaatttccatgaaaaatagtc

SEQ ID NO: 4812 - DNA, 72 bp, Staphylococcus aureus
gactatttttcatggaaatttaagacagtgttataatgacatcaatatcaaaaataaggagcctattaaatc

SEQ ID NO: 4813 - DNA, 96 bp, Staphylococcus aureus
actatgattccttttctattcaatattgttttcaaagtaccatggaaagaatgaataatcaatgatgaacagtcttgatagaatagaattggtaca

SEQ ID NO: 4814 - DNA, 96 bp, Staphylococcus aureus
tgtaccaattctattctatcaagactgttcatcattgattattcattctttccatggtactttgaaaacaatattgaatagaaaaggaatcatagt

SEQ ID NO: 4815 - DNA, 159 bp, Staphylococcus aureus
tgaaaatatgaatatgaaaaagaaaaataaaggcgaaaagatataaaagttaattgaaaaacgttatcatatacgtgggtatatgaagagggaatggtattaagaacgctaaaatgttatgtcggtttgacatgacaggataagtttggagatgacgga

SEQ ID NO: 4816 - DNA, 159 bp, Staphylococcus aureus
tccgtcatctccaaacttatcctgtcatgtcaaaccgacataacattttagcgttcttaataccattccctcttcatatacccacgtatatgataacgtttttcaattaacttttatatcttttcgcctttatttttctttttcatattcatattttca

SEQ ID NO: 4817 - DNA, 315 bp, Staphylococcus aureus
tattgtttaggcgttaatgtcacaccctcaatgaatatgtgtatttgcttttaaaatggtgactatgtagttatgtaatttgattatacgattgaaaatgaatttagttaattagcaaagacatcatatttatagcgtttgtgtttattagtgattgggtatttgaaaatggttaatgatagtttttaaaggaataaattcattttcatttatataagtaagattaaatactagctactaaagtctatttatatacgtcaaaatataatgactgctataatgagtaatcaatagacacaaagaggagattatgtg

SEQ ID NO: 4818 - DNA, 315 bp, Staphylococcus aureus
cacataatctcctctttgtgtctattgattactcattatagcagtcattatattttgacgtatataaatagactttagtagctagtatttaatcttacttatataaatgaaaatgaatttattcctttaaaaactatcattaaccattttcaaatacccaatcactaataaacacaaacgctataaatatgatgtctttgctaattaactaaattcattttcaatcgtataatcaaattacataactacatagtcaccattttaaaagcaaatacacatattcattgagggtgtgacattaacgcctaaacaata

SEQ ID NO: 4819 - DNA, 93 bp, Staphylococcus aureus
tacaaaaacaccgtccataagtaagtggctttcctcttgataaaagaggcattcactcaatatgtgacggtgttttatatatttacgttaaca

SEQ ID NO: 4820 - DNA, 93 bp, Staphylococcus aureus
tgttaacgtaaatatataaaacaccgtcacatattgagtgaatgcctcttttatcaagaggaaagccacttacttatggacggtgtttttgta

SEQ ID NO: 4821 - DNA, 211 bp, Staphylococcus aureus
cgtaatatcctcctatttgtaattgtaagcgatttcttaaaaacgtagatatgcaatctctttcatattttaatccgaaaaattgcatatcaaaatgtttatggcgcaagattttataggaacttttaaaataaattagatattcatgttgacaatttaaaaatgtcgcagtatatttagttagacatctaacgaaatggtggtgcaataa

SEQ ID NO: 4822 - DNA, 211 bp, Staphylococcus aureus
ttattgcaccaccatttcgttagatgtctaactaaatatactgcgacatttttaaattgtcaacatgaatatctaatttattttaaaagttcctataaaatcttgcgccataaacattttgatatgcaatttttcggattaaaatatgaaagagattgcatatctacgtttttaagaaatcgcttacaattacaaataggaggatattacg

SEQ ID NO: 4823 - DNA, 106 bp, Staphylococcus aureus
atggtaagtgtgactggtagaaatcagtcactttatctttaatattatagttagatatctaattgttagtaagctaattattggaaaagacaaggagtattgaaca

SEQ ID NO: 4824 - DNA, 106 bp, Staphylococcus aureus
tgttcaatactccttgtcttttccaataattagcttactaacaattagatatctaactataatattaaagataaagtgactgatttctaccagtcacacttaccat

SEQ ID NO: 4825 - DNA, 103 bp, Staphylococcus aureus
atatttcgtacacttctggctgagtatatttcggtcggaagggtatttttcgaaaaaaataaatatatgatacgattatgaaaaaataaagtgagattggcat

SEQ ID NO: 4826 - DNA, 103 bp, Staphylococcus aureus
atgccaatctcactttattttttcataatcgtatcatatatttatttttttcgaaaaatacccttccgaccgaaatatactcagccagaagtgtacgaaatat

SEQ ID NO: 4827 - DNA, 63 bp, Staphylococcus aureus
acttataagagatgaatatatcatctttcgataagataaccatatgactttattttttatcat

SEQ ID NO: 4828 - DNA, 63 bp, Staphylococcus aureus
atgataaaaaataaagtcatatggttatcttatcgaaagatgatatattcatctcttataagt

SEQ ID NO: 4829 - DNA, 249 bp, Staphylococcus aureus
aaaatcctccttaatatgtatttatatgcattttgtgcgataaacttatattagacatgtatgaaagcgttgtcaatatacttttgtgaaatcttgcatatttagttattgaagtattttataaacatttagaaaaaataaattgctacacataaatttataattatgcaattattatgtcgttatacatactagctgtgtatctacgaatgagtacaaacatatttttatttgcagaaaaggggtaaa

SEQ ID NO: 4830 - DNA, 249 bp, Staphylococcus aureus
tttaccccttttctgcaaataaaaatatgtttgtactcattcgtagatacacagctagtatgtataacgacataataattgcataattataaatttatgtgtagcaatttattttttctaaatgtttataaaatacttcaataactaaatatgcaagatttcacaaaagtatattgacaacgctttcatacatgtctaatataagtttatcgcacaaaatgcatataaatacatattaaggaggatttt

SEQ ID NO: 4831 - DNA, 58 bp, Staphylococcus aureus
agtataaaaataagacgctcggcacactaaatttgtatgtgtttgagcgtcttttata

SEQ ID NO: 4832 - DNA, 58 bp, Staphylococcus aureus
tataaaagacgctcaaacacatacaaatttagtgtgccgagcgtcttatttttatact

SEQ ID NO: 4833 - DNA, 86 bp, Staphylococcus aureus
aatttaagatacaatgcgtaatattaatatgttattattatgataatttacagaattatatgaaaaatgaatgaggatgtgatggt

SEQ ID NO: 4834 - DNA, 86 bp, Staphylococcus aureus
accatcacatcctcattcatttttcatataattctgtaaattatcataataataacatattaatattacgcattgtatcttaaatt

SEQ ID NO: 4835 - DNA, 266 bp, Staphylococcus aureus
caaattagacttacaaaagagtgatgacatttaaaatggcatcgctcttttatttaatttttgaaaataaaaggttgttgacagtattattttataacaatataatgattttgataattattatcaactagataatgttcatgggaggatgccttaaaatcatcattttaagagccacgtattatcttggcatttagggagtgtgagatagtacgaatgagggcatgtctatggggataatagaatttctataatgaggtgtcaaa

SEQ ID NO: 4836 - DNA, 266 bp, Staphylococcus aureus
tttgacacctcattatagaaattctattatccccatagacatgccctcattcgtactatctcacactccctaaatgccaagataatacgtggctcttaaaatgatgattttaaggcatcctcccatgaacattatctagttgataataattatcaaaatcattatattgttataaaataatactgtcaacaaccttttattttcaaaaattaaataaaagagcgatgccattttaaatgtcatcactcttttgtaagtctaatttg

SEQ ID NO: 4837 - DNA, 186 bp, Staphylococcus aureus
aaaacaggccgagtgcctgtttttttgttgctgtattgcggattatcgtagcattgttgagatgtggatatcgctgcatggttggttctcgttgtattgcagatatcacggtttaatccgattctgtattctaattaacgcaagtgcagtattgatataatctgaggtgctacattgttcttttat

SEQ ID NO: 4838 - DNA, 186 bp, Staphylococcus aureus
ataaaagaacaatgtagcacctcagattatatcaatactgcacttgcgttaattagaatacagaatcggattaaaccgtgatatctgcaatacaacgagaaccaaccatgcagcgatatccacatctcaacaatgctacgataatccgcaatacagcaacaaaaaaacaggcactcggcctgtttt

SEQ ID NO: 4839 - DNA, 55 bp, Staphylococcus aureus
tttaactaaacgatgacgtagctcgctaaaatgaactagtaaggtgtggtcagtg

SEQ ID NO: 4840 - DNA, 55 bp, Staphylococcus aureus
cactgaccacaccttactagttcattttagcgagctacgtcatcgtttagttaaa

SEQ ID NO: 4841 - DNA, 107 bp, Staphylococcus aureus
gataatcaacctcactcataagtagtatatagtatttactttataccgaacgataatgattatcaataaattttataaaataattaaaatgttgctgtaaatacaaa

SEQ ID NO: 4842 - DNA, 107 bp, Staphylococcus aureus
tttgtatttacagcaacattttaattattttataaaatttattgataatcattatcgttcggtataaagtaaatactatatactacttatgagtgaggttgattatc

SEQ ID NO: 4843 - DNA, 239 bp, Staphylococcus aureus
aatagtctcctttgaatggtttgatttagtgaaaatgcgtgcatcatactaaaattagaatgctgttaattatgcaggaaggtgtaacgaaagtaaacaattatgacttgtaggcgttgaggtgttgtttcaaaatgtcatacataggtggacaatcatatttttttgtgtagatttgacaaatatagttgtcaaaaagacaaatatcatttacattaggactaaggagttgatgcgat

SEQ ID NO: 4844 - DNA, 239 bp, Staphylococcus aureus
atcgcatcaactccttagtcctaatgtaaatgatatttgtctttttgacaactatatttgtcaaatctacacaaaaaaatatgattgtccacctatgtatgacattttgaaacaacacctcaacgcctacaagtcataattgtttactttcgttacaccttcctgcataattaacagcattctaattttagtatgatgcacgcattttcactaaatcaaaccattcaaaggagactatt

SEQ ID NO: 4845 - DNA, 386 bp, Staphylococcus aureus
tcaatattcttggtgtgaagctagtcattgaaataatatttagagcaggtgataaatcaatacgattatcatctgctctttttggtgttgtggaatgaaatgcgggatgataggttgaggtgacatctctatatcatatcatttgtttttagaagattaggttatgtgggaattgcatccttttatagtgaggattaacgtgtatatatcattgagtatgttgctgaaatttatttgcgtgtatcatttgatgattgtataggctaacgatttccttggaaatatttaaaaacctcgatcatgtagcataactgaatccaaaagtataatgtgaagttcgacacttttggattcagttcaaatactttgaccgaggtgaatactat

SEQ ID NO: 4846 - DNA, 386 bp, Staphylococcus aureus
atagtattcacctcggtcaaagtatttgaactgaatccaaaagtgtcgaacttcacattatacttttggattcagttatgctacatgatcgaggtttttaaatatttccaaggaaatcgttagcctatacaatcatcaaatgatacacgcaaataaatttcagcaacatactcaatgatatatacacgttaatcctcactataaaaggatgcaattcccacataacctaatcttctaaaaacaaatgatatgatatagagatgtcacctcaacctatcatcccgcatttcattccacaacaccaaaaagagcagatgataatcgtattgatttatcacctgctctaaatattatttcaatgactagcttcacaccaagaatattga

SEQ ID NO: 4847 - DNA, 538 bp, Staphylococcus aureus
aaaattttaactcctttaagatgtgtaattaatttactaagtatactatttattttttctagtgaataggggcagatttggcgatgaagtggaaggagaggtgactgcaaggtaattgcggaattaacaatcatcagcgatttaatatttgactggagacgtcatggtaataaaaaattgatgagaaattgatggtgaaaccagctgtgaatagcgatgcaatgatagatagaatttaattagagtcattacgcgaaatgattaatgataatttgtggtaaatcaaagcataattttgtactatagatgaggatgatagagcatatttaagagtgtgaaatgttaaagtgaaaccgtttacgtttccgattgcccaaacaaattacatcattgtataatatgatttgttaaatgcataacaagaatgaaaatgtaacatacgtagcaattggtttcataaattggatgttagtggcgtattggttcattagacgtattagtaataaaattgtatatatcataaggagatgaatatgac

SEQ ID NO: 4848 - DNA, 538 bp, Staphylococcus aureus
gtcatattcatctccttatgatatatacaattttattactaatacgtctaatgaaccaatacgccactaacatccaatttatgaaaccaattgctacgtatgttacattttcattcttgttatgcatttaacaaatcatattatacaatgatgtaatttgtttgggcaatcggaaacgtaaacggtttcactttaacatttcacactcttaaatatgctctatcatcctcatctatagtacaaaattatgctttgatttaccacaaattatcattaatcatttcgcgtaatgactctaattaaattctatctatcattgcatcgctattcacagctggtttcaccatcaatttctcatcaattttttattaccatgacgtctccagtcaaatattaaatcgctgatgattgttaattccgcaattaccttgcagtcacctctccttccacttcatcgccaaatctgcccctattcactagaaaaaataaatagtatacttagtaaattaattacacatcttaaaggagttaaaatttt

SEQ ID NO: 4849 - DNA, 82 bp, Staphylococcus aureus
taagaaaacaggttatcacaacagtattaattacatgttggcataacctgtttttatttgtttatggatttattgggtaata

SEQ ID NO: 4850 - DNA, 82 bp, Staphylococcus aureus
tattacccaataaatccataaacaaataaaaacaggttatgccaacatgtaattaatactgttgtgataacctgttttctta

SEQ ID NO: 4851 - DNA, 670 bp, Staphylococcus aureus
attaagaccctcctataagaaaaaataaaaagcttccgtccttcgtacccgaatgaatcggataaaaaggacgaaagcttatgtttcgcggtaccacctttatttgttattccatcgctgaaataaccttattcagtacgcattaaaagtaaatatgcttactgaacaattatcacaattaaagtcagtaagtaaggatatagtaatgtgctatcccatacttattaacaaaaaatcgtgcgtaaagaatccagtacgccatttaacatcaatgttaatactgtatcgctataacgggcgaacccgtagacacctcatattggcatcaacactccaaggccattttcaaacacgctttcaaaatcttctctcagctactaaagactctctgtataagcagggtgtgttttactttcctctttattgtgtttacgtttcattaaactattataagatattaattagcttacagagtaaaaaaagatttgtcaacaattattcagaaaattttgatttaaaagttaatttgtttgtgaaattgtaattggtatcttgaagttgaaaaatgaattattttttaaataaagtgtggttaatggttgtctgactcatttagaatacataaaatatatttaactgttgttatcaaataaaaagtgatgtgagtgaa

SEQ ID NO: 4852 - DNA, 670 bp, Staphylococcus aureus
ttcactcacatcactttttatttgataacaacagttaaatatattttatgtattctaaatgagtcagacaaccattaaccacactttatttaaaaaataattcatttttcaacttcaagataccaattacaatttcacaaacaaattaacttttaaatcaaaattttctgaataattgttgacaaatctttttttactctgtaagctaattaatatcttataatagtttaatgaaacgtaaacacaataaagaggaaagtaaaacacaccctgcttatacagagagtctttagtagctgagagaagattttgaaagcgtgtttgaaaatggccttggagtgttgatgccaatatgaggtgtctacgggttcgcccgttatagcgatacagtattaacattgatgttaaatggcgtactggattctttacgcacgattttttgttaataagtatgggatagcacattactatatccttacttactgactttaattgtgataattgttcagtaagcatatttacttttaatgcgtactgaataaggttatttcagcgatggaataacaaataaaggtggtaccgcgaaacataagctttcgtcctttttatccgattcattcgggtacgaaggacggaagctttttattttttcttataggagggtcttaat

SEQ ID NO: 4853 - DNA, 153 bp, Staphylococcus aureus
ttacacaattttatataataactctttgtgaatctatagatatattgatagttatctatattctttgaagatgatgcgacttcagtaggttggaagaatacaacaatattaataaaattatttgagactatatagaagggagtaacgctaatt

SEQ ID NO: 4854 - DNA, 153 bp, Staphylococcus aureus
aattagcgttactcccttctatatagtctcaaataattttattaatattgttgtattcttccaacctactgaagtcgcatcatcttcaaagaatatagataactatcaatatatctatagattcacaaagagttattatataaaattgtgtaa

SEQ ID NO: 4855 - DNA, 85 bp, Staphylococcus aureus
acgatagagtgaagttaattaaatagtatatatgtagaagaggcggaatcaattgttcgcctcttttaattatgcgtataattta

SEQ ID NO: 4856 - DNA, 85 bp, Staphylococcus aureus
taaattatacgcataattaaaagaggcgaacaattgattccgcctcttctacatatatactatttaattaacttcactctatcgt

SEQ ID NO: 4857 - DNA, 243 bp, Staphylococcus aureus
tccttaccacctcacaaccattatagaacatgcgttcgcttttgtgaagtgtatttttaaaaatatcatagaaaatttcaaatgaattaatgtcaaaaatgatatgaagagtagtttgaattattattgtaaaaagtaatggcgcatgatataattctttattgtgagtaatgaaaattattccttgcttatctgttttaagattgataagccgtatagaccacaaggaggtgcaaatataaa

SEQ ID NO: 4858 - DNA, 243 bp, Staphylococcus aureus
tttatatttgcacctccttgtggtctatacggcttatcaatcttaaaacagataagcaaggaataattttcattactcacaataaagaattatatcatgcgccattactttttacaataataattcaaactactcttcatatcatttttgacattaattcatttgaaattttctatgatatttttaaaaatacacttcacaaaagcgaacgcatgttctataatggttgtgaggtggtaagga

SEQ ID NO: 4859 - DNA, 51 bp, Staphylococcus aureus
taaaaattaacgaaattaaagcggaaaaattatcaaaggaggcacacaatc

SEQ ID NO: 4860 - DNA, 51 bp, Staphylococcus aureus
gattgtgtgcctcctttgataatttttccgctttaatttcgttaattttta

SEQ ID NO: 4861 - DNA, 276 bp, Staphylococcus aureus
tatttaatatattataaccctcgtaggcataggcttatgggggatttttttatgtttgggatatagaaaagggacagaaaagggcaaaaaaggatgatgtgaatgttttgtgttcggaatttgcacaaagatatgtttatattgcaaaaataatatgaatttagatgcataaaaaaagaactacgcattttaaataaaatgcatagctcttctttttcttgcatacgaattaaaataactcgcgagacctataagtctctttcctcactagatagt

SEQ ID NO: 4862 - DNA, 276 bp, Staphylococcus aureus
actatctagtgaggaaagagacttataggtctcgcgagttattttaattcgtatgcaagaaaaagaagagctatgcattttatttaaaatgcgtagttctttttttatgcatctaaattcatattatttttgcaatataaacatatctttgtgcaaattccgaacacaaaacattcacatcatccttttttgcccttttctgtcccttttctatatcccaaacataaaaaaatcccccataagcctatgcctacgagggttataatatattaaata

SEQ ID NO: 4863 - DNA, 270 bp, Staphylococcus aureus
tgtgttactatgtttagctagtaacgcatcactatagggatatctattttatctattacacatataactttgaattgcttgctattttaaattaacaaattttattctcttagattttgtccaattatgtgtagacgatttatagttattaaattcagagtggtagcaaattaaagttaatcaagagttaagatgaatttaattcatgaacacgtctattatttttataattgtagcaaataaagctttacatcaaggaggtaattaaat

SEQ ID NO: 4864 - DNA, 270 bp, Staphylococcus aureus
atttaattacctccttgatgtaaagctttatttgctacaattataaaaataatagacgtgttcatgaattaaattcatcttaactcttgattaactttaatttgctaccactctgaatttaataactataaatcgtctacacataattggacaaaatctaagagaataaaatttgttaatttaaaatagcaagcaattcaaagttatatgtgtaatagataaaatagatatccctatagtgatgcgttactagctaaacatagtaacaca

SEQ ID NO: 4865 - DNA, 100 bp, Staphylococcus aureus
aattaagttgaattagtatatacagtgttttattgctaatactttgaaagttaggtatctaaaggtgcctagctttctttgttatgattagcactatcat

SEQ ID NO: 4866 - DNA, 100 bp, Staphylococcus aureus
atgatagtgctaatcataacaaagaaagctaggcacctttagatacctaactttcaaagtattagcaataaaacactgtatatactaattcaacttaatt

SEQ ID NO: 4867 - DNA, 152 bp, Staphylococcus aureus
aataaagtctctataaaataacttagtttaaaaacgattcgtatctttcaggttcaaataccatcattttctcctaatacttacactttaattacaattatgtaagttgttttcagaggcatcctattttatattttgtcagaggtgatctt

SEQ ID NO: 4868 - DNA, 152 bp, Staphylococcus aureus
aagatcacctctgacaaaatataaaataggatgcctctgaaaacaacttacataattgtaattaaagtgtaagtattaggagaaaatgatggtatttgaacctgaaagatacgaatcgtttttaaactaagttattttatagagactttatt

SEQ ID NO: 4869 - DNA, 180 bp, Staphylococcus aureus
tagcatgcttatattacatggttcatttataaaaggagtacgaacgaaagtaacgcatgacgattaatttaaaaatatttgtaataattatgaataaaattaaaaacaaggggtaatacaatctatatagcatataagcttttgttatgagtttcaaaaataggaagagagagtgatatt

SEQ ID NO: 4870 - DNA, 180 bp, Staphylococcus aureus
aatatcactctctcttcctatttttgaaactcataacaaaagcttatatgctatatagattgtattaccccttgtttttaattttattcataattattacaaatatttttaaattaatcgtcatgcgttactttcgttcgtactccttttataaatgaaccatgtaatataagcatgcta

SEQ ID NO: 4871 - DNA, 136 bp, Staphylococcus aureus
aaagattcgttgcattaacgcttgtaaaatgtcttaattcatattaattaataaaataccctcacaatacttatgcataagtcctgtttgacgtgaaaggatatatgccaaacgtgttgtgagggtttaattgcat

SEQ ID NO: 4872 - DNA, 136 bp, Staphylococcus aureus
atgcaattaaaccctcacaacacgtttggcatatatcctttcacgtcaaacaggacttatgcataagtattgtgagggtattttattaattaatatgaattaagacattttacaagcgttaatgcaacgaatcttt

SEQ ID NO: 4873 - DNA, 299 bp, Staphylococcus aureus
tgttcattaacctcgcttcttgatttaaaattcaaagatgctctaataatatgtgtatattctagtcctataacataaaataatcaagctatgaattcggcagaaaaaataatgtaaatgtatatgatattgccagtacagagactttaaataacgatagctacattgaataaaattgatattcaattactacttttaaaaatatttggataaaaataatttgaatttgttttagaattgtaaataaggggtactacttagaataacgcaaaataaatagaaaaaggagactgaaaatt

SEQ ID NO: 4874 - DNA, 299 bp, Staphylococcus aureus
aattttcagtctcctttttctatttattttgcgttattctaagtagtaccccttatttacaattctaaaacaaattcaaattatttttatccaaatatttttaaaagtagtaattgaatatcaattttattcaatgtagctatcgttatttaaagtctctgtactggcaatatcatatacatttacattattttttctgccgaattcatagcttgattattttatgttataggactagaatatacacatattattagagcatctttgaattttaaatcaagaagcgaggttaatgaaca

SEQ ID NO: 4875 - DNA, 153 bp, Staphylococcus aureus
ttaagaactacacccatatagtaacacatcacttgattaaagacaatactatttttagagtcattaatttaaaatatgaattaattctttttttagaatagaatattaagattgatatcgaattagtagtcaaagtgttatggtagatatgaa

SEQ ID NO: 4876 - DNA, 153 bp, Staphylococcus aureus
ttcatatctaccataacactttgactactaattcgatatcaatcttaatattctattctaaaaaaagaattaattcatattttaaattaatgactctaaaaatagtattgtctttaatcaagtgatgtgttactatatgggtgtagttcttaa

SEQ ID NO: 4877 - DNA, 65 bp, Staphylococcus aureus
aagtatagaggttctgaaaagctgtgttttatagtggccttcagaacctttttggcatttggaat

SEQ ID NO: 4878 - DNA, 65 bp, Staphylococcus aureus
attccaaatgccaaaaaggttctgaaggccactataaaacacagcttttcagaacctctatactt

SEQ ID NO: 4879 - DNA, 140 bp, Staphylococcus aureus
taatatgctgcttgatgcaaaatggtaaggtattggttaaattgtattgtctcaaagattagtcacttttaaagataaagaattgtcatgaattaaagctcatgtaatgatgtgttacatgtcgcaatgatggctttcag

SEQ ID NO: 4880 - DNA, 140 bp, Staphylococcus aureus
ctgaaagccatcattgcgacatgtaacacatcattacatgagctttaattcatgacaattctttatctttaaaagtgactaatctttgagacaatacaatttaaccaataccttaccattttgcatcaagcagcatatta

SEQ ID NO: 4881 - DNA, 72 bp, Staphylococcus aureus
aatgtaatataactccttagtttatctttaattgaaaaaatatgtattcatgtttaatagagtaacattgaa

SEQ ID NO: 4882 - DNA, 72 bp, Staphylococcus aureus
ttcaatgttactctattaaacatgaatacatattttttcaattaaagataaactaaggagttatattacatt

SEQ ID NO: 4883 - DNA, 78 bp, Staphylococcus aureus
aacatgattttatgtcgggataaaaaaataacagcatcttaacaaatgtaagatactgtcagtgaaactgtgaaaact

SEQ ID NO: 4884 - DNA, 78 bp, Staphylococcus aureus
agttttcacagtttcactgacagtatcttacatttgttaagatgctgttatttttttatcccgacataaaatcatgtt

SEQ ID NO: 4885 - DNA, 441 bp, Staphylococcus aureus
aaatatcttcctcctaagaatttaagtatgaattagaactatcaattgattgtgcttaattataataattctaatctcttagttagcattattacattttgatccagaatagtcaactggataactttgtaaagtgaacgattacttttaaaataaagaaagataatataaagtgctttgataatggattttgtagttgatgatttaaaaggttgtgtctatatttaatatcttgattttaatgtaaaaaatgtaaaaaaagaagatttgtattctcaactaagtcaaccttattgataatggtgtgagaatatttgttcgagatggatgaaggtgattagtgagaaactggaattttcaagtacgagacaatatttttaaaagttcaattattaacttataagcaaataattgctataaaaaagtttggacgtgtacaat

SEQ ID NO: 4886 - DNA, 441 bp, Staphylococcus aureus
attgtacacgtccaaacttttttatagcaattatttgcttataagttaataattgaacttttaaaaatattgtctcgtacttgaaaattccagtttctcactaatcaccttcatccatctcgaacaaatattctcacaccattatcaataaggttgacttagttgagaatacaaatcttctttttttacattttttacattaaaatcaagatattaaatatagacacaaccttttaaatcatcaactacaaaatccattatcaaagcactttatattatctttctttattttaaaagtaatcgttcactttacaaagttatccagttgactattctggatcaaaatgtaataatgctaactaagagattagaattattataattaagcacaatcaattgatagttctaattcatacttaaattcttaggaggaagatattt

SEQ ID NO: 4887 - DNA, 79 bp, Staphylococcus aureus
caagataccaaaataacccgccccctctagcttaaaatgataagtatagctagagggggcgggtatttcttgcaatgaa

SEQ ID NO: 4888 - DNA, 79 bp, Staphylococcus aureus
ttcattgcaagaaatacccgccccctctagctatacttatcattttaagctagagggggcgggttattttggtatcttg

SEQ ID NO: 4889 - DNA, 85 bp, Staphylococcus aureus
gaacgtcactcctcaaatttttgaatataattccgactagtatgctaagaataatattaattttaaaatatttcaagagggcatt

SEQ ID NO: 4890 - DNA, 85 bp, Staphylococcus aureus
aatgccctcttgaaatattttaaaattaatattattcttagcatactagtcggaattatattcaaaaatttgaggagtgacgttc

SEQ ID NO: 4891 - DNA, 561 bp, Staphylococcus aureus
taatagtgttatgacctagtcgattaaagttgatatttgaaaatgaagcagggcattaaatgcaataaattaaataagttgtcattacagcgttaataatagaaatgattttaacaggaaaaaagtgatgaatatttggaaaagatatatatcgtgcactgtcataagagataagatatgagaaaacaaatgcatccttgaatcgagatgtggctatgacggtttgataaaaattgctaacctcatatttattgaataaaaagataataaatgatcaaccttgaaaagacgcttcgaacaaacacgttgtaaaaaattctgtcgaatcaaaattagcatcttttgagggttcgtgtgtgcaggtggtagttcaaaagctaccgtaaacaaatatttttgtttgagaaaaaaggcgtttgtagtaaatgtgaatatgagtgtgcccttgtgtgattcgtcatttactaacacagccaaacatttaaattgaatgggcttattaagatgaatctatttaggaatacacaggagccatcccatttaaaagggttcttcatcttt

SEQ ID NO: 4892 - DNA, 561 bp, Staphylococcus aureus
aaagatgaagaacccttttaaatgggatggctcctgtgtattcctaaatagattcatcttaataagcccattcaatttaaatgtttggctgtgttagtaaatgacgaatcacacaagggcacactcatattcacatttactacaaacgccttttttctcaaacaaaaatatttgtttacggtagcttttgaactaccacctgcacacacgaaccctcaaaagatgctaattttgattcgacagaattttttacaacgtgtttgttcgaagcgtcttttcaaggttgatcatttattatctttttattcaataaatatgaggttagcaatttttatcaaaccgtcatagccacatctcgattcaaggatgcatttgttttctcatatcttatctcttatgacagtgcacgatatatatcttttccaaatattcatcacttttttcctgttaaaatcatttctattattaacgctgtaatgacaacttatttaatttattgcatttaatgccctgcttcattttcaaatatcaactttaatcgactaggtcataacactatta

SEQ ID NO: 4893 - DNA, 257 bp, Staphylococcus aureus
ttaaaagtaacatactataaaaatttattcaaaattcaatattaatcataatgaataattaaaaaacctgaaacaaattagtttgatatgctctcttcaaagtagatattgaatggagtatatcagcttgtttcaggttttatgaattgagtattaaatttgaaagtaaattacagttctataggtttataaaaaatcagtttttaaatcaaagctatatatgaattgagtattaaatttgtgttcaaatcacaagt

SEQ ID NO: 4894 - DNA, 257 bp, Staphylococcus aureus
acttgtgatttgaacacaaatttaatactcaattcatatatagctttgatttaaaaactgattttttataaacctatagaactgtaatttactttcaaatttaatactcaattcataaaacctgaaacaagctgatatactccattcaatatctactttgaagagagcatatcaaactaatttgtttcaggttttttaattattcattatgattaatattgaattttgaataaatttttatagtatgttacttttaa

SEQ ID NO: 4895 - DNA, 117 bp, Staphylococcus aureus
actttaaagtcctttctgcatatactttatgtatactgacgtttgtctacgggcagtgaaacgtcagtcttgcttcatacatagtttaaacgttattgttagtgatttcaagtttgt

SEQ ID NO: 4896 - DNA, 117 bp, Staphylococcus aureus
acaaacttgaaatcactaacaataacgtttaaactatgtatgaagcaagactgacgtttcactgcccgtagacaaacgtcagtatacataaagtatatgcagaaaggactttaaagt

SEQ ID NO: 4897 - DNA, 142 bp, Staphylococcus aureus
aagaacacctccccaatttaaataatattatagcataatcgcctgctgtaaaagattgttcataaacttttaaatggtataaaaaactgtactatcttaaattagacagtacagtaatctcattttgaattcagtgtgataa

SEQ ID NO: 4898 - DNA, 142 bp, Staphylococcus aureus
ttatcacactgaattcaaaatgagattactgtactgtctaatttaagatagtacagttttttataccatttaaaagtttatgaacaatcttttacagcaggcgattatgctataatattatttaaattggggaggtgttctt

SEQ ID NO: 4899 - DNA, 512 bp, Staphylococcus aureus
agttgtcgcccctttaaaaatttgtttatttaatcttttacccttcttattataaagtaaaacccttacattattaagttataagtcttcattcgcattaaacgtctctgtacatttataaaactattaaaagattacctaagcagttattgaaaaaatgccgaaaatttgctattatcgttaaataatttacataaactcatataatctaaagaatatggctttagaagtttctaccatgttgccttgaacgacatgactatgagtaacaacacaatactaggagtagcttcagccattaaattgtaaccatggtgggtgatttatatcattttatatgatggtcacagtttatttgatgaaacttcttttacattgattgcatgacaaattcgttatgcatgttcgttcactcataaaccctgaaactattatttagtttggggatttttttgtatctagcaccaatttaagagcaaaatgtttcacacaaatctgaggaggttttaaga

SEQ ID NO: 4900 - DNA, 512 bp, Staphylococcus aureus
tcttaaaacctcctcagatttgtgtgaaacattttgctcttaaattggtgctagatacaaaaaaatccccaaactaaataatagtttcagggtttatgagtgaacgaacatgcataacgaatttgtcatgcaatcaatgtaaaagaagtttcatcaaataaactgtgaccatcatataaaatgatataaatcacccaccatggttacaatttaatggctgaagctactcctagtattgtgttgttactcatagtcatgtcgttcaaggcaacatggtagaaacttctaaagccatattctttagattatatgagtttatgtaaattatttaacgataatagcaaattttcggcattttttcaataactgcttaggtaatcttttaatagttttataaatgtacagagacgtttaatgcgaatgaagacttataacttaataatgtaagggttttactttataataagaagggtaaaagattaaataaacaaatttttaaaggggcgacaact

SEQ ID NO: 4901 - DNA, 112 bp, Staphylococcus aureus
ttatatataataaaaccacctgtttgcacgggtggtttttaatttgagtagttggaaaattacaataaggacggaaaaggggtaaggtgttctaagtttgcgttttaattca

SEQ ID NO: 4902 - DNA, 112 bp, Staphylococcus aureus
tgaattaaaacgcaaacttagaacaccttaccccttttccgtccttattgtaattttccaactactcaaattaaaaaccacccgtgcaaacaggtggttttattatatataa

SEQ ID NO: 4903 - DNA, 391 bp, Staphylococcus aureus
aatattttatcctttccattagttgattgttttcatttgttcaaatctctattcatttactcggatacagggctgtgtatttgcagagtaatattatgattggaataaccaacgcgttccgtattcgttttgagtgacgcagctagctacgataataatgacatgtggcttataacacattgtgtaatttattgtgtgttttgtgatgtctatattggttgcagattgttgtatatttcacttaaagggcatttatataaaaaaagaggccagatgacgtatcatctgaccttcagctaaaacgctgagaatatgtcattcttcaagagaatgaagccggaatggttaccgggaatttgtaaatcaattatatcagatgtaatattacaat

SEQ ID NO: 4904 - DNA, 391 bp, Staphylococcus aureus
attgtaatattacatctgatataattgatttacaaattcccggtaaccattccggcttcattctcttgaagaatgacatattctcagcgttttagctgaaggtcagatgatacgtcatctggcctctttttttatataaatgccctttaagtgaaatatacaacaatctgcaaccaatatagacatcacaaaacacacaataaattacacaatgtgttataagccacatgtcattattatcgtagctagctgcgtcactcaaaacgaatacggaacgcgttggttattccaatcataatattactctgcaaatacacagccctgtatccgagtaaatgaatagagatttgaacaaatgaaaacaatcaactaatggaaaggataaaatatt

SEQ ID NO: 4905 - DNA, 313 bp, Staphylococcus aureus
taaatagtgttctcctaatcaatttattcttctttatatcagcattattagcactgaaattaacatgaatggtacgaaaatagatgttactataaaaccaacaatttttattaggtggaactcatcaattttgtatttagcaaatttcgcaatgaccttctatttattcgctttttatagttcatgtatgtgtaaaaaagtctatattgaacatctaattataagcgaattcctaatgctaaaagcaatctaacttacttaaatattattatgagtttttattgaaattaaataaatttaaactatttcttag

SEQ ID NO: 4906 - DNA, 313 bp, Staphylococcus aureus
ctaagaaatagtttaaatttatttaatttcaataaaaactcataataatatttaagtaagttagattgcttttagcattaggaattcgcttataattagatgttcaatatagacttttttacacatacatgaactataaaaagcgaataaatagaaggtcattgcgaaatttgctaaatacaaaattgatgagttccacctaataaaaattgttggttttatagtaacatctattttcgtaccattcatgttaatttcagtgctaataatgctgatataaagaagaataaattgattaggagaacactattta

SEQ ID NO: 4907 - DNA, 66 bp, Staphylococcus aureus
ttaacaatatctattctcatagaatttgttcaattaagtgtagacgattcactgacacatcataag

SEQ ID NO: 4908 - DNA, 66 bp, Staphylococcus aureus
cttatgatgtgtcagtgaatcgtctacacttaattgaacaaattctatgagaatagatattgttaa

SEQ ID NO: 4909 - DNA, 416 bp, Staphylococcus aureus
taatgccaatcaacaccgaagttctcatgtcctctttccttttacgactacatatattgttaataatattgaaataataaacttatagtgataatttatttaatagatccatgagagtaggaaccccaccatacgggaatttcgaaatcatgggttttttgttttaaaggattgatgcaatagataaagtagccattctaatatatggagtatttatcagctaaaaattaaaacagatatgggttttcttcattaaatcatttttctataaggaaacagaggaaacgctactgtcacctctgcttgaaataattaggatgaaatactctgagtttatgaacgtccacacccaaaacactcaaaccctccaaactctcaaccccagactacatctccaaacccccaaacaccaatac

SEQ ID NO: 4910 - DNA, 416 bp, Staphylococcus aureus
gtattggtgtttgggggtttggagatgtagtctggggttgagagtttggagggtttgagtgttttgggtgtggacgttcataaactcagagtatttcatcctaattatttcaagcagaggtgacagtagcgtttcctctgtttccttatagaaaaatgatttaatgaagaaaacccatatctgttttaatttttagctgataaatactccatatattagaatggctactttatctattgcatcaatcctttaaaacaaaaaacccatgatttcgaaattcccgtatggtggggttcctactctcatggatctattaaataaattatcactataagtttattatttcaatattattaacaatatatgtagtcgtaaaaggaaagaggacatgagaacttcggtgttgattggcatta

SEQ ID NO: 4911 - DNA, 72 bp, Staphylococcus aureus
tcacttcatctcctaatctttatatacataacataatacttattcgattgttttcaaaacatttgattttat

SEQ ID NO: 4912 - DNA, 72 bp, Staphylococcus aureus
ataaaatcaaatgttttgaaaacaatcgaataagtattatgttatgtatataaagattaggagatgaagtga

SEQ ID NO: 4913 - DNA, 271 bp, Staphylococcus aureus
gtactacgacaatatgatgtctgttttgtgtctgaaagttttacagtttttaaaataaaaatggtataaagtgtgatttgtataaaaaagagtctcgacggataagaattgattaataacagttagcattttattaattaccttaacaatgattcaagtttagttaaatgaggtttaatttgaaaggggatagcgcctcaatataatgtaggtagattgttcatattacgtaattgaaaaatcaaatttaaatagattggggctaaaaatt

SEQ ID NO: 4914 - DNA, 271 bp, Staphylococcus aureus
aatttttagccccaatctatttaaatttgatttttcaattacgtaatatgaacaatctacctacattatattgaggcgctatcccctttcaaattaaacctcatttaactaaacttgaatcattgttaaggtaattaataaaatgctaactgttattaatcaattcttatccgtcgagactcttttttatacaaatcacactttataccatttttattttaaaaactgtaaaactttcagacacaaaacagacatcatattgtcgtagtac

SEQ ID NO: 4915 - DNA, 151 bp, Staphylococcus aureus
tacacatacttgacgacgaaataatttgaaattgaaatagagaggttaagtgacgatcaaacgttgcttaacttctttttaatgcttaaaaatcatttcaaaggcacatagaaacgctatattaacctcataatcactcattattttttgc

SEQ ID NO: 4916 - DNA, 151 bp, Staphylococcus aureus
gcaaaaaataatgagtgattatgaggttaatatagcgtttctatgtgcctttgaaatgatttttaagcattaaaaagaagttaagcaacgtttgatcgtcacttaacctctctatttcaatttcaaattatttcgtcgtcaagtatgtgta

SEQ ID NO: 4917 - DNA, 118 bp, Staphylococcus aureus
tcatgacgttctctaaatagaagctgacatcggtaaaacaagaagttaagtgacaacggtttacatgttgcttagcttcttttattatgcgtaatgatgtaaaagacgaatattcatt

SEQ ID NO: 4918 - DNA, 118 bp, Staphylococcus aureus
aatgaatattcgtcttttacatcattacgcataataaaagaagctaagcaacatgtaaaccgttgtcacttaacttcttgttttaccgatgtcagcttctatttagagaacgtcatga

SEQ ID NO: 4919 - DNA, 111 bp, Staphylococcus aureus
tagttaaacaaggtttaatgtgaatggagcaatacgccatctataataaagctgtatgattcaatgaatgtaatcgaacaaatctaataattacgaatggagcatacaact

SEQ ID NO: 4920 - DNA, 111 bp, Staphylococcus aureus
agttgtatgctccattcgtaattattagatttgttcgattacattcattgaatcatacagctttattatagatggcgtattgctccattcacattaaaccttgtttaacta

SEQ ID NO: 4921 - DNA, 177 bp, Staphylococcus aureus
tcatgacattctctaaatagaagctgtcatcggaaaaacaagaagttcagtgacaacggcctacatgttgcttagcttcttttgttatgttcgatgatttgagaacccgaattttcgatgggtccaaatatgacgtggaagagtcctgaatttatctgtaaatccctatctatcggg

SEQ ID NO: 4922 - DNA, 177 bp, Staphylococcus aureus
cccgatagatagggatttacagataaattcaggactcttccacgtcatatttggacccatcgaaaattcgggttctcaaatcatcgaacataacaaaagaagctaagcaacatgtaggccgttgtcactgaacttcttgtttttccgatgacagcttctatttagagaatgtcatga

SEQ ID NO: 4923 - DNA, 91 bp, Staphylococcus aureus
tgaaaggtcaaatacgccaattataataaagctgtatgattcaatagacgtaagcgaacaaatctaataattacgaatggagcatacaact

SEQ ID NO: 4924 - DNA, 91 bp, Staphylococcus aureus
agttgtatgctccattcgtaattattagatttgttcgcttacgtctattgaatcatacagctttattataattggcgtatttgacctttca

SEQ ID NO: 4925 - DNA, 445 bp, Staphylococcus aureus
ttcaatgaaatatggataatagtaaaatatggatagtatagaggagttaggcaacataagttgcttagcttcttttttgtgttggcgagatgaaaatgaagcgtatcgatgaataataaaaacaccaataaaacttgtggaaatagttgatacttatagatgcgtgatgtcgctttagtgacatgaaacaatgtggaaaacataattaaattgagggaaagtgtgaatagttaaaaaattagcattgtgttataaaaaataattaatactgttaggatttcattaactaacttaacgttggttcaaaaatagttaaaaagaggttaattcatagcgcagtatctcgcttatataatgatagtagattgttcgtattacgtaattgaattaatcatataaaaatatattaagacaaaatttataaatagattgggagaatagtact

SEQ ID NO: 4926 - DNA, 445 bp, Staphylococcus aureus
agtactattctcccaatctatttataaattttgtcttaatatatttttatatgattaattcaattacgtaatacgaacaatctactatcattatataagcgagatactgcgctatgaattaacctctttttaactatttttgaaccaacgttaagttagttaatgaaatcctaacagtattaattattttttataacacaatgctaattttttaactattcacactttccctcaatttaattatgttttccacattgtttcatgtcactaaagcgacatcacgcatctataagtatcaactatttccacaagttttattggtgtttttattattcatcgatacgcttcattttcatctcgccaacacaaaaaagaagctaagcaacttatgttgcctaactcctctatactatccatattttactattatccatatttcattgaa

SEQ ID NO: 4927 - DNA, 338 bp, Staphylococcus aureus
attaaacaatcaatgactttaaagtaataaatttgaagcagcttaacgatgaaatgttgaataaatacgtacatcctccaaaaaggggcgtatctaaatcaacagtgtcgttaggctgtttttatgttttataacgcagggtatgagcgtactaaaaattcacattacttctgaaagtgatgtccattgaatattaattagttcttcattaaccatgatttaattttaattaaacgagtgttaatgtcagtctgtctcaatgccctttataataaatgtgtattattcaaattacgtaataaaagcaatccaatatattaagattggagcatatgaat

SEQ ID NO: 4928 - DNA, 338 bp, Staphylococcus aureus
attcatatgctccaatcttaatatattggattgcttttattacgtaatttgaataatacacatttattataaagggcattgagacagactgacattaacactcgtttaattaaaattaaatcatggttaatgaagaactaattaatattcaatggacatcactttcagaagtaatgtgaatttttagtacgctcataccctgcgttataaaacataaaaacagcctaacgacactgttgatttagatacgcccctttttggaggatgtacgtatttattcaacatttcatcgttaagctgcttcaaatttattactttaaagtcattgattgtttaat

SEQ ID NO: 4929 - DNA, 376 bp, Staphylococcus aureus
tcaatgatatatagaataaaagcttaagaagcggtttaataatcccatgtttaatgattttgatacgtgttttaataataaaaacatatcgaacattgactacgttattaagctgcttttttgtacactttgtatcgaataacttaagatctaaaactaatcggaaagaacaatgattcccccaaaaaaatttatgttgctattaaaaatcagttaatacgaatgttaaaatacgtttgattttcattaataatgattcaagtttatttaaatgagcgttaatgtcagtctgttttgatgcaccttataataaagacagatagttcaaattacgtaatcataacaatccaatatatcaagattggagcaaataaat

SEQ ID NO: 4930 - DNA, 376 bp, Staphylococcus aureus
atttatttgctccaatcttgatatattggattgttatgattacgtaatttgaactatctgtctttattataaggtgcatcaaaacagactgacattaacgctcatttaaataaacttgaatcattattaatgaaaatcaaacgtattttaacattcgtattaactgatttttaatagcaacataaatttttttgggggaatcattgttctttccgattagttttagatcttaagttattcgatacaaagtgtacaaaaaagcagcttaataacgtagtcaatgttcgatatgtttttattattaaaacacgtatcaaaatcattaaacatgggattattaaaccgcttcttaagcttttattctatatatcattga

SEQ ID NO: 4931 - DNA, 365 bp, Staphylococcus aureus
tttgagttaatagcataatagcttaagaagcgacttaacgacaaaatgtgaattgacatctgtgtccttatataaggaactgtgttaaatacattactgttgttaagttgtttttgtaattcaaagagcagaacagagtaacatcatcagttgtagtaaacgataatccagtaaaacaactaaatgaaataatgaaagtcatttaacctgaacattaaaatatatttgtttttcattaagaataattcaagtatatttaaatcgaggttaattatcgtatgaaacgatgcacgttataataaaaatgtatgattcaaattacgtaatgaaaacaatccaatatattaagattggagcaaataaat

SEQ ID NO: 4932 - DNA, 365 bp, Staphylococcus aureus
atttatttgctccaatcttaatatattggattgttttcattacgtaatttgaatcatacatttttattataacgtgcatcgtttcatacgataattaacctcgatttaaatatacttgaattattcttaatgaaaaacaaatatattttaatgttcaggttaaatgactttcattatttcatttagttgttttactggattatcgtttactacaactgatgatgttactctgttctgctctttgaattacaaaaacaacttaacaacagtaatgtatttaacacagttccttatataaggacacagatgtcaattcacattttgtcgttaagtcgcttcttaagctattatgctattaactcaaa

SEQ ID NO: 4933 - DNA, 52 bp, Staphylococcus aureus
ataattacgaataataaaaagtaattgaagcggcttaacggtgaaatgtaaa

SEQ ID NO: 4934 - DNA, 52 bp, Staphylococcus aureus
tttacatttcaccgttaagccgcttcaattactttttattattcgtaattat

SEQ ID NO: 4935 - DNA, 382 bp, Staphylococcus aureus
ctttgataaatacatagattgcataagaataaaatttgtataatttaacataaaagttgtaaaagtaaagtgaattaaaaacgaacattaaatttaggcactgtgaaagcgcagtgtcttttttgtgtcgaaattgtgtacagaataagtagttaaataaagattaagttgagataaagtgttattcgtaaataaaagagagtagatcgataggaattgaatgatattagttaactatttattaaattacttaataatgattaatttttagttaaagtaagtttaatgtgaagcacgaccattgctcattataatgaatgaggattgttcgtattgcgtaatagaataaatcaaatagactaaaaattgggagcatagaatt

SEQ ID NO: 4936 - DNA, 382 bp, Staphylococcus aureus
aattctatgctcccaatttttagtctatttgatttattctattacgcaatacgaacaatcctcattcattataatgagcaatggtcgtgcttcacattaaacttactttaactaaaaattaatcattattaagtaatttaataaatagttaactaatatcattcaattcctatcgatctactctcttttatttacgaataacactttatctcaacttaatctttatttaactacttattctgtacacaatttcgacacaaaaaagacactgcgctttcacagtgcctaaatttaatgttcgtttttaattcactttacttttacaacttttatgttaaattatacaaattttattcttatgcaatctatgtatttatcaaag

SEQ ID NO: 4937 - DNA, 108 bp, Staphylococcus aureus
ttaataaaataaaacagcttaatgatgtaatgaaattagtgagttaatcactgacttcaacgtcattgagctgttttttatttgcttcgttacaaagcattattgaat

SEQ ID NO: 4938 - DNA, 108 bp, Staphylococcus aureus
attcaataatgctttgtaacgaagcaaataaaaaacagctcaatgacgttgaagtcagtgattaactcactaatttcattacatcattaagctgttttattttattaa

SEQ ID NO: 4939 - DNA, 212 bp, Staphylococcus aureus
ttaatctttaaaacggtgtttatggatttttcctactaaaaccttgatttcaaaaagggtttaaatcaaatgaaacaataataaaaaataatgcaacataataataagtacaaatttaattaagaaattaaattgattgtatatgtatattttggtaacgtaaaagagaaatatacaaaataattaattatttatatgaaaagagaatataa

SEQ ID NO: 4940 - DNA, 212 bp, Staphylococcus aureus
ttatattctcttttcatataaataattaattattttgtatatttctcttttacgttaccaaaatatacatatacaatcaatttaatttcttaattaaatttgtacttattattatgttgcattattttttattattgtttcatttgatttaaaccctttttgaaatcaaggttttagtaggaaaaatccataaacaccgttttaaagattaa

SEQ ID NO: 4941 - DNA, 60 bp, Staphylococcus aureus
aaataacacaaaggttgatagtactcaacaaatattaacatgatagagagaagtgaaaaa

SEQ ID NO: 4942 - DNA, 60 bp, Staphylococcus aureus
tttttcacttctctctatcatgttaatatttgttgagtactatcaacctttgtgttattt

SEQ ID NO: 4943 - DNA, 56 bp, Staphylococcus aureus
caaaaagttgatattagtcaacaaaagcaaatattgagaataaagagagttgtgaa

SEQ ID NO: 4944 - DNA, 56 bp, Staphylococcus aureus
ttcacaactctctttattctcaatatttgcttttgttgactaatatcaactttttg

SEQ ID NO: 4945 - DNA, 51 bp, Staphylococcus aureus
taaataaaaccaagggcataaactaatttaaaacaagagagaagtgaaaag

SEQ ID NO: 4946 - DNA, 51 bp, Staphylococcus aureus
cttttcacttctctcttgttttaaattagtttatgcccttggttttattta

SEQ ID NO: 4947 - DNA, 134 bp, Staphylococcus aureus
gtataattattattataaaaaatgacgttagaacatttaataataaagttaaatgaattacatgtattaaattgaataagttagttttgtttgataacataaaagttgaataatcactattttaataagttata

SEQ ID NO: 4948 - DNA, 134 bp, Staphylococcus aureus
tataacttattaaaatagtgattattcaacttttatgttatcaaacaaaactaacttattcaatttaatacatgtaattcatttaactttattattaaatgttctaacgtcattttttataataataattatac

SEQ ID NO: 4949 - DNA, 288 bp, Staphylococcus aureus
actacatatcatactactaaataaagcgaccaatgttcagtatattcacaactgacactaggccgcttctttttaatttattttatttccatgtaaagtaacgctctcttaatcgaaataccacactcacaattgtaaaaacacaacttaaattactgtcccgcattaaacatatctacattccaaacagcaacaacaaaatcctcaagtaccaaaagctatgaccactttatcaaaatcaacgcaagttaacctctcccgaactacccgctatagatcatcatcacc

SEQ ID NO: 4950 - DNA, 288 bp, Staphylococcus aureus
ggtgatgatgatctatagcgggtagttcgggagaggttaacttgcgttgattttgataaagtggtcatagcttttggtacttgaggattttgttgttgctgtttggaatgtagatatgtttaatgcgggacagtaatttaagttgtgtttttacaattgtgagtgtggtatttcgattaagagagcgttactttacatggaaataaaataaattaaaaagaagcggcctagtgtcagttgtgaatatactgaacattggtcgctttatttagtagtatgatatgtagt

SEQ ID NO: 4951 - DNA, 118 bp, Staphylococcus aureus
taatttaattaagtatactatttttttattatcgaagattgcgaaagaggaaacgctcctatataatgtaaaacggaattattcctatttacaaataaattgaagtgagggtatatat

SEQ ID NO: 4952 - DNA, 118 bp, Staphylococcus aureus
atatataccctcacttcaatttatttgtaaataggaataattccgttttacattatataggagcgtttcctctttcgcaatcttcgataataaaaaaatagtatacttaattaaatta

SEQ ID NO: 4953 - DNA, 106 bp, Staphylococcus aureus
gttgaatgaagtataatcatttttgaattgtggcttaattgtttgcaatttatgacaattaataaaaagttaagatgttcttaggaactttttgttttcaatctat

SEQ ID NO: 4954 - DNA, 106 bp, Staphylococcus aureus
atagattgaaaacaaaaagttcctaagaacatcttaactttttattaattgtcataaattgcaaacaattaagccacaattcaaaaatgattatacttcattcaac

SEQ ID NO: 4955 - DNA, 1030 bp, Staphylococcus aureus
acaaacaagactcacctcacatcaataaatcaacacaaagcaaagccaccatccctattggtatagtggcctgagaattttaagtattcaattcgcttaaattattttgcgaaaatgtcgataattgctttgatgattttaatgatagtacctacaatagccatcgttttgtcctcctgtatgttgatttaacatagtgatgagttgttgattgttaatgtttgagattagttgttacctaaaaatttaccaagtaaatctttaaagaatttgaataattttgctacgaattccatgtgaatggcccccttcaaataagatgttcatatctatgagatttttataacttacttaccagtgaatttctcaattaatcctttaatgaatttaatgattcctgcaatgatacccatgtgaaagacctcctttgtttgttatgaaatcttatttaccagtgaattgttcgattaagcttttgataactttaatgatgccagcgatgatacccattaagattacctcctttgcttatgagttaacttcattgtacatagttatcttgtgcgtaattgatttttttcctaacttgaattgttatgatcataactgcgaattttttattttaaaaggacgggaaatactgcctaactgtacaggtgcgtttacaaaatctttacaatcattggtttaatagaggttaagctcatgaatttgacatgaagcagaaatttaattatattttatgttataagtttaaaacgaataacacgttaggtctcgtctaggcaaagcatatttatgaagatgaattgaacagacagaagtaacattttatatacatatgtgcatgggagcacgcttaaagagaacactgcaacaaggtatatcaacgtaccgtgatgcagtgtctagttaaactgaaacctgcaatagtaaattttctgccattatgtacagaatctactattgtaggtttttatttttatacataagcaattatgcgagagattagaaataaggaggttatgca

SEQ ID NO: 4956 - DNA, 1030 bp, Staphylococcus aureus
tgcataacctccttatttctaatctctcgcataattgcttatgtataaaaataaaaacctacaatagtagattctgtacataatggcagaaaatttactattgcaggtttcagtttaactagacactgcatcacggtacgttgatataccttgttgcagtgttctctttaagcgtgctcccatgcacatatgtatataaaatgttacttctgtctgttcaattcatcttcataaatatgctttgcctagacgagacctaacgtgttattcgttttaaacttataacataaaatataattaaatttctgcttcatgtcaaattcatgagcttaacctctattaaaccaatgattgtaaagattttgtaaacgcacctgtacagttaggcagtatttcccgtccttttaaaataaaaaattcgcagttatgatcataacaattcaagttaggaaaaaaatcaattacgcacaagataactatgtacaatgaagttaactcataagcaaaggaggtaatcttaatgggtatcatcgctggcatcattaaagttatcaaaagcttaatcgaacaattcactggtaaataagatttcataacaaacaaaggaggtctttcacatgggtatcattgcaggaatcattaaattcattaaaggattaattgagaaattcactggtaagtaagttataaaaatctcatagatatgaacatcttatttgaagggggccattcacatggaattcgtagcaaaattattcaaattctttaaagatttacttggtaaatttttaggtaacaactaatctcaaacattaacaatcaacaactcatcactatgttaaatcaacatacaggaggacaaaacgatggctattgtaggtactatcattaaaatcatcaaagcaattatcgacattttcgcaaaataatttaagcgaattgaatacttaaaattctcaggccactataccaatagggatggtggctttgctttgtgttgatttattgatgtgaggtgagtcttgtttgt

SEQ ID NO: 4957 - DNA, 161 bp, Staphylococcus aureus
cgatgatatgttgcgatgctaagtaattaatatatcatcatatctacaatgttctagcttcttaaaatatactaaaaatgataaacttaatgtaatagttgatgtcgtgataacgatacaaagatgaagtaatcaattttaatattattggagttagtgat

SEQ ID NO: 4958 - DNA, 161 bp, Staphylococcus aureus
atcactaactccaataatattaaaattgattacttcatctttgtatcgttatcacgacatcaactattacattaagtttatcatttttagtatattttaagaagctagaacattgtagatatgatgatatattaattacttagcatcgcaacatatcatcg

SEQ ID NO: 4959 - DNA, 228 bp, Staphylococcus aureus
gaaggttaggtatgcttctgctggcttattaaagctatagaagtatgcttggttaaacagcgcaacgccatatatttgggtgtgctgtttttctattacatgatgtgtttattacgtggatgaatgcgtgggtctgaatatagcccgtgaaaggcgtatgtcataaaatttgcgaatggtgacaagtcaacgcaagcatatttgttgcgagacatgcccactatcctt

SEQ ID NO: 4960 - DNA, 228 bp, Staphylococcus aureus
aaggatagtgggcatgtctcgcaacaaatatgcttgcgttgacttgtcaccattcgcaaattttatgacatacgcctttcacgggctatattcagacccacgcattcatccacgtaataaacacatcatgtaatagaaaaacagcacacccaaatatatggcgttgcgctgtttaaccaagcatacttctatagctttaataagccagcagaagcatacctaaccttc

SEQ ID NO: 4961 - DNA, 95 bp, Staphylococcus aureus
ttgaagattttaaatattaacacttgagtgacgatgttattatatttgtcatttgagtgttttttgtggcgtgatagtatagggaacttagacaa

SEQ ID NO: 4962 - DNA, 95 bp, Staphylococcus aureus
ttgtctaagttccctatactatcacgccacaaaaaacactcaaatgacaaatataataacatcgtcactcaagtgttaatatttaaaatcttcaa

SEQ ID NO: 4963 - DNA, 161 bp, Staphylococcus aureus
cgtaatgacaacacattacaagagttgactatattatgataaatacaggcgctaccgtattaatgaaacaattttgatgcaggtgtattgcatgttatttacatacatgttagagtgttacttaaacacgtagacgctttaacgctttaaaggagatgtga

SEQ ID NO: 4964 - DNA, 161 bp, Staphylococcus aureus
tcacatctcctttaaagcgttaaagcgtctacgtgtttaagtaacactctaacatgtatgtaaataacatgcaatacacctgcatcaaaattgtttcattaatacggtagcgcctgtatttatcataatatagtcaactcttgtaatgtgttgtcattacg

SEQ ID NO: 4965 - DNA, 166 bp, Staphylococcus aureus
tatatagaagcatctgacacacaagtatttgtgttgctcaggtgtttttttgtttggaattgaaaagttagtactggttctgaattaatcgaaacttagataattgcaaaataacaaaatgtcgtttataattcttatctgaaaagtaagaattaaaattgagaca

SEQ ID NO: 4966 - DNA, 166 bp, Staphylococcus aureus
tgtctcaattttaattcttacttttcagataagaattataaacgacattttgttattttgcaattatctaagtttcgattaattcagaaccagtactaacttttcaattccaaacaaaaaaacacctgagcaacacaaatacttgtgtgtcagatgcttctatata

SEQ ID NO: 4967 - DNA, 294 bp, Staphylococcus aureus
ataatagcagcactagcatatattttaagatcaacttaaattgattttgaaaatgctagtgcttttttgtgcgatgttaatcattcgtgattgagttatggaggtttggtggacatttgtatggatttaatttgataaatgtcatagtagtctcacaattcatcattgtcacatgaattaattatttttttaattttttagaaaattcggcaaattgtattgacgatatatgcaattttacatataatgctcttattcctagtggattaataagaatttgtaggaggggcgatg

SEQ ID NO: 4968 - DNA, 294 bp, Staphylococcus aureus
catcgcccctcctacaaattcttattaatccactaggaataagagcattatatgtaaaattgcatatatcgtcaatacaatttgccgaattttctaaaaaattaaaaaaataattaattcatgtgacaatgatgaattgtgagactactatgacatttatcaaattaaatccatacaaatgtccaccaaacctccataactcaatcacgaatgattaacatcgcacaaaaaagcactagcattttcaaaatcaatttaagttgatcttaaaatatatgctagtgctgctattat

SEQ ID NO: 4969 - DNA, 222 bp, Staphylococcus aureus
attatattgcgtcctacaagcaaagttcatgcttatgtttgtagggcgttattgtttgacaataaaattatttccaatagagaaagggaatgtaatcattttatagtgaaatattatgaaattgtaataatttagatattgtaaaatctaataagttgtaataattttaaggggtaattataaaatttgatgatacagtatatgatttttttgtaatcataa

SEQ ID NO: 4970 - DNA, 222 bp, Staphylococcus aureus
ttatgattacaaaaaaatcatatactgtatcatcaaattttataattaccccttaaaattattacaacttattagattttacaatatctaaattattacaatttcataatatttcactataaaatgattacattccctttctctattggaaataattttattgtcaaacaataacgccctacaaacataagcatgaactttgcttgtaggacgcaatataat

SEQ ID NO: 4971 - DNA, 184 bp, Staphylococcus aureus
agtcttacgtatataaatatataatgaattcctattacatttcacaagctgaaaagttggattgaatcctaaactttatggcggggctatcaaagtcgtgattgttgtaataggaatttttgtataagaaaaaggattggtcgaatgaacttcatgttctatgttcgaccaatccttttctgaa

SEQ ID NO: 4972 - DNA, 184 bp, Staphylococcus aureus
ttcagaaaaggattggtcgaacatagaacatgaagttcattcgaccaatcctttttcttatacaaaaattcctattacaacaatcacgactttgatagccccgccataaagtttaggattcaatccaacttttcagcttgtgaaatgtaataggaattcattatatatttatatacgtaagact

SEQ ID NO: 4973 - DNA, 139 bp, Staphylococcus aureus
tccccctagtatcttctgtttatatgaaaagttgggtgcgctgaattgctaacgttttgcgctataactactcatatatgataacataattgtacagtataatttgaaaaattgatttcacaaagttggggtgtcaaag

SEQ ID NO: 4974 - DNA, 139 bp, Staphylococcus aureus
ctttgacaccccaactttgtgaaatcaatttttcaaattatactgtacaattatgttatcatatatgagtagttatagcgcaaaacgttagcaattcagcgcacccaacttttcatataaacagaagatactaggggga

SEQ ID NO: 4975 - DNA, 168 bp, Staphylococcus aureus
attaaatttaaaagcatctttactcatcgtcgaccacaacaattaatgatgaataaaggtgctttttgttatagatcaccggacaatttaatatagtaaaaagcgacctagtgaacaattgacatatatccacaggtcgcttaacttaagttatattgctagttgcga

SEQ ID NO: 4976 - DNA, 168 bp, Staphylococcus aureus
tcgcaactagcaatataacttaagttaagcgacctgtggatatatgtcaattgttcactaggtcgctttttactatattaaattgtccggtgatctataacaaaaagcacctttattcatcattaattgttgtggtcgacgatgagtaaagatgcttttaaatttaat

SEQ ID NO: 4977 - DNA, 120 bp, Staphylococcus aureus
aaacaaaaccccaattctatgaatgaattaatatggtgattatacgcccttaattttttattttcaaagatattactgctaagtgtaaaacgaaaatcatcattgatagcatcgaattac

SEQ ID NO: 4978 - DNA, 120 bp, Staphylococcus aureus
gtaattcgatgctatcaatgatgattttcgttttacacttagcagtaatatctttgaaaataaaaaattaagggcgtataatcaccatattaattcattcatagaattggggttttgttt

SEQ ID NO: 4979 - DNA, 180 bp, Staphylococcus aureus
agcgatataggcacctccgaaaatgagtgttttgtaactattatagcaatattattgataaatgttctattttttagatgaatatcttctattttatatattgaacagataaattttttagattatagtaattatcattaataactaatatcagaatattctaaaaaaggggtgtgcatc

SEQ ID NO: 4980 - DNA, 180 bp, Staphylococcus aureus
gatgcacaccccttttttagaatattctgatattagttattaatgataattactataatctaaaaaatttatctgttcaatatataaaatagaagatattcatctaaaaaatagaacatttatcaataatattgctataatagttacaaaacactcattttcggaggtgcctatatcgct

SEQ ID NO: 4981 - DNA, 269 bp, Staphylococcus aureus
tctttgtatggaaatggtggttacgttgacgttgtgtcatgctgaatcgagtttgaaataatctagtatctatcaacgtcacatgccatctttgtaacctaaaaacaaaggtttgtaagacaacaaatcgattaattataagtagtgattttttacattcgtttataggtcaactgtagtggaagacaatgatttgtggtaatcatgtaatgcttaaaaacaatattgacttttacagaacgttcatatatgataaatattgtgtttag

SEQ ID NO: 4982 - DNA, 269 bp, Staphylococcus aureus
ctaaacacaatatttatcatatatgaacgttctgtaaaagtcaatattgtttttaagcattacatgattaccacaaatcattgtcttccactacagttgacctataaacgaatgtaaaaaatcactacttataattaatcgatttgttgtcttacaaacctttgtttttaggttacaaagatggcatgtgacgttgatagatactagattatttcaaactcgattcagcatgacacaacgtcaacgtaaccaccatttccatacaaaga

SEQ ID NO: 4983 - DNA, 468 bp, Staphylococcus aureus
tcaatatttatattaaatactatatataatgaaggtaagtgctcaaattttgagtatttgccttttttatttgtctttgaatggctcgtttttttagctatagaaatgatagggcattgagattggaagggcatttggcttgtgcaatatacatagctaaatgtcttttttgttttgtgaaatatgatggatggcttgtgtgggcaagtttgctatttatagatatgcatttttcaatttaggagttggccatgcatctacactttataatggtgagagcgtggtgaggtattgttaatcacgcaattgtagcgaggagttattgctacatatgtcgttatggcctattgattttctaaaatagctgtatcagatcatgtgacaaaataaaaataatttgttgaaagcctttacataacttgtctagacaagttatactcgttttaagacattaagggagtgaaatat

SEQ ID NO: 4984 - DNA, 468 bp, Staphylococcus aureus
atatttcactcccttaatgtcttaaaacgagtataacttgtctagacaagttatgtaaaggctttcaacaaattatttttattttgtcacatgatctgatacagctattttagaaaatcaataggccataacgacatatgtagcaataactcctcgctacaattgcgtgattaacaatacctcaccacgctctcaccattataaagtgtagatgcatggccaactcctaaattgaaaaatgcatatctataaatagcaaacttgcccacacaagccatccatcatatttcacaaaacaaaaaagacatttagctatgtatattgcacaagccaaatgcccttccaatctcaatgccctatcatttctatagctaaaaaaacgagccattcaaagacaaataaaaaaggcaaatactcaaaatttgagcacttaccttcattatatatagtatttaatataaatattga

SEQ ID NO: 4985 - DNA, 63 bp, Staphylococcus aureus
taaaataaaaaaggggcgttcgttatttggacgtcctttattacgttataaggtggtaattgt

SEQ ID NO: 4986 - DNA, 63 bp, Staphylococcus aureus
acaattaccaccttataacgtaataaaggacgtccaaataacgaacgccccttttttatttta

SEQ ID NO: 4987 - DNA, 404 bp, Staphylococcus aureus
acaatgatataaatgatttatacttgcaattaactattaaaatatagtaatatatatcttgccgtgctaggtggggaggtagcggttccctgtactcgaaatccgctttatgcgaggcttaattcctttgttgaggccgtatttttgcgaagtctgcccaaagcacgtagtgtttgaagatttcggtcctatgcaatatgaacccatgaaccatgtcaggtcctgacggaagcagcattaagtggatcatcatatgtgccgtagggtagccgagatttagctaacgactttggttacgttcgtgaattacgttcgatgcttaggtgcacggttttttattttttaaatattaaaccgattattaagagttgaaaatatatatttatttatagaagctactttct

SEQ ID NO: 4988 - DNA, 404 bp, Staphylococcus aureus
agaaagtagcttctataaataaatatatattttcaactcttaataatcggtttaatatttaaaaaataaaaaaccgtgcacctaagcatcgaacgtaattcacgaacgtaaccaaagtcgttagctaaatctcggctaccctacggcacatatgatgatccacttaatgctgcttccgtcaggacctgacatggttcatgggttcatattgcataggaccgaaatcttcaaacactacgtgctttgggcagacttcgcaaaaatacggcctcaacaaaggaattaagcctcgcataaagcggatttcgagtacagggaaccgctacctccccacctagcacggcaagatatatattactatattttaatagttaattgcaagtataaatcatttatatcattgt

SEQ ID NO: 4989 - DNA, 140 bp, Staphylococcus aureus
tgatttttgtgtcaatgaaaagtaagaagttataatttgatgataaagaaatgatggtgaaatgagggggagtatcttacaatagaattattaatgagatacgttatgattattgacaatcaaatgcctacggaggacat

SEQ ID NO: 4990 - DNA, 140 bp, Staphylococcus aureus
atgtcctccgtaggcatttgattgtcaataatcataacgtatctcattaataattctattgtaagatactccccctcatttcaccatcatttctttatcatcaaattataacttcttacttttcattgacacaaaaatca

SEQ ID NO: 4991 - DNA, 68 bp, Staphylococcus aureus
ttgttcaattaagaagtaaaggtattatcatgctataatgagaggtaattgtttatggaggtgctaac

SEQ ID NO: 4992 - DNA, 68 bp, Staphylococcus aureus
gttagcacctccataaacaattacctctcattatagcatgataatacctttacttcttaattgaacaa

SEQ ID NO: 4993 - DNA, 89 bp, Staphylococcus aureus
tacatgacaagcgatataatcgtatgtataatgaaagaaacatcattttattgataaatatttattgattttcaaggaggaaatggaat

SEQ ID NO: 4994 - DNA, 89 bp, Staphylococcus aureus
attccatttcctccttgaaaatcaataaatatttatcaataaaatgatgtttctttcattatacatacgattatatcgcttgtcatgta

SEQ ID NO: 4995 - DNA, 205 bp, Staphylococcus aureus
tgtcttctattaaacatttttgaatttaatactatagtaagaaaagttacagtgtaatcattgtggctttttttatggtgtggtgtgatgtactactttatttgcggtgtggcggtggtatggtttacctagttttactgagggatgggtaatctttaggaagcaagccgttggttgtgatttgttacttctaatagtaatgatg

SEQ ID NO: 4996 - DNA, 205 bp, Staphylococcus aureus
catcattactattagaagtaacaaatcacaaccaacggcttgcttcctaaagattacccatccctcagtaaaactaggtaaaccataccaccgccacaccgcaaataaagtagtacatcacaccacaccataaaaaaagccacaatgattacactgtaacttttcttactatagtattaaattcaaaaatgtttaatagaagaca

SEQ ID NO: 4997 - DNA, 553 bp, Staphylococcus aureus
taattgaaatgatagatgctggcttagtagttgtacttctttggtctaaagcttattaaatcagcctgtatagcggtgttttgagagattatttaaaacttgtaaatttatttttaatttctggtaaaaaaataacgttctgttttgcggtttttttgattgatatggttagagaaaaatctgtttcttgttctaaaaaacgtactatttataagtggggattttttaagttcgatttttaggataagggcgttcagtacagatgacaaaggtgtaatttttactgttgttaagcagtttgaaagcctgtatagtatttatttgttgaggcaaacaaaacaactcaacttaagaaataacttgaattactaacgaaaattaattttaaaaagttgttgacttaaatgttaataaaatgtataattaattcttgtcggtaagaaaaaatgaacattgaaaactgaatgacaatatgtcaacgttaattccaaaaaacgtaactataagttacaaacattatttagtatttatgagctaatcaaacatcataatt

SEQ ID NO: 4998 - DNA, 553 bp, Staphylococcus aureus
aattatgatgtttgattagctcataaatactaaataatgtttgtaacttatagttacgttttttggaattaacgttgacatattgtcattcagttttcaatgttcattttttcttaccgacaagaattaattatacattttattaacatttaagtcaacaactttttaaaattaattttcgttagtaattcaagttatttcttaagttgagttgttttgtttgcctcaacaaataaatactatacaggctttcaaactgcttaacaacagtaaaaattacacctttgtcatctgtactgaacgcccttatcctaaaaatcgaacttaaaaaatccccacttataaatagtacgttttttagaacaagaaacagatttttctctaaccatatcaatcaaaaaaaccgcaaaacagaacgttatttttttaccagaaattaaaaataaatttacaagttttaaataatctctcaaaacaccgctatacaggctgatttaataagctttagaccaaagaagtacaactactaagccagcatctatcatttcaatta

SEQ ID NO: 4999 - DNA, 214 bp, Staphylococcus aureus
ttatttgtacattgaaaactagataagtaagtaaaatatagattttaccaagcaaaaccgagtgaataaagagttttaaataagcttgaattcataagaaataatcgctagtgttcgaaagaacactcacaagattaataacgcgtttaaatctttttataaaagaacgtaatttcatgttaacgtttgacttataaaaatggtggaaacatag

SEQ ID NO: 5000 - DNA, 214 bp, Staphylococcus aureus
ctatgtttccaccatttttataagtcaaacgttaacatgaaattacgttcttttataaaaagatttaaacgcgttattaatcttgtgagtgttctttcgaacactagcgattatttcttatgaattcaagcttatttaaaactctttattcactcggttttgcttggtaaaatctatattttacttacttatctagttttcaatgtacaaataa

SEQ ID NO: 5001 - DNA, 162 bp, Staphylococcus aureus
cctcaaagatgatgaggttaataggttcgaggtggaagcatggtgacatgtggagctgacgaatactaatcgatcgaagacttaatcaaaataaatgttttgcgaagcaaaatcacttttacttactatctagttttgaatgtataatctacattcatatgt

SEQ ID NO: 5002 - DNA, 162 bp, Staphylococcus aureus
acatatgaatgtagattatacattcaaaactagatagtaagtaaaagtgattttgcttcgcaaaacatttattttgattaagtcttcgatcgattagtattcgtcagctccacatgtcaccatgcttccacctcgaacctattaacctcatcatctttgagg

SEQ ID NO: 5003 - DNA, 91 bp, Staphylococcus aureus
agagcgcaacgagtttagtagagctaaatgagtaagcgagagccgaaggagaggaaagaagcaagcgattgtcacaagtcaagaaaggttc

SEQ ID NO: 5004 - DNA, 91 bp, Staphylococcus aureus
gaacctttcttgacttgtgacaatcgcttgcttctttcctctccttcggctctcgcttactcatttagctctactaaactcgttgcgctct

SEQ ID NO: 5005 - DNA, 90 bp, Staphylococcus aureus
aaaaatggatgcgatgagccgcattgagaccgtgaggtctctttttttatgtctaaaacgtcaaaataaaaagtaaacacaaagaaaaat

SEQ ID NO: 5006 - DNA, 90 bp, Staphylococcus aureus
atttttctttgtgtttactttttattttgacgttttagacataaaaaaagagacctcacggtctcaatgcggctcatcgcatccattttt

SEQ ID NO: 5007 - DNA, 490 bp, Staphylococcus aureus
agagcgcaacgagtttagtagagctaaatgagtaagcgagagccgaaggagaggaaagaagcaagcgattgtcacaagtcaagaaaggttcttagcgaggatggtagccaacttacgttccgctagagtagaacgttgctagacaagaaatgaatgcgatgagccgcattgagtgtgaaattgatattttaataatgtgcacttttgattatttaaatctgtgactagaagtataagtgaagacattcagaagtattataaaaagtgaacagcagtaagatagtttttaatcataaatcatcttactgctgtttttagattttatgtctaatatcttttaaatcgaagtacaaaaaggaaattaattattatacaatagacaagctattgcataagtaacactaacttttgtcaaagaagtgttactatataattaatacttttgaaagtaactaattccaaaacagtgtaaataaaggaagcgtatatc

SEQ ID NO: 5008 - DNA, 490 bp, Staphylococcus aureus
gatatacgcttcctttatttacactgttttggaattagttactttcaaaagtattaattatatagtaacacttctttgacaaaagttagtgttacttatgcaatagcttgtctattgtataataattaatttcctttttgtacttcgatttaaaagatattagacataaaatctaaaaacagcagtaagatgatttatgattaaaaactatcttactgctgttcactttttataatacttctgaatgtcttcacttatacttctagtcacagatttaaataatcaaaagtgcacattattaaaatatcaatttcacactcaatgcggctcatcgcattcatttcttgtctagcaacgttctactctagcggaacgtaagttggctaccatcctcgctaagaacctttcttgacttgtgacaatcgcttgcttctttcctctccttcggctctcgcttactcatttagctctactaaactcgttgcgctct

SEQ ID NO: 5009 - DNA, 92 bp, Staphylococcus aureus
aaaaaatggatgcgatgagccgcattgagaccgcaaggtctcttttttttatgtctaaaacgtcaaaataaaaagtaaacacaaagaaaaat

SEQ ID NO: 5010 - DNA, 92 bp, Staphylococcus aureus
atttttctttgtgtttactttttattttgacgttttagacataaaaaaaagagaccttgcggtctcaatgcggctcatcgcatccatttttt

SEQ ID NO: 5011 - DNA, 90 bp, Staphylococcus aureus
aaggatatattcggaacatcttctgaagaagatgcggaataacgtgacatattgtattcagttttgaatgtttgttcattcaaattaatg

SEQ ID NO: 5012 - DNA, 90 bp, Staphylococcus aureus
cattaatttgaatgaacaaacattcaaaactgaatacaatatgtcacgttattccgcatcttcttcagaagatgttccgaatatatcctt

SEQ ID NO: 5013 - DNA, 122 bp, Staphylococcus aureus
ttctataatacaatcatcaattagagatacttaaaatagtgtattaataagttattaacaattttgggttgcttgactgcgactagttcagatgccaatagatttgatttttgtggttctaa

SEQ ID NO: 5014 - DNA, 122 bp, Staphylococcus aureus
ttagaaccacaaaaatcaaatctattggcatctgaactagtcgcagtcaagcaacccaaaattgttaataacttattaatacactattttaagtatctctaattgatgattgtattatagaa

SEQ ID NO: 5015 - DNA, 273 bp, Staphylococcus aureus
tcaagcacactcaaatagtgttataattataaatgaatatggtttggataagtctgagacaatgcatgtttcaggctttaattgtgtataaagttttggtgattgcataagagatggcggtactaaatgttattattaagtgtgcacgcagtatcattagttataaaatgtagctgttaaaagtcaaaaatacatcgaatgtagttaggcatataatataaaaagagatttcaattactcaatagaaaaaggttgtcttcataggagttaaaa

SEQ ID NO: 5016 - DNA, 273 bp, Staphylococcus aureus
ttttaactcctatgaagacaacctttttctattgagtaattgaaatctctttttatattatatgcctaactacattcgatgtatttttgacttttaacagctacattttataactaatgatactgcgtgcacacttaataataacatttagtaccgccatctcttatgcaatcaccaaaactttatacacaattaaagcctgaaacatgcattgtctcagacttatccaaaccatattcatttataattataacactatttgagtgtgcttga

SEQ ID NO: 5017 - DNA, 104 bp, Staphylococcus aureus
tgaataagatgaaaatgagatgacgagataaatgttcgcgtccgttgaaatgcatagaaatcttagatattatttgaagtgagacattacgaggaggaacagtt

SEQ ID NO: 5018 - DNA, 104 bp, Staphylococcus aureus
aactgttcctcctcgtaatgtctcacttcaaataatatctaagatttctatgcatttcaacggacgcgaacatttatctcgtcatctcattttcatcttattca

SEQ ID NO: 5019 - DNA, 166 bp, Staphylococcus aureus
agttaaaagtgagaaagatcaccgccataaatgtaaacgatgctatattcgtttaatatgctatggttctttctcacttttttaaattaaaatatcgtacatgtgcaatacgtacgatagagatggttagagctttgaaattaagaattgtaggaaggcgttttaa

SEQ ID NO: 5020 - DNA, 166 bp, Staphylococcus aureus
ttaaaacgccttcctacaattcttaatttcaaagctctaaccatctctatcgtacgtattgcacatgtacgatattttaatttaaaaaagtgagaaagaaccatagcatattaaacgaatatagcatcgtttacatttatggcggtgatctttctcacttttaact

SEQ ID NO: 5021 - DNA, 99 bp, Staphylococcus aureus
atgattgacaaagcaaagcactattgttaaaatttaaattttgtttgacgaaaacgctgcaaatatggtattatgtaacttgtagcgaggtggagcaat

SEQ ID NO: 5022 - DNA, 99 bp, Staphylococcus aureus
attgctccacctcgctacaagttacataataccatatttgcagcgttttcgtcaaacaaaatttaaattttaacaatagtgctttgctttgtcaatcat

SEQ ID NO: 5023 - DNA, 309 bp, Staphylococcus aureus
ataagacatatagagatgttaggcgtttcttagtataagaagtaaatattatgataattatttgagtgttgggcattatgttcaatactctttttatttacaaaatgtttaacactgatgtttcgcttatagatttttcagtaaatggataattgtatttataaacacaaatacaagtaaatactaagtaattagatggagaaaattacttttttattaaaaaaacactaaaaaacaaattaaaatgtcaaatattaattctctttatgttaaaatcatcatattaagataacgaaaagagggcggaaa

SEQ ID NO: 5024 - DNA, 309 bp, Staphylococcus aureus
tttccgccctcttttcgttatcttaatatgatgattttaacataaagagaattaatatttgacattttaatttgttttttagtgtttttttaataaaaaagtaattttctccatctaattacttagtatttacttgtatttgtgtttataaatacaattatccatttactgaaaaatctataagcgaaacatcagtgttaaacattttgtaaataaaaagagtattgaacataatgcccaacactcaaataattatcataatatttacttcttatactaagaaacgcctaacatctctatatgtcttat

SEQ ID NO: 5025 - DNA, 211 bp, Staphylococcus aureus
tcaattttatatttagcgatgtaatacatttgcaataagttgatttgatactgtcgataaagcataaagctttgtcggcagtttttttagtttgtattaatgtttttttagtttgtattaatgtttttttatttttaatgaaaggctaataaatatatacgttaacagattatgatgatatgaaaattattgattcattgctgataaaaat

SEQ ID NO: 5026 - DNA, 211 bp, Staphylococcus aureus
atttttatcagcaatgaatcaataattttcatatcatcataatctgttaacgtatatatttattagcctttcattaaaaataaaaaaacattaatacaaactaaaaaaacattaatacaaactaaaaaaactgccgacaaagctttatgctttatcgacagtatcaaatcaacttattgcaaatgtattacatcgctaaatataaaattga

SEQ ID NO: 5027 - DNA, 146 bp, Staphylococcus aureus
tcatttacgtatttaaaatggctaggataaaaggataatcctatgtaatattaatgtaatctttatgatttaatgattcgcatagtaatggagttacattttatatataatagtaattgcgtaagtaaataattggaggactataa

SEQ ID NO: 5028 - DNA, 146 bp, Staphylococcus aureus
ttatagtcctccaattatttacttacgcaattactattatatataaaatgtaactccattactatgcgaatcattaaatcataaagattacattaatattacataggattatccttttatcctagccattttaaatacgtaaatga

SEQ ID NO: 5029 - DNA, 149 bp, Staphylococcus aureus
tatttaaaaggcgtttgacgaacatattccaaacgtgtataatagtttcgttcgtgattatacgaataaataaacacttgcaagcaacgatgatgttgatgggtaagtgaggtgctcgttttgagcaaaaatgaaaggtggaaatgaga

SEQ ID NO: 5030 - DNA, 149 bp, Staphylococcus aureus
tctcatttccacctttcatttttgctcaaaacgagcacctcacttacccatcaacatcatcgttgcttgcaagtgtttatttattcgtataatcacgaacgaaactattatacacgtttggaatatgttcgtcaaacgccttttaaata

SEQ ID NO: 5031 - DNA, 310 bp, Staphylococcus aureus
ttttaatctgttacattaaagtttttatactttgtttaacaagcactgtgcttattttaatataagcatggtgctttttgtgttattataaagcttaattaaactttattactttgtactaaagtttaattaattttagtgagtaaaagatattaaactcaacaatgatacatcataaaaattttaatgtactcgattttaaaatacatacttactaagctaaagaataatgataattgatggcaatggcggaaaatagatgttgtcattataataataaatgaaacaattatgttggaggtaaacacgc

SEQ ID NO: 5032 - DNA, 310 bp, Staphylococcus aureus
gcgtgtttacctccaacataattgtttcatttattattataatgacaacatctattttccgccattgccatcaattatcattattctttagcttagtaagtatgtattttaaaatcgagtacattaaaatttttatgatgtatcattgttgagtttaatatcttttactcactaaaattaattaaactttagtacaaagtaataaagtttaattaagctttataataacacaaaaagcaccatgcttatattaaaataagcacagtgcttgttaaacaaagtataaaaactttaatgtaacagattaaaa

SEQ ID NO: 5033 - DNA, 179 bp, Staphylococcus aureus
ttaaaataaataaagactgtttcgataaggaatatatttagaatgatgcgtatcgaataatcgattgcagcgttagacaatctaagactgtttcttaaataaggagcagtctcttttatttgtaatgatataactaagacttataccatttttgaaaattgtaaaagtgaggtgatgtt

SEQ ID NO: 5034 - DNA, 179 bp, Staphylococcus aureus
aacatcacctcacttttacaattttcaaaaatggtataagtcttagttatatcattacaaataaaagagactgctccttatttaagaaacagtcttagattgtctaacgctgcaatcgattattcgatacgcatcattctaaatatattccttatcgaaacagtctttatttattttaa

SEQ ID NO: 5035 - DNA, 256 bp, Staphylococcus aureus
ttttttaatcaatttcagttattattactatgcgtttgagaaataatagtgtagactcaaaaatatgaaaaatgtatttcatatatatttaattttagacaagacatatgtcttgaaaagttgaaaaatatagagattgataaaactaatacgggtgtgaatgacattgatgttaagctcaattactagcttataaaacatgtcatatgttacaatttttgttagttttattatgggaagtaggaggaaatgacgc

SEQ ID NO: 5036 - DNA, 256 bp, Staphylococcus aureus
gcgtcatttcctcctacttcccataataaaactaacaaaaattgtaacatatgacatgttttataagctagtaattgagcttaacatcaatgtcattcacacccgtattagttttatcaatctctatatttttcaacttttcaagacatatgtcttgtctaaaattaaatatatatgaaatacatttttcatatttttgagtctacactattatttctcaaacgcatagtaataataactgaaattgattaaaaaa

SEQ ID NO: 5037 - DNA, 227 bp, Staphylococcus aureus
tcgattatattcagtacctctttctatgataaagttatagaaagaggtacttttatcgtttttaaaaatacgtattagattttaagtcattgaattgttatagcagaaaataattgtaaaacaagttacttcattatttagaatgatgggtgtagaataagtacaattgttgcattttatgaagtaaagtaattttaaaatatagagtaatagaggagattgaaata

SEQ ID NO: 5038 - DNA, 227 bp, Staphylococcus aureus
tatttcaatctcctctattactctatattttaaaattactttacttcataaaatgcaacaattgtacttattctacacccatcattctaaataatgaagtaacttgttttacaattattttctgctataacaattcaatgacttaaaatctaatacgtatttttaaaaacgataaaagtacctctttctataactttatcatagaaagaggtactgaatataatcga

SEQ ID NO: 5039 - DNA, 178 bp, Staphylococcus aureus
tttaatttaaatcaatacgctaaaatgtttatttttagcggtttagtgaaatgtagaactaaatagttgtataatccttagtgattttgtttgctttctagaatttatttgataaaataattctatatccgataaataaactaagatttcaacaactaactaaaaaggagtgttctta

SEQ ID NO: 5040 - DNA, 178 bp, Staphylococcus aureus
taagaacactcctttttagttagttgttgaaatcttagtttatttatcggatatagaattattttatcaaataaattctagaaagcaaacaaaatcactaaggattatacaactatttagttctacatttcactaaaccgctaaaaataaacattttagcgtattgatttaaattaaa

SEQ ID NO: 5041 - DNA, 215 bp, Staphylococcus aureus
ttaatgtcatttaaaagagtgagttatctttttgagataacttgctctttttttctaccatgtataattttaaaaatatgagcgttaaattaaacatttttctgataaaaacatccagtgaatgataagataataaacgtacatattaataactagtaaatcgcaggagtaaattttattagagttaaacaatacataattaaagggtggttaac

SEQ ID NO: 5042 - DNA, 215 bp, Staphylococcus aureus
gttaaccaccctttaattatgtattgtttaactctaataaaatttactcctgcgatttactagttattaatatgtacgtttattatcttatcattcactggatgtttttatcagaaaaatgtttaatttaacgctcatatttttaaaattatacatggtagaaaaaaagagcaagttatctcaaaaagataactcactcttttaaatgacattaa

SEQ ID NO: 5043 - DNA, 116 bp, Staphylococcus aureus
tgtattgttgagaacattcatatttattgggaatagatgattgattattggagatgtttccgcattttgattatctctaaatgcatttgattacgaattagtatatgatgatttag

SEQ ID NO: 5044 - DNA, 116 bp, Staphylococcus aureus
ctaaatcatcatatactaattcgtaatcaaatgcatttagagataatcaaaatgcggaaacatctccaataatcaatcatctattcccaataaatatgaatgttctcaacaataca

SEQ ID NO: 5045 - DNA, 168 bp, Staphylococcus aureus
ttacttagggttgtattaatgataatcgtattttaaatgaataagtaattcataaacgaaaacagaaattgctttattacatttacaagctcttgtaaaattaaaaaagtgataaaattgatgttatgaatataagaaaacatgccacatcataactttaaggtgtaa

SEQ ID NO: 5046 - DNA, 168 bp, Staphylococcus aureus
ttacaccttaaagttatgatgtggcatgttttcttatattcataacatcaattttatcacttttttaattttacaagagcttgtaaatgtaataaagcaatttctgttttcgtttatgaattacttattcatttaaaatacgattatcattaatacaaccctaagtaa

SEQ ID NO: 5047 - DNA, 558 bp, Staphylococcus aureus
atgacgttgattgttagtaagagctctcgtgtatacaacatgtgtatgcgagggttttcttaattatggtaattagttcgtgtttgaatgtttttgatagtaatagttaacgatagtggtactatttttgactgttaaacaaggtagttggctgatagatgaaaatgacgatacgtatatagagtagttcggatgagaaatgttaacgatagacattgagatatcttataacaaaaattgctatattagtataatttatcttaatcagctataaaagtactttaaaattgtatagaatgtgtatggttttgtacatatgtgtatgatagaatactaaaagtgttatgaattagagagcacgagaaatgtcagttttgaagaataaaaaagttgattaaaagtgttgactttatcaattgaatgaagtaatatataaaagtcgtcaaaaacagacgaaacacactaaaagctgatgtgacaaagttcacaacaaagtgtaaaattaactattgcaccttattaattaagcgtgtatcataaataagtaagttattttgt

SEQ ID NO: 5048 - DNA, 558 bp, Staphylococcus aureus
acaaaataacttacttatttatgatacacgcttaattaataaggtgcaatagttaattttacactttgttgtgaactttgtcacatcagcttttagtgtgtttcgtctgtttttgacgacttttatatattacttcattcaattgataaagtcaacacttttaatcaacttttttattcttcaaaactgacatttctcgtgctctctaattcataacacttttagtattctatcatacacatatgtacaaaaccatacacattctatacaattttaaagtacttttatagctgattaagataaattatactaatatagcaatttttgttataagatatctcaatgtctatcgttaacatttctcatccgaactactctatatacgtatcgtcattttcatctatcagccaactaccttgtttaacagtcaaaaatagtaccactatcgttaactattactatcaaaaacattcaaacacgaactaattaccataattaagaaaaccctcgcatacacatgttgtatacacgagagctcttactaacaatcaacgtcat

SEQ ID NO: 5049 - DNA, 121 bp, Staphylococcus aureus
tttatttttacacgatgaacattgaaaactgaatgacaatatgtcaacgttaattccaaaaaacgtaactataagttacaaacattatttagtatttatgagctaatcaaacatcataatt

SEQ ID NO: 5050 - DNA, 121 bp, Staphylococcus aureus
aattatgatgtttgattagctcataaatactaaataatgtttgtaacttatagttacgttttttggaattaacgttgacatattgtcattcagttttcaatgttcatcgtgtaaaaataaa

SEQ ID NO: 5051 - DNA, 168 bp, Staphylococcus aureus
ttatttgtacattgaaaactagataagtaagtaaaatatagattttaccaagcaaaaccgagtgaataaagagttttaaataagcttgaattcataagaaataatcgctagtgttcgaaagaacactcacaagattaataacgcgtttcctgtaggatggaaacatag

SEQ ID NO: 5052 - DNA, 168 bp, Staphylococcus aureus
ctatgtttccatcctacaggaaacgcgttattaatcttgtgagtgttctttcgaacactagcgattatttcttatgaattcaagcttatttaaaactctttattcactcggttttgcttggtaaaatctatattttacttacttatctagttttcaatgtacaaataa

SEQ ID NO: 5053 - DNA, 162 bp, Staphylococcus aureus
cctcaaagatgatgaggttaataggttcgaggtggaagcatggtgacatgtggagctgacgaatactaatcgatcgaagacttaatcaaaataaatgttttgcgaagcaaaatcacttttacttactatctagttttgaatgtataaattacattcatatgt

SEQ ID NO: 5054 - DNA, 162 bp, Staphylococcus aureus
acatatgaatgtaatttatacattcaaaactagatagtaagtaaaagtgattttgcttcgcaaaacatttattttgattaagtcttcgatcgattagtattcgtcagctccacatgtcaccatgcttccacctcgaacctattaacctcatcatctttgagg

SEQ ID NO: 5055 - DNA, 138 bp, Staphylococcus aureus
agagcgcaacgagtttagtagagctaaatgagtaagcgagagccgaagaagaggaaagaagcaagcgattgtcacaagtcaagaaaggttcttagcgaggatggtagccaacttacgttccgctagagtagaactgga

SEQ ID NO: 5056 - DNA, 138 bp, Staphylococcus aureus
tccagttctactctagcggaacgtaagttggctaccatcctcgctaagaacctttcttgacttgtgacaatcgcttgcttctttcctcttcttcggctctcgcttactcatttagctctactaaactcgttgcgctct

SEQ ID NO: 5057 - DNA, 205 bp, Staphylococcus aureus
actttaattttgtgtttatataaatttaaaatgatatcatcgaaaacaaaatattgtataaatagagaagagcagtaagacggtatctaattgaaaatgatcttactgctcttttatatactttattgaaatacaaaaaggaaattaattattatacaatagacaagctattgcataagtaacactaacttttatcaaagaagtg

SEQ ID NO: 5058 - DNA, 205 bp, Staphylococcus aureus
cacttctttgataaaagttagtgttacttatgcaatagcttgtctattgtataataattaatttcctttttgtatttcaataaagtatataaaagagcagtaagatcattttcaattagataccgtcttactgctcttctctatttatacaatattttgttttcgatgatatcattttaaatttatataaacacaaaattaaagt

SEQ ID NO: 5059 - DNA, 93 bp, Staphylococcus aureus
aaggatatattcggaacatcttcttcagaagatgcggaataacgtgacatattgtattcagttttgaatgtttatttaacattcaaaaaaatg

SEQ ID NO: 5060 - DNA, 93 bp, Staphylococcus aureus
catttttttgaatgttaaataaacattcaaaactgaatacaatatgtcacgttattccgcatcttctgaagaagatgttccgaatatatcctt

SEQ ID NO: 5061 - DNA, 103 bp, Staphylococcus aureus
ttttataactgacctcctaaatttatcttattttgtacctttttaaatatcagtttatacattacaatgtatttaatcaacttgaaaaggggttttatgtata

SEQ ID NO: 5062 - DNA, 103 bp, Staphylococcus aureus
tatacataaaaccccttttcaagttgattaaatacattgtaatgtataaactgatatttaaaaaggtacaaaataagataaatttaggaggtcagttataaaa

SEQ ID NO: 5063 - DNA, 207 bp, Staphylococcus aureus
cttaatgtatgctaaatcaacgaattattgatatttatagatttgttgagaagaaaatatctccttcaaacttagctttggaggagttattttttatgtcaaaattaaaaatgataaaaaataaagatatacataagaaaaaaccccttcaaagagactgagaatagtcaaaattttgaagggattaattcgatgttgatgtatttg

SEQ ID NO: 5064 - DNA, 207 bp, Staphylococcus aureus
caaatacatcaacatcgaattaatcccttcaaaattttgactattctcagtctctttgaaggggttttttcttatgtatatctttattttttatcatttttaattttgacataaaaaataactcctccaaagctaagtttgaaggagatattttcttctcaacaaatctataaatatcaataattcgttgatttagcatacattaag

SEQ ID NO: 5065 - DNA, 157 bp, Staphylococcus aureus
atatttctcattcctttagttttttctacaatctatcatacaataaaatggaagggctaacatcataaatttttgaaaatataaaaacaaattaattgaaaaaggtcaaaataggtcatataatatagtcaaagaaggtcaaaaaggggtgatatac

SEQ ID NO: 5066 - DNA, 157 bp, Staphylococcus aureus
gtatatcacccctttttgaccttctttgactatattatatgacctattttgacctttttcaattaatttgtttttatattttcaaaaatttatgatgttagcccttccattttattgtatgatagattgtagaaaaaactaaaggaatgagaaatat

SEQ ID NO: 5067 - DNA, 484 bp, Staphylococcus aureus
ttataaaacagtccaaaacaaattaaagttttgggctgtttttttagtagcattgaactatagaaattcgtgaaagtatccatcaacgaaacaatctaataaaacaatcatcaaaggatagttaagaattatatgtaacaagttaatgagcctacagcgatagcataaaggtatgaatttttataaaggttttttgtttgaagatactagcaacttacgtcaaaataaaataggtctatataatattgtgataaatctagagaaaagagtttactaagaaattattaagattttatctttgaaagataccgactatcaacatgatgtaagtttattttataatattcataaaaaataaatctggtaaaacagtttgcgttagtagtcatgttaaaatacaaacaaatgtaactcacatttaatttgtcataatgggaatgtgcgtttaaaatagatttgttcaaaggaaagtggaggtgcaatt

SEQ ID NO: 5068 - DNA, 484 bp, Staphylococcus aureus
aattgcacctccactttcctttgaacaaatctattttaaacgcacattcccattatgacaaattaaatgtgagttacatttgtttgtattttaacatgactactaacgcaaactgttttaccagatttattttttatgaatattataaaataaacttacatcatgttgatagtcggtatctttcaaagataaaatcttaataatttcttagtaaactcttttctctagatttatcacaatattatatagacctattttattttgacgtaagttgctagtatcttcaaacaaaaaacctttataaaaattcatacctttatgctatcgctgtaggctcattaacttgttacatataattcttaactatcctttgatgattgttttattagattgtttcgttgatggatactttcacgaatttctatagttcaatgctactaaaaaaacagcccaaaactttaatttgttttggactgttttataa

SEQ ID NO: 5069 - DNA, 556 bp, Staphylococcus aureus
aaactgtagttgacgaaaacaaaatagatattaaaaggtatatgaaatggcgaagtttgtaatttgaagtataactataaataaatgcaaaacatatcagttatcaaaaaatacaaatagtgctaatatatcattgaaacaagttcattaagtgttaaattttagatattaataaagttattcttatagcaatcaagacatacaaaattagaatcaattttaacgtatttgaatagttaatttgaagtttaattttacagtacataatattcatttttaagtcgttgaaatgcttatgtagtgcagtcttgattcttagggatagcttttttaaagtgttgaaaaaacaactgctttctatttaaaatttaagcatattacccagtgaattatgttatgattaaacaatgaaattattttaaggtcatgttaaaaagcattgtttcgttttaacaataagacgagttagacatttgttatgacggtcgaagatagcaaatgaataatttatatgaactaacttgaaaatctgatatttaatttaggagtgaaaaaa

SEQ ID NO: 5070 - DNA, 556 bp, Staphylococcus aureus
ttttttcactcctaaattaaatatcagattttcaagttagttcatataaattattcatttgctatcttcgaccgtcataacaaatgtctaactcgtcttattgttaaaacgaaacaatgctttttaacatgaccttaaaataatttcattgtttaatcataacataattcactgggtaatatgcttaaattttaaatagaaagcagttgttttttcaacactttaaaaaagctatccctaagaatcaagactgcactacataagcatttcaacgacttaaaaatgaatattatgtactgtaaaattaaacttcaaattaactattcaaatacgttaaaattgattctaattttgtatgtcttgattgctataagaataactttattaatatctaaaatttaacacttaatgaacttgtttcaatgatatattagcactatttgtattttttgataactgatatgttttgcatttatttatagttatacttcaaattacaaacttcgccatttcatataccttttaatatctattttgttttcgtcaactacagttt

SEQ ID NO: 5071 - DNA, 304 bp, Staphylococcus aureus
tgaaatagacaagatcaaggtagtatatacttgaattttataacgtaaccacatatgataaagttgtattaacaaattacaacaatatgaataaagtattttatataaaacgaaggattagtaattaaatttatacgatgcagagagtgtacggttgctgtgagtacaacgtagaaattaatgaatgcaccttcgtaaaatgaattaaatatataatgagagtgatgagcattaagttgacttagtttccttgataatttggaagcgcccgcaatattattaatgttattcgctaaattcagag

SEQ ID NO: 5072 - DNA, 304 bp, Staphylococcus aureus
ctctgaatttagcgaataacattaataatattgcgggcgcttccaaattatcaaggaaactaagtcaacttaatgctcatcactctcattatatatttaattcattttacgaaggtgcattcattaatttctacgttgtactcacagcaaccgtacactctctgcatcgtataaatttaattactaatccttcgttttatataaaatactttattcatattgttgtaatttgttaatacaactttatcatatgtggttacgttataaaattcaagtatatactaccttgatcttgtctatttca

SEQ ID NO: 5073 - DNA, 80 bp, Staphylococcus aureus
catttccgtcatcttgaaattttgaatgtaacaatattaaactaaccttaaattttagatagaaggggttagtttaatac

SEQ ID NO: 5074 - DNA, 80 bp, Staphylococcus aureus
gtattaaactaaccccttctatctaaaatttaaggttagtttaatattgttacattcaaaatttcaagatgacggaaatg

SEQ ID NO: 5075 - DNA, 115 bp, Staphylococcus aureus
aaagcgccttaggacgtgaattgaattataacgtgttacttactgatggtttgacatttgttataaattttatgtatagtatactggtattataatgaataaaggtgaattattg

SEQ ID NO: 5076 - DNA, 115 bp, Staphylococcus aureus
caataattcacctttattcattataataccagtatactatacataaaatttataacaaatgtcaaaccatcagtaagtaacacgttataattcaattcacgtcctaaggcgcttt

SEQ ID NO: 5077 - DNA, 55 bp, Staphylococcus aureus
atacattcgaaataatactttgataatatgttcaaaggatttggaggttgagcag

SEQ ID NO: 5078 - DNA, 55 bp, Staphylococcus aureus
ctgctcaacctccaaatcctttgaacatattatcaaagtattatttcgaatgtat

SEQ ID NO: 5079 - DNA, 137 bp, Staphylococcus aureus
ttaacaattaaagttattaaactaaccaaaagataaaaaagagtattgattttttaattagaaaagtgttaaaattatgtggtcgcgcttttagagcgcccatttcgtcacgaaatgttaagagtgggagggcaaaa

SEQ ID NO: 5080 - DNA, 137 bp, Staphylococcus aureus
ttttgccctcccactcttaacatttcgtgacgaaatgggcgctctaaaagcgcgaccacataattttaacacttttctaattaaaaaatcaatactcttttttatcttttggttagtttaataactttaattgttaa

SEQ ID NO: 5081 - DNA, 207 bp, Staphylococcus aureus
ttttacgaatattaaatttgattacatgatttaaacgatgaagcagataacagagataataatgatgaattataaatataatctgaatgactagattaatgattgatttattcataagattaattcttctgttgtctgctcttaacttgcatatagcaagtaatgtgggaggaaattccgctaaaaccactaaaggaggaactataa

SEQ ID NO: 5082 - DNA, 207 bp, Staphylococcus aureus
ttatagttcctcctttagtggttttagcggaatttcctcccacattacttgctatatgcaagttaagagcagacaacagaagaattaatcttatgaataaatcaatcattaatctagtcattcagattatatttataattcatcattattatctctgttatctgcttcatcgtttaaatcatgtaatcaaatttaatattcgtaaaa

SEQ ID NO: 5083 - DNA, 271 bp, Staphylococcus aureus
taaatgatataaacaattacaggctgaaagaaatatctttcagtctgtaaaaatatattgacaataagtaatttccaagttatattacttattgtgattattttacctaagacagtaggagttatttataacttaaaatttatcctgccgaggctaaaattgacttgaacgtgatgatctatgatctttcaagcactttttgccgtgggtagaaagtgctttttttattaattttaaaaaaagcaccaaaaatttaaatggaggtgtctga

SEQ ID NO: 5084 - DNA, 271 bp, Staphylococcus aureus
tcagacacctccatttaaatttttggtgctttttttaaaattaataaaaaaagcactttctacccacggcaaaaagtgcttgaaagatcatagatcatcacgttcaagtcaattttagcctcggcaggataaattttaagttataaataactcctactgtcttaggtaaaataatcacaataagtaatataacttggaaattacttattgtcaatatatttttacagactgaaagatatttctttcagcctgtaattgtttatatcattta

SEQ ID NO: 5085 - DNA, 174 bp, Staphylococcus aureus
ttcaagtatcttaaacttaataatcaaagttttatagcaagtattgctataatataatgattctttgagaagttaaaaccccgttattttgataacggggttttattcatttaaagactgagtgaaatgttataattataatgacgagttacaaagtgaagatgaggtggaata

SEQ ID NO: 5086 - DNA, 174 bp, Staphylococcus aureus
tattccacctcatcttcactttgtaactcgtcattataattataacatttcactcagtctttaaatgaataaaaccccgttatcaaaataacggggttttaacttctcaaagaatcattatattatagcaatacttgctataaaactttgattattaagtttaagatacttgaa

SEQ ID NO: 5087 - DNA, 214 bp, Staphylococcus aureus
aatgaaatggatattctgttatagttatataatataaaaatttatgttcaataagtgtgtacttttacgttaaatagataagttaattaagaataaatatagaatcgaaaatggtgtcatcattagtgttgccgttttctttttgtctttttattaatatgcttatggtatttagctaaaagcggatcacataatttttgaggggtgaatctgt

SEQ ID NO: 5088 - DNA, 214 bp, Staphylococcus aureus
acagattcacccctcaaaaattatgtgatccgcttttagctaaataccataagcatattaataaaaagacaaaaagaaaacggcaacactaatgatgacaccattttcgattctatatttattcttaattaacttatctatttaacgtaaaagtacacacttattgaacataaatttttatattatataactataacagaatatccatttcatt

SEQ ID NO: 5089 - DNA, 136 bp, Staphylococcus aureus
tacgcaatttacaaaacaggcaaaaagatactaagctgaattttattgatgattcagtttagtactttaagccattttaaataaatgcaaatcaatcaaatagcacagctaatctaaattgaaggaggtaggctcc

SEQ ID NO: 5090 - DNA, 136 bp, Staphylococcus aureus
ggagcctacctccttcaatttagattagctgtgctatttgattgatttgcatttatttaaaatggcttaaagtactaaactgaatcatcaataaaattcagcttagtatctttttgcctgttttgtaaattgcgta

SEQ ID NO: 5091 - DNA, 72 bp, Staphylococcus aureus
caagtatataacagaggctaatgctttagcctcttgttatttttatgtaaattatttgatttaatgttgacg

SEQ ID NO: 5092 - DNA, 72 bp, Staphylococcus aureus
cgtcaacattaaatcaaataatttacataaaaataacaagaggctaaagcattagcctctgttatatacttg

SEQ ID NO: 5093 - DNA, 97 bp, Staphylococcus aureus
gaattagtaagtgttttacttactaaattttatttaacctaaaaatgaaccacctggatgtgtgggattaaaaagtgaagagaggaggacatatcac

SEQ ID NO: 5094 - DNA, 97 bp, Staphylococcus aureus
gtgatatgtcctcctctcttcactttttaatcccacacatccaggtggttcatttttaggttaaataaaatttagtaagtaaaacacttactaattc

SEQ ID NO: 5095 - DNA, 65 bp, Staphylococcus aureus
gaatttagtttttaattaaatcttaaacttaaaatatttaatataaggaagggaggatttacatt

SEQ ID NO: 5096 - DNA, 65 bp, Staphylococcus aureus
aatgtaaatcctcccttccttatattaaatattttaagtttaagatttaattaaaaactaaattc

SEQ ID NO: 5097 - DNA, 57 bp, Staphylococcus aureus
gataaaagcttttaccctgagtgtgttctatattaatgaattttcattaagcgttca

SEQ ID NO: 5098 - DNA, 57 bp, Staphylococcus aureus
tgaacgcttaatgaaaattcattaatatagaacacactcagggtaaaagcttttatc

SEQ ID NO: 5099 - DNA, 216 bp, Staphylococcus aureus
tataacttgttttgactagctagcctaggttaaaatacaaggtgagcttaaatgtaagctatcatctttatagtttgattttttggggtgaatgcattataaaagaattgtaaaattctttttgcatcgctataaataatttctcatgatggtgagaaactatcatgagagataaatttaaatattatttttaattagaataggagagattttata

SEQ ID NO: 5100 - DNA, 216 bp, Staphylococcus aureus
tataaaatctctcctattctaattaaaaataatatttaaatttatctctcatgatagtttctcaccatcatgagaaattatttatagcgatgcaaaaagaattttacaattcttttataatgcattcaccccaaaaaatcaaactataaagatgatagcttacatttaagctcaccttgtattttaacctaggctagctagtcaaaacaagttata

SEQ ID NO: 5101 - DNA, 281 bp, Staphylococcus aureus
tttctaatttcttagattttatataaaaagaagatccctcaatcgaggggtctttttttaatgtgtaaattttgtaatggctattcgatttagaagaacaataattgatgaaagactgactaataaaacttataactgataatactgtttaaataaaattgttgagtcttggacattgtaaaatgctcccttcaaagttttcattttttcaatgtctactttgaagggagcatttcattagtttatgtcccagattcatatctttcaattaatttaaatgc

SEQ ID NO: 5102 - DNA, 281 bp, Staphylococcus aureus
gcatttaaattaattgaaagatatgaatctgggacataaactaatgaaatgctcccttcaaagtagacattgaaaaaatgaaaactttgaagggagcattttacaatgtccaagactcaacaattttatttaaacagtattatcagttataagttttattagtcagtctttcatcaattattgttcttctaaatcgaatagccattacaaaatttacacattaaaaaaagacccctcgattgagggatcttctttttatataaaatctaagaaattagaaa

SEQ ID NO: 5103 - DNA, 206 bp, Staphylococcus aureus
ccttatcactactttctaaaataatgtttatagtataacattttatgaaattatcgtactaaatgattgctttgagatattttatctatgaatgataaggctttcaagttatgtagaattactgtatgataaaggtattaccaaacaatacttaagggggattatatactgtggttcaatcattacatgagtttttagaggaaaat

SEQ ID NO: 5104 - DNA, 206 bp, Staphylococcus aureus
attttcctctaaaaactcatgtaatgattgaaccacagtatataatcccccttaagtattgtttggtaatacctttatcatacagtaattctacataacttgaaagccttatcattcatagataaaatatctcaaagcaatcatttagtacgataatttcataaaatgttatactataaacattattttagaaagtagtgataagg

SEQ ID NO: 5105 - DNA, 269 bp, Staphylococcus aureus
tatttatttatttattcccacggcaaatattgtcgtgggctttttttaatgtttagtttattaacagtaagttcttataacaatgtttagtgctccccaaaattgaagtttgaattttaaaagcatcttgtagaatttagttgtattttttacaaagaaattcattttgattatttttgataatgagtattttaatagtaatacatgtttatagtgtgtagtatatgtctatactagtagtaactatatagagaaagtaggaataaact

SEQ ID NO: 5106 - DNA, 269 bp, Staphylococcus aureus
agtttattcctactttctctatatagttactactagtatagacatatactacacactataaacatgtattactattaaaatactcattatcaaaaataatcaaaatgaatttctttgtaaaaaatacaactaaattctacaagatgcttttaaaattcaaacttcaattttggggagcactaaacattgttataagaacttactgttaataaactaaacattaaaaaaagcccacgacaatatttgccgtgggaataaataaataaata

SEQ ID NO: 5107 - DNA, 158 bp, Staphylococcus aureus
ttaaatattaattagaggagcctcatatgtaaatgtatgaggactcttttttttggcaaaatttaagtgatacttgtaaaatagaacctattatgagtatgatttaagaaaacgcttgcaaaactaataaccgcaactagcgatatggaggaaacatg

SEQ ID NO: 5108 - DNA, 158 bp, Staphylococcus aureus
catgtttcctccatatcgctagttgcggttattagttttgcaagcgttttcttaaatcatactcataataggttctattttacaagtatcacttaaattttgccaaaaaaaagagtcctcatacatttacatatgaggctcctctaattaatatttaa

SEQ ID NO: 5109 - DNA, 145 bp, Staphylococcus aureus
aaaatttaatttgacagtaattagcaataataaacgctataaattactaaaatcaattaatacaactagaatttccatttacagaaacatcagcaacatgtacatgtcatatatacaagaaagcgcttttatattataattatta

SEQ ID NO: 5110 - DNA, 145 bp, Staphylococcus aureus
taataattataatataaaagcgctttcttgtatatatgacatgtacatgttgctgatgtttctgtaaatggaaattctagttgtattaattgattttagtaatttatagcgtttattattgctaattactgtcaaattaaatttt

SEQ ID NO: 5111 - DNA, 335 bp, Staphylococcus aureus
tcatttccattcactttaatacacggaatgatattttaaattactctttattttaataaactagtgcatgaattctaatattattcattatacatattgaattcgcgagcttagttcattttaaagtaaagagttttttgtatgtaaagtatattagtaaaacacagattacttgtctctgtgaaattaatacgtttatactaaaagatatagtctttctagaaaatctgttaattaattttgaatttttagaaaatttattgaacagcaaaatatggattgttataatttaagttaaacaaattcttatacaatattattaggaggcaatcacc

SEQ ID NO: 5112 - DNA, 335 bp, Staphylococcus aureus
ggtgattgcctcctaataatattgtataagaatttgtttaacttaaattataacaatccatattttgctgttcaataaattttctaaaaattcaaaattaattaacagattttctagaaagactatatcttttagtataaacgtattaatttcacagagacaagtaatctgtgttttactaatatactttacatacaaaaaactctttactttaaaatgaactaagctcgcgaattcaatatgtataatgaataatattagaattcatgcactagtttattaaaataaagagtaatttaaaatatcattccgtgtattaaagtgaatggaaatga

SEQ ID NO: 5113 - DNA, 106 bp, Staphylococcus aureus
taattcaatatttaaatagaacaatactacgagttcattttcaggggataacgaatatcatagaatcagcataatacgaaataaataaataggagtattgatatca

SEQ ID NO: 5114 - DNA, 106 bp, Staphylococcus aureus
tgatatcaatactcctatttatttatttcgtattatgctgattctatgatattcgttatcccctgaaaatgaactcgtagtattgttctatttaaatattgaatta

SEQ ID NO: 5115 - DNA, 115 bp, Staphylococcus aureus
aaagaaagacatagtgtatatgtgaattaatgtattcgatagaattgataatgtaatcgatgatatctatggaatatacattgaatataaacatatacgctatgtctttagtctt

SEQ ID NO: 5116 - DNA, 115 bp, Staphylococcus aureus
aagactaaagacatagcgtatatgtttatattcaatgtatattccatagatatcatcgattacattatcaattctatcgaatacattaattcacatatacactatgtctttcttt

SEQ ID NO: 5117 - DNA, 146 bp, Staphylococcus aureus
acgatagtacatactaattaaaatttgttagaattacattatatgataaattaatgacaatataaatgttaatagaaaagtatgtgcgctgagtatatattcttatttaagaacaagattttaaatttacgaaacgaggtaacata

SEQ ID NO: 5118 - DNA, 146 bp, Staphylococcus aureus
tatgttacctcgtttcgtaaatttaaaatcttgttcttaaataagaatatatactcagcgcacatacttttctattaacatttatattgtcattaatttatcatataatgtaattctaacaaattttaattagtatgtactatcgt

SEQ ID NO: 5119 - DNA, 428 bp, Staphylococcus aureus
tattaaaaaatatgtaaatatacattaaaaataggtatgtagcttaaggtatttcattgagaatgcttttaagtcacatgcctttttttgttctaatgcaccaatagtaagcctttgagattactgttgtgagcaatgttattaattaaaataagatgtaatagcgaattgaaaacaagcttagattaaaagagagttttaaaaatatagataaataatttaaagcaattaaagaaaaaagtattaaaaattgcaattcttaaactgtgattcatattaatatttgtagcaaataacattgtaaaataaagaaaaataattaaagtattgcactttattgaaatttatattacgatagtaatgcagaaatttatatatgcaaaatattatatttatcaaattttgatattttaaaggagtattattaa

SEQ ID NO: 5120 - DNA, 428 bp, Staphylococcus aureus
ttaataatactcctttaaaatatcaaaatttgataaatataatattttgcatatataaatttctgcattactatcgtaatataaatttcaataaagtgcaatactttaattatttttctttattttacaatgttatttgctacaaatattaatatgaatcacagtttaagaattgcaatttttaatacttttttctttaattgctttaaattatttatctatatttttaaaactctcttttaatctaagcttgttttcaattcgctattacatcttattttaattaataacattgctcacaacagtaatctcaaaggcttactattggtgcattagaacaaaaaaaggcatgtgacttaaaagcattctcaatgaaataccttaagctacatacctatttttaatgtatatttacatattttttaata

SEQ ID NO: 5121 - DNA, 366 bp, Staphylococcus aureus
tatgattaacttaaccaggtccatgtggcctggttttttctgtttagaaattcccagatataaaacaaaaaatctttaaggaatagatgcaatttaatttgttacagaaatgtaattgtctatgaattagaaaagctaagatattaattttaagggcaaataatactattttttatgataattaaataaagattacaaaactcataaaaacttttatttaaacacaaatgttaaataacgttttacgataaagaaaaataattaaagtattgtgctttatctaaaaatgtaatactatattgatatacatttttgtatttaaaacaattgtattatttaaaaatttgatgaattaggagtaatcta

SEQ ID NO: 5122 - DNA, 366 bp, Staphylococcus aureus
tagattactcctaattcatcaaatttttaaataatacaattgttttaaatacaaaaatgtatatcaatatagtattacatttttagataaagcacaatactttaattatttttctttatcgtaaaacgttatttaacatttgtgtttaaataaaagtttttatgagttttgtaatctttatttaattatcataaaaaatagtattatttgcccttaaaattaatatcttagcttttctaattcatagacaattacatttctgtaacaaattaaattgcatctattccttaaagattttttgttttatatctgggaatttctaaacagaaaaaaccaggccacatggacctggttaagttaatcata

SEQ ID NO: 5123 - DNA, 393 bp, Staphylococcus aureus
tacagcttataccaggtccgtgaggcctggttttttatttcaaaatttatgaaatgtatcttatgtttgagattaaatagtgcaattttttaaaaaatataacataaatcaacataaatttaattcatctttacattaaaagtacaaacgaataagaaaagcaattaaacacagtatcaaaccatttaaaacaattgatataaaaaacaaacgaataattaaaaattactagaattaatttattcaaaccaaagtgtaaaataacagtcttagataaataaatttatttaaagtattgtgctttatctaaaaatgtattacgatgggaatacaaatttttatatgtaaaaatattaattttttgcaaatattgatattttaaaggagatttat

SEQ ID NO: 5124 - DNA, 393 bp, Staphylococcus aureus
ataaatctcctttaaaatatcaatatttgcaaaaaattaatatttttacatataaaaatttgtattcccatcgtaatacatttttagataaagcacaatactttaaataaatttatttatctaagactgttattttacactttggtttgaataaattaattctagtaatttttaattattcgtttgttttttatatcaattgttttaaatggtttgatactgtgtttaattgcttttcttattcgtttgtacttttaatgtaaagatgaattaaatttatgttgatttatgttatattttttaaaaaattgcactatttaatctcaaacataagatacatttcataaattttgaaataaaaaaccaggcctcacggacctggtataagctgta

SEQ ID NO: 5125 - DNA, 120 bp, Staphylococcus aureus
tacaatatgacccaggtccttgtggcctggtttttttttatgattacacatgcaatagatgtatttttcatataaaataaacaataaagatacggaataaaacttatatgaggcgataat

SEQ ID NO: 5126 - DNA, 120 bp, Staphylococcus aureus
attatcgcctcatataagttttattccgtatctttattgtttattttatatgaaaaatacatctattgcatgtgtaatcataaaaaaaaaccaggccacaaggacctgggtcatattgta

SEQ ID NO: 5127 - DNA, 124 bp, Staphylococcus aureus
gtcaaaagaaaaaagcattttcctagaatcatctatttaacaaacaacgttcatacgaacttacatgtttagttaaatgacataggaaaacgcttttttttataaaaataaaggtgaagtacat

SEQ ID NO: 5128 - DNA, 124 bp, Staphylococcus aureus
atgtacttcacctttatttttataaaaaaaagcgttttcctatgtcatttaactaaacatgtaagttcgtatgaacgttgtttgttaaatagatgattctaggaaaatgcttttttcttttgac

SEQ ID NO: 5129 - DNA, 65 bp, Staphylococcus aureus
ttacaacaccacttatatctattttttataattatatcacataatatttaattacttcttttaac

SEQ ID NO: 5130 - DNA, 65 bp, Staphylococcus aureus
gttaaaagaagtaattaaatattatgtgatataattataaaaaatagatataagtggtgttgtaa

SEQ ID NO: 5131 - DNA, 58 bp, Staphylococcus aureus
tagaaggtataataaaaacgcgcaactaatgttacgcgtttgaattaatcatatgata

SEQ ID NO: 5132 - DNA, 58 bp, Staphylococcus aureus
tatcatatgattaattcaaacgcgtaacattagttgcgcgtttttattataccttcta

SEQ ID NO: 5133 - DNA, 278 bp, Staphylococcus aureus
cacgttcactccttacactatcaatgtgtttatctttctattttactaaaaactattcgataattgtatacgattgctcaattatttataaattaattttcatgaagggtaattactcaggattacgtaatcatacagcattagttttttacttttaaaaatcaaaaatttgttggaatttgaaaagtgttaaacattaaaaatgatgctatattaatggtgtatgaatgaattcataagtttttaaaatgtattaaatttgtggaggcatgtaaaca

SEQ ID NO: 5134 - DNA, 278 bp, Staphylococcus aureus
tgtttacatgcctccacaaatttaatacattttaaaaacttatgaattcattcatacaccattaatatagcatcatttttaatgtttaacacttttcaaattccaacaaatttttgatttttaaaagtaaaaaactaatgctgtatgattacgtaatcctgagtaattacccttcatgaaaattaatttataaataattgagcaatcgtatacaattatcgaatagtttttagtaaaatagaaagataaacacattgatagtgtaaggagtgaacgtg

SEQ ID NO: 5135 - DNA, 76 bp, Staphylococcus aureus
ttgcaatgtttaattaagaaatgcctcgggaaaggttccaatagaaagataaaaagcattggaaggatgattttta

SEQ ID NO: 5136 - DNA, 76 bp, Staphylococcus aureus
taaaaatcatccttccaatgctttttatctttctattggaacctttcccgaggcatttcttaattaaacattgcaa

SEQ ID NO: 5137 - DNA, 112 bp, Staphylococcus aureus
aataaagatagtcgataatatgatgcctaggcagaaatattatcgattatttttttatttaaataataaattatagtataatatcaataataaacgaataggggtgttaata

SEQ ID NO: 5138 - DNA, 112 bp, Staphylococcus aureus
tattaacacccctattcgtttattattgatattatactataatttattatttaaataaaaaaataatcgataatatttctgcctaggcatcatattatcgactatctttatt

SEQ ID NO: 5139 - DNA, 501 bp, Staphylococcus aureus
aatttgttaaaacagagaataccatggttaaaatgcatattcataaatattagattatacatagaaatatttcgctttagattaggaatgtaaaataaatatttattaataatcgtgtatgtttaaagagtgatgtctgattcgttgatcatttatttttgtacaaataaattaaagtaaaaacaaagttattgaagtaaatcgaatataaacattttaatatgatgaggaaagtagtgatagcatatgacttacatgaagttgtgtgctatcgctatttttagttataattccaaaaagttaatcgttcgatgatttaagaattattattgtttaattcaaatgtatgagggtataaaatcattgaatttaattcgataaagtgaaatttttgaacaaacatacttttgtatttatataaaagtttaaattcttataaatttgacaaaactaattaactccgtataattatgaaacatacaagagggagtgtatgaattc

SEQ ID NO: 5140 - DNA, 501 bp, Staphylococcus aureus
gaattcatacactccctcttgtatgtttcataattatacggagttaattagttttgtcaaatttataagaatttaaacttttatataaatacaaaagtatgtttgttcaaaaatttcactttatcgaattaaattcaatgattttataccctcatacatttgaattaaacaataataattcttaaatcatcgaacgattaactttttggaattataactaaaaatagcgatagcacacaacttcatgtaagtcatatgctatcactactttcctcatcatattaaaatgtttatattcgatttacttcaataactttgtttttactttaatttatttgtacaaaaataaatgatcaacgaatcagacatcactctttaaacatacacgattattaataaatatttattttacattcctaatctaaagcgaaatatttctatgtataatctaatatttatgaatatgcattttaaccatggtattctctgttttaacaaatt

SEQ ID NO: 5141 - DNA, 334 bp, Staphylococcus aureus
agattttaataaaaagtataaatcaatcgtatataagcactttaaagctagtaggttctgctaactttaaagtgctttttaaattgagaactgtaattagccgtaataaagtttttgtatatacataaacccccactgcaatgattatcgcaatgggggaaagaggggacttaaagcatatgtttagctttgaatacttaaaattctcttgctattgaaatgttaggatgtaaatatgtcttagagtattttgtccaacgcaattaatattgagactctaaccttcaatattattatagagaacacaaacttaaatagattgggtgacttattt

SEQ ID NO: 5142 - DNA, 334 bp, Staphylococcus aureus
aaataagtcacccaatctatttaagtttgtgttctctataataatattgaaggttagagtctcaatattaattgcgttggacaaaatactctaagacatatttacatcctaacatttcaatagcaagagaattttaagtattcaaagctaaacatatgctttaagtcccctctttcccccattgcgataatcattgcagtgggggtttatgtatatacaaaaactttattacggctaattacagttctcaatttaaaaagcactttaaagttagcagaacctactagctttaaagtgcttatatacgattgatttatactttttattaaaatct

SEQ ID NO: 5143 - DNA, 200 bp, Staphylococcus aureus
ccgatattagctgcatgaacgcatattaattaggagatgaaaggacagctaatatcagttatgtattgttattattattgggaacagagatgaatataggttacgtttctttctttgcacggggatgcattaatctaaaataataataacaactatatcaatgtttaataaattctggattattggaacgattagtcaat

SEQ ID NO: 5144 - DNA, 200 bp, Staphylococcus aureus
attgactaatcgttccaataatccagaatttattaaacattgatatagttgttattattattttagattaatgcatccccgtgcaaagaaagaaacgtaacctatattcatctctgttcccaataataataacaatacataactgatattagctgtcctttcatctcctaattaatatgcgttcatgcagctaatatcgg

SEQ ID NO: 5145 - DNA, 506 bp, Staphylococcus aureus
aacctatattacctcctttgctactctatggttatattataaataacatttttatgtgtgacatcaaccttaagtatcaactttttatcagacatagaacgtatgatttactaagactatttatgtataaaagttctaaataaatatatatttatagagtcgcctggcagtcatttgggaaatataacatatatgattagagaggcatctatcgcaaaagaatgataatgatagaggtattgagcatatagatgagtttaagttcatcttgaaaataaagggttatttagtcatagatgtagatgtataggaaatatttgtatgtattgttcgatatgtatgaaattttcaataaaagctaataacgcttatatgtaactttcaaatttaaattatatacagagcatgatgattataaaaaaataaccacatcacataaattgagttcatacccaatttaagtggtgtggctaataatgttgatttatagatgaaccgcctaatcg

SEQ ID NO: 5146 - DNA, 506 bp, Staphylococcus aureus
cgattaggcggttcatctataaatcaacattattagccacaccacttaaattgggtatgaactcaatttatgtgatgtggttatttttttataatcatcatgctctgtatataatttaaatttgaaagttacatataagcgttattagcttttattgaaaatttcatacatatcgaacaatacatacaaatatttcctatacatctacatctatgactaaataaccctttattttcaagatgaacttaaactcatctatatgctcaatacctctatcattatcattcttttgcgatagatgcctctctaatcatatatgttatatttcccaaatgactgccaggcgactctataaatatatatttatttagaacttttatacataaatagtcttagtaaatcatacgttctatgtctgataaaaagttgatacttaaggttgatgtcacacataaaaatgttatttataatataaccatagagtagcaaaggaggtaatataggtt

SEQ ID NO: 5147 - DNA, 183 bp, Staphylococcus aureus
tgagcttcactcctacataataatattgtattcatcatatcatttttaacctaattgaaaaatattaagcattcaatatttgatgattgttgaaatgaatcattcatactattgtaacttttgaaaatgtcattcactttagataagtgtgatatgttaaaatatgtcctgaggtgagattga

SEQ ID NO: 5148 - DNA, 183 bp, Staphylococcus aureus
tcaatctcacctcaggacatattttaacatatcacacttatctaaagtgaatgacattttcaaaagttacaatagtatgaatgattcatttcaacaatcatcaaatattgaatgcttaatatttttcaattaggttaaaaatgatatgatgaatacaatattattatgtaggagtgaagctca

SEQ ID NO: 5149 - DNA, 132 bp, Staphylococcus aureus
aaagcaacaatgaaacataattacttaatagcttgttaagtatgttggttaataatcaagacgcatatacttttattcgagtgttcggatttaaacatttattaatactgaattatataaggagaggtagca

SEQ ID NO: 5150 - DNA, 132 bp, Staphylococcus aureus
tgctacctctccttatataattcagtattaataaatgtttaaatccgaacactcgaataaaagtatatgcgtcttgattattaaccaacatacttaacaagctattaagtaattatgtttcattgttgcttt

SEQ ID NO: 5151 - DNA, 120 bp, Staphylococcus aureus
attttaaaactttagattacctatgtaactaaacattaaatttttaataaaaataatcaagaaaaagagttacaaactcatcttttgggtatagaataccttcgaggtgagtttttattt

SEQ ID NO: 5152 - DNA, 120 bp, Staphylococcus aureus
aaataaaaactcacctcgaaggtattctatacccaaaagatgagtttgtaactctttttcttgattatttttattaaaaatttaatgtttagttacataggtaatctaaagttttaaaat

SEQ ID NO: 5153 - DNA, 140 bp, Staphylococcus aureus
taaaagaatcgcacaatataccttcttcattcggaggcgtatcgtgcgattttttgtattataaattgacatttaagacgaggcagctgaaccttatatataattgctaagagtttgggctgagccatttctaacaatat

SEQ ID NO: 5154 - DNA, 140 bp, Staphylococcus aureus
atattgttagaaatggctcagcccaaactcttagcaattatatataaggttcagctgcctcgtcttaaatgtcaatttataatacaaaaaatcgcacgatacgcctccgaatgaagaaggtatattgtgcgattctttta

SEQ ID NO: 5155 - DNA, 548 bp, Staphylococcus aureus
ttcatcaccattgtttataagaatttaatactcattatagtttatacactataaaataaccacatgagctttttgataagttgttattgattttaaaaaactaatatttgatactattgtaataataatcattggaatttttagtagttaaaattctcttgaagtataaaaagggaaaattattgaaaaaaattcgacaaaaatatgtttcaaatatttcaaataggttaaaataatattagttaaccattacaaaaattgtatagagtagcgactgtataatttctattgaggttaacgtttatatgtagtgatagtagttaaagttctcccaaggaagactactcgggtacactttgctatgagcaaagtgtactttgttattgataatacattagcacatatatataagtttaaacatacagatttcaactatttaccaaatcacgtcttatgtatacgggaatatactgaagataaacgaaaaattccaagcttaaaccgataagcttggaatttttttattaatttataaacgtaccaatgta

SEQ ID NO: 5156 - DNA, 548 bp, Staphylococcus aureus
tacattggtacgtttataaattaataaaaaaattccaagcttatcggtttaagcttggaatttttcgtttatcttcagtatattcccgtatacataagacgtgatttggtaaatagttgaaatctgtatgtttaaacttatatatatgtgctaatgtattatcaataacaaagtacactttgctcatagcaaagtgtacccgagtagtcttccttgggagaactttaactactatcactacatataaacgttaacctcaatagaaattatacagtcgctactctatacaatttttgtaatggttaactaatattattttaacctatttgaaatatttgaaacatatttttgtcgaatttttttcaataattttccctttttatacttcaagagaattttaactactaaaaattccaatgattattattacaatagtatcaaatattagttttttaaaatcaataacaacttatcaaaaagctcatgtggttattttatagtgtataaactataatgagtattaaattcttataaacaatggtgatgaa

SEQ ID NO: 5157 - DNA, 167 bp, Staphylococcus aureus
gtttatcgctccttttcaaaaatcatcagttctttataaattttatcataaagcaaaggggtaacgataaaattatgattacaaattggtgacgtggcattatgaaataaaatggcgtataattataccgtgaatgattaataagatttatattacaggaggacatt

SEQ ID NO: 5158 - DNA, 167 bp, Staphylococcus aureus
aatgtcctcctgtaatataaatcttattaatcattcacggtataattatacgccattttatttcataatgccacgtcaccaatttgtaatcataattttatcgttacccctttgctttatgataaaatttataaagaactgatgatttttgaaaaggagcgataaac

SEQ ID NO: 5159 - DNA, 587 bp, Staphylococcus aureus
ttaaatatttaacagcccctttcaagttatcgtttggggctgttatttttgaaagtatccataaaaagcataaatatgttattgacctaatatttaaattgaacatcattaaattaaaagtaatgatatgatggaaataataaatttaataagaaaatttcatgttttacgtattaaatagattgagaatagggtatatataatgcgtatgactatgaaagaaacgaccttctattgaaatgttctaatactttagtagtaaatctatatattccaattattatttgtagtattatagttagggtggaaaattataaattgtagggctattttataaaaagataaagaatctgaaatatcactcgataagatttaaactttgaagtaaacgaaagttagttttatactaatcaagttaagtcaaatataaattcaaaataaagattatacataatatgaataatgtgagataaagactgcaatgaaatttaacgcgaatgcgtatgcaacttagaatatgatgtcttttactaataaataaaaataatgaatcaagtataggataaatataaaaggtgatattgaca

SEQ ID NO: 5160 - DNA, 587 bp, Staphylococcus aureus
tgtcaatatcaccttttatatttatcctatacttgattcattatttttatttattagtaaaagacatcatattctaagttgcatacgcattcgcgttaaatttcattgcagtctttatctcacattattcatattatgtataatctttattttgaatttatatttgacttaacttgattagtataaaactaactttcgtttacttcaaagtttaaatcttatcgagtgatatttcagattctttatctttttataaaatagccctacaatttataattttccaccctaactataatactacaaataataattggaatatatagatttactactaaagtattagaacatttcaatagaaggtcgtttctttcatagtcatacgcattatatataccctattctcaatctatttaatacgtaaaacatgaaattttcttattaaatttattatttccatcatatcattacttttaatttaatgatgttcaatttaaatattaggtcaataacatatttatgctttttatggatactttcaaaaataacagccccaaacgataacttgaaaggggctgttaaatatttaa

SEQ ID NO: 5161 - DNA, 176 bp, Staphylococcus aureus
atgatttgataggggagcaatcatctaatttaattagaagataaatgctccattttttattgccagccgtgttacgtatcttgaaaaaaatattaaaaagagtaaaatagatagagttaacgaaaaaattaatgaaatcgacgatatagatatgataaagaaaggtgggtagcaat

SEQ ID NO: 5162 - DNA, 176 bp, Staphylococcus aureus
attgctacccacctttctttatcatatctatatcgtcgatttcattaattttttcgttaactctatctattttactctttttaatatttttttcaagatacgtaacacggctggcaataaaaaatggagcatttatcttctaattaaattagatgattgctcccctatcaaatcat

SEQ ID NO: 5163 - DNA, 51 bp, Staphylococcus aureus
aacctgatggcagcatcattcaatgcgtgccaccaggtttttatgttttgt

SEQ ID NO: 5164 - DNA, 51 bp, Staphylococcus aureus
acaaaacataaaaacctggtggcacgcattgaatgatgctgccatcaggtt

SEQ ID NO: 5165 - DNA, 468 bp, Staphylococcus aureus
tgaaattttaattatgtatgaactgatagatatgaaatgaatattgaaaatgagagcaataaaattttgaatgatgatgttgtgtgattgtataaacttattcgtattttagatacgttttgatatttcgcatgatgaggaaatacttttaacaactgatgacatattttaatagtgaatatattttgagatattaatatatttaatgttaaggatgttgtcgcaataaaattaaaatattgaaagataatttttattgattaattgcgaatatacaaagacaccattatatccatatgctaaaataagaaaaaaggcgacatgttatctcaatttacctgcatctagactcctttacataagaaataatcatcgccgagttttaaaattttacaactttgtagatgtaaaaagcatttgattttaaatagtttgaaaatcatatatttttgaaaaaggagcatgccg

SEQ ID NO: 5166 - DNA, 468 bp, Staphylococcus aureus
cggcatgctcctttttcaaaaatatatgattttcaaactatttaaaatcaaatgctttttacatctacaaagttgtaaaattttaaaactcggcgatgattatttcttatgtaaaggagtctagatgcaggtaaattgagataacatgtcgccttttttcttattttagcatatggatataatggtgtctttgtatattcgcaattaatcaataaaaattatctttcaatattttaattttattgcgacaacatccttaacattaaatatattaatatctcaaaatatattcactattaaaatatgtcatcagttgttaaaagtatttcctcatcatgcgaaatatcaaaacgtatctaaaatacgaataagtttatacaatcacacaacatcatcattcaaaattttattgctctcattttcaatattcatttcatatctatcagttcatacataattaaaatttca

SEQ ID NO: 5167 - DNA, 139 bp, Staphylococcus aureus
atggtggtaataaattcagattaaagatatgcaaataacaatgaataaaatttttaatgatagtaagttgataatattttaatgtcttttgaagtatcgaaaaatgtattacacataaaattaaagggatgtggagaca

SEQ ID NO: 5168 - DNA, 139 bp, Staphylococcus aureus
tgtctccacatccctttaattttatgtgtaatacatttttcgatacttcaaaagacattaaaatattatcaacttactatcattaaaaattttattcattgttatttgcatatctttaatctgaatttattaccaccat

SEQ ID NO: 5169 - DNA, 66 bp, Staphylococcus aureus
taaatgagttttttaaatctaaaattattaaatttaatataaaaatttgactcatagatagaatga

SEQ ID NO: 5170 - DNA, 66 bp, Staphylococcus aureus
tcattctatctatgagtcaaatttttatattaaatttaataattttagatttaaaaaactcattta

SEQ ID NO: 5171 - DNA, 66 bp, Staphylococcus aureus
tataatggatatcccatgttaatattaacagttttaatttctttgttatgcaaatcaaaacattat

SEQ ID NO: 5172 - DNA, 66 bp, Staphylococcus aureus
ataatgttttgatttgcataacaaagaaattaaaactgttaatattaacatgggatatccattata

SEQ ID NO: 5173 - DNA, 179 bp, Staphylococcus aureus
tcaacgagcaatcgcgctatatgcatatcaacttaagcaatacttattttaactgagttctacataacatttttctaatacaccgccttaattcaaaccctaattctaacatttggaagttgtattaaatcatgatagtgtgatagtggaaaagttataaagataaggagctgggtcta

SEQ ID NO: 5174 - DNA, 179 bp, Staphylococcus aureus
tagacccagctccttatctttataacttttccactatcacactatcatgatttaatacaacttccaaatgttagaattagggtttgaattaaggcggtgtattagaaaaatgttatgtagaactcagttaaaataagtattgcttaagttgatatgcatatagcgcgattgctcgttga

SEQ ID NO: 5175 - DNA, 129 bp, Staphylococcus aureus
tgacgaaatttcgtcaaatttatataaaagttgtaagcgttttactattcggtaggcaaagcttatgatagtataattaggtaacgaaaaacacagatatttattaatcaaaagtgaggttaggctaaa

SEQ ID NO: 5176 - DNA, 129 bp, Staphylococcus aureus
tttagcctaacctcacttttgattaataaatatctgtgtttttcgttacctaattatactatcataagctttgcctaccgaatagtaaaacgcttacaacttttatataaatttgacgaaatttcgtca

SEQ ID NO: 5177 - DNA, 167 bp, Staphylococcus aureus
gacatacctcatactaaacgaagtgattttttgcttcgttatttttatttttaattttaacggaaaatataaatatataaattgaatagacaatcattgtttattaagtattgagcaagttgtggtataatgccgttattaaaacttgttaataaggggagaaagtc

SEQ ID NO: 5178 - DNA, 167 bp, Staphylococcus aureus
gactttctccccttattaacaagttttaataacggcattataccacaacttgctcaatacttaataaacaatgattgtctattcaatttatatatttatattttccgttaaaattaaaaataaaaataacgaagcaaaaaatcacttcgtttagtatgaggtatgtc

SEQ ID NO: 5179 - DNA, 498 bp, Staphylococcus aureus
atattagaaactaaaatttcccaattaatctataaagatatgattcatttctcaatgacgacgtaaatcttgaggtgaaaataaagtcttagattggttgggagtttttttaatttttttgaaattaaattaatctgtagttaataaaaaatttgaataactgacacatttttttgatcatagctatatactttgtgaattaattcacattataataagagtgaagataagagtattataaattatctttaaataaatatatgtgaagtaaaaattacacgttagcatatcgattatgtcatttcttttaacatattaactagggaaacgttaaaagttaacggttgatatctaactaaaaacaaagtcacagtagtatgttttaatctggcgtctattacaaataaaaattacatctataattattcgttttcatttttgaaagtaatcgccaattaatatcatacatactggagtgactataaggaggacattatt

SEQ ID NO: 5180 - DNA, 498 bp, Staphylococcus aureus
aataatgtcctccttatagtcactccagtatgtatgatattaattggcgattactttcaaaaatgaaaacgaataattatagatgtaatttttatttgtaatagacgccagattaaaacatactactgtgactttgtttttagttagatatcaaccgttaacttttaacgtttccctagttaatatgttaaaagaaatgacataatcgatatgctaacgtgtaatttttacttcacatatatttatttaaagataatttataatactcttatcttcactcttattataatgtgaattaattcacaaagtatatagctatgatcaaaaaaatgtgtcagttattcaaattttttattaactacagattaatttaatttcaaaaaaattaaaaaaactcccaaccaatctaagactttattttcacctcaagatttacgtcgtcattgagaaatgaatcatatctttatagattaattgggaaattttagtttctaatat

SEQ ID NO: 5181 - DNA, 75 bp, Staphylococcus aureus
aaatatcaactgactatatagataaagaaggtagtgctctgaacactatcattataatcaaacacgaggttttca

SEQ ID NO: 5182 - DNA, 75 bp, Staphylococcus aureus
tgaaaacctcgtgtttgattataatgatagtgttcagagcactaccttctttatctatatagtcagttgatattt

SEQ ID NO: 5183 - DNA, 83 bp, Staphylococcus aureus
taattgaacctatttagctttaagaaggcataacaagatgaccttattttatgctataatatttctattatgcgaagattaag

SEQ ID NO: 5184 - DNA, 83 bp, Staphylococcus aureus
cttaatcttcgcataatagaaatattatagcataaaataaggtcatcttgttatgccttcttaaagctaaataggttcaatta

SEQ ID NO: 5185 - DNA, 182 bp, Staphylococcus aureus
gaacatttatatacactccaacgtagagtttctcgaaagatactttgtgttggagtgtttttaattaggtatgtgacatattggggaatgcttagtatgtgaataaggttaagagggacgcagttggatgctactgcacaactgcataagagagcctaaatcgctaaagctcaaggggagta

SEQ ID NO: 5186 - DNA, 182 bp, Staphylococcus aureus
tactccccttgagctttagcgatttaggctctcttatgcagttgtgcagtagcatccaactgcgtccctcttaaccttattcacatactaagcattccccaatatgtcacatacctaattaaaaacactccaacacaaagtatctttcgagaaactctacgttggagtgtatataaatgttc

SEQ ID NO: 5187 - DNA, 251 bp, Staphylococcus aureus
acgctgtgaagttagatagatgagtttatatgaaatataaaaaataatttactattttcttttagtatgtggacttatataataaatagaagcatataaagaaaaaaacagttgtttgtttgtgcagcaactgcataaaagcctctaatcactaaaggtgaagaggaacgcagttggatgctaaggcacaactgcataaatccctctaatcgctaaagcgaaaagtgggattaaaaaggagatgtgataat

SEQ ID NO: 5188 - DNA, 251 bp, Staphylococcus aureus
attatcacatctcctttttaatcccacttttcgctttagcgattagagggatttatgcagttgtgccttagcatccaactgcgttcctcttcacctttagtgattagaggcttttatgcagttgctgcacaaacaaacaactgtttttttctttatatgcttctatttattatataagtccacatactaaaagaaaatagtaaattattttttatatttcatataaactcatctatctaacttcacagcgt

SEQ ID NO: 5189 - DNA, 101 bp, Staphylococcus aureus
accattctaattatgccccttattgctacatgtaaaaaaatacatgtttgagataaggggtttttaaaatatatttagtgaatgatagcaacgcgagtatg

SEQ ID NO: 5190 - DNA, 101 bp, Staphylococcus aureus
catactcgcgttgctatcattcactaaatatattttaaaaaccccttatctcaaacatgtatttttttacatgtagcaataaggggcataattagaatggt

SEQ ID NO: 5191 - DNA, 54 bp, Staphylococcus aureus
cacatgacatttgctaaaataaaaataactataaacataaagagggcataagcg

SEQ ID NO: 5192 - DNA, 54 bp, Staphylococcus aureus
cgcttatgccctctttatgtttatagttatttttattttagcaaatgtcatgtg

SEQ ID NO: 5193 - DNA, 135 bp, Staphylococcus aureus
tttttagtgataagtgaaatataaaagtagtaattattatttgtaatataattgtaatatgactgttgttttagaaatgattgttgtataatggttgtgagcacaagacgatataaataaaaggagagagtgctt

SEQ ID NO: 5194 - DNA, 135 bp, Staphylococcus aureus
aagcactctctccttttatttatatcgtcttgtgctcacaaccattatacaacaatcatttctaaaacaacagtcatattacaattatattacaaataataattactacttttatatttcacttatcactaaaaa

SEQ ID NO: 5195 - DNA, 161 bp, Staphylococcus aureus
taattaaattaatcgtgcttaaccgacaagttaaatcgcaatacttgtcggttattttattacatggcataatacagtgaatattaatttttatgatttgcgaaggggaaattaaaccaatacaataaataaagatgtttcattttaaaggagtactacca

SEQ ID NO: 5196 - DNA, 161 bp, Staphylococcus aureus
tggtagtactcctttaaaatgaaacatctttatttattgtattggtttaatttccccttcgcaaatcataaaaattaatattcactgtattatgccatgtaataaaataaccgacaagtattgcgatttaacttgtcggttaagcacgattaatttaatta

SEQ ID NO: 5197 - DNA, 168 bp, Staphylococcus aureus
atatgataaaactattcacttgattaattgtattaattgagatgaatagtttttttattgttggaataacttttggtaatttataaataatttaaaaaaattgtttataaaatggaagcgtatatagaatgaaggttgggtatatagtttattgagggaggtgtcaca

SEQ ID NO: 5198 - DNA, 168 bp, Staphylococcus aureus
tgtgacacctccctcaataaactatatacccaaccttcattctatatacgcttccattttataaacaatttttttaaattatttataaattaccaaaagttattccaacaataaaaaaactattcatctcaattaatacaattaatcaagtgaatagttttatcatat

SEQ ID NO: 5199 - DNA, 251 bp, Staphylococcus aureus
tatgtgatatataaacctagggcataaagtccttaggcaatgtgaaaaagctgattactattcattatttgatagaaatcagctttttttgaaatgtatttgatatatactgctcgttatgcggctatcttccttatattaagtgccattagtgcaaaacctcttaacaattaggtaaaaaaagacataaaaaaaggaagtttaatagaatgtatcatctatcaaacttcaccaaattgcgctaaacaaaa

SEQ ID NO: 5200 - DNA, 251 bp, Staphylococcus aureus
ttttgtttagcgcaatttggtgaagtttgatagatgatacattctattaaacttcctttttttatgtctttttttacctaattgttaagaggttttgcactaatggcacttaatataaggaagatagccgcataacgagcagtatatatcaaatacatttcaaaaaaagctgatttctatcaaataatgaatagtaatcagctttttcacattgcctaaggactttatgccctaggtttatatatcacata

SEQ ID NO: 5201 - DNA, 148 bp, Staphylococcus aureus
gtttaaaacctccctatttgatgcatcttgctcgatacatttgcccgataatatattgatatctaatctttatttattatagatatgttagtcataattttgcattaaataagttttattaaatatatttaatgctctattatttagt

SEQ ID NO: 5202 - DNA, 148 bp, Staphylococcus aureus
actaaataatagagcattaaatatatttaataaaacttatttaatgcaaaattatgactaacatatctataataaataaagattagatatcaatatattatcgggcaaatgtatcgagcaagatgcatcaaatagggaggttttaaac

SEQ ID NO: 5203 - DNA, 446 bp, Staphylococcus aureus
tttttataatttaccttaatttaatcgccaatacaaggtaatttatttaatgaaacgatttagcgcaattaaatgtttcgatattcaatgtgtgtctaaagagattctttgttatagcttaactcttccaagttaacttcttctactatttatacccatttttcagaattttatcactaaaaatgaaaaatttttataatttttttaatttagtaattctcagtgcagttttaatgataagaaaaacacattaatttagtgattaaaaccaatctatagcacgttaaagtgtatatacgttattccgattgataacgggtaacaaataatagaaagtacgataattgatcatgcattaaagcacttttatttttcaaactcgactcaatgaattataaaaagttgtgcattttgacttatttttaattaattgaataaccaactat

SEQ ID NO: 5204 - DNA, 446 bp, Staphylococcus aureus
atagttggttattcaattaattaaaaataagtcaaaatgcacaactttttataattcattgagtcgagtttgaaaaataaaagtgctttaatgcatgatcaattatcgtactttctattatttgttacccgttatcaatcggaataacgtatatacactttaacgtgctatagattggttttaatcactaaattaatgtgtttttcttatcattaaaactgcactgagaattactaaattaaaaaaattataaaaatttttcatttttagtgataaaattctgaaaaatgggtataaatagtagaagaagttaacttggaagagttaagctataacaaagaatctctttagacacacattgaatatcgaaacatttaattgcgctaaatcgtttcattaaataaattaccttgtattggcgattaaattaaggtaaattataaaaa

SEQ ID NO: 5205 - DNA, 88 bp, Staphylococcus aureus
cgcttttctaaagatttttagaccacaaaaaaatagcttatcacttttaaaaataattacaagttaaaatgataagctaaaagttaat

SEQ ID NO: 5206 - DNA, 88 bp, Staphylococcus aureus
attaacttttagcttatcattttaacttgtaattatttttaaaagtgataagctatttttttgtggtctaaaaatctttagaaaagcg

SEQ ID NO: 5207 - DNA, 194 bp, Staphylococcus aureus
atgaataaagtctcactttccaaagttaataataaaatcatatgaatacattatcattatagagaaaatatacaactcatttacaataatgttgaaaaaaacaggacattatcataacaaaatcaccctagacaatcatgatgaaagtctagggtgttagtatttatactaaattaattgcgctttctttatat

SEQ ID NO: 5208 - DNA, 194 bp, Staphylococcus aureus
atataaagaaagcgcaattaatttagtataaatactaacaccctagactttcatcatgattgtctagggtgattttgttatgataatgtcctgtttttttcaacattattgtaaatgagttgtatattttctctataatgataatgtattcatatgattttattattaactttggaaagtgagactttattcat

SEQ ID NO: 5209 - DNA, 158 bp, Staphylococcus aureus
attttaaaacctcctttcacactatatatcgaaataaaataataaaatggctaattttattttctatgtttaaaatctataaaaaaggcaatagatatatgtaactaaaatataaaatagctatgattaagacacttaaagcaaggggaggttgagta

SEQ ID NO: 5210 - DNA, 158 bp, Staphylococcus aureus
tactcaacctccccttgctttaagtgtcttaatcatagctattttatattttagttacatatatctattgccttttttatagattttaaacatagaaaataaaattagccattttattattttatttcgatatatagtgtgaaaggaggttttaaaat

SEQ ID NO: 5211 - DNA, 339 bp, Staphylococcus aureus
agtgttggctaaattgttaagcataacaatgcttttgaaaatctgttttcaaaattaatcattaaaagagtactttgaaattggttagtcgattttaaggtgctcattttttgtattataagttaatgttgttatgtgaaagcaagttgtttatttatacaaacaattagtgataaaataaaattaaataattgcaaatttaagtactgcaatcgtagacatatatctatattaaagtgcttttgtggtcgctaactcaatttatcctctaaagtataattacaacgagatgtgatacttaattttcaattaaacaatactttttagagaggtgaaagt

SEQ ID NO: 5212 - DNA, 339 bp, Staphylococcus aureus
actttcacctctctaaaaagtattgtttaattgaaaattaagtatcacatctcgttgtaattatactttagaggataaattgagttagcgaccacaaaagcactttaatatagatatatgtctacgattgcagtacttaaatttgcaattatttaattttattttatcactaattgtttgtataaataaacaacttgctttcacataacaacattaacttataatacaaaaaatgagcaccttaaaatcgactaaccaatttcaaagtactcttttaatgattaattttgaaaacagattttcaaaagcattgttatgcttaacaatttagccaacact

SEQ ID NO: 5213 - DNA, 1013 bp, Staphylococcus aureus
aatatgaagaacctgaaaaactgaagggcttttcatcaatcccttttattttaggggaattgaatagatagttttaaactatacgaattattaatatttgagatttaattgaaataagttttaaaaattggaggagatagattaatcgaagtcatttaaagatgaagataagtgcattcacaaaaaatagccacactcatatgacatcggatgagtgtggcttaaggatctatggggggaggaaaccatagatgtttactttgataggccagattaaatatcaaagtatgcgattatttatagcttgatgcaaaagtggtatgcctattaaaagttactgcacatagcttttaatattccgttcaaaggaaaggggcatacaattgaacaatctgtaatagtacttttaaccagctatgctaaaagtctagtagggagaacagttgtccaatcacataagaacctctaacttcgttagtacgattaagaaaagctttttagttagtatgtaatacaatttattgacgcgcgtgaatctcttttataagagtgtgtagggaatggcgttgtataaattgtattagaagaacttctaacgcatctctgtggttaaaagagatgaagggaacgacagtttaattaaaactgcataagaacttctagcttttctctttcgttcaaagagaagcagctgttcgcagtttaatcaaaaccacataaagcttttaactttactctttgatttaaagagtgacaaatgtttacagtttaattaaaactgcataagaacttctagcttttctctttcgttcaaagagaagttctaataccaccatatcgtgcgatcgggaacggtatatatattaataggagggtaatatatatttaacgcacgatatgggactattagccttcgactttgttatgttgatgtgtagcctaaaatattggagataccaatattttaggttgcatcaacatcaattcatcttacttcattaaaacacagcgtg

SEQ ID NO: 5214 - DNA, 1013 bp, Staphylococcus aureus
cacgctgtgttttaatgaagtaagatgaattgatgttgatgcaacctaaaatattggtatctccaatattttaggctacacatcaacataacaaagtcgaaggctaatagtcccatatcgtgcgttaaatatatattaccctcctattaatatatataccgttcccgatcgcacgatatggtggtattagaacttctctttgaacgaaagagaaaagctagaagttcttatgcagttttaattaaactgtaaacatttgtcactctttaaatcaaagagtaaagttaaaagctttatgtggttttgattaaactgcgaacagctgcttctctttgaacgaaagagaaaagctagaagttcttatgcagttttaattaaactgtcgttcccttcatctcttttaaccacagagatgcgttagaagttcttctaatacaatttatacaacgccattccctacacactcttataaaagagattcacgcgcgtcaataaattgtattacatactaactaaaaagcttttcttaatcgtactaacgaagttagaggttcttatgtgattggacaactgttctccctactagacttttagcatagctggttaaaagtactattacagattgttcaattgtatgcccctttcctttgaacggaatattaaaagctatgtgcagtaacttttaataggcataccacttttgcatcaagctataaataatcgcatactttgatatttaatctggcctatcaaagtaaacatctatggtttcctccccccatagatccttaagccacactcatccgatgtcatatgagtgtggctattttttgtgaatgcacttatcttcatctttaaatgacttcgattaatctatctcctccaatttttaaaacttatttcaattaaatctcaaatattaataattcgtatagtttaaaactatctattcaattcccctaaaataaaagggattgatgaaaagcccttcagtttttcaggttcttcatatt

SEQ ID NO: 5215 - DNA, 121 bp, Staphylococcus aureus
acgtttatacctcctaattaaaagtttaggctaacctaattaattgtataataaactgagaatatttatcatgtcaagtaaattcgtgatataatatagacaatgtatgtgaggtgaaagt

SEQ ID NO: 5216 - DNA, 121 bp, Staphylococcus aureus
actttcacctcacatacattgtctatattatatcacgaatttacttgacatgataaatattctcagtttattatacaattaattaggttagcctaaacttttaattaggaggtataaacgt

SEQ ID NO: 5217 - DNA, 79 bp, Staphylococcus aureus
aataaagaagccataaagatatccatgattgaactgataaagacatatggataattgctttaggcttcttttttattag

SEQ ID NO: 5218 - DNA, 79 bp, Staphylococcus aureus
ctaataaaaaagaagcctaaagcaattatccatatgtctttatcagttcaatcatggatatctttatggcttctttatt

SEQ ID NO: 5219 - DNA, 235 bp, Staphylococcus aureus
tgttaacctcatataagatattaatttaaagtttgcttagcacttattataaatgatattggcatcaatagcgttagactttagacttaccttagttaaactaattttaatttttgaaaaggtgaatatgtgttaaaataaagcaaaatcatttcgatataaataggatgaatataaatactgttaatattgattacactaacataataatgaaataagataggagattcctgtt

SEQ ID NO: 5220 - DNA, 235 bp, Staphylococcus aureus
aacaggaatctcctatcttatttcattattatgttagtgtaatcaatattaacagtatttatattcatcctatttatatcgaaatgattttgctttattttaacacatattcaccttttcaaaaattaaaattagtttaactaaggtaagtctaaagtctaacgctattgatgccaatatcatttataataagtgctaagcaaactttaaattaatatcttatatgaggttaaca

SEQ ID NO: 5221 - DNA, 60 bp, Staphylococcus aureus
tcatgatgataaaaataaaaccgaggaaatccttaaatggagattctcggttttttcggt

SEQ ID NO: 5222 - DNA, 60 bp, Staphylococcus aureus
accgaaaaaaccgagaatctccatttaaggatttcctcggttttatttttatcatcatga

SEQ ID NO: 5223 - DNA, 325 bp, Staphylococcus aureus
ttgtagaccttccttattcacatttatctagattataatatactactcaacagttgttaaattttaaaacctgttgtaaagtgtatagaagattttgttattatcagagttggtgttttgacacaaaatgttaatcatcaatgataacaatgatatttaaaaactaaacttatttcaacttacatgattgtatactataatgtatttgtaataaactaatattttaaagaactagacaataattttgatagcatccatgtatagtgatagtatttacaacaattattataatactatttagttaagtagagaaatagttaaacat

SEQ ID NO: 5224 - DNA, 325 bp, Staphylococcus aureus
atgtttaactatttctctacttaactaaatagtattataataattgttgtaaatactatcactatacatggatgctatcaaaattattgtctagttctttaaaatattagtttattacaaatacattatagtatacaatcatgtaagttgaaataagtttagtttttaaatatcattgttatcattgatgattaacattttgtgtcaaaacaccaactctgataataacaaaatcttctatacactttacaacaggttttaaaatttaacaactgttgagtagtatattataatctagataaatgtgaataaggaaggtctacaa

SEQ ID NO: 5225 - DNA, 99 bp, Staphylococcus aureus
tatatttatatgacgaaaccccgctaaccattaataaatggaagtggggttcatttttgtttataatttaagtaaataacatattaagttggtgtatta

SEQ ID NO: 5226 - DNA, 99 bp, Staphylococcus aureus
taatacaccaacttaatatgttatttacttaaattataaacaaaaatgaaccccacttccatttattaatggttagcggggtttcgtcatataaatata

SEQ ID NO: 5227 - DNA, 62 bp, Staphylococcus aureus
cgtgtatattgatgaccataaactgcaatcctatgatgtgacaatatgaggaggataactta

SEQ ID NO: 5228 - DNA, 62 bp, Staphylococcus aureus
taagttatcctcctcatattgtcacatcataggattgcagtttatggtcatcaatatacacg

SEQ ID NO: 5229 - DNA, 116 bp, Staphylococcus aureus
attatatagaactatcgatactaaacgataaattaacttaggttattataaaataaatataaaacggacaagtttcgcagctttataatgtgcaacttgtccgtttttagtatgtt

SEQ ID NO: 5230 - DNA, 116 bp, Staphylococcus aureus
aacatactaaaaacggacaagttgcacattataaagctgcgaaacttgtccgttttatatttattttataataacctaagttaatttatcgtttagtatcgatagttctatataat

SEQ ID NO: 5231 - DNA, 420 bp, Staphylococcus aureus
aaagcgttaatcttcccttttccaattcttaaatattccctaaaagcaatggttattcctacttacggaaatcattgctaattcacttcaccttaattaaattgttgaaaataaagttttctgcagttaatttgaaaaataatgcaaatatattacgtgtgtagctaaaggtgttataatgtttgtacgaagagcaaacttactcaaaagcgattaattttcatgttttaatataaagactttgagaagttattacaaaaaatgcaatagaaatattctatcatataaatgttatgagcggtattttggggcaacactttatttgatttttaaagttttgttgggagaaagtatatgatagaaatgcatgtatctatctaaatgaattaactataaatttcaaacagaagaggtaaaact

SEQ ID NO: 5232 - DNA, 420 bp, Staphylococcus aureus
agttttacctcttctgtttgaaatttatagttaattcatttagatagatacatgcatttctatcatatactttctcccaacaaaactttaaaaatcaaataaagtgttgccccaaaataccgctcataacatttatatgatagaatatttctattgcattttttgtaataacttctcaaagtctttatattaaaacatgaaaattaatcgcttttgagtaagtttgctcttcgtacaaacattataacacctttagctacacacgtaatatatttgcattatttttcaaattaactgcagaaaactttattttcaacaatttaattaaggtgaagtgaattagcaatgatttccgtaagtaggaataaccattgcttttagggaatatttaagaattggaaaagggaagattaacgcttt

SEQ ID NO: 5233 - DNA, 68 bp, Staphylococcus aureus
ttttatatataagtaagcttggagcaaatacacatataccatcgaggaaattaaagtgtggcacattg

SEQ ID NO: 5234 - DNA, 68 bp, Staphylococcus aureus
caatgtgccacactttaatttcctcgatggtatatgtgtatttgctccaagcttacttatatataaaa

SEQ ID NO: 5235 - DNA, 207 bp, Staphylococcus aureus
attaataaaatcgatattttaagaaaaaaatgctcatggtataatacaagttataagcaaacatacatatattaaatactgtagccacgagtcataattcttcatattttacatagcaatttaactgattttagagtccacggtacagaagtttgatatttcaatgtttctaaatttttaaaaaattaaatcataggtgggtgctaa

SEQ ID NO: 5236 - DNA, 207 bp, Staphylococcus aureus
ttagcacccacctatgatttaattttttaaaaatttagaaacattgaaatatcaaacttctgtaccgtggactctaaaatcagttaaattgctatgtaaaatatgaagaattatgactcgtggctacagtatttaatatatgtatgtttgcttataacttgtattataccatgagcatttttttcttaaaatatcgattttattaat

SEQ ID NO: 5237 - DNA, 255 bp, Staphylococcus aureus
tatgtcgaagagtgactatgataatacattttaactaataaatatgtccaggcatgtcgtctattgatataggtgagatgcttggacttttttattattgatataaaggtatttaaatatttttaaagttaccgaaattgaagcattataaaaaccaagtgcacatggtaatacacttggcttttatgggaaatgaatattattgtacatatgacagtaaggactaggtacagtcatagtacttcgagcaaaatt

SEQ ID NO: 5238 - DNA, 255 bp, Staphylococcus aureus
aattttgctcgaagtactatgactgtacctagtccttactgtcatatgtacaataatattcatttcccataaaagccaagtgtattaccatgtgcacttggtttttataatgcttcaatttcggtaactttaaaaatatttaaatacctttatatcaataataaaaaagtccaagcatctcacctatatcaatagacgacatgcctggacatatttattagttaaaatgtattatcatagtcactcttcgacata

SEQ ID NO: 5239 - DNA, 181 bp, Staphylococcus aureus
taaaaattcagaatatttttaattattatattgtgagtgatatttattagggaaagctattcttcatataaattagttaaatagtaaatctttgttagaactctttccatagagttgtgacagcatttttgttgtgctactatttttatagtctaataaatatataaaggggatggtttcg

SEQ ID NO: 5240 - DNA, 181 bp, Staphylococcus aureus
cgaaaccatcccctttatatatttattagactataaaaatagtagcacaacaaaaatgctgtcacaactctatggaaagagttctaacaaagatttactatttaactaatttatatgaagaatagctttccctaataaatatcactcacaatataataattaaaaatattctgaattttta

SEQ ID NO: 5241 - DNA, 281 bp, Staphylococcus aureus
ataaatggtatgagcacacatacttaaatagaagtccacggacaagtttttgaactatgaagacttatctgtgggcgttttttattttataaaagtaatatacaagacatgacaaatcgagctatccaatttaaaaagtaatgttagtcaataagattgaaaaatgttataatgatgttcatgataatcattatcaattgggatgcctttgaaaattgataatttaaaaatagaaattattttttataaacagaaagaattttattgaaagtagggaaatt

SEQ ID NO: 5242 - DNA, 281 bp, Staphylococcus aureus
aatttccctactttcaataaaattctttctgtttataaaaaataatttctatttttaaattatcaattttcaaaggcatcccaattgataatgattatcatgaacatcattataacatttttcaatcttattgactaacattactttttaaattggatagctcgatttgtcatgtcttgtatattacttttataaaataaaaaacgcccacagataagtcttcatagttcaaaaacttgtccgtggacttctatttaagtatgtgtgctcataccatttat

SEQ ID NO: 5243 - DNA, 236 bp, Staphylococcus aureus
tgtcaaaggacacaacttattgctatgaaaggcactttattataaggcttttcatagcattttttatttaatgagccactcaagactatttattttttcaataatgaaccattaagttatcaagaggatcttatcaaaaatatatttgataacggtatcaggttaattctttatgatagcgcattcatttattctgttttatactatgactgataataccaaggaggtacaacatg

SEQ ID NO: 5244 - DNA, 236 bp, Staphylococcus aureus
catgttgtacctccttggtattatcagtcatagtataaaacagaataaatgaatgcgctatcataaagaattaacctgataccgttatcaaatatatttttgataagatcctcttgataacttaatggttcattattgaaaaaataaatagtcttgagtggctcattaaataaaaaatgctatgaaaagccttataataaagtgcctttcatagcaataagttgtgtcctttgaca

SEQ ID NO: 5245 - DNA, 115 bp, Staphylococcus aureus
ttaaaatttactaataatgaaaaatgtaaacctttttcaaatgaaactttataaaaaatatgatagtatatatgtaaatgtttaataaaatctggagaaataggaggacattgcc

SEQ ID NO: 5246 - DNA, 115 bp, Staphylococcus aureus
ggcaatgtcctcctatttctccagattttattaaacatttacatatatactatcatattttttataaagtttcatttgaaaaaggtttacatttttcattattagtaaattttaa

SEQ ID NO: 5247 - DNA, 457 bp, Staphylococcus aureus
ttacatttcaattatattagcttaataatagttttaacatttggttgggttgggacatatgttccagccttttttaatacttaaaaactaacgaagtatacttgtgtgcacaaatggtttttatacaacattttataaatttatacattttaataaagaacatacgatatatggtttaaaccttgttaactgagagattttgatatgtattcttcgaaatttaactaaatttacgaaattcaagaagcacaataattaatcaattttcctatacaaaagttcgtatgactgcattataaaagcataaatttataatttttttaaatgtcattgaacgtgataatgtgaatggattgagcaattttgaaaaagtgaaaaataacctatgcgacttgcaattaattttcagtacgttataatgcacactgtgcaaaattaaggaggtctattattcaca

SEQ ID NO: 5248 - DNA, 457 bp, Staphylococcus aureus
tgtgaataatagacctccttaattttgcacagtgtgcattataacgtactgaaaattaattgcaagtcgcataggttatttttcactttttcaaaattgctcaatccattcacattatcacgttcaatgacatttaaaaaaattataaatttatgcttttataatgcagtcatacgaacttttgtataggaaaattgattaattattgtgcttcttgaatttcgtaaatttagttaaatttcgaagaatacatatcaaaatctctcagttaacaaggtttaaaccatatatcgtatgttctttattaaaatgtataaatttataaaatgttgtataaaaaccatttgtgcacacaagtatacttcgttagtttttaagtattaaaaaaggctggaacatatgtcccaacccaaccaaatgttaaaactattattaagctaatataattgaaatgtaa

SEQ ID NO: 5249 - DNA, 150 bp, Staphylococcus aureus
tatcatatgatggatatccgaaactttacaattgaatcactttgttttaaccttaaaagcaattcgtctctactcttatcgggcgaattgctttttatatttattcagtctattaatatgagcgtctaacaaatagagaggtacgatgta

SEQ ID NO: 5250 - DNA, 150 bp, Staphylococcus aureus
tacatcgtacctctctatttgttagacgctcatattaatagactgaataaatataaaaagcaattcgcccgataagagtagagacgaattgcttttaaggttaaaacaaagtgattcaattgtaaagtttcggatatccatcatatgata

SEQ ID NO: 5251 - DNA, 328 bp, Staphylococcus aureus
tgataaacagtagtaatttattacttaagcaacatttaagatcttcaaattgaaaacgaagaatttaaaacatgtggggctaatgtgtaagagtctgagatataataaattgttagcggttctttatcatttctatctcaccctattatgatgtgacatttattttacaaactaatttgttttgaacctgaaaataactttttacaactaaattgtcgaaaaacagtgtgtacatgatataataaatttataaattgaaaagaattcaaaagaaaaaataaaatatagattgagcacgaagtgatttgaaataaggttgtgaaaggga

SEQ ID NO: 5252 - DNA, 328 bp, Staphylococcus aureus
tccctttcacaaccttatttcaaatcacttcgtgctcaatctatattttattttttcttttgaattcttttcaatttataaatttattatatcatgtacacactgtttttcgacaatttagttgtaaaaagttattttcaggttcaaaacaaattagtttgtaaaataaatgtcacatcataatagggtgagatagaaatgataaagaaccgctaacaatttattatatctcagactcttacacattagccccacatgttttaaattcttcgttttcaatttgaagatcttaaatgttgcttaagtaataaattactactgtttatca

SEQ ID NO: 5253 - DNA, 208 bp, Staphylococcus aureus
acaacatatataaagcactactaatcgtagttgatagttgatcaattacacattagtggtgctttattttgaatttaaatttgataaatgaataagagtatacgcattcatttaagattagatgacattgataagtatgagtaatgtattaggtaaccattaaattcgttgttatgcgattctgatacaagattatgataaaatagct

SEQ ID NO: 5254 - DNA, 208 bp, Staphylococcus aureus
agctattttatcataatcttgtatcagaatcgcataacaacgaatttaatggttacctaatacattactcatacttatcaatgtcatctaatcttaaatgaatgcgtatactcttattcatttatcaaatttaaattcaaaataaagcaccactaatgtgtaattgatcaactatcaactacgattagtagtgctttatatatgttgt

SEQ ID NO: 5255 - DNA, 112 bp, Staphylococcus aureus
aaaaagcctccagtattttgaaattttaaaacatttgctactattataatatatatgtaactaaaaggtggagtaatatgttttttggttacagtttaaaggagtattttag

SEQ ID NO: 5256 - DNA, 112 bp, Staphylococcus aureus
ctaaaatactcctttaaactgtaaccaaaaaacatattactccaccttttagttacatatatattataatagtagcaaatgttttaaaatttcaaaatactggaggcttttt

SEQ ID NO: 5257 - DNA, 81 bp, Staphylococcus aureus
acatgcgttttgttacttagaattgatacatcaatgcagcttcaacgttataataagatagatgttagtcatatgttaaat

SEQ ID NO: 5258 - DNA, 81 bp, Staphylococcus aureus
atttaacatatgactaacatctatcttattataacgttgaagctgcattgatgtatcaattctaagtaacaaaacgcatgt

SEQ ID NO: 5259 - DNA, 722 bp, Staphylococcus aureus
aatatacagatggctttcagtagagtagtggattcgaattcacgaactatactggaagctttttattataaatgaagagaagttatatttttagcatgtatagttgaatactgggttaaaataccatattaataatgaagtaaaggtatgagtgattatgaaagtgttttgaatgaaatatatttaattggtgatgcttttaattgaaaagattaacaggattcaactttgtaaattgtattaaatgtgagaaaataaaagtatattcattgagatatatgagtcaatgatcgttttaaacaagataagtgtattttaatatgtaaaagttatgtaataaatattgtatcgttgcaaatttcccaactatatccatttacaatttttagagttgtatagataaaaaattgcctataaaataactttttcaaaacaaatgcctactactatttaaattttatgtaaaagttaagtttcggaattgttaaaaatttgtaaattgaattgtgggattgtaaattttgtgctattttcatataagggcaaatacagtaaattgtttactgtgaggcatttttgaaattaatatcagtacactaaaattatactgacgattgataataacaaatttgtatcattagtttgtaaattcacttgtcttaatttgaaacaaattataactgaatgtgattggtgacaatcgcttaaatggaggattttaa

SEQ ID NO: 5260 - DNA, 722 bp, Staphylococcus aureus
ttaaaatcctccatttaagcgattgtcaccaatcacattcagttataatttgtttcaaattaagacaagtgaatttacaaactaatgatacaaatttgttattatcaatcgtcagtataattttagtgtactgatattaatttcaaaaatgcctcacagtaaacaatttactgtatttgcccttatatgaaaatagcacaaaatttacaatcccacaattcaatttacaaatttttaacaattccgaaacttaacttttacataaaatttaaatagtagtaggcatttgttttgaaaaagttattttataggcaattttttatctatacaactctaaaaattgtaaatggatatagttgggaaatttgcaacgatacaatatttattacataacttttacatattaaaatacacttatcttgtttaaaacgatcattgactcatatatctcaatgaatatacttttattttctcacatttaatacaatttacaaagttgaatcctgttaatcttttcaattaaaagcatcaccaattaaatatatttcattcaaaacactttcataatcactcatacctttacttcattattaatatggtattttaacccagtattcaactatacatgctaaaaatataacttctcttcatttataataaaaagcttccagtatagttcgtgaattcgaatccactactctactgaaagccatctgtatatt

SEQ ID NO: 5261 - DNA, 587 bp, Staphylococcus aureus
ttgaaaataaaactaaactgaacttcagtatcacaaacatatggtggtattgaagttcatttttttatgtaagtagataacatattttatagaatttacgtagaatgaccaagacaaagcattttaattagggggctaagttataaatttattccatggaacataaacagttaggtcattaaaatataagtaagcgtaaaataatgatttaatagtttatattcttcaatgaaggaataattaaatagttatcaacttgtttaattaacctaaattgtattgggctttatttaatataaatttgtatatgtagaagaaaaagcgtaaaatactggtataacaaattaaatcattatatagtcaacttagttgcattattttgatttttaatatattatgcatttaatttaatcaaataggtaggttattattttttacctaactaccattcatacaaaatataaataagtatgatagggaagggtgagataattttttgtaccaaaatgaaaatttttttcaaaaataaaaaactagcaatctcacatgatgtgaattgctagtatatatcagtacaatttatttaa

SEQ ID NO: 5262 - DNA, 587 bp, Staphylococcus aureus
ttaaataaattgtactgatatatactagcaattcacatcatgtgagattgctagttttttatttttgaaaaaaattttcattttggtacaaaaaattatctcacccttccctatcatacttatttatattttgtatgaatggtagttaggtaaaaaataataacctacctatttgattaaattaaatgcataatatattaaaaatcaaaataatgcaactaagttgactatataatgatttaatttgttataccagtattttacgctttttcttctacatatacaaatttatattaaataaagcccaatacaatttaggttaattaaacaagttgataactatttaattattccttcattgaagaatataaactattaaatcattattttacgcttacttatattttaatgacctaactgtttatgttccatggaataaatttataacttagccccctaattaaaatgctttgtcttggtcattctacgtaaattctataaaatatgttatctacttacataaaaaaatgaacttcaataccaccatatgtttgtgatactgaagttcagtttagttttattttcaa

SEQ ID NO: 5263 - DNA, 360 bp, Staphylococcus aureus
agggactcctccttaaaattaagttttactacttttaaaaattattaagacaatttatatagtaaattaagttttcgttttatattacgatttccatattatcaaaaataagtagctttgtgtggtttgttattatcttgtaatattattaacattttaggatatcggttcatatttttataaatgctgatttgatagtgtataaaagcgttttagtgattttaactaattataaaaaattatattttgtaacattgtaaaatgtaaaattactatacttgttaaaggttatttcttttgatgaagcaaaatttactgtaaaatttgacgcataaaacgacggtagaaggaggaattatt

SEQ ID NO: 5264 - DNA, 360 bp, Staphylococcus aureus
aataattcctccttctaccgtcgttttatgcgtcaaattttacagtaaattttgcttcatcaaaagaaataacctttaacaagtatagtaattttacattttacaatgttacaaaatataattttttataattagttaaaatcactaaaacgcttttatacactatcaaatcagcatttataaaaatatgaaccgatatcctaaaatgttaataatattacaagataataacaaaccacacaaagctacttatttttgataatatggaaatcgtaatataaaacgaaaacttaatttactatataaattgtcttaataatttttaaaagtagtaaaacttaattttaaggaggagtccct

SEQ ID NO: 5265 - DNA, 696 bp, Staphylococcus aureus
acagttaaattaataaagaaatttgtataaagttttggaataatcaataatgaatatcaaccttaaattggagcgattgtcataaattagaaatttagatagagattttactgataaagcaataaaaatttattaccttaattgtaaagatattattaatcattaaaatgattaactgctatagttctaaagtaaacaaatcttagaagataaactttaaacaggtgtacttgcctttctaattacacttttattagaaaagtaaagtatagctacgtattaattttaaaatcgaaatattaataggaagaagtatagataatataaacaatttaatgttagtttgagctcatctcaaaagtagaatgtgatttaaataagtgtttatttttaaattgaaaatgaatatataactaacaaaagataatagtaatacgttgtagatgtggtcatttaaaattattttgaaaatactaaaaagtagtgtgttttcaattggatagtttaattaaactgactacatctatttttgtaatatttaaatgattgatatataagtttaaaaattaaccattatatagttttatttatttttgatttggtattcgtattgtgttaaatttacgtttaattaaataagttaaatattatagggaatgataaaagtggtacttaaatatagaaagaggtaaagtt

SEQ ID NO: 5266 - DNA, 696 bp, Staphylococcus aureus
aactttacctctttctatatttaagtaccacttttatcattccctataatatttaacttatttaattaaacgtaaatttaacacaatacgaataccaaatcaaaaataaataaaactatataatggttaatttttaaacttatatatcaatcatttaaatattacaaaaatagatgtagtcagtttaattaaactatccaattgaaaacacactactttttagtattttcaaaataattttaaatgaccacatctacaacgtattactattatcttttgttagttatatattcattttcaatttaaaaataaacacttatttaaatcacattctacttttgagatgagctcaaactaacattaaattgtttatattatctatacttcttcctattaatatttcgattttaaaattaatacgtagctatactttacttttctaataaaagtgtaattagaaaggcaagtacacctgtttaaagtttatcttctaagatttgtttactttagaactatagcagttaatcattttaatgattaataatatctttacaattaaggtaataaatttttattgctttatcagtaaaatctctatctaaatttctaatttatgacaatcgctccaatttaaggttgatattcattattgattattccaaaactttatacaaatttctttattaatttaactgt

SEQ ID NO: 5267 - DNA, 79 bp, Staphylococcus aureus
caccttgatatgtattgcaaaatttaatttgcatttgttggtaattttgacaacgtattaaaaacaaatgagaaagaca

SEQ ID NO: 5268 - DNA, 79 bp, Staphylococcus aureus
tgtctttctcatttgtttttaatacgttgtcaaaattaccaacaaatgcaaattaaattttgcaatacatatcaaggtg

SEQ ID NO: 5269 - DNA, 243 bp, Staphylococcus aureus
ttgaaattgagtgtcgaaagcatagaatttgcttatcggcacatttttaatttatacatattttaaaactaagtaacagtttgaaggaatcgtagttcaataatgttaattgtgaaaatgtatataaacataaaaaaatcatgtataatatatgttgttaattaaacagttcgaaagcgagatgacattatgggacgtaaatggaataacattaaagaaaaaaaggcccaaaaagataaaaac

SEQ ID NO: 5270 - DNA, 243 bp, Staphylococcus aureus
gtttttatctttttgggcctttttttctttaatgttattccatttacgtcccataatgtcatctcgctttcgaactgtttaattaacaacatatattatacatgatttttttatgtttatatacattttcacaattaacattattgaactacgattccttcaaactgttacttagttttaaaatatgtataaattaaaaatgtgccgataagcaaattctatgctttcgacactcaatttcaa

SEQ ID NO: 5271 - DNA, 89 bp, Staphylococcus aureus
aaatgatcaatgaagtggtttgaaggttgttaataaacctttgagtcacttcatttttatatgtattcttgattgaatcagaatagatt

SEQ ID NO: 5272 - DNA, 89 bp, Staphylococcus aureus
aatctattctgattcaatcaagaatacatataaaaatgaagtgactcaaaggtttattaacaaccttcaaaccacttcattgatcattt

SEQ ID NO: 5273 - DNA, 147 bp, Staphylococcus aureus
taatattgtctattttaagtaaattgaagcgagttgtagtaaaataataataaatattttcatatgattaacaaaaactataaaactgtatcatgacatgacatcatttatgtagttttatataataatgacaaggagttggtggct

SEQ ID NO: 5274 - DNA, 147 bp, Staphylococcus aureus
agccaccaactccttgtcattattatataaaactacataaatgatgtcatgtcatgatacagttttatagtttttgttaatcatatgaaaatatttattattattttactacaactcgcttcaatttacttaaaatagacaatatta

SEQ ID NO: 5275 - DNA, 92 bp, Staphylococcus aureus
gtaattcaagctgcagccatgccaataaaattggtgaaattattcgttagtaatgaactcatgaatgcttgtagccatgaaagttcaataat

SEQ ID NO: 5276 - DNA, 92 bp, Staphylococcus aureus
attattgaactttcatggctacaagcattcatgagttcattactaacgaataatttcaccaattttattggcatggctgcagcttgaattac

SEQ ID NO: 5277 - DNA, 60 bp, Staphylococcus aureus
ttttagactaatttaaggtttgtatttaattttaaactattcggttaaattgaacgtagt

SEQ ID NO: 5278 - DNA, 60 bp, Staphylococcus aureus
actacgttcaatttaaccgaatagtttaaaattaaatacaaaccttaaattagtctaaaa

SEQ ID NO: 5279 - DNA, 98 bp, Staphylococcus aureus
taaaaagcttattgcaaaatatgtttttcggtaactgtaatttagtgattttatcattaacagtaccaaattcgcatatgatgtaataagctttttgt

SEQ ID NO: 5280 - DNA, 98 bp, Staphylococcus aureus
acaaaaagcttattacatcatatgcgaatttggtactgttaatgataaaatcactaaattacagttaccgaaaaacatattttgcaataagcttttta

SEQ ID NO: 5281 - DNA, 126 bp, Staphylococcus aureus
tgttacttaagcgctcctttaaaaatgtttaattcctaattaaaatggaaatgattttatagtattaataaagtcaatcatatcatattaaacgcataaatataacgattaatattggagaggaaa

SEQ ID NO: 5282 - DNA, 126 bp, Staphylococcus aureus
tttcctctccaatattaatcgttatatttatgcgtttaatatgatatgattgactttattaatactataaaatcatttccattttaattaggaattaaacatttttaaaggagcgcttaagtaaca

SEQ ID NO: 5283 - DNA, 66 bp, Staphylococcus aureus
aattaggattatgttgctaattcatgttaaaattaaaaaagatttaatgacgttaaggagttttat

SEQ ID NO: 5284 - DNA, 66 bp, Staphylococcus aureus
ataaaactccttaacgtcattaaatcttttttaattttaacatgaattagcaacataatcctaatt

SEQ ID NO: 5285 - DNA, 137 bp, Staphylococcus aureus
tcgtattgcttacttgttatagatgaaaggtacagcgttttaaaccttattttaagggtatgtattaattaaaatgtggtcatgattgaaacagaacgtaaaaatagacaacgtaattaataaaggagagaaacggc

SEQ ID NO: 5286 - DNA, 137 bp, Staphylococcus aureus
gccgtttctctcctttattaattacgttgtctatttttacgttctgtttcaatcatgaccacattttaattaatacatacccttaaaataaggtttaaaacgctgtacctttcatctataacaagtaagcaatacga

SEQ ID NO: 5287 - DNA, 79 bp, Staphylococcus aureus
actgctatctaaaacgcaaagttgatcaaaatatcgattttgtgttttttattgagaaattatataggagtgtcaatcg

SEQ ID NO: 5288 - DNA, 79 bp, Staphylococcus aureus
cgattgacactcctatataatttctcaataaaaaacacaaaatcgatattttgatcaactttgcgttttagatagcagt

SEQ ID NO: 5289 - DNA, 95 bp, Staphylococcus aureus
aaaatttatacataatcgtaacaaacacccctaacattgtttagctgatgataacaatattaggggtgtttgtttattttttaaccttagaatga

SEQ ID NO: 5290 - DNA, 95 bp, Staphylococcus aureus
tcattctaaggttaaaaaataaacaaacacccctaatattgttatcatcagctaaacaatgttaggggtgtttgttacgattatgtataaatttt

SEQ ID NO: 5291 - DNA, 218 bp, Staphylococcus aureus
aatgtacccactttcattactcaatttaatttatttaaatatcaaaattaccatatcatgatagcatattcatttaaagacatgctagttatagttataatactagactaaagatgtatatattcattttcttttacatgtaaaactacaatattttattgagctatttaatttgattttaaggaaaaccttttataataggtttaggtgatataatt

SEQ ID NO: 5292 - DNA, 218 bp, Staphylococcus aureus
aattatatcacctaaacctattataaaaggttttccttaaaatcaaattaaatagctcaataaaatattgtagttttacatgtaaaagaaaatgaatatatacatctttagtctagtattataactataactagcatgtctttaaatgaatatgctatcatgatatggtaattttgatatttaaataaattaaattgagtaatgaaagtgggtacatt

SEQ ID NO: 5293 - DNA, 126 bp, Staphylococcus aureus
aaaaactgcttgataggctaagaaacctttcaagcagttttttaactaacaagcttacgcgtgctaattgtttttctattcttaataaattctaaacattactttaattgtcatgacaaaagttaa

SEQ ID NO: 5294 - DNA, 126 bp, Staphylococcus aureus
ttaacttttgtcatgacaattaaagtaatgtttagaatttattaagaatagaaaaacaattagcacgcgtaagcttgttagttaaaaaactgcttgaaaggtttcttagcctatcaagcagttttt

SEQ ID NO: 5295 - DNA, 226 bp, Staphylococcus aureus
taaagttctcctccagacatactatccgtttttttctcttttcggattggtaatcattaaaaagttgattgtttattaattcacaactttctttgattcaatgccatgctaaaattaaagtatgtttaaagtttagaagatatttttgattaaatcaagcaaaaagataatttaatatatatgttatcatttttaaaaataactgtaatagaaaagagaatataaa

SEQ ID NO: 5296 - DNA, 226 bp, Staphylococcus aureus
tttatattctcttttctattacagttatttttaaaaatgataacatatatattaaattatctttttgcttgatttaatcaaaaatatcttctaaactttaaacatactttaattttagcatggcattgaatcaaagaaagttgtgaattaataaacaatcaactttttaatgattaccaatccgaaaagagaaaaaaacggatagtatgtctggaggagaacttta

SEQ ID NO: 5297 - DNA, 102 bp, Staphylococcus aureus
atcagaaaatgtgttgtttcaatttaacggaaatagcacattaatttcttaatacttttattgtgaatattttgtgacattgagggatggagtggatgagat

SEQ ID NO: 5298 - DNA, 102 bp, Staphylococcus aureus
atctcatccactccatccctcaatgtcacaaaatattcacaataaaagtattaagaaattaatgtgctatttccgttaaattgaaacaacacattttctgat

SEQ ID NO: 5299 - DNA, 282 bp, Staphylococcus aureus
atattaaaaagagactatctacaataatctcatttgcattttatctaactaagtttaacttttgcttagaaaaatgatgctatgaggatattcagtagatagtttttttatgatctaatatttaaacttagatatcgttttgtaattaaccgagataactcatcacctagcaatattatttacaaaatatttcgataaaattgtgtattttgcataaattaaaaatgtatgttttaaaaaattgttataattaaattaagattaaacaaaggggtgactgtt

SEQ ID NO: 5300 - DNA, 282 bp, Staphylococcus aureus
aacagtcacccctttgtttaatcttaatttaattataacaattttttaaaacatacatttttaatttatgcaaaatacacaattttatcgaaatattttgtaaataatattgctaggtgatgagttatctcggttaattacaaaacgatatctaagtttaaatattagatcataaaaaaactatctactgaatatcctcatagcatcatttttctaagcaaaagttaaacttagttagataaaatgcaaatgagattattgtagatagtctctttttaatat

SEQ ID NO: 5301 - DNA, 85 bp, Staphylococcus aureus
ttaaaaatataaataagaatctaggttattttaaagtgacaaaaagcttaataaaataaaaagataattgaagggtgttttgttt

SEQ ID NO: 5302 - DNA, 85 bp, Staphylococcus aureus
aaacaaaacacccttcaattatctttttattttattaagctttttgtcactttaaaataacctagattcttatttatatttttaa

SEQ ID NO: 5303 - DNA, 61 bp, Staphylococcus aureus
ttcggctcaattgatagatctggcatgagtaaaatctggagcagaatataaagttcttaag

SEQ ID NO: 5304 - DNA, 61 bp, Staphylococcus aureus
cttaagaactttatattctgctccagattttactcatgccagatctatcaattgagccgaa

SEQ ID NO: 5305 - DNA, 51 bp, Staphylococcus aureus
tggctttcctcaaatatataagttgtatttagttttcttattaaattgatg

SEQ ID NO: 5306 - DNA, 51 bp, Staphylococcus aureus
catcaatttaataagaaaactaaatacaacttatatatttgaggaaagcca

SEQ ID NO: 5307 - DNA, 182 bp, Staphylococcus aureus
taataaacactactttctaatgaaaaagttattcattcaaatgtgatagttataaacgcattcaattcctaattaaaaatttaatttaactcgttgaagtatattaataaacgagaatgcatttatgattaagcacttatgataacttgtaataaaatttgattcaactaaaaagtaaagtg

SEQ ID NO: 5308 - DNA, 182 bp, Staphylococcus aureus
cactttactttttagttgaatcaaattttattacaagttatcataagtgcttaatcataaatgcattctcgtttattaatatacttcaacgagttaaattaaatttttaattaggaattgaatgcgtttataactatcacatttgaatgaataactttttcattagaaagtagtgtttatta

SEQ ID NO: 5309 - DNA, 208 bp, Staphylococcus aureus
atgatcaatcccctttattttaatatgtcattaattatacaattaaatggaaaatagtgataattacaaagaaaaaatattgtcaaatgtagcaatgttgtaatacaatatagaaactttttacgaatatttagcatgaattgcaatctgtcgtggaaaagaagaataacagctttaagcatgacatggagaaaaaagaggtgagcat

SEQ ID NO: 5310 - DNA, 208 bp, Staphylococcus aureus
atgctcacctcttttttctccatgtcatgcttaaagctgttattcttcttttccacgacagattgcaattcatgctaaatattcgtaaaaagtttctatattgtattacaacattgctacatttgacaatattttttctttgtaattatcactattttccatttaattgtataattaatgacatattaaaataaaggggattgatcat

SEQ ID NO: 5311 - DNA, 292 bp, Staphylococcus aureus
cataagtattttggtgtatattgatataaagtaaagcgtaatattatgaatgattagcatcgtttttcttatgaattttattaagaaaattcgatgctttacatttaaaaagattcgattgactaaatgttttactctttatatttaaatgttatatgtaacaaaaaatgattttgagtaataaacatgttacaaatattacattctttttaaattgcaatccacatacctaattcattaacgttaatgtgttaagatgataaaaaatgagtaaggaaatgtgggtaagggg

SEQ ID NO: 5312 - DNA, 292 bp, Staphylococcus aureus
ccccttacccacatttccttactcattttttatcatcttaacacattaacgttaatgaattaggtatgtggattgcaatttaaaaagaatgtaatatttgtaacatgtttattactcaaaatcattttttgttacatataacatttaaatataaagagtaaaacatttagtcaatcgaatctttttaaatgtaaagcatcgaattttcttaataaaattcataagaaaaacgatgctaatcattcataatattacgctttactttatatcaatatacaccaaaatacttatg

SEQ ID NO: 5313 - DNA, 173 bp, Staphylococcus aureus
tagatggaacagtgtattctaattggatatactgtttttattttgcaataatttaatttaaaaaggtgaaatcaacttataaaatgatgtaaatgttatgtcaaaatcaaccaatccgtaatgtattttaaaatgttaatatagttctgaagaagtataaatgaggtgttgaa

SEQ ID NO: 5314 - DNA, 173 bp, Staphylococcus aureus
ttcaacacctcatttatacttcttcagaactatattaacattttaaaatacattacggattggttgattttgacataacatttacatcattttataagttgatttcacctttttaaattaaattattgcaaaataaaaacagtatatccaattagaatacactgttccatcta

SEQ ID NO: 5315 - DNA, 252 bp, Staphylococcus aureus
ttaataacaacaaaaagtatggggcaagattaggagtgtggcagagatgaaatttttataaaattcatttctgccacactcctttttgattgaattagcattttacgatcataaacagtcattataattgagtatttgaacataaaaatgtaattttatcgtcacaatttgggtgtttgtgattgtttttggtaatttatgattgaaaagtgaaagcgtactcattataatacaaagtgagatggggtgatg

SEQ ID NO: 5316 - DNA, 252 bp, Staphylococcus aureus
catcaccccatctcactttgtattataatgagtacgctttcacttttcaatcataaattaccaaaaacaatcacaaacacccaaattgtgacgataaaattacatttttatgttcaaatactcaattataatgactgtttatgatcgtaaaatgctaattcaatcaaaaaggagtgtggcagaaatgaattttataaaaatttcatctctgccacactcctaatcttgccccatactttttgttgttattaa

SEQ ID NO: 5317 - DNA, 307 bp, Staphylococcus aureus
ttttaatgatgtaaaatgattgttagcaaagagcttcatattaagttgtaagttcaatgaatatatgttagttttatacatcgtgttaacggtagcttatacaaagctgtaaaaacactttctattaattcagtttttatgaattgatatgaaggtgtttttatttttagataaatgaatgaagaaatagacaccacaaatgtatagacttttttaatattttgcaaaaagttatgccaaacgaagcagatatagtaaaatatgagtgtcttaaagtgaaaatttataaataaagaagggtttatac

SEQ ID NO: 5318 - DNA, 307 bp, Staphylococcus aureus
gtataaacccttctttatttataaattttcactttaagacactcatattttactatatctgcttcgtttggcataactttttgcaaaatattaaaaaagtctatacatttgtggtgtctatttcttcattcatttatctaaaaataaaaacaccttcatatcaattcataaaaactgaattaatagaaagtgtttttacagctttgtataagctaccgttaacacgatgtataaaactaacatatattcattgaacttacaacttaatatgaagctctttgctaacaatcattttacatcattaaaa

SEQ ID NO: 5319 - DNA, 220 bp, Staphylococcus aureus
taaataatcataattaaatgtatgcaatagatttaatctgttaacataagcactttatattatgataaaatagaagcaataacatttttttctgggggtgtctaaatgggaaggcgataacatgtagttgtaatttaagccatagtgataaatttgaatgcgtgttacccatgagtgacacatataacatggaggtgaatccctagaaatagggaattaa

SEQ ID NO: 5320 - DNA, 220 bp, Staphylococcus aureus
ttaattccctatttctagggattcacctccatgttatatgtgtcactcatgggtaacacgcattcaaatttatcactatggcttaaattacaactacatgttatcgccttcccatttagacacccccagaaaaaaatgttattgcttctattttatcataatataaagtgcttatgttaacagattaaatctattgcatacatttaattatgattattta

SEQ ID NO: 5321 - DNA, 221 bp, Staphylococcus aureus
atattaatatataaaccaactaagaatgatttaattcatttttggttggttatttttttgactaaaattaatgaaaagtgaaaatagtattggaactcaatatctttaatgatttaatgaatattttttattgaaagcgataattcgcattaattgagtttgttgaaaaatttagggtaatgtaaagatataaaagatacatagattggagagatataaag

SEQ ID NO: 5322 - DNA, 221 bp, Staphylococcus aureus
ctttatatctctccaatctatgtatcttttatatctttacattaccctaaatttttcaacaaactcaattaatgcgaattatcgctttcaataaaaaatattcattaaatcattaaagatattgagttccaatactattttcacttttcattaattttagtcaaaaaaataaccaaccaaaaatgaattaaatcattcttagttggtttatatattaatat

SEQ ID NO: 5323 - DNA, 131 bp, Staphylococcus aureus
ctggatgttaaattttacgtttatgaatgccttttaatgtgtacattaaaataaatgagttggtttttactatttgataaaacaatactcaggtacattcaaaatcttttaaataaaaaggatggacatag

SEQ ID NO: 5324 - DNA, 131 bp, Staphylococcus aureus
ctatgtccatcctttttatttaaaagattttgaatgtacctgagtattgttttatcaaatagtaaaaaccaactcatttattttaatgtacacattaaaaggcattcataaacgtaaaatttaacatccag

SEQ ID NO: 5325 - DNA, 71 bp, Staphylococcus aureus
acaaaaaaagaagccctcattaatgggagcttctttttagtctttgcattttattttataaataaatcgga

SEQ ID NO: 5326 - DNA, 71 bp, Staphylococcus aureus
tccgatttatttataaaataaaatgcaaagactaaaaagaagctcccattaatgagggcttctttttttgt

SEQ ID NO: 5327 - DNA, 333 bp, Staphylococcus aureus
attctttctatttattgtgtgtaatttatataaacataagattaagcaacataatgcgatttgtagtgttatgtgaacaggaagtgtttgagctcatgggttgcttaagctaaacaaacctcaagctctaaaaaaattttacttatgtgctctacaatcttatgggatttaatagttgtatatatattgaaaaaaggaaagtatgatttctacaagctaggggggctgtgaaatcatacgctttccattgagtaatgagtgtaatgtatatttttaaaatttgtaatgtatagtaatagtatgttgtatataaaagtttaactcagaaattga

SEQ ID NO: 5328 - DNA, 333 bp, Staphylococcus aureus
tcaatttctgagttaaacttttatatacaacatactattactatacattacaaattttaaaaatatacattacactcattactcaatggaaagcgtatgatttcacagcccccctagcttgtagaaatcatactttccttttttcaatatatatacaactattaaatcccataagattgtagagcacataagtaaaatttttttagagcttgaggtttgtttagcttaagcaacccatgagctcaaacacttcctgttcacataacactacaaatcgcattatgttgcttaatcttatgtttatataaattacacacaataaatagaaagaat

SEQ ID NO: 5329 - DNA, 279 bp, Staphylococcus aureus
gctaactcctcatttcttcaatttgataagttaagtttaaaatgaaggcaaataatatgccattaactaattcttaacttcgtttaaatatcgcttaactaatattgaagaaagaataatttgaaaatgaaaataattgtctgatttaaataaataggagtcaaaataagaggagggcatttttttaggtgagaaaatatttatctgaactagataacactataaaacacttctgatattttgaactaagaatatcagaagtgttttatagttttggta

SEQ ID NO: 5330 - DNA, 279 bp, Staphylococcus aureus
taccaaaactataaaacacttctgatattcttagttcaaaatatcagaagtgttttatagtgttatctagttcagataaatattttctcacctaaaaaaatgccctcctcttattttgactcctatttatttaaatcagacaattattttcattttcaaattattctttcttcaatattagttaagcgatatttaaacgaagttaagaattagttaatggcatattatttgccttcattttaaacttaacttatcaaattgaagaaatgaggagttagc

SEQ ID NO: 5331 - DNA, 98 bp, Staphylococcus aureus
gatggactcctgttcgttatacttcaatcaactattatatcaattaatatattgttattcattagatatgacttgtaaaaagtaaaataagttatcct

SEQ ID NO: 5332 - DNA, 98 bp, Staphylococcus aureus
aggataacttattttactttttacaagtcatatctaatgaataacaatatattaattgatataatagttgattgaagtataacgaacaggagtccatc

SEQ ID NO: 5333 - DNA, 350 bp, Staphylococcus aureus
tttgtaattgctcctatcattaataatattaataaagaggttaatggcattgataagcccgtttttaatttataaaataaaaaaagcctatctccataaaagatagacgaaagaaatgggttgctcctataatatatattaaaggtttaccaacgaatgtttgaaatttcaatgtctagttttttatagagggtttcagctagaaacctctgatattcatttatgtacgatgaatagaatataccatatattagttaaaatcaaggtcaggataatgacaatgcttttaaagttttagctacatccaatacatattataaaaataaaacacatttagaacggagtataca

SEQ ID NO: 5334 - DNA, 350 bp, Staphylococcus aureus
tgtatactccgttctaaatgtgttttatttttataatatgtattggatgtagctaaaactttaaaagcattgtcattatcctgaccttgattttaactaatatatggtatattctattcatcgtacataaatgaatatcagaggtttctagctgaaaccctctataaaaaactagacattgaaatttcaaacattcgttggtaaacctttaatatatattataggagcaacccatttctttcgtctatcttttatggagataggctttttttattttataaattaaaaacgggcttatcaatgccattaacctctttattaatattattaatgataggagcaattacaaa

SEQ ID NO: 5335 - DNA, 65 bp, Staphylococcus aureus
aattagtatgataataaagtagaaaatgatgtgaaaacaaatttaaaaattaaatggggccaaat

SEQ ID NO: 5336 - DNA, 65 bp, Staphylococcus aureus
atttggccccatttaatttttaaatttgttttcacatcattttctactttattatcatactaatt

SEQ ID NO: 5337 - DNA, 87 bp, Staphylococcus aureus
atttagtgagtaggtaaaacgaactattcaatcgattctataattaaaaatgaaagtaaagtaaccaaatattgaagaggtgtacaa

SEQ ID NO: 5338 - DNA, 87 bp, Staphylococcus aureus
ttgtacacctcttcaatatttggttactttactttcatttttaattatagaatcgattgaatagttcgttttacctactcactaaat

SEQ ID NO: 5339 - DNA, 473 bp, Staphylococcus aureus
tatttggtacgtagctcatactcgagtccgatgcaaataatttcctcctaatgtataatgaaataatactgtgttttatctgcgaaatgtatcattttctaattcgtttcacagtaaaatgaaaagataaagtgtgtttttacttgaattttgactaaaattactctatatttattaattgagctatgcttattattacaatttgattacaaattttaaatttgttaattgaatgataatattaaataaagaaacttacacaagcaaatatgagttgtagcccaaaatacttgttaaatcaaagttgaaagctacaagtaatgaaaattataaacttgaatctgaaagtaattactataattatgacaatgttaacttttaaacgcacttattaattaactacataatgttaatatctaatttattcaagtactttcgcaagatttattatctaaataacgggggaaagaatc

SEQ ID NO: 5340 - DNA, 473 bp, Staphylococcus aureus
gattctttcccccgttatttagataataaatcttgcgaaagtacttgaataaattagatattaacattatgtagttaattaataagtgcgtttaaaagttaacattgtcataattatagtaattactttcagattcaagtttataattttcattacttgtagctttcaactttgatttaacaagtattttgggctacaactcatatttgcttgtgtaagtttctttatttaatattatcattcaattaacaaatttaaaatttgtaatcaaattgtaataataagcatagctcaattaataaatatagagtaattttagtcaaaattcaagtaaaaacacactttatcttttcattttactgtgaaacgaattagaaaatgatacatttcgcagataaaacacagtattatttcattatacattaggaggaaattatttgcatcggactcgagtatgagctacgtaccaaata

SEQ ID NO: 5341 - DNA, 275 bp, Staphylococcus aureus
tatttaaacacgaactcggattgataaaatatcaatccgggttttattatgttcttttatattatgttttacagtatatgtgttgataaaaaggtatattataaaaatcattagcatagtcatcaaagccttatcaagttttatttatagttgaagcaacaatatattaaattatgacacttaacggtatcgatttcttttgatttcaaaaaggtgtataatgtatagaactgatttaagtacgtagagatttcaacagaagaaggaagatgggt

SEQ ID NO: 5342 - DNA, 275 bp, Staphylococcus aureus
acccatcttccttcttctgttgaaatctctacgtacttaaatcagttctatacattatacacctttttgaaatcaaaagaaatcgataccgttaagtgtcataatttaatatattgttgcttcaactataaataaaacttgataaggctttgatgactatgctaatgatttttataatatacctttttatcaacacatatactgtaaaacataatataaaagaacataataaaacccggattgatattttatcaatccgagttcgtgtttaaata

SEQ ID NO: 5343 - DNA, 221 bp, Staphylococcus aureus
tgaaggcacctagtaagcattccttgttttactgggtgtttttttgaattcaaggtaaaataacactatttcttaactggagattacctattattcattattttgttaaaaaagttcaaggataaatcatttaaatttgaaaattgtaataaacgtggttaaatagggaatacatacatataatctcggttttatgctatgagaaaaaaagaggtggcaaa

SEQ ID NO: 5344 - DNA, 221 bp, Staphylococcus aureus
tttgccacctctttttttctcatagcataaaaccgagattatatgtatgtattccctatttaaccacgtttattacaattttcaaatttaaatgatttatccttgaacttttttaacaaaataatgaataataggtaatctccagttaagaaatagtgttattttaccttgaattcaaaaaaacacccagtaaaacaaggaatgcttactaggtgccttca

SEQ ID NO: 5345 - DNA, 144 bp, Staphylococcus aureus
cgaccaacgccacataagatgcgtaacaccaaattatatcttatgtggcgttgttatatttaaatctataattatgttcaatttaaacatgcaataatgattaaaaaatatgacatgttaaacacaatgtaagctattatgatg

SEQ ID NO: 5346 - DNA, 144 bp, Staphylococcus aureus
catcataatagcttacattgtgtttaacatgtcatattttttaatcattattgcatgtttaaattgaacataattatagatttaaatataacaacgccacataagatataatttggtgttacgcatcttatgtggcgttggtcg

SEQ ID NO: 5347 - DNA, 132 bp, Staphylococcus aureus
tcaagctcaatgcagtgtgaatgatgaggtgagagtattcagtgtaaaaagcaacaatagatgatattgttttgtatcaattgcttttttgctatactgaatcaatactgatattttgaggagaagattaaa

SEQ ID NO: 5348 - DNA, 132 bp, Staphylococcus aureus
tttaatcttctcctcaaaatatcagtattgattcagtatagcaaaaaagcaattgatacaaaacaatatcatctattgttgctttttacactgaatactctcacctcatcattcacactgcattgagcttga

SEQ ID NO: 5349 - DNA, 113 bp, Staphylococcus aureus
aatatatcacttgaaaaatttcatgtagaaaagatgatggataggctataaagtaattgtgactgagatgaacttttatgtcttagacactacaacactatattggcagtagt

SEQ ID NO: 5350 - DNA, 113 bp, Staphylococcus aureus
actactgccaatatagtgttgtagtgtctaagacataaaagttcatctcagtcacaattactttatagcctatccatcatcttttctacatgaaatttttcaagtgatatatt

SEQ ID NO: 5351 - DNA, 293 bp, Staphylococcus aureus
ccgtcccgctctcaataaatgttagtctatctcattattataaatcggatgaatgtgttaatctatggcagattacacgtcatccgattttttatagaatttgaaaaagacgcataaaccactatgatttaaaatacaacatcaatcattttagtggcatgcgccaaaattatatgtctgtttttgaaacagggtaatagcttaaagctaataaaaacgaatataaggtgcgttgaatcttatgattacactccaaacctaatataatatcgggtcaagatcattccggatgc

SEQ ID NO: 5352 - DNA, 293 bp, Staphylococcus aureus
gcatccggaatgatcttgacccgatattatattaggtttggagtgtaatcataagattcaacgcaccttatattcgtttttattagctttaagctattaccctgtttcaaaaacagacatataattttggcgcatgccactaaaatgattgatgttgtattttaaatcatagtggtttatgcgtctttttcaaattctataaaaaatcggatgacgtgtaatctgccatagattaacacattcatccgatttataataatgagatagactaacatttattgagagcgggacgg

SEQ ID NO: 5353 - DNA, 269 bp, Staphylococcus aureus
agtttagcctactttctaaaaattggttcattaaatatatatacccacttttaattgttaataccaaaaatatgtttttaaatagagaaaatggtaataactgacattgatgtctatagagtgggacgagaaaatatagttatagctgtctataacgagcatattaagcttttatttatactgatatcttgaatttaattaatagaaacctataaaaaaacagtaagccatttaaatgacttactgttttttgaattaggccaacaata

SEQ ID NO: 5354 - DNA, 269 bp, Staphylococcus aureus
tattgttggcctaattcaaaaaacagtaagtcatttaaatggcttactgtttttttataggtttctattaattaaattcaagatatcagtataaataaaagcttaatatgctcgttatagacagctataactatattttctcgtcccactctatagacatcaatgtcagttattaccattttctctatttaaaaacatatttttggtattaacaattaaaagtgggtatatatatttaatgaaccaatttttagaaagtaggctaaact

SEQ ID NO: 5355 - DNA, 340 bp, Staphylococcus aureus
gtatacatcccatcctttcttcccctaatacaatagtttaagtaaatttgattgtgccttatcaactaaatattccaacaaatcacaaaaaaataaaaatattgagaatattctgttattaagcgcgcacaattaattagagataatataaaaatatacttattgacgttaaagtgcaataggtttctataaaaatgttgtttaattcgtgtactaatattcttttggtgtactttggtataaaatgttattttaatgtaacctattatgtatgctaaatgaaaaacacaccaataagttaggaaaatcaacttattggtgtgtttattaaatgatacat

SEQ ID NO: 5356 - DNA, 340 bp, Staphylococcus aureus
atgtatcatttaataaacacaccaataagttgattttcctaacttattggtgtgtttttcatttagcatacataataggttacattaaaataacattttataccaaagtacaccaaaagaatattagtacacgaattaaacaacatttttatagaaacctattgcactttaacgtcaataagtatatttttatattatctctaattaattgtgcgcgcttaataacagaatattctcaatatttttatttttttgtgatttgttggaatatttagttgataaggcacaatcaaatttacttaaactattgtattaggggaagaaaggatgggatgtatac

SEQ ID NO: 5357 - DNA, 421 bp, Staphylococcus aureus
ttttatcgcctcttttatataaaattaacgtatttatattagcataaaacaacatgttgtgcataaatagttgaaatttactataaaaagactataatagactgtaccgaacaaacgttctgtgtttatttgtcggaataatagggcattacacttttatgaatgtttgtgttattacataaaacaaatatcaattcagtatcaagctaataagctttttcttgatttctgttgatacaattgagattgacacagatttaaaaaaatcaagtgatatctactaaaaaatttttttaaatttgttcaagtttttctaatttagtattggtgcctagttggaacgttttacgaacattcgattagaaaatggcactttaaatcatagtgtgtcttatgtataatgaaacacataatatagtgt

SEQ ID NO: 5358 - DNA, 421 bp, Staphylococcus aureus
acactatattatgtgtttcattatacataagacacactatgatttaaagtgccattttctaatcgaatgttcgtaaaacgttccaactaggcaccaatactaaattagaaaaacttgaacaaatttaaaaaaattttttagtagatatcacttgatttttttaaatctgtgtcaatctcaattgtatcaacagaaatcaagaaaaagcttattagcttgatactgaattgatatttgttttatgtaataacacaaacattcataaaagtgtaatgccctattattccgacaaataaacacagaacgtttgttcggtacagtctattatagtctttttatagtaaatttcaactatttatgcacaacatgttgttttatgctaatataaatacgttaattttatataaaagaggcgataaaa

SEQ ID NO: 5359 - DNA, 220 bp, Staphylococcus aureus
taatagtcatatttttagaaaatgtactgagcaaatggaagatatccaatgatgtaaatactacatatagtgatttttatacattcaacccatataagctactattttctcaaatataaatctatgcaattggtttacatttgagaaaataagtagcttcattatagttaatacaatgctgagataaccatagtaaccatgttgttaaagcattttttaa

SEQ ID NO: 5360 - DNA, 220 bp, Staphylococcus aureus
ttaaaaaatgctttaacaacatggttactatggttatctcagcattgtattaactataatgaagctacttattttctcaaatgtaaaccaattgcatagatttatatttgagaaaatagtagcttatatgggttgaatgtataaaaatcactatatgtagtatttacatcattggatatcttccatttgctcagtacattttctaaaaatatgactatta

SEQ ID NO: 5361 - DNA, 117 bp, Staphylococcus aureus
caattaaatgttgaaaatgacaaacagctaatcatctggtctgaattagcagatgattagactgctatgtctgtatttgtcaattattgagtaacattacaggaggaaattatattc

SEQ ID NO: 5362 - DNA, 117 bp, Staphylococcus aureus
gaatataatttcctcctgtaatgttactcaataattgacaaatacagacatagcagtctaatcatctgctaattcagaccagatgattagctgtttgtcattttcaacatttaattg

SEQ ID NO: 5363 - DNA, 132 bp, Staphylococcus aureus
caattaaattaaaagaccttcacatgtaaagggaaatagcgattcgtttcgtcttgtctcctacatgttgaaggtcttttctctatgcttaaaagcgtatgcatattttgaaaaagtaaaaattgtatttaa

SEQ ID NO: 5364 - DNA, 132 bp, Staphylococcus aureus
ttaaatacaatttttactttttcaaaatatgcatacgcttttaagcatagagaaaagaccttcaacatgtaggagacaagacgaaacgaatcgctatttccctttacatgtgaaggtcttttaatttaattg

SEQ ID NO: 5365 - DNA, 118 bp, Staphylococcus aureus
taatttggagacactttaaaggggtgatgcgccaattaaagaagggttaaacgtaaagcatttatttatatttcacatcaagcacacagattaagccaaaagaggagaatattatatt

SEQ ID NO: 5366 - DNA, 118 bp, Staphylococcus aureus
aatataatattctcctcttttggcttaatctgtgtgcttgatgtgaaatataaataaatgctttacgtttaacccttctttaattggcgcatcacccctttaaagtgtctccaaatta

SEQ ID NO: 5367 - DNA, 197 bp, Staphylococcus aureus
ttttaaaagaggggaacaatggttaaaggtcttaatcattgctcccctcttttctttaaaaaaggaaatctgggacgtcaatcaatgtcctagactctaaaatgttctgttgtcagtcgttggttgaatgaacatgtacttgtaacaagttcatttcaataccagtgggctccaaacatagagaaatttgattttca

SEQ ID NO: 5368 - DNA, 197 bp, Staphylococcus aureus
tgaaaatcaaatttctctatgtttggagcccactggtattgaaatgaacttgttacaagtacatgttcattcaaccaacgactgacaacagaacattttagagtctaggacattgattgacgtcccagatttccttttttaaagaaaagaggggagcaatgattaagacctttaaccattgttcccctcttttaaaa

SEQ ID NO: 5369 - DNA, 55 bp, Staphylococcus aureus
gaagtggtgctttatcatgtctgacccactccctataatgttttgactatgttgt

SEQ ID NO: 5370 - DNA, 55 bp, Staphylococcus aureus
acaacatagtcaaaacattatagggagtgggtcagacatgataaagcaccacttc

SEQ ID NO: 5371 - DNA, 126 bp, Staphylococcus aureus
ttctcagtacatcctttctcatgtctttaatatcatatagtattataccaattttaaaattcatttgcgaaaattgaaaagaaagtattagaattagtataattataaaatacggcattattgtcg

SEQ ID NO: 5372 - DNA, 126 bp, Staphylococcus aureus
cgacaataatgccgtattttataattatactaattctaatactttcttttcaattttcgcaaatgaattttaaaattggtataatactatatgatattaaagacatgagaaaggatgtactgagaa

SEQ ID NO: 5373 - DNA, 119 bp, Staphylococcus aureus
gataaactcctttgatattgaaaattaatttaatcacgataaagtctggaatactataacataattcattttcataataaacatgtttttgtataatgaatctgttaaggagtgcaatc

SEQ ID NO: 5374 - DNA, 119 bp, Staphylococcus aureus
gattgcactccttaacagattcattatacaaaaacatgtttattatgaaaatgaattatgttatagtattccagactttatcgtgattaaattaattttcaatatcaaaggagtttatc

SEQ ID NO: 5375 - DNA, 153 bp, Staphylococcus aureus
ctataatcatttttcaaagttaaaaattttgaatttatggttaacatgtcaacttactatgtgtataatggtaaacattgatattaactatatgtataaaaatgtcacgcagatgctatttaaatgtgataaatatttttagaggtgaataga

SEQ ID NO: 5376 - DNA, 153 bp, Staphylococcus aureus
tctattcacctctaaaaatatttatcacatttaaatagcatctgcgtgacatttttatacatatagttaatatcaatgtttaccattatacacatagtaagttgacatgttaaccataaattcaaaatttttaactttgaaaaatgattatag

SEQ ID NO: 5377 - DNA, 423 bp, Staphylococcus aureus
tgaaactataggttggaacattttgccttacactactagacgtgaatagcacaacttaaattcgtgtgaatcagagtagtttggctataatgatgttctgaccttttattttatgtcacctttagaagcagttaagttagtacttttttacaaacatatgtataatgtattcgagtatttttattgaaaatattttggaaaacgacgaatccaataagaaaatttaaacatgatttgtaagttagtttaataggaaatatatgataaaccaaaagaagcatactgttatttactggaataattaataatcatgtcatgttaaatgttcgcatataatcacgagataaaatctaaaatttaagattaatcttttatgaataaaaaacgtatcacaacaaataataaagtaaggtggtcaaggtt

SEQ ID NO: 5378 - DNA, 423 bp, Staphylococcus aureus
aaccttgaccaccttactttattatttgttgtgatacgttttttattcataaaagattaatcttaaattttagattttatctcgtgattatatgcgaacatttaacatgacatgattattaattattccagtaaataacagtatgcttcttttggtttatcatatatttcctattaaactaacttacaaatcatgtttaaattttcttattggattcgtcgttttccaaaatattttcaataaaaatactcgaatacattatacatatgtttgtaaaaaagtactaacttaactgcttctaaaggtgacataaaataaaaggtcagaacatcattatagccaaactactctgattcacacgaatttaagttgtgctattcacgtctagtagtgtaaggcaaaatgttccaacctatagtttca

SEQ ID NO: 5379 - DNA, 186 bp, Staphylococcus aureus
taaagaaggactaaattgatgatgctgtcatgatggttaataacatttatgatggttagcaaaacgaattagaagatcgaaagtatacgtaaaaaatatgaaaaatcacgctatcattgcactgaatgttagcgtgatttttttattaattaagcctgagttgaactagtatataatcgtttgttt

SEQ ID NO: 5380 - DNA, 186 bp, Staphylococcus aureus
aaacaaacgattatatactagttcaactcaggcttaattaataaaaaaatcacgctaacattcagtgcaatgatagcgtgatttttcatattttttacgtatactttcgatcttctaattcgttttgctaaccatcataaatgttattaaccatcatgacagcatcatcaatttagtccttcttta

SEQ ID NO: 5381 - DNA, 195 bp, Staphylococcus aureus
atcaattcacctccaatgatatgtgttatttatttgaacaattgaagtttacaacttgttgttacaactttcaatagtgagactttgtgttagtatgatgaacttgtatggttcaaatttaaataagaaaaactgttaatctttgctattatactatgatttaataatagcaaaggattaacagttttgtcgttg

SEQ ID NO: 5382 - DNA, 195 bp, Staphylococcus aureus
caacgacaaaactgttaatcctttgctattattaaatcatagtataatagcaaagattaacagtttttcttatttaaatttgaaccatacaagttcatcatactaacacaaagtctcactattgaaagttgtaacaacaagttgtaaacttcaattgttcaaataaataacacatatcattggaggtgaattgat

SEQ ID NO: 5383 - DNA, 317 bp, Staphylococcus aureus
gtctgaatcgactcctttaattgaccactagctattgtaagtgaaaacttacaatttgtcattagtttacatataaaattaatgtatgatatagactttgatgttaaaatgttgccttaaatgatatgatgaaaaaatgaataataggcgatatataagaaatgaatcgtatagttgtaaatatgatatcattgattgagcgaattaatttataataaagctataagatatacgtagaaaatagatatatcattctataaagacaatattaaataaatataacgttaaaaacaattaatatcgatgaaggtgaataa

SEQ ID NO: 5384 - DNA, 317 bp, Staphylococcus aureus
ttattcaccttcatcgatattaattgtttttaacgttatatttatttaatattgtctttatagaatgatatatctattttctacgtatatcttatagctttattataaattaattcgctcaatcaatgatatcatatttacaactatacgattcatttcttatatatcgcctattattcattttttcatcatatcatttaaggcaacattttaacatcaaagtctatatcatacattaattttatatgtaaactaatgacaaattgtaagttttcacttacaatagctagtggtcaattaaaggagtcgattcagac

SEQ ID NO: 5385 - DNA, 164 bp, Staphylococcus aureus
attttaaaacagtaagtaataaaataaaaaaatgatgtctgtacttttatgttgttataaaggaagacatactcacaaaaaacactagcatggaacgtgctttccaaattgcaaagtaacaatacgcaattagagttagccctcctaagctagtgtttttattt

SEQ ID NO: 5386 - DNA, 164 bp, Staphylococcus aureus
aaataaaaacactagcttaggagggctaactctaattgcgtattgttactttgcaatttggaaagcacgttccatgctagtgttttttgtgagtatgtcttcctttataacaacataaaagtacagacatcatttttttattttattacttactgttttaaaat

SEQ ID NO: 5387 - DNA, 143 bp, Staphylococcus aureus
aataactccttaattcataagcttaagattatttaatcttcattatacactgaaaatgacatgactataaatcgtttgattgccattttctttttaactgaaatattgtatcattgctatgagtatattttaggaggacgact

SEQ ID NO: 5388 - DNA, 143 bp, Staphylococcus aureus
agtcgtcctcctaaaatatactcatagcaatgatacaatatttcagttaaaaagaaaatggcaatcaaacgatttatagtcatgtcattttcagtgtataatgaagattaaataatcttaagcttatgaattaaggagttatt

SEQ ID NO: 5389 - DNA, 230 bp, Staphylococcus aureus
ttataaaattttaataaaagagtctatattgtaattggaaattatctctcgtatacatggctttaaatgttcatcatttgaaagtcaaaatgctaaagatataagaaaatcattataatattaggctcttttttacgttgaaatgaggttttaagcattaaacattacgggaaattaattcatcctcatacttcacttactaatgaaaaaataaaaaaagaagtaacagg

SEQ ID NO: 5390 - DNA, 230 bp, Staphylococcus aureus
cctgttacttctttttttattttttcattagtaagtgaagtatgaggatgaattaatttcccgtaatgtttaatgcttaaaacctcatttcaacgtaaaaaagagcctaatattataatgattttcttatatctttagcattttgactttcaaatgatgaacatttaaagccatgtatacgagagataatttccaattacaatatagactcttttattaaaattttataa

SEQ ID NO: 5391 - DNA, 60 bp, Staphylococcus aureus
cgtaaaaatgttaaaatataataaagagttaccaataaagaggtttaaggagagattact

SEQ ID NO: 5392 - DNA, 60 bp, Staphylococcus aureus
agtaatctctccttaaacctctttattggtaactctttattatattttaacatttttacg

SEQ ID NO: 5393 - DNA, 413 bp, Staphylococcus aureus
attaagtttaaagcacttgtgtttttgcacaagtgcttttttatactccaaaagcaaattatgactatttcatagttcgataatgtaatttgttgaatgaaacatagtgactatgctaatgttaatggatgtatatatttgaatgttaagttaataatagtatgtcagtctattgtatagtccgagtcgaaaatcgtaaaatatttataatataatttattaggaagtataattgcgtattgagaatatatttattagtgataaacttgttgacaacagaatgtgaatgaagtatgtcataaatatatttatattgattccacaaatgagtaaataagtataattttctaactataaatgataagatatattgttgtaggccaaacagttttttagctaaaggagcgaacgaa

SEQ ID NO: 5394 - DNA, 413 bp, Staphylococcus aureus
ttcgttcgctcctttagctaaaaaactgtttggcctacaacaatatatcttatcatttatagttagaaaattatacttatttactcatttgtggaatcaatataaatatatttatgacatacttcattcacattctgttgtcaacaagtttatcactaataaatatattctcaatacgcaattatacttcctaataaattatattataaatattttacgattttcgactcggactatacaatagactgacatactattattaacttaacattcaaatatatacatccattaacattagcatagtcactatgtttcattcaacaaattacattatcgaactatgaaatagtcataatttgcttttggagtataaaaaagcacttgtgcaaaaacacaagtgctttaaacttaat

SEQ ID NO: 5395 - DNA, 289 bp, Staphylococcus aureus
taggcatatgtcgatgataaatgtactgatttttaacaataaaagcataaactaattgtcagtgtgcttatatttcttaacattgttatttaacaaaattatgttaaaatttagcattataaaagatacaaatcaatgacttgaattgaaatttaaataggagcgaaggctatggaattatcagaaatcaaacgaaatatagataagtataatcaagatttaacacaaattagggggtctctttgacttagagaacaaagaaactaatatccaagaatatgaagaaatg

SEQ ID NO: 5396 - DNA, 289 bp, Staphylococcus aureus
catttcttcatattcttggatattagtttctttgttctctaagtcaaagagaccccctaatttgtgttaaatcttgattatacttatctatatttcgtttgatttctgataattccatagccttcgctcctatttaaatttcaattcaagtcattgatttgtatcttttataatgctaaattttaacataattttgttaaataacaatgttaagaaatataagcacactgacaattagtttatgcttttattgttaaaaatcagtacatttatcatcgacatatgccta

SEQ ID NO: 5397 - DNA, 154 bp, Staphylococcus aureus
tatatattttaaaaccgaggctctaaaagggcgtcggtttttggtttttttaaaggtagctaaataaattgtaaattagattttggaatatgatttgtttatgaatatttaagtacaattcggtagatagagttagaatatattttttaaaagt

SEQ ID NO: 5398 - DNA, 154 bp, Staphylococcus aureus
acttttaaaaaatatattctaactctatctaccgaattgtacttaaatattcataaacaaatcatattccaaaatctaatttacaatttatttagctacctttaaaaaaaccaaaaaccgacgcccttttagagcctcggttttaaaatatata

SEQ ID NO: 5399 - DNA, 150 bp, Staphylococcus aureus
tgaatacattttacactatgataaaaggttgtattctttttatattgttaaccatttgattacatcgttataacaatagcttttgacaaaatgtattgtgctatagtatttgcatacttaaaatactaacagcaaaggaatgacagcaag

SEQ ID NO: 5400 - DNA, 150 bp, Staphylococcus aureus
cttgctgtcattcctttgctgttagtattttaagtatgcaaatactatagcacaatacattttgtcaaaagctattgttataacgatgtaatcaaatggttaacaatataaaaagaatacaaccttttatcatagtgtaaaatgtattca

SEQ ID NO: 5401 - DNA, 173 bp, Staphylococcus aureus
gtaatatatcaagacaagactatcctcttagcctgtttaagtaacaggttgagaggattttttggtatcatttaatcagagttatataaagaagatatttaaatgatatttaattgattgatatgtaaaaagaaagtataatttatgattaattaatggaggaggtaattgaa

SEQ ID NO: 5402 - DNA, 173 bp, Staphylococcus aureus
ttcaattacctcctccattaattaatcataaattatactttctttttacatatcaatcaattaaatatcatttaaatatcttctttatataactctgattaaatgataccaaaaaatcctctcaacctgttacttaaacaggctaagaggatagtcttgtcttgatatattac

SEQ ID NO: 5403 - DNA, 221 bp, Staphylococcus aureus
gattaactttaaaataatgtttcaaacaaatttgttgaaacaaaacgatgattaatataatgtgtatttacatactaaaaataacaagataaacgatttgatttaaggcaagcatagttagcacaactatgtttgtttttctttgttcgacatttttacgaacaaacgtttgctttttgtgtggctactttgctaaaatatgtaatgagaaagcgaagagt

SEQ ID NO: 5404 - DNA, 221 bp, Staphylococcus aureus
actcttcgctttctcattacatattttagcaaagtagccacacaaaaagcaaacgtttgttcgtaaaaatgtcgaacaaagaaaaacaaacatagttgtgctaactatgcttgccttaaatcaaatcgtttatcttgttatttttagtatgtaaatacacattatattaatcatcgttttgtttcaacaaatttgtttgaaacattattttaaagttaatc

SEQ ID NO: 5405 - DNA, 310 bp, Staphylococcus aureus
gattaaaagaagtgaagggtgttgtaaatttacccttcacttctttttattaatttagtaatgaatagtagaaagaaaagatgcgtaaaaagaattatgttaagatagggtcaatctagagttgctaaacataaatcgaaactgagagtgggacagaaatgataaagaatcactaatgatttattatgtagtggttctttgtcattagccacagctattgtgtacttaaaaataggaatgcatgagtgcaactcatgcataagaaatactaatttctaaagaaaaagtatttctttatgttggggcccac

SEQ ID NO: 5406 - DNA, 310 bp, Staphylococcus aureus
gtgggccccaacataaagaaatactttttctttagaaattagtatttcttatgcatgagttgcactcatgcattcctatttttaagtacacaatagctgtggctaatgacaaagaaccactacataataaatcattagtgattctttatcatttctgtcccactctcagtttcgatttatgtttagcaactctagattgaccctatcttaacataattctttttacgcatcttttctttctactattcattactaaattaataaaaagaagtgaagggtaaatttacaacacccttcacttcttttaatc

SEQ ID NO: 5407 - DNA, 236 bp, Staphylococcus aureus
aattacaatatatcattgtagagcttaggtcattgatttatggctcggacttttatggcgatatgaaccatgtaaattaagcaagcaataaattaatgattgatattgacttgtaaaataataacaataatgaacaattaatatttattttagcttttcaatgtagattggtgttatatttttgatatgataagaagagatgtaagagtagggataaatacaattgaggtgaaccc

SEQ ID NO: 5408 - DNA, 236 bp, Staphylococcus aureus
gggttcacctcaattgtatttatccctactcttacatctcttcttatcatatcaaaaatataacaccaatctacattgaaaagctaaaataaatattaattgttcattattgttattattttacaagtcaatatcaatcattaatttattgcttgcttaatttacatggttcatatcgccataaaagtccgagccataaatcaatgacctaagctctacaatgatatattgtaatt

SEQ ID NO: 5409 - DNA, 66 bp, Staphylococcus aureus
atttatgaaaagttagatttattatataatgcgcataatgattaataatgaggaggcgttaataaa

SEQ ID NO: 5410 - DNA, 66 bp, Staphylococcus aureus
tttattaacgcctcctcattattaatcattatgcgcattatataataaatctaacttttcataaat

SEQ ID NO: 5411 - DNA, 350 bp, Staphylococcus aureus
ttcgaggtcgaattaagatgttgagttgtaagttatttggatatttattttaatagtgtcatcaccttgttaaaataatgtcttacttttaaattaaagcaaattatatagaaaactagaacttagtacgtatcatttgtgcgtttcaatgagttctagttttttttatatgttatattaaacttataactttatgggagtgggacagaaatgataaagagccactaatgatttattatgtagtggttcttatacattagccacagctaatgtgtacttaaaaataggaatacatgagtaaaactcatgcataagaaatactaatttctatagaaaaagtattactttat

SEQ ID NO: 5412 - DNA, 350 bp, Staphylococcus aureus
ataaagtaatactttttctatagaaattagtatttcttatgcatgagttttactcatgtattcctatttttaagtacacattagctgtggctaatgtataagaaccactacataataaatcattagtggctctttatcatttctgtcccactcccataaagttataagtttaatataacatataaaaaaaactagaactcattgaaacgcacaaatgatacgtactaagttctagttttctatataatttgctttaatttaaaagtaagacattattttaacaaggtgatgacactattaaaataaatatccaaataacttacaactcaacatcttaattcgacctcgaa

SEQ ID NO: 5413 - DNA, 142 bp, Staphylococcus aureus
gtcccaagctcctttaaatgatgtatatttttagaaatttaatctagacatagttggaaataaatataaaacatcgttgcttaattttgtcatagaacatttaaattaacatcatgaaattcgttttggcggtgaaaaaata

SEQ ID NO: 5414 - DNA, 142 bp, Staphylococcus aureus
tattttttcaccgccaaaacgaatttcatgatgttaatttaaatgttctatgacaaaattaagcaacgatgttttatatttatttccaactatgtctagattaaatttctaaaaatatacatcatttaaaggagcttgggac

SEQ ID NO: 5415 - DNA, 110 bp, Staphylococcus aureus
tatagaacgtaatcatattatgatatgataatagagctgtgtaaaaaaatgaaaatagacagtggttctaaggtgaatcatgttttaaataagaaaggaatgactgtacg

SEQ ID NO: 5416 - DNA, 110 bp, Staphylococcus aureus
cgtacagtcattcctttcttatttaaaacatgattcaccttagaaccactgtctattttcatttttttacacagctctattatcatatcataatatgattacgttctata

SEQ ID NO: 5417 - DNA, 306 bp, Staphylococcus aureus
gtaagaaggtgtttttggtagtgaattatcaaaaataccttttttatgattaaaaagtgtttaatgaataatagtcgactaactattaaattgagctggaaagtttaatgaaggaaattcaataaccaagcgttacctaattttctcattaagtagcatcatatgtatcaatttggtcataagaaaatatgaatgtgataattaattgagtcactgatcatagacaaaaacaaaatcagcataaataagaatcccgactttgcgggattctctgtattgaaaagtattgtattttattaaaacagc

SEQ ID NO: 5418 - DNA, 306 bp, Staphylococcus aureus
gctgttttaataaaatacaatacttttcaatacagagaatcccgcaaagtcgggattcttatttatgctgattttgtttttgtctatgatcagtgactcaattaattatcacattcatattttcttatgaccaaattgatacatatgatgctacttaatgagaaaattaggtaacgcttggttattgaatttccttcattaaactttccagctcaatttaatagttagtcgactattattcattaaacactttttaatcataaaaaaggtatttttgataattcactaccaaaaacaccttcttac

SEQ ID NO: 5419 - DNA, 186 bp, Staphylococcus aureus
caaatatgtaatcatatctctgtactatgagaagtaaaataagtacaatctaaaatagatattatcagtttacaaaggaaagagaaaagcgtcaaacaatgtaactatttaaagtcaaagtgtttgaccaaatttgacttaatatgtaaaataatgagtaacagttattacaaggaggaaatatag

SEQ ID NO: 5420 - DNA, 186 bp, Staphylococcus aureus
ctatatttcctccttgtaataactgttactcattattttacatattaagtcaaatttggtcaaacactttgactttaaatagttacattgtttgacgcttttctctttcctttgtaaactgataatatctattttagattgtacttattttacttctcatagtacagagatatgattacatatttg

SEQ ID NO: 5421 - DNA, 242 bp, Staphylococcus aureus
ttcaaagtaaagagtagactaagcagtctgctctttttgtatgagtaaaccgaggtgtcaataaattgtttactatactttgagcggaaatatgattgaatgaagctagttgaaccgtaactatatgaaatgttcccttcaaagtagacattgaaaggaacatttcaatcctttgtttgtaagtcgctctagacattacatttagtacatatgttgtttctaatgctcattaatggtattga

SEQ ID NO: 5422 - DNA, 242 bp, Staphylococcus aureus
tcaataccattaatgagcattagaaacaacatatgtactaaatgtaatgtctagagcgacttacaaacaaaggattgaaatgttcctttcaatgtctactttgaagggaacatttcatatagttacggttcaactagcttcattcaatcatatttccgctcaaagtatagtaaacaatttattgacacctcggtttactcatacaaaaagagcagactgcttagtctactctttactttgaa

SEQ ID NO: 5423 - DNA, 702 bp, Staphylococcus aureus
tatcattcaccccatgtaattttgtatttagttactatttaataatcattattgttgttcaaaggttatacattatttagacaataatatgtcaataactttttttgaattgtattttaataaaaatgatataagttataataaaggtgtaccttcgataacgaataaacatctcttaaaagtatgtgtaaaacgctgcatgatacaaacgaaggtaaaaatttgactccctttagtagtggacccgtacgttaatcgtgcgggtcgtttttatttatttcttattcccattatacatcaatttaaagcattaattttttaaacaaatttaagaatacatagtaatataacaatctaaacataaaaacttttaacacaacacttaaaccaatgctttaattttcaatacgtagctataatttgttgtaaaatcaaaaaggttaaaatgttaattttcaaaaaaaggctcaaaatatgtttgatttagttattaaatgttaagatatataagactactatttctttgtaaaaatgaatccgatttacgagtgagtaatagtgaaggcagttttaagttgaagaaggcaaaaagagtaaatgtttattaatatttgtagaaactaggtaagcaaattagttgtgaaaatgttaatggttgcgtgataatttctatatttaaattagtttgaagtgagggagagt

SEQ ID NO: 5424 - DNA, 702 bp, Staphylococcus aureus
actctccctcacttcaaactaatttaaatatagaaattatcacgcaaccattaacattttcacaactaatttgcttacctagtttctacaaatattaataaacatttactctttttgccttcttcaacttaaaactgccttcactattactcactcgtaaatcggattcatttttacaaagaaatagtagtcttatatatcttaacatttaataactaaatcaaacatattttgagcctttttttgaaaattaacattttaacctttttgattttacaacaaattatagctacgtattgaaaattaaagcattggtttaagtgttgtgttaaaagtttttatgtttagattgttatattactatgtattcttaaatttgtttaaaaaattaatgctttaaattgatgtataatgggaataagaaataaataaaaacgacccgcacgattaacgtacgggtccactactaaagggagtcaaatttttaccttcgtttgtatcatgcagcgttttacacatacttttaagagatgtttattcgttatcgaaggtacacctttattataacttatatcatttttattaaaatacaattcaaaaaaagttattgacatattattgtctaaataatgtataacctttgaacaacaataatgattattaaatagtaactaaatacaaaattacatggggtgaatgata

SEQ ID NO: 5425 - DNA, 160 bp, Staphylococcus aureus
tatttagtcaaacaaaaatgaaccagtatgacagacaacacaattaattaggttgtctcgaatattggttcttatttttataattgttaattaggggagagatgatacttaaatagttagttgtttattttacggatagtgaaatttattttgagtgagg

SEQ ID NO: 5426 - DNA, 160 bp, Staphylococcus aureus
cctcactcaaaataaatttcactatccgtaaaataaacaactaactatttaagtatcatctctcccctaattaacaattataaaaataagaaccaatattcgagacaacctaattaattgtgttgtctgtcatactggttcatttttgtttgactaaata

SEQ ID NO: 5427 - DNA, 327 bp, Staphylococcus aureus
actaatgtgacttttcggattctagagcattgttttatgtcttagtctcaaataataagcaaatgattagcgagtcagtataagggtatacatttgactacagcgaataaaataaaacgttttgttgaataacaaatcgaaaatgtattgcaagcgctttatcaaattatttagaaaatttaagttttatgcttgcaatttttgaaatagaatagtactattgcaagtgtaaagaggttaatttttgtcccacgcgggacttaaaaaggcaaccactggttgtgacatatccttatttacatttataaatataaggaggaggtagta

SEQ ID NO: 5428 - DNA, 327 bp, Staphylococcus aureus
tactacctcctccttatatttataaatgtaaataaggatatgtcacaaccagtggttgcctttttaagtcccgcgtgggacaaaaattaacctctttacacttgcaatagtactattctatttcaaaaattgcaagcataaaacttaaattttctaaataatttgataaagcgcttgcaatacattttcgatttgttattcaacaaaacgttttattttattcgctgtagtcaaatgtatacccttatactgactcgctaatcatttgcttattatttgagactaagacataaaacaatgctctagaatccgaaaagtcacattagt

SEQ ID NO: 5429 - DNA, 52 bp, Staphylococcus aureus
gagataaaaagtttaatactttttaaatatcattttaaaggaggccattata

SEQ ID NO: 5430 - DNA, 52 bp, Staphylococcus aureus
tataatggcctcctttaaaatgatatttaaaaagtattaaactttttatctc

SEQ ID NO: 5431 - DNA, 138 bp, Staphylococcus aureus
ttttagtatagtttttattcaaatacgctagtgctcagaactatttagcattaattaaagcttatgagtaagcggggagcacaaacgcttctccgcttatttttatataaaatttcctaattacaaggaggaaacacc

SEQ ID NO: 5432 - DNA, 138 bp, Staphylococcus aureus
ggtgtttcctccttgtaattaggaaattttatataaaaataagcggagaagcgtttgtgctccccgcttactcataagctttaattaatgctaaatagttctgagcactagcgtatttgaataaaaactatactaaaa

SEQ ID NO: 5433 - DNA, 129 bp, Staphylococcus aureus
tattgtaaaagatgttaagtaaacgcttaatgacacttattttttgaaaataatagtaatatcattttgttaaatgaaagaataaagctataataattatagaataactatttaaaggagattataaac

SEQ ID NO: 5434 - DNA, 129 bp, Staphylococcus aureus
gtttataatctcctttaaatagttattctataattattatagctttattctttcatttaacaaaatgatattactattattttcaaaaaataagtgtcattaagcgtttacttaacatcttttacaata

SEQ ID NO: 5435 - DNA, 338 bp, Staphylococcus aureus
tcattttaaacattaagtactgccataattttagttgaggattattatgtcggtataaattgaataaagtttttgagttcacgcttaaaaagttcacgcttgtatttataacctgccacagagttgagactgtggtaggttttttattttgaagtattattcataacagactaataatcatgaggtaactaataacacatatttaacttgtattcttaaactggtataataaatttatgttgaaatgaatattgtatgacagggtattcacttttattaaaaggtaaaattaaataaaggttttatagaacgtatttaaatatatgaggagtaaacaa

SEQ ID NO: 5436 - DNA, 338 bp, Staphylococcus aureus
ttgtttactcctcatatatttaaatacgttctataaaacctttatttaattttaccttttaataaaagtgaataccctgtcatacaatattcatttcaacataaatttattataccagtttaagaatacaagttaaatatgtgttattagttacctcatgattattagtctgttatgaataatacttcaaaataaaaaacctaccacagtctcaactctgtggcaggttataaatacaagcgtgaactttttaagcgtgaactcaaaaactttattcaatttataccgacataataatcctcaactaaaattatggcagtacttaatgtttaaaatga

SEQ ID NO: 5437 - DNA, 115 bp, Staphylococcus aureus
ggtccggcgatgtaaatgtcgggcttttttatttataattaagaatgtaatagtttaacaataagctatgtaaaatatatagcctagttaagtatgcaaagggagcgttagattt

SEQ ID NO: 5438 - DNA, 115 bp, Staphylococcus aureus
aaatctaacgctccctttgcatacttaactaggctatatattttacatagcttattgttaaactattacattcttaattataaataaaaaagcccgacatttacatcgccggacc

SEQ ID NO: 5439 - DNA, 91 bp, Staphylococcus aureus
gcgatttagttgcttaatcgggctatatttgatatagttatatgtgcttttgtaaattacaaaagtatgatttgtttgatttattatttcg

SEQ ID NO: 5440 - DNA, 91 bp, Staphylococcus aureus
cgaaataataaatcaaacaaatcatacttttgtaatttacaaaagcacatataactatatcaaatatagcccgattaagcaactaaatcgc

SEQ ID NO: 5441 - DNA, 184 bp, Staphylococcus aureus
tatttgtagcctacaacctttgtggatgtaggcttttttattatgtgtttttcaggggataatgcattgcagaatttgttgtgagtattgatatagcagtgtttgtataggtgtttatttgatggaggaaagagtaataagtgattatgaattagtttttgagatataaggggacagtgatgtg

SEQ ID NO: 5442 - DNA, 184 bp, Staphylococcus aureus
cacatcactgtccccttatatctcaaaaactaattcataatcacttattactctttcctccatcaaataaacacctatacaaacactgctatatcaatactcacaacaaattctgcaatgcattatcccctgaaaaacacataataaaaaagcctacatccacaaaggttgtaggctacaaata

SEQ ID NO: 5443 - DNA, 201 bp, Staphylococcus aureus
gtaatcgataaaaaattctccattgaataaatgagaagttaaaaactttacttaacctttctcattgcattttcctattcacgattttaagaacccaacatactacaaacgaattttaaaaggcgagagtaaagcttacttgtttattatacagatttaaaatccaagagtcagaacagactactcctctttataactata

SEQ ID NO: 5444 - DNA, 201 bp, Staphylococcus aureus
tatagttataaagaggagtagtctgttctgactcttggattttaaatctgtataataaacaagtaagctttactctcgccttttaaaattcgtttgtagtatgttgggttcttaaaatcgtgaataggaaaatgcaatgagaaaggttaagtaaagtttttaacttctcatttattcaatggagaattttttatcgattac

SEQ ID NO: 5445 - DNA, 191 bp, Staphylococcus aureus
tgcgggatttacaaatttatcccatcttttttttatgattttccggcacggggactgatttctttaacaccattaaacacagattttttatttttaatcatagttttatagtatcatgttggctaagctataaataagtcagtttctctaaaaattaaataactgaatgtaagacaatcaacaaaccaaat

SEQ ID NO: 5446 - DNA, 191 bp, Staphylococcus aureus
atttggtttgttgattgtcttacattcagttatttaatttttagagaaactgacttatttatagcttagccaacatgatactataaaactatgattaaaaataaaaaatctgtgtttaatggtgttaaagaaatcagtccccgtgccggaaaatcataaaaaaaagatgggataaatttgtaaatcccgca

SEQ ID NO: 5447 - DNA, 59 bp, Staphylococcus aureus
ttaacatgtctcctttatttcgcaaaaatttattttaaaaactctaaatgacttatcat

SEQ ID NO: 5448 - DNA, 59 bp, Staphylococcus aureus
atgataagtcatttagagtttttaaaataaatttttgcgaaataaaggagacatgttaa

SEQ ID NO: 5449 - DNA, 287 bp, Staphylococcus aureus
taaattaatgaaactataattactaatattatattacttttattgatagaaatatattacttttttaaaaaacttgtaatatatcgaaagatttaaatgtaaaattttgatttgttaagaaattacgtttgtaaaaataaaaaaatcaacttatttgtatgagatgaatatgtattgaagaagatgtgttattaatttggaaaatactggtcaaagatgggagctcttaaaagcgttattgtattttttagtcaatgcaaatagattgccgtaataataatcgtact

SEQ ID NO: 5450 - DNA, 287 bp, Staphylococcus aureus
agtacgattattattacggcaatctatttgcattgactaaaaaatacaataacgcttttaagagctcccatctttgaccagtattttccaaattaataacacatcttcttcaatacatattcatctcatacaaataagttgatttttttatttttacaaacgtaatttcttaacaaatcaaaattttacatttaaatctttcgatatattacaagttttttaaaaaagtaatatatttctatcaataaaagtaatataatattagtaattatagtttcattaattta

SEQ ID NO: 5451 - DNA, 138 bp, Staphylococcus aureus
aaattgatttaagagggtagttgtttattgcgaaaaatatcattcaattttaatgaaataatggcgtcattactataaaatattactttatgttgtaatgcatttttctataagatagaactaaaaggaggggcaaag

SEQ ID NO: 5452 - DNA, 138 bp, Staphylococcus aureus
ctttgcccctccttttagttctatcttatagaaaaatgcattacaacataaagtaatattttatagtaatgacgccattatttcattaaaattgaatgatatttttcgcaataaacaactaccctcttaaatcaattt

SEQ ID NO: 5453 - DNA, 262 bp, Staphylococcus aureus
tttaaagctaggattacattaggtagagttcatattaataataaaaaatgtttgcaatcaaatcgtacgttgtcgtttgtaattcttaaaatagcaataaataaaatgtttgttagtaaagtattattgtggataataaaatatcgatacaaattaattgctataatgcaattttagtgtataattccattaacagagattaaatatatctttaaagggtatatagttaatataaaatgactttttaaaaagagggaataaa

SEQ ID NO: 5454 - DNA, 262 bp, Staphylococcus aureus
tttattccctctttttaaaaagtcattttatattaactatataccctttaaagatatatttaatctctgttaatggaattatacactaaaattgcattatagcaattaatttgtatcgatattttattatccacaataatactttactaacaaacattttatttattgctattttaagaattacaaacgacaacgtacgatttgattgcaaacattttttattattaatatgaactctacctaatgtaatcctagctttaaa

SEQ ID NO: 5455 - DNA, 220 bp, Staphylococcus aureus
gtaataataatattaaattaatcatatgattcatgaagaagccaccttaaaaggtggcttttttacttggattttccaaatatattgtttgaatataattaataattaattcatcaacagttaattattttaaaaaggtagatgttatataatttggcttggcgaaaaaatagggtgtaaggtaggttgttaattagggaaaattaaggagaaaatacag

SEQ ID NO: 5456 - DNA, 220 bp, Staphylococcus aureus
ctgtattttctccttaattttccctaattaacaacctaccttacaccctattttttcgccaagccaaattatataacatctacctttttaaaataattaactgttgatgaattaattattaattatattcaaacaatatatttggaaaatccaagtaaaaaagccaccttttaaggtggcttcttcatgaatcatatgattaatttaatattattattac

SEQ ID NO: 5457 - DNA, 352 bp, Staphylococcus aureus
tattaatgcatggctgcaaagcaaataatgagtttgtcgtaaaaataacaacattttaaactagcaataaataatatcaaagtcatcatttcaatgatgcaatctagtatagtccacattctaaacaggtgtggactattacttttttcactttatattacgaaaaaattattatgcttaactatcaatatcaataattaattttaagctgaaaaacaataaaaatgttaagacaacgtttacttcaagttaattattatactgaaaattctggtatataatgctgttagtgaatataacagggaaattatattggttataatattgagtctatataaaggagaaataacag

SEQ ID NO: 5458 - DNA, 352 bp, Staphylococcus aureus
ctgttatttctcctttatatagactcaatattataaccaatataatttccctgttatattcactaacagcattatataccagaattttcagtataataattaacttgaagtaaacgttgtcttaacatttttattgtttttcagcttaaaattaattattgatattgatagttaagcataataattttttcgtaatataaagtgaaaaaagtaatagtccacacctgtttagaatgtggactatactagattgcatcattgaaatgatgactttgatattatttattgctagtttaaaatgttgttatttttacgacaaactcattatttgctttgcagccatgcattaata

SEQ ID NO: 5459 - DNA, 239 bp, Staphylococcus aureus
aaattggcactaagtttacgagatatgataaatacctattattttaaatatagtctacaatctatgtggttgtaggctgtattttttgcagtttatcaataaacacccatcaacaaattataccgtttttctactttgaaagttggaagtaacataatcttaaataaatatattattaattaagataaatataagactcaagattattgttaatagtttgttcatcgcaagttaattat

SEQ ID NO: 5460 - DNA, 239 bp, Staphylococcus aureus
ataattaacttgcgatgaacaaactattaacaataatcttgagtcttatatttatcttaattaataatatatttatttaagattatgttacttccaactttcaaagtagaaaaacggtataatttgttgatgggtgtttattgataaactgcaaaaaatacagcctacaaccacatagattgtagactatatttaaaataataggtatttatcatatctcgtaaacttagtgccaattt

SEQ ID NO: 5461 - DNA, 340 bp, Staphylococcus aureus
tccaaagtaaattataagttatacatctcgtttttaaatgacaatttatccccgtaaatataataaataatcttttcaaattccgcatagatatagagacgctaataaacctctttgtctcgatatgatagtctgcaacgattcatgttgtaggctttttaattttacaaataaggctaaatatataagttctgacacctaaaatatagaaaatacataaaagtacgtatagttattttattataattattaaatttttattaattaattgtaaaaatgtagaattataattaattaacgtttaatattaaaattaactaaaaagaaagaggtgttagtt

SEQ ID NO: 5462 - DNA, 340 bp, Staphylococcus aureus
aactaacacctctttctttttagttaattttaatattaaacgttaattaattataattctacatttttacaattaattaataaaaatttaataattataataaaataactatacgtacttttatgtattttctatattttaggtgtcagaacttatatatttagccttatttgtaaaattaaaaagcctacaacatgaatcgttgcagactatcatatcgagacaaagaggtttattagcgtctctatatctatgcggaatttgaaaagattatttattatatttacggggataaattgtcatttaaaaacgagatgtataacttataatttactttgga

SEQ ID NO: 5463 - DNA, 356 bp, Staphylococcus aureus
tgctcattgtaaaagtgtcactgctgctagtggcccttttataatttttagatcacgatatgatttattatcaattcagaattaaaaaagtaaatagtatcaaaagtaagtgtatttaatattagaaaataaaaattttaaatttagtattaaaatggaatgttactatatagttcaatgtgtattatcacagaaaataaaataatgctttacttctatatttaaaagtgtataatgaaagttaagtaataaagagcgtgaagaaaaatgtgagttatttatatagaatattctccttttcatttatgaatttgttacaaaatatttagtgcaaaagcacgacggaggtattcaat

SEQ ID NO: 5464 - DNA, 356 bp, Staphylococcus aureus
attgaatacctccgtcgtgcttttgcactaaatattttgtaacaaattcataaatgaaaaggagaatattctatataaataactcacatttttcttcacgctctttattacttaactttcattatacacttttaaatatagaagtaaagcattattttattttctgtgataatacacattgaactatatagtaacattccattttaatactaaatttaaaatttttattttctaatattaaatacacttacttttgatactatttacttttttaattctgaattgataataaatcatatcgtgatctaaaaattataaaagggccactagcagcagtgacacttttacaatgagca

SEQ ID NO: 5465 - DNA, 135 bp, Staphylococcus aureus
ttttaacttattcaaacagtccttattatagggctgtttttttatgctttaaatcgataacagttggtgtggtaaaagcactagccgttatttttttgtccaataaattgtggagatctaacaatatataatggt

SEQ ID NO: 5466 - DNA, 135 bp, Staphylococcus aureus
accattatatattgttagatctccacaatttattggacaaaaaaataacggctagtgcttttaccacaccaactgttatcgatttaaagcataaaaaaacagccctataataaggactgtttgaataagttaaaa

SEQ ID NO: 5467 - DNA, 312 bp, Staphylococcus aureus
tgtccgacttttgattttgaataaaaaaagcgccaatacagaactttaataatgacgagaattaaagtctgtatatggcgataacaagaagtaatgttaaacactcaaaatgtttaacaataataggataccacatcgcataatatcttactacttaattaataatttaactaatcaactttttgttaattttttattaagactgattaattattgagaatatttattgtttttaaaatctcataataattcagtaatcttgttttcatttaaaaggcgaaacattaaaataattaaataaaaatattgcgt

SEQ ID NO: 5468 - DNA, 312 bp, Staphylococcus aureus
acgcaatatttttatttaattattttaatgtttcgccttttaaatgaaaacaagattactgaattattatgagattttaaaaacaataaatattctcaataattaatcagtcttaataaaaaattaacaaaaagttgattagttaaattattaattaagtagtaagatattatgcgatgtggtatcctattattgttaaacattttgagtgtttaacattacttcttgttatcgccatatacagactttaattctcgtcattattaaagttctgtattggcgctttttttattcaaaatcaaaagtcggaca

SEQ ID NO: 5469 - DNA, 61 bp, Staphylococcus aureus
gtatgtttttcactcctgctttaaaatagggttaaaaagtttatagttgagacattcatgt

SEQ ID NO: 5470 - DNA, 61 bp, Staphylococcus aureus
acatgaatgtctcaactataaactttttaaccctattttaaagcaggagtgaaaaacatac

SEQ ID NO: 5471 - DNA, 87 bp, Staphylococcus aureus
aatattgggcctcctgaaatatcatttgtaatctatacccaatttattgcaaaacacaaactaatttaactatttgatgaaactgtg

SEQ ID NO: 5472 - DNA, 87 bp, Staphylococcus aureus
cacagtttcatcaaatagttaaattagtttgtgttttgcaataaattgggtatagattacaaatgatatttcaggaggcccaatatt

SEQ ID NO: 5473 - DNA, 187 bp, Staphylococcus aureus
ttaaaagctccttgttgaagaaatatatgtaaatagtcttaaattagaattgtaatctttaataagcttgtaagactaaaacatatcttaaatattaaagtatgagagtgtgaaatgtctattaagaataaaaaacagtctgaaacatcattgagacgtttcagactggatataaaatgaatttcat

SEQ ID NO: 5474 - DNA, 187 bp, Staphylococcus aureus
atgaaattcattttatatccagtctgaaacgtctcaatgatgtttcagactgttttttattcttaatagacatttcacactctcatactttaatatttaagatatgttttagtcttacaagcttattaaagattacaattctaatttaagactatttacatatatttcttcaacaaggagcttttaa

SEQ ID NO: 5475 - DNA, 340 bp, Staphylococcus aureus
gactgacacctactagtataaaaatagcttcttaataaatatgataacactattttccaataggtaaataaaaagtatagttatttttaaaatattatttgtagaatgctaaagtttattaattcaaacaagtgagcatatatagggatgtatagtattaatatgaaaagaatatttacatactaaaaactcttaaagttgtataattcgttaatatttttagaatcagatatcaaaaaaatgtgcaaaatcacttttgcacatttacaaatactagttttctgataagattaataataacactttaaatagcgcttaataaatgaagggggcaagtctt

SEQ ID NO: 5476 - DNA, 340 bp, Staphylococcus aureus
aagacttgcccccttcatttattaagcgctatttaaagtgttattattaatcttatcagaaaactagtatttgtaaatgtgcaaaagtgattttgcacatttttttgatatctgattctaaaaatattaacgaattatacaactttaagagtttttagtatgtaaatattcttttcatattaatactatacatccctatatatgctcacttgtttgaattaataaactttagcattctacaaataatattttaaaaataactatactttttatttacctattggaaaatagtgttatcatatttattaagaagctatttttatactagtaggtgtcagtc

SEQ ID NO: 5477 - DNA, 224 bp, Staphylococcus aureus
aaacactcactcctttaaaattctgtactcttcattgcgttttaccccgtcacattatcttttaaactaaaatcatcattacttatgaaaaaaatgtacatcaaaagcaaaggttttcgctaccgaaaaagtttaaataatggtttaatatatttggtactcattttaataaaaagagaatacattttgagctatcaatactttttattgaagaggtgttattg

SEQ ID NO: 5478 - DNA, 224 bp, Staphylococcus aureus
caataacacctcttcaataaaaagtattgatagctcaaaatgtattctctttttattaaaatgagtaccaaatatattaaaccattatttaaactttttcggtagcgaaaacctttgcttttgatgtacatttttttcataagtaatgatgattttagtttaaaagataatgtgacggggtaaaacgcaatgaagagtacagaattttaaaggagtgagtgttt

SEQ ID NO: 5479 - DNA, 72 bp, Staphylococcus aureus
taaataaagcgttatacatagacacaagtatgtcttttgtataacgcttttaaaatacaactacataacgct

SEQ ID NO: 5480 - DNA, 72 bp, Staphylococcus aureus
agcgttatgtagttgtattttaaaagcgttatacaaaagacatacttgtgtctatgtataacgctttattta

SEQ ID NO: 5481 - DNA, 154 bp, Staphylococcus aureus
taagttttgacacccctaaaacatagaatattctgaaaaaacttattgttatcatatcaaataaaaaacaactactcaatagtagagtagttgtatgaaaaatagaacctatatgatttgaatttatgagaaatgtagaatatataaaactgta

SEQ ID NO: 5482 - DNA, 154 bp, Staphylococcus aureus
tacagttttatatattctacatttctcataaattcaaatcatataggttctatttttcatacaactactctactattgagtagttgttttttatttgatatgataacaataagttttttcagaatattctatgttttaggggtgtcaaaactta

SEQ ID NO: 5483 - DNA, 207 bp, Staphylococcus aureus
tactgacctccttaatcattattaagaaagattttgtactaaaaaaatttcttaattacatattaaaatgtttattaaaattttgcaatcactgatttatatgcacattcttgtaaatggattatcaatttaattatatttatttttaagttcaggaaattatggaattggttattgatcgacactggacttttatttggagacgtt

SEQ ID NO: 5484 - DNA, 207 bp, Staphylococcus aureus
aacgtctccaaataaaagtccagtgtcgatcaataaccaattccataatttcctgaacttaaaaataaatataattaaattgataatccatttacaagaatgtgcatataaatcagtgattgcaaaattttaataaacattttaatatgtaattaagaaatttttttagtacaaaatctttcttaataatgattaaggaggtcagta

SEQ ID NO: 5485 - DNA, 140 bp, Staphylococcus aureus
gggacaatcattttcagttaaatattgccagaaatttcagtcacgaatagaaaaaataaccaaccaaaaatttttggttggcaaatttgaattttatgtgaattttattaataacgttgaataatctctttaagttaatg

SEQ ID NO: 5486 - DNA, 140 bp, Staphylococcus aureus
cattaacttaaagagattattcaacgttattaataaaattcacataaaattcaaatttgccaaccaaaaatttttggttggttattttttctattcgtgactgaaatttctggcaatatttaactgaaaatgattgtccc

SEQ ID NO: 5487 - DNA, 147 bp, Staphylococcus aureus
tcttataacctcctaatttaaaatacatttatgctttacccattcgaaaataccttaatcattttcatttatagcattgtttgattgaaggataaaaagttgttgtttacaataaaaataatgagtatctgaaatgagggatttact

SEQ ID NO: 5488 - DNA, 147 bp, Staphylococcus aureus
agtaaatccctcatttcagatactcattatttttattgtaaacaacaactttttatccttcaatcaaacaatgctataaatgaaaatgattaaggtattttcgaatgggtaaagcataaatgtattttaaattaggaggttataaga

SEQ ID NO: 5489 - DNA, 82 bp, Staphylococcus aureus
taaaatgaattaggttgcttttgtgtaagtgctgtcttataattgagaagtattatcattgttcgtggaggagcgattttag

SEQ ID NO: 5490 - DNA, 82 bp, Staphylococcus aureus
ctaaaatcgctcctccacgaacaatgataatacttctcaattataagacagcacttacacaaaagcaacctaattcatttta

SEQ ID NO: 5491 - DNA, 150 bp, Staphylococcus aureus
tatgtataattatagaaaacattaataaaagctgagacatgaattgatggacatctatcgagttagagatttaatctaatttactagagtcggtacaatcacagtctcagctttttattgtgaagtatatacacatttgtattttagtat

SEQ ID NO: 5492 - DNA, 150 bp, Staphylococcus aureus
atactaaaatacaaatgtgtatatacttcacaataaaaagctgagactgtgattgtaccgactctagtaaattagattaaatctctaactcgatagatgtccatcaattcatgtctcagcttttattaatgttttctataattatacata

SEQ ID NO: 5493 - DNA, 143 bp, Staphylococcus aureus
tgtaacaactcctctagatagtttaataatttttattatagctaaatttatatcataataaaaaattttagcttcaaaatgaaagccttttgctatggaaaatgatatatttattttaaatacataaaggaggttgcagtcgc

SEQ ID NO: 5494 - DNA, 143 bp, Staphylococcus aureus
gcgactgcaacctcctttatgtatttaaaataaatatatcattttccatagcaaaaggctttcattttgaagctaaaattttttattatgatataaatttagctataataaaaattattaaactatctagaggagttgttaca

SEQ ID NO: 5495 - DNA, 157 bp, Staphylococcus aureus
gtgaaatgtaaacgtttactaaatatctcgatatttagattcattacatgtaaaatgaaataagctatacaattgttaatttttataaatatagttgaatagcatctagccttatggcatcattaatgatgtaaagattaattaggaggggattctc

SEQ ID NO: 5496 - DNA, 157 bp, Staphylococcus aureus
gagaatcccctcctaattaatctttacatcattaatgatgccataaggctagatgctattcaactatatttataaaaattaacaattgtatagcttatttcattttacatgtaatgaatctaaatatcgagatatttagtaaacgtttacatttcac

SEQ ID NO: 5497 - DNA, 64 bp, Staphylococcus aureus
tcaccgtgtaactccttaatctaagattgaggagtttatttttagtctgagtaagtaaataata

SEQ ID NO: 5498 - DNA, 64 bp, Staphylococcus aureus
tattatttacttactcagactaaaaataaactcctcaatcttagattaaggagttacacggtga

SEQ ID NO: 5499 - DNA, 101 bp, Staphylococcus aureus
agtagtttaagaggagatattaaagggatattttactttaaataaaaattaacaaggtttataatttgtagtagttaaagtatttaaagaggtgggaacat

SEQ ID NO: 5500 - DNA, 101 bp, Staphylococcus aureus
atgttcccacctctttaaatactttaactactacaaattataaaccttgttaatttttatttaaagtaaaatatccctttaatatctcctcttaaactact

SEQ ID NO: 5501 - DNA, 316 bp, Staphylococcus aureus
aattgaaacctccttatgtaactgaatatgattgtatcatcttttcattttagaataaacctttatatgtaattttgcacttgacacttcagatggacgttttcttcaaaataatatgttttgaaacttgataagagaagccactgtctttactaaaaagtaaaggctgcgataaaggacagtgactttaataaagttgcactgttgtattgtctttggataaaattgtctaaagggaagttttatccccaacgaaaaaacatctaaagtggtaagtaatgaaagaatgtcgataaagtaggaatgggggatcttt

SEQ ID NO: 5502 - DNA, 316 bp, Staphylococcus aureus
aaagatcccccattcctactttatcgacattctttcattacttaccactttagatgttttttcgttggggataaaacttccctttagacaattttatccaaagacaatacaacagtgcaactttattaaagtcactgtcctttatcgcagcctttactttttagtaaagacagtggcttctcttatcaagtttcaaaacatattattttgaagaaaacgtccatctgaagtgtcaagtgcaaaattacatataaaggtttattctaaaatgaaaagatgatacaatcatattcagttacataaggaggtttcaatt

SEQ ID NO: 5503 - DNA, 260 bp, Staphylococcus aureus
cttaaagctgtggctttgaaaagttgaatttgtgattgttttcagagctatcgggtgctttagtataaataacaatgaataaaaaatcagcctgtatcttatgttactattaagtaatttaagatacaggttttactatttttgaaataagtaccttccacttcaaatacatgtattcaaagtgaaagtattgatttaaatgattcttttgtaatttactcttgataagatgtacgatgtttggtggatatgatgaatta

SEQ ID NO: 5504 - DNA, 260 bp, Staphylococcus aureus
taattcatcatatccaccaaacatcgtacatcttatcaagagtaaattacaaaagaatcatttaaatcaatactttcactttgaatacatgtatttgaagtggaaggtacttatttcaaaaatagtaaaacctgtatcttaaattacttaatagtaacataagatacaggctgattttttattcattgttatttatactaaagcacccgatagctctgaaaacaatcacaaattcaacttttcaaagccacagctttaag

SEQ ID NO: 5505 - DNA, 91 bp, Staphylococcus aureus
gagaatcataaaaatatattactttaataagtgtagtatctatagatcaatctagggagtgggacagaaatgatattttcgcaaaatttat

SEQ ID NO: 5506 - DNA, 91 bp, Staphylococcus aureus
ataaattttgcgaaaatatcatttctgtcccactccctagattgatctatagatactacacttattaaagtaatatatttttatgattctc

SEQ ID NO: 5507 - DNA, 112 bp, Staphylococcus aureus
ttcataagccacagctaatgtgtatttaaaaataggaatacatgagtaaaactcatgcataagaaatactaatttctaaagaaaaagtatttctttatgttgggccccccca

SEQ ID NO: 5508 - DNA, 112 bp, Staphylococcus aureus
tgggggggcccaacataaagaaatactttttctttagaaattagtatttcttatgcatgagttttactcatgtattcctatttttaaatacacattagctgtggcttatgaa

SEQ ID NO: 5509 - DNA, 252 bp, Staphylococcus aureus
tataattgaaaagtttgttataggtgtattttcttttggttaactattgttaatataacattgtagattttaggatgttgatttttgacttagcctttgtctgcttatgttaaatgttccagctagtcaaacattgagtttgtaattattatattaagctagtttaaattttttgtgatttatgttttattcataccaattttgtgaaatgatacagtgacagatgtttattgattttaaagggtgatgatg

SEQ ID NO: 5510 - DNA, 252 bp, Staphylococcus aureus
catcatcaccctttaaaatcaataaacatctgtcactgtatcatttcacaaaattggtatgaataaaacataaatcacaaaaaatttaaactagcttaatataataattacaaactcaatgtttgactagctggaacatttaacataagcagacaaaggctaagtcaaaaatcaacatcctaaaatctacaatgttatattaacaatagttaaccaaaagaaaatacacctataacaaacttttcaattata

SEQ ID NO: 5511 - DNA, 249 bp, Staphylococcus aureus
ttattgacgaaattttactaaggtgttaggattaatacaaattaaatgatgcgtaaactcttatcgagagtggtggagggatgtgccctacgaagcccggcaaccgtcttatatagaaatggtgccaattcacataaagttttaacttttgaagatgagagaaacaatactactattgctttctcaatttttctatcgatattgagaaagcattttttattttattaagcaacacagggaggaatcaac

SEQ ID NO: 5512 - DNA, 249 bp, Staphylococcus aureus
gttgattcctccctgtgttgcttaataaaataaaaaatgctttctcaatatcgatagaaaaattgagaaagcaatagtagtattgtttctctcatcttcaaaagttaaaactttatgtgaattggcaccatttctatataagacggttgccgggcttcgtagggcacatccctccaccactctcgataagagtttacgcatcatttaatttgtattaatcctaacaccttagtaaaatttcgtcaataa

SEQ ID NO: 5513 - DNA, 353 bp, Staphylococcus aureus
atcatattaatggctcagtaacgtgatgttgctgggctttttaatttaaacaggtatttatatgatatttaggaatgagatgctattacggataaagtaaaatcctatatgcatgcgtgctactcatttattcttatttttaatttcacatggatagtgactactacatcataaatcattagtgattctttattatttcagtcccactccctcaagttaatgatgaatctatttcgctagttataaaatgacgtcaaatcaatatcaaaaattatttaagtaaaatgtttagataatttttcagtgggtaagtattatatataacatttaattattccgaggaggcatttatt

SEQ ID NO: 5514 - DNA, 353 bp, Staphylococcus aureus
aataaatgcctcctcggaataattaaatgttatatataatacttacccactgaaaaattatctaaacattttacttaaataatttttgatattgatttgacgtcattttataactagcgaaatagattcatcattaacttgagggagtgggactgaaataataaagaatcactaatgatttatgatgtagtagtcactatccatgtgaaattaaaaataagaataaatgagtagcacgcatgcatataggattttactttatccgtaatagcatctcattcctaaatatcatataaatacctgtttaaattaaaaagcccagcaacatcacgttactgagccattaatatgat

SEQ ID NO: 5515 - DNA, 233 bp, Staphylococcus aureus
ttttacttttttattcctaatacactgcacatgccacttagtcggtataaccatcggctaggtggtttttgtattaaaaaagtggataccaaaatttattaataattattttaatgttagaaaaaaactaaataaaaactcgctaatgatatccaataatatgtatacaaaacgagacatatattgcatatgattaacgagatactgaatatattttatcacccctaaaatga

SEQ ID NO: 5516 - DNA, 233 bp, Staphylococcus aureus
tcattttaggggtgataaaatatattcagtatctcgttaatcatatgcaatatatgtctcgttttgtatacatattattggatatcattagcgagtttttatttagtttttttctaacattaaaataattattaataaattttggtatccacttttttaatacaaaaaccacctagccgatggttataccgactaagtggcatgtgcagtgtattaggaataaaaaagtaaaa

SEQ ID NO: 5517 - DNA, 327 bp, Staphylococcus aureus
gaataactcctttcaaacgattggaataaaatcataaatagcatcataccatattacaaatgtcctagtgaaatgataacatattttaaattcataaaatccattgagaaattatgtgcacttattatcatttatatttttaaagagagcggattagagttgtactttagagttattaaaaataataaaaagggtttaagttgtttatattaaggtataagtaagttataattaactgaacgcattattacaaagtctttttgactacaaattaaaattattataaactagttaagaaaactttatattttacggagggaatataaa

SEQ ID NO: 5518 - DNA, 327 bp, Staphylococcus aureus
tttatattccctccgtaaaatataaagttttcttaactagtttataataattttaatttgtagtcaaaaagactttgtaataatgcgttcagttaattataacttacttataccttaatataaacaacttaaaccctttttattatttttaataactctaaagtacaactctaatccgctctctttaaaaatataaatgataataagtgcacataatttctcaatggattttatgaatttaaaatatgttatcatttcactaggacatttgtaatatggtatgatgctatttatgattttattccaatcgtttgaaaggagttattc

SEQ ID NO: 5519 - DNA, 97 bp, Staphylococcus aureus
tcttattaatacagtatccatgagatgttcatctatatatgatgaaaatgaacatttatacgaaatagtaaatttcatcaagtaggaggaaaaagtt

SEQ ID NO: 5520 - DNA, 97 bp, Staphylococcus aureus
aactttttcctcctacttgatgaaatttactatttcgtataaatgttcattttcatcatatatagatgaacatctcatggatactgtattaataaga

SEQ ID NO: 5521 - DNA, 150 bp, Staphylococcus aureus
aatgctgttaatcatagatgattttgatattagacatataaaagtataaaaatttttataagatgtcatgtcattgttataatatggtttacatcatgaattaaaaacttacgcacgccgttgtaaatatatttttaaggagtgattgaa

SEQ ID NO: 5522 - DNA, 150 bp, Staphylococcus aureus
ttcaatcactccttaaaaatatatttacaacggcgtgcgtaagtttttaattcatgatgtaaaccatattataacaatgacatgacatcttataaaaatttttatacttttatatgtctaatatcaaaatcatctatgattaacagcatt

SEQ ID NO: 5523 - DNA, 187 bp, Staphylococcus aureus
ctttaaacagcgttgttaagccattcttgacttccggaaatgggtattgataccattttgatactgaatataacaaaaagccacattactgtggctttttttgttttataactaaatcggattgatagataagctttgtacttatttatatcagtccgattttttgattggtgtaaaaaataatcat

SEQ ID NO: 5524 - DNA, 187 bp, Staphylococcus aureus
atgattattttttacaccaatcaaaaaatcggactgatataaataagtacaaagcttatctatcaatccgatttagttataaaacaaaaaaagccacagtaatgtggctttttgttatattcagtatcaaaatggtatcaatacccatttccggaagtcaagaatggcttaacaacgctgtttaaag

SEQ ID NO: 5525 - DNA, 364 bp, Staphylococcus aureus
gttaatccttctttctatatttgaatataaacaagtacttgtctaaagatatttaaaagataattagaataaatttatgagaaactggttgttatcattataatggtttcaaatgattataactatgtcataaactgaatttgttgaaatttttcattatgtaaatttattaataacaaacagctcgaactatagcatcattttactaatgaatgcattaaagtaactatgattaaaaatgcatattaattatcattattaagtctattatatataatgaattttaactggtttattaaacgagaacgtcgggaattaagtaactacaataaaaataagatatgacaataaggagactacacgc

SEQ ID NO: 5526 - DNA, 364 bp, Staphylococcus aureus
gcgtgtagtctccttattgtcatatcttatttttattgtagttacttaattcccgacgttctcgtttaataaaccagttaaaattcattatatataatagacttaataatgataattaatatgcatttttaatcatagttactttaatgcattcattagtaaaatgatgctatagttcgagctgtttgttattaataaatttacataatgaaaaatttcaacaaattcagtttatgacatagttataatcatttgaaaccattataatgataacaaccagtttctcataaatttattctaattatcttttaaatatctttagacaagtacttgtttatattcaaatatagaaagaaggattaac

SEQ ID NO: 5527 - DNA, 98 bp, Staphylococcus aureus
tgaaatgattatgatcaaacgaaattatcgagctgaaggtcaccgaaatgattataattaaacgaaattatcgagctaaagttcactgaaatgattat

SEQ ID NO: 5528 - DNA, 98 bp, Staphylococcus aureus
ataatcatttcagtgaactttagctcgataatttcgtttaattataatcatttcggtgaccttcagctcgataatttcgtttgatcataatcatttca

SEQ ID NO: 5529 - DNA, 50 bp, Staphylococcus aureus
tgaaatgattatgataaaagttatatggtatgatgacattggtgatatat

SEQ ID NO: 5530 - DNA, 50 bp, Staphylococcus aureus
atatatcaccaatgtcatcataccatataacttttatcataatcatttca

SEQ ID NO: 5531 - DNA, 129 bp, Staphylococcus aureus
tatttaacaattaataaggcataaaggcttagtttgtacaaaacgaacgtgtcatagaagtaatcattatttttatgaaacactaaaagtataaactgagcctttcattgtcatagataggtgaagaat

SEQ ID NO: 5532 - DNA, 129 bp, Staphylococcus aureus
attcttcacctatctatgacaatgaaaggctcagtttatacttttagtgtttcataaaaataatgattacttctatgacacgttcgttttgtacaaactaagcctttatgccttattaattgttaaata

SEQ ID NO: 5533 - DNA, 100 bp, Staphylococcus aureus
taaaacccttagctagattgaaaatgggaatcatgcaattcaagcatggacctgtaatctagttaggggtttttatctttaatgaaggttcttcatcttt

SEQ ID NO: 5534 - DNA, 100 bp, Staphylococcus aureus
aaagatgaagaaccttcattaaagataaaaacccctaactagattacaggtccatgcttgaattgcatgattcccattttcaatctagctaagggtttta

SEQ ID NO: 5535 - DNA, 254 bp, Staphylococcus aureus
aaataagtatggtttttaatcattggtaaaacaagcaaagcaattgttaaatatgttatgcttgacttgcgaatgtatatatttgcgctgatgataattcaataacattataaactcgtcatattaatgtgatgagtttatttgattttgacgtatataacaaaattgttatatagactgtaattgtttattgtttaaataacctttaaaatgaatgatgttctcaacaaagtgtatcatttacaataattgag

SEQ ID NO: 5536 - DNA, 254 bp, Staphylococcus aureus
ctcaattattgtaaatgatacactttgttgagaacatcattcattttaaaggttatttaaacaataaacaattacagtctatataacaattttgttatatacgtcaaaatcaaataaactcatcacattaatatgacgagtttataatgttattgaattatcatcagcgcaaatatatacattcgcaagtcaagcataacatatttaacaattgctttgcttgttttaccaatgattaaaaaccatacttattt

SEQ ID NO: 5537 - DNA, 262 bp, Staphylococcus aureus
aatacaaatagcacataactcaacgattttgattgagcgtatgtgctatttttatattttaaatttcatagaatagaatagtaatatgtgcttggatatgtggcaataataaaataattaatcagataaatagtataaaataactttcccatcagtccaatttgacagcgaaaaaagacaggtaataactgattataaataattcagtattcctgtctttgttgttattcataatatgttctgttaacttaatatctttata

SEQ ID NO: 5538 - DNA, 262 bp, Staphylococcus aureus
tataaagatattaagttaacagaacatattatgaataacaacaaagacaggaatactgaattatttataatcagttattacctgtcttttttcgctgtcaaattggactgatgggaaagttattttatactatttatctgattaattattttattattgccacatatccaagcacatattactattctattctatgaaatttaaaatataaaaatagcacatacgctcaatcaaaatcgttgagttatgtgctatttgtatt

SEQ ID NO: 5539 - DNA, 58 bp, Staphylococcus aureus
tatacacataacaaaaagcaatgtcagtaatagtgtgaactgacattgctttttaatt

SEQ ID NO: 5540 - DNA, 58 bp, Staphylococcus aureus
aattaaaaagcaatgtcagttcacactattactgacattgctttttgttatgtgtata

SEQ ID NO: 5541 - DNA, 316 bp, Staphylococcus aureus
aatgaagtaccccttttatatgttaatatttactttaattttgaaaagatcaaagtgcatagatatatttgttaatgaacagttataaaatgcaagtgtctttgattcatcaataacccctaaaaaagtaaatatgtatttatatgcttattatatatttttttgaaaatgactacaaataaatatttgtactaactaaggcactattacataactgggataagaaacatcagttgttggtaattgagcacatcatgttaaaataccagttttaaaatgctataatattgtaacaaatgaaataagaaggtgaagt

SEQ ID NO: 5542 - DNA, 316 bp, Staphylococcus aureus
acttcaccttcttatttcatttgttacaatattatagcattttaaaactggtattttaacatgatgtgctcaattaccaacaactgatgtttcttatcccagttatgtaatagtgccttagttagtacaaatatttatttgtagtcattttcaaaaaaatatataataagcatataaatacatatttacttttttaggggttattgatgaatcaaagacacttgcattttataactgttcattaacaaatatatctatgcactttgatcttttcaaaattaaagtaaatattaacatataaaaggggtacttcatt

SEQ ID NO: 5543 - DNA, 139 bp, Staphylococcus aureus
taaaataactttttaatggttaacccaatttttgggatacaaattgatatcaattatgattagggacatatttgattatgtcctatttttacgtaaagatattttgttttattaaaaagcttattgaaaattaagaatc

SEQ ID NO: 5544 - DNA, 139 bp, Staphylococcus aureus
gattcttaattttcaataagctttttaataaaacaaaatatctttacgtaaaaataggacataatcaaatatgtccctaatcataattgatatcaatttgtatcccaaaaattgggttaaccattaaaaagttatttta

SEQ ID NO: 5545 - DNA, 222 bp, Staphylococcus aureus
tgactgaatcttgcttgaaaatataacataaaagctatagaattagtattggattaaaaatgtcttttttgtgaacatcacaggtttttacataatttaaaagacttaaataacaaaatgatgataaactagtatacattgtggtaaaagtagtaatgaccagttgttactagtaattatcagcatttggttaaaaaaatatgaaagcttaggtgaaattaa

SEQ ID NO: 5546 - DNA, 222 bp, Staphylococcus aureus
ttaatttcacctaagctttcatatttttttaaccaaatgctgataattactagtaacaactggtcattactacttttaccacaatgtatactagtttatcatcattttgttatttaagtcttttaaattatgtaaaaacctgtgatgttcacaaaaaagacatttttaatccaatactaattctatagcttttatgttatattttcaagcaagattcagtca

SEQ ID NO: 5547 - DNA, 62 bp, Staphylococcus aureus
gctttaaataaagtttcagctaaacacataaaattaaattattcatttataaagtccttcag

SEQ ID NO: 5548 - DNA, 62 bp, Staphylococcus aureus
ctgaaggactttataaatgaataatttaattttatgtgtttagctgaaactttatttaaagc

SEQ ID NO: 5549 - DNA, 410 bp, Staphylococcus aureus
tttaattatttgcctgatacaacttgtgtcttgttatacatttctaatttaactcttgaaagtataaaggatcgcattgtatcaggcattttcattgttgtaagaaaatataaatcgcatatccttgtgagcataaatcaacttgattagcattgcaaaaacttattataatcatatgctcattcagtcaacgactactaatataacattatagaacttaggattttgattggtgttccaggcttgtaaaattgtttaatttaatgaaagtgaaaattattttaagaaagacaattaactaaaaaataaagattatgggtatagtttgctattgacaggtgttaaagctactgatactatgtagtctataaacgctttagttcgatagagcgataaaggatggttatcat

SEQ ID NO: 5550 - DNA, 410 bp, Staphylococcus aureus
atgataaccatcctttatcgctctatcgaactaaagcgtttatagactacatagtatcagtagctttaacacctgtcaatagcaaactatacccataatctttattttttagttaattgtctttcttaaaataattttcactttcattaaattaaacaattttacaagcctggaacaccaatcaaaatcctaagttctataatgttatattagtagtcgttgactgaatgagcatatgattataataagtttttgcaatgctaatcaagttgatttatgctcacaaggatatgcgatttatattttcttacaacaatgaaaatgcctgatacaatgcgatcctttatactttcaagagttaaattagaaatgtataacaagacacaagttgtatcaggcaaataattaaa

SEQ ID NO: 5551 - DNA, 55 bp, Staphylococcus aureus
aagaactgctagctgaaatgttatgagatattcataactacggctagcagttttt

SEQ ID NO: 5552 - DNA, 55 bp, Staphylococcus aureus
aaaaactgctagccgtagttatgaatatctcataacatttcagctagcagttctt

SEQ ID NO: 5553 - DNA, 248 bp, Staphylococcus aureus
aataaaacctctctttttttaaagcgtaatcgttacgatttatgattattattatcataatacataacgacatgaaaggcaattaaattaaagagatatacgtagatagggcgaagatgtagtcaaagaaaaaatcattgaaaaagaggtaacaatgtcaaaagaaaacagcagtaaaatcattcctaatttggaatcatcttactgctgtttgttgttgatttatattcatgattttgttatataat

SEQ ID NO: 5554 - DNA, 248 bp, Staphylococcus aureus
attatataacaaaatcatgaatataaatcaacaacaaacagcagtaagatgattccaaattaggaatgattttactgctgttttcttttgacattgttacctctttttcaatgattttttctttgactacatcttcgccctatctacgtatatctctttaatttaattgcctttcatgtcgttatgtattatgataataataatcataaatcgtaacgattacgctttaaaaaaagagaggttttatt

SEQ ID NO: 5555 - DNA, 130 bp, Staphylococcus aureus
tatgttgtcctcctttaaaaaatatttatgttattcattatacatgaatgatatagttctgaaaaacgtacacactccttgttgtgctttattttcagaagtatttaaataagaagaaacacgtcatttt

SEQ ID NO: 5556 - DNA, 130 bp, Staphylococcus aureus
aaaatgacgtgtttcttcttatttaaatacttctgaaaataaagcacaacaaggagtgtgtacgtttttcagaactatatcattcatgtataatgaataacataaatattttttaaaggaggacaacata

SEQ ID NO: 5557 - DNA, 63 bp, Staphylococcus aureus
gctattttcctcccttaaaagtatgttaatatatatgtatcataacatgaatggagaatataa

SEQ ID NO: 5558 - DNA, 63 bp, Staphylococcus aureus
ttatattctccattcatgttatgatacatatatattaacatacttttaagggaggaaaatagc

SEQ ID NO: 5559 - DNA, 415 bp, Staphylococcus aureus
tagctaaacataattaactaccaacattttaaactcggataaagctaatttatgaatggattagtatatattccaacgaaacaaataaactaacatgatgagcaatctcaatatatttatcaagaaagcacagtttttaaatagatgtgtattctaaagataatagttgaggttgctttttatgtttttaaagagaattgctattcaaatagttaataaattgaaaacaaagtagctggatatcatattgatttagataggagtttgttgctaattttatttgtaaatccaagtttgtagaattcttattcatttataaaataatattcgtatgatttgatgttttaattagtccaccatttcgatttgtgctatgataatagtgttaagtaaacgaaataaggggttattaagt

SEQ ID NO: 5560 - DNA, 415 bp, Staphylococcus aureus
acttaataaccccttatttcgtttacttaacactattatcatagcacaaatcgaaatggtggactaattaaaacatcaaatcatacgaatattattttataaatgaataagaattctacaaacttggatttacaaataaaattagcaacaaactcctatctaaatcaatatgatatccagctactttgttttcaatttattaactatttgaatagcaattctctttaaaaacataaaaagcaacctcaactattatctttagaatacacatctatttaaaaactgtgctttcttgataaatatattgagattgctcatcatgttagtttatttgtttcgttggaatatatactaatccattcataaattagctttatccgagtttaaaatgttggtagttaattatgtttagcta

SEQ ID NO: 5561 - DNA, 361 bp, Staphylococcus aureus
aggaacagataaatcgtaccgaaaatcatacaaagggtctgaaatgaaagtttcttagactataaaagagattagtatctattaaattttattagatactaatctctttttgtctacgataacgtaatatgattgattctatttacacgtacaaatggtttaaggtgacatatccattatctttgttagatagaatcgttgatttgcaatattgtatgtggatttgttttttttatttattttagaaatgagaactacaacttaaagtattaaacgaattgcaactatataaacagataattggagaatgaaaaaattacatgttatagtcaactcaataattttaaggaggaattaagta

SEQ ID NO: 5562 - DNA, 361 bp, Staphylococcus aureus
tacttaattcctccttaaaattattgagttgactataacatgtaattttttcattctccaattatctgtttatatagttgcaattcgtttaatactttaagttgtagttctcatttctaaaataaataaaaaaaacaaatccacatacaatattgcaaatcaacgattctatctaacaaagataatggatatgtcaccttaaaccatttgtacgtgtaaatagaatcaatcatattacgttatcgtagacaaaaagagattagtatctaataaaatttaatagatactaatctcttttatagtctaagaaactttcatttcagaccctttgtatgattttcggtacgatttatctgttcct

SEQ ID NO: 5563 - DNA, 307 bp, Staphylococcus aureus
gtgtttaactgttaccactaatgatattgtgtatgcaatttgttagtggttttcaatatttataaataaaaatattcttagtaaaatacacttttgattaagtgtaaaattatcaattcttttgcttgtaatcatttaagtaattatgtcattataaatgtaagggttttcaaaatagacaaatttaatgaaacttagtgattatttcatcttttttggtggaaaagtatctgctttgaaaactaatgtaattatttggataatgtttcatgtataatagttataaatgatgaaaaggggagatatg

SEQ ID NO: 5564 - DNA, 307 bp, Staphylococcus aureus
catatctccccttttcatcatttataactattatacatgaaacattatccaaataattacattagttttcaaagcagatacttttccaccaaaaaagatgaaataatcactaagtttcattaaatttgtctattttgaaaacccttacatttataatgacataattacttaaatgattacaagcaaaagaattgataattttacacttaatcaaaagtgtattttactaagaatatttttatttataaatattgaaaaccactaacaaattgcatacacaatatcattagtggtaacagttaaacac

SEQ ID NO: 5565 - DNA, 67 bp, Staphylococcus aureus
tgtcaaaaagttgtaacaatcagtttgtaagggctttaaaaaggaatacgttatgttacaatatgtt

SEQ ID NO: 5566 - DNA, 67 bp, Staphylococcus aureus
aacatattgtaacataacgtattcctttttaaagcccttacaaactgattgttacaactttttgaca

SEQ ID NO: 5567 - DNA, 125 bp, Staphylococcus aureus
ttaattatcatatgtgatttaacgagcttgggacagaaaacaaagccctaagctcgttaattttattttagcagcagttgactgtaaaacaatgcccgtgtaacacgctcttttcaaaaatagtc

SEQ ID NO: 5568 - DNA, 125 bp, Staphylococcus aureus
gactatttttgaaaagagcgtgttacacgggcattgttttacagtcaactgctgctaaaataaaattaacgagcttagggctttgttttctgtcccaagctcgttaaatcacatatgataattaa

SEQ ID NO: 5569 - DNA, 143 bp, Staphylococcus aureus
ctgagaatttctaattaaacgctcaactatatatagttgatcaaaaagacagcagtaggataatttcaatttggaaatatcttactgctgttttttatagtaatagctatatttttgtatttatgttttctagtttaacaata

SEQ ID NO: 5570 - DNA, 143 bp, Staphylococcus aureus
tattgttaaactagaaaacataaatacaaaaatatagctattactataaaaaacagcagtaagatatttccaaattgaaattatcctactgctgtctttttgatcaactatatatagttgagcgtttaattagaaattctcag

SEQ ID NO: 5571 - DNA, 241 bp, Staphylococcus aureus
agtctttatcctttcatctctttatttgtagtctaacaattttaaaatactacaaaaacctgcttgtgaaaacgctttacacatttcttttacaatttataacatttctgtaatataaatttaaaagaattatcaaacattttaggaatcttaaaaatgtgatgttcaacaagacgaagagagcattaaaatacccacaatgtaattttaatagacattgtgggtaggtagattaacgtat

SEQ ID NO: 5572 - DNA, 241 bp, Staphylococcus aureus
atacgttaatctacctacccacaatgtctattaaaattacattgtgggtattttaatgctctcttcgtcttgttgaacatcacatttttaagattcctaaaatgtttgataattcttttaaatttatattacagaaatgttataaattgtaaaagaaatgtgtaaagcgttttcacaagcaggtttttgtagtattttaaaattgttagactacaaataaagagatgaaaggataaagact

SEQ ID NO: 5573 - DNA, 94 bp, Staphylococcus aureus
acttttaatgaaaataaaaccattattttacatatttattcataaaatgcgatagagatagttagagttgtaagtataaatgcttatttatcaa

SEQ ID NO: 5574 - DNA, 94 bp, Staphylococcus aureus
ttgataaataagcatttatacttacaactctaactatctctatcgcattttatgaataaatatgtaaaataatggttttattttcattaaaagt

SEQ ID NO: 5575 - DNA, 71 bp, Staphylococcus aureus
acttgtgaattgaatcgcaaacgtaaacttagtaaaattaagatattaaatgaaacaggaggcttttatag

SEQ ID NO: 5576 - DNA, 71 bp, Staphylococcus aureus
ctataaaagcctcctgtttcatttaatatcttaattttactaagtttacgtttgcgattcaattcacaagt

SEQ ID NO: 5577 - DNA, 324 bp, Staphylococcus aureus
aatacattacttcaatgattagtgaagtttgaaaagatagaactagacgttaactatttaaagcatattttcgaggttgtcattacaaatgtaaaaatgtaatgacaacctcgtttttatttatatgcaagaactaggttactagctaatgtgacaagatgttaagagaaaattaaagaaaaaataacatctgtcatacaataatattgttatactactagagactgatttattagcatgattacatgttaatgtttctttacttagtaattaactttataatgtaagaataattatcttcaaccaaagaaagggattgatgat

SEQ ID NO: 5578 - DNA, 324 bp, Staphylococcus aureus
atcatcaatccctttctttggttgaagataattattcttacattataaagttaattactaagtaaagaaacattaacatgtaatcatgctaataaatcagtctctagtagtataacaatattattgtatgacagatgttattttttctttaattttctcttaacatcttgtcacattagctagtaacctagttcttgcatataaataaaaacgaggttgtcattacatttttacatttgtaatgacaacctcgaaaatatgctttaaatagttaacgtctagttctatcttttcaaacttcactaatcattgaagtaatgtatt

SEQ ID NO: 5579 - DNA, 159 bp, Staphylococcus aureus
tatgaaacaaatacaacatcgtttgtcggttttaatactgataaacgatgttttattttgttagtaccacaataaaagctaagttcgaaatgaacttataataaatcaatcacaatcactttgtgttaaaatatgtgtcaaaggaagtgagggtttgtc

SEQ ID NO: 5580 - DNA, 159 bp, Staphylococcus aureus
gacaaaccctcacttcctttgacacatattttaacacaaagtgattgtgattgatttattataagttcatttcgaacttagcttttattgtggtactaacaaaataaaacatcgtttatcagtattaaaaccgacaaacgatgttgtatttgtttcata

SEQ ID NO: 5581 - DNA, 83 bp, Staphylococcus aureus
aattgtcttacttatttatttgttatttgataacgaaaaaagttataatgtgaattaagataaagatgaggagttgagaatga

SEQ ID NO: 5582 - DNA, 83 bp, Staphylococcus aureus
tcattctcaactcctcatctttatcttaattcacattataacttttttcgttatcaaataacaaataaataagtaagacaatt

SEQ ID NO: 5583 - DNA, 328 bp, Staphylococcus aureus
ttatcatttaaaaagctaaccagtctttatatagattggttagttttttcttgcttttctaaaaaggtgttaaagataaattatttataatgttaccattttgagatgaaagtgaaatattgatattaagaagtagttgattattttacagcagattcacaatattctaataaggaataaaatgtcatgttcttcctctcaaatatagaagtgtggtagaatatatattcgtgtataatcaaatcatgattaaattacaagcaagtgggtattaatcccaagaagctttaatttaataatataaataattaaagtggggggaatcagt

SEQ ID NO: 5584 - DNA, 328 bp, Staphylococcus aureus
actgattccccccactttaattatttatattattaaattaaagcttcttgggattaatacccacttgcttgtaatttaatcatgatttgattatacacgaatatatattctaccacacttctatatttgagaggaagaacatgacattttattccttattagaatattgtgaatctgctgtaaaataatcaactacttcttaatatcaatatttcactttcatctcaaaatggtaacattataaataatttatctttaacacctttttagaaaagcaagaaaaaactaaccaatctatataaagactggttagctttttaaatgataa

SEQ ID NO: 5585 - DNA, 171 bp, Staphylococcus aureus
ttgataagacatatagtatatgacataaggcatggacaattattagtccaagaccttatgtcttttttgattctaaaaatgtttaaacataaaaaaaggactggatagtagtaccagtccaaaataattctaacctagacaattaagattagattgaatcgcatgattcat

SEQ ID NO: 5586 - DNA, 171 bp, Staphylococcus aureus
atgaatcatgcgattcaatctaatcttaattgtctaggttagaattattttggactggtactactatccagtcctttttttatgtttaaacatttttagaatcaaaaaagacataaggtcttggactaataattgtccatgccttatgtcatatactatatgtcttatcaa

SEQ ID NO: 5587 - DNA, 51 bp, Staphylococcus aureus
cgtaacttacctcctattgttttaaaatattataaaatgattagttataaa

SEQ ID NO: 5588 - DNA, 51 bp, Staphylococcus aureus
tttataactaatcattttataatattttaaaacaataggaggtaagttacg

SEQ ID NO: 5589 - DNA, 113 bp, Staphylococcus aureus
atctctctcctcataagttgcttagttcatatagatacatcatagcattttattggcgttttgtcggatatttgatatattatgaataatatgacattaaagaggtgatatgg

SEQ ID NO: 5590 - DNA, 113 bp, Staphylococcus aureus
ccatatcacctctttaatgtcatattattcataatatatcaaatatccgacaaaacgccaataaaatgctatgatgtatctatatgaactaagcaacttatgaggagagagat

SEQ ID NO: 5591 - DNA, 458 bp, Staphylococcus aureus
tgtgaataagctcccttcaaagtagacattgaaaaatgaaaattttgaagggagccttatttatgttctaggttctgatttcattttgaaaatttatatctaacttgtttcaaaaaatatgaattaagacagtgacttgcacttccaagagtgcacaattcattttctagttgaatattttcttgaaaatttttataataaattgaatttatattacagttatattacaatacataatacttcatagtttttaagttgccgagttgcattacaaattggatttcgaagtaagaatcatcattggtaatttttttaatttaacagtattttagtcaatatgattttgatgatgtcgtaattcaataatatacatatgcatttcaatattcttttaaacagcataactaaatttaattaagcatctaagaagaacagttttaaaagggaagaatgcaaaa

SEQ ID NO: 5592 - DNA, 458 bp, Staphylococcus aureus
ttttgcattcttcccttttaaaactgttcttcttagatgcttaattaaatttagttatgctgtttaaaagaatattgaaatgcatatgtatattattgaattacgacatcatcaaaatcatattgactaaaatactgttaaattaaaaaaattaccaatgatgattcttacttcgaaatccaatttgtaatgcaactcggcaacttaaaaactatgaagtattatgtattgtaatataactgtaatataaattcaatttattataaaaattttcaagaaaatattcaactagaaaatgaattgtgcactcttggaagtgcaagtcactgtcttaattcatattttttgaaacaagttagatataaattttcaaaatgaaatcagaacctagaacataaataaggctcccttcaaaattttcatttttcaatgtctactttgaagggagcttattcaca

SEQ ID NO: 5593 - DNA, 202 bp, Staphylococcus aureus
catatgtttaataagtctagttaatgtgtaacgtaacattagctagatttttttattcaaaaaaatatttacaaatattaggaaatttaagtgtaaaagagttgataaatgattatattgggactataatataattaaggtcaaagaaagtcaaagtcaaaagtgcaacttgaccaactctacaaattagaggtgaaattat

SEQ ID NO: 5594 - DNA, 202 bp, Staphylococcus aureus
ataatttcacctctaatttgtagagttggtcaagttgcacttttgactttgactttctttgaccttaattatattatagtcccaatataatcatttatcaactcttttacacttaaatttcctaatatttgtaaatatttttttgaataaaaaaatctagctaatgttacgttacacattaactagacttattaaacatatg

SEQ ID NO: 5595 - DNA, 58 bp, Staphylococcus aureus
aattgaaccaagaatgtgatgattaatcgcattcttggttttttagatttgaaattta

SEQ ID NO: 5596 - DNA, 58 bp, Staphylococcus aureus
taaatttcaaatctaaaaaaccaagaatgcgattaatcatcacattcttggttcaatt

SEQ ID NO: 5597 - DNA, 109 bp, Staphylococcus aureus
gaacttacctctttcaaaaaagttaataattcattagataatatttaatttttattgcataaaaataatattaatattatatcagaggttatcgagggggtgaagtaat

SEQ ID NO: 5598 - DNA, 109 bp, Staphylococcus aureus
attacttcaccccctcgataacctctgatataatattaatattatttttatgcaataaaaattaaatattatctaatgaattattaacttttttgaaagaggtaagttc

SEQ ID NO: 5599 - DNA, 310 bp, Staphylococcus aureus
tgctaaatatctcatcaatataaaattgttcaattaaaagtacaaagaaacaagagatttaatttatatattaggtacggcgttcgctataatgcaaagaagtaattaaatttaagaaatgtaaacttagttattgtaatgtgaatttatttgaaaaaatagaaagtattaacaattatagcttttacattaattaaaatttatttttaaaaacaagtaaacaatttacatacttataatttttgaaacttttagatttgtgttatattgattttgtaagatactttaactcacaaaggagagagattat

SEQ ID NO: 5600 - DNA, 310 bp, Staphylococcus aureus
ataatctctctcctttgtgagttaaagtatcttacaaaatcaatataacacaaatctaaaagtttcaaaaattataagtatgtaaattgtttacttgtttttaaaaataaattttaattaatgtaaaagctataattgttaatactttctattttttcaaataaattcacattacaataactaagtttacatttcttaaatttaattacttctttgcattatagcgaacgccgtacctaatatataaattaaatctcttgtttctttgtacttttaattgaacaattttatattgatgagatatttagca

SEQ ID NO: 5601 - DNA, 256 bp, Staphylococcus aureus
acacttaaaattatcaaattcaacatgaagcatttaattttacagtgatgattataatataattgccttgatacaaagattactcgtaaatgacatctttgtattaaggctttttctaaatttaaaagtgatgggttagaggttattgagctttaaaatattcaaaatacaaaacattaatggccaaaaataaaagccgcctttatctgggcagcttcaataataagaaagacatatttcattttatactaaatag

SEQ ID NO: 5602 - DNA, 256 bp, Staphylococcus aureus
ctatttagtataaaatgaaatatgtctttcttattattgaagctgcccagataaaggcggcttttatttttggccattaatgttttgtattttgaatattttaaagctcaataacctctaacccatcacttttaaatttagaaaaagccttaatacaaagatgtcatttacgagtaatctttgtatcaaggcaattatattataatcatcactgtaaaattaaatgcttcatgttgaatttgataattttaagtgt

SEQ ID NO: 5603 - DNA, 294 bp, Staphylococcus aureus
gtcattctacctccactttaattatatatattttattttaagtgaaagttagaaatttgtatagtaacatctcatatattttgaccatattatacagtttaaataaatgattttatctgaatggctattcaaatttaagcgcattaaaaccaatttcatactgaaatttgacgataataaagcattaaaattttattaactagtcaatattcctacctctgacttgagtttaaaaagtaatctatgttaaattaatacctggtattaaaaattttattaagaaggtgttcaact

SEQ ID NO: 5604 - DNA, 294 bp, Staphylococcus aureus
agttgaacaccttcttaataaaatttttaataccaggtattaatttaacatagattactttttaaactcaagtcagaggtaggaatattgactagttaataaaattttaatgctttattatcgtcaaatttcagtatgaaattggttttaatgcgcttaaatttgaatagccattcagataaaatcatttatttaaactgtataatatggtcaaaatatatgagatgttactatacaaatttctaactttcacttaaaataaaatatatataattaaagtggaggtagaatgac

SEQ ID NO: 5605 - DNA, 54 bp, Staphylococcus aureus
ttataaaaatcttcagtaacgttgttttagttactgaagattttttctgtttct

SEQ ID NO: 5606 - DNA, 54 bp, Staphylococcus aureus
agaaacagaaaaaatcttcagtaactaaaacaacgttactgaagatttttataa

SEQ ID NO: 5607 - DNA, 242 bp, Staphylococcus aureus
ttgatcactcccacttatagaaaactcttacgcatagtttacattaaaatgagacattgaggaatgattttttaatttctgcagctttattgaaattctaaaatcaatcattcttcattagtttaaagcaaaaaaatattgatatatagtaaatattgtatatataatattagttaagatttcagaaaattttgaagggaatggaaatttagaaatcggaatttgttagaggaggggattag

SEQ ID NO: 5608 - DNA, 242 bp, Staphylococcus aureus
ctaatcccctcctctaacaaattccgatttctaaatttccattcccttcaaaattttctgaaatcttaactaatattatatatacaatatttactatatatcaatatttttttgctttaaactaatgaagaatgattgattttagaatttcaataaagctgcagaaattaaaaaatcattcctcaatgtctcattttaatgtaaactatgcgtaagagttttctataagtgggagtgatcaa

SEQ ID NO: 5609 - DNA, 211 bp, Staphylococcus aureus
tatgctttgtaaattaggctggagacatatctccagtctttttgtgttggataaaaactttgggaataaaaatttaaaataagtcgttttttaaattactgaaattgattaaatgcataaataactgaatattctaaaaataaacttgtaataattttttctatgagtaaactaaaaagaaaaaattagattgaaagtaggaggcatatgt

SEQ ID NO: 5610 - DNA, 211 bp, Staphylococcus aureus
acatatgcctcctactttcaatctaattttttctttttagtttactcatagaaaaaattattacaagtttatttttagaatattcagttatttatgcatttaatcaatttcagtaatttaaaaaacgacttattttaaatttttattcccaaagtttttatccaacacaaaaagactggagatatgtctccagcctaatttacaaagcata

SEQ ID NO: 5611 - DNA, 50 bp, Staphylococcus aureus
taatgtaacctcgacgattttgtcgaggtttacttatatggggggatgtt

SEQ ID NO: 5612 - DNA, 50 bp, Staphylococcus aureus
aacatccccccatataagtaaacctcgacaaaatcgtcgaggttacatta

SEQ ID NO: 5613 - DNA, 293 bp, Staphylococcus aureus
ttaaatgcctactttcttagtaatattttaataattatcattataacagtatttcttaaaaatgtaagatgtgttagaatatacgtataacttactactaacaaaggattaataatcttttttataagtgtagaaacttatctgaaaaattaggtttttctcatttaattttaatgttagatagttataataaatagtaacgattaagaattttagaaaaaaatgttttttcttgatctataactaaattttaagcaatgaattttattcattcaaataggagagtgagatgt

SEQ ID NO: 5614 - DNA, 293 bp, Staphylococcus aureus
acatctcactctcctatttgaatgaataaaattcattgcttaaaatttagttatagatcaagaaaaaacatttttttctaaaattcttaatcgttactatttattataactatctaacattaaaattaaatgagaaaaacctaatttttcagataagtttctacacttataaaaaagattattaatcctttgttagtagtaagttatacgtatattctaacacatcttacatttttaagaaatactgttataatgataattattaaaatattactaagaaagtaggcatttaa

SEQ ID NO: 5615 - DNA, 370 bp, Staphylococcus aureus
taaccatttaactatgtgtcatactttactaaaagatatgtcaagcaacactatttctatagtgttgcttttttggttttaattttacaataattgcttagtatcttttaaatcaaatgtgcaattgttaatatagctctatattagagtgttttggatgaaacatttgctatgataaggtaaaattaaattaagaaagtgctttaatgctttaactgtataaatcatttaaatagttttgctacaacgaatatgttattataagttaccaaaatattttagagaaagaaatcaaacaaataaattgtattttgtttgatgctttaatacaatgtggatactattcatcgactgtaaggagtgagatgat

SEQ ID NO: 5616 - DNA, 370 bp, Staphylococcus aureus
atcatctcactccttacagtcgatgaatagtatccacattgtattaaagcatcaaacaaaatacaatttatttgtttgatttctttctctaaaatattttggtaacttataataacatattcgttgtagcaaaactatttaaatgatttatacagttaaagcattaaagcactttcttaatttaattttaccttatcatagcaaatgtttcatccaaaacactctaatatagagctatattaacaattgcacatttgatttaaaagatactaagcaattattgtaaaattaaaaccaaaaaagcaacactatagaaatagtgttgcttgacatatcttttagtaaagtatgacacatagttaaatggtta

SEQ ID NO: 5617 - DNA, 120 bp, Staphylococcus aureus
cgatattaattaagcaacgcactatgaaaggagactctttggagtctctttttttattgatttcaaaagctgaaaaagtaatagtagttaaacttacgtgtaatattttgaggtgaagat

SEQ ID NO: 5618 - DNA, 120 bp, Staphylococcus aureus
atcttcacctcaaaatattacacgtaagtttaactactattactttttcagcttttgaaatcaataaaaaaagagactccaaagagtctcctttcatagtgcgttgcttaattaatatcg

SEQ ID NO: 5619 - DNA, 459 bp, Staphylococcus aureus
tactattgtattcgcttacattatgaacagattgtgacaatttaaattaagtactattaaaaggttgaaatggtagagatagcatgttatattatgaacatgaaattaatcacataacaaacatacccctttgtttgaagtgaaaaatttctcccatcccctttgtttagcgtcgtgtattcagacacgacgtttttttatgttcttttttaataagagagaagtgaagttgtataaaaatgtattaaatatgcactttttatacattaacgattaatataagtctattatgtaccaaatttataatttgtataattttcgaactggttaaattcgaaaaatatcactaatatatttagatcgatgtgtaacattacgttctaataatttaatgttgcaaaattaagagtcagtaaaaagacctcgttacatttatggtgtacgaggtctttaatttat

SEQ ID NO: 5620 - DNA, 459 bp, Staphylococcus aureus
ataaattaaagacctcgtacaccataaatgtaacgaggtctttttactgactcttaattttgcaacattaaattattagaacgtaatgttacacatcgatctaaatatattagtgatatttttcgaatttaaccagttcgaaaattatacaaattataaatttggtacataatagacttatattaatcgttaatgtataaaaagtgcatatttaatacatttttatacaacttcacttctctcttattaaaaaagaacataaaaaaacgtcgtgtctgaatacacgacgctaaacaaaggggatgggagaaatttttcacttcaaacaaaggggtatgtttgttatgtgattaatttcatgttcataatataacatgctatctctaccatttcaaccttttaatagtacttaatttaaattgtcacaatctgttcataatgtaagcgaatacaatagta

SEQ ID NO: 5621 - DNA, 103 bp, Staphylococcus aureus
ttaatcacccattttcaaaaatttactattacgaacttaagttaatatataactaatataacatgattttaaacatttggaagaaatatgcatatttgccaat

SEQ ID NO: 5622 - DNA, 103 bp, Staphylococcus aureus
attggcaaatatgcatatttcttccaaatgtttaaaatcatgttatattagttatatattaacttaagttcgtaatagtaaatttttgaaaatgggtgattaa

SEQ ID NO: 5623 - DNA, 185 bp, Staphylococcus aureus
gatatgtatacacctcgtatcaaattcaatttatcttaactatattatgaatgacaaagttgaattttaaaagcaatttcctttatctattatcaatgttaatttgaccattaaaaatagtgttcgtaagtgttttgtattattgaattgtgttaaaatgttatggaataagaggaggattaagc

SEQ ID NO: 5624 - DNA, 185 bp, Staphylococcus aureus
gcttaatcctcctcttattccataacattttaacacaattcaataatacaaaacacttacgaacactatttttaatggtcaaattaacattgataatagataaaggaaattgcttttaaaattcaactttgtcattcataatatagttaagataaattgaatttgatacgaggtgtatacatatc

SEQ ID NO: 5625 - DNA, 277 bp, Staphylococcus aureus
caataatgatattaaaatgcagacgtattttagtacgacgtaaaattaatgattttaaaatgctagtatgtatatgattttgataaataaatgctttttacgtaaatcaagtttgatacagaaaggactaaatcaaacatttatcgttgtaatacgtttaaataactttattaaaaagtcataatagtgttaaaatgtattgacgaataaaaagttagttaaaactgggattagatattctatccgttaaattaattattataaggagttatcttac

SEQ ID NO: 5626 - DNA, 277 bp, Staphylococcus aureus
gtaagataactccttataataattaatttaacggatagaatatctaatcccagttttaactaactttttattcgtcaatacattttaacactattatgactttttaataaagttatttaaacgtattacaacgataaatgtttgatttagtcctttctgtatcaaacttgatttacgtaaaaagcatttatttatcaaaatcatatacatactagcattttaaaatcattaattttacgtcgtactaaaatacgtctgcattttaatatcattattg

SEQ ID NO: 5627 - DNA, 196 bp, Staphylococcus aureus
tatcattcaacagctttgttcacgttatcatatatgtgagcaaagcttttttgcttttataataatcggactgatggaaaattatttgatatttcatctgactgattttttttatgcacaaaaaaatctcctcaaaagctgtagtttcaacttttgaggagatagtatcttatattcttaaaagacatccacagaa

SEQ ID NO: 5628 - DNA, 196 bp, Staphylococcus aureus
ttctgtggatgtcttttaagaatataagatactatctcctcaaaagttgaaactacagcttttgaggagatttttttgtgcataaaaaaaatcagtcagatgaaatatcaaataattttccatcagtccgattattataaaagcaaaaaagctttgctcacatatatgataacgtgaacaaagctgttgaatgata

SEQ ID NO: 5629 - DNA, 270 bp, Staphylococcus aureus
aaacgatgttcctcctatttttctaaacttagttattatttagtatatcctaaatagcagtgcttaaaaaggttaatattttttaaatatacttaaattaaccattcactttctattttaagatatttactttcaatagtttgtgagacttttcaatgactcgtaagtctgcaattggatcaaacagcaccagtttatatgaataacttattttaatattaaacgtgtttaaataatgaaatgatcatattaatatttataagaatattc

SEQ ID NO: 5630 - DNA, 270 bp, Staphylococcus aureus
gaatattcttataaatattaatatgatcatttcattatttaaacacgtttaatattaaaataagttattcatataaactggtgctgtttgatccaattgcagacttacgagtcattgaaaagtctcacaaactattgaaagtaaatatcttaaaatagaaagtgaatggttaatttaagtatatttaaaaaatattaacctttttaagcactgctatttaggatatactaaataataactaagtttagaaaaataggaggaacatcgttt

SEQ ID NO: 5631 - DNA, 144 bp, Staphylococcus aureus
tctacttttgtttatagtatatgtagtgatcatttgataaaaaaagaaacagcattgataattttaggtgctcagaaatttgaattttaaaaatatagtgtctcttggtacaataacaatacaactactagggggcactttttt

SEQ ID NO: 5632 - DNA, 144 bp, Staphylococcus aureus
aaaaaagtgccccctagtagttgtattgttattgtaccaagagacactatatttttaaaattcaaatttctgagcacctaaaattatcaatgctgtttctttttttatcaaatgatcactacatatactataaacaaaagtaga

SEQ ID NO: 5633 - DNA, 193 bp, Staphylococcus aureus
tttacattagtagatttagtatgaattgtcttcatatagtttggtctataatataatttataaaagattttactgtttgatttaatttaaatttgtcgaaattgcaaaagatgtataatgaattatttttaatgtaacggttttcaaagaaatttgatataatagcaataggttaaacaaaggaggaattcag

SEQ ID NO: 5634 - DNA, 193 bp, Staphylococcus aureus
ctgaattcctcctttgtttaacctattgctattatatcaaatttctttgaaaaccgttacattaaaaataattcattatacatcttttgcaatttcgacaaatttaaattaaatcaaacagtaaaatcttttataaattatattatagaccaaactatatgaagacaattcatactaaatctactaatgtaaa

SEQ ID NO: 5635 - DNA, 112 bp, Staphylococcus aureus
gtaacataatagtattgttaatcgtagtatgtttgaattaataagaaaatggtcatttttattgaatgtaataaaaatgaccattttctttattttaaaatacgttttaacc

SEQ ID NO: 5636 - DNA, 112 bp, Staphylococcus aureus
ggttaaaacgtattttaaaataaagaaaatggtcatttttattacattcaataaaaatgaccattttcttattaattcaaacatactacgattaacaatactattatgttac

SEQ ID NO: 5637 - DNA, 432 bp, Staphylococcus aureus
taatagccaccctccgttagtttgaaaattttatttaagtgtaacttattttacggcattataaaagaaataaagacgcaaagtcgttacatttatagcaattttaatcaatagatgaattgatacaaaataaaacgttattttataaagcaatttattgttctatgttttatttgtatatttaaaattatccagtatacaattatagcatatttttggaaacaattatgatattataccatgttacaagatggttttaataatttaagatgagccataattgtaaaactaattcataataccgtatgttttatttttaatagtagaaattagaaaatgctgattagtaggatataacagtgaaattataaatttattaacatcaacaaaacgtgtataataaacatattgtagaaaaaggagcggttcagt

SEQ ID NO: 5638 - DNA, 432 bp, Staphylococcus aureus
actgaaccgctcctttttctacaatatgtttattatacacgttttgttgatgttaataaatttataatttcactgttatatcctactaatcagcattttctaatttctactattaaaaataaaacatacggtattatgaattagttttacaattatggctcatcttaaattattaaaaccatcttgtaacatggtataatatcataattgtttccaaaaatatgctataattgtatactggataattttaaatatacaaataaaacatagaacaataaattgctttataaaataacgttttattttgtatcaattcatctattgattaaaattgctataaatgtaacgactttgcgtctttatttcttttataatgccgtaaaataagttacacttaaataaaattttcaaactaacggagggtggctatta

SEQ ID NO: 5639 - DNA, 301 bp, Staphylococcus aureus
cagctcaattgtataatcgaatttgttacattaaaaataattgtttcgttgaagaaaaataaattgtatattttaaaagaaaaaggtatactatgatgtatcaaatgaataacctatggcattttgtcagaggggagtaacttaagaatcatgaccgtataaatgattcgacactttatcgtcattacgaagatatcttccggtaaagtgggcaatttaaattgcttagtgagacctttgctatttatttagcataggtctttttgtttgtacttaacttatttatttaaaggagttgtac

SEQ ID NO: 5640 - DNA, 301 bp, Staphylococcus aureus
gtacaactcctttaaataaataagttaagtacaaacaaaaagacctatgctaaataaatagcaaaggtctcactaagcaatttaaattgcccactttaccggaagatatcttcgtaatgacgataaagtgtcgaatcatttatacggtcatgattcttaagttactcccctctgacaaaatgccataggttattcatttgatacatcatagtatacctttttcttttaaaatatacaatttatttttcttcaacgaaacaattatttttaatgtaacaaattcgattatacaattgagctg

SEQ ID NO: 5641 - DNA, 59 bp, Staphylococcus aureus
ttgatgtgaagcggacaatcttaatttagtttaaggttgtcctttttcatttaattgag

SEQ ID NO: 5642 - DNA, 59 bp, Staphylococcus aureus
ctcaattaaatgaaaaaggacaaccttaaactaaattaagattgtccgcttcacatcaa

SEQ ID NO: 5643 - DNA, 82 bp, Staphylococcus aureus
tagaaattatatagattttaaagcaaattaggtgttaatgtgtcataatgataagtgattttattgaatggagtggacatta

SEQ ID NO: 5644 - DNA, 82 bp, Staphylococcus aureus
taatgtccactccattcaataaaatcacttatcattatgacacattaacacctaatttgctttaaaatctatataatttcta

SEQ ID NO: 5645 - DNA, 135 bp, Staphylococcus aureus
tataatagcaatctaagtttagttaatatagattttaactggaacttagattgcttttttagtttgtatttttaacttattttataagacgattggttttcaaaatggtaaactagtaacaatgagaggtgtaac

SEQ ID NO: 5646 - DNA, 135 bp, Staphylococcus aureus
gttacacctctcattgttactagtttaccattttgaaaaccaatcgtcttataaaataagttaaaaatacaaactaaaaaagcaatctaagttccagttaaaatctatattaactaaacttagattgctattata

SEQ ID NO: 5647 - DNA, 180 bp, Staphylococcus aureus
atattgctatgtaataaattaattataagttcaacaagtataaaaacctttcttagagaagattatctaggaaaggtttttagaattttaaaattgatataaaagaacagtgaaattctcattcattatatataagtaaacaaaaaagctaaaatggtatataccattttagcaagtaac

SEQ ID NO: 5648 - DNA, 180 bp, Staphylococcus aureus
gttacttgctaaaatggtatataccattttagcttttttgtttacttatatataatgaatgagaatttcactgttcttttatatcaattttaaaattctaaaaacctttcctagataatcttctctaagaaaggtttttatacttgttgaacttataattaatttattacatagcaatat

SEQ ID NO: 5649 - DNA, 141 bp, Staphylococcus aureus
ttaatttgtatgtgtttgaatatcaagcacaaatattattataacaagattaagttaatttgcaatagataccttaaaaaaatatgcagaacatttacactatatttataaaacattccgcatattttaaaaataaacaat

SEQ ID NO: 5650 - DNA, 141 bp, Staphylococcus aureus
attgtttatttttaaaatatgcggaatgttttataaatatagtgtaaatgttctgcatatttttttaaggtatctattgcaaattaacttaatcttgttataataatatttgtgcttgatattcaaacacatacaaattaa

SEQ ID NO: 5651 - DNA, 209 bp, Staphylococcus aureus
aagcaaaacctcgctttattaagttttaaaccattaatataaaaatacaattaatgatataaagatattttataataaaattctgagttgtcaagttattattttggtgaaaatgtacaataatttttaactaatagtcagaatattcattgatttcaaaattagaaaaatgtatacttattataaattaaagaaaggtagtggtttct

SEQ ID NO: 5652 - DNA, 209 bp, Staphylococcus aureus
agaaaccactacctttctttaatttataataagtatacatttttctaattttgaaatcaatgaatattctgactattagttaaaaattattgtacattttcaccaaaataataacttgacaactcagaattttattataaaatatctttatatcattaattgtatttttatattaatggtttaaaacttaataaagcgaggttttgctt

SEQ ID NO: 5653 - DNA, 80 bp, Staphylococcus aureus
cattgattcgaattccataacgcaatcataaaaggactattcttaacatctcatacatgtaagaatagtcctttaatcgt

SEQ ID NO: 5654 - DNA, 80 bp, Staphylococcus aureus
acgattaaaggactattcttacatgtatgagatgttaagaatagtccttttatgattgcgttatggaattcgaatcaatg

SEQ ID NO: 5655 - DNA, 198 bp, Staphylococcus aureus
tacaatctctcccttatatctatatatattctctacttatttatgccttaactttgctcaaaatgccaattatatactcacaaatcattctaaatatcggcttaaagttacattttattatttttgattgttaatagtttatttgttaagtgaattttagtacaatataatttagttatgatttaaggaggacttaaa

SEQ ID NO: 5656 - DNA, 198 bp, Staphylococcus aureus
tttaagtcctccttaaatcataactaaattatattgtactaaaattcacttaacaaataaactattaacaatcaaaaataataaaatgtaactttaagccgatatttagaatgatttgtgagtatataattggcattttgagcaaagttaaggcataaataagtagagaatatatatagatataagggagagattgta

SEQ ID NO: 5657 - DNA, 208 bp, Staphylococcus aureus
ataagcttttcttagacgtctgtgttctaagaaaagctttttgctttagaaaagcaatacgaagattcaaggcatgctttattatagtgtatacatttttaacggcaagcagttattattgaggttatattttagtcagtttttattactaaatattttataaaaatagtataatattttgtgggcaagttgaattgatggtggctat

SEQ ID NO: 5658 - DNA, 208 bp, Staphylococcus aureus
atagccaccatcaattcaacttgcccacaaaatattatactatttttataaaatatttagtaataaaaactgactaaaatataacctcaataataactgcttgccgttaaaaatgtatacactataataaagcatgccttgaatcttcgtattgcttttctaaagcaaaaagcttttcttagaacacagacgtctaagaaaagcttat

SEQ ID NO: 5659 - DNA, 326 bp, Staphylococcus aureus
aaaataaccatcatttcaaaactttgacatagaatgatggttaaagaaaatctcatttagtcaccgtctttttaacgggctcattaggcgacatgttcctgcatgtcgtctttttacatttttatagtaacatatcttttatttaattgtctatttttattagatgtgtaacaaaattttgaagtattttccgtatattgcctgctaaacatgtcagatttgaaaggaaaatcatactgtggtagaaatcaattatgattatatggtagtacttataaataagtgatttctattgaatatgtaatgaagttcatatattaatataa

SEQ ID NO: 5660 - DNA, 326 bp, Staphylococcus aureus
ttatattaatatatgaacttcattacatattcaatagaaatcacttatttataagtactaccatataatcataattgatttctaccacagtatgattttcctttcaaatctgacatgtttagcaggcaatatacggaaaatacttcaaaattttgttacacatctaataaaaatagacaattaaataaaagatatgttactataaaaatgtaaaaagacgacatgcaggaacatgtcgcctaatgagcccgttaaaaagacggtgactaaatgagattttctttaaccatcattctatgtcaaagttttgaaatgatggttatttt

SEQ ID NO: 5661 - DNA, 173 bp, Staphylococcus aureus
caaccatcatttcaaaactttgacaacgaatgatggttaaagaaaatctcatttagtcaccgtctttttaacgggttcaataggggacatgttcctgcatgtcgtctatttatgcactgcgcaatttaacaataatacaattatactttgatgtccatttaacataaagtggt

SEQ ID NO: 5662 - DNA, 173 bp, Staphylococcus aureus
accactttatgttaaatggacatcaaagtataattgtattattgttaaattgcgcagtgcataaatagacgacatgcaggaacatgtcccctattgaacccgttaaaaagacggtgactaaatgagattttctttaaccatcattcgttgtcaaagttttgaaatgatggttg

SEQ ID NO: 5663 - DNA, 87 bp, Staphylococcus aureus
tatccaaaagataaaattaaaagccaatcaatgggaaatgttgacttcaacactccgtttgattggcttttataatgtgttactaag

SEQ ID NO: 5664 - DNA, 87 bp, Staphylococcus aureus
cttagtaacacattataaaagccaatcaaacggagtgttgaagtcaacatttcccattgattggcttttaattttatcttttggata

SEQ ID NO: 5665 - DNA, 82 bp, Staphylococcus aureus
tcattttaaatacatcatacaataaaattaaattgtgcggtagaagaatttgaaattaaattgaattggcttgattaaaagg

SEQ ID NO: 5666 - DNA, 82 bp, Staphylococcus aureus
ccttttaatcaagccaattcaatttaatttcaaattcttctaccgcacaatttaattttattgtatgatgtatttaaaatga

SEQ ID NO: 5667 - DNA, 487 bp, Staphylococcus aureus
catgtcacctccaacattcatatttttaaaacatagtccaaattatatttgtaaacatgtggaaagtaaagattttttataagattaattattaaatatttattaaatattctattgtattgaacaattgttgtagaaagatgtttaagtcatcagttactttttgtatttataaataaagattagtacagcatagtgcaaagattatagggaaatgaattaactattgcatcgctatttatgaatcgtaaacactattatgaaattgcgagagtagtatggataattagaatgatggtttgagataaatgagtattattaaccagtgcgtcatcttcaaaattagaggccatttgctgtttataataagaagatttgataataaactatgataagaaaaaataatagcataccaaatatatcataaacaaattaaatgataaaataataatgcagttttctattaaagttgtttggaggtaaatat

SEQ ID NO: 5668 - DNA, 487 bp, Staphylococcus aureus
atatttacctccaaacaactttaatagaaaactgcattattattttatcatttaatttgtttatgatatatttggtatgctattattttttcttatcatagtttattatcaaatcttcttattataaacagcaaatggcctctaattttgaagatgacgcactggttaataatactcatttatctcaaaccatcattctaattatccatactactctcgcaatttcataatagtgtttacgattcataaatagcgatgcaatagttaattcatttccctataatctttgcactatgctgtactaatctttatttataaatacaaaaagtaactgatgacttaaacatctttctacaacaattgttcaatacaatagaatatttaataaatatttaataattaatcttataaaaaatctttactttccacatgtttacaaatataatttggactatgttttaaaaatatgaatgttggaggtgacatg

SEQ ID NO: 5669 - DNA, 63 bp, Staphylococcus aureus
ttctctatatcttacgaactatatacccattcatatatgctttttaaacgtcattgtcacaat

SEQ ID NO: 5670 - DNA, 63 bp, Staphylococcus aureus
attgtgacaatgacgtttaaaaagcatatatgaatgggtatatagttcgtaagatatagagaa

SEQ ID NO: 5671 - DNA, 89 bp, Staphylococcus aureus
actttctaaaattataagtatatctttttaaaataagctagaatttctatataataaatgttaataacgtaaaagggaatgatgacata

SEQ ID NO: 5672 - DNA, 89 bp, Staphylococcus aureus
tatgtcatcattcccttttacgttattaacatttattatatagaaattctagcttattttaaaaagatatacttataattttagaaagt

SEQ ID NO: 5673 - DNA, 51 bp, Staphylococcus aureus
aaaaactcgacagttcgatgtaagtcgattgccgagtagtatcattttcta

SEQ ID NO: 5674 - DNA, 51 bp, Staphylococcus aureus
tagaaaatgatactactcggcaatcgacttacatcgaactgtcgagttttt

SEQ ID NO: 5675 - DNA, 181 bp, Staphylococcus aureus
tgaatacaaaacctctttaaatcatattttttataacaaagatattttaatagaaagtagcataaaggtcaattgacgtgaaaaattgcaagataagtttaagcaattcttgtaacacaattatccaaaaatgatacaatataataatgagtgaaaaaagacgaagaaagaagtgaaatgg

SEQ ID NO: 5676 - DNA, 181 bp, Staphylococcus aureus
ccatttcacttctttcttcgtcttttttcactcattattatattgtatcatttttggataattgtgttacaagaattgcttaaacttatcttgcaatttttcacgtcaattgacctttatgctactttctattaaaatatctttgttataaaaaatatgatttaaagaggttttgtattca

SEQ ID NO: 5677 - DNA, 237 bp, Staphylococcus aureus
gttattttgaatatgatattaagtcacttgcgtcgtttattagcgacgataggtggcttttttattttataagaatttaaaagagaattttaattaattatcataaagataagatggtttgagtaaattaatagagaaagaataaatgttaaagattattattacaatgaaaaaacgagctggtgagaaattgaattctcgccaacccgctttatgaagtgaaatcatttaaattag

SEQ ID NO: 5678 - DNA, 237 bp, Staphylococcus aureus
ctaatttaaatgatttcacttcataaagcgggttggcgagaattcaatttctcaccagctcgttttttcattgtaataataatctttaacatttattctttctctattaatttactcaaaccatcttatctttatgataattaattaaaattctcttttaaattcttataaaataaaaaagccacctatcgtcgctaataaacgacgcaagtgacttaatatcatattcaaaataac

SEQ ID NO: 5679 - DNA, 81 bp, Staphylococcus aureus
ataataccctccatttaaatcaaaatattttgcgttgctaagactttgcttctatttactaaatctaaattaagatgaagt

SEQ ID NO: 5680 - DNA, 81 bp, Staphylococcus aureus
acttcatcttaatttagatttagtaaatagaagcaaagtcttagcaacgcaaaatattttgatttaaatggagggtattat

SEQ ID NO: 5681 - DNA, 527 bp, Staphylococcus aureus
ctaaaaacctccaaaaaatttatttacaagttaaatataacactaaaaatttttaagtcaataagaatatataaataaattaaaaagtttttgtaaagattagagtttacaaaaacattaaggtaattaaaattgaattgtattatactttattcaattgagttaaattgataagatcgtcaattgtttgcatttatctaaaagaataaataagaaaggaattgagagcgaatggaaagtatttgtttataataataaatagtaacttttgaataataattgtttggccaaaggtagattaatatgaatggtgatatattatttgagtgcttaagtttcgaagaacaattataagttagcatattaaaaccttttgatagaatcattttgagtgaggtgtttaaaggagaggaatataactcggtagtatttacagtctctatagagtattatttaaaacttatagaatataaaaaactgaacgtactatgaatttagttcacgacgtccagttcaacatatcattt

SEQ ID NO: 5682 - DNA, 527 bp, Staphylococcus aureus
aaatgatatgttgaactggacgtcgtgaactaaattcatagtacgttcagttttttatattctataagttttaaataatactctatagagactgtaaatactaccgagttatattcctctcctttaaacacctcactcaaaatgattctatcaaaaggttttaatatgctaacttataattgttcttcgaaacttaagcactcaaataatatatcaccattcatattaatctacctttggccaaacaattattattcaaaagttactatttattattataaacaaatactttccattcgctctcaattcctttcttatttattcttttagataaatgcaaacaattgacgatcttatcaatttaactcaattgaataaagtataatacaattcaattttaattaccttaatgtttttgtaaactctaatctttacaaaaactttttaatttatttatatattcttattgacttaaaaatttttagtgttatatttaacttgtaaataaattttttggaggtttttag

SEQ ID NO: 5683 - DNA, 195 bp, Staphylococcus aureus
ttgtgacacctcaaatataaatcaaatattgtctaaaaatttagaaattaataatatcataacatacttttaaaccaaaaaagggtaaattacttaagctttatttgaaaaacgaaaaatgtctaaatacactgtagtaactacttttcaaaatgaataaagtggttacagttaatgtacttagacactataaaa

SEQ ID NO: 5684 - DNA, 195 bp, Staphylococcus aureus
ttttatagtgtctaagtacattaactgtaaccactttattcattttgaaaagtagttactacagtgtatttagacatttttcgtttttcaaataaagcttaagtaatttacccttttttggtttaaaagtatgttatgatattattaatttctaaatttttagacaatatttgatttatatttgaggtgtcacaa

SEQ ID NO: 5685 - DNA, 152 bp, Staphylococcus aureus
attttatctcctttatgtccataagactcttactaatttattatattttgtattagttatgcaacaaatttgtctattgtgtcgaatagtattgtaaaaattataaaaaaagcatataatattataaataatatgtagtggagtagatcaac

SEQ ID NO: 5686 - DNA, 152 bp, Staphylococcus aureus
gttgatctactccactacatattatttataatattatatgctttttttataatttttacaatactattcgacacaatagacaaatttgttgcataactaatacaaaatataataaattagtaagagtcttatggacataaaggagataaaat

SEQ ID NO: 5687 - DNA, 72 bp, Staphylococcus aureus
taaaaaagggatcaaaggtcatcccccatgattgatagtgggggatgacttttgatcctatgttcatgttgc

SEQ ID NO: 5688 - DNA, 72 bp, Staphylococcus aureus
gcaacatgaacataggatcaaaagtcatcccccactatcaatcatgggggatgacctttgatccctttttta

SEQ ID NO: 5689 - DNA, 227 bp, Staphylococcus aureus
tctatttattactcctaacatttattaattattactaacattatagtacctgttttatatacctgtgcgtatttaaccaatttgtaatatactcttaatttacattttcactgtaaaaaaatgaaaaaaattttgaatctcaatggtgacgtgacaaatcaaatagaattgatgtcaatttaagaattggtttattacaaatgtttctaaaatagatacaacttttt

SEQ ID NO: 5690 - DNA, 227 bp, Staphylococcus aureus
aaaaagttgtatctattttagaaacatttgtaataaaccaattcttaaattgacatcaattctatttgatttgtcacgtcaccattgagattcaaaatttttttcatttttttacagtgaaaatgtaaattaagagtatattacaaattggttaaatacgcacaggtatataaaacaggtactataatgttagtaataattaataaatgttaggagtaataaataga

SEQ ID NO: 5691 - DNA, 154 bp, Staphylococcus aureus
aaaattcctccacatcctaacaaaatcatttacatttaatttactaataataacatagaataacgattgttattttcctcaaaaataattagacataaaaaagctataaagatgattcacaagaatcatctttatagctaattaattattaatg

SEQ ID NO: 5692 - DNA, 154 bp, Staphylococcus aureus
cattaataattaattagctataaagatgattcttgtgaatcatctttatagcttttttatgtctaattatttttgaggaaaataacaatcgttattctatgttattattagtaaattaaatgtaaatgattttgttaggatgtggaggaatttt

SEQ ID NO: 5693 - DNA, 450 bp, Staphylococcus aureus
gattgatgctcctatattaaatttttgttaaatcataatcataattttaaaatataattagttgaacgatatttatacaacttcattactaatacattatagccttaaattgtagtactttatagtaaaaaatacaaatgttatgtcaaagttccttgtaatttgaatgttttgttaaaatcaaaaagcatttttaaaaatataatgcgactttagtatgatgtcttaaaaaatttaaaggcgtaatataaattcgagtgatttatacaaagtgataaggtataattaattttgttgtatagataacatattagaaaaacttattactatgtagcgtaaagcataaatgaatgataagttaatttttgtaagttgtattattaggcatctaggttcaaatttttaacgatttaaatatataaaatgaatacattgtgaggcaattatcaa

SEQ ID NO: 5694 - DNA, 450 bp, Staphylococcus aureus
ttgataattgcctcacaatgtattcattttatatatttaaatcgttaaaaatttgaacctagatgcctaataatacaacttacaaaaattaacttatcattcatttatgctttacgctacatagtaataagtttttctaatatgttatctatacaacaaaattaattataccttatcactttgtataaatcactcgaatttatattacgcctttaaattttttaagacatcatactaaagtcgcattatatttttaaaaatgctttttgattttaacaaaacattcaaattacaaggaactttgacataacatttgtattttttactataaagtactacaatttaaggctataatgtattagtaatgaagttgtataaatatcgttcaactaattatattttaaaattatgattatgatttaacaaaaatttaatataggagcatcaatc

SEQ ID NO: 5695 - DNA, 247 bp, Staphylococcus aureus
ttaatatagaagatataacatgtatatggcattaaggcatcgaccttatctgaccagtatacgagttatatctttttttttatagtggtaaaaagtttaaagtataaggttgaagaaggatgagtttaaaaatatgtgttaactgataaaaggggaaatcatttggtgagttggcatcagactaaaatgaatgaagacgaatacgttggtccatgcgtggtgtgaatgttttctaaatctaactgga

SEQ ID NO: 5696 - DNA, 247 bp, Staphylococcus aureus
tccagttagatttagaaaacattcacaccacgcatggaccaacgtattcgtcttcattcattttagtctgatgccaactcaccaaatgatttccccttttatcagttaacacatatttttaaactcatccttcttcaaccttatactttaaactttttaccactataaaaaaaaagatataactcgtatactggtcagataaggtcgatgccttaatgccatatacatgttatatcttctatattaa

SEQ ID NO: 5697 - DNA, 243 bp, Staphylococcus aureus
atttttaaaaacctagggataattttattgacgtgaacaacattgagattatctttagacataaatatggattttgaagttactatatttattagttgtggttgttaatgtattaattgaattgattataatgattgtcttataagatatagaaggggacttaaccatttaaaaattgaaggaaaataaaaaccagctaacaaaagtgttagctggttaaactttacattattaaaatgttgt

SEQ ID NO: 5698 - DNA, 243 bp, Staphylococcus aureus
acaacattttaataatgtaaagtttaaccagctaacacttttgttagctggtttttattttccttcaatttttaaatggttaagtccccttctatatcttataagacaatcattataatcaattcaattaatacattaacaaccacaactaataaatatagtaacttcaaaatccatatttatgtctaaagataatctcaatgttgttcacgtcaataaaattatccctaggtttttaaaaat

SEQ ID NO: 5699 - DNA, 265 bp, Staphylococcus aureus
ttttttgacctcctaatactacaaatgtagggcttaacattaattttaagttattacacaatatttacaagggcttatgggaaaaaaattaataaaattgtatcaaaaatgttgataaatcaaggtgtgacgtgggttcacacatttgttaaaattatgtgtacattttgtgactaatagcgtttttgaaaaaattgcttcatatttaaaaggaaagttgagaatagctttcaattaaaggttaattgaatgaaaataaaaaaag

SEQ ID NO: 5700 - DNA, 265 bp, Staphylococcus aureus
ctttttttattttcattcaattaacctttaattgaaagctattctcaactttccttttaaatatgaagcaattttttcaaaaacgctattagtcacaaaatgtacacataattttaacaaatgtgtgaacccacgtcacaccttgatttatcaacatttttgatacaattttattaatttttttcccataagcccttgtaaatattgtgtaataacttaaaattaatgttaagccctacatttgtagtattaggaggtcaaaaaa

SEQ ID NO: 5701 - DNA, 95 bp, Staphylococcus aureus
taagttttaataatttgataggtagtcctttggtatacagaaaaaatacaatatttaggttaaagttgcagatgaagttggaataacaaataaaa

SEQ ID NO: 5702 - DNA, 95 bp, Staphylococcus aureus
ttttatttgttattccaacttcatctgcaactttaacctaaatattgtattttttctgtataccaaaggactacctatcaaattattaaaactta

SEQ ID NO: 5703 - DNA, 188 bp, Staphylococcus aureus
aatgtaacctccgaatgataagtcatttctgagttagctttactataccttaatttatattatttacacatcatactatagtcctaatcttaccctataaagaatgaaatttaaatataaatttataaataatgaggaaataattattattttgaaaatctgccacaattgtaaaattaataatttag

SEQ ID NO: 5704 - DNA, 188 bp, Staphylococcus aureus
ctaaattattaattttacaattgtggcagattttcaaaataataattatttcctcattatttataaatttatatttaaatttcattctttatagggtaagattaggactatagtatgatgtgtaaataatataaattaaggtatagtaaagctaactcagaaatgacttatcattcggaggttacatt

SEQ ID NO: 5705 - DNA, 190 bp, Staphylococcus aureus
aattgttgagccaagaacaaagtgaaatgctcccttcaaagccttcatttattcaatgtctactttgaagggagcatttgatcgattaatgtcccaggtttttcttgttattcattgcaattgcaaaataatatttaatgtgggttaaaagagttcattaaaactcagttattagggagtgggacagaaa

SEQ ID NO: 5706 - DNA, 190 bp, Staphylococcus aureus
tttctgtcccactccctaataactgagttttaatgaactcttttaacccacattaaatattattttgcaattgcaatgaataacaagaaaaacctgggacattaatcgatcaaatgctcccttcaaagtagacattgaataaatgaaggctttgaagggagcatttcactttgttcttggctcaacaatt

SEQ ID NO: 5707 - DNA, 200 bp, Staphylococcus aureus
aaaaacttctcctcctattgtcaatatcctaactttgttagtttataaaactaatttacatagcaaaagacgtaaattcaaacaaaaaatcaaaataaagttcgatttttgattgaaaaagcagaaattgcttgttatgctatatctataatatacaactaaagtaattcacaattcaaacttttgaaagggtgtacaaa

SEQ ID NO: 5708 - DNA, 200 bp, Staphylococcus aureus
tttgtacaccctttcaaaagtttgaattgtgaattactttagttgtatattatagatatagcataacaagcaatttctgctttttcaatcaaaaatcgaactttattttgattttttgtttgaatttacgtcttttgctatgtaaattagttttataaactaacaaagttaggatattgacaataggaggagaagttttt

SEQ ID NO: 5709 - DNA, 267 bp, Staphylococcus aureus
gtatatttaaaaaatactaagattagctatgaagaaatctataacgatagttttttttcatagcttttttagttgtagagtctaggacattgatttctgtaccaaatttgtgattatgcatatgtaatacaaaagaggcgccacaacatgtttggatgaacaaaataacatgtttgtggcacctcttttgtttagtatggaataaatggttttctttttctatacaatgaatttctaatttagtatctatacaattatggataaaat

SEQ ID NO: 5710 - DNA, 267 bp, Staphylococcus aureus
attttatccataattgtatagatactaaattagaaattcattgtatagaaaaagaaaaccatttattccatactaaacaaaagaggtgccacaaacatgttattttgttcatccaaacatgttgtggcgcctcttttgtattacatatgcataatcacaaatttggtacagaaatcaatgtcctagactctacaactaaaaaagctatgaaaaaaaactatcgttatagatttcttcatagctaatcttagtattttttaaatatac

SEQ ID NO: 5711 - DNA, 381 bp, Staphylococcus aureus
ttttacatcctcctaataaaaaaacgcacaaccatccataggaaagttatgcgttcacaatatatattagtaaaacatatgtatagtaacactttcctacgctagttcaagctagatcaggttcaaagggtttgagggcaagcctcatctcagtataaaacacccctagtgtgtgcgatttatttaattaattatactgtaagacgtttgtaaacttatgtcaataggttgtcttcatgaaatttcgtttaattcgatttaaaatttataatattagcattggatttaaattgaagatgtagtaggaatgttagtaattaaagatataaaaatatgtgacatgtaataagattgagctgataaatgaagagggatacttat

SEQ ID NO: 5712 - DNA, 381 bp, Staphylococcus aureus
ataagtatccctcttcatttatcagctcaatcttattacatgtcacatatttttatatctttaattactaacattcctactacatcttcaatttaaatccaatgctaatattataaattttaaatcgaattaaacgaaatttcatgaagacaacctattgacataagtttacaaacgtcttacagtataattaattaaataaatcgcacacactaggggtgttttatactgagatgaggcttgccctcaaaccctttgaacctgatctagcttgaactagcgtaggaaagtgttactatacatatgttttactaatatatattgtgaacgcataactttcctatggatggttgtgcgtttttttattaggaggatgtaaaa

SEQ ID NO: 5713 - DNA, 151 bp, Staphylococcus aureus
gattaattcctcccaaattggataattatttatatataaatcttacccggttgtactttcgttaaacttttctaagtctatagcactatttattcatttatctaaagacaacaacattagattaatatataatgattttgaggtgaacata

SEQ ID NO: 5714 - DNA, 151 bp, Staphylococcus aureus
tatgttcacctcaaaatcattatatattaatctaatgttgttgtctttagataaatgaataaatagtgctatagacttagaaaagtttaacgaaagtacaaccgggtaagatttatatataaataattatccaatttgggaggaattaatc

SEQ ID NO: 5715 - DNA, 424 bp, Staphylococcus aureus
ttaaaagcattataaaagtactatctattaaacattttgatgtgtacgctataagttagatatatctctaacttatttagatacaggtcaatgaagtttatggatagtactttttttgtaactagatttgattgattcaggtgatgtgaattaagtattgaaaattgtatacaaagttttagtgcaaataaaatagttgaaaagttatccatttgtaaaatcaagaaaactagtaaatagttgaagcgacatatggaatttgcgaaacgatatatagtatttcctttgtagaaatttaacatatatcattcgaattactaatttgttaaaatcaacagtaagattagaagtagatgatattgaaatttggcaaacaatttaatctatataaaactacaacgaaacacagaaaggaagttgtcag

SEQ ID NO: 5716 - DNA, 424 bp, Staphylococcus aureus
ctgacaacttcctttctgtgtttcgttgtagttttatatagattaaattgtttgccaaatttcaatatcatctacttctaatcttactgttgattttaacaaattagtaattcgaatgatatatgttaaatttctacaaaggaaatactatatatcgtttcgcaaattccatatgtcgcttcaactatttactagttttcttgattttacaaatggataacttttcaactattttatttgcactaaaactttgtatacaattttcaatacttaattcacatcacctgaatcaatcaaatctagttacaaaaaaagtactatccataaacttcattgacctgtatctaaataagttagagatatatctaacttatagcgtacacatcaaaatgtttaatagatagtacttttataatgcttttaa

SEQ ID NO: 5717 - DNA, 53 bp, Staphylococcus aureus
tttgataaaaaggggtatagtaacttattgagaaaaagaagggtgataatatt

SEQ ID NO: 5718 - DNA, 53 bp, Staphylococcus aureus
aatattatcacccttctttttctcaataagttactatacccctttttatcaaa

SEQ ID NO: 5719 - DNA, 153 bp, Staphylococcus aureus
gtgctataatagttttgcaatttgcaaattttactgaaaccggttttaaacgaattgaatttaaagcatggttttggtaaagttaatgtataaaactaagttagtattgtaataatattgaagattctaactatacgaaggagaaatgtaatt

SEQ ID NO: 5720 - DNA, 153 bp, Staphylococcus aureus
aattacatttctccttcgtatagttagaatcttcaatattattacaatactaacttagttttatacattaactttaccaaaaccatgctttaaattcaattcgtttaaaaccggtttcagtaaaatttgcaaattgcaaaactattatagcac

SEQ ID NO: 5721 - DNA, 236 bp, Staphylococcus aureus
ttaattctttcgaaagacagaattataaataaacccgaagtattcattgtgagtaattatgaatacttcgggttcttttttatgatttatgttaatttcaatggaatgttgttgctaactaattaaacaactatgtgtcattaacaaaatgttgttctttaattaatgttagttaatttaaaaatcgatatttaatttatgatagctataaatgatgaagttgatttagatgaaaa

SEQ ID NO: 5722 - DNA, 236 bp, Staphylococcus aureus
ttttcatctaaatcaacttcatcatttatagctatcataaattaaatatcgatttttaaattaactaacattaattaaagaacaacattttgttaatgacacatagttgtttaattagttagcaacaacattccattgaaattaacataaatcataaaaaagaacccgaagtattcataattactcacaatgaatacttcgggtttatttataattctgtctttcgaaagaattaa

SEQ ID NO: 5723 - DNA, 197 bp, Staphylococcus aureus
gtatcatgctccttcgtgctttattctaatgtaatatacacaattatacattgaaattcaaatttgtgaacacattgtgaactgacataaattatacacaatttcatagcgcataatgttttaaaaatacacattatagcaattataattaagttcattgtgttgtcatcaaaaaaagaaaaaggtgatgtttttaa

SEQ ID NO: 5724 - DNA, 197 bp, Staphylococcus aureus
ttaaaaacatcacctttttctttttttgatgacaacacaatgaacttaattataattgctataatgtgtatttttaaaacattatgcgctatgaaattgtgtataatttatgtcagttcacaatgtgttcacaaatttgaatttcaatgtataattgtgtatattacattagaataaagcacgaaggagcatgatac

SEQ ID NO: 5725 - DNA, 132 bp, Staphylococcus aureus
gttgagacgataccccaactttcatttacttgcattactgcatttagataatttagttggggtactcatttataataattttaaatttatattttcaatgaattgatgaaaatcatttaatggagggcgagt

SEQ ID NO: 5726 - DNA, 132 bp, Staphylococcus aureus
actcgccctccattaaatgattttcatcaattcattgaaaatataaatttaaaattattataaatgagtaccccaactaaattatctaaatgcagtaatgcaagtaaatgaaagttggggtatcgtctcaac

SEQ ID NO: 5727 - DNA, 87 bp, Staphylococcus aureus
tcaagctcatcatatataaagaaaaagctactaacaatgggtggtgagtttaattaaaacttcacttcaaagttagtagctttttga

SEQ ID NO: 5728 - DNA, 87 bp, Staphylococcus aureus
tcaaaaagctactaactttgaagtgaagttttaattaaactcaccacccattgttagtagctttttctttatatatgatgagcttga

SEQ ID NO: 5729 - DNA, 330 bp, Staphylococcus aureus
tttaaaaaattagtgaaataacactaaaatttcagttaaatcttattttacatgatgaatgataataaataaagcagtttatctcactagaaatctaagtatttcgaataaatgtgcagttctatttattaaaataaatgtagagattataaattaatgttaagaaagaattaaaggattttatatgaaacggtaaaatttaaatgaggggataaaaagtttggtagaaaggtgaatatatttaactgttgtttattcgaaaaagttgtacaagaaaaagcttaggacatcatatttatcctaagctttgataattagtaaaaatgtgct

SEQ ID NO: 5730 - DNA, 330 bp, Staphylococcus aureus
agcacatttttactaattatcaaagcttaggataaatatgatgtcctaagctttttcttgtacaactttttcgaataaacaacagttaaatatattcacctttctaccaaactttttatcccctcatttaaattttaccgtttcatataaaatcctttaattctttcttaacattaatttataatctctacatttattttaataaatagaactgcacatttattcgaaatacttagatttctagtgagataaactgctttatttattatcattcatcatgtaaaataagatttaactgaaattttagtgttatttcactaattttttaaa

SEQ ID NO: 5731 - DNA, 292 bp, Staphylococcus aureus
ttttatgtgtaaatatctacaaagttaaccaactactgccaatgtttattttagatagtatatgtaaattttcagatatgctaattgcttaaaaaatgattaaagtgttggttccaagcaatgatactttagaaatttatttatcatcttgactttaaaaattatattataaatgacgtaactgtcaacagatatacttagtaatgaagatgtgtaatgtaattgtttaaaattgatttccaagcagattttatttatcatttaatttaaatagcaagtggaggtacaagta

SEQ ID NO: 5732 - DNA, 292 bp, Staphylococcus aureus
tacttgtacctccacttgctatttaaattaaatgataaataaaatctgcttggaaatcaattttaaacaattacattacacatcttcattactaagtatatctgttgacagttacgtcatttataatataatttttaaagtcaagatgataaataaatttctaaagtatcattgcttggaaccaacactttaatcattttttaagcaattagcatatctgaaaatttacatatactatctaaaataaacattggcagtagttggttaactttgtagatatttacacataaaa

SEQ ID NO: 5733 - DNA, 171 bp, Staphylococcus aureus
ttaatataatacagatggtaggaaacaactaatacagttcctattatctgtatctttttttattaaaacagaactttttcaaatggtttaacagtcccatttatttgtggtacaattagtaaggataaaatgaatttctatacaattatgggaaaggtatggtgaattgaa

SEQ ID NO: 5734 - DNA, 171 bp, Staphylococcus aureus
ttcaattcaccatacctttcccataattgtatagaaattcattttatccttactaattgtaccacaaataaatgggactgttaaaccatttgaaaaagttctgttttaataaaaaaagatacagataataggaactgtattagttgtttcctaccatctgtattatattaa

SEQ ID NO: 5735 - DNA, 90 bp, Staphylococcus aureus
tacattttaaaagttaacgaagttagcgtattttagtctcattgattaaaatgaaatgtttaatttacgaaatcttaggagggcaaaaac

SEQ ID NO: 5736 - DNA, 90 bp, Staphylococcus aureus
gtttttgccctcctaagatttcgtaaattaaacatttcattttaatcaatgagactaaaatacgctaacttcgttaacttttaaaatgta

SEQ ID NO: 5737 - DNA, 167 bp, Staphylococcus aureus
taactgattatctataaagattcagtcattaaaagctgtagcatatgctacggcttttttgttttaggtaaagtaatgtaaggaaattgatttgagatatcgttaacatgtgacatgcatgttatactagcgatgctaacaaaagaattgaaatggagggttcaaca

SEQ ID NO: 5738 - DNA, 167 bp, Staphylococcus aureus
tgttgaaccctccatttcaattcttttgttagcatcgctagtataacatgcatgtcacatgttaacgatatctcaaatcaatttccttacattactttacctaaaacaaaaaagccgtagcatatgctacagcttttaatgactgaatctttatagataatcagtta

SEQ ID NO: 5739 - DNA, 143 bp, Staphylococcus aureus
ttcgttcgaaattaacacaatttaataggattttttctttaaaactattgctaataaagctatattttgatacctttatcaagtgttaaacaaaatgtttgataaaagtaaacttaatatagcttttttaggtggaaaaataa

SEQ ID NO: 5740 - DNA, 143 bp, Staphylococcus aureus
ttatttttccacctaaaaaagctatattaagtttacttttatcaaacattttgtttaacacttgataaaggtatcaaaatatagctttattagcaatagttttaaagaaaaaatcctattaaattgtgttaatttcgaacgaa

SEQ ID NO: 5741 - DNA, 73 bp, Staphylococcus aureus
aatcataaatagtagttatttactgtatatttagttataataacgggataagtactataaggagttgtaacga

SEQ ID NO: 5742 - DNA, 73 bp, Staphylococcus aureus
tcgttacaactccttatagtacttatcccgttattataactaaatatacagtaaataactactatttatgatt

SEQ ID NO: 5743 - DNA, 282 bp, Staphylococcus aureus
atattgatgatacccagattagtaagtagaggtcttttgcttattaatctgggtttttatatgaggttaatcatcgataacgtttaattaaagtgtttaggtgtcaaaattttaaatgacgatttctcattaccatacacctaaattatcatcaatctgaattcagatgtttattataaaaattagatgaaaaatatgttaatatacaagtaatttaatgtgcgtatatctataggctcgtagtatacttattaaaatattaaacaaagaaaggattttaag

SEQ ID NO: 5744 - DNA, 282 bp, Staphylococcus aureus
cttaaaatcctttctttgtttaatattttaataagtatactacgagcctatagatatacgcacattaaattacttgtatattaacatatttttcatctaatttttataataaacatctgaattcagattgatgataatttaggtgtatggtaatgagaaatcgtcatttaaaattttgacacctaaacactttaattaaacgttatcgatgattaacctcatataaaaacccagattaataagcaaaagacctctacttactaatctgggtatcatcaatat

SEQ ID NO: 5745 - DNA, 183 bp, Staphylococcus aureus
tttgactcacctctacttcttatggacaatataataacctaataaaatgtttaggtcaacctaaatttattttaatttttttaaaagtatgaattattatgttgaacgttcgatttaatattaagaaaaaagagcacgaaatcatggatgtgattacgtgctctattatttaaacaaagttat

SEQ ID NO: 5746 - DNA, 183 bp, Staphylococcus aureus
ataactttgtttaaataatagagcacgtaatcacatccatgatttcgtgctcttttttcttaatattaaatcgaacgttcaacataataattcatacttttaaaaaaattaaaataaatttaggttgacctaaacattttattaggttattatattgtccataagaagtagaggtgagtcaaa

SEQ ID NO: 5747 - DNA, 156 bp, Staphylococcus aureus
agagtacctcctgtatagtgtttaaaaatattgtagcatatgttttatcaattgcggcttaagacgctctcattaaaattagtattttcatttttatcataagaagttatttttataaaatgttgatgtataataaagatgttaggagatgatgtt

SEQ ID NO: 5748 - DNA, 156 bp, Staphylococcus aureus
aacatcatctcctaacatctttattatacatcaacattttataaaaataacttcttatgataaaaatgaaaatactaattttaatgagagcgtcttaagccgcaattgataaaacatatgctacaatatttttaaacactatacaggaggtactct

SEQ ID NO: 5749 - DNA, 153 bp, Staphylococcus aureus
ttaccaaaagcgtaatatgtagtcctaacaattaggtaacatattacgcttttataccttaaataataaaaacacgcgccaatataaaaccatttaaatgttcataatgaacatgtgtggtcttaaatcaacgcgtgttattgtcgatataac

SEQ ID NO: 5750 - DNA, 153 bp, Staphylococcus aureus
gttatatcgacaataacacgcgttgatttaagaccacacatgttcattatgaacatttaaatggttttatattggcgcgtgtttttattatttaaggtataaaagcgtaatatgttacctaattgttaggactacatattacgcttttggtaa

SEQ ID NO: 5751 - DNA, 101 bp, Staphylococcus aureus
cctatccccaccttttgcttatcttttctcaattatatgatataataaaaaagttgtaattaaaagtgggattttacttaagaaagaaggaaactatttat

SEQ ID NO: 5752 - DNA, 101 bp, Staphylococcus aureus
ataaatagtttccttctttcttaagtaaaatcccacttttaattacaacttttttattatatcatataattgagaaaagataagcaaaaggtggggatagg

SEQ ID NO: 5753 - DNA, 83 bp, Staphylococcus aureus
attttaaatctacttgctttttaatatttagtaagataaacttttagtaagacttgagaatttatatagagggggagcgtgtc

SEQ ID NO: 5754 - DNA, 83 bp, Staphylococcus aureus
gacacgctccccctctatataaattctcaagtcttactaaaagtttatcttactaaatattaaaaagcaagtagatttaaaat

SEQ ID NO: 5755 - DNA, 302 bp, Staphylococcus aureus
ggtttaatatataagcatattaaaatggcgtgagatatcgacaattgagctgcgccgattttatatttatagtttaattactgattaaagtggctgttatgttgtcttcttgatgacatgtcagtcacttttattgggttttagcaattcacgatattaagtaaacaaatattctataaattacctcaagagacctgttaatatttgtgattatgactgtgtcatgtatataataagtaacatggatttttaaaattaaagtataaaacgaaatcatttgaagtataaattgtagaattgga

SEQ ID NO: 5756 - DNA, 302 bp, Staphylococcus aureus
tccaattctacaatttatacttcaaatgatttcgttttatactttaattttaaaaatccatgttacttattatatacatgacacagtcataatcacaaatattaacaggtctcttgaggtaatttatagaatatttgtttacttaatatcgtgaattgctaaaacccaataaaagtgactgacatgtcatcaagaagacaacataacagccactttaatcagtaattaaactataaatataaaatcggcgcagctcaattgtcgatatctcacgccattttaatatgcttatatattaaacc

SEQ ID NO: 5757 - DNA, 74 bp, Staphylococcus aureus
aaaaatactagccaatatttagtacgagatgacttctgtcattaagcaatgctaaacattggctatttatatac

SEQ ID NO: 5758 - DNA, 74 bp, Staphylococcus aureus
gtatataaatagccaatgtttagcattgcttaatgacagaagtcatctcgtactaaatattggctagtattttt

SEQ ID NO: 5759 - DNA, 426 bp, Staphylococcus aureus
acgcttaacttcctttttgttttgatattacgagattactcatgattatcaaattttataaacaaaacaacgtataattataactaaattttatgactaaaaattactaaatgtggtggcgaaattagaatcatgatgataagataaagttatcgctattgataataaatgttgatgttttgcaattttatttttaattttttagagttgtagaaatcgaaaatgtttcacaacaaaaacgtgaactacctgttgttgcatagtcatttttgaaattattatttctgaagcggaggttttaattgtctcaagaatgttaaattttgaaaatttgaaacataactatagcaaaacagagcgctttaagataaaattttattatctaattagttagaaaattctaatagtttgaggagtgtatcgcta

SEQ ID NO: 5760 - DNA, 426 bp, Staphylococcus aureus
tagcgatacactcctcaaactattagaattttctaactaattagataataaaattttatcttaaagcgctctgttttgctatagttatgtttcaaattttcaaaatttaacattcttgagacaattaaaacctccgcttcagaaataataatttcaaaaatgactatgcaacaacaggtagttcacgtttttgttgtgaaacattttcgatttctacaactctaaaaaattaaaaataaaattgcaaaacatcaacatttattatcaatagcgataactttatcttatcatcatgattctaatttcgccaccacatttagtaatttttagtcataaaatttagttataattatacgttgttttgtttataaaatttgataatcatgagtaatctcgtaatatcaaaacaaaaaggaagttaagcgt

SEQ ID NO: 5761 - DNA, 139 bp, Staphylococcus aureus
aatgattaaaataaaacgagattacacaacaattgacgtgtaatctcgtttttacatggcttaggtttaattttaaatattgatataaaaaaccgtaattttaatgggcgtgccattaaaattacggtttgcttttttg

SEQ ID NO: 5762 - DNA, 139 bp, Staphylococcus aureus
caaaaaagcaaaccgtaattttaatggcacgcccattaaaattacggttttttatatcaatatttaaaattaaacctaagccatgtaaaaacgagattacacgtcaattgttgtgtaatctcgttttattttaatcatt

SEQ ID NO: 5763 - DNA, 277 bp, Staphylococcus aureus
aaaaagaacttaatcgtaatgatttttttattgggataattatgtaatccacgtttactcaaatttgaagcttaaatattaatctcttttagatgcatgattctacttattaaaattttctaacatatacattatagcaataaattaaatgttatttgtgtcacaaaattgacattttctcttgtcgttaatttgtcacattttaattttattaaacctagtctttttatgcaatctaagatatcataatcttatatgaacaaatttaaggaggggg

SEQ ID NO: 5764 - DNA, 277 bp, Staphylococcus aureus
ccccctccttaaatttgttcatataagattatgatatcttagattgcataaaaagactaggtttaataaaattaaaatgtgacaaattaacgacaagagaaaatgtcaattttgtgacacaaataacatttaatttattgctataatgtatatgttagaaaattttaataagtagaatcatgcatctaaaagagattaatatttaagcttcaaatttgagtaaacgtggattacataattatcccaataaaaaaatcattacgattaagttcttttt

SEQ ID NO: 5765 - DNA, 212 bp, Staphylococcus aureus
tatgcttatacaaatgatactaatctgataaggcaatttgttttatcaggttttttgatgaagaatagtcggacagttgatggtattcatttgataccttaactgtccatttttttatacatattttaatcttaataatgaaattcaacctgaaaacataaagataggttatgatatagagtgtagggaaaatctttatgacgttaaaatta

SEQ ID NO: 5766 - DNA, 212 bp, Staphylococcus aureus
taattttaacgtcataaagattttccctacactctatatcataacctatctttatgttttcaggttgaatttcattattaagattaaaatatgtataaaaaaatggacagttaaggtatcaaatgaataccatcaactgtccgactattcttcatcaaaaaacctgataaaacaaattgccttatcagattagtatcatttgtataagcata

SEQ ID NO: 5767 - DNA, 62 bp, Staphylococcus aureus
aaaacatcgagtcagaaaaaggtggttattgaaaccactaactagcatctgactcgatgttt

SEQ ID NO: 5768 - DNA, 62 bp, Staphylococcus aureus
aaacatcgagtcagatgctagttagtggtttcaataaccacctttttctgactcgatgtttt

SEQ ID NO: 5769 - DNA, 238 bp, Staphylococcus aureus
agaaaattcctcctcgtttacttttatagcttaacaaaatcatagttctgactacagcgaaatgtgtggttaatcatatagtgatgctcttgagaattgaattaatataatgatgtttaatataatctaaatacatttatcgagcaattacataagacataattaaggtagcttaatattttaaaattaataaagacatgatatgattaatgctgaaaataaatggagtgaggtttaa

SEQ ID NO: 5770 - DNA, 238 bp, Staphylococcus aureus
ttaaacctcactccatttattttcagcattaatcatatcatgtctttattaattttaaaatattaagctaccttaattatgtcttatgtaattgctcgataaatgtatttagattatattaaacatcattatattaattcaattctcaagagcatcactatatgattaaccacacatttcgctgtagtcagaactatgattttgttaagctataaaagtaaacgaggaggaattttct

SEQ ID NO: 5771 - DNA, 69 bp, Staphylococcus aureus
tggtttatcattctcctttttctcaataaattatattaaataactaaatgaattggaagtgtgaacaac

SEQ ID NO: 5772 - DNA, 69 bp, Staphylococcus aureus
gttgttcacacttccaattcatttagttatttaatataatttattgagaaaaaggagaatgataaacca

SEQ ID NO: 5773 - DNA, 61 bp, Staphylococcus aureus
taaaaataacagtattttaggtttatcatggtttacaatcctaaaatactgttttcatttg

SEQ ID NO: 5774 - DNA, 61 bp, Staphylococcus aureus
caaatgaaaacagtattttaggattgtaaaccatgataaacctaaaatactgttattttta

SEQ ID NO: 5775 - DNA, 78 bp, Staphylococcus aureus
gatatgttaagaaaaaatcttgacaacttgttcttagaaagttaaaataaattttgtgcttgttagaggtgaagccat

SEQ ID NO: 5776 - DNA, 78 bp, Staphylococcus aureus
atggcttcacctctaacaagcacaaaatttattttaactttctaagaacaagttgtcaagattttttcttaacatatc

SEQ ID NO: 5777 - DNA, 79 bp, Staphylococcus aureus
gtagtttaattaatgatataatgttgttaattaaactaacatttagtatttttcgtttataatctaaggaggatatatc

SEQ ID NO: 5778 - DNA, 79 bp, Staphylococcus aureus
gatatatcctccttagattataaacgaaaaatactaaatgttagtttaattaacaacattatatcattaattaaactac

SEQ ID NO: 5779 - DNA, 153 bp, Staphylococcus aureus
ttttagttactcaatataaaaagtcccgcttaaaatgattgttttaagtgggactttttatattgcgaaaaataattggcgaacgaggtaactggatacctcatccgccaattaaaatttgttaatttaataattaaatataaagacgattta

SEQ ID NO: 5780 - DNA, 153 bp, Staphylococcus aureus
taaatcgtctttatatttaattattaaattaacaaattttaattggcggatgaggtatccagttacctcgttcgccaattatttttcgcaatataaaaagtcccacttaaaacaatcattttaagcgggactttttatattgagtaactaaaa

SEQ ID NO: 5781 - DNA, 202 bp, Staphylococcus aureus
gttgtagaaacaactcctaattgtatattatcaactgataatcattatcaattgattacttgtattgtacattgaaatggtagttaattgcaacattattttataaaaaaataacctatgttatagattatgaaatatctatgacataggttaaataaaatttaaaataaaaaatatattaagttatgagtgtgacgatgat

SEQ ID NO: 5782 - DNA, 202 bp, Staphylococcus aureus
atcatcgtcacactcataacttaatatattttttattttaaattttatttaacctatgtcatagatatttcataatctataacataggttatttttttataaaataatgttgcaattaactaccatttcaatgtacaatacaagtaatcaattgataatgattatcagttgataatatacaattaggagttgtttctacaac

SEQ ID NO: 5783 - DNA, 208 bp, Staphylococcus aureus
gttgttttcctcctaaggatacaaattatgtgttgttatatgagatgattaaccattgcaattgataatggttatcaattatactagcacatctatttccgtataacaataataaattgattataaaataaatattgacaatgataatcattattatttatgattttactaaagacttaaaagcaatcataaaaaggaggattatgtt

SEQ ID NO: 5784 - DNA, 208 bp, Staphylococcus aureus
aacataatcctcctttttatgattgcttttaagtctttagtaaaatcataaataataatgattatcattgtcaatatttattttataatcaatttattattgttatacggaaatagatgtgctagtataattgataaccattatcaattgcaatggttaatcatctcatataacaacacataatttgtatccttaggaggaaaacaac

SEQ ID NO: 5785 - DNA, 61 bp, Staphylococcus aureus
aacggtacaacaactggtttagtgatgactgaagaaacgtcgttaataaaagaggattttt

SEQ ID NO: 5786 - DNA, 61 bp, Staphylococcus aureus
aaaaatcctcttttattaacgacgtttcttcagtcatcactaaaccagttgttgtaccgtt

SEQ ID NO: 5787 - DNA, 242 bp, Staphylococcus aureus
tgaatgtgctttgaaaataatcatcaattatatcattttgatttattttgaagaagaaaagaattaataatgatattttggggcgtatgatttatagtagtagtatcgataaaagaaatttatgcaatttgaaatattatgagtgataaaagcgattaattaatattaactatacaatcaaatgttttcatcttattaatgattaatatttttatttttaaaaataaagcgaggagctatca

SEQ ID NO: 5788 - DNA, 242 bp, Staphylococcus aureus
tgatagctcctcgctttatttttaaaaataaaaatattaatcattaataagatgaaaacatttgattgtatagttaatattaattaatcgcttttatcactcataatatttcaaattgcataaatttcttttatcgatactactactataaatcatacgccccaaaatatcattattaattcttttcttcttcaaaataaatcaaaatgatataattgatgattattttcaaagcacattca

SEQ ID NO: 5789 - DNA, 379 bp, Staphylococcus aureus
ccgtgttgaaagttttccgatataattataattaattgtttaacagaacatttctacgtgaatgcatacacaattgaatataaaccaataaaaaggcatggacatttatataaataattgttttagggagaataatcgtgactgcaagttattccaattatttaaagtcttttcacctttttggttacttaaagagatttaagtcggaaagacaatccgttatcaatattaaacaagtgtatgcttaggcataaatttgggtggtaccacggaaatgactttcgtcccttatttttaagaggatgaaagtcattttttagttaaacaacaaatatgatcaatagaaaatgaatagttcgaatagggaggtcagtgacat

SEQ ID NO: 5790 - DNA, 379 bp, Staphylococcus aureus
atgtcactgacctccctattcgaactattcattttctattgatcatatttgttgtttaactaaaaaatgactttcatcctcttaaaaataagggacgaaagtcatttccgtggtaccacccaaatttatgcctaagcatacacttgtttaatattgataacggattgtctttccgacttaaatctctttaagtaaccaaaaaggtgaaaagactttaaataattggaataacttgcagtcacgattattctccctaaaacaattatttatataaatgtccatgcctttttattggtttatattcaattgtgtatgcattcacgtagaaatgttctgttaaacaattaattataattatatcggaaaactttcaacacgg

SEQ ID NO: 5791 - DNA, 431 bp, Staphylococcus aureus
tgatttaaaccccatgtataaggatatctgaagtagattgatatccttaacatggggttttatttttggattcaccaattaggtttcgattcatttaaaaatcaaagaggcacagcggaatacagatgatgcttctcacaactgcatataaagtcatacttatgagcaaagcaaattagtatgacttacctaataggatttcctattaggatccaatttatcttgattttataaatcatagaggcacagtggattacagatgatgcttcgcatcactgcatataaagtcatacttatgagcaaagcaaattagtatgacttacctaataggatcacctattaggatccaattcattttataaatcaaagaggaacagcggaatacagatgatgcttcgcacaactgcataaaagcctctaatgattaaaaa

SEQ ID NO: 5792 - DNA, 431 bp, Staphylococcus aureus
tttttaatcattagaggcttttatgcagttgtgcgaagcatcatctgtattccgctgttcctctttgatttataaaatgaattggatcctaataggtgatcctattaggtaagtcatactaatttgctttgctcataagtatgactttatatgcagtgatgcgaagcatcatctgtaatccactgtgcctctatgatttataaaatcaagataaattggatcctaataggaaatcctattaggtaagtcatactaatttgctttgctcataagtatgactttatatgcagttgtgagaagcatcatctgtattccgctgtgcctctttgatttttaaatgaatcgaaacctaattggtgaatccaaaaataaaaccccatgttaaggatatcaatctacttcagatatccttatacatggggtttaaatca

SEQ ID NO: 5793 - DNA, 319 bp, Staphylococcus aureus
atcataaatgataataacgtcagaaacatttatgtatgttgtaaagaattaattgcggatacttacaaaatacatagtggtcatgtataatgtttatgaaaatgttatagtgacacaatttaaacatgataaagtattgaatagaaaattctttacattatttcattataaaaagaacattaagtcatctatagagattgtgttgttgttttatcataattgcaatataacaatattagtatcaaattcagacaaactatccagtcatattttataacgtgaatttagattttaaaaaaaggatcaggagaaattataa

SEQ ID NO: 5794 - DNA, 319 bp, Staphylococcus aureus
ttataatttctcctgatcctttttttaaaatctaaattcacgttataaaatatgactggatagtttgtctgaatttgatactaatattgttatattgcaattatgataaaacaacaacacaatctctatagatgacttaatgttctttttataatgaaataatgtaaagaattttctattcaatactttatcatgtttaaattgtgtcactataacattttcataaacattatacatgaccactatgtattttgtaagtatccgcaattaattctttacaacatacataaatgtttctgacgttattatcatttatgat

SEQ ID NO: 5795 - DNA, 72 bp, Staphylococcus aureus
attatcataagaggtcaggacaaaggtatatattaatgatacgtcctggtcttctttttatggagtgttatt

SEQ ID NO: 5796 - DNA, 72 bp, Staphylococcus aureus
aataacactccataaaaagaagaccaggacgtatcattaatatatacctttgtcctgacctcttatgataat

SEQ ID NO: 5797 - DNA, 172 bp, Staphylococcus aureus
attataatttgataaattaaatagctgcagttaaaataatgtaaagcaacaagaatacatttcaaacatgttatttgaaataagcataaaaattgagcaaatagaaatacatgaagcatgttatctgatataatttgaacatcataataataattaaggaggattggcattt

SEQ ID NO: 5798 - DNA, 172 bp, Staphylococcus aureus
aaatgccaatcctccttaattattattatgatgttcaaattatatcagataacatgcttcatgtatttctatttgctcaatttttatgcttatttcaaataacatgtttgaaatgtattcttgttgctttacattattttaactgcagctatttaatttatcaaattataat

SEQ ID NO: 5799 - DNA, 66 bp, Staphylococcus aureus
gttataaccaatgacgactggggcatttctttaatgaattgctccagtttttgtttgtgtttttaa

SEQ ID NO: 5800 - DNA, 66 bp, Staphylococcus aureus
ttaaaaacacaaacaaaaactggagcaattcattaaagaaatgccccagtcgtcattggttataac

SEQ ID NO: 5801 - DNA, 165 bp, Staphylococcus aureus
gctgatagatttgtagcagttggtttgataaaaccatgttcaatattacatgatgtgcatgaaaagtcatactcgaagatgttgattatgagctagaattagtggtgataaatttgaagcacttttgtagcatcattcattttaaaattagaaggggggatattt

SEQ ID NO: 5802 - DNA, 165 bp, Staphylococcus aureus
aaatatccccccttctaattttaaaatgaatgatgctacaaaagtgcttcaaatttatcaccactaattctagctcataatcaacatcttcgagtatgacttttcatgcacatcatgtaatattgaacatggttttatcaaaccaactgctacaaatctatcagc

SEQ ID NO: 5803 - DNA, 323 bp, Staphylococcus aureus
attactgggcgtgagaatcattctcatgccccaaaatatatgaaataatgttacaatatggttaacaaagttatttttttgaatgtacgtggaagcgttttctaaatgagaaagtttatcatcacaagcaattttaaatatctaatccaaatgttacattgttcgacatgcagtttggtgatcgtacagtgtgtatttgtctttaaaatgtttcgcttaatgataatgacaacgctagaaacgatatcactttagggggttaagcgtacgtttaatataaatagctcaataaattaaatattcgttcacaggggggactcctt

SEQ ID NO: 5804 - DNA, 323 bp, Staphylococcus aureus
aaggagtcccccctgtgaacgaatatttaatttattgagctatttatattaaacgtacgcttaaccccctaaagtgatatcgtttctagcgttgtcattatcattaagcgaaacattttaaagacaaatacacactgtacgatcaccaaactgcatgtcgaacaatgtaacatttggattagatatttaaaattgcttgtgatgataaactttctcatttagaaaacgcttccacgtacattcaaaaaaataactttgttaaccatattgtaacattatttcatatattttggggcatgagaatgattctcacgcccagtaat

SEQ ID NO: 5805 - DNA, 51 bp, Staphylococcus aureus
tacatcgcatttaacaaatatagattgaaaatttaggggagtgaaattttt

SEQ ID NO: 5806 - DNA, 51 bp, Staphylococcus aureus
aaaaatttcactcccctaaattttcaatctatatttgttaaatgcgatgta

SEQ ID NO: 5807 - DNA, 235 bp, Staphylococcus aureus
aaattaatcccttttgagttaaaatgttatgttcctttcaaaattaaattgaatggagatacacaataacttggaagggatttttttaataagcagattacatgacaatatgatagtgggctgatttaaaataaatattataatgacaaaaatggtaaacacagtgcataatactaaaatccaatgcttagttatgataaactaaaaattaaattaaaagtaaggatgaccgaat

SEQ ID NO: 5808 - DNA, 235 bp, Staphylococcus aureus
attcggtcatccttacttttaatttaatttttagtttatcataactaagcattggattttagtattatgcactgtgtttaccatttttgtcattataatatttattttaaatcagcccactatcatattgtcatgtaatctgcttattaaaaaaatcccttccaagttattgtgtatctccattcaatttaattttgaaaggaacataacattttaactcaaaagggattaattt

SEQ ID NO: 5809 - DNA, 157 bp, Staphylococcus aureus
atagaagtagctatggctttttttagtttatagactgatttaactaggaggtcgtgtcatgaatgtttgtttaaaagtatttctgacaattttataagataattggaatgaataacacatttatgttatgaaaagaattgtaattttggagaatgtg

SEQ ID NO: 5810 - DNA, 157 bp, Staphylococcus aureus
cacattctccaaaattacaattcttttcataacataaatgtgttattcattccaattatcttataaaattgtcagaaatacttttaaacaaacattcatgacacgacctcctagttaaatcagtctataaactaaaaaaagccatagctacttctat

SEQ ID NO: 5811 - DNA, 193 bp, Staphylococcus aureus
aaggatttctaaagtcataaattatatcaataatttgatggttaaaatatggagtagcaaaattcttgaaattcagaaatgtagtgacacaaatattaatgtttagttaataaatagttaatgtagttttttgtatctgtctattattataaatatatacaaaataaatatttgaggataggtgttattaatt

SEQ ID NO: 5812 - DNA, 193 bp, Staphylococcus aureus
aattaataacacctatcctcaaatatttattttgtatatatttataataatagacagatacaaaaaactacattaactatttattaactaaacattaatatttgtgtcactacatttctgaatttcaagaattttgctactccatattttaaccatcaaattattgatataatttatgactttagaaatcctt

SEQ ID NO: 5813 - DNA, 162 bp, Staphylococcus aureus
ttgatagaagccatgctatagagtgtggctttttgctatatccaaaggtataattattttataatattgtgtttatttgaatggtgagcttattgggataaatcatataaataattacttaaaagtgaatgcaatagttgtttatgttttgaacaagcgagg

SEQ ID NO: 5814 - DNA, 162 bp, Staphylococcus aureus
cctcgcttgttcaaaacataaacaactattgcattcacttttaagtaattatttatatgatttatcccaataagctcaccattcaaataaacacaatattataaaataattatacctttggatatagcaaaaagccacactctatagcatggcttctatcaa

SEQ ID NO: 5815 - DNA, 669 bp, Staphylococcus aureus
aataagttctccctgtaaaataaatttgtacttactaatgcgagtacactgctattttacaaacggtttcatgcatttaccagttaacacttcattaattaaaattaagtgcaaattaataaggtttaatgcaatcgaaaaagaataatgatgaatttgatggtattatttttatttgaggtattattgaatttgttgatagtataataatagtagtaaacgtcactcaactatgattggataatttttattgttaaaacgatatatatttctttgcattttgtttgcaatgttgggtagacaaacactccaaattgttatacatatagcttttttgatatatattttttataaaacaaagaaatgattcatagtagagaagtaattaatatgtataattttacttataaagaaataagagatatattctaattatggttgatatgttatgattaatatataagttaaaaattatactatttaattgaattatgcattttcgaagtaaacataattcaacacttacatttttaattagataaaatagtgtaaaatcacgtgccaagattactatagagtaggcattgagtattattggcaatcacttaagtgattgttatttttcgtggtcaataataaagatataaataaatatattgaggtcaaacg

SEQ ID NO: 5816 - DNA, 669 bp, Staphylococcus aureus
cgtttgacctcaatatatttatttatatctttattattgaccacgaaaaataacaatcacttaagtgattgccaataatactcaatgcctactctatagtaatcttggcacgtgattttacactattttatctaattaaaaatgtaagtgttgaattatgtttacttcgaaaatgcataattcaattaaatagtataatttttaacttatatattaatcataacatatcaaccataattagaatatatctcttatttctttataagtaaaattatacatattaattacttctctactatgaatcatttctttgttttataaaaaatatatatcaaaaaagctatatgtataacaatttggagtgtttgtctacccaacattgcaaacaaaatgcaaagaaatatatatcgttttaacaataaaaattatccaatcatagttgagtgacgtttactactattattatactatcaacaaattcaataatacctcaaataaaaataataccatcaaattcatcattattctttttcgattgcattaaaccttattaatttgcacttaattttaattaatgaagtgttaactggtaaatgcatgaaaccgtttgtaaaatagcagtgtactcgcattagtaagtacaaatttattttacagggagaacttatt

SEQ ID NO: 5817 - DNA, 132 bp, Staphylococcus aureus
tcacaagatagataactatattttgtctatattataaagtgtttatagttaattaataattagttaatttcaaaagttgtataaataggataacttaataaatgtaagataataatttggaggataattaac

SEQ ID NO: 5818 - DNA, 132 bp, Staphylococcus aureus
gttaattatcctccaaattattatcttacatttattaagttatcctatttatacaacttttgaaattaactaattattaattaactataaacactttataatatagacaaaatatagttatctatcttgtga

SEQ ID NO: 5819 - DNA, 149 bp, Staphylococcus aureus
tacttctgtcattattttaagttcaaaataatttaatattatattattttttattaataaaacgactatgctatttaatgccaggttaatgtaactttcctaaaattgactatataatcgttaagtatcaattttaaggagagtttaca

SEQ ID NO: 5820 - DNA, 149 bp, Staphylococcus aureus
tgtaaactctccttaaaattgatacttaacgattatatagtcaattttaggaaagttacattaacctggcattaaatagcatagtcgttttattaataaaaaataatataatattaaattattttgaacttaaaataatgacagaagta

SEQ ID NO: 5821 - DNA, 198 bp, Staphylococcus aureus
taaataaaacaggttgagacaaaaaatggtcttaacctgttttcaatttgcatatgtgataaattctatatcaaaatgcttatgtataatgaatgacatttaaaagtaggggagacaaatataaatacaatagttcctaggattactctcaaaataactatatcaattatttactttgctcttctattttttaaaata

SEQ ID NO: 5822 - DNA, 198 bp, Staphylococcus aureus
tattttaaaaaatagaagagcaaagtaaataattgatatagttattttgagagtaatcctaggaactattgtatttatatttgtctcccctacttttaaatgtcattcattatacataagcattttgatatagaatttatcacatatgcaaattgaaaacaggttaagaccattttttgtctcaacctgttttattta

SEQ ID NO: 5823 - DNA, 102 bp, Staphylococcus aureus
ggtaggacatcgataaaaaaatactttttctttagaaattagtatttcttatgcatgagttttactcatgtattcattttttaagtagacattagctacagc

SEQ ID NO: 5824 - DNA, 102 bp, Staphylococcus aureus
gctgtagctaatgtctacttaaaaaatgaatacatgagtaaaactcatgcataagaaatactaatttctaaagaaaaagtatttttttatcgatgtcctacc

SEQ ID NO: 5825 - DNA, 621 bp, Staphylococcus aureus
gatgttgactccttataatatatgtttaattcattaaaatagttgaaaacatgacttgaaataaagatataaagctaaagtaaggatgttcaattgtttcaaattttatgaaagtataacgttaaatatgttaatttgatgatgatatttgctttttattttccaaatggaatttacttaaactgatgcattaaaatattaatgaagcactagaatacataaatgaatagtaatggtgcacagtatagaataattaaggctatattaagtataaatatcgttaactgtaagctatctttagttttaatataaactattaggataatcgacgtaagaagaatcatatatattaatgatgaagaagtccatacaaaatccgcatcatttgttgttaataatgggactataattaatccgaaattaatcatgcatgctatatatactataatgttatacacaatgttaatttttgttcaccaccttatacttctattttaaaaacttctttataatgatatattgtttaatgttgaaataattagattatctaattttcatttgctttacatgtaaaaggctatatatagtatgctctttatgattctaaatgctttttaatat

SEQ ID NO: 5826 - DNA, 621 bp, Staphylococcus aureus
atattaaaaagcatttagaatcataaagagcatactatatatagccttttacatgtaaagcaaatgaaaattagataatctaattatttcaacattaaacaatatatcattataaagaagtttttaaaatagaagtataaggtggtgaacaaaaattaacattgtgtataacattatagtatatatagcatgcatgattaatttcggattaattatagtcccattattaacaacaaatgatgcggattttgtatggacttcttcatcattaatatatatgattcttcttacgtcgattatcctaatagtttatattaaaactaaagatagcttacagttaacgatatttatacttaatatagccttaattattctatactgtgcaccattactattcatttatgtattctagtgcttcattaatattttaatgcatcagtttaagtaaattccatttggaaaataaaaagcaaatatcatcatcaaattaacatatttaacgttatactttcataaaatttgaaacaattgaacatccttactttagctttatatctttatttcaagtcatgttttcaactattttaatgaattaaacatatattataaggagtcaacatc

SEQ ID NO: 5827 - DNA, 413 bp, Staphylococcus aureus
ttgttaacctccttgaacatttaaattgattcaacttaagtttaacttattcatacaacttcgtacaatatctagatgaacattaattgtatttctagaaatctttttcaattatatgtactaattatacttttaaatttcttatttcagtatagttttaaaacgattttaaaataattctgcaaatatattaacacataatgtgttcaaaaagttttgaacaatttcaaaacttttatataaagggtttgacaacatggaattcaaatttcttattttaaaaatcacctcatatagtgtcatgtttagtctaatttttaagtcaggaaagcaaatcaagtacatagtttaaattaaaaatatcataagttaattaaactaaattaagtataaaaattaggttcttcatcttt

SEQ ID NO: 5828 - DNA, 413 bp, Staphylococcus aureus
aaagatgaagaacctaatttttatacttaatttagtttaattaacttatgatatttttaatttaaactatgtacttgatttgctttcctgacttaaaaattagactaaacatgacactatatgaggtgatttttaaaataagaaatttgaattccatgttgtcaaaccctttatataaaagttttgaaattgttcaaaactttttgaacacattatgtgttaatatatttgcagaattattttaaaatcgttttaaaactatactgaaataagaaatttaaaagtataattagtacatataattgaaaaagatttctagaaatacaattaatgttcatctagatattgtacgaagttgtatgaataagttaaacttaagttgaatcaatttaaatgttcaaggaggttaacaa

SEQ ID NO: 5829 - DNA, 80 bp, Staphylococcus aureus
ttagccgaaaaacatcatttctgaagttatcggctaaagttataaattatatttatttgtacatgaacaaataatttaca

SEQ ID NO: 5830 - DNA, 80 bp, Staphylococcus aureus
tgtaaattatttgttcatgtacaaataaatataatttataactttagccgataacttcagaaatgatgtttttcggctaa

SEQ ID NO: 5831 - DNA, 673 bp, Staphylococcus aureus
tttcatcatccttctattttttttaacgatttgaggaaacaataatcaatatgtcaatttagaatattgcagttgagacatatcaaatatttataatcgtttatattagtatatttaatgtagcaactgataaattactgagtgatgatgagtgattattttaagaatatgtttttaacttttatttaaaatttgaaaggaagcatttcaatttcgagggttagtcaaagttgaataaattctttatgaaacaaggaaaagacatagctaattttattgattaatttctttaaaactaatgatttgtttgatttaaaaatgtaatcgattacaatataaaaatacaaatatcttagaattaaatcaattaattaactattaaataaaaattaactatatattaactactgtaaattaataaatagaaatagagaaaaagggtattaattatgtttggaatttcgtcgggaataatttttgccattacatagaaatatctaatagataatgaaaaagtatcgtatgtatttttaatatagtgtaaaatatcatatgtaaaataaaatgtagatttttagttagaggcattataagaaaattttgagtataggttagcttttaattatgaatcttattgaaatttgattaataaatatatgataggggattaaaa

SEQ ID NO: 5832 - DNA, 673 bp, Staphylococcus aureus
ttttaatcccctatcatatatttattaatcaaatttcaataagattcataattaaaagctaacctatactcaaaattttcttataatgcctctaactaaaaatctacattttattttacatatgatattttacactatattaaaaatacatacgatactttttcattatctattagatatttctatgtaatggcaaaaattattcccgacgaaattccaaacataattaataccctttttctctatttctatttattaatttacagtagttaatatatagttaatttttatttaatagttaattaattgatttaattctaagatatttgtatttttatattgtaatcgattacatttttaaatcaaacaaatcattagttttaaagaaattaatcaataaaattagctatgtcttttccttgtttcataaagaatttattcaactttgactaaccctcgaaattgaaatgcttcctttcaaattttaaataaaagttaaaaacatattcttaaaataatcactcatcatcactcagtaatttatcagttgctacattaaatatactaatataaacgattataaatatttgatatgtctcaactgcaatattctaaattgacatattgattattgtttcctcaaatcgttaaaaaaaatagaaggatgatgaaa

SEQ ID NO: 5833 - DNA, 131 bp, Staphylococcus aureus
attcctactcccaattccatttaaatatatagaaaatttcacctattatatacatcatacactttaaaaattatcatttaaataatctgatttggaattaaagtgcatgaagtataagtcaccttcatata

SEQ ID NO: 5834 - DNA, 131 bp, Staphylococcus aureus
tatatgaaggtgacttatacttcatgcactttaattccaaatcagattatttaaatgataatttttaaagtgtatgatgtatataataggtgaaattttctatatatttaaatggaattgggagtaggaat

SEQ ID NO: 5835 - DNA, 94 bp, Staphylococcus aureus
tcgaatttctcctttgagtattgttggaatgtttaattataaaaaggggttaattagataattgaaattatccgcatttacaaaaggtaatagg

SEQ ID NO: 5836 - DNA, 94 bp, Staphylococcus aureus
cctattaccttttgtaaatgcggataatttcaattatctaattaacccctttttataattaaacattccaacaatactcaaaggagaaattcga

SEQ ID NO: 5837 - DNA, 437 bp, Staphylococcus aureus
atgaaaatctcctttgcgtgaattacccaaagtatataagctattacaccgattcggaattaaataaaagctaaaactatgttaaataaacttaaacagttagtagtgttatttaagcaaaacttatcatttttaagttttggacagaaacagtacttaataaagtaggcgggagttatatattaaaaacgacacgttacaattattctctaatcaattgcattaaattgtttgataattgaattttctaactacttgaaaaatagttatactttaaatgtagtacttattttaattatttcctactacttaaatttaatattaataaaatgttcatttaattattgataaaatattacaaattttaatagtaggttgtgtttattttgtatgcgcttacaatttaggtgtaactaaaataaaaggagttgttatta

SEQ ID NO: 5838 - DNA, 437 bp, Staphylococcus aureus
taataacaactccttttattttagttacacctaaattgtaagcgcatacaaaataaacacaacctactattaaaatttgtaatattttatcaataattaaatgaacattttattaatattaaatttaagtagtaggaaataattaaaataagtactacatttaaagtataactatttttcaagtagttagaaaattcaattatcaaacaatttaatgcaattgattagagaataattgtaacgtgtcgtttttaatatataactcccgcctactttattaagtactgtttctgtccaaaacttaaaaatgataagttttgcttaaataacactactaactgtttaagtttatttaacatagttttagcttttatttaattccgaatcggtgtaatagcttatatactttgggtaattcacgcaaaggagattttcat

SEQ ID NO: 5839 - DNA, 171 bp, Staphylococcus aureus
ttgaattgaaacgcttttcaattactatatgtcaaatgcatgatttttattatttatgtgcaccccctgaaaataatgcctctattttgatgcggggtgcactttcttaatttatatttataaaatctttaaggtagaaatgctaggttaaatgtcgaaggagatgaaacc

SEQ ID NO: 5840 - DNA, 171 bp, Staphylococcus aureus
ggtttcatctccttcgacatttaacctagcatttctaccttaaagattttataaatataaattaagaaagtgcaccccgcatcaaaatagaggcattattttcagggggtgcacataaataataaaaatcatgcatttgacatatagtaattgaaaagcgtttcaattcaa

SEQ ID NO: 5841 - DNA, 306 bp, Staphylococcus aureus
tttgaaatgctatattataaaaatactaattgggttttatgcatctcgtaggtttgtagaaatactaaactaagcgaggtgcattattatttttgattaagaaaataatgacggtaatgataacactagtaagtaattgatacaatgctctatttaataatgatatttttaaaatttgtttttaatgtaatgttagatctatggtatattatatttatcgtggtaaatatgtatttgctgtaaacagtttttgtaacacatgacacatatggttgtgaaaatagcatatataaaggatggctataa

SEQ ID NO: 5842 - DNA, 306 bp, Staphylococcus aureus
ttatagccatcctttatatatgctattttcacaaccatatgtgtcatgtgttacaaaaactgtttacagcaaatacatatttaccacgataaatataatataccatagatctaacattacattaaaaacaaattttaaaaatatcattattaaatagagcattgtatcaattacttactagtgttatcattaccgtcattattttcttaatcaaaaataataatgcacctcgcttagtttagtatttctacaaacctacgagatgcataaaacccaattagtatttttataatatagcatttcaaa

SEQ ID NO: 5843 - DNA, 305 bp, Staphylococcus aureus
tttatcgatatttagaggtgataaaatttgtcaactattacaaagactaaaataaaaatctttattaattattttattggtatattagccttggcgtttgctgcttatatattatttaaataaaggttagagtgaaacgtgtttatgaactagacgttctagtatagttactacagctttagtcagaaggtatcattgataagatcatattaaatcaaagaggcattgatatacactaaaaagaggcaagattacctgcctcttttttagttattaaatatgcgtgttaattcttggtaatagtg

SEQ ID NO: 5844 - DNA, 305 bp, Staphylococcus aureus
cactattaccaagaattaacacgcatatttaataactaaaaaagaggcaggtaatcttgcctctttttagtgtatatcaatgcctctttgatttaatatgatcttatcaatgataccttctgactaaagctgtagtaactatactagaacgtctagttcataaacacgtttcactctaacctttatttaaataatatataagcagcaaacgccaaggctaatataccaataaaataattaataaagatttttattttagtctttgtaatagttgacaaattttatcacctctaaatatcgataaa

SEQ ID NO: 5845 - DNA, 248 bp, Staphylococcus aureus
gatttacaacctttcttatgtgattttcttcactaattatatcatgatagctatggccaattaataagaagagtgtgtactattacgttattagagtatgtatattggattgatagacacataattgacatttaaatctcaaaattaatgatatttgaggtatgctttgcaacctaaatattggaatatgtggaaaagtaattatttaatttaaatgatgattgaagatttacaagggggtgtacaaa

SEQ ID NO: 5846 - DNA, 248 bp, Staphylococcus aureus
tttgtacacccccttgtaaatcttcaatcatcatttaaattaaataattacttttccacatattccaatatttaggttgcaaagcatacctcaaatatcattaattttgagatttaaatgtcaattatgtgtctatcaatccaatatacatactctaataacgtaatagtacacactcttcttattaattggccatagctatcatgatataattagtgaagaaaatcacataagaaaggttgtaaatc

SEQ ID NO: 5847 - DNA, 468 bp, Staphylococcus aureus
gaagaataattagtgagttaaataattaaaaaaccacgtctcgatggacgtggttatttttttaaatgtatttaattataggatttcgggcccctgaaaagtccctaaaattttgaatagtatcaaaatctataggaataatataataataaaaatctctacgcatgcaaatggtgagtgttaaaaatcttggtgtagtgttggtgtagttcaggtgcagtatagatgaaatttgagcacaaaattacttaattaaaaatgtataaacaagtgtcagacgcgtgtcaattgtgtgtcaaaaaattctatgacgaataagcatgcttgttttaattactgtattttcggggcttatgcgggggacgttttggtgacgcatcatactatattactgaaattcaaaacaaaaagagccccgtaatcacggaactcttttgtttggtaatgcgtataaaaatacctataaac

SEQ ID NO: 5848 - DNA, 468 bp, Staphylococcus aureus
gtttataggtatttttatacgcattaccaaacaaaagagttccgtgattacggggctctttttgttttgaatttcagtaatatagtatgatgcgtcaccaaaacgtcccccgcataagccccgaaaatacagtaattaaaacaagcatgcttattcgtcatagaattttttgacacacaattgacacgcgtctgacacttgtttatacatttttaattaagtaattttgtgctcaaatttcatctatactgcacctgaactacaccaacactacaccaagatttttaacactcaccatttgcatgcgtagagatttttattattatattattcctatagattttgatactattcaaaattttagggacttttcaggggcccgaaatcctataattaaatacatttaaaaaaataaccacgtccatcgagacgtggttttttaattatttaactcactaattattcttc

SEQ ID NO: 5849 - DNA, 355 bp, Staphylococcus aureus
acgtttaacaacacaagaattattatatctaaatgaacttaaattagcaataccttgtaaataaaaaatgtttatatttttcactattatagagctatttatctaaaaaggttcaataagacttaaatgcgaattcaggcaacttaattgtgttaaatacagttttgaatgcctaactgtatttcttttctctttaaaatacagttaagtacattataagatgttgtgcggataaacaaactaattgcatcaaatttattttaaaataacaacaacaaaacgttaagcgaataacatttcggtgatttaaaagctacgcacgtttttgttatcttcaaatttaaattttaaggag

SEQ ID NO: 5850 - DNA, 355 bp, Staphylococcus aureus
ctccttaaaatttaaatttgaagataacaaaaacgtgcgtagcttttaaatcaccgaaatgttattcgcttaacgttttgttgttgttattttaaaataaatttgatgcaattagtttgtttatccgcacaacatcttataatgtacttaactgtattttaaagagaaaagaaatacagttaggcattcaaaactgtatttaacacaattaagttgcctgaattcgcatttaagtcttattgaacctttttagataaatagctctataatagtgaaaaatataaacattttttatttacaaggtattgctaatttaagttcatttagatataataattcttgtgttgttaaacgt

SEQ ID NO: 5851 - DNA, 57 bp, Staphylococcus aureus
tttcaatatgttatgtaagtaatcagtattatttcaaaggtgagggagagatttaaa

SEQ ID NO: 5852 - DNA, 57 bp, Staphylococcus aureus
tttaaatctctccctcacctttgaaataatactgattacttacataacatattgaaa

SEQ ID NO: 5853 - DNA, 132 bp, Staphylococcus aureus
tataataactaatattctttaaaataaactgggtgagcatactttaatgttatgcactcagtttattttatttgcagaaatttgagcctctgttaagatttagatacatagacaatataggagatggggaaa

SEQ ID NO: 5854 - DNA, 132 bp, Staphylococcus aureus
tttccccatctcctatattgtctatgtatctaaatcttaacagaggctcaaatttctgcaaataaaataaactgagtgcataacattaaagtatgctcacccagtttattttaaagaatattagttattata

SEQ ID NO: 5855 - DNA, 108 bp, Staphylococcus aureus
gacaaataatttgaaaatgatttacttatattagcttaagaaagtaattgtaaaaacgacactacgaaaagatgcattttcatgctcgtagtgtcgaatattattatc

SEQ ID NO: 5856 - DNA, 108 bp, Staphylococcus aureus
gataataatattcgacactacgagcatgaaaatgcatcttttcgtagtgtcgtttttacaattactttcttaagctaatataagtaaatcattttcaaattatttgtc

SEQ ID NO: 5857 - DNA, 194 bp, Staphylococcus aureus
atttatctaccccttatttgtttactactattattatacattaaaccacttgtgtttttcattgatttgaaaatgtaaaacaatgaacattataaattttccatgattaaattgattttcaagccgtaaaattgtcaatcaccggtatagactttatactatagtttgtaatcgcgtacttaaggagaaaaaac

SEQ ID NO: 5858 - DNA, 194 bp, Staphylococcus aureus
gttttttctccttaagtacgcgattacaaactatagtataaagtctataccggtgattgacaattttacggcttgaaaatcaatttaatcatggaaaatttataatgttcattgttttacattttcaaatcaatgaaaaacacaagtggtttaatgtataataatagtagtaaacaaataaggggtagataaat

SEQ ID NO: 5859 - DNA, 143 bp, Staphylococcus aureus
tataccaagggtttagcccgatttatcttaatgataaatcgggcatttttttgttttttaaaataaatttcacaaattttgtataaatagtggtggatagtggggagatgtggtaaattatatataaggtgaggtgataaaaa

SEQ ID NO: 5860 - DNA, 143 bp, Staphylococcus aureus
tttttatcacctcaccttatatataatttaccacatctccccactatccaccactatttatacaaaatttgtgaaatttattttaaaaaacaaaaaaatgcccgatttatcattaagataaatcgggctaaacccttggtata

SEQ ID NO: 5861 - DNA, 291 bp, Staphylococcus aureus
caagaatggctacattaaataagggtgtattgtcactatttgtttttactaaagtaatgctgtgatagaaaaaaacatcttcatttaatctttataaataagtgttgatagagaattttaaggtagacgaggtcagattaacttgtttgttataggcaaactttttatactggcctcttatgccgtaaaaaagaaaaattataaattttgattacaactttgtttatttaattgaaaaattgataatatattagtggttaaaaaagtctggattaagaagaggagatagtt

SEQ ID NO: 5862 - DNA, 291 bp, Staphylococcus aureus
aactatctcctcttcttaatccagacttttttaaccactaatatattatcaatttttcaattaaataaacaaagttgtaatcaaaatttataatttttcttttttacggcataagaggccagtataaaaagtttgcctataacaaacaagttaatctgacctcgtctaccttaaaattctctatcaacacttatttataaagattaaatgaagatgtttttttctatcacagcattactttagtaaaaacaaatagtgacaatacacccttatttaatgtagccattcttg

SEQ ID NO: 5863 - DNA, 105 bp, Staphylococcus aureus
aaaattttgatattgtctatgtttatagttcacaagccattcaacgtattgtaaactaaggatagtgtatttttttaatagtaatttgtcaggaggtgcctatct

SEQ ID NO: 5864 - DNA, 105 bp, Staphylococcus aureus
agataggcacctcctgacaaattactattaaaaaaatacactatccttagtttacaatacgttgaatggcttgtgaactataaacatagacaatatcaaaatttt

SEQ ID NO: 5865 - DNA, 259 bp, Staphylococcus aureus
tcggttaatatatatacacaaataattcaacacaaatcatcagataacatatctgatgatttttttactaatttttagaacatgtagaaggacatttaagtttttcgaagtcattaaaagtgtttaagtatcgtgtcaaaattaagtcaaaaattatttgcgcaacattttaactttaaacataaatgttatattatataattattaactttgtacagttagacgaagataatttaaatgaaatgatggtgacgatcga

SEQ ID NO: 5866 - DNA, 259 bp, Staphylococcus aureus
tcgatcgtcaccatcatttcatttaaattatcttcgtctaactgtacaaagttaataattatataatataacatttatgtttaaagttaaaatgttgcgcaaataatttttgacttaattttgacacgatacttaaacacttttaatgacttcgaaaaacttaaatgtccttctacatgttctaaaaattagtaaaaaaatcatcagatatgttatctgatgatttgtgttgaattatttgtgtatatatattaaccga

SEQ ID NO: 5867 - DNA, 83 bp, Staphylococcus aureus
attaagcgacataacgaggcaagggtacatgatactttagcctcgtttttgatatgtatttttctgaatataagggcaataga

SEQ ID NO: 5868 - DNA, 83 bp, Staphylococcus aureus
tctattgcccttatattcagaaaaatacatatcaaaaacgaggctaaagtatcatgtacccttgcctcgttatgtcgcttaat

SEQ ID NO: 5869 - DNA, 220 bp, Staphylococcus aureus
gaattaaataaagacagacgcgtaatatacatttaacttttcacagcgaattaggtaatggtgagagcctagtaaaagcatgtatgttatatcactggctttttaatatttaaataatgtaatgagagaactctaagttgagttaataagggtggtaccgcgagcaatcgtcccttttaatttaacttagagttttttaaatttttaaggagtgaaaaaa

SEQ ID NO: 5870 - DNA, 220 bp, Staphylococcus aureus
ttttttcactccttaaaaatttaaaaaactctaagttaaattaaaagggacgattgctcgcggtaccacccttattaactcaacttagagttctctcattacattatttaaatattaaaaagccagtgatataacatacatgcttttactaggctctcaccattacctaattcgctgtgaaaagttaaatgtatattacgcgtctgtctttatttaattc

SEQ ID NO: 5871 - DNA, 290 bp, Staphylococcus aureus
ttgaaattgtataaagtacttatacagatgatataaattaaagctctcttcataatcatgttgtagtttttgttgacatgatgaagagagtttttttgtgaataaaaaaatgaccaagttactggttatatgtgttaaaaaatgtgtaatttactaaaataaaaattattcaggaatggtacaaattctctgaagcttataaatgcgttatagttgctattctcaattatgttcgcgataattttaagtaaaagtaagcacagatattgaatttgataggagttaattga

SEQ ID NO: 5872 - DNA, 290 bp, Staphylococcus aureus
tcaattaactcctatcaaattcaatatctgtgcttacttttacttaaaattatcgcgaacataattgagaatagcaactataacgcatttataagcttcagagaatttgtaccattcctgaataatttttattttagtaaattacacattttttaacacatataaccagtaacttggtcatttttttattcacaaaaaaactctcttcatcatgtcaacaaaaactacaacatgattatgaagagagctttaatttatatcatctgtataagtactttatacaatttcaa

SEQ ID NO: 5873 - DNA, 60 bp, Staphylococcus aureus
tatatactttgaatggacgaaccatataatgaatcgtttttaatgatctttttatacaag

SEQ ID NO: 5874 - DNA, 60 bp, Staphylococcus aureus
cttgtataaaaagatcattaaaaacgattcattatatggttcgtccattcaaagtatata

SEQ ID NO: 5875 - DNA, 105 bp, Staphylococcus aureus
agcctactttcttaaattaacaatatctattctcatagaatttgtccaattaagtgtagacgattcatgtcttatttttttaaagtatttaaaagtaaaattaca

SEQ ID NO: 5876 - DNA, 105 bp, Staphylococcus aureus
tgtaattttacttttaaatactttaaaaaaataagacatgaatcgtctacacttaattggacaaattctatgagaatagatattgttaatttaagaaagtaggct

SEQ ID NO: 5877 - DNA, 321 bp, Staphylococcus aureus
tgtgccagatgggcatagcgaagccattcaatacgaagtattgtataaatagagaacagcagtaagataatttttaattagaaaatatcttactactgtctttttagggatttatgttccagcctgctttcctaatttttaatgtcatcttaaatatgataaatgaataattaagttcatatttaatgtcaaaacatagtagtttatcaagtattgagtgagtaacattagatttaatgtaatatgcttactttttttattagcaggtgtaagctataatataaagagttgtcttatggacgattgattggaggaacgaaa

SEQ ID NO: 5878 - DNA, 321 bp, Staphylococcus aureus
tttcgttcctccaatcaatcgtccataagacaactctttatattatagcttacacctgctaataaaaaaagtaagcatattacattaaatctaatgttactcactcaatacttgataaactactatgttttgacattaaatatgaacttaattattcatttatcatatttaagatgacattaaaaattaggaaagcaggctggaacataaatccctaaaaagacagtagtaagatattttctaattaaaaattatcttactgctgttctctatttatacaatacttcgtattgaatggcttcgctatgcccatctggcaca

SEQ ID NO: 5879 - DNA, 399 bp, Staphylococcus aureus
ttgtgttgtgctataattacgataacattattatgtaaactataagtatttatcgttttcgtttttttaaaatgaaaacacattataaaatagattaaggttaacatttttactgagatcggttaatttttcaatatagattgacaaagcgcctgattagtattatccttataacagtttaagtacaacataaagagtctttaattgagcgtccagagagacgtcaaagacatgaaaatatagatatatactaaaatgatcataacactttcacatatgcaagaataagtagtaatactacgattcttctatgtaaataggctgattgtatatactaaacctcatgtcgatattaaagacatgaggttttttgtttctaaattttgaaagggtgagaat

SEQ ID NO: 5880 - DNA, 399 bp, Staphylococcus aureus
attctcaccctttcaaaatttagaaacaaaaaacctcatgtctttaatatcgacatgaggtttagtatatacaatcagcctatttacatagaagaatcgtagtattactacttattcttgcatatgtgaaagtgttatgatcattttagtatatatctatattttcatgtctttgacgtctctctggacgctcaattaaagactctttatgttgtacttaaactgttataaggataatactaatcaggcgctttgtcaatctatattgaaaaattaaccgatctcagtaaaaatgttaaccttaatctattttataatgtgttttcattttaaaaaaacgaaaacgataaatacttatagtttacataataatgttatcgtaattatagcacaacacaa

SEQ ID NO: 5881 - DNA, 217 bp, Staphylococcus aureus
taccccttttaattcagtacgagagactgaaaaaggtgggggagttgaatgataaataagttttcatatgcttgtttatctaataataccctcatgttcgacaactataagtcaatttctatggacgaaaatgacttgtagcaacttgtcacactttttgtctctttacatatactgatgtaaagagatttttttattatcggaggaaatgaatatt

SEQ ID NO: 5882 - DNA, 217 bp, Staphylococcus aureus
aatattcatttcctccgataataaaaaaatctctttacatcagtatatgtaaagagacaaaaagtgtgacaagttgctacaagtcattttcgtccatagaaattgacttatagttgtcgaacatgagggtattattagataaacaagcatatgaaaacttatttatcattcaactcccccacctttttcagtctctcgtactgaattaaaaggggta

SEQ ID NO: 5883 - DNA, 109 bp, Staphylococcus aureus
atcaatcaaactgtatcggtggggctgtaattaaccatttacttaaagaagtttatattacagcctcattattttaatgaatttcttaatataaagggagacatatatg

SEQ ID NO: 5884 - DNA, 109 bp, Staphylococcus aureus
catatatgtctccctttatattaagaaattcattaaaataatgaggctgtaatataaacttctttaagtaaatggttaattacagccccaccgatacagtttgattgat

SEQ ID NO: 5885 - DNA, 436 bp, Staphylococcus aureus
aaacaaaaaagctatagtgtttaatatcaggggctgcttaaccgcatccgaatattacaaacactatagcttttattatataaaaaatttattagcggataattaactttattaaaatccaaccaattaagaatacgagtaataggactaatactggaatcacataatgtaacataacgtccctcctttaacttaattttaattgtaatcaaatttgacaataagtcaaaacattaatacctatgataagtatcatttattaacatatgtatcatatttttaatcttgcgtaatttttatcgttaactatgtgatttaatcaacaggccaataagacgtttgtcattcgtgcacataacggtatgacgcgcttttgtcattttaattatgttaagataatagtagttatagaagttcgatctataggaggcatagc

SEQ ID NO: 5886 - DNA, 436 bp, Staphylococcus aureus
gctatgcctcctatagatcgaacttctataactactattatcttaacataattaaaatgacaaaagcgcgtcataccgttatgtgcacgaatgacaaacgtcttattggcctgttgattaaatcacatagttaacgataaaaattacgcaagattaaaaatatgatacatatgttaataaatgatacttatcataggtattaatgttttgacttattgtcaaatttgattacaattaaaattaagttaaaggagggacgttatgttacattatgtgattccagtattagtcctattactcgtattcttaattggttggattttaataaagttaattatccgctaataaattttttatataataaaagctatagtgtttgtaatattcggatgcggttaagcagcccctgatattaaacactatagcttttttgttt

SEQ ID NO: 5887 - DNA, 77 bp, Staphylococcus aureus
aaggattcgcacagcgttgaatgataaagaaacactttttcttatgcatgcgttttacctatgtatttctattttaa

SEQ ID NO: 5888 - DNA, 77 bp, Staphylococcus aureus
ttaaaatagaaatacataggtaaaacgcatgcataagaaaaagtgtttctttatcattcaacgctgtgcgaatcctt

SEQ ID NO: 5889 - DNA, 57 bp, Staphylococcus aureus
ctcgcaaaagaaagtagtcctttcttatggtgaggtgtttatttgtcgacaacttga

SEQ ID NO: 5890 - DNA, 57 bp, Staphylococcus aureus
tcaagttgtcgacaaataaacacctcaccataagaaaggactactttcttttgcgag

SEQ ID NO: 5891 - DNA, 274 bp, Staphylococcus aureus
aatttatcttccaccttcttcatatcattcgtttcattttaacatgattgtaacttttcggtatagttattgaaccatacattatgccacacattttacattatctaaaagttcgcaattcaatttatttaattaaaattaatcgtgcaatataacgatattgttagacttaatagaaattatggcatgcaatttcaaatatgctatacaatataaagaacaatgtgatatcatatttaaataatagaagattagcttagagaggtcgtaaggc

SEQ ID NO: 5892 - DNA, 274 bp, Staphylococcus aureus
gccttacgacctctctaagctaatcttctattatttaaatatgatatcacattgttctttatattgtatagcatatttgaaattgcatgccataatttctattaagtctaacaatatcgttatattgcacgattaattttaattaaataaattgaattgcgaacttttagataatgtaaaatgtgtggcataatgtatggttcaataactataccgaaaagttacaatcatgttaaaatgaaacgaatgatatgaagaaggtggaagataaatt

SEQ ID NO: 5893 - DNA, 215 bp, Staphylococcus aureus
tttcgaccattaaaaatatgtgaagctagacgtacatcaaatacgtcaaggcatatccaaatcaaacgcacctatgtaggtgtgtttttttagtttatccaatgattgatgttataataatactaaatttgtatctataaaaaagtaatgagcatttgtgcgcatatgatgatgtaaagcgtaaatgtcatagtgatatttaagggagattgaat

SEQ ID NO: 5894 - DNA, 215 bp, Staphylococcus aureus
attcaatctcccttaaatatcactatgacatttacgctttacatcatcatatgcgcacaaatgctcattacttttttatagatacaaatttagtattattataacatcaatcattggataaactaaaaaaacacacctacataggtgcgtttgatttggatatgccttgacgtatttgatgtacgtctagcttcacatatttttaatggtcgaaa

SEQ ID NO: 5895 - DNA, 505 bp, Staphylococcus aureus
cattactaattattagaaacaagttcagtatgtacgagtatttgaaccagtgtttgaatatttactttaagtacagaaaaagggcagaatatacaactgttaactatttaaattagcagtttatattctgtctttttatatggctttataacttacgtgattttggtttgataaggaatttattagtattttcatttacgaattctgattttaatgcaagcgccatacttactgatgaataaaagtactaatgattaaacaaactatttttaaatggtaaattgaaatagtgcaaattttacacttataaattaatggctataaactattttatatctatctatgttttaactacttaaattattagacaaaacaattttcttaaattatcaattaaagtatttaaaaatattgatggttaatgtaaaatatcaatataaataagttttttaaatttatgtatgtttatttgattcaaacaaaataacttaagaggagaaagttt

SEQ ID NO: 5896 - DNA, 505 bp, Staphylococcus aureus
aaactttctcctcttaagttattttgtttgaatcaaataaacatacataaatttaaaaaacttatttatattgatattttacattaaccatcaatatttttaaatactttaattgataatttaagaaaattgttttgtctaataatttaagtagttaaaacatagatagatataaaatagtttatagccattaatttataagtgtaaaatttgcactatttcaatttaccatttaaaaatagtttgtttaatcattagtacttttattcatcagtaagtatggcgcttgcattaaaatcagaattcgtaaatgaaaatactaataaattccttatcaaaccaaaatcacgtaagttataaagccatataaaaagacagaatataaactgctaatttaaatagttaacagttgtatattctgccctttttctgtacttaaagtaaatattcaaacactggttcaaatactcgtacatactgaacttgtttctaataattagtaatg

SEQ ID NO: 5897 - DNA, 162 bp, Staphylococcus aureus
tatttactgtgtgaaaaataaatagtgtactacattaaataatcgcaataataatcccgataaacaatcagcattactgcttatcatatagagttcgtaataactataactctatgattcgcaaataataaatgattgtcatcgggatttatttttatcaat

SEQ ID NO: 5898 - DNA, 162 bp, Staphylococcus aureus
attgataaaaataaatcccgatgacaatcatttattatttgcgaatcatagagttatagttattacgaactctatatgataagcagtaatgctgattgtttatcgggattattattgcgattatttaatgtagtacactatttatttttcacacagtaaata

SEQ ID NO: 5899 - DNA, 199 bp, Staphylococcus aureus
ctaaatttcagttattcattccttacaataaatttaggattacacttcagttgcattgtattattttacgtgtgaaatatacgtaatgaatcacatgacaatcttcaaattgaaaaatatacattctatgatgtaaggtcgcatttttaatatatttacgttataatagtttgatgaattttattgaggagtaagagtt

SEQ ID NO: 5900 - DNA, 199 bp, Staphylococcus aureus
aactcttactcctcaataaaattcatcaaactattataacgtaaatatattaaaaatgcgaccttacatcatagaatgtatatttttcaatttgaagattgtcatgtgattcattacgtatatttcacacgtaaaataatacaatgcaactgaagtgtaatcctaaatttattgtaaggaatgaataactgaaatttag

SEQ ID NO: 5901 - DNA, 227 bp, Staphylococcus aureus
atataattgaagtaaatgtaccgaggtttctatttggaagtctcggtatttttatgttgagattgcggtagttttaaaatgcttaatgtcatcatttacagttgagcattgtctatcaattctgtatcactctcacaatatttatatcatttgaaatgatcatttatatattaattttccagtctttgatataataaatgcagtaaaattaatcgagaggtgccatt

SEQ ID NO: 5902 - DNA, 227 bp, Staphylococcus aureus
aatggcacctctcgattaattttactgcatttattatatcaaagactggaaaattaatatataaatgatcatttcaaatgatataaatattgtgagagtgatacagaattgatagacaatgctcaactgtaaatgatgacattaagcattttaaaactaccgcaatctcaacataaaaataccgagacttccaaatagaaacctcggtacatttacttcaattatat

SEQ ID NO: 5903 - DNA, 273 bp, Staphylococcus aureus
taatgaagattatggcgtgatttattattggaaggaaaattgtaggtcctagtacattgatttatgtgccaaaatcgatattgaacccataagtccaatttgacagagaaccattattaaacgtattaaccaaattatattgatagttcgaatttcactatgaaccattatgtattgtttggtaacaaaaaaagaactaagaggttgagctcttagttcttaagtaaatgtgtcctccacataaggtcacattttttatgtgcaatatattta

SEQ ID NO: 5904 - DNA, 273 bp, Staphylococcus aureus
taaatatattgcacataaaaaatgtgaccttatgtggaggacacatttacttaagaactaagagctcaacctcttagttctttttttgttaccaaacaatacataatggttcatagtgaaattcgaactatcaatataatttggttaatacgtttaataatggttctctgtcaaattggacttatgggttcaatatcgattttggcacataaatcaatgtactaggacctacaattttccttccaataataaatcacgccataatcttcatta

SEQ ID NO: 5905 - DNA, 442 bp, Staphylococcus aureus
atgagtacctcctttaataaatataaatacacataactacttatatacttaattaagatagcatagtttcatttgaaaaacaatgaataattttcacataaaagtcaaaaatactgagttttgtgatataattgtagactgtgaagttatgtagtatgatattttagagaaataagtgaatgaaacatttaaaatttttatttaatgatactacatctattaaaagaaaacgcctatagataatcgtcatgagtgtaaattcagtttactcaaaatataataggtgatttaagcgtaagtcattctgataagttgtaccattgatattttataaaaataatcaatgaaacttaaagcgtttatgactacactaagtggtaaaattttaaaagtgattagggaaaacgaataataaactttgaaatttaggagggacaaagat

SEQ ID NO: 5906 - DNA, 442 bp, Staphylococcus aureus
atctttgtccctcctaaatttcaaagtttattattcgttttccctaatcacttttaaaattttaccacttagtgtagtcataaacgctttaagtttcattgattatttttataaaatatcaatggtacaacttatcagaatgacttacgcttaaatcacctattatattttgagtaaactgaatttacactcatgacgattatctataggcgttttcttttaatagatgtagtatcattaaataaaaattttaaatgtttcattcacttatttctctaaaatatcatactacataacttcacagtctacaattatatcacaaaactcagtatttttgacttttatgtgaaaattattcattgtttttcaaatgaaactatgctatcttaattaagtatataagtagttatgtgtatttatatttattaaaggaggtactcat

SEQ ID NO: 5907 - DNA, 189 bp, Staphylococcus aureus
aaatttaaaataaaaaactaccaatgataaatcatcagttggtagttttttattttgctattttagtgttattgcgggttaaaagtatcattctcgagttgctaacaatgtcatgttcaacttagtcatgataaaataaataacatactaaatgatacgtaaaatcaaataaaacataggtgatttatt

SEQ ID NO: 5908 - DNA, 189 bp, Staphylococcus aureus
aataaatcacctatgttttatttgattttacgtatcatttagtatgttatttattttatcatgactaagttgaacatgacattgttagcaactcgagaatgatacttttaacccgcaataacactaaaatagcaaaataaaaaactaccaactgatgatttatcattggtagttttttattttaaattt

SEQ ID NO: 5909 - DNA, 217 bp, Staphylococcus aureus
ttaccatgctgatttgtcaatttgagtgcaacacttcgttaattgagtgatatgacacttgaactatttaaatgtaaagtggtattttaacaatttataaatttccgactaaataatagctaaataatacagttatttgttgagtcggttaaatagaaagtgttatgatatgtgaggaatgtttaagactaggtactaaaaaatgaggggtgagacg

SEQ ID NO: 5910 - DNA, 217 bp, Staphylococcus aureus
cgtctcacccctcattttttagtacctagtcttaaacattcctcacatatcataacactttctatttaaccgactcaacaaataactgtattatttagctattatttagtcggaaatttataaattgttaaaataccactttacatttaaatagttcaagtgtcatatcactcaattaacgaagtgttgcactcaaattgacaaatcagcatggtaa

SEQ ID NO: 5911 - DNA, 312 bp, Staphylococcus aureus
tatatttgagctaaagctcattgacgcagtggttgactggtcatccaatggagaattgtctgacctagtcaactttgcgggggaaattctaagcaacctagataaggttccagaatttctccctaagaaacactaatcaataaattgataagaagattagaggaacgcttgagctaaagctcaagataaagacgcagaaatcaataaattgataactgggatagaggtacgcctgagctaaagctcaagataaagacgcagtaatcaataaattgataactgggatagaggtacacctgagctaaagctcat

SEQ ID NO: 5912 - DNA, 312 bp, Staphylococcus aureus
atgagctttagctcaggtgtacctctatcccagttatcaatttattgattactgcgtctttatcttgagctttagctcaggcgtacctctatcccagttatcaatttattgatttctgcgtctttatcttgagctttagctcaagcgttcctctaatcttcttatcaatttattgattagtgtttcttagggagaaattctggaaccttatctaggttgcttagaatttcccccgcaaagttgactaggtcagacaattctccattggatgaccagtcaaccactgcgtcaatgagctttagctcaaatata

SEQ ID NO: 5913 - DNA, 115 bp, Staphylococcus aureus
taaatcttacatctgggtcgtcagtattgtcgactcagtttttttctttaattatcaatagttttaacgtaaaattaaagatgattcaagagcaacacataaaggagataaaata

SEQ ID NO: 5914 - DNA, 115 bp, Staphylococcus aureus
tattttatctcctttatgtgttgctcttgaatcatctttaattttacgttaaaactattgataattaaagaaaaaaactgagtcgacaatactgacgacccagatgtaagattta

SEQ ID NO: 5915 - DNA, 434 bp, Staphylococcus aureus
tgtttaatataacacgctgatttttgttgcaatgagatgtgcatcccgaaagttatactaaagaatataactttatggggtgcatatttttagatacacaataataattaaaaactgaaattgcggatttgctagaacatgaggttattgttgctaatattaataagttatattggtggaacatgtgcgttagaagtggtaccattcatgtccttacgagataaattaacttaacacgtaggtggtgaaggctactatgaatttttataacctattaacagtctaatttagtaatcacatagttattattgtaagaaaaaggttcaataattttcctggtaaagaaaaaactctttacaaacattcatacacctgttaatattatttcttgtagaaaataaaaattaaaacatgacttaaaggagattttataa

SEQ ID NO: 5916 - DNA, 434 bp, Staphylococcus aureus
ttataaaatctcctttaagtcatgttttaatttttattttctacaagaaataatattaacaggtgtatgaatgtttgtaaagagttttttctttaccaggaaaattattgaacctttttcttacaataataactatgtgattactaaattagactgttaataggttataaaaattcatagtagccttcaccacctacgtgttaagttaatttatctcgtaaggacatgaatggtaccacttctaacgcacatgttccaccaatataacttattaatattagcaacaataacctcatgttctagcaaatccgcaatttcagtttttaattattattgtgtatctaaaaatatgcaccccataaagttatattctttagtataactttcgggatgcacatctcattgcaacaaaaatcagcgtgttatattaaaca

SEQ ID NO: 5917 - DNA, 187 bp, Staphylococcus aureus
tttagcgtaaaattgttctaacaataagaataactcgtttacactgacagttattactcaatgatacgttgggaatatcacatgttagtaatatagaacgtattgggtaccataatggtgccctttttctttgaattattttcaattaaaatagaagtgttcaaagcatagagttggaggtaataga

SEQ ID NO: 5918 - DNA, 187 bp, Staphylococcus aureus
tctattacctccaactctatgctttgaacacttctattttaattgaaaataattcaaagaaaaagggcaccattatggtacccaatacgttctatattactaacatgtgatattcccaacgtatcattgagtaataactgtcagtgtaaacgagttattcttattgttagaacaattttacgctaaa

SEQ ID NO: 5919 - DNA, 102 bp, Staphylococcus aureus
tattgtgctaacatattctgagtgtggaaacacaaaaatcactatgatccgctgctatatatttgtcgaggcaagaacataggttgaagaggagaatttata

SEQ ID NO: 5920 - DNA, 102 bp, Staphylococcus aureus
tataaattctcctcttcaacctatgttcttgcctcgacaaatatatagcagcggatcatagtgatttttgtgtttccacactcagaatatgttagcacaata

SEQ ID NO: 5921 - DNA, 79 bp, Staphylococcus aureus
aaatgcttatataaacaaaaatctactaagtgccattgaaaaggacttagtagatttattaaatatatgcgtagcaaca

SEQ ID NO: 5922 - DNA, 79 bp, Staphylococcus aureus
tgttgctacgcatatatttaataaatctactaagtccttttcaatggcacttagtagatttttgtttatataagcattt

SEQ ID NO: 5923 - DNA, 400 bp, Staphylococcus aureus
aacattatcctcaactttcaaatttaaaattaagtttaactgaaactaaagttaatgaggttcttgataggtaaagacgaagatgactgtggaacagataccttatcatagttacttaaactttggatcattttcagtttatcattaaacaaatatattgaataataaaaatgtcatactgataaagatgaatgtcacttaataagtaacttagatttaacaaatgatgatttttaattgtagaaaacttgaaataatcacttttacctaaatctaaagcattgttaagaagtgtgacaatgttaaaataaatatagttgaattaatgaatttgttctataattaacaggttatagattttaataatgagaaaagaattgacgaaagtaaggtgaattga

SEQ ID NO: 5924 - DNA, 400 bp, Staphylococcus aureus
tcaattcaccttactttcgtcaattcttttctcattattaaaatctataacctgttaattatagaacaaattcattaattcaactatatttattttaacattgtcacacttcttaacaatgctttagatttaggtaaaagtgattatttcaagttttctacaattaaaaatcatcatttgttaaatctaagttacttattaagtgacattcatctttatcagtatgacatttttattattcaatatatttgtttaatgataaactgaaaatgatccaaagtttaagtaactatgataaggtatctgttccacagtcatcttcgtctttacctatcaagaacctcattaactttagtttcagttaaacttaattttaaatttgaaagttgaggataatgtt

SEQ ID NO: 5925 - DNA, 108 bp, Staphylococcus aureus
atcgtaaaattcaattaaatgataaaaaagtagcatttaagtttacaatagcgcttacattttttataattgtaagggaacttaacctaagtaacaggaggatggaag

SEQ ID NO: 5926 - DNA, 108 bp, Staphylococcus aureus
cttccatcctcctgttacttaggttaagttcccttacaattataaaaaatgtaagcgctattgtaaacttaaatgctacttttttatcatttaattgaattttacgat

SEQ ID NO: 5927 - DNA, 59 bp, Staphylococcus aureus
agttaaaagatgatataaatggctatagcccattccatactttataaaagtatcggaaa

SEQ ID NO: 5928 - DNA, 59 bp, Staphylococcus aureus
tttccgatacttttataaagtatggaatgggctatagccatttatatcatcttttaact

SEQ ID NO: 5929 - DNA, 172 bp, Staphylococcus aureus
ttataaagtatgttggaaattgaaattttaaattctttccaacatacttttcactttttaagtcagtatttttactccttaaaataacattacatcgacaatgtttttgtattagaaatgtaaaacaaaaatagaatatgattttgtatgattacaaaaaggagttgattta

SEQ ID NO: 5930 - DNA, 172 bp, Staphylococcus aureus
taaatcaactcctttttgtaatcatacaaaatcatattctatttttgttttacatttctaatacaaaaacattgtcgatgtaatgttattttaaggagtaaaaatactgacttaaaaagtgaaaagtatgttggaaagaatttaaaatttcaatttccaacatactttataa

SEQ ID NO: 5931 - DNA, 179 bp, Staphylococcus aureus
aactaaaaataacgagttgcttcatatttcttttgttaccctttgtaatttattttttaataaaatctataaaaaatagacagggaaaatgatttgtttagatataaaacgttgacaaaagcaaaattaagcgtttatcatttatctttagtaattagattagcgagggggaaatgaca

SEQ ID NO: 5932 - DNA, 179 bp, Staphylococcus aureus
tgtcatttccccctcgctaatctaattactaaagataaatgataaacgcttaattttgcttttgtcaacgttttatatctaaacaaatcattttccctgtctattttttatagattttattaaaaaataaattacaaagggtaacaaaagaaatatgaagcaactcgttatttttagtt

SEQ ID NO: 5933 - DNA, 155 bp, Staphylococcus aureus
tatttttattccctagagacattttaagattgttaaatagaatcattagtgaatcttattttaaagatagtaatggattaatctaaataagtgcggataatataaacataacaacataattaaaagacataaatgacaataaaaggagtatagaa

SEQ ID NO: 5934 - DNA, 155 bp, Staphylococcus aureus
ttctatactccttttattgtcatttatgtcttttaattatgttgttatgtttatattatccgcacttatttagattaatccattactatctttaaaataagattcactaatgattctatttaacaatcttaaaatgtctctagggaataaaaata

SEQ ID NO: 5935 - DNA, 417 bp, Staphylococcus aureus
aatagttagaaagactagatatgctattcattcttaagtcatcaacgagtaagtaatgactttctaaatggaaaatacttatcctagtctttttaattttggaattgttacgtatttctgacaatttagaattcgtattcaaaaaaatatctaaataaataacacgcaataagttgattgatgtaacatgtaagagaatgttttaaataaactttatttaaaagacaatgaaataataaatggcaaggctattaataaagacttttagtaattaatttaaaaaagaggtattctaattaacaggttttccgattagttacaattatttaattctcaaaagatttagaattgattatcaaattactgtaagccctttgctgtatatgctacaattcttattgatggagggtaaatgta

SEQ ID NO: 5936 - DNA, 417 bp, Staphylococcus aureus
tacatttaccctccatcaataagaattgtagcatatacagcaaagggcttacagtaatttgataatcaattctaaatcttttgagaattaaataattgtaactaatcggaaaacctgttaattagaatacctcttttttaaattaattactaaaagtctttattaatagccttgccatttattatttcattgtcttttaaataaagtttatttaaaacattctcttacatgttacatcaatcaacttattgcgtgttatttatttagatatttttttgaatacgaattctaaattgtcagaaatacgtaacaattccaaaattaaaaagactaggataagtattttccatttagaaagtcattacttactcgttgatgacttaagaatgaatagcatatctagtctttctaactatt

SEQ ID NO: 5937 - DNA, 65 bp, Staphylococcus aureus
taatcagagcacgataaataattacgaccaattaattttagttaaaagacggaggaatgaaatta

SEQ ID NO: 5938 - DNA, 65 bp, Staphylococcus aureus
taatttcattcctccgtcttttaactaaaattaattggtcgtaattatttatcgtgctctgatta

SEQ ID NO: 5939 - DNA, 66 bp, Staphylococcus aureus
gtcgatgagtctgggacataattcaatgtcctagtcgtgacgatgttatcttggcagtagtcaact

SEQ ID NO: 5940 - DNA, 66 bp, Staphylococcus aureus
agttgactactgccaagataacatcgtcacgactaggacattgaattatgtcccagactcatcgac

SEQ ID NO: 5941 - DNA, 138 bp, Staphylococcus aureus
ggcattatgttatatttattttcggctataaagccaatacacacatatcaaacgtgattgtgtaaagggtgcaatatttatatattgtctttacaatagtttgctatggaggtaattaaccaataggaggaatttata

SEQ ID NO: 5942 - DNA, 138 bp, Staphylococcus aureus
tataaattcctcctattggttaattacctccatagcaaactattgtaaagacaatatataaatattgcaccctttacacaatcacgtttgatatgtgtgtattggctttatagccgaaaataaatataacataatgcc

SEQ ID NO: 5943 - DNA, 83 bp, Staphylococcus aureus
tctgtcataaagtaaaacaaggaagaagacacctttaatgttgctttattaaaatgtaaatcattctaataaaacgacaactg

SEQ ID NO: 5944 - DNA, 83 bp, Staphylococcus aureus
cagttgtcgttttattagaatgatttacattttaataaagcaacattaaaggtgtcttcttccttgttttactttatgacaga

SEQ ID NO: 5945 - DNA, 319 bp, Staphylococcus aureus
aactaatatacaatgacatattaaaatgccagtattaaacgataatgtaacatttaaaatgggcatgtttaattaaatcaaagatgcatgtgataatttaaattcacaatgagcataaaaatggtgtttaaacaagttaattaaacatatactttataaataataggcattaggtatattgctataataaagttatgtaatttttaacctcagtatgtatgtcacatttctggtgtaaactgtaccgagtcagactttggtacagtttttttatttgcttattcaatgcattaaatgagtatgataaaatgataatgat

SEQ ID NO: 5946 - DNA, 319 bp, Staphylococcus aureus
atcattatcattttatcatactcatttaatgcattgaataagcaaataaaaaaactgtaccaaagtctgactcggtacagtttacaccagaaatgtgacatacatactgaggttaaaaattacataactttattatagcaatatacctaatgcctattatttataaagtatatgtttaattaacttgtttaaacaccatttttatgctcattgtgaatttaaattatcacatgcatctttgatttaattaaacatgcccattttaaatgttacattatcgtttaatactggcattttaatatgtcattgtatattagtt

SEQ ID NO: 5947 - DNA, 211 bp, Staphylococcus aureus
tgctgagaacaaatcaataaacgtaaagaggagttgctgagataatttaatgaatctcagaactccttttgaaaattatacgcaatattaactttgaaaattagacgttatattttgtgatttgtcagtatcatattataatgacttatgttacgtatacagcaatcaattttaaaataaaagaaatttataaacaatcgaggtgtagcga

SEQ ID NO: 5948 - DNA, 211 bp, Staphylococcus aureus
tcgctacacctcgattgtttataaatttcttttattttaaaattgattgctgtatacgtaacataagtcattataatatgatactgacaaatcacaaaatataacgtctaattttcaaagttaatattgcgtataattttcaaaaggagttctgagattcattaaattatctcagcaactcctctttacgtttattgatttgttctcagca

SEQ ID NO: 5949 - DNA, 257 bp, Staphylococcus aureus
ttaagatcgaatgaattataagagtaggaaaaagctgaaagaaatctgatgcttatgtcctgctcttattatttttgatataatgattattcgatgaaaaatgactgaagacatagtataattaaagataaatttgttttaacaatattatgattagccaaatataaagcatttaattttctatcattactatgctcacataatctaaatattgttcgaacacgtaaaagtaatttctatttaaggtggtaattgtc

SEQ ID NO: 5950 - DNA, 257 bp, Staphylococcus aureus
gacaattaccaccttaaatagaaattacttttacgtgttcgaacaatatttagattatgtgagcatagtaatgatagaaaattaaatgctttatatttggctaatcataatattgttaaaacaaatttatctttaattatactatgtcttcagtcatttttcatcgaataatcattatatcaaaaataataagagcaggacataagcatcagatttctttcagctttttcctactcttataattcattcgatcttaa

SEQ ID NO: 5951 - DNA, 289 bp, Staphylococcus aureus
aatgaaataatcaaggtatttatttaatgcgtatggcgtagttaaagaaatacaaaattggtgctggacataaaattatgcctgtatttcttttcaacgtcttacgagtctattcgaatgtaatggtgaaataaatgaacaaacttttacaagaatctctgattaatagtgaagtcatttgtttcaagcataaacttatgctataattaagttgcttaaaaattagtgaactcaggcagaagagtgggagattcccgctcttttctatttgccaaaaagggaggcctgt

SEQ ID NO: 5952 - DNA, 289 bp, Staphylococcus aureus
acaggcctccctttttggcaaatagaaaagagcgggaatctcccactcttctgcctgagttcactaatttttaagcaacttaattatagcataagtttatgcttgaaacaaatgacttcactattaatcagagattcttgtaaaagtttgttcatttatttcaccattacattcgaatagactcgtaagacgttgaaaagaaatacaggcataattttatgtccagcaccaattttgtatttctttaactacgccatacgcattaaataaataccttgattatttcatt

SEQ ID NO: 5953 - DNA, 344 bp, Staphylococcus aureus
ttaaataaattacaagctaaaagtatagttaagattgatatgctccctataaatattgcactttttaagtgtctactttatagggagcatatttgatactagcttttggttttttattagaatagattacctattaaaagttacgttatatggacatgattttgtataaaattttgtggtggcctagaatgatttttaatgacaaaatataatgtcgactattattggaaaattttctgttgaaatgcctatcttacggcaaactttatttgattttataggcttaatttattaaaataacgtgtgagctaaaataattgtttaagcattgttacactaaaaaa

SEQ ID NO: 5954 - DNA, 344 bp, Staphylococcus aureus
ttttttagtgtaacaatgcttaaacaattattttagctcacacgttattttaataaattaagcctataaaatcaaataaagtttgccgtaagataggcatttcaacagaaaattttccaataatagtcgacattatattttgtcattaaaaatcattctaggccaccacaaaattttatacaaaatcatgtccatataacgtaacttttaataggtaatctattctaataaaaaaccaaaagctagtatcaaatatgctccctataaagtagacacttaaaaagtgcaatatttatagggagcatatcaatcttaactatacttttagcttgtaatttatttaa

SEQ ID NO: 5955 - DNA, 168 bp, Staphylococcus aureus
tttagtgttaggtatctggaaaatgtttgataatttcttaatatcggtatattaacattaaacagttaatacatagatgtgtagaaatagttaacattttccagtttttttatgaataaattcagttgatacgctattaaaatatattttaaaaaagaaggtgactat

SEQ ID NO: 5956 - DNA, 168 bp, Staphylococcus aureus
atagtcaccttcttttttaaaatatattttaatagcgtatcaactgaatttattcataaaaaaactggaaaatgttaactatttctacacatctatgtattaactgtttaatgttaatataccgatattaagaaattatcaaacattttccagatacctaacactaaa

SEQ ID NO: 5957 - DNA, 114 bp, Staphylococcus aureus
agttgcgtatagttatataaacaatctataccacacctttttcttagtaggtcgaatctccaacgcctaactcggattaaggagtattcaaacattttaaggaggaaattgatt

SEQ ID NO: 5958 - DNA, 114 bp, Staphylococcus aureus
aatcaatttcctccttaaaatgtttgaatactccttaatccgagttaggcgttggagattcgacctactaagaaaaaggtgtggtatagattgtttatataactatacgcaact

SEQ ID NO: 5959 - DNA, 368 bp, Staphylococcus aureus
tcttaatataacgtctttgaggttggggcatatttatgttccaaccttaatttatattaaaaaagctttttacaaatattaacatttattatatgttaagctaatattgagtgaataataaggttacaatgagataaagatgatataagtacacctagagtaataatcaagatattaaaaataaagtatgttttttaaaaaatataacttatatttatactgataagggtgggacgataagtctattttgtaaataatagatggatatcccgctctctttttttccaattcaatattttataactaatattaaaatacgataataaatgatatgatataactattagattcaagagaggagatttata

SEQ ID NO: 5960 - DNA, 368 bp, Staphylococcus aureus
tataaatctcctctcttgaatctaatagttatatcatatcatttattatcgtattttaatattagttataaaatattgaattggaaaaaaagagagcgggatatccatctattatttacaaaatagacttatcgtcccacccttatcagtataaatataagttatattttttaaaaaacatactttatttttaatatcttgattattactctaggtgtacttatatcatctttatctcattgtaaccttattattcactcaatattagcttaacatataataaatgttaatatttgtaaaaagcttttttaatataaattaaggttggaacataaatatgccccaacctcaaagacgttatattaaga

SEQ ID NO: 5961 - DNA, 185 bp, Staphylococcus aureus
tatttaaagtcatatgacgacaatgtatcgtcatgtgatttttttatgccattttttacgaagtgatccattttgaatttgttgtattgaacattttaaaacgctttattattttgagtgcaactgttaattatcctgtatgtatagtgattaatagtgtacatcaagtgttttttaacttataa

SEQ ID NO: 5962 - DNA, 185 bp, Staphylococcus aureus
ttataagttaaaaaacacttgatgtacactattaatcactatacatacaggataattaacagttgcactcaaaataataaagcgttttaaaatgttcaatacaacaaattcaaaatggatcacttcgtaaaaaatggcataaaaaaatcacatgacgatacattgtcgtcatatgactttaaata

SEQ ID NO: 5963 - DNA, 256 bp, Staphylococcus aureus
tcaaaaagtcattaacataaaagaggtcagaacaagtcaccgaaatataatggttgtcatggacaatttacttatattttatgatggtcaattgaaaggggtaacgattaatctgttatcttaagtaaattgatacatagatgatattgttctaacctctttcatcgtctgtttggactacatattctaaacatcaaataggaaattatatataataacgtcgttttaactaaggcaacataaggaggtgcgtcaa

SEQ ID NO: 5964 - DNA, 256 bp, Staphylococcus aureus
ttgacgcacctccttatgttgccttagttaaaacgacgttattatatataatttcctatttgatgtttagaatatgtagtccaaacagacgatgaaagaggttagaacaatatcatctatgtatcaatttacttaagataacagattaatcgttacccctttcaattgaccatcataaaatataagtaaattgtccatgacaaccattatatttcggtgacttgttctgacctcttttatgttaatgactttttga

SEQ ID NO: 5965 - DNA, 51 bp, Staphylococcus aureus
aatatagaactatttttatgagcaaatgtttttatgattgatgttataata

SEQ ID NO: 5966 - DNA, 51 bp, Staphylococcus aureus
tattataacatcaatcataaaaacatttgctcataaaaatagttctatatt

SEQ ID NO: 5967 - DNA, 223 bp, Staphylococcus aureus
atatttgtttatactagatttcattttcatatggaatctagtttttttaatcccaattttagaaattagccacgcaattgtttataatgatatattgtaaaacaatatttgttcattttttaggcaaatgtgttgtagcatctgatacattgaatctaaaattgatgtgaatttttaaatggaatacatgaaaaaagaattaaacgatacaagggggatataa

SEQ ID NO: 5968 - DNA, 223 bp, Staphylococcus aureus
ttatatcccccttgtatcgtttaattcttttttcatgtattccatttaaaaattcacatcaattttagattcaatgtatcagatgctacaacacatttgcctaaaaaatgaacaaatattgttttacaatatatcattataaacaattgcgtggctaatttctaaaattgggattaaaaaaactagattccatatgaaaatgaaatctagtataaacaaatat

SEQ ID NO: 5969 - DNA, 164 bp, Staphylococcus aureus
ttgtattatcgataaaaatataagcacgtttgttcgtttttgcgttttgatttcaagattttatacgaacaaatattcgcaaaacacttgtattttattttgaatccttgtatagtattgataagataattaaaagatagcaatttcaattaggaggtctcgct

SEQ ID NO: 5970 - DNA, 164 bp, Staphylococcus aureus
agcgagacctcctaattgaaattgctatcttttaattatcttatcaatactatacaaggattcaaaataaaatacaagtgttttgcgaatatttgttcgtataaaatcttgaaatcaaaacgcaaaaacgaacaaacgtgcttatatttttatcgataatacaa

SEQ ID NO: 5971 - DNA, 353 bp, Staphylococcus aureus
tacacaaatttatatctatagttaaacttagcaaatatccttataggattgattgaaagtgatattcatctcataaagctagaataatatctaactttatgggatacactacaaatcgagactataaggttttttattttatttattattacattatcaatagttttataatcgagcttcaaaactttagaaaatagtagaaatagcattcaatatagtgcaaaagtgcaaattgataacttgacacttatctcctataaaccgtacaattaatttgtatgatttatatataatttcataaagtcatattgaatttcatataaagagcaaaccctagaaaaggaggtgtttgt

SEQ ID NO: 5972 - DNA, 353 bp, Staphylococcus aureus
acaaacacctccttttctagggtttgctctttatatgaaattcaatatgactttatgaaattatatataaatcatacaaattaattgtacggtttataggagataagtgtcaagttatcaatttgcacttttgcactatattgaatgctatttctactattttctaaagttttgaagctcgattataaaactattgataatgtaataataaataaaataaaaaaccttatagtctcgatttgtagtgtatcccataaagttagatattattctagctttatgagatgaatatcactttcaatcaatcctataaggatatttgctaagtttaactatagatataaatttgtgta

SEQ ID NO: 5973 - DNA, 296 bp, Staphylococcus aureus
tttttgtctccctcacaaattagtgagggagcttttttaagttgtagtctcaatctaattagacagcactttatcggtaataactatagtaaacagtggttatttgaaagtaagacggaccttatattaaataagaagttattgcttttaataaaaatgttttaggcttcgtatttactatatttatattatgtaaacctataaagatgagtgcttttctaaccaataaaaaagaagagaagatgtaacacatcttctcttctgcaatattaattaggatttatttctaagttgag

SEQ ID NO: 5974 - DNA, 296 bp, Staphylococcus aureus
ctcaacttagaaataaatcctaattaatattgcagaagagaagatgtgttacatcttctcttcttttttattggttagaaaagcactcatctttataggtttacataatataaatatagtaaatacgaagcctaaaacatttttattaaaagcaataacttcttatttaatataaggtccgtcttactttcaaataaccactgtttactatagttattaccgataaagtgctgtctaattagattgagactacaacttaaaaaagctccctcactaatttgtgagggagacaaaaa

SEQ ID NO: 5975 - DNA, 173 bp, Staphylococcus aureus
gtatttatttacaactcctatttattttgatgtcttaatactaacatattgaagttttcagacaaagtaatgtctctctataattgaagaaaaataattcaaagaatttaatatttactttaaatattagaacgtatgaattaaactagtatttatgagaggatgaacaaaac

SEQ ID NO: 5976 - DNA, 173 bp, Staphylococcus aureus
gttttgttcatcctctcataaatactagtttaattcatacgttctaatatttaaagtaaatattaaattctttgaattatttttcttcaattatagagagacattactttgtctgaaaacttcaatatgttagtattaagacatcaaaataaataggagttgtaaataaatac

SEQ ID NO: 5977 - DNA, 95 bp, Staphylococcus aureus
aattacgtaagtaaacattcgaattggaccctatcgtccattagtatgaatttaatatagtaccactgtttacatagtaaatcggtggttctttt

SEQ ID NO: 5978 - DNA, 95 bp, Staphylococcus aureus
aaaagaaccaccgatttactatgtaaacagtggtactatattaaattcatactaatggacgatagggtccaattcgaatgtttacttacgtaatt

SEQ ID NO: 5979 - DNA, 302 bp, Staphylococcus aureus
ttttatgatatatgatttcaaacagagtcattgttcattttaatattgaacgcccttacttaattaaatgtcttgaatgttagaattttaatttaattctaaacatgctattgacacattttattaggtttgaggcgttttcttatacatttaagatgcttcgtgattatatggtatgaataggtttgtaaaagtaagtatgttaaaatgtataagttaaataattaataattagaaagcttacaaacgaatatattgtaaagacaaattttaaaaagagacaagggttgtgaagaaataat

SEQ ID NO: 5980 - DNA, 302 bp, Staphylococcus aureus
attatttcttcacaacccttgtctctttttaaaatttgtctttacaatatattcgtttgtaagctttctaattattaattatttaacttatacattttaacatacttacttttacaaacctattcataccatataatcacgaagcatcttaaatgtataagaaaacgcctcaaacctaataaaatgtgtcaatagcatgtttagaattaaattaaaattctaacattcaagacatttaattaagtaagggcgttcaatattaaaatgaacaatgactctgtttgaaatcatatatcataaaa

SEQ ID NO: 5981 - DNA, 282 bp, Staphylococcus aureus
ctagtcataaaaaatatggctgaagaatgtcaattaaacaaaatggcgtcataaataaattagtgcggattgatatttctagttttcaaattaaactacttttataaagacttgaaaaattaaatttgacaaaatttttacaaaaaccattgacaacgctttcatatcgatagtatcataacaaatataataaaagttaatacatagaatagagacgggagatttctacgagccaaactgctagtgtaggaatctctttgtctttttgggaggacatttaat

SEQ ID NO: 5982 - DNA, 282 bp, Staphylococcus aureus
attaaatgtcctcccaaaaagacaaagagattcctacactagcagtttggctcgtagaaatctcccgtctctattctatgtattaacttttattatatttgttatgatactatcgatatgaaagcgttgtcaatggtttttgtaaaaattttgtcaaatttaatttttcaagtctttataaaagtagtttaatttgaaaactagaaatatcaatccgcactaatttatttatgacgccattttgtttaattgacattcttcagccatattttttatgactag

SEQ ID NO: 5983 - DNA, 109 bp, Staphylococcus aureus
acttgtagattagacttttgtataaacattgtgatacaatcaatttaagttaatatttgaatcgagaaacgagagatttgttcgaacatgtacaattgaaggattgttt

SEQ ID NO: 5984 - DNA, 109 bp, Staphylococcus aureus
aaacaatccttcaattgtacatgttcgaacaaatctctcgtttctcgattcaaatattaacttaaattgattgtatcacaatgtttatacaaaagtctaatctacaagt

SEQ ID NO: 5985 - DNA, 149 bp, Staphylococcus aureus
ttaatttgtacaatcataaactggtgtcctgttttaagggcatcagtttttttatacgagatacattagtcaattgaaactatgcatcactaaatgtatgataataataaaagcgaatataaaaacgttgttattaaaggtgtgagatg

SEQ ID NO: 5986 - DNA, 149 bp, Staphylococcus aureus
catctcacacctttaataacaacgtttttatattcgcttttattattatcatacatttagtgatgcatagtttcaattgactaatgtatctcgtataaaaaaactgatgcccttaaaacaggacaccagtttatgattgtacaaattaa

SEQ ID NO: 5987 - DNA, 221 bp, Staphylococcus aureus
gttgtaatcatatgggcacgatttaatgactcgtgtacataacgtttgaagtatgataaatagatatagaaataaagtcatatgtgacatcaattaaatgatgttcaaatgacaagatacaatagaggaatgtttgtaataaaaacgcttcatataaaggtcgagtcaatatatgatacgactttatatgaagcgttttatttgctatgagctagtatatt

SEQ ID NO: 5988 - DNA, 221 bp, Staphylococcus aureus
aatatactagctcatagcaaataaaacgcttcatataaagtcgtatcatatattgactcgacctttatatgaagcgtttttattacaaacattcctctattgtatcttgtcatttgaacatcatttaattgatgtcacatatgactttatttctatatctatttatcatacttcaaacgttatgtacacgagtcattaaatcgtgcccatatgattacaac

SEQ ID NO: 5989 - DNA, 111 bp, Staphylococcus aureus
tgaatcatcctttcgatttacttaaaatgtaccataaaatcgtgtaatagtctttactaaaactctatgatagaatactttgagtaggattttattaaggagatgtataac

SEQ ID NO: 5990 - DNA, 111 bp, Staphylococcus aureus
gttatacatctccttaataaaatcctactcaaagtattctatcatagagttttagtaaagactattacacgattttatggtacattttaagtaaatcgaaaggatgattca

SEQ ID NO: 5991 - DNA, 242 bp, Staphylococcus aureus
tagattaaatttcaccctaaatgataatgtgtcttgggtgaaattttttgcggagatttatcagattatttttaaaaattgaaaaaatattttagctgtagattgttttatgtcgttttagaagtcgaaatcgcagttatatcaatgttttaagctttatgttagaaaacctgacatatttttgaaatcctaaaaaaattatgataagttattaacaagttcaaaagtagaggagaggaaca

SEQ ID NO: 5992 - DNA, 242 bp, Staphylococcus aureus
tgttcctctcctctacttttgaacttgttaataacttatcataatttttttaggatttcaaaaatatgtcaggttttctaacataaagcttaaaacattgatataactgcgatttcgacttctaaaacgacataaaacaatctacagctaaaatattttttcaatttttaaaaataatctgataaatctccgcaaaaaatttcacccaagacacattatcatttagggtgaaatttaatcta

SEQ ID NO: 5993 - DNA, 78 bp, Staphylococcus aureus
tacgctaaacaatgatgggaaatcagtaatatcaagggctagagcgttttgctttagctcttttttgatttggaaaga

SEQ ID NO: 5994 - DNA, 78 bp, Staphylococcus aureus
tctttccaaatcaaaaaagagctaaagcaaaacgctctagcccttgatattactgatttcccatcattgtttagcgta

SEQ ID NO: 5995 - DNA, 305 bp, Staphylococcus aureus
tagttcacatgaattttaatatatttggaggtgatgagatgaggcgataaaagaacgtcgcgaaaacgttgagtattacttgaaaatagccatattcatattacttctcatcgaattcatttgcagaacgttctaaggtaagaccccgaaaagagggaccttactacgcattattaagggggtaatactatatgaaaagagaaacaaaacaaaaaatatctttttgtttatcgatcggtattttcattttagttatactactattgatattctaaaaaattaaaaatttcgcctcatctaattta

SEQ ID NO: 5996 - DNA, 305 bp, Staphylococcus aureus
taaattagatgaggcgaaatttttaattttttagaatatcaatagtagtataactaaaatgaaaataccgatcgataaacaaaaagatattttttgttttgtttctcttttcatatagtattacccccttaataatgcgtagtaaggtccctcttttcggggtcttaccttagaacgttctgcaaatgaattcgatgagaagtaatatgaatatggctattttcaagtaatactcaacgttttcgcgacgttcttttatcgcctcatctcatcacctccaaatatattaaaattcatgtgaacta

SEQ ID NO: 5997 - DNA, 687 bp, Staphylococcus aureus
tataagcattgagttcaataggcatacaataactgcccaaactagtgactgagtgggtgtttttatagtattaaaagttttctaaaagtgaaagaaatcatgtttagtgatttacttatgttttttaaaatagtataataattttatataatatatagaacttcagtataccttttgagtatatatggagttctttcttttttacaagatgtatatgtataaatggaaatgtttattacattacataaaaacctttaggtgctcttagatggatgttaatcataaaaaaagagattttgaaaaatataggctattataatttagaattacaaattataaatcttgccagtggatatgggagttcaacatgtcacttaccccaatttgtggaatgttaaataactataaagaggaaaggagaaaaaatgataagaatggttaaagaaaaagaacgaatagcaaaattaaatttcgaatagctgtgacgagcttaataattcaagtacttaattttatcaaatcgttcttttaaaaaggtaaagggcaaaagacctttaccacattaaatagggaggtggtatttatgacaagagaattaaggaaaaaattaactctctatcttaacattgcaactttaatattatttattattaatttaactagaaaaaataaattattctttcattt

SEQ ID NO: 5998 - DNA, 687 bp, Staphylococcus aureus
aaatgaaagaataatttattttttctagttaaattaataataaataatattaaagttgcaatgttaagatagagagttaattttttccttaattctcttgtcataaataccacctccctatttaatgtggtaaaggtcttttgccctttacctttttaaaagaacgatttgataaaattaagtacttgaattattaagctcgtcacagctattcgaaatttaattttgctattcgttctttttctttaaccattcttatcattttttctcctttcctctttatagttatttaacattccacaaattggggtaagtgacatgttgaactcccatatccactggcaagatttataatttgtaattctaaattataatagcctatatttttcaaaatctctttttttatgattaacatccatctaagagcacctaaaggtttttatgtaatgtaataaacatttccatttatacatatacatcttgtaaaaaagaaagaactccatatatactcaaaaggtatactgaagttctatatattatataaaattattatactattttaaaaaacataagtaaatcactaaacatgatttctttcacttttagaaaacttttaatactataaaaacacccactcagtcactagtttgggcagttattgtatgcctattgaactcaatgcttata

SEQ ID NO: 5999 - DNA, 296 bp, Staphylococcus aureus
taaaataaggccatatcttttgaaatatcatggagtgagccttttaaatcatctaattttaaagtatattaaatatggatagcttaatgtgaatataaataaaaaattatcaaataatataatatagaatatatgaagacaagaaattttataaatatataataaaaaaccaatactattaggtattagtttatgaattaacaagtttggcaactacaaagaaacaatgtattgctaaacgtagttactgcattaggattattataattataaatagaaagagagcgtgattaaaa

SEQ ID NO: 6000 - DNA, 296 bp, Staphylococcus aureus
ttttaatcacgctctctttctatttataattataataatcctaatgcagtaactacgtttagcaatacattgtttctttgtagttgccaaacttgttaattcataaactaatacctaatagtattggttttttattatatatttataaaatttcttgtcttcatatattctatattatattatttgataattttttatttatattcacattaagctatccatatttaatatactttaaaattagatgatttaaaaggctcactccatgatatttcaaaagatatggccttatttta

SEQ ID NO: 6001 - DNA, 373 bp, Staphylococcus aureus
caaaaatattttgttaggttaggtggacaagaaattaaatttctaatgatttcatggttgtctgtccacgttttgtccacctcaataagataatctcttagttttagaaattgtacatggttaaataatcaaaaatgcatattatgaaattatcattgccattaaatcttgaataatctttaagtgatgatattaaaggctgaacacagtaaataagttaattttaatgcagtattctatattatacatattttgtaataatgtttgtgcgaattattttttattgacaattttttatattaaattgtgtaattggcatatatgatgatttgtgataattatattgtaatatagcatttggtttatgattcca

SEQ ID NO: 6002 - DNA, 373 bp, Staphylococcus aureus
tggaatcataaaccaaatgctatattacaatataattatcacaaatcatcatatatgccaattacacaatttaatataaaaaattgtcaataaaaaataattcgcacaaacattattacaaaatatgtataatatagaatactgcattaaaattaacttatttactgtgttcagcctttaatatcatcacttaaagattattcaagatttaatggcaatgataatttcataatatgcatttttgattatttaaccatgtacaatttctaaaactaagagattatcttattgaggtggacaaaacgtggacagacaaccatgaaatcattagaaatttaatttcttgtccacctaacctaacaaaatatttttg

SEQ ID NO: 6003 - DNA, 260 bp, Staphylococcus aureus
tttcgagtgtaaagaatcgtgtggtaaacataatttatatagattataaggaggtgaaaatggtcgaggaagttaaaacgataaaatagtttgaatcttttgatttcaattctggtaggactattgaatttgcaatctaataagaatgtgaggtttgatttaatatgaagtcatattctttgaataaaatattactttctcaccattagtaaaatgaagatgactattaaagtgcgaaaaacaaataaaaaagagaaaat

SEQ ID NO: 6004 - DNA, 260 bp, Staphylococcus aureus
attttctcttttttatttgtttttcgcactttaatagtcatcttcattttactaatggtgagaaagtaatattttattcaaagaatatgacttcatattaaatcaaacctcacattcttattagattgcaaattcaatagtcctaccagaattgaaatcaaaagattcaaactattttatcgttttaacttcctcgaccattttcacctccttataatctatataaattatgtttaccacacgattctttacactcgaaa

SEQ ID NO: 6005 - DNA, 369 bp, Staphylococcus aureus
taaatgtatagtatttgagaaggctatatgactccggaaaaattaaagtctaaagatatctcaatatctaaaatctaaaagactactggagttagtagtttgaatattgaaagactctaatctaataaaaatacataaaaggtttaactttagaagtggttgtaaacttcaatgaatattaaacattgaagtttagtaaaaggcgtaaggtataaaagcaatcgtttgtctttgacaaagtaattgatgatgaaaagtcgttaatatgttgaaagaaaaattgataatatgaaatttaactattatgaagtgatgatagccattaatgaatagaaaaataataaaatcatttataaataaaaactacgt

SEQ ID NO: 6006 - DNA, 369 bp, Staphylococcus aureus
acgtagtttttatttataaatgattttattatttttctattcattaatggctatcatcacttcataatagttaaatttcatattatcaatttttctttcaacatattaacgacttttcatcatcaattactttgtcaaagacaaacgattgcttttataccttacgccttttactaaacttcaatgtttaatattcattgaagtttacaaccacttctaaagttaaaccttttatgtatttttattagattagagtctttcaatattcaaactactaactccagtagtcttttagattttagatattgagatatctttagactttaatttttccggagtcatatagccttctcaaatactatacattta

SEQ ID NO: 6007 - DNA, 511 bp, Staphylococcus aureus
tataactactgtataaattaatcaagctatgtttatttgatttaactattaataaaaatcatatggtaaatggatattataatgattaaaatacaaaaatagtacattccaatttgtgaaaaaggagtatgtcgtttcatttagaatttattacactaaattagcatcgaataagggaaaatgagtgttaagttttaaatgataaaatagattggaatggatcgtcttgaaatgctcccttcaaagttttcattttttcaatgtctacttcgaaggggcatttccattatattgttatagctttttatatttgtataatgaacatataagtttaagaagatgagagtgaaggaaataaaaaagctcaaatgtaccaaattgttaatcttaataaatctctactttataaagattgaatggacattcgagcgttaatcagtcaggagggaatttcactcctacaatttaataataatacttgcttcaacactgtacaaggagtgatttgtta

SEQ ID NO: 6008 - DNA, 511 bp, Staphylococcus aureus
taacaaatcactccttgtacagtgttgaagcaagtattattattaaattgtaggagtgaaattccctcctgactgattaacgctcgaatgtccattcaatctttataaagtagagatttattaagattaacaatttggtacatttgagcttttttatttccttcactctcatcttcttaaacttatatgttcattatacaaatataaaaagctataacaatataatggaaatgccccttcgaagtagacattgaaaaaatgaaaactttgaagggagcatttcaagacgatccattccaatctattttatcatttaaaacttaacactcattttcccttattcgatgctaatttagtgtaataaattctaaatgaaacgacatactcctttttcacaaattggaatgtactatttttgtattttaatcattataatatccatttaccatatgatttttattaatagttaaatcaaataaacatagcttgattaatttatacagtagttata

SEQ ID NO: 6009 - DNA, 410 bp, Staphylococcus aureus
aaagtttatttgaaatgatgcacacctataaaaatcttaatcatcgaaaagtcacaaacatctccatattaaaaacttaaatagtgcatttcatttaaactaaacatagatattcttacaaatatatacttagtaattcgattgttaatacatcactttcataaaataactataaccatcataatacttctcaaatctcgtcaaattaaagtaaatacagcacaaattaacatttttaaatatataaaataaaacaagatactcaataatctgtagtatcttgttttggaataatgtaattttatatcatcaacggcttcaaatgagtagtttcatataaatcaataaacacaactactcaactgatcttaattaataaatgatttgtcagatgacacataacagcatta

SEQ ID NO: 6010 - DNA, 410 bp, Staphylococcus aureus
taatgctgttatgtgtcatctgacaaatcatttattaattaagatcagttgagtagttgtgtttattgatttatatgaaactactcatttgaagccgttgatgatataaaattacattattccaaaacaagatactacagattattgagtatcttgttttattttatatatttaaaaatgttaatttgtgctgtatttactttaatttgacgagatttgagaagtattatgatggttatagttattttatgaaagtgatgtattaacaatcgaattactaagtatatatttgtaagaatatctatgtttagtttaaatgaaatgcactatttaagtttttaatatggagatgtttgtgacttttcgatgattaagatttttataggtgtgcatcatttcaaataaacttt

SEQ ID NO: 6011 - DNA, 215 bp, Staphylococcus aureus
aactagttcgatatttaaaatgtattgtgaattgttaaagtttgtatcgcattatcgcgaagttgaataaatatattatacatcaaacaatacattaagaaaattaattaatttttaatcatagcgacttttcatgctggaacacatatattaatgattgaattttactgttaaaagttctatgatttaggaaatagagaaaagaggggatttaa

SEQ ID NO: 6012 - DNA, 215 bp, Staphylococcus aureus
ttaaatcccctcttttctctatttcctaaatcatagaacttttaacagtaaaattcaatcattaatatatgtgttccagcatgaaaagtcgctatgattaaaaattaattaattttcttaatgtattgtttgatgtataatatatttattcaacttcgcgataatgcgatacaaactttaacaattcacaatacattttaaatatcgaactagtt

SEQ ID NO: 6013 - DNA, 183 bp, Staphylococcus aureus
tttatttgtaaggagtctcgattatagaggctctttttattttgcccaaaattaaaataacgataaatatattatgtaaacctaataatgacatttgtcatttcaaatctatgacaaagtgttctattttaaatctaataaatttactaatattaaattaagaaaaaaatagaggtgattaaa

SEQ ID NO: 6014 - DNA, 183 bp, Staphylococcus aureus
tttaatcacctctatttttttcttaatttaatattagtaaatttattagatttaaaatagaacactttgtcatagatttgaaatgacaaatgtcattattaggtttacataatatatttatcgttattttaattttgggcaaaataaaaagagcctctataatcgagactccttacaaataaa

SEQ ID NO: 6015 - DNA, 112 bp, Staphylococcus aureus
atacaaacaaaaaagtattgagtgttttgatttaagagacttggaaagtgagtcaataatcaaaatcttactcaatacttttattttggtactcgcaatttagatttgttaa

SEQ ID NO: 6016 - DNA, 112 bp, Staphylococcus aureus
ttaacaaatctaaattgcgagtaccaaaataaaagtattgagtaagattttgattattgactcactttccaagtctcttaaatcaaaacactcaatacttttttgtttgtat

SEQ ID NO: 6017 - DNA, 144 bp, Staphylococcus aureus
ttaaataggtgattatatatattaaagtaaaatatacttgaagcatcgatttattattaccataactttatatataaagaaataatttaaaggcataataaccatagtgcgtatcgagcgtaatggattattatgcctttgatt

SEQ ID NO: 6018 - DNA, 144 bp, Staphylococcus aureus
aatcaaaggcataataatccattacgctcgatacgcactatggttattatgcctttaaattatttctttatatataaagttatggtaataataaatcgatgcttcaagtatattttactttaatatatataatcacctatttaa

SEQ ID NO: 6019 - DNA, 273 bp, Staphylococcus aureus
taataattaataaagattaattgttattcaatttcccacatttttattagttgattttagttcatcattgttataatcaaattataaactgacagatattgatgttcaatgaatatgacgtgaaagattcgtgaattcaagtttatgtcgaatttatgttataacggtcatttaaatgacagaattaggtcactcatagtattttgaagattgaattcattaattttaaaatgtataatgatatttgtgaaagcgcttgcttaggaggtgtat

SEQ ID NO: 6020 - DNA, 273 bp, Staphylococcus aureus
atacacctcctaagcaagcgctttcacaaatatcattatacattttaaaattaatgaattcaatcttcaaaatactatgagtgacctaattctgtcatttaaatgaccgttataacataaattcgacataaacttgaattcacgaatctttcacgtcatattcattgaacatcaatatctgtcagtttataatttgattataacaatgatgaactaaaatcaactaataaaaatgtgggaaattgaataacaattaatctttattaattatta

SEQ ID NO: 6021 - DNA, 53 bp, Staphylococcus aureus
gaaaaagcaattcataacgcagttgaatacatgtgttacgaattgcttttata

SEQ ID NO: 6022 - DNA, 53 bp, Staphylococcus aureus
tataaaagcaattcgtaacacatgtattcaactgcgttatgaattgctttttc

SEQ ID NO: 6023 - DNA, 80 bp, Staphylococcus aureus
taattctatactatactatcatctagtgtttttcaataatacatttgtttttctcaaaagcacaaacggaggtacataaa

SEQ ID NO: 6024 - DNA, 80 bp, Staphylococcus aureus
tttatgtacctccgtttgtgcttttgagaaaaacaaatgtattattgaaaaacactagatgatagtatagtatagaatta

SEQ ID NO: 6025 - DNA, 57 bp, Staphylococcus aureus
acgctttatattgtaaaatagtattaaatgcagaatagagaggagatttaatgcgat

SEQ ID NO: 6026 - DNA, 57 bp, Staphylococcus aureus
atcgcattaaatctcctctctattctgcatttaatactattttacaatataaagcgt

SEQ ID NO: 6027 - DNA, 292 bp, Staphylococcus aureus
attttaaaataagccttaacacatgatatttgaataagatatcttgtggttaaggctttttatttatgtgaaaatgacttcagttatactatggaggatttgaaatacatattttagattagtaatgatatcaaacgaatagagtaaatgtatattttttgaataaatcaagtattaactagtcacggaaggtaggtaaataaatttgatcattctgaataataacgaatgcattaaaaaatgcagtgacaatctaacattaattgttaaaatcactgcaagcatcttgatt

SEQ ID NO: 6028 - DNA, 292 bp, Staphylococcus aureus
aatcaagatgcttgcagtgattttaacaattaatgttagattgtcactgcattttttaatgcattcgttattattcagaatgatcaaatttatttacctaccttccgtgactagttaatacttgatttattcaaaaaatatacatttactctattcgtttgatatcattactaatctaaaatatgtatttcaaatcctccatagtataactgaagtcattttcacataaataaaaagccttaaccacaagatatcttattcaaatatcatgtgttaaggcttattttaaaat

SEQ ID NO: 6029 - DNA, 138 bp, Staphylococcus aureus
ggtaataataaaatataaacagaatactagttaatacactttatactagaaaaagatattaaagtatatctgctttacaccattaaaaagcggcaaatgctatagataatctaaagcatctgccgtgtaagaatttat

SEQ ID NO: 6030 - DNA, 138 bp, Staphylococcus aureus
ataaattcttacacggcagatgctttagattatctatagcatttgccgctttttaatggtgtaaagcagatatactttaatatctttttctagtataaagtgtattaactagtattctgtttatattttattattacc

SEQ ID NO: 6031 - DNA, 197 bp, Staphylococcus aureus
atttagtctcccatctatttaaatatacccattattgtaagctttttaagtgtactattcaataactatttagtactgtaaagcgaaaaaattaaaattttctgattttttaatcatcttgagcatgtttaattgtaattttgatggggttaaattataatatgtattaaattataattattataaattgtggaggg

SEQ ID NO: 6032 - DNA, 197 bp, Staphylococcus aureus
ccctccacaatttataataattataatttaatacatattataatttaaccccatcaaaattacaattaaacatgctcaagatgattaaaaaatcagaaaattttaattttttcgctttacagtactaaatagttattgaatagtacacttaaaaagcttacaataatgggtatatttaaatagatgggagactaaat

SEQ ID NO: 6033 - DNA, 90 bp, Staphylococcus aureus
atttgatatgtagtttctatattgcgtagttgagcagtttatgatatcataataaatcgtaaagattcctaacaagagagggtgtttaac

SEQ ID NO: 6034 - DNA, 90 bp, Staphylococcus aureus
gttaaacaccctctcttgttaggaatctttacgatttattatgatatcataaactgctcaactacgcaatatagaaactacatatcaaat

SEQ ID NO: 6035 - DNA, 453 bp, Staphylococcus aureus
ttcttatcattcaaatacgacgatttgaaaataaagcgggcttacctattatattggggagctcgcttttttatgaaatttttgtgaagagtgattaatggattgagtttcatcggtagaacaatatatgattgtattagttgttactttattaaaatttgagaatatttatagaaggaaatagattactgattttataaagtcactttgttagcgaatgcttgaaagagtatttaatatagtagaatttaaaatttcaaagcggaatttaataagtacgaagtaattctgggtatgttttataaatgttcgataatacactttaatcttaaatatgatggtttagaaaatgatttaacaaagaaatgaaactttactgttgaattatgtgaggattgtgttattatataaatcgtaataattacgatttgataaaaagtgaggtaactatat

SEQ ID NO: 6036 - DNA, 453 bp, Staphylococcus aureus
atatagttacctcactttttatcaaatcgtaattattacgatttatataataacacaatcctcacataattcaacagtaaagtttcatttctttgttaaatcattttctaaaccatcatatttaagattaaagtgtattatcgaacatttataaaacatacccagaattacttcgtacttattaaattccgctttgaaattttaaattctactatattaaatactctttcaagcattcgctaacaaagtgactttataaaatcagtaatctatttccttctataaatattctcaaattttaataaagtaacaactaatacaatcatatattgttctaccgatgaaactcaatccattaatcactcttcacaaaaatttcataaaaaagcgagctccccaatataataggtaagcccgctttattttcaaatcgtcgtatttgaatgataagaa

SEQ ID NO: 6037 - DNA, 156 bp, Staphylococcus aureus
aatcaaatttcgcactttagcccatttacaatatcaataaaacaatgtacagtatatacgaatgctataaactgaatgttttctcatattaataaggaaacattcggtttttaatttgcatttaaaaataattagtttttaaaggggctatttaaa

SEQ ID NO: 6038 - DNA, 156 bp, Staphylococcus aureus
tttaaatagcccctttaaaaactaattatttttaaatgcaaattaaaaaccgaatgtttccttattaatatgagaaaacattcagtttatagcattcgtatatactgtacattgttttattgatattgtaaatgggctaaagtgcgaaatttgatt

SEQ ID NO: 6039 - DNA, 379 bp, Staphylococcus aureus
tgtttttggtatgagtttaaagggtaatgtttgtctgtaaggaagtagataaacatgatgacaacagataaaccaaaagatgcggatatacttgaacgcgtcaaagatatacttaataaaaaagaaagaaaaaaataataatggctcgctcctgtaaattattacgggggcgagttttaatttgtgtaacattttgcaggaatctgtaattcaaaatttatattaaagaatgagattatctaacaattcgcaatttctgtttgaactgaatttagattagaataaataaaacctcttgaaaacgaaactttttcaagaggtccaaaatttataaaaatgagggtttaacaattacgataatatataacggtttaaaata

SEQ ID NO: 6040 - DNA, 379 bp, Staphylococcus aureus
tattttaaaccgttatatattatcgtaattgttaaaccctcatttttataaattttggacctcttgaaaaagtttcgttttcaagaggttttatttattctaatctaaattcagttcaaacagaaattgcgaattgttagataatctcattctttaatataaattttgaattacagattcctgcaaaatgttacacaaattaaaactcgcccccgtaataatttacaggagcgagccattattatttttttctttcttttttattaagtatatctttgacgcgttcaagtatatccgcatcttttggtttatctgttgtcatcatgtttatctacttccttacagacaaacattaccctttaaactcataccaaaaaca

SEQ ID NO: 6041 - DNA, 65 bp, Staphylococcus aureus
atataggcactccctaaattaatttaaatacagtatatcattaattcacaaccaaaacaaacatt

SEQ ID NO: 6042 - DNA, 65 bp, Staphylococcus aureus
aatgtttgttttggttgtgaattaatgatatactgtatttaaattaatttagggagtgcctatat

SEQ ID NO: 6043 - DNA, 136 bp, Staphylococcus aureus
tacattgtcacaacgttattttgcctatttttgcgaaatagcgtttttttattacttttttgctggtcttaaatttgttatattttgttaaagtattataatgattgaataaacaaattgaaggtaggttttttaa

SEQ ID NO: 6044 - DNA, 136 bp, Staphylococcus aureus
ttaaaaaacctaccttcaatttgtttattcaatcattataatactttaacaaaatataacaaatttaagaccagcaaaaaagtaataaaaaaacgctatttcgcaaaaataggcaaaataacgttgtgacaatgta

SEQ ID NO: 6045 - DNA, 120 bp, Staphylococcus aureus
atcacaaatctgtaaagaattttctgacattataacttgaaataagtattttacttatctttttattttaaaataagttataatgtatttgataaaattgaagaagggaagatacacaag

SEQ ID NO: 6046 - DNA, 120 bp, Staphylococcus aureus
cttgtgtatcttcccttcttcaattttatcaaatacattataacttattttaaaataaaaagataagtaaaatacttatttcaagttataatgtcagaaaattctttacagatttgtgat

SEQ ID NO: 6047 - DNA, 230 bp, Staphylococcus aureus
gaataatttataaagcgagtatgtttagaagtctaggatgcataatcttaggcttcttttaaagtgttgaaatttagagtatagcacttaaactacatcataagtgataagttatgaaagtatactatttcagattaatctttaaaagctctgttataacagcatgatttttgatattatttttagtatcgatattaaaatacttgaataaactagttcttgaaataatg

SEQ ID NO: 6048 - DNA, 230 bp, Staphylococcus aureus
cattatttcaagaactagtttattcaagtattttaatatcgatactaaaaataatatcaaaaatcatgctgttataacagagcttttaaagattaatctgaaatagtatactttcataacttatcacttatgatgtagtttaagtgctatactctaaatttcaacactttaaaagaagcctaagattatgcatcctagacttctaaacatactcgctttataaattattc

SEQ ID NO: 6049 - DNA, 96 bp, Staphylococcus aureus
taaaattaaagttaacaaaatgacgaatagactgagaaatgctataattcattttgtatgatttacagagagtttatttaacgagaaggtgtctgc

SEQ ID NO: 6050 - DNA, 96 bp, Staphylococcus aureus
gcagacaccttctcgttaaataaactctctgtaaatcatacaaaatgaattatagcatttctcagtctattcgtcattttgttaactttaatttta

SEQ ID NO: 6051 - DNA, 123 bp, Staphylococcus aureus
ttacttttaaaaccacttgtgatcgacttctaaatcagtcaatgagtggttttaattttacttgaaaaggtgaaatgattatattaaaataaaagcgaacaaatgttctatatggaggcagta

SEQ ID NO: 6052 - DNA, 123 bp, Staphylococcus aureus
tactgcctccatatagaacatttgttcgcttttattttaatataatcatttcaccttttcaagtaaaattaaaaccactcattgactgatttagaagtcgatcacaagtggttttaaaagtaa

SEQ ID NO: 6053 - DNA, 121 bp, Staphylococcus aureus
tgattatcgcaaagacctttgttatcctataaaggtgcgtgagttattgaataaaatgtttagataatctttttattctactacataaaattaaatatagaattgaagggagtaattaatt

SEQ ID NO: 6054 - DNA, 121 bp, Staphylococcus aureus
aattaattactcccttcaattctatatttaattttatgtagtagaataaaaagattatctaaacattttattcaataactcacgcacctttataggataacaaaggtctttgcgataatca

SEQ ID NO: 6055 - DNA, 268 bp, Staphylococcus aureus
taaaatttagttaagtatttaaataacaagtagtatgtcattctagtagctagaacagatatactacttgtttgtttttgtggaaaattgagtatattcaaaaggataagaacgagaatttcgttattaaactacgaattctcgatttttttatattttaagataggtttatttctgacaacttaatagaaagaggtttgacaaagctaaagtgaagtacgacggtataaaaaaattaactatacttttatagaaaattaactcagac

SEQ ID NO: 6056 - DNA, 268 bp, Staphylococcus aureus
gtctgagttaattttctataaaagtatagttaatttttttataccgtcgtacttcactttagctttgtcaaacctctttctattaagttgtcagaaataaacctatcttaaaatataaaaaaatcgagaattcgtagtttaataacgaaattctcgttcttatccttttgaatatactcaattttccacaaaaacaaacaagtagtatatctgttctagctactagaatgacatactacttgttatttaaatacttaactaaatttta

SEQ ID NO: 6057 - DNA, 292 bp, Staphylococcus aureus
tgacattgaaaagaaatattaaagtttggcgccacaattttctttctgctcaatgaaataatacgtttgaaaattgaattgaatcattcacgaaattgataattattctcaattaataaaaaatacttattacaccttacctgtatgataagttttgcttatatactctgattaaaaagtcaaaacctaaattaagcgttttctaagcatgatgagttgtttatcaataaatataataatacaatttaatcaaggcatataaatataaaaatgtatcaagggggatcattaa

SEQ ID NO: 6058 - DNA, 292 bp, Staphylococcus aureus
ttaatgatcccccttgatacatttttatatttatatgccttgattaaattgtattattatatttattgataaacaactcatcatgcttagaaaacgcttaatttaggttttgactttttaatcagagtatataagcaaaacttatcatacaggtaaggtgtaataagtattttttattaattgagaataattatcaatttcgtgaatgattcaattcaattttcaaacgtattatttcattgagcagaaagaaaattgtggcgccaaactttaatatttcttttcaatgtca

SEQ ID NO: 6059 - DNA, 179 bp, Staphylococcus aureus
aaaatagatatcacagtaaaatttcaatcggtatttgaggcactttgatagtgctcaaaaatacttctataaactttatgatataataggtcggttcaaaacctttgtgttcttggccggcctcttcttgtattttatgttagaatgagatataaagttaaactgaaagaaggcttaaa

SEQ ID NO: 6060 - DNA, 179 bp, Staphylococcus aureus
tttaagccttctttcagtttaactttatatctcattctaacataaaatacaagaagaggccggccaagaacacaaaggttttgaaccgacctattatatcataaagtttatagaagtatttttgagcactatcaaagtgcctcaaataccgattgaaattttactgtgatatctatttt

SEQ ID NO: 6061 - DNA, 206 bp, Staphylococcus aureus
gttactgtaaatgtttggagaggcaatattaacaattaatctataagaaatagccaatacgttaacattaatgtaattagcgtgaagataagctaatatatagcaaaaacgaacttgttcatacaacatcagatgtgctaaaccaaagtacaacttccgaggttcaggacacatcagaatgtgtaaacaagttcgttttattttag

SEQ ID NO: 6062 - DNA, 206 bp, Staphylococcus aureus
ctaaaataaaacgaacttgtttacacattctgatgtgtcctgaacctcggaagttgtactttggtttagcacatctgatgttgtatgaacaagttcgtttttgctatatattagcttatcttcacgctaattacattaatgttaacgtattggctatttcttatagattaattgttaatattgcctctccaaacatttacagtaac

SEQ ID NO: 6063 - DNA, 134 bp, Staphylococcus aureus
gtctcggtctcaaatgttcttgtaaaaaaactaagtatagttgaattttaagttaaaaaaattgtttttgcaaaaataaaataatccatcaactgcaaaaaaatatgcaatgatggactaatgtcaaaaaattg

SEQ ID NO: 6064 - DNA, 134 bp, Staphylococcus aureus
caattttttgacattagtccatcattgcatatttttttgcagttgatggattattttatttttgcaaaaacaatttttttaacttaaaattcaactatacttagtttttttacaagaacatttgagaccgagac

SEQ ID NO: 6065 - DNA, 113 bp, Staphylococcus aureus
aaatattacacatcctttaatatcttaggactattttatcatattcatttaaattacggctaaaaattttaaaaacggggattaatatatggaattaagctatgaaagttaat

SEQ ID NO: 6066 - DNA, 113 bp, Staphylococcus aureus
attaactttcatagcttaattccatatattaatccccgtttttaaaatttttagccgtaatttaaatgaatatgataaaatagtcctaagatattaaaggatgtgtaatattt

SEQ ID NO: 6067 - DNA, 131 bp, Staphylococcus aureus
aaactatatgcaatcacgaaattaaatgataaaatacagtaatgttaaattttgactaaattcaagggatttatattaaatgctgaccaagtacttatcgttaaattagcgatagactttgaccaaactaa

SEQ ID NO: 6068 - DNA, 131 bp, Staphylococcus aureus
ttagtttggtcaaagtctatcgctaatttaacgataagtacttggtcagcatttaatataaatcccttgaatttagtcaaaatttaacattactgtattttatcatttaatttcgtgattgcatatagttt

SEQ ID NO: 6069 - DNA, 499 bp, Staphylococcus aureus
atatttttaatgtaacgattcattatataaaaatcaaataaaccctgaggttttcaaattaaagcgaaaatctcagggttttaaatttgtactcaataatcatctgtatcattacactagttaatctaagatttgattatatattaatatagtaaggttgagatttatttcctccattggtgtgcaaagactataccatttataagacatattgttggatagatgaatataaatttattttagttttgcacaatttaatagtgcgttttagtttgtattgagtattaattcagataatatataaataaatagaattatttgtaaatatgggagtcagatttttttattatagttattccactttgagagacatcgaaattaaattaagatatatcatataggataggcgtgtaatagaacacaagtatttaaattattatactttcaagttagacatttccgatatataatcttaataatagaaaaataggtgatgata

SEQ ID NO: 6070 - DNA, 499 bp, Staphylococcus aureus
tatcatcacctatttttctattattaagattatatatcggaaatgtctaacttgaaagtataataatttaaatacttgtgttctattacacgcctatcctatatgatatatcttaatttaatttcgatgtctctcaaagtggaataactataataaaaaaatctgactcccatatttacaaataattctatttatttatatattatctgaattaatactcaatacaaactaaaacgcactattaaattgtgcaaaactaaaataaatttatattcatctatccaacaatatgtcttataaatggtatagtctttgcacaccaatggaggaaataaatctcaaccttactatattaatatataatcaaatcttagattaactagtgtaatgatacagatgattattgagtacaaatttaaaaccctgagattttcgctttaatttgaaaacctcagggtttatttgatttttatataatgaatcgttacattaaaaatat

SEQ ID NO: 6071 - DNA, 480 bp, Staphylococcus aureus
gtaataaaaaataccaatgactatatgtttgttggtattttttatggtgcttataatgttgggcagttacatttatgattatcagcacatgtttagcttataaatttttacgaaagtttagccgtttataaagcacatgcataatgaaacgagtatttgccacttgattagtacttcattattatgtcgaaaataaaaataagtggtatttttaatatattaagaagcactcataatcggctgttaattaataatatttttcataagtattgattcatcattttctttatgttaaatatgaatcagtatagataaccatattgttctgtttgagatagaaatattttctatttacttcttaatacagatatcaatatgacaaaagtgttatataaatcaaaggtaaatgatatgctatttttatggtttatatgatatattttgatttataacagaaataattagaattgatgtgaaaaa

SEQ ID NO: 6072 - DNA, 480 bp, Staphylococcus aureus
tttttcacatcaattctaattatttctgttataaatcaaaatatatcatataaaccataaaaatagcatatcatttacctttgatttatataacacttttgtcatattgatatctgtattaagaagtaaatagaaaatatttctatctcaaacagaacaatatggttatctatactgattcatatttaacataaagaaaatgatgaatcaatacttatgaaaaatattattaattaacagccgattatgagtgcttcttaatatattaaaaataccacttatttttattttcgacataataatgaagtactaatcaagtggcaaatactcgtttcattatgcatgtgctttataaacggctaaactttcgtaaaaatttataagctaaacatgtgctgataatcataaatgtaactgcccaacattataagcaccataaaaaataccaacaaacatatagtcattggtattttttattac

SEQ ID NO: 6073 - DNA, 202 bp, Staphylococcus aureus
ttaaaatccaagtgctaagaggtatacagttatgcctgaagcgcttggattttttggtttctataaagaatgatttataaaaaacggtacagataagaatatttaagtttcctatctgtaccgtattttaatattgaaatgagcttaagttaagtcgcctaacttttattatcagcccaatcagtttcatcaagtataaatg

SEQ ID NO: 6074 - DNA, 202 bp, Staphylococcus aureus
catttatacttgatgaaactgattgggctgataataaaagttaggcgacttaacttaagctcatttcaatattaaaatacggtacagataggaaacttaaatattcttatctgtaccgttttttataaatcattctttatagaaaccaaaaaatccaagcgcttcaggcataactgtatacctcttagcacttggattttaa

SEQ ID NO: 6075 - DNA, 136 bp, Staphylococcus aureus
ttttgacatcctttcattagaccttagtacgatttattaagaaatcacttgctttttgaattgtttttatataacgttaatatgtgattattatagtacacaaaaatctatttttgaagatataaggtaggtaaat

SEQ ID NO: 6076 - DNA, 136 bp, Staphylococcus aureus
atttacctaccttatatcttcaaaaatagatttttgtgtactataataatcacatattaacgttatataaaaacaattcaaaaagcaagtgatttcttaataaatcgtactaaggtctaatgaaaggatgtcaaaa

SEQ ID NO: 6077 - DNA, 144 bp, Staphylococcus aureus
ccaaacctcctaatcattattaatttgagtatatcatgtaatacttaaaaattcatttgcaaaataacagaacatttgttctaaaatagttgaaatagaacacgtgttcgtatataataaggttcaagtaagggaggaataaca

SEQ ID NO: 6078 - DNA, 144 bp, Staphylococcus aureus
tgttattcctcccttacttgaaccttattatatacgaacacgtgttctatttcaactattttagaacaaatgttctgttattttgcaaatgaatttttaagtattacatgatatactcaaattaataatgattaggaggtttgg

SEQ ID NO: 6079 - DNA, 136 bp, Staphylococcus aureus
tgactatacggtttaaggaatatataactgtgattcgtataaaataagtctctaaagataaatatttcatatatcacaatagatttcacaataatatctaagaatacatgggaatttatcaaaagagacttaataa

SEQ ID NO: 6080 - DNA, 136 bp, Staphylococcus aureus
ttattaagtctcttttgataaattcccatgtattcttagatattattgtgaaatctattgtgatatatgaaatatttatctttagagacttattttatacgaatcacagttatatattccttaaaccgtatagtca

SEQ ID NO: 6081 - DNA, 164 bp, Staphylococcus aureus
ataaatcaccttatttcgaaattttcagaataataacattgtaaatgagctgttgacacagtgcaatagtaaataaaaatcgataatagcattaatagataaacggagataaatcatctacaataaagagtatagtaacacaatggcaacggaggggtaaatca

SEQ ID NO: 6082 - DNA, 164 bp, Staphylococcus aureus
tgatttacccctccgttgccattgtgttactatactctttattgtagatgatttatctccgtttatctattaatgctattatcgatttttatttactattgcactgtgtcaacagctcatttacaatgttattattctgaaaatttcgaaataaggtgatttat

SEQ ID NO: 6083 - DNA, 423 bp, Staphylococcus aureus
acaattagtgttgacaaatgtgaacgacctatgtaatataatgaactataaaaataattagaattttctaaagaaatagtagcagatatgaaacgtagcaaatagaaagctaatgggtgatgggaattagcacgccatatcttgtgaattggactttggaaaacaattgaatgagttttgaaagtgaacatgaattatgttaactaaggtggcaccacggtaacgcgtccttacaggtatatgcgttatgtggtgtctttttatttagacaaaatgtagtagttaattaaaggtagcaacagaaagttagtggatgatgtgaactaacaccgagattaatgaaattgggttttgtctgcaacagaaaaattatatatagtaaagagtgaactatgaatattttgaatattcggttaatttagg

SEQ ID NO: 6084 - DNA, 423 bp, Staphylococcus aureus
cctaaattaaccgaatattcaaaatattcatagttcactctttactatatataatttttctgttgcagacaaaacccaatttcattaatctcggtgttagttcacatcatccactaactttctgttgctacctttaattaactactacattttgtctaaataaaaagacaccacataacgcatatacctgtaaggacgcgttaccgtggtgccaccttagttaacataattcatgttcactttcaaaactcattcaattgttttccaaagtccaattcacaagatatggcgtgctaattcccatcacccattagctttctatttgctacgtttcatatctgctactatttctttagaaaattctaattatttttatagttcattatattacataggtcgttcacatttgtcaacactaattgt

SEQ ID NO: 6085 - DNA, 247 bp, Staphylococcus aureus
gtttacttgatttaaaaaaattaggcgaatactgtttgaaaaagtgaaaaacggtgaattataaaattgaatagaaatgatacaaaagtaatatgagcaaacccaaacgttcatattactttttttgaaattgtatgcaaaaatctaaatattactataaaagtatacgcaattaaagcgtttatgttttagttttaacattaactattgtatacttatttagattagatttattatttttgacatt

SEQ ID NO: 6086 - DNA, 247 bp, Staphylococcus aureus
aatgtcaaaaataataaatctaatctaaataagtatacaatagttaatgttaaaactaaaacataaacgctttaattgcgtatacttttatagtaatatttagatttttgcatacaatttcaaaaaaagtaatatgaacgtttgggtttgctcatattacttttgtatcatttctattcaattttataattcaccgtttttcactttttcaaacagtattcgcctaatttttttaaatcaagtaaac

SEQ ID NO: 6087 - DNA, 288 bp, Staphylococcus aureus
atgtaaatgatgttagggcttatagttattgatactataggctcttttttatgctttttttagcgaaattttaattatttcacactaagaaaaactagtatgtatttgtcaatctaatgtttttcattataatgatgttttattgatttagttttatgattaaaagattatgcaaaacataaaatatatagcgtcatatttgagttttaatgataatatttttataatatataatataaaataatggttatctgagtatgaaatgcaagtaagtgaggtagttaaaaa

SEQ ID NO: 6088 - DNA, 288 bp, Staphylococcus aureus
tttttaactacctcacttacttgcatttcatactcagataaccattattttatattatatattataaaaatattatcattaaaactcaaatatgacgctatatattttatgttttgcataatcttttaatcataaaactaaatcaataaaacatcattataatgaaaaacattagattgacaaatacatactagtttttcttagtgtgaaataattaaaatttcgctaaaaaaagcataaaaaagagcctatagtatcaataactataagccctaacatcatttacat

SEQ ID NO: 6089 - DNA, 229 bp, Staphylococcus aureus
aaagttaatagtaactacaaacatactttactaataatcaaaacgacttatacaaaatcgaagttatataagtccccttatggaatttcacattctagtttacataatatatattataggaagtaatgtgtgtgacgcaaaaggtaccctacatcataatcattatctaatatcgtcacataacttacttatgctataatcatggtattatattgtttggagtgatttg

SEQ ID NO: 6090 - DNA, 229 bp, Staphylococcus aureus
caaatcactccaaacaatataataccatgattatagcataagtaagttatgtgacgatattagataatgattatgatgtagggtaccttttgcgtcacacacattacttcctataatatatattatgtaaactagaatgtgaaattccataaggggacttatataacttcgattttgtataagtcgttttgattattagtaaagtatgtttgtagttactattaacttt

SEQ ID NO: 6091 - DNA, 123 bp, Staphylococcus aureus
taatgatactcctttttattattatttttaaataaagaaaataaaatcgataagtgtctagattaatatacttgattcatctatattttataacaagtctagaattatcgcattcttaaatag

SEQ ID NO: 6092 - DNA, 123 bp, Staphylococcus aureus
ctatttaagaatgcgataattctagacttgttataaaatatagatgaatcaagtatattaatctagacacttatcgattttattttctttatttaaaaataataataaaaaggagtatcatta

SEQ ID NO: 6093 - DNA, 234 bp, Staphylococcus aureus
cttacatattaagaaccaacgttcattatagtattatccataaagaaattgaagtatatttaattttttaacaaaatcattataaaatataatattttgaatcaagtcaaccatgtaaaatataaaaaagtcaaaacaaaaacaactatagcactgtattccatctctttcgaaataattgttactgcagtgtaacttaaaagtcgatgattttgtgcatatagttgtcgaata

SEQ ID NO: 6094 - DNA, 234 bp, Staphylococcus aureus
tattcgacaactatatgcacaaaatcatcgacttttaagttacactgcagtaacaattatttcgaaagagatggaatacagtgctatagttgtttttgttttgacttttttatattttacatggttgacttgattcaaaatattatattttataatgattttgttaaaaaattaaatatacttcaatttctttatggataatactataatgaacgttggttcttaatatgtaag

SEQ ID NO: 6095 - DNA, 204 bp, Staphylococcus aureus
attcattctccttttatttcattactttccttgtatacattttattataaatttttaaaaacttaaacaatagcagtcagtttcaagcaatattctatctactattagaaaaatcattgttccttgcgacatggaaatcgtaacattatcgtttaggagacaaaattatgtataatgaatgtattataccaaaggagtgattat

SEQ ID NO: 6096 - DNA, 204 bp, Staphylococcus aureus
ataatcactcctttggtataatacattcattatacataattttgtctcctaaacgataatgttacgatttccatgtcgcaaggaacaatgatttttctaatagtagatagaatattgcttgaaactgactgctattgtttaagtttttaaaaatttataataaaatgtatacaaggaaagtaatgaaataaaaggagaatgaat

SEQ ID NO: 6097 - DNA, 139 bp, Staphylococcus aureus
gatgcgagacaatttatagtagaacaatataaaccaagattttcacattactaattgtgagaatcttggtttttttgagggtttatgaatgatagaaatatatatttatcgtaagggattttatagtaataactttaag

SEQ ID NO: 6098 - DNA, 139 bp, Staphylococcus aureus
cttaaagttattactataaaatcccttacgataaatatatatttctatcattcataaaccctcaaaaaaaccaagattctcacaattagtaatgtgaaaatcttggtttatattgttctactataaattgtctcgcatc

SEQ ID NO: 6099 - DNA, 183 bp, Staphylococcus aureus
tgaaatatcctccctgtatgaacaacaaatagtatttgtattgattacatctttatcttaaccttgaattattaacctcatttttagaaactgtaaatgttacataaaaatttgttaagaaaatgtaaatattaatttttgttaatctaaaaaatattgcttcattagtaaaattaaaatgct

SEQ ID NO: 6100 - DNA, 183 bp, Staphylococcus aureus
agcattttaattttactaatgaagcaatattttttagattaacaaaaattaatatttacattttcttaacaaatttttatgtaacatttacagtttctaaaaatgaggttaataattcaaggttaagataaagatgtaatcaatacaaatactatttgttgttcatacagggaggatatttca

SEQ ID NO: 6101 - DNA, 126 bp, Staphylococcus aureus
aggctgggacataaatccctaaaaaaacagcagtaagataattttcaattagaaaatatcttactgctgttctctatttatacaatacttcgtattgaatggcttcgctttgcccgtctggcacat

SEQ ID NO: 6102 - DNA, 126 bp, Staphylococcus aureus
atgtgccagacgggcaaagcgaagccattcaatacgaagtattgtataaatagagaacagcagtaagatattttctaattgaaaattatcttactgctgtttttttagggatttatgtcccagcct

SEQ ID NO: 6103 - DNA, 61 bp, Staphylococcus aureus
gaacttaatgtcccagcctattcgtttgaattatttaattttttactttgaaaggaatgtt

SEQ ID NO: 6104 - DNA, 61 bp, Staphylococcus aureus
aacattcctttcaaagtaaaaaattaaataattcaaacgaataggctgggacattaagttc

SEQ ID NO: 6105 - DNA, 146 bp, Staphylococcus aureus
gttattctccttcgattcttgtattctttattattataacatgtgtgagtcattctatcattacaacttatatgaggtcgaaactgtgacgataatatgatataattcttccgttagaatatcgaatgaaaaaaaggagaaaatgc

SEQ ID NO: 6106 - DNA, 146 bp, Staphylococcus aureus
gcattttctcctttttttcattcgatattctaacggaagaattatatcatattatcgtcacagtttcgacctcatataagttgtaatgatagaatgactcacacatgttataataataaagaatacaagaatcgaaggagaataac

SEQ ID NO: 6107 - DNA, 109 bp, Staphylococcus aureus
acataatatgtagaatttcttttcgaaaatctctgtattgaggcccgaccaacttgcacattattgtaagttggcttactgtcaccttctatattgggacttattccgc

SEQ ID NO: 6108 - DNA, 109 bp, Staphylococcus aureus
gcggaataagtcccaatatagaaggtgacagtaagccaacttacaataatgtgcaagttggtcgggcctcaatacagagattttcgaaaagaaattctacatattatgt

SEQ ID NO: 6109 - DNA, 195 bp, Staphylococcus aureus
attgcagggtctagggcattgattcatgcccgagactatattcaatttaatagacattaactggtcgtgaggctgggacataaatccctaaaaaaacagcagtaagataattttcaattagaaaatatcttactgctgttctctatttatacaatacttcgtattgaatggcttcgctttgcccgtctggcacat

SEQ ID NO: 6110 - DNA, 195 bp, Staphylococcus aureus
atgtgccagacgggcaaagcgaagccattcaatacgaagtattgtataaatagagaacagcagtaagatattttctaattgaaaattatcttactgctgtttttttagggatttatgtcccagcctcacgaccagttaatgtctattaaattgaatatagtctcgggcatgaatcaatgccctagaccctgcaat

SEQ ID NO: 6111 - DNA, 577 bp, Staphylococcus aureus
tctttttacattgcctaagaacttaatatcccagcctcgtgtcctttttattttattttttagcacatcagcacagtgaacaccccttctctaaattacaaatacagttatcaccgcattaaaagagtacatttatttaatgtgcatattgagtatgctataagtattttgaattttatttttcaaaaagtctcattatcaccaccttttaaaatataagcaacgctataacttgaattttcaggttattccaaaaaatctaaattatcggtttacattcatatttgtcatatgtataatgaacacataccaatttaataatattttgatgaggcgcatcaatcatgagtaaagtttagattactgtctgctaacagctgaatttgaaagggtgcgatgccgaagcgattataatagcagttataatttgttggactttttggttaagagctgagagtttgtcattatttaaaaataatggagtgcatcacttgtatatagattaagagcaagttcgcattccgaacttgttctttttttattattgtgtgcccttcctaacaattaggaggattat

SEQ ID NO: 6112 - DNA, 577 bp, Staphylococcus aureus
ataatcctcctaattgttaggaagggcacacaataataaaaaaagaacaagttcggaatgcgaacttgctcttaatctatatacaagtgatgcactccattatttttaaataatgacaaactctcagctcttaaccaaaaagtccaacaaattataactgctattataatcgcttcggcatcgcaccctttcaaattcagctgttagcagacagtaatctaaactttactcatgattgatgcgcctcatcaaaatattattaaattggtatgtgttcattatacatatgacaaatatgaatgtaaaccgataatttagattttttggaataacctgaaaattcaagttatagcgttgcttatattttaaaaggtggtgataatgagactttttgaaaaataaaattcaaaatacttatagcatactcaatatgcacattaaataaatgtactcttttaatgcggtgataactgtatttgtaatttagagaaggggtgttcactgtgctgatgtgctaaaaaataaaataaaaaggacacgaggctgggatattaagttcttaggcaatgtaaaaaga

SEQ ID NO: 6113 - DNA, 63 bp, Staphylococcus aureus
tggtaaaatgattgttaaaatattctaaaaattggaaattattataaaatggagtgacaagtt

SEQ ID NO: 6114 - DNA, 63 bp, Staphylococcus aureus
aacttgtcactccattttataataatttccaatttttagaatattttaacaatcattttacca

SEQ ID NO: 6115 - DNA, 142 bp, Staphylococcus aureus
tgacgtcaacgtataataatttcaaggttgagatacgattatgtctcaaccttattgtttatcattgaataaacttatgatcacaaatttcgaaatacgttacactatttatatagtaatttaacacaaaggattgataatt

SEQ ID NO: 6116 - DNA, 142 bp, Staphylococcus aureus
aattatcaatcctttgtgttaaattactatataaatagtgtaacgtatttcgaaatttgtgatcataagtttattcaatgataaacaataaggttgagacataatcgtatctcaaccttgaaattattatacgttgacgtca

SEQ ID NO: 6117 - DNA, 239 bp, Staphylococcus aureus
aaataaacaaagtaatccccgaagcacagaaaattatactgtgactcggggaatttttatgcattatagatgactgtagaaaacatgcttggacatatactctaaaaaaggaagaacagcacatttttagttagaaagtatttatttctttttgtcattaatcctttatatttagttagccctattcaactaatttaaagcatcatatacataccacactttaaacaagcatcatgaaa

SEQ ID NO: 6118 - DNA, 239 bp, Staphylococcus aureus
tttcatgatgcttgtttaaagtgtggtatgtatatgatgctttaaattagttgaatagggctaactaaatataaaggattaatgacaaaaagaaataaatactttctaactaaaaatgtgctgttcttccttttttagagtatatgtccaagcatgttttctacagtcatctataatgcataaaaattccccgagtcacagtataattttctgtgcttcggggattactttgtttattt

SEQ ID NO: 6119 - DNA, 196 bp, Staphylococcus aureus
aaaatcacctcgtcgttgtacaccataattatattatataaatataattttctattgcaaacaatgttggtgatataaaaaaagagttctcaatttggctgagaaactcatcgcgttaagtatttgtaataagcatataaaaacaccttacttcttggtaaggtgttagttaaaatcaatgattcaaatctaagaa

SEQ ID NO: 6120 - DNA, 196 bp, Staphylococcus aureus
ttcttagatttgaatcattgattttaactaacaccttaccaagaagtaaggtgtttttatatgcttattacaaatacttaacgcgatgagtttctcagccaaattgagaactctttttttatatcaccaacattgtttgcaatagaaaattatatttatataatataattatggtgtacaacgacgaggtgatttt

SEQ ID NO: 6121 - DNA, 170 bp, Staphylococcus aureus
aatctgaaacctccaagactaaaattcattcaatatgcttattcgcatattacaaaaaatacatgcaaatttcactcaaatattctttgcaatatggaataatcatctgcttaacttgtattatagtgcagttattaccaaattgcaatacaataataaaaaatattcat

SEQ ID NO: 6122 - DNA, 170 bp, Staphylococcus aureus
atgaatattttttattattgtattgcaatttggtaataactgcactataatacaagttaagcagatgattattccatattgcaaagaatatttgagtgaaatttgcatgtattttttgtaatatgcgaataagcatattgaatgaattttagtcttggaggtttcagatt

SEQ ID NO: 6123 - DNA, 162 bp, Staphylococcus aureus
tattaaagaccccttccatacttcaaaaactctatacttatttttatacctttatcctctgaaaatcaagtttgacgacttgaaacaaacaaagtagtaactatagtaattattagtttttttaagtaaaactacgtataataacattatgaggtggtaaaa

SEQ ID NO: 6124 - DNA, 162 bp, Staphylococcus aureus
ttttaccacctcataatgttattatacgtagttttacttaaaaaaactaataattactatagttactactttgtttgtttcaagtcgtcaaacttgattttcagaggataaaggtataaaaataagtatagagtttttgaagtatggaaggggtctttaata

SEQ ID NO: 6125 - DNA, 72 bp, Staphylococcus aureus
attacgaattagatataacaaaaaggaagcatcctacgattaaattggagatgcttccttttatattattcg

SEQ ID NO: 6126 - DNA, 72 bp, Staphylococcus aureus
cgaataatataaaaggaagcatctccaatttaatcgtaggatgcttcctttttgttatatctaattcgtaat

SEQ ID NO: 6127 - DNA, 114 bp, Staphylococcus aureus
atgtgttgtttaaatcaaattatgccagaaaataaaattcttcaaattcactttttaaatagtaactgatgacttttattcacaatttcatataaactcatattttaaacttat

SEQ ID NO: 6128 - DNA, 114 bp, Staphylococcus aureus
ataagtttaaaatatgagtttatatgaaattgtgaataaaagtcatcagttactatttaaaaagtgaatttgaagaattttattttctggcataatttgatttaaacaacacat

SEQ ID NO: 6129 - DNA, 180 bp, Staphylococcus aureus
tttaaaacgttctcctttaaataaattaaaaaactaagacatggaataagttcttcaaatgccttagtttactattctattctgatataaaacgcaatacttagtatgcgaattgtttatattttaccaaatttactaattgaaaatctcatattaggcttcatttcaataattatgcgt

SEQ ID NO: 6130 - DNA, 180 bp, Staphylococcus aureus
acgcataattattgaaatgaagcctaatatgagattttcaattagtaaatttggtaaaatataaacaattcgcatactaagtattgcgttttatatcagaatagaatagtaaactaaggcatttgaagaacttattccatgtcttagttttttaatttatttaaaggagaacgttttaaa

SEQ ID NO: 6131 - DNA, 525 bp, Staphylococcus aureus
aaattatagaatatcggtcagttgattttgattatagattaatatgtgaaaaatgtatttctttaaaagaactatttcatttaaataggtaacataatattgttatggttgctattgagtatgtcattaatgagtatctgtatatagcaattgaatatttcgttttatgtagtacataaaaaacatatacatgtcgtatccataaagtgaatttacatcttgttcagatgattttaaattaactaaaggcgcttatagaattcataaatttcatcgcttgttattatctaaaatgatttcattagcatattgaaacacgccattccacctatatttctattgtgagtctatttcaataaaaatgatatattttttaagttgtcaaaattaaactcacattttaatacgaagcattataaaaataaagtacagcagtaagatatttcgactagaaaataatcttactgctgtttgttattgatttgattacgtttttaggaatagtaaactattttgtgttgtgga

SEQ ID NO: 6132 - DNA, 525 bp, Staphylococcus aureus
tccacaacacaaaatagtttactattcctaaaaacgtaatcaaatcaataacaaacagcagtaagattattttctagtcgaaatatcttactgctgtactttatttttataatgcttcgtattaaaatgtgagtttaattttgacaacttaaaaaatatatcatttttattgaaatagactcacaatagaaatataggtggaatggcgtgtttcaatatgctaatgaaatcattttagataataacaagcgatgaaatttatgaattctataagcgcctttagttaatttaaaatcatctgaacaagatgtaaattcactttatggatacgacatgtatatgttttttatgtactacataaaacgaaatattcaattgctatatacagatactcattaatgacatactcaatagcaaccataacaatattatgttacctatttaaatgaaatagttcttttaaagaaatacatttttcacatattaatctataatcaaaatcaactgaccgatattctataattt

SEQ ID NO: 6133 - DNA, 283 bp, Staphylococcus aureus
tttacaccctccacaaaaatgttgaaacgcttacaatgtaataatatcactatttagttatttgttaaagtagatttacctatttatctgctaaaaagaagaatcaacaaaagcgttgattcttctaggtttatagatgtattttattgtaaattttgggagtacaacagaaatgataaagaaccactgtttatttgttttatagttgttcttatacattagtcacagctaatgtgtacttaaaaaattgatcctatgactttgattgacgtctcagacatga

SEQ ID NO: 6134 - DNA, 283 bp, Staphylococcus aureus
tcatgtctgagacgtcaatcaaagtcataggatcaattttttaagtacacattagctgtgactaatgtataagaacaactataaaacaaataaacagtggttctttatcatttctgttgtactcccaaaatttacaataaaatacatctataaacctagaagaatcaacgcttttgttgattcttctttttagcagataaataggtaaatctactttaacaaataactaaatagtgatattattacattgtaagcgtttcaacatttttgtggagggtgtaaa

SEQ ID NO: 6135 - DNA, 470 bp, Staphylococcus aureus
ttgtacacctcatattacgactttttctaataaggtaatatattttaaattttgtatttttctatacaatagttgctttttaaattagtttgtttacgtttaaattttatcacaaatcaataaccatgttttaaatttttcaagctacaatcattaattatttattaactcaaatatttaataatcagttaatggcattctgttaattctgattgcagtacttaaatatagaatactgtaacacaaggccttaccgcaatattaattgttgtcatatactgacttttcactattgtaaaatgaatagttattatctttattttcacaaaatgaccgtagtttaaacattttcacacatcatttcaatgtgcgattttgaacttggaagtaacatttcataatgtataaattcaaaaggagtatgtaaacaatataatttttaaacctcataacttttaaatattctaatt

SEQ ID NO: 6136 - DNA, 470 bp, Staphylococcus aureus
aattagaatatttaaaagttatgaggtttaaaaattatattgtttacatactccttttgaatttatacattatgaaatgttacttccaagttcaaaatcgcacattgaaatgatgtgtgaaaatgtttaaactacggtcattttgtgaaaataaagataataactattcattttacaatagtgaaaagtcagtatatgacaacaattaatattgcggtaaggccttgtgttacagtattctatatttaagtactgcaatcagaattaacagaatgccattaactgattattaaatatttgagttaataaataattaatgattgtagcttgaaaaatttaaaacatggttattgatttgtgataaaatttaaacgtaaacaaactaatttaaaaagcaactattgtatagaaaaatacaaaatttaaaatatattaccttattagaaaaagtcgtaatatgaggtgtacaa

SEQ ID NO: 6137 - DNA, 116 bp, Staphylococcus aureus
tttcaaatattccccttttatatgcccgtaaaagacaatatacgttataacaacgttttataaaagcagtaaacccttacgacactttaggtttactgcttttgtttttttactat

SEQ ID NO: 6138 - DNA, 116 bp, Staphylococcus aureus
atagtaaaaaaacaaaagcagtaaacctaaagtgtcgtaagggtttactgcttttataaaacgttgttataacgtatattgtcttttacgggcatataaaaggggaatatttgaaa

SEQ ID NO: 6139 - DNA, 399 bp, Staphylococcus aureus
gtacgtcactccttatatcgttatgttaaacatgtttttcagtacatgttaatcttacacactattaacatgctttaaacctttattatgaatgaaaaatagtaattatcacactatgggatgaaaataaccaataaaagtatcatataccaattaatcgattgttaaaactagtgaataatactatttaaaaagtatatgctcatagtatattaaagcatgaattgttaacagcgatgatagaaattgcgttatttacatcatttgtaaatgtctaatttatatcttttagggttagacgtcaataaaaataaacacgcctcctaaattgctatctttgcaaatttaggaagcgtgtcattaacataataataatacaattttagtagtgtgtatcgc

SEQ ID NO: 6140 - DNA, 399 bp, Staphylococcus aureus
gcgatacacactactaaaattgtattattattatgttaatgacacgcttcctaaatttgcaaagatagcaatttaggaggcgtgtttatttttattgacgtctaaccctaaaagatataaattagacatttacaaatgatgtaaataacgcaatttctatcatcgctgttaacaattcatgctttaatatactatgagcatatactttttaaatagtattattcactagttttaacaatcgattaattggtatatgatacttttattggttattttcatcccatagtgtgataattactatttttcattcataataaaggtttaaagcatgttaatagtgtgtaagattaacatgtactgaaaaacatgtttaacataacgatataaggagtgacgtac

SEQ ID NO: 6141 - DNA, 191 bp, Staphylococcus aureus
tgtatcacttccttattatgtattatgtacttttaaattctgtgtagttaatcatatcaatttatgcaagatagcgcaccatatttcactataattgattaatttttagtcacaacttagtttattttaaattaaaaccaggataacgaattgcatcaccctggttctaactattatttttaaaaattata

SEQ ID NO: 6142 - DNA, 191 bp, Staphylococcus aureus
tataatttttaaaaataatagttagaaccagggtgatgcaattcgttatcctggttttaatttaaaataaactaagttgtgactaaaaattaatcaattatagtgaaatatggtgcgctatcttgcataaattgatatgattaactacacagaatttaaaagtacataatacataataaggaagtgataca

SEQ ID NO: 6143 - DNA, 85 bp, Staphylococcus aureus
atgaattacctcctctatctatctaattataaatttagtctataaaggattgaaatggaagtaattaacactgaaaagattaaat

SEQ ID NO: 6144 - DNA, 85 bp, Staphylococcus aureus
atttaatcttttcagtgttaattacttccatttcaatcctttatagactaaatttataattagatagatagaggaggtaattcat

SEQ ID NO: 6145 - DNA, 199 bp, Staphylococcus aureus
aattatcctccttcttctatcatttcattttttattactaagttatctttaatttaacacaatttttatcataaagtgtgatagaaataatgattttgcataatttatgaaaacgtttaacacaaaaaagtacttttttgcacttgaaaatactatgatgtcattttgatgtctatatggttagctaactatgcaatga

SEQ ID NO: 6146 - DNA, 199 bp, Staphylococcus aureus
tcattgcatagttagctaaccatatagacatcaaaatgacatcatagtattttcaagtgcaaaaaagtacttttttgtgttaaacgttttcataaattatgcaaaatcattatttctatcacactttatgataaaaattgtgttaaattaaagataacttagtaataaaaaatgaaatgatagaagaaggaggataatt

SEQ ID NO: 6147 - DNA, 75 bp, Staphylococcus aureus
tcattttaggaatatgatattaatatcatgaattccgttactttatttataaaatgctgattaagtacctaccac

SEQ ID NO: 6148 - DNA, 75 bp, Staphylococcus aureus
gtggtaggtacttaatcagcattttataaataaagtaacggaattcatgatattaatatcatattcctaaaatga

SEQ ID NO: 6149 - DNA, 202 bp, Staphylococcus aureus
aaaaaattttaaaaaagaggttaacacatgatttgaatattatgtttgatgtcctattaaaacagttaaatttctagaaaatatagttggtaaaaacggactttatttaacaaatagaatacaactatattctctattttcaatgacagacaccatttttaatattataaaatgtgttgacctttatatttatttatgtgta

SEQ ID NO: 6150 - DNA, 202 bp, Staphylococcus aureus
tacacataaataaatataaaggtcaacacattttataatattaaaaatggtgtctgtcattgaaaatagagaatatagttgtattctatttgttaaataaagtccgtttttaccaactatattttctagaaatttaactgttttaataggacatcaaacataatattcaaatcatgtgttaacctcttttttaaaatttttt

SEQ ID NO: 6151 - DNA, 253 bp, Staphylococcus aureus
acgcgacacttcctttattacttcaaaatattgcaaccttgtaaataagtgttactgttttaaatttgacataaaaatattataacatttttgaccctaagatttgaatgaaaccttttacaattctatacgtaaaatgtatttatattcaaatgctattgcatcgcaaacgatttttcagtaaaatgagtaagttatttattgagcggtttctaaacacccgcatgatcaaaatttaggaggacattttaat

SEQ ID NO: 6152 - DNA, 253 bp, Staphylococcus aureus
attaaaatgtcctcctaaattttgatcatgcgggtgtttagaaaccgctcaataaataacttactcattttactgaaaaatcgtttgcgatgcaatagcatttgaatataaatacattttacgtatagaattgtaaaaggtttcattcaaatcttagggtcaaaaatgttataatatttttatgtcaaatttaaaacagtaacacttatttacaaggttgcaatattttgaagtaataaaggaagtgtcgcgt

SEQ ID NO: 6153 - DNA, 84 bp, Staphylococcus aureus
aagatgattttttaggaagtatattacagtactacgtattagaaaatcatctttgaatcagcgagtattttaaacacgtgttac

SEQ ID NO: 6154 - DNA, 84 bp, Staphylococcus aureus
gtaacacgtgtttaaaatactcgctgattcaaagatgattttctaatacgtagtactgtaatatacttcctaaaaaatcatctt

SEQ ID NO: 6155 - DNA, 58 bp, Staphylococcus aureus
aaggagcaccgactgatgtgatgtcaatcggtgctcctctatttatcaaagaaacaaa

SEQ ID NO: 6156 - DNA, 58 bp, Staphylococcus aureus
tttgtttctttgataaatagaggagcaccgattgacatcacatcagtcggtgctcctt

SEQ ID NO: 6157 - DNA, 230 bp, Staphylococcus aureus
tacaactatgtgttgaacaatttatttatgctccagaatataataacacaaaatatattgtaaggtaaattgaatttgtgacaatttataataattataaataaagtagcgtaaaagagtaataaaaaaccaatccctatgttcatttaaaataatgacacataagaatcggtttatatttttgtttaatattgtagcgacttgtatgatttcaatttaattctcaatta

SEQ ID NO: 6158 - DNA, 230 bp, Staphylococcus aureus
taattgagaattaaattgaaatcatacaagtcgctacaatattaaacaaaaatataaaccgattcttatgtgtcattattttaaatgaacatagggattggttttttattactcttttacgctactttatttataattattataaattgtcacaaattcaatttaccttacaatatattttgtgttattatattctggagcataaataaattgttcaacacatagttgta

SEQ ID NO: 6159 - DNA, 94 bp, Staphylococcus aureus
aataattacatccttccgttttgtaaatttttagtccaaactataatgctatatttaaaatattcatttcactcaatttcatttaaattattat

SEQ ID NO: 6160 - DNA, 94 bp, Staphylococcus aureus
ataataatttaaatgaaattgagtgaaatgaatattttaaatatagcattatagtttggactaaaaatttacaaaacggaaggatgtaattatt

SEQ ID NO: 6161 - DNA, 475 bp, Staphylococcus aureus
ttgcaacactcctctttcatttgtgaataatttcacaattattttatcctttggttatgaatatgtaaataccattaattaattattcatattttatctataatttgttaataaatatttaatatattattcttattcttaaatattatgtgcaattataccactatatttatttcttatactccatttgatttatagttgtattaatacattgactcaaaaactaattaatcaaatatgttttttagattaataaagttgtaactgtactattttgtagtgtatggtaatttatttggatgaaatataattctttaaactctattgattaatcaaatatgtatctatcaaaattcgtcttatttattcactctgacatatccaaatacgcaaaaagactatttctaccttgcatcgatagaaatagtctttttatacttaattggtttaatttttcataaaattttatactttt

SEQ ID NO: 6162 - DNA, 475 bp, Staphylococcus aureus
aaaagtataaaattttatgaaaaattaaaccaattaagtataaaaagactatttctatcgatgcaaggtagaaatagtctttttgcgtatttggatatgtcagagtgaataaataagacgaattttgatagatacatatttgattaatcaatagagtttaaagaattatatttcatccaaataaattaccatacactacaaaatagtacagttacaactttattaatctaaaaaacatatttgattaattagtttttgagtcaatgtattaatacaactataaatcaaatggagtataagaaataaatatagtggtataattgcacataatatttaagaataagaataatatattaaatatttattaacaaattatagataaaatatgaataattaattaatggtatttacatattcataaccaaaggataaaataattgtgaaattattcacaaatgaaagaggagtgttgcaa

SEQ ID NO: 6163 - DNA, 303 bp, Staphylococcus aureus
gttactttcccctttggttcgttcacatagaaatgcttgcttgttaaaacgaattcatacaatatcgatgtccatttaaacatagatcgttaaatggctcgcattgtattatgtttaaattttatcatagctgcttgataaaacatacgaataatcaattttcttcaaacattccaacttaaaagttcatatttctaaaaatcacaaatcatcgttaaatttttctagaaaataaatattgtcacagtttgttcacacacgtcacagaattgacaccgtataatagccaattgggagggaaat

SEQ ID NO: 6164 - DNA, 303 bp, Staphylococcus aureus
atttccctcccaattggctattatacggtgtcaattctgtgacgtgtgtgaacaaactgtgacaatatttattttctagaaaaatttaacgatgatttgtgatttttagaaatatgaacttttaagttggaatgtttgaagaaaattgattattcgtatgttttatcaagcagctatgataaaatttaaacataatacaatgcgagccatttaacgatctatgtttaaatggacatcgatattgtatgaattcgttttaacaagcaagcatttctatgtgaacgaaccaaaggggaaagtaac

SEQ ID NO: 6165 - DNA, 205 bp, Staphylococcus aureus
tgcacttaaagttttgaactgacgaaatttacaaaatgattctcgtctctctaattacttaaaacgggttctataataaatcgtactgatggaaagtttttactttttatctgtcagattttttgaatttgaagataaaaaagcatctaaaacgcataagaagataactctacttcttcaaaattacgttatagatgctttttta

SEQ ID NO: 6166 - DNA, 205 bp, Staphylococcus aureus
taaaaaagcatctataacgtaattttgaagaagtagagttatcttcttatgcgttttagatgcttttttatcttcaaattcaaaaaatctgacagataaaaagtaaaaactttccatcagtacgatttattatagaacccgttttaagtaattagagagacgagaatcattttgtaaatttcgtcagttcaaaactttaagtgca

SEQ ID NO: 6167 - DNA, 83 bp, Staphylococcus aureus
ttatagactcctccatttttcaaaaatacctattatcatgagaacttaattattactaattttagtcacgcattagaaacact

SEQ ID NO: 6168 - DNA, 83 bp, Staphylococcus aureus
agtgtttctaatgcgtgactaaaattagtaataattaagttctcatgataataggtatttttgaaaaatggaggagtctataa

SEQ ID NO: 6169 - DNA, 433 bp, Staphylococcus aureus
atatgattctccttttatacaggtattttattcttagcttgtgttttttatacatttccaacaaatttaatcgctgatacattaacgcatccgcttactattttaaaacaaggcagtgtcattatatcaagacaaggcgttaattttaagtgttcttttcatgaaaaaagctctccatcatctaggagagctaaactagtagtgatatttctataagccatgttctgttccatcgtactcatcacgtgcactagtcacactggtactcaggtgataaccatctgtctacaccacttcatttcgcgaagtgtgtctcgtttatacgttgaattccgttaaacaagtgctcctaccaaatttggattgctcactcgaggggtttaccgcgttccaccttttatatttctataaaagctacgtcactgtggcactt

SEQ ID NO: 6170 - DNA, 433 bp, Staphylococcus aureus
aagtgccacagtgacgtagcttttatagaaatataaaaggtggaacgcggtaaacccctcgagtgagcaatccaaatttggtaggagcacttgtttaacggaattcaacgtataaacgagacacacttcgcgaaatgaagtggtgtagacagatggttatcacctgagtaccagtgtgactagtgcacgtgatgagtacgatggaacagaacatggcttatagaaatatcactactagtttagctctcctagatgatggagagcttttttcatgaaaagaacacttaaaattaacgccttgtcttgatataatgacactgccttgttttaaaatagtaagcggatgcgttaatgtatcagcgattaaatttgttggaaatgtataaaaaacacaagctaagaataaaatacctgtataaaaggagaatcatat

SEQ ID NO: 6171 - DNA, 58 bp, Staphylococcus aureus
ttttaaaattataacatagtcattattagtaagacagttaaacttttgtatttagtaa

SEQ ID NO: 6172 - DNA, 58 bp, Staphylococcus aureus
ttactaaatacaaaagtttaactgtcttactaataatgactatgttataattttaaaa

SEQ ID NO: 6173 - DNA, 200 bp, Staphylococcus aureus
atacttgtacttgcctcaaaaataaaaattactgatcatgatttgacttttataacaaaattcaaaaatattgtaatgagtattcatttttataagcaaaacttttcaattaattaaaattgtgtgtaaaattccaacattaacggtaaatgtattataatattattgtgttaatgctgaaatcacgttaaaataagctt

SEQ ID NO: 6174 - DNA, 200 bp, Staphylococcus aureus
aagcttattttaacgtgatttcagcattaacacaataatattataatacatttaccgttaatgttggaattttacacacaattttaattaattgaaaagttttgcttataaaaatgaatactcattacaatatttttgaattttgttataaaagtcaaatcatgatcagtaatttttatttttgaggcaagtacaagtat

SEQ ID NO: 6175 - DNA, 565 bp, Staphylococcus aureus
tccactcaacataaaatcctcagttataccatatttatggtgtagctgaggatttttttaggttcttcatcttttatggtgggaaggtaaaacttcctgctttttttataagtattcatacgctaatgctatattagtagaaaccgtaaaatcagtcattcacatacattttgaaacatctaaatagtttttcatattcacatctttagctatgtaaaattattgaatttgaataagtggttgttcccatttttaaaattatgattatattttctcatagtcatcttagacgctgttttaaattgaaatgtttatcaattccctgtgtacgttaatcagtgaaatatcaagatgtttgcaacatattttcacaatcatagatataagaaatccacctacgattcgaaataggtatcttaaagcatatctcaagatatccattatgatgtagatggacagtttttatattaagacgttgtaatgacacgacacctaacataaatacaaatatgtgtgcatgaattagttttacatattttcaacattaagaaatgatcaatcttgt

SEQ ID NO: 6176 - DNA, 565 bp, Staphylococcus aureus
acaagattgatcatttcttaatgttgaaaatatgtaaaactaattcatgcacacatatttgtatttatgttaggtgtcgtgtcattacaacgtcttaatataaaaactgtccatctacatcataatggatatcttgagatatgctttaagatacctatttcgaatcgtaggtggatttcttatatctatgattgtgaaaatatgttgcaaacatcttgatatttcactgattaacgtacacagggaattgataaacatttcaatttaaaacagcgtctaagatgactatgagaaaatataatcataattttaaaaatgggaacaaccacttattcaaattcaataattttacatagctaaagatgtgaatatgaaaaactatttagatgtttcaaaatgtatgtgaatgactgattttacggtttctactaatatagcattagcgtatgaatacttataaaaaaagcaggaagttttaccttcccaccataaaagatgaagaacctaaaaaaatcctcagctacaccataaatatggtataactgaggattttatgttgagtgga

SEQ ID NO: 6177 - DNA, 327 bp, Staphylococcus aureus
gttcgtgcccccttttaaatttaaccattacttaatagtataaatcattttctttaattttcgactaaaatgcttaatatatttaactagtagcaaacaaattttaaataacagtattttttaaaactagattttaacaatgaactttatggataatcagatgaactatttattttccaaatatagttactaaacaaaagtttgttcatgattaatataagccgttatcaatcttcattttgcaagcataaatcgcccagctattaatataggctggacgattctttttattatcataatataaattttaagtaacgatcctaaaac

SEQ ID NO: 6178 - DNA, 327 bp, Staphylococcus aureus
gttttaggatcgttacttaaaatttatattatgataataaaaagaatcgtccagcctatattaatagctgggcgatttatgcttgcaaaatgaagattgataacggcttatattaatcatgaacaaacttttgtttagtaactatatttggaaaataaatagttcatctgattatccataaagttcattgttaaaatctagttttaaaaaatactgttatttaaaatttgtttgctactagttaaatatattaagcattttagtcgaaaattaaagaaaatgatttatactattaagtaatggttaaatttaaaagggggcacgaac

SEQ ID NO: 6179 - DNA, 321 bp, Staphylococcus aureus
aaccattctcctatttattttttcgttatacaatactcattcattttaacaaaatccgctttcaagttctagaactagactaaaagataacgtgtaaatggtaatgatttacgcacagatttgaacattaatttatattaagacaatacaatcatcagtttcagacaaaatatataataaagcctcaatattattagtatgaaggtcgttttttgtgctaacattcaagtttaattataaaactcaaattttgacgaccaaacaaaaattcttgtaacagaacatagcacatgtcatgtcacaagaattttactttgtatt

SEQ ID NO: 6180 - DNA, 321 bp, Staphylococcus aureus
aatacaaagtaaaattcttgtgacatgacatgtgctatgttctgttacaagaatttttgtttggtcgtcaaaatttgagttttataattaaacttgaatgttagcacaaaaaacgaccttcatactaataatattgaggctttattatatattttgtctgaaactgatgattgtattgtcttaatataaattaatgttcaaatctgtgcgtaaatcattaccatttacacgttatcttttagtctagttctagaacttgaaagcggattttgttaaaatgaatgagtattgtataacgaaaaaataaataggagaatggtt

SEQ ID NO: 6181 - DNA, 243 bp, Staphylococcus aureus
tcgcttgcccatcctttctttctatttctctttctattattctcgatgcgtagataattgtttaaatttaagtttatagtaatgttgagtttataatttcaaatatctaaaaaacaggtgttgtatatataatcatttatctagttctacttactttaaaaataatataatttcatgcgatgcaattcattggtctatgtttttaatcttaatcaaatccaaataaagcatatatttttaaat

SEQ ID NO: 6182 - DNA, 243 bp, Staphylococcus aureus
atttaaaaatatatgctttatttggatttgattaagattaaaaacatagaccaatgaattgcatcgcatgaaattatattatttttaaagtaagtagaactagataaatgattatatatacaacacctgttttttagatatttgaaattataaactcaacattactataaacttaaatttaaacaattatctacgcatcgagaataatagaaagagaaatagaaagaaaggatgggcaagcga

SEQ ID NO: 6183 - DNA, 118 bp, Staphylococcus aureus
tttgaagtctcatgcatgtttagtgcaatctactgactctagctaaactagatgacaagttgtttattttagaagtttaataattcagtttatataaatgtaatgcattcctaactaa

SEQ ID NO: 6184 - DNA, 118 bp, Staphylococcus aureus
ttagttaggaatgcattacatttatataaactgaattattaaacttctaaaataaacaacttgtcatctagtttagctagagtcagtagattgcactaaacatgcatgagacttcaaa

SEQ ID NO: 6185 - DNA, 78 bp, Staphylococcus aureus
aaaaaaactagcaatcacacaaaatgtgattagctagttaataagtgtctaatttaagttaattgttaatctataaga

SEQ ID NO: 6186 - DNA, 78 bp, Staphylococcus aureus
tcttatagattaacaattaacttaaattagacacttattaactagctaatcacattttgtgtgattgctagttttttt

SEQ ID NO: 6187 - DNA, 53 bp, Staphylococcus aureus
taaactcactctcctttataaatattttactgtcatttgccgtttttatcaaa

SEQ ID NO: 6188 - DNA, 53 bp, Staphylococcus aureus
tttgataaaaacggcaaatgacagtaaaatatttataaaggagagtgagttta

SEQ ID NO: 6189 - DNA, 385 bp, Staphylococcus aureus
acacactcgctcctttcatacttccgcaataacattataatatgttgttaatcttatcacattcattgtggattcataaatgtttgttttcaagcttaattaagaaaatggatgacatctcattttaaatgtcagaattatcttaatattaaacgaactaaaattaattataatatattcgtctgtagaaaagtatcatgaatttctaaacagttgcatcatataatcattaattaaaaatgattagccgttttaatataatcgtatcgcaactttagcaaataatatactgactacatttcttaatacaaaagaacgaactgttaattattaataaagttaatcagtccgtttaaaaaaattatgatattaaaatatacatatg

SEQ ID NO: 6190 - DNA, 385 bp, Staphylococcus aureus
catatgtatattttaatatcataatttttttaaacggactgattaactttattaataattaacagttcgttcttttgtattaagaaatgtagtcagtatattatttgctaaagttgcgatacgattatattaaaacggctaatcatttttaattaatgattatatgatgcaactgtttagaaattcatgatacttttctacagacgaatatattataattaattttagttcgtttaatattaagataattctgacatttaaaatgagatgtcatccattttcttaattaagcttgaaaacaaacatttatgaatccacaatgaatgtgataagattaacaacatattataatgttattgcggaagtatgaaaggagcgagtgtgt

SEQ ID NO: 6191 - DNA, 54 bp, Staphylococcus aureus
aacaaaaccctttctacctttataaataaatcgtaaaggtttacagtttatatt

SEQ ID NO: 6192 - DNA, 54 bp, Staphylococcus aureus
aatataaactgtaaacctttacgatttatttataaaggtagaaagggttttgtt

SEQ ID NO: 6193 - DNA, 430 bp, Staphylococcus aureus
gtctacacctcacgatattatcactattcatattaacattatatgtaagaaattaaaatcttttgaagcattaagattacttatcatttttaaatttcaatttaaactaacagtaatttatgtagcttttgtaattctcataataacctttacttcatttacattattcatctttttaaataacgtaaaatactatagtagacatggttaccttttaagtaaattcaacgctaacaattaatctcattattcatatgtatattttgtagttgctatttttatcaaaactattatgtcatgtaatattttgaacgcttaaacaatgaatgttccaaagattaaaaacttagaagaacattacaaattatgtacaggttgtaagtattaaaagcaaaataaaaagcccttattcagggctttttaagtaaaa

SEQ ID NO: 6194 - DNA, 430 bp, Staphylococcus aureus
ttttacttaaaaagccctgaataagggctttttattttgcttttaatacttacaacctgtacataatttgtaatgttcttctaagtttttaatctttggaacattcattgtttaagcgttcaaaatattacatgacataatagttttgataaaaatagcaactacaaaatatacatatgaataatgagattaattgttagcgttgaatttacttaaaaggtaaccatgtctactatagtattttacgttatttaaaaagatgaataatgtaaatgaagtaaaggttattatgagaattacaaaagctacataaattactgttagtttaaattgaaatttaaaaatgataagtaatcttaatgcttcaaaagattttaatttcttacatataatgttaatatgaatagtgataatatcgtgaggtgtagac

SEQ ID NO: 6195 - DNA, 170 bp, Staphylococcus aureus
tagacattcacctcctgaggtttgataatgatatgtttatatcattatggtaaaactttaacacaagcattacataaatcgcaatcatttatgtggcaaaaacgttgaatttaagccatttctattcattttacgtaattattagccgtatatgtgtaataatacacatt

SEQ ID NO: 6196 - DNA, 170 bp, Staphylococcus aureus
aatgtgtattattacacatatacggctaataattacgtaaaatgaatagaaatggcttaaattcaacgtttttgccacataaatgattgcgatttatgtaatgcttgtgttaaagttttaccataatgatataaacatatcattatcaaacctcaggaggtgaatgtcta

SEQ ID NO: 6197 - DNA, 221 bp, Staphylococcus aureus
aagctaacttcctctctttcttatatctttttaataatatcacatgagactgtgtattcaaaatgagtttattactgtaatgataaaaatcagcacttaaaactttatctttttaaacacttagttaaatttgtccacgttatcattccgagtatattttgttacataaaaatactccacatgcaatcataaacatgtggagttgactattaaatattaaa

SEQ ID NO: 6198 - DNA, 221 bp, Staphylococcus aureus
tttaatatttaatagtcaactccacatgtttatgattgcatgtggagtatttttatgtaacaaaatatactcggaatgataacgtggacaaatttaactaagtgtttaaaaagataaagttttaagtgctgatttttatcattacagtaataaactcattttgaatacacagtctcatgtgatattattaaaaagatataagaaagagaggaagttagctt

SEQ ID NO: 6199 - DNA, 528 bp, Staphylococcus aureus
cttgtttgcctccttatacactacatatttataacatcttataaactgacagaattgtcaagaaattctacctttattacatttagtaaattagttgtatccataaatatgtcacttaatctcattctgtaaattagttggacatatatttattacaaccatatattcaaacaagtaataaagtccgctatgtttatacatattttttgtataaaaattagcatagcttactattttgttttataagtctgtcatttcattgttctctacaagatatattatagtaaaattttatacttttataaaacaaaaagccacgcaaataagcaacttttacatttgaatagtaagaagaccgtatatagtgcatctttctcgaattattacataggacattttttgtgactaaatcaacttcttttgcaatatttagatttgtaacactcattttcttaccatttgtaaaatgctttatgaatgtaatgaattatttttggaattctaataattcacctttattatttcttt

SEQ ID NO: 6200 - DNA, 528 bp, Staphylococcus aureus
aaagaaataataaaggtgaattattagaattccaaaaataattcattacattcataaagcattttacaaatggtaagaaaatgagtgttacaaatctaaatattgcaaaagaagttgatttagtcacaaaaaatgtcctatgtaataattcgagaaagatgcactatatacggtcttcttactattcaaatgtaaaagttgcttatttgcgtggctttttgttttataaaagtataaaattttactataatatatcttgtagagaacaatgaaatgacagacttataaaacaaaatagtaagctatgctaatttttatacaaaaaatatgtataaacatagcggactttattacttgtttgaatatatggttgtaataaatatatgtccaactaatttacagaatgagattaagtgacatatttatggatacaactaatttactaaatgtaataaaggtagaatttcttgacaattctgtcagtttataagatgttataaatatgtagtgtataaggaggcaaacaag

SEQ ID NO: 6201 - DNA, 76 bp, Staphylococcus aureus
gcgtcatttcccttccttgtcgttttatgaataatattttatcataattaggtaaattaaatataggaggaaatat

SEQ ID NO: 6202 - DNA, 76 bp, Staphylococcus aureus
atatttcctcctatatttaatttacctaattatgataaaatattattcataaaacgacaaggaagggaaatgacgc

SEQ ID NO: 6203 - DNA, 114 bp, Staphylococcus aureus
tgaatacgtaacataaaaaggtctatgtacaataattagtcatcaacctcatttgacatatcatgaatgtcagtcgttgtaaaactaagttatttagtacatagacctttattt

SEQ ID NO: 6204 - DNA, 114 bp, Staphylococcus aureus
aaataaaggtctatgtactaaataacttagttttacaacgactgacattcatgatatgtcaaatgaggttgatgactaattattgtacatagacctttttatgttacgtattca

SEQ ID NO: 6205 - DNA, 124 bp, Staphylococcus aureus
actttgaaaaatgaaaaaaccgctacatacttataagcgcaatttaagttctccaaaatatttagagatacttataatatgcacgtttgtatatagcagttcagttacaatttatatagttata

SEQ ID NO: 6206 - DNA, 124 bp, Staphylococcus aureus
tataactatataaattgtaactgaactgctatatacaaacgtgcatattataagtatctctaaatattttggagaacttaaattgcgcttataagtatgtagcggttttttcatttttcaaagt

SEQ ID NO: 6207 - DNA, 152 bp, Staphylococcus aureus
agccatcttcctttctattctattacaatgattttacataaaatatacccacatgacatatgtttatgtatatttttcaaaattatttcaatcatttttcaattgtgtatacactaattatagcttgtcaattttcttttagtaaagtaata

SEQ ID NO: 6208 - DNA, 152 bp, Staphylococcus aureus
tattactttactaaaagaaaattgacaagctataattagtgtatacacaattgaaaaatgattgaaataattttgaaaaatatacataaacatatgtcatgtgggtatattttatgtaaaatcattgtaatagaatagaaaggaagatggct

SEQ ID NO: 6209 - DNA, 107 bp, Staphylococcus aureus
atttaaccctcactctgtaaaacggataatttgaaaataaaaatgatgctgtctaaaattttagtcacattactattttagcatttttatcaaaggaggcgaagaca

SEQ ID NO: 6210 - DNA, 107 bp, Staphylococcus aureus
tgtcttcgcctcctttgataaaaatgctaaaatagtaatgtgactaaaattttagacagcatcatttttattttcaaattatccgttttacagagtgagggttaaat

SEQ ID NO: 6211 - DNA, 105 bp, Staphylococcus aureus
ttgattttttagacaaatgttctatagaaaaagcaggcaagctatcgtttattgatagtcacctgctttttattattatgtgtatattattttgctttaatttga

SEQ ID NO: 6212 - DNA, 105 bp, Staphylococcus aureus
tcaaattaaagcaaaataatatacacataataataaaaagcaggtgactatcaataaacgatagcttgcctgctttttctatagaacatttgtctaaaaaatcaa

SEQ ID NO: 6213 - DNA, 401 bp, Staphylococcus aureus
attcaattttctccttccattcatctcgtaagaataggaggattattgcacaacaaaaaacctccatcttctcccatccagactatactgtcggctctagaatctcactagatcagccactaatatgatacatactagcaggtcgcaggctttatttactgccggttgggaattacacccgaccccgaagatgaattttacattattaaatttaattctcattaattttatactatatatcacaaaacctcaataactatgctttaattagatcatagttacattattggagagtgatacattggtgatttgagttcattggttggataggtttgattggtttgtggttttaactgttgttgagatggcttttttgaacctacctttttattgttattagt

SEQ ID NO: 6214 - DNA, 401 bp, Staphylococcus aureus
actaataacaataaaaaggtaggttcaaaaaagccatctcaacaacagttaaaaccacaaaccaatcaaacctatccaaccaatgaactcaaatcaccaatgtatcactctccaataatgtaactatgatctaattaaagcatagttattgaggttttgtgatatatagtataaaattaatgagaattaaatttaataatgtaaaattcatcttcggggtcgggtgtaattcccaaccggcagtaaataaagcctgcgacctgctagtatgtatcatattagtggctgatctagtgagattctagagccgacagtatagtctggatgggagaagatggaggttttttgttgtgcaataatcctcctattcttacgagatgaatggaaggagaaaattgaat

SEQ ID NO: 6215 - DNA, 57 bp, Staphylococcus aureus
agcccatctcccatttatgtgtttgtttagaatatagagaaattagctgatttcaag

SEQ ID NO: 6216 - DNA, 57 bp, Staphylococcus aureus
cttgaaatcagctaatttctctatattctaaacaaacacataaatgggagatgggct

SEQ ID NO: 6217 - DNA, 89 bp, Staphylococcus aureus
agctcatcacccatttatgtgtttgtaaaacttttatgttaaaaaaactacttattctcaaagaaaacaagtagcatttaataaattac

SEQ ID NO: 6218 - DNA, 89 bp, Staphylococcus aureus
gtaatttattaaatgctacttgttttctttgagaataagtagtttttttaacataaaagttttacaaacacataaatgggtgatgagct

SEQ ID NO: 6219 - DNA, 57 bp, Staphylococcus aureus
gctataaattagagtctctaatcaataacatgcgttcttaaataactatattcagtt

SEQ ID NO: 6220 - DNA, 57 bp, Staphylococcus aureus
aactgaatatagttatttaagaacgcatgttattgattagagactctaatttatagc

SEQ ID NO: 6221 - DNA, 132 bp, Staphylococcus aureus
acaggtcatacctcccacacatgcttttctttacaaaagtattatatcacaggaaagcgcatacagttattaaaaacctaaaattttgtgaaaaaattctcaaactttgtgataaatacatattttatttaa

SEQ ID NO: 6222 - DNA, 132 bp, Staphylococcus aureus
ttaaataaaatatgtatttatcacaaagtttgagaattttttcacaaaattttaggtttttaataactgtatgcgctttcctgtgatataatacttttgtaaagaaaagcatgtgtgggaggtatgacctgt

SEQ ID NO: 6223 - DNA, 77 bp, Staphylococcus aureus
tcaaccaatttaaaaaagccacaatagcacagacatttttagtcatgtgtattgtgacttttaagttatggttcact

SEQ ID NO: 6224 - DNA, 77 bp, Staphylococcus aureus
agtgaaccataacttaaaagtcacaatacacatgactaaaaatgtctgtgctattgtggcttttttaaattggttga

SEQ ID NO: 6225 - DNA, 104 bp, Staphylococcus aureus
cgatgtccactcccctactaataattaaaatcattacaaattatttcaaacttcacaattaaaactaacagttttctcaataaaatgcaagcttttctcatttg

SEQ ID NO: 6226 - DNA, 104 bp, Staphylococcus aureus
caaatgagaaaagcttgcattttattgagaaaactgttagttttaattgtgaagtttgaaataatttgtaatgattttaattattagtaggggagtggacatcg

SEQ ID NO: 6227 - DNA, 81 bp, Staphylococcus aureus
tataatcacgttcctttaaattcatattatatattgatacactatgcttgttagctaaagtgtatcgaaaggagaacagac

SEQ ID NO: 6228 - DNA, 81 bp, Staphylococcus aureus
gtctgttctcctttcgatacactttagctaacaagcatagtgtatcaatatataatatgaatttaaaggaacgtgattata

SEQ ID NO: 6229 - DNA, 215 bp, Staphylococcus aureus
aagtcattttcagtaataaaaacagcagcatgaggcgtttcattataaaaatgccttactgctgttgtttatgtacaattcgctataatttatgattatgattactcacttatgatagaaattaaagcgttgtcctcacgcatcagtatttagtaatttcgccttgcggcattgccttaagcaaacttctgccacttcatctcttaataatttta

SEQ ID NO: 6230 - DNA, 215 bp, Staphylococcus aureus
taaaattattaagagatgaagtggcagaagtttgcttaaggcaatgccgcaaggcgaaattactaaatactgatgcgtgaggacaacgctttaatttctatcataagtgagtaatcataatcataaattatagcgaattgtacataaacaacagcagtaaggcatttttataatgaaacgcctcatgctgctgtttttattactgaaaatgactt

SEQ ID NO: 6231 - DNA, 141 bp, Staphylococcus aureus
caattaaccttccttttcaattatatagaatgcaatttatcgtctctgtataattgagacaagttgattatctttcctaatatatatacaataataagaaaatataacatacaaatcaaaaactaaagggatgtgacgtta

SEQ ID NO: 6232 - DNA, 141 bp, Staphylococcus aureus
taacgtcacatccctttagtttttgatttgtatgttatattttcttattattgtatatatattaggaaagataatcaacttgtctcaattatacagagacgataaattgcattctatataattgaaaaggaaggttaattg

SEQ ID NO: 6233 - DNA, 60 bp, Staphylococcus aureus
atatgcccctccttttcttcaattcattttatcataaaatttgtatcaatttagttttaa

SEQ ID NO: 6234 - DNA, 60 bp, Staphylococcus aureus
ttaaaactaaattgatacaaattttatgataaaatgaattgaagaaaaggaggggcatat

SEQ ID NO: 6235 - DNA, 121 bp, Staphylococcus aureus
gatacatgaatcgatatttcatttaagacactgcatactgtcgagcatattgaatgacctgctgaatggattatcttataataataaatcatatatctaattaagaattgaggttttaatc

SEQ ID NO: 6236 - DNA, 121 bp, Staphylococcus aureus
gattaaaacctcaattcttaattagatatatgatttattattataagataatccattcagcaggtcattcaatatgctcgacagtatgcagtgtcttaaatgaaatatcgattcatgtatc

SEQ ID NO: 6237 - DNA, 229 bp, Staphylococcus aureus
ttgaattaaaacgcacatgttaaacaaaaataaatgagcgaatgacaaggattgattacgaatcaagtaaatcaattgttctatcattcgctttttttctagactatattatgaaattatattttacaatgcccaaaactattttaataatcattgaacaaatgggtgtataatttatagaaataatgtagaataaaaataaatgattgaattaattggagtgaaagtt

SEQ ID NO: 6238 - DNA, 229 bp, Staphylococcus aureus
aactttcactccaattaattcaatcatttatttttattctacattatttctataaattatacacccatttgttcaatgattattaaaatagttttgggcattgtaaaatataatttcataatatagtctagaaaaaaagcgaatgatagaacaattgatttacttgattcgtaatcaatccttgtcattcgctcatttatttttgtttaacatgtgcgttttaattcaa

SEQ ID NO: 6239 - DNA, 81 bp, Staphylococcus aureus
aaattaaaaacaaagaagccccctaatatatctataggtctacaaatggccttagattctattagggggcatattaatatg

SEQ ID NO: 6240 - DNA, 81 bp, Staphylococcus aureus
catattaatatgccccctaatagaatctaaggccatttgtagacctatagatatattagggggcttctttgtttttaattt

SEQ ID NO: 6241 - DNA, 193 bp, Staphylococcus aureus
ttaatcacctcctgttaatttctgcattggaaaacgcttccaacctctatataataacagtttagttactctttctaaaaaagtcaaaagatttgtgcaaacgattgcataaaacgataaaaataaaaccttcatactgaaattcaatccgaaaatcaatataaaggtttgtataaatattaaaatcgattgt

SEQ ID NO: 6242 - DNA, 193 bp, Staphylococcus aureus
acaatcgattttaatatttatacaaacctttatattgattttcggattgaatttcagtatgaaggttttatttttatcgttttatgcaatcgtttgcacaaatcttttgacttttttagaaagagtaactaaactgttattatatagaggttggaagcgttttccaatgcagaaattaacaggaggtgattaa

SEQ ID NO: 6243 - DNA, 301 bp, Staphylococcus aureus
aaaatagtacctctatttctctatagtacatgctatcataacacagtaaatattttattacttcacaaaatgcttaaaaatatggcgggatgcttttaaggtaatagatattgcttgtgtaatttttaaaattttgtagccacatagaacttcattaatcaaacatgtcgtctgggacatatatcaatgaaatacttcgttcaaagttttcgtattttctatgtcaacttaactgggtgtagctcacattgtccattagaatgtataactaacataataaaattaattaaacgtacatcat

SEQ ID NO: 6244 - DNA, 301 bp, Staphylococcus aureus
atgatgtacgtttaattaattttattatgttagttatacattctaatggacaatgtgagctacacccagttaagttgacatagaaaatacgaaaactttgaacgaagtatttcattgatatatgtcccagacgacatgtttgattaatgaagttctatgtggctacaaaattttaaaaattacacaagcaatatctattaccttaaaagcatcccgccatatttttaagcattttgtgaagtaataaaatatttactgtgttatgatagcatgtactatagagaaatagaggtactatttt

SEQ ID NO: 6245 - DNA, 315 bp, Staphylococcus aureus
tctatccctcttattcatcaaataataaaacgtaatctatttatcgaaatattaaaattatttactaatgctatcttaatagtatgtaagtaaaacgtctacacttaaacggacaaattctatgaggatagatatcgttaatttataaaagttgaaaattttaatttgacaagagaaagaaaatcattgaatatatcatgcgtagaaaatttcgataaatacataaggaaagagacaatttctatcaaataaataatagaaattgtctctttaacattacctaaattcataaggtctcaggctcaatggtcaata

SEQ ID NO: 6246 - DNA, 315 bp, Staphylococcus aureus
tattgaccattgagcctgagaccttatgaatttaggtaatgttaaagagacaatttctattatttatttgatagaaattgtctctttccttatgtatttatcgaaattttctacgcatgatatattcaatgattttctttctcttgtcaaattaaaattttcaacttttataaattaacgatatctatcctcatagaatttgtccgtttaagtgtagacgttttacttacatactattaagatagcattagtaaataattttaatatttcgataaatagattacgttttattatttgatgaataagagggataga

SEQ ID NO: 6247 - DNA, 67 bp, Staphylococcus aureus
attacttacctcacttgttgatttttcattagtattgtatcacaaaatagacatacactacactaaa

SEQ ID NO: 6248 - DNA, 67 bp, Staphylococcus aureus
tttagtgtagtgtatgtctattttgtgatacaatactaatgaaaaatcaacaagtgaggtaagtaat

SEQ ID NO: 6249 - DNA, 151 bp, Staphylococcus aureus
atattattttcaatttattatatatatttattgtaactcaaactaagctttgtcaaaaatatattgattgatttttcaaagatatcgtataatgaggaaaatgacataagcaaacttactcatgttttttattatattccttaatgatgat

SEQ ID NO: 6250 - DNA, 151 bp, Staphylococcus aureus
atcatcattaaggaatataataaaaaacatgagtaagtttgcttatgtcattttcctcattatacgatatctttgaaaaatcaatcaatatatttttgacaaagcttagtttgagttacaataaatatatataataaattgaaaataatat

SEQ ID NO: 6251 - DNA, 129 bp, Staphylococcus aureus
taaactatatctcaactacctatacaaaatcatacaattaaaaatccatccgttataaacgcatgtattaataagttatcgtattgcaacgattactttcaaacatgggtcatacggatggattatttt

SEQ ID NO: 6252 - DNA, 129 bp, Staphylococcus aureus
aaaataatccatccgtatgacccatgtttgaaagtaatcgttgcaatacgataacttattaatacatgcgtttataacggatggatttttaattgtatgattttgtataggtagttgagatatagttta

SEQ ID NO: 6253 - DNA, 76 bp, Staphylococcus aureus
aagttcaatcacctatccctttatatttaaactatcctcattctactaattaataacatattgttcaataaactaa

SEQ ID NO: 6254 - DNA, 76 bp, Staphylococcus aureus
ttagtttattgaacaatatgttattaattagtagaatgaggatagtttaaatataaagggataggtgattgaactt

SEQ ID NO: 6255 - DNA, 179 bp, Staphylococcus aureus
taatatgtttccagtatgatgtattattttgactttactgcaaaaatgcattcaaccatgttgattattgttctttatctttttttgaatttattgcacatattttattgcccaaaaaaatacatccatcgacaagaacaagataaaacaagttgtcgatagatgtatccatgttatca

SEQ ID NO: 6256 - DNA, 179 bp, Staphylococcus aureus
tgataacatggatacatctatcgacaacttgttttatcttgttcttgtcgatggatgtatttttttgggcaataaaatatgtgcaataaattcaaaaaaagataaagaacaataatcaacatggttgaatgcatttttgcagtaaagtcaaaataatacatcatactggaaacatatta

SEQ ID NO: 6257 - DNA, 150 bp, Staphylococcus aureus
gttcttactcctaactaatgatatatatccattgaaaatttattaatacatagttttcatgtccattaattacctattttacatgattgtctatttagtttgaatgcacataaataaatccataaatgagtattcaacacactttggaaa

SEQ ID NO: 6258 - DNA, 150 bp, Staphylococcus aureus
tttccaaagtgtgttgaatactcatttatggatttatttatgtgcattcaaactaaatagacaatcatgtaaaataggtaattaatggacatgaaaactatgtattaataaattttcaatggatatatatcattagttaggagtaagaac

SEQ ID NO: 6259 - DNA, 431 bp, Staphylococcus aureus
agtaaacacctctgattacgaatatttatacatttattttaacacatgcactgatttacgactactaaacacctttacgtaaaaagggtaaacatggtttatctatcttggttatctatttataaatatttttcatattacgcataacaattgcttaaaatatgtataaaaatgaatatatgtgtaataaacttgctaattattagatttaataagcgtcaattgtttgaacatatttaattaaaatcacattgatgtcacagatacgaatattgtcgtatagaaattgaaaattctattttttaaatgaaagtcttcaacataattttaagtttcaacatgagaaaaatcgattaacaaacaacgtcagttgaatatgccttttgagacatttcaaactttacaattgttgctaatcgatatatttgctt

SEQ ID NO: 6260 - DNA, 431 bp, Staphylococcus aureus
aagcaaatatatcgattagcaacaattgtaaagtttgaaatgtctcaaaaggcatattcaactgacgttgtttgttaatcgatttttctcatgttgaaacttaaaattatgttgaagactttcatttaaaaaatagaattttcaatttctatacgacaatattcgtatctgtgacatcaatgtgattttaattaaatatgttcaaacaattgacgcttattaaatctaataattagcaagtttattacacatatattcatttttatacatattttaagcaattgttatgcgtaatatgaaaaatatttataaatagataaccaagatagataaaccatgtttaccctttttacgtaaaggtgtttagtagtcgtaaatcagtgcatgtgttaaaataaatgtataaatattcgtaatcagaggtgtttact

SEQ ID NO: 6261 - DNA, 59 bp, Staphylococcus aureus
ttttaactccttcaaacgtttgtatttttctttatttaattactgaattaggtatgaca

SEQ ID NO: 6262 - DNA, 59 bp, Staphylococcus aureus
tgtcatacctaattcagtaattaaataaagaaaaatacaaacgtttgaaggagttaaaa

SEQ ID NO: 6263 - DNA, 473 bp, Staphylococcus aureus
tattactgactccttcagtttgttttcatctacccgtctattttacttgagacaactcttcaattcaagcatgttcatattgctggcgacattataagtctatcccaaagttataataaaaccacattttaaattaaaaacacttgtgtatttattacttaacattgactcatcttaactcttgattaaaaattttatgcattcagttaaacatatcaatgttatttttattagctattatgttttatcctcaacaatatgatatgtagatatatacctttactcatgtctatgttttttcactaccaattagacgattcgttttatattttaaaaattattttaaaaataaaaagcctcatatcagcatataacctataatcattttaggcaatagctttatgagacttatttagaatatcttacgttaaatcagtatagtgaatacaagctatttgttaacaaattagaga

SEQ ID NO: 6264 - DNA, 473 bp, Staphylococcus aureus
tctctaatttgttaacaaatagcttgtattcactatactgatttaacgtaagatattctaaataagtctcataaagctattgcctaaaatgattataggttatatgctgatatgaggctttttatttttaaaataatttttaaaatataaaacgaatcgtctaattggtagtgaaaaaacatagacatgagtaaaggtatatatctacatatcatattgttgaggataaaacataatagctaataaaaataacattgatatgtttaactgaatgcataaaatttttaatcaagagttaagatgagtcaatgttaagtaataaatacacaagtgtttttaatttaaaatgtggttttattataactttgggatagacttataatgtcgccagcaatatgaacatgcttgaattgaagagttgtctcaagtaaaatagacgggtagatgaaaacaaactgaaggagtcagtaata

SEQ ID NO: 6265 - DNA, 104 bp, Staphylococcus aureus
cttattacctcctagtgaaacgtttgtgcatttcaactttatacattaaaataatatcataataaggataaaaaataatagatattgattttagggagatagta

SEQ ID NO: 6266 - DNA, 104 bp, Staphylococcus aureus
tactatctccctaaaatcaatatctattattttttatccttattatgatattattttaatgtataaagttgaaatgcacaaacgtttcactaggaggtaataag

SEQ ID NO: 6267 - DNA, 63 bp, Staphylococcus aureus
ataaaaaaacggaagcacttgtaggtaaaatagtctacgtgcttccattttttattctaaaaa

SEQ ID NO: 6268 - DNA, 63 bp, Staphylococcus aureus
tttttagaataaaaaatggaagcacgtagactattttacctacaagtgcttccgtttttttat

SEQ ID NO: 6269 - DNA, 157 bp, Staphylococcus aureus
attcaagaactcctatcagcaaaatgtataatatttgattcgctaattaatcaatttaactaaatgaataataattgcaattctttagtgaaatattttgataatttgacctaacagtcttataattatattatcgtttaattagggaggatgcaag

SEQ ID NO: 6270 - DNA, 157 bp, Staphylococcus aureus
cttgcatcctccctaattaaacgataatataattataagactgttaggtcaaattatcaaaatatttcactaaagaattgcaattattattcatttagttaaattgattaattagcgaatcaaatattatacattttgctgataggagttcttgaat

SEQ ID NO: 6271 - DNA, 364 bp, Staphylococcus aureus
tttttgtaaatttaatatacgatttaataaaatctgagtgttaattgatcatcaataacaatactcagattttaattttttaacaaagcctgttactatatttctctagcttcactgatcattaaacttagtttcagcataataaagaaagttcagctcattttcaatacgattcaattaccgcaatctaaaaaatgaaaagacaatttctatgaaagaataataccaaaccctaagagttattacttcggtttatttttcttgttcaaatagaaattgtctttttcaattgattttgaaaccattatccttaaatcttcatacaaagttagaataataattctcggaatatgtgtttaatact

SEQ ID NO: 6272 - DNA, 364 bp, Staphylococcus aureus
agtattaaacacatattccgagaattattattctaactttgtatgaagatttaaggataatggtttcaaaatcaattgaaaaagacaatttctatttgaacaagaaaaataaaccgaagtaataactcttagggtttggtattattctttcatagaaattgtcttttcattttttagattgcggtaattgaatcgtattgaaaatgagctgaactttctttattatgctgaaactaagtttaatgatcagtgaagctagagaaatatagtaacaggctttgttaaaaaattaaaatctgagtattgttattgatgatcaattaacactcagattttattaaatcgtatattaaatttacaaaaa

SEQ ID NO: 6273 - DNA, 158 bp, Staphylococcus aureus
tgaaatacccccttaaaattataaaaacaggatagcaatcgctaccctgtttataaatcaccaattcaggaacgcgttacagtattatccttttgcctgagagtttcgtaataaattacttgcaccttcggcgatagagtcttaacgctctattctct

SEQ ID NO: 6274 - DNA, 158 bp, Staphylococcus aureus
agagaatagagcgttaagactctatcgccgaaggtgcaagtaatttattacgaaactctcaggcaaaaggataatactgtaacgcgttcctgaattggtgatttataaacagggtagcgattgctatcctgtttttataattttaagggggtatttca

SEQ ID NO: 6275 - DNA, 96 bp, Staphylococcus aureus
taagaacggagttacatatcctttttctttatataaatcaaaattaataaattatttcacatcctttttaatagtactcatttaaattctagtaag

SEQ ID NO: 6276 - DNA, 96 bp, Staphylococcus aureus
cttactagaatttaaatgagtactattaaaaaggatgtgaaataatttattaattttgatttatataaagaaaaaggatatgtaactccgttctta

SEQ ID NO: 6277 - DNA, 51 bp, Staphylococcus aureus
aaaaacacctcctacatataatcacgtaggaggtgtttttattacttcaat

SEQ ID NO: 6278 - DNA, 51 bp, Staphylococcus aureus
attgaagtaataaaaacacctcctacgtgattatatgtaggaggtgttttt

SEQ ID NO: 6279 - DNA, 154 bp, Staphylococcus aureus
tatgttgtcatgatgaattatgcgacaattctaaaatttattatttcaattgaaaatcttttatcatttcatacgtgtgcataattaaaaaggtgaaacctcttattttgagatttcaccttttttattgttaatttaaatttaattttaatga

SEQ ID NO: 6280 - DNA, 154 bp, Staphylococcus aureus
tcattaaaattaaatttaaattaacaataaaaaaggtgaaatctcaaaataagaggtttcacctttttaattatgcacacgtatgaaatgataaaagattttcaattgaaataataaattttagaattgtcgcataattcatcatgacaacata

SEQ ID NO: 6281 - DNA, 112 bp, Staphylococcus aureus
ggttattcctccttatcatttctaaatacgactttattattataccaacatctataatatttgcaaagttaaaattttacaaccatgcgctacacaatcgtcaggttaaatt

SEQ ID NO: 6282 - DNA, 112 bp, Staphylococcus aureus
aatttaacctgacgattgtgtagcgcatggttgtaaaattttaactttgcaaatattatagatgttggtataataataaagtcgtatttagaaatgataaggaggaataacc

SEQ ID NO: 6283 - DNA, 120 bp, Staphylococcus aureus
aactacctacctctattcaaagtctttcactttaaatcatatatgaatttagaaattatttctatctttttgacaaaaaaataacggtctcatttaagagaccgaacaagtaatcatact

SEQ ID NO: 6284 - DNA, 120 bp, Staphylococcus aureus
agtatgattacttgttcggtctcttaaatgagaccgttatttttttgtcaaaaagatagaaataatttctaaattcatatatgatttaaagtgaaagactttgaatagaggtaggtagtt

SEQ ID NO: 6285 - DNA, 275 bp, Staphylococcus aureus
aaataatcatcctcctaaaatgtctgtaagtaaataataacaagcagtgactggttcaacaaagaatttgcttaaattctactacttattattttctctactcatttaatataactcaaatcaaaaataattaaacattttgtatataaaaagttaacagatttgccataaaatcatacgaacggagtatgaaatgaacctttatcttctataatttaaaaaatgagatttatgcatacatctgaccaaatgtgcataaatctcatttctttata

SEQ ID NO: 6286 - DNA, 275 bp, Staphylococcus aureus
tataaagaaatgagatttatgcacatttggtcagatgtatgcataaatctcattttttaaattatagaagataaaggttcatttcatactccgttcgtatgattttatggcaaatctgttaactttttatatacaaaatgtttaattatttttgatttgagttatattaaatgagtagagaaaataataagtagtagaatttaagcaaattctttgttgaaccagtcactgcttgttattatttacttacagacattttaggaggatgattattt

SEQ ID NO: 6287 - DNA, 143 bp, Staphylococcus aureus
cgtattctcacctcgcattcaactatacaactcctagtaacatatgtaaacagtaatgtttacgactcaaaattagacaaaataaagagatatgcccccttcaagttttatttatcgcatttcttgaagagagcattatcatt

SEQ ID NO: 6288 - DNA, 143 bp, Staphylococcus aureus
aatgataatgctctcttcaagaaatgcgataaataaaacttgaagggggcatatctctttattttgtctaattttgagtcgtaaacattactgtttacatatgttactaggagttgtatagttgaatgcgaggtgagaatacg

SEQ ID NO: 6289 - DNA, 113 bp, Staphylococcus aureus
gatttggcctccttatatgttcatctttactattataaagtataaatgtgctattttaaataaaaatattaaaacctcgaaatttcaaaatttagaaatcccgagattttagt

SEQ ID NO: 6290 - DNA, 113 bp, Staphylococcus aureus
actaaaatctcgggatttctaaattttgaaatttcgaggttttaatatttttatttaaaatagcacatttatactttataatagtaaagatgaacatataaggaggccaaatc

SEQ ID NO: 6291 - DNA, 130 bp, Staphylococcus aureus
tttattctcctttatgaaaaaagaggttgaacattattcaatgtaccaacctcactcaagttaaatcttaatctaaaaataaataagcgcttattcatgtcttggtatcaatcattaaaattgatataaa

SEQ ID NO: 6292 - DNA, 130 bp, Staphylococcus aureus
tttatatcaattttaatgattgataccaagacatgaataagcgcttatttatttttagattaagatttaacttgagtgaggttggtacattgaataatgttcaacctcttttttcataaaggagaataaa

SEQ ID NO: 6293 - DNA, 223 bp, Staphylococcus aureus
gaaacggcctcccgattttaaatatgaacattcgaaatttattcaatattgctattttaaactaaattcttaattaattcatccatatttttaattttattttacaaattggaactaatcccaatatttatttttcaatagtgttgtttaaatgcggtaactatcatttacccttatacattttgacataatcattattcgtattattctttaaaatcacatg

SEQ ID NO: 6294 - DNA, 223 bp, Staphylococcus aureus
catgtgattttaaagaataatacgaataatgattatgtcaaaatgtataagggtaaatgatagttaccgcatttaaacaacactattgaaaaataaatattgggattagttccaatttgtaaaataaaattaaaaatatggatgaattaattaagaatttagtttaaaatagcaatattgaataaatttcgaatgttcatatttaaaatcgggaggccgtttc

SEQ ID NO: 6295 - DNA, 60 bp, Staphylococcus aureus
attaaatcacctattaagcattagttatactattatacctaatttttgacaaaaatgaaa

SEQ ID NO: 6296 - DNA, 60 bp, Staphylococcus aureus
tttcatttttgtcaaaaattaggtataatagtataactaatgcttaataggtgatttaat

SEQ ID NO: 6297 - DNA, 334 bp, Staphylococcus aureus
aggtcttcaccccttttttattcacttattattataccgatatttctttcatgtcacaaacacattaattttacttgcctttaaataatctatcaattagaataaacgtacagcgagttaaggatagtgtaagcttaacaataagattggcgcaacgaatcattttaaaataaaagcgagtgactacactaatttgggtggaaccgcgggttaaatacgtaacttattttgtattatatacaatttaaaatattaactcgtcccatggaagtaaagcatatttactatgctgttattttccatggggcgttttcatgtatgaggagaggtaatt

SEQ ID NO: 6298 - DNA, 334 bp, Staphylococcus aureus
aattacctctcctcatacatgaaaacgccccatggaaaataacagcatagtaaatatgctttacttccatgggacgagttaatattttaaattgtatataatacaaaataagttacgtatttaacccgcggttccacccaaattagtgtagtcactcgcttttattttaaaatgattcgttgcgccaatcttattgttaagcttacactatccttaactcgctgtacgtttattctaattgatagattatttaaaggcaagtaaaattaatgtgtttgtgacatgaaagaaatatcggtataataataagtgaataaaaaaggggtgaagacct

SEQ ID NO: 6299 - DNA, 149 bp, Staphylococcus aureus
ttaaaaagactttccaccatatgtggtggctatataatttataaaaagagatactggttagtaaaattgccagtatctcttttctattcaaaaaggtattcaaataaacacatctatgtggctacttgaataccttttattattttatg

SEQ ID NO: 6300 - DNA, 149 bp, Staphylococcus aureus
cataaaataataaaaggtattcaagtagccacatagatgtgtttatttgaatacctttttgaatagaaaagagatactggcaattttactaaccagtatctctttttataaattatatagccaccacatatggtggaaagtctttttaa

SEQ ID NO: 6301 - DNA, 181 bp, Staphylococcus aureus
acacgcgctccttttcatatatcatttatattcattctatgatgctttaatatctacttaattatatcatgcaattgattgatttaaacatctttgcattgacttactcatttttctttaatttaaaataatcatttatacttttcaccttgtcataaaagcagtttcaattttagactaa

SEQ ID NO: 6302 - DNA, 181 bp, Staphylococcus aureus
ttagtctaaaattgaaactgcttttatgacaaggtgaaaagtataaatgattattttaaattaaagaaaaatgagtaagtcaatgcaaagatgtttaaatcaatcaattgcatgatataattaagtagatattaaagcatcatagaatgaatataaatgatatatgaaaaggagcgcgtgt

SEQ ID NO: 6303 - DNA, 219 bp, Staphylococcus aureus
aatttcacctcgccctcacattaattatacatgaaattgaatatactttatagttataagaacctatagaatatcaatttgattatttataaactatataactttttttaattaaaaattgacaacaaaaaaacatcacatattagtgtcagacactaacttgtgatgtttattttatataattaatattcgtgttgagggagtcaacagaggtattaa

SEQ ID NO: 6304 - DNA, 219 bp, Staphylococcus aureus
ttaatacctctgttgactccctcaacacgaatattaattatataaaataaacatcacaagttagtgtctgacactaatatgtgatgtttttttgttgtcaatttttaattaaaaaaagttatatagtttataaataatcaaattgatattctataggttcttataactataaagtatattcaatttcatgtataattaatgtgagggcgaggtgaaatt

SEQ ID NO: 6305 - DNA, 292 bp, Staphylococcus aureus
ctgtatttccctccctccaaatatcaacggaactttatagtcaattgcacagtaaaactatgcatttataagtataatatatctgtaatttatggtcaattagtaaattgttttttatttgaaacatatttcacatcaaaatcacaaagacttttagattttgttctaaaaatctcttaataatttatttaatgagaagagttgcttatatagtaaattgtgaagccgttaaaacaacgttacaaaacctatatctttaatacggaaccttatggtatgaatcaaggaatac

SEQ ID NO: 6306 - DNA, 292 bp, Staphylococcus aureus
gtattccttgattcataccataaggttccgtattaaagatataggttttgtaacgttgttttaacggcttcacaatttactatataagcaactcttctcattaaataaattattaagagatttttagaacaaaatctaaaagtctttgtgattttgatgtgaaatatgtttcaaataaaaaacaatttactaattgaccataaattacagatatattatacttataaatgcatagttttactgtgcaattgactataaagttccgttgatatttggagggagggaaatacag

SEQ ID NO: 6307 - DNA, 135 bp, Staphylococcus aureus
agctatctctccttttcttaattaactcatatagtttaacgtaatatgtcatactatccaaataaaaagccaaagccaatgttctattgactttgacttttcagatcatgacaacattctaattgtattgtttaa

SEQ ID NO: 6308 - DNA, 135 bp, Staphylococcus aureus
ttaaacaatacaattagaatgttgtcatgatctgaaaagtcaaagtcaatagaacattggctttggctttttatttggatagtatgacatattacgttaaactatatgagttaattaagaaaaggagagatagct

SEQ ID NO: 6309 - DNA, 68 bp, Staphylococcus aureus
aataaaattcctccatttaatcattaaattaatttaattttaaacaatgtcttttcgccaaatttaag

SEQ ID NO: 6310 - DNA, 68 bp, Staphylococcus aureus
cttaaatttggcgaaaagacattgtttaaaattaaattaatttaatgattaaatggaggaattttatt

SEQ ID NO: 6311 - DNA, 100 bp, Staphylococcus aureus
gttttcacctcattagcactcacttatctcaagtgctaattataatttatcaaattggtcaaagtaagtcaatgttaaagactcgaaatttcaatttttt

SEQ ID NO: 6312 - DNA, 100 bp, Staphylococcus aureus
aaaaaattgaaatttcgagtctttaacattgacttactttgaccaatttgataaattataattagcacttgagataagtgagtgctaatgaggtgaaaac

SEQ ID NO: 6313 - DNA, 276 bp, Staphylococcus aureus
tttaatgccccgcttctcagactgtttatccaatcggctacatcctgttggactatctgctgttattcttacttttaactttaacgtttaatcaatggttgtctaatatatcgattcattttgatatttattcttgtttagagggagtgagatagaaataataaagaaccactaatgatttattatgtagtggctcttacacattagccagatgtaatatgtccttaaaaataaaattacatgagtaaaactcatgcataagggagtgggacagaa

SEQ ID NO: 6314 - DNA, 276 bp, Staphylococcus aureus
ttctgtcccactcccttatgcatgagttttactcatgtaattttatttttaaggacatattacatctggctaatgtgtaagagccactacataataaatcattagtggttctttattatttctatctcactccctctaaacaagaataaatatcaaaatgaatcgatatattagacaaccattgattaaacgttaaagttaaaagtaagaataacagcagatagtccaacaggatgtagccgattggataaacagtctgagaagcggggcattaaa

SEQ ID NO: 6315 - DNA, 130 bp, Staphylococcus aureus
gctcattttaactctgtcgatgactgccaatataacattgtaaagcccaggacgttaatttatcctaggctccctctttttagttattaaactttattcattgtaaattgttaataaattttttaaaaac

SEQ ID NO: 6316 - DNA, 130 bp, Staphylococcus aureus
gtttttaaaaaatttattaacaatttacaatgaataaagtttaataactaaaaagagggagcctaggataaattaacgtcctgggctttacaatgttatattggcagtcatcgacagagttaaaatgagc

SEQ ID NO: 6317 - DNA, 345 bp, Staphylococcus aureus
tttatccttctcactttcataaaataaacccgtattatctttcgcatctttgatataataacgtttttaataggtaaatgcaaacgccataatcttggatgaactttgaaattataacaatctttatttaaatacatacttgcgatatgttaatatgttaattacgtacttataattataaaacgtattgattgtgtttccaacacaatttattaaatctgcaaaattttaagctaaccccatcaaataaatgattgcacaacggttagacttttgttaaaatatttcttgttgtaatcaaataaaattttgataagatgaactcacttttaggaggtgacagaa

SEQ ID NO: 6318 - DNA, 345 bp, Staphylococcus aureus
ttctgtcacctcctaaaagtgagttcatcttatcaaaattttatttgattacaacaagaaatattttaacaaaagtctaaccgttgtgcaatcatttatttgatggggttagcttaaaattttgcagatttaataaattgtgttggaaacacaatcaatacgttttataattataagtacgtaattaacatattaacatatcgcaagtatgtatttaaataaagattgttataatttcaaagttcatccaagattatggcgtttgcatttacctattaaaaacgttattatatcaaagatgcgaaagataatacgggtttattttatgaaagtgagaaggataaa

SEQ ID NO: 6319 - DNA, 56 bp, Staphylococcus aureus
tcattacaccctttcattcgtttgacacatcaatagattatatcatgtttctgtat

SEQ ID NO: 6320 - DNA, 56 bp, Staphylococcus aureus
atacagaaacatgatataatctattgatgtgtcaaacgaatgaaagggtgtaatga

SEQ ID NO: 6321 - DNA, 91 bp, Staphylococcus aureus
gatgttcaccttccatacttaaaatttagtaacattttctaataatataagattaatcacaaaaaataaaatttgcaattaaaataatcca

SEQ ID NO: 6322 - DNA, 91 bp, Staphylococcus aureus
tggattattttaattgcaaattttattttttgtgattaatcttatattattagaaaatgttactaaattttaagtatggaaggtgaacatc

SEQ ID NO: 6323 - DNA, 106 bp, Staphylococcus aureus
aaactaatcatatcaattacatcaaccaatcgtgtcaagaaactttattaaataacaggaaaatgatatgtttaaaataataatgatgaaataagaggattttaca

SEQ ID NO: 6324 - DNA, 106 bp, Staphylococcus aureus
tgtaaaatcctcttatttcatcattattattttaaacatatcattttcctgttatttaataaagtttcttgacacgattggttgatgtaattgatatgattagttt

SEQ ID NO: 6325 - DNA, 201 bp, Staphylococcus aureus
tagttttattttgtaattacacagttaatcatatttgtttcgtatcgaattcctgtgtgcattaaagataattctaatagaaaatagcagtaagacttttctaagtgttagcatccttactgctgttttcatttgtaacaatataatgtcaggtactttatatttcactgtcaaagattattaatgattaacttaattaaa

SEQ ID NO: 6326 - DNA, 201 bp, Staphylococcus aureus
tttaattaagttaatcattaataatctttgacagtgaaatataaagtacctgacattatattgttacaaatgaaaacagcagtaaggatgctaacacttagaaaagtcttactgctattttctattagaattatctttaatgcacacaggaattcgatacgaaacaaatatgattaactgtgtaattacaaaataaaacta

SEQ ID NO: 6327 - DNA, 347 bp, Staphylococcus aureus
gtgggacgacgataaagaaatactttttctatagaaattagtatttcttatacatgagttttactcatgtattcctatttttaagtacacattagctgtggctaatgtgtaagaaccactacataataaatcattagtggctctttatcatttctgtcccactcccttgagcctacaattttgattatgtatcacgttcataatactttccaatttgaaataccctgttcgcaattattagttgagttatatcaaccaatacagtgtaaacataaaaattccaaaccgtttaacagtatatcagaaaaaatgataatcatttcttttatttttattaaatttcataa

SEQ ID NO: 6328 - DNA, 347 bp, Staphylococcus aureus
ttatgaaatttaataaaaataaaagaaatgattatcattttttctgatatactgttaaacggtttggaatttttatgtttacactgtattggttgatataactcaactaataattgcgaacagggtatttcaaattggaaagtattatgaacgtgatacataatcaaaattgtaggctcaagggagtgggacagaaatgataaagagccactaatgatttattatgtagtggttcttacacattagccacagctaatgtgtacttaaaaataggaatacatgagtaaaactcatgtataagaaatactaatttctatagaaaaagtatttctttatcgtcgtcccac

SEQ ID NO: 6329 - DNA, 142 bp, Staphylococcus aureus
ttgcagcctcctctactcatttaaaatgtattttttgtccaataaatccattttcattagattagctaaatattatcactttttttctttaaaaactatataaataactattttctcaatcaatagaaaaagatttttcatc

SEQ ID NO: 6330 - DNA, 142 bp, Staphylococcus aureus
gatgaaaaatctttttctattgattgagaaaatagttatttatatagtttttaaagaaaaaaagtgataatatttagctaatctaatgaaaatggatttattggacaaaaaatacattttaaatgagtagaggaggctgcaa

SEQ ID NO: 6331 - DNA, 107 bp, Staphylococcus aureus
ccttaaaatatatctaattatgctttataaatgaatcaccggaaatcaaaatatatcttgcctaatactaacaacatttacagtgatgctattagtcgaaatgtctt

SEQ ID NO: 6332 - DNA, 107 bp, Staphylococcus aureus
aagacatttcgactaatagcatcactgtaaatgttgttagtattaggcaagatatattttgatttccggtgattcatttataaagcataattagatatattttaagg

SEQ ID NO: 6333 - DNA, 325 bp, Staphylococcus aureus
tttaaatccccctttgtattgcaataaaccagtattgaataccttttcattgtatcattgagaagcacaagttgtttaataagtaattcaaatcgcatacaataacaaatgataatcaatttgttttctcggaaatattttgcttttttaaaatggagtagttaatattgtaactcttacactaatttaggttctgctatcattcggtctgatggaaaatttttacttttcatctgtccgattttttgattttgaatataaaaaagcacgaccgaagtatcattaacacacttcaatcgcgcaattaaacaatctatttgatcat

SEQ ID NO: 6334 - DNA, 325 bp, Staphylococcus aureus
atgatcaaatagattgtttaattgcgcgattgaagtgtgttaatgatacttcggtcgtgcttttttatattcaaaatcaaaaaatcggacagatgaaaagtaaaaattttccatcagaccgaatgatagcagaacctaaattagtgtaagagttacaatattaactactccattttaaaaaagcaaaatatttccgagaaaacaaattgattatcatttgttattgtatgcgatttgaattacttattaaacaacttgtgcttctcaatgatacaatgaaaaggtattcaatactggtttattgcaatacaaagggggatttaaa

SEQ ID NO: 6335 - DNA, 284 bp, Staphylococcus aureus
gttttaaacttcctttatgtaaaataagtcaatatgattatgacaataaaataaatcagccttcacaattgattataattttgccaaccaattaaatgactgatttcttgttagacgcaaagctattttatttatagaagcgaatcattcatataaaatttaactttagatattttaccatattttcaataaaattataagcgttaattatttatacattgcttgacttaaaaaaatactcttgcctacccatcttaaggttagcaagagtaaaatctttttaa

SEQ ID NO: 6336 - DNA, 284 bp, Staphylococcus aureus
ttaaaaagattttactcttgctaaccttaagatgggtaggcaagagtatttttttaagtcaagcaatgtataaataattaacgcttataattttattgaaaatatggtaaaatatctaaagttaaattttatatgaatgattcgcttctataaataaaatagctttgcgtctaacaagaaatcagtcatttaattggttggcaaaattataatcaattgtgaaggctgatttattttattgtcataatcatattgacttattttacataaaggaagtttaaaac

SEQ ID NO: 6337 - DNA, 62 bp, Staphylococcus aureus
ttgcgacactcctttaattacaaatataactcactatcatcatacaatattatggctttaaa

SEQ ID NO: 6338 - DNA, 62 bp, Staphylococcus aureus
tttaaagccataatattgtatgatgatagtgagttatatttgtaattaaaggagtgtcgcaa

SEQ ID NO: 6339 - DNA, 342 bp, Staphylococcus aureus
cttttacacatcctatttactgtttttaaattaccattccataaaaattgatgacacagatagtcgatttgaaaaactagtataaatcaatatcattttttattattaaaaaataaaaaacgcccatcctcaaaagggacgaacgttatcgcggtaccaccctagttataaatgcaattcaacacatttatcactttaaatcgactatacagttgtgcataaagtagcgttcactaatgtttgttgtacttttcaccaaccagtacatctctgataaacaaatcattaactactcatctttatacgaatttaattctattttagttacatttacgcttgttg

SEQ ID NO: 6340 - DNA, 342 bp, Staphylococcus aureus
caacaagcgtaaatgtaactaaaatagaattaaattcgtataaagatgagtagttaatgatttgtttatcagagatgtactggttggtgaaaagtacaacaaacattagtgaacgctactttatgcacaactgtatagtcgatttaaagtgataaatgtgttgaattgcatttataactagggtggtaccgcgataacgttcgtcccttttgaggatgggcgttttttattttttaataataaaaaatgatattgatttatactagtttttcaaatcgactatctgtgtcatcaatttttatggaatggtaatttaaaaacagtaaataggatgtgtaaaag

SEQ ID NO: 6341 - DNA, 124 bp, Staphylococcus aureus
ttacgaacctcatttctcatcaattataacatcttgataaattgtatgtctcgaatcacttaacaacgaataaaatataatctaatatcattttcattcatgaaaaagcgggaatggaatagaa

SEQ ID NO: 6342 - DNA, 124 bp, Staphylococcus aureus
ttctattccattcccgctttttcatgaatgaaaatgatattagattatattttattcgttgttaagtgattcgagacatacaatttatcaagatgttataattgatgagaaatgaggttcgtaa

SEQ ID NO: 6343 - DNA, 61 bp, Staphylococcus aureus
ccacattagccaccactattatgtacttaaaaataggaatacataattagattcatgcata

SEQ ID NO: 6344 - DNA, 61 bp, Staphylococcus aureus
tatgcatgaatctaattatgtattcctatttttaagtacataatagtggtggctaatgtgg

SEQ ID NO: 6345 - DNA, 134 bp, Staphylococcus aureus
gccaatataacattgtagagcctaggacattgtgatgtcccagactctatcatcatgaattattctcatcaaaaactgtctttcgtcattttcgacgttgaaacttcaaataagtaatttattgttgccattgt

SEQ ID NO: 6346 - DNA, 134 bp, Staphylococcus aureus
acaatggcaacaataaattacttatttgaagtttcaacgtcgaaaatgacgaaagacagtttttgatgagaataattcatgatgatagagtctgggacatcacaatgtcctaggctctacaatgttatattggc

SEQ ID NO: 6347 - DNA, 230 bp, Staphylococcus aureus
gtttggacactcctcacaattttatcaatgttccaataatagcaccttacatactatttttctacttttctgtttaactttatttataatgtttttaattatattttaccattttctacacatgcttttcgataggcttttttaagtttatcgctttattcttgtcttttttataaattttagtatttgcagatattttttcatttgtaaaatgtaacgtactattattt

SEQ ID NO: 6348 - DNA, 230 bp, Staphylococcus aureus
aaataatagtacgttacattttacaaatgaaaaaatatctgcaaatactaaaatttataaaaaagacaagaataaagcgataaacttaaaaaagcctatcgaaaagcatgtgtagaaaatggtaaaatataattaaaaacattataaataaagttaaacagaaaagtagaaaaatagtatgtaaggtgctattattggaacattgataaaattgtgaggagtgtccaaac

SEQ ID NO: 6349 - DNA, 236 bp, Staphylococcus aureus
tgtgataaataaactaagtgaaagtatgtatccataatattaataaaaataaacagtaacagcattttgaataaaagatgtctttattgttcaatcatttgttttagtaatgattcaaattcacttaaaattctaaagcaaatatgaaagcgccccttcaactttacactgtgttagtgtttatttgatggggcgctttcaaaatattgaaaagcatatccaaaatttaaagaaat

SEQ ID NO: 6350 - DNA, 236 bp, Staphylococcus aureus
atttctttaaattttggatatgcttttcaatattttgaaagcgccccatcaaataaacactaacacagtgtaaagttgaaggggcgctttcatatttgctttagaattttaagtgaatttgaatcattactaaaacaaatgattgaacaataaagacatcttttattcaaaatgctgttactgtttatttttattaatattatggatacatactttcacttagtttatttatcaca

SEQ ID NO: 6351 - DNA, 99 bp, Staphylococcus aureus
agtgaaacctccttggatgtatatatttatataccactaaggaggttcgctaaacattataatatgaagtttttatgttatagtatagtatttatacga

SEQ ID NO: 6352 - DNA, 99 bp, Staphylococcus aureus
tcgtataaatactatactataacataaaaacttcatattataatgtttagcgaacctccttagtggtatataaatatatacatccaaggaggtttcact

SEQ ID NO: 6353 - DNA, 84 bp, Staphylococcus aureus
tgtataacctcacttaattcgaatattgatattcccattttagcattttttgagttaagatagtataagaaaggtgtgacaaat

SEQ ID NO: 6354 - DNA, 84 bp, Staphylococcus aureus
atttgtcacacctttcttatactatcttaactcaaaaaatgctaaaatgggaatatcaatattcgaattaagtgaggttataca

SEQ ID NO: 6355 - DNA, 160 bp, Staphylococcus aureus
aaataagattaaatcgattacctttgatattttagctataatcaaatcaaaactgactagtacacgaggcatattctactatgcttgcgaactagtcagttttagttttatggtgtggttacacttgccttacgttgaaaattatgactttcaaaatgaa

SEQ ID NO: 6356 - DNA, 160 bp, Staphylococcus aureus
ttcattttgaaagtcataattttcaacgtaaggcaagtgtaaccacaccataaaactaaaactgactagttcgcaagcatagtagaatatgcctcgtgtactagtcagttttgatttgattatagctaaaatatcaaaggtaatcgatttaatcttattt

SEQ ID NO: 6357 - DNA, 85 bp, Staphylococcus aureus
ctaattctttattaaaaacttaaagaaacgcataaaaatacgcaagacaaagtcttgcgtatcgatagagtccgtattgccgtag

SEQ ID NO: 6358 - DNA, 85 bp, Staphylococcus aureus
ctacggcaatacggactctatcgatacgcaagactttgtcttgcgtatttttatgcgtttctttaagtttttaataaagaattag

SEQ ID NO: 6359 - DNA, 145 bp, Staphylococcus aureus
tgggctcccttgatcaaagagtgttaggcccaaattaaaaagcaaacttacgaacaactcagatgactatcttatgatgttatattaccacataattaaaattaatgaaattataacaaaccaaagtttattgattttttaaaat

SEQ ID NO: 6360 - DNA, 145 bp, Staphylococcus aureus
attttaaaaaatcaataaactttggtttgttataatttcattaattttaattatgtggtaatataacatcataagatagtcatctgagttgttcgtaagtttgctttttaatttgggcctaacactctttgatcaagggagccca

SEQ ID NO: 6361 - DNA, 460 bp, Staphylococcus aureus
tttgacatctccctcggcaaactattttatttaattacctttttaaaactaaaactatatacgatcacttaactttgcatgataaatcataattttaaaagcaaaagaaaaagcccttgcacagcctgaaactgcacaagggacgaatatccgtgttgccaccctcattggtttaaaaaacatgcctaattgtaatcatcattactttttataagcgtgcattaaataaacccactcaaaacgtttaacgtacgtttaacggctttacttttcataaagcacctcttcttgtgttcaatgtatataaactactcagcataatctttcagtctatggattatattcctacacaatcttagttagattgctacctatttcatttaccatttcaagaatactaacggttttagttataaaattcaatatcaatgataactactttcacatatttttgcaagcc

SEQ ID NO: 6362 - DNA, 460 bp, Staphylococcus aureus
ggcttgcaaaaatatgtgaaagtagttatcattgatattgaattttataactaaaaccgttagtattcttgaaatggtaaatgaaataggtagcaatctaactaagattgtgtaggaatataatccatagactgaaagattatgctgagtagtttatatacattgaacacaagaagaggtgctttatgaaaagtaaagccgttaaacgtacgttaaacgttttgagtgggtttatttaatgcacgcttataaaaagtaatgatgattacaattaggcatgttttttaaaccaatgagggtggcaacacggatattcgtcccttgtgcagtttcaggctgtgcaagggctttttcttttgcttttaaaattatgatttatcatgcaaagttaagtgatcgtatatagttttagttttaaaaaggtaattaaataaaatagtttgccgagggagatgtcaaa

SEQ ID NO: 6363 - DNA, 427 bp, Staphylococcus aureus
tatatgatacaccccattcatatttattacttcgccttaaacaatgatttaggtactcttgttgaatagtatttgtcccacaccaatcatacgtccgtcgacgataaatatttatcctgtcgtcattaatcgtaatattaattttacttgagcgagtttaatttgtatactattcctacttttaaaacttttacaaaaattcgacctaaatctactgtttcattttttaaatattagttctatgatactacaatttatgaaataaataaacgatgttattaaggtataatgctcaatcatctaacattttcagtaaataaaaaatcctaacatctcatgttaagaaaacttaaacaacttttttaattaagtcattggttcttatacatttgatgaaggatttcatttgataaaattatattattta

SEQ ID NO: 6364 - DNA, 427 bp, Staphylococcus aureus
taaataatataattttatcaaatgaaatccttcatcaaatgtataagaaccaatgacttaattaaaaaagttgtttaagttttcttaacatgagatgttaggattttttatttactgaaaatgttagatgattgagcattataccttaataacatcgtttatttatttcataaattgtagtatcatagaactaatatttaaaaaatgaaacagtagatttaggtcgaatttttgtaaaagttttaaaagtaggaatagtatacaaattaaactcgctcaagtaaaattaatattacgattaatgacgacaggataaatatttatcgtcgacggacgtatgattggtgtgggacaaatactattcaacaagagtacctaaatcattgtttaaggcgaagtaataaatatgaatggggtgtatcatata

SEQ ID NO: 6365 - DNA, 132 bp, Staphylococcus aureus
taatcaagactttaattataccattttttaaaaatgaatgcgggaacttatttatatatattttgttaaatttaaataaagtaaaaagcggtatgtgaactctttattgtttcacataccgcttaattcatt

SEQ ID NO: 6366 - DNA, 132 bp, Staphylococcus aureus
aatgaattaagcggtatgtgaaacaataaagagttcacataccgctttttactttatttaaatttaacaaaatatatataaataagttcccgcattcatttttaaaaaatggtataattaaagtcttgatta

SEQ ID NO: 6367 - DNA, 274 bp, Staphylococcus aureus
atgaacacctcattatttacgtatgtatttagaatacttgaatactattttataacgcaagttaaatctttcttacaaaatttattagccttatacatattaacatactagagcagggagtaaaaatagtcatagatatatttaatttaaatttaacaattattatgtatcacaatttctttttttggaataaaaataagctattctacatactacttataacttaaaaaggatgaaacgctattcgtttcatcctttttaataccacttctcg

SEQ ID NO: 6368 - DNA, 274 bp, Staphylococcus aureus
cgagaagtggtattaaaaaggatgaaacgaatagcgtttcatcctttttaagttataagtagtatgtagaatagcttatttttattccaaaaaaagaaattgtgatacataataattgttaaatttaaattaaatatatctatgactatttttactccctgctctagtatgttaatatgtataaggctaataaattttgtaagaaagatttaacttgcgttataaaatagtattcaagtattctaaatacatacgtaaataatgaggtgttcat

SEQ ID NO: 6369 - DNA, 176 bp, Staphylococcus aureus
atatctcacctcttttacatataattttcattttcccaataattatagcatattagagccccttatatattgtaaataattaggggctcttatgcagttgcttttaaatttactttactcaaattgctgatatttccgaataccaaatatgatactttttttgctttttatactgc

SEQ ID NO: 6370 - DNA, 176 bp, Staphylococcus aureus
gcagtataaaaagcaaaaaaagtatcatatttggtattcggaaatatcagcaatttgagtaaagtaaatttaaaagcaactgcataagagcccctaattatttacaatatataaggggctctaatatgctataattattgggaaaatgaaaattatatgtaaaagaggtgagatat

SEQ ID NO: 6371 - DNA, 122 bp, Staphylococcus aureus
tacatttagtataacgtctaaaattcccattttttaataacataattaaaataataatgaaaaaccttttataaaaagtaaaaaacaccagaagattcacttctggtgttaactagacaaaa

SEQ ID NO: 6372 - DNA, 122 bp, Staphylococcus aureus
ttttgtctagttaacaccagaagtgaatcttctggtgttttttactttttataaaaggtttttcattattattttaattatgttattaaaaaatgggaattttagacgttatactaaatgta

SEQ ID NO: 6373 - DNA, 103 bp, Staphylococcus aureus
actttgcacctcctgtataataagtcacgccatacataggtgacatttcgttattgagtcaagcgtttgcactctacgttgtttcggtcgcaactcgagtcat

SEQ ID NO: 6374 - DNA, 103 bp, Staphylococcus aureus
atgactcgagttgcgaccgaaacaacgtagagtgcaaacgcttgactcaataacgaaatgtcacctatgtatggcgtgacttattatacaggaggtgcaaagt

SEQ ID NO: 6375 - DNA, 72 bp, Staphylococcus aureus
cattaaaaatgttcttgaacctatatttgagcggttgtatgtagctacttataactactcaactattgcatc

SEQ ID NO: 6376 - DNA, 72 bp, Staphylococcus aureus
gatgcaatagttgagtagttataagtagctacatacaaccgctcaaatataggttcaagaacatttttaatg

SEQ ID NO: 6377 - DNA, 202 bp, Staphylococcus aureus
ccagaacacctctattatgtcaaaatattgtatatccttttctattttatattactcccattatgaaataaagcactaactacgaattactttgaaaatgaacaactccgtaaaaaatttgtggcattttaaaaacaaaaaactactagcaaacattccagtcactagtagtttaaataatcgatttaaattttaaaattat

SEQ ID NO: 6378 - DNA, 202 bp, Staphylococcus aureus
ataattttaaaatttaaatcgattatttaaactactagtgactggaatgtttgctagtagttttttgtttttaaaatgccacaaattttttacggagttgttcattttcaaagtaattcgtagttagtgctttatttcataatgggagtaatataaaatagaaaaggatatacaatattttgacataatagaggtgttctgg

SEQ ID NO: 6379 - DNA, 73 bp, Staphylococcus aureus
ttgaactacaccaaccttttaaatttattctagtgacaggataactaaaatatatttcttatgcaataatttc

SEQ ID NO: 6380 - DNA, 73 bp, Staphylococcus aureus
gaaattattgcataagaaatatattttagttatcctgtcactagaataaatttaaaaggttggtgtagttcaa

SEQ ID NO: 6381 - DNA, 159 bp, Staphylococcus aureus
agttcgcctccaatgtcttcatctaattatatattttattatgtatattttcctcagtcttcagccttaatcatgatatatcttaggactgatgcacgttcatttaaaatagcttataattttgttatgatttaaaagcgtatgaggaggtttgtagca

SEQ ID NO: 6382 - DNA, 159 bp, Staphylococcus aureus
tgctacaaacctcctcatacgcttttaaatcataacaaaattataagctattttaaatgaacgtgcatcagtcctaagatatatcatgattaaggctgaagactgaggaaaatatacataataaaatatataattagatgaagacattggaggcgaact

SEQ ID NO: 6383 - DNA, 116 bp, Staphylococcus aureus
atttattctgcataacaaaactcctaatgtactagtttagaattttttaactagttccacattaggagttttaatttggtttcaagcacggatactacttgatgaacagattacta

SEQ ID NO: 6384 - DNA, 116 bp, Staphylococcus aureus
tagtaatctgttcatcaagtagtatccgtgcttgaaaccaaattaaaactcctaatgtggaactagttaaaaaattctaaactagtacattaggagttttgttatgcagaataaat

SEQ ID NO: 6385 - DNA, 228 bp, Staphylococcus aureus
ttatcaagagtaaattacaaaagaatcatttaaatcaatactttcactttgaatacatgtatttgaagtggaaggtacttatttcaaaaatagtaaaacctgtatcttaaattacttaatagtaacataagatacaggctgattttttattcattgttatttatactaaagcacccgatagctctgaaaacaatcacaaattcaacttttcaaagccacagctttaag

SEQ ID NO: 6386 - DNA, 228 bp, Staphylococcus aureus
cttaaagctgtggctttgaaaagttgaatttgtgattgttttcagagctatcgggtgctttagtataaataacaatgaataaaaaatcagcctgtatcttatgttactattaagtaatttaagatacaggttttactatttttgaaataagtaccttccacttcaaatacatgtattcaaagtgaaagtattgatttaaatgattcttttgtaatttactcttgataa

SEQ ID NO: 6387 - DNA, 269 bp, Staphylococcus aureus
atgacaacctccttatgtaaattatagttagttattaccaaaatgtaaatatacactatttttcaagaattgaaccgctttttcatttaaatttttcaatattgctaagcataattgatggatactttaacaacccattactgctcggcaaaattaataatggcaagaaattgaaccttataaacacatacgatttagagcataaaaaataaccatgaagctctacctattgattaaatagattcttcatggctattttagttttagtt

SEQ ID NO: 6388 - DNA, 269 bp, Staphylococcus aureus
aactaaaactaaaatagccatgaagaatctatttaatcaataggtagagcttcatggttattttttatgctctaaatcgtatgtgtttataaggttcaatttcttgccattattaattttgccgagcagtaatgggttgttaaagtatccatcaattatgcttagcaatattgaaaaatttaaatgaaaaagcggttcaattcttgaaaaatagtgtatatttacattttggtaataactaactataatttacataaggaggttgtcat

SEQ ID NO: 6389 - DNA, 402 bp, Staphylococcus aureus
ttgctatacctcctaaaaaaataaaaatatccatcctatatacaaataggacggatattccgtggtaccacctatattcaagaaggatgtttaatatcaaattcactcttttaacataattggaataatcataccaatactatcatcgtgaaatttgaaatgcttcatctcttcaagcactctagattatgattaacgctcaaacacgtcttagcctactattaatcacgttcagctaagatactctgtgggctaccttcagtaaaaatcatttacatactcacaccaaatcatatgctctctttaaaataatttgaacttactcttcccaaatcctatattaaactcttaacttatagtataatgattgacaaaataagtcaatgtataggtgggaataaa

SEQ ID NO: 6390 - DNA, 402 bp, Staphylococcus aureus
tttattcccacctatacattgacttattttgtcaatcattatactataagttaagagtttaatataggatttgggaagagtaagttcaaattattttaaagagagcatatgatttggtgtgagtatgtaaatgatttttactgaaggtagcccacagagtatcttagctgaacgtgattaatagtaggctaagacgtgtttgagcgttaatcataatctagagtgcttgaagagatgaagcatttcaaatttcacgatgatagtattggtatgattattccaattatgttaaaagagtgaatttgatattaaacatccttcttgaatataggtggtaccacggaatatccgtcctatttgtatataggatggatatttttatttttttaggaggtatagcaa

SEQ ID NO: 6391 - DNA, 222 bp, Staphylococcus aureus
tttgctatagcatcataaagtaaacgagacatcatctatttttaactaatagactgtctcgttttttgatgtgaaaatttattcaaatcataagttaaagttccaagttaatgcactgctaatattagatatcttaatctaaaaatagatgtacaacctttgcttaaaccttaataatgaattctatcctaagcataattcaacttaaatggatgatagttt

SEQ ID NO: 6392 - DNA, 222 bp, Staphylococcus aureus
aaactatcatccatttaagttgaattatgcttaggatagaattcattattaaggtttaagcaaaggttgtacatctatttttagattaagatatctaatattagcagtgcattaacttggaactttaacttatgatttgaataaattttcacatcaaaaaacgagacagtctattagttaaaaatagatgatgtctcgtttactttatgatgctatagcaaa

SEQ ID NO: 6393 - DNA, 72 bp, Staphylococcus aureus
gtcgccgcccatgcctgatatacatttaaaaagagcctgaacaaagttcaggctctcaatttgtccgtatat

SEQ ID NO: 6394 - DNA, 72 bp, Staphylococcus aureus
atatacggacaaattgagagcctgaactttgttcaggctctttttaaatgtatatcaggcatgggcggcgac

SEQ ID NO: 6395 - DNA, 216 bp, Staphylococcus aureus
ttgaaacgcccccatatatactaacaatacaaatattataacataatttaaaatccaattaagtacgatgcttaaataaattataatctttctaatttacttttgagtttttgacaaaatgatgaacgttgaaaaatgttatcaattgtgtactaattaaaagtttcgtgcttacattatttttaaaatttttgtataagttttgtcgtacaaaaa

SEQ ID NO: 6396 - DNA, 216 bp, Staphylococcus aureus
tttttgtacgacaaaacttatacaaaaattttaaaaataatgtaagcacgaaacttttaattagtacacaattgataacatttttcaacgttcatcattttgtcaaaaactcaaaagtaaattagaaagattataatttatttaagcatcgtacttaattggattttaaattatgttataatatttgtattgttagtatatatgggggcgtttcaa

SEQ ID NO: 6397 - DNA, 153 bp, Staphylococcus aureus
tttatatcctcacttttttatattctctttcaactctaccattatataatatttgaacctttcggtatacattataaaaaagctccgatcaaagttaaactatttgagcgtcaactttgattggagcttttcacttttataacacatcaatga

SEQ ID NO: 6398 - DNA, 153 bp, Staphylococcus aureus
tcattgatgtgttataaaagtgaaaagctccaatcaaagttgacgctcaaatagtttaactttgatcggagcttttttataatgtataccgaaaggttcaaatattatataatggtagagttgaaagagaatataaaaaagtgaggatataaa

SEQ ID NO: 6399 - DNA, 150 bp, Staphylococcus aureus
tctttttacacccctattcgttaaagactatactagattggatattacaatgcaacatattaacatacaaactttttgcttaaagaatagtagcagatacataagctatgcatctgctactcatttttgtaatttaatatttaatgaaga

SEQ ID NO: 6400 - DNA, 150 bp, Staphylococcus aureus
tcttcattaaatattaaattacaaaaatgagtagcagatgcatagcttatgtatctgctactattctttaagcaaaaagtttgtatgttaatatgttgcattgtaatatccaatctagtatagtctttaacgaataggggtgtaaaaaga

SEQ ID NO: 6401 - DNA, 162 bp, Staphylococcus aureus
gtatatatacctccatgattaactaatttattttttcaacttccctattatatcataggtctattccctatacaaacattgaaatcacaacgtttatatatttgtaaatcaacttttttcgtcaaaactatattaaaatgctgagtattattttgcaacaat

SEQ ID NO: 6402 - DNA, 162 bp, Staphylococcus aureus
attgttgcaaaataatactcagcattttaatatagttttgacgaaaaaagttgatttacaaatatataaacgttgtgatttcaatgtttgtatagggaatagacctatgatataatagggaagttgaaaaaataaattagttaatcatggaggtatatatac

SEQ ID NO: 6403 - DNA, 141 bp, Staphylococcus aureus
cgtataaaactcctcactttaatgtttgttctcttaaatgcattttagcaaatatgtcatattttagcgattaaatgtggcattttgcttttaaaaaaataaaaaagagatgacaatgccatctcttttttataagtgtta

SEQ ID NO: 6404 - DNA, 141 bp, Staphylococcus aureus
taacacttataaaaaagagatggcattgtcatctcttttttatttttttaaaagcaaaatgccacatttaatcgctaaaatatgacatatttgctaaaatgcatttaagagaacaaacattaaagtgaggagttttatacg

SEQ ID NO: 6405 - DNA, 153 bp, Staphylococcus aureus
agttatgtgtaatgtgattaacctgccaactgctttatgcgtcgctacaggtgagaagcgggtgcttctacttggttcgtttcgtattcaacgttgttaatcatatcaacaattcacatttaagtcaacactataactgtaattatttttatt

SEQ ID NO: 6406 - DNA, 153 bp, Staphylococcus aureus
aataaaaataattacagttatagtgttgacttaaatgtgaattgttgatatgattaacaacgttgaatacgaaacgaaccaagtagaagcacccgcttctcacctgtagcgacgcataaagcagttggcaggttaatcacattacacataact

SEQ ID NO: 6407 - DNA, 425 bp, Staphylococcus aureus
ataagctccctttccatgttttagaggccaagaaataaataacctttattcactttcatacccttttttacagaacatagtgatattaaaagtaaaaaagtggctacatacctttaagatatgcaaccactttggcaattatctatataaggtagcacatcacattctgtgacagtacagttcctattcgaaaactgtcccaatagatataatttatggtttatatctatttcggcatctttacctttcacttgttcaacttatgtaccataaatacttctgacaagttactaattaaacatgcaacctctaactcaatttaatattttaactaacttgtaatatacaggattcatcacgcataatcaaccctgtaaaacttgatacgcaataaaagttttaaagcattttattgcgacaactgt

SEQ ID NO: 6408 - DNA, 425 bp, Staphylococcus aureus
acagttgtcgcaataaaatgctttaaaacttttattgcgtatcaagttttacagggttgattatgcgtgatgaatcctgtatattacaagttagttaaaatattaaattgagttagaggttgcatgtttaattagtaacttgtcagaagtatttatggtacataagttgaacaagtgaaaggtaaagatgccgaaatagatataaaccataaattatatctattgggacagttttcgaataggaactgtactgtcacagaatgtgatgtgctaccttatatagataattgccaaagtggttgcatatcttaaaggtatgtagccacttttttacttttaatatcactatgttctgtaaaaaagggtatgaaagtgaataaaggttatttatttcttggcctctaaaacatggaaagggagcttat

SEQ ID NO: 6409 - DNA, 201 bp, Staphylococcus aureus
gttaaaccctcctatttgctttataaatacttttatctgacctcgttaaaaaattgaacaacaatcatcgttttaacattaaacctattaacaataaacagggaatatatgacaccaacaaacatttatgtctgaaaaaaacaaaaaatcccgcccctatacaagggacgagatcgtcgtggtaccaccctagttatttaa

SEQ ID NO: 6410 - DNA, 201 bp, Staphylococcus aureus
ttaaataactagggtggtaccacgacgatctcgtcccttgtataggggcgggattttttgtttttttcagacataaatgtttgttggtgtcatatattccctgtttattgttaataggtttaatgttaaaacgatgattgttgttcaattttttaacgaggtcagataaaagtatttataaagcaaataggagggtttaac

SEQ ID NO: 6411 - DNA, 92 bp, Staphylococcus aureus
tggctttctgtgtaatattgattagatcatcttgtcttcaatcatttaaacgatttagatttgtattcattatacaccaatcattttaaaat

SEQ ID NO: 6412 - DNA, 92 bp, Staphylococcus aureus
attttaaaatgattggtgtataatgaatacaaatctaaatcgtttaaatgattgaagacaagatgatctaatcaatattacacagaaagcca

SEQ ID NO: 6413 - DNA, 210 bp, Staphylococcus aureus
tacatcaccctctttattttgattatgcctaattatactataaatctagagatgaaaaaagaatccctcaatttaattcatttaaccaaataatgaaacaataaaaaacattatatcgttacttattaagtaatttgcatgacaatattattgtattaaaaaataaaaaacctaactccgaagtcagagttaggctataaattaattgta

SEQ ID NO: 6414 - DNA, 210 bp, Staphylococcus aureus
tacaattaatttatagcctaactctgacttcggagttaggttttttattttttaatacaataatattgtcatgcaaattacttaataagtaacgatataatgttttttattgtttcattatttggttaaatgaattaaattgagggattcttttttcatctctagatttatagtataattaggcataatcaaaataaagagggtgatgta

SEQ ID NO: 6415 - DNA, 169 bp, Staphylococcus aureus
taaaagcaccccttgatttttatatgttatactttatggaattagtatagcatattatatgaattttgaaagcgttttccgttgatatatttatcttttttataaaaaatagtcattacttacatacatcaacgcgtacgtaaagtaatgacttatttatagtgtaata

SEQ ID NO: 6416 - DNA, 169 bp, Staphylococcus aureus
tattacactataaataagtcattactttacgtacgcgttgatgtatgtaagtaatgactattttttataaaaaagataaatatatcaacggaaaacgctttcaaaattcatataatatgctatactaattccataaagtataacatataaaaatcaaggggtgctttta

SEQ ID NO: 6417 - DNA, 293 bp, Staphylococcus aureus
aattttaacctccagaactaatttatatatattttagcatattcgactgtgatgtcgtaattaaagaaactatctcatagagtatttatacacgacctaatttcaaataaaacaagtgcctatatagacttagctaaaaaataaaaaagacataatcatgattgttcttgatgagcactccataaagtcaggttaaaagtccaacttttgagatgcacattatcatttcatgattatgtctactttttaatatttttatgctgctattttaaatttttataggtaagaataag

SEQ ID NO: 6418 - DNA, 293 bp, Staphylococcus aureus
cttattcttacctataaaaatttaaaatagcagcataaaaatattaaaaagtagacataatcatgaaatgataatgtgcatctcaaaagttggacttttaacctgactttatggagtgctcatcaagaacaatcatgattatgtcttttttattttttagctaagtctatataggcacttgttttatttgaaattaggtcgtgtataaatactctatgagatagtttctttaattacgacatcacagtcgaatatgctaaaatatatataaattagttctggaggttaaaatt

SEQ ID NO: 6419 - DNA, 498 bp, Staphylococcus aureus
tttgctaatcctcaaatctagttaaattttcctcaacttgtaggtcgaaaaattaattcaatatttttaatgtatttctaattttcacctatgcatgtttcctcaatcaaattagataaacaaggtatttaatattactttcaacaatttatctaaatcgcccctcgtctttttctatgacgaatgattacacttgtgtattcaagtgttcaaattaagatttatttccgttcaaataaaacttattactttttaattaagcatctattttaagcgcattactaaaatttctttattataataaatatattataaaattgcttgattcacaacaatctattacttataacttacaaaacgatatatgctaatgacaaaattgacaaccgaatttattccaattcattaactctaatttaataccaatagagatttgaacgaaataaaaaagcagcaacaacttcgtgaaaaatacacgcgctgttaccactttaattt

SEQ ID NO: 6420 - DNA, 498 bp, Staphylococcus aureus
aaattaaagtggtaacagcgcgtgtatttttcacgaagttgttgctgcttttttatttcgttcaaatctctattggtattaaattagagttaatgaattggaataaattcggttgtcaattttgtcattagcatatatcgttttgtaagttataagtaatagattgttgtgaatcaagcaattttataatatatttattataataaagaaattttagtaatgcgcttaaaatagatgcttaattaaaaagtaataagttttatttgaacggaaataaatcttaatttgaacacttgaatacacaagtgtaatcattcgtcatagaaaaagacgaggggcgatttagataaattgttgaaagtaatattaaataccttgtttatctaatttgattgaggaaacatgcataggtgaaaattagaaatacattaaaaatattgaattaatttttcgacctacaagttgaggaaaatttaactagatttgaggattagcaaa

SEQ ID NO: 6421 - DNA, 155 bp, Staphylococcus aureus
ggtatgcctccctaacttataattatatttacattataaccgaactatttataaaaataacatcctacacattatctttacacattttttacattactttacatataaataaaatacttcttatatttccttctatcatttgcatgacttactct

SEQ ID NO: 6422 - DNA, 155 bp, Staphylococcus aureus
agagtaagtcatgcaaatgatagaaggaaatataagaagtattttatttatatgtaaagtaatgtaaaaaatgtgtaaagataatgtgtaggatgttatttttataaatagttcggttataatgtaaatataattataagttagggaggcatacc

SEQ ID NO: 6423 - DNA, 189 bp, Staphylococcus aureus
acctatgcatgagttttactcatttattcctaagcttatgtacaaattcgctttgtctaatgtgtaataaacactacataatcaatcattggtgactctttattatttctatcctgttgccaacttcaattcatttaaaaaggcgaacctagcaattaaagttgctagactcacctaattttattttgc

SEQ ID NO: 6424 - DNA, 189 bp, Staphylococcus aureus
gcaaaataaaattaggtgagtctagcaactttaattgctaggttcgcctttttaaatgaattgaagttggcaacaggatagaaataataaagagtcaccaatgattgattatgtagtgtttattacacattagacaaagcgaatttgtacataagcttaggaataaatgagtaaaactcatgcataggt

SEQ ID NO: 6425 - DNA, 347 bp, Staphylococcus aureus
gataaatttcccctttactgtttctttatgaaatggctttcaactaatattatagctaaacgcatttcgtttgtgaaatataaaaactggcattatatgtgcaacaatttttttgtaaatctatgtaaatgtcacagaatagccacaaatagcaccattaaagctttttcaagatgtgaataatccatgaattttacaatagaattaaattttcaattggttattatatatgattataaaaaccaaagtatattaacatggaattttacacatttttaccgaaaataattgtatatatctcaatataagtgcataataaacatatctatatttaagggagatgtatt

SEQ ID NO: 6426 - DNA, 347 bp, Staphylococcus aureus
aatacatctcccttaaatatagatatgtttattatgcacttatattgagatatatacaattattttcggtaaaaatgtgtaaaattccatgttaatatactttggtttttataatcatatataataaccaattgaaaatttaattctattgtaaaattcatggattattcacatcttgaaaaagctttaatggtgctatttgtggctattctgtgacatttacatagatttacaaaaaaattgttgcacatataatgccagtttttatatttcacaaacgaaatgcgtttagctataatattagttgaaagccatttcataaagaaacagtaaaggggaaatttatc

SEQ ID NO: 6427 - DNA, 347 bp, Staphylococcus aureus
caacaagttttacccctgttgaatatactaaagttcaacaggggtttttatatgcaacttataatattaaattgcgtacttggctcaaaacttttactttctcatctatttaataatgtatcatttcagaaatacatccatacttctattttataataaatttccaaagtaatatgagtgaaagtttgaaggtgataatgtacatgtataaaagatataaacatttatatagattgccattcatacactatcattatcaaataacctattaattacgtcataaaataccagatgaaccaaaaaacgcctttccattgttgataaatggaaagacgtttttttataaa

SEQ ID NO: 6428 - DNA, 347 bp, Staphylococcus aureus
tttataaaaaaacgtctttccatttatcaacaatggaaaggcgttttttggttcatctggtattttatgacgtaattaataggttatttgataatgatagtgtatgaatggcaatctatataaatgtttatatcttttatacatgtacattatcaccttcaaactttcactcatattactttggaaatttattataaaatagaagtatggatgtatttctgaaatgatacattattaaatagatgagaaagtaaaagttttgagccaagtacgcaatttaatattataagttgcatataaaaacccctgttgaactttagtatattcaacaggggtaaaacttgttg

SEQ ID NO: 6429 - DNA, 268 bp, Staphylococcus aureus
gacgacatacctttctataactgatttatctttaactctaaattaccacaaattgatatgtcattccatcaaaactaatgtattgaattgatgtaaacgttttaaatattgaattttattttaacttaattaaaaaaagattagtagccacaattttgactactaatcttagttaaaattcagtatctaaatattaaattattgttttaatgtacttcaatttatggtaaaacccagtatcgatttaacataaaaatgctcaagttga

SEQ ID NO: 6430 - DNA, 268 bp, Staphylococcus aureus
tcaacttgagcatttttatgttaaatcgatactgggttttaccataaattgaagtacattaaaacaataatttaatatttagatactgaattttaactaagattagtagtcaaaattgtggctactaatctttttttaattaagttaaaataaaattcaatatttaaaacgtttacatcaattcaatacattagttttgatggaatgacatatcaatttgtggtaatttagagttaaagataaatcagttatagaaaggtatgtcgtc

SEQ ID NO: 6431 - DNA, 194 bp, Staphylococcus aureus
aggaaaacctccaaataacctctgttctaaccatttagagccttaaactgaacttgaccagttaaaaacgggtttaaatttatttgatttatattcgtttgactgttgaatgtttatcataaactttcattttcatcattttaatgactctttattgctaacttttaagcaatttaattaaacgttaattattt

SEQ ID NO: 6432 - DNA, 194 bp, Staphylococcus aureus
aaataattaacgtttaattaaattgcttaaaagttagcaataaagagtcattaaaatgatgaaaatgaaagtttatgataaacattcaacagtcaaacgaatataaatcaaataaatttaaacccgtttttaactggtcaagttcagtttaaggctctaaatggttagaacagaggttatttggaggttttcct

SEQ ID NO: 6433 - DNA, 449 bp, Staphylococcus aureus
gaaatcagcccctaattcaatatttatttttaaaaaataacttggataaaacgcattacattataaaagtaaaaatattgggtaaatctgaatgagtaagaatttatggttttgattatgtaacacaaatagcgataaacgataataaaataatatttataaagatacattaaaccatactatctaaagatatacctttaattattataatggatagcaaaaaccaatatatcaaaaagttattatttttccgcacgatatatcgacaaaattctttactcaatttatgtatactgctttttgtgctaattattcttatggattaatcaataatgtaaagtgaaactcataaaaataataagcataaaaaactaatataaacgcaaactgatggttaaaaaatatctaaccatcagtttactatatcataatttattagttgataaaag

SEQ ID NO: 6434 - DNA, 449 bp, Staphylococcus aureus
cttttatcaactaataaattatgatatagtaaactgatggttagatattttttaaccatcagtttgcgtttatattagttttttatgcttattatttttatgagtttcactttacattattgattaatccataagaataattagcacaaaaagcagtatacataaattgagtaaagaattttgtcgatatatcgtgcggaaaaataataactttttgatatattggtttttgctatccattataataattaaaggtatatctttagatagtatggtttaatgtatctttataaatattattttattatcgtttatcgctatttgtgttacataatcaaaaccataaattcttactcattcagatttacccaatatttttacttttataatgtaatgcgttttatccaagttattttttaaaaataaatattgaattaggggctgatttc

SEQ ID NO: 6435 - DNA, 103 bp, Staphylococcus aureus
tagtctatatcaaaatatctaaattataaaaattgttactgccatattaaactatttgcccgttttaattatttagatatatatatttccatactatttagtt

SEQ ID NO: 6436 - DNA, 103 bp, Staphylococcus aureus
aactaaatagtatggaaatatatatatctaaataattaaaacgggcaaatagtttaatatggcagtaacaatttttataatttagatattttgatatagacta

SEQ ID NO: 6437 - DNA, 67 bp, Staphylococcus aureus
aacaatgtaagttgggctccaacgtttgtgcgaaatctatcttatgcctattttctctgctaagttc

SEQ ID NO: 6438 - DNA, 67 bp, Staphylococcus aureus
gaacttagcagagaaaataggcataagatagatttcgcacaaacgttggagcccaacttacattgtt

SEQ ID NO: 6439 - DNA, 204 bp, Staphylococcus aureus
tctttacctcttcttttcgaacagtattaactacattataactttattttggataaaaagcattgaagtgaaatgaaataatgatcgtttcacctattttattttttgaaaatatacaacaaacacaaagatcacaaaatctttaattttaaatggaaaaatccattattatttattagaatgtaagtgaggagggatgtacta

SEQ ID NO: 6440 - DNA, 204 bp, Staphylococcus aureus
tagtacatccctcctcacttacattctaataaataataatggatttttccatttaaaattaaagattttgtgatctttgtgtttgttgtatattttcaaaaaataaaataggtgaaacgatcattatttcatttcacttcaatgctttttatccaaaataaagttataatgtagttaatactgttcgaaaagaagaggtaaaga

SEQ ID NO: 6441 - DNA, 304 bp, Staphylococcus aureus
aatttttatccagaatcacaaataatctttcaatcatgatgcagtctcaaacgactgagtaaacacaagaaatgattatgactgtggttctggattttttatatcgtagtaaatttataatcaatgtctaattgtataaaactaaaattacgagagtaggtcagaaatgataaagaaccactgatgtcccccgtccacgtcgtaactgaatcagtagaatataaaaacacccactaaaaatatgcagacgataacttccacatagattagcgaggtgttttttagtgtaaaatctatattctat

SEQ ID NO: 6442 - DNA, 304 bp, Staphylococcus aureus
atagaatatagattttacactaaaaaacacctcgctaatctatgtggaagttatcgtctgcatatttttagtgggtgtttttatattctactgattcagttacgacgtggacgggggacatcagtggttctttatcatttctgacctactctcgtaattttagttttatacaattagacattgattataaatttactacgatataaaaaatccagaaccacagtcataatcatttcttgtgtttactcagtcgtttgagactgcatcatgattgaaagattatttgtgattctggataaaaatt

SEQ ID NO: 6443 - DNA, 123 bp, Staphylococcus aureus
gttcgatgatttcttcgcattgtttctagctttaatttatcattatttaattttaataaccaaggagatgataacgtcattctttagtacgctgtaatccattcccttttcatcaaattcaaa

SEQ ID NO: 6444 - DNA, 123 bp, Staphylococcus aureus
tttgaatttgatgaaaagggaatggattacagcgtactaaagaatgacgttatcatctccttggttattaaaattaaataatgataaattaaagctagaaacaatgcgaagaaatcatcgaac

SEQ ID NO: 6445 - DNA, 92 bp, Staphylococcus aureus
tcaaaaatccacaaaattgtaaaggttattacactgacttttccgaaaattgtggtaaaatataattaagaaagaacaaggaggcacttact

SEQ ID NO: 6446 - DNA, 92 bp, Staphylococcus aureus
agtaagtgcctccttgttctttcttaattatattttaccacaattttcggaaaagtcagtgtaataacctttacaattttgtggatttttga

SEQ ID NO: 6447 - DNA, 245 bp, Staphylococcus aureus
atatagatgatcattagataactacttgatcattatgaaccaagtgcaactttctgcacttggttttttattgtttataaataaaactcacttaataatgttttcataatcttcttcgactacttaattctttaagatattcgtgaaaagagacattacactagttaattttcaaacaatacaaaaagcgtctacctcctacatataattgtagcggagatagacgcttaatatttatttaaaaa

SEQ ID NO: 6448 - DNA, 245 bp, Staphylococcus aureus
tttttaaataaatattaagcgtctatctccgctacaattatatgtaggaggtagacgctttttgtattgtttgaaaattaactagtgtaatgtctcttttcacgaatatcttaaagaattaagtagtcgaagaagattatgaaaacattattaagtgagttttatttataaacaataaaaaaccaagtgcagaaagttgcacttggttcataatgatcaagtagttatctaatgatcatctatat

SEQ ID NO: 6449 - DNA, 87 bp, Staphylococcus aureus
aagtaatgatcctccatcgtttgctttttatactatttcatttctcattttatcattcatacagttttatgactatactattacaga

SEQ ID NO: 6450 - DNA, 87 bp, Staphylococcus aureus
tctgtaatagtatagtcataaaactgtatgaatgataaaatgagaaatgaaatagtataaaaagcaaacgatggaggatcattactt

SEQ ID NO: 6451 - DNA, 80 bp, Staphylococcus aureus
tcatagaaaacaattctattttaatgctgttgacaacgatggacacgatgtatacattttaagatttatctctttaatga

SEQ ID NO: 6452 - DNA, 80 bp, Staphylococcus aureus
tcattaaagagataaatcttaaaatgtatacatcgtgtccatcgttgtcaacagcattaaaatagaattgttttctatga

SEQ ID NO: 6453 - DNA, 97 bp, Staphylococcus aureus
atacttgacctcctgcattttaaaattctaactacatcatacgacaatttatggtttgattacaattttcatgctttaatcaaaagcaaatttaatt

SEQ ID NO: 6454 - DNA, 97 bp, Staphylococcus aureus
aattaaatttgcttttgattaaagcatgaaaattgtaatcaaaccataaattgtcgtatgatgtagttagaattttaaaatgcaggaggtcaagtat

SEQ ID NO: 6455 - DNA, 112 bp, Staphylococcus aureus
actcaagcattatactattatccgacaaaaaataaaggttatagcgcaaaataatcttatttctacttattaaataagaattagactatttcactctatttaaacagctgtg

SEQ ID NO: 6456 - DNA, 112 bp, Staphylococcus aureus
cacagctgtttaaatagagtgaaatagtctaattcttatttaataagtagaaataagattattttgcgctataacctttattttttgtcggataatagtataatgcttgagt

SEQ ID NO: 6457 - DNA, 76 bp, Staphylococcus aureus
taacttcaattattaaactcatcagtccaatttgacagagtgctcatattatttaagtataactacatactagttt

SEQ ID NO: 6458 - DNA, 76 bp, Staphylococcus aureus
aaactagtatgtagttatacttaaataatatgagcactctgtcaaattggactgatgagtttaataattgaagtta

SEQ ID NO: 6459 - DNA, 136 bp, Staphylococcus aureus
atgcttctcctcctaatttatcattactattataacgtaattttgcttaaggataaattataaaatgaatttattgccataatattttcgaaattctatactattataaaatctatgaaaataagaggttttaaat

SEQ ID NO: 6460 - DNA, 136 bp, Staphylococcus aureus
atttaaaacctcttattttcatagattttataatagtatagaatttcgaaaatattatggcaataaattcattttataatttatccttaagcaaaattacgttataatagtaatgataaattaggaggagaagcat

SEQ ID NO: 6461 - DNA, 243 bp, Staphylococcus aureus
aaggacatcagcattttcaataaagtgttgacagttagcaggaaaatgttacaataatctttgtgtgaattaacgaaagtagcagttgtatattattgagcgctatgttgttcccaatgcggacgtgtcacgtaactgtcgctataaggtgaagacacataaaacaatatatcttagtaagcatgcaacactcttttttgtttattcataacaacaaaaaagaattaaaggaggagtcttatt

SEQ ID NO: 6462 - DNA, 243 bp, Staphylococcus aureus
aataagactcctcctttaattcttttttgttgttatgaataaacaaaaaagagtgttgcatgcttactaagatatattgttttatgtgtcttcaccttatagcgacagttacgtgacacgtccgcattgggaacaacatagcgctcaataatatacaactgctactttcgttaattcacacaaagattattgtaacattttcctgctaactgtcaacactttattgaaaatgctgatgtcctt

SEQ ID NO: 6463 - DNA, 86 bp, Staphylococcus aureus
tacgttcaatacaaacacccacaattgtgggtgttttttttattaatttaaaaatgatagattcaaaattatggttcttcatcttt

SEQ ID NO: 6464 - DNA, 86 bp, Staphylococcus aureus
aaagatgaagaaccataattttgaatctatcatttttaaattaataaaaaaaacacccacaattgtgggtgtttgtattgaacgta

SEQ ID NO: 6465 - DNA, 151 bp, Staphylococcus aureus
aaaattatatggagctaccctattttacaatcaacttagaatttacaagtcttatttgtttaattatctttagtatttcatcattagtttttaaaattatcaattgcgatatacgaatcctcatccctctatcaaattaccattcatcgtc

SEQ ID NO: 6466 - DNA, 151 bp, Staphylococcus aureus
gacgatgaatggtaatttgatagagggatgaggattcgtatatcgcaattgataattttaaaaactaatgatgaaatactaaagataattaaacaaataagacttgtaaattctaagttgattgtaaaatagggtagctccatataatttt

SEQ ID NO: 6467 - DNA, 114 bp, Staphylococcus aureus
aatcgttacgtgataacgtttattcgacaatatagcgttatcactttttttaggcttttaaattttcagaaaatttgctaaaatagtgaaatcttatttataggaggcatataa

SEQ ID NO: 6468 - DNA, 114 bp, Staphylococcus aureus
ttatatgcctcctataaataagatttcactattttagcaaattttctgaaaatttaaaagcctaaaaaaagtgataacgctatattgtcgaataaacgttatcacgtaacgatt

SEQ ID NO: 6469 - DNA, 67 bp, Staphylococcus aureus
tgtaactcaatatgaaacctttggttcaatcattcacttcaagttatgctgtcaaacaacaatcaaa

SEQ ID NO: 6470 - DNA, 67 bp, Staphylococcus aureus
tttgattgttgtttgacagcataacttgaagtgaatgattgaaccaaaggtttcatattgagttaca

SEQ ID NO: 6471 - DNA, 106 bp, Staphylococcus aureus
aatccccactccatttctgaaaattcagatataaatcattctactatttgactaaaaaaagcgcaaaccctattgaagttagatttgcgctttagctgtttaaatt

SEQ ID NO: 6472 - DNA, 106 bp, Staphylococcus aureus
aatttaaacagctaaagcgcaaatctaacttcaatagggtttgcgctttttttagtcaaatagtagaatgatttatatctgaattttcagaaatggagtggggatt

SEQ ID NO: 6473 - DNA, 127 bp, Staphylococcus aureus
tgaatgtcatccttcttaaaataaggtagaaatataaagattactaatgtaactagaataactacttcgatactccgttatagtcacctaggcatactaaccagctatatttctacctcaagttatt

SEQ ID NO: 6474 - DNA, 127 bp, Staphylococcus aureus
aataacttgaggtagaaatatagctggttagtatgcctaggtgactataacggagtatcgaagtagttattctagttacattagtaatctttatatttctaccttattttaagaaggatgacattca

SEQ ID NO: 6475 - DNA, 171 bp, Staphylococcus aureus
tgtgccacctacttaacttatttgtttataacaactagattttatcactatatttttactagaacaagatagtctgaaaatacatctaaagttgtatagtgtattactagcaataattataaaaaaaagacataattaaagcatatataaatcatataatggaggttaagt

SEQ ID NO: 6476 - DNA, 171 bp, Staphylococcus aureus
acttaacctccattatatgatttatatatgctttaattatgtcttttttttataattattgctagtaatacactatacaactttagatgtattttcagactatcttgttctagtaaaaatatagtgataaaatctagttgttataaacaaataagttaagtaggtggcaca

SEQ ID NO: 6477 - DNA, 93 bp, Staphylococcus aureus
tttacagacagaaaagtacattaagagcctactcattacattcttaggaatgaatatgagtaggctctaatttatttagctatgcaattatat

SEQ ID NO: 6478 - DNA, 93 bp, Staphylococcus aureus
atataattgcatagctaaataaattagagcctactcatattcattcctaagaatgtaatgagtaggctcttaatgtacttttctgtctgtaaa

SEQ ID NO: 6479 - DNA, 381 bp, Staphylococcus aureus
tattatttcctcctatttataattatttattgaatacttgttaaaatactttaaagttttttgaacgtaaaaaaaacccttacaacaaatatgtaagggcgcgattgcacgttaccaccaaacttaaacataatcataagataatgttcactctattaatgatacgttcattaataaacgtaggacatgttagttataaaggtgtattcatattattaaaaacactagttcacagcgaccactagctctctgatgatttcaaataatattacttgtccttttatcctattctttatgcattttccctaattataattaacgttaaaataaaagtcaaattgcttaaatatggtatactatacgtaatttaggaggttaaag

SEQ ID NO: 6480 - DNA, 381 bp, Staphylococcus aureus
ctttaacctcctaaattacgtatagtataccatatttaagcaatttgacttttattttaacgttaattataattagggaaaatgcataaagaataggataaaaggacaagtaatattatttgaaatcatcagagagctagtggtcgctgtgaactagtgtttttaataatatgaatacacctttataactaacatgtcctacgtttattaatgaacgtatcattaatagagtgaacattatcttatgattatgtttaagtttggtggtaacgtgcaatcgcgcccttacatatttgttgtaagggttttttttacgttcaaaaaactttaaagtattttaacaagtattcaataaataattataaataggaggaaataata

SEQ ID NO: 6481 - DNA, 130 bp, Staphylococcus aureus
ttagaaaatttctcactgctgttctttttatttactctaaaggaaagccattaaaccaatcaatagtttataaattaattgctttcacattgtttacaaagttaaccatacatatgctatatttagttaa

SEQ ID NO: 6482 - DNA, 130 bp, Staphylococcus aureus
ttaactaaatatagcatatgtatggttaactttgtaaacaatgtgaaagcaattaatttataaactattgattggtttaatggctttcctttagagtaaataaaaagaacagcagtgagaaattttctaa

SEQ ID NO: 6483 - DNA, 110 bp, Staphylococcus aureus
ggaatctatttttagcacagcaaaaaaccgaactgctgaaataatgcatctccaacagtccggtctattaaactatttacttatctttattaaacaattgacatgattta

SEQ ID NO: 6484 - DNA, 110 bp, Staphylococcus aureus
taaatcatgtcaattgtttaataaagataagtaaatagtttaatagaccggactgttggagatgcattatttcagcagttcggttttttgctgtgctaaaaatagattcc

SEQ ID NO: 6485 - DNA, 439 bp, Staphylococcus aureus
cttttttcgcccctttttgtttaatttatgcatttataatatgtaagttgtagctaagaaatttttacttacattcatataataacgaactgttaaaaacttgtcgactaaatcgggttagcgctttcatttttgcaataaattcacttattaaagttttgtattataaaacttttagcgcttgatactattgataactatatttttctattatttaaaataatcatcttccaaagatcatattaaaaataaaaagcaatataaagatatgccataattgttatgtcatcattttcaaatgctttctacgaaatgatatgacacaagttaacagctctttatattgcttatcgtaaagtaaacgattatttaaacattgacatgaaatatgttgtcaccctttattcttcgaaaaaaatcttcaataacattcatgtca

SEQ ID NO: 6486 - DNA, 439 bp, Staphylococcus aureus
tgacatgaatgttattgaagatttttttcgaagaataaagggtgacaacatatttcatgtcaatgtttaaataatcgtttactttacgataagcaatataaagagctgttaacttgtgtcatatcatttcgtagaaagcatttgaaaatgatgacataacaattatggcatatctttatattgctttttatttttaatatgatctttggaagatgattattttaaataatagaaaaatatagttatcaatagtatcaagcgctaaaagttttataatacaaaactttaataagtgaatttattgcaaaaatgaaagcgctaacccgatttagtcgacaagtttttaacagttcgttattatatgaatgtaagtaaaaatttcttagctacaacttacatattataaatgcataaattaaacaaaaaggggcgaaaaaag

SEQ ID NO: 6487 - DNA, 168 bp, Staphylococcus aureus
ttgaaactccccctttgttatgtgaaaacgctttctttctcaatattatacataacatttctaattattcaaaatttttacttttatcctttttctagtattaattattgtaaattttctatataatgaatttaatacaatcacgacgtcgattgaggagttgaaaat

SEQ ID NO: 6488 - DNA, 168 bp, Staphylococcus aureus
attttcaactcctcaatcgacgtcgtgattgtattaaattcattatatagaaaatttacaataattaatactagaaaaaggataaaagtaaaaattttgaataattagaaatgttatgtataatattgagaaagaaagcgttttcacataacaaagggggagtttcaa

SEQ ID NO: 6489 - DNA, 97 bp, Staphylococcus aureus
gtaacctaatctgcaacgattttaaaagataaataaaaggcattcttccaacacccatataatttgggtcgttagatgaatgcctaattttgtgaat

SEQ ID NO: 6490 - DNA, 97 bp, Staphylococcus aureus
attcacaaaattaggcattcatctaacgacccaaattatatgggtgttggaagaatgccttttatttatcttttaaaatcgttgcagattaggttac

SEQ ID NO: 6491 - DNA, 76 bp, Staphylococcus aureus
aatttcctccttgtaaacgttttattcattataataacatgttttcatttcattttcatagtttaccatattttaa

SEQ ID NO: 6492 - DNA, 76 bp, Staphylococcus aureus
ttaaaatatggtaaactatgaaaatgaaatgaaaacatgttattataatgaataaaacgtttacaaggaggaaatt

SEQ ID NO: 6493 - DNA, 241 bp, Staphylococcus aureus
tagttataattttaattactgctatcagtcataatctttaataattgtgaaattgaacaagtgtcgaagtattataacaatcgttaagtgcagtatacctttatttctatacaaaaaataatagccactctaaaagtaatatactcttagaatggctgtaagtttaaaattgtcgattcaaagataatattctacttcaacatgacatattagttaagtagtctatagtttccttggaata

SEQ ID NO: 6494 - DNA, 241 bp, Staphylococcus aureus
tattccaaggaaactatagactacttaactaatatgtcatgttgaagtagaatattatctttgaatcgacaattttaaacttacagccattctaagagtatattacttttagagtggctattattttttgtatagaaataaaggtatactgcacttaacgattgttataatacttcgacacttgttcaatttcacaattattaaagattatgactgatagcagtaattaaaattataacta

SEQ ID NO: 6495 - DNA, 693 bp, Staphylococcus aureus
ccttactcacctctacgaattatttcaagtatattccactttaaagcaataaaatataatgttaaaaaatattctaacaatatcatatgtatagttcaaccctaaattgacagaaaataatcaattttctaattatatgattcgagactgacatttcgattttctcagtcattattggaaagttatattctatattgatatttattagcaaatgttaatcaattaaataagtgtcattattatagcttattttgagtcaacattactgcttttaagaaaaattttcgtttctatcttctattataaatctaaaattctcatacattcaacctaacgcttaataaaaattaacaacctttgtatattaatataaatctatagtgaacatcactcaccaacatgagcggctatatttgaattagtgaacgtcattgtaccttctaagattcattgtttatttgattatcgaatatttttccatcttcagcttaaaatgtgcaatataactattgttatctaacgatgtttcaaacagcataaatacatgaaatgatcgcgttgcctttcaaaataaactgatgatatcaaaaaaggtaagcacctgaatgcctaccttttattttgaaattcaatttttaaaaatataatacatagcttactgctatgattgattattcaacgattttagtaatc

SEQ ID NO: 6496 - DNA, 693 bp, Staphylococcus aureus
gattactaaaatcgttgaataatcaatcatagcagtaagctatgtattatatttttaaaaattgaatttcaaaataaaaggtaggcattcaggtgcttaccttttttgatatcatcagtttattttgaaaggcaacgcgatcatttcatgtatttatgctgtttgaaacatcgttagataacaatagttatattgcacattttaagctgaagatggaaaaatattcgataatcaaataaacaatgaatcttagaaggtacaatgacgttcactaattcaaatatagccgctcatgttggtgagtgatgttcactatagatttatattaatatacaaaggttgttaatttttattaagcgttaggttgaatgtatgagaattttagatttataatagaagatagaaacgaaaatttttcttaaaagcagtaatgttgactcaaaataagctataataatgacacttatttaattgattaacatttgctaataaatatcaatatagaatataactttccaataatgactgagaaaatcgaaatgtcagtctcgaatcatataattagaaaattgattattttctgtcaatttagggttgaactatacatatgatattgttagaatattttttaacattatattttattgctttaaagtggaatatacttgaaataattcgtagaggtgagtaagg

SEQ ID NO: 6497 - DNA, 73 bp, Staphylococcus aureus
ttgtatatcctcctataacaaatgcacttaaataagtaacaacctcatttaagtgcatttgtttaattattaa

SEQ ID NO: 6498 - DNA, 73 bp, Staphylococcus aureus
ttaataattaaacaaatgcacttaaatgaggttgttacttatttaagtgcatttgttataggaggatatacaa

SEQ ID NO: 6499 - DNA, 73 bp, Staphylococcus aureus
taaaaacgcctcctaattaacatgtaataatgtcattaataataaatacccatactactctattataaacata

SEQ ID NO: 6500 - DNA, 73 bp, Staphylococcus aureus
tatgtttataatagagtagtatgggtatttattattaatgacattattacatgttaattaggaggcgttttta

SEQ ID NO: 6501 - DNA, 99 bp, Staphylococcus aureus
atgtaacactcctaatttcgcaccttataatagtttacaataaatcaacacatagtaacagagaaaaacgagtattaccccgtttttctctagtctaaa

SEQ ID NO: 6502 - DNA, 99 bp, Staphylococcus aureus
tttagactagagaaaaacggggtaatactcgtttttctctgttactatgtgttgatttattgtaaactattataaggtgcgaaattaggagtgttacat

SEQ ID NO: 6503 - DNA, 64 bp, Staphylococcus aureus
ttttatgtctccttaattaatgattatatataactatttagagataatagttgttattacccga

SEQ ID NO: 6504 - DNA, 64 bp, Staphylococcus aureus
tcgggtaataacaactattatctctaaatagttatatataatcattaattaaggagacataaaa

SEQ ID NO: 6505 - DNA, 86 bp, Staphylococcus aureus
aaaagttctcactccttataagttattatatcatcttcaatatggtaaactaatgatatgaatttgaaatcaagggagcataaatg

SEQ ID NO: 6506 - DNA, 86 bp, Staphylococcus aureus
catttatgctcccttgatttcaaattcatatcattagtttaccatattgaagatgatataataacttataaggagtgagaactttt

SEQ ID NO: 6507 - DNA, 124 bp, Staphylococcus aureus
tacgaattttatccatatttgatttggatcgtaaaacttaaaaatgagccacaccctaattagtaagattggatgtggctcatttttttatttttgaaaatttgtttagtaatacatctttatt

SEQ ID NO: 6508 - DNA, 124 bp, Staphylococcus aureus
aataaagatgtattactaaacaaattttcaaaaataaaaaaatgagccacatccaatcttactaattagggtgtggctcatttttaagttttacgatccaaatcaaatatggataaaattcgta

SEQ ID NO: 6509 - DNA, 59 bp, Staphylococcus aureus
acaagtaaaatgcaagctttattcttttaaatcaaaggtatttagtataacattgttta

SEQ ID NO: 6510 - DNA, 59 bp, Staphylococcus aureus
taaacaatgttatactaaatacctttgatttaaaagaataaagcttgcattttacttgt

SEQ ID NO: 6511 - DNA, 151 bp, Staphylococcus aureus
tttttttatattcaaaatcaaaaaatcggacagatgaaaagtaaaatacttttttccatcagtccgatttattatagaacctttatctatagaaccattatagtacgaaaaaacacttatgattgtatgtgtacataccctcataagtgtt

SEQ ID NO: 6512 - DNA, 151 bp, Staphylococcus aureus
aacacttatgagggtatgtacacatacaatcataagtgttttttcgtactataatggttctatagataaaggttctataataaatcggactgatggaaaaaagtattttacttttcatctgtccgattttttgattttgaatataaaaaaa

SEQ ID NO: 6513 - DNA, 344 bp, Staphylococcus aureus
ctcgtccacctcactttcaattagaaaatggctctagaaataggtttttcaagagccatatattctaatttataacaccatactggtacaaatattatgtccagataattattgtaaatcctcaaccaatgcctacattacacgactaattttaaatcgtaatgtctgtcattgacaccatacattctatagtcacttacttgacatataatgttaccgtgtctaaaactacatgtttttgaatctctgtaggcgataaactctagttttcaaaataattgctatcccattttcatggttagcataaatttatgaactgtaacatttacgtacttagtaaaata

SEQ ID NO: 6514 - DNA, 344 bp, Staphylococcus aureus
tattttactaagtacgtaaatgttacagttcataaatttatgctaaccatgaaaatgggatagcaattattttgaaaactagagtttatcgcctacagagattcaaaaacatgtagttttagacacggtaacattatatgtcaagtaagtgactatagaatgtatggtgtcaatgacagacattacgatttaaaattagtcgtgtaatgtaggcattggttgaggatttacaataattatctggacataatatttgtaccagtatggtgttataaattagaatatatggctcttgaaaaacctatttctagagccattttctaattgaaagtgaggtggacgag

SEQ ID NO: 6515 - DNA, 113 bp, Staphylococcus aureus
taatatgtgttttctaaacaacacttttaagcttcgttttaaattataacataattcacttacgaaagttgataaatttaagtaatttaatctaaaaatatgatgaaagaatt

SEQ ID NO: 6516 - DNA, 113 bp, Staphylococcus aureus
aattctttcatcatatttttagattaaattacttaaatttatcaactttcgtaagtgaattatgttataatttaaaacgaagcttaaaagtgttgtttagaaaacacatatta

SEQ ID NO: 6517 - DNA, 257 bp, Staphylococcus aureus
tcgaaatcgacttccttttttctataagttaaattctattttacatgaaaagatataaaaactacaataagatgtcagaaaataataaaaaggaacaaaacgatgctattgatatgacacaaatcataaatagctgctttgttccttttttaatttatatatttaaaatacacatattcaagagctcgagatataagtcaatgtactaggcacacaatttaatattgacagtaattaaccgaacgaaaatgcgcccc

SEQ ID NO: 6518 - DNA, 257 bp, Staphylococcus aureus
ggggcgcattttcgttcggttaattactgtcaatattaaattgtgtgcctagtacattgacttatatctcgagctcttgaatatgtgtattttaaatatataaattaaaaaaggaacaaagcagctatttatgatttgtgtcatatcaatagcatcgttttgttcctttttattattttctgacatcttattgtagtttttatatcttttcatgtaaaatagaatttaacttatagaaaaaaggaagtcgatttcga

SEQ ID NO: 6519 - DNA, 190 bp, Staphylococcus aureus
ggtaagggccccaacacagagaatttcgaaaagataaagaaatacgttttctttagatattagtatttcttatgaatgagtttcacgcatgtattcttctttctatatgcatattagctatgactaacgataaagaaccactatataataaatcatagtggttctttatcatttctgtcctactcacatc

SEQ ID NO: 6520 - DNA, 190 bp, Staphylococcus aureus
gatgtgagtaggacagaaatgataaagaaccactatgatttattatatagtggttctttatcgttagtcatagctaatatgcatatagaaagaagaatacatgcgtgaaactcattcataagaaatactaatatctaaagaaaacgtatttctttatcttttcgaaattctctgtgttggggcccttacc

SEQ ID NO: 6521 - DNA, 365 bp, Staphylococcus aureus
tacgaatctccctatctcatgtttattaaagttttgtaaactaaaagctatttctctgtaaaatcatttttcattattatgaatatatcacaaaactttatttcattgtcgtatattcaatgaattatcataacaaaattatcaacgcattgtcattgaatactcgattttgattagaatattacgaaatttcatataaacattatactactatttgagatgaacatcgcataacagtagaaaaatcattcttatcatacacatacatcttcattttttatgaagttcacattataaatatattcaacataattgtcatctcataacacaagagatatagcaaagtttaaaaaagtactataaaa

SEQ ID NO: 6522 - DNA, 365 bp, Staphylococcus aureus
ttttatagtacttttttaaactttgctatatctcttgtgttatgagatgacaattatgttgaatatatttataatgtgaacttcataaaaaatgaagatgtatgtgtatgataagaatgatttttctactgttatgcgatgttcatctcaaatagtagtataatgtttatatgaaatttcgtaatattctaatcaaaatcgagtattcaatgacaatgcgttgataattttgttatgataattcattgaatatacgacaatgaaataaagttttgtgatatattcataataatgaaaaatgattttacagagaaatagcttttagtttacaaaactttaataaacatgagatagggagattcgta

SEQ ID NO: 6523 - DNA, 116 bp, Staphylococcus aureus
tagtataaaatttggttcgattctctttagtagatcaactttttcattcaattaaaaatgaccttaatataactgagtcactaaaaagtgtcgttatattaaggtcatttcgttaa

SEQ ID NO: 6524 - DNA, 116 bp, Staphylococcus aureus
ttaacgaaatgaccttaatataacgacactttttagtgactcagttatattaaggtcatttttaattgaatgaaaaagttgatctactaaagagaatcgaaccaaattttatacta

SEQ ID NO: 6525 - DNA, 325 bp, Staphylococcus aureus
ttcattttcctcctggttgtctgttctctgctgtgttgtttagaattatgctaaaaatatacgctctctcatattatgtttatagctatattattttgtacaatattttaagttcactcaattttatcatcatcattttataaaataaagttttattttattacaatttagtttccgttttgtaattaaaatcttaataaaacataacaagaacgctttagattgttttgtaacagaaagtaattcataccaaaaaacaccaagcaaccgaaacgttacttggtgtcattacaaatgtaatattattttaaattatgtcactact

SEQ ID NO: 6526 - DNA, 325 bp, Staphylococcus aureus
agtagtgacataatttaaaataatattacatttgtaatgacaccaagtaacgtttcggttgcttggtgttttttggtatgaattactttctgttacaaaacaatctaaagcgttcttgttatgttttattaagattttaattacaaaacggaaactaaattgtaataaaataaaactttattttataaaatgatgatgataaaattgagtgaacttaaaatattgtacaaaataatatagctataaacataatatgagagagcgtatatttttagcataattctaaacaacacagcagagaacagacaaccaggaggaaaatgaa

SEQ ID NO: 6527 - DNA, 290 bp, Staphylococcus aureus
cacatttcctcctattcaataaaaaagacacctctaactattctatttacatagggacgacatttgccgcgttaccaccctatttcacaaaaattgtgcactcattttaatagtaagagatgtcattcattcaatttaaaattaatacgatttacatttagtccttaacactagctctcagcatcactagctttctgtagaaaagctccaaacgaaattaaattatacaaattaatattatgttataacgacatttatttcaagtctataacgttaattctatttactca

SEQ ID NO: 6528 - DNA, 290 bp, Staphylococcus aureus
tgagtaaatagaattaacgttatagacttgaaataaatgtcgttataacataatattaatttgtataatttaatttcgtttggagcttttctacagaaagctagtgatgctgagagctagtgttaaggactaaatgtaaatcgtattaattttaaattgaatgaatgacatctcttactattaaaatgagtgcacaatttttgtgaaatagggtggtaacgcggcaaatgtcgtccctatgtaaatagaatagttagaggtgtcttttttattgaataggaggaaatgtg

SEQ ID NO: 6529 - DNA, 109 bp, Staphylococcus aureus
atttcatagttcctctctcttttttgtcaaactataataaacactataacattaaaatatgttaaaatctgtacttagaactctttttttatagaaaggaaaatgacat

SEQ ID NO: 6530 - DNA, 109 bp, Staphylococcus aureus
atgtcattttcctttctataaaaaaagagttctaagtacagattttaacatattttaatgttatagtgtttattatagtttgacaaaaaagagagaggaactatgaaat

SEQ ID NO: 6531 - DNA, 122 bp, Staphylococcus aureus
gcatttgctgcgctatactatttataatttaggattgagtagtcaacatttgaaaaattaataccaacaacaacaaaaagaggttttcaacttaatgaaaacctctttttatgctattaaac

SEQ ID NO: 6532 - DNA, 122 bp, Staphylococcus aureus
gtttaatagcataaaaagaggttttcattaagttgaaaacctctttttgttgttgttggtattaatttttcaaatgttgactactcaatcctaaattataaatagtatagcgcagcaaatgc

SEQ ID NO: 6533 - DNA, 510 bp, Staphylococcus aureus
cccaacaatcccaaaacttgtatgtgctaacttatgcataaaactacaagtgtaaataaacttgctttctattcaattgtcaaagttgaataaaattaaataagtataaaaaccaataatcaatagagttaatatttagaaataagataatagtacataaaacaaatcactctattacatattaattttataatttatatacaaagaaaatatatcaatattaccattaaattgcaacaattctacatatatttcttcaaaaaagatacgcattgaatttttattacatataactctcatgaaaattgattaaactaaattaattagttagccttaaatttaacaaattaaatcaaaccgaatgaggctaaattggttatttttcaagatatgatttgtataaatcaaaacatttcttacaaatcaaatgtgtataaaatgtgatatacattctcaaccttaaaaaagtaaaaaaaagatgagcatctactgtctcatctttttagaata

SEQ ID NO: 6534 - DNA, 510 bp, Staphylococcus aureus
tattctaaaaagatgagacagtagatgctcatcttttttttacttttttaaggttgagaatgtatatcacattttatacacatttgatttgtaagaaatgttttgatttatacaaatcatatcttgaaaaataaccaatttagcctcattcggtttgatttaatttgttaaatttaaggctaactaattaatttagtttaatcaattttcatgagagttatatgtaataaaaattcaatgcgtatcttttttgaagaaatatatgtagaattgttgcaatttaatggtaatattgatatattttctttgtatataaattataaaattaatatgtaatagagtgatttgttttatgtactattatcttatttctaaatattaactctattgattattggtttttatacttatttaattttattcaactttgacaattgaatagaaagcaagtttatttacacttgtagttttatgcataagttagcacatacaagttttgggattgttggg

SEQ ID NO: 6535 - DNA, 111 bp, Staphylococcus aureus
taatagtgtaattatacataattatttttgattgttttttatgaaaacgctttctcgaatatttttttcatgctaaacttattgtaaacacaagggtttggaggagtagca

SEQ ID NO: 6536 - DNA, 111 bp, Staphylococcus aureus
tgctactcctccaaacccttgtgtttacaataagtttagcatgaaaaaaatattcgagaaagcgttttcataaaaaacaatcaaaaataattatgtataattacactatta

SEQ ID NO: 6537 - DNA, 121 bp, Staphylococcus aureus
agcatggcataaacaataatttaggagtctggaacaataatcaatgttctaggctcctaaatgttatattggcagttctgaaacatttataaatctttgattatgaactcacaacagcgct

SEQ ID NO: 6538 - DNA, 121 bp, Staphylococcus aureus
agcgctgttgtgagttcataatcaaagatttataaatgtttcagaactgccaatataacatttaggagcctagaacattgattattgttccagactcctaaattattgtttatgccatgct

SEQ ID NO: 6539 - DNA, 480 bp, Staphylococcus aureus
atgatcacctctataaacaaaaatcctcacatcatgaattaagatgcaaggagaaaaatttatcgttaaataagcctatttgtacacatttttacaaatacgctacattatctttgtcgataattaacattctttctcccatccagactttaactgtcggctctagaatctcactagatcagccactaatatgaaacatattagcaggtcgcaggctttatttactgccggttgggaatttcaccctgccccgaaagaattatatatgaaattgttatagattatttgagtacgtagtatgtcaactacatttaaaatgatactatatgttttctgaaaaaacaattaatgacggttttaatttaatataatctgagtactataggcatctcattgatatgattcttactaacagacattaaaatcaaaccttcaattcgtctctatagagcgttctctttattatcttctagttacaaa

SEQ ID NO: 6540 - DNA, 480 bp, Staphylococcus aureus
tttgtaactagaagataataaagagaacgctctatagagacgaattgaaggtttgattttaatgtctgttagtaagaatcatatcaatgagatgcctatagtactcagattatattaaattaaaaccgtcattaattgttttttcagaaaacatatagtatcattttaaatgtagttgacatactacgtactcaaataatctataacaatttcatatataattctttcggggcagggtgaaattcccaaccggcagtaaataaagcctgcgacctgctaatatgtttcatattagtggctgatctagtgagattctagagccgacagttaaagtctggatgggagaaagaatgttaattatcgacaaagataatgtagcgtatttgtaaaaatgtgtacaaataggcttatttaacgataaatttttctccttgcatcttaattcatgatgtgaggatttttgtttatagaggtgatcat

SEQ ID NO: 6541 - DNA, 522 bp, Staphylococcus aureus
atatcatccatccttttgtaattcaaaatattatatttaaactattacctataattatagcaatttggtatttccaataaaatttattaaggtaagctattatttcactttcacaaccattaaaccatttaaaacttttcatttaatatcaaccttagtgtttgtgttaaaatatttttaacgaggtgaattaaattgaaatttatagcaaagatattaatctcattagtaattctatttatgatttttagtcgtaaaaacaaagcttcttaatcaatacccttgattacaaaataaattcaactaaggtgattggccatacactcaagatatggctaatcacctttttcaatgcaaaacaaagagtatattttgcaaaatcaatatctataatttatctttaatacccttttaatactaaaaccaaattcaaattacatagtcatatcgtgtaatataccaaaggaatatagacattcatctatatagatgataatctatttaacgtctaggaggtatgtt

SEQ ID NO: 6542 - DNA, 522 bp, Staphylococcus aureus
aacatacctcctagacgttaaatagattatcatctatatagatgaatgtctatattcctttggtatattacacgatatgactatgtaatttgaatttggttttagtattaaaagggtattaaagataaattatagatattgattttgcaaaatatactctttgttttgcattgaaaaaggtgattagccatatcttgagtgtatggccaatcaccttagttgaatttattttgtaatcaagggtattgattaagaagctttgtttttacgactaaaaatcataaatagaattactaatgagattaatatctttgctataaatttcaatttaattcacctcgttaaaaatattttaacacaaacactaaggttgatattaaatgaaaagttttaaatggtttaatggttgtgaaagtgaaataatagcttaccttaataaattttattggaaataccaaattgctataattataggtaatagtttaaatataatattttgaattacaaaaggatggatgatat

SEQ ID NO: 6543 - DNA, 86 bp, Staphylococcus aureus
gaaataaaaagacgctttctatttattgcgatagaaagcgtctttttatacttgagcaagttatatcataacttaactctatcaaa

SEQ ID NO: 6544 - DNA, 86 bp, Staphylococcus aureus
tttgatagagttaagttatgatataacttgctcaagtataaaaagacgctttctatcgcaataaatagaaagcgtctttttatttc

SEQ ID NO: 6545 - DNA, 275 bp, Staphylococcus aureus
atccacacctcttaggtcattgttgttatacattcagtttgactacgataataaagtttaacattattaaaaccgtttaacaattttatctatgcattgttacatattcataaataaacagtaatgtaaatgaaacgttttaaaccatttatcaacattactttacgttgatctacgaatcataaatgttttatctttttgtataacctttgaaaacctttatatcaataatcttattattcacgtattaaaaaacaaaaaattcttttgttcgt

SEQ ID NO: 6546 - DNA, 275 bp, Staphylococcus aureus
acgaacaaaagaattttttgttttttaatacgtgaataataagattattgatataaaggttttcaaaggttatacaaaaagataaaacatttatgattcgtagatcaacgtaaagtaatgttgataaatggtttaaaacgtttcatttacattactgtttatttatgaatatgtaacaatgcatagataaaattgttaaacggttttaataatgttaaactttattatcgtagtcaaactgaatgtataacaacaatgacctaagaggtgtggat

SEQ ID NO: 6547 - DNA, 121 bp, Staphylococcus aureus
tgttacctcccgattacaaattttgttctatctactatttagcaaagtaataatacatcatatcacattaaattaattacttatgtcttatatttaacacttaatttagcgattacgcaaa

SEQ ID NO: 6548 - DNA, 121 bp, Staphylococcus aureus
tttgcgtaatcgctaaattaagtgttaaatataagacataagtaattaatttaatgtgatatgatgtattattactttgctaaatagtagatagaacaaaatttgtaatcgggaggtaaca

SEQ ID NO: 6549 - DNA, 112 bp, Staphylococcus aureus
tttattgtgaaatttcggtcgatgtgttagtgatgttgaaacaccctaacatcttcatataaatttattttaaccattaaattaacaacttattatacgaggagtactatat

SEQ ID NO: 6550 - DNA, 112 bp, Staphylococcus aureus
atatagtactcctcgtataataagttgttaatttaatggttaaaataaatttatatgaagatgttagggtgtttcaacatcactaacacatcgaccgaaatttcacaataaa

SEQ ID NO: 6551 - DNA, 295 bp, Staphylococcus aureus
aattaaggatttctctcctttataatattgacgtaattttaaacattagcgtcaattgaaagtgtattttatatattttacagaaatatatgtatcaaatctacaaaaatccatattacaatttcatttatggtgatttgacgctaaaatacagtctgctaatttttcaaactaatgctttttaggtaggtacaatgataaattttaatcgtatatatgtttcatatataatgaatctagccttaaccatattgcattcaaaataattttaaaaaatgaaaagaaaggatttagc

SEQ ID NO: 6552 - DNA, 295 bp, Staphylococcus aureus
gctaaatcctttcttttcattttttaaaattattttgaatgcaatatggttaaggctagattcattatatatgaaacatatatacgattaaaatttatcattgtacctacctaaaaagcattagtttgaaaaattagcagactgtattttagcgtcaaatcaccataaatgaaattgtaatatggatttttgtagatttgatacatatatttctgtaaaatatataaaatacactttcaattgacgctaatgtttaaaattacgtcaatattataaaggagagaaatccttaatt

SEQ ID NO: 6553 - DNA, 439 bp, Staphylococcus aureus
ttttgagataacctttcatattattttcaaattatctatctgatatttattttattgaacttgagtcaccacttaaactcaaaaatacgtgtcatcaagtgcaaaataatttagaactaatacaaacataaaaacttttgctttacgcttaaaatcaaaagtcacatacctagatataagtacaacttgtatattttgtactctaataagtatgtggcttaaataatatttaattcttgagttgcatatagtaattgtttttattcattttctaaaatatgcgagactaatttccttttctactcctgttgaatcaatttagacttttttataactcgggcttttacttagctgaattttgacttcttcttcattaataactatgatggaaaaacccccataagcacaatgcctatgagggtttaaatatgtttataaa

SEQ ID NO: 6554 - DNA, 439 bp, Staphylococcus aureus
tttataaacatatttaaaccctcataggcattgtgcttatgggggtttttccatcatagttattaatgaagaagaagtcaaaattcagctaagtaaaagcccgagttataaaaaagtctaaattgattcaacaggagtagaaaaggaaattagtctcgcatattttagaaaatgaataaaaacaattactatatgcaactcaagaattaaatattatttaagccacatacttattagagtacaaaatatacaagttgtacttatatctaggtatgtgacttttgattttaagcgtaaagcaaaagtttttatgtttgtattagttctaaattattttgcacttgatgacacgtatttttgagtttaagtggtgactcaagttcaataaaataaatatcagatagataatttgaaaataatatgaaaggttatctcaaaa

SEQ ID NO: 6555 - DNA, 259 bp, Staphylococcus aureus
ataatatagcctccttgattcttattaaaattttaacaacatctgcatgtctttttcttacaaccatttgtaaaaaatgatttttatttctttgttatataaaacatttatatcacgcttttataatatatagctaattttttgcctatattttttaaaaatgactttagcaaacattgtgtctacaagttaataaaactattgttttatgattgtttatgatacgatatgtaaatgataatcatccaggaggtctagc

SEQ ID NO: 6556 - DNA, 259 bp, Staphylococcus aureus
gctagacctcctggatgattatcatttacatatcgtatcataaacaatcataaaacaatagttttattaacttgtagacacaatgtttgctaaagtcatttttaaaaaatataggcaaaaaattagctatatattataaaagcgtgatataaatgttttatataacaaagaaataaaaatcattttttacaaatggttgtaagaaaaagacatgcagatgttgttaaaattttaataagaatcaaggaggctatattat

SEQ ID NO: 6557 - DNA, 177 bp, Staphylococcus aureus
aaaagataaaatgtcaatgtagcgttaatacaaaacaatacaatgtatcatgctataatgagtaaaacaatttgatgacgttgttgcgtataaaaaatattagattttcgaaatcataactatgcatctaatcgctatagttatacaacaagatataacatataatgaggtttgata

SEQ ID NO: 6558 - DNA, 177 bp, Staphylococcus aureus
tatcaaacctcattatatgttatatcttgttgtataactatagcgattagatgcatagttatgatttcgaaaatctaatattttttatacgcaacaacgtcatcaaattgttttactcattatagcatgatacattgtattgttttgtattaacgctacattgacattttatctttt

SEQ ID NO: 6559 - DNA, 313 bp, Staphylococcus aureus
aaataaaatgcttcattcagcaaataggtaaattacgacaccttcctgaacgaagcattttttaattttcatgcaaattttttaacaccatataatgcctatcaaaataaaacaatctttgttgccgtttaaataatgtgaatgtcaataaattctccaaactagtcgaaaataaaacaggctgggacataaatccctaaaaaaacagcagtaagataattttcaattagaaaatatcttactgctgttctctatttatacaatacttcgtattgaatggcttcgctttcctagggtgccgtctcagcctcgg

SEQ ID NO: 6560 - DNA, 313 bp, Staphylococcus aureus
ccgaggctgagacggcaccctaggaaagcgaagccattcaatacgaagtattgtataaatagagaacagcagtaagatattttctaattgaaaattatcttactgctgtttttttagggatttatgtcccagcctgttttattttcgactagtttggagaatttattgacattcacattatttaaacggcaacaaagattgttttattttgataggcattatatggtgttaaaaaatttgcatgaaaattaaaaaatgcttcgttcaggaaggtgtcgtaatttacctatttgctgaatgaagcattttattt

SEQ ID NO: 6561 - DNA, 62 bp, Staphylococcus aureus
gaacttaatgtcccaagccctgacaattcatctaaccttttcatcagttgagtgattttaat

SEQ ID NO: 6562 - DNA, 62 bp, Staphylococcus aureus
attaaaatcactcaactgatgaaaaggttagatgaattgtcagggcttgggacattaagttc

SEQ ID NO: 6563 - DNA, 211 bp, Staphylococcus aureus
aaatatcgcctcacctttttgatgtattataccctgttatcataacaaatctgagttgaatacatgagaaaaaacacttagagcaatcaaccactaaaattctagtaatatctctcaaacattaatcaaattgtaaaagcaattatgtttaatttatgacaaactaaaaaagccgaagtcacaacatatagtcatcacttcagcctaacat

SEQ ID NO: 6564 - DNA, 211 bp, Staphylococcus aureus
atgttaggctgaagtgatgactatatgttgtgacttcggcttttttagtttgtcataaattaaacataattgcttttacaatttgattaatgtttgagagatattactagaattttagtggttgattgctctaagtgttttttctcatgtattcaactcagatttgttatgataacagggtataatacatcaaaaaggtgaggcgatattt

SEQ ID NO: 6565 - DNA, 118 bp, Staphylococcus aureus
aacaacgctcctttttaatatatgaataactttaattataatagaaaagctaaagattttcgatacatattatcatttatataccgaaaatcttttatttagctatattaaattcatc

SEQ ID NO: 6566 - DNA, 118 bp, Staphylococcus aureus
gatgaatttaatatagctaaataaaagattttcggtatataaatgataatatgtatcgaaaatctttagcttttctattataattaaagttattcatatattaaaaaggagcgttgtt

SEQ ID NO: 6567 - DNA, 269 bp, Staphylococcus aureus
tcgctcttatcgttcagacctatttgtctgcaaacggtttggcacctttcttttataaaaaaagaggttgctgggtttcattgggtccatgtccctccaccactcaggataagagaatccgttaaaaataatagtacctaattaatgaattaatgtcaatttttcacaaataaatttacagtaaaatattgtagattaattatgttaatgtgttatactaattaaatgtaaaggcttacatttaaattatcgctttggagggatttagg

SEQ ID NO: 6568 - DNA, 269 bp, Staphylococcus aureus
cctaaatccctccaaagcgataatttaaatgtaagcctttacatttaattagtataacacattaacataattaatctacaatattttactgtaaatttatttgtgaaaaattgacattaattcattaattaggtactattatttttaacggattctcttatcctgagtggtggagggacatggacccaatgaaacccagcaacctctttttttataaaagaaaggtgccaaaccgtttgcagacaaataggtctgaacgataagagcga

SEQ ID NO: 6569 - DNA, 123 bp, Staphylococcus aureus
atttgaatactaattaaagagccaaccgttgttatagtctaacaatggttggctcctcttattttatgtgctaaaaatttataggcaattttattacaacaatgcacatttaaggtgaccttc

SEQ ID NO: 6570 - DNA, 123 bp, Staphylococcus aureus
gaaggtcaccttaaatgtgcattgttgtaataaaattgcctataaatttttagcacataaaataagaggagccaaccattgttagactataacaacggttggctctttaattagtattcaaat

SEQ ID NO: 6571 - DNA, 77 bp, Staphylococcus aureus
aagcgcatacccctcattcaacgtatatcacacatcttcaaagcttgatagttcccatgcgcacaccacgtttcata

SEQ ID NO: 6572 - DNA, 77 bp, Staphylococcus aureus
tatgaaacgtggtgtgcgcatgggaactatcaagctttgaagatgtgtgatatacgttgaatgaggggtatgcgctt

SEQ ID NO: 6573 - DNA, 158 bp, Staphylococcus aureus
gcgttattcctccaaaatcatttacattataattataacgattttatgacattctagcagtggttatgtttaaaaatataaaaaagtagacgaattgattcattgatatgattgttataatgctcaatacatatcgttatatcattcgtctactatta

SEQ ID NO: 6574 - DNA, 158 bp, Staphylococcus aureus
taatagtagacgaatgatataacgatatgtattgagcattataacaatcatatcaatgaatcaattcgtctacttttttatatttttaaacataaccactgctagaatgtcataaaatcgttataattataatgtaaatgattttggaggaataacgc

SEQ ID NO: 6575 - DNA, 311 bp, Staphylococcus aureus
aagcaacacctctaaaaataaatacaatatattatagcaaatagaaattattattttgttaaattatgttgtcatgttcgtgtcattttgagtcgtaatacaactttacaattattaaattaacacttctacaatccaaaaatatttttaaagttttgaaaaaaattaaagtatttccactactaatttggtaaaatatgattatgtgatatagtgaaagcgttttacacttaataactccctcttaaatgcatccaggttttatgtagtaaatcatgaaaataacatataaatatagaggagatttacct

SEQ ID NO: 6576 - DNA, 311 bp, Staphylococcus aureus
aggtaaatctcctctatatttatatgttattttcatgatttactacataaaacctggatgcatttaagagggagttattaagtgtaaaacgctttcactatatcacataatcatattttaccaaattagtagtggaaatactttaatttttttcaaaactttaaaaatatttttggattgtagaagtgttaatttaataattgtaaagttgtattacgactcaaaatgacacgaacatgacaacataatttaacaaaataataatttctatttgctataatatattgtatttatttttagaggtgttgctt

SEQ ID NO: 6577 - DNA, 74 bp, Staphylococcus aureus
attttcagggtagctcagctacccttctttttcggtaaaaataaatatacatagcaatataaggagattaaaaa

SEQ ID NO: 6578 - DNA, 74 bp, Staphylococcus aureus
tttttaatctccttatattgctatgtatatttatttttaccgaaaaagaagggtagctgagctaccctgaaaat

SEQ ID NO: 6579 - DNA, 197 bp, Staphylococcus aureus
atgattaatggagatttattttttgctgttgagattttgttatagatgtttaaacctgtaattaaatatattttataaaatagaccacgcatacctatctataaacggacaatgtttataaatgagtttgcatggtcttgaattgtattaaatttcttttggttttaatagttcacttagtggtatgtcaacatttt

SEQ ID NO: 6580 - DNA, 197 bp, Staphylococcus aureus
aaaatgttgacataccactaagtgaactattaaaaccaaaagaaatttaatacaattcaagaccatgcaaactcatttataaacattgtccgtttatagataggtatgcgtggtctattttataaaatatatttaattacaggtttaaacatctataacaaaatctcaacagcaaaaaataaatctccattaatcat

SEQ ID NO: 6581 - DNA, 326 bp, Staphylococcus aureus
taaattaacaaaatctactctcatagaatttgtccaattagatgatataatagtagagtcgcctatctctcaggcgtcaatttagacgcagagaggaggtgtataaggtgatgcttattttcgttcacatcatagcaccagtcatcagtggctgtgccattgcgtttttttcttattggctaagtagacgcaatacaaaataggtgacatatagccgcaccaataaaaatcccctcactaccgcaaatagtgaggggattggtgtataagtaaatacttattttcgttatctcaattatactgctaatctttctctttgtaaaata

SEQ ID NO: 6582 - DNA, 326 bp, Staphylococcus aureus
tattttacaaagagaaagattagcagtataattgagataacgaaaataagtatttacttatacaccaatcccctcactatttgcggtagtgaggggatttttattggtgcggctatatgtcacctattttgtattgcgtctacttagccaataagaaaaaaacgcaatggcacagccactgatgactggtgctatgatgtgaacgaaaataagcatcaccttatacacctcctctctgcgtctaaattgacgcctgagagataggcgactctactattatatcatctaattggacaaattctatgagagtagattttgttaattta

SEQ ID NO: 6583 - DNA, 362 bp, Staphylococcus aureus
ccagttaaactgtcttgatgattgaatgactcagtattttggttttgttttgtctaatttgagagagttaatgatgttagattatattctcgtataatttcgtttctaggcttaccattttcataaagtttaattattttaatttaaattatttactaaaagctcttcagtctcttgtcacaataaaatcgcctaacctcttagtttaacaatatctattcccatagaatttgtccaactaagtgtagacgattcactaaactccaaaaaaataaatcccaaattataatagtttcaatattaatatattacaatttattcatagaatttttatcattttaattaataggctgttatctgga

SEQ ID NO: 6584 - DNA, 362 bp, Staphylococcus aureus
tccagataacagcctattaattaaaatgataaaaattctatgaataaattgtaatatattaatattgaaactattataatttgggatttatttttttggagtttagtgaatcgtctacacttagttggacaaattctatgggaatagatattgttaaactaagaggttaggcgattttattgtgacaagagactgaagagcttttagtaaataatttaaattaaaataattaaactttatgaaaatggtaagcctagaaacgaaattatacgagaatataatctaacatcattaactctctcaaattagacaaaacaaaaccaaaatactgagtcattcaatcatcaagacagtttaactgg

SEQ ID NO: 6585 - DNA, 62 bp, Staphylococcus aureus
tatattaataaatgttagttatagtatattttgtcaggattgggtgaatgtctaagttttaa

SEQ ID NO: 6586 - DNA, 62 bp, Staphylococcus aureus
ttaaaacttagacattcacccaatcctgacaaaatatactataactaacatttattaatata

SEQ ID NO: 6587 - DNA, 157 bp, Staphylococcus aureus
ttttgtgctcctctaagtattcgtataaatataaggttaggtttttgaagttttattttttaaatcatttcgaataaatagaatcacagagatgtttaaaattgttgattttgttgttaatttctaaaaatcatttatcaatgtatggatggatgat

SEQ ID NO: 6588 - DNA, 157 bp, Staphylococcus aureus
atcatccatccatacattgataaatgatttttagaaattaacaacaaaatcaacaattttaaacatctctgtgattctatttattcgaaatgatttaaaaaataaaacttcaaaaacctaaccttatatttatacgaatacttagaggagcacaaaa

SEQ ID NO: 6589 - DNA, 120 bp, Staphylococcus aureus
ttttgtgctcctctgtttattcatgatgcttttgatatagacgtttttttatgttatattcgaccgatgtttttcattaaaattattgaacacatgctcatggtgtatatttaaatttgt

SEQ ID NO: 6590 - DNA, 120 bp, Staphylococcus aureus
acaaatttaaatatacaccatgagcatgtgttcaataattttaatgaaaaacatcggtcgaatataacataaaaaaacgtctatatcaaaagcatcatgaataaacagaggagcacaaaa

SEQ ID NO: 6591 - DNA, 57 bp, Staphylococcus aureus
tttcaagctcctttacaattcgagatatgttgcaacgctcgtttaaagtcaatttgt

SEQ ID NO: 6592 - DNA, 57 bp, Staphylococcus aureus
acaaattgactttaaacgagcgttgcaacatatctcgaattgtaaaggagcttgaaa

SEQ ID NO: 6593 - DNA, 82 bp, Staphylococcus aureus
aattcagtatatttagttggttatgtaaccgttttcttaatcactctttaaaaaatcaacttcacgaatgaattgatgatac

SEQ ID NO: 6594 - DNA, 82 bp, Staphylococcus aureus
gtatcatcaattcattcgtgaagttgattttttaaagagtgattaagaaaacggttacataaccaactaaatatactgaatt

SEQ ID NO: 6595 - DNA, 435 bp, Staphylococcus aureus
attttacctccttccaaatttatttttatagttaatgtatctagatacacatttactatatacattttaaataaaaatattaattaaatattaattaaccacttattaacattttattaaataattatacatgaattgactcatttatttaaatatgcttaaaactcaatatcacgcaattaaaattgactttttaggattattttggtcttaaatattaattattgaattaaaattgtaatatttattcggaaattaggtaattgaaaatatatggcggaatggtgaacaattcatgtatttaaaatctttcactttattatgtattgtgtttaacaatattattagcgattagttcccctattatttatgacaatatgcagtcaatcaatgaaacatgtatgtatgagtatatttggaactagtaatgtattg

SEQ ID NO: 6596 - DNA, 435 bp, Staphylococcus aureus
caatacattactagttccaaatatactcatacatacatgtttcattgattgactgcatattgtcataaataataggggaactaatcgctaataatattgttaaacacaatacataataaagtgaaagattttaaatacatgaattgttcaccattccgccatatattttcaattacctaatttccgaataaatattacaattttaattcaataattaatatttaagaccaaaataatcctaaaaagtcaattttaattgcgtgatattgagttttaagcatatttaaataaatgagtcaattcatgtataattatttaataaaatgttaataagtggttaattaatatttaattaatatttttatttaaaatgtatatagtaaatgtgtatctagatacattaactataaaaataaatttggaaggaggtaaaat

SEQ ID NO: 6597 - DNA, 308 bp, Staphylococcus aureus
tacttagtatgacacctgctaattcaaacattatttgagacattcttttcaaattaattataaatttttacctatagactagtttgatatttatctacatctcaaaattctcatcaacaatctttcacatccaacatttttactttagtttttataattcaaaacaacaaaacgatgttaaaaaattattctattttttagttaatagatagttaatacatttttgatatttagttaattgttcttttaaaaaatattattatattttcattgtaaacgtttacaatataaaaaaaggagcaattaaa

SEQ ID NO: 6598 - DNA, 308 bp, Staphylococcus aureus
tttaattgctcctttttttatattgtaaacgtttacaatgaaaatataataatattttttaaaagaacaattaactaaatatcaaaaatgtattaactatctattaactaaaaaatagaataattttttaacatcgttttgttgttttgaattataaaaactaaagtaaaaatgttggatgtgaaagattgttgatgagaattttgagatgtagataaatatcaaactagtctataggtaaaaatttataattaatttgaaaagaatgtctcaaataatgtttgaattagcaggtgtcatactaagta

SEQ ID NO: 6599 - DNA, 150 bp, Staphylococcus aureus
accttaaactcaaatttccttaattcataaaaccttaataactaaccctttcttacaaaccacctagcccataatatattaaaacgtcatttttatttcaattagcggaaaataaaaaaaccattccgcattaactttggcaagttggaa

SEQ ID NO: 6600 - DNA, 150 bp, Staphylococcus aureus
ttccaacttgccaaagttaatgcggaatggtttttttattttccgctaattgaaataaaaatgacgttttaatatattatgggctaggtggtttgtaagaaagggttagttattaaggttttatgaattaaggaaatttgagtttaaggt

SEQ ID NO: 6601 - DNA, 206 bp, Staphylococcus aureus
taaacctcaattacattcaaattcaaaaactttgcacctaatattcatcgcttaaataaacattacgtttaattaaccagacattgtcaatcgcgtctaatacccctgctgtccgaatacaaaattattttgtattcatatttatctgttctctttcctcccttttaaacgcaactaaatttcttttaccattagcgccccaatct

SEQ ID NO: 6602 - DNA, 206 bp, Staphylococcus aureus
agattggggcgctaatggtaaaagaaatttagttgcgtttaaaagggaggaaagagaacagataaatatgaatacaaaataattttgtattcggacagcaggggtattagacgcgattgacaatgtctggttaattaaacgtaatgtttatttaagcgatgaatattaggtgcaaagtttttgaatttgaatgtaattgaggttta

SEQ ID NO: 6603 - DNA, 195 bp, Staphylococcus aureus
aaattattaataatgttaaaaatgacggtactaaataaattaataaatattccattgtcatgtattgctaaacgattatgacgctaaaaaggaataattattaagtttatagaaaacatctgtataacttactacaaatactgaaaataatataaggatttaagatcgtaaaatctaaactaaggagatgtttaa

SEQ ID NO: 6604 - DNA, 195 bp, Staphylococcus aureus
ttaaacatctccttagtttagattttacgatcttaaatccttatattattttcagtatttgtagtaagttatacagatgttttctataaacttaataattattcctttttagcgtcataatcgtttagcaatacatgacaatggaatatttattaatttatttagtaccgtcatttttaacattattaataattt

SEQ ID NO: 6605 - DNA, 201 bp, Staphylococcus aureus
tttttttaataattttttatatgttggaagtttctaaataattctactttcgtaaatttagcaccctgctatttagcaaagtaatctacatttccctaactaaaaattatcatgtgtgtaaataaaaattatgttagttctttaattccgtttgataattgaaataattgcactttgttgattatttaatcatatacaatt

SEQ ID NO: 6606 - DNA, 201 bp, Staphylococcus aureus
aattgtatatgattaaataatcaacaaagtgcaattatttcaattatcaaacggaattaaagaactaacataatttttatttacacacatgataatttttagttagggaaatgtagattactttgctaaatagcagggtgctaaatttacgaaagtagaattatttagaaacttccaacatataaaaaattattaaaaaaa

SEQ ID NO: 6607 - DNA, 154 bp, Staphylococcus aureus
aagtttcactttctttctatataaatttttaatacaaatttattctagattatttcacttatttataaaattaactgttcattaaaaaaataaaatgctataaaatattaaaaatgatacaatttattcatttatgatgctgaaaaccggtcat

SEQ ID NO: 6608 - DNA, 154 bp, Staphylococcus aureus
atgaccggttttcagcatcataaatgaataaattgtatcatttttaatattttatagcattttatttttttaatgaacagttaattttataaataagtgaaataatctagaataaatttgtattaaaaatttatatagaaagaaagtgaaactt

SEQ ID NO: 6609 - DNA, 637 bp, Staphylococcus aureus
aacgaactttaatcaaatcttaaaaaataatgtttgtattatcaaaaataatctataattgaatttaaaattaactgattattaactattgtccgttaaacggagaggattacttcgtatactgttataactgaaatcttctatatatcatttcgtaatatcgctagcttcatctaaaaaatttaatgctatgatttagccgaattaaaaacatatatatatttactatgaactaaaatttcactttaaaaataaaaaaccatgatttcgaagtcttcataaactgaagcttctactctcatggcaatttatactatgatattcaattataatgcctagtctcatagtaaacggctactacattcgcatgtacttcgttttactgtccacgcatggtcgttgacttatttatattataatataaatattttatttttcaatacttaattttaaaaatcccctatgaaaatgttgatgaactacatctttaaatcttattatacattgtataaaattatattgtgaggtactaaattgatgatatacacttttggttgtgtatgcatctcacctatctttttttgcttttttcaaataagaaagtattaaaaattaatgcctatacaacgttaaagga

SEQ ID NO: 6610 - DNA, 637 bp, Staphylococcus aureus
tcctttaacgttgtataggcattaatttttaatactttcttatttgaaaaaagcaaaaaaagataggtgagatgcatacacaaccaaaagtgtatatcatcaatttagtacctcacaatataattttatacaatgtataataagatttaaagatgtagttcatcaacattttcataggggatttttaaaattaagtattgaaaaataaaatatttatattataatataaataagtcaacgaccatgcgtggacagtaaaacgaagtacatgcgaatgtagtagccgtttactatgagactaggcattataattgaatatcatagtataaattgccatgagagtagaagcttcagtttatgaagacttcgaaatcatggttttttatttttaaagtgaaattttagttcatagtaaatatatatatgtttttaattcggctaaatcatagcattaaattttttagatgaagctagcgatattacgaaatgatatatagaagatttcagttataacagtatacgaagtaatcctctccgtttaacggacaatagttaataatcagttaattttaaattcaattatagattatttttgataatacaaacattattttttaagatttgattaaagttcgtt

SEQ ID NO: 6611 - DNA, 494 bp, Staphylococcus aureus
tatttatagacgtgataatatcaatgtttatattaaatgaaacgaatttgaaaatttcgaaacagcttaagatagcaaattgaatagtcttatagataatgcagaatcgtctacacatagttaaacaaattatttgagaataattattgttaaactatgtggataggcgattttattttgacaagagtcagaagaacatatattaaggatttcaaattacaaatggctaaactttatgaaaatggtatgactagaatcgaaattatacgcgaatacgatttaacactctcaatcttctcgaactgaataaatactgggtcattcaatcattaagacaacttaataagtgatgatatatgttcataccattttgcaaatataaccagatactctcaacaaaatgtagagttcaaaattaaaaatgtcaacattatagtaaactaacatagtcccctgttcatattcttcaatctttaaatcttatcgaacaaata

SEQ ID NO: 6612 - DNA, 494 bp, Staphylococcus aureus
tatttgttcgataagatttaaagattgaagaatatgaacaggggactatgttagtttactataatgttgacatttttaattttgaactctacattttgttgagagtatctggttatatttgcaaaatggtatgaacatatatcatcacttattaagttgtcttaatgattgaatgacccagtatttattcagttcgagaagattgagagtgttaaatcgtattcgcgtataatttcgattctagtcataccattttcataaagtttagccatttgtaatttgaaatccttaatatatgttcttctgactcttgtcaaaataaaatcgcctatccacatagtttaacaataattattctcaaataatttgtttaactatgtgtagacgattctgcattatctataagactattcaatttgctatcttaagctgtttcgaaattttcaaattcgtttcatttaatataaacattgatattatcacgtctataaata

SEQ ID NO: 6613 - DNA, 249 bp, Staphylococcus aureus
atgacacttgctcttttaagaatctgaatatttcacgctatttccattaaattagcggagaatgaatgatatctttatactaatagatttaactttttaacgtataaaattaatgcattgtactaaagtttcaattattttataattgtatgaatgaatcgtatacacttaggtagtcaaatctaagaatttagatattgtttaattttaaaactatcgattcacatataaataaaaggagataacagc

SEQ ID NO: 6614 - DNA, 249 bp, Staphylococcus aureus
gctgttatctccttttatttatatgtgaatcgatagttttaaaattaaacaatatctaaattcttagatttgactacctaagtgtatacgattcattcatacaattataaaataattgaaactttagtacaatgcattaattttatacgttaaaaagttaaatctattagtataaagatatcattcattctccgctaatttaatggaaatagcgtgaaatattcagattcttaaaagagcaagtgtcat

SEQ ID NO: 6615 - DNA, 50 bp, Staphylococcus aureus
aatcaaactaaataatttcgggtagcccccctacccttattatttttttg

SEQ ID NO: 6616 - DNA, 50 bp, Staphylococcus aureus
caaaaaaataataagggtaggggggctacccgaaattatttagtttgatt

SEQ ID NO: 6617 - DNA, 402 bp, Staphylococcus aureus
tgacacttgctcttttaagaaaactaacaattcattgtatttccgttaaattaacggagaattcggattacctagatagatttacctctagagtgttaaaaaattgtacattcttaaacaatcataaatgtacgttattaaattatcatttccactggagaatcatgtcgactaaaagattataaaagtaaaaatacatttaaaagcacgtcattttcaaaccgccataaaacagcatttttaaaccgctattgacataaaatatatttagaataaatcatttagaaaaattaaataatttaaccggcaataaactaactatttacatgaatctataaaacacttagaacaaaagttcgaaaaacgcactttatgattgtatagtgatatcaaatatactta

SEQ ID NO: 6618 - DNA, 402 bp, Staphylococcus aureus
taagtatatttgatatcactatacaatcataaagtgcgtttttcgaacttttgttctaagtgttttatagattcatgtaaatagttagtttattgccggttaaattatttaatttttctaaatgatttattctaaatatattttatgtcaatagcggtttaaaaatgctgttttatggcggtttgaaaatgacgtgcttttaaatgtatttttacttttataatcttttagtcgacatgattctccagtggaaatgataatttaataacgtacatttatgattgtttaagaatgtacaattttttaacactctagaggtaaatctatctaggtaatccgaattctccgttaatttaacggaaatacaatgaattgttagttttcttaaaagagcaagtgtca

SEQ ID NO: 6619 - DNA, 282 bp, Staphylococcus aureus
aaaacctcctctaacttattcagtctatttgacaatgaaccttattataaattcacgcttatagatagttcaggttgtagtgtgtcgatagcattgttttaaaactaaaaattcactagcagaataaattaaaattctatttatcattattactaattacaacaaataattttgaatccgtattcaagataatatataaatttcaaattttactacaattcaaatcattttcctctcataaaatggtttaatttcatgattcagttgataatcatcaatcac

SEQ ID NO: 6620 - DNA, 282 bp, Staphylococcus aureus
gtgattgatgattatcaactgaatcatgaaattaaaccattttatgagaggaaaatgatttgaattgtagtaaaatttgaaatttatatattatcttgaatacggattcaaaattatttgttgtaattagtaataatgataaatagaattttaatttattctgctagtgaatttttagttttaaaacaatgctatcgacacactacaacctgaactatctataagcgtgaatttataataaggttcattgtcaaatagactgaataagttagaggaggtttt

SEQ ID NO: 6621 - DNA, 153 bp, Staphylococcus aureus
tacaacaactccatattttaattttttataaatttgatgtattacagggaatatttaacgtacacattagccctagagactttaaaatttaaatagttaatacatatattaatttcgtataaattcgcattttagtgttaaaactaattatca

SEQ ID NO: 6622 - DNA, 153 bp, Staphylococcus aureus
tgataattagttttaacactaaaatgcgaatttatacgaaattaatatatgtattaactatttaaattttaaagtctctagggctaatgtgtacgttaaatattccctgtaatacatcaaatttataaaaaattaaaatatggagttgttgta

SEQ ID NO: 6623 - DNA, 280 bp, Staphylococcus aureus
attttatttctcctatatttaaacttctctatctttattatcttttattgtaaaaataaccaattcttcttaaatcatcatgattctatcccacttatatattattactcgttaatctggttttgttatctatactaaaatagaaagctttttatagtaataaagttagatttgaatcactattcgttcttcatcatttactaagctactttgtaaaaatatgttaatatctatagttctttataggattgtaagttgatatccatcaactttcagattg

SEQ ID NO: 6624 - DNA, 280 bp, Staphylococcus aureus
caatctgaaagttgatggatatcaacttacaatcctataaagaactatagatattaacatatttttacaaagtagcttagtaaatgatgaagaacgaatagtgattcaaatctaactttattactataaaaagctttctattttagtatagataacaaaaccagattaacgagtaataatatataagtgggatagaatcatgatgatttaagaagaattggttatttttacaataaaagataataaagatagagaagtttaaatataggagaaataaaat

SEQ ID NO: 6625 - DNA, 214 bp, Staphylococcus aureus
aatatccctccttcacaaaatttttttcttaataaactgaaaaattctgtttttaatctttaaatattcactaatattattagattacgattttaaacttaacaatcctacttactattgaacaaacaaattttaaattaagtgactcagataatagacaaaaaaccttaaaaatagcgcttaaaatgggtaaaaccattttaagcgctataac

SEQ ID NO: 6626 - DNA, 214 bp, Staphylococcus aureus
gttatagcgcttaaaatggttttacccattttaagcgctatttttaaggttttttgtctattatctgagtcacttaatttaaaatttgtttgttcaatagtaagtaggattgttaagtttaaaatcgtaatctaataatattagtgaatatttaaagattaaaaacagaatttttcagtttattaagaaaaaaattttgtgaaggagggatatt

SEQ ID NO: 6627 - DNA, 55 bp, Staphylococcus aureus
tcaataataaatatgtaataaaaaaacagaagcgatatttcacttctgtttgtat

SEQ ID NO: 6628 - DNA, 55 bp, Staphylococcus aureus
atacaaacagaagtgaaatatcgcttctgtttttttattacatatttattattga

SEQ ID NO: 6629 - DNA, 400 bp, Staphylococcus aureus
ctaatattattttgaattacctaattaatataccatatttaaaaacctaaagtcaagaacttttttaatttaatttaaatattatttcttaaataattacttaaatatcgtagcaacatgttctctgttgaacacaaatattagtatattcatttttgtagtgtacgtcaacgacattttgaaagttttttgtgtaaaaaaacgcttcttcttcccttttataatataagtgtctaatagttgtcataattactcatgaactattgaaaaagatgtaggaatcataaattttataatgcctacacctctaaactattaaaatataattataatctttttcactaaagtgctatgcttcgtactgacacacataacacaatacatagcaaccaaacattac

SEQ ID NO: 6630 - DNA, 400 bp, Staphylococcus aureus
gtaatgtttggttgctatgtattgtgttatgtgtgtcagtacgaagcatagcactttagtgaaaaagattataattatattttaatagtttagaggtgtaggcattataaaatttatgattcctacatctttttcaatagttcatgagtaattatgacaactattagacacttatattataaaagggaagaagaagcgtttttttacacaaaaaactttcaaaatgtcgttgacgtacactacaaaaatgaatatactaatatttgtgttcaacagagaacatgttgctacgatatttaagtaattatttaagaaataatatttaaattaaattaaaaaagttcttgactttaggtttttaaatatggtatattaattaggtaattcaaaataatattag

SEQ ID NO: 6631 - DNA, 94 bp, Staphylococcus aureus
ctcattctctcctttcaacttactacttcttttctatttttaaaaaaatgactgattacctataattgtaaaataaaaacaccttaattagaaa

SEQ ID NO: 6632 - DNA, 94 bp, Staphylococcus aureus
tttctaattaaggtgtttttattttacaattataggtaatcagtcatttttttaaaaatagaaaagaagtagtaagttgaaaggagagaatgag

SEQ ID NO: 6633 - DNA, 57 bp, Staphylococcus aureus
tgataataccttcctttaaatgaattatctttcatgtgcttcaatgtaatactatga

SEQ ID NO: 6634 - DNA, 57 bp, Staphylococcus aureus
tcatagtattacattgaagcacatgaaagataattcatttaaaggaaggtattatca

SEQ ID NO: 6635 - DNA, 162 bp, Staphylococcus aureus
agaactatttattgtaaatttaaattctaaagtccattattttgtatcattacttctaaatatctcgcaagattcattatagtaattttaatcaattattaatagtggtaatgactagtttatcatcgtataataaataaaaacataagggggacctttcat

SEQ ID NO: 6636 - DNA, 162 bp, Staphylococcus aureus
atgaaaggtcccccttatgtttttatttattatacgatgataaactagtcattaccactattaataattgattaaaattactataatgaatcttgcgagatatttagaagtaatgatacaaaataatggactttagaatttaaatttacaataaatagttct

SEQ ID NO: 6637 - DNA, 123 bp, Staphylococcus aureus
actcgaagaaaacttccattggttatgctgttaacgtatagatgctaatgtaatctgaacgccgtatcatttggcgttcaacattacatgcacctttacaacatacatgccaatggaagtttt

SEQ ID NO: 6638 - DNA, 123 bp, Staphylococcus aureus
aaaacttccattggcatgtatgttgtaaaggtgcatgtaatgttgaacgccaaatgatacggcgttcagattacattagcatctatacgttaacagcataaccaatggaagttttcttcgagt

SEQ ID NO: 6639 - DNA, 133 bp, Staphylococcus aureus
aaggcacctccatgacttatattgtaccaaaaattataaaatgctcatattaaatacacatgtcctaatatcgaatttttagcgacaatgttataatgaatggtaatactagttgaaaaggagtgtagtcatc

SEQ ID NO: 6640 - DNA, 133 bp, Staphylococcus aureus
gatgactacactccttttcaactagtattaccattcattataacattgtcgctaaaaattcgatattaggacatgtgtatttaatatgagcattttataatttttggtacaatataagtcatggaggtgcctt

SEQ ID NO: 6641 - DNA, 141 bp, Staphylococcus aureus
atgtatgcttaatctaagctcgaacgggtataatatgattaatattataacaattgcgtttgaagtgataacatcaaggttagcaattttaaacaaaatgagttatcaagataacagatgttaaaagtgaggagaatataa

SEQ ID NO: 6642 - DNA, 141 bp, Staphylococcus aureus
ttatattctcctcacttttaacatctgttatcttgataactcattttgtttaaaattgctaaccttgatgttatcacttcaaacgcaattgttataatattaatcatattatacccgttcgagcttagattaagcatacat

SEQ ID NO: 6643 - DNA, 110 bp, Staphylococcus aureus
cacgttacgttctcgatcacaactatttttattagtaacagcatatttatttttttaaattaaatgccaaataaacgagatgacattagaaattagatatttcttgtcat

SEQ ID NO: 6644 - DNA, 110 bp, Staphylococcus aureus
atgacaagaaatatctaatttctaatgtcatctcgtttatttggcatttaatttaaaaaaataaatatgctgttactaataaaaatagttgtgatcgagaacgtaacgtg

SEQ ID NO: 6645 - DNA, 508 bp, Staphylococcus aureus
tgtgttatccttgcactttgattacgctttacttatatcattatcgacaaacaacatacttatattttcattgagccgaaccttatatacacattacatataccttacttgcacaaattattaatctggtatttattataattacatatcactatatttttagcatttgtataacttagttggtcaaaagatgcttttgcatatgccctgccatatccattttttatattattcaagttttcaaatactcatgtcacacgcgcctttttcataagtgatgctttattagcaagaagatgtgttcgcagaaatttgttctgcattctacttctacgctagtcaatcagccaattttaccaatctccactttcgcgtttcaaatcaaacaatacgtgtctcccctttcttcttatataacaattcttctaacatgatatgttactattgaattactgaacctgagttagttataatctaacttatattgaaaagagatgaggcgtaagat

SEQ ID NO: 6646 - DNA, 508 bp, Staphylococcus aureus
atcttacgcctcatctcttttcaatataagttagattataactaactcaggttcagtaattcaatagtaacatatcatgttagaagaattgttatataagaagaaaggggagacacgtattgtttgatttgaaacgcgaaagtggagattggtaaaattggctgattgactagcgtagaagtagaatgcagaacaaatttctgcgaacacatcttcttgctaataaagcatcacttatgaaaaaggcgcgtgtgacatgagtatttgaaaacttgaataatataaaaaatggatatggcagggcatatgcaaaagcatcttttgaccaactaagttatacaaatgctaaaaatatagtgatatgtaattataataaataccagattaataatttgtgcaagtaaggtatatgtaatgtgtatataaggttcggctcaatgaaaatataagtatgttgtttgtcgataatgatataagtaaagcgtaatcaaagtgcaaggataacaca

SEQ ID NO: 6647 - DNA, 204 bp, Staphylococcus aureus
caaaataattatagcaaggtgttattatttgtttttaggctatgtaatagcttacaatcaaatgtatatagaccttgtttttttattttcatcaatttctacccctaaacctaatgctctagtctgatgtcatgggttattgattggtgataatataaaactatgttatattcacgatgattaacttacaaaggagtttcaact

SEQ ID NO: 6648 - DNA, 204 bp, Staphylococcus aureus
agttgaaactcctttgtaagttaatcatcgtgaatataacatagttttatattatcaccaatcaataacccatgacatcagactagagcattaggtttaggggtagaaattgatgaaaataaaaaaacaaggtctatatacatttgattgtaagctattacatagcctaaaaacaaataataacaccttgctataattattttg

SEQ ID NO: 6649 - DNA, 120 bp, Staphylococcus aureus
cacaaaaccgagcgaccgtggttcaaaaatcataccacggccgctcggttttttcgcattaaaaatcggacagaggagctcatgtttcagtatactcatctgtccgatatcttttaattc

SEQ ID NO: 6650 - DNA, 120 bp, Staphylococcus aureus
gaattaaaagatatcggacagatgagtatactgaaacatgagctcctctgtccgatttttaatgcgaaaaaaccgagcggccgtggtatgatttttgaaccacggtcgctcggttttgtg

SEQ ID NO: 6651 - DNA, 294 bp, Staphylococcus aureus
acatccatatctccttaattaaaggttctaacatcaattttgcaaaatccaactatacaaagcattctaatcactatattcatacttataggtgtagtgattcattagctgatttattaaaaccagtcgccatttttatttcgttaaaaaattattatctacacaataataaagtgctttagtcaaatcgtgatgttttatttattaacaagtttattatttcttcattttaccataatacgcttcatatcgtcgatgaacatatgaaattgagacacatttataacagtttaa

SEQ ID NO: 6652 - DNA, 294 bp, Staphylococcus aureus
ttaaactgttataaatgtgtctcaatttcatatgttcatcgacgatatgaagcgtattatggtaaaatgaagaaataataaacttgttaataaataaaacatcacgatttgactaaagcactttattattgtgtagataataattttttaacgaaataaaaatggcgactggttttaataaatcagctaatgaatcactacacctataagtatgaatatagtgattagaatgctttgtatagttggattttgcaaaattgatgttagaacctttaattaaggagatatggatgt

SEQ ID NO: 6653 - DNA, 237 bp, Staphylococcus aureus
attaaagatttacatgattactctactagatttgctcggcagtaatgaccaattagaaactaaatgtcaaaactatcattgcacttaatacgccaaacattttcaggccgttcttaatgagtcattaaaagtgaaacgcttttccatcagtccgatacatgaccgaactaatagtattatgttgaaaactttacacttcaaaatgcaaaaaggaagttaggacacgtttactagcct

SEQ ID NO: 6654 - DNA, 237 bp, Staphylococcus aureus
aggctagtaaacgtgtcctaacttcctttttgcattttgaagtgtaaagttttcaacataatactattagttcggtcatgtatcggactgatggaaaagcgtttcacttttaatgactcattaagaacggcctgaaaatgtttggcgtattaagtgcaatgatagttttgacatttagtttctaattggtcattactgccgagcaaatctagtagagtaatcatgtaaatctttaat

SEQ ID NO: 6655 - DNA, 103 bp, Staphylococcus aureus
acctctaacttccgttatcaagctcatctgcccgttttggcatagagctagccatgtttgattgcccagcttccgtcgtccattctgagctaaagctaggaca

SEQ ID NO: 6656 - DNA, 103 bp, Staphylococcus aureus
tgtcctagctttagctcagaatggacgacggaagctgggcaatcaaacatggctagctctatgccaaaacgggcagatgagcttgataacggaagttagaggt

SEQ ID NO: 6657 - DNA, 101 bp, Staphylococcus aureus
ctaacttccgttatcaaaactaaaaaaactacccacaaagtctcggactctgtcggcagtctattcctctatttaaaggattgaaaaatattattttaata

SEQ ID NO: 6658 - DNA, 101 bp, Staphylococcus aureus
tattaaaataatatttttcaatcctttaaatagaggaatagactgccgacagagtccgagactttgtgggtagtttttttagttttgataacggaagttag

SEQ ID NO: 6659 - DNA, 68 bp, Staphylococcus aureus
ggttatagcactcctttgttgtgatgtttattaaaacgttcgatattactttaccacatctcgctttt

SEQ ID NO: 6660 - DNA, 68 bp, Staphylococcus aureus
aaaagcgagatgtggtaaagtaatatcgaacgttttaataaacatcacaacaaaggagtgctataacc

SEQ ID NO: 6661 - DNA, 178 bp, Staphylococcus aureus
aattttgactcctttgtgacaacatagttattcattataccactatttttattttttaattcattaatcatttcactttctgctcaatttattattagtttacatacaaaaagcgatgcctcacctctcgaaacaggtgtgttacatcgcttttattatttattaaaagtatataggc

SEQ ID NO: 6662 - DNA, 178 bp, Staphylococcus aureus
gcctatatacttttaataaataataaaagcgatgtaacacacctgtttcgagaggtgaggcatcgctttttgtatgtaaactaataataaattgagcagaaagtgaaatgattaatgaattaaaaaataaaaatagtggtataatgaataactatgttgtcacaaaggagtcaaaatt

SEQ ID NO: 6663 - DNA, 355 bp, Staphylococcus aureus
tctgttatctacctttctgtttggggaattttatccggacacaagaaattgcaataatacacatttcttgaaacacagattacatcttaatatatttttaataaaatgaaaagagtcaatttcacatttgtattaaattttgatcaagtcaacaagagttaagtttactttataatgaagcgaaagtaaatgaagtaaaattttatgcacaatcactagatttgataaaacttacacttttataatgatatcaaatttacaaagaaaactgtataataaaccctatcgctataaaaaattcatcaaaatcagattaaaaattgtctatttttcgacaaatatttaaaagctcatt

SEQ ID NO: 6664 - DNA, 355 bp, Staphylococcus aureus
aatgagcttttaaatatttgtcgaaaaatagacaatttttaatctgattttgatgaattttttatagcgatagggtttattatacagttttctttgtaaatttgatatcattataaaagtgtaagttttatcaaatctagtgattgtgcataaaattttacttcatttactttcgcttcattataaagtaaacttaactcttgttgacttgatcaaaatttaatacaaatgtgaaattgactcttttcattttattaaaaatatattaagatgtaatctgtgtttcaagaaatgtgtattattgcaatttcttgtgtccggataaaattccccaaacagaaaggtagataacaga

SEQ ID NO: 6665 - DNA, 162 bp, Staphylococcus aureus
caaatcgctccaattcatttttacgtgtattaactattatacattgagttattatatttttaaatcttagacgtgaacatgataaaatggccttgattactcaatagttatatttaggagaactgatttgtgatatgatattaaagactataggaggatttt

SEQ ID NO: 6666 - DNA, 162 bp, Staphylococcus aureus
aaaatcctcctatagtctttaatatcatatcacaaatcagttctcctaaatataactattgagtaatcaaggccattttatcatgttcacgtctaagatttaaaaatataataactcaatgtataatagttaatacacgtaaaaatgaattggagcgatttg

SEQ ID NO: 6667 - DNA, 452 bp, Staphylococcus aureus
tttgattagttttgcatgatatttaaacatgcaataccgcattgtaactaaatcaagtatcaacttaaatcggatagatggaaaattattaattttttcagatgttcggtttttttgttttttacgatgcttaggattttatattttgatattttagcaattattcattttataacatccttggataatgacttgtagtctttttcaactgcgttacgtgtatctatggacaatacatgacatcataagatttttatcacaggttgtttggccaatacatgtacaacaattcatcatataaaaaataggttctataataaaacggactccatgaaaagtttttccttttcatggctctatatcaaatcggacttataagttcaatttgacatagacaaaaaataaagcttgaacactataatgcccaaactttattttatattaatatttaa

SEQ ID NO: 6668 - DNA, 452 bp, Staphylococcus aureus
ttaaatattaatataaaataaagtttgggcattatagtgttcaagctttattttttgtctatgtcaaattgaacttataagtccgatttgatatagagccatgaaaaggaaaaacttttcatggagtccgttttattatagaacctattttttatatgatgaattgttgtacatgtattggccaaacaacctgtgataaaaatcttatgatgtcatgtattgtccatagatacacgtaacgcagttgaaaaagactacaagtcattatccaaggatgttataaaatgaataattgctaaaatatcaaaatataaaatcctaagcatcgtaaaaaacaaaaaaaccgaacatctgaaaaaattaataattttccatctatccgatttaagttgatacttgatttagttacaatgcggtattgcatgtttaaatatcatgcaaaactaatcaaa

SEQ ID NO: 6669 - DNA, 195 bp, Staphylococcus aureus
tcaatttctccccttatcactgtttatttaactgtagtatatcattaaataatttaattgagcaatttatgattaaaacgttttcataatttgaaataaaaatacactaatcgcacgtactcaccctttattacagtgatacggtcatacgattagtgtgttatctatcattatttagttattgttgaactaagt

SEQ ID NO: 6670 - DNA, 195 bp, Staphylococcus aureus
acttagttcaacaataactaaataatgatagataacacactaatcgtatgaccgtatcactgtaataaagggtgagtacgtgcgattagtgtatttttatttcaaattatgaaaacgttttaatcataaattgctcaattaaattatttaatgatatactacagttaaataaacagtgataaggggagaaattga

SEQ ID NO: 6671 - DNA, 119 bp, Staphylococcus aureus
aaatatataaatctcctctaatttcattcttcaatagcatatcataatcttggcatattaagaaacgcggtttaatgatttcattaaaaatattactgatagatgacttctttcaatta

SEQ ID NO: 6672 - DNA, 119 bp, Staphylococcus aureus
taattgaaagaagtcatctatcagtaatatttttaatgaaatcattaaaccgcgtttcttaatatgccaagattatgatatgctattgaagaatgaaattagaggagatttatatattt

SEQ ID NO: 6673 - DNA, 138 bp, Staphylococcus aureus
ctatgaatataataaaaaagctaggtaacaaaatgctacctaacttcatattcaagataatcaatcctatttgatatatgttctatactatacattatttacatgataaataactgaatattacacaattataatact

SEQ ID NO: 6674 - DNA, 138 bp, Staphylococcus aureus
agtattataattgtgtaatattcagttatttatcatgtaaataatgtatagtatagaacatatatcaaataggattgattatcttgaatatgaagttaggtagcattttgttacctagcttttttattatattcatag

SEQ ID NO: 6675 - DNA, 158 bp, Staphylococcus aureus
gatttctacactcctcttagtttgcattttacataaaaacggcgatattaataattattataccctaactttcaatatatcaaaccatttaactttaacatggttatactctaaatatagcacttaagtatcatttttataatgaaaatagacgaatt

SEQ ID NO: 6676 - DNA, 158 bp, Staphylococcus aureus
aattcgtctattttcattataaaaatgatacttaagtgctatatttagagtataaccatgttaaagttaaatggtttgatatattgaaagttagggtataataattattaatatcgccgtttttatgtaaaatgcaaactaagaggagtgtagaaatc

SEQ ID NO: 6677 - DNA, 150 bp, Staphylococcus aureus
tcgtatgccccccataaaataatactatgttattttaacacaaccattattcatattgaggtttcatttcacataattttaataataaaaagcttgaatatatgatataactttgtggtgcgcatcatatattcaagcttcgttaggttg

SEQ ID NO: 6678 - DNA, 150 bp, Staphylococcus aureus
caacctaacgaagcttgaatatatgatgcgcaccacaaagttatatcatatattcaagctttttattattaaaattatgtgaaatgaaacctcaatatgaataatggttgtgttaaaataacatagtattattttatggggggcatacga

SEQ ID NO: 6679 - DNA, 257 bp, Staphylococcus aureus
ttatacagccctccctaattaatattcataattatacatattaatacattttgatgcaatagtgttttataaatgtatttttatcaatataaagaaaagcttctttttaaaagactgtacataaaaaatccgctattatacgtgaacaaatctcacattttaaaatcaatcaaaaaagcgctactatcaatatcttattgacagtaacgcctatatttatcatatattaaaacttattcttgtcatcaagctatcaa

SEQ ID NO: 6680 - DNA, 257 bp, Staphylococcus aureus
ttgatagcttgatgacaagaataagttttaatatatgataaatataggcgttactgtcaataagatattgatagtagcgcttttttgattgattttaaaatgtgagatttgttcacgtataatagcggattttttatgtacagtcttttaaaaagaagcttttctttatattgataaaaatacatttataaaacactattgcatcaaaatgtattaatatgtataattatgaatattaattagggagggctgtataa

SEQ ID NO: 6681 - DNA, 379 bp, Staphylococcus aureus
aaacgacctccaatttgaacattaaactcatcatattatagaaaattaactttaacaatgattagttggctaatttaatctaaatataacaatccacaaaatgaataaagtaaatttaaacaatctactcactaatcaatgtcatgctaatcttaaaatactactaattacatcctgtgactaataatgtaataaattgtaaatattaaaatagccatattactattaagatagataaattgaatcgacttggtataaagcacaataaaatagcacttttacaaatatattattagaaaagttgaaacaaatatataaccccagataatataatcattatcattaatgtaataccaaaaaaagaagttaaacaatgcat

SEQ ID NO: 6682 - DNA, 379 bp, Staphylococcus aureus
atgcattgtttaacttctttttttggtattacattaatgataatgattatattatctggggttatatatttgtttcaacttttctaataatatatttgtaaaagtgctattttattgtgctttataccaagtcgattcaatttatctatcttaatagtaatatggctattttaatatttacaatttattacattattagtcacaggatgtaattagtagtattttaagattagcatgacattgattagtgagtagattgtttaaatttactttattcattttgtggattgttatatttagattaaattagccaactaatcattgttaaagttaattttctataatatgatgagtttaatgttcaaattggaggtcgttt

SEQ ID NO: 6683 - DNA, 50 bp, Staphylococcus aureus
tctattaaagcgtgtgccatttgagtccacttttatggttcttcatcttt

SEQ ID NO: 6684 - DNA, 50 bp, Staphylococcus aureus
aaagatgaagaaccataaaagtggactcaaatggcacacgctttaataga

SEQ ID NO: 6685 - DNA, 90 bp, Staphylococcus aureus
attaatttgaatgaacaaacattcaaaactgaatacaatatgtcacgttattccgcatcttcttcagaagatgttccgaatatatcctta

SEQ ID NO: 6686 - DNA, 90 bp, Staphylococcus aureus
taaggatatattcggaacatcttctgaagaagatgcggaataacgtgacatattgtattcagttttgaatgtttgttcattcaaattaat

SEQ ID NO: 6687 - DNA, 92 bp, Staphylococcus aureus
acttttatttgtattgtatagagagaaataaaaagaaaccttgttttacaaggtttctaataggttatgttatgtaaataacagttaattat

SEQ ID NO: 6688 - DNA, 92 bp, Staphylococcus aureus
ataattaactgttatttacataacataacctattagaaaccttgtaaaacaaggtttctttttatttctctctatacaatacaaataaaagt

SEQ ID NO: 6689 - DNA, 214 bp, Staphylococcus aureus
tatgtttccaccatttttataagtcaaacgttaacatgaagttacgttcttttataaaaagatttaaacgcgttattaatcttgtgagtgttctttcgaacactagcgattatttcttatgaattcaagcttatttaaaactctttattcactcggttttgcttggtaaaatctatattttacttacttatctagttttcaatgtacaaataat

SEQ ID NO: 6690 - DNA, 214 bp, Staphylococcus aureus
attatttgtacattgaaaactagataagtaagtaaaatatagattttaccaagcaaaaccgagtgaataaagagttttaaataagcttgaattcataagaaataatcgctagtgttcgaaagaacactcacaagattaataacgcgtttaaatctttttataaaagaacgtaacttcatgttaacgtttgacttataaaaatggtggaaacata

SEQ ID NO: 6691 - DNA, 740 bp, Staphylococcus aureus
attatgatgtttgattagctcataaatactaaataatgtttgtaacttatagttacgtttttggaattaacgttgacatattgtcattcagttttcaatgttcgtttgtcacttacaacatttaattataactcgtaagtttttgtaagtcaagaattatttttaattattttatttctaaaaaataaatttcctaactcaattaattcaacaaatattattttattatgtatttgttcgaatttcaatagtcaaatttacactttattaatattttaaatcaacaacttaaaacatttgttttttaaatattagtgccgtttgacgacttttatataatatcaagttattctagtagagtcaacataaaacaacacttatttttgtttaaaaattactgttgaagggattattttctattcgtaagtactatatgtatttaaagtgtaattccttacgctttttacttcagttttacaaacaaacttatactcactttatggatagttatttagtagaccttcgtttgaatatttttatgtttatttataaagggtactagttattagttaataccacttccgtagttagaatattcttttcttcaatttaaatatttttcagaataagcataaaaaagaagttaaacaactttcatgtcgtttaacttcttaaatattacacttacttatatgaagtaagctaacgcttttttaatttgtcatactaccaaagttaaa

SEQ ID NO: 6692 - DNA, 740 bp, Staphylococcus aureus
tttaactttggtagtatgacaaattaaaaaagcgttagcttacttcatataagtaagtgtaatatttaagaagttaaacgacatgaaagttgtttaacttcttttttatgcttattctgaaaaatatttaaattgaagaaaagaatattctaactacggaagtggtattaactaataactagtaccctttataaataaacataaaaatattcaaacgaaggtctactaaataactatccataaagtgagtataagtttgtttgtaaaactgaagtaaaaagcgtaaggaattacactttaaatacatatagtacttacgaatagaaaataatcccttcaacagtaatttttaaacaaaaataagtgttgttttatgttgactctactagaataacttgatattatataaaagtcgtcaaacggcactaatatttaaaaaacaaatgttttaagttgttgatttaaaatattaataaagtgtaaatttgactattgaaattcgaacaaatacataataaaataatatttgttgaattaattgagttaggaaatttattttttagaaataaaataattaaaaataattcttgacttacaaaaacttacgagttataattaaatgttgtaagtgacaaacgaacattgaaaactgaatgacaatatgtcaacgttaattccaaaaacgtaactataagttacaaacattatttagtatttatgagctaatcaaacatcataat

SEQ ID NO: 6693 - DNA, 96 bp, Staphylococcus aureus
ctatatcaccatctttcttatataataattattattacttactataaatataactgtagtattgcgcgcgtgtcaatatttacatgatgatttcat

SEQ ID NO: 6694 - DNA, 96 bp, Staphylococcus aureus
atgaaatcatcatgtaaatattgacacgcgcgcaatactacagttatatttatagtaagtaataataattattatataagaaagatggtgatatag

SEQ ID NO: 6695 - DNA, 80 bp, Staphylococcus aureus
ataatcacctttttcttcattataataattttatgatacgatattagatgaaaatattaaattaaaagaggttgatataa

SEQ ID NO: 6696 - DNA, 80 bp, Staphylococcus aureus
ttatatcaacctcttttaatttaatattttcatctaatatcgtatcataaaattattataatgaagaaaaaggtgattat

SEQ ID NO: 6697 - DNA, 209 bp, Staphylococcus aureus
cttttaaggaagtatatttttaattgaattaaaataaaacaaatgctcacatagtagattcattttatatcgttaactattaacgtttaacttgatatgtcactatgtgagtttttattttacaaatttatactcttttaatctctgactaaagttttacatcgctatcagtattatgtatgatttattttaacaactataaataagct

SEQ ID NO: 6698 - DNA, 209 bp, Staphylococcus aureus
agcttatttatagttgttaaaataaatcatacataatactgatagcgatgtaaaactttagtcagagattaaaagagtataaatttgtaaaataaaaactcacatagtgacatatcaagttaaacgttaatagttaacgatataaaatgaatctactatgtgagcatttgttttattttaattcaattaaaaatatacttccttaaaag

SEQ ID NO: 6699 - DNA, 189 bp, Staphylococcus aureus
gtttaaagcaattcctgtaattaataccacaatgagataaagtaatattgaatctcgaaattaaatttaaaaaagcagtaagattattttcaatgaagaaaatctcttactgcttttctatgttatgaccccaccatcctgttacaaatcttccctacaagattgtactgaagtcaaacaactaatact

SEQ ID NO: 6700 - DNA, 189 bp, Staphylococcus aureus
agtattagttgtttgacttcagtacaatcttgtagggaagatttgtaacaggatggtggggtcataacatagaaaagcagtaagagattttcttcattgaaaataatcttactgcttttttaaatttaatttcgagattcaatattactttatctcattgtggtattaattacaggaattgctttaaac

SEQ ID NO: 6701 - DNA, 290 bp, Staphylococcus aureus
acaatcccccctaatctattgccctatcctattcataagcataaaaatgaatagaggttggatacataatttgtagatgtaaattcttcttacaatttacatttttaaaattaagatatctcaacctctgtcatattcatgtgattaaatacgttgtcttattcgtatgttatattctattcaatttaatctatggatactgtgtccccacacgacagcaaaagttatcatacttctttacatcactaagtcaatataaatgatttaatcagtatttacactttatttgc

SEQ ID NO: 6702 - DNA, 290 bp, Staphylococcus aureus
gcaaataaagtgtaaatactgattaaatcatttatattgacttagtgatgtaaagaagtatgataacttttgctgtcgtgtggggacacagtatccatagattaaattgaatagaatataacatacgaataagacaacgtatttaatcacatgaatatgacagaggttgagatatcttaattttaaaaatgtaaattgtaagaagaatttacatctacaaattatgtatccaacctctattcatttttatgcttatgaataggatagggcaatagattaggggggattgt

SEQ ID NO: 6703 - DNA, 105 bp, Staphylococcus aureus
actccacaccaccttctgttaatttaaccattataaattatagcatatttcagaaatagtattatataaatacatatttttacgaaataagattttactacttaa

SEQ ID NO: 6704 - DNA, 105 bp, Staphylococcus aureus
ttaagtagtaaaatcttatttcgtaaaaatatgtatttatataatactatttctgaaatatgctataatttataatggttaaattaacagaaggtggtgtggagt

SEQ ID NO: 6705 - DNA, 72 bp, Staphylococcus aureus
taaagatatcatttatacatttttaaaattaatgtcactatgttttccgataatattaccaatcatcgaatg

SEQ ID NO: 6706 - DNA, 72 bp, Staphylococcus aureus
cattcgatgattggtaatattatcggaaaacatagtgacattaattttaaaaatgtataaatgatatcttta

SEQ ID NO: 6707 - DNA, 151 bp, Staphylococcus aureus
ttataaaaccctttcctcaccaaaattaattgtctttactcataatgtttttattgtacattaaaatcatggttagtatgtaagttaatttagttatttgcgaaattggattataatagtatatataatattatgaaatgagtgaactgat

SEQ ID NO: 6708 - DNA, 151 bp, Staphylococcus aureus
atcagttcactcatttcataatattatatatactattataatccaatttcgcaaataactaaattaacttacatactaaccatgattttaatgtacaataaaaacattatgagtaaagacaattaattttggtgaggaaagggttttataa

SEQ ID NO: 6709 - DNA, 260 bp, Staphylococcus aureus
tttcaagttattattcactaaagttaatctataaaaaatgaacaaccgggcagaatgaaaatcaaaacgatttttactctgtccggttttttaatgtaaaactatgaatgcttttacaaaatctaaaatttatattgttgctaacaaactacctttaatgactcgaaatatcaaaatcagtataggaaaacaatatctagatgatattctaattgtttctgattctcacagattaatttacacaacaggtcagctaaaca

SEQ ID NO: 6710 - DNA, 260 bp, Staphylococcus aureus
tgtttagctgacctgttgtgtaaattaatctgtgagaatcagaaacaattagaatatcatctagatattgttttcctatactgattttgatatttcgagtcattaaaggtagtttgttagcaacaatataaattttagattttgtaaaagcattcatagttttacattaaaaaaccggacagagtaaaaatcgttttgattttcattctgcccggttgttcattttttatagattaactttagtgaataataacttgaaa

SEQ ID NO: 6711 - DNA, 259 bp, Staphylococcus aureus
tggatcaccccgttactttctcaagttttatacaatactcttttattattcaataagccacttcctatagcaaatgtttaactttaaatatttttcgatgctaacaaaaaatcacactatcatcttttaaaatgaaagtgtgattacaagcaaatctgtaaaatttattaagcagaaacaattcaactttatcattatgacatttcaattaaaccttctacattatagttccaagcatcttacacatgaatgcaagtat

SEQ ID NO: 6712 - DNA, 259 bp, Staphylococcus aureus
atacttgcattcatgtgtaagatgcttggaactataatgtagaaggtttaattgaaatgtcataatgataaagttgaattgtttctgcttaataaattttacagatttgcttgtaatcacactttcattttaaaagatgatagtgtgattttttgttagcatcgaaaaatatttaaagttaaacatttgctataggaagtggcttattgaataataaaagagtattgtataaaacttgagaaagtaacggggtgatcca

SEQ ID NO: 6713 - DNA, 339 bp, Staphylococcus aureus
gcgtttgctccttcttttaaaactcacttagtatataccttgagtttaccagtactatcacaaataggctacactttttgggaaaatcagtccaagggcttacaatcgtatacgccatcatacttacttttttgttttttgaaaagattatagataaatcattacaattttaaatattaatcatgccaaatattgttatattttgtaaaataaaagaccatccctattaaatgccaatagagacgaccttttatttgttattcatttattaaaactaaaatccatatttcatttcaaacgaaaatatataaattttaacaatcgataaccacaatactt

SEQ ID NO: 6714 - DNA, 339 bp, Staphylococcus aureus
aagtattgtggttatcgattgttaaaatttatatattttcgtttgaaatgaaatatggattttagttttaataaatgaataacaaataaaaggtcgtctctattggcatttaatagggatggtcttttattttacaaaatataacaatatttggcatgattaatatttaaaattgtaatgatttatctataatcttttcaaaaaacaaaaaagtaagtatgatggcgtatacgattgtaagcccttggactgattttcccaaaaagtgtagcctatttgtgatagtactggtaaactcaaggtatatactaagtgagttttaaaagaaggagcaaacgc

SEQ ID NO: 6715 - DNA, 130 bp, Staphylococcus aureus
tgaaaatcacatttctatatatcattgatataattactatagacaagtaaatcagtgattaaacatacaagatataaaaaatattaagcgactatcgcgatatctaactctaacacatcttatgtggcat

SEQ ID NO: 6716 - DNA, 130 bp, Staphylococcus aureus
atgccacataagatgtgttagagttagatatcgcgatagtcgcttaatattttttatatcttgtatgtttaatcactgatttacttgtctatagtaattatatcaatgatatatagaaatgtgattttca

SEQ ID NO: 6717 - DNA, 223 bp, Staphylococcus aureus
aaaaagttaactccttttattttgttttctttttcattattatcctaacagaaattgcgttaaagcgatataatcttagctatatttatgacattcaaattattttgacttttaaaaatccccttttcaattaactaaaattaagagataatttgttacgagtgataatacgaagtggtatcataccgatatgaaccaaatagaaagaaggaagtttaagacg

SEQ ID NO: 6718 - DNA, 223 bp, Staphylococcus aureus
cgtcttaaacttccttctttctatttggttcatatcggtatgataccacttcgtattatcactcgtaacaaattatctcttaattttagttaattgaaaaggggatttttaaaagtcaaaataatttgaatgtcataaatatagctaagattatatcgctttaacgcaatttctgttaggataataatgaaaaagaaaacaaaataaaaggagttaacttttt

SEQ ID NO: 6719 - DNA, 259 bp, Staphylococcus aureus
aaactcttaattatgcggagaagcactttatcgataagtagtctccgcatattttaatgctattataaaataaaaaacaattaattgctggcagtactctactttaataataaaggtcatttaataggactaatagtctataataaaaaggttaaattttaactaaaagcataaacgtgcataatcaaaaagacagattgtaggtggaatattcgaacataacagttcaattcatccttaacaatctgtctttatattt

SEQ ID NO: 6720 - DNA, 259 bp, Staphylococcus aureus
aaatataaagacagattgttaaggatgaattgaactgttatgttcgaatattccacctacaatctgtctttttgattatgcacgtttatgcttttagttaaaatttaacctttttattatagactattagtcctattaaatgacctttattattaaagtagagtactgccagcaattaattgttttttattttataatagcattaaaatatgcggagactacttatcgataaagtgcttctccgcataattaagagttt

SEQ ID NO: 6721 - DNA, 89 bp, Staphylococcus aureus
tattttatctcccaatctatactttaatcacgtatttgacctttaaatacatgtttcatttcctactcagcacctcaaaataacattta

SEQ ID NO: 6722 - DNA, 89 bp, Staphylococcus aureus
taaatgttattttgaggtgctgagtaggaaatgaaacatgtatttaaaggtcaaatacgtgattaaagtatagattgggagataaaata

SEQ ID NO: 6723 - DNA, 140 bp, Staphylococcus aureus
aatgttcacctctaataatagttatgttatcaaagtatcacaatttaataaactttaatagaattttatataatctgctttcttattgtttaaagtcgctataaaatggggatataactacatagtttggaggaatcaaa

SEQ ID NO: 6724 - DNA, 140 bp, Staphylococcus aureus
tttgattcctccaaactatgtagttatatccccattttatagcgactttaaacaataagaaagcagattatataaaattctattaaagtttattaaattgtgatactttgataacataactattattagaggtgaacatt

SEQ ID NO: 6725 - DNA, 277 bp, Staphylococcus aureus
gatgattttgtttttataaggcaatacttaacaatttggtgtacgcctttcatagttatcattattaaatgataatacaatgattggccaaactacattgtttcagtattgcctttgttttaattttaaatcaaaatagcctatgaaagatttaaatcaattaatttctataatattatcatttttaaagcatatcattgtttagtttttttataattggataaatactaatagttactttataaaacattacatagagaaaggttaaggagtgcac

SEQ ID NO: 6726 - DNA, 277 bp, Staphylococcus aureus
gtgcactccttaacctttctctatgtaatgttttataaagtaactattagtatttatccaattataaaaaaactaaacaatgatatgctttaaaaatgataatattatagaaattaattgatttaaatctttcataggctattttgatttaaaattaaaacaaaggcaatactgaaacaatgtagtttggccaatcattgtattatcatttaataatgataactatgaaaggcgtacaccaaattgttaagtattgccttataaaaacaaaatcatc

SEQ ID NO: 6727 - DNA, 112 bp, Staphylococcus aureus
acaccaacaaaacagaggttttcgctaatgattgcgaagacctctgttttttggtgtctatttgatgttatattgtgattggcgtaagtaacttttcttaattcgatacgaa

SEQ ID NO: 6728 - DNA, 112 bp, Staphylococcus aureus
ttcgtatcgaattaagaaaagttacttacgccaatcacaatataacatcaaatagacaccaaaaaacagaggtcttcgcaatcattagcgaaaacctctgttttgttggtgt

SEQ ID NO: 6729 - DNA, 216 bp, Staphylococcus aureus
aactatcaccttttataataagttttaaaataccaaatgcgctatgtatcttcgttgatgtcgatgatatgtttgcttaaaaactactttattacaacatatttttgaaatgacgcattgattgtgttcttaattattataaaacagttccgaaaccaatatgaataggctccggaactaaatgatgttcatactttagtcttagtatatgttgaa

SEQ ID NO: 6730 - DNA, 216 bp, Staphylococcus aureus
ttcaacatatactaagactaaagtatgaacatcatttagttccggagcctattcatattggtttcggaactgttttataataattaagaacacaatcaatgcgtcatttcaaaaatatgttgtaataaagtagtttttaagcaaacatatcatcgacatcaacgaagatacatagcgcatttggtattttaaaacttattataaaaggtgatagtt

SEQ ID NO: 6731 - DNA, 137 bp, Staphylococcus aureus
tttatcccgttccttttttatataattataacttattatagcaaaaattctttgatatactaaagatgttactttagtattttggaaagtgagtgagacatagtgtgataaagaaaaaatatttctttatcgttgta

SEQ ID NO: 6732 - DNA, 137 bp, Staphylococcus aureus
tacaacgataaagaaatattttttctttatcacactatgtctcactcactttccaaaatactaaagtaacatctttagtatatcaaagaatttttgctataataagttataattatataaaaaaggaacgggataaa

SEQ ID NO: 6733 - DNA, 172 bp, Staphylococcus aureus
ctactaacaatataacattgtggagcccagaactttgattaatgtatatgaaaatcaaagtaatgcttaagtatgattatttcaaatattttacatacatgaacttttccaatgtacgatactattattataaagcgctcgctaagattttacgatgattagaggttaaaaa

SEQ ID NO: 6734 - DNA, 172 bp, Staphylococcus aureus
tttttaacctctaatcatcgtaaaatcttagcgagcgctttataataatagtatcgtacattggaaaagttcatgtatgtaaaatatttgaaataatcatacttaagcattactttgattttcatatacattaatcaaagttctgggctccacaatgttatattgttagtag

SEQ ID NO: 6735 - DNA, 135 bp, Staphylococcus aureus
ctttttatcgtatatagcatgtccctttttaaaattacaagcataaatattcagactcaaatatagccacacgcctaaactacggagggatgtggctgtcttttttgattgtaattatgtatcagatttaaatca

SEQ ID NO: 6736 - DNA, 135 bp, Staphylococcus aureus
tgatttaaatctgatacataattacaatcaaaaaagacagccacatccctccgtagtttaggcgtgtggctatatttgagtctgaatatttatgcttgtaattttaaaaagggacatgctatatacgataaaaag

SEQ ID NO: 6737 - DNA, 85 bp, Staphylococcus aureus
aataatgtgtgtgtttatacatatatgatttattactaaacttcatcgtttatcaatattaaatccattgatgcgatgttcagag

SEQ ID NO: 6738 - DNA, 85 bp, Staphylococcus aureus
ctctgaacatcgcatcaatggatttaatattgataaacgatgaagtttagtaataaatcatatatgtataaacacacacattatt

SEQ ID NO: 6739 - DNA, 222 bp, Staphylococcus aureus
tcacaaattgatacagtgtttctaaattataatcattctcatttagataattaaaaatgatatttattctcaattaaatatcgctaaatgatacattttctcaattagagtgctaaaataaggtattaaattataattattattatttacaattgagaatgagtttgttatactaagtttaattcatagtaattttaatttacaaataagaggtgtatcaaa

SEQ ID NO: 6740 - DNA, 222 bp, Staphylococcus aureus
tttgatacacctcttatttgtaaattaaaattactatgaattaaacttagtataacaaactcattctcaattgtaaataataataattataatttaataccttattttagcactctaattgagaaaatgtatcatttagcgatatttaattgagaataaatatcatttttaattatctaaatgagaatgattataatttagaaacactgtatcaatttgtga

SEQ ID NO: 6741 - DNA, 85 bp, Staphylococcus aureus
ttaaacatcactacaatagacagataaatatcatacgacatgataggcatttgggtcacttacaataacccaatgtctatattat

SEQ ID NO: 6742 - DNA, 85 bp, Staphylococcus aureus
ataatatagacattgggttattgtaagtgacccaaatgcctatcatgtcgtatgatatttatctgtctattgtagtgatgtttaa

SEQ ID NO: 6743 - DNA, 256 bp, Staphylococcus aureus
gttttttcattttcaaggctaattattgtatttttagtcatttattttttaaactactaatgttaataactctaaatttgatgttgaattaatttgaccgattttaaagcatatcatcatttactttttaatcagagttacatccaaatgatagatttcacgttataccttcacgtataatattatgtatcgtttgtaagcaaatgactaaaagtctattaatatatacatttaattaattgaaaggattgactac

SEQ ID NO: 6744 - DNA, 256 bp, Staphylococcus aureus
gtagtcaatcctttcaattaattaaatgtatatattaatagacttttagtcatttgcttacaaacgatacataatattatacgtgaaggtataacgtgaaatctatcatttggatgtaactctgattaaaaagtaaatgatgatatgctttaaaatcggtcaaattaattcaacatcaaatttagagttattaacattagtagtttaaaaaataaatgactaaaaatacaataattagccttgaaaatgaaaaaac

SEQ ID NO: 6745 - DNA, 67 bp, Staphylococcus aureus
gactaaataaaatactcccttcaaaagtaagcattgtaaaaatgtaaactttgcagggagctttatt

SEQ ID NO: 6746 - DNA, 67 bp, Staphylococcus aureus
aataaagctccctgcaaagtttacatttttacaatgcttacttttgaagggagtattttatttagtc

SEQ ID NO: 6747 - DNA, 246 bp, Staphylococcus aureus
gtgctcacctccctactaatttttacttttataacgcacaaaaatatctcaacataattatacgctgtgtacgatttttttacataaatcttgcacttagcgataactatattgagataactacaagttgttataaaatcaattgctatttaagcatgatgatgaagacgattgagtaagaaaacataggtaatctgaaataattcaagcaaattcattttgttggtattatcatattaaaattta

SEQ ID NO: 6748 - DNA, 246 bp, Staphylococcus aureus
taaattttaatatgataataccaacaaaatgaatttgcttgaattatttcagattacctatgttttcttactcaatcgtcttcatcatcatgcttaaatagcaattgattttataacaacttgtagttatctcaatatagttatcgctaagtgcaagatttatgtaaaaaaatcgtacacagcgtataattatgttgagatatttttgtgcgttataaaagtaaaaattagtagggaggtgagcac

SEQ ID NO: 6749 - DNA, 169 bp, Staphylococcus aureus
taccaaccctcccgatcatgacattcttattcttctttaaatatagtatacaatgtcacatttaatttaaaaagttcatatcaagaaagtaaattggctgtaataaaattttaatatacgacttctttcttcacttattaaggcgaaattttatctcaaatcatgtgcg

SEQ ID NO: 6750 - DNA, 169 bp, Staphylococcus aureus
cgcacatgatttgagataaaatttcgccttaataagtgaagaaagaagtcgtatattaaaattttattacagccaatttactttcttgatatgaactttttaaattaaatgtgacattgtatactatatttaaagaagaataagaatgtcatgatcgggagggttggta

SEQ ID NO: 6751 - DNA, 80 bp, Staphylococcus aureus
aattttacctccaaaatgaacaggttaggaacaaaattatgcgcttcctaacctgccattatatatttcactatttctgt

SEQ ID NO: 6752 - DNA, 80 bp, Staphylococcus aureus
acagaaatagtgaaatatataatggcaggttaggaagcgcataattttgttcctaacctgttcattttggaggtaaaatt

SEQ ID NO: 6753 - DNA, 58 bp, Staphylococcus aureus
atcttatccctctacttaaaattcatatattttaacttcatctttgtttcgtctaata

SEQ ID NO: 6754 - DNA, 58 bp, Staphylococcus aureus
tattagacgaaacaaagatgaagttaaaatatatgaattttaagtagagggataagat

SEQ ID NO: 6755 - DNA, 213 bp, Staphylococcus aureus
gctcagtcttatttcatcattcttaatatcgttaaagaccaacttgtatcttaaacaaatactatctcaatatgtacaaagcttgttatttattcagcattttttgccgttcttcattatatagacttcgtcagttatgctattttacctttaaaatgatgttgtaaatataatgttgtctttatacaaaaatgttttatacctttttattat

SEQ ID NO: 6756 - DNA, 213 bp, Staphylococcus aureus
ataataaaaaggtataaaacatttttgtataaagacaacattatatttacaacatcattttaaaggtaaaatagcataactgacgaagtctatataatgaagaacggcaaaaaatgctgaataaataacaagctttgtacatattgagatagtatttgtttaagatacaagttggtctttaacgatattaagaatgatgaaataagactgagc

SEQ ID NO: 6757 - DNA, 366 bp, Staphylococcus aureus
taataaaagcctcctttaagtcattcatcactaaattgtatcaaatttccaattaaaaatctaagtatttatgaggtgctactttaatttcatataaactgtataaacattatcattcgtttatcaaatcattttttatgaaaacaacactcttttaatattagacaacccaattcaatattatgattatgcaattttaattataaaaatttgctcatatccaaaaaatacgaaagcgcttcctatattggtatgcaagtatttcaaaaagaataaatttaattttcctacttttctaaacatttatctttatgtataatgttttcaagtaactaaattataaattaaataaagggagtgtttatc

SEQ ID NO: 6758 - DNA, 366 bp, Staphylococcus aureus
gataaacactccctttatttaatttataatttagttacttgaaaacattatacataaagataaatgtttagaaaagtaggaaaattaaatttattctttttgaaatacttgcataccaatataggaagcgctttcgtattttttggatatgagcaaatttttataattaaaattgcataatcataatattgaattgggttgtctaatattaaaagagtgttgttttcataaaaaatgatttgataaacgaatgataatgtttatacagtttatatgaaattaaagtagcacctcataaatacttagatttttaattggaaatttgatacaatttagtgatgaatgacttaaaggaggcttttatta

SEQ ID NO: 6759 - DNA, 88 bp, Staphylococcus aureus
ttcataagtcttaacaaattaaaaaggtactaatgttaatcaaaattatgactaacattggtacctttttattatctttaatttacaa

SEQ ID NO: 6760 - DNA, 88 bp, Staphylococcus aureus
ttgtaaattaaagataataaaaaggtaccaatgttagtcataattttgattaacattagtacctttttaatttgttaagacttatgaa

SEQ ID NO: 6761 - DNA, 171 bp, Staphylococcus aureus
tttccgaaactccttttttaacatacatatgattatagcatttttaagtgtcgagttctaaagacttaatatgaattttaagttcttttactctgtaaattttttcgtgaaaaaacaatgattatctaccttattagtgcagatagataaccattgtttatcgttcattta

SEQ ID NO: 6762 - DNA, 171 bp, Staphylococcus aureus
taaatgaacgataaacaatggttatctatctgcactaataaggtagataatcattgttttttcacgaaaaaatttacagagtaaaagaacttaaaattcatattaagtctttagaactcgacacttaaaaatgctataatcatatgtatgttaaaaaaggagtttcggaaa

SEQ ID NO: 6763 - DNA, 108 bp, Staphylococcus aureus
atcgaaacaacccctataattttattctttatgtcattttaacgcattaatctattaaagtgtagcgatttatattttattaaatctgaatcgttactttatttaatt

SEQ ID NO: 6764 - DNA, 108 bp, Staphylococcus aureus
aattaaataaagtaacgattcagatttaataaaatataaatcgctacactttaatagattaatgcgttaaaatgacataaagaataaaattataggggttgtttcgat

SEQ ID NO: 6765 - DNA, 791 bp, Staphylococcus aureus
aaagttcgtttttaactctactcttcacagtttaacagaattggttataaatgtataaaaaatttccgtatattctcattctattttattttttacattaatacaattatctatggcagattaatactgatttctaattgtaaatgttcgcaatactttaatctaattggtatttataatgatccattaagaatatatttttgcattttagtttttctcccctcaactacactatccaactttttataacaattaggacaatcaatagctttagtaataccagaatttattcactttacttctcctattgtatggaattttcaacaatctacttttcctagtttcataatatttcttcttacatttcataatatgttttaaaattattcgcttctaatataacaaattttctactcacaaaaagaatatatattctattgcataggtgtggcattttaaatataagacattaatattgaactccagaatcgtataaatacgaaactgattatagaaaaatacgcagagatttttttaatagtaaatttttatagaaagacataaattgactacgcttctttcaaaatcgactaatatattttcatgaaactttcgatcatattaattattgaatgagatgtttgcaatttagtaaataagctactaaattattacataaactgataatgtgtaaaaattaattattttttaaacatagattaaaattttatattgaaactcttaactaaatttaatataattattttataataaaataaaggagtttttat

SEQ ID NO: 6766 - DNA, 791 bp, Staphylococcus aureus
ataaaaactcctttattttattataaaataattatattaaatttagttaagagtttcaatataaaattttaatctatgtttaaaaaataattaatttttacacattatcagtttatgtaataatttagtagcttatttactaaattgcaaacatctcattcaataattaatatgatcgaaagtttcatgaaaatatattagtcgattttgaaagaagcgtagtcaatttatgtctttctataaaaatttactattaaaaaaatctctgcgtatttttctataatcagtttcgtatttatacgattctggagttcaatattaatgtcttatatttaaaatgccacacctatgcaatagaatatatattctttttgtgagtagaaaatttgttatattagaagcgaataattttaaaacatattatgaaatgtaagaagaaatattatgaaactaggaaaagtagattgttgaaaattccatacaataggagaagtaaagtgaataaattctggtattactaaagctattgattgtcctaattgttataaaaagttggatagtgtagttgaggggagaaaaactaaaatgcaaaaatatattcttaatggatcattataaataccaattagattaaagtattgcgaacatttacaattagaaatcagtattaatctgccatagataattgtattaatgtaaaaaataaaatagaatgagaatatacggaaattttttatacatttataaccaattctgttaaactgtgaagagtagagttaaaaacgaacttt

SEQ ID NO: 6767 - DNA, 295 bp, Staphylococcus aureus
gactatctagatatgattaagtaaactattaatcttattaaaggtctctaggaagaaaaaatttcatgcgatgagattgttttagaaaaagcgacgatatatataatctaacaataatttttaaaatattaagaacccccagcatatgctttatatagcttgctgggggtttctcatacaatatggatcgagcatcttgcatgtataaacaaataggctattcaaagtaaaattactcaaactttgaatagcctttcctcttcaaatagtctttatttaaattggattatgttat

SEQ ID NO: 6768 - DNA, 295 bp, Staphylococcus aureus
ataacataatccaatttaaataaagactatttgaagaggaaaggctattcaaagtttgagtaattttactttgaatagcctatttgtttatacatgcaagatgctcgatccatattgtatgagaaacccccagcaagctatataaagcatatgctgggggttcttaatattttaaaaattattgttagattatatatatcgtcgctttttctaaaacaatctcatcgcatgaaattttttcttcctagagacctttaataagattaatagtttacttaatcatatctagatagtc

SEQ ID NO: 6769 - DNA, 270 bp, Staphylococcus aureus
aaggcgccccactctctttcaattacactttaaataccaaactgcttcaacctaaccttaatgaatgcatattaatataatatagtacgaaaactctcataaataaatagcgaatttgtcataaataaaaatttattctcaaatgaacatacttactttagttcatacactttcaatttatacactgaagtagtctagctgaatgtggtttaatgttattaattctaactcatatttaatttaagtcacacgttagaagaaaaaattaaa

SEQ ID NO: 6770 - DNA, 270 bp, Staphylococcus aureus
tttaattttttcttctaacgtgtgacttaaattaaatatgagttagaattaataacattaaaccacattcagctagactacttcagtgtataaattgaaagtgtatgaactaaagtaagtatgttcatttgagaataaatttttatttatgacaaattcgctatttatttatgagagttttcgtactatattatattaatatgcattcattaaggttaggttgaagcagtttggtatttaaagtgtaattgaaagagagtggggcgcctt

SEQ ID NO: 6771 - DNA, 138 bp, Staphylococcus aureus
aattcatttttttatatacataagagccccttaatttccatacttttaattaaaatcaaccaacaatttaatgacatatacataatttttaagagtattttaataatgtagactataatataaagcgaggtgttgtta

SEQ ID NO: 6772 - DNA, 138 bp, Staphylococcus aureus
taacaacacctcgctttatattatagtctacattattaaaatactcttaaaaattatgtatatgtcattaaattgttggttgattttaattaaaagtatggaaattaaggggctcttatgtatataaaaaaatgaatt

SEQ ID NO: 6773 - DNA, 204 bp, Staphylococcus aureus
aaatttccccctcatgatgattatgacaagctacttcaactcactatattagagtatagaaagttgtctatcttgtattatcattaccgtcaaaataccccttttatcagataattgggtttattatagcatatttataccgttttatgaatgcgctttcaaaaattatctactattcttaatcctaatgtcatgcgaaacttt

SEQ ID NO: 6774 - DNA, 204 bp, Staphylococcus aureus
aaagtttcgcatgacattaggattaagaatagtagataatttttgaaagcgcattcataaaacggtataaatatgctataataaacccaattatctgataaaaggggtattttgacggtaatgataatacaagatagacaactttctatactctaatatagtgagttgaagtagcttgtcataatcatcatgagggggaaattt

SEQ ID NO: 6775 - DNA, 368 bp, Staphylococcus aureus
aaatcgtcatcctttgtctattttctaattactcatatattaaccaattattcaaattataatcgtgttaggttgatttagcagatagtcataaatctcgtgatgccatctattagcatttttatattcaaaacatcaacacttgatattagttctaagtttgtcacatttagtattctattacagctattttaaaactatcgcaaaaacttcttatattatttgttgattgcgtgatttgctcttccaaaaaagttgattaatctatatacttaatctatatttatatattaaccattagggttaaaaattactctagcatttatgaatagatgggagtttattttattatataggagagatgttga

SEQ ID NO: 6776 - DNA, 368 bp, Staphylococcus aureus
tcaacatctctcctatataataaaataaactcccatctattcataaatgctagagtaatttttaaccctaatggttaatatataaatatagattaagtatatagattaatcaacttttttggaagagcaaatcacgcaatcaacaaataatataagaagtttttgcgatagttttaaaatagctgtaatagaatactaaatgtgacaaacttagaactaatatcaagtgttgatgttttgaatataaaaatgctaatagatggcatcacgagatttatgactatctgctaaatcaacctaacacgattataatttgaataattggttaatatatgagtaattagaaaatagacaaaggatgacgattt

SEQ ID NO: 6777 - DNA, 52 bp, Staphylococcus aureus
atcgtgctaaaataattataaagaatacaatttacaagggagatatttgaca

SEQ ID NO: 6778 - DNA, 52 bp, Staphylococcus aureus
tgtcaaatatctcccttgtaaattgtattctttataattattttagcacgat

SEQ ID NO: 6779 - DNA, 196 bp, Staphylococcus aureus
tactatattactgtctaatcatagacatgttgtatttaactaacagttcattaaagtagaatttatttcactttcaatgaactgttttttatttacgtttgactaatttacaaccttttcaatagtagttttcattcctttagctatcctaacccacagattagtgatttctatacaattcctcttttgtctttac

SEQ ID NO: 6780 - DNA, 196 bp, Staphylococcus aureus
gtaaagacaaaagaggaattgtatagaaatcactaatctgtgggttaggatagctaaaggaatgaaaactactattgaaaaggttgtaaattagtcaaacgtaaataaaaaacagttcattgaaagtgaaataaattctactttaatgaactgttagttaaatacaacatgtctatgattagacagtaatatagta

SEQ ID NO: 6781 - DNA, 51 bp, Staphylococcus aureus
atcaattaatcactttttccaaaataatcatataaggaggttcttttcatt

SEQ ID NO: 6782 - DNA, 51 bp, Staphylococcus aureus
aatgaaaagaacctccttatatgattattttggaaaaagtgattaattgat

SEQ ID NO: 6783 - DNA, 119 bp, Staphylococcus aureus
tttttgagacaaaaataaaccatgcttccataatttgatgttcttgaaaacaataaatttcaaggtatacacaaattttttgtaaacatggttttctttttatcatgattaattaaaga

SEQ ID NO: 6784 - DNA, 119 bp, Staphylococcus aureus
tctttaattaatcatgataaaaagaaaaccatgtttacaaaaaatttgtgtataccttgaaatttattgttttcaagaacatcaaattatggaagcatggtttatttttgtctcaaaaa

SEQ ID NO: 6785 - DNA, 269 bp, Staphylococcus aureus
tacttttacccctccatgtcagtcttattttcattttattaaattttagctagaattaacaatcatttatcatttccttaacgctaaaactgtttaactactttaaaagaactatttgctgtgatatgtcattattcgattttaattaatccctcttttttacttacacgagcattaattattaacgcgtttatgcttccacaaaatttttgttgcaaaacagaacacatgttcgtataatgtaattatcagattggggtgaattaagg

SEQ ID NO: 6786 - DNA, 269 bp, Staphylococcus aureus
ccttaattcaccccaatctgataattacattatacgaacatgtgttctgttttgcaacaaaaattttgtggaagcataaacgcgttaataattaatgctcgtgtaagtaaaaaagagggattaattaaaatcgaataatgacatatcacagcaaatagttcttttaaagtagttaaacagttttagcgttaaggaaatgataaatgattgttaattctagctaaaatttaataaaatgaaaataagactgacatggaggggtaaaagta

SEQ ID NO: 6787 - DNA, 185 bp, Staphylococcus aureus
tggtagtgtagttgggtcatgttataatttttatacataaggcacctcgttaatttagtttagtggtatttattaaattataagaagggacccaacacagaaaattcattttattgaattttacatttatgtgcaagttgggcaaagtgtcttattttttaaaagtatttcaaagtaaaattaca

SEQ ID NO: 6788 - DNA, 185 bp, Staphylococcus aureus
tgtaattttactttgaaatacttttaaaaaataagacactttgcccaacttgcacataaatgtaaaattcaataaaatgaattttctgtgttgggtcccttcttataatttaataaataccactaaactaaattaacgaggtgccttatgtataaaaattataacatgacccaactacactacca

SEQ ID NO: 6789 - DNA, 143 bp, Staphylococcus aureus
caaggctgagacggcaccctaggaaagcgaagccattcaatacgaagtattgtataaatagagaacagcagtaagatattttctaattgaaaattatcttactgctgttttttagggatttatgtcccagcctctaaatgtta

SEQ ID NO: 6790 - DNA, 143 bp, Staphylococcus aureus
taacatttagaggctgggacataaatccctaaaaaacagcagtaagataattttcaattagaaaatatcttactgctgttctctatttatacaatacttcgtattgaatggcttcgctttcctagggtgccgtctcagccttg

SEQ ID NO: 6791 - DNA, 379 bp, Staphylococcus aureus
ctcaatttcacctctgttaaattaaatacctatctacatttcattatactatcatatatagaataatcattaaataaatacccacttttacgaaatatattcatcaaattatatagtgagcaagctaatgattattttcaaaaatgccgaggaacctctgtttcaacgtgacatgaccttatatgctaatgttaacaatgactattatcgtgaatgctaacttaagattgttatttatgataagatgattttaagtttttaacttaatatccccaccatctataaaaatatgttttaactgattgataagtcttatacaccgagaaatcacctcaaacaattttatatttcatttagtaaaatataactttatttaaca

SEQ ID NO: 6792 - DNA, 379 bp, Staphylococcus aureus
tgttaaataaagttatattttactaaatgaaatataaaattgtttgaggtgatttctcggtgtataagacttatcaatcagttaaaacatatttttatagatggtggggatattaagttaaaaacttaaaatcatcttatcataaataacaatcttaagttagcattcacgataatagtcattgttaacattagcatataaggtcatgtcacgttgaaacagaggttcctcggcatttttgaaaataatcattagcttgctcactatataatttgatgaatatatttcgtaaaagtgggtatttatttaatgattattctatatatgatagtataatgaaatgtagataggtatttaatttaacagaggtgaaattgag

SEQ ID NO: 6793 - DNA, 56 bp, Staphylococcus aureus
ataacaccgatattagagaaattatgcttcctaatatcggtgcttacatcctttat

SEQ ID NO: 6794 - DNA, 56 bp, Staphylococcus aureus
ataaaggatgtaagcaccgatattaggaagcataatttctctaatatcggtgttat

SEQ ID NO: 6795 - DNA, 59 bp, Staphylococcus aureus
ataggtcactcatcccaataaaattatttattcgttttttataactttaagacctaaag

SEQ ID NO: 6796 - DNA, 59 bp, Staphylococcus aureus
ctttaggtcttaaagttataaaaaacgaataaataattttattgggatgagtgacctat

SEQ ID NO: 6797 - DNA, 120 bp, Staphylococcus aureus
aaggtgcctcccgtttcatccttaacaaaaattaacaaagaatttgcaattaatttatttcattaccttttattactataaattggtataatgttgtaaatgctaaaggaggtttttaca

SEQ ID NO: 6798 - DNA, 120 bp, Staphylococcus aureus
tgtaaaaacctcctttagcatttacaacattataccaatttatagtaataaaaggtaatgaaataaattaattgcaaattctttgttaatttttgttaaggatgaaacgggaggcacctt

SEQ ID NO: 6799 - DNA, 65 bp, Staphylococcus aureus
atttacaataagacaaactttgaggttgggaaaatttaaaattcccaacctcaaaattattttta

SEQ ID NO: 6800 - DNA, 65 bp, Staphylococcus aureus
taaaaataattttgaggttgggaattttaaattttcccaacctcaaagtttgtcttattgtaaat

SEQ ID NO: 6801 - DNA, 73 bp, Staphylococcus aureus
ctaaaacgaatgtctttaatctctacgtgacaaccgtagcgtcaacataaacaatcgttttaaacagtcaatt

SEQ ID NO: 6802 - DNA, 73 bp, Staphylococcus aureus
aattgactgtttaaaacgattgtttatgttgacgctacggttgtcacgtagagattaaagacattcgttttag

SEQ ID NO: 6803 - DNA, 258 bp, Staphylococcus aureus
tttatttcacctcaacatcgacattataacaaatataaatttttttaataagttattgaatttcaaaagttcaaggtactaatcactttcaactaaaatagcgcaacaaaaccattcaatcaaaatgattattgattgcgatatattgtgttcaatgatattatttaagtgtatccacagaattatactacacaaccccaagtctggtaccagcagacttggggttatttatgtgtgtaggatcattttttatttttc

SEQ ID NO: 6804 - DNA, 258 bp, Staphylococcus aureus
gaaaaataaaaaatgatcctacacacataaataaccccaagtctgctggtaccagacttggggttgtgtagtataattctgtggatacacttaaataatatcattgaacacaatatatcgcaatcaataatcattttgattgaatggttttgttgcgctattttagttgaaagtgattagtaccttgaacttttgaaattcaataacttattaaaaaaatttatatttgttataatgtcgatgttgaggtgaaataaa

SEQ ID NO: 6805 - DNA, 199 bp, Staphylococcus aureus
tacactacacctccgttcgactaaagtatcatactgaaggatgacctacacctattctaacataaaaacagaacatatgttcgtattttggcagcagattttacatattattcgttaattcaccaacaacactttatctttggtataattaaagataatatataggcatacaatttttttaaagagaggttaagcaata

SEQ ID NO: 6806 - DNA, 199 bp, Staphylococcus aureus
tattgcttaacctctctttaaaaaaattgtatgcctatatattatctttaattataccaaagataaagtgttgttggtgaattaacgaataatatgtaaaatctgctgccaaaatacgaacatatgttctgtttttatgttagaataggtgtaggtcatccttcagtatgatactttagtcgaacggaggtgtagtgta

SEQ ID NO: 6807 - DNA, 278 bp, Staphylococcus aureus
ttaatttcaaccaataatctgatgagtatgactcggattattggttttttatttttaaaattattccttctttcaaagtatcataagatatattttattcagcaacttgtcaaacactatacctaattagttttatacatctctcctaacaaaatttaatttatttggtacaaatttatataacttttggcaaatcacttcaaacattcaagcatcacatctctacaaatgtaaaaggcaccccacgattgtgagatgccttattataaaattaaaga

SEQ ID NO: 6808 - DNA, 278 bp, Staphylococcus aureus
tctttaattttataataaggcatctcacaatcgtggggtgccttttacatttgtagagatgtgatgcttgaatgtttgaagtgatttgccaaaagttatataaatttgtaccaaataaattaaattttgttaggagagatgtataaaactaattaggtatagtgtttgacaagttgctgaataaaatatatcttatgatactttgaaagaaggaataattttaaaaataaaaaaccaataatccgagtcatactcatcagattattggttgaaattaa

SEQ ID NO: 6809 - DNA, 212 bp, Staphylococcus aureus
aaattatctctccttttttatgtaattcgtgattgcaactttattatagccagactttctctattttttgaattaactgaatattaataataaattatctttaacaataattttttaacactgttaaaagttcttttaattttgattaactaactaatttacaatacctaaaatgttgtttgattttgtttataccaagtttcaaacttaaa

SEQ ID NO: 6810 - DNA, 212 bp, Staphylococcus aureus
tttaagtttgaaacttggtataaacaaaatcaaacaacattttaggtattgtaaattagttagttaatcaaaattaaaagaacttttaacagtgttaaaaaattattgttaaagataatttattattaatattcagttaattcaaaaaatagagaaagtctggctataataaagttgcaatcacgaattacataaaaaaggagagataattt

SEQ ID NO: 6811 - DNA, 97 bp, Staphylococcus aureus
atttacttaaaaatataaattcgatttaataattaatttaaatttagttaatcaattttgcatctattttgttgtaagctatataaaaggagtgata

SEQ ID NO: 6812 - DNA, 97 bp, Staphylococcus aureus
tatcactccttttatatagcttacaacaaaatagatgcaaaattgattaactaaatttaaattaattattaaatcgaatttatatttttaagtaaat

SEQ ID NO: 6813 - DNA, 371 bp, Staphylococcus aureus
aattacttatcattcaaaaagtaaaacagcataatatcaaggtttataactttatcattatcaataatacctcatataaaataaaattttagggactttttagggactttaaatttaaaattacaagtttaatagaaacatcaaaataatcacatgtttgtgtggaatgtacaccccaaaagctagactgaaaaatctattttttgaggtgtatttttataggtaaatataataaattagagtagacaactcagaattccaattttataataatattgcttgacatatcaaactagatagtactattttgaatatattattataatcaaaaattcattgtaaacttttagacaaaaggaagtaataaaaac

SEQ ID NO: 6814 - DNA, 371 bp, Staphylococcus aureus
gtttttattacttccttttgtctaaaagtttacaatgaatttttgattataataatatattcaaaatagtactatctagtttgatatgtcaagcaatattattataaaattggaattctgagttgtctactctaatttattatatttacctataaaaatacacctcaaaaaatagatttttcagtctagcttttggggtgtacattccacacaaacatgtgattattttgatgtttctattaaacttgtaattttaaatttaaagtccctaaaaagtccctaaaattttattttatatgaggtattattgataatgataaagttataaaccttgatattatgctgttttactttttgaatgataagtaatt

SEQ ID NO: 6815 - DNA, 316 bp, Staphylococcus aureus
agggtgtgtattgttatttacctaatttatagtctaattgtctatttcatctgcattataaattttttcataatggctgcaccattcttaatgactaatgctgattatgtatggacgcctatgactacagttacgttatttattttgagtttgattattttcttgatatttataaaaacaaaagatgtcgttcatttaacaattttcatattaaacttacttttttcaatactttattgtttgcctatactgttttatttatgaacacttttatattatctagaaaattaaaaccacccgtaaaagggtggttttt

SEQ ID NO: 6816 - DNA, 316 bp, Staphylococcus aureus
aaaaaccacccttttacgggtggttttaattttctagataatataaaagtgttcataaataaaacagtataggcaaacaataaagtattgaaaaaagtaagtttaatatgaaaattgttaaatgaacgacatcttttgtttttataaatatcaagaaaataatcaaactcaaaataaataacgtaactgtagtcataggcgtccatacataatcagcattagtcattaagaatggtgcagccattatgaaaaaatttataatgcagatgaaatagacaattagactataaattaggtaaataacaatacacaccct

SEQ ID NO: 6817 - DNA, 682 bp, Staphylococcus aureus
tttttattctccttagtaattagtactaatttattttaatgactaactaaaaaaaagtacattaattattcattaactatatagatcttcttattaaatgaaaattaataaattatcaaattgacataccttattgtatttatagaaaaacaaaaaaaggtaagcaccgaaatgcttacctacttcccataaacaatataacacatatacattgatttggaaagcgcaaaaataaatttaataaactagcccgaaaaggagcaatacataaaaaatgaaaggcgctccttgaaaacgcccaaggtaatattaacataaaatggctactattgcattatctaattttatttaattaaaacaaatatatagcacaaaaaaactagcccgaaggctagcttatgaatagatgaaaatttgaacacattgctgtgtctaagataaatataacacatattaattactattaatagaaaaattatagcgttttttagatcatttcaatttatcaagaccaaattcatcaaaacactaattgaactttaatttttagttaaaaataattaatcttttattaatttcaagttaattaatatatttcgtcgattagattaaactcattttaggaatttcgcaaaactaactataaatttaaatatagaatttaaggagaattaacatcatt

SEQ ID NO: 6818 - DNA, 682 bp, Staphylococcus aureus
aatgatgttaattctccttaaattctatatttaaatttatagttagttttgcgaaattcctaaaatgagtttaatctaatcgacgaaatatattaattaacttgaaattaataaaagattaattatttttaactaaaaattaaagttcaattagtgttttgatgaatttggtcttgataaattgaaatgatctaaaaaacgctataatttttctattaatagtaattaatatgtgttatatttatcttagacacagcaatgtgttcaaattttcatctattcataagctagccttcgggctagtttttttgtgctatatatttgttttaattaaataaaattagataatgcaatagtagccattttatgttaatattaccttgggcgttttcaaggagcgcctttcattttttatgtattgctccttttcgggctagtttattaaatttatttttgcgctttccaaatcaatgtatatgtgttatattgtttatgggaagtaggtaagcatttcggtgcttacctttttttgtttttctataaatacaataaggtatgtcaatttgataatttattaattttcatttaataagaagatctatatagttaatgaataattaatgtacttttttttagttagtcattaaaataaattagtactaattactaaggagaataaaaa

SEQ ID NO: 6819 - DNA, 94 bp, Staphylococcus aureus
tagtagttacataaattaaaaggtagatatttcttttttatataaaggtttggcagacatttcataacttgccaaacctttatatatctaatta

SEQ ID NO: 6820 - DNA, 94 bp, Staphylococcus aureus
taattagatatataaaggtttggcaagttatgaaatgtctgccaaacctttatataaaaaagaaatatctaccttttaatttatgtaactacta

SEQ ID NO: 6821 - DNA, 369 bp, Staphylococcus aureus
aagtgttaggttactaggccacttaacaggctatatagttcactcctactatatacaattaattataacataaaaagcaccccgtaaactattatacgggaatgctaaagtcatatatactacgggggagtagtatgaaaactatgctctctatcataagaaaaaacacccagtgacatgcttgggtgaacaaggatgtaaatagttgatgcatgtgtaacacatcataacaaaaaattaaccggaaggctagctataacatacaatctaaaaagacgtcctttgaatacgtctagaaagattataacataaaaaaataggcaagtaccgaagtacctgcctaaaaaaggattatccactttttcatcc

SEQ ID NO: 6822 - DNA, 369 bp, Staphylococcus aureus
ggatgaaaaagtggataatccttttttaggcaggtacttcggtacttgcctatttttttatgttataatctttctagacgtattcaaaggacgtctttttagattgtatgttatagctagccttccggttaattttttgttatgatgtgttacacatgcatcaactatttacatccttgttcacccaagcatgtcactgggtgttttttcttatgatagagagcatagttttcatactactcccccgtagtatatatgactttagcattcccgtataatagtttacggggtgctttttatgttataattaattgtatatagtaggagtgaactatatagcctgttaagtggcctagtaacctaacactt

SEQ ID NO: 6823 - DNA, 88 bp, Staphylococcus aureus
gtgcatgaatgagaatttgatgaaagataattttcactacacatattcaatcaagacattgctttctataataaacaactattttgtt

SEQ ID NO: 6824 - DNA, 88 bp, Staphylococcus aureus
aacaaaatagttgtttattatagaaagcaatgtcttgattgaatatgtgtagtgaaaattatctttcatcaaattctcattcatgcac

SEQ ID NO: 6825 - DNA, 138 bp, Staphylococcus aureus
taacacacttatttaagatgataaatatcaacaacttcattttatattgagaaaatattaaaaatcaagaaaatattaaaataaactaaacttacattaaaaaataattaacaaatatttaacattttaacctaagaa

SEQ ID NO: 6826 - DNA, 138 bp, Staphylococcus aureus
ttcttaggttaaaatgttaaatatttgttaattattttttaatgtaagtttagtttattttaatattttcttgatttttaatattttctcaatataaaatgaagttgttgatatttatcatcttaaataagtgtgtta

SEQ ID NO: 6827 - DNA, 52 bp, Staphylococcus aureus
attcttatctccttttatccaaaataaaaagacgactaataagccgtctatt

SEQ ID NO: 6828 - DNA, 52 bp, Staphylococcus aureus
aatagacggcttattagtcgtctttttattttggataaaaggagataagaat

SEQ ID NO: 6829 - DNA, 55 bp, Staphylococcus aureus
taaagattaaattaataaccatttaaccatcgaaaccagccaaagttagcgatgg

SEQ ID NO: 6830 - DNA, 55 bp, Staphylococcus aureus
ccatcgctaactttggctggtttcgatggttaaatggttattaatttaatcttta

SEQ ID NO: 6831 - DNA, 193 bp, Staphylococcus aureus
agcatattatagcacatatactttttttactgcttgtatactttcagattattctcgctttgttcaaaactatctatagaaattttttataaaacttacaaacagcagtaaaaaagtgaatgttttaagtatagtaataaaataacttatggtactttttatagattttaaattttttcagccaaaatttcac

SEQ ID NO: 6832 - DNA, 193 bp, Staphylococcus aureus
gtgaaattttggctgaaaaaatttaaaatctataaaaagtaccataagttattttattactatacttaaaacattcacttttttactgctgtttgtaagttttataaaaaatttctatagatagttttgaacaaagcgagaataatctgaaagtatacaagcagtaaaaaaagtatatgtgctataatatgct

SEQ ID NO: 6833 - DNA, 108 bp, Staphylococcus aureus
ctctaaagcataattccatataaacttgttattatccgaaatttttgtataatagattatttttgttggagtaattattagttatatacaataattatggaatgatca

SEQ ID NO: 6834 - DNA, 108 bp, Staphylococcus aureus
tgatcattccataattattgtatataactaataattactccaacaaaaataatctattatacaaaaatttcggataataacaagtttatatggaattatgctttagag

SEQ ID NO: 6835 - DNA, 55 bp, Staphylococcus aureus
aactacacctactttctaagaaagctatgagcgtaatgctcataacttagtatag

SEQ ID NO: 6836 - DNA, 55 bp, Staphylococcus aureus
ctatactaagttatgagcattacgctcatagctttcttagaaagtaggtgtagtt

SEQ ID NO: 6837 - DNA, 60 bp, Staphylococcus aureus
tttttacctcctttctaaaaaagttcaaaaaaataaccctaaccaaacggttaaggttaa

SEQ ID NO: 6838 - DNA, 60 bp, Staphylococcus aureus
ttaaccttaaccgtttggttagggttatttttttgaacttttttagaaaggaggtaaaaa

SEQ ID NO: 6839 - DNA, 53 bp, Staphylococcus aureus
tttataatactctccttattttcaaataaaatagaggggttgccccctcttat

SEQ ID NO: 6840 - DNA, 53 bp, Staphylococcus aureus
ataagagggggcaacccctctattttatttgaaaataaggagagtattataaa

SEQ ID NO: 6841 - DNA, 125 bp, Staphylococcus aureus
taacttactttgattagatggctctactacaacatttaaatcgtatgtgtcgccaactttaagtgttttaatgctatctggtatattaaccgactttaccgcagtttccgatgaagccggttttg

SEQ ID NO: 6842 - DNA, 125 bp, Staphylococcus aureus
caaaaccggcttcatcggaaactgcggtaaagtcggttaatataccagatagcattaaaacacttaaagttggcgacacatacgatttaaatgttgtagtagagccatctaatcaaagtaagtta

SEQ ID NO: 6843 - DNA, 231 bp, Staphylococcus aureus
aatgtttcaccttatataacttaagtagtatcaagacgcatctatacttgatgtgtagtaatgtatttacaattagtttgaacatgttcatacctcataaataaaaagacacatcacatagtaatgcgcctcttgttcatgcgtcgtattagcatttaataaccttaaatattaatctgatactaacataataaactgttttaatgcggacttacatagggtaaaagtccg

SEQ ID NO: 6844 - DNA, 231 bp, Staphylococcus aureus
cggacttttaccctatgtaagtccgcattaaaacagtttattatgttagtatcagattaatatttaaggttattaaatgctaatacgacgcatgaacaagaggcgcattactatgtgatgtgtctttttatttatgaggtatgaacatgttcaaactaattgtaaatacattactacacatcaagtatagatgcgtcttgatactacttaagttatataaggtgaaacatt

SEQ ID NO: 6845 - DNA, 65 bp, Staphylococcus aureus
taacgtagtacgtccatcatttaagacgtagcagttaccacttgaaccagttgctattgtttcaa

SEQ ID NO: 6846 - DNA, 65 bp, Staphylococcus aureus
ttgaaacaatagcaactggttcaagtggtaactgctacgtcttaaatgatggacgtactacgtta

SEQ ID NO: 6847 - DNA, 54 bp, Staphylococcus aureus
ttctatctttcctttcgtgtataatgttgttatcaacctaaggtagtgataagt

SEQ ID NO: 6848 - DNA, 54 bp, Staphylococcus aureus
acttatcactaccttaggttgataacaacattatacacgaaaggaaagatagaa

SEQ ID NO: 6849 - DNA, 50 bp, Staphylococcus aureus
attgtttgtgctcctttctgctatactcctattaaggaggtgaatgactt

SEQ ID NO: 6850 - DNA, 50 bp, Staphylococcus aureus
aagtcattcacctccttaataggagtatagcagaaaggagcacaaacaat

SEQ ID NO: 6851 - DNA, 159 bp, Staphylococcus aureus
accaatccattatttcataatactaaccttaaatttacagaggttttaattatgaaacatgaaaaaagcaatcttaactttaagtcttatatttattacctactacctcacttttaaatatatgtggattaaagaattgaagtattaatcatgcttatt

SEQ ID NO: 6852 - DNA, 159 bp, Staphylococcus aureus
aataagcatgattaatacttcaattctttaatccacatatatttaaaagtgaggtagtaggtaataaatataagacttaaagttaagattgcttttttcatgtttcataattaaaacctctgtaaatttaaggttagtattatgaaataatggattggt

SEQ ID NO: 6853 - DNA, 99 bp, Staphylococcus aureus
ttttactaaacaaaaaaacgcctactagtgtgaaaacgtattgattaatagcgcctatgtggcgctttaatatataaagtaagcaaaggagaaatgaaa

SEQ ID NO: 6854 - DNA, 99 bp, Staphylococcus aureus
tttcatttctcctttgcttactttatatattaaagcgccacataggcgctattaatcaatacgttttcacactagtaggcgtttttttgtttagtaaaa

SEQ ID NO: 6855 - DNA, 62 bp, Staphylococcus aureus
tgcgaaatttcgggtagctcgcctacccttattattttttgccaattttgaggagggaacac

SEQ ID NO: 6856 - DNA, 62 bp, Staphylococcus aureus
gtgttccctcctcaaaattggcaaaaaataataagggtaggcgagctacccgaaatttcgca

SEQ ID NO: 6857 - DNA, 237 bp, Staphylococcus aureus
tgctcaactaactaataactcgcttcgttctaaaaggacgaagcgagttatattgttaaaatttgaattgacttacattttaataaaatcatcttaacaactttaatttttcattaatacaagtctttactctacactcaaacaagattcatacactgcacatcataataaatctatctactcaaatataaataaaagttacctactacattctatgtagcaggcaacttttattac

SEQ ID NO: 6858 - DNA, 237 bp, Staphylococcus aureus
gtaataaaagttgcctgctacatagaatgtagtaggtaacttttatttatatttgagtagatagatttattatgatgtgcagtgtatgaatcttgtttgagtgtagagtaaagacttgtattaatgaaaaattaaagttgttaagatgattttattaaaatgtaagtcaattcaaattttaacaatataactcgcttcgtccttttagaacgaagcgagttattagttagttgagca

SEQ ID NO: 6859 - DNA, 308 bp, Staphylococcus aureus
aaaaatagagaatatatatttaactatttattaaatgattttgttaatattattaaatactttatcctctttaaaaataatgtgtgtacaaagtcattaatttagcaaatatttttatttagtagttaataaccatcgatttgaaatttatatataattattagctaaataatatcctgcatctttctcatacaatttactataaaattaagcatacccgatatcagtgttaataagatcgttgatactagacagttaatttcatagaacgaaatcaaataacacgctactttctgcattttaaatta

SEQ ID NO: 6860 - DNA, 308 bp, Staphylococcus aureus
taatttaaaatgcagaaagtagcgtgttatttgatttcgttctatgaaattaactgtctagtatcaacgatcttattaacactgatatcgggtatgcttaattttatagtaaattgtatgagaaagatgcaggatattatttagctaataattatatataaatttcaaatcgatggttattaactactaaataaaaatatttgctaaattaatgactttgtacacacattatttttaaagaggataaagtatttaataatattaacaaaatcatttaataaatagttaaatatatattctctattttt

SEQ ID NO: 6861 - DNA, 73 bp, Staphylococcus aureus
gaacgatgctgtcagctgccctattcgcgtgctggcagttttttattgcgaattttaagttgatagaaatagc

SEQ ID NO: 6862 - DNA, 73 bp, Staphylococcus aureus
gctatttctatcaacttaaaattcgcaataaaaaactgccagcacgcgaatagggcagctgacagcatcgttc

SEQ ID NO: 6863 - DNA, 84 bp, Staphylococcus aureus
gtaatacacatcagtaacatttctattttcatttatgatattatctaattattaatttataatataaaggagtatgcaattaaa

SEQ ID NO: 6864 - DNA, 84 bp, Staphylococcus aureus
tttaattgcatactcctttatattataaattaataattagataatatcataaatgaaaatagaaatgttactgatgtgtattac

SEQ ID NO: 6865 - DNA, 398 bp, Staphylococcus aureus
aataactatccatctttaacaagaaatgaactagtgttttaatctattacatttaaaaaactacctaaacaggtagttttttgttttttatttattttaggcccattaaatgtcttatctctttaattaagtaaaatgcacaagtacacctttaaaaagatttactcaaaactaaactatacctagttaaccgcttgtgattaagaaattttaaatgtggtttcttttaattatgtcaaccacccataaggattttaatcaagcactcattcattcctgcactcgcaatatgcattacttatagaagtggatgcactctcatattatggcaataccataactcccgcaccataatgatttaaataccattatgaatctcaattacaaattagcacata

SEQ ID NO: 6866 - DNA, 398 bp, Staphylococcus aureus
tatgtgctaatttgtaattgagattcataatggtatttaaatcattatggtgcgggagttatggtattgccataatatgagagtgcatccacttctataagtaatgcatattgcgagtgcaggaatgaatgagtgcttgattaaaatccttatgggtggttgacataattaaaagaaaccacatttaaaatttcttaatcacaagcggttaactaggtatagtttagttttgagtaaatctttttaaaggtgtacttgtgcattttacttaattaaagagataagacatttaatgggcctaaaataaataaaaaacaaaaaactacctgtttaggtagttttttaaatgtaatagattaaaacactagttcatttcttgttaaagatggatagttatt

SEQ ID NO: 6867 - DNA, 579 bp, Staphylococcus aureus
gtgtcttaaattaaaatattttcatacgctctaatatttatttggaacgaatcatactcgtctatcatggaatgttctagttagtcaaaactagaaactgttttacatcattcccggcattaagggcggtatgaaatagatataaatcacatacaaaaatactattaaatcagtatcgtgtattctttatacattcaatttttttagtttttttatttcattatgaccaatttatgaccaccaattattacacacataaatctctataagtatatttgcaatgatcgatatgatgatttttcattgcaatataatgattctctcagcatcttatatcacctaataaagttaatgtaaaatgttaaaattgataaaactatataaatttgtgcacccaacatcacctcataattaacgtattcaaatacgtattcactgcctgcaacgtgtggaatgatacatatttttctataactcttcctttataaccttttgtattttttatgaattttctaaaatttattattcaacttatatttataatgttattataaatataatgaaaaggaagtgcctaat

SEQ ID NO: 6868 - DNA, 579 bp, Staphylococcus aureus
attaggcacttccttttcattatatttataataacattataaatataagttgaataataaattttagaaaattcataaaaaatacaaaaggttataaaggaagagttatagaaaaatatgtatcattccacacgttgcaggcagtgaatacgtatttgaatacgttaattatgaggtgatgttgggtgcacaaatttatatagttttatcaattttaacattttacattaactttattaggtgatataagatgctgagagaatcattatattgcaatgaaaaatcatcatatcgatcattgcaaatatacttatagagatttatgtgtgtaataattggtggtcataaattggtcataatgaaataaaaaaactaaaaaaattgaatgtataaagaatacacgatactgatttaatagtatttttgtatgtgatttatatctatttcataccgcccttaatgccgggaatgatgtaaaacagtttctagttttgactaactagaacattccatgatagacgagtatgattcgttccaaataaatattagagcgtatgaaaatattttaatttaagacac

SEQ ID NO: 6869 - DNA, 168 bp, Staphylococcus aureus
ttccaattattatagtttagattcactgtataaataaccgcactttctattaatatagaagtgcggtttaatctatatatatatgcatcctaaaaaggcaagcaccgaagtacttacctttcaaatatatctaatactttcactttttatatcaaaatcggattaaca

SEQ ID NO: 6870 - DNA, 168 bp, Staphylococcus aureus
tgttaatccgattttgatataaaaagtgaaagtattagatatatttgaaaggtaagtacttcggtgcttgcctttttaggatgcatatatatatagattaaaccgcacttctatattaatagaaagtgcggttatttatacagtgaatctaaactataataattggaa

SEQ ID NO: 6871 - DNA, 786 bp, Staphylococcus aureus
tttttatctcctttatccaacattcccaaaaagtatctagatacactttaaatatatgttatattcttaaatattcaattaaaaaatattaaaagaaaattaattatatttaatgatttatctttatttataggaattaagttatgctttgaaaattaattaactatatttcatttgaacttatatacaaaactctttctctaagaaaaacagaggatttctaagcatcttgaattaataacattgtttatatattcacacttttataattaatgcattcatttttgcaaattctaaaattggtttctactgttaattttatattcatatatttaatcttatagtcaaaattatttttttgctgttataaggaactagctatatattatataactactataacaactcaatgttaaatgccatatgcgttaattgcctattttgctataaaacttagtaagtcatatagtcgattcctatcgtatagagatataataataggcaagtaccgaagtacttgcctaaatatcaacaagattaacatgtgaataataatggaaataaaaagtcagcccgaaggctaacttacgaatagatgaaaatttgaacacattgctgtgtctaaaatgattatagcataaatgacgaatacttctagctcaaaattattatattttaatgataaaattttatgtatttgttaataattatttaattgatttacataaataataattgtaaaattactttgtaattgattgcaaataagttataggagaaaataaa

SEQ ID NO: 6872 - DNA, 786 bp, Staphylococcus aureus
tttattttctcctataacttatttgcaatcaattacaaagtaattttacaattattatttatgtaaatcaattaaataattattaacaaatacataaaattttatcattaaaatataataattttgagctagaagtattcgtcatttatgctataatcattttagacacagcaatgtgttcaaattttcatctattcgtaagttagccttcgggctgactttttatttccattattattcacatgttaatcttgttgatatttaggcaagtacttcggtacttgcctattattatatctctatacgataggaatcgactatatgacttactaagttttatagcaaaataggcaattaacgcatatggcatttaacattgagttgttatagtagttatataatatatagctagttccttataacagcaaaaaaataattttgactataagattaaatatatgaatataaaattaacagtagaaaccaattttagaatttgcaaaaatgaatgcattaattataaaagtgtgaatatataaacaatgttattaattcaagatgcttagaaatcctctgtttttcttagagaaagagttttgtatataagttcaaatgaaatatagttaattaattttcaaagcataacttaattcctataaataaagataaatcattaaatataattaattttcttttaatattttttaattgaatatttaagaatataacatatatttaaagtgtatctagatactttttgggaatgttggataaaggagataaaaa

SEQ ID NO: 6873 - DNA, 152 bp, Staphylococcus aureus
cttttttcgagaggcagattactcctgcctcttttcttttgaacagtgataatcttctggatctatgtaacactcaattacttcagattctttacctttaacttcctttaattactttctctctatctcctcaaaaagttgtgctttttcat

SEQ ID NO: 6874 - DNA, 152 bp, Staphylococcus aureus
atgaaaaagcacaactttttgaggagatagagagaaagtaattaaaggaagttaaaggtaaagaatctgaagtaattgagtgttacatagatccagaagattatcactgttcaaaagaaaagaggcaggagtaatctgcctctcgaaaaaag

SEQ ID NO: 6875 - DNA, 69 bp, Staphylococcus aureus
tttttttacttctcacctttagtgaaatactcttatcctttctcttcttgcgttaatgttgctaattag

SEQ ID NO: 6876 - DNA, 69 bp, Staphylococcus aureus
ctaattagcaacattaacgcaagaagagaaaggataagagtatttcactaaaggtgagaagtaaaaaaa

SEQ ID NO: 6877 - DNA, 444 bp, Staphylococcus aureus
ccactaagttattttgtttcatatggttttaatctacggccaatctcaaagatagattgaccagcgatgtttaaagtcatatttcacggatccacatttacgataaacatatctagttacacaatattatcccttactgcaacacaggacgtttctcagcgtaaaaaacaccactagaaagtgactttaaagaatataactaattcaaacttatattaattaatattctttaaatgaccactcacactttgttttttgctatttgtaactttaaaatgttgtttaaatctatatttttttttgatatagctccctatgtaacaaacactttttaattaatatatatttaaacaataatttagagatggttaattgattcatttaaataatatttatacattctatatgtaaacgtttacacatttgaatgaaggagaattaaaa

SEQ ID NO: 6878 - DNA, 444 bp, Staphylococcus aureus
ttttaattctccttcattcaaatgtgtaaacgtttacatatagaatgtataaatattatttaaatgaatcaattaaccatctctaaattattgtttaaatatatattaattaaaaagtgtttgttacatagggagctatatcaaaaaaaaatatagatttaaacaacattttaaagttacaaatagcaaaaaacaaagtgtgagtggtcatttaaagaatattaattaatataagtttgaattagttatattctttaaagtcactttctagtggtgttttttacgctgagaaacgtcctgtgttgcagtaagggataatattgtgtaactagatatgtttatcgtaaatgtggatccgtgaaatatgactttaaacatcgctggtcaatctatctttgagattggccgtagattaaaaccatatgaaacaaaataacttagtgg

SEQ ID NO: 6879 - DNA, 154 bp, Staphylococcus aureus
tttaccactttttctgtaataattattaataaagggagtccgttaattataataagcgttctcccttttatctttataacgctttaatataaagctagggtgaattagtaaactaatcctcactaactcaatatgataatcgtttttactgtaa

SEQ ID NO: 6880 - DNA, 154 bp, Staphylococcus aureus
ttacagtaaaaacgattatcatattgagttagtgaggattagtttactaattcaccctagctttatattaaagcgttataaagataaaagggagaacgcttattataattaacggactccctttattaataattattacagaaaaagtggtaaa

SEQ ID NO: 6881 - DNA, 449 bp, Staphylococcus aureus
ttctacacctctttcttttaattatttcatacctaaattataccatttttacaggtctaaaacaaacttacgttcgctttatagcgcgttttatcaattgtttagcttatcatatataacacttataaaatcatgttataaacttaacgttaggcttttcacattaacctaatatagaacttaagttcggtaaaataacacgaacaaacagcgaacaaacttaacttttaggcctatgccaaaaacacaaactttagcttgtattagcgttaacaaagttcgcacaccttgcacaaatcttgccattttttcaattctcaaagactgtataccttccgattttaaaagccaacaccttccgaaaaccttaccattttaaactgctatacctcgtataaaatcatagtattttattaggagccacacactacatgtgacccctcataaca

SEQ ID NO: 6882 - DNA, 449 bp, Staphylococcus aureus
tgttatgaggggtcacatgtagtgtgtggctcctaataaaatactatgattttatacgaggtatagcagtttaaaatggtaaggttttcggaaggtgttggcttttaaaatcggaaggtatacagtctttgagaattgaaaaaatggcaagatttgtgcaaggtgtgcgaactttgttaacgctaatacaagctaaagtttgtgtttttggcataggcctaaaagttaagtttgttcgctgtttgttcgtgttattttaccgaacttaagttctatattaggttaatgtgaaaagcctaacgttaagtttataacatgattttataagtgttatatatgataagctaaacaattgataaaacgcgctataaagcgaacgtaagtttgttttagacctgtaaaaatggtataatttaggtatgaaataattaaaagaaagaggtgtagaa

SEQ ID NO: 6883 - DNA, 309 bp, Staphylococcus aureus
gtgtaacctccatatttatattgattgtgtaccatacacagttaaatacacacctttttttactttcgtgtactggttaaaacattgatatatatagcctcgtgataattagtacacaaagtacacagaaattttagtgatagttgtatattatttagaaatctacgataattaatttattaattttaactatgactatatatttatatgtgtacattgtgtacttcgtgtactatctgcatgtaactgttgatattattgaatttatcgagtacacatattttaaaattgagtgtgtacttgtgtgta

SEQ ID NO: 6884 - DNA, 309 bp, Staphylococcus aureus
tacacacaagtacacactcaattttaaaatatgtgtactcgataaattcaataatatcaacagttacatgcagatagtacacgaagtacacaatgtacacatataaatatatagtcatagttaaaattaataaattaattatcgtagatttctaaataatatacaactatcactaaaatttctgtgtactttgtgtactaattatcacgaggctatatatatcaatgttttaaccagtacacgaaagtaaaaaaaggtgtgtatttaactgtgtatggtacacaatcaatataaatatggaggttacac

SEQ ID NO: 6885 - DNA, 64 bp, Staphylococcus aureus
tttttgcacctcttaatgaaacaacagagcaaagatgttataataagaatgtgtaatttctata

SEQ ID NO: 6886 - DNA, 64 bp, Staphylococcus aureus
tatagaaattacacattcttattataacatctttgctctgttgtttcattaagaggtgcaaaaa

SEQ ID NO: 6887 - DNA, 68 bp, Staphylococcus aureus
aatttctatgaccaaattacgaccacccaatattacaaactttataaaatcagcgtttaacagtcgtt

SEQ ID NO: 6888 - DNA, 68 bp, Staphylococcus aureus
aacgactgttaaacgctgattttataaagtttgtaatattgggtggtcgtaatttggtcatagaaatt

SEQ ID NO: 6889 - DNA, 75 bp, Staphylococcus aureus
aaatgataaacctccatttgtttagtcatatttcattttcgttctttacaatttatctatgaatttaattttata

SEQ ID NO: 6890 - DNA, 75 bp, Staphylococcus aureus
tataaaattaaattcatagataaattgtaaagaacgaaaatgaaatatgactaaacaaatggaggtttatcattt

SEQ ID NO: 6891 - DNA, 174 bp, Staphylococcus aureus
gattgttcctccttaaaaaacctaaagtttagcacttaacattaaagagtgctaacatacatttataataatcaaatttggtcaaaatttcaagtcataaccttttaattaagttttgtaacttcaagttatttacgataaaataaattataaacaaatatttggaggaaaatt

SEQ ID NO: 6892 - DNA, 174 bp, Staphylococcus aureus
aattttcctccaaatatttgtttataatttattttatcgtaaataacttgaagttacaaaacttaattaaaaggttatgacttgaaattttgaccaaatttgattattataaatgtatgttagcactctttaatgttaagtgctaaactttaggttttttaaggaggaacaatc

SEQ ID NO: 6893 - DNA, 196 bp, Staphylococcus aureus
ttcacgagacacctccctttttcatgtaagtattaatctaagtataataaatatgcgttgaaaatgcatttatatttggaatttgaaaatgaatattaatattcttgaaattttcgtaaatattactttacaagtccgagtataaattttatacttagtctattaagtattctttactaaagaaggagcaataatt

SEQ ID NO: 6894 - DNA, 196 bp, Staphylococcus aureus
aattattgctccttctttagtaaagaatacttaatagactaagtataaaatttatactcggacttgtaaagtaatatttacgaaaatttcaagaatattaatattcattttcaaattccaaatataaatgcattttcaacgcatatttattatacttagattaatacttacatgaaaaagggaggtgtctcgtgaa

SEQ ID NO: 6895 - DNA, 142 bp, Staphylococcus aureus
tcaatatattgttaagaatgggacagaaatgataaagaatcattagttattcattatgtagtagttcttacacattagccgctgctaatgtgcacttaagaataggaatacatgagtaaaactcatgtataagaaatactaa

SEQ ID NO: 6896 - DNA, 142 bp, Staphylococcus aureus
ttagtatttcttatacatgagttttactcatgtattcctattcttaagtgcacattagcagcggctaatgtgtaagaactactacataatgaataactaatgattctttatcatttctgtcccattcttaacaatatattga

SEQ ID NO: 6897 - DNA, 67 bp, Staphylococcus aureus
ctcgttttttgcgtttcaacataacttttagtaagttatatataagatctatcaaggatgcgatgtt

SEQ ID NO: 6898 - DNA, 67 bp, Staphylococcus aureus
aacatcgcatccttgatagatcttatatataacttactaaaagttatgttgaaacgcaaaaaacgag

SEQ ID NO: 6899 - DNA, 86 bp, Staphylococcus aureus
gaagcgcccgaaataatatttaacacatgtcatgactaaacatagatttatgagagatttttcataagtctatgtttattttttta

SEQ ID NO: 6900 - DNA, 86 bp, Staphylococcus aureus
taaaaaaataaacatagacttatgaaaaatctctcataaatctatgtttagtcatgacatgtgttaaatattatttcgggcgcttc

SEQ ID NO: 6901 - DNA, 422 bp, Staphylococcus aureus
tagacttattcatatattttaacggtgggtctcataatgaggattaactctccccttctttattacaataaaaaaggccgcgagcttgggaggggctcacgaccatacttattattaagggaatgttttacagttattttttcaatctatttttggggatgttattaattatgaaaaaaattttatttatcaaataatgataaatcgatgttgtttacgatagcttacatgctagaaataattatctgtaatgataattaagaaaaatacatagcactgagtccaaggaaactaactctactagcaaatgttactcacttgctaattttacatggttattaagttgggatggcttaataactcatacttttagtactatacgaagataacaaatttacaatgaaagtaattaattattcatc

SEQ ID NO: 6902 - DNA, 422 bp, Staphylococcus aureus
gatgaataattaattactttcattgtaaatttgttatcttcgtatagtactaaaagtatgagttattaagccatcccaacttaataaccatgtaaaattagcaagtgagtaacatttgctagtagagttagtttccttggactcagtgctatgtatttttcttaattatcattacagataattatttctagcatgtaagctatcgtaaacaacatcgatttatcattatttgataaataaaatttttttcataattaataacatccccaaaaatagattgaaaaaataactgtaaaacattcccttaataataagtatggtcgtgagcccctcccaagctcgcggccttttttattgtaataaagaaggggagagttaatcctcattatgagacccaccgttaaaatatatgaataagtcta

SEQ ID NO: 6903 - DNA, 182 bp, Staphylococcus aureus
caactattttccatcacatctctgtgatctagttatattaaaacatgctaaaagcatttattttccaatttttcttaactagtcgttttttattcttaactgtaaatttttttatgttaaaatattaaatacaaattacatttaacagttaagtatttatttcctacagttaggcaatataa

SEQ ID NO: 6904 - DNA, 182 bp, Staphylococcus aureus
ttatattgcctaactgtaggaaataaatacttaactgttaaatgtaatttgtatttaatattttaacataaaaaaatttacagttaagaataaaaaacgactagttaagaaaaattggaaaataaatgcttttagcatgttttaatataactagatcacagagatgtgatggaaaatagttg

SEQ ID NO: 6905 - DNA, 72 bp, Staphylococcus aureus
taagataataaagtcagttaacggcgtattcaattgtaaatcttgttggattttaacaagataactagcaaa

SEQ ID NO: 6906 - DNA, 72 bp, Staphylococcus aureus
tttgctagttatcttgttaaaatccaacaagatttacaattgaatacgccgttaactgactttattatctta

SEQ ID NO: 6907 - DNA, 190 bp, Staphylococcus aureus
taatttatcaatttctatttcactctacaatcctatggcgcaatttttaacaaaatatactaaatttgaaattgacagtttccataaataaaatgctacaatttcctaccccgtgaatcttattttgttttaaaaaacagtgtagcacaagattcaacttgtttcctacactgttttataaatgaattat

SEQ ID NO: 6908 - DNA, 190 bp, Staphylococcus aureus
ataattcatttataaaacagtgtaggaaacaagttgaatcttgtgctacactgttttttaaaacaaaataagattcacggggtaggaaattgtagcattttatttatggaaactgtcaatttcaaatttagtatattttgttaaaaattgcgccataggattgtagagtgaaatagaaattgataaatta

SEQ ID NO: 6909 - DNA, 148 bp, Staphylococcus aureus
aatatttacccagtcctccttttataatttatgctgttaacaatttatattctattatagcaaattttacctacgttctttaacttttaacctatccatttatagttatatggtatcggttccacatttgttttaaaaaatacagcgt

SEQ ID NO: 6910 - DNA, 148 bp, Staphylococcus aureus
acgctgtattttttaaaacaaatgtggaaccgataccatataactataaatggataggttaaaagttaaagaacgtaggtaaaatttgctataatagaatataaattgttaacagcataaattataaaaggaggactgggtaaatatt

SEQ ID NO: 6911 - DNA, 130 bp, Staphylococcus aureus
taaccgctttaaataatatttctgcttctttcataaaaagatttcaaaataaaacttttgtataacaaaatgtcccaacatcaacctttagttaaatgtcaggacaatgaatattctatgtaaatatatt

SEQ ID NO: 6912 - DNA, 130 bp, Staphylococcus aureus
aatatatttacatagaatattcattgtcctgacatttaactaaaggttgatgttgggacattttgttatacaaaagttttattttgaaatctttttatgaaagaagcagaaatattatttaaagcggtta

SEQ ID NO: 6913 - DNA, 91 bp, Staphylococcus aureus
gaactaaaacaaaaaagactacttactcacttttaaattagcggaagtagccatagaatctaatatctattttattgttaaaatgataacg

SEQ ID NO: 6914 - DNA, 91 bp, Staphylococcus aureus
cgttatcattttaacaataaaatagatattagattctatggctacttccgctaatttaaaagtgagtaagtagtcttttttgttttagttc

SEQ ID NO: 6915 - DNA, 59 bp, Staphylococcus aureus
aattatttctccttttccaatcacttttatttgatcaacatcatttgcataataatctt

SEQ ID NO: 6916 - DNA, 59 bp, Staphylococcus aureus
aagattattatgcaaatgatgttgatcaaataaaagtgattggaaaaggagaaataatt

SEQ ID NO: 6917 - DNA, 303 bp, Staphylococcus aureus
aatcctaacccctcatttccgataagtttagtatgtattataggtgatgattttcttgttttcaaccttatacacaatatttttgatatttatattatattcatataaggaaggcgattaattacgattcatcattatatctctacgtgttaatttattaacctatactatatttatcaacacaacagtttttcctttcattttcaaacataacagaaaaagcctgagacatacttagtcccagactgttctataattaattaaagatataacaaggttaatcattcaaagctaacatcacat

SEQ ID NO: 6918 - DNA, 303 bp, Staphylococcus aureus
atgtgatgttagctttgaatgattaaccttgttatatctttaattaattatagaacagtctgggactaagtatgtctcaggctttttctgttatgtttgaaaatgaaaggaaaaactgttgtgttgataaatatagtataggttaataaattaacacgtagagatataatgatgaatcgtaattaatcgccttccttatatgaatataatataaatatcaaaaatattgtgtataaggttgaaaacaagaaaatcatcacctataatacatactaaacttatcggaaatgaggggttaggatt

SEQ ID NO: 6919 - DNA, 252 bp, Staphylococcus aureus
tcgctatttcctccttcgtgtttgaatgaattatatctatgtattcaaacgagttagagcgtaattgttagattattaaaaaacaaataattgattacaatgaatacctaaatattatacattattgaattttaaaaataaatatcttagtttcaagacggcgttttatactgtaaaatggttattaatgtaataattacgacttttttcataagttaataaaatttgagaaagacgaaaggtgaagatcga

SEQ ID NO: 6920 - DNA, 252 bp, Staphylococcus aureus
tcgatcttcacctttcgtctttctcaaattttattaacttatgaaaaaagtcgtaattattacattaataaccattttacagtataaaacgccgtcttgaaactaagatatttatttttaaaattcaataatgtataatatttaggtattcattgtaatcaattatttgttttttaataatctaacaattacgctctaactcgtttgaatacatagatataattcattcaaacacgaaggaggaaatagcga

SEQ ID NO: 6921 - DNA, 361 bp, Staphylococcus aureus
aaatatacataactctaactgtaaattcgctatagttagagttatttttttacaaattttaattttttttattcacaataaaaacgctgatattatagctatccacagacttatcctagttatccacaagtaaattaacactaatcaattatttattttctgttttcccacctgatatccacaataaatgacgttatcaacaccttttatccacaagttattcactctttgttgataagtacgcatgttctctattgacattgtttttatcaaaattcattgttaagacactttctttatgaaataataatattattgaagtatatttttattattattaaaaataaataaggagatactt

SEQ ID NO: 6922 - DNA, 361 bp, Staphylococcus aureus
aagtatctccttatttatttttaataataataaaaatatacttcaataatattattatttcataaagaaagtgtcttaacaatgaattttgataaaaacaatgtcaatagagaacatgcgtacttatcaacaaagagtgaataacttgtggataaaaggtgttgataacgtcatttattgtggatatcaggtgggaaaacagaaaataaataattgattagtgttaatttacttgtggataactaggataagtctgtggatagctataatatcagcgtttttattgtgaataaaaaaaattaaaatttgtaaaaaaataactctaactatagcgaatttacagttagagttatgtatattt

SEQ ID NO: 6923 - DNA, 58 bp, Staphylococcus aureus
catgaatcttgaacatcaatcaatgttcaagtcgcaacattgttatattgacagtctt

SEQ ID NO: 6924 - DNA, 58 bp, Staphylococcus aureus
aagactgtcaatataacaatgttgcgacttgaacattgattgatgttcaagattcatg

SEQ ID NO: 6925 - DNA, 153 bp, Staphylococcus aureus
cagaatcccaacataataaatcattagtggttctttatcttttctgtctcactcccctaattgcaatataaaaacgtcagctatcacatgacagaagactatgaacagtttcaataatgttcatcgtaatcatgttaataactgacgtttatt

SEQ ID NO: 6926 - DNA, 153 bp, Staphylococcus aureus
aataaacgtcagttattaacatgattacgatgaacattattgaaactgttcatagtcttctgtcatgtgatagctgacgtttttatattgcaattaggggagtgagacagaaaagataaagaaccactaatgatttattatgttgggattctg

SEQ ID NO: 6927 - DNA, 510 bp, Staphylococcus aureus
tgttgattctcctatattatgcttttcattcataaaaatgattatccattgttcaatcgtatctaactttatatttaacctttatattgtaacaaatttcaacttaaatttcttatctttgaaacagattatctattcaaagttaattgtaagaaaatttaaaatatttgttgacatactaaagcagatatagtaaattaaatttatcaaatttttagacaattctaactattaaagtgatatataccattcacggaaggagtataataaaatgcttaatcaatatactgaacatcaaccgacaacttcaaatattattattttattatactctttaggactcgaacgttagtaaatatttactaaacgctttaagtcctatttctgtttgaatgggacttgtaaacgtcccaataatattgggacgtttttttatgttttatctttcaattacttatttttattactataaaacatgattaatcattaaaatttacgggggaatttact

SEQ ID NO: 6928 - DNA, 510 bp, Staphylococcus aureus
agtaaattcccccgtaaattttaatgattaatcatgttttatagtaataaaaataagtaattgaaagataaaacataaaaaaacgtcccaatattattgggacgtttacaagtcccattcaaacagaaataggacttaaagcgtttagtaaatatttactaacgttcgagtcctaaagagtataataaaataataatatttgaagttgtcggttgatgttcagtatattgattaagcattttattatactccttccgtgaatggtatatatcactttaatagttagaattgtctaaaaatttgataaatttaatttactatatctgctttagtatgtcaacaaatattttaaattttcttacaattaactttgaatagataatctgtttcaaagataagaaatttaagttgaaatttgttacaatataaaggttaaatataaagttagatacgattgaacaatggataatcatttttatgaatgaaaagcataatataggagaatcaaca

SEQ ID NO: 6929 - DNA, 65 bp, Staphylococcus aureus
ttttaagacaaaggcaatgatgcgctaattagttatagatatatcataggctgctagttaacatc

SEQ ID NO: 6930 - DNA, 65 bp, Staphylococcus aureus
gatgttaactagcagcctatgatatatctataactaattagcgcatcattgcctttgtcttaaaa

SEQ ID NO: 6931 - DNA, 52 bp, Staphylococcus aureus
cacatagtaagaaaaacagtcataaattgatttctaattgaaatcatcttat

SEQ ID NO: 6932 - DNA, 52 bp, Staphylococcus aureus
ataagatgatttcaattagaaatcaatttatgactgtttttcttactatgtg

SEQ ID NO: 6933 - DNA, 150 bp, Staphylococcus aureus
tttttgcctggcaacgttctactctagcggaacgtaagtttgctaccttcgtcgctaagaacctttcttgacttgtgacaatcgcttgcttctttcctctccttcggctctcgcttactcatttagctctactaaactcgttgcactctt

SEQ ID NO: 6934 - DNA, 150 bp, Staphylococcus aureus
aagagtgcaacgagtttagtagagctaaatgagtaagcgagagccgaaggagaggaaagaagcaagcgattgtcacaagtcaagaaaggttcttagcgacgaaggtagcaaacttacgttccgctagagtagaacgttgccaggcaaaaa

SEQ ID NO: 6935 - DNA, 92 bp, Staphylococcus aureus
agacctttcttgacttgtgacaatcgcttgcttctttcctctccttcggctctcgcttactcatttagctctactaaactcgttgcgctctt

SEQ ID NO: 6936 - DNA, 92 bp, Staphylococcus aureus
aagagcgcaacgagtttagtagagctaaatgagtaagcgagagccgaaggagaggaaagaagcaagcgattgtcacaagtcaagaaaggtct

SEQ ID NO: 6937 - DNA, 118 bp, Staphylococcus aureus
attatgatgtttgattagctcataaatactaaataatgtttgtaacttatagttacgtttttggaattaacgttgacatattgtcattcagttttcaatgttcattaaaattatctat

SEQ ID NO: 6938 - DNA, 118 bp, Staphylococcus aureus
atagataattttaatgaacattgaaaactgaatgacaatatgtcaacgttaattccaaaaacgtaactataagttacaaacattatttagtatttatgagctaatcaaacatcataat

SEQ ID NO: 6939 - DNA, 573 bp, Staphylococcus aureus
taacttttaatcgtttttttacaataaattaatttgtgttatcagttgttaacacaacgctatttataataaaacattaagaacttattgtcaacatattttataaattaaatttagaattgactgtctttcaaatcaaagtttatttaatttgttcttttttaaggaacgtgtttaatcatactaactataagctgtacagtcaatagaaaagttcaatcaaaatgtcattaaaaatgtataattatcttttgtgctactttaaagctttaattgggtaaagtttatatattatttattactaaaatacgtcaagatttttaatctaatcaatttaatttcatcctatcaagtcacaatttatgccattacctatatcataagtagaaaagccgagattgcgaagtattaaattacgacaatctcggctttaaacattttataaacacaatttcttcttattcaattactatgtttaccaatcaaaataactcactgataaattctatagaaattccatacaactcataaataatcttacatatacacgaattagctctatttgtattgtac

SEQ ID NO: 6940 - DNA, 573 bp, Staphylococcus aureus
gtacaatacaaatagagctaattcgtgtatatgtaagattatttatgagttgtatggaatttctatagaatttatcagtgagttattttgattggtaaacatagtaattgaataagaagaaattgtgtttataaaatgtttaaagccgagattgtcgtaatttaatacttcgcaatctcggcttttctacttatgatataggtaatggcataaattgtgacttgataggatgaaattaaattgattagattaaaaatcttgacgtattttagtaataaataatatataaactttacccaattaaagctttaaagtagcacaaaagataattatacatttttaatgacattttgattgaacttttctattgactgtacagcttatagttagtatgattaaacacgttccttaaaaaagaacaaattaaataaactttgatttgaaagacagtcaattctaaatttaatttataaaatatgttgacaataagttcttaatgttttattataaatagcgttgtgttaacaactgataacacaaattaatttattgtaaaaaaacgattaaaagtta

SEQ ID NO: 6941 - DNA, 433 bp, Staphylococcus aureus
ttacttaacccacactttttcttaaatttactcatttattttaacatattctaaaatacttctattaaggtatgatacttaatgtaattttcacttccaaaacatttaaaacgaattattaggtcatactatattttaaaacgcactaagattattgaaaatgacacaccatcatttctaaatttcataatctaagactactttttttattctaatagcaatccacctatttaaaacgacaattagatatcttcttcacttaaattattaatactatatcgcgacatttatgtggatacacattaaactacgttaataatgtattaattcgaaaatcttaattaaattaaaaatacccctcgatttcaatttaataatcaagggataattatatggatttttcattataaaacgtatcattaataagcaaatt

SEQ ID NO: 6942 - DNA, 433 bp, Staphylococcus aureus
aatttgcttattaatgatacgttttataatgaaaaatccatataattatcccttgattattaaattgaaatcgaggggtatttttaatttaattaagattttcgaattaatacattattaacgtagtttaatgtgtatccacataaatgtcgcgatatagtattaataatttaagtgaagaagatatctaattgtcgttttaaataggtggattgctattagaataaaaaaagtagtcttagattatgaaatttagaaatgatggtgtgtcattttcaataatcttagtgcgttttaaaatatagtatgacctaataattcgttttaaatgttttggaagtgaaaattacattaagtatcataccttaatagaagtattttagaatatgttaaaataaatgagtaaatttaagaaaaagtgtgggttaagtaa

SEQ ID NO: 6943 - DNA, 118 bp, Staphylococcus aureus
ttcattacactcctacttattaaaaatatttatcttcattttaagcgctgtatccaccatatttatatttcaaattattatatacccatcgaaataatttctaatcttcttttttaaa

SEQ ID NO: 6944 - DNA, 118 bp, Staphylococcus aureus
tttaaaaaagaagattagaaattatttcgatgggtatataataatttgaaatataaatatggtggatacagcgcttaaaatgaagataaatatttttaataagtaggagtgtaatgaa

SEQ ID NO: 6945 - DNA, 286 bp, Staphylococcus aureus
ttactaacatttatttaattgcacttatcaattttgtcgtttgcaattttgctgtagatgatacttttaagctaaaaaaaactttaggatggaatacctaaagcctaaaaaacttaagacatccttttataataaaaaatatgaatatcataactggtatttgctaaaatctatgtttataagaaaattcttcgtacagaatttagaaatagttataattattataaagttattgtcttttatatcaatattttatttatctctgaaaaatacatataatagacgc

SEQ ID NO: 6946 - DNA, 286 bp, Staphylococcus aureus
gcgtctattatatgtatttttcagagataaataaaatattgatataaaagacaataactttataataattataactatttctaaattctgtacgaagaattttcttataaacatagattttagcaaataccagttatgatattcatattttttattataaaaggatgtcttaagttttttaggctttaggtattccatcctaaagttttttttagcttaaaagtatcatctacagcaaaattgcaaacgacaaaattgataagtgcaattaaataaatgttagtaa

SEQ ID NO: 6947 - DNA, 84 bp, Staphylococcus aureus
atgagaacctccaattgattccaaaagttattaaatgacctttaattactctaatgataacaaattttatatgcactgaccata

SEQ ID NO: 6948 - DNA, 84 bp, Staphylococcus aureus
tatggtcagtgcatataaaatttgttatcattagagtaattaaaggtcatttaataacttttggaatcaattggaggttctcat

SEQ ID NO: 6949 - DNA, 65 bp, Staphylococcus aureus
attacttcctcctgtaattcccacacgttttaaaactagatcttaattatcattgtataacaaat

SEQ ID NO: 6950 - DNA, 65 bp, Staphylococcus aureus
atttgttatacaatgataattaagatctagttttaaaacgtgtgggaattacaggaggaagtaat

SEQ ID NO: 6951 - DNA, 98 bp, Staphylococcus aureus
aacccctctccccaaataaaaaattatacggatttataatctatttcattttatttttatatgatgataattatagcatatggaatatttcatgctaa

SEQ ID NO: 6952 - DNA, 98 bp, Staphylococcus aureus
ttagcatgaaatattccatatgctataattatcatcatataaaaataaaatgaaatagattataaatccgtataattttttatttggggagaggggtt

SEQ ID NO: 6953 - DNA, 66 bp, Staphylococcus aureus
cgtaacaacttgtttatgagagaaatattaattttcaaacttagttattaagaaatcattaagatg

SEQ ID NO: 6954 - DNA, 66 bp, Staphylococcus aureus
catcttaatgatttcttaataactaagtttgaaaattaatatttctctcataaacaagttgttacg

SEQ ID NO: 6955 - DNA, 175 bp, Staphylococcus aureus
taaagtttatttatgttcgattattcttaatttaagtagttgttatattctagattcatatttatatttacacagaatgatataaccgcatacagatctcaatccaattaaatatttaacctttaaaacgttagtactttgatatctacagagaatcaattattgaaaacaaaaa

SEQ ID NO: 6956 - DNA, 175 bp, Staphylococcus aureus
tttttgttttcaataattgattctctgtagatatcaaagtactaacgttttaaaggttaaatatttaattggattgagatctgtatgcggttatatcattctgtgtaaatataaatatgaatctagaatataacaactacttaaattaagaataatcgaacataaataaacttta

SEQ ID NO: 6957 - DNA, 62 bp, Staphylococcus aureus
aagatgaagaaccaacaaaaaagagctcaagacattacatctttaagctcttaatctataaa

SEQ ID NO: 6958 - DNA, 62 bp, Staphylococcus aureus
tttatagattaagagcttaaagatgtaatgtcttgagctcttttttgttggttcttcatctt

SEQ ID NO: 6959 - DNA, 516 bp, Staphylococcus aureus
aataattctcctttttacctgtttatttctcaatatacttttgcatataagttcattaatatttcatcaacttctatatagtaccaccaaaaaaatttaatcgcaataaagcaatttgcgaatatttattagaatcacattaattgattgtcatatttttgtcaaaaagctagcattagataagatgtaagcgttacgcatcattcgaataatcattataaaaaattttttataaaatacgtatatcgttaacattccacaacaaattttactgaaacacatgtgaaattagacattataatactacatctttttgtaaaacattatataaacattcaaactacttcctatataaagtgtgtacatagaattaaccttgatttagtttcaaatttatagatttaacataaaaagaaaaaggcaattttgtatttacacacaaaaccacctcttctttgtaatcttttagtattaattcaaatcatttttataagtaaaaggtcgctcgactaatct

SEQ ID NO: 6960 - DNA, 516 bp, Staphylococcus aureus
agattagtcgagcgaccttttacttataaaaatgatttgaattaatactaaaagattacaaagaagaggtggttttgtgtgtaaatacaaaattgcctttttctttttatgttaaatctataaatttgaaactaaatcaaggttaattctatgtacacactttatataggaagtagtttgaatgtttatataatgttttacaaaaagatgtagtattataatgtctaatttcacatgtgtttcagtaaaatttgttgtggaatgttaacgatatacgtattttataaaaaattttttataatgattattcgaatgatgcgtaacgcttacatcttatctaatgctagctttttgacaaaaatatgacaatcaattaatgtgattctaataaatattcgcaaattgctttattgcgattaaatttttttggtggtactatatagaagttgatgaaatattaatgaacttatatgcaaaagtatattgagaaataaacaggtaaaaaggagaattatt

SEQ ID NO: 6961 - DNA, 206 bp, Staphylococcus aureus
attttaatgctattttgcattttaaaaacgaggacttatgtgtctgtatctatgttgattcatttataatcagaacaatattcccttctattttattcctaattcaaattgaaatctatagctgatatcactgtgatattctagctaatttttaaaaagtcatgtaaaattgatataaacattagtgagtataaaaggagtttgca

SEQ ID NO: 6962 - DNA, 206 bp, Staphylococcus aureus
tgcaaactccttttatactcactaatgtttatatcaattttacatgactttttaaaaattagctagaatatcacagtgatatcagctatagatttcaatttgaattaggaataaaatagaagggaatattgttctgattataaatgaatcaacatagatacagacacataagtcctcgtttttaaaatgcaaaatagcattaaaat

SEQ ID NO: 6963 - DNA, 263 bp, Staphylococcus aureus
tttaaactattttgagtttcaaatatcataacttttcaagatgacgttatatagtctatttacgtcgtcgatttaaaatgtcatatatagatattactcgataataacaatccctctttgaagtacacattgtaaaatgtacactctaaagagggattttgttatatagtacttgctttcattttagtaaatccagtcaaaaaagctatcatcgaatagtccgacgatagctttaacggtgtgtgattcacaatcacagtcaa

SEQ ID NO: 6964 - DNA, 263 bp, Staphylococcus aureus
ttgactgtgattgtgaatcacacaccgttaaagctatcgtcggactattcgatgatagcttttttgactggatttactaaaatgaaagcaagtactatataacaaaatccctctttagagtgtacattttacaatgtgtacttcaaagagggattgttattatcgagtaatatctatatatgacattttaaatcgacgacgtaaatagactatataacgtcatcttgaaaagttatgatatttgaaactcaaaatagtttaaa

SEQ ID NO: 6965 - DNA, 127 bp, Staphylococcus aureus
tattatcacctcgtttggatcgctttcaatattatcttaccctattcgacatacctttactacatcatttacaaaatttttaatttattttcaaaattaaaatctatagcgcactctacattatacc

SEQ ID NO: 6966 - DNA, 127 bp, Staphylococcus aureus
ggtataatgtagagtgcgctatagattttaattttgaaaataaattaaaaattttgtaaatgatgtagtaaaggtatgtcgaatagggtaagataatattgaaagcgatccaaacgaggtgataata

SEQ ID NO: 6967 - DNA, 159 bp, Staphylococcus aureus
tgactttcacatttgaaatcatcttactgctgtttctatttatcacatattgtataatgtgacactaagtttcgctattgaagcgaaaaataatgtgcgccctataaagttaaaattatcttcaacttttagggtgcacattatttggacttgctaagg

SEQ ID NO: 6968 - DNA, 159 bp, Staphylococcus aureus
ccttagcaagtccaaataatgtgcaccctaaaagttgaagataattttaactttatagggcgcacattatttttcgcttcaatagcgaaacttagtgtcacattatacaatatgtgataaatagaaacagcagtaagatgatttcaaatgtgaaagtca

SEQ ID NO: 6969 - DNA, 85 bp, Staphylococcus aureus
ttttccacctctatcattatattcacataggatttattctatcacattaatgagtacgtatgaaacaataagtggaaaaatttaa

SEQ ID NO: 6970 - DNA, 85 bp, Staphylococcus aureus
ttaaatttttccacttattgtttcatacgtactcattaatgtgatagaataaatcctatgtgaatataatgatagaggtggaaaa

SEQ ID NO: 6971 - DNA, 103 bp, Staphylococcus aureus
tgtaaaaaatcctccctaaataaaaaaactacttccaacatgaaagtagtttgatggcaatgttgctatactagccccatcacttcaataactactttcctac

SEQ ID NO: 6972 - DNA, 103 bp, Staphylococcus aureus
gtaggaaagtagttattgaagtgatggggctagtatagcaacattgccatcaaactactttcatgttggaagtagtttttttatttagggaggattttttaca

SEQ ID NO: 6973 - DNA, 155 bp, Staphylococcus aureus
ttattgttgctcagttgtattattatctttaaataataattctataatgacgtatatttgcgaaataaaaaagaccggaacatatcgagaattccccgatatattccgatctaaaagttacttatataactattgattagctatgcataaatggc

SEQ ID NO: 6974 - DNA, 155 bp, Staphylococcus aureus
gccatttatgcatagctaatcaatagttatataagtaacttttagatcggaatatatcggggaattctcgatatgttccggtcttttttatttcgcaaatatacgtcattatagaattattatttaaagataataatacaactgagcaacaataa

SEQ ID NO: 6975 - DNA, 388 bp, Staphylococcus aureus
aatcttaaaatcctcctacaagtaatttgtttctctaaaagttttacagagactactgtaacatctataaaatccgtgcaggttacaacaaaataaaaaaatagccttgttttttacacagtgattacaacgaaatcccccataatttcagatatgattctatcgagaattgtcatgacagtaaaaatgttttttatttgcaattttttatgtaatcgttttgcaatctatgtctattttctattagaaaaactacacaaaaagacgacctacacaacagtactagtcatgtaagtcgtttttaattgagtatatttcaagttaattagatctataaaaaatttaggatggattaaatgtatattaaggatgtttaggataattggat

SEQ ID NO: 6976 - DNA, 388 bp, Staphylococcus aureus
atccaattatcctaaacatccttaatatacatttaatccatcctaaattttttatagatctaattaacttgaaatatactcaattaaaaacgacttacatgactagtactgttgtgtaggtcgtctttttgtgtagtttttctaatagaaaatagacatagattgcaaaacgattacataaaaaattgcaaataaaaaacatttttactgtcatgacaattctcgatagaatcatatctgaaattatgggggatttcgttgtaatcactgtgtaaaaaacaaggctatttttttattttgttgtaacctgcacggattttatagatgttacagtagtctctgtaaaacttttagagaaacaaattacttgtaggaggattttaagatt

SEQ ID NO: 6977 - DNA, 131 bp, Staphylococcus aureus
gtagtgtgtgattcacctcctatgcctatatcttaattactagcttaaaaatggtcaaaatggcaaattttatataattaatagctatagcatctcgttatttgttatatttaaagaaattagtcatgaaa

SEQ ID NO: 6978 - DNA, 131 bp, Staphylococcus aureus
tttcatgactaatttctttaaatataacaaataacgagatgctatagctattaattatataaaatttgccattttgaccatttttaagctagtaattaagatataggcataggaggtgaatcacacactac

SEQ ID NO: 6979 - DNA, 58 bp, Staphylococcus aureus
aataaaaaacattcaaagattatgccaacacattaaatctttgaatgttttttttgtt

SEQ ID NO: 6980 - DNA, 58 bp, Staphylococcus aureus
aacaaaaaaaacattcaaagatttaatgtgttggcataatctttgaatgttttttatt

SEQ ID NO: 6981 - DNA, 65 bp, Staphylococcus aureus
tttaaaattattttaagtcattatttaattatatctagttttgattacaaatcatagagttagac

SEQ ID NO: 6982 - DNA, 65 bp, Staphylococcus aureus
gtctaactctatgatttgtaatcaaaactagatataattaaataatgacttaaaataattttaaa

SEQ ID NO: 6983 - DNA, 561 bp, Staphylococcus aureus
tttatcacctcataagattactgtattacattgtacatgaaaaatttaaataatgatacaaagtttaatacccgtttttagtaaagtttaagctaacttactatataattctttttacataaatatcataactataaaatatcttggtatgaaaaaatgtagataatttcaaaaaatgaaatgtcgactgtagatagtggtgaaggaaattttgattttagcaatctattagtgattgtaaaaaagtaaaactattcttgggagtcggacataaatcaatgtctagactctatagtgttgtatttggcagtagttgacggggccccaacataaagaaatactttttctttaaaaattagtatttcttatacatgagttttactcatgtattcctatttttaaatacacattagctgtgtttaatgataaagaaccactacatcataaatctttaatggttctttatcaattccttcccccctctcatgttttgtatctttaaatcaatataattcaaaaaagggtcgaagatatgaaatcacatcttcgaccctttattta

SEQ ID NO: 6984 - DNA, 561 bp, Staphylococcus aureus
taaataaagggtcgaagatgtgatttcatatcttcgacccttttttgaattatattgatttaaagatacaaaacatgagaggggggaaggaattgataaagaaccattaaagatttatgatgtagtggttctttatcattaaacacagctaatgtgtatttaaaaataggaatacatgagtaaaactcatgtataagaaatactaatttttaaagaaaaagtatttctttatgttggggccccgtcaactactgccaaatacaacactatagagtctagacattgatttatgtccgactcccaagaatagttttacttttttacaatcactaatagattgctaaaatcaaaatttccttcaccactatctacagtcgacatttcattttttgaaattatctacattttttcataccaagatattttatagttatgatatttatgtaaaaagaattatatagtaagttagcttaaactttactaaaaacgggtattaaactttgtatcattatttaaatttttcatgtacaatgtaatacagtaatcttatgaggtgataaa

SEQ ID NO: 6985 - DNA, 197 bp, Staphylococcus aureus
gggttcatgacactcctttcattaaaataatcgctagtgttatatagaaaaaaacgacgaggttaggacctactgaatttatgcgataggcatggtgcattcatatctcaactatttaataaagttcaaagatattactatatatgcatcatgaattatgtcctatgcgctttgtcccgacctcttttatctgttaa

SEQ ID NO: 6986 - DNA, 197 bp, Staphylococcus aureus
ttaacagataaaagaggtcgggacaaagcgcataggacataattcatgatgcatatatagtaatatctttgaactttattaaatagttgagatatgaatgcaccatgcctatcgcataaattcagtaggtcctaacctcgtcgtttttttctatataacactagcgattattttaatgaaaggagtgtcatgaaccc

SEQ ID NO: 6987 - DNA, 67 bp, Staphylococcus aureus
attgttgtaaaaaaataagcatagttagacacaatttagacacaattagacaaaaagtctattttcc

SEQ ID NO: 6988 - DNA, 67 bp, Staphylococcus aureus
ggaaaatagactttttgtctaattgtgtctaaattgtgtctaactatgcttatttttttacaacaat

SEQ ID NO: 6989 - DNA, 106 bp, Staphylococcus aureus
aaaagcccacccttcctaaaaataaaaaaggaatatagcaaagtgctacactcctctattataacttatttaactgttaacatatactaattatacagaattccta

SEQ ID NO: 6990 - DNA, 106 bp, Staphylococcus aureus
taggaattctgtataattagtatatgttaacagttaaataagttataatagaggagtgtagcactttgctatattccttttttatttttaggaagggtgggctttt

SEQ ID NO: 6991 - DNA, 207 bp, Staphylococcus aureus
tattctaatttgttgcttcttattcgtgcggtgtttctactcaatacaaactttaataaagggggaaatttatcattatgtattaacaacatggtattgagtcacttctttgaacacagtcgtaagtatatacccttactacgcttataaataaaaaagctgtctacaattccattataggatgcagacagcttaacgattactata

SEQ ID NO: 6992 - DNA, 207 bp, Staphylococcus aureus
tatagtaatcgttaagctgtctgcatcctataatggaattgtagacagcttttttatttataagcgtagtaagggtatatacttacgactgtgttcaaagaagtgactcaataccatgttgttaatacataatgataaatttccccctttattaaagtttgtattgagtagaaacaccgcacgaataagaagcaacaaattagaata

SEQ ID NO: 6993 - DNA, 117 bp, Staphylococcus aureus
tattttcagctcctttgccctgaaccatctggaacagagttatttgtgagtttttacccaatactgtgtaattataaaggtaattaattcaaaacgcaagcccctatataatgttta

SEQ ID NO: 6994 - DNA, 117 bp, Staphylococcus aureus
taaacattatataggggcttgcgttttgaattaattacctttataattacacagtattgggtaaaaactcacaaataactctgttccagatggttcagggcaaaggagctgaaaata

SEQ ID NO: 6995 - DNA, 246 bp, Staphylococcus aureus
atagtttacacccatttcattattttttagttagtaagtaatagataggcatgacaatgcataaataactgtgctagcacaatcccattatgctaatccccaaccttttaaatacatgaataactatagcaaatttttattttaattacaaaatctatttataaaaattgcaaaattaaaacagtacacaaaacttaattagtcatgtgcactgttttattgcgatttttaattcaaaaatcaaat

SEQ ID NO: 6996 - DNA, 246 bp, Staphylococcus aureus
atttgatttttgaattaaaaatcgcaataaaacagtgcacatgactaattaagttttgtgtactgttttaattttgcaatttttataaatagattttgtaattaaaataaaaatttgctatagttattcatgtatttaaaaggttggggattagcataatgggattgtgctagcacagttatttatgcattgtcatgcctatctattacttactaactaaaaaataatgaaatgggtgtaaactat

SEQ ID NO: 6997 - DNA, 106 bp, Staphylococcus aureus
ctatttttttatatttttaaataaaaataactattcccacatcatcgcaaataatgcgaagacttagaaatagttataatcaatgctatgtttaaacgtcatgtaa

SEQ ID NO: 6998 - DNA, 106 bp, Staphylococcus aureus
ttacatgacgtttaaacatagcattgattataactatttctaagtcttcgcattatttgcgatgatgtgggaatagttatttttatttaaaaatataaaaaaatag

SEQ ID NO: 6999 - DNA, 85 bp, Staphylococcus aureus
cttcacctctcatcaataaatttagaatgtaaacgaacacccttttttaatcagtataattattataccacaaaacaagataaat

SEQ ID NO: 7000 - DNA, 85 bp, Staphylococcus aureus
atttatcttgttttgtggtataataattatactgattaaaaaagggtgttcgtttacattctaaatttattgatgagaggtgaag

SEQ ID NO: 7001 - DNA, 465 bp, Staphylococcus aureus
atcatttatctcctttgtccattactttttaattttttgcattattagcattataaattaattttactttatttgtaaaatagtttattttaatcgttaaaatcttgtctttctattttcgattgattaataacaaatcattcacctttactaatatatgctgttcttccccacttgaccatggtctaaagtctgattattcaactaaatattgacgttgttttgataattatttagttttaattctacgatttgtacgtaaacttttttcataaattgctcattttccttataattatatcacaatcaattttggtatattttaccatttttacgctttcattttaaaatcaaactgttttatttattacttatacgacataaaaaagaagcaaacaccattttgtctgcttcttttaaaattaatatccctacgttattaataacttaaaaactaaatattaa

SEQ ID NO: 7002 - DNA, 465 bp, Staphylococcus aureus
ttaatatttagtttttaagttattaataacgtagggatattaattttaaaagaagcagacaaaatggtgtttgcttcttttttatgtcgtataagtaataaataaaacagtttgattttaaaatgaaagcgtaaaaatggtaaaatataccaaaattgattgtgatataattataaggaaaatgagcaatttatgaaaaaagtttacgtacaaatcgtagaattaaaactaaataattatcaaaacaacgtcaatatttagttgaataatcagactttagaccatggtcaagtggggaagaacagcatatattagtaaaggtgaatgatttgttattaatcaatcgaaaatagaaagacaagattttaacgattaaaataaactattttacaaataaagtaaaattaatttataatgctaataatgcaaaaaattaaaaagtaatggacaaaggagataaatgat

SEQ ID NO: 7003 - DNA, 217 bp, Staphylococcus aureus
gaaagttcctccttgagtgcttacgcacgtatttttcaaagtaattatatcaaaaaaatagcgtcaatgcattgaaatactgcagattaaatgtgtattttttgaaaaatgcgatagttatactaaatgcaaacgtatacatttttatacaatttaagccgttgcataatatgtagtcattaattacaatattttataagtagattggaggataaag

SEQ ID NO: 7004 - DNA, 217 bp, Staphylococcus aureus
ctttatcctccaatctacttataaaatattgtaattaatgactacatattatgcaacggcttaaattgtataaaaatgtatacgtttgcatttagtataactatcgcatttttcaaaaaatacacatttaatctgcagtatttcaatgcattgacgctatttttttgatataattactttgaaaaatacgtgcgtaagcactcaaggaggaactttc

SEQ ID NO: 7005 - DNA, 108 bp, Staphylococcus aureus
aagtcactattgttatttcataccttgtcactaacataatattaaaattatacgaaaaaccggtactttcaatgtttaacaatgaaagtaccggttttattagcaaat

SEQ ID NO: 7006 - DNA, 108 bp, Staphylococcus aureus
atttgctaataaaaccggtactttcattgttaaacattgaaagtaccggtttttcgtataattttaatattatgttagtgacaaggtatgaaataacaatagtgactt

SEQ ID NO: 7007 - DNA, 335 bp, Staphylococcus aureus
gtcttgacctcctaattattaaagggaatgcttcctcatcaattgtaaaaattacgtaaaacataacattaaagcaagctcattcaagttgtttatttgtcgaattcgacaaaattaaattctgtttacttaccgtttccatactgctatgtcactatgtatatcatttacaactttgatttttgcgttatcatttcttgatttactcaattaaataaaaaaacgctccctctcacaaattctgtaaggggagcgtataaattttatacacgtgtcctatttaaaggagcccgaataaaattttatcatctttcaactaaaagtcaaacaaaaaa

SEQ ID NO: 7008 - DNA, 335 bp, Staphylococcus aureus
ttttttgtttgacttttagttgaaagatgataaaattttattcgggctcctttaaataggacacgtgtataaaatttatacgctccccttacagaatttgtgagagggagcgtttttttatttaattgagtaaatcaagaaatgataacgcaaaaatcaaagttgtaaatgatatacatagtgacatagcagtatggaaacggtaagtaaacagaatttaattttgtcgaattcgacaaataaacaacttgaatgagcttgctttaatgttatgttttacgtaatttttacaattgatgaggaagcattccctttaataattaggaggtcaagac

SEQ ID NO: 7009 - DNA, 111 bp, Staphylococcus aureus
tgcccaatacttcctttcgaaggatataatctaaatttatacgtctgaattcatttatatatagtaacaaaactaaattataaatgacaatatcatatttcgcaatcactg

SEQ ID NO: 7010 - DNA, 111 bp, Staphylococcus aureus
cagtgattgcgaaatatgatattgtcatttataatttagttttgttactatatataaatgaattcagacgtataaatttagattatatccttcgaaaggaagtattgggca

SEQ ID NO: 7011 - DNA, 278 bp, Staphylococcus aureus
atatttaacccctatctttttatatatgaagcatgaatccccatattattttacctattatttcactacgataccattatttactctaagttaaataaattacttatttatatttttttaaatttcaaaattaatgtgctattcctcattactcatcattttaatcagagacttacaaatacactgcgtacgaactacttttaatattgcgtcactaactaacaatcctatacaacttcaaaattcctagaaaataatatatataacttaacgtctac

SEQ ID NO: 7012 - DNA, 278 bp, Staphylococcus aureus
gtagacgttaagttatatatattattttctaggaattttgaagttgtataggattgttagttagtgacgcaatattaaaagtagttcgtacgcagtgtatttgtaagtctctgattaaaatgatgagtaatgaggaatagcacattaattttgaaatttaaaaaaatataaataagtaatttatttaacttagagtaaataatggtatcgtagtgaaataataggtaaaataatatggggattcatgcttcatatataaaaagataggggttaaatat

SEQ ID NO: 7013 - DNA, 51 bp, Staphylococcus aureus
tttactatactattatttaaggatagacattaataatgaggtgggaatctt

SEQ ID NO: 7014 - DNA, 51 bp, Staphylococcus aureus
aagattcccacctcattattaatgtctatccttaaataatagtatagtaaa

SEQ ID NO: 7015 - DNA, 130 bp, Staphylococcus aureus
aaaaagaccatttatatgcgcgttgttttaaataaacgctatataaatggccttttattttatggtctacgtgttttggaatacgtattgttccatttattatcacttaattacttacaactcaattcaa

SEQ ID NO: 7016 - DNA, 130 bp, Staphylococcus aureus
ttgaattgagttgtaagtaattaagtgataataaatggaacaatacgtattccaaaacacgtagaccataaaataaaaggccatttatatagcgtttatttaaaacaacgcgcatataaatggtcttttt

SEQ ID NO: 7017 - DNA, 311 bp, Staphylococcus aureus
gcttgaccctcactttttaaaatatgtcatacataaaatagtaaatgactccaacaagttagtcaattagacatattatgaattcaatttaatgtcatgtttttcattttaaaaattcaatagcattaaattttacgtatacacaaattcggtctataacacgaaacatatctagttactaaaaatttcaaaacgataacctttagtatacctttatcaacaaaatggcaactcttataacatagtgaaataaaagtcgccatttaatattagtattacaaagtattgccatatcataaatttaattactg

SEQ ID NO: 7018 - DNA, 311 bp, Staphylococcus aureus
cagtaattaaatttatgatatggcaatactttgtaatactaatattaaatggcgacttttatttcactatgttataagagttgccattttgttgataaaggtatactaaaggttatcgttttgaaatttttagtaactagatatgtttcgtgttatagaccgaatttgtgtatacgtaaaatttaatgctattgaatttttaaaatgaaaaacatgacattaaattgaattcataatatgtctaattgactaacttgttggagtcatttactattttatgtatgacatattttaaaaagtgagggtcaagc

SEQ ID NO: 7019 - DNA, 310 bp, Staphylococcus aureus
tttttactatctcccttttaccctacactcattttaatcatccacaatattttgttctttcaaaatgaattattacttattctatcggttttatctcatgatgtcatctagtttttctttatttacaaaattttctaataactaaaagcctttcataaatttataaaacagtttcaaattgtaaaacataagccctattgttacaatttaagtattgttagaaacacaacttacaacaaacttaagttttatattgcaacaaatcataagcgttttatagttttgagtagtaaataggaggaaattcaaa

SEQ ID NO: 7020 - DNA, 310 bp, Staphylococcus aureus
tttgaatttcctcctatttactactcaaaactataaaacgcttatgatttgttgcaatataaaacttaagtttgttgtaagttgtgtttctaacaatacttaaattgtaacaatagggcttatgttttacaatttgaaactgttttataaatttatgaaaggcttttagttattagaaaattttgtaaataaagaaaaactagatgacatcatgagataaaaccgatagaataagtaataattcattttgaaagaacaaaatattgtggatgattaaaatgagtgtagggtaaaagggagatagtaaaaa

SEQ ID NO: 7021 - DNA, 151 bp, Staphylococcus aureus
atcttagtcaatcaagttaatcagaaaagcagtcgaacaatgatgttacaatcgccattgtccaactgctttttattatgcttcaaagtcaaaaaatcgaacaaatgaaaaagtaaaatctttaacatttgtccgatttatttgagaacca

SEQ ID NO: 7022 - DNA, 151 bp, Staphylococcus aureus
tggttctcaaataaatcggacaaatgttaaagattttactttttcatttgttcgattttttgactttgaagcataataaaaagcagttggacaatggcgattgtaacatcattgttcgactgcttttctgattaacttgattgactaagat

SEQ ID NO: 7023 - DNA, 169 bp, Staphylococcus aureus
taatatcacaatttcaatgcgatgttattattcttaaatagattggttataacgttaaagtccctattaaattatcttagaatcatcatggcatttatgatgtcttaaagctgatatcgacatacttatatatggttacgatgtcccatgcttacatatttttataaaa

SEQ ID NO: 7024 - DNA, 169 bp, Staphylococcus aureus
ttttataaaaatatgtaagcatgggacatcgtaaccatatataagtatgtcgatatcagctttaagacatcataaatgccatgatgattctaagataatttaatagggactttaacgttataaccaatctatttaagaataataacatcgcattgaaattgtgatatta

SEQ ID NO: 7025 - DNA, 313 bp, Staphylococcus aureus
ttctatctcctcctttatggttgattataaaaatacggttgtaaattagttgattgagcgtcaggttcatttaaatatcaggttagatgttcgctttttatgtaaccgcatacatatactattacattaattcatttcccataaacaaacaatacaattgaacgtgatatcttcattatgaacgatgacttgacaacaagctaatcaggattatatttttataattctttaattctatagtacaaaaattcgcaaaaaagggaaacaaatgttatcttaaaattattaatgaatattaaggagaagataacaa

SEQ ID NO: 7026 - DNA, 313 bp, Staphylococcus aureus
ttgttatcttctccttaatattcattaataattttaagataacatttgtttcccttttttgcgaatttttgtactatagaattaaagaattataaaaatataatcctgattagcttgttgtcaagtcatcgttcataatgaagatatcacgttcaattgtattgtttgtttatgggaaatgaattaatgtaatagtatatgtatgcggttacataaaaagcgaacatctaacctgatatttaaatgaacctgacgctcaatcaactaatttacaaccgtatttttataatcaaccataaaggaggagatagaa

SEQ ID NO: 7027 - DNA, 120 bp, Staphylococcus aureus
cttatttaaattgactttaattgctctttaacaatgcgattaaactcaaaaagccaacacattctgggcgtatccccatttatgtgttggcttttatttatattattacttatctgtaga

SEQ ID NO: 7028 - DNA, 120 bp, Staphylococcus aureus
tctacagataagtaataatataaataaaagccaacacataaatggggatacgcccagaatgtgttggctttttgagtttaatcgcattgttaaagagcaattaaagtcaatttaaataag

SEQ ID NO: 7029 - DNA, 199 bp, Staphylococcus aureus
atttaatacactccttaaaattgtctacgtcttgcttgtttatattaattattatattataatgattctaatctgtaaagtgtttttactctcttttttataattattctaatctaaatgtaaggtgttccgctttttaaatgtctaaattttaattcatcatctagtatatccattatcaattagcaagtatgtttta

SEQ ID NO: 7030 - DNA, 199 bp, Staphylococcus aureus
taaaacatacttgctaattgataatggatatactagatgatgaattaaaatttagacatttaaaaagcggaacaccttacatttagattagaataattataaaaaagagagtaaaaacactttacagattagaatcattataatataataattaatataaacaagcaagacgtagacaattttaaggagtgtattaaat

SEQ ID NO: 7031 - DNA, 456 bp, Staphylococcus aureus
aatttattcgctcctttaatagtacttatagtcatttttcctaatttaaaaacatttaaacaaggttgtcacttgataagtcctcgcgacacgaaattgccataaaatttatttttcagttttatatttattgtataatgtattttttatttactttaaatttctcaatctacagtgtaatcttatttcttattattaacttagcgtttggtcattcgtcttattcaacatacgactggaaaactcatataaagttttaattcagtaacataaattcatttatattcatatactgtctttattatttattaaaataaaaacgagcaatctatcataagctcttaattagctcttatggttgattacccgtcatttttctttatgcggttattcaaatatgcaattatgcaatttttaatcctatccttacttcttttcaaaaactaccatatatca

SEQ ID NO: 7032 - DNA, 456 bp, Staphylococcus aureus
tgatatatggtagtttttgaaaagaagtaaggataggattaaaaattgcataattgcatatttgaataaccgcataaagaaaaatgacgggtaatcaaccataagagctaattaagagcttatgatagattgctcgtttttattttaataaataataaagacagtatatgaatataaatgaatttatgttactgaattaaaactttatatgagttttccagtcgtatgttgaataagacgaatgaccaaacgctaagttaataataagaaataagattacactgtagattgagaaatttaaagtaaataaaaaatacattatacaataaatataaaactgaaaaataaattttatggcaatttcgtgtcgcgaggacttatcaagtgacaaccttgtttaaatgtttttaaattaggaaaaatgactataagtactattaaaggagcgaataaatt

SEQ ID NO: 7033 - DNA, 671 bp, Staphylococcus aureus
cttaatactccttaacctgaataaattttagaaacactatgaattacattcttttagtgtttcttatgcagttggacgcgtatgcgaacaactgtataccctttgttcactgcgattttaatcgcatttcctataacattgtagcgcccaggacattaatttacgtcccagacccttatcgttttcacttctaagtaagtcgaactattttgctttacaacaagtgcgactctaaatacagttggacacacatacgagcaactgtataccttttaatcagttttctatattttatttattatatctgtcttaatgataaaaattgttacaaacagtttaacatatttagctacctattttgcatataaaaaacatgcttgcatacactatgcaataaaaattacaaatttatatatgataccactatgcttgcttatctctatagcgccattgatacacatttttaaatatctatactgccgttagaattttatcatgtcttaattttcattaaatattaattacttcattttatataaaccaacaaaaaccccctcactactatgcaagtgagaggttatgttgatgtgctttattttcatcaatgtcattaacacgatcatatttcttctgttaatgcactgtactttattcaaacgcgctatcgacaa

SEQ ID NO: 7034 - DNA, 671 bp, Staphylococcus aureus
ttgtcgatagcgcgtttgaataaagtacagtgcattaacagaagaaatatgatcgtgttaatgacattgatgaaaataaagcacatcaacataacctctcacttgcatagtagtgagggggtttttgttggtttatataaaatgaagtaattaatatttaatgaaaattaagacatgataaaattctaacggcagtatagatatttaaaaatgtgtatcaatggcgctatagagataagcaagcatagtggtatcatatataaatttgtaatttttattgcatagtgtatgcaagcatgttttttatatgcaaaataggtagctaaatatgttaaactgtttgtaacaatttttatcattaagacagatataataaataaaatatagaaaactgattaaaaggtatacagttgctcgtatgtgtgtccaactgtatttagagtcgcacttgttgtaaagcaaaatagttcgacttacttagaagtgaaaacgataagggtctgggacgtaaattaatgtcctgggcgctacaatgttataggaaatgcgattaaaatcgcagtgaacaaagggtatacagttgttcgcatacgcgtccaactgcataagaaacactaaaagaatgtaattcatagtgtttctaaaatttattcaggttaaggagtattaag

SEQ ID NO: 7035 - DNA, 357 bp, Staphylococcus aureus
ttacatcgtattataaacttccacatttcaaattaactattagtgattgtaccatatttactaacattgcagtactgccaattaaagcgcttcacttaaatttacagtactttaacatttttaaaaattaatagcatagagattatctctctcttacatttgtacacatttccctttaaatttactcgcccattataccaattaataaacaactttaatagttgtgccatacattgttcaaattctttgtaaaatgcatagacaatacgtacttattcatacttataattcatcattttcaaaaaaataacgagttacgaaaacgtaacccgcttcaaatcatatttactatcctta

SEQ ID NO: 7036 - DNA, 357 bp, Staphylococcus aureus
taaggatagtaaatatgatttgaagcgggttacgttttcgtaactcgttatttttttgaaaatgatgaattataagtatgaataagtacgtattgtctatgcattttacaaagaatttgaacaatgtatggcacaactattaaagttgtttattaattggtataatgggcgagtaaatttaaagggaaatgtgtacaaatgtaagagagagataatctctatgctattaatttttaaaaatgttaaagtactgtaaatttaagtgaagcgctttaattggcagtactgcaatgttagtaaatatggtacaatcactaatagttaatttgaaatgtggaagtttataatacgatgtaa

SEQ ID NO: 7037 - DNA, 151 bp, Staphylococcus aureus
ttacaacactctcctatttattattctctatgccataccactttatgagatatgtaaaacttgttacaactataaaaatcaattgacatactactgggaacgtattaaattaatatatgaacaaatattcatatgaaaggattgtcatata

SEQ ID NO: 7038 - DNA, 151 bp, Staphylococcus aureus
tatatgacaatcctttcatatgaatatttgttcatatattaatttaatacgttcccagtagtatgtcaattgatttttatagttgtaacaagttttacatatctcataaagtggtatggcatagagaataataaataggagagtgttgtaa

SEQ ID NO: 7039 - DNA, 66 bp, Staphylococcus aureus
taattttaacctactgccattgcatcgattaaacttttcaatggcagtaggttttttatgtcttta

SEQ ID NO: 7040 - DNA, 66 bp, Staphylococcus aureus
taaagacataaaaaacctactgccattgaaaagtttaatcgatgcaatggcagtaggttaaaatta

SEQ ID NO: 7041 - DNA, 215 bp, Staphylococcus aureus
attacaaaagaatcatttaaatcaatactttcactttgaatacatgtatttgaagtggaaggtacttatttcaaaaatagtaaaacctgtatcttaaattacttaatagtaacataagatacaggctgattttttattcattgttatttatactaaagcacccgatagctctgaaaacaatcacaaattcaacttttcaaagccacagctttaag

SEQ ID NO: 7042 - DNA, 215 bp, Staphylococcus aureus
cttaaagctgtggctttgaaaagttgaatttgtgattgttttcagagctatcgggtgctttagtataaataacaatgaataaaaaatcagcctgtatcttatgttactattaagtaatttaagatacaggttttactatttttgaaataagtaccttccacttcaaatacatgtattcaaagtgaaagtattgatttaaatgattcttttgtaat

SEQ ID NO: 7043 - DNA, 110 bp, Staphylococcus aureus
atgttcccacctctttaaatactttaactactacaaattataaaccttgttaatttttatttaaagtaaaatatccctttaatatctcctcttaaactactttaactact

SEQ ID NO: 7044 - DNA, 110 bp, Staphylococcus aureus
agtagttaaagtagtttaagaggagatattaaagggatattttactttaaataaaaattaacaaggtttataatttgtagtagttaaagtatttaaagaggtgggaacat

SEQ ID NO: 7045 - DNA, 321 bp, Staphylococcus aureus
attttggagccccttacaactttagttgttaggggctcttatgcatgcgcttagcgcaggcgctcctacttttcaactttagttgttaggggcttctttctaaaataactaagtgaattatctatatatgaagaggtctccaatactttttatataattcgtgattacattctatacttttaattgtattttctgctgtatggaaagttggttttattaattctgattatgttcagaactacaattcataagaaaaatgtgttaaaatatatttgtagtaagtagaagcaaaagatgaaaatctttaactcttgaaacaca

SEQ ID NO: 7046 - DNA, 321 bp, Staphylococcus aureus
tgtgtttcaagagttaaagattttcatcttttgcttctacttactacaaatatattttaacacatttttcttatgaattgtagttctgaacataatcagaattaataaaaccaactttccatacagcagaaaatacaattaaaagtatagaatgtaatcacgaattatataaaaagtattggagacctcttcatatatagataattcacttagttattttagaaagaagcccctaacaactaaagttgaaaagtaggagcgcctgcgctaagcgcatgcataagagcccctaacaactaaagttgtaaggggctccaaaat

SEQ ID NO: 7047 - DNA, 60 bp, Staphylococcus aureus
accttatattttatttaaaaatagccttcaaaatgccggtcaaagcgaatagaaggttat

SEQ ID NO: 7048 - DNA, 60 bp, Staphylococcus aureus
ataaccttctattcgctttgaccggcattttgaaggctatttttaaataaaatataaggt

SEQ ID NO: 7049 - DNA, 324 bp, Staphylococcus aureus
ctataaccataggcatcacccctttattaagagattagccaccatctatccaacttgctcaataaatattataacatgcacacttttaaacagtaattcatagtataagttttttcatttcttaatcaactcgataaacagttgagtgacatacccttgtctaactagctatttcttcccctgttatcgtttgttcatcatataaaaatttaatttctcattttttattctctgataaagaagagcaccaaccttttcggctgatatgctcccttcaaaatagacattgaaaaatgaaaactttgaaagagaaatcgtcagtct

SEQ ID NO: 7050 - DNA, 324 bp, Staphylococcus aureus
agactgacgatttctctttcaaagttttcatttttcaatgtctattttgaagggagcatatcagccgaaaaggttggtgctcttctttatcagagaataaaaaatgagaaattaaatttttatatgatgaacaaacgataacaggggaagaaatagctagttagacaagggtatgtcactcaactgtttatcgagttgattaagaaatgaaaaaacttatactatgaattactgtttaaaagtgtgcatgttataatatttattgagcaagttggatagatggtggctaatctcttaataaaggggtgatgcctatggttatag

SEQ ID NO: 7051 - DNA, 147 bp, Staphylococcus aureus
ttcgctgatggttttaaatttcaagtaaaaccttgtatttccggcctccctagaaaaagataaagttgaatcaataacaaaaatattagatgaaattaatgcttaccaagacgaattgcatttggaagagattcctaagttttttta

SEQ ID NO: 7052 - DNA, 147 bp, Staphylococcus aureus
taaaaaaacttaggaatctcttccaaatgcaattcgtcttggtaagcattaatttcatctaatatttttgttattgattcaactttatctttttctagggaggccggaaatacaaggttttacttgaaatttaaaaccatcagcgaa

SEQ ID NO: 7053 - DNA, 166 bp, Staphylococcus aureus
agtgaaacatatcttacttatggaatgaaatgtttgattatcccaaaatcacaaatgcgattttggagttgttaggggctctaacgcaaatacacccctacttaaaataacggtagttgttatagtatacttaaatgcataaaccatataaaaggtgatgctaata

SEQ ID NO: 7054 - DNA, 166 bp, Staphylococcus aureus
tattagcatcaccttttatatggtttatgcatttaagtatactataacaactaccgttattttaagtaggggtgtatttgcgttagagcccctaacaactccaaaatcgcatttgtgattttgggataatcaaacatttcattccataagtaagatatgtttcact

SEQ ID NO: 7055 - DNA, 131 bp, Staphylococcus aureus
taacactagtatctggattactagcatacaaaggagcagtaagacattttctaatagaaaataactttactgctctttgtacattactcatcaactattgtaaattaaataataaataactacctatttta

SEQ ID NO: 7056 - DNA, 131 bp, Staphylococcus aureus
taaaataggtagttatttattatttaatttacaatagttgatgagtaatgtacaaagagcagtaaagttattttctattagaaaatgtcttactgctcctttgtatgctagtaatccagatactagtgtta

SEQ ID NO: 7057 - DNA, 67 bp, Staphylococcus aureus
attgccctccactgtccattttatcttaattaaattttgtcattattacttattatttgcaaaatat

SEQ ID NO: 7058 - DNA, 67 bp, Staphylococcus aureus
atattttgcaaataataagtaataatgacaaaatttaattaagataaaatggacagtggagggcaat

SEQ ID NO: 7059 - DNA, 231 bp, Staphylococcus aureus
gcgaggtcacccctttattgctactccatacttctcataaaatcatattaacataacacccttaattgtcagactatttaaataaataaaacacttcctttttacgcatttctgccaaattaagatgaagtaaaagctaagtcgacctaaaaaagcacccttctagtcgattaatctaaaagggtgccatatactttaattttaatacatgattgattctaaaaaagtgaa

SEQ ID NO: 7060 - DNA, 231 bp, Staphylococcus aureus
ttcacttttttagaatcaatcatgtattaaaattaaagtatatggcacccttttagattaatcgactagaagggtgcttttttaggtcgacttagcttttacttcatcttaatttggcagaaatgcgtaaaaaggaagtgttttatttatttaaatagtctgacaattaagggtgttatgttaatatgattttatgagaagtatggagtagcaataaaggggtgacctcgc

SEQ ID NO: 7061 - DNA, 467 bp, Staphylococcus aureus
aacgacattttcctccatattggaatagtacgcgtaaattatgatttattgccgataatttagattgacaatctgctttcataatataaataggaacatgctattatcgcattcatccataacaaattaagcatagttatttttacaactatacaaattgctcacactgtactttccatattaatattttttatattcaatttctggcgatcttattaactttgtccattaagtcaccctaatgttttacttaataagctaacgaatgagccacatccgggatagcatccgccgatctattcgatcactatcctcctcgtctacaaatacatatattgcactctataaaggccactcatatattaacctttaatcttcaaatacaaatatttatttgcacaggcgctttaactgtactgccgaactttccccctttccattaatcattattgtacaacggtgttgtt

SEQ ID NO: 7062 - DNA, 467 bp, Staphylococcus aureus
aacaacaccgttgtacaataatgattaatggaaagggggaaagttcggcagtacagttaaagcgcctgtgcaaataaatatttgtatttgaagattaaaggttaatatatgagtggcctttatagagtgcaatatatgtatttgtagacgaggaggatagtgatcgaatagatcggcggatgctatcccggatgtggctcattcgttagcttattaagtaaaacattagggtgacttaatggacaaagttaataagatcgccagaaattgaatataaaaaatattaatatggaaagtacagtgtgagcaatttgtatagttgtaaaaataactatgcttaatttgttatggatgaatgcgataatagcatgttcctatttatattatgaaagcagattgtcaatctaaattatcggcaataaatcataatttacgcgtactattccaatatggaggaaaatgtcgtt

SEQ ID NO: 7063 - DNA, 57 bp, Staphylococcus aureus
caagtaacgtctctatacactatatatagtcacatatattaaaaaagaggtgtaaat

SEQ ID NO: 7064 - DNA, 57 bp, Staphylococcus aureus
atttacacctcttttttaatatatgtgactatatatagtgtatagagacgttacttg

SEQ ID NO: 7065 - DNA, 318 bp, Staphylococcus aureus
tttattgagctttgtttgaaacaagaagtttccaacgttattcgttaacaatcagtaataatgtagtagttccgttgaattaacaatattaaatttctgaacataaaaaatactcccttcaacatagacacttaacttgtgttatgtatgaaaggagtatttttgcgttaataatttgttttattttcgagccacagcgacctattcaattgctattggtcattactaaaacaaattcatattaactgttagacttggttacttagtaaggaatatttccctatgaaataactagatgttcacattcttgaataaatt

SEQ ID NO: 7066 - DNA, 318 bp, Staphylococcus aureus
aatttattcaagaatgtgaacatctagttatttcatagggaaatattccttactaagtaaccaagtctaacagttaatatgaatttgttttagtaatgaccaatagcaattgaataggtcgctgtggctcgaaaataaaacaaattattaacgcaaaaatactcctttcatacataacacaagttaagtgtctatgttgaagggagtattttttatgttcagaaatttaatattgttaattcaacggaactactacattattactgattgttaacgaataacgttggaaacttcttgtttcaaacaaagctcaataaa

SEQ ID NO: 7067 - DNA, 277 bp, Staphylococcus aureus
taagtcatcctcctggttgattattctcgctgttaaatgatttcacttaatcaactgttaagataagtagtagcatctgcgttaaaaacacaaagcaactctatctaattaaaattaattttatcatcattatatattgagtaccagtgtattttatattacatattgattactttgtttttattttgtttatatcattttacgtttgtactataaattatttctagaaacacaaaaaaaccgatgcatacgcatcggcttatttgtaatacagtat

SEQ ID NO: 7068 - DNA, 277 bp, Staphylococcus aureus
atactgtattacaaataagccgatgcgtatgcatcggtttttttgtgtttctagaaataatttatagtacaaacgtaaaatgatataaacaaaataaaaacaaagtaatcaatatgtaatataaaatacactggtactcaatatataatgatgataaaattaattttaattagatagagttgctttgtgtttttaacgcagatgctactacttatcttaacagttgattaagtgaaatcatttaacagcgagaataatcaaccaggaggatgactta

SEQ ID NO: 7069 - DNA, 188 bp, Staphylococcus aureus
aacatctcctccgggtaatatttttccataatacccattataccaatcatttacatcactgtcatacgaacatatatttaaatagaaaaaatttattttaaagattataactactcttaatcattttagtgaattaaaaaaagtagtgcaaaaagcaaaatatactttatacactacaaatcatttat

SEQ ID NO: 7070 - DNA, 188 bp, Staphylococcus aureus
ataaatgatttgtagtgtataaagtatattttgctttttgcactactttttttaattcactaaaatgattaagagtagttataatctttaaaataaattttttctatttaaatatatgttcgtatgacagtgatgtaaatgattggtataatgggtattatggaaaaatattacccggaggagatgtt

SEQ ID NO: 7071 - DNA, 186 bp, Staphylococcus aureus
attatgatgtttgattagctcataaatactaaataatgtttgtaacttatagttacgttttttggaattaacgttgacatattgtcattcagttttcaatgttcattaatattcaatctcttttattctacttcatttgtttcttgaagtcaataactttttgaacgattactttatttattctat

SEQ ID NO: 7072 - DNA, 186 bp, Staphylococcus aureus
atagaataaataaagtaatcgttcaaaaagttattgacttcaagaaacaaatgaagtagaataaaagagattgaatattaatgaacattgaaaactgaatgacaatatgtcaacgttaattccaaaaaacgtaactataagttacaaacattatttagtatttatgagctaatcaaacatcataat

SEQ ID NO: 7073 - DNA, 88 bp, Staphylococcus aureus
aagaacttattttaccagcattccaaaacaaatcaacataaaaacgtacaaaataaaagtaattttgtacgtttagcatatattatac

SEQ ID NO: 7074 - DNA, 88 bp, Staphylococcus aureus
gtataatatatgctaaacgtacaaaattacttttattttgtacgtttttatgttgatttgttttggaatgctggtaaaataagttctt

SEQ ID NO: 7075 - DNA, 147 bp, Staphylococcus aureus
agcaaatcccccttaatcattttaagacatctacatcatagcaaataacaatttttgcttagtctatcactaaaagtataaaactttttattaaataaaaaaagcagttagcctattattttaaatagaccaactactataattatt

SEQ ID NO: 7076 - DNA, 147 bp, Staphylococcus aureus
aataattatagtagttggtctatttaaaataataggctaactgctttttttatttaataaaaagttttatacttttagtgatagactaagcaaaaattgttatttgctatgatgtagatgtcttaaaatgattaagggggatttgct

SEQ ID NO: 7077 - DNA, 322 bp, Staphylococcus aureus
cataattcctcctttttaaaacagatatacacttgtccctttaatacatatagccattaacataatgggagtagtactcaaatgataaagaagcactacataataaatcattattggttcttacacattaggcacagctaatgtgtacttaaaaaactaacaatataacattgtagggcctaataatttattttatttctcagactcatacaatggttatttaacttatttaccacaaattgagcactaagactcactattatcgattcttctattgaacaaaaagaagttggaacacatatgtgccctcaacttcagatat

SEQ ID NO: 7078 - DNA, 322 bp, Staphylococcus aureus
atatctgaagttgagggcacatatgtgttccaacttctttttgttcaatagaagaatcgataatagtgagtcttagtgctcaatttgtggtaaataagttaaataaccattgtatgagtctgagaaataaaataaattattaggccctacaatgttatattgttagttttttaagtacacattagctgtgcctaatgtgtaagaaccaataatgatttattatgtagtgcttctttatcatttgagtactactcccattatgttaatggctatatgtattaaagggacaagtgtatatctgttttaaaaaggaggaattatg

SEQ ID NO: 7079 - DNA, 98 bp, Staphylococcus aureus
tggcctccttattaataaaatattgaacgatttatctagtatctaggaaatttattatttcttactttaattacactacatcaattttaatcataatt

SEQ ID NO: 7080 - DNA, 98 bp, Staphylococcus aureus
aattatgattaaaattgatgtagtgtaattaaagtaagaaataataaatttcctagatactagataaatcgttcaatattttattaataaggaggcca

SEQ ID NO: 7081 - DNA, 176 bp, Staphylococcus aureus
gaaatacctccttctatatatttatttataagattttatttacaaataattggttttcatatgtataaacacttttgactttcaaatcttaacgataattctattacaatacaatcccctattagaatgatttatgtaataaaaaaagcggagtttcccccagcttttctaaacga

SEQ ID NO: 7082 - DNA, 176 bp, Staphylococcus aureus
tcgtttagaaaagctgggggaaactccgctttttttattacataaatcattctaataggggattgtattgtaatagaattatcgttaagatttgaaagtcaaaagtgtttatacatatgaaaaccaattatttgtaaataaaatcttataaataaatatatagaaggaggtatttc

SEQ ID NO: 7083 - DNA, 176 bp, Staphylococcus aureus
atttgttctcctttaatactcacattttaccacatccctaacaaaaacacgaacatattttcgggttaaaattcattagtatgacacaatttaaaaaagtatcacataactcttgaaaacgattacaaaatcgtttatgatgtatttacaaaatatttaaaggatgtgtttgaata

SEQ ID NO: 7084 - DNA, 176 bp, Staphylococcus aureus
tattcaaacacatcctttaaatattttgtaaatacatcataaacgattttgtaatcgttttcaagagttatgtgatacttttttaaattgtgtcatactaatgaattttaacccgaaaatatgttcgtgtttttgttagggatgtggtaaaatgtgagtattaaaggagaacaaat

SEQ ID NO: 7085 - DNA, 68 bp, Staphylococcus aureus
attgtataaaaaaatacaaaaggacaactgttctcataattttaacagttgtcctttttcacatatat

SEQ ID NO: 7086 - DNA, 68 bp, Staphylococcus aureus
atatatgtgaaaaaggacaactgttaaaattatgagaacagttgtccttttgtatttttttatacaat

SEQ ID NO: 7087 - DNA, 235 bp, Staphylococcus aureus
aaaatcaatccatttctctatgtattcgttttaagtatatacagaattctattcagttaacaaacatattccttatcattctatctttcaaaatgtttatgtatgcaaaataatgaataattacagttattaaatatacgctattacttgtaatttttcaagatgaattcaaaaaaggttaagtacaattactgatttcgtacttaaccttttttaaactctaatcatatgttag

SEQ ID NO: 7088 - DNA, 235 bp, Staphylococcus aureus
ctaacatatgattagagtttaaaaaaggttaagtacgaaatcagtaattgtacttaaccttttttgaattcatcttgaaaaattacaagtaatagcgtatatttaataactgtaattattcattattttgcatacataaacattttgaaagatagaatgataaggaatatgtttgttaactgaatagaattctgtatatacttaaaacgaatacatagagaaatggattgatttt

SEQ ID NO: 7089 - DNA, 319 bp, Staphylococcus aureus
cgttccactccttaatatgtataacttcatttattattttattgataacaattatcattgtcaagtagcgttcaatcttttttatatttctaaaatgtatgactatatatttcctctaataattatgactacaattagcacatttccttagacaaaatactgataatgtatcattgctatatcatctttgcattaatacaattgacaccatttagcatgaccgttatccctgtaattcagctgatattatctgttgcaattttatgtgacgaactgttgcacttaatttgataaatcaacaaatacaaaaaatctaagt

SEQ ID NO: 7090 - DNA, 319 bp, Staphylococcus aureus
acttagattttttgtatttgttgatttatcaaattaagtgcaacagttcgtcacataaaattgcaacagataatatcagctgaattacagggataacggtcatgctaaatggtgtcaattgtattaatgcaaagatgatatagcaatgatacattatcagtattttgtctaaggaaatgtgctaattgtagtcataattattagaggaaatatatagtcatacattttagaaatataaaaaagattgaacgctacttgacaatgataattgttatcaataaaataataaatgaagttatacatattaaggagtggaacg

SEQ ID NO: 7091 - DNA, 101 bp, Staphylococcus aureus
aaaacttacacccgcattctgttgataataagaatcattatcattaatatggattatacaaatctatcttgcttttgtaaaatatttcatagaggtgaatt

SEQ ID NO: 7092 - DNA, 101 bp, Staphylococcus aureus
aattcacctctatgaaatattttacaaaagcaagatagatttgtataatccatattaatgataatgattcttattatcaacagaatgcgggtgtaagtttt

SEQ ID NO: 7093 - DNA, 160 bp, Staphylococcus aureus
aattatagaattttattaatcgtgagctcaaggattacattaacttattaaatacaatctatacaaatgagagaataatacattttccatattcaaattattaaaaatcacaaaaaagctcggcactaaaatggtgtgccgagcttttttatcgaataac

SEQ ID NO: 7094 - DNA, 160 bp, Staphylococcus aureus
gttattcgataaaaaagctcggcacaccattttagtgccgagcttttttgtgatttttaataatttgaatatggaaaatgtattattctctcatttgtatagattgtatttaataagttaatgtaatccttgagctcacgattaataaaattctataatt

SEQ ID NO: 7095 - DNA, 62 bp, Staphylococcus aureus
aatagattctccttttacttgttaatttttatatttttttaattaaattctaaattgatgaa

SEQ ID NO: 7096 - DNA, 62 bp, Staphylococcus aureus
ttcatcaatttagaatttaattaaaaaaatataaaaattaacaagtaaaaggagaatctatt

SEQ ID NO: 7097 - DNA, 174 bp, Staphylococcus aureus
ccctaacgacacctccttagttaaagttaatttaaaaacatattaaatatgtacccatcagtttttttcttaaacataataaattaataactttaaatttatttttaatatataagatgaagtaccatttagtaatatattccctagtttttgtaaataaaacctcattattaa

SEQ ID NO: 7098 - DNA, 174 bp, Staphylococcus aureus
ttaataatgaggttttatttacaaaaactagggaatatattactaaatggtacttcatcttatatattaaaaataaatttaaagttattaatttattatgtttaagaaaaaaactgatgggtacatatttaatatgtttttaaattaactttaactaaggaggtgtcgttaggg

SEQ ID NO: 7099 - DNA, 307 bp, Staphylococcus aureus
aaatacaaaccctttctgtgtaatggtaagttcatacccataactgcaacattttaatcatttgtaattttatatagacacaattaataatgcctcatcttttaaaaatgatatataaaacacactcaaattatttatcattgagcaacaaagtattttattgtatttaagtaatgcctttctagtgcattattgatttgatacctgtaaagttgccatatttccgtttagaatcaatagtcgctagacacaaaaaataagtcgccctatacagtattttctgcataaggcgactttacttactaat

SEQ ID NO: 7100 - DNA, 307 bp, Staphylococcus aureus
attagtaagtaaagtcgccttatgcagaaaatactgtatagggcgacttattttttgtgtctagcgactattgattctaaacggaaatatggcaactttacaggtatcaaatcaataatgcactagaaaggcattacttaaatacaataaaatactttgttgctcaatgataaataatttgagtgtgttttatatatcatttttaaaagatgaggcattattaattgtgtctatataaaattacaaatgattaaaatgttgcagttatgggtatgaacttaccattacacagaaagggtttgtattt

SEQ ID NO: 7101 - DNA, 234 bp, Staphylococcus aureus
atcgtttcacctcatttatgaacttatttcttattatacaaaatagaagccatgtgtgcttataccgcagcatcatgactcctttttcatttgaatatataaataattacagacgactttcgtattacattttagacttatttctaccatgttactgaacaaatttgctttagataagaaagttattaaattttgatcaattaacaaagttagtttgttaaaacgtatacttta

SEQ ID NO: 7102 - DNA, 234 bp, Staphylococcus aureus
taaagtatacgttttaacaaactaactttgttaattgatcaaaatttaataactttcttatctaaagcaaatttgttcagtaacatggtagaaataagtctaaaatgtaatacgaaagtcgtctgtaattatttatatattcaaatgaaaaaggagtcatgatgctgcggtataagcacacatggcttctattttgtataataagaaataagttcataaatgaggtgaaacgat

SEQ ID NO: 7103 - DNA, 277 bp, Staphylococcus aureus
cattaatcacctttctttatttgaaacttttacttatttgttacttaagcgttaagttttaattgtgtcttcgtgatgtctgtatgcaaatacattcttagttgttatattttgacttaagcactgattcatttaacttcaagtacattatatttgctgtaaacataaattaaaaatgttacgacttagacattttatggaaactctcaaacaatagataatttttgaaaagctctaatattacaagcttttttgccccagaaaactagcagttgct

SEQ ID NO: 7104 - DNA, 277 bp, Staphylococcus aureus
agcaactgctagttttctggggcaaaaaagcttgtaatattagagcttttcaaaaattatctattgtttgagagtttccataaaatgtctaagtcgtaacatttttaatttatgtttacagcaaatataatgtacttgaagttaaatgaatcagtgcttaagtcaaaatataacaactaagaatgtatttgcatacagacatcacgaagacacaattaaaacttaacgcttaagtaacaaataagtaaaagtttcaaataaagaaaggtgattaatg

SEQ ID NO: 7105 - DNA, 265 bp, Staphylococcus aureus
acttttaactcccattcatgtcttttatataagtataaaggatgtgattaaaaatgtcctttagttgattttgaatacatcattaacttttaagatgactttggaaagttgtccgttaacgtttgttaattgattgcttctttagctttcaatggtgtgtcacccattgattaatatataaatatgtatatacttgtttaatttatctctttctataaataaagacctaccagcactcgactgataggccttttaatatctataa

SEQ ID NO: 7106 - DNA, 265 bp, Staphylococcus aureus
ttatagatattaaaaggcctatcagtcgagtgctggtaggtctttatttatagaaagagataaattaaacaagtatatacatatttatatattaatcaatgggtgacacaccattgaaagctaaagaagcaatcaattaacaaacgttaacggacaactttccaaagtcatcttaaaagttaatgatgtattcaaaatcaactaaaggacatttttaatcacatcctttatacttatataaaagacatgaatgggagttaaaagt

SEQ ID NO: 7107 - DNA, 71 bp, Staphylococcus aureus
taaatcaacataatatgtttataacctgtttgtttatgacatattttcaaacaataagtgaacattcctat

SEQ ID NO: 7108 - DNA, 71 bp, Staphylococcus aureus
ataggaatgttcacttattgtttgaaaatatgtcataaacaaacaggttataaacatattatgttgattta

SEQ ID NO: 7109 - DNA, 250 bp, Staphylococcus aureus
tgtaaaattgcctcctttatttaggcgatgggtcattatcctttatgtttagacatcaattttaatatacatgcttattctataataaaaattgcgtaaaaactaatataatttaactgttcgattatatgtataattcatttttaaaaagaactgtttaaactgcgcttttgataatcgtaaaatgaatatactataataaaagcaaaagacgttataaatcattcattattttgatggggtgtttatt

SEQ ID NO: 7110 - DNA, 250 bp, Staphylococcus aureus
aataaacaccccatcaaaataatgaatgatttataacgtcttttgcttttattatagtatattcattttacgattatcaaaagcgcagtttaaacagttctttttaaaaatgaattatacatataatcgaacagttaaattatattagtttttacgcaatttttattatagaataagcatgtatattaaaattgatgtctaaacataaaggataatgacccatcgcctaaataaaggaggcaattttaca

SEQ ID NO: 7111 - DNA, 86 bp, Staphylococcus aureus
tgttgggatgctactttataacattttcaatcgctaaaggcccattcgtaaaaaattaactgtaaatcttatgcttacaactcatt

SEQ ID NO: 7112 - DNA, 86 bp, Staphylococcus aureus
aatgagttgtaagcataagatttacagttaattttttacgaatgggcctttagcgattgaaaatgttataaagtagcatcccaaca

SEQ ID NO: 7113 - DNA, 232 bp, Staphylococcus aureus
gttattatcccctatacaatttattctacattcattatatacttcattttataaaattatcaatactataattattatcttaggtaagttattgcataatacaaaaattcataataacttatttgcttgctccattcactttttaagagtaataaaataacctgcaacatagactttaacatccaagtttcaggttagcgtaatgtaaattatttactttgttatattatga

SEQ ID NO: 7114 - DNA, 232 bp, Staphylococcus aureus
tcataatataacaaagtaaataatttacattacgctaacctgaaacttggatgttaaagtctatgttgcaggttattttattactcttaaaaagtgaatggagcaagcaaataagttattatgaatttttgtattatgcaataacttacctaagataataattatagtattgataattttataaaatgaagtatataatgaatgtagaataaattgtataggggataataac

SEQ ID NO: 7115 - DNA, 69 bp, Staphylococcus aureus
aaaatgaacctcctttatcttgtatgtccactataaaccatggagcgaactctatagcaagccagaggt

SEQ ID NO: 7116 - DNA, 69 bp, Staphylococcus aureus
acctctggcttgctatagagttcgctccatggtttatagtggacatacaagataaaggaggttcatttt

SEQ ID NO: 7117 - DNA, 241 bp, Staphylococcus aureus
tgcgactatcctttcagttatatttgggcatctaaagtaatgttgttttatatattgccatctttgtttgaatacttcttattttattactcaaatttaaatttgtctcttttttaacattttacatttcatcgtttttaattactttaaaaattgtataacttaaatatttaaaatgatataatcactaagattgataatatttaattttttaaaaattatttttgttgcaatttttggg

SEQ ID NO: 7118 - DNA, 241 bp, Staphylococcus aureus
cccaaaaattgcaacaaaaataatttttaaaaaattaaatattatcaatcttagtgattatatcattttaaatatttaagttatacaatttttaaagtaattaaaaacgatgaaatgtaaaatgttaaaaaagagacaaatttaaatttgagtaataaaataagaagtattcaaacaaagatggcaatatataaaacaacattactttagatgcccaaatataactgaaaggatagtcgca

SEQ ID NO: 7119 - DNA, 59 bp, Staphylococcus aureus
gcaagaaaatctcgacactataccatttttatagtgtcgagattttataagtatcgcca

SEQ ID NO: 7120 - DNA, 59 bp, Staphylococcus aureus
tggcgatacttataaaatctcgacactataaaaatggtatagtgtcgagattttcttgc

SEQ ID NO: 7121 - DNA, 210 bp, Staphylococcus aureus
atatacttaacctcttatattaattttggtatcaattctttctccagttcctgcgtcatttttgcgctacctgaatcgtctacacttaattggacaaatcaacatataaataattttttaaaactaaagtgtagtctattcaccatattttctaatcatcccttaaatattaatatttgcacttaaaaagtatacatatcactcaactaa

SEQ ID NO: 7122 - DNA, 210 bp, Staphylococcus aureus
ttagttgagtgatatgtatactttttaagtgcaaatattaatatttaagggatgattagaaaatatggtgaatagactacactttagttttaaaaaattatttatatgttgatttgtccaattaagtgtagacgattcaggtagcgcaaaaatgacgcaggaactggagaaagaattgataccaaaattaatataagaggttaagtatat

SEQ ID NO: 7123 - DNA, 294 bp, Staphylococcus aureus
actcattcccccataatattctaatgaatttatctataacttaaatacactataagtctcaattaaaagtataagatcgactatatgcttttcatgcttattatatacaactaatgaatccctataaactaaaaacattgcttaccacttttcaaaatacacgggtcatatccctcgttaaaaactattactaaaaatcaaaaatataaaaaaatcaaaaagtatgttttaaactttatgaaacgtgttatataaatagtgtaatataccacaactttaaaaggagattgagat

SEQ ID NO: 7124 - DNA, 294 bp, Staphylococcus aureus
atctcaatctccttttaaagttgtggtatattacactatttatataacacgtttcataaagtttaaaacatactttttgatttttttatatttttgatttttagtaatagtttttaacgagggatatgacccgtgtattttgaaaagtggtaagcaatgtttttagtttatagggattcattagttgtatataataagcatgaaaagcatatagtcgatcttatacttttaattgagacttatagtgtatttaagttatagataaattcattagaatattatgggggaatgagt

SEQ ID NO: 7125 - DNA, 383 bp, Staphylococcus aureus
taatttgaaaatgaaaatagttacacagggcaaacgctgaaaaattgcgtttgtctttttagtatgaaatgaatgatcgaacttataatttcttattgattgcttctactgacaatagattagatcggcctatactaaagtaaattctatattaatgtcttccgcaatttataatctaacataacagcaaatctcaaatatctggaacctaataaatcccctcactactgctaatagtgaagggatttattttattacttagacgtaattataaatatatttgttctattgtagtcatggttaatcatatttacaaactatcatttctaaatcgcgcattatgaagtcaattttcataaaccgtcattatatttctggattca

SEQ ID NO: 7126 - DNA, 383 bp, Staphylococcus aureus
tgaatccagaaatataatgacggtttatgaaaattgacttcataatgcgcgatttagaaatgatagtttgtaaatatgattaaccatgactacaatagaacaaatatatttataattacgtctaagtaataaaataaatcccttcactattagcagtagtgaggggatttattaggttccagatatttgagatttgctgttatgttagattataaattgcggaagacattaatatagaatttactttagtataggccgatctaatctattgtcagtagaagcaatcaataagaaattataagttcgatcattcatttcatactaaaaagacaaacgcaatttttcagcgtttgccctgtgtaactattttcattttcaaatta

SEQ ID NO: 7127 - DNA, 233 bp, Staphylococcus aureus
ttatattcatttccttccaattgtgatgtatagatgtgtattacatgtaattacattgtgatttgtaatctaatgatagttacgcaaaattaatgatgtttatcaaaattttacatgtacgattagatttgtaatacataaaaattgccttcattacattatataacctttgttagatgaataaaaatcgttatttgtaatactaagtattccaaaaatgcatgagtagattt

SEQ ID NO: 7128 - DNA, 233 bp, Staphylococcus aureus
aaatctactcatgcatttttggaatacttagtattacaaataacgatttttattcatctaacaaaggttatataatgtaatgaaggcaatttttatgtattacaaatctaatcgtacatgtaaaattttgataaacatcattaattttgcgtaactatcattagattacaaatcacaatgtaattacatgtaatacacatctatacatcacaattggaaggaaatgaatataa

SEQ ID NO: 7129 - DNA, 128 bp, Staphylococcus aureus
ttaggtcactccttattttgataatactctttaattaaggctcttgagttatcgtccggtcgttctttcccttgaaccactatgattagaacacaatcgtctggttatcgtccaccctccgcaagcta

SEQ ID NO: 7130 - DNA, 128 bp, Staphylococcus aureus
tagcttgcggagggtggacgataaccagacgattgtgttctaatcatagtggttcaagggaaagaacgaccggacgataactcaagagccttaattaaagagtattatcaaaataaggagtgacctaa

SEQ ID NO: 7131 - DNA, 164 bp, Staphylococcus aureus
aattatacgtgtaaatcaataatccatagttgaattaattctattcctaagacattaaataaaggaaagtccatttatactctacacatttcatattccccacacaaacgcaaaaaaacacctcgacataacatcgaggtgttttgtatatatcgtccgacaat

SEQ ID NO: 7132 - DNA, 164 bp, Staphylococcus aureus
attgtcggacgatatatacaaaacacctcgatgttatgtcgaggtgtttttttgcgtttgtgtggggaatatgaaatgtgtagagtataaatggactttcctttatttaatgtcttaggaatagaattaattcaactatggattattgatttacacgtataatt

SEQ ID NO: 7133 - DNA, 185 bp, Staphylococcus aureus
actttaggatttcgtatagttgcatatactgtcttaaggcatgatattaaaggatttctaatttttttgatagtattgggtttcctctaatttaacctaggggtattaaaatataataaaaatctgctggctggtggtaaatttcaaaagaaatattaactaaaatatattaattattaagcggt

SEQ ID NO: 7134 - DNA, 185 bp, Staphylococcus aureus
accgcttaataattaatatattttagttaatatttcttttgaaatttaccaccagccagcagatttttattatattttaatacccctaggttaaattagaggaaacccaatactatcaaaaaaattagaaatcctttaatatcatgccttaagacagtatatgcaactatacgaaatcctaaagt

SEQ ID NO: 7135 - DNA, 244 bp, Staphylococcus aureus
ttaattctccattttttatctaaatgagcaactcttgctaaaccatcttcttttaattattacattatttagtcgttaggggcccccctaactattaaataatataaataattatctcaaaaaatgacctcttaaattaaaataattatttatagtaaaattttcgaagaaaaatttactgtaatcaattgtataccttaattcttagataagacgactcgcttatcagacactcttgctcatt

SEQ ID NO: 7136 - DNA, 244 bp, Staphylococcus aureus
aatgagcaagagtgtctgataagcgagtcgtcttatctaagaattaaggtatacaattgattacagtaaatttttcttcgaaaattttactataaataattattttaatttaagaggtcattttttgagataattatttatattatttaatagttaggggggcccctaacgactaaataatgtaataattaaaagaagatggtttagcaagagttgctcatttagataaaaaatggagaattaa

SEQ ID NO: 7137 - DNA, 83 bp, Staphylococcus aureus
atactcaccacacagtgtattatattaagaacagcatgacaaaataatttttcgaatataatatataattaatttattactag

SEQ ID NO: 7138 - DNA, 83 bp, Staphylococcus aureus
ctagtaataaattaattatatattatattcgaaaaattattttgtcatgctgttcttaatataatacactgtgtggtgagtat

SEQ ID NO: 7139 - DNA, 307 bp, Staphylococcus aureus
atctttataattccatatatgtgtttggtgatcatattgtaaatctgtattacaaataggacaatttgaagcttcactttttcgagcattattagtttgctcttgatatttagactttttattcgcttcagtgaaagctctaattgatagttattttataaattctaatttttctccgcttaataaatactcaaaaattcctagcttccttgaaacatcactatcttcatataaacttaaaagtttatattctaatactgaaggattttaagagttgttatgatatgtttcatataaacttctctat

SEQ ID NO: 7140 - DNA, 307 bp, Staphylococcus aureus
atagagaagtttatatgaaacatatcataacaactcttaaaatccttcagtattagaatataaacttttaagtttatatgaagatagtgatgtttcaaggaagctaggaatttttgagtatttattaagcggagaaaaattagaatttataaaataactatcaattagagctttcactgaagcgaataaaaagtctaaatatcaagagcaaactaataatgctcgaaaaagtgaagcttcaaattgtcctatttgtaatacagatttacaatatgatcaccaaacacatatatggaattataaagat

SEQ ID NO: 7141 - DNA, 649 bp, Staphylococcus aureus
gtatccattaatatcacctttacttcccccatttagagcttcttctaatatttcttatctatttggaattcctttaatataactttgccattttttgctgattagcattcatagaattagaaaattcatactttgcttttgttataaatggacctgactagattgcatttctaagttcttgttgatttaatggatttgttttgtattagccattagctttctcctcttataaatatcttcactttttatatttatacttttcttcaagtatatcattttttcttcacgataaatgttctaatatttgtttttttgcaatcaaaactatactcctcatgataaaatgccacctaaaatggatggacaaattaattatatcggttgtctgtgaatcgtctacatttagttggatgtaaatgtcaatattaaaatctacataaatgattgtatagaaatgtacaaaattgtttgctaagtaattttctttttaggtgaatgattttttaatctatacgattttcctgtgatttttactacacttgaatgatgcaatatcctatccaaaatcgcatttgcgattttgggatcatcaaatatttcattttataagttgaaattgatatttgtggtaaatattgtgcttttcttc

SEQ ID NO: 7142 - DNA, 649 bp, Staphylococcus aureus
gaagaaaagcacaatatttaccacaaatatcaatttcaacttataaaatgaaatatttgatgatcccaaaatcgcaaatgcgattttggataggatattgcatcattcaagtgtagtaaaaatcacaggaaaatcgtatagattaaaaaatcattcacctaaaaagaaaattacttagcaaacaattttgtacatttctatacaatcatttatgtagattttaatattgacatttacatccaactaaatgtagacgattcacagacaaccgatataattaatttgtccatccattttaggtggcattttatcatgaggagtatagttttgattgcaaaaaaacaaatattagaacatttatcgtgaagaaaaaatgatatacttgaagaaaagtataaatataaaaagtgaagatatttataagaggagaaagctaatggctaatacaaaacaaatccattaaatcaacaagaacttagaaatgcaatctagtcaggtccatttataacaaaagcaaagtatgaattttctaattctatgaatgctaatcagcaaaaaatggcaaagttatattaaaggaattccaaatagataagaaatattagaagaagctctaaatgggggaagtaaaggtgatattaatggatac

SEQ ID NO: 7143 - DNA, 284 bp, Staphylococcus aureus
tagtagactaaatgaagtacatgcgtgtatcgatgcctaatgacgaattagaggtattctttaaatgatattcaaatcttcataagatacacgttcatagcttcaggcatactcgtgcttcactattattcgaatcaggtgcaacaacttaaagaagtaaaactagattaggtcatagtgatataaagacgactatggacatttataaacacattacaaaatcatctagagaaaaattggcagatgaatttcaaaaacatattaatttttaggaggattttata

SEQ ID NO: 7144 - DNA, 284 bp, Staphylococcus aureus
tataaaatcctcctaaaaattaatatgtttttgaaattcatctgccaatttttctctagatgattttgtaatgtgtttataaatgtccatagtcgtctttatatcactatgacctaatctagttttacttctttaagttgttgcacctgattcgaataatagtgaagcacgagtatgcctgaagctatgaacgtgtatcttatgaagatttgaatatcatttaaagaatacctctaattcgtcattaggcatcgatacacgcatgtacttcatttagtctacta

SEQ ID NO: 7145 - DNA, 77 bp, Staphylococcus aureus
aaataattttaaaacacacaaacgcaaaaaaacacctcgacataatatcgaggtgttttgtatatatcgtccgacaa

SEQ ID NO: 7146 - DNA, 77 bp, Staphylococcus aureus
ttgtcggacgatatatacaaaacacctcgatattatgtcgaggtgtttttttgcgtttgtgtgttttaaaattattt

SEQ ID NO: 7147 - DNA, 239 bp, Staphylococcus aureus
aataattgtcctcctaaaaaataaatgcttctattcaagctataaacagtttcataacctaatagatgatttcatttgtttcatttttaaaacgtttaatttcatttattttgttaactgttgttcgtttctgcttatatatcttgtaacacaataagtttccggggcttatcgtggggtggatataaaacaataccgttaataatcttataatttcacaagctttttgtcaatggcaa

SEQ ID NO: 7148 - DNA, 239 bp, Staphylococcus aureus
ttgccattgacaaaaagcttgtgaaattataagattattaacggtattgttttatatccaccccacgataagccccggaaacttattgtgttacaagatatataagcagaaacgaacaacagttaacaaaataaatgaaattaaacgttttaaaaatgaaacaaatgaaatcatctattaggttatgaaactgtttatagcttgaatagaagcatttattttttaggaggacaattatt

SEQ ID NO: 7149 - DNA, 426 bp, Staphylococcus aureus
ttctagtctttaaagtgttgtttaacaactaatgataaggacatttattcctctctaacaattatgtataaacgttaataaaataaatgatttactaatataggggtggtcgcgtttggttcaacgataatactttcacttcattcagttctagtgaaattgatcaaactagcttgatcatatttttagattcgcactcaaaaaagtagatataaagaaatcggacttaaaaacatttctgttcataagtccgatatcttattcaataaaaaagcgcgcaccccatcataagtttgttgagttcacgctttaaatctttatttagttgatggggtactctgagctagacaatatttgtatgtggcaaacattatcgttgcactcatttgctttatataaaagtagttagtgtatttatataaattc

SEQ ID NO: 7150 - DNA, 426 bp, Staphylococcus aureus
gaatttatataaatacactaactacttttatataaagcaaatgagtgcaacgataatgtttgccacatacaaatattgtctagctcagagtaccccatcaactaaataaagatttaaagcgtgaactcaacaaacttatgatggggtgcgcgcttttttattgaataagatatcggacttatgaacagaaatgtttttaagtccgatttctttatatctacttttttgagtgcgaatctaaaaatatgatcaagctagtttgatcaatttcactagaactgaatgaagtgaaagtattatcgttgaaccaaacgcgaccacccctatattagtaaatcatttattttattaacgtttatacataattgttagagaggaataaatgtccttatcattagttgttaaacaacactttaaagactagaa

SEQ ID NO: 7151 - DNA, 74 bp, Staphylococcus aureus
ttaaatatcctccttatatacgtcgacttaatttaaaatgtttgctcagtgacctgtaacaataccatcataaa

SEQ ID NO: 7152 - DNA, 74 bp, Staphylococcus aureus
tttatgatggtattgttacaggtcactgagcaaacattttaaattaagtcgacgtatataaggaggatatttaa

SEQ ID NO: 7153 - DNA, 192 bp, Staphylococcus aureus
tgattaacttccccctttttgcaatagtaaggtaatcgtcaatagacaactttattgttacgaatctatcagtgattaattttataagttaaacaaaaattacgggaattaattatcgttaattgccactctcatctatctaatatgattaaatcatgcctcacttaaaatagaccgctaaaagttgatcta

SEQ ID NO: 7154 - DNA, 192 bp, Staphylococcus aureus
tagatcaacttttagcggtctattttaagtgaggcatgatttaatcatattagatagatgagagtggcaattaacgataattaattcccgtaatttttgtttaacttataaaattaatcactgatagattcgtaacaataaagttgtctattgacgattaccttactattgcaaaaagggggaagttaatca

SEQ ID NO: 7155 - DNA, 356 bp, Staphylococcus aureus
aattttccctccttattcgtctacatttagtgatagacttctccacgaaaactatcttacacagcgccatggcaaagcggccgggtgtgtcagtaacctttcgcttcatcgcttttcttaaagtccaacgttagttatattacacgaaaaacatcgataaatcaaggcttttcacataatttttctatctgtctaacacatacttttatattttactttatatacttagtcagttcaactattttcgagatattttttatttccttctttattgtaaattcgtaccttgaatcattttattattatcattgaaaattattctatataattagtcataagaacggtggtgaatgaat

SEQ ID NO: 7156 - DNA, 356 bp, Staphylococcus aureus
attcattcaccaccgttcttatgactaattatatagaataattttcaatgataataataaaatgattcaaggtacgaatttacaataaagaaggaaataaaaaatatctcgaaaatagttgaactgactaagtatataaagtaaaatataaaagtatgtgttagacagatagaaaaattatgtgaaaagccttgatttatcgatgtttttcgtgtaatataactaacgttggactttaagaaaagcgatgaagcgaaaggttactgacacacccggccgctttgccatggcgctgtgtaagatagttttcgtggagaagtctatcactaaatgtagacgaataaggagggaaaatt

SEQ ID NO: 7157 - DNA, 190 bp, Staphylococcus aureus
ttcttaaaacctttttaattaggtatataatatagaagaaacacgtccaacaattttaaaagaagtatatttatatcggatatttaaagacattcataatattgctttatgttatttcgcttcttattttatccttacttcaaagaaaaaacgactaccaatcattggcagtcgttttttgtgtctggat

SEQ ID NO: 7158 - DNA, 190 bp, Staphylococcus aureus
atccagacacaaaaaacgactgccaatgattggtagtcgttttttctttgaagtaaggataaaataagaagcgaaataacataaagcaatattatgaatgtctttaaatatccgatataaatatacttcttttaaaattgttggacgtgtttcttctatattatatacctaattaaaaaggttttaagaa

SEQ ID NO: 7159 - DNA, 112 bp, Staphylococcus aureus
gaatggatgctcctttttttaaaataccttaatagtttaatatcattcttaataaaaaacaataccaaaagcgaacttttcgtttttctgattcaactttgttcgattttat

SEQ ID NO: 7160 - DNA, 112 bp, Staphylococcus aureus
ataaaatcgaacaaagttgaatcagaaaaacgaaaagttcgcttttggtattgttttttattaagaatgatattaaactattaaggtattttaaaaaaaggagcatccattc

SEQ ID NO: 7161 - DNA, 180 bp, Staphylococcus aureus
aataccaagcaaataccccacagtacttcattagcatgtattgtgggtttttctactttttgtaaatattgaaaattataagtagttgttttttactattagggcagaatgctttacaataacatgcaagtgtcaattaaggggagcacttgcaaaaatagtataggagagtgagtagtc

SEQ ID NO: 7162 - DNA, 180 bp, Staphylococcus aureus
gactactcactctcctatactatttttgcaagtgctccccttaattgacacttgcatgttattgtaaagcattctgccctaatagtaaaaaacaactacttataattttcaatatttacaaaaagtagaaaaacccacaatacatgctaatgaagtactgtggggtatttgcttggtatt

SEQ ID NO: 7163 - DNA, 120 bp, Staphylococcus aureus
aaagttaaatactcatgtaacgtaaaaatgtaatcacttctgaaaataaccattcacttatagaatgattaaaattaattttcgggaattttacgttgaatgttcctctatatgtcctag

SEQ ID NO: 7164 - DNA, 120 bp, Staphylococcus aureus
ctaggacatatagaggaacattcaacgtaaaattcccgaaaattaattttaatcattctataagtgaatggttattttcagaagtgattacatttttacgttacatgagtatttaacttt

SEQ ID NO: 7165 - DNA, 119 bp, Staphylococcus aureus
ttgaacaactatgtcataaataaaagcccccttttcacaatatgcatttacatgttgtggtaaagggggctctcattttctacgaatactaaaatggattttattttcaaatgtgtaaa

SEQ ID NO: 7166 - DNA, 119 bp, Staphylococcus aureus
tttacacatttgaaaataaaatccattttagtattcgtagaaaatgagagccccctttaccacaacatgtaaatgcatattgtgaaaagggggcttttatttatgacatagttgttcaa

SEQ ID NO: 7167 - DNA, 132 bp, Staphylococcus aureus
tgttatcccttctttcaataatcttcataatttataactttaacatactccacagatattttagaagtctactgtttcatgctataatctacattaaatgcacttaattatatttcaaaggagtgttatagt

SEQ ID NO: 7168 - DNA, 132 bp, Staphylococcus aureus
actataacactcctttgaaatataattaagtgcatttaatgtagattatagcatgaaacagtagacttctaaaatatctgtggagtatgttaaagttataaattatgaagattattgaaagaagggataaca

SEQ ID NO: 7169 - DNA, 179 bp, Staphylococcus aureus
taatctatcattcaagcaataaatgcttttcgttacataaatttgactagcattgctctgaatacgttatattgatgaattgctttatttttcgctcaattacatctagaatcacaagatgttgtcgtgttatgatttagtgtttcattaacaacatacacgcatatctatcccaacac

SEQ ID NO: 7170 - DNA, 179 bp, Staphylococcus aureus
gtgttgggatagatatgcgtgtatgttgttaatgaaacactaaatcataacacgacaacatcttgtgattctagatgtaattgagcgaaaaataaagcaattcatcaatataacgtattcagagcaatgctagtcaaatttatgtaacgaaaagcatttattgcttgaatgatagatta

SEQ ID NO: 7171 - DNA, 183 bp, Staphylococcus aureus
ataataaacaaaacatgcaataacataattgcaattttattttattatcgtacatgttgaatgccagtattgttttattaacacatcgattaaatcgcacgtgaaataaggtctaaaatttcaaattttaaaaagccataaaagtagtcaatatcatgaccgcttttatggcttttatattat

SEQ ID NO: 7172 - DNA, 183 bp, Staphylococcus aureus
ataatataaaagccataaaagcggtcatgatattgactacttttatggctttttaaaatttgaaattttagaccttatttcacgtgcgatttaatcgatgtgttaataaaacaatactggcattcaacatgtacgataataaaataaaattgcaattatgttattgcatgttttgtttattat

SEQ ID NO: 7173 - DNA, 116 bp, Staphylococcus aureus
agtacttccccctctttcactatattcaaaaatattttactcaaccattctatattgtgtaaaaaaatctgaacgcaaatgacagtcttatgagcgttcagatttcagtcgttaat

SEQ ID NO: 7174 - DNA, 116 bp, Staphylococcus aureus
attaacgactgaaatctgaacgctcataagactgtcatttgcgttcagatttttttacacaatatagaatggttgagtaaaatatttttgaatatagtgaaagagggggaagtact

SEQ ID NO: 7175 - DNA, 388 bp, Staphylococcus aureus
gatttatgatatctccttctatttaacaatacctttaattatacagtttgtatcttatagtgtcgattcagagcttgtgtaagatttgaactcttatttttgaaatgtccatgctccaattaatagtttagcaagttcaaatttacccattttaattgtgaatcattttatatctatgtttcgtgttaaatttaatgttatcgtacaattaatacttttcaactagttacctatacttcaatatactttcatcatctaacacgatattcatttctaaaatgaaccaacttgacttcaatgaataaatttttcctcaagcaaccacattaatgttcatatacaattacccctgttataatgtcaataatctaacaatgaggtgtttgat

SEQ ID NO: 7176 - DNA, 388 bp, Staphylococcus aureus
atcaaacacctcattgttagattattgacattataacaggggtaattgtatatgaacattaatgtggttgcttgaggaaaaatttattcattgaagtcaagttggttcattttagaaatgaatatcgtgttagatgatgaaagtatattgaagtataggtaactagttgaaaagtattaattgtacgataacattaaatttaacacgaaacatagatataaaatgattcacaattaaaatgggtaaatttgaacttgctaaactattaattggagcatggacatttcaaaaataagagttcaaatcttacacaagctctgaatcgacactataagatacaaactgtataattaaaggtattgttaaatagaaggagatatcataaatc

SEQ ID NO: 7177 - DNA, 161 bp, Staphylococcus aureus
tagtatccccctatttacatgtaattacgcttattttaacaaagtataattatttttgctcttaataattatatattgatttctaattgctcccgttttataattactattgttgtaaaaaggttagctaagctaactattttgtcttaggagatgtcact

SEQ ID NO: 7178 - DNA, 161 bp, Staphylococcus aureus
agtgacatctcctaagacaaaatagttagcttagctaacctttttacaacaatagtaattataaaacgggagcaattagaaatcaatatataattattaagagcaaaaataattatactttgttaaaataagcgtaattacatgtaaatagggggatacta

SEQ ID NO: 7179 - DNA, 101 bp, Staphylococcus aureus
atatttatattcaaaaataaaaagcatgccaatctctattcatcatttgtctgtccccaagacgcaaatatgatgtactgattggcatgctttttaagttt

SEQ ID NO: 7180 - DNA, 101 bp, Staphylococcus aureus
aaacttaaaaagcatgccaatcagtacatcatatttgcgtcttggggacagacaaatgatgaatagagattggcatgctttttatttttgaatataaatat

SEQ ID NO: 7181 - DNA, 126 bp, Staphylococcus aureus
aatatgatgcctcctatgtttcttcttagatgtttgtaattcatattattatacaattacttaaatttattatatatcaaacttagcattttatctattacaaatattaaattgctggctatatct

SEQ ID NO: 7182 - DNA, 126 bp, Staphylococcus aureus
agatatagccagcaatttaatatttgtaatagataaaatgctaagtttgatatataataaatttaagtaattgtataataatatgaattacaaacatctaagaagaaacataggaggcatcatatt

SEQ ID NO: 7183 - DNA, 103 bp, Staphylococcus aureus
agatatgaccgtttttactttaataaataatattgtattttagggagtaagacagaaatattaaaacatctctaatgatttaatatgtagtggtccctacaca

SEQ ID NO: 7184 - DNA, 103 bp, Staphylococcus aureus
tgtgtagggaccactacatattaaatcattagagatgttttaatatttctgtcttactccctaaaatacaatattatttattaaagtaaaaacggtcatatct

SEQ ID NO: 7185 - DNA, 62 bp, Staphylococcus aureus
taaaaatcatctccaaaacttttattttttcatgatatactagatgcactaggaggggtaaa

SEQ ID NO: 7186 - DNA, 62 bp, Staphylococcus aureus
tttacccctcctagtgcatctagtatatcatgaaaaaataaaagttttggagatgattttta

SEQ ID NO: 7187 - DNA, 169 bp, Staphylococcus aureus
attaagttatcctttctttttatcattactttcattatatgacgcgcgtcaatgtctctcaaaaaaactgcccctaaaaaagagtttaaaacatcattaaaatgctgatagaagcattcacttctacaattttaaatacgttctaaactctttaatggcaaataaatga

SEQ ID NO: 7188 - DNA, 169 bp, Staphylococcus aureus
tcatttatttgccattaaagagtttagaacgtatttaaaattgtagaagtgaatgcttctatcagcattttaatgatgttttaaactcttttttaggggcagtttttttgagagacattgacgcgcgtcatataatgaaagtaatgataaaaagaaaggataacttaat

SEQ ID NO: 7189 - DNA, 242 bp, Staphylococcus aureus
ttactattatatttgaaaagaaccgttgcctgtttatatattgattcaaacaattgtcaaatttgcataagattgatatttattaattgatcccctagtatgtatactctcgaattcaatttaaatcaaacagattgctcgctattaattttataaatcaaatttcaaacttaagcaaatatgttaaaattttaagcaaattgctttaaaataaagtttaagctaattaaaggggttagata

SEQ ID NO: 7190 - DNA, 242 bp, Staphylococcus aureus
tatctaacccctttaattagcttaaactttattttaaagcaatttgcttaaaattttaacatatttgcttaagtttgaaatttgatttataaaattaatagcgagcaatctgtttgatttaaattgaattcgagagtatacatactaggggatcaattaataaatatcaatcttatgcaaatttgacaattgtttgaatcaatatataaacaggcaacggttcttttcaaatataatagtaa

SEQ ID NO: 7191 - DNA, 171 bp, Staphylococcus aureus
catattcattatagtgtgtcataatgaacgatattctacatgaatcaacaatttaaacgcactatttttataagtataagtagctcaaaacaatttaaaaagcagtaagttgatttctactcgaaaccagcttactgcttttttattctaatacaaacctatcatcaatcg

SEQ ID NO: 7192 - DNA, 171 bp, Staphylococcus aureus
cgattgatgataggtttgtattagaataaaaaagcagtaagctggtttcgagtagaaatcaacttactgctttttaaattgttttgagctacttatacttataaaaatagtgcgtttaaattgttgattcatgtagaatatcgttcattatgacacactataatgaatatg

SEQ ID NO: 7193 - DNA, 76 bp, Staphylococcus aureus
tgacacctactcctttcacttttataaatttcaaagcaacttattcaattactttattatcttaacttaaatatga

SEQ ID NO: 7194 - DNA, 76 bp, Staphylococcus aureus
tcatatttaagttaagataataaagtaattgaataagttgctttgaaatttataaaagtgaaaggagtaggtgtca

SEQ ID NO: 7195 - DNA, 120 bp, Staphylococcus aureus
tttttacttcctttcgtatttcatgaccattattatagcaccattgtaaactttaagaaatgaaaagtttacaataagttgttctatataaattaaaaccttaattattctacacagctg

SEQ ID NO: 7196 - DNA, 120 bp, Staphylococcus aureus
cagctgtgtagaataattaaggttttaatttatatagaacaacttattgtaaacttttcatttcttaaagtttacaatggtgctataataatggtcatgaaatacgaaaggaagtaaaaa

SEQ ID NO: 7197 - DNA, 397 bp, Staphylococcus aureus
tcgaaatcccccttacatttcattgtccattaacaatattatgtttttataaaacgttgttatatatctttctacaaaatcataacattctgttgtaatccttttaaacctcttcttttattgatagccattccctgatatcccttccataaagtatgcactaatataattatgatataacttatcaataaagagatacattgagctattttctcaggtatactactttagctataataatactaatctatcattaattaaattgaacgataacaacggcacttattatttaaaaaaatacaaatatctaactttctagctataaaaataagagcctaatacaatatcaaaagatgatatgtttcagactctcatttcactaacttatatagctgaa

SEQ ID NO: 7198 - DNA, 397 bp, Staphylococcus aureus
ttcagctatataagttagtgaaatgagagtctgaaacatatcatcttttgatattgtattaggctcttatttttatagctagaaagttagatatttgtatttttttaaataataagtgccgttgttatcgttcaatttaattaatgatagattagtattattatagctaaagtagtatacctgagaaaatagctcaatgtatctctttattgataagttatatcataattatattagtgcatactttatggaagggatatcagggaatggctatcaataaaagaagaggtttaaaaggattacaacagaatgttatgattttgtagaaagatatataacaacgttttataaaaacataatattgttaatggacaatgaaatgtaagggggatttcga

SEQ ID NO: 7199 - DNA, 213 bp, Staphylococcus aureus
aatttcctcctattgaaaatgattatcaattattccaaaattatacaagattgcatatacatttacaatagctagtgctatttatttttttattttcgcaaaaaatttagcaaaatatcttaacatccctataaatccccacaaaaaagggtaaatccgaacgtcaaatttcatctctttatgccaatcaacgatcgatttacctttttaaat

SEQ ID NO: 7200 - DNA, 213 bp, Staphylococcus aureus
atttaaaaaggtaaatcgatcgttgattggcataaagagatgaaatttgacgttcggatttacccttttttgtggggatttatagggatgttaagatattttgctaaattttttgcgaaaataaaaaaataaatagcactagctattgtaaatgtatatgcaatcttgtataattttggaataattgataatcattttcaataggaggaaatt

SEQ ID NO: 7201 - DNA, 77 bp, Staphylococcus aureus
aaaaatacaccttaaactatacaattcgctgtatggtttaaggtgatattcaaacaatattaggtttgatttaacta

SEQ ID NO: 7202 - DNA, 77 bp, Staphylococcus aureus
tagttaaatcaaacctaatattgtttgaatatcaccttaaaccatacagcgaattgtatagtttaaggtgtattttt

SEQ ID NO: 7203 - DNA, 259 bp, Staphylococcus aureus
atctttcacctttcctttgaatcattactcattaatatactactattctatgaaaagttatattaaaaactattttggtttttacataaatatattccgctatttgttttcgattagattgtttgcttcaatagcggatatgctaaaaatataattttctaattacacattgaactttgtatattacttgtttatcacaacaattaggattaatataaattttgtaaattgtatctaatatgaaattgggggttttaat

SEQ ID NO: 7204 - DNA, 259 bp, Staphylococcus aureus
attaaaacccccaatttcatattagatacaatttacaaaatttatattaatcctaattgttgtgataaacaagtaatatacaaagttcaatgtgtaattagaaaattatatttttagcatatccgctattgaagcaaacaatctaatcgaaaacaaatagcggaatatatttatgtaaaaaccaaaatagtttttaatataacttttcatagaatagtagtatattaatgagtaatgattcaaaggaaaggtgaaagat

SEQ ID NO: 7205 - DNA, 188 bp, Staphylococcus aureus
aataaaaagactagtgtaccttgtttcaagcttaataagctgaaataaggtatggctagtctttaactttaattaaagcatcttcaatatttaaattttaagttaattttatgtcccaatgctgaataaataacttcgttttaataaattgttatcgttcaatgttattaaacgcaattaaccttgat

SEQ ID NO: 7206 - DNA, 188 bp, Staphylococcus aureus
atcaaggttaattgcgtttaataacattgaacgataacaatttattaaaacgaagttatttattcagcattgggacataaaattaacttaaaatttaaatattgaagatgctttaattaaagttaaagactagccataccttatttcagcttattaagcttgaaacaaggtacactagtctttttatt

SEQ ID NO: 7207 - DNA, 427 bp, Staphylococcus aureus
tattaaaccactcctctgatgcacatcttgttgtagcaaggttcacatgtaatttattaaatcgaaactctatccaactatgttataaagttcattctaaacaaataagtataaaaattcaatatttttattactagaatatggttaaatacatttatttcttataataatttgatgtttaagatattttgccaaattgaaaattattagtctgaatattttgtatcttaactgatatgtaaacttttaaaattttaatctatatcaacgtgtttgatttgatattttttatattaattggatggcttgctcacaaaatttataaaatataaaaaaagaagagctttaaatcataacgcatgccatttatctttaaatgcaatgagttatcattcaaactcttcttatcaacctacatacattgaca

SEQ ID NO: 7208 - DNA, 427 bp, Staphylococcus aureus
tgtcaatgtatgtaggttgataagaagagtttgaatgataactcattgcatttaaagataaatggcatgcgttatgatttaaagctcttctttttttatattttataaattttgtgagcaagccatccaattaatataaaaaatatcaaatcaaacacgttgatatagattaaaattttaaaagtttacatatcagttaagatacaaaatattcagactaataattttcaatttggcaaaatatcttaaacatcaaattattataagaaataaatgtatttaaccatattctagtaataaaaatattgaatttttatacttatttgtttagaatgaactttataacatagttggatagagtttcgatttaataaattacatgtgaaccttgctacaacaagatgtgcatcagaggagtggtttaata

SEQ ID NO: 7209 - DNA, 63 bp, Staphylococcus aureus
aatatccctcccacttaaaactataaactattcttcataggtatatgaaatacaagtgattaa

SEQ ID NO: 7210 - DNA, 63 bp, Staphylococcus aureus
ttaatcacttgtatttcatatacctatgaagaatagtttatagttttaagtgggagggatatt

SEQ ID NO: 7211 - DNA, 609 bp, Staphylococcus aureus
cttacatcctcacatatacaaatatattgatttactcctgtttgtctttctcaaatcaattgtcaacatctaatattcactaccaattatatcgccacatgttttttagcagtaacaaaacataagtcgattatatcaaataatacttttattaaaacatttttttatgctaaattaggatattttatccattaaatatacattttcatccaaataccaaagctttcataatcatagaaacttgatcgttcgtgtcgaatttttatgcattttctgattaaaagtcctatattatgcacaaaatatacatttagaattttcagtaatattacaaatttgtaacagacttattttcgaaacattcagttttcacaaagaatgccgtagttataagttttgcaaaatgcaaatttctatacttttaaaattctattgtgtcaagatattagcaaaaaattacaaaacgttaacaaagcacacaaggacgctaatttctgttatagtctttcttgtcgtttaattacgagagataacttataacattaattttgtcacacggacattacgaaaatattttagatttaaaatttttaggaggatatttttaaa

SEQ ID NO: 7212 - DNA, 609 bp, Staphylococcus aureus
tttaaaaatatcctcctaaaaattttaaatctaaaatattttcgtaatgtccgtgtgacaaaattaatgttataagttatctctcgtaattaaacgacaagaaagactataacagaaattagcgtccttgtgtgctttgttaacgttttgtaattttttgctaatatcttgacacaatagaattttaaaagtatagaaatttgcattttgcaaaacttataactacggcattctttgtgaaaactgaatgtttcgaaaataagtctgttacaaatttgtaatattactgaaaattctaaatgtatattttgtgcataatataggacttttaatcagaaaatgcataaaaattcgacacgaacgatcaagtttctatgattatgaaagctttggtatttggatgaaaatgtatatttaatggataaaatatcctaatttagcataaaaaaatgttttaataaaagtattatttgatataatcgacttatgttttgttactgctaaaaaacatgtggcgatataattggtagtgaatattagatgttgacaattgatttgagaaagacaaacaggagtaaatcaatatatttgtatatgtgaggatgtaag

SEQ ID NO: 7213 - DNA, 287 bp, Staphylococcus aureus
acagccattgacacacccaaatttaggcatgtcaaatcggctatacattgataaatttttagttaaagtacttacaaatatacttgccttcaaattctcaattaatttagtcattacaaatcatgacataaaacttacattacatatatcaacatgttccgctacaaaacatattcagtatatgtatagaggatatttattctaagttaaaaccttttcaaattataaccgctacaattataaatgattaaagtgtttcaacatattatatatattccacgctcaca

SEQ ID NO: 7214 - DNA, 287 bp, Staphylococcus aureus
tgtgagcgtggaatatatataatatgttgaaacactttaatcatttataattgtagcggttataatttgaaaaggttttaacttagaataaatatcctctatacatatactgaatatgttttgtagcggaacatgttgatatatgtaatgtaagttttatgtcatgatttgtaatgactaaattaattgagaatttgaaggcaagtatatttgtaagtactttaactaaaaatttatcaatgtatagccgatttgacatgcctaaatttgggtgtgtcaatggctgt

SEQ ID NO: 7215 - DNA, 94 bp, Staphylococcus aureus
ctatcgtccccttcgcttattgatgagaaacctcttttcttcaatttattgcttttgcataatgctatatccttttctatcttcaagccatcat

SEQ ID NO: 7216 - DNA, 94 bp, Staphylococcus aureus
atgatggcttgaagatagaaaaggatatagcattatgcaaaagcaataaattgaagaaaagaggtttctcatcaataagcgaaggggacgatag

SEQ ID NO: 7217 - DNA, 247 bp, Staphylococcus aureus
aaacaaccctctttctatctttggttaaaattaaaaacaaattatacgtaagacaatataaaaatgatgcgaattcattacgcatcattataaatgttaagtatatataaccttaaattaacctatttaaacgccgacgtccaccaattatttttatttttaataattgtttaataaacatgtttatttttgattatattttgttatagttaaagataatattacaattttcaaaggagtgtctaat

SEQ ID NO: 7218 - DNA, 247 bp, Staphylococcus aureus
attagacactcctttgaaaattgtaatattatctttaactataacaaaatataatcaaaaataaacatgtttattaaacaattattaaaaataaaaataattggtggacgtcggcgtttaaataggttaatttaaggttatatatacttaacatttataatgatgcgtaatgaattcgcatcatttttatattgtcttacgtataatttgtttttaattttaaccaaagatagaaagagggttgttt

SEQ ID NO: 7219 - DNA, 236 bp, Staphylococcus aureus
acatattacaaataaatatttcctattaattatctgttaatctcattgtaactttgactaatttttattacaaaattagtcaaagtttttttattcttttacaaatcaataacattccccacaagaagcattaattttgttaaagtaactattgtcatcaattcgagatgtgagaataaaacagtcgctacgttttatttataaaaaaagatatagaactttggaggactttattc

SEQ ID NO: 7220 - DNA, 236 bp, Staphylococcus aureus
gaataaagtcctccaaagttctatatctttttttataaataaaacgtagcgactgttttattctcacatctcgaattgatgacaatagttactttaacaaaattaatgcttcttgtggggaatgttattgatttgtaaaagaataaaaaaactttgactaattttgtaataaaaattagtcaaagttacaatgagattaacagataattaataggaaatatttatttgtaatatgt

SEQ ID NO: 7221 - DNA, 360 bp, Staphylococcus aureus
tataaacacgatgatacatattgtcttgaaacttaattctagtacatatgtcatcaaaaaactttgagctttcctttataggagaagctctttttttgctatttttcgttgccacctacttatttatatttcccccatatttataatattaattttttctaatactattaactttaaaactacgttatctaatttaattgatccagtttttccacattacaaaattcatagttctacagtgcctaagttatatcacctccatcaaaagtacgcgcttacatcattgatacacaagacatcatgacatagttgtatactgtctaatcttctactatactaagataaaaggagtgatctttt

SEQ ID NO: 7222 - DNA, 360 bp, Staphylococcus aureus
aaaagatcactccttttatcttagtatagtagaagattagacagtatacaactatgtcatgatgtcttgtgtatcaatgatgtaagcgcgtacttttgatggaggtgatataacttaggcactgtagaactatgaattttgtaatgtggaaaaactggatcaattaaattagataacgtagttttaaagttaatagtattagaaaaaattaatattataaatatgggggaaatataaataagtaggtggcaacgaaaaatagcaaaaaaagagcttctcctataaaggaaagctcaaagttttttgatgacatatgtactagaattaagtttcaagacaatatgtatcatcgtgtttata

SEQ ID NO: 7223 - DNA, 91 bp, Staphylococcus aureus
taattgaatttattataataacattataaaaacaagaacccccatatgttgagctctcgtttcaacatacgggggttttcatattgttgta

SEQ ID NO: 7224 - DNA, 91 bp, Staphylococcus aureus
tacaacaatatgaaaacccccgtatgttgaaacgagagctcaacatatgggggttcttgtttttataatgttattataataaattcaatta

SEQ ID NO: 7225 - DNA, 310 bp, Staphylococcus aureus
attgtcacctctatatttttcattcttttctattttatcacatgcactattgtttaaaaatgactcttggaactaacgtttcatttttaaggacttaagtgtattatctgcaccattgtacattacatgcacatttagacagcaatattcatttacatcatgtacatttgtaacaatgatgtgggatatagcatatttgatgctatatagcgttttttgttaggttaaaatccatttaactaacacactcagaatgcgctaaaggagctcgaaacaataaattgttccagctcctttaagcaccgatgtc

SEQ ID NO: 7226 - DNA, 310 bp, Staphylococcus aureus
gacatcggtgcttaaaggagctggaacaatttattgtttcgagctcctttagcgcattctgagtgtgttagttaaatggattttaacctaacaaaaaacgctatatagcatcaaatatgctatatcccacatcattgttacaaatgtacatgatgtaaatgaatattgctgtctaaatgtgcatgtaatgtacaatggtgcagataatacacttaagtccttaaaaatgaaacgttagttccaagagtcatttttaaacaatagtgcatgtgataaaatagaaaagaatgaaaaatatagaggtgacaat

SEQ ID NO: 7227 - DNA, 209 bp, Staphylococcus aureus
tcaccctttttatttaaataacttacataatcataataatacatgatgtttcataggcctgtcgatgattgattcacaatagcacgtgatttttttgtttttcaatattattcatttattccatcaaaaacaccctttttaatttttacaaaaattaaaaaaagtgctcctacactgcttgcatgtagaaacactttttcattgtaatg

SEQ ID NO: 7228 - DNA, 209 bp, Staphylococcus aureus
cattacaatgaaaaagtgtttctacatgcaagcagtgtaggagcactttttttaatttttgtaaaaattaaaaagggtgtttttgatggaataaatgaataatattgaaaaacaaaaaaatcacgtgctattgtgaatcaatcatcgacaggcctatgaaacatcatgtattattatgattatgtaagttatttaaataaaaagggtga

SEQ ID NO: 7229 - DNA, 509 bp, Staphylococcus aureus
atagaattaatttaattgtattactttatgtactagttgttaagtgaaattttgtattttgcctttttacaatcatttttatttgaaatattttgcgcgaaattaaatcatctttttgtttaattgaaaataattatcattattagttttccaattatctgtttcacgcttttcagtcatatctttcacaaccttattaatgacaatacttaataatcacctcacctaaaaatcgttatactatttataaataccctttttctgaaaattaataacccaagtttgataaatatctactaccatttagaaggtaatatttatctttaaattaaatttgtaatggattaatttataaaaatcaaatcaggcattaaataaaatagcccataaatacaaagtgttatcaccttctatttacgggctattagttctattcgttattctatttacagatcattctatctaattaatttgtgtacaattttgataacttattttcccttagttta

SEQ ID NO: 7230 - DNA, 509 bp, Staphylococcus aureus
taaactaagggaaaataagttatcaaaattgtacacaaattaattagatagaatgatctgtaaatagaataacgaatagaactaatagcccgtaaatagaaggtgataacactttgtatttatgggctattttatttaatgcctgatttgatttttataaattaatccattacaaatttaatttaaagataaatattaccttctaaatggtagtagatatttatcaaacttgggttattaattttcagaaaaagggtatttataaatagtataacgatttttaggtgaggtgattattaagtattgtcattaataaggttgtgaaagatatgactgaaaagcgtgaaacagataattggaaaactaataatgataattattttcaattaaacaaaaagatgatttaatttcgcgcaaaatatttcaaataaaaatgattgtaaaaaggcaaaatacaaaatttcacttaacaactagtacataaagtaatacaattaaattaattctat

SEQ ID NO: 7231 - DNA, 132 bp, Staphylococcus aureus
tcccaccactcctttactattccttacatactttgtctgttttctctatttattatatagtaaaataatttttttactatacttctgtagacgtataactattttttatcattttttatctctagagaatat

SEQ ID NO: 7232 - DNA, 132 bp, Staphylococcus aureus
atattctctagagataaaaaatgataaaaaatagttatacgtctacagaagtatagtaaaaaaattattttactatataataaatagagaaaacagacaaagtatgtaaggaatagtaaaggagtggtggga

SEQ ID NO: 7233 - DNA, 384 bp, Staphylococcus aureus
ttcgtccaccacttctcatatcattatcattttattattaccctatattaaaagaatcaacaatacaactgaagacttcttcattttatgcataaaaaaatcggctagtcacgtgctagccgacaaatagaaaggaaagtaagtaataaatattgaagatgttgtgatgtaacttgaacgattaaaagctatctgttatatagctctacccctttgtttaatcgctccccctgttacaagtaatatcatagcacaatcttttttaaaatgtaagcgttttccaaaaaatttttacgattttttttaaaagatattgaaaatgtcctcattgtcactcttatgttatactttgtgtaatatatcatcttttaggaggtggctgtc

SEQ ID NO: 7234 - DNA, 384 bp, Staphylococcus aureus
gacagccacctcctaaaagatgatatattacacaaagtataacataagagtgacaatgaggacattttcaatatcttttaaaaaaaatcgtaaaaattttttggaaaacgcttacattttaaaaaagattgtgctatgatattacttgtaacagggggagcgattaaacaaaggggtagagctatataacagatagcttttaatcgttcaagttacatcacaacatcttcaatatttattacttactttcctttctatttgtcggctagcacgtgactagccgatttttttatgcataaaatgaagaagtcttcagttgtattgttgattcttttaatatagggtaataataaaatgataatgatatgagaagtggtggacgaa

SEQ ID NO: 7235 - DNA, 444 bp, Staphylococcus aureus
cctatttttcataaaatgtcatttaaacaagttatttattaaaattcactttattacataaattatacaattaaaaagtttcttcaaattgtaaagatgcattaatcgagttataatcataatgattaagatggtagatttagtcttatataactacatttactaagatttaaatagatgagtacataatgtataaattgggaatatacagtatgacttacggtaatatatcaatatattgatatattatttgcacatgggagtatgctattttttatctatacatcttaaaaaaatttacagttttacaattcaatatcattaaacaaacaacatattcagcttatttttcattctcttacgttacaagttgtaaataccatcgcgttaaacaacaatagccaacgctaataaaatatattgcgttaaagtggagtgattaat

SEQ ID NO: 7236 - DNA, 444 bp, Staphylococcus aureus
attaatcactccactttaacgcaatatattttattagcgttggctattgttgtttaacgcgatggtatttacaacttgtaacgtaagagaatgaaaaataagctgaatatgttgtttgtttaatgatattgaattgtaaaactgtaaatttttttaagatgtatagataaaaaatagcatactcccatgtgcaaataatatatcaatatattgatatattaccgtaagtcatactgtatattcccaatttatacattatgtactcatctatttaaatcttagtaaatgtagttatataagactaaatctaccatcttaatcattatgattataactcgattaatgcatctttacaatttgaagaaactttttaattgtataatttatgtaataaagtgaattttaataaataacttgtttaaatgacattttatgaaaaatagg

SEQ ID NO: 7237 - DNA, 386 bp, Staphylococcus aureus
cagtcttatataaattctttaatcatgtcatataataatttatgcatcattttcaaagcttacatgtcttttatcttgtataacatacgcatatgaccaatgatttgataaggccattcaatttcttatattaaaaacaaacgcagttgattacaggattcattccatatatcaattgcgtttgttattttaataatgctattttttattttaaagcccacagtaaaaactaacgataatattgccacttataagtttttcacactacaacttcgatttaagctatatttataaaaaaatgcgcctactcataacattctttggctatttaactttaataagctagggccaaatttgtcataaaataagcgcacattataatcata

SEQ ID NO: 7238 - DNA, 386 bp, Staphylococcus aureus
tatgattataatgtgcgcttattttatgacaaatttggccctagcttattaaagttaaatagccaaagaatgttatgagtaggcgcatttttttataaatatagcttaaatcgaagttgtagtgtgaaaaacttataagtggcaatattatcgttagtttttactgtgggctttaaaataaaaaatagcattattaaaataacaaacgcaattgatatatggaatgaatcctgtaatcaactgcgtttgtttttaatataagaaattgaatggccttatcaaatcattggtcatatgcgtatgttatacaagataaaagacatgtaagctttgaaaatgatgcataaattattatatgacatgattaaagaatttatataagactg

SEQ ID NO: 7239 - DNA, 279 bp, Staphylococcus aureus
aacttcttaccccatctctgattgatactaaataaatccataaaaaaacttattgccgtaattatactataaattatcgattttggtacattaatatttgcataccatgcaatcgtttacagaactactatagcaggcttttgcaactttgcaaacaattattttgtgatttttctaaaaaattaaaaaagttgctcaagtaccgttgagtcacatacaacttcagctattctcggtaattatgatataattttaataatattaaaaaggagtatatca

SEQ ID NO: 7240 - DNA, 279 bp, Staphylococcus aureus
tgatatactcctttttaatattattaaaattatatcataattaccgagaatagctgaagttgtatgtgactcaacggtacttgagcaacttttttaattttttagaaaaatcacaaaataattgtttgcaaagttgcaaaagcctgctatagtagttctgtaaacgattgcatggtatgcaaatattaatgtaccaaaatcgataatttatagtataattacggcaataagtttttttatggatttatttagtatcaatcagagatggggtaagaagtt

SEQ ID NO: 7241 - DNA, 95 bp, Staphylococcus aureus
ctatttaaaccaccctatctcatacataaacatgaacgttctgccatttcacatacatatggtcgtccatttaatgaggtaaggtggttttctcg

SEQ ID NO: 7242 - DNA, 95 bp, Staphylococcus aureus
cgagaaaaccaccttacctcattaaatggacgaccatatgtatgtgaaatggcagaacgttcatgtttatgtatgagatagggtggtttaaatag

SEQ ID NO: 7243 - DNA, 74 bp, Staphylococcus aureus
atatttactcctctattttttctctttatcaaagcttaacatagtccgatgaccacttcattctattagtgcaa

SEQ ID NO: 7244 - DNA, 74 bp, Staphylococcus aureus
ttgcactaatagaatgaagtggtcatcggactatgttaagctttgataaagagaaaaaatagaggagtaaatat

SEQ ID NO: 7245 - DNA, 135 bp, Staphylococcus aureus
ttattttaaacttcattcaaaagtcttagtgaataaagaaaaaaagcgtggtaaaatcaacttgaacaaaattaagtcacctttataaatattaaacgtgtatttaatgccatgtattcctcgggaggtcctcac

SEQ ID NO: 7246 - DNA, 135 bp, Staphylococcus aureus
gtgaggacctcccgaggaatacatggcattaaatacacgtttaatatttataaaggtgacttaattttgttcaagttgattttaccacgctttttttctttattcactaagacttttgaatgaagtttaaaataa

SEQ ID NO: 7247 - DNA, 65 bp, Staphylococcus aureus
taaaagacacatctatacgatgatcatttacaatgattgcgtatagtgatgtgtctttttttgta

SEQ ID NO: 7248 - DNA, 65 bp, Staphylococcus aureus
tacaaaaaaagacacatcactatacgcaatcattgtaaatgatcatcgtatagatgtgtctttta

SEQ ID NO: 7249 - DNA, 329 bp, Staphylococcus aureus
cttctattccctccatatcatctttcctaacaatacatctaattagattcatttataaatagatgtcttactatttaaatataatatatagtaaacgcttacacacctacaacgacattgacgtattttgaaagtattttgtataatcagattatcttttcatatagtgaaaattttttcacgaccttatatatgacatcgttgtatttgtaatacattcgttttaaacgcataatcaaacctatatcaatacacaaatatatataatgacatacaagattttaatgtaataacgatctatcacacatttattttcaaggaggttgaat

SEQ ID NO: 7250 - DNA, 329 bp, Staphylococcus aureus
attcaacctccttgaaaataaatgtgtgatagatcgttattacattaaaatcttgtatgtcattatatatatttgtgtattgatataggtttgattatgcgtttaaaacgaatgtattacaaatacaacgatgtcatatataaggtcgtgaaaaaattttcactatatgaaaagataatctgattatacaaaatactttcaaaatacgtcaatgtcgttgtaggtgtgtaagcgtttactatatattatatttaaatagtaagacatctatttataaatgaatctaattagatgtattgttaggaaagatgatatggagggaatagaag

SEQ ID NO: 7251 - DNA, 57 bp, Staphylococcus aureus
aaaaaaggaagttatgatttaatggccttgagcctatcataacttccttttatcatt

SEQ ID NO: 7252 - DNA, 57 bp, Staphylococcus aureus
aatgataaaaggaagttatgataggctcaaggccattaaatcataacttcctttttt

SEQ ID NO: 7253 - DNA, 166 bp, Staphylococcus aureus
tgttgtccacccactttcgctcttacttttattttaacgtatttttgctcagttccaaacatagatgatcatcatttttaaaagattagcgttatacggtgagtacaacatgatctgttaatataacaagccaccttacttggctacatcgatatattgttaagca

SEQ ID NO: 7254 - DNA, 166 bp, Staphylococcus aureus
tgcttaacaatatatcgatgtagccaagtaaggtggcttgttatattaacagatcatgttgtactcaccgtataacgctaatcttttaaaaatgatgatcatctatgtttggaactgagcaaaaatacgttaaaataaaagtaagagcgaaagtgggtggacaaca

SEQ ID NO: 7255 - DNA, 158 bp, Staphylococcus aureus
gtgctttacctgcttatcttcaaaccattacggttactggaattggcacattcgagatgttgccgaggcttcatagggccagtccctccacctctctagataagtgatgcttatttacgtttacgttacaagataatccttagtacgtcaatcataaa

SEQ ID NO: 7256 - DNA, 158 bp, Staphylococcus aureus
tttatgattgacgtactaaggattatcttgtaacgtaaacgtaaataagcatcacttatctagagaggtggagggactggccctatgaagcctcggcaacatctcgaatgtgccaattccagtaaccgtaatggtttgaagataagcaggtaaagcac

SEQ ID NO: 7257 - DNA, 486 bp, Staphylococcus aureus
aataacaacccctttgtttaatatcgagtttgcaaatttacgtttatcagcatttctatgatcagtacttctacgggtagcgtttctatgtaatttacatcatcttaacatataaatacttcgctatttaattgaaaacatatcttattattctttgtccgttctgacatttaatatctaaccttaggcatttcacttgttaataaatttaactttcttccactaaccgtccctaaacccaatcccgcaacagtttttaactttttcgttgttgtcctgacatcctcattaagaaagtttattctgcttaaaacttataatccacaccctgagcaaacgctccttatgacagagtattaaaataagccgataaagatacacacctttaccgactatttaaaatacacttcaccaattcattttaatttaatggattgaagtaactaaattaatattatgctgttcaattaaaagcttcatacaacc

SEQ ID NO: 7258 - DNA, 486 bp, Staphylococcus aureus
ggttgtatgaagcttttaattgaacagcataatattaatttagttacttcaatccattaaattaaaatgaattggtgaagtgtattttaaatagtcggtaaaggtgtgtatctttatcggcttattttaatactctgtcataaggagcgtttgctcagggtgtggattataagttttaagcagaataaactttcttaatgaggatgtcaggacaacaacgaaaaagttaaaaactgttgcgggattgggtttagggacggttagtggaagaaagttaaatttattaacaagtgaaatgcctaaggttagatattaaatgtcagaacggacaaagaataataagatatgttttcaattaaatagcgaagtatttatatgttaagatgatgtaaattacatagaaacgctacccgtagaagtactgatcatagaaatgctgataaacgtaaatttgcaaactcgatattaaacaaaggggttgttatt

SEQ ID NO: 7259 - DNA, 110 bp, Staphylococcus aureus
tttttaacatctccttattcgcttaatggttattatttacccaatcttcctaggaacttaatcatgattacactaaaaattactttcttctttataaaaacaagctcgaa

SEQ ID NO: 7260 - DNA, 110 bp, Staphylococcus aureus
ttcgagcttgtttttataaagaagaaagtaatttttagtgtaatcatgattaagttcctaggaagattgggtaaataataaccattaagcgaataaggagatgttaaaaa

SEQ ID NO: 7261 - DNA, 275 bp, Staphylococcus aureus
cggtcattccccttccttaagtcaatgatatgttgtctaccctacgatgatcatctttgactattaaacgatgatttcacaacaatgtactcttgttaattactttcgctaatgatagacagttgtttaataatatcgtaacactgttgtcaaactattctaacttttataattaagaatctatacaaaaacgtgttctcggataaacttgtttttacaaaccacaaaagctctaaacattagtgtaaaccaatgcttagagctttctaattatt

SEQ ID NO: 7262 - DNA, 275 bp, Staphylococcus aureus
aataattagaaagctctaagcattggtttacactaatgtttagagcttttgtggtttgtaaaaacaagtttatccgagaacacgtttttgtatagattcttaattataaaagttagaatagtttgacaacagtgttacgatattattaaacaactgtctatcattagcgaaagtaattaacaagagtacattgttgtgaaatcatcgtttaatagtcaaagatgatcatcgtagggtagacaacatatcattgacttaaggaaggggaatgaccg

SEQ ID NO: 7263 - DNA, 159 bp, Staphylococcus aureus
aaaattcgctcctgttcttttaagaagttaattccactaaatttaaaacgcttacattattatcttcaatattcattatagtatgttaaaatatagccaacaaatataaataaactaattatccatagcttgaacctataaataaaaggagcaaaacac

SEQ ID NO: 7264 - DNA, 159 bp, Staphylococcus aureus
gtgttttgctccttttatttataggttcaagctatggataattagtttatttatatttgttggctatattttaacatactataatgaatattgaagataataatgtaagcgttttaaatttagtggaattaacttcttaaaagaacaggagcgaatttt

SEQ ID NO: 7265 - DNA, 241 bp, Staphylococcus aureus
cttaagttattagagcctcttatgcagttgcgtagtcaactgtatacctttttcctttaacttaagttattagagcctcttatgcagttgctcagtcaactgtatacctttttcctttaacttaagttattagagcctcttatgcagttgctcagatcatcgtataaaaattaatgacgtcatttcaaaaatcgatacaaaaataatttattataaaaattctaagaaagaagtgaagcag

SEQ ID NO: 7266 - DNA, 241 bp, Staphylococcus aureus
ctgcttcacttctttcttagaatttttataataaattatttttgtatcgatttttgaaatgacgtcattaatttttatacgatgatctgagcaactgcataagaggctctaataacttaagttaaaggaaaaaggtatacagttgactgagcaactgcataagaggctctaataacttaagttaaaggaaaaaggtatacagttgactacgcaactgcataagaggctctaataacttaag

SEQ ID NO: 7267 - DNA, 255 bp, Staphylococcus aureus
ggcgtcattataaaaaggcctcttgaaatccgttaaaattttaattaattattatataataagagaacttttcaaacaatacagttgttatttttgctatttcaacaaacataaataagcagtaagatgactacaacttaagagtcttcttactgcaattatttttcaaatatatcaacgttaatataacttctattaagaaatactcacattctgccctgcaatgcaaatctcgtcacatataaatatttttaa

SEQ ID NO: 7268 - DNA, 255 bp, Staphylococcus aureus
ttaaaaatatttatatgtgacgagatttgcattgcagggcagaatgtgagtatttcttaatagaagttatattaacgttgatatatttgaaaaataattgcagtaagaagactcttaagttgtagtcatcttactgcttatttatgtttgttgaaatagcaaaaataacaactgtattgtttgaaaagttctcttattatataataattaattaaaattttaacggatttcaagaggcctttttataatgacgcc

SEQ ID NO: 7269 - DNA, 289 bp, Staphylococcus aureus
agcatttccccctcttatttatgtggcttattaacaattaaagtataacgtataggaaattttgaattcaattcatagttaaatccgtatcttaaaaatacttatctacattacttttacccctattttctatgtaataacgaatacttagctgatttatgttaataaaatacgtcaagactattacattttcattaatattgacatagacaatttatctctcggcttgtaatatgtataattgttactaaaagatattttgcttgttacctaatggaggttacatata

SEQ ID NO: 7270 - DNA, 289 bp, Staphylococcus aureus
tatatgtaacctccattaggtaacaagcaaaatatcttttagtaacaattatacatattacaagccgagagataaattgtctatgtcaatattaatgaaaatgtaatagtcttgacgtattttattaacataaatcagctaagtattcgttattacatagaaaataggggtaaaagtaatgtagataagtatttttaagatacggatttaactatgaattgaattcaaaatttcctatacgttatactttaattgttaataagccacataaataagagggggaaatgct

SEQ ID NO: 7271 - DNA, 65 bp, Staphylococcus aureus
taacaaagcgcttgctagtacctcttaaaaagatgatgctagcaagcgcttttctatactatata

SEQ ID NO: 7272 - DNA, 65 bp, Staphylococcus aureus
tatatagtatagaaaagcgcttgctagcatcatctttttaagaggtactagcaagcgctttgtta

SEQ ID NO: 7273 - DNA, 173 bp, Staphylococcus aureus
gaaggtagcctcccatatttatgtaatctattcaattcatattttacatgactcgtataaattaacatacccttatttctaacatttttttaaacatatcaatcagaatttacaattctaaaaatgttttatagtacaatatattttaaataatactcgttaaggagaatgat

SEQ ID NO: 7274 - DNA, 173 bp, Staphylococcus aureus
atcattctccttaacgagtattatttaaaatatattgtactataaaacatttttagaattgtaaattctgattgatatgtttaaaaaaatgttagaaataagggtatgttaatttatacgagtcatgtaaaatatgaattgaatagattacataaatatgggaggctaccttc

SEQ ID NO: 7275 - DNA, 133 bp, Staphylococcus aureus
ttacctttcattataagtgttaaatgaacttttcaaaacaaaaaggaatcaacttacacatcgtttgtataatagtcttatctataaccactgatgctattgattccttttttatgttatatattttctttat

SEQ ID NO: 7276 - DNA, 133 bp, Staphylococcus aureus
ataaagaaaatatataacataaaaaaggaatcaatagcatcagtggttatagataagactattatacaaacgatgtgtaagttgattcctttttgttttgaaaagttcatttaacacttataatgaaaggtaa

SEQ ID NO: 7277 - DNA, 52 bp, Staphylococcus aureus
gaaatcactccatcacacatttgctatcaataatctatcggctacatatcat

SEQ ID NO: 7278 - DNA, 52 bp, Staphylococcus aureus
atgatatgtagccgatagattattgatagcaaatgtgtgatggagtgatttc

SEQ ID NO: 7279 - DNA, 76 bp, Staphylococcus aureus
actttgcctcctaaaaaaatatgtatttatcttaatataacatttctattctctataaatgcaatatttttaaagt

SEQ ID NO: 7280 - DNA, 76 bp, Staphylococcus aureus
actttaaaaatattgcatttatagagaatagaaatgttatattaagataaatacatatttttttaggaggcaaagt

SEQ ID NO: 7281 - DNA, 74 bp, Staphylococcus aureus
cgcatttcccatacctttattgccttatttgtaaaaaaatatcccagcatcattgtgccgagatatttatatca

SEQ ID NO: 7282 - DNA, 74 bp, Staphylococcus aureus
tgatataaatatctcggcacaatgatgctgggatatttttttacaaataaggcaataaaggtatgggaaatgcg

SEQ ID NO: 7283 - DNA, 215 bp, Staphylococcus aureus
aagtcaacgcttcgttaactatactaaaaatatgtcatactgcaatgttcacgtttaaaagagtctcaatctctgcaaataaaatattccataacaaagtatatactttacatttttataattcttaacaatactattttatcaaatatttaccacaataaaaatatctttttcatttttatttaatttaatcatataattgcgaggagaatatt

SEQ ID NO: 7284 - DNA, 215 bp, Staphylococcus aureus
aatattctcctcgcaattatatgattaaattaaataaaaatgaaaaagatatttttattgtggtaaatatttgataaaatagtattgttaagaattataaaaatgtaaagtatatactttgttatggaatattttatttgcagagattgagactcttttaaacgtgaacattgcagtatgacatatttttagtatagttaacgaagcgttgactt

SEQ ID NO: 7285 - DNA, 332 bp, Staphylococcus aureus
atgccatctttcattgattactatcatgaaaatgaaatctatctccttataagtcaatcaatcgtgccgccaacatgcggatgggttgattgtttttttgtccatcatattttttgattcatctcctctttttgaacttgttcttaattataaaatataacaatagaattatttataattattaaatttagatgcattaatattattgatattattttcaaaaactagaaatattgatttgttgcatgtataatgttaaaagtgcccttttataacgcttacatataaaagcttatttagggagagggatattcaacaagggggatttgaaa

SEQ ID NO: 7286 - DNA, 332 bp, Staphylococcus aureus
tttcaaatcccccttgttgaatatccctctccctaaataagcttttatatgtaagcgttataaaagggcacttttaacattatacatgcaacaaatcaatatttctagtttttgaaaataatatcaataatattaatgcatctaaatttaataattataaataattctattgttatattttataattaagaacaagttcaaaaagaggagatgaatcaaaaaatatgatggacaaaaaaacaatcaacccatccgcatgttggcggcacgattgattgacttataaggagatagatttcattttcatgatagtaatcaatgaaagatggcat

SEQ ID NO: 7287 - DNA, 55 bp, Staphylococcus aureus
cgatactccccctaaataacgaattctctattattttatcatgaattaaataacg

SEQ ID NO: 7288 - DNA, 55 bp, Staphylococcus aureus
cgttatttaattcatgataaaataatagagaattcgttatttagggggagtatcg

SEQ ID NO: 7289 - DNA, 107 bp, Staphylococcus aureus
caattagtctatataacccttgctatattttcaaaaacaaaacccaattacgttttcatgtcaaatatcatcttgcatgaaatcgtaactgggtcaattgtatgtta

SEQ ID NO: 7290 - DNA, 107 bp, Staphylococcus aureus
taacatacaattgacccagttacgatttcatgcaagatgatatttgacatgaaaacgtaattgggttttgtttttgaaaatatagcaagggttatatagactaattg

SEQ ID NO: 7291 - DNA, 207 bp, Staphylococcus aureus
tgtcttaacctacctttatatattttatgtatccaatgattgtctatcccctacattctttgccaaaaaaagtatataatgtagaagatattttctttttcactttcaaatttaagactacaattgaacagtgatttttcatcattataacagacaactagacatattgataagtaaagaaaagaattttatacggaggtgccttgc

SEQ ID NO: 7292 - DNA, 207 bp, Staphylococcus aureus
gcaaggcacctccgtataaaattcttttctttacttatcaatatgtctagttgtctgttataatgatgaaaaatcactgttcaattgtagtcttaaatttgaaagtgaaaaagaaaatatcttctacattatatactttttttggcaaagaatgtaggggatagacaatcattggatacataaaatatataaaggtaggttaagaca

SEQ ID NO: 7293 - DNA, 183 bp, Staphylococcus aureus
ttcctgctttttctttattaatgacctactacgtcaatgccaaattttaatataattcctcttttattttataaatcaacaaataaaaaaagtatcgataaccatatttggcaccgatactttaaaaatcatgtccccacaacataatttttgattagtcacacttcaattaatttattttat

SEQ ID NO: 7294 - DNA, 183 bp, Staphylococcus aureus
ataaaataaattaattgaagtgtgactaatcaaaaattatgttgtggggacatgatttttaaagtatcggtgccaaatatggttatcgatactttttttatttgttgatttataaaataaaagaggaattatattaaaatttggcattgacgtagtaggtcattaataaagaaaaagcaggaa

SEQ ID NO: 7295 - DNA, 120 bp, Staphylococcus aureus
gaaacatttcctcctatttgcttttaaaattcactttatttattatagagacatgataactaaaaaaacaccaacaatttttataagagtgttggttaaaattcacaaaggtgtaacaat

SEQ ID NO: 7296 - DNA, 120 bp, Staphylococcus aureus
attgttacacctttgtgaattttaaccaacactcttataaaaattgttggtgtttttttagttatcatgtctctataataaataaagtgaattttaaaagcaaataggaggaaatgtttc

SEQ ID NO: 7297 - DNA, 226 bp, Staphylococcus aureus
tacggtttcattctaataaagaaatgctataaaacaactagataaagttaaaccaaatggatagataatagtacatatgttacggtgctatcaatataaaaatgccgagatttccacataataatctcggcatttttatttttgatgctaaattcataggtctatgaatagctcaagttttgttttttaatttttcaattcaatataatagaagaaactatgttta

SEQ ID NO: 7298 - DNA, 226 bp, Staphylococcus aureus
taaacatagtttcttctattatattgaattgaaaaattaaaaaacaaaacttgagctattcatagacctatgaatttagcatcaaaaataaaaatgccgagattattatgtggaaatctcggcatttttatattgatagcaccgtaacatatgtactattatctatccatttggtttaactttatctagttgttttatagcatttctttattagaatgaaaccgta

SEQ ID NO: 7299 - DNA, 113 bp, Staphylococcus aureus
atgactatctcctttatataatgattagtttataactatcacgaacagaaactaaatttaaatatgctcttttatatattagcattactcacaagtttcatgaacatcattac

SEQ ID NO: 7300 - DNA, 113 bp, Staphylococcus aureus
gtaatgatgttcatgaaacttgtgagtaatgctaatatataaaagagcatatttaaatttagtttctgttcgtgatagttataaactaatcattatataaaggagatagtcat

SEQ ID NO: 7301 - DNA, 239 bp, Staphylococcus aureus
actttcacctcaattctgttcctcttcaattgttatatgtatatcacaaaaattatttcattattttaccattattattttacaaatattatcccaagaatacaattcaagaaatgattaactttactttagaattgtaccttattacattatttatgaaagtactctctcaattataactaaaaagaaggtgttcaatacatacatatttagtcttatatttgaacaccttcaaaaac

SEQ ID NO: 7302 - DNA, 239 bp, Staphylococcus aureus
gtttttgaaggtgttcaaatataagactaaatatgtatgtattgaacaccttctttttagttataattgagagagtactttcataaataatgtaataaggtacaattctaaagtaaagttaatcatttcttgaattgtattcttgggataatatttgtaaaataataatggtaaaataatgaaataatttttgtgatatacatataacaattgaagaggaacagaattgaggtgaaagt

SEQ ID NO: 7303 - DNA, 194 bp, Staphylococcus aureus
aattatttctccctaattactatttttataaagtatcctcagcaatcattgtatcgcacatctaaaaaacacaaaaatattgacccatatataatataacaaattaagacttacatgttgctgcgttctccttgctttaataaattaaatcatctacatttatatttaatatttattataagcgaggtgtcagt

SEQ ID NO: 7304 - DNA, 194 bp, Staphylococcus aureus
actgacacctcgcttataataaatattaaatataaatgtagatgatttaatttattaaagcaaggagaacgcagcaacatgtaagtcttaatttgttatattatatatgggtcaatatttttgtgttttttagatgtgcgatacaatgattgctgaggatactttataaaaatagtaattagggagaaataatt

SEQ ID NO: 7305 - DNA, 230 bp, Staphylococcus aureus
tccacaaacaaactattattataggttgtttctaatattgcgtcaaactatctttaaatattcgttaatccttgattagacaattgttatattgaaaataaataaactaaagcacgtcatcattttatataatagtgacgcgcttttttgtaaacccaaatcgtattctgttatctaacttttatactactatgtcttaaatcattaacatttagcgtctttacaagcca

SEQ ID NO: 7306 - DNA, 230 bp, Staphylococcus aureus
tggcttgtaaagacgctaaatgttaatgatttaagacatagtagtataaaagttagataacagaatacgatttgggtttacaaaaaagcgcgtcactattatataaaatgatgacgtgctttagtttatttattttcaatataacaattgtctaatcaaggattaacgaatatttaaagatagtttgacgcaatattagaaacaacctataataatagtttgtttgtgga

SEQ ID NO: 7307 - DNA, 135 bp, Staphylococcus aureus
atcgattcacttctccctatttcttctttagcgtcagtataaggttgaaatatgaactcaatatgaacaattgtttttttacgcaaaaatattttacatgtataataaatgaaaaagataagggagtttatagct

SEQ ID NO: 7308 - DNA, 135 bp, Staphylococcus aureus
agctataaactcccttatctttttcatttattatacatgtaaaatatttttgcgtaaaaaaacaattgttcatattgagttcatatttcaaccttatactgacgctaaagaagaaatagggagaagtgaatcgat

SEQ ID NO: 7309 - DNA, 162 bp, Staphylococcus aureus
tctctacctcctgaaaaaacatttctgtttttatttcaggaggtatcttttatattgattagcgctttctagccacttaacatttaatttctaccattcaacaaaatttaaatatatcgatggtcatttatggtttaataattttgaaggaggcattaacct

SEQ ID NO: 7310 - DNA, 162 bp, Staphylococcus aureus
aggttaatgcctccttcaaaattattaaaccataaatgaccatcgatatatttaaattttgttgaatggtagaaattaaatgttaagtggctagaaagcgctaatcaatataaaagatacctcctgaaataaaaacagaaatgttttttcaggaggtagaga

SEQ ID NO: 7311 - DNA, 65 bp, Staphylococcus aureus
tttttattaaccactaaaaaacggtaatgtctatcacattaaaaaagacattaccgtttcgttta

SEQ ID NO: 7312 - DNA, 65 bp, Staphylococcus aureus
taaacgaaacggtaatgtcttttttaatgtgatagacattaccgttttttagtggttaataaaaa

SEQ ID NO: 7313 - DNA, 323 bp, Staphylococcus aureus
attaataccactttaaatcaataagtgtctcaataggttcccatggtgatgctctattactatctactatgtatattaatattttataataacgaaactactttaattatatactttatgtgcgatagcacaaagacaaaaccacaaaccttaacagctatcaaccaatttaatttgattgctgattactcactattcattttaacataaagcgctaccattattataatgtcaaacttctttcattaatgatccataaaaaaaagatgagatgttagaaaacatctcaccttctgtatatttatattttgaaatacgttttt

SEQ ID NO: 7314 - DNA, 323 bp, Staphylococcus aureus
aaaaacgtatttcaaaatataaatatacagaaggtgagatgttttctaacatctcatcttttttttatggatcattaatgaaagaagtttgacattataataatggtagcgctttatgttaaaatgaatagtgagtaatcagcaatcaaattaaattggttgatagctgttaaggtttgtggttttgtctttgtgctatcgcacataaagtatataattaaagtagtttcgttattataaaatattaatatacatagtagatagtaatagagcatcaccatgggaacctattgagacacttattgatttaaagtggtattaat

SEQ ID NO: 7315 - DNA, 316 bp, Staphylococcus aureus
aggctgactcttctttccataaagtagtagtgtaattgcttcattaaaatcatgctctggctatagcattttgttatcgataacattttacagaacagtgagattaatgtgatttttttcacaattaaaatataccattttttcagactattaacaatatcactttcctatttaattgttttatttttcattttaaatctgttcatcaaaatgaattgtacttaatgtaatgaagtaacttatactattcatgaattttacataagaccgtgctaaaataaggaagatactacgatgagaaatggaagttatagca

SEQ ID NO: 7316 - DNA, 316 bp, Staphylococcus aureus
tgctataacttccatttctcatcgtagtatcttccttattttagcacggtcttatgtaaaattcatgaatagtataagttacttcattacattaagtacaattcattttgatgaacagatttaaaatgaaaaataaaacaattaaataggaaagtgatattgttaatagtctgaaaaaatggtatattttaattgtgaaaaaaatcacattaatctcactgttctgtaaaatgttatcgataacaaaatgctatagccagagcatgattttaatgaagcaattacactactactttatggaaagaagagtcagcct

SEQ ID NO: 7317 - DNA, 153 bp, Staphylococcus aureus
tgtttaaatttctcagtggctgtgaatgaggtttaaaagtgctataaaacgtaaacttttatactttaaaatacgcaaaaaacggtaaaccctaattcatattatagagtttaccgttttatttttttaacttgcatcatagttatattaaca

SEQ ID NO: 7318 - DNA, 153 bp, Staphylococcus aureus
tgttaatataactatgatgcaagttaaaaaaataaaacggtaaactctataatatgaattagggtttaccgttttttgcgtattttaaagtataaaagtttacgttttatagcacttttaaacctcattcacagccactgagaaatttaaaca

SEQ ID NO: 7319 - DNA, 185 bp, Staphylococcus aureus
aactacaatctaaggttctttttattataccctaatttttgttcattattatttaatttttgtgaattttatgttttctataaatttaattattttactttaacaattcattacgcatttagcatttcaaggcatacacaatatttattactatgatttcattttatctgctgcaaaaacaatca

SEQ ID NO: 7320 - DNA, 185 bp, Staphylococcus aureus
tgattgtttttgcagcagataaaatgaaatcatagtaataaatattgtgtatgccttgaaatgctaaatgcgtaatgaattgttaaagtaaaataattaaatttatagaaaacataaaattcacaaaaattaaataataatgaacaaaaattagggtataataaaaagaaccttagattgtagtt

SEQ ID NO: 7321 - DNA, 149 bp, Staphylococcus aureus
ataaatcctccaataaacagtgatcgaatcaaaatattacttatgttatttttcagccaaaactatttaaaaatacattaacacaaatcaattacaaattgtattgattgtgtgtaacatcaataaatgatacatttattccagtaaaa

SEQ ID NO: 7322 - DNA, 149 bp, Staphylococcus aureus
ttttactggaataaatgtatcatttattgatgttacacacaatcaatacaatttgtaattgatttgtgttaatgtatttttaaatagttttggctgaaaaataacataagtaatattttgattcgatcactgtttattggaggatttat

SEQ ID NO: 7323 - DNA, 104 bp, Staphylococcus aureus
gaattatcaataactatcccatcacaatataaaaacacacctttcaaagtaagaaacaacaatgttcctttgaaagatgtgtatattttttagttctagttata

SEQ ID NO: 7324 - DNA, 104 bp, Staphylococcus aureus
tataactagaactaaaaaatatacacatctttcaaaggaacattgttgtttcttactttgaaaggtgtgtttttatattgtgatgggatagttattgataattc

SEQ ID NO: 7325 - DNA, 52 bp, Staphylococcus aureus
tttgaatcctccctcaccttttcattatatccgattatacctattataacag

SEQ ID NO: 7326 - DNA, 52 bp, Staphylococcus aureus
ctgttataataggtataatcggatataatgaaaaggtgagggaggattcaaa

SEQ ID NO: 7327 - DNA, 65 bp, Staphylococcus aureus
taaaatagctataccatgacgctcgctacaaacgtcttgtatagctattatttctatttattaaa

SEQ ID NO: 7328 - DNA, 65 bp, Staphylococcus aureus
tttaataaatagaaataatagctatacaagacgtttgtagcgagcgtcatggtatagctatttta

SEQ ID NO: 7329 - DNA, 160 bp, Staphylococcus aureus
tttattaattacctccttattagacaatgtgttgaatatttcgcatgttgtctattataatatgtaagtgggaataaacaatacacaatgttcatcaatacgttcattaatagacaaatacacccacattgttcaataacacaaggaggttgatttattt

SEQ ID NO: 7330 - DNA, 160 bp, Staphylococcus aureus
aaataaatcaacctccttgtgttattgaacaatgtgggtgtatttgtctattaatgaacgtattgatgaacattgtgtattgtttattcccacttacatattataatagacaacatgcgaaatattcaacacattgtctaataaggaggtaattaataaa

SEQ ID NO: 7331 - DNA, 84 bp, Staphylococcus aureus
ctaaattaaaaggtatgacagcttaaagtttcatcctattgcatttgcaatgactgatactttgattactgtcatacctctttt

SEQ ID NO: 7332 - DNA, 84 bp, Staphylococcus aureus
aaaagaggtatgacagtaatcaaagtatcagtcattgcaaatgcaataggatgaaactttaagctgtcataccttttaatttag

SEQ ID NO: 7333 - DNA, 1487 bp, Staphylococcus aureus
attgaaactttagttgtaacggacaaatagtagtcattggagttcagcaattcatactttgtactaaagtttactataatctatctctcaaggtttaaatgtacatatctatattaagatgcgtttcatgatgttagaagataccatacacatttaattagttacagcataaatcaatttatacccttaattattacattgtttatattttaaattcgggggagtaattttaagtaatatcttgttgctgctaattctattgttaataaattgatattagatgtagaaattgagtgtgaaagttaataatagatgatttagctagtaacataattaattcatatatagtcaaaaagttctgttagatactgttcttgatgaatattctttgatgttaggtgttagctattctagatgagtttcttagatgtggatgcctgtcttgatgaagttatctatgatgttaatataatacttgatgttgattcttagatgttagtgcgatttcaagatgctgattctttgttgttgcactatcttggtgacgtttctagttgtttatagttatcgcatctcttgatgtaaaatctaagatgtttatgcatttctagatgttaattcttcgctgcttaagaattatcttgatggtaaatctagttgtgccatgcattttctcatgatgaatctaaggtgttaattcattgatgtgtgctgtttcttgttgcttcattatcttgatggtgaatttcgttgtctaatgcactttttcaaatgattattctaattgttacggcaataactagatggattttcttagatgttcacttttctagatgtttatacttatcttgatgttttctaaacagaacttttaaacgctttattttttagtagattgtttaaaatttcttagttgatggttattgttgttgatttgaataatttgtagcgaatattttgtaacagggctactaagaatttttataacaagaagtgatttcaatcgtactaattttcagcgtttgatgacaaaagtgtatgtccaaacttaaataatggcgataaaatttaagtcatgggtacatttaatgttttttgattcaaacttccattttggtcaatttgctttttttataacatagttgaatatcaataaaagattagcaagttagttcaaaatggctatgtattgttttttgaaatacataggtttgaaatctatattaattatgcaccaaataatttaattagactctatcgaaaatttccaaattttgcttactatctttctaattttacttttatattgtgcacaatgcataaaaacaagcgttttcctaggagttttcattaatttcttttatttttcactattaccttttcaaaaatattcaactataataggtatactatccatgattttaaaaatttccatgttttacatttaaatgatagatttcaatatatattaggcaggagagagaaat

SEQ ID NO: 7334 - DNA, 1487 bp, Staphylococcus aureus
atttctctctcctgcctaatatatattgaaatctatcatttaaatgtaaaacatggaaatttttaaaatcatggatagtatacctattatagttgaatatttttgaaaaggtaatagtgaaaaataaaagaaattaatgaaaactcctaggaaaacgcttgtttttatgcattgtgcacaatataaaagtaaaattagaaagatagtaagcaaaatttggaaattttcgatagagtctaattaaattatttggtgcataattaatatagatttcaaacctatgtatttcaaaaaacaatacatagccattttgaactaacttgctaatcttttattgatattcaactatgttataaaaaaagcaaattgaccaaaatggaagtttgaatcaaaaaacattaaatgtacccatgacttaaattttatcgccattatttaagtttggacatacacttttgtcatcaaacgctgaaaattagtacgattgaaatcacttcttgttataaaaattcttagtagccctgttacaaaatattcgctacaaattattcaaatcaacaacaataaccatcaactaagaaattttaaacaatctactaaaaaataaagcgtttaaaagttctgtttagaaaacatcaagataagtataaacatctagaaaagtgaacatctaagaaaatccatctagttattgccgtaacaattagaataatcatttgaaaaagtgcattagacaacgaaattcaccatcaagataatgaagcaacaagaaacagcacacatcaatgaattaacaccttagattcatcatgagaaaatgcatggcacaactagatttaccatcaagataattcttaagcagcgaagaattaacatctagaaatgcataaacatcttagattttacatcaagagatgcgataactataaacaactagaaacgtcaccaagatagtgcaacaacaaagaatcagcatcttgaaatcgcactaacatctaagaatcaacatcaagtattatattaacatcatagataacttcatcaagacaggcatccacatctaagaaactcatctagaatagctaacacctaacatcaaagaatattcatcaagaacagtatctaacagaactttttgactatatatgaattaattatgttactagctaaatcatctattattaactttcacactcaatttctacatctaatatcaatttattaacaatagaattagcagcaacaagatattacttaaaattactcccccgaatttaaaatataaacaatgtaataattaagggtataaattgatttatgctgtaactaattaaatgtgtatggtatcttctaacatcatgaaacgcatcttaatatagatatgtacatttaaaccttgagagatagattatagtaaactttagtacaaagtatgaattgctgaactccaatgactactatttgtccgttacaactaaagtttcaat

SEQ ID NO: 7335 - DNA, 70 bp, Staphylococcus aureus
atactaacagtcctcttgtgtttagtttcttacgttaaaggctatttatatcataaggagatgatatgta

SEQ ID NO: 7336 - DNA, 70 bp, Staphylococcus aureus
tacatatcatctccttatgatataaatagcctttaacgtaagaaactaaacacaagaggactgttagtat

SEQ ID NO: 7337 - DNA, 99 bp, Staphylococcus aureus
cacaaagtatatataggaaataacttttatgaattctagatataacaatgttaaatacttaaaataactcgctataattaaagtgtttaatatgtttac

SEQ ID NO: 7338 - DNA, 99 bp, Staphylococcus aureus
gtaaacatattaaacactttaattatagcgagttattttaagtatttaacattgttatatctagaattcataaaagttatttcctatatatactttgtg

SEQ ID NO: 7339 - DNA, 317 bp, Staphylococcus aureus
ttaagctttaattttgagtaatatagaagatattaaaagcagcagtaagatgttttctaattgaaaattatcttactgctgctttttaagaattactgtgtcagtctattttcggttcgcctgcgcttttgcgcatgcataaaagcccctaacaacctgaggtcactgcgcttcggttcgcctgcgcttttgcgcatgcataaaagcccctaacaacctgaggtcactgcgcttcggttcgcctgcgcttttgcgcatgcataaaagcccctaacaaccaaaggttgtaaggggctttaaatgtcagatagtatttt

SEQ ID NO: 7340 - DNA, 317 bp, Staphylococcus aureus
aaaatactatctgacatttaaagccccttacaacctttggttgttaggggcttttatgcatgcgcaaaagcgcaggcgaaccgaagcgcagtgacctcaggttgttaggggcttttatgcatgcgcaaaagcgcaggcgaaccgaagcgcagtgacctcaggttgttaggggcttttatgcatgcgcaaaagcgcaggcgaaccgaaaatagactgacacagtaattcttaaaaagcagcagtaagataattttcaattagaaaacatcttactgctgcttttaatatcttctatattactcaaaattaaagcttaa

SEQ ID NO: 7341 - DNA, 181 bp, Staphylococcus aureus
agtacaaactccccttcatctgacatcactcaattatatcagaaaattgataattatctataaaaaattaaaatatttatcttttatagatgtcaaaaatcactaatttccatacaaaaactgtttacctcaaataattaaaattgaaggcactaaactgtttcaccagtttaacgtttca

SEQ ID NO: 7342 - DNA, 181 bp, Staphylococcus aureus
tgaaacgttaaactggtgaaacagtttagtgccttcaattttaattatttgaggtaaacagtttttgtatggaaattagtgatttttgacatctataaaagataaatattttaattttttatagataattatcaattttctgatataattgagtgatgtcagatgaaggggagtttgtact

SEQ ID NO: 7343 - DNA, 396 bp, Staphylococcus aureus
tatgtaactcctttttgcttatctattcagtatgaacgaatcaatttatttaataaagagtttttaccagattgtaacaatttttttattctcaatattattatagaaatcgaattacatacacgatgcttttaaaaaatttaataacaaattttattttactatctatcaaaataattgactacttttaacaattaaggatgatacaattacatttttttcaatttaaaaaatcagtcatatcagtaattaccgatgaaaatactaagatatcgatatattttgcattatttaacatttaaattcaattatagacaattcaataattgcgatgaaatcagtacttgacaactattacacttcataatattgtttattttaacaaggagtgattgg

SEQ ID NO: 7344 - DNA, 396 bp, Staphylococcus aureus
ccaatcactccttgttaaaataaacaatattatgaagtgtaatagttgtcaagtactgatttcatcgcaattattgaattgtctataattgaatttaaatgttaaataatgcaaaatatatcgatatcttagtattttcatcggtaattactgatatgactgattttttaaattgaaaaaaatgtaattgtatcatccttaattgttaaaagtagtcaattattttgatagatagtaaaataaaatttgttattaaattttttaaaagcatcgtgtatgtaattcgatttctataataatattgagaataaaaaaattgttacaatctggtaaaaactctttattaaataaattgattcgttcatactgaatagataagcaaaaaggagttacata

SEQ ID NO: 7345 - DNA, 170 bp, Staphylococcus aureus
tatctttattgcttgtataaatctcgatgctcagttcttttgccctgattccttatcaggcacaaatctacccatttataacttttttatctccccttttactttatcttttttaatactactcatataatggctttgtaatacaaatttctataatggaagtgatgata

SEQ ID NO: 7346 - DNA, 170 bp, Staphylococcus aureus
tatcatcacttccattatagaaatttgtattacaaagccattatatgagtagtattaaaaaagataaagtaaaaggggagataaaaaagttataaatgggtagatttgtgcctgataaggaatcagggcaaaagaactgagcatcgagatttatacaagcaataaagata

SEQ ID NO: 7347 - DNA, 106 bp, Staphylococcus aureus
ttaaatttaaaatgaatacactactaaagccttaatgtcatgctacgaatattgtgcatgatattaaggctttgtatttaactaaatgaatgtcatgtattacata

SEQ ID NO: 7348 - DNA, 106 bp, Staphylococcus aureus
tatgtaatacatgacattcatttagttaaatacaaagccttaatatcatgcacaatattcgtagcatgacattaaggctttagtagtgtattcattttaaatttaa

SEQ ID NO: 7349 - DNA, 71 bp, Staphylococcus aureus
acgtttcaccttcatcaaaatcatttattttttaatagatatcaatactctgcctatatattagaggtcaa

SEQ ID NO: 7350 - DNA, 71 bp, Staphylococcus aureus
ttgacctctaatatataggcagagtattgatatctattaaaaaataaatgattttgatgaaggtgaaacgt

SEQ ID NO: 7351 - DNA, 181 bp, Staphylococcus aureus
tgaagtgatttaccctatacaatgtccctttaagatgcttttagacacttattcgccatcattttaatcatattatttaggaacactcacatacttttcttatttttttcaattagttacaattactgcttgaaaatcacgttacgttatcctttatgctgacaacataaggaggtttatc

SEQ ID NO: 7352 - DNA, 181 bp, Staphylococcus aureus
gataaacctccttatgttgtcagcataaaggataacgtaacgtgattttcaagcagtaattgtaactaattgaaaaaaataagaaaagtatgtgagtgttcctaaataatatgattaaaatgatggcgaataagtgtctaaaagcatcttaaagggacattgtatagggtaaatcacttca

SEQ ID NO: 7353 - DNA, 257 bp, Staphylococcus aureus
tcctcatacagatgctacaacactgaatacaccaactaaaataattgttcaaagtagaaaactaatcatttattctctaaatcaataactataataaaagttatacctttgcaaagcgaattagtataggttaccgaaaggagaaaggattaggttccattcgatttataaaaaaatatatttcgaaacatacaaaagcgccagaagataatcatttcctctcgcgcttttatactgaattatattaatttcaaact

SEQ ID NO: 7354 - DNA, 257 bp, Staphylococcus aureus
agtttgaaattaatataattcagtataaaagcgcgagaggaaatgattatcttctggcgcttttgtatgtttcgaaatatatttttttataaatcgaatggaacctaatcctttctcctttcggtaacctatactaattcgctttgcaaaggtataacttttattatagttattgatttagagaataaatgattagttttctactttgaacaattattttagttggtgtattcagtgttgtagcatctgtatgagga

SEQ ID NO: 7355 - DNA, 308 bp, Staphylococcus aureus
atttatatcctcctacgtataaaaatacgatgtgtagatgtcgtgtttttaaatactttaaaatgcccaagactattgctttaattagattgtacattttttcacaaatataaaatattagggaatcacctaattacttaaggaatttccctatcaataacgggatttcattgaaataatacacaatcatgtatggtcgtgcttattgccaatctaaatcgttcaaatttggcacaacgacaaataaggcttcaacacgaatatattctctcggttgaaaccttacttattcatttattttttataaa

SEQ ID NO: 7356 - DNA, 308 bp, Staphylococcus aureus
tttataaaaaataaatgaataagtaaggtttcaaccgagagaatatattcgtgttgaagccttatttgtcgttgtgccaaatttgaacgatttagattggcaataagcacgaccatacatgattgtgtattatttcaatgaaatcccgttattgatagggaaattccttaagtaattaggtgattccctaatattttatatttgtgaaaaaatgtacaatctaattaaagcaatagtcttgggcattttaaagtatttaaaaacacgacatctacacatcgtatttttatacgtaggaggatataaat

SEQ ID NO: 7357 - DNA, 65 bp, Staphylococcus aureus
aaaatatgcccctttactccataatatttatttcaaaaaaaggtattaatttttcgttagtgctt

SEQ ID NO: 7358 - DNA, 65 bp, Staphylococcus aureus
aagcactaacgaaaaattaatacctttttttgaaataaatattatggagtaaaggggcatatttt

SEQ ID NO: 7359 - DNA, 229 bp, Staphylococcus aureus
atttaccaaccctttcacacgtattgtataccaaatcattttgtttttgtgaaaagaatcacattataatgtaaaatcagggaattccctgatgcctgtagtcatgcatattccttatacattttccctttttgttaaatcaaaaaaagcgaccgatatatgaatccctactcaacatttatttgagcaagcatcaatatatcggtcgcttgtagtgtatattattatc

SEQ ID NO: 7360 - DNA, 229 bp, Staphylococcus aureus
gataataatatacactacaagcgaccgatatattgatgcttgctcaaataaatgttgagtagggattcatatatcggtcgctttttttgatttaacaaaaagggaaaatgtataaggaatatgcatgactacaggcatcagggaattccctgattttacattataatgtgattcttttcacaaaaacaaaatgatttggtatacaatacgtgtgaaagggttggtaaat

SEQ ID NO: 7361 - DNA, 233 bp, Staphylococcus aureus
attaatccccactcttttttaaatgatttaaccatattttatttttaaaataaatatccatcaaagtgtatcaataaatttatcacatgtcagaaagtatgcttcatctgaatacaccaatactctcatgaaacttattaaaaattactctctcaacgtaaaaaaaccattcaaattcatgaatggtttggaagaatgattcattgttacgctatttaatcactacatcttaa

SEQ ID NO: 7362 - DNA, 233 bp, Staphylococcus aureus
ttaagatgtagtgattaaatagcgtaacaatgaatcattcttccaaaccattcatgaatttgaatggtttttttacgttgagagagtaatttttaataagtttcatgagagtattggtgtattcagatgaagcatactttctgacatgtgataaatttattgatacactttgatggatatttattttaaaaataaaatatggttaaatcatttaaaaaagagtggggattaat

SEQ ID NO: 7363 - DNA, 216 bp, Staphylococcus aureus
agtacttcccccatttactttgatcaaataaaatttactttctaattatattagtaaatcaatgtaattgatagattaaatttcagaaaaatctttttattctctcaaaaatgtagttttctttcataaaaacagcgagataaatcgcgtgattggctaatatctttatgatttaagatattacgacgctcattttatctcgctttatgtaaagta

SEQ ID NO: 7364 - DNA, 216 bp, Staphylococcus aureus
tactttacataaagcgagataaaatgagcgtcgtaatatcttaaatcataaagatattagccaatcacgcgatttatctcgctgtttttatgaaagaaaactacatttttgagagaataaaaagatttttctgaaatttaatctatcaattacattgatttactaatataattagaaagtaaattttatttgatcaaagtaaatgggggaagtact

SEQ ID NO: 7365 - DNA, 83 bp, Staphylococcus aureus
cgaatcatccctcatttttataatattacaagattattataaaccgaatgaaacaaaaaagtttttacatattttcaacaact

SEQ ID NO: 7366 - DNA, 83 bp, Staphylococcus aureus
agttgttgaaaatatgtaaaaacttttttgtttcattcggtttataataatcttgtaatattataaaaatgagggatgattcg

SEQ ID NO: 7367 - DNA, 185 bp, Staphylococcus aureus
cttcccactccctatcttttatatttactcatcttaacatgcattgagtaacatatgttaccaaaccatttgttataaactatagtaatattaatcattccctctgttgaaattgataactacgaaataaaaaacacactctattcagctattaacagttgagtagagtgtgcaaacctgttgaa

SEQ ID NO: 7368 - DNA, 185 bp, Staphylococcus aureus
ttcaacaggtttgcacactctactcaactgttaatagctgaatagagtgtgttttttatttcgtagttatcaatttcaacagagggaatgattaatattactatagtttataacaaatggtttggtaacatatgttactcaatgcatgttaagatgagtaaatataaaagatagggagtgggaag

SEQ ID NO: 7369 - DNA, 207 bp, Staphylococcus aureus
agtcaccctcctaaatagtaatctttacgttttaaaattatatactcatgctacttaaaatacaagcactgtttttataaataatataaagtcgaatcatactttaggtatttaccacttttcgttttatctaatacatgactattgtacaaatatgatacagaaaactttatagtatttacgaacgtcataatataagaaaaaaag

SEQ ID NO: 7370 - DNA, 207 bp, Staphylococcus aureus
ctttttttcttatattatgacgttcgtaaatactataaagttttctgtatcatatttgtacaatagtcatgtattagataaaacgaaaagtggtaaatacctaaagtatgattcgactttatattatttataaaaacagtgcttgtattttaagtagcatgagtatataattttaaaacgtaaagattactatttaggagggtgact

SEQ ID NO: 7371 - DNA, 168 bp, Staphylococcus aureus
atttatcgcctccttttaacacacctcaattgtacaaatatctgtacaataaaacaagcgacacagaaaaaaactactaatcaagatttcgcacggggaagaatcaatacctatcctgtactgattccctactaaacaatgtttacatgataatttctacctatttag

SEQ ID NO: 7372 - DNA, 168 bp, Staphylococcus aureus
ctaaataggtagaaattatcatgtaaacattgtttagtagggaatcagtacaggataggtattgattcttccccgtgcgaaatcttgattagtagtttttttctgtgtcgcttgttttattgtacagatatttgtacaattgaggtgtgttaaaaggaggcgataaat

SEQ ID NO: 7373 - DNA, 254 bp, Staphylococcus aureus
tgctcccactcctactatcaacttccaactaactttcaatataattaatactatacaccgtcaaacattaatgcgctacaactactaccaatgcatttaatataaatatccaaagaaataacagttatgtatagtcaaagaaaaatatatttcattttctatgtgtatttgtaatcagtttttgataaaataaaaaaatagcattattaataaattcaaaaattacagttcaattcagagagggatgggataaa

SEQ ID NO: 7374 - DNA, 254 bp, Staphylococcus aureus
tttatcccatccctctctgaattgaactgtaatttttgaatttattaataatgctatttttttattttatcaaaaactgattacaaatacacatagaaaatgaaatatatttttctttgactatacataactgttatttctttggatatttatattaaatgcattggtagtagttgtagcgcattaatgtttgacggtgtatagtattaattatattgaaagttagttggaagttgatagtaggagtgggagca

SEQ ID NO: 7375 - DNA, 96 bp, Staphylococcus aureus
aatatcgctccaagattatgacaacataacaaagaaccacgcatcatgtatatggcatcatcaccatactaaaacatgatacgtggttttatttga

SEQ ID NO: 7376 - DNA, 96 bp, Staphylococcus aureus
tcaaataaaaccacgtatcatgttttagtatggtgatgatgccatatacatgatgcgtggttctttgttatgttgtcataatcttggagcgatatt

SEQ ID NO: 7377 - DNA, 120 bp, Staphylococcus aureus
agaatatatctccttattcttattattctaatcggaataaaaatattttaatctgaaatgccggataagtcaatatgttgaacttttgctaaaaagctttatatagctagcaacttatat

SEQ ID NO: 7378 - DNA, 120 bp, Staphylococcus aureus
atataagttgctagctatataaagctttttagcaaaagttcaacatattgacttatccggcatttcagattaaaatatttttattccgattagaataataagaataaggagatatattct

SEQ ID NO: 7379 - DNA, 101 bp, Staphylococcus aureus
aaaattagcacgactttattacaatttctttaaaacgtaatcattactatttacatatgagtagttatcggtcataatatatttacaaggagggatagaga

SEQ ID NO: 7380 - DNA, 101 bp, Staphylococcus aureus
tctctatccctccttgtaaatatattatgaccgataactactcatatgtaaatagtaatgattacgttttaaagaaattgtaataaagtcgtgctaatttt

SEQ ID NO: 7381 - DNA, 156 bp, Staphylococcus aureus
taattgttttaatttgactatattgtatgtctaactatattttcgagtatccctagctcgttaatataaactctatacttaactatttccttacattacttcacatatttaagagctgcatatacactcactccttgtgtacatgcagctcttttt

SEQ ID NO: 7382 - DNA, 156 bp, Staphylococcus aureus
aaaaagagctgcatgtacacaaggagtgagtgtatatgcagctcttaaatatgtgaagtaatgtaaggaaatagttaagtatagagtttatattaacgagctagggatactcgaaaatatagttagacatacaatatagtcaaattaaaacaatta

SEQ ID NO: 7383 - DNA, 326 bp, Staphylococcus aureus
aacttataacctctttcctttaatctttaggacgttatttcagggatattttaagatgatttaatcttagtaattttcttttcaatatattttaaaattcaatgattaaatcaattatcactagacattaaatacataaatcctattccccattttcattttttaattcataaatgaatcaataaccacctaataacaaatcatattatacacctttgttcgctatttttctaaggtttaaaaaatatttttaggtaagcctaaaaatagatgtaataaaaacgcctcctcagatatttatatatctatgaagacgtttaaataca

SEQ ID NO: 7384 - DNA, 326 bp, Staphylococcus aureus
tgtatttaaacgtcttcatagatatataaatatctgaggaggcgtttttattacatctatttttaggcttacctaaaaatattttttaaaccttagaaaaatagcgaacaaaggtgtataatatgatttgttattaggtggttattgattcatttatgaattaaaaaatgaaaatggggaataggatttatgtatttaatgtctagtgataattgatttaatcattgaattttaaaatatattgaaaagaaaattactaagattaaatcatcttaaaatatccctgaaataacgtcctaaagattaaaggaaagaggttataagtt

SEQ ID NO: 7385 - DNA, 433 bp, Staphylococcus aureus
gcgttgaaccaccttgaattagtatagtaacaatattatgaatgattcattttaattttacaacgtttttaatttttataaatttttataaaattaaactaatttattcattcgcaacccctaaaaataatttttagcctttcttcaaatttatttgttagaaaggcttatgcattagtagcgatgctatctaatgcgttcctttattttctgcgaattttatgagctagaaagccgcccaactcttcctgtttgtgaactttcgcctcgaaagtttctatgttgggaccctatgcattagttgcgaagctatctaatgtcgtgacctaattatatagaagaaaaagtgcatcagtgacaaattaaatgagatttctactctaccaaactctcttcgaaagacaatttcctcctctatttattagcaaactat

SEQ ID NO: 7386 - DNA, 433 bp, Staphylococcus aureus
atagtttgctaataaatagaggaggaaattgtctttcgaagagagtttggtagagtagaaatctcatttaatttgtcactgatgcactttttcttctatataattaggtcacgacattagatagcttcgcaactaatgcatagggtcccaacatagaaactttcgaggcgaaagttcacaaacaggaagagttgggcggctttctagctcataaaattcgcagaaaataaaggaacgcattagatagcatcgctactaatgcataagcctttctaacaaataaatttgaagaaaggctaaaaattatttttaggggttgcgaatgaataaattagtttaattttataaaaatttataaaaattaaaaacgttgtaaaattaaaatgaatcattcataatattgttactatactaattcaaggtggttcaacgc

SEQ ID NO: 7387 - DNA, 94 bp, Staphylococcus aureus
tagttaataattagttaatttccatttgtattctcatgtgataaattctaaaagcatacaataaatttaatatgtaaaaagaaagggaatacac

SEQ ID NO: 7388 - DNA, 94 bp, Staphylococcus aureus
gtgtattccctttctttttacatattaaatttattgtatgcttttagaatttatcacatgagaatacaaatggaaattaactaattattaacta

SEQ ID NO: 7389 - DNA, 439 bp, Staphylococcus aureus
gtggttctttttttattttccatcaattaaatgtttcttcgctatttgtcagtccacttctttacctgcaacttgttaaataatccttacatcgttaacgaatagttcatcatttagttgaatcagctcaactttattaacttcaaattttcacaaactattgcgaaatccattcctcttccactacaagcaccataattaaacaacaattcaatagaataagacttgcaaaacatagttatgtcgctatataaacgcctgcgaccaataaatcttttaaacataacataatgcaaaaacatcatttaacaatgctaaaaatgtctcttcaatacatgttgatagtaattaacttttaacgaacagttaattcgaaaacgcttacaaatggattattatatatatgaacttaaaattaaatagaaagaaagtgatttct

SEQ ID NO: 7390 - DNA, 439 bp, Staphylococcus aureus
agaaatcactttctttctatttaattttaagttcatatatataataatccatttgtaagcgttttcgaattaactgttcgttaaaagttaattactatcaacatgtattgaagagacatttttagcattgttaaatgatgtttttgcattatgttatgtttaaaagatttattggtcgcaggcgtttatatagcgacataactatgttttgcaagtcttattctattgaattgttgtttaattatggtgcttgtagtggaagaggaatggatttcgcaatagtttgtgaaaatttgaagttaataaagttgagctgattcaactaaatgatgaactattcgttaacgatgtaaggattatttaacaagttgcaggtaaagaagtggactgacaaatagcgaagaaacatttaattgatggaaaataaaaaaagaaccac

SEQ ID NO: 7391 - DNA, 386 bp, Staphylococcus aureus
tccatttaagttgaaagcttaaataaatattctcaagttaataaataattaacttttagatggattcatcaaaaatcgtaaaaagaacaatttgtattttacaaacattaattaaaaataaaagcaagacattcgtgcaatcggttaccttaaattgtttacaactgtcaacaataccaaggttttattaactatatttctcacaaaattagcttttagcattccaaacaaaaaaggttaaattgaacggaattatggcatttttaacttaattgtaaaaaaagttgataatggtcaattgttaatgaacagttaattataataacgtccaaaatatattattatttaattaagttaaataaaattatagaaagaaagtgaaactt

SEQ ID NO: 7392 - DNA, 386 bp, Staphylococcus aureus
aagtttcactttctttctataattttatttaacttaattaaataataatatattttggacgttattataattaactgttcattaacaattgaccattatcaactttttttacaattaagttaaaaatgccataattccgttcaatttaaccttttttgtttggaatgctaaaagctaattttgtgagaaatatagttaataaaaccttggtattgttgacagttgtaaacaatttaaggtaaccgattgcacgaatgtcttgcttttatttttaattaatgtttgtaaaatacaaattgttctttttacgatttttgatgaatccatctaaaagttaattatttattaacttgagaatatttatttaagctttcaacttaaatgga

SEQ ID NO: 7393 - DNA, 51 bp, Staphylococcus aureus
ctagtaaaacacggtcgccaacagtaattgtgacgaccgtgttttgattta

SEQ ID NO: 7394 - DNA, 51 bp, Staphylococcus aureus
taaatcaaaacacggtcgtcacaattactgttggcgaccgtgttttactag

SEQ ID NO: 7395 - DNA, 225 bp, Staphylococcus aureus
aaaaaataagcacctcaatccgaatgtaaacttttataattaataagtttacatttaaggcgcatgtttttcaagaaaacatgaatttaaacttctcagtataactataatttttggcaaaattttgaccttgctattgaaatgactaaggcttcttacgaaatttgggcagatataaacagcgattcgttaaaatatgtcagttaaaattaataattgcattat

SEQ ID NO: 7396 - DNA, 225 bp, Staphylococcus aureus
ataatgcaattattaattttaactgacatattttaacgaatcgctgtttatatctgcccaaatttcgtaagaagccttagtcatttcaatagcaaggtcaaaattttgccaaaaattatagttatactgagaagtttaaattcatgttttcttgaaaaacatgcgccttaaatgtaaacttattaattataaaagtttacattcggattgaggtgcttatttttt

SEQ ID NO: 7397 - DNA, 87 bp, Staphylococcus aureus
tattgccctagtgaggggatttattttgctgttgattatctatcaccctttttatttccaaattctgattccatattaaactattat

SEQ ID NO: 7398 - DNA, 87 bp, Staphylococcus aureus
ataatagtttaatatggaatcagaatttggaaataaaaagggtgatagataatcaacagcaaaataaatcccctcactagggcaata

SEQ ID NO: 7399 - DNA, 319 bp, Staphylococcus aureus
cgtatatgcaactcctttcaattaataatctaaattaagccgcttatattatttatttcactggatgatatacataatataaatttgtcatttgttaaaaattaatacttattacaagtacatcatatattagttgataacgattatcaatgtcgcgtggatttgtgacacatttcttttaaaaattcacaaggttatggggcagaaatgataaagagccactaatgatttattatgtaatgattctttatccttagccacagctaatatgtacttaaaaataggaatacatgagtaaaactctatgttggggctccgc

SEQ ID NO: 7400 - DNA, 319 bp, Staphylococcus aureus
gcggagccccaacatagagttttactcatgtattcctatttttaagtacatattagctgtggctaaggataaagaatcattacataataaatcattagtggctctttatcatttctgccccataaccttgtgaatttttaaaagaaatgtgtcacaaatccacgcgacattgataatcgttatcaactaatatatgatgtacttgtaataagtattaatttttaacaaatgacaaatttatattatgtatatcatccagtgaaataaataatataagcggcttaatttagattattaattgaaaggagttgcatatacg

SEQ ID NO: 7401 - DNA, 145 bp, Staphylococcus aureus
tccctgagtatagccttgtagagtctagtacattgatttgtatcccaatgtccctataattgattattcgctttatctaatgatcctatgactcaactattaaatcatttttcgaaatacttaattctaatataattaaattcat

SEQ ID NO: 7402 - DNA, 145 bp, Staphylococcus aureus
atgaatttaattatattagaattaagtatttcgaaaaatgatttaatagttgagtcataggatcattagataaagcgaataatcaattatagggacattgggatacaaatcaatgtactagactctacaaggctatactcaggga

SEQ ID NO: 7403 - DNA, 267 bp, Staphylococcus aureus
atgtgtaactcctcaacatcaaaatatatgcatagctacgttctccaacatactcgaatatgcgagccaatccgcttcacttcaaatttacttatttcaacctttataccctttcacagcaaatttagtctctttcctctcatccttatacgccattataatgtaactgatttatcgcgtgactcattagcactatagagattactttagttcactagtaattttatatacaataagagcgacaacagtaatgagaggatgtctact

SEQ ID NO: 7404 - DNA, 267 bp, Staphylococcus aureus
agtagacatcctctcattactgttgtcgctcttattgtatataaaattactagtgaactaaagtaatctctatagtgctaatgagtcacgcgataaatcagttacattataatggcgtataaggatgagaggaaagagactaaatttgctgtgaaagggtataaaggttgaaataagtaaatttgaagtgaagcggattggctcgcatattcgagtatgttggagaacgtagctatgcatatattttgatgttgaggagttacacat

SEQ ID NO: 7405 - DNA, 59 bp, Staphylococcus aureus
tgtcaaagtaaatcatcagctttattatttgcagttaaaacttgaatgaggtgaaaccc

SEQ ID NO: 7406 - DNA, 59 bp, Staphylococcus aureus
gggtttcacctcattcaagttttaactgcaaataataaagctgatgatttactttgaca

SEQ ID NO: 7407 - DNA, 181 bp, Staphylococcus aureus
ttattacacctgctttgatgataaacattaattccctatactttatctgtatcactacgttattcgtgatgatgcattaagagtatagggattttttatataaacttgtattctaactacatacaaatacacacaaaacgtatataatttatataattatatcatttaaaggagtctgatc

SEQ ID NO: 7408 - DNA, 181 bp, Staphylococcus aureus
gatcagactcctttaaatgatataattatataaattatatacgttttgtgtgtatttgtatgtagttagaatacaagtttatataaaaaatccctatactcttaatgcatcatcacgaataacgtagtgatacagataaagtatagggaattaatgtttatcatcaaagcaggtgtaataa

SEQ ID NO: 7409 - DNA, 59 bp, Staphylococcus aureus
tttatcactccattaattttattcactcatgtaaaacatatgtttaggacattttgcat

SEQ ID NO: 7410 - DNA, 59 bp, Staphylococcus aureus
atgcaaaatgtcctaaacatatgttttacatgagtgaataaaattaatggagtgataaa

SEQ ID NO: 7411 - DNA, 62 bp, Staphylococcus aureus
gtaaacacattactcgcgtgtgtaaaacataaaatgcgcaaactgggtcaggtttgcgcatt

SEQ ID NO: 7412 - DNA, 62 bp, Staphylococcus aureus
aatgcgcaaacctgacccagtttgcgcattttatgttttacacacgcgagtaatgtgtttac

SEQ ID NO: 7413 - DNA, 285 bp, Staphylococcus aureus
acccataccttctttactcaaattaaaatgttatttattatgccatagcttatctaatatatatagttaactgcttcatttagatgattattttatatttttgcataaaaacttatatcttttcaaaaaatcgataagttttagttatcatacccttacctatcaaatgttttttcttatatttaaaaaaataattgctttattaaatggatttctttagtatttataattaagaaaacgcttacacacaacttttttatttgctttatcctgaggaggaaaatt

SEQ ID NO: 7414 - DNA, 285 bp, Staphylococcus aureus
aattttcctcctcaggataaagcaaataaaaaagttgtgtgtaagcgttttcttaattataaatactaaagaaatccatttaataaagcaattatttttttaaatataagaaaaaacatttgataggtaagggtatgataactaaaacttatcgattttttgaaaagatataagtttttatgcaaaaatataaaataatcatctaaatgaagcagttaactatatatattagataagctatggcataataaataacattttaatttgagtaaagaaggtatgggt

SEQ ID NO: 7415 - DNA, 138 bp, Staphylococcus aureus
tttaaacatctcgctctagtatcagttcaaccgatactagagttttttttgaaaataacttcattttatcaatatatctatgtcattatgccttaaaagtgataaaatattaactattaaaattttgaggagtattgt

SEQ ID NO: 7416 - DNA, 138 bp, Staphylococcus aureus
acaatactcctcaaaattttaatagttaatattttatcacttttaaggcataatgacatagatatattgataaaatgaagttattttcaaaaaaaactctagtatcggttgaactgatactagagcgagatgtttaaa

SEQ ID NO: 7417 - DNA, 83 bp, Staphylococcus aureus
gcaagacataacaataccccccatacatatgagacaaagtcattatcatctcatatgtacggggtttttatattcaacatcaa

SEQ ID NO: 7418 - DNA, 83 bp, Staphylococcus aureus
ttgatgttgaatataaaaaccccgtacatatgagatgataatgactttgtctcatatgtatggggggtattgttatgtcttgc

SEQ ID NO: 7419 - DNA, 97 bp, Staphylococcus aureus
aatctcctattcctttttatagtttttgatggatatcactatacgcctatctttccaaaaagtatagagagttaattaatattttttatgtaattat

SEQ ID NO: 7420 - DNA, 97 bp, Staphylococcus aureus
ataattacataaaaaatattaattaactctctatactttttggaaagataggcgtatagtgatatccatcaaaaactataaaaaggaataggagatt

SEQ ID NO: 7421 - DNA, 91 bp, Staphylococcus aureus
taaaaaagacttgttcgagccgtgcgtttgataatatatcatccacgattcgaccaagtctttattctttgtatattaaacggataaatta

SEQ ID NO: 7422 - DNA, 91 bp, Staphylococcus aureus
taatttatccgtttaatatacaaagaataaagacttggtcgaatcgtggatgatatattatcaaacgcacggctcgaacaagtctttttta

SEQ ID NO: 7423 - DNA, 225 bp, Staphylococcus aureus
cctataaacccctcttcatcgttgttgttcattttaaaaatactactttcgcatattagcgtcaatttgaaaatcattcgcttaatatgcacacagcttttatcgtctataaaagaacacacctaacattaaacgtcaatacgtaacattaagtgtgtatgataaacttactttcacaaaatttcctttaaaatccctacataataacttgctttcatttcggtt

SEQ ID NO: 7424 - DNA, 225 bp, Staphylococcus aureus
aaccgaaatgaaagcaagttattatgtagggattttaaaggaaattttgtgaaagtaagtttatcatacacacttaatgttacgtattgacgtttaatgttaggtgtgttcttttatagacgataaaagctgtgtgcatattaagcgaatgattttcaaattgacgctaatatgcgaaagtagtatttttaaaatgaacaacaacgatgaagaggggtttatagg

SEQ ID NO: 7425 - DNA, 293 bp, Staphylococcus aureus
gaattagataagcctcctatgtttaagaaaaacaaatttttaatatgatatattaagaaacaatatcataaatttgcagaaaattataaataaaacatctcattttttagcatttttacaataattaacgctttttatccaaaaactttcatgataataattgctattttagtgtaaacgcatacaaacacaacctataaaaaggctactcaaagattatttgagctccttgagtagcctcattttttataaatcatgaaacgaaatcgctaaattataaacatcttctacta

SEQ ID NO: 7426 - DNA, 293 bp, Staphylococcus aureus
tagtagaagatgtttataatttagcgatttcgtttcatgatttataaaaaatgaggctactcaaggagctcaaataatctttgagtagcctttttataggttgtgtttgtatgcgtttacactaaaatagcaattattatcatgaaagtttttggataaaaagcgttaattattgtaaaaatgctaaaaaatgagatgttttatttataattttctgcaaatttatgatattgtttcttaatatatcatattaaaaatttgtttttcttaaacataggaggcttatctaattc

SEQ ID NO: 7427 - DNA, 324 bp, Staphylococcus aureus
ttctccttcctcataaaaaatatgacgaatgatacgcataaaataaaaagaccattatcgcaattgttaaacaaatagagtcataagttaaacaagtacacatcatggtcttgattatgtagaattttatatttttcatctgtaatgtgaatacttaacagtaaacggcgctatgtatgttgaatttctaccgattactttgtttgcacattcgtatattcgacatttaaaactaacatactctatatgatgttattaaacattattattttatctttggcaactaaatagataactcatattttttaaaagcgaatttattat

SEQ ID NO: 7428 - DNA, 324 bp, Staphylococcus aureus
ataataaattcgcttttaaaaaatatgagttatctatttagttgccaaagataaaataataatgtttaataacatcatatagagtatgttagttttaaatgtcgaatatacgaatgtgcaaacaaagtaatcggtagaaattcaacatacatagcgccgtttactgttaagtattcacattacagatgaaaaatataaaattctacataatcaagaccatgatgtgtacttgtttaacttatgactctatttgtttaacaattgcgataatggtctttttattttatgcgtatcattcgtcatattttttatgaggaaggagaa

SEQ ID NO: 7429 - DNA, 83 bp, Staphylococcus aureus
ccgccactcacaaagtcatccttatattttaatatcttcatcattcattgtagacacccttgccttttgctaacattttctac

SEQ ID NO: 7430 - DNA, 83 bp, Staphylococcus aureus
gtagaaaatgttagcaaaaggcaagggtgtctacaatgaatgatgaagatattaaaatataaggatgactttgtgagtggcgg

SEQ ID NO: 7431 - DNA, 308 bp, Staphylococcus aureus
atattttaaaatgcaatgccatatatgatttcaacacacacacattaaccaaccattgatttcaacatcttggttggttttttattttgaaaatcggttataaataactaacataacaatgtggcgagagtgatattgtaatgaaatgtcactgtagaagaacatcatataatgctgaaaatggtttgagttaaaacagatatcaagctagtctgattcagtcacaaaattgtcttgttatacttgtcacctatcatctatagaccgtggtatgattaaattggggatgataaaggaggttaataaat

SEQ ID NO: 7432 - DNA, 308 bp, Staphylococcus aureus
atttattaacctcctttatcatccccaatttaatcataccacggtctatagatgataggtgacaagtataacaagacaattttgtgactgaatcagactagcttgatatctgttttaactcaaaccattttcagcattatatgatgttcttctacagtgacatttcattacaatatcactctcgccacattgttatgttagttatttataaccgattttcaaaataaaaaaccaaccaagatgttgaaatcaatggttggttaatgtgtgtgtgttgaaatcatatatggcattgcattttaaaatat

SEQ ID NO: 7433 - DNA, 61 bp, Staphylococcus aureus
cgttatcgcatctaaaaaagcacacctgaatttgatagcaggcgtgcttttcatatgagaa

SEQ ID NO: 7434 - DNA, 61 bp, Staphylococcus aureus
ttctcatatgaaaagcacgcctgctatcaaattcaggtgtgcttttttagatgcgataacg

SEQ ID NO: 7435 - DNA, 395 bp, Staphylococcus aureus
tttaaaactcctttcaaacaaaatttccgatattcatttcccttagaataacgatttattaaaaaatgtgtgcaacacaattttatatataaccgttctattatataatattttgctttaattttctgtgcttaaatggaaaattattgaaattgtttttcagtatttgaaaaattaacacaagtatgtcatttaataattatgtataattacttcagtttcaacaatgtcttcaaaaaagcacgcacgctttatatgtcagaacagataactgactacaaagtatgcgtgcctttatgaatattttcgctgtgttaatgaatagcgatactatatgtgcgcgtcacttcatttccaattaaaactaatgcctaaatctgatgcagtaaaatcta

SEQ ID NO: 7436 - DNA, 395 bp, Staphylococcus aureus
tagattttactgcatcagatttaggcattagttttaattggaaatgaagtgacgcgcacatatagtatcgctattcattaacacagcgaaaatattcataaaggcacgcatactttgtagtcagttatctgttctgacatataaagcgtgcgtgcttttttgaagacattgttgaaactgaagtaattatacataattattaaatgacatacttgtgttaatttttcaaatactgaaaaacaatttcaataattttccatttaagcacagaaaattaaagcaaaatattatataatagaacggttatatataaaattgtgttgcacacattttttaataaatcgttattctaagggaaatgaatatcggaaattttgtttgaaaggagttttaaa

SEQ ID NO: 7437 - DNA, 247 bp, Staphylococcus aureus
ttgcaccgctcctcatgtaatatatcaggtatattattcccgtttttttggtttttagtgcaattacatttaagaaaaaatcattttcttgtaatatcaaaatttaggcataattgattttcagcatttaaattaaaaacaaaaaatcctattaacatggatactgtctaatgactaagaattaaagttagacaattgtttaacaacctaccatattaaaaggattctttattatttatggatttga

SEQ ID NO: 7438 - DNA, 247 bp, Staphylococcus aureus
tcaaatccataaataataaagaatccttttaatatggtaggttgttaaacaattgtctaactttaattcttagtcattagacagtatccatgttaataggattttttgtttttaatttaaatgctgaaaatcaattatgcctaaattttgatattacaagaaaatgattttttcttaaatgtaattgcactaaaaaccaaaaaaacgggaataatatacctgatatattacatgaggagcggtgcaa

SEQ ID NO: 7439 - DNA, 58 bp, Staphylococcus aureus
gttattcatcctcctgtatttcaacttaaaactattgtatcactaactttcagaaaaa

SEQ ID NO: 7440 - DNA, 58 bp, Staphylococcus aureus
tttttctgaaagttagtgatacaatagttttaagttgaaatacaggaggatgaataac

SEQ ID NO: 7441 - DNA, 219 bp, Staphylococcus aureus
ttttaaaatttaatattccgaaaaagtcacaatttaaaattccttattataatatgttattcttttattgttactaatttcaatttgtttagtcttgcgctattataaaattaaaaagtgtagagataacaacgcattaacgtcgctattttccctacacttaaatactagtttctttaattaacttaccattaaagttattcagatattgaatattca

SEQ ID NO: 7442 - DNA, 219 bp, Staphylococcus aureus
tgaatattcaatatctgaataactttaatggtaagttaattaaagaaactagtatttaagtgtagggaaaatagcgacgttaatgcgttgttatctctacactttttaattttataatagcgcaagactaaacaaattgaaattagtaacaataaaagaataacatattataataaggaattttaaattgtgactttttcggaatattaaattttaaaa

SEQ ID NO: 7443 - DNA, 113 bp, Staphylococcus aureus
ataaaccctcctttgttttctgttacgctaattatagcgtacgcacttgagtacgtcaatattgccaacgagttcatcgtattcttaatacctatatgctatcgtacacaagc

SEQ ID NO: 7444 - DNA, 113 bp, Staphylococcus aureus
gcttgtgtacgatagcatataggtattaagaatacgatgaactcgttggcaatattgacgtactcaagtgcgtacgctataattagcgtaacagaaaacaaaggagggtttat

SEQ ID NO: 7445 - DNA, 58 bp, Staphylococcus aureus
tttttagtaaatgttataatttctttataatacaaatatcgaaagaaggcgactgact

SEQ ID NO: 7446 - DNA, 58 bp, Staphylococcus aureus
agtcagtcgccttctttcgatatttgtattataaagaaattataacatttactaaaaa

SEQ ID NO: 7447 - DNA, 54 bp, Staphylococcus aureus
tttataacataaaaatgccctcagataagactaaggatacaaaccttaattcat

SEQ ID NO: 7448 - DNA, 54 bp, Staphylococcus aureus
atgaattaaggtttgtatccttagtcttatctgagggcatttttatgttataaa

SEQ ID NO: 7449 - DNA, 132 bp, Staphylococcus aureus
aatggaagcgcttcattttataaaacaattttatgatatgtttttcattttaaattttaatgtataaaacatacaatacaaagtaatatgtgctaaagtatctatataatacaactatttaagaggtatact

SEQ ID NO: 7450 - DNA, 132 bp, Staphylococcus aureus
agtatacctcttaaatagttgtattatatagatactttagcacatattactttgtattgtatgttttatacattaaaatttaaaatgaaaaacatatcataaaattgttttataaaatgaagcgcttccatt

SEQ ID NO: 7451 - DNA, 148 bp, Staphylococcus aureus
aatttttcagagtattatccattatccatacacatcaaaaagcacacttaaaagtcagtatcacaactcacttttaagcgtgctttatttagatatactgtcgttctaaaaacgagccatatagagagcctgagacataaatcaatgt

SEQ ID NO: 7452 - DNA, 148 bp, Staphylococcus aureus
acattgatttatgtctcaggctctctatatggctcgtttttagaacgacagtatatctaaataaagcacgcttaaaagtgagttgtgatactgacttttaagtgtgctttttgatgtgtatggataatggataatactctgaaaaatt

SEQ ID NO: 7453 - DNA, 87 bp, Staphylococcus aureus
ttctgtcccactcccatgaatcgccatgctcaatataccttttaaaatttaaatattcattaacttaatatgctttaattcacttca

SEQ ID NO: 7454 - DNA, 87 bp, Staphylococcus aureus
tgaagtgaattaaagcatattaagttaatgaatatttaaattttaaaaggtatattgagcatggcgattcatgggagtgggacagaa

SEQ ID NO: 7455 - DNA, 142 bp, Staphylococcus aureus
ttgcttttcctctttctaaattgataagttgcattacttaatcaaatcgtaatgattatttttctcaattatttgcttatttttatgtaaatgtcaaacataattcaataatttttttctattataaaacttcaaaccctta

SEQ ID NO: 7456 - DNA, 142 bp, Staphylococcus aureus
taagggtttgaagttttataatagaaaaaaattattgaattatgtttgacatttacataaaaataagcaaataattgagaaaaataatcattacgatttgattaagtaatgcaacttatcaatttagaaagaggaaaagcaa

SEQ ID NO: 7457 - DNA, 85 bp, Staphylococcus aureus
ctaaaactgtaatttttagaagatgaacctaatattttcccatctattaggtaagtcatgctaacccgcaaaagcgaaaaccatg

SEQ ID NO: 7458 - DNA, 85 bp, Staphylococcus aureus
catggttttcgcttttgcgggttagcatgacttacctaatagatgggaaaatattaggttcatcttctaaaaattacagttttag

SEQ ID NO: 7459 - DNA, 60 bp, Staphylococcus aureus
ctaaaccttgtaatttttataaaaagaacctaatattttcccatctattaggtaagtcat

SEQ ID NO: 7460 - DNA, 60 bp, Staphylococcus aureus
atgacttacctaatagatgggaaaatattaggttctttttataaaaattacaaggtttag

SEQ ID NO: 7461 - DNA, 282 bp, Staphylococcus aureus
ttagatgcttttactgttttcacctcaactaaaacttcaaaaaagttgcagaaaacaaatcgtaactattacgatttgattatatactatattagttgagaatcattgtcaataaaggttgtaaatgaatgcacatttatattttgataatctttccataaacatcgtattctcagcacattcaagtcttttgaaaatttttatcaaacaaaaaaaccagcttcaacgtaaaatacgttaaaactagctttaagcaatacacttcatcaaataaacaaacat

SEQ ID NO: 7462 - DNA, 282 bp, Staphylococcus aureus
atgtttgtttatttgatgaagtgtattgcttaaagctagttttaacgtattttacgttgaagctggtttttttgtttgataaaaattttcaaaagacttgaatgtgctgagaatacgatgtttatggaaagattatcaaaatataaatgtgcattcatttacaacctttattgacaatgattctcaactaatatagtatataatcaaatcgtaatagttacgatttgttttctgcaacttttttgaagttttagttgaggtgaaaacagtaaaagcatctaa

SEQ ID NO: 7463 - DNA, 99 bp, Staphylococcus aureus
gttaaatccccctatttcatatgtctgtcattgcgacaatatgcatacattgcctacttcatgccaaattcttttccactggatatcgattttaaataa

SEQ ID NO: 7464 - DNA, 99 bp, Staphylococcus aureus
ttatttaaaatcgatatccagtggaaaagaatttggcatgaagtaggcaatgtatgcatattgtcgcaatgacagacatatgaaatagggggatttaac

SEQ ID NO: 7465 - DNA, 195 bp, Staphylococcus aureus
tcagtcactcctatacaacatatcttaaacttacagtccttattttccactgttcaatgcttcataaacctaatagataagtctccaggcagtcttagctactctctgctatacaatttctattgaataactcaaaatatttaacaatattagtcttttcattttctgaaaattgttacttttgagagtattttt

SEQ ID NO: 7466 - DNA, 195 bp, Staphylococcus aureus
aaaaatactctcaaaagtaacaattttcagaaaatgaaaagactaatattgttaaatattttgagttattcaatagaaattgtatagcagagagtagctaagactgcctggagacttatctattaggtttatgaagcattgaacagtggaaaataaggactgtaagtttaagatatgttgtataggagtgactga

SEQ ID NO: 7467 - DNA, 112 bp, Staphylococcus aureus
cagtattcaaagggataaattaaaaatgccactatacaagatttgacctgtatagtggcatgatttgttatgatatagcgttcgagatgaaactctgcatttatatgaacaa

SEQ ID NO: 7468 - DNA, 112 bp, Staphylococcus aureus
ttgttcatataaatgcagagtttcatctcgaacgctatatcataacaaatcatgccactatacaggtcaaatcttgtatagtggcatttttaatttatccctttgaatactg

SEQ ID NO: 7469 - DNA, 361 bp, Staphylococcus aureus
cttgtcaatctatgctttagttaaaacatttagcgcttatatttaaaaaatatataaaatatgaaaacagattgaaaggatattataccttgctctacccttttttataaaaaatcacacacatttgagaaaatttgataatgtcaataaatcacgtcatcgccattgttattcggtatataatgtttttataatggctaaactattatttcatttacattaatggggttcgcttgtgttaatgtactgtacaaaactggggaagtattggtgatgatgaagtgattgatattaattgcgaaacaccttcgatagcaatgacatagattattggaagattaaatcaaaaataaagaagacc

SEQ ID NO: 7470 - DNA, 361 bp, Staphylococcus aureus
ggtcttctttatttttgatttaatcttccaataatctatgtcattgctatcgaaggtgtttcgcaattaatatcaatcacttcatcatcaccaatacttccccagttttgtacagtacattaacacaagcgaaccccattaatgtaaatgaaataatagtttagccattataaaaacattatataccgaataacaatggcgatgacgtgatttattgacattatcaaattttctcaaatgtgtgtgattttttataaaaaagggtagagcaaggtataatatcctttcaatctgttttcatattttatatattttttaaatataagcgctaaatgttttaactaaagcatagattgacaag

SEQ ID NO: 7471 - DNA, 266 bp, Staphylococcus aureus
ctatcaccagctcctaaaatgtggtggaattttatacagtttacatatttatgatactacaaaacacactcttacaaagaaaatctataattttaatctaggtcaaggaaaagcagccaaaagtgtttatataagatcaacgaaatattgcgggtataaagtggttaacagataaatacagtggaaattgtactaaaaattcaacttttcatttttatatgtaagtatgattaacttgaaaacaaaattaaaacggccgcatagtt

SEQ ID NO: 7472 - DNA, 266 bp, Staphylococcus aureus
aactatgcggccgttttaattttgttttcaagttaatcatacttacatataaaaatgaaaagttgaatttttagtacaatttccactgtatttatctgttaaccactttatacccgcaatatttcgttgatcttatataaacacttttggctgcttttccttgacctagattaaaattatagattttctttgtaagagtgtgttttgtagtatcataaatatgtaaactgtataaaattccaccacattttaggagctggtgatag

SEQ ID NO: 7473 - DNA, 159 bp, Staphylococcus aureus
cgtcgccttcattaacttgattgttaaaatcaccaattactgagaattgtacaaggaataattgcctattatgccctcatgtcattattgccttactaacattaacaaaatcgatagctattacattaaatgtctatctcccacacctcaaacaccttt

SEQ ID NO: 7474 - DNA, 159 bp, Staphylococcus aureus
aaaggtgtttgaggtgtgggagatagacatttaatgtaatagctatcgattttgttaatgttagtaaggcaataatgacatgagggcataataggcaattattccttgtacaattctcagtaattggtgattttaacaatcaagttaatgaaggcgacg

SEQ ID NO: 7475 - DNA, 288 bp, Staphylococcus aureus
aatgatcgactcctttgattctttttattttttcagggtaaatcataaatacatattacttttaaaaagcgtatcacaattcatataacggtcataataactcgcttcattttcatagataaattacattacaagccattcgaaatatacaattaatcgttgcttatattttttatttttaaaaatgttgaaaaatcgtcacttctttattgtaaaaacattatattagtactaaagttaatactgtgatttatcattcgattgaatgattagagggaggaattaaac

SEQ ID NO: 7476 - DNA, 288 bp, Staphylococcus aureus
gtttaattcctccctctaatcattcaatcgaatgataaatcacagtattaactttagtactaatataatgtttttacaataaagaagtgacgatttttcaacatttttaaaaataaaaaatataagcaacgattaattgtatatttcgaatggcttgtaatgtaatttatctatgaaaatgaagcgagttattatgaccgttatatgaattgtgatacgctttttaaaagtaatatgtatttatgatttaccctgaaaaaataaaaagaatcaaaggagtcgatcatt

SEQ ID NO: 7477 - DNA, 141 bp, Staphylococcus aureus
tagtatcgttccagatttgtggggagttagggtttacttaattaaagggatctgccctcaattgctcaccaacgagggcaagttacatcaatcacacttcaattgccgccgactaggggtagtaatcattggcaataagaa

SEQ ID NO: 7478 - DNA, 141 bp, Staphylococcus aureus
ttcttattgccaatgattactacccctagtcggcggcaattgaagtgtgattgatgtaacttgccctcgttggtgagcaattgagggcagatccctttaattaagtaaaccctaactccccacaaatctggaacgatacta

SEQ ID NO: 7479 - DNA, 435 bp, Staphylococcus aureus
aatcatcactccaatgtttatatattatttatataaactctctcgtctctctctatttattaacttcttacaagtctaatattacatgaatttccaaataaataaagaggtttgtgatgtatttcacaaatttatcactattttggaaaattaagaaatagttaattatataaaagtttaataagtcagaaaatatgataaaatgtagatgttctttagacattaaaagcttctaacatgatacggaatatgaggttcctgtatcacattagaagcttttttgttgcggtgcttatattaataatggcatgaatgaacgcatgctgtcttagtttcaggaatcggctagaatattaaacttccgttctttgaatattttttaatttcttactaatatcatccagttcattcttcgcctttttaacccaatctcct

SEQ ID NO: 7480 - DNA, 435 bp, Staphylococcus aureus
aggagattgggttaaaaaggcgaagaatgaactggatgatattagtaagaaattaaaaaatattcaaagaacggaagtttaatattctagccgattcctgaaactaagacagcatgcgttcattcatgccattattaatataagcaccgcaacaaaaaagcttctaatgtgatacaggaacctcatattccgtatcatgttagaagcttttaatgtctaaagaacatctacattttatcatattttctgacttattaaacttttatataattaactatttcttaattttccaaaatagtgataaatttgtgaaatacatcacaaacctctttatttatttggaaattcatgtaatattagacttgtaagaagttaataaatagagagagacgagagagtttatataaataatatataaacattggagtgatgatt

SEQ ID NO: 7481 - DNA, 116 bp, Staphylococcus aureus
catttctccaccttatatttttaatattgactcaatctttaatttatacaactaaagcgaaaaattattttgaacactttatgaaatttttatttcaaacttctattaaccctatt

SEQ ID NO: 7482 - DNA, 116 bp, Staphylococcus aureus
aatagggttaatagaagtttgaaataaaaatttcataaagtgttcaaaataatttttcgctttagttgtataaattaaagattgagtcaatattaaaaatataaggtggagaaatg

SEQ ID NO: 7483 - DNA, 165 bp, Staphylococcus aureus
tcgccatcaccttcatacagtttgaagtcatatttaccaattgtaaatgacgactagatgatatatagttcaagaaacatcaaaattcgttaaaacataatcaaattttattatgttcaaaactttattttccaaaaaataaaaaagaagttaaacaaagattgg

SEQ ID NO: 7484 - DNA, 165 bp, Staphylococcus aureus
ccaatctttgtttaacttcttttttattttttggaaaataaagttttgaacataataaaatttgattatgttttaacgaattttgatgtttcttgaactatatatcatctagtcgtcatttacaattggtaaatatgacttcaaactgtatgaaggtgatggcga

SEQ ID NO: 7485 - DNA, 105 bp, Staphylococcus aureus
tcccgaaaaataatggctaatagccacttatagtcgagattatgaactatataatttatttattattaaatggattatatacttattgtgtttcttaataccttt

SEQ ID NO: 7486 - DNA, 105 bp, Staphylococcus aureus
aaaggtattaagaaacacaataagtatataatccatttaataataaataaattatatagttcataatctcgactataagtggctattagccattatttttcggga

SEQ ID NO: 7487 - DNA, 243 bp, Staphylococcus aureus
catttctccaccttatatttataattctgactcagtttttaatatttacaactaaagcgaaaaattgttttgaacaaatgaatttaattgtaattattttgtattttaaatcttcttatcagaattataaaacaattaaatcaaaagataaagtttctgtgatttattattaattttaagagttatcgttataatcttttacctagtgctttatggaattttcattccaaacttctattaacc

SEQ ID NO: 7488 - DNA, 243 bp, Staphylococcus aureus
ggttaatagaagtttggaatgaaaattccataaagcactaggtaaaagattataacgataactcttaaaattaataataaatcacagaaactttatcttttgatttaattgttttataattctgataagaagatttaaaatacaaaataattacaattaaattcatttgttcaaaacaatttttcgctttagttgtaaatattaaaaactgagtcagaattataaatataaggtggagaaatg

SEQ ID NO: 7489 - DNA, 111 bp, Staphylococcus aureus
catttctccaccttatatttttaatactgactcaatctttaatttacacaactaaagcgaaaaattattttgaacactttatgaaattttcatttcaaacttctattaacc

SEQ ID NO: 7490 - DNA, 111 bp, Staphylococcus aureus
ggttaatagaagtttgaaatgaaaatttcataaagtgttcaaaataatttttcgctttagttgtgtaaattaaagattgagtcagtattaaaaatataaggtggagaaatg

SEQ ID NO: 7491 - DNA, 100 bp, Staphylococcus aureus
ttcacatccccatttttatttttgatgcaaagttaagttcaaattccaatattaataatactagaggaaattttatgattaaatcctcgtggattttaat

SEQ ID NO: 7492 - DNA, 100 bp, Staphylococcus aureus
attaaaatccacgaggatttaatcataaaatttcctctagtattattaatattggaatttgaacttaactttgcatcaaaaataaaaatggggatgtgaa

SEQ ID NO: 7493 - DNA, 111 bp, Staphylococcus aureus
taagataaattgcgcttatatttaaaataataacactgaaacttcaatgtctttacttattacaattgatgtttaaatacatctttactaacattcatttttcggtttaca

SEQ ID NO: 7494 - DNA, 111 bp, Staphylococcus aureus
tgtaaaccgaaaaatgaatgttagtaaagatgtatttaaacatcaattgtaataagtaaagacattgaagtttcagtgttattattttaaatataagcgcaatttatctta

SEQ ID NO: 7495 - DNA, 105 bp, Staphylococcus aureus
aagactcacccttcaatttaaaatcatcttaattgttattctatcaaaaattacaaaactatatataaatcaatattaaaaattaatattttacaatttcctgca

SEQ ID NO: 7496 - DNA, 105 bp, Staphylococcus aureus
tgcaggaaattgtaaaatattaatttttaatattgatttatatatagttttgtaatttttgatagaataacaattaagatgattttaaattgaagggtgagtctt

SEQ ID NO: 7497 - DNA, 283 bp, Staphylococcus aureus
ttaaaaattttatacatcgaaatattacatttcattttatacttatcagcccttttgaaactagaatccttatgttttcgcgttttgaaggggctaatttgtaataatttttcaaaagtatattagaaaattaattttcatgtatttttcatattaagcggtaataatataataattaataccgcgacctatttaattgttttcgcgatgaaaaaggtttagaattacaaaaataactattttaaatttagttacaaatatattttagaaaggatgtgaaata

SEQ ID NO: 7498 - DNA, 283 bp, Staphylococcus aureus
tatttcacatcctttctaaaatatatttgtaactaaatttaaaatagttatttttgtaattctaaacctttttcatcgcgaaaacaattaaataggtcgcggtattaattattatattattaccgcttaatatgaaaaatacatgaaaattaattttctaatatacttttgaaaaattattacaaattagccccttcaaaacgcgaaaacataaggattctagtttcaaaagggctgataagtataaaatgaaatgtaatatttcgatgtataaaatttttaa

SEQ ID NO: 7499 - DNA, 143 bp, Staphylococcus aureus
aacttcctttttcataaccccattcattcaactaataaattaaaaattgataaaaacgtactgttttttagaaacatacatatataagatacgcattcattactaaaagacagtacattatattctatcaggaaggtgcaaca

SEQ ID NO: 7500 - DNA, 143 bp, Staphylococcus aureus
tgttgcaccttcctgatagaatataatgtactgtcttttagtaatgaatgcgtatcttatatatgtatgtttctaaaaaacagtacgtttttatcaatttttaatttattagttgaatgaatggggttatgaaaaaggaagtt

SEQ ID NO: 7501 - DNA, 107 bp, Staphylococcus aureus
atgtttgcgatagtgtgttggttagatttattgatgcgctgtcattaagtaattgtttgcgaaaaaaatacaaccttgtacgaatacaaagttgcattaatatagaa

SEQ ID NO: 7502 - DNA, 107 bp, Staphylococcus aureus
ttctatattaatgcaactttgtattcgtacaaggttgtatttttttcgcaaacaattacttaatgacagcgcatcaataaatctaaccaacacactatcgcaaacat

SEQ ID NO: 7503 - DNA, 387 bp, Staphylococcus aureus
atttatcacctctcataaaaataattgaatgcatccaccagccttttttagaccttcttctaaactctctttatccaaagcgcaattaattctaataaaattaagtcagttaaatatcaattatttcgaaatatacatactacttgaaacaccatacataccccccaaaatgactactcagaggttatattctactaattatgattatattaaatatgaaaatattatcaaaaaatcaaatttataacaaaaatacaccccttaaagttaggtctttcaatccaacttttggggtgtatatcattctcatcatattctaggttgtttttaacaaactaaatatagtgaatgcaaatcaactattatttaaattatgaattattttaa

SEQ ID NO: 7504 - DNA, 387 bp, Staphylococcus aureus
ttaaaataattcataatttaaataatagttgatttgcattcactatatttagtttgttaaaaacaacctagaatatgatgagaatgatatacaccccaaaagttggattgaaagacctaactttaaggggtgtatttttgttataaatttgattttttgataatattttcatatttaatataatcataattagtagaatataacctctgagtagtcattttggggggtatgtatggtgtttcaagtagtatgtatatttcgaaataattgatatttaactgacttaattttattagaattaattgcgctttggataaagagagtttagaagaaggtctaaaaaaggctggtggatgcattcaattatttttatgagaggtgataaat

SEQ ID NO: 7505 - DNA, 304 bp, Staphylococcus aureus
ttgcatactcctttttccatattttccactttacttacagtgaatttacatgtaattttacaaatacaataggagttgcacaatggaatataacacttatctttataaaattattttatatattgacacacttaaaacaatctacaactaaaaatattatttttagttttcaatgaataattcattcttatctgttggaaaaacccatcaactcaatagcattgaatttctaaaataaaaaataccttaacgcatttaaaaatacatttaactgcaccaagatattaaaatctcgaaacatact

SEQ ID NO: 7506 - DNA, 304 bp, Staphylococcus aureus
agtatgtttcgagattttaatatcttggtgcagttaaatgtatttttaaatgcgttaaggtattttttattttagaaattcaatgctattgagttgatgggtttttccaacagataagaatgaattattcattgaaaactaaaaataatatttttagttgtagattgttttaagtgtgtcaatatataaaataattttataaagataagtgttatattccattgtgcaactcctattgtatttgtaaaattacatgtaaattcactgtaagtaaagtggaaaatatggaaaaaggagtatgcaa

SEQ ID NO: 7507 - DNA, 320 bp, Staphylococcus aureus
gtcttcatcccttacttttaattgtcacgtcaaataatatttgtctttaactagtaataactccaaatatatttagtttgtggtgctagctataaacacaaatgaatcataacactatattttgattttgttcaattgtttttgtttttggataataaatgaatttgtcatttgttattccgtgatttttagttatttatattttatatatattatatataaaaatatttaggttaacatgtcttcaaaagagattgcttttatattactttaaataatataaagtattgggacatcagaaaatagtaggagaatgtaag

SEQ ID NO: 7508 - DNA, 320 bp, Staphylococcus aureus
cttacattctcctactattttctgatgtcccaatactttatattatttaaagtaatataaaagcaatctcttttgaagacatgttaacctaaatatttttatatataatatatataaaatataaataactaaaaatcacggaataacaaatgacaaattcatttattatccaaaaacaaaaacaattgaacaaaatcaaaatatagtgttatgattcatttgtgtttatagctagcaccacaaactaaatatatttggagttattactagttaaagacaaatattatttgacgtgacaattaaaagtaagggatgaagac

SEQ ID NO: 7509 - DNA, 210 bp, Staphylococcus aureus
atttaaacagatttacctcttgataaaataaataagcaatcataatacttctcaatttagtataaataaaaatacataattaactttcttttgtttttatattatttcaataccctactatatatcacaacacataaattaagcatgacactcattcaatttagttcaccatttcgtgttccaattttattgagtatcatgcttttaata

SEQ ID NO: 7510 - DNA, 210 bp, Staphylococcus aureus
tattaaaagcatgatactcaataaaattggaacacgaaatggtgaactaaattgaatgagtgtcatgcttaatttatgtgttgtgatatatagtagggtattgaaataatataaaaacaaaagaaagttaattatgtatttttatttatactaaattgagaagtattatgattgcttatttattttatcaagaggtaaatctgtttaaat

SEQ ID NO: 7511 - DNA, 100 bp, Staphylococcus aureus
agttaatgtgctccttttcctaagtattaaatctatgtatcaacgtcattttaacactaattagaacgccttcatagtgtcattgagtatgtaattattg

SEQ ID NO: 7512 - DNA, 100 bp, Staphylococcus aureus
caataattacatactcaatgacactatgaaggcgttctaattagtgttaaaatgacgttgatacatagatttaatacttaggaaaaggagcacattaact

SEQ ID NO: 7513 - DNA, 102 bp, Staphylococcus aureus
aatatgaagaacctaattatttcttgggaaatttgatttaattttaaaaaaacaggtttacttcatataatttatgaaataaacccgtcaatttttgtttaa

SEQ ID NO: 7514 - DNA, 102 bp, Staphylococcus aureus
ttaaacaaaaattgacgggtttatttcataaattatatgaagtaaacctgtttttttaaaattaaatcaaatttcccaagaaataattaggttcttcatatt

SEQ ID NO: 7515 - DNA, 79 bp, Staphylococcus aureus
tgaaaaaaagcgagttaataaaaagttaagattgttgttaactttatgtataatgagttttttattatttataactcac

SEQ ID NO: 7516 - DNA, 79 bp, Staphylococcus aureus
gtgagttataaataataaaaaactcattatacataaagttaacaacaatcttaactttttattaactcgctttttttca

SEQ ID NO: 7517 - DNA, 397 bp, Staphylococcus aureus
aataatcgcctgtacaatgcatcattaacaagtcactgaaatgcctttcattgtattaataacgtcattataattttatatcgttcggtttttgttttattttaatgattatttatacagaaacagccgtatttcaagacgacattttaagtttaactaaatttgcatctagttaataattgcatttatcaaatttgtcttattgattcaatctaatttgtactaacaaactagttttaaattctaactttatctctcattttgtaatcaatcatcagacataaagcgcttcagcaatcagaaaacactctaattttctattagaaatttgatttaatctaaaaaaacaggtttacttcatataatttatgaaataaacccgtcaatttttgtttaa

SEQ ID NO: 7518 - DNA, 397 bp, Staphylococcus aureus
ttaaacaaaaattgacgggtttatttcataaattatatgaagtaaacctgtttttttagattaaatcaaatttctaatagaaaattagagtgttttctgattgctgaagcgctttatgtctgatgattgattacaaaatgagagataaagttagaatttaaaactagtttgttagtacaaattagattgaatcaataagacaaatttgataaatgcaattattaactagatgcaaatttagttaaacttaaaatgtcgtcttgaaatacggctgtttctgtataaataatcattaaaataaaacaaaaaccgaacgatataaaattataatgacgttattaatacaatgaaaggcatttcagtgacttgttaatgatgcattgtacaggcgattatt

SEQ ID NO: 7519 - DNA, 116 bp, Staphylococcus aureus
gacattcccctctttctcttttcaatagaatgtaacaccgtcgtcgcgcacgtattccagataatatatagtagtcatggcacaacaactttatctaagatgcttgagtgacgtat

SEQ ID NO: 7520 - DNA, 116 bp, Staphylococcus aureus
atacgtcactcaagcatcttagataaagttgttgtgccatgactactatatattatctggaatacgtgcgcgacgacggtgttacattctattgaaaagagaaagaggggaatgtc

SEQ ID NO: 7521 - DNA, 164 bp, Staphylococcus aureus
agattccacctcctacaatcaccatagttgatgacccgacgtcacgagcaagtacaatttccatatttttaagaaatttattatacttggcgtcttatttttatgatttcgtaccatgttgatttacaaaatcactcaaattaagcaacactcctactaaacgt

SEQ ID NO: 7522 - DNA, 164 bp, Staphylococcus aureus
acgtttagtaggagtgttgcttaatttgagtgattttgtaaatcaacatggtacgaaatcataaaaataagacgccaagtataataaatttcttaaaaatatggaaattgtacttgctcgtgacgtcgggtcatcaactatggtgattgtaggaggtggaatct

SEQ ID NO: 7523 - DNA, 230 bp, Staphylococcus aureus
ttttatactaacctccgatatataatcatctttattgtacctaacattttattaagataatactaatacactatcgaactttgggctgatactgaaacagcacaaagaaactcaaacaatccgaattatgtatcaaaaccttcaattacaggaagtaattttaaaatgatttaacgcaaaaaaacacctgttaccgttatataggtacaagtgcttaattgatagagatg

SEQ ID NO: 7524 - DNA, 230 bp, Staphylococcus aureus
catctctatcaattaagcacttgtacctatataacggtaacaggtgtttttttgcgttaaatcattttaaaattacttcctgtaattgaaggttttgatacataattcggattgtttgagtttctttgtgctgtttcagtatcagcccaaagttcgatagtgtattagtattatcttaataaaatgttaggtacaataaagatgattatatatcggaggttagtataaaa

SEQ ID NO: 7525 - DNA, 66 bp, Staphylococcus aureus
aattttttagactcccgtcataataacttcagacaaacgttagtctgacctgataaatattttatt

SEQ ID NO: 7526 - DNA, 66 bp, Staphylococcus aureus
aataaaatatttatcaggtcagactaacgtttgtctgaagttattatgacgggagtctaaaaaatt

SEQ ID NO: 7527 - DNA, 275 bp, Staphylococcus aureus
ttatctaaatttaaaaacttttaaagtccaattaaaattaatttctaatgttatttaacatcgttgaacctttggtcgcccacctttgggctagttaaaatttatatgtacttttacaagcgttacctgactaatgttttaaaactttatttctttacatatatcattttaataacttcccgttcatcttaaaccatatctgttttaaaaagtttcaatttcaacgtaaaaaagcaataagccccaacaatgtgaaagcttactgcttgtttaaa

SEQ ID NO: 7528 - DNA, 275 bp, Staphylococcus aureus
tttaaacaagcagtaagctttcacattgttggggcttattgcttttttacgttgaaattgaaactttttaaaacagatatggtttaagatgaacgggaagttattaaaatgatatatgtaaagaaataaagttttaaaacattagtcaggtaacgcttgtaaaagtacatataaattttaactagcccaaaggtgggcgaccaaaggttcaacgatgttaaataacattagaaattaattttaattggactttaaaagtttttaaatttagataa

SEQ ID NO: 7529 - DNA, 546 bp, Staphylococcus aureus
aactattcctacttccctaattaattttttaaaacttaccctgaaacgttaaaattttcggacatctggcatgtccacccctactttgtcacaaaattgtaccaaagttattttttataatattatcagacatggaaagcgtttacaatagaatctataaaaattttattaaattccgcttaacttttgctattaaaacgatataaaggaacttttagttacatagtagcctatcatttgttaattaaaaatactgcaatcctagtgttttaaaacgtatattgcaggctttcttacatattcgacattcattttaaattgcataaaactacattgctcattcattgtgcagcgcctgttatttagatgatcatttgttgacttttcgtacttatagcaagcaattttttgatttattgcttataatacattttaagacaaatgcttgtttcaacatcgcatacgacatcattcattattcatttgaatttatccagtttctatttgtctgcaattgctgaaaattaaaggagcttatttttaata

SEQ ID NO: 7530 - DNA, 546 bp, Staphylococcus aureus
tattaaaaataagctcctttaattttcagcaattgcagacaaatagaaactggataaattcaaatgaataatgaatgatgtcgtatgcgatgttgaaacaagcatttgtcttaaaatgtattataagcaataaatcaaaaaattgcttgctataagtacgaaaagtcaacaaatgatcatctaaataacaggcgctgcacaatgaatgagcaatgtagttttatgcaatttaaaatgaatgtcgaatatgtaagaaagcctgcaatatacgttttaaaacactaggattgcagtatttttaattaacaaatgataggctactatgtaactaaaagttcctttatatcgttttaatagcaaaagttaagcggaatttaataaaatttttatagattctattgtaaacgctttccatgtctgataatattataaaaaataactttggtacaattttgtgacaaagtaggggtggacatgccagatgtccgaaaattttaacgtttcagggtaagttttaaaaaattaattagggaagtaggaatagtt

SEQ ID NO: 7531 - DNA, 443 bp, Staphylococcus aureus
tattgttgttagtataaaggcatgaattttaaatttctatacacaaaaagcagtaaaatcattccatctattgaaatgattcactgcttttttaagtttatttggcatactttagctgaaagtcacctaaaatcctttacgttaagagatataatgaagtttcccatcaaagttcagttccctcagtatgtatacattccgcaaacttatctcacaaatccatctataatacaaactatcatcttaaataaacagaatttaccctgtcctccacacaaattgttttcgacactttaatgtgcctactatccaaaaaagttactcataacaaattgcgcattttaataaatgtagcaataccatttgcacgctacaaaaatactcgtgttcatatttatattttatattattaaagttttttaaatccatatttttataacact

SEQ ID NO: 7532 - DNA, 443 bp, Staphylococcus aureus
agtgttataaaaatatggatttaaaaaactttaataatataaaatataaatatgaacacgagtatttttgtagcgtgcaaatggtattgctacatttattaaaatgcgcaatttgttatgagtaacttttttggatagtaggcacattaaagtgtcgaaaacaatttgtgtggaggacagggtaaattctgtttatttaagatgatagtttgtattatagatggatttgtgagataagtttgcggaatgtatacatactgagggaactgaactttgatgggaaacttcattatatctcttaacgtaaaggattttaggtgactttcagctaaagtatgccaaataaacttaaaaaagcagtgaatcatttcaatagatggaatgattttactgctttttgtgtatagaaatttaaaattcatgcctttatactaacaacaata

SEQ ID NO: 7533 - DNA, 213 bp, Staphylococcus aureus
taacttaaagtattagatgaataaatacacacatattccatcgtaattcaaaatcattttcaaatcccttcacccaaataatggtgcggggatttttttatccaaattttggcaattccacattttacatatcgtaattttttaggaaactagtgaatataacaaattcctcctctcatttttaaaataaatatatcactttcccacttttac

SEQ ID NO: 7534 - DNA, 213 bp, Staphylococcus aureus
gtaaaagtgggaaagtgatatatttattttaaaaatgagaggaggaatttgttatattcactagtttcctaaaaaattacgatatgtaaaatgtggaattgccaaaatttggataaaaaaatccccgcaccattatttgggtgaagggatttgaaaatgattttgaattacgatggaatatgtgtgtatttattcatctaatactttaagtta

SEQ ID NO: 7535 - DNA, 58 bp, Staphylococcus aureus
tgtaagcgcatttattttataaactaacgtttgaaatatactacaggagtgacacgta

SEQ ID NO: 7536 - DNA, 58 bp, Staphylococcus aureus
tacgtgtcactcctgtagtatatttcaaacgttagtttataaaataaatgcgcttaca

SEQ ID NO: 7537 - DNA, 341 bp, Staphylococcus aureus
agacgacattttatgcatgtattgtatactgttgtattgatgcggtttacgcattggctacgcaaacgcgatgataaataggcgacctagctacaccgaaaaaaatcccctcactattgcgagtagtgaggggattggtgtatctatgctaattcctgttaactgtattataacaactttacagcaaaaaaatgcaaaatcaactaataaattaatgaaatgaccgacgccctcgcttctacttcaatttaacaaaatactatattagtactatatttttcattaacatgtatgttacattttctatattacttaaaattacgaagggacatttttaaatc

SEQ ID NO: 7538 - DNA, 341 bp, Staphylococcus aureus
gatttaaaaatgtcccttcgtaattttaagtaatatagaaaatgtaacatacatgttaatgaaaaatatagtactaatatagtattttgttaaattgaagtagaagcgagggcgtcggtcatttcattaatttattagttgattttgcatttttttgctgtaaagttgttataatacagttaacaggaattagcatagatacaccaatcccctcactactcgcaatagtgaggggatttttttcggtgtagctaggtcgcctatttatcatcgcgtttgcgtagccaatgcgtaaaccgcatcaatacaacagtatacaatacatgcataaaatgtcgtct

SEQ ID NO: 7539 - DNA, 104 bp, Staphylococcus aureus
aacatctatactattgtaaaatttattacagcacttcaaaatcaaaaaagcgggcagatgaaaagtaaaaatcttttccatctgtccgcttcttaatagaactg

SEQ ID NO: 7540 - DNA, 104 bp, Staphylococcus aureus
cagttctattaagaagcggacagatggaaaagatttttacttttcatctgcccgcttttttgattttgaagtgctgtaataaattttacaatagtatagatgtt

SEQ ID NO: 7541 - DNA, 77 bp, Staphylococcus aureus
tttatataccctctttatatttttagtgtatttatctcgaaatcgagatattttaatgtaaatttttagtgcacgcc

SEQ ID NO: 7542 - DNA, 77 bp, Staphylococcus aureus
ggcgtgcactaaaaatttacattaaaatatctcgatttcgagataaatacactaaaaatataaagagggtatataaa

SEQ ID NO: 7543 - DNA, 225 bp, Staphylococcus aureus
atcatcaccaactttttaatttatttcgatttcgagataaattatatagctgaatggatttaatgtcaagatacgtgttttcatctttatttcaaattgcgcttaataaaaacgactacataaatgcggcaatgtcgtcacatgactgtcatgcaccttttacttcgtttaagttaaaatagaatagggaaatattataatcaaacatgataggagttgatatgt

SEQ ID NO: 7544 - DNA, 225 bp, Staphylococcus aureus
acatatcaactcctatcatgtttgattataatatttccctattctattttaacttaaacgaagtaaaaggtgcatgacagtcatgtgacgacattgccgcatttatgtagtcgtttttattaagcgcaatttgaaataaagatgaaaacacgtatcttgacattaaatccattcagctatataatttatctcgaaatcgaaataaattaaaaagttggtgatgat

SEQ ID NO: 7545 - DNA, 170 bp, Staphylococcus aureus
ataaattttgcgatggtgcaactgtaccatcgcttttttgttcgcatcaatataaaattgcaaaacgactagttattttgcatttcaaactttatgctatcaattcattttcttttctggtatactttttatactaacttatagaaaaatagaaaacgaggcgatgcata

SEQ ID NO: 7546 - DNA, 170 bp, Staphylococcus aureus
tatgcatcgcctcgttttctatttttctataagttagtataaaaagtataccagaaaagaaaatgaattgatagcataaagtttgaaatgcaaaataactagtcgttttgcaattttatattgatgcgaacaaaaaagcgatggtacagttgcaccatcgcaaaatttat

SEQ ID NO: 7547 - DNA, 120 bp, Staphylococcus aureus
tcatccatactttattaatacaattttttcacgcaaaaacctgcgattcatttatgtaatcgcaggctttttttattgctaactttttaattttatatatttagacatactgtattctat

SEQ ID NO: 7548 - DNA, 120 bp, Staphylococcus aureus
atagaatacagtatgtctaaatatataaaattaaaaagttagcaataaaaaaagcctgcgattacataaatgaatcgcaggtttttgcgtgaaaaaattgtattaataaagtatggatga

SEQ ID NO: 7549 - DNA, 155 bp, Staphylococcus aureus
gttttaaaaagactaaagtaatccgtttgcaattcgctataacttgtgcacatgttataagttttctgcaataaaacacacttttgaattttggaaaatttagtgttataatatatttgtgatatttttcacaattaaattgtggcgtgatttta

SEQ ID NO: 7550 - DNA, 155 bp, Staphylococcus aureus
taaaatcacgccacaatttaattgtgaaaaatatcacaaatatattataacactaaattttccaaaattcaaaagtgtgttttattgcagaaaacttataacatgtgcacaagttatagcgaattgcaaacggattactttagtctttttaaaac

SEQ ID NO: 7551 - DNA, 246 bp, Staphylococcus aureus
tatatatttaaaagcaaaggcgcaccatgtgcctttgctttttattttgtttatctgtatcaaaatcggtttgattaaaatctgctttattttatcatctattcaactgattgtagtgcgcttattttactatggcattattgcctaacctgtttgagatatattaatgtttgatgattcgtattcaaagttttcatttaacatgtatttagtatcatgatagccgcttcattgatgatgtgctac

SEQ ID NO: 7552 - DNA, 246 bp, Staphylococcus aureus
gtagcacatcatcaatgaagcggctatcatgatactaaatacatgttaaatgaaaactttgaatacgaatcatcaaacattaatatatctcaaacaggttaggcaataatgccatagtaaaataagcgcactacaatcagttgaatagatgataaaataaagcagattttaatcaaaccgattttgatacagataaacaaaataaaaagcaaaggcacatggtgcgcctttgcttttaaatatata

SEQ ID NO: 7553 - DNA, 247 bp, Staphylococcus aureus
accacaatgaaactatattcacattttgaaattgctttcatatatgcaaaacacattacactggatatagcattcggaggcgaacataaatttcagaatattgtaaaaatataacgatatatttatcatttggacaaaatatagtgtgatatactaatttataacatctatacataatgtgaaaaaatttttaaaatacaattaaatatcggtgtaataaatccctttatacataggagttgtatac

SEQ ID NO: 7554 - DNA, 247 bp, Staphylococcus aureus
gtatacaactcctatgtataaagggatttattacaccgatatttaattgtattttaaaaattttttcacattatgtatagatgttataaattagtatatcacactatattttgtccaaatgataaatatatcgttatatttttacaatattctgaaatttatgttcgcctccgaatgctatatccagtgtaatgtgttttgcatatatgaaagcaatttcaaaatgtgaatatagtttcattgtggt

SEQ ID NO: 7555 - DNA, 161 bp, Staphylococcus aureus
tacataaaaaagagcggcatccattgtcgctcctttttattatgtatttttacaatctccaccaatgacacgtcgtcattggtgcctcacaccaaacaaaaaaacagtctcgcaatcaagactgttttccactcaatatattcatccattagcgtaatgga

SEQ ID NO: 7556 - DNA, 161 bp, Staphylococcus aureus
tccattacgctaatggatgaatatattgagtggaaaacagtcttgattgcgagactgtttttttgtttggtgtgaggcaccaatgacgacgtgtcattggtggagattgtaaaaatacataataaaaaggagcgacaatggatgccgctcttttttatgta

SEQ ID NO: 7557 - DNA, 114 bp, Staphylococcus aureus
agcaattcattttatattataaaatttgcacatatattgtcacgttagatttcattacacatatttgcattcaaataacgaaacgtttttaataattactaagggggaattatt

SEQ ID NO: 7558 - DNA, 114 bp, Staphylococcus aureus
aataattcccccttagtaattattaaaaacgtttcgttatttgaatgcaaatatgtgtaatgaaatctaacgtgacaatatatgtgcaaattttataatataaaatgaattgct

SEQ ID NO: 7559 - DNA, 147 bp, Staphylococcus aureus
tagtgtttaaatcacataatataaacaagacaaccatgttaattcacttaacataacatgctaacatataaaactataaacctcttagggacaatttacatcgtcccttttttcatttcaaatactatccccatagctttgatttaa

SEQ ID NO: 7560 - DNA, 147 bp, Staphylococcus aureus
ttaaatcaaagctatggggatagtatttgaaatgaaaaaagggacgatgtaaattgtccctaagaggtttatagttttatatgttagcatgttatgttaagtgaattaacatggttgtcttgtttatattatgtgatttaaacacta

SEQ ID NO: 7561 - DNA, 71 bp, Staphylococcus aureus
atcatcactccttttaagttattttagatatacgggggcgcttttgcaatcactattttgattagcatgta

SEQ ID NO: 7562 - DNA, 71 bp, Staphylococcus aureus
tacatgctaatcaaaatagtgattgcaaaagcgcccccgtatatctaaaataacttaaaaggagtgatgat

SEQ ID NO: 7563 - DNA, 549 bp, Staphylococcus aureus
ttcccaaaaacctctctctatgtttattttattttcagaccataaacatcgtacacccttaagaaaacgttttcaacttttatctgttatcaaatcaaatatttaagtgaaatatttcatatttgtgaaagatttttaaaatggattgtttcaaaaactacttatgttgtcattaatatttactaattaactttttactctatatttcaaacagttgtgtgacagttttttgataacttttttacatctgaaagtgagtaatatttctaaaaatctttaatatttatacactttatctttcgagctatttattttttgtttttgtgctgtgtttataaaaccgcacactatattcaaaaataacttattacacatatatttgcaataagataattaaagtaggatattatttttagttttctgataggaatgatgatagtctataggttgaatctttactttttttaaagctaaatttacatcaacttaacaatggctggttatactgaagatgaaaatatttagtataacttagtggaggcgataaag

SEQ ID NO: 7564 - DNA, 549 bp, Staphylococcus aureus
ctttatcgcctccactaagttatactaaatattttcatcttcagtataaccagccattgttaagttgatgtaaatttagctttaaaaaaagtaaagattcaacctatagactatcatcattcctatcagaaaactaaaaataatatcctactttaattatcttattgcaaatatatgtgtaataagttatttttgaatatagtgtgcggttttataaacacagcacaaaaacaaaaaataaatagctcgaaagataaagtgtataaatattaaagatttttagaaatattactcactttcagatgtaaaaaagttatcaaaaaactgtcacacaactgtttgaaatatagagtaaaaagttaattagtaaatattaatgacaacataagtagtttttgaaacaatccattttaaaaatctttcacaaatatgaaatatttcacttaaatatttgatttgataacagataaaagttgaaaacgttttcttaagggtgtacgatgtttatggtctgaaaataaaataaacatagagagaggtttttgggaa

SEQ ID NO: 7565 - DNA, 146 bp, Staphylococcus aureus
tttatcctctgtgtttcaacattcatttcccatatcgattcatttatctatcatctagaccactacatcttagatgatttttttattttctcatttcactctttcttaaaagtcgatataatgaattaaatcattatcatacaccg

SEQ ID NO: 7566 - DNA, 146 bp, Staphylococcus aureus
cggtgtatgataatgatttaattcattatatcgacttttaagaaagagtgaaatgagaaaataaaaaaatcatctaagatgtagtggtctagatgatagataaatgaatcgatatgggaaatgaatgttgaaacacagaggataaa

SEQ ID NO: 7567 - DNA, 80 bp, Staphylococcus aureus
gaaaactctgataatcactttagcaagtaactatttttaacaacgtagctaccttgtatgtgatatcagagttttttatt

SEQ ID NO: 7568 - DNA, 80 bp, Staphylococcus aureus
aataaaaaactctgatatcacatacaaggtagctacgttgttaaaaatagttacttgctaaagtgattatcagagttttc

SEQ ID NO: 7569 - DNA, 120 bp, Staphylococcus aureus
ttgtcgtcactcctctttgatgatttctactatagttctactgtaccatgctgattcttattactaccaatatttactgggaaataagttatgatgtctacataatcttagcaatgctaa

SEQ ID NO: 7570 - DNA, 120 bp, Staphylococcus aureus
ttagcattgctaagattatgtagacatcataacttatttcccagtaaatattggtagtaataagaatcagcatggtacagtagaactatagtagaaatcatcaaagaggagtgacgacaa

SEQ ID NO: 7571 - DNA, 65 bp, Staphylococcus aureus
aatgacaaatctccttatcttacaaatagatttaaaatcatgttaatttatttttattactttca

SEQ ID NO: 7572 - DNA, 65 bp, Staphylococcus aureus
tgaaagtaataaaaataaattaacatgattttaaatctatttgtaagataaggagatttgtcatt

SEQ ID NO: 7573 - DNA, 149 bp, Staphylococcus aureus
tgacaaaaacataagcaatgttttctatatctaacactaatatttaacttattatcatcaacacacctgctatacatcattgcgcactaaaaaggcagtagcttcattttaagctactgccttttgtaacgtattctctttcaactcgc

SEQ ID NO: 7574 - DNA, 149 bp, Staphylococcus aureus
gcgagttgaaagagaatacgttacaaaaggcagtagcttaaaatgaagctactgcctttttagtgcgcaatgatgtatagcaggtgtgttgatgataataagttaaatattagtgttagatatagaaaacattgcttatgtttttgtca

SEQ ID NO: 7575 - DNA, 92 bp, Staphylococcus aureus
gtgatatgtaattcatagctattatacatatttgtaaaagcgttttcaacaactttttcacaattttatcatcaattcagtacgatcatttg

SEQ ID NO: 7576 - DNA, 92 bp, Staphylococcus aureus
caaatgatcgtactgaattgatgataaaattgtgaaaaagttgttgaaaacgcttttacaaatatgtataatagctatgaattacatatcac

SEQ ID NO: 7577 - DNA, 50 bp, Staphylococcus aureus
tattactaatagcctccctttcttagtgtctatcattttaaatatctaaa

SEQ ID NO: 7578 - DNA, 50 bp, Staphylococcus aureus
tttagatatttaaaatgatagacactaagaaagggaggctattagtaata

SEQ ID NO: 7579 - DNA, 212 bp, Staphylococcus aureus
ggcgccatccctttctaaatatgtctaaaatgttacaataactattataaagatggcgtgcacaatataaaaatactctttttttatagtttgtattactattttctatggaaacgctctctcaatttcacttcattttcacaaaaaaacactcatcatttcaatgacccacgtaatgatgcgccttaaataatgagtgctttattaatatg

SEQ ID NO: 7580 - DNA, 212 bp, Staphylococcus aureus
catattaataaagcactcattatttaaggcgcatcattacgtgggtcattgaaatgatgagtgtttttttgtgaaaatgaagtgaaattgagagagcgtttccatagaaaatagtaatacaaactataaaaaaagagtatttttatattgtgcacgccatctttataatagttattgtaacattttagacatatttagaaagggatggcgcc

SEQ ID NO: 7581 - DNA, 157 bp, Staphylococcus aureus
cctaactatttcaacacgtttatttcattatacacaacttcttaaacattcaataaatttagatttataaaattgctttataaaaagttttatgtaaaatacacattcttttatggtattatattaatggctcaagtttgttattcgaggtgaggta

SEQ ID NO: 7582 - DNA, 157 bp, Staphylococcus aureus
tacctcacctcgaataacaaacttgagccattaatataataccataaaagaatgtgtattttacataaaactttttataaagcaattttataaatctaaatttattgaatgtttaagaagttgtgtataatgaaataaacgtgttgaaatagttagg

SEQ ID NO: 7583 - DNA, 389 bp, Staphylococcus aureus
tacatgaatacatggagtcacatcatctcatgttagcgctctgattgcagggcgctatttttaatgttatcgctacatttagtatattgtgattgctattttctttcagttatagaaccacgtaccttttcttttaaatcattttatattttcccactaatatccgctgttaatcaattctgacatccttgtatcactatgacaattaattgttaaatacatgaatttctacattttatgaaaaaatccatttttattacaattcaacactttatatgacaacttcattacagttacttttattgttgattgcttgcattgttttctaaaaaaattttgttatcataattaacgttgaataaagaaaaaaattaacttgggagataaaa

SEQ ID NO: 7584 - DNA, 389 bp, Staphylococcus aureus
ttttatctcccaagttaatttttttctttattcaacgttaattatgataacaaaatttttttagaaaacaatgcaagcaatcaacaataaaagtaactgtaatgaagttgtcatataaagtgttgaattgtaataaaaatggattttttcataaaatgtagaaattcatgtatttaacaattaattgtcatagtgatacaaggatgtcagaattgattaacagcggatattagtgggaaaatataaaatgatttaaaagaaaaggtacgtggttctataactgaaagaaaatagcaatcacaatatactaaatgtagcgataacattaaaaatagcgccctgcaatcagagcgctaacatgagatgatgtgactccatgtattcatgta

SEQ ID NO: 7585 - DNA, 138 bp, Staphylococcus aureus
tcaaaaaacttctatcacgaacgcttcaatttcctgtatgcgtgtgatagaagtttttattttttgttcatattaatttatctaagcgctacgatggactgacttaaacttttctttaaaatcgctattcgccattta

SEQ ID NO: 7586 - DNA, 138 bp, Staphylococcus aureus
taaatggcgaatagcgattttaaagaaaagtttaagtcagtccatcgtagcgcttagataaattaatatgaacaaaaaataaaaacttctatcacacgcatacaggaaattgaagcgttcgtgatagaagttttttga

SEQ ID NO: 7587 - DNA, 254 bp, Staphylococcus aureus
ggacatactccttttacttcacataattttttaacatttcaatcactactatttttaccataaaataacgttattcgtcttaaaattcaattgaataattattgttttaactataaaataaagcaaggtaaattaaaacgcttacaagaaacgtcaaatcatttttaaatttagtgtatttctttgtataagataagcatattctgatatgatacaagtgttgcttttataaatttgaaaggatgtaaaacctt

SEQ ID NO: 7588 - DNA, 254 bp, Staphylococcus aureus
aaggttttacatcctttcaaatttataaaagcaacacttgtatcatatcagaatatgcttatcttatacaaagaaatacactaaatttaaaaatgatttgacgtttcttgtaagcgttttaatttaccttgctttattttatagttaaaacaataattattcaattgaattttaagacgaataacgttattttatggtaaaaatagtagtgattgaaatgttaaaaaattatgtgaagtaaaaggagtatgtcc

SEQ ID NO: 7589 - DNA, 164 bp, Staphylococcus aureus
tctgtgtatttgaaagacatttaaatataacctaaaaacagcagtaagacagcttctcattgaaatcgtcttactgctgttctctatttataacacttcgtattgaatgaattcattatgcctatttgacacattattgaaatttttaatataccccttatacg

SEQ ID NO: 7590 - DNA, 164 bp, Staphylococcus aureus
cgtataaggggtatattaaaaatttcaataatgtgtcaaataggcataatgaattcattcaatacgaagtgttataaatagagaacagcagtaagacgatttcaatgagaagctgtcttactgctgtttttaggttatatttaaatgtctttcaaatacacaga

SEQ ID NO: 7591 - DNA, 408 bp, Staphylococcus aureus
aaaaattccccctttttctaatcatacgccttaattgttaaattagaaaatattcatgttcacattttttaaaaataaataagtcgtcaattacgtatataaacacgtaataccagctatccctttgctgcaatatacagttacataacttactacacgtgctaacctattactttgtaaaccaaatcttaaattaaaatattgaaaatgcaatggatccttaatattttattaaacctataattacttattaaaaataacacacaatattcataaagttttaaaaatattctgttttatcacctattattagtggaaaagtacaattgcaattgtatatagtttgcataacgcttcaaaagtaatttcttttttgtttagttcaaaaaaatttagaggtgatgttat

SEQ ID NO: 7592 - DNA, 408 bp, Staphylococcus aureus
ataacatcacctctaaatttttttgaactaaacaaaaaagaaattacttttgaagcgttatgcaaactatatacaattgcaattgtacttttccactaataataggtgataaaacagaatatttttaaaactttatgaatattgtgtgttatttttaataagtaattataggtttaataaaatattaaggatccattgcattttcaatattttaatttaagatttggtttacaaagtaataggttagcacgtgtagtaagttatgtaactgtatattgcagcaaagggatagctggtattacgtgtttatatacgtaattgacgacttatttatttttaaaaaatgtgaacatgaatattttctaatttaacaattaaggcgtatgattagaaaaagggggaattttt

SEQ ID NO: 7593 - DNA, 68 bp, Staphylococcus aureus
cgacactttaacatatcgcgcatcaaaaatgagcatcaggtcgcccttgcctgtgctcatttttttaa

SEQ ID NO: 7594 - DNA, 68 bp, Staphylococcus aureus
ttaaaaaaatgagcacaggcaagggcgacctgatgctcatttttgatgcgcgatatgttaaagtgtcg

SEQ ID NO: 7595 - DNA, 144 bp, Staphylococcus aureus
agtatattgcctccttttaaaatcaacgttatagtttaaatatacagtgtagattattgttcgattatagtatctatccccgacctcttaaagaatcaattggaaaattttgtatattaaactacacacaaaggagaaatgtag

SEQ ID NO: 7596 - DNA, 144 bp, Staphylococcus aureus
ctacatttctcctttgtgtgtagtttaatatacaaaattttccaattgattctttaagaggtcggggatagatactataatcgaacaataatctacactgtatatttaaactataacgttgattttaaaaggaggcaatatact

SEQ ID NO: 7597 - DNA, 95 bp, Staphylococcus aureus
tagatgagaaactcatgagcgttaccaacattcataataaaaacgatagtgtacacgttaatgaattcgtgtactactatcgttttttattttta

SEQ ID NO: 7598 - DNA, 95 bp, Staphylococcus aureus
taaaaataaaaaacgatagtagtacacgaattcattaacgtgtacactatcgtttttattatgaatgttggtaacgctcatgagtttctcatcta

SEQ ID NO: 7599 - DNA, 111 bp, Staphylococcus aureus
attcttatacctataatccttttctaaaaatatggttgctattacttaatttttaaagttataaataaaaagagccaaccgcaatggatggcccttgttcattatgaagca

SEQ ID NO: 7600 - DNA, 111 bp, Staphylococcus aureus
tgcttcataatgaacaagggccatccattgcggttggctctttttatttataactttaaaaattaagtaatagcaaccatatttttagaaaaggattataggtataagaat

SEQ ID NO: 7601 - DNA, 61 bp, Staphylococcus aureus
ttattctcaagtattttgaaattgattggttactttttaaaatttatatgggtcgcaactg

SEQ ID NO: 7602 - DNA, 61 bp, Staphylococcus aureus
cagttgcgacccatataaattttaaaaagtaaccaatcaatttcaaaatacttgagaataa

SEQ ID NO: 7603 - DNA, 238 bp, Staphylococcus aureus
tacacctttcaactcctaataacttatttacttgtttaaaagttaatcaaataaacattcgcctatgcaactaatacgctataacattatgaaatcatgaccttatcacccttatctatacaattctcgcatcaaatactgctaaagtagtagataaattcaatactacagacgcattcattttttaatctattaacgtacaatgtgagtaagagaaatataaaggagtatgatagcg

SEQ ID NO: 7604 - DNA, 238 bp, Staphylococcus aureus
cgctatcatactcctttatatttctcttactcacattgtacgttaatagattaaaaaatgaatgcgtctgtagtattgaatttatctactactttagcagtatttgatgcgagaattgtatagataagggtgataaggtcatgatttcataatgttatagcgtattagttgcataggcgaatgtttatttgattaacttttaaacaagtaaataagttattaggagttgaaaggtgta

SEQ ID NO: 7605 - DNA, 239 bp, Staphylococcus aureus
gtcacctaagaattgcaaatccagaagtcatttaagttttacctttcattcatacatcctttaatattaattacgacttcttttatatagatgctaaatagagagattgttgtgcaatgtttgcacggcaatctctctttttctttttaaaattggtaaaagtaaaacgcaacgattgacttatatacctagagggggtacattagacgtgtaacaatgaatcacagggaggcaataat

SEQ ID NO: 7606 - DNA, 239 bp, Staphylococcus aureus
attattgcctccctgtgattcattgttacacgtctaatgtaccccctctaggtatataagtcaatcgttgcgttttacttttaccaattttaaaaagaaaaagagagattgccgtgcaaacattgcacaacaatctctctatttagcatctatataaaagaagtcgtaattaatattaaaggatgtatgaatgaaaggtaaaacttaaatgacttctggatttgcaattcttaggtgac

SEQ ID NO: 7607 - DNA, 364 bp, Staphylococcus aureus
attccttaataatgaaggattcgttggtgattctgagataggctagtgattggctctataatgtcgcggtttacagttgggtcttcgctccaactgcatatatagttacacttttcgcttagcgaattagtgtatcttacctaatagcttcgcctattaggttccatcattattataaataataagtacactacggtttacagttggatcttcgctcctactgcatatatagttacacttttcgcttggcgaattagtgtatcttacctaatagctccgcctattaggttccatcattattataaataataagtacactatggtttacagttggatcttcgctccaactgcataagagcctgag

SEQ ID NO: 7608 - DNA, 364 bp, Staphylococcus aureus
ctcaggctcttatgcagttggagcgaagatccaactgtaaaccatagtgtacttattatttataataatgatggaacctaataggcggagctattaggtaagatacactaattcgccaagcgaaaagtgtaactatatatgcagtaggagcgaagatccaactgtaaaccgtagtgtacttattatttataataatgatggaacctaataggcgaagctattaggtaagatacactaattcgctaagcgaaaagtgtaactatatatgcagttggagcgaagacccaactgtaaaccgcgacattatagagccaatcactagcctatctcagaatcaccaacgaatccttcattattaaggaat

SEQ ID NO: 7609 - DNA, 90 bp, Staphylococcus aureus
ttaggcaatattcaacgtcatcaacaccaaattaaaaaaatcgaactgatgagaatcccaacaatccaaattatctcatcagttcgattt

SEQ ID NO: 7610 - DNA, 90 bp, Staphylococcus aureus
aaatcgaactgatgagataatttggattgttgggattctcatcagttcgatttttttaatttggtgttgatgacgttgaatattgcctaa

SEQ ID NO: 7611 - DNA, 305 bp, Staphylococcus aureus
tgacacacgttgtattgaatgaatttattttcattttaggtaggtacattattattgtcaatattaggaattttcagattaatatgcactcaatcgttatgatttaactgtcatgcatatccgcatgcgcaaccagttagatatgcttatataaagtataacgcccctcaaggtacgtattcaaacgtgaaccttaacaggcgcctattcattgttaaataaaacttctttagaacatacttatttcactatgccttttactttccccttatacttttctcacatctttctcttagactactccc

SEQ ID NO: 7612 - DNA, 305 bp, Staphylococcus aureus
gggagtagtctaagagaaagatgtgagaaaagtataaggggaaagtaaaaggcatagtgaaataagtatgttctaaagaagttttatttaacaatgaataggcgcctgttaaggttcacgtttgaatacgtaccttgaggggcgttatactttatataagcatatctaactggttgcgcatgcggatatgcatgacagttaaatcataacgattgagtgcatattaatctgaaaattcctaatattgacaataataatgtacctacctaaaatgaaaataaattcattcaatacaacgtgtgtca

SEQ ID NO: 7613 - DNA, 165 bp, Staphylococcus aureus
ctaaattgaatcactctcaatcatactgacatagtataaattatcactttattacttagttccctaaagatcagtgaataaaccgctctcatttatatttatataaaacaaaaacgccaatactctcatgttagagaatattgacgtcatttgatttacatttga

SEQ ID NO: 7614 - DNA, 165 bp, Staphylococcus aureus
tcaaatgtaaatcaaatgacgtcaatattctctaacatgagagtattggcgtttttgttttatataaatataaatgagagcggtttattcactgatctttagggaactaagtaataaagtgataatttatactatgtcagtatgattgagagtgattcaatttag

SEQ ID NO: 7615 - DNA, 360 bp, Staphylococcus aureus
aattaaatatcctcccaataatcaaaacactctatacatatagtcattagcgactcaattattttaaattttatattttttatttttttagtatgcaaataattataacttttatagttttgcgacaaaacaaactataacagagattaggtgtcttgcgggctttgttatcataatgtaatctgttcctaataaagcttcattgaatgtaatataccaattagaatgtttacaacactttttctgcaccgttaacatgggatttgaaaataaaaaagcactaaacttttaatgaaatacatcatttttgataataaatatcagaagtaatgtaatatttcaaaagtttagtgcatcaag

SEQ ID NO: 7616 - DNA, 360 bp, Staphylococcus aureus
cttgatgcactaaacttttgaaatattacattacttctgatatttattatcaaaaatgatgtatttcattaaaagtttagtgcttttttattttcaaatcccatgttaacggtgcagaaaaagtgttgtaaacattctaattggtatattacattcaatgaagctttattaggaacagattacattatgataacaaagcccgcaagacacctaatctctgttatagtttgttttgtcgcaaaactataaaagttataattatttgcatactaaaaaaataaaaaatataaaatttaaaataattgagtcgctaatgactatatgtatagagtgttttgattattgggaggatatttaatt

SEQ ID NO: 7617 - DNA, 512 bp, Staphylococcus aureus
gttaataaacgccccatttatttttctctattttgtagcatatcacaatatttttgaaaataaaatattgcactgattttcattaattgatttaacccttaattaagatagttttaaattttttattaagtagaaaacaattattacagttaatttcattactgcaaaccacatataaatttgtcgattttactacataacatagattatcatagattcttgaatttttagcaaaataactgttattttcattatatttttacaaaaaaaggttcgttttatattttatgcatcttactgtaacagaatcattaagatatgctattcgaatttactttttcaaaatttctataatgaataaattaccatgtattgaaaataaagcgaaatgcagcctatcctctaatttaaaccaagcgatatatcacgtcagcctttatatttaaacgctatgtgtcacttttaaaatgaatattactaagattgtcataccaattattcattgcatcgaa

SEQ ID NO: 7618 - DNA, 512 bp, Staphylococcus aureus
ttcgatgcaatgaataattggtatgacaatcttagtaatattcattttaaaagtgacacatagcgtttaaatataaaggctgacgtgatatatcgcttggtttaaattagaggataggctgcatttcgctttattttcaatacatggtaatttattcattatagaaattttgaaaaagtaaattcgaatagcatatcttaatgattctgttacagtaagatgcataaaatataaaacgaacctttttttgtaaaaatataatgaaaataacagttattttgctaaaaattcaagaatctatgataatctatgttatgtagtaaaatcgacaaatttatatgtggtttgcagtaatgaaattaactgtaataattgttttctacttaataaaaaatttaaaactatcttaattaagggttaaatcaattaatgaaaatcagtgcaatattttattttcaaaaatattgtgatatgctacaaaatagagaaaaataaatggggcgtttattaac

SEQ ID NO: 7619 - DNA, 275 bp, Staphylococcus aureus
ttttatctcctttttcatttaatttaatcataaaatgcgcgtttagtttgtatctagtgtactcagtacagcctcaaatgaagttttattccacttggcacttaataaagacaagtattttagcagtaatacaataaagtccaataaatttccctaacttcaatatccactttttaagaaatgtatttttaattaataaaaaaactctccccaatttctatgggaagagctatatatttaatgtctaaacattacttttatttattatgaaggaa

SEQ ID NO: 7620 - DNA, 275 bp, Staphylococcus aureus
ttccttcataataaataaaagtaatgtttagacattaaatatatagctcttcccatagaaattggggagagtttttttattaattaaaaatacatttcttaaaaagtggatattgaagttagggaaatttattggactttattgtattactgctaaaatacttgtctttattaagtgccaagtggaataaaacttcatttgaggctgtactgagtacactagatacaaactaaacgcgcattttatgattaaattaaatgaaaaaggagataaaa

SEQ ID NO: 7621 - DNA, 607 bp, Staphylococcus aureus
agtaaaaaatcctccagtaataattgtaagtttatgtttttagtaattatattttgaatttgaatgtcgtagtgcaagtttaaattgtcttttatttctttcaacggtactcactatatcacaaaaaaccagccagtaaattacactttctttacaaaacattacaatatcaagtgttatttgtaatgttgaaatatggctgttttatactgtaatgtgaaatatgtgccctttagaatccaatcaacccttgaaatagtctttaacacataagatttttactatatttagctcaactattacagctttcgtaatattacagattgtatttttgttacatagctgtaatatatctgacatgtaacttctcttattttcgtacattaaacgcaattaaaaagcaatcaacacatatgtttctgcacatgtattgattgctattattgttgtatattcaaagttttaaaacacacatcttttgtgaattatcttatcttttataagcacaaataaactgcaactcaattatattgctaaactttattctcgcaattcacaataacattaaataatttttggtctaatattttcaaaaaacatactgtcc

SEQ ID NO: 7622 - DNA, 607 bp, Staphylococcus aureus
ggacagtatgttttttgaaaatattagaccaaaaattatttaatgttattgtgaattgcgagaataaagtttagcaatataattgagttgcagtttatttgtgcttataaaagataagataattcacaaaagatgtgtgttttaaaactttgaatatacaacaataatagcaatcaatacatgtgcagaaacatatgtgttgattgctttttaattgcgtttaatgtacgaaaataagagaagttacatgtcagatatattacagctatgtaacaaaaatacaatctgtaatattacgaaagctgtaatagttgagctaaatatagtaaaaatcttatgtgttaaagactatttcaagggttgattggattctaaagggcacatatttcacattacagtataaaacagccatatttcaacattacaaataacacttgatattgtaatgttttgtaaagaaagtgtaatttactggctggttttttgtgatatagtgagtaccgttgaaagaaataaaagacaatttaaacttgcactacgacattcaaattcaaaatataattactaaaaacataaacttacaattattactggaggattttttact

SEQ ID NO: 7623 - DNA, 50 bp, Staphylococcus aureus
gccgatgttgttatatttaggctagcagtatcatctataactcaagacta

SEQ ID NO: 7624 - DNA, 50 bp, Staphylococcus aureus
tagtcttgagttatagatgatactgctagcctaaatataacaacatcggc

SEQ ID NO: 7625 - DNA, 63 bp, Staphylococcus aureus
tgacaatataatagaagatactgataataagtgttaaaacaacagatgttaggtagtgaacaa

SEQ ID NO: 7626 - DNA, 63 bp, Staphylococcus aureus
ttgttcactacctaacatctgttgttttaacacttattatcagtatcttctattatattgtca

SEQ ID NO: 7627 - DNA, 106 bp, Staphylococcus aureus
taaaacttggtatttagtcatgcatcttgaaatcactatgtgacttaggttcatacttgtacacacaataaaatttaacatattacgattgattagccgtgtctag

SEQ ID NO: 7628 - DNA, 106 bp, Staphylococcus aureus
ctagacacggctaatcaatcgtaatatgttaaattttattgtgtgtacaagtatgaacctaagtcacatagtgatttcaagatgcatgactaaataccaagtttta

SEQ ID NO: 7629 - DNA, 219 bp, Staphylococcus aureus
aacaacattgcagacatgtatatcaaacgacacttcaataacatcactttgccatcgtactactattaaaatcgtgtctcaaaccccttattttaattccaaaaatctgctggtcaaaagaccgagaaactaaaaacattactggatgtgttgataaattatcttatagaaataaactcaaaatatatcaacacttgattctaaggaggatatgacaat

SEQ ID NO: 7630 - DNA, 219 bp, Staphylococcus aureus
attgtcatatcctccttagaatcaagtgttgatatattttgagtttatttctataagataatttatcaacacatccagtaatgtttttagtttctcggtcttttgaccagcagatttttggaattaaaataaggggtttgagacacgattttaatagtagtacgatggcaaagtgatgttattgaagtgtcgtttgatatacatgtctgcaatgttgtt

SEQ ID NO: 7631 - DNA, 72 bp, Staphylococcus aureus
tatttgctcacgaggtattgcacttaaggtgccaactgacctcataaacaaagcccatactgattgaagaca

SEQ ID NO: 7632 - DNA, 72 bp, Staphylococcus aureus
tgtcttcaatcagtatgggctttgtttatgaggtcagttggcaccttaagtgcaatacctcgtgagcaaata

SEQ ID NO: 7633 - DNA, 70 bp, Staphylococcus aureus
ttctgtcccactcccacattaaacttcatctctgtatgggctttttatttattcttttgagaatttcatt

SEQ ID NO: 7634 - DNA, 70 bp, Staphylococcus aureus
aatgaaattctcaaaagaataaataaaaagcccatacagagatgaagtttaatgtgggagtgggacagaa

SEQ ID NO: 7635 - DNA, 130 bp, Staphylococcus aureus
tatcaacactcttttcttttatgatatttaatagttattgcaaattcattgctaactttcttaacacgttttataataaacggatagttatccgtttgtcaattttagagaattttaagtaggtgtaatc

SEQ ID NO: 7636 - DNA, 130 bp, Staphylococcus aureus
gattacacctacttaaaattctctaaaattgacaaacggataactatccgtttattataaaacgtgttaagaaagttagcaatgaatttgcaataactattaaatatcataaaagaaaagagtgttgata

SEQ ID NO: 7637 - DNA, 146 bp, Staphylococcus aureus
ttgatcgttctctaataaaacagcttggacagttttcaaattatatttgatggctgaccaagcttatttttgtttacgtttaaacgttcaaatcaactcgttattatacatgaaggcatgttaaccattctcttccactgaaaaca

SEQ ID NO: 7638 - DNA, 146 bp, Staphylococcus aureus
tgttttcagtggaagagaatggttaacatgccttcatgtataataacgagttgatttgaacgtttaaacgtaaacaaaaataagcttggtcagccatcaaatataatttgaaaactgtccaagctgttttattagagaacgatcaa

SEQ ID NO: 7639 - DNA, 96 bp, Staphylococcus aureus
ctgcgactctcctcttatacttcatatgaatagcatattccaagatagatctcctattgactgacatgactctatattcagttatagttcattttt

SEQ ID NO: 7640 - DNA, 96 bp, Staphylococcus aureus
aaaaatgaactataactgaatatagagtcatgtcagtcaataggagatctatcttggaatatgctattcatatgaagtataagaggagagtcgcag

SEQ ID NO: 7641 - DNA, 332 bp, Staphylococcus aureus
attaacactccctcaatgatctatttcaagttattgtttttgactataaatcgtaataattacgatttataaagtatagacctatccttaagaaatttcaatattaaaagaaaaacttccgttattgtagagaattcatctacatttcggaagttggtatgtgtcttttttattaaatttaaggatgctacggttagttcaaatgattatgaatgacatttaatggtatcatccagcctcagtacttggagataacattttggcggtgagacataaatcatatttttacaaaacttatttcgtcgtctccccaataaagataaagtatttct

SEQ ID NO: 7642 - DNA, 332 bp, Staphylococcus aureus
agaaatactttatctttattggggagacgacgaaataagttttgtaaaaatatgatttatgtctcaccgccaaaatgttatctccaagtactgaggctggatgataccattaaatgtcattcataatcatttgaactaaccgtagcatccttaaatttaataaaaaagacacataccaacttccgaaatgtagatgaattctctacaataacggaagtttttcttttaatattgaaatttcttaaggataggtctatactttataaatcgtaattattacgatttatagtcaaaaacaataacttgaaatagatcattgagggagtgttaat

SEQ ID NO: 7643 - DNA, 191 bp, Staphylococcus aureus
tatttacacctcttcccatttaaattattttaaaattattagaaactgtatcaatatatgatattcaaacattcaataatacttaaatattgttttgtgattatattcaaaattattgtatcaataaatatgtatcattcctagaattttattgaacaaaaagttataaaatcacttttattgcaactcaa

SEQ ID NO: 7644 - DNA, 191 bp, Staphylococcus aureus
ttgagttgcaataaaagtgattttataactttttgttcaataaaattctaggaatgatacatatttattgatacaataattttgaatataatcacaaaacaatatttaagtattattgaatgtttgaatatcatatattgatacagtttctaataattttaaaataatttaaatgggaagaggtgtaaata

SEQ ID NO: 7645 - DNA, 66 bp, Staphylococcus aureus
actgaaggccttctcttcataaaatatctgtgcatattatctatttatctcaatctaacgtcttaa

SEQ ID NO: 7646 - DNA, 66 bp, Staphylococcus aureus
ttaagacgttagattgagataaatagataatatgcacagatattttatgaagagaaggccttcagt

SEQ ID NO: 7647 - DNA, 217 bp, Staphylococcus aureus
acaaacaccttccaatctacttactttatactataatattgcctaattaggatgatttaatcttaaaaacgttattcaaacttgcgtcaattttcaaaactttttagttttaactaggaaattatgtagggaaatgctagtctattaaaagaatatatttcacatatattaagttgaggatagtaagcctcaaatataatgaaataggagcatactc

SEQ ID NO: 7648 - DNA, 217 bp, Staphylococcus aureus
gagtatgctcctatttcattatatttgaggcttactatcctcaacttaatatatgtgaaatatattcttttaatagactagcatttccctacataatttcctagttaaaactaaaaagttttgaaaattgacgcaagtttgaataacgtttttaagattaaatcatcctaattaggcaatattatagtataaagtaagtagattggaaggtgtttgt

SEQ ID NO: 7649 - DNA, 154 bp, Staphylococcus aureus
tccaacgtagtcaaataacactttaaaacttgctgaatcgtcttattaaaattatgatataactcaagaagatatatttatcaccatttttcaaaataatggcttaaatatcacatatcattaaatatagcgttttataacggaggcgtttgtt

SEQ ID NO: 7650 - DNA, 154 bp, Staphylococcus aureus
aacaaacgcctccgttataaaacgctatatttaatgatatgtgatatttaagccattattttgaaaaatggtgataaatatatcttcttgagttatatcataattttaataagacgattcagcaagttttaaagtgttatttgactacgttgga

SEQ ID NO: 7651 - DNA, 353 bp, Staphylococcus aureus
gatttaacctcccacatttaatcattaacttctattatatatgattcatattaaatgtcagtcaaaaaagttagaaattcattttaatgcatttatatttcgaaagtcccttatgtatctaaaagcattttttaaacttgaattttaaaacactaaacaacacatacgtctctgtgtcattttcattttttgtatgtcatatatatgtttacttcatttaaatcaatttcatcttacaatttatcgtgtattttacaaaagattgacttcaattcatcgtaaaagttatacttttgccattttttaatgtaacatggtgttagtaataaaaatactacattgaggtgttttac

SEQ ID NO: 7652 - DNA, 353 bp, Staphylococcus aureus
gtaaaacacctcaatgtagtatttttattactaacaccatgttacattaaaaaatggcaaaagtataacttttacgatgaattgaagtcaatcttttgtaaaatacacgataaattgtaagatgaaattgatttaaatgaagtaaacatatatatgacatacaaaaaatgaaaatgacacagagacgtatgtgttgtttagtgttttaaaattcaagtttaaaaaatgcttttagatacataagggactttcgaaatataaatgcattaaaatgaatttctaacttttttgactgacatttaatatgaatcatatataatagaagttaatgattaaatgtgggaggttaaatc

SEQ ID NO: 7653 - DNA, 80 bp, Staphylococcus aureus
tgttattgataaagatatcatttaataagcttatgttatttagcaaggcaagccactctcgattcatggcttgccttatt

SEQ ID NO: 7654 - DNA, 80 bp, Staphylococcus aureus
aataaggcaagccatgaatcgagagtggcttgccttgctaaataacataagcttattaaatgatatctttatcaataaca

SEQ ID NO: 7655 - DNA, 97 bp, Staphylococcus aureus
catgcaggaattacggtcgattttgattaaaagtgacatagtgatagaagagaaggccacacgcttggaatcttaaaccaaggtgtggcccttttta

SEQ ID NO: 7656 - DNA, 97 bp, Staphylococcus aureus
taaaaagggccacaccttggtttaagattccaagcgtgtggccttctcttctatcactatgtcacttttaatcaaaatcgaccgtaattcctgcatg

SEQ ID NO: 7657 - DNA, 252 bp, Staphylococcus aureus
atcttcttttgtaggagcattttattatcaagagtaaattacaaaagaatcatttaaatcaatactttcactttgaatacatgtatttgaagtggaaggtacttatttcaaaaatagtaaaacctgtatcttaaattacttaatagtaacataagatacaggctgattttttattcattgttatttatactaaagcacccgatagctctgaaaacaatcacaaattcaacttttcaaagccacagctttaag

SEQ ID NO: 7658 - DNA, 252 bp, Staphylococcus aureus
cttaaagctgtggctttgaaaagttgaatttgtgattgttttcagagctatcgggtgctttagtataaataacaatgaataaaaaatcagcctgtatcttatgttactattaagtaatttaagatacaggttttactatttttgaaataagtaccttccacttcaaatacatgtattcaaagtgaaagtattgatttaaatgattcttttgtaatttactcttgataataaaatgctcctacaaaagaagat

SEQ ID NO: 7659 - DNA, 342 bp, Staphylococcus aureus
aggcattcctcctttaatctatattatttttatctatttcatataattttattatataattgctatcaattcaatatttttacttcacgaaactaaacaacatgtcattaacttatctcgttaagttaagaattctattttctaccaaataaattctgaatactgttttagataatcaattcgcaaaactatttctttataaatatgtccatcatttaacactgataaaattgcaacgataatacctttacttctattacgctaacccaattggcataaaaataaaaacccctaatggataactacattgttatctactagaggtttctaacttatactatt

SEQ ID NO: 7660 - DNA, 342 bp, Staphylococcus aureus
aatagtataagttagaaacctctagtagataacaatgtagttatccattaggggtttttatttttatgccaattgggttagcgtaatagaagtaaaggtattatcgttgcaattttatcagtgttaaatgatggacatatttataaagaaatagttttgcgaattgattatctaaaacagtattcagaatttatttggtagaaaatagaattcttaacttaacgagataagttaatgacatgttgtttagtttcgtgaagtaaaaatattgaattgatagcaattatataataaaattatatgaaatagataaaaataatatagattaaaggaggaatgcct

SEQ ID NO: 7661 - DNA, 72 bp, Staphylococcus aureus
tgttattcaacctctttttgcagtattattagaaatagtataatgaatcttttatagaaaggaaagaagaag

SEQ ID NO: 7662 - DNA, 72 bp, Staphylococcus aureus
cttcttctttcctttctataaaagattcattatactatttctaataatactgcaaaaagaggttgaataaca

SEQ ID NO: 7663 - DNA, 85 bp, Staphylococcus aureus
gcacatatataatataaaaagaccttaacgatgcatttagaaccacctgttcctaatatcgctaaggtcttttaattatattaga

SEQ ID NO: 7664 - DNA, 85 bp, Staphylococcus aureus
tctaatataattaaaagaccttagcgatattaggaacaggtggttctaaatgcatcgttaaggtctttttatattatatatgtgc

SEQ ID NO: 7665 - DNA, 277 bp, Staphylococcus aureus
tccaaaaccatctccctatagttattcctcgttgtcatgctctacttcgtgcttaatgcagaactactttcctttatactcaatgacgcctcggcatttcgattcatgtcactaaattttcacgagtcataatactttattcaattattattttacgcaaaagtattgcctctatcaatgcttgctaaaaaaatggatctatcagtgccacatgttactgcaacactaatagatcctcttaccattaatatatttctaattaatacttaaaataggc

SEQ ID NO: 7666 - DNA, 277 bp, Staphylococcus aureus
gcctattttaagtattaattagaaatatattaatggtaagaggatctattagtgttgcagtaacatgtggcactgatagatccatttttttagcaagcattgatagaggcaatacttttgcgtaaaataataattgaataaagtattatgactcgtgaaaatttagtgacatgaatcgaaatgccgaggcgtcattgagtataaaggaaagtagttctgcattaagcacgaagtagagcatgacaacgaggaataactatagggagatggttttgga

SEQ ID NO: 7667 - DNA, 685 bp, Staphylococcus aureus
aattatgtctcctaacctaattgaatttattttacacgtgactacacgtaaaaatatctatactgaaattaaagattaacaattttattttattataatattatgctaccaaattacaaacataaaactgagatgtaagcggagtcaaattacactctatcgccaataaatattgatatctcaagctttagcacgtaatttgaaatttgtgacaatttttagcattctaaaattgcgtaatgacgctatttaaagcctttaacaaactattgagctttctatttttttcattttaaaaaggatggctattcgacttaaatgacttactatataacctcctattttccgccttaccctcatcatatttgatgcatcattttatagtcaaagaattacatttcatacaaactagccaatcagacataaacatgaaattgattttaaaaatataatgtgcaaaattgttagaaaattagcaaaaatagtacttattcatttaatatctgttataatcagttttatcatttaaaaaatctatggatgttatcaagacaagtcattaatacgtaacataaagttgtgatttttcagaatttttagacaaaatattgattatttgtgctatgatataacatattaaaaaacaccgtatagaattgtttatgaatgtttgggaggaaagttt

SEQ ID NO: 7668 - DNA, 685 bp, Staphylococcus aureus
aaactttcctcccaaacattcataaacaattctatacggtgttttttaatatgttatatcatagcacaaataatcaatattttgtctaaaaattctgaaaaatcacaactttatgttacgtattaatgacttgtcttgataacatccatagattttttaaatgataaaactgattataacagatattaaatgaataagtactatttttgctaattttctaacaattttgcacattatatttttaaaatcaatttcatgtttatgtctgattggctagtttgtatgaaatgtaattctttgactataaaatgatgcatcaaatatgatgagggtaaggcggaaaataggaggttatatagtaagtcatttaagtcgaatagccatcctttttaaaatgaaaaaaatagaaagctcaatagtttgttaaaggctttaaatagcgtcattacgcaattttagaatgctaaaaattgtcacaaatttcaaattacgtgctaaagcttgagatatcaatatttattggcgatagagtgtaatttgactccgcttacatctcagttttatgtttgtaatttggtagcataatattataataaaataaaattgttaatctttaatttcagtatagatatttttacgtgtagtcacgtgtaaaataaattcaattaggttaggagacataatt

SEQ ID NO: 7669 - DNA, 80 bp, Staphylococcus aureus
aaaatcaaaaaaatcatttcccatctgattaacatccagatgtggaaatgattttttattttatattaagataatcgcta

SEQ ID NO: 7670 - DNA, 80 bp, Staphylococcus aureus
tagcgattatcttaatataaaataaaaaatcatttccacatctggatgttaatcagatgggaaatgatttttttgatttt

SEQ ID NO: 7671 - DNA, 221 bp, Staphylococcus aureus
gcaaagtggcctctcttaaatcgattataaaatccgatttaaaatcctgctcaaataccgtcatgcctctatgaatactatccaatatactaataaaattcagatttgtaaatatattctgataattaagaattttatatcaatctactttgtttatgcgcataattttgttcgattagggaattgtttactatattccatttgactctgaggtgatacga

SEQ ID NO: 7672 - DNA, 221 bp, Staphylococcus aureus
tcgtatcacctcagagtcaaatggaatatagtaaacaattccctaatcgaacaaaattatgcgcataaacaaagtagattgatataaaattcttaattatcagaatatatttacaaatctgaattttattagtatattggatagtattcatagaggcatgacggtatttgagcaggattttaaatcggattttataatcgatttaagagaggccactttgc

SEQ ID NO: 7673 - DNA, 122 bp, Staphylococcus aureus
tatttttaattaaactgacaattatttttcacattttatacacttttcaaggtttatgacttgagaaatgttctcatttttatcatactggaggtgtattgaaaagttaaggagtggaaagt

SEQ ID NO: 7674 - DNA, 122 bp, Staphylococcus aureus
actttccactccttaacttttcaatacacctccagtatgataaaaatgagaacatttctcaagtcataaaccttgaaaagtgtataaaatgtgaaaaataattgtcagtttaattaaaaata

SEQ ID NO: 7675 - DNA, 193 bp, Staphylococcus aureus
tttatacattaaacgtattttttgatataaactactaaaaaggactcatacatgtgctttaagggcattgtgtatgagtcttttttgattaaagttgaatttgccgtatgtattagattacgtaaaaaaatcggacagctgaaaaatctttaagatttctcagttgtccgattttaaatatagctattagaat

SEQ ID NO: 7676 - DNA, 193 bp, Staphylococcus aureus
attctaatagctatatttaaaatcggacaactgagaaatcttaaagatttttcagctgtccgatttttttacgtaatctaatacatacggcaaattcaactttaatcaaaaaagactcatacacaatgcccttaaagcacatgtatgagtcctttttagtagtttatatcaaaaaatacgtttaatgtataaa

SEQ ID NO: 7677 - DNA, 208 bp, Staphylococcus aureus
tagataacttcctgttttaattgatacgctgtaacaaaatactatagttagtgcttacatgtatatgttaaagcaagcagtggtaaatgtaaattataattattcattaactttgcaatatattaaatcttttattcatagaagataaatatcaaatcaatcataattatttgacaacaaatagctaacgattgttttaatctacatt

SEQ ID NO: 7678 - DNA, 208 bp, Staphylococcus aureus
aatgtagattaaaacaatcgttagctatttgttgtcaaataattatgattgatttgatatttatcttctatgaataaaagatttaatatattgcaaagttaatgaataattataatttacatttaccactgcttgctttaacatatacatgtaagcactaactatagtattttgttacagcgtatcaattaaaacaggaagttatcta

SEQ ID NO: 7679 - DNA, 59 bp, Staphylococcus aureus
ataaacaagcagtccagtgcgtatcatcataccttacgcattggactgctttgctatgt

SEQ ID NO: 7680 - DNA, 59 bp, Staphylococcus aureus
acatagcaaagcagtccaatgcgtaaggtatgatgatacgcactggactgcttgtttat

SEQ ID NO: 7681 - DNA, 172 bp, Staphylococcus aureus
ccactttccctgtgatgaacattgtaattttataaatgaattatatatatcatacgcctatctttacagaattttcaattaaatagggttaaataccaaagtcctcggcactacactttgccatgacgtagcattcaaggactttcaaatgattgagggttgatatctcggg

SEQ ID NO: 7682 - DNA, 172 bp, Staphylococcus aureus
cccgagatatcaaccctcaatcatttgaaagtccttgaatgctacgtcatggcaaagtgtagtgccgaggactttggtatttaaccctatttaattgaaaattctgtaaagataggcgtatgatatatataattcatttataaaattacaatgttcatcacagggaaagtgg

SEQ ID NO: 7683 - DNA, 279 bp, Staphylococcus aureus
aataaatgccttcatttcatttatatttttggtcatattactttatatctatgactaattcattcccgtatttattaattacaatcatagtttggcttctttttaaaagataagactttgtaaaaagtattaatatttcatgcaaatggggacaggagtcgcccactatttttgtgtcttcaatttcatgatcattatttaacattagtcatgaaaatagccgacaacttcatctgtgaaatcaccggccttttattttagctaactttatttctgatt

SEQ ID NO: 7684 - DNA, 279 bp, Staphylococcus aureus
aatcagaaataaagttagctaaaataaaaggccggtgatttcacagatgaagttgtcggctattttcatgactaatgttaaataatgatcatgaaattgaagacacaaaaatagtgggcgactcctgtccccatttgcatgaaatattaatactttttacaaagtcttatcttttaaaaagaagccaaactatgattgtaattaataaatacgggaatgaattagtcatagatataaagtaatatgaccaaaaatataaatgaaatgaaggcatttatt

SEQ ID NO: 7685 - DNA, 277 bp, Staphylococcus aureus
agtattccttctctcaatttacttatataaatcctaccacgaaagctttcaagaaaacacaattaaatgtctatttagtgaactttttaaggttgtacactcttttaatgtctgccaattaggtcaattaatcatcacaatgtacaattaactctattttcagttcacttactcacacaccgtttttaaacaacacattaacttctcatttagataaaacgcaaaaaagtctggcaccaatacaatagatgccagactaagagtctactatataaat

SEQ ID NO: 7686 - DNA, 277 bp, Staphylococcus aureus
atttatatagtagactcttagtctggcatctattgtattggtgccagacttttttgcgttttatctaaatgagaagttaatgtgttgtttaaaaacggtgtgtgagtaagtgaactgaaaatagagttaattgtacattgtgatgattaattgacctaattggcagacattaaaagagtgtacaaccttaaaaagttcactaaatagacatttaattgtgttttcttgaaagctttcgtggtaggatttatataagtaaattgagagaaggaatact

SEQ ID NO: 7687 - DNA, 152 bp, Staphylococcus aureus
tcgattttccttttacgattgttactaacagtcatgaaataatctatgattcattttgcgtttagtccaaattatcaatcaacatttcgccacttatacaaaacaaagtgagtgtcttgtgttcttacaatggcactcaccttatctaattt

SEQ ID NO: 7688 - DNA, 152 bp, Staphylococcus aureus
aaattagataaggtgagtgccattgtaagaacacaagacactcactttgttttgtataagtggcgaaatgttgattgataatttggactaaacgcaaaatgaatcatagattatttcatgactgttagtaacaatcgtaaaaggaaaatcga

SEQ ID NO: 7689 - DNA, 69 bp, Staphylococcus aureus
tcaacaacctccgttaagtttgttaaatttttatttaacgaattttacaaacttatgttagcatagaaa

SEQ ID NO: 7690 - DNA, 69 bp, Staphylococcus aureus
tttctatgctaacataagtttgtaaaattcgttaaataaaaatttaacaaacttaacggaggttgttga

SEQ ID NO: 7691 - DNA, 88 bp, Staphylococcus aureus
taaatatttttaatgtctttttttagaaaaggttttataatgtattagtatttattttaacgtgaacaaaatgatgtacggaggtgca

SEQ ID NO: 7692 - DNA, 88 bp, Staphylococcus aureus
tgcacctccgtacatcattttgttcacgttaaaataaatactaatacattataaaaccttttctaaaaaaagacattaaaaatattta

SEQ ID NO: 7693 - DNA, 170 bp, Staphylococcus aureus
aattagcctcggacagcggcaatgatgattatgcatgatgaaaacaatacaataggtccacgaaataaacggtaatttctatctcaataaatagaaattaccgtttttgttttatatgacaatcaattatatacttataaaattcaaaatcttatgcatcattatttgaa

SEQ ID NO: 7694 - DNA, 170 bp, Staphylococcus aureus
ttcaaataatgatgcataagattttgaattttataagtatataattgattgtcatataaaacaaaaacggtaatttctatttattgagatagaaattaccgtttatttcgtggacctattgtattgttttcatcatgcataatcatcattgccgctgtccgaggctaatt

SEQ ID NO: 7695 - DNA, 132 bp, Staphylococcus aureus
ttgtgctccccctaattattaattttatgaatcctgtttcgatttatctcaaaatgtaataattatattgattcacaaaattgacaataactattatttaataataatgcaaatttcatacaatttgaaact

SEQ ID NO: 7696 - DNA, 132 bp, Staphylococcus aureus
agtttcaaattgtatgaaatttgcattattattaaataatagttattgtcaattttgtgaatcaatataattattacattttgagataaatcgaaacaggattcataaaattaataattagggggagcacaa

SEQ ID NO: 7697 - DNA, 67 bp, Staphylococcus aureus
taaaacgctaccaaaaagttagacttccttcccactaaagtaccacttttttctttcaactttttta

SEQ ID NO: 7698 - DNA, 67 bp, Staphylococcus aureus
taaaaaagttgaaagaaaaaagtggtactttagtgggaaggaagtctaactttttggtagcgtttta

SEQ ID NO: 7699 - DNA, 99 bp, Staphylococcus aureus
tatatttttctaaagaattgcttttattaactttcaattatgtacctaacctaaaaagaagccaaggcaacgaatgttaccttgacttctaatacatat

SEQ ID NO: 7700 - DNA, 99 bp, Staphylococcus aureus
atatgtattagaagtcaaggtaacattcgttgccttggcttctttttaggttaggtacataattgaaagttaataaaagcaattctttagaaaaatata

SEQ ID NO: 7701 - DNA, 189 bp, Staphylococcus aureus
tttaccccttcttcctatatattgtgtctactcattacgttataccactatatatagtattttcaaatttttattagtctgttaactaaaacgtcacaaagttattaacatttagtgaaattcatatttctacacaattatttcattaatttttaaaattgttctgtcatttcgacatgtttatgcaac

SEQ ID NO: 7702 - DNA, 189 bp, Staphylococcus aureus
gttgcataaacatgtcgaaatgacagaacaattttaaaaattaatgaaataattgtgtagaaatatgaatttcactaaatgttaataactttgtgacgttttagttaacagactaataaaaatttgaaaatactatatatagtggtataacgtaatgagtagacacaatatataggaagaaggggtaaa

SEQ ID NO: 7703 - DNA, 306 bp, Staphylococcus aureus
attattttctccctccacttttaatacaatttacataatccccctctttaacttaaatattataattaatataattttttatatttaagttatctcattttatcaaaaaaatcttttttgcgtaactatcaatagtgaagtttgattttcctacttgataacatggcatgactaatccttgtatatcctgtcctgtatttcattttgatctatcatttttattattgctttctattgcacaaaaaatctggctaaaggtcgctatgatagtaacgacttcaaccagatttcaatttatccatctat

SEQ ID NO: 7704 - DNA, 306 bp, Staphylococcus aureus
atagatggataaattgaaatctggttgaagtcgttactatcatagcgacctttagccagattttttgtgcaatagaaagcaataataaaaatgatagatcaaaatgaaatacaggacaggatatacaaggattagtcatgccatgttatcaagtaggaaaatcaaacttcactattgatagttacgcaaaaaagatttttttgataaaatgagataacttaaatataaaaaattatattaattataatatttaagttaaagagggggattatgtaaattgtattaaaagtggagggagaaaataat

SEQ ID NO: 7705 - DNA, 75 bp, Staphylococcus aureus
gtcttaatttcaatgattaagcgttaaagttaaaataagaagacttaccttagacggttagacggtccgctatta

SEQ ID NO: 7706 - DNA, 75 bp, Staphylococcus aureus
taatagcggaccgtctaaccgtctaaggtaagtcttcttattttaactttaacgcttaatcattgaaattaagac

SEQ ID NO: 7707 - DNA, 62 bp, Staphylococcus aureus
gttgagcaacatcctttatatctttttacatcattacaccttaaaatatttaacaccaatcg

SEQ ID NO: 7708 - DNA, 62 bp, Staphylococcus aureus
cgattggtgttaaatattttaaggtgtaatgatgtaaaaagatataaaggatgttgctcaac

SEQ ID NO: 7709 - DNA, 249 bp, Staphylococcus aureus
gttgcttgaatgacattatcagtaattcagacaaaactttgattatgtcgtgtcagttattaatgcatacagtaatgcatcgttgttattttttatttatttactatttattatgtaccaaatcagcctttcagtaaaataggtcaaattactgattttctaaatataaaatgcctcctaatgacatactattagtacatcattaagaggctcttgtgttatttgcatactaagcgctcaattttaaat

SEQ ID NO: 7710 - DNA, 249 bp, Staphylococcus aureus
atttaaaattgagcgcttagtatgcaaataacacaagagcctcttaatgatgtactaatagtatgtcattaggaggcattttatatttagaaaatcagtaatttgacctattttactgaaaggctgatttggtacataataaatagtaaataaataaaaaataacaacgatgcattactgtatgcattaataactgacacgacataatcaaagttttgtctgaattactgataatgtcattcaagcaac

SEQ ID NO: 7711 - DNA, 655 bp, Staphylococcus aureus
aagacacccctacacagccttttttatattgaatatattctttttagaatgttctgataaaataagtgcgcgtttacaccgcgaacatacattatatagcgtgatacatttttcgagcacacgataaataatgttcgagtttatgttgttgctcaacctatcccatttaccgtcttttttcacctgtcttactttattaaaataatcacattgtatagctgtattagtccagctacaatatctttcgttataacccctcattataatcatccttattttctatttttaaaaagacaattagaccgctctttaaactatagattaatacttaagttaaactcatacatactgataccatacgttagatctaacaatttaaaattcgttataactatggattaaagagctgcccaactcatataatccttaaaaacttcacatgtgattgtttattaagccctcctttatcttattaaatatccttataacccttttaaaattaaactgacacactcatacattgttacacgcgacgataaacgtcatattattgcatatcattaaaacaagtcactttgtatcgtgtgcgaccgaatacatattaaatcatcaataatgattattcaattattaaaaataaaaacgaacattctat

SEQ ID NO: 7712 - DNA, 655 bp, Staphylococcus aureus
atagaatgttcgtttttatttttaataattgaataatcattattgatgatttaatatgtattcggtcgcacacgatacaaagtgacttgttttaatgatatgcaataatatgacgtttatcgtcgcgtgtaacaatgtatgagtgtgtcagtttaattttaaaagggttataaggatatttaataagataaaggagggcttaataaacaatcacatgtgaagtttttaaggattatatgagttgggcagctctttaatccatagttataacgaattttaaattgttagatctaacgtatggtatcagtatgtatgagtttaacttaagtattaatctatagtttaaagagcggtctaattgtctttttaaaaatagaaaataaggatgattataatgaggggttataacgaaagatattgtagctggactaatacagctatacaatgtgattattttaataaagtaagacaggtgaaaaaagacggtaaatgggataggttgagcaacaacataaactcgaacattatttatcgtgtgctcgaaaaatgtatcacgctatataatgtatgttcgcggtgtaaacgcgcacttattttatcagaacattctaaaaagaatatattcaatataaaaaaggctgtgtaggggtgtctt

SEQ ID NO: 7713 - DNA, 655 bp, Staphylococcus aureus
ttttaatcatattatttttcttattgatatttctattcatatatttctgattgtatatttagatataataatttgttattggaaaatatatgaaacaaatttgactcatctttttcaatatctaaatgacacgatgcatgatttttgaattttgtaattaacttccttttaaattagactgaattgtgacaattttcaaacattttaatgtgtaaatcattggcaaaatatacgaattgcatttaaatcgtcaatttacatatatttttgcgtagtaatcaatcgttatcattgttatttatcgttacattatttcgagtatcagtatgtatttcgggcttcgtttgataacgacatttctttgtgacatcgcttcatcagtgtaacaacaaatacaatgatttcgtgatgttagttacccattttatgtgttgcataaaatatgttgttataaaacattttaaatcattttatataaacaatctatatatttttggtatttccaaaatatcacttgttatattaaaaaccgacaagacattttatcttatcggttcaaatttggtattgttatttgtaatgtttttaggtttctttttaatataatatatttcagtgaaaatacatgattgattgtgatttcactgaaacatgg

SEQ ID NO: 7714 - DNA, 655 bp, Staphylococcus aureus
ccatgtttcagtgaaatcacaatcaatcatgtattttcactgaaatatattatattaaaaagaaacctaaaaacattacaaataacaataccaaatttgaaccgataagataaaatgtcttgtcggtttttaatataacaagtgatattttggaaataccaaaaatatatagattgtttatataaaatgatttaaaatgttttataacaacatattttatgcaacacataaaatgggtaactaacatcacgaaatcattgtatttgttgttacactgatgaagcgatgtcacaaagaaatgtcgttatcaaacgaagcccgaaatacatactgatactcgaaataatgtaacgataaataacaatgataacgattgattactacgcaaaaatatatgtaaattgacgatttaaatgcaattcgtatattttgccaatgatttacacattaaaatgtttgaaaattgtcacaattcagtctaatttaaaaggaagttaattacaaaattcaaaaatcatgcatcgtgtcatttagatattgaaaaagatgagtcaaatttgtttcatatattttccaataacaaattattatatctaaatatacaatcagaaatatatgaatagaaatatcaataagaaaaataatatgattaaaa

SEQ ID NO: 7715 - DNA, 107 bp, Staphylococcus aureus
ggcatgcacctcatttctttgttagttctatattaaaacaaaaaaatactaataacatttaaattagtaaaaaaatgttactagtatacttacaatattgaaagttt

SEQ ID NO: 7716 - DNA, 107 bp, Staphylococcus aureus
aaactttcaatattgtaagtatactagtaacatttttttactaatttaaatgttattagtatttttttgttttaatatagaactaacaaagaaatgaggtgcatgcc

SEQ ID NO: 7717 - DNA, 197 bp, Staphylococcus aureus
ttttccacctcaaattatatttaattctatattttcacacgcttctattctaacgctttctataacaaattgtcatatatattcattttttgttattctaaatcactctgtttacatatttttaactaaaactacataattgctcaaaattcctcttttacactgaagacatagtcatatactcaggaggatgtatt

SEQ ID NO: 7718 - DNA, 197 bp, Staphylococcus aureus
aatacatcctcctgagtatatgactatgtcttcagtgtaaaagaggaattttgagcaattatgtagttttagttaaaaatatgtaaacagagtgatttagaataacaaaaaatgaatatatatgacaatttgttatagaaagcgttagaatagaagcgtgtgaaaatatagaattaaatataatttgaggtggaaaa

SEQ ID NO: 7719 - DNA, 70 bp, Staphylococcus aureus
agcataaaaaaattcccgagcactataacaaggtgttcgggaattttttatggtttaatttagtactcaa

SEQ ID NO: 7720 - DNA, 70 bp, Staphylococcus aureus
ttgagtactaaattaaaccataaaaaattcccgaacaccttgttatagtgctcgggaatttttttatgct

SEQ ID NO: 7721 - DNA, 105 bp, Staphylococcus aureus
taagatgtgttgaaactgagttcaattaaattatatgtttttattatacactttttgacatattttttaaatttaagaatgcgaagatttttaacatttctgatg

SEQ ID NO: 7722 - DNA, 105 bp, Staphylococcus aureus
catcagaaatgttaaaaatcttcgcattcttaaatttaaaaaatatgtcaaaaagtgtataataaaaacatataatttaattgaactcagtttcaacacatctta

SEQ ID NO: 7723 - DNA, 181 bp, Staphylococcus aureus
atgatgataaaactataagctaaatctaagtttcacgagaaacatttttgcgtatcagcaaattgcgccaatcatattaatacaaatttaatttaaacactcagaaatgttagtcgtgcgtaaatagtttgtatctctcactctgtgtatttaatgcaaccacatattttccaggaaataa

SEQ ID NO: 7724 - DNA, 181 bp, Staphylococcus aureus
ttatttcctggaaaatatgtggttgcattaaatacacagagtgagagatacaaactatttacgcacgactaacatttctgagtgtttaaattaaatttgtattaatatgattggcgcaatttgctgatacgcaaaaatgtttctcgtgaaacttagatttagcttatagttttatcatcat

SEQ ID NO: 7725 - DNA, 115 bp, Staphylococcus aureus
acgtcatgacccctttctaattctactttatcaacattttacgcttaatcaattcactttaaaatcattttcaacaaaaaaaccgaatacaaatgtattcggcctaaaaaagtat

SEQ ID NO: 7726 - DNA, 115 bp, Staphylococcus aureus
atacttttttaggccgaatacatttgtattcggtttttttgttgaaaatgattttaaagtgaattgattaagcgtaaaatgttgataaagtagaattagaaaggggtcatgacgt

SEQ ID NO: 7727 - DNA, 349 bp, Staphylococcus aureus
aaatattactccatttcaatttctagattagtctaaattgtataatgaaataagaattatatcaattgcttttcgaaaaaaattacgtaaaatttgttttcttcctatttatataacttaaaattttctgttaactagcaaaaatcaatatactatttttacactattacaaattttttacttttcaaaaacttagaagttctaaatttttcatcaccttaaattttactgtaatttcaacaatcaaatttaactaacattttaaattattcatcatgctagcaaaaaaggcctaacgtataaatgtacgttagacctcatgttcaacttattcattttacattgtata

SEQ ID NO: 7728 - DNA, 349 bp, Staphylococcus aureus
tatacaatgtaaaatgaataagttgaacatgaggtctaacgtacatttatacgttaggccttttttgctagcatgatgaataatttaaaatgttagttaaatttgattgttgaaattacagtaaaatttaaggtgatgaaaaatttagaacttctaagtttttgaaaagtaaaaaatttgtaatagtgtaaaaatagtatattgatttttgctagttaacagaaaattttaagttatataaataggaagaaaacaaattttacgtaatttttttcgaaaagcaattgatataattcttatttcattatacaatttagactaatctagaaattgaaatggagtaatattt

SEQ ID NO: 7729 - DNA, 98 bp, Staphylococcus aureus
aagttaaactccttcaaaccttgcaaagtgtcagcagacaactttttcatttgaatcaacggagaaacatatttaatgttttgtcgcgtgataaagtg

SEQ ID NO: 7730 - DNA, 98 bp, Staphylococcus aureus
cactttatcacgcgacaaaacattaaatatgtttctccgttgattcaaatgaaaaagttgtctgctgacactttgcaaggtttgaaggagtttaactt

SEQ ID NO: 7731 - DNA, 90 bp, Staphylococcus aureus
attcatttctcctttaataccaatatgaggtgtctgtacatgacacttatatcatcagacacatcatattcatatcgttccatttagtga

SEQ ID NO: 7732 - DNA, 90 bp, Staphylococcus aureus
tcactaaatggaacgatatgaatatgatgtgtctgatgatataagtgtcatgtacagacacctcatattggtattaaaggagaaatgaat

SEQ ID NO: 7733 - DNA, 346 bp, Staphylococcus aureus
gtctatttcctccttttatctttgaattcatttagagtatagacaatcttcaaacgcttacatgtgattatattcacataaagaaagtcgaaaatttcatatctttttgttatacaatacataataatggatttttatacataaataaaggtgttttgggtcaaaatatacattttttattcaaaaagacccacaaaaacacgttgtataaagttttttatacagtcaaatgaatgactatgaattctttctttccataaaaaaacgcgtacacaagttaatatttggtaactaacttgtgtacacgtgatacgaaactaatttttattattcatttgatacatgt

SEQ ID NO: 7734 - DNA, 346 bp, Staphylococcus aureus
acatgtatcaaatgaataataaaaattagtttcgtatcacgtgtacacaagttagttaccaaatattaacttgtgtacgcgtttttttatggaaagaaagaattcatagtcattcatttgactgtataaaaaactttatacaacgtgtttttgtgggtctttttgaataaaaaatgtatattttgacccaaaacacctttatttatgtataaaaatccattattatgtattgtataacaaaaagatatgaaattttcgactttctttatgtgaatataatcacatgtaagcgtttgaagattgtctatactctaaatgaattcaaagataaaaggaggaaatagac

SEQ ID NO: 7735 - DNA, 315 bp, Staphylococcus aureus
gcatgtttcatttataatttaacactttgttttgcaaaagataataaaaatacatgtaaattttttgtgacaacttttaaaatgaattttgtattctaagtcagcatttaattatcacatatctactacttgtaatgattttagactgccgagtagtctttcggcagacaaccctcacactcctctcatctaattacaaagagagggtatacctacaaagtcaattatcaatgtaggtataccccatatataagctgtatttaaaatttaattatttataagtgtttaacattacttcttcttgtttatatattt

SEQ ID NO: 7736 - DNA, 315 bp, Staphylococcus aureus
aaatatataaacaagaagaagtaatgttaaacacttataaataattaaattttaaatacagcttatatatggggtatacctacattgataattgactttgtaggtataccctctctttgtaattagatgagaggagtgtgagggttgtctgccgaaagactactcggcagtctaaaatcattacaagtagtagatatgtgataattaaatgctgacttagaatacaaaattcattttaaaagttgtcacaaaaaatttacatgtatttttattatcttttgcaaaacaaagtgttaaattataaatgaaacatgc

SEQ ID NO: 7737 - DNA, 423 bp, Staphylococcus aureus
atttcattcctcctgaaatcttaaaaacagcttataaataaaatattaatttaatttttcagaaaagtaaatgattatttctatttatttcgatactttttgttcgttgattttatttattgattcttttattttttaaaaatgttatctgtagctaaataaaattttaaaaattgagcttaattatattttaaaatttatcaaggctttatttttgtgaaaatattaacaaatacaaaatagtgctctatatacttaatcaatgcttgaaatatgtgagataactatttaaataatcatgatcaaataaacatttttatcaatttcaaacaactatgtaagacgcaataatcgttattatttaataaaaaagactagaatgcggtatctctcctcacactctagccttaatatgccattatt

SEQ ID NO: 7738 - DNA, 423 bp, Staphylococcus aureus
aataatggcatattaaggctagagtgtgaggagagataccgcattctagtcttttttattaaataataacgattattgcgtcttacatagttgtttgaaattgataaaaatgtttatttgatcatgattatttaaatagttatctcacatatttcaagcattgattaagtatatagagcactattttgtatttgttaatattttcacaaaaataaagccttgataaattttaaaatataattaagctcaatttttaaaattttatttagctacagataacatttttaaaaaataaaagaatcaataaataaaatcaacgaacaaaaagtatcgaaataaatagaaataatcatttacttttctgaaaaattaaattaatattttatttataagctgtttttaagatttcaggaggaatgaaat

SEQ ID NO: 7739 - DNA, 257 bp, Staphylococcus aureus
aattatctctcttttccatacaaatattttattccttacacttttattataactttttcagccataaaaatactaatgattatatttataaatacataacagttttgttatactaattgaagtacacaaaaaacaatgaaaatattaatatcgcctacttttctaatatttattttttaaaatgattatggcaatattgaaataaattatttagcttcacgtatcaactacttttcattaacatggaggcgttatat

SEQ ID NO: 7740 - DNA, 257 bp, Staphylococcus aureus
atataacgcctccatgttaatgaaaagtagttgatacgtgaagctaaataatttatttcaatattgccataatcattttaaaaaataaatattagaaaagtaggcgatattaatattttcattgttttttgtgtacttcaattagtataacaaaactgttatgtatttataaatataatcattagtatttttatggctgaaaaagttataataaaagtgtaaggaataaaatatttgtatggaaaagagagataatt

SEQ ID NO: 7741 - DNA, 239 bp, Staphylococcus aureus
tcatttgcctgatacgtccacaagtaccagatgcataaattcagaaaaacagcagtgagatatttttctatttgaaatatcttactgctgttctttatttgcataattcgcactctgttaaaatcatataaaagttcgctttaatgtcattgacgtatgtataagctctcatgtttaataatattaatacacctttaaaaacgcttacacgaaaaatttagaaaggaggtacatgttaa

SEQ ID NO: 7742 - DNA, 239 bp, Staphylococcus aureus
ttaacatgtacctcctttctaaatttttcgtgtaagcgtttttaaaggtgtattaatattattaaacatgagagcttatacatacgtcaatgacattaaagcgaacttttatatgattttaacagagtgcgaattatgcaaataaagaacagcagtaagatatttcaaatagaaaaatatctcactgctgtttttctgaatttatgcatctggtacttgtggacgtatcaggcaaatga

SEQ ID NO: 7743 - DNA, 111 bp, Staphylococcus aureus
tagcaatgataacaaccgtcccataaaagacagaaattactatctcttctgtctaaaaacataaaaatccacacattaaggagctataaccctaatgtgtggatttaattt

SEQ ID NO: 7744 - DNA, 111 bp, Staphylococcus aureus
aaattaaatccacacattagggttatagctccttaatgtgtggatttttatgtttttagacagaagagatagtaatttctgtcttttatgggacggttgttatcattgcta

SEQ ID NO: 7745 - DNA, 210 bp, Staphylococcus aureus
tgtcacactcctatgtaggaattattcatattttttatatattttttgtaaattaatttatttttgcgttgtgaattagtataatcaatttactggaagatatttagtcgattgatacctatcaactattttcagcatacgataaattataacaaatcatagtttattatcacacttaattattatatttttcaagggagaatacgaaat

SEQ ID NO: 7746 - DNA, 210 bp, Staphylococcus aureus
atttcgtattctcccttgaaaaatataataattaagtgtgataataaactatgatttgttataatttatcgtatgctgaaaatagttgataggtatcaatcgactaaatatcttccagtaaattgattatactaattcacaacgcaaaaataaattaatttacaaaaaatatataaaaaatatgaataattcctacataggagtgtgaca

SEQ ID NO: 7747 - DNA, 264 bp, Staphylococcus aureus
gtattattaaacccgcaaaatttataagtataaacaaggagttcggacttaaacatatttctgttcataagtccgatttcttattcaattaaacccgaggtattcagttcgaacgcctcgggtcattttatataaatatattattttatgttcaaatgttcctcatcatatccgtttcaattgtcatctcacacattttataaatatgagcaaatgtacttattttcaaacattactgcctagctttaattgacgttatattaa

SEQ ID NO: 7748 - DNA, 264 bp, Staphylococcus aureus
ttaatataacgtcaattaaagctaggcagtaatgtttgaaaataagtacatttgctcatatttataaaatgtgtgagatgacaattgaaacggatatgatgaggaacatttgaacataaaataatatatttatataaaatgacccgaggcgttcgaactgaatacctcgggtttaattgaataagaaatcggacttatgaacagaaatatgtttaagtccgaactccttgtttatacttataaattttgcgggtttaataatac

SEQ ID NO: 7749 - DNA, 168 bp, Staphylococcus aureus
cttcattctcctttacttctgtagttctaagtcgttaaattcattataacgttaaaatgatggacaatctattcattgcattttgcatatacttcacaataatttaagggggaaataagacgtcttatatacttaaaaaaatatatagatgctcttcccccaatataa

SEQ ID NO: 7750 - DNA, 168 bp, Staphylococcus aureus
ttatattgggggaagagcatctatatatttttttaagtatataagacgtcttatttcccccttaaattattgtgaagtatatgcaaaatgcaatgaatagattgtccatcattttaacgttataatgaatttaacgacttagaactacagaagtaaaggagaatgaag

SEQ ID NO: 7751 - DNA, 240 bp, Staphylococcus aureus
caacatactcctttctcacttacttccttcaaagaattacatactattatatacctgtttacaagaaatttacacttatctatctagttattgttgttagtaattatcaacttattacttagcttatatttaagtaaacaaaaaagcatgacgtaatatcatattgtccatgtcgctaacatcatattacgtcaaatcttttaaattaaatgatgctttattttagactgctttttcttt

SEQ ID NO: 7752 - DNA, 240 bp, Staphylococcus aureus
aaagaaaaagcagtctaaaataaagcatcatttaatttaaaagatttgacgtaatatgatgttagcgacatggacaatatgatattacgtcatgcttttttgtttacttaaatataagctaagtaataagttgataattactaacaacaataactagatagataagtgtaaatttcttgtaaacaggtatataatagtatgtaattctttgaaggaagtaagtgagaaaggagtatgttg

SEQ ID NO: 7753 - DNA, 129 bp, Staphylococcus aureus
gttgcacctcttttatatcaaaaacattaaaaagactaagggttcatcactaattattaaaatcctatatcgatttttctagtgattggtgcctcagtctttttaattttagccagctataaattcaat

SEQ ID NO: 7754 - DNA, 129 bp, Staphylococcus aureus
attgaatttatagctggctaaaattaaaaagactgaggcaccaatcactagaaaaatcgatataggattttaataattagtgatgaacccttagtctttttaatgtttttgatataaaagaggtgcaac

SEQ ID NO: 7755 - DNA, 387 bp, Staphylococcus aureus
gtaataactccttgtattatctttacattcattagattataatatatgccactattcaatttaatacaactcttttttgatacaaaaatactcattttgttaaaatttgtaaaaattcatttttattcgtctagatggaatcgttttcatatttttaaaattactttttctcgtttatgcgtataatcttttttatataaatttggctaattggctttatgtttaatcattataattgtttcgtttttaaaataattattgtattaatatatctatatcatccaccttttatttataaatagttaatttacaactaaacgataaatattatatgcaaaatacatctttaatattaaagtaataccaatattttttcaataaacctag

SEQ ID NO: 7756 - DNA, 387 bp, Staphylococcus aureus
ctaggtttattgaaaaaatattggtattactttaatattaaagatgtattttgcatataatatttatcgtttagttgtaaattaactatttataaataaaaggtggatgatatagatatattaatacaataattattttaaaaacgaaacaattataatgattaaacataaagccaattagccaaatttatataaaaaagattatacgcataaacgagaaaaagtaattttaaaaatatgaaaacgattccatctagacgaataaaaatgaatttttacaaattttaacaaaatgagtatttttgtatcaaaaaagagttgtattaaattgaatagtggcatatattataatctaatgaatgtaaagataatacaaggagttattac

SEQ ID NO: 7757 - DNA, 234 bp, Staphylococcus aureus
actatcttcaccccttataagtaattacatttaaggttacgccctctttacataagcgtctaatataaataaacaatttatttataagtagaaactatatatgacgtggttgcttataatttgcgttcttgattcgaaaaattcagataaggatttatacaattaatatttatgatatcttttgtaaatttaattaattatagttacttcaatcatgattagtttataataata

SEQ ID NO: 7758 - DNA, 234 bp, Staphylococcus aureus
tattattataaactaatcatgattgaagtaactataattaattaaatttacaaaagatatcataaatattaattgtataaatccttatctgaatttttcgaatcaagaacgcaaattataagcaaccacgtcatatatagtttctacttataaataaattgtttatttatattagacgcttatgtaaagagggcgtaaccttaaatgtaattacttataaggggtgaagatagt

SEQ ID NO: 7759 - DNA, 52 bp, Staphylococcus aureus
atgataaagtaatcatctttcacaaaaatccaaagattgggaggaattaaat

SEQ ID NO: 7760 - DNA, 52 bp, Staphylococcus aureus
atttaattcctcccaatctttggatttttgtgaaagatgattactttatcat

SEQ ID NO: 7761 - DNA, 78 bp, Staphylococcus aureus
aatacctacctcttttcttagtatatctaggtatttctccgattttggttaatttaaacatctattctcctctgaaaa

SEQ ID NO: 7762 - DNA, 78 bp, Staphylococcus aureus
ttttcagaggagaatagatgtttaaattaaccaaaatcggagaaatacctagatatactaagaaaagaggtaggtatt

SEQ ID NO: 7763 - DNA, 234 bp, Staphylococcus aureus
aaaaacacttccttagccctatatatcaaaagtaataccttcatctttatattcattattttcaaactaccttcactataaaaaacgagtctttttattgaaagccattcgccttaatcaattagacaagttgtattatacgaattagtaaataatcatgattataattcattttaagcatactcaaaaagactggtacatgtataccagtctaattcgaaaaaatatatttag

SEQ ID NO: 7764 - DNA, 234 bp, Staphylococcus aureus
ctaaatatattttttcgaattagactggtatacatgtaccagtctttttgagtatgcttaaaatgaattataatcatgattatttactaattcgtataatacaacttgtctaattgattaaggcgaatggctttcaataaaaagactcgttttttatagtgaaggtagtttgaaaataatgaatataaagatgaaggtattacttttgatatatagggctaaggaagtgttttt

SEQ ID NO: 7765 - DNA, 848 bp, Staphylococcus aureus
ggtttcctccacataatcaatcattgtattcattatgtatgttttataaatcggacaattatatctagtttaacgaccacaaaacatacacaactacattttctctaattatttatataaatattttatcgtttaaaattatatcatgattctctaccgttatgtataacttatttatatttttgtacaagatataatattgtccaacttcaaatatccaaacctattaataataaaactagataccatcgtactctatcatggctttcttataatcgagtagaagcatcatcattacttgattatttgctctttacaacaccgagcgtgcccgtactcggtaattcaataccttgcctaacccgtcactgtgagttgggttaatgataataaagcccacaccttttaaaaagatgtgggtaatttatataatttttatttacatttttaacttataaaaaaaagcgcctatgtcatgatttaccatcacataggcgcttatcaataaattattacttattactttccatttcatctaatttatgcggatttcctgtaattagatgacaacttattcttttcaggggaacattacacttttataatatgttcaaagacaaacttaaccattcacaaatataaagaataatattataaaatcattgaacaaatcgtattttgcaacaattgatatttatattaatgtattgcatttaatttataaaattcatatacatcttaatattctcaatatcgatttgtattgtcaactttatatagatttaaaaaaataatctcatgtctttttttacaaaagtaagttaattattacaaactagtaacaaaaa

SEQ ID NO: 7766 - DNA, 848 bp, Staphylococcus aureus
tttttgttactagtttgtaataattaacttacttttgtaaaaaaagacatgagattatttttttaaatctatataaagttgacaatacaaatcgatattgagaatattaagatgtatatgaattttataaattaaatgcaatacattaatataaatatcaattgttgcaaaatacgatttgttcaatgattttataatattattctttatatttgtgaatggttaagtttgtctttgaacatattataaaagtgtaatgttcccctgaaaagaataagttgtcatctaattacaggaaatccgcataaattagatgaaatggaaagtaataagtaataatttattgataagcgcctatgtgatggtaaatcatgacataggcgcttttttttataagttaaaaatgtaaataaaaattatataaattacccacatctttttaaaaggtgtgggctttattatcattaacccaactcacagtgacgggttaggcaaggtattgaattaccgagtacgggcacgctcggtgttgtaaagagcaaataatcaagtaatgatgatgcttctactcgattataagaaagccatgatagagtacgatggtatctagttttattattaataggtttggatatttgaagttggacaatattatatcttgtacaaaaatataaataagttatacataacggtagagaatcatgatataattttaaacgataaaatatttatataaataattagagaaaatgtagttgtgtatgttttgtggtcgttaaactagatataattgtccgatttataaaacatacataatgaatacaatgattgattatgtggaggaaacc

SEQ ID NO: 7767 - DNA, 163 bp, Staphylococcus aureus
tttttataaccccctactgaaaattaatcacactatgttacaggaaaattaagttgcaattacaaatatttccgtttaattataacaacaatctattgcaaattaaaatactatcaattaccatatggcttacaacctaactaacgaaaggtaggtaaagaaa

SEQ ID NO: 7768 - DNA, 163 bp, Staphylococcus aureus
tttctttacctacctttcgttagttaggttgtaagccatatggtaattgatagtattttaatttgcaatagattgttgttataattaaacggaaatatttgtaattgcaacttaattttcctgtaacatagtgtgattaattttcagtagggggttataaaaa

SEQ ID NO: 7769 - DNA, 142 bp, Staphylococcus aureus
ttattaagctatgttaaaaacacgcggtgggcgaaatcagtttgaattgactgacttcgttttaccgcgtgtttaataatgttatacatatattctaattgcacatttaaacttcgtaaatgccaatgggagtgggacagaa

SEQ ID NO: 7770 - DNA, 142 bp, Staphylococcus aureus
ttctgtcccactcccattggcatttacgaagtttaaatgtgcaattagaatatatgtataacattattaaacacgcggtaaaacgaagtcagtcaattcaaactgatttcgcccaccgcgtgtttttaacatagcttaataa

SEQ ID NO: 7771 - DNA, 718 bp, Staphylococcus aureus
tgtcagcacctctatttttttagtttagataaacaaattgataattattcgaggaataaactcaaataatttacttaaccaagcactcataatgaccatcctttctattgtttaatttgacgagaaagcgtttacatttgtatttaaaaaatatattctccaaagagaatttaaagtgtatacgctaatcatttcaaattattaattaatattatatttggcaaaatttaattagtcaataattagacacaatttaattatgcaaattgtaacttttttacatatatcttttgtgatttttaatatttacatgcttgggtcttgattccaatgatgtattatttttttagattagctgtatggagagatttatgagctattacagttattatgtttgctggtgtcgtattttaaacctaaaaatatcatcccatccacaatgattgtatcaggataaaccgtaatacttgttcctacattaaatatatacagttaattttcttccctcaaagtaagtatcctactatttttaatttattgtttaattactcttgaactacctttaacttaatctcgaatttatgatgattagcataaaaatacaccccataaagttagttttttagtctaactttcgggatgcacatcttagttctaatggagattgtcttttaaataggctatgacatttctatttcaggctagatatatttgtatt

SEQ ID NO: 7772 - DNA, 718 bp, Staphylococcus aureus
aatacaaatatatctagcctgaaatagaaatgtcatagcctatttaaaagacaatctccattagaactaagatgtgcatcccgaaagttagactaaaaaactaactttatggggtgtatttttatgctaatcatcataaattcgagattaagttaaaggtagttcaagagtaattaaacaataaattaaaaatagtaggatacttactttgagggaagaaaattaactgtatatatttaatgtaggaacaagtattacggtttatcctgatacaatcattgtggatgggatgatatttttaggtttaaaatacgacaccagcaaacataataactgtaatagctcataaatctctccatacagctaatctaaaaaaataatacatcattggaatcaagacccaagcatgtaaatattaaaaatcacaaaagatatatgtaaaaaagttacaatttgcataattaaattgtgtctaattattgactaattaaattttgccaaatataatattaattaataatttgaaatgattagcgtatacactttaaattctctttggagaatatattttttaaatacaaatgtaaacgctttctcgtcaaattaaacaatagaaaggatggtcattatgagtgcttggttaagtaaattatttgagtttattcctcgaataattatcaatttgtttatctaaactaaaaaaatagaggtgctgaca

SEQ ID NO: 7773 - DNA, 159 bp, Staphylococcus aureus
tacttatctataacgagttcgcaactttagtaccatcacagcattcatagttaaaatatgttggtgtcgtattttaaacttgaaaatgtcacgttttccacaatatttgtaagtgtataagccatgatccttttccttatatcttagtccatacttgct

SEQ ID NO: 7774 - DNA, 159 bp, Staphylococcus aureus
agcaagtatggactaagatataaggaaaaggatcatggcttatacacttacaaatattgtggaaaacgtgacattttcaagtttaaaatacgacaccaacatattttaactatgaatgctgtgatggtactaaagttgcgaactcgttatagataagta

SEQ ID NO: 7775 - DNA, 303 bp, Staphylococcus aureus
tcgaccaccctttactttcaatactgtatttaaaatcacttggtattttcgttgtttactttacttctctaccacactaaagtgtaatatgattaataacttatcatttttagcaatacattacaacctttttcagaaaattcggtgtattgtttttaaatttttacaaaagaaaaaggcaagacatttgtgcctataaaaatgctaaaccaagatttttatattgaagttgtacttcttgcacatattgtgcttgccttattatgtaaagttattttctttctatctttttattaaatttaa

SEQ ID NO: 7776 - DNA, 303 bp, Staphylococcus aureus
ttaaatttaataaaaagatagaaagaaaataactttacataataaggcaagcacaatatgtgcaagaagtacaacttcaatataaaaatcttggtttagcatttttataggcacaaatgtcttgcctttttcttttgtaaaaatttaaaaacaatacaccgaattttctgaaaaaggttgtaatgtattgctaaaaatgataagttattaatcatattacactttagtgtggtagagaagtaaagtaaacaacgaaaataccaagtgattttaaatacagtattgaaagtaaagggtggtcga

SEQ ID NO: 7777 - DNA, 117 bp, Staphylococcus aureus
taaacattctccctatgttttattatgcacaattataacatttttattatgcggctcataactttttaagaaactgttgggattttaattttattttttagataatgtcatagtatt

SEQ ID NO: 7778 - DNA, 117 bp, Staphylococcus aureus
aatactatgacattatctaaaaaataaaattaaaatcccaacagtttcttaaaaagttatgagccgcataataaaaatgttataattgtgcataataaaacatagggagaatgttta

SEQ ID NO: 7779 - DNA, 52 bp, Staphylococcus aureus
gatatatcattacctttctacattcatttacatatctgattcaacaaaatga

SEQ ID NO: 7780 - DNA, 52 bp, Staphylococcus aureus
tcattttgttgaatcagatatgtaaatgaatgtagaaaggtaatgatatatc

SEQ ID NO: 7781 - DNA, 378 bp, Staphylococcus aureus
aaaatgcctccttttttaaaacttcaaaaaaatataatctacatatttaacgttctatattttgaattttcagaattatattaaaatagtacgagtcacttgatgcaaagtcaatagtagtgactataaaaatgataataatagtcagatttatctcattaactaaatttcacggacttgtaatcacttctttatgtttgaattaattgactagggtataacaatagtgtggtgttttataggtcattctttaaatacatcacagaaaatattcgaattcgaaataaaatgcttgcatctttgttttttaggtggtattgtatgtatatcaagtataaaaaatatatctaagagataaaaatatggaggttttatatt

SEQ ID NO: 7782 - DNA, 378 bp, Staphylococcus aureus
aatataaaacctccatatttttatctcttagatatattttttatacttgatatacatacaataccacctaaaaaacaaagatgcaagcattttatttcgaattcgaatattttctgtgatgtatttaaagaatgacctataaaacaccacactattgttataccctagtcaattaattcaaacataaagaagtgattacaagtccgtgaaatttagttaatgagataaatctgactattattatcatttttatagtcactactattgactttgcatcaagtgactcgtactattttaatataattctgaaaattcaaaatatagaacgttaaatatgtagattatatttttttgaagttttaaaaaaggaggcatttt

SEQ ID NO: 7783 - DNA, 150 bp, Staphylococcus aureus
tctcattacacaatcctcattgttttaatatatatatacgaaatgccaactatatcatccctaggtatagttggcatttttcgtttaactcatgtgtaacaagcactaactgttcaccctaatttaagacgcctttcattcaggtaggtc

SEQ ID NO: 7784 - DNA, 150 bp, Staphylococcus aureus
gacctacctgaatgaaaggcgtcttaaattagggtgaacagttagtgcttgttacacatgagttaaacgaaaaatgccaactatacctagggatgatatagttggcatttcgtatatatatattaaaacaatgaggattgtgtaatgaga

SEQ ID NO: 7785 - DNA, 156 bp, Staphylococcus aureus
ctatctattttatcggtctagtggctgatttcaagctagaaatattgaatgacaatacaactctgttaaaatgatggacgtagataaatatgcgtattgacgctttattttaaaaattaacatgcttataacatgtttatagaaggagattaacct

SEQ ID NO: 7786 - DNA, 156 bp, Staphylococcus aureus
aggttaatctccttctataaacatgttataagcatgttaatttttaaaataaagcgtcaatacgcatatttatctacgtccatcattttaacagagttgtattgtcattcaatatttctagcttgaaatcagccactagaccgataaaatagatag

SEQ ID NO: 7787 - DNA, 151 bp, Staphylococcus aureus
ttttaattaaatacctttcaaaacacgctttgaaaatccgatttataaaggtttttcaaggctgttttttatgcgcatacataacctgatatgtttttaattatgcgcgtgttatactaaattaaattttaatactgcggggtgtcttaaa

SEQ ID NO: 7788 - DNA, 151 bp, Staphylococcus aureus
tttaagacaccccgcagtattaaaatttaatttagtataacacgcgcataattaaaaacatatcaggttatgtatgcgcataaaaaacagccttgaaaaacctttataaatcggattttcaaagcgtgttttgaaaggtatttaattaaaa

SEQ ID NO: 7789 - DNA, 118 bp, Staphylococcus aureus
ttataaatgcacaaacaaaagcaccctaatttgttagtttaagtctaactttagggtgcttttggatgattggtatacagttttactataatgatgtattttagctaaacgacattgt

SEQ ID NO: 7790 - DNA, 118 bp, Staphylococcus aureus
acaatgtcgtttagctaaaatacatcattatagtaaaactgtataccaatcatccaaaagcaccctaaagttagacttaaactaacaaattagggtgcttttgtttgtgcatttataa

SEQ ID NO: 7791 - DNA, 166 bp, Staphylococcus aureus
tttaatcacctactatcttacataataagatagtacattgagaacttttcgtcaactatcttttattgtaaggtagttgttgtacacattccttaaatgactaacaactttgttaatagggtaatacttacggaagtatgttttatttatgggggaggaattaata

SEQ ID NO: 7792 - DNA, 166 bp, Staphylococcus aureus
tattaattcctcccccataaataaaacatacttccgtaagtattaccctattaacaaagttgttagtcatttaaggaatgtgtacaacaactaccttacaataaaagatagttgacgaaaagttctcaatgtactatcttattatgtaagatagtaggtgattaaa

SEQ ID NO: 7793 - DNA, 237 bp, Staphylococcus aureus
atatgtgcttattaaccgttaacaacacgttaacgggttttttatttgtttaaaaggccacttttttgaatttaataaacaccatctataccagttcttcaccgcttctcgaaaaataattatattaatgatttcgttaatttaattttatatttaattattactgtacatcttttgtagttagctttattcttaaattgaaatatgtataaaacatagaaagaaggacgttttaac

SEQ ID NO: 7794 - DNA, 237 bp, Staphylococcus aureus
gttaaaacgtccttctttctatgttttatacatatttcaatttaagaataaagctaactacaaaagatgtacagtaataattaaatataaaattaaattaacgaaatcattaatataattatttttcgagaagcggtgaagaactggtatagatggtgtttattaaattcaaaaaagtggccttttaaacaaataaaaaacccgttaacgtgttgttaacggttaataagcacatat

SEQ ID NO: 7795 - DNA, 147 bp, Staphylococcus aureus
aatatttaaattagtgctcgaatctcattgatttgggcgctttttaatttgtatttaaaatcaacctttgctaaatcaagactccctttttaaaatacgtttatcctttaaatcattgcgtgcttcactgaaaatttgtataaagat

SEQ ID NO: 7796 - DNA, 147 bp, Staphylococcus aureus
atctttatacaaattttcagtgaagcacgcaatgatttaaaggataaacgtattttaaaaagggagtcttgatttagcaaaggttgattttaaatacaaattaaaaagcgcccaaatcaatgagattcgagcactaatttaaatatt

SEQ ID NO: 7797 - DNA, 187 bp, Staphylococcus aureus
aaatcatgaaataaaaaaacaccttcgtttaaattcattttaagtgcgaattcaacgaaagtgatttatttcatattcaatgttttaaatttatacagctgtcactgttactgcacacatacctcagtctcaccttatcatgacacaaaggatattgaaaacacgtataattatctttcctcgtatt

SEQ ID NO: 7798 - DNA, 187 bp, Staphylococcus aureus
aatacgaggaaagataattatacgtgttttcaatatcctttgtgtcatgataaggtgagactgaggtatgtgtgcagtaacagtgacagctgtataaatttaaaacattgaatatgaaataaatcactttcgttgaattcgcacttaaaatgaatttaaacgaaggtgtttttttatttcatgattt

SEQ ID NO: 7799 - DNA, 162 bp, Staphylococcus aureus
ttacatacctccttactctcccaaatttttaacatgttacgctcacttggttatgctaatataacgattttactaataatatttcgataaagatatcattttgtttatatttcccacatttattcaccaaccactaaacaatattaattttataaataattc

SEQ ID NO: 7800 - DNA, 162 bp, Staphylococcus aureus
gaattatttataaaattaatattgtttagtggttggtgaataaatgtgggaaatataaacaaaatgatatctttatcgaaatattattagtaaaatcgttatattagcataaccaagtgagcgtaacatgttaaaaatttgggagagtaaggaggtatgtaa

SEQ ID NO: 7801 - DNA, 161 bp, Staphylococcus aureus
tgactcataatctataacgctaaaaactatcgtaattacatatatatgttaataaaacaaataattttgcataatatttttgttatatgaatgctttttactagagtgcacattgaacatacagtatgattaaatatcatgttatgaaagaaggatatatt

SEQ ID NO: 7802 - DNA, 161 bp, Staphylococcus aureus
aatatatccttctttcataacatgatatttaatcatactgtatgttcaatgtgcactctagtaaaaagcattcatataacaaaaatattatgcaaaattatttgttttattaacatatatatgtaattacgatagtttttagcgttatagattatgagtca

SEQ ID NO: 7803 - DNA, 68 bp, Staphylococcus aureus
agtaacttgtcttgcaactacctttgtattgttgcatttttagacaccctgcacacttcttccattat

SEQ ID NO: 7804 - DNA, 68 bp, Staphylococcus aureus
ataatggaagaagtgtgcagggtgtctaaaaatgcaacaatacaaaggtagttgcaagacaagttact

SEQ ID NO: 7805 - DNA, 76 bp, Staphylococcus aureus
aattcaatgctttcgaatttaaaatttcagcatttctgtttaaaatttaattataatctttaatacaggaggcgct

SEQ ID NO: 7806 - DNA, 76 bp, Staphylococcus aureus
agcgcctcctgtattaaagattataattaaattttaaacagaaatgctgaaattttaaattcgaaagcattgaatt

SEQ ID NO: 7807 - DNA, 133 bp, Staphylococcus aureus
tagtaaaatataaaaatatgggcgtatcttacttattgtaggtagcgccccttttttatgcttcataaacacaacaaaaaggatatgacacaaacttcatgtcacacccttcttttgaaccgcttcattttac

SEQ ID NO: 7808 - DNA, 133 bp, Staphylococcus aureus
gtaaaatgaagcggttcaaaagaagggtgtgacatgaagtttgtgtcatatcctttttgttgtgtttatgaagcataaaaaaggggcgctacctacaataagtaagatacgcccatatttttatattttacta

SEQ ID NO: 7809 - DNA, 282 bp, Staphylococcus aureus
aacaatcaattcctttcaaataaagccctcttttaatttttacaaaaaatttattatacaataattaaattcccttttctcaatttacacaaacatcatcacttagaaagcaccattgcttttgtctaatatgtacgattaatctgtatcctcactcaaaaatctactaagtagcgatagctttcaactctgtaaggttcattcattgaattgtaagtttagataaaggctactactccaaacattatttaaaatgaaattaaatacaaaaggagtgagact

SEQ ID NO: 7810 - DNA, 282 bp, Staphylococcus aureus
agtctcactccttttgtatttaatttcattttaaataatgtttggagtagtagcctttatctaaacttacaattcaatgaatgaaccttacagagttgaaagctatcgctacttagtagatttttgagtgaggatacagattaatcgtacatattagacaaaagcaatggtgctttctaagtgatgatgtttgtgtaaattgagaaaagggaatttaattattgtataataaattttttgtaaaaattaaaagagggctttatttgaaaggaattgattgtt

SEQ ID NO: 7811 - DNA, 91 bp, Staphylococcus aureus
cacttacgattaaaagatgcttcattgagattttgattttaagcaatgcagtataactattaactgatttataaaaaggagagattgaatc

SEQ ID NO: 7812 - DNA, 91 bp, Staphylococcus aureus
gattcaatctctcctttttataaatcagttaatagttatactgcattgcttaaaatcaaaatctcaatgaagcatcttttaatcgtaagtg

SEQ ID NO: 7813 - DNA, 391 bp, Staphylococcus aureus
gcacattccatcggcatataacattgctatgacctttcaagtcagattttaatatcaacaagtagcatttatcgctgcttgttttttatgaattgcttataaaatcgtcatgtttaaacgttatgtcactttgaaaactagcaaacaccataaaagactacaattttttatttttataaacccctttaaatcaacgtttctaaggtttttaaaaatctttttaaatttattttcaaaaaacactgtacattatgccaatatgagcgtatagttggtcttacgtaataaaagctcgtgaattaaattgtagtgtatttgtttagaatatcctcttttttagttatgaatttgttacaaatattaagtgcaaaagcacatggaggttttctat

SEQ ID NO: 7814 - DNA, 391 bp, Staphylococcus aureus
atagaaaacctccatgtgcttttgcacttaatatttgtaacaaattcataactaaaaaagaggatattctaaacaaatacactacaatttaattcacgagcttttattacgtaagaccaactatacgctcatattggcataatgtacagtgttttttgaaaataaatttaaaaagatttttaaaaaccttagaaacgttgatttaaaggggtttataaaaataaaaaattgtagtcttttatggtgtttgctagttttcaaagtgacataacgtttaaacatgacgattttataagcaattcataaaaaacaagcagcgataaatgctacttgttgatattaaaatctgacttgaaaggtcatagcaatgttatatgccgatggaatgtgc

SEQ ID NO: 7815 - DNA, 117 bp, Staphylococcus aureus
tcttacaaaataaaacgactcattataaatgaatcgctttgattaccaacaaggttctaaatcttgttggtatttttttatgctattttggataatatgagacaatacgatgatgat

SEQ ID NO: 7816 - DNA, 117 bp, Staphylococcus aureus
atcatcatcgtattgtctcatattatccaaaatagcataaaaaaataccaacaagatttagaaccttgttggtaatcaaagcgattcatttataatgagtcgttttattttgtaaga

SEQ ID NO: 7817 - DNA, 259 bp, Staphylococcus aureus
ttacatacgcctccagtcaattagtacaatcattacaatcagactatcagataaacttagttaaagtcacctttatgattgactaaatgttttgacatacgacaacatcggggttcgaagactcccttaagacagacctgtataattacgcgcttgtaattttctcaatgccaacttgaatttcacttattaatgatgcaacttttccatgctattcaatgcttgcaaagttagtcctagttaagagattacgttcaca

SEQ ID NO: 7818 - DNA, 259 bp, Staphylococcus aureus
tgtgaacgtaatctcttaactaggactaactttgcaagcattgaatagcatggaaaagttgcatcattaataagtgaaattcaagttggcattgagaaaattacaagcgcgtaattatacaggtctgtcttaagggagtcttcgaaccccgatgttgtcgtatgtcaaaacatttagtcaatcataaaggtgactttaactaagtttatctgatagtctgattgtaatgattgtactaattgactggaggcgtatgtaa

SEQ ID NO: 7819 - DNA, 67 bp, Staphylococcus aureus
gatgttctgcctccaaaaatttattacttaataactgaatacaactaattatcacgcattttccaaa

SEQ ID NO: 7820 - DNA, 67 bp, Staphylococcus aureus
tttggaaaatgcgtgataattagttgtattcagttattaagtaataaatttttggaggcagaacatc

SEQ ID NO: 7821 - DNA, 187 bp, Staphylococcus aureus
cttcaacgtacctttctataattaattcaatacaaaacgtatcattcacacaaagtgtaaaacttaaattttctactgtaaaggcaactcaagcgatgttcataaagctttcatgatactttcataaactagcaataaagggttcaaatgaaggtatatccagctcaaattagggagtgggacagaa

SEQ ID NO: 7822 - DNA, 187 bp, Staphylococcus aureus
ttctgtcccactccctaatttgagctggatataccttcatttgaaccctttattgctagtttatgaaagtatcatgaaagctttatgaacatcgcttgagttgcctttacagtagaaaatttaagttttacactttgtgtgaatgatacgttttgtattgaattaattatagaaaggtacgttgaag

SEQ ID NO: 7823 - DNA, 113 bp, Staphylococcus aureus
tcaacatataaatataaatttttatgtttcacgtaaaacaaaaaaagacaaagctgttatgatcttagctttgtcttttatgtgttagtcatcatgtatacgacatcctacta

SEQ ID NO: 7824 - DNA, 113 bp, Staphylococcus aureus
tagtaggatgtcgtatacatgatgactaacacataaaagacaaagctaagatcataacagctttgtctttttttgttttacgtgaaacataaaaatttatatttatatgttga

SEQ ID NO: 7825 - DNA, 66 bp, Staphylococcus aureus
aatataaacctccttatttgatatcttactagccttcttaagacgatattccgtctatttcaatta

SEQ ID NO: 7826 - DNA, 66 bp, Staphylococcus aureus
taattgaaatagacggaatatcgtcttaagaaggctagtaagatatcaaataaggaggtttatatt

SEQ ID NO: 7827 - DNA, 156 bp, Staphylococcus aureus
attgctactcgcctccttcaacgatgtgaatacattttaaagtaagttattataaccctaaggtcagtcttaaccctaaggtcagtcttacgtttgtctgaggtaagacttcgggatgcgttgagtggttaatgttttccttcccctaccctatcc

SEQ ID NO: 7828 - DNA, 156 bp, Staphylococcus aureus
ggatagggtaggggaaggaaaacattaaccactcaacgcatcccgaagtcttacctcagacaaacgtaagactgaccttagggttaagactgaccttagggttataataacttactttaaaatgtattcacatcgttgaaggaggcgagtagcaat

SEQ ID NO: 7829 - DNA, 126 bp, Staphylococcus aureus
taacatcactcgcttatttatcgtttttatttgaagctatatttaaacttctattgagcttataacataaatttctatttattcttaatttaaacgaaaaaaaagatcactgatgagtcagtgatc

SEQ ID NO: 7830 - DNA, 126 bp, Staphylococcus aureus
gatcactgactcatcagtgatcttttttttcgtttaaattaagaataaatagaaatttatgttataagctcaatagaagtttaaatatagcttcaaataaaaacgataaataagcgagtgatgtta

SEQ ID NO: 7831 - DNA, 948 bp, Staphylococcus aureus
atggcaacaactaaattaggcaataccaaatcggcaagtcgagcaatcaattacgcagagaaacgtgcagaagaaaaaagtggtttgaattgtgatgtagattatgcaaaatcagcttttaaacaaacaagagccttgtatggcaaagaagatgggattcaagcacatacggttattcaatcttttaaacctggtgaagtaacgccagaacaatgtaatcaacttggcttagagctagcagaaaaaatagcccctaatcatcaagtagccgtatatacgcatacagataaagaccattatcataatcatattgtaattaattcagttgatttagaaactggtaaaaaatatcaaagtaataaaaaacaacgtgacttagtaaaaaaagagaatgacaatatctgtcgtgaacatggtttgagtgttacagaacgtggcattgccaaaatgagatacacacaagcagaaaaaggcattgtctttgatagagatgaatattcttggaaagatgaattacgagatttgattgaaaatgcaaaaacccatacaagcaatttagagacgttttcagagcatttagaagaaaaaggggttggagttaaacttcggggcgaaacaatctcatataagcctgaaaatgaaaataaatgggtacgtggacgaacactaggctcagaatatgagaaaggggcaattgatcatgagcatgaaagacatcaaaaacaacaaagagaacccgaatacgcagatgaattcaaaatcaactgggacgccgtcgagcagcacacagaacagcttaaacaacgaagagttgagcgagctcaagagacaaaacaagctcatagtaaaatatctagcagagatacaagagaatcagaaaatcagagagaaagagcaaaaggaaataacatccgaattgaaagaggcgacgaaggactttcgagataa

SEQ ID NO: 7832 - DNA, 48 bp, Staphylococcus aureus
atgtgcaccagtatcgcagtagtagaaattactttatctcattcataa

SEQ ID NO: 7833 - DNA, 849 bp, Staphylococcus aureus
atgaggactgaaaaagaaattttaaatttagtttctgaatttgcttatcaacgaagcaatgtaaaaattattgctctcgagggttcaagaactaatgaaaatataaaaaaagataagtttcaagattatgattttgcttttttcgtatcagatattgagtatttcacacatgaagaaagttggttaagtttatttggagaattattgtttatacagaaaccagaagatatggaattattcccacctgatttagattatggttacagttatataatgtattttaaagatggcataaaaatggatattacattaattaatttaaaagatttaaatcgttattttagtgattctgatggtcttgtaaaaattttagttgataaagataatttagtaactcaagaaattgttccagatgactcaaattattggttaaaaaaaccaacagaacgagaattttatgattgctgtaatgagttttggagtgtctcaacgtatgtagcaaagggtgtttttagaagagaaatattatttgctttagatcatttcaataatattttacgtcctgaattattaagaatgatttcttggtatattggctttaataggggttttgattttagtttaggaaagaattataagtttataaacaaatatttaactgataaagaattcaatatgcttttagctacttttgagatgaatggatatagaaagacataccaatcttttaagctttgttgtgaattatttaaatattattcaaataaagtaagttgtttaggaaattataactatccaaattacgaaaaaaatattgagaattttattcgtaataattatgagaattaa

SEQ ID NO: 7834 - DNA, 609 bp, Staphylococcus aureus
atgattattggctatgcgagagtatcatcgcttgatcaaaatttagaaagacaactagaaaatttaaaaacgtttggtgctgaaaaaatatttacagaaaaacagtctgggaaatctattgaaaatagaccgatacttcaaaaagcacttaactttgtgagaatgggagatcggtttatagtggaatccatcgatcgtttaggtcgtaattacaatgaagtgattcatactgttaattatttaaaagacaaagaagttcaattgatgattactagcttgcctatgatgaacgaggttattggcaatccattactagataaatttatgaaagacctaatcattcaaatattagcaatggtttcggaacaagaacgaaatgaaagtaaacgtcgacaagcacaagggattcaagttgcgaaagaaaaaggcgtatataaaggacgacctttgctttattcaccgaacgcgaaagatccccaaaaacgtgttatctatcatcgagttgtcgaaatgttagaagaagggcaagcaattagtaagattgcgaaagaggttaatattacaagacagacagtttatagaattaaacatgataatggattatcttga

SEQ ID NO: 7835 - DNA, 1293 bp, Staphylococcus aureus
gtgagattgaacaaaggaagtataattgaaaaaatgaaaaatcaaaatattaaaacacaaactgaattagctgaaaaaattgatatatctaaaagccaactatcattcatgttttcagatgaatatgagcctcttaaaaagaatgttattaagttggcagatgttttaaaagtatctcctaatgacattatattagacgaagaagaccaaatgccaattaactctgattttaatagatatgattataaattagatgaattcatagatgtaagcaatgtaagaaagaataaagattataatgtattcgaaacctttgccggggctggtggactagcactaggcttagaaagcgctggcttgtcaacttatggagcagttgaaattgataaaaatgccgcagaaactttgagaattaataggccaaaatggaaagttattgagaacgatattgaattcattgctgataatttggatgaatttatagatgaagagatagatatattgagtggggggtatccttgccaaacatttagttatgcaggaaaaagaaatggatttgcggatacaagaggaacactgttctatccatatagtaaaattttaagtaaattaaagcctaaagcttttatagcagaaaatgttagaggattagtcaatcacgacgatggcaaaacattagaagtaatgttaaaagtttttattaaggaaggttatgaggtttactggaatattttgaactcgtggaattatgatgtagcgcaaaaaagagaaagaatagtaattataggtatcagagaagatttagtaaaagaacagaaatatccatttagatttcctttagctcaagtatacaaacctgtattgaaagatgtactgaaagatgttccaaagagtaaagttacagcatacagtgacaaaaaaagagaagtaatgaaattagttccaccaggaggctgttgggtagatttacctgaacaaatagctaaagattatatggggaaaagttggtattcaggtggtggtaaaagaggaatggctagaaggataagttgggacgagccttgtttgacgttaacaacatctcctagtcaaaaacaaacagagagatgtcatcctgatgaaactcgaccatttagtatcagagagtatgctagaattcaatcgttccctgatgaatgggaattttctggaggagtaggtgcacaatacagacaaataggtaacgctgtacctgtaaatctagctaaatatataggtaaatctttagtacattatttaaatcaatttaattga

SEQ ID NO: 7836 - DNA, 786 bp, Staphylococcus aureus
atgactaataagtatttaagttttatcactgatgaggatctattcgaatgtattgaatttttgtatacagagtatgaaaaagcgcttgaaggaattgattttgataaattttttaaaaatagaattgatacatttaagatgacttttgatatgggtattaataatttgagtgagcaagattggttagcggcagagttgcaaagacaagttgagaagactattactaatcatgtaggaacatttcatgaaaagttaattggaaaaatagagggctatactaattatccagttggttatgattatgatgttgctaaggatgataatacactttttgcagaaattaaaaataagcataatactttgaccggtactcatactaaaagtctgtttcaaaaaatatgtggctatgcagaaaaatatccagacgccatttgctattatgttagaataatagacactaaaagtcgaaatgatatttgggaatttagaagtggaagtattgatgaaaacacaagagaaaaaccaagattttctcacccaagagtaagaattgcttctggagatcaattttataaaattgttactggagaagaagatgctttcaagcaactagcttataacattcctatagcattagatgattggatagaaacgaaaagggctaaaaaaggatcaagcttaggactatttgcagaactttatcaacaagcaaaggcaaataaccgaacattatcagaagaaataatttctattaattatcctaaatctaattacattagtttctag

SEQ ID NO: 7837 - DNA, 87 bp, Staphylococcus aureus
ggtaccattgctggtcagtatagagtttatagcgaagaaggcgctaataaaagcggtttagcctggccttcagcatttaaggtatag

SEQ ID NO: 7838 - DNA, 466 bp, Staphylococcus aureus
  misc_feature (146)..(146): n is a, c, g, or t
  misc_feature (161)..(161): n is a, c, g, or t
aaaagaaggtaatgacatttcaatcataacatacggtgcaatggttcaagaatcaatgaaagctgcagaagaacttgaaaaagaaggtaatgacatttcaaatcaatcacatcggtgcaaatggttcaagaaatcaaatgaaagcncgcagaagaacttgnaaaaagatggttattctgttgaagtaattgacttacgtactgttcaaccaatcgatgttgatacaattgtagcttcagttgaaaaaactggtcgtgcagttgtagttcaagaagcacaacgtcaagctggtgttggtgcagcagttgtagctgaattaagtgaacgtgcaatcctttcattagaagcacctattggaagagttgcagcagcagatacaatttatccattcactcaagctgaaaatgtttggttaccaaacaaaaatgacatcatcgaaaaagcaaaagaaactttagaattttaa

SEQ ID NO: 7839 - DNA, 450 bp, Staphylococcus aureus
gaattcccagaaaatcacgtcgacttaattcttaatttaaatacttctatcggatataaaaaaaatgatttaaaaaatttgttaagaaatagttatacctccttaaaaaaaggtggtattttaattatagatttgatgaaccccgcctttttctataaaaattttgaagaacaaatgattttcaacttcaaagattacgaagttaatcaaactattaaaataaataaaatttataatagtatagtttcaacatgggatgtttataaaaataacgaatatagcaaagacctttcaagagaattaaaatttaaattatatactactaatgatataatttgcagtagtttgtattataactttactttatccaatatatctttctatggagacatgaaaggaaatgaatttcatgaaaattcaccaagactaatagtaaaaataacgaaataa

SEQ ID NO: 7840 - DNA, 393 bp, Staphylococcus aureus
atgtataattttgattattctaaattaccaattaaaaatattcaaaaaatatttcctattgcagggggatatgtgaatctatctttttcagttgatgcttccaacaaaaaatattttttaaagctacaacctaatactaaatcaaatttttttgattatgagttatccagtttaaaagaattaactgataaaaatattcctgttcctcaaattattaataaaggagaattagacaataattcttttttactgttagagttcattgaaaatggccatgcttatcctgaaagctatagaaaactaggtaaaatagttgcaaacatgcataaaaatataaattcactaaatctatttggctttagtcataatttcaatggaggaacgattgaattc

SEQ ID NO: 7841 - DNA, 52 bp, Staphylococcus aureus
gatctacggattttcgccatgccacgaaattagcatcatgctagcaagttaa

SEQ ID NO: 7842 - DNA, 558 bp, Staphylococcus aureus
ttggataaaaaagataaaacacctacagttgttggtggaattaacttaagtacccgttttaaaagtaaaacgttttgggtagctactgtatctgcactagcagtatttaccaatcaattaacaggtgcttttggtttagactattctagtcaagtagagcaaggtgttaatattgttggttctatcttaacactgcttgcaggtttaggtattttagtagataacaatactaaaggtattaaagatagtgttattgttcaaacagattaccatgaaccacgtgattctaaagacccagaaaaagcattgacttgggaacataataaagttgaggacaatgtggttgacaatactaaaactcctaaggaatatggtactgatgaagacttttcagatgtagaccctcatgtatatgatgcggacgaagagccttttaaagaccaagctaaaccttatggtgtcaactgggatgagacagtagatacgactaaaaatatagacactaaagaggagggagttattgatgaaaaccctgaaacaagcagagtcctacattaa

SEQ ID NO: 7843 - DNA, 1404 bp, Staphylococcus aureus
atgaaaaccctgaaacaagcagagtcctacattaagagtaaagtaaatacaggaactgattttgatggtttatatgggtatcagtgtatggacttagcagtagattatatttaccatgtaacagatggtaaaataagaatgtggggtaatgctaaggatgcgataaataactcttttggtggtactgctacggtatataaaaactaccctgcttttagacctaagtacggtgatgtagtcgtatggactactggtaattttgcaacttatggtcatatcgcaatagttactaaccctgacccttatggagaccttcaatatgttacagttcttgaacaaaactggaacggtaacgggatttataaaaccgagttagctacaatcagaacacacgattacacaggaattacacattttattagacctaactttgctactgaatcaagtgtaaaaaagaaagatacaaagaaaaaaccaaaaccatcaaatagagatggaataaataaagataaaattgtatatgatagaactaatattaattacaatatggttaaacgaggatataatcctgtaggtgtaattttacacaacgatgctggaagtatgacaggattacagtataaaaataatttgcaaaatgcgggatataaccgatgggctcaaggtatagctcactcatatatttctgaaggtcaagtatggcaagccttaggagaaagtcgtatagcttggcattgtgctaatcagtggggaaataaaaacctttatggtattgaaatatgccaatcaatgactgcatctgatgagcaatttcttaaaaatgaacaaacagcgttttatgaggcatcacgtatgcttaaaaaatggggactaaagccagataaaaatacagtacgactacatatggaatattaccaaactgcatgtcctcatcgctctatgaagttgcatgtaggtaaagaccctactaaaacttctatcactcaggctgatatagaaaaacttaaagaatattttattaaacaaattaaaatgtattatgaaggtaaaacaccagtaccaacagtagtaaatcaaaaagccaaaacaaaaccagttaagcagtcaagtacaagtggatggaacgttaataattatggtacttactataaatccgagagcgctacgtttaagtgtacagcacgtcaaggtatcgttacacgatatactggaccttttactacgtgtcctcaagcaggagtactatattatggtcaatctgtaacttatgatacggtttgtaagcaagatggttatgtatggattagttggactactaatggaggtcaagatgtttggatgcctgtaagaacatgggataaaaacacagacattatgggtcagctatggggagatatatattaa

SEQ ID NO: 7844 - DNA, 1887 bp, Staphylococcus aureus
atggcactgcctaaaacgggtaaaccaacggcaaaacaggtggttgactgggcaatcaatttaatcggcagtggtgtcgatgttgatggttattatggtcggcaatgttgggatttacctaactatatttttaatagatactggaactttaagacaccaggcaacgcaagagatatggcatggtatagatatcctgaagggtttaaagtgtttagaaacacttctgattttgtccctaaaccaggtgatatagcagtgtggacaggtggtaattacaattggaacacttggggacacactggtattgttgtaggtccatcaactaaaagttacttttatagtgtagatcagaattggaataactctaactcttacgttggtagtcctgcagcaaagataaaacatagttattttggtgtaactcattttgttagacccgcatacaaagcagaaccgaaacctacaccaccagcacaaaacaatcctgcacctaaagaccctgaaccatcaaaaaaaccggaatcaaacaaacctatttataaagtagtaacaaaaattttgtttactactgcacatatagagcacgtaaaagcaaatcgctttgtacactacatcaccaaatcagataaccacaataataaacctaataaaattgttatcaaaaacacaaatacagcattatctacaatagatgtttataggtatagagatgaattagataaagatgaaatccctcactttttcgtcgatagattaaatgtatgggcgtgcagacctatagaagattctattaacggttatcacgattctgtagtgttatctatcacagaaacaagaacggcattaagtgataattttaaaatgaatgaaatcgaatgtttgtcattagctgaatcaatattaaaagctaataataagaagatgagtgccagcaatattatcgttgacaataaggcttggagaacgttcaaattgcacactggtaaagattctttgaaatccagtagttttacctcaaaagactatcaaaaggccgttaacgagctaattaagctatttaacgacaaagataaattgttgaacaataaaccaaaagacgtcgttgaaagaataaggattagaacaatagttaaagaaaatacaaaatttgtgcctagcgagttaaaacctagaaacaatattagggataagcaagacagtaaaatcgatagggttattaataattacactttaaaacaagctttgaatattcaatacaagcttaatccgaagccccaaacatctaatggtgtaagttggtataatgctagtgtgaatcaaattaaatctgctatggacactactaaaatatttaataataacgtacaggtttatcaattcttgaaactgaatcaataccaaggaattccagttgataaattaaataagttgcttgtaggcaaagggacattggctaatcaaggacatgcatttgcagatggatgtaaaaagtataatatcaacgaaatctatctgattgcacatcgatttttagaaagtgctaatggtacatcattctttgcgagtggcaaaacaggagtatataactactttggaataggtgctttcgataataatccgaacaatgcaatggcgtttgcgcggagtcacggatggacatcaccaaccaaagcaattattggtggcgctgaatttgttggaaaagggtatttcaatgtaggtcaaaacactttgtatcgtatgaggtggaacccgcaaaaaccaggcacacatcaatatgctactgatattagttgggctaaagtacaagcgcagatgataagtgcgatgtataaagaaatcggattaacaggtgattattttatatacgatcaatataaaaaataa

SEQ ID NO: 7845 - DNA, 174 bp, Staphylococcus aureus
atgttgatggttattatggtcggcaatgttgggatttacctaactatatttttaatagatactggaactttaagacaccaggcaacgcaagagatatggcatggtatagatatcctgaagggtttaaagtgtttagaaacacttctgattttgtccctaaaccaggtgatatag

SEQ ID NO: 7846 - DNA, 285 bp, Staphylococcus aureus
atgtttatgaatttgtccttcatttttaactccacaacaataacaggccgaagcttatacgttagtacagcattaaccactgttgctttttttcctttgataatgacgtcaatttcttggtttatatattttatattttcatcttttattcttagtaattctaaggtatcattacacataggcgcacttgtctcctttagtttgggtttggtcactttaaattatagaggcaattgcgctttttgtgtattaaaaaaagcaggaagttttaccttcccaccataa

SEQ ID NO: 7847 - DNA, 555 bp, Staphylococcus aureus
atgatttttggctatgctcgagtgagtacggatgatcaaaatcttagtttacaaattgatgcacttactcattatggaattgataaattatttcaagaaaaagtaactggtgcgaaaaaagaccgaccgcaattagaagaaatgatcaacctactacgtgaaggagattctgttgtcatttacaagttagatcgaatttcacgatcaactaaacatttgattgaactttctgaattatttgaagaacttagtgtcaattttatatctattcaagataacgtagatacttcaacgtctatgggaagattctttttccgagttatggctagtttagcagaactggaacgggatattattattgaacgaactaactctggtcttaaggcagccagagtccgaggaaaaaaagggggccgtccaagtaaaggtaagctatcaattgatttagctttaaaaatgtatgacagcaaagagtattctattcgtcaaattcttgatgcctctaaattaagcaaaacaaccttttaccgttacctcaataaaaggaatgcttaa

SEQ ID NO: 7848 - DNA, 836 bp, Staphylococcus aureus
aagctttatccgtttgtacattagcgcctttaggggaacatcaaattatcgatgggttgggtgtccaagatagcaaacgtttcatccatcattataacttcccacaattctctgttggttcaacaggacgcgcgggctcaccaggtcgtcgtgaaatcggtcacggtgcgttaggtgaacgtgccttagcacaaattattccatcagaagaagacttcccttacacaatccgcttagtagcagaagtgttagaatcaaatggttcttcttcacaagcaagtatttgcgcgggaacattagcattaatggatgcgggtgtgccaattaaagcgccagttgcaggtattgcaatgggtcttgttagtgatggcgaaaactatacaatcttaacagatattcaaggtttagaagaccaccttggcgatatggactttaaagtagcaggaacgaaagacggaatcactgctttacaaatggacatcaaaatccaaggaattacagaacaaattttaacggaagcattagaccaagcgaagaaagcacggatggaaattctagaagaattaacaacaacgattgctgctcctcgtgaagaattaagtcaatatgcaccgaaaattgaaatgattcaaattaaaccagcgaaaattaaagatgtcattggtaaaggtggcgaaacaatcaacagcattattgatgaaaccggcgttaagattgatatcgatcaagacggtaacgtaagtattgcttcatcagatgctgaaatgattaaaaaagccatcaagattattgaagaattaaccaaagaagttgaagtcacatcaagtatcacttag

SEQ ID NO: 7849 - DNA, 162 bp, Staphylococcus aureus
atggcgagactcctgagggagcagtgccagtcgaagacaggggccccaacacagaagctgacatatagtcagcttacaacaatgtgccggttggggtggctgagacggcaccctaggaagggacccgtcatcaaaaattctatttatagaattttacagtaa

SEQ ID NO: 7850 - DNA, 184 bp, Staphylococcus aureus
atggaaaaaggaaatcaaggtattaaatggtctagtttaataatgggtgtattattattaatgttggcagtcgttatttttacatttccaattgaaaatttttatgctattacctggttgattggactgtttgtattaattaacggtgtgattcaaatcgtttaccgtagaaaagcaaaagctt

SEQ ID NO: 7851 - DNA, 3516 bp, Staphylococcus aureus
atgattaacagggataacaaaaaggcaataacaaaaaagggtatgatttcgaatcgcttaaacaaattctcgattagaaagtatactgtaggaactgcatcgattttagtaggtacgacattgatttttggtctagggaaccaagaagctaaagctgctgaaaacactagtacagaaaatgctaagcaagatgaggcatcggctagtgataataaagaagtagtgtcagaaactgaaaataattcgacacaaaaaaatgatttaacaaatccaattaagaaagaaacaaatactgattcacaccaagaagctaaagaagcaccaactacatctagtactcaacaacagcaaaataatgctacaacttcaactgaaactaagcctcaaaacattgaaaaagaaaatgttaaaccttcaactgataaaactgcgacagaagatacatctgttattttagaagagaagaaagcgccaaataatacaaataacgatgtaactacaaaaccatctacaagtgaaattcaaacaacaccaactacacctcaagaatctacaaatattgaaaattcacaaccgcaaccaacgccttcaaaagtagacaatcaagttacagatacaactaatccaaaagaaccagtaaatgtgtcaaaagaagaacttaaaaataatcctgagaaattaaaagaattagttagaaatgatagcaatacagatcgttcaactaaaccagttgctacagctccaacaagtgttgcaccaaaacgtgtaaacgcaaaaatacgctttgcagttgcacaaccagcagcagttgcttcaaacaatgttaatgatttaattacagtgacaaaacagatgattactgaaggtattaaagatgatggtgttattcaagcacatgacggtgaacatattatttatacatccgattttaaaattgataatgctgtaaaagctggggatacaatgacagtaaagtatgacaaggagacgattccttcagatattacggatgatttcacaccagttgatattacagatccatcaggtgaagtaatagcgaagggaacatttgatttaaatacgaaaacaattacttacaaatttactgattatgttgatagatatgagaatgtcaatgcaaaattagaactaaactcatatattgataagaaagaagtcccaaatgaaacaaatttaaatttaacatttgctacagcagataaagaaactagtaaaaatgttaaagttgaatatcaaaaacctattgtaaaagatgagtcaaatattcaatctatatttagccatttagatactactaagcatgaggtagaacagactatttatgtgaatccattaaaattaaatgctaaaaacacaaatgttactattaaaagtggtggtgtagcagataatggtgattattatactggagacggtagtactataattgatagtaatacggaaattaaagtctataaagttgcatcgggtcaacaattacctcaaagtaataaaatttatgattatagtcaatatgaagatgttaccaattcagtaactattaataaaaattatggtactaacatggctaatattaattttggtgacattgattctgcatatatagttaaagttgttagtaaatatacacccggcgccgaggacgacttagcagttcaacagggtgtaagaatgactacaacaaataaatataattattcatcatatgcaggttacacaatactattttatcaactactgactctggtggtggtgacggtatctgttaaacctgaagaaaagttatacaaaattggtgactatgtatgggaagacgttgataaagtcggtgttcaaggtacagattcaaaagaaaagccaatggcaaacgttttagttacattaacttacccggacggtactacaaaatcagtaagaacagatgctaacggtcattatgaattcggtggtttgaaagacggagaaacttatactgttaaattcgaaacgccagctggatatcttccaacaaaagaaaatggaacaactgatggtgaaaaagactcaaatggtagttctgtaactgttaaaattaatggtaaagatgatatgtctttagacactggtttttataaagaacctaaatataatcttggtgactatgtatgggaagatacgaataaagatggtatccaagatgctaatgaacctggtatcaaagatgttaaggttacattaaaagatagtactggaaaagttattggtacaactactactgatgcctcgggtaaatataaatttacagatttagataatggtaactatacagtagaatttgaaacaccagcaggttacacgccaacggttaaaaacactacagctgaagataaagattctaatggtttaacaacaacaggtgttattaaagatgcagataattggacattagacagtggtttctataaaacaccaaaatatagtttaggtgattatgtttggtacgacagtaataaagacggcaaacaagattcaactgaaaagggtattaaagatgtgacagttacattgcaaaacgaaaaaggcgaagtaattggaacaactaaaacagatgaaaatggtaaatatcatttcgataatttagatagcggtaaatacaaagttatttttgaaaagcctgctggcttaacacaaacaggtacaaatacaactgaagatgataaagatgcagatggtggcgaagttgacgtaacaattacggatcatgatgatttcacacttgataacggatacttcgaagaagatacatcagacagcgactcagactcagacagtgattccgattcagacagtgactcagactcagacagtgactcagactcagatagcgattcagattcagaaagcgactcagactcagacagtgactcagattcagatagcgattcagactcagatagtgattcagattcagaaagcgactcagattcagaaagcgattcagactcagatagcgattcagactcggatagcgactcagactcagatagcgactcagattcagactcagacagtgactcagacagtgattcagactcagatagcgattcagattcagacagtgactcagactcagacagtgactcagattcagatagcgactcagattcagatagcgactcagactcagatagcgactcagactcagacagtgactcagattcagacagcgattcagactcagatagcgactcagattcagacagtgactcagactcagatagcgattcagattcagacagtgactcagactcagatagcgattcagattcagatgcaggaaaacatacacctgtgaaaccgatgagtgctactaaagaccatcacaataaagcaaaagcattaccagaaacaggtagtgaaaataacggctcaaataacgcaacgttatttggcggattattcgcagcattaggttcattattgttatttggtcgtcgtaaaaaacagaataagtaa

SEQ ID NO: 7852 - DNA, 4248 bp, Staphylococcus aureus
atgacagagcaacaaaaatttaaagtgcttgctgatcaaattaaaatttcaaatcaattagatgctgaaattttaaattcaggtgaactgacacgtatagatgtttctaacaaaaacagaacatgggaatttcatattacattaccacaattcttagctcatgaagattatttattatttataaatgcaatagagcaagagtttaaagatatcgccaacgttacatgtcgttttacggtaacaaatggcacgaatcaagatgaacatgcaattaaatactttgggcactgtattgaccaaacagctttatctccaaaagttaaaggtcaattgaaacagaaaaagcttattatgtctggaaaagtattaaaagtaatggtatcaaatgacattgaacgtaatcattttgataaggcatgtaatggaagtcttatcaaagcgtttagaaattgtggttttgatatcgataaaatcatattcgaaacaaatgataatgatcaagaacaaaacttagcttctttagaagcacatattcaagaagaagacgaacaaagtgcacgattggcaacagagaaacttgaaaaaatgaaagctgaaaaagcgaaacaacaagataacaagcaaagtgctgtcgataagtgtcaaattggtaagccgattcaaattgaaaatattaaaccaattgaatctattattgaggaagagtttaaagttgcaatagagggtgtcatttttgatataaacttaaaagaacttaaaagtggtcgccatatcgtagaaattaaagtgactgactatacggactctttagttttaaaaatgtttactcgtaaaaacaaagatgatttagaacattttaaagcgctaagtgttggtaaatgggttagggctcaaggtcgtattgaagaagatacatttattagagatttagttatgatgatgtctgatattgaagagattaaaaaagcgacaaaaaaagataaggctgaagaaaagcgagtagaattccacttgcatactgcaatgagccaaatggatggtatacccaatattggtgcgtatgttaaacaggcagcagactggggacatccagccattgcggttacagaccataatgtggtgcaagcatttccagatgctcacgcagcagcggaaaaacatggcattaaaatgatatacggtatggaaggtatgttagttgatgatggtgttccgattgcatacaaaccacaagatgtcgtattaaaagatgctacttatgttgtgttcgacgttgagacaactggtttatcaaatcagtatgataaaatcatcgagcttgcagctgtgaaagttcataacggtgaaatcatcgataagtttgaaaggtttagtaatccgcatgaacgattatcggaaacgattatcaatttgacgcatattactgatgatatgttagtagatgcccctgagattgaagaagtacttacagagtttaaagaatgggttggcgatgcgatattcgtagcgcataatgcttcgtttgatatgggcttcatcgatacgggatatgaacgtcttgggtttggaccatcaacgaatggtgttatcgatactttagaattatctcgtacgattaatactgaatatggtaaacatggtttgaatttcttggctaaaaaatatggcgtagaattaacgcaacatcaccgtgccatttatgatacagaagcaacagcttacattttcataaaaatggttcaacaaatgaaagaattaggcgtattaaatcataacgaaatcaacaaaaaactcagtaatgaagatgcatataaacgtgcaagacctagtcatgtcacattaattgtacaaaaccaacaaggtcttaaaaatctatttaaaattgtaagtgcatcattggtgaagtatttctaccgtacacctcgaattccacgttcattgttagatgaatatcgtgagggattattggtaggtacagcgtgtgatgaaggtgaattatttacggcagttatgcagaaggaccagagtcaagttgaaaaaattgccaaatattatgattttattgaaattcaaccaccggcactttatcaagatttaattgatagagagcttattagagatactgaaacattacatgaaatttatcaacgtttaatacatgcaggtgacacagcgggtatacctgttattgcgacaggaaatgcacactatttgtttgaacatgatggtatcgcacgtaaaattttaatagcatcacaacccggcaatccacttaatcgctcaactttaccggaagcacattttagaactacagatgaaatgttaaacgagtttcattttttaggtgaagaaaaagcgcatgaaattgttgtgaaaaatacaaacgaattagcagatcgaattgaacgtgttgttcctattaaagatgaattatacacaccgcgtatggaaggtgctaacgaagaaattagagaactaagttatgcaaatgcgcgtaaactgtatggtgaagacctgcctcaaatcgtaattgatcgattagaaaaagaattaaaaagtattatcggtaatggatttgcggtaatttacttaatttcgcaacgtttagttaaaaaatcattagatgatggatacttagttggttcccgtggttcagtaggttctagttttgtagcgacaatgactgagattactgaagtaaacccgttaccgccacactatatttgtccgaactgtaaaacgagtgaatttttcaatgatggttcagtaggatcaggatttgatttacctgataagacgtgtgaaacttgtggagcgccacttattaaagaaggacaagatattccgtttgaaaaatttttaggatttaagggagataaagttcctgatatcgacttaaactttagtggtgaatatcaaccgaatgcccataactacacaaaagtattatttggtgaggataaagtattccgtgcaggtacaattggtactgttgctgaaaagactgcttttggttatgttaaaggttatttgaatgatcaaggtatccacaaaagaggtgctgaaatagatcgactcgttaaaggatacatggatatttatgattttacgccgatacaatatcctgccgatgatcaaaattcagcatggatgacgacacattttgatttccattctattcatgataatgtattaaaacttgatatacttggacacgatgatccaacaatgattcgtatgcttcaagatttatcaggaattgatccaaaaacaatacctgtagatgataaagaagttatgcagatatttagtacacctgaaagtttgggtgttactgaagatgaaattttatgtaaaacaggtacatttggggtaccgaattcggacaggattcgtcgtcaaatgttagaagatacaaagccaacaacattttctgaattagttcaaatctcaggattatctcatggtacagatgtgtggttaggcaatgctcaagaattaattaaaaccggtatatgtgatttatcaagtgtaattggttgtcgtgatgatatcatggtttatttaatgtatgctggtttagaaccatcaatggcttttaaaataatggagtcagtacgtaaaggtaaaggtttaactgaagaaatgattgaaacgatgaaagaaaatgaagtgccagattggtatttagattcatgtcttaaaattaagtacatattccctaaagcccatgcagcagcatacgttttaatggcagtacgtatcgcatatttcaaagtacatcatccactttattactatgcatcttactttacaattcgtgcgtcagactttgatttaatcacgatgattaaagataaaacaagcattcgaaatactgtaaaagacatgtattctcgctatatggatctaggtaaaaaagaaaaagacgtattaacagtcttggaaattatgaatgaaatggcgcatcgaggttatcgaatgcaaccgattagtttagaaaagagtcaggcgttcgaatttatcattgaaggcgatacacttattccgccgttcatatcagtgcctgggcttggcgaaaacgttgcgaaacgaattgttgaagctcgtgacgatggcccatttttatcaaaagaagatttaaacaaaaaagctggattatatcagaaaattattgagtatttagatgagttaggctcattaccgaatttaccagataaagctcaactttcgatatttgatatgtaa

SEQ ID NO: 7853 - DNA, 1629 bp, Staphylococcus aureus; identical to SEQ ID NO: 1

SEQ ID NO: 7854 - DNA, 477 bp, Staphylococcus aureus; identical to SEQ ID NO: 2

SEQ ID NO: 7855 - DNA, 477 bp, Staphylococcus aureus; identical to SEQ ID NO: 3

SEQ ID NO: 7856 - DNA, 1173 bp, Staphylococcus aureus; identical to SEQ ID NO: 4

SEQ ID NO: 7857 - DNA, 705 bp, Staphylococcus aureus; identical to SEQ ID NO: 5

SEQ ID NO: 7858 - DNA, 520 bp, Staphylococcus aureus
tatgttagctgctgagctaggcgaagatgagacattagcgaaacgagctggacttttacatgatgttggtaaagcaattgatcatgaagtagaaggtagtcatgttgaaatcggtgtagaattagcgaaaaaatatggtgaaaatgaaacagttattaatgcaatccattctcaycatggtgatgttgaacctacatctattatatctatccttgttgctgctgcagatgcattgtctgcggctcgtccaggtgcaagaaaagaaacattagagaattatattcgtcgattagaacgtttagaaacgttatcagaaagttatgatggtgtagaaaaagcatttgcgattcaggcaggtagagaaatccgagtgattgtatctcctgaagaaattgatgatttaaaatcttatcgattggctagagatattaaaaatcagattgaagatgaattacaatatcctggtcatatcaaggtgacagttgttcgagagactagagcagtagaatatgcgaaataa

SEQ ID NO: 7859 - DNA, 520 bp, Staphylococcus aureus
gtgaatttattaagcctcctactcattttgctggggatcattctaggagttgttggagggtatgttgttgcccgaaatttgttgcttcaaaagcaatcacaagctagacaaactgccgaagatattgtaaatcaagcacataaagaagctgacaatatcaaaaaagagaaattacttgaggcaaaagaagaaaaccaaatcctaagagaacaaactgaagcagaactacgwgaaagacgtagygaacttcaaagacaagaaacccgacttcttcaaaaagaagaaaacttagagcgyaaatctgatctattagataaaaaagatgagattttagagcaaaaagaatcaaaaattgaagaaaaacaacaacaagtagatgcaaaagagagtagtgttcaaacgttaataatgaagcatgaacaagaattagaacgcatctccggtctcactcaagaagaagctattaatgagcaacttcaaagagtwgaggaagaactgtcacaagatattgcagtacttg

SEQ ID NO: 7860 - DNA, 520 bp, Staphylococcus aureus
ttaaagaaaaagaaaaagaagctaaagaaaaagttgataaaacagcaaaagaattattagctacagcagtacaaagattagcagcagatcacacaagtgaatcaacggtatcagtagttaacttacctaatgatgagatgaaaggtcgaatcattggacgwgaaggacgaaacatccgyacacttgaaactttaactggcattgatttaattattgatgacacaccagaagcrgttatattatctggttttgatccaataagaagagaaattgctagaacagcacttgttaacttagtatctgatggacgtattcatccaggyagaattgaagatatggtcgaaaaagctagaaaagaagtagacgatattatwagagaagcaggtgaacaagctacatttgaagtgaacgcacataatatgcatcctgacttagtaaaaattgtagggcgtttaaactatcgtacragttacggtcaaaatgtacttaaacattcaattgaagttgcgcatcttgctag

SEQ ID NO: 7861 - DNA, 3336 bp, Staphylococcus aureus
atgtttgataagaataaccctcaraactaycaagctagrggraatgtagctgcattaggtcgtgtgaatgcaaatgattctacagatcayggtaactttaacggtatttcaaaaactgttaatgtaaaaccagattcagaattaattatcaactttactactatgcaaacgaatagtaagcaaggtgcaacaaatttagttattaaagatgctaagaaaaatactgaattagcaactgtaaatgtagctaagactggtactgcacacttatttaaagtaccaacagatgctgatcgtttagatttasaatttattcctgacaatacagcagttgctgatgcttcaagaattacaacaaataaagatggttataaatactattcattcattgataatgtaggtctattctcaggatcacatttatatgtcaaaaatagagatttagcaccgaaagcaacwaayaataaagaatwtacwattaatactgaaatcggtaacaatggtaattttggtgcttcattgaaagcagatcaatttaaatatgaagtaacattaccacaaggtgtaacttacrttaatgattcattaactacaacattccctaatggtaatgaagacagtacagtattgaaaaatatgactgtyaattatgatcaaamtgcaaataaagttacatttacaagccaaggtgtgacaacrgcacgtggtacacayackaaagaagtkttattcccagataaatctttaaaattatcatataaagttaatgttgcgaatatygatacacctaaaaatattgattttaatgaaaaattaacatatcgtactgcttcagatgttgtaattaataatgcgcaaccagaagttacactaactgcagatccattttcagtagcrgttgaaatgaacaaagatgcgttgcaacaacaagtwaactcacaagttgatratagtcattacacaacagcatcaattgcagaatacaataaacttaaacaacaagcagayactattttaaatgaagatgcgaatcatgttgaaactgcaaatcgtgcatctcaagcggatattgatggtttagtaactaaattacaagctgcattaattgataatcaagcagcaattkctgaattagatrctaaagctcaagaaaaggttacagcagcacaacaaagtaaaaaagttacgcaagatgaagttgcagcgcttgtgactaaaattaacaatgataaaaataatgcaatcgcagaaattaataaacaaacaacakcacaaggtgtcacaactgaaaaagataatggtatcgcagtgttrgaacaagatgtgattacaccaacagttaaacctcaagcgaaacaagatattatccaagcagttacaactcgtaaacaacaaattaaaaagtcaaatgcatcattacaagatgaaaaagatgtagcaaatgataaaattggtaaaattgaaacaaaggcaattaaagatattgatgcagcaacaacaaatgcacaagtagaagccattaaaacaaaagcratcaatgatattaatcaaactrcacctgctacaacagctaaagcagcagctcttgaagaatttgacgaagttgttcaagcacaaattgatcaagcacctttaaatcctgatacaacaaatgaagargtagcggaagckattgaacgtattaatgcagctaaagtttcwggtgttaaagcaattgaagcgacaacgactgcacaagatttagawagagttaaaaacgaagaaatmtymaaaattgaraatattackgactctacgcaaacaaaaatggatgcctataatgaagttaaacaagctgcwacagctagaaaagctcaaaatgctacagtttcaaatgcaacwratgaagaagtagcagaagctgatgcagcagtagawgcagctcaaaagcaaggtttacatgacatccaagttgttaaatcaaaacaggaagtkgctgatacwaaakcaaaagtattagataaaatcaatgcmattcaaacacaagcwaragttaaacctgcagckgatasagaagtagamaacgcatataatacacgtaaacaagaaatycaaaatagyaayrcttcaacwacagaagaaaaasaagckgcatatacrsaattagatrcwaaaaarcaagargcaagaacraatcttgatgctgcaaatacaaacagtgctgtaacracagctaaagacaatggtattgctgcaattaatcaagttcaagctgccacwactaagaaatcggatgctaaagcagaaatygctcaaaaagcaagtgaacgtaaaacwgcaatcgaagcaatgaatgattcgactactgaagaacaacaagcagcgaaagawaaagtkgatcaagcwgtwstkwmtgcaaacgctgatatwgataatgcygcagcaaayamwgatgtrgataatgcaaaaactacaaatgaagctacaatcgcagccattacacctgatgcaaatgttaaacctcaagcgaaacaagcaattgcagataaagtacaagckcaagaaamagcaattgatgctaataacggtkcaacaacagaagaraaarcagcwgcgaaacaacaagtycaaacwgaaaaaacgacwgctgatrcagcaatagatgswgcacatwcaaatgcrgaagttgaagcggctaaraatgcagaaattgctaaaattgaagcrattcarccagcracaacaackaaagatratgcgaaasaagcmattgctacgaaagcgaatgaacgtaaarcagcmatygctcaaacgcaagasattacwgcwgaagaaattgcagcggctaatgcgracgtagataatgcwgtracasaagcaaayarcmacattgarrctgctaatagtcaaaatgawgtwgaycaagcgaaracracaggtgaarctagtattgatcaagtracaccaacwgttaataaaaaagcwacwgcacgtaatgaaatcacwrcaatwttaaataacaarttrcaagmrattcaagctacgccagatgcaacagatgaagaraaacaagcagcwgawrcwgaagcwaatactgaaaatgstaaagcaawtcaagccatyrcagcagcwacwacwaaygcasaagtwgatgargcwaaaacwaatgcagaagcrgcrattaaygckgtaacaccaaaagttrtgaagaaacaarcrgckaaagatgaratygatcaattacaagcarcrcaaacarmkgttatyaataaygatcaraacgcwacaamtgaagaaaaagaagcrgckattcaacaaytagcaacagcagttacagacgcgaaaaataayattaca

SEQ ID NO: 7862 - DNA, 3336 bp, Staphylococcus aureus
gctgcaactgayrataatggtgtagatcakgckaaagaygcwggwaaraattcrattcaaagyacrcaaccagcaacakcrgttaaatcraatgckaaaaatgawgtwgatcaagctgtgacaactcaaaatcaagcaattgataatacwacwggtgcwacractgaagagaaaaatgcagcaaaagatttagtttywaaagctaaagaaaaagcrtatcaagatatyttaaatgcrcaaacractaaygatgttacrcaaattaaagatcaagcagttgctgayattcaaggtattactgcwgatacracaattaaagatgtwgckaaagatgaattagcaacaaaagcaaasgaacaaaaagcrcttattgcacaaactgcagatgcgactactgaagaaaaagaacaagcaaatcaacaagtagaygcacaattaacrcaaggtaatcaaaatattgaaaatgcamagtcaatygatgaygtaaacactgcaaaagataatgcaattcaagcmatygacccaattcaagcatcaacagatgttaaaacgaatgcaagagcggaattgctaamtgaaatgcaaaataaaataactgaaatmcttaatrataatrmgactacwaatgaagaaaaaggwaamgatatwgraccagttagagcagcatatgaagaaggtttaaataatattaatgcagcaactactacaggtgatgtaactactgctaaagatacagcagtacaaaaagttcaacaacttcatgcaaatcctgttaagaaaccagcaggtaaaamagaattagatcaagctgcagctgataagaaaacacaaatwgaacaaacaccaaatgcrtcacaacaagaaattaatgatgcaaaacaagaagttgatrcwgmrttaaatcaagcgaaaacaaatrtygatcaatcatcaacaaatgaatatgttgataatgcrgttaaagaaggraaagctaaaattaatgcagttaaaacatttagtgagtacaaaaaagatgctttagctaaaattgmagatgcatataaygctaaagtraacgaagcggataactctaacgcatcgacttcaagtgaaattgctgaagcgaaacaaaaacttgctgaattaaaacaaacwgcggatcaaaatgttaatcaagctacttctaaagatgacattgaagttcaaattcataatgacttagataatattaacgattacacaattccaacmggtaaaaaagaatcrgctacaacagatttatatgcytatgcagatcagaagaaaaataatatttyagctgacactaatgcaacacaagatgaaaarcaayaagcaattaagcaagttgaccaaaatgttcaaactgcattagaaagcattaataatggtgtggataatagtgatgttgatgatgcattaacacaaggtaaagcgacaattgatgcagttcaagtagatgctactgttaaacctaaagcaaaccaagcgattgatgctaaagcacaggaaacgaaagagtctatagaccaaagtgaccagttaactgctgaagaaaaaacggctgcattagcaacgattaaacaaattacagatcaagctaaacaaggtattactgatgcaacaacaactgctgaagttgaaaaagcgaaagctcaaggacttgaggcgtttgataacattcaaattgactcaacagaaaaacaaaaagctatcgaagaattagaaactgcactagaccagattgaagcaggagtaaatgtcgacgctgatgctacaactgaagaaaaagaagcgtttacgaatgcattagaagacattttatcaaaagcaactgaagatatttctgatcaaactacaaatgcagaaatcgctactgtcaaaaatagtgcgcttgaacaacttaaagcacaacgtattaatccagtagttaagaaaaatgctttggaagcaattagagaagtggttaacaagcaaatagaaataattgaaaatgcagatgcatcggcgaaagaaattgcacgtacagatttaggtagatattttgacagatttgctgataaattagataaaacgcaaacaaatacagaagttgatgaattacaaaatgtaacgatacctgcaattgaagcgattgtacctcagaaggatccaaatgctaatgatactaatagtggttcagataataatgatgcaacagcaaattcaaatgctaatgcaacaccagaaaatactggacaacctaatgtaactgagtcaacagataatgccaatgcagatacgtcttcaacaacgacaaataatcataatgatgcggcaactggtggaacaacagcaacatcaacagacaattcggcaacgggtaatggtacaagtgataaatcagaagtagaatcaactaataacggcacaactgataaatctgcaacagaaacagataatgcaacgccagcagaaagcgcaagaaataacaatagtacaactgcaacaaacgagaacgcaccaacaggatcaacagcaacggttccaacaacaaatgcgagcacaggtgcagcatcatctgctgatagcaaagataatgcatctgtaaatgattcaaaacaaaatgctgaagtaaataatagtgctgaatctcaatcaactaatggcaaggttgcacaaccaaaatctgaaaataaagctaaggatgaaaaagatggtagagattcaacaaatcaaagtatggttgaatcaacaactgaaacattgccttcagcagacattacagaaccaaaagtaccttctaatacagagaaagataaaaaagaaagtacgacaaatcaaacagatgctggacaacttaagtctgaaactaacgttgcatctaacgaagcagataaatctgaaggcaacgttgatactgatgtatcgaataaaccatcaacatctaaaccgtcagaagcaaaagataaagcgacttcgactgaggatagtcaaaaggctgacatggcaacatcagataaaaaagataatcaagcagcaattggtgcaactgcagatgtaaacaataaagctacgcaaaacgacggtgccaatgcatctccagctacagtttcaaatggaagcaatagtgctaatcaagatatgcttaaagtaactaacactgacaaacaccaagctaaggcaacatcagcgcaacaaggtaaagaaaataaagcaaaacaacaagctaaaactttaccagatactggtatgtcacataatgacgatttaccatatgttgaattagctctaggtgcaggtatggcattcttaattagaagattcactaagaaagaccaacaaactgaagaataa

SEQ ID NO: 7863 - DNA, 3723 bp, Staphylococcus aureus
atgaatttattcagacaacaaaaatttagtatcagaaaatttaatgtcggtattttttcagctttaattgccactgttacttttatatctactaacccgacaacagcgtctgcagcagagcaaaatcagcctgcacaaaatcaaccagcacaaccagctgatgccaatacacagcctaacgcaaatgctggtgctcaagctaatcctgcagcacagccagcaaaccaaggtggacaggctaatccagcaggaggagcagcacaaccagctggacaaggtaatcaagctgatccgaataacgctgcacaagcacaacctggaaatcaagcagcaccggcaaaccaagcaggtcaaggaaataaccaagcaacacctaataataatgcaacaccggcaaatcaaacacagccagcgaatgctccagcagcagcgcaaccagcagcacctgtagcagcaaacgcacaaactcaagatccaaatgctagcaatactggtgaaggcagtattaatacgacattaacatttgatgatcctgccatatcaacagatgagaatagacaggatccaactgtaactgttacagataaagtaaatggttattcattaattaacaacggtaagattggtttcgttaactcagaattaagacgaagcgatatgtttgataagaataaccctcaaaactatcaagctaaaggaaacgtggctgcattaggtcgtgtgaatgcaaatgattctacagatcatggtaactttaacggtattacaaaaactgtaaatgtaaaaccagattcagaattaattattaactttactactatgcaaacgaatagtaagcaaggtgcaacaaatttagttattaaagatgctaagaaaaatactgaattagcaactgtaaatgttgctaagactggtactgcacatttatttaaagtaccaactgatgctgatcgtttagatttacaatttattcctgacaatacagcagttgctgatgcttcaagaattacaacaaataaagatggttataaatactattcattcattgataatgtaggtctattctcaggatcacatttatatgtcaaaaatagagatttagcaccgaaagcaactaacaataaagaatatactattaatactgaaatcggtaacaatggtaattttggtgcttcattaaaagcagatcaatttaaatatgaagtaacattaccacaaggtgtaacttacgttaatgattcattaactacaacattccctaatggtaatgaagacagtacagtattgaaaaatatgactgttaattatgatcaaactgcaaataaagttacatttacaagccaaggtgtgacaacggcacgtggtacacacactaaagaagttttattcccagataaatctttaaaattatcatataaagttaatgttgcgaatatcgatacacctaaaaatattgattttaatgaaaaattaacatatcgtactgcttcagatgttgtaattaataatgcgcaaccagaagttacactaactgcagatccattttcagtagcggttgaaatgaacaaagatgcgttgcaacaacaagtaaactcacaagttgataatagtcattacacaacagcatcaattgcagaatacaataaacttaaacaacaagcagacactattttaaatgaagatgcgaatcacgttgaaactgcaaatcgtgcatctcaagcggatattgacggtttagtaactaaattacaagctgcattaattgataatcaagcagcaattgctgaattagatactaaagctcaagaaaaggttacagcagcacaacaaagtaaaaaagttacgcaagatgaagttgcagcgcttgtgactaaaattaacaatgataaaaataatgcaatcgcagaaattaataaacaaacaacatcacaaggtgtcacaactgaaaaagataatggtatcgcagtgttagaacaagatgtgattacaccaacagttaaacctcaagcgaaacaagatattatccaagcagttacaactcgtaaacaacaaattaaaaagtcaaatgcatcattacaagatgaaaaagatgtagcaaatgataaaattggtaaaattgaaacaaaggcaattaaagatattgatgcagcaacaacaaatgcacaagtagaagccattaaaacaaaagcaatcaatgatattaatcaaactacacctgctacaacagctaaagcagcagctcttgaagaatttgacgaagttgttcaagcacaaattgatcaagcacctttaaatcctgatacaacaaatgaagaagtagcggaagctattgaacgtattaatgcagctaaagtttctggtgttaaagcaattgaagcgacaacgactgcacaagatttagaacgcgttaaaaacgaagaaatattcaaaattgagaatattacggattcaactcaaactaaaatggatgcttataaagaagttagacaagcagctacagctagaaaagcgcaaaatgctacagtttcaaatgcaactgatgaagaagtagcagaggcaaatgcagcagtagatgcagctcaaacagaaggtttacatgacatccaagttgttaaatcacaacaagaagtggctgatactaaagcaaaagtattagataaaatcaatgcaattcaaacacaagcaaaagttaaacctgcagctgatacagaagtagaaaacgcatataatacacgtaaacaagaaatccaaaatagcaatgcttcaactacagaagaaaaagaagctgcatatacagaattagatgctaaaaagcaagaagcaagaacaaatcttgatgctgcaaatacaaacagtgatgtaacaacagctaaagacaatggtattgctgcaattaatcaagtgcaagctgccacaactaagaaatcggatgctaaagcggaaatcgctcaaaaagcaagtgaacgtaaaactgcaattgaagcaatgaatgattcgactactgaagaacaacaagctgcaaaagataaagttgatcaagcagtagttactgcaaacgctgatatagataatgctacagcaaatacagatgtagataatgcaaaaactactaatgaagctacaatagctgcaattacgccagatgcaaatgttaaaccagcagcaaaacaagcaattgcagataaagtacaagctcaagaaacagcaattgatgctaataacggttcaacaacagaagaaaaagaagctgctaaacaacaagttcaaactgaaaaaacggctgctgatgcagcaatagatgcagctcattcaaatgtggaagttgaagcggctaaaaatgcagaaattgctaaaattgaagcgattcagccagcaacaacaactaaagataatgcgaaacaagcaattgctacgaaagcgaatgaacgtaaaacagcaatcgctcaaacgcaagatattactgctgaagaaattgcagcggctaatgcggacgtagataatgctgtgacacaagcaaatagcaacattgaagctgctaatagtcaaaatgatgtagaccaagcgaaaacgacaggtgaaactagtattgatcaagtaacaccaacagttaataaaaaagcaactgcacgtaatgaaatcacagcaattttaaataacaaattgcaagagattcaagctacaccagatgcaacagatgaagaaaaacaagcagctgatgcagaa

SEQ ID NO: 7864 - DNA, 3723 bp, Staphylococcus aureus
gcaaatactgaaaatggtaaagcaaatcaagccatttcagcagcaactactaacgcacaagttgatgaagcgaaagctaatgcagaagcagcaattaatgcggtaacaccaaaagttgttaagaaacaagcggctaaagatgagattgatcaattacaagcaacgcaaacaaatgttatcaataatgatcagaacgctacaaatgaagaaaaagaagcagctattcaacaattagcaacagcagttacagacgcgaaaaataatattacagctgcaactgatgataatggtgtagatacagcgaaagacgctggaaagaattcaattcaaagcacacaaccagcaacagcagttaaatcgaatgcgaaaaatgaagttgatcaagctgtgacaactcaaaatcaagcaattgataatacaactggcgctacaactgaagagaaaaatgcagcaaaagatttagttttaaaagctaaagaaaaagcgtatcaagatatcttaaatgcacaaacaactaatgatgttacgcaaattaaagatcaagcagttgctgatattcaaggtattactgcagatacaacaattaaagatgttgcgaaagatgaattagcaacaaaagcaaacgaacaaaaagcgcttattgcacaaactgcagatgcgactactgaagaaaaagaacaagcaaatcaacaagtagacgcacaattaacacaaggtaatcaaaatattgaaaatgcacagtcaatcgatgatgtaaacactgcaaaagataatgcaattcaagcaattgacccaattcaagcatcaacagatgttaaaacgaatgcaagagcagaattgctaactgaaatgcaaaataaaataactgaaatacttaataataatgagactactaatgaagaaaaaggtaacgatattggaccagttagagcagcatatgaagaaggtttaaataatattaatgcagcaactactacaggtgatgtaactactgctaaagatacagcagtacaaaaagttcaacaacttcatgcaaatcctgttaagaaaccagcaggtaaaaaagaattagatcaagctgcagctgataagaaaacacaaatagaacaaacaccaaatgcatcacaacaagaaattaatgatgcaaaacaagaagttgatactgaattaaatcaagcgaaaacaaatgtcgatcaatcatcaacaaatgaatatgttgataatgcagttaaagaaggaaaagctaaaattaatgcagttaaaacatttagtgagtacaaaaaagatgctttagctaaaattgaagatgcatataatgctaaagtaaacgaagcggataactctaacgcatcgacttcaagtgaaattgctgaagcgaaacaaaaacttgctgaattaaaacaaactgcggatcaaaatgttaatcaagctacttctaaagatgacattgaagttcaaattcataatgacttagataatattaacgattacacaattccaacaggtaaaaaagaatcagctacaacagatttatatgcttatgcagatcagaagaaaaataatatttcagctgacactaatgcaacacaagatgaaaagcaacaagcaattaagcaagttgaccaaaatgttcaaactgcattagaaaacattaataatggtgtggataatggtgacgttgatgatgcattaacacaaggtaaagcagcaattgatrctattcaagtagatgctactgttaaacctaaagcgaaccaagctattgaagytaaagcagaagatacgaaagaatcwattgatcawagtgaccagttaactgctgaagaaaaaactgaagcattagcaatgattaaacaaattacagatcaagctaaacaaggtattactgatgcaacaacaactgctgaagttgaaaaagcgaaagctcaaggacttgargcatttgataacattcaaatygactcaacagaaaaacaaaaagctatcgaagaattagaaactgcactagaccagattgaagcaggtgtaaatgtcgacgctgatgctacaactgaagaaaaagaagcgtttacgaatgctttagaagacattttatcaaaagcaactgaagatatttctgatcaaactacaaatgcagaaatcgctactgtcaaaaatagtgcgcttgaacaacttaaagcacaacgtattaatccagtagttaagaaaaatgctttggaagcaattagagaagtggttaacaagcaaatagaaataattaaaaatgcagatgcagatgcatcggcgaaagaaattgcacgtacagatttaggtagatattttgacagatttgctgataaattagataaaacacaaacaaatacagaggttgctgaattacaaaatgtaacgatacctgcaattgaagcgattgtgcctcagaatgatccagatgctaatgatactaataatggtacagataataatgatgcaacagcaaattcaaatgctaatgcaacaccagaaaacactggacaacctaacgtatctgagacgacagataatggcaaagcagacgcttctccgacaacaccaaataatagtgatgcggcaacaggtgaaacaacagtaacatcagcaactgatgatgcaaaggataaaccgcaagctaataacaattctagtgcagatgcatcaacaaacagtccgacaatggataacgatgtaactagtaaaccagaagtagaatcaactaataacggcacaactgataaacctgtaacagaaacagataatgcaacgccagcagaaagcacaacaaataacaatagtacaactacagcaacaaacgagaatgcaccaacaggatcaacarcracggctccaacaactgcgagcacagaagcagcatcatctgctgatagtaaagataatgcatctgtaaatgattcaaaacaaaatgctgaagtaaataatagtgctgaatctcaatcaactaatggcaaggttgcacaaccaaaatctgaaaataaagctaaggcagaaaaagatggtagagattcaacaaatcaaagtatggttgaatcaacaactgaaacattgccttcagcagacataacagaaccaaatgtaccttctaatacatcaaaagataaagargaaagtacgwcaaatcaaactgatgcaggacaacttaagtctgaaactaacgttgcatctaacgaagcagataaatcgccaagcaaagctgatactgaagtttcgaataaaccatcaacatctgcatcttctgaagcaaaagawaaaatgacttcaactaatgttagccaaaaagatgatacggcaacagcagatactaatgataygcaaamatcagttggcycagttgcaaacaataaagctaaagatatgcaaactaatgatacgcaaamatcagttggyycagytgcaaacaataaagctacgcaaaacgacggtgccaatgcatctccagcaacagtttcwaatggtagtcatagtatgcatcaagatatgcttaatgtaactaagmctgaagaaaacaaagcaaatgcaaaatcagaccaacaaggaaaagttaataagcctaaacaacaagctaaaactttaccagatactggtatgtcacataatgacgatttaccatatgctgaattagctctaggtgcaggtatggcattcttaattagaagattcactaagaaagaccaacaaactgaagaataa

SEQ ID NO: 7865 - DNA, 3718 bp, Staphylococcus aureus
atgaatttattcagacaacaaaaatttagtatcagaaaatttaatgtcggtattttttcagctttaattgccactgttacttttatatctactaacccgacaacagcgtctgcagcagagcaaaatcagcctgcacaaaatcaaccagcacaaccagctgatgccaatacacagcctaacgcaaatgctggtgctcaagctaatcctacagcacagccagctgcacctgccaaccaaggacaaccagcagtacaaccagcaaaccaaggtggacaggctaatccagcaggaggagcagcacaaccaaatacacaaccagctggacaaggtratcaagctgatccgaataacgctgcacaagcacaacctggaaatcaagcaacaccggcaaaccaagcaggtcaaggaaataaccaagcaacacctaataataatgcaacaccggcaaatcaaacacagccagcgaatgctccagcagcagcgcaaccagcagcacctgtagcagcaaacgcacaaactcaagatccaaatgctagcaatactggtgaaggcagtattaatacgacattaacatttgatgatcctgccatatcaacagatgagaatagacaggatccaactgtaactgttacagataaagtaaatggttattcattaattaacaacggtaagattggtttcgttaactcagaattaagacgaagcgatatgtttgataagaataaccctcaaaactatcaagctaaaggaaacgtggctgcattaggtcgtgtgaatgcaaatgattctacagatcatggtaactttaacggtatttcaaaaactgtaaatgtaaaaccagattcagaattaattattaactttactactatgcaaacgaatagtaagcaaggtgcaacaaatttagttattaaagatgctaagaaaaatactgaattagcaactgtaaatgttgctaagactggtactgcacatttatttaaagtaccaactgatgctgatcgtttagatttacaatttattcctgacaatacagcagttgctgatgcttcaagaattacaacaaataaagatggttataaatactattcattcattgataatgtaggtctattctcaggatcacatttatatgtcaaaaatagagatttagcaccgaaagcaactaacaataaagaatatactattaatactgaaatcggtaacaatggtaattttggtgcttcattaaaagcagatcaatttaaatatgaagtaacattaccacaaggtgtaacttacgttaataattcattaactacaacattycctaatggtaatgaagacagtacagtattgaaaaatatgactgttaattatgatcaaaatgcaaataaagttacatttacaagccaaggtgtgacaacggcacgtggtacacacactaaagaagttttattcccagataaatctttaaaattatcatataaagttaatgttgcgaatatcgatacacctaaaaatattgattttaatgaaaaattaacatatcgtactgcttcagatgttgtaattaataatgcgcaaccagaagttacactaactgcagatccattttcagtagcggttgaaatgaacaaagatgcgttgcaacaacaagtaaactcacaagttgataatagtcattacacaacagcatcaattgcagaatacaataaacttaaacaacaagcagatactattttaaatgaagatgcgaatcatgttaaaactgcaaatcgtgcatctcaagcggatattgatggtttagtaactaaattacaagctgcattaattgataatcaagcagcaattgctgaattagatactaaagctcaagaaaaggttacagcagcacaacaaagtaaaaaagttacgcaagatgaagttgcagcacttgtaactaaaattaacaatgataaaaataatgcaatcgcagaaattaataaacaaactacagcacaaggtgtcacaactgaaaaagataatggtatcgcagtgttagaacaagatgtgattacaccaacagttaaacctmaagcgaamcaagatattatccaagcagttacaactcgtaaacaacaaattaaaaagtcaaatgcatcattacaagatgaaaaagatgtagcaaatgataaaattggtaaaattgaaacaaaggcaattaaagatattgatgcagcaacaacaaatgcacaagtagaagccattaaaacaaaagcaatcaatgatattaatcaaactacacctgctacaacagctaaagcagcagctcttgaagaatttgacgaagttgttcaagcacaaattgatcaagcacctttaaatcctgatacaacaaatgaagaagtagcggaagctattgaacgtattaatgcagctaaagtttctggtgttaaagcaattgaagcgacaacgactgcacargatttagaaagagttaaaaacgaagaaatctcaaaaattgaaaatattactgactctacgcaaacaaaaatggatgcctataatgaagttaaacaagctgcaacagctagaaaagctcaaaatgctacagyttcaaatgcaacaaatgaagaagtagcagaagctgatgcagcagtagatgcagctcaaaagcaaggtttacatgacatccaagttgttaaatcaaaacaggaagttgctgatacaaaatcaaaagtattagataaaatcaatgcaattcaaacacaagcaaaagttaaacctgcagctgatacggaagtagaaaacgcatataatacacgtaaacaagaaattcaaaatagcaatgcttcaactacagaagaaaaacaagctgcatatacagaattagatactaaaaagcaagaagcaagaacaaatcttgatgctgcaaatacaaacagtgatgtaacaacagctaaagacaatagtattgctgcaattaatcaagttcaagctgccacaactaagaaatcggatgcaaaagcggaaatcgctcaaaaagcaagtgaacgtaaaacagcaattgaagcaatgaatgattcgactactgaagaacaacaagcagcgaaagamaaagtkgatcaagcwgtwstkwctgcaaacgctgatatagataatgctgcagcaaayamwgatgtrgataatgcaaaaactacaaatgaagctacaatcgcagccattacacctgatgcaaatgttaaaccwsmagcraaacaagcaattgcagataaagtacaagctcaagaaamagcaattgatgswaataacggytcaacaacwgaagaaaaagcagctgckaaacaacaagtycaaactgaaaaaacracwgctgatgcmgcaatagatgcagcacatacaaatgcggaagttgaagcggctaaaaawgcagmaattgctaaaattgaagcgattcagccagcaacaacaactaaagataatgcgaaagaagcaattgctacgaaagcgaatgaacgtaaaacagcaatcgctcaaacgcaagacattactgctgaagaaattgcagcggctaatgcggacgtagataatgctgtgacacaagcaaatagcaacattgaagctgctaatagtcaaaatgatgtagaccaagcgaaaacgacaggtgaaamtagtattgatcaagtaacaccaacagttaataaaaaagcaactgcacgtaatgaaatcacagcaattttaaataacaaattgcaag

SEQ ID NO: 7866 - DNA, 3718 bp, Staphylococcus aureus
agattcaagctacgccagatgcaacagatgaagaaaaacaagcagctgatgcwgaagcaaatactgaaaatggtaaagcaawtcaagccattkcagcagcaactactaacgcacaagttgatgaagctaaarcaaatgcagaagcagcgattaatgcggtaacaccaaaagttgtgaagaaacaarcggctaaagatgaaattgatcaattacaagcaacgcaaacaaatgttatcaataatgatcagaacgctacaacwgaagaaaaagaagcagctattcaacaattagcaacagcagttacagacgcgaaaaataatattacagctgcaactgatgataatggtgtagatcaggcgaaagacgctggaaagaattcaattcaaagcacgcaaccagcaacakcggttaaatcaaatgctaaaaatgatgttgatcaagctgtgacaactcaaaatcaagcaattgataatacaactggtgctacaactgaagagaaaaatgcagcaaaagatttagttttaaaagctaaagaaaaagcgtatcaagatatcttaaatgcacaaacaactaatgatgttacgcaaattaaagatcaagcagttgctgatattcaaggtattactgcagatacaacaattaaagatgttgcgaaagatgaattagcaacaaragcaaacgaacaaaaagcgcttattgcacaaactgcagatgcgactactgaagaaaaagaacaagcaaatcaacaagtagacgcacawttaacacaaggtaatcaaaatattgaaaatgcacagtcaatygatgaygtaaacactgcaaaagataatgcaattcaagcmatygacccaattcaagcatcaacagatgttaaaacgaatgcaagagcggaattgctaactgaaatgcaaaataaaataactgaaatacttaataataatgagactactaatgaagaaaaaggtaacgatattggaccagttagagcagcatatgaagaaggtttaaataatattaatgcagcaactactacaggtgatgtaactactgctaaagatacagcagtacaaaaagttcaacaacttcatgcaaatcctgttaagaaaccagcaggtaaaaaagaattagatcaagctgcagctgataagaaaacacaaatagaacaaacaccaaatgcatcacaacaagaaattaatgatgcaaaacaagaagttgatactgaattaaatcaagcgaaaacaaatgtcgatcaatcatcaacaaatgaatatgttgataatgcagttaaagaaggaaaagctaaaattaatgcagttaaaacatttagtgagtacaaaaaagatgctttagctaaaattgaagatgcatataatgctaaagtaaacgaagcggataactctaacgcatcgacttcaagtgaaattgctgaagcgaaacaaaaacttgctgaattaaaacaaactgcggatcaaaatgttaatcaagctacttctaaagatgacattgaagttcaaattcataatgacttagataatattaacgattacacaattccaacaggtaaaaaagaatcagctacaacagatttatatgcttatgcagatcagaagaaaaataatatttcagctgacactaatgcaacacaagatgaaaagcaayaagcaattaagcaagttgaccaaaatgttcaaactgcattagaaagcattaataatggtgtggataatggtgacgttgatgatgcattaacacaaggtaaagcagcaattgatgctattcaagtagatgctactgttaaacctaaagcgaaccaagctattgaagttaaagcagaagatacgaaagaatctattgatcaaagtgaccagttaactgctgaagaaaaaactgaagcattagcaatgattaaacaaattacagatcaagctaaacaaggtattactgatgcaacaacaactgctgaagttgaaaaagcgaaagctcaaggacttgaagcatttgataacattcaaatcgactcaacagaaaaacaaaaagctatcgaagaattagaaactgcactagaccagattgaagcaggtgtaaatgtcaacgctgatgctacaactgaagaaaaagaagcgtttacgaatgctttagaagacattttatcaaaagcaactgaagatatttctgatcaaactacaaatgcagaaatcgctactgtcaaaaatagtgcgcttgaacaacttaaagcacaacgtattaatcctgaagttaagaaaaatgctttggaagcaatcagagaagtggttaacaagcaaatagaaataattaaaaatgcagatgcagatgcatcggcgaaagaaattgcacgtacggatttaggtagatattttgacagatttgctgataaattagataaaacacaaacaaatgcagaagttgctgaattacaaaatgtaacgatacctgcaattgaagcgattgtgcctcagaatgatccagatgctaatgatactaataatggtatagataataatgatgcaacagcaaattcaaatgctaatgcaacaccagaaaatactggacaacctaacgtatctgagacgacagctaatggcaaagcagacgcttctccgacaacaccaaataatagtgatgcggcaacaggtgaaacaacagcaacatcagcaactgatgatgcaaatgataaaccgcaagctaataacaattctagtgtagatgcatcaacaaacagtccgacaatggataacgatgtaactagtaaaccagaagtagaatcaactaataacggcacaactgataaacctgtaacagaaactgataatgcaacgccagcagaaagcacaacaaataacaatagtacaactacagcaacaaacgagaatgcaccaacaggatcaacagcaacggctccaacaactgcgagcacagaagcagcatcatctgctgatagcaaagataatgcatctgtaaatgattcaaaacaaaatgctgaagtaaataatagtgctgaatctcaatcaactaatgacaaggttgcacaaccaaaatctgaaaataaagctaaggcagaaaaagatggtagtgattcaacaaatcaaagtatggttgaatcaacaactgaaacattgccttcagcagacataacagaaccaaatgtaccttctaatacatcaaaagataaagaagaaagtacgacaaatcaaactgatgcaggacaacttaagtctgaaactaacgttgcatctaacgaagcagataaatcgccaagcaaagctgatactgaagtttcgaataaaccatcaacatctgcatcttctgaagcaaaagaaaaaatgacttcaactaatsttagccaaaaagatgatacggcaacagcagatactaatgatacgcaammatcagttggttcagctgcaaacaataaagctacgcaaaacgacggtgccaatgcatctccagctacagtttcaaatggaagcaatagtgctaatcaagatatgcttaatgtaactaacactgacgaccaccaagctaagacaaaatcagctcaacaaggaaaagttaataaagctaaacaacaagctaaaactttaccagatactggtatgtcacataatgacgatttaccatatgctgaattagctctaggtgcaggtatggcattcttaattagaagattcactaagaaagaccaacaaactgaagaata

SEQ ID NO: 7867 - DNA, 3285 bp, Staphylococcus aureus
atgaatttgttaaagaaaaataaatatagtattagaaaatataaagtagggatattctctactttaatcgggacagttttattactttcaaacccaaatggtgcacaagctttaactacggatcataatgtgcaaggtggttcaaatcaagcattacctggcaactcacaaaatacaaatgccgatactaatcgagacatagtaaatgattcgcaaaatactcctaatgcacatgcaacagacaatacatcaacaaatcaagcattgactaatcatcaaaacgttgatgtggcaaatcaagtcgggcctgctccaatacagcctagcgcgtcgcctgcgcaaaataataataattctaatgctaattcaacagcaacagagccagcggcgaatacaaataataatttagcatcaaataacaatacattaaacgtgcctaataatacagataacaatgattcagcgcgtcatctgactttaaaagaaattcaagaagatgttcgtcattcgtctgataagccagagttagttgcgattgctgaagaagcatctaatagaccgaaaaagagaagcagacgtgctgcgccaacagatcctaatgcaacaccagcagatccaacggctacaccagcagatccaacggcaggaaatggtagtgcaccagttgcaattacagcgccatacacgccaacaactgatcccaatgccaataatataggacaaaatgcacctaacgaagtgctttcatttgatgataacaacattagaccaagtacgaaccgttctgtgcctacagtaactgttgttgataatttaccaggctacacactgattaatggtggtaaagtaggggtgtttagtcatgcaatggtaagaacgagcatgtttgattcaggagatgccaagaactatcaagcgcaaggcaatgtaattgcattgggtcgtattagaggaaatgatacaaatgatcatggcgattttaatggtatcgagaaaacattaacagtaaatccgaattctgaattaatctttgaatttaatactatgactactaaaaactatcaaggtatgacaaatttaatcattaaaaatgctgataacgatactgttattggtgaaaaagtagttgcttatggtccgatttggcgcttattaaaagtacctgaaaatgttagtcatctaaaaattcaatttgtacctaaaaatgacgcaataacagatgcacgtggtatttatcaattacgagatggatataaatactatgactttgtagactcaatcggtcttcattctgggtcacatgtctatgttgaaagacgtacaatggagccaacagcaacaaataataaagaatttacagttacaacgtcattaaagaataatggtaactttggcgcttcattcaatacagatgattttgtatataaaattcaattacctgaaggtgttgaatatgtaaataattcattgactaaagattttcctagcggtaattcaggtgttgatattaatgatatgaatgtgacgtatgacgcagcaaatcgaattattacaattaaaagtactggtggaggtacagggaattcgccggcacgactaatgcctgataaaatattggatttgaagtataagctacgtgtgaacaatgtgccaacaccaagaacagtaacatttaacgatacattaacgtataaaacatattcacaagattttattaattcacctgctgaaagtcatactgtaagtacaaatccatatacaattgatatcatcatgaataaagacgcattgcaagccgaagtcgatagacgaattcaacaagcggattatacatttgcatcattagatatttttaatgatcttaaaagacgcgcacaaacaattttagatgaaaaccgtaacaatgtacctttaaacaaaagagtttctcaagcagatatcgattcattagcaaatcagatgcaacatacgttaattcgcagtgttgacgctgaaaatgccgttaatagaaaagttgatgacatggaagatttagttaaccaaaatgatgaactgacagatgaagaaaaacaagcagcgattcaagtcatcgaggaacataaaaatgaaattattgggaatattggtgaccaaacgactgatgatggcgttactagaattaaagatcaaggtatacagactttaagtggagacactgcaacaccagttgttaaaccaaatgctaaacaagctatacgtgataaagcagcgaaacaaagagaaattatcaatcacacgccagatgctactcaagatgaaattcaagatgcattaaatcaattaacaacggatgaaacagatgctattgataatgttacgaatgctactaccaatgctgatgttgaaacagctaaaaataatggtattaatacaattggtgcagttgcgccacaagtgacacacaaacaagctgcaagagatgcaattaatcaagcgacagcaacgaaacgacaacaaataaatagcaatagagaagcaacacaagaagagaaaaatgcagcattgaatgaattaacgcaagccacgaaccacgcattagaacaaatcaatcaagcgacaaccaatgatgatgtagatactgccaaaggtgatggtctgaatgccattaatcctattgcgcctgtaactgttgtcaagcaagcagcaagagatgccgtatcacatgatgcacaacagcatatcgcagagatcaatgcaaatcctgatgcgactcaagaagaaagacaagcagcaatagagaaagtaaatgctgctgtagctgttgcgaatactaatatattaaatgctaataccaatgctgatgttgagcaagtaaagacaaatgcaattcaaggtatacaagccattgaaccagctacaaaggttaaaacagatgctaaaaacgctattgatcaaagtgcggaaacgcaacataatgcgatatttaataataatgatgcgaccttagaagagcaacaagcagcacaacaattgcttgatcaagctgtagccacagcgaagcaaaatattaatgcagcagatacgaatcaagaagttgcacaagcaaaagatcagggcacacaaaatatagttgtgattcaaccggcaacacaagttaaaacggatgcacgcaatgctgtaaatgaaaaagcgcgagaggcgataacaaatatcaatgctacacctggcgcgactcgagaagagaaacaagaagcgataaatcgtgtcaatacacttaaaaatagagcattaaatgatattggtgtg

SEQ ID NO: 7868 - DNA, 3285 bp, Staphylococcus aureus
acgtctactactgcgatggtcaatagtattagagacgatgcagtcaatcaaatcggtgcagttcaaccgcatgtaacgaagaaacaaactgctacaggtgtattaacggacttagcaactgcaaaaaaacaagaaattaatcaaaatacaaatgcaaccactgaagaaaagcaagtagcattaaatcaagtagaccaagatttagcaacggcaattaataatataaatcaagctgatactaatgcagaagtagatcaagcacaacaattaggtacaaaagcaattaatgcgattcagccaaatattgtaaaaaaacctgcagcattagcacaaaccaatcagcattatagtgctaaattagttgaaatcaatgctacaccagatgcaacagatgatgagaaaaatgctgcgatcaatactttaaatcaagacagacaacaagctattgaaagtattaaacaagcaaatacaaatgcggaagtagaccaagctgcgacagtggcagagaataatatcgatgctgttcaagttgacgttgtaaaaaaacaagcagcgcgagataaaatcactgctgaagtagcgaagcgtattgaagcggttaaacaaacacctaatgcaactgacgaagaaaagcaggctgcagttaatcaaatcaatcaacttaaagatcaagcgtttaatcaaattaatcaaaaccaaacaaatgatcaggtagacgcaactacaaatcaagcgattaatgctatagataatgttgaagctgaagtagtaattaaaccaaaggcaattgcagatattgaaaaagctgttaaagaaaagcaacagcaaattgataatagtcttgattcaacagataatgagaaagaagttgctttacaagcattagctaaagaaaaagaaaaagcacttgcagctattgaccaagctcaaacgaatagtcaggtgaatcaagcggcaacaaatggtgtatcagcgattaaaattattcaacctgaaacaaaaattaaaccagcagcacgtgaaaaaatcaatcaaaaagcgaatgaattacgtgcgcaaattaatcaagataaagaagcgacagcagaagaaagacaagcggcgttagataaaatcaatgatttagttgctaaagctatgacaaatatcacgaatgatagaacaaatcagcaagttaatgactcaacaaatcaagcgcttgacgacattgcattagtgacgcctgaccatattgttagagcagctgctagagatgcagttaagcaacaatatgaagctaaaaagcacgaaattgagcaagcggaacatgcgactgatgaagaaaaacaagttgctttaaatcaattagcgaataatgaaaaacgtgcattacaaaacattaatcaagcaatagcgaataatgatgtgaaacgtgttgaatcaaatggtattgctacgttaaaaggcgtagaaccgcacattgtggttaaacctgaagctcaagaagccataaaagcgagcgcagataaccaagtagaatctataaaagatacaccacatgctacgacagatgaattagatgaagcaaaccaacaaataaacgacacacttaaacaaggtcaacaagatatagacaatacgacacaagatgcagctgtcaatgatgttagaaaccaaacgattaaggcaatcgaacaaattaaaccgaaagttagacgcaaacgtgcagcgttggataacattgatgaaagtaataataatcaactcgatgcaatacgaaatacgctagatacaacgcaagatgaacgaaatgttgctattgctgcgttaaataaaattgttaatgcaattaaaaatgatattgcacaaaacaaaacgaatgcagaagtggatcaaactgaggctgatggtaacaacaacatcaaagtgattttacctaaagttcaagttaaaccagcagcgcgtcaatctgtcagcgcaaaagctgaagctcaaaatgcacttattgatcaaagtgatttatctaccgaagaagaaagattagctgctaaacatttagtagaacaagcacttaatcaagctattgatcagatcaatcacgcagataagactgcgcaagttaatcaaaatagtatcgatgctcaaaatattatttcaaaaattaaaccagcgacaacagttaaagcaacagcattacaacaaattcaaaatatcgctacaaataaaattaatttaattaaagcaaataacgaagcgacagatgaagaacaaaatgctgcaatagtacaagttgaaaaagagttaattaaagctaaacaacaaattgctggtgcagtgactaatgctgatgtggcatatttattgcatgatgggaaaaacgaaattcgtgaaatcgaacctgttattaataaaaaagcaactgcgcgagaacaattaacaacattattcaacgataagaaacaagcaattgaagcgaatgttcaagcaacagtagaagaaagaaatagtattttagcacagttacaaaacatttatgacactgctattggacaaattgatcaagatcgtagcaatgcacaagttgataaaacagcaacattaaatctacaaacaatacatgatttagacgtacatcctattaaaaagccagatgctgaaaaaacgattaatgatgatcttgcacgtgttacacatttagtgcaaaattatcgaaaagtaagtgatcgtaataaggctgatgcattaaaagctataactgcattaaaattacaaatggatgaagaattaaaaacagcacgcactaatgctgatgttgatgcagttttaaaacgatttaatgttgcattaggcgatatagaagcagtaattactgaaaaagaaaatagcttactgcgcattgataacattgctcaacaaacatatgcgaaattcaaagcgatcgcaacaccagaacaattagctaaagtaaaagcattaattgatcaatatgttgcagatggcaatagaatggttgatgaagatgcgacattaaatgacatcaaaaaagatacgcaactcattattgatgaaattttagcaattaaattacctgctgaagtgataaaagcgtcaccaaaagtggggcaacctgctccaaaagtttgtacgcctattaaaaaagaagataaacaagaagtgcgaaaagttgtaaaagaacttccaaatactggttctgaagaaatggatttaccattaaaagaattagcactaattacaggcgcagcattattagctagaagacgttctaaaaaagaaaaagaatcataa

SEQ ID NO: 7869 - DNA, 3280 bp, Staphylococcus aureus
atgaatttgttaaagaaaaataaatatagtattaggaagtataaagtaggcatattctctactttaatcggaacagttttattactttcaaacccaaatggtgcacaagccttaactacggataataatgtacaaagcgatactaatcaagccacacctgtaaattcacaagatacaaatgttgctaataatagaggtttagcaaatagtgctcagaatacacctaatcaatctgcaacaactaatcaatcaacgaatcaagcattggttaatcataataatggtagtatagcaaatcaagctacgccaacatcagtgcaatcaagtacgccttcagcacaaaacaataatcatacagatggcaatacaacagcaactgagacagtgtcaaacgctaataataaggatgtagtgtcgaataataccacattaaatgtacctaataaaacaaatgaaaatggttcaggaggacatctaactttaaaggaaattcaagaagatgttcgtcattcttcagataaaccagagctagttgcaattgctgaacaagcatctaatagaccgaaaaagagaagtagacgtgcggcaccggcagatcctaatgcaactccagcagatccagcggctgcagcggcaggaaacggtggtgcaccagtagcaattacagcgccatacacgccgacaactgatcctaatgccaataatgcaggacaaaatgcacctaacgaagtgctgtcttttgatgacaatggtattagaccaagtaccaaccgttctgtaccatcagtaacagttgttgataatttaccaggctttacacttatcaatggtggtaaagtaggtgtgtttagtcatgcgatggttagaacaagtatgtttgattcaggagatgctaagaactatcaagcacaaggaaatgtaattgcattaggtcgtattaagggaaatgatacaaatgatcatggtgattttaatggaattgaaaaatctttaacagtaaatccaaattctgaattaattttcgaatttaatacgatgactacaaaaaactatcaaggtgtgacaaatttaataattaaaaatgctgataatgatactgttattgcagaaaaatcagtagcttatggtccgatttggcgtttgtttaaagtgcctgaaaatgttagtcacttaaaaattcaatttgtacctaaaaatgatgcaataacagatgcgcgtggcatttatcaactaagagacggttataaatactatgactttgttgactcaattggtctacattctggttcgcatgtctatgttgaaagacgaacaatggaacccacagctactaataataaagaatttacagtcacaacttcattaaagaataatggtaacttcggtgcttcatttaatacagatgattttgtatataaagttcaattacctgaaggggtagaatatgttaataactcattgactaaagattttccaagcagtaattcaggtgttgatatgaatgattttaatgtgacgtatgatgcggcgaatcgagtgataacaattaaaagtactggtggaggttcaggtaactcgccggcacgattaatgcctgataaaatattggatttaaagtataagttgcgtgttaataatgtaccgacaccaagaacagtaacatttaatgatacattaacatataaaacatatacacaagattttattaattcacctgctgaaagtcatactgtaagtacaaatccatatacaatcgatatcatcatgaataaagatgcattacaagccgaggttgatagacgcattcaacaagctgattatacatttgcatcattagatatctttaatgatcttaaaagacgtgcacaaacgattttagatgaaaatcgtaacaatgtaccattaaataaaagagtttctcaagcagatattgattcattaactaatcaaatgcaacatacgttaattcgaagtgttgatgctgaaaatgcagttaataaaaaagttgaccaaatggaagatttagttaatcaaaatgatgaattgacagatgaagaaaaacaagcagcaatacaagttatcgaggaacataaaaatgaaataattggtaatattggtgaccaaacgactgatgatggcgttactagaatcaaagatcaaggtatacagaccttaagtggggatactgcaacaccggttgttaaaccaaatgctaaaaaagcaatacgtgataaagcaacgaaacaaagggaaattatcaatgcaacaccagatgctactgaagacgagattcaagatgcactaaatcaattagctacggatgaaacagatgctattgataatgttacgaatgctactacaaatgctgacgttgaaatagctaaaaataatggcatcaatactattggagcagttgttcctcaagtgacacataaacaagctgcaagagatgcaattaaccaagcaacagcaacgaaaagacaacaaataaatagtaatagagaagcaactcaggaagagaaaaatgcagcattgaacgaattaactcaagcaaccaaccatgctttagaacaaatcaatcaagcaacaacaaatgctgatgttgataacgccaaaggagatggtctaaatgccattaatccaattgctcctgtaactgttgttaagcaagctgcaagggatgctgtatcacatgatgcacaacaacatatcgcagaaatcaatgctaatcctgatgcgactcaagaagaaagacaagcagcaattgacaaagtgaatgctgctgtaactgcagcaaacacaaacattttaaacgctaataccaatgctgatgttgaacaagtaaagacaaatgcgattcaaggaatacaagcaattacaccagctacaaaagtaaaaacagatgcaaaaaatgccatcgataaaagtgcggaaacgcaacataatacgatatttaataataatgatgcgacgctcgaagaacaacaagcagcacaacaattacttgatcaagctgtagccacagcgaagcaaaatattaatgcagcagatacgaatcaagaagttgcacaagcaaaagatcagggcacacaaaatatagttgtgattcaaccggcaacacaagttaaaacggatgctcgcaatgctgtaaatgataaagctcgagaggcgataacaaatatcaatgctacacctggcgcgactcgagaagagaaacaagaagcgataaatcgtgtcaatacacttaaaaatagagcattaactgatattggtgtgacgt

SEQ ID NO: 7870 - DNA, 3280 bp, Staphylococcus aureus
ctactactgcgatggtcaatagtattagagacgatgcagtcaatcaaatcggcgcagttcaaccgcatgtaacgaagaaacaaactgctacaggtgtattaaatgatttagcaactgctaaaaagcaagaaattaatcaaaacacaaatgcaacaactgaagaaaagcaagtggctttaaatcaagtggatcaagagttagcaacggcaattaataatataaatcaagctgatacaaatgcggaagtagatcaagcgcaacaattaggtacaaaagcaattaatgcgattcagccaaatattgttaaaaaacctgcagcattagcacaaatcaatcagcattataatgctaaattagctgaaatcaatgctacaccagatgcaacgaatgatgagaaaaatgctgcgatcaatactttaaatcaagacagacaacaagctattgaaagtattaaacaagctaacacaaatgcagaagtagaccaagctgcgacagtagcagagaataatatcgatgctgttcaagttgatgtagtaaaaaaacaagcagcgcgagataaaatcactgctgaagtggcgaagcgtattgaagcggttaaacaaacacctaatgcaactgacgaagaaaagcaggctgctgttaatcaaatcaatcaacttaaagatcaagcaattaatcaaattaatcaaaaccaaacaaatgatcaggtagacacaactacaaatcaagcggtaaatgctatagataatgttgaagctgaagtagtaattaaaccaaaggcaattgcagatattgaaaaagctgttaaagaaaagcaacagcaaattgataatagtcttgattcaacagataatgagaaagaagttgcttcacaagcattagctaaagaaaaagaaaaagcacttgcagctattgaccaagctcaaacgaatagtcaggtgaatcaagcagcaacaaatggtgtatcagcgattaaaattattcaacctgaaacaaaagttaaaccagctgcacgtgaaaaaatcaatcaaaaagcgaatgaattacgtgctaagattaatcaggataaagaagcaacagcagaagaaagacaagtagcactagataaaatcaatgaatttgtaaatcaagccatgacagatattacgaataatagaacaaatcaacaagttgatgatacaacaagtcaagcgcttgatagcattgctttagtagcgcctgaacatattgttagagcagctgctagagatgcagtaaagcaacaatatgaggctaaaaagcaagaaatagagcaagctgaacatgcgactgatgaagaaaaacaagttgctttaaatcaattagcgaataatgaaaaacttgcattacaaaacatcaatcaagcagtaacgaataatgatgtgaaacgtgttgaaacaaatggcattgctacactaaaaggtgtacaacctcatattgtaattaagcctgaagcacaacaagcaataaaagcaactgcagaaaatcaagtagaatcaataaaagatacaccacatgcaacagttgatgaattagatgaagcgaatcaattaattagcgacacactcaaacaagcgcaacaagaaatagaaaatacaaatcaagatgctgctgttactgatgttagaaatcaaacaatcaaggcaattgagcaaataaaacctaaagtaagacgtaaacgagctgcgcttgatagcattgaagaaaataataaaaatcaactcgatgcaatccgaaatacgttggatactactcaagatgaaagagatgttgctattgatactttaaataaaattgtaaatacaattaaaaatgacattgcacaaaacaaaacgaatgcagaagtggatcgaactgagactgatggcaacgacaacatcaaagtgattttacctaaagttcaagttaaaccagcagcgcgtcaatctgttggtgtaaaagccgaagctcaaaatgcactaatcgatcaaagcgatttatcaactgaagaagaaagactagctgctaaacatttagtagaacaagcacttaatcaggctattgatcagatcaatcatgcagataagactgcccaagttaatcaagatagtatagatgctcaaaatattatttcaaaaattaaaccagcgacaacagttaaagcaacagcattacaacaaattcaaaatatcgctacaaataaaattaatttaattaaagcaaataacgaagcgacagatgaagaacaaaatattgcaatagcacaagttgaaaaagagttaattaaagctaaacaacaaattgctagtgcagtgactaatgctgatgtggcatatttattgcatgatgagaaaaacgaaattcgtgaaatcgaacctgttattaacagaaaggcgtctgctcgagaacaattgacaacattattcaacgataaaaaacaagcaattgaagcgaatattcaagcaacggtagaagaaagaaatagtatattagcacagttacaaaatatttatgacactgctattggacaaattgatcaagatcgtagcaatgcacaagttgataaaacagcatcattaaatctacaaacaatacatgatttagatgtacatcctattaaaaagccagatgctgraaaaacgattaatgatgatcttgcacgcgtcactgctttagtgcaaaattatcgaaaagtaagtaatcgtaataaggctgatgcattaaaagctataactgctttaaaattacaaatggatgaagaattaaaaacagcacgcactaatgctgatgttgatgcagttttaaaacgatttaatgttgcattaagcgatatagaagcagtaattactgaaaaagaaaatagcttactgcgaattgataacattgctcaacaaacatatgcgaaattcaaagcgatcgcaacaccagaacaattagctaaagtaaaagtattaattgatcaatatgttgcagatggcaatagaatgattgatgaagatgcgacattaaatgacatcaaacaacacacgcaattcattgttgatgaaattttagcaattaaattaccagctgaagcgacgaaagtatcaccaaaagaaattcagccagctccaaaagtttgtacgcctattaaaaaagaagagacacatgaatcgcgcaaagttgaaaaagaacttccaaatacaggttctgaaggaatggatttaccattgaaagaatttgcactgattacaggtgcggctttgttagctagaagacgtactaaaaacgaaaaagaatcata

SEQ ID NO: 7871 - DNA, 3280 bp, Staphylococcus aureus
atgaatttgttaaagaaaaataaatatagtattaggaagtataaagtaggcatattctctactttaatcggaacagttttattactttcaaacccaaatggtgcacaagccttaactacggataataatgtacaaagcgatactaatcaagcaacacctgtaaattcacaagataaagatgttgctaataatagaggtttagcaaatagtgcgcagaatacacctaatcaatctgcaacaaccaatcaagcaacgaatcaagcattggttaatcataataatggtagtatagtaaatcaagctacgccaacatcagtgcaatcaagtacgccttcagcacaaaacaataatcatacagatggcaatacaacagcaactgagacagtgtcaaacgctaataataatgatgtagygtcgaataataccrcattaaatgtaccaamtaaaacaaatgaaaatggttcaggaggacatctaactttaaaggaaattcaagaagatgttcgtcattcttcarataaaccagagctagttgcaattgctgaaccagcatctaatagaccgaaaaagagaagtagacgtgcggcaccggcagatcctaatgcaactccagcagatccaksggctgcagcggyaggaaacggtggtgmaccagttgcaattacagcgccatayacgccwacaactgatcctaatgccaataatgcaggacaaaatgcacctaacgaagtgctgtcatttgatgacaatrgtattagaccaagtaccaaccgttctgtrccawcagtaammgttgttrataayttrccrggcttyacactwatcaatggtggyaaagtaggkgtgytwagtcatgcratggtwagaacragyatgtttgakkcwggagakmawmagaactatcargcacaaggmaatgtamttgcattaggwcgtatamryggrackgayrckartraycatggmgattttaatggtatygaraaakcwttaacagtaaatccraattctgaattaatctttgaatttaatacaatgmcwactaaaaayggtcaaggcgcaacaaatgttattatcaaaaatgctgatactaatgatacgattgctgaaaagactgttgaaggcggtccaactttgcgtttatttaaagtacctgataatgtgagaaatctcaaaattcaatttgtacctaaaaatgacgcaataacagatgcgcgtggcatttatcaactaaaagatggttacaaatactatagctttgttgactctatcggacttcattctgggtcacatgtttwtgttgaaagacgaacaatggawccmacagcaacraataataaagartttacwgtwacaacatcaytaaaraataatggtaattctggtgcttctytagayacaratgamtttgtwtatmaarttcaattacctgaaggkgtwgaatatgtgaacaattcattgactaaagattttccaagtaacaattcaggcgttgatgttaatgatatgaatgttacatatgatgcrgcraatcgwgtgataacaattaaaagyactggwggwggyacarcraaytcwcckgcacgactwatgcctgataaaataytsgatttaarrtataarttrcgtgtwaataatgtrccgacaccaagaacagtaacatttaaygakacattaacgtataaaacatatacacaagatttcattaattcagctgcagaaagtcatactgtaagtacaaatccatatactatcgatatcatcatgaataaagatgcattacaagccgaagttgacagacgtattcaacaagctgattatacatttgcrtcattagatatctttaatgrtctkaaamracgygcacaaacrattttagmtgaaaatcgtaacaatgtaccattaaataaaagagtwtctcaagcakatattgatwcattaactaatcaratgcaacatackttaattcgaagtgttgatgctgaaaatgcagtwaatmaaaaagytgaycaaatggaagatttagttaatcaaaatgatgaaytgacagatgaagaaaaacaagcagcaatacaagttatcgaggaacataaarryrawatwattggtratattggtgaycaaacgactgatgatggcgttactagaatcaaagatcaaggtatacagaccttaagtggggatactgcaacaccggttgttaaaccaaatgctaaaaaagcaatacgtgataaagcaacgaaacaaagggaaattatcaatgcaacaccagatgytactgaagacgagattcaagatgcamtaaatcaattagctacggatgaaacagatgctattgataatgttacgaatgctactacaaatgctgacgttgaaacagctaaaaataatggcatcaatactattggakcagttgttcctcaagtracwcataaamaagctgcaagagatgcaattaaccaagcaacagcaacgaaaagacaacaaataaatagtaatagagaagcaactcaggaagagaaaaatgcagcattgaacgaattaactcaagcaaccaaccatgctttagaacaaatcaatcaagcaacaacaaatgctratgttgataacgccaaaggagatggtctaaatgccattaatccaattgctcctgtaactgttgttaagcaagctgcaagggatgccgtatcacatgatgcacaacaacatatcgcagagatcaatgctaatcctgatgcgactcaagaagaaagacaagcagcaattgacaaagtgaatgctgctgtaactgcagcaaacacaaacattttaaacgctaataccaatgctgawgtkgaacaagtraagacaaatgcgatwcaaggaatacaagcaattacaccagctacaaargtaaaaacagatgcaaaaaatgccatcgataaaagtgcggaaacgcaacataatacgatatttaataataatgatgcgacgctcgaagaacaacaagcagcacaacaattacttgatcaagctgtagccacagcgaagcaaaatattaatgcagcagatacgaatcaagaagttgcacaagcaaaagatcagggcacacaaaatatagtagtgattcaaccggcaacacaagttaaaacggatrctcgcaatgttgtaaatgataaagcgcgagaggcgataacaaatatcaatgctacamctggcgcgactcgagaagagaaacaagaagcgataaatcgtgtcaatacacttaaaaatagagcattaactgatattggtgtgacrt

SEQ ID NO: 7872 - DNA, 3280 bp, Staphylococcus aureus
ctactactgcgatggtcaatagtattagagacgatgcagtcaatcaaatcggcgcagttcaaccgcatgtaacgaagaaacaaactgctacaggtgtattaaatgatttagcaactgctaaaaagcaagaaattaatcaaaacacaaatgcaacaactgaagaaaagcaagtggctttaaatcaagtggatcaagagttagcaacggcaattaataatataaatcaagctgatacaaatgcggaagtagatcaagcgcaacaattaggtacaaaagcaattaatgcgattcagccaaatattgttaaaaaacctgcagcattagcacaaatcaatcagcattataatgctaaattagctgaaatcaatgctacaccagatgcaacgaatgatgagaaaaatgctgcgatcaatactttaaatcaagacagacaacaagctattgaaagtattaaacaagctaacacaaatgcagaagtagaccaagctgcgacagtagcagagaataatatcgatgctgttcaagttgaygtagtaaaaaaacaagcagcgcgagataaaatcactgctgaagtggcgaagcgtattgaagcggttaaacaaacacctaatgcaactgacgaagaaaagcaggctgctgttaatcaaatcaatcaacttaaagatcaagcawttaatcaaattaatcaaaaccaaacaaatgatcaggtagacacaactacaaatcaagcgktaaatgctatagataatgttgaagctgaagtagtaattaaamcaaaggcaattgcagatattgaaaaagctgttaaagaaaagcaacagcaaattgataatagtcttgattcaacagataatgagaaagaagttgcttcacaagcattagctaaagaaaaagaaaaagcacttgcagctattgaccaagctcaaacgaatagtcaggtgaatcaagcagcaacaaatggtgtatcagcgattaaaattattcaacctgaaacaaaagttaaaccagctgcacgtgaaaaaatcaatcaaaaagcgaatgaattacgtgctaagattaatcaggataaagaagcaacagcagaagaaagacaagtagcactagataaaatcaatgaatttgtaaatcaagccatgacagatattacgaataatagaacaaatcaacaagttgatgatacaacaagtcaagcgcttgatagcattgctttagtrrcgcctgamcatattgttagagcagctgctagagatgcagtwaagcaacaatatgargctaaaaagcrmgaaatwgagcaagckgaacatgcgactgatgaagaaaaacaagttgctttaaatcaattagcgaataatraaaaacktgcattacaaaacatcratcaagcartarcgaataatgatgtgaaacgtgttgaaacaaatggcattgctacactaaaaggtgtacaacctcatattgtaattaagcctgaagcacaacaagcaataaaagcaastgcagaaaatcaagtagaatcaataaaagatacaccacatgcaacagttgatgaattagatgaagcgaatcaattaattagcgacacactcaaacaagcgcaacaagaaatagaaaatacaaatcaagatgctgctgttactgatgttagaaatcaaacaatcaaggcaatwgagcaaataaaacctaaagtaagacgtaaacgagctgcgcttgatagcattgaagaaaataataaaaatcaactcgatgcaatccgaaatacgttggatactactcaagatgaaagagatgttgctattgatactttaaataaaattgtaaatacaattaaaaatgacattgcacaaaacaaaacgaatgcagaagtggatcgaactgagactgatggcaacgacaacatcaaagtgattttacctaaagttcaagttaaaccagcagcgcgtcaatctgttggtgtaaaagccgaagctcaaaatgcactaatcgatcaaagcgatttatcaactgaagaagaaagactagctgctaaacatttagtagaacaagcacttaatcaggctattgatcagatcaatcatgcagataagactgcccaagttaatcaagatagtataratgctcaaaatattatttcaaaaattaaaccagcgacaacagttaaagcaacagcattacaacaaattcaaaatatcgctacaaataaaattaatttaattaaagcaaataacgaagcgacagatgaagaacaaaatattgcaatagcacaagttgaaaaagagttaattaaagctaaacaacaaattgctagtgcagtgactaatgcwgatgtggcatatttattgcatgatgagaaaaacgaaattcgtgaaatcgaacctgttattarcagaaaggcgtctgctcgagaacaattgacaacattattcaacgataaaaaacaagcaattgaagcgaatattcaagcaacggtagaagaaagaaatagtatattagcacagttacaaaatatttatgacactgctattggacaaattgatcaagatcgtagcaatgcacaagttgataaaacagcatcattaaatctacaaacaatacatgatttagatgtacatcctattaaaaagccagatgctgaaaaaacgattaatgatgatcttgcacgcgtcactgctttagtgcaaaattatcgaaaagtaagtratcgtaataaggctgatgcattaaaagctataactgctttaaaattacaaatggatgaagaattaaaaacagcacgcactaatgctgatgttgatgcagttttaaaacgatttaatgttgcattaagcgatatagaagcagtaattactgaaaaagaaaatagcttactgcgmattgataacattgctcaacaaacatatgcgaaattcaaagcgatcgcaacaccagaacaattagctaaagtaaaagtattaattgatcaatatgttgcagatggcaatagaatgattgatgaagatgcgacattaaatgacatcaaacaacayacgcaattcattgttgatgaaattttagcaattaaattaccagctgaagcgaygaaagtatcaccaaaagwaattcagccagctccaaaagtttgtacgcctattaaaaaagaagagacacatgaatcgcgcaaagttgaaaaagaacttccaaatacaggttctgaagraatggatttaccattgaaagaatttgcactgattacaggtgcggctttgttagctagaagacgtactaaaaacgaaaaagaatcata

SEQ ID NO: 7873 - DNA, 589 bp, Staphylococcus aureus
agtaatgtttgttgcagacaaaccaaatgtcgttgcacaaagtttaggtgcattacgtgtcaaattagctaaagaattaggtttaatcgatgaaacaaaattaaacttcttatgggtgacagattggccattattrgaatatgatgaagatgcgaaacgttacgttgcagcacatcatccatttacatctccaaaagaagcygatattgctaagcttggcactgcgccagaagaagctgaggcaaatgcttatgacatagtattaaatggttatgaattaggtggcggttcaatcagaattcatgayggtgagttacaagaaaaaatgttcgaagttcttggatttactaaagaacaagcacargaacarttcggcttcttactagatgcatttaaatatggtgcaccaccwcatggcggtattgcattaggattagaccgattagtcatgttattgactaatagaacaaacttgagagatacaatygcattccctaaaacagcatctgctacatgtttattaacgaatgcgcctrgtgaagtttctgataaacaattagaagaactttctttgcgaattcgtcactaa

SEQ ID NO: 7874 - DNA, 589 bp, Staphylococcus aureus
atgagtaagagaacaacttattgtggattagttactgargcatttttaggacaagaaattacattaaaaggatgggttaacaatcgtcgtgacctwggtggattgattttcgttgatttaagagatagagaaggaattgtacaagtygtgtttaatcctgcattttcagaagaggcattgaaaattgctgaaacagtacgttctgaatatgttgtagaagttcaaggtacagttacgaagcgtgaccctgaaacwgttaatcctaaaattaaaactggccaagttgaagtacaagttacaaatattaaagtgattaataaatctgagacaccaccattttctataaatgaagaaaatgttaacgttgatgaaaatattcgattaaaataccgttatttagatttacgtcgtcaagagttagcgcaaacatttaaaatgagacatcaaattacacgttctattcgtcaatatttggatgatgaagggttctttgacatcgaaacaccagtactaacgaagtcaacacctgagggtgcacgtgactatttagtaccatctcgtgtycatgatggtgaattttatgcattac

SEQ ID NO: 7875 - DNA, 589 bp, Staphylococcus aureus
cacaatcrccacaattatttaagcaattattgatgattagyggatttgacaaatactaccaaatygtaaaatgcttccgtgacgaagatttacgtgcagatcgtcaacctgaattyacacaagtcgatattgaaatgagttttgtagaycaagaagatgtgatgcaaatgggtgaagaaatgcttaaaaaagttgttaaagaagttaaaggcgttgaaattaatggcgctttcccacgsatgacatataaagaagcgatgcgtcgctatggttctgataaaccagatacrcgttttgaaatggaattaattgacgtttctcaattaggacgtgatatggactttaaagtatttaaagatactgttgaaaatgatggtgaaattaaagcaattgtcgctaaaggtgcagctgaacaatatacwcgtaaagatatggatgctttaacagaatttgtaaacatctatggtgctaaaggattagcrtgggttaaagttgtggaagatggtttgacaggtccaattggacgtttctttgarrcagaaaatgttgaaacattacttacattaactggtgctgaagctggtgactt

SEQ ID NO: 7876 - DNA, 410 bp, Staphylococcus aureus
tgattacaggawtgatagsaggatggataggcataaaaggtagtttcggtttaaaccaaattttaggtgtgtttatgtatccatttgcgctattactcggtttaccttatgatgaagcgtggttggtagcacaacaaatggctaagaaaattgttacaaatgaatttgttgttatgggtgaaatttctaaagatattgcatcttatacaccacaccatcgtgcggttattacaacattcttaatttcatttgcaaacttctcaacgattggtatgattatcggtacattgaaaggmattgtwgataaaaagacatcagactttgtatctaaatatgtrcctatgatgctattatcaggtatcctagtytcattattaacagcagctttcgttggtttatttgcatggtaa

SEQ ID NO: 7877 - DNA, 410 bp, Staphylococcus aureus
atgtttttattaatcaacattattggtctaattgtatttcttggtattgcggtattattttcaagagatcgcaaaaatatccaatggcaatcaattgggatcttagttgttttaaacctgtttttagcatggttctttatttattttgattggggkcaaaaagcagtaagaggagcagccaatggtatcgcttgggtagttcagtcagcgcatgctggtacaggttttgcatttgcaagtttgacaaatgttaaaatgatggatatggctgttgcagccttattcccaatwttattaatagtgccattatttgatatcttaatgtactttaatattttaccgaaaattattggaggtattggttggttactagctaaagtaacaagacaacctaaattmgagtcattctt

SEQ ID NO: 7878 - DNA, 410 bp, Staphylococcus aureus
tgggatwgaaatgatgttyttaggaaatactgaagcattagccgtatcaagtgagcaactaaaacgtatgaatgaaatgcgtgtattaacaatcgcaatgatgtcaatgagctctgtatcsggagctattgtaggtgcgtatgtacaaatggtaccaggagaactggtactaacggcaattccactaaatatcgttaacgcgattattgtgtcatgcttgttgaatccagtaagtgttgaagagaaagaagatattatttacagtcttaaaaacaatgargttgaacgtcaaccattcttctcattccttggagattctgtattagcagcaggtaaattagtattaatcatcatcgcatttgttattagttttgtagcrttagctgatctatttgatcgttttatcaatt

SEQ ID NO: 7879 - DNA, 801 bp, Staphylococcus aureus
accatcatcattattttattgggtagtgtactagcaatcaaagtagattggaaaaaagtgttcacaggtaaaattagacaratttcagtttcaaaargstaygaratggtwtaycgacawtttgaaaagtttrctacgaagcgatttaaacgtgttatgcaagatcgtttaaaycaatacattattatgacmytrggcatatttatgrtwatcatyggatayggttatattcgwatwggactwccwaaagtwcatcagttacatgtttcygaatttggrscrttagaarttatattagcaatygtwacwgtyaymattggtwtktcwttaatwtttatacgtcaacgactracmatggtcattttaaatggrgtcatcggwtttgttgtracyttattctttatagcaatgaaagcmcctgatytagcattgacwcarctwgtagttgaaacratwacgacratwytatttattgtyagyttttcaagattaccmaacgtrccaagrtctaamgytaayaaaaaamgagaaataattaaaatttcwgtatcwctywtgatggcrctkattgttgtrtcaytwattttyatyrcrcaacaarcagatggwttrkcatcratwtcwrayttttatytwaragckgayaaaytaacaggtggyaaaaayattgtraatgcgataytwggwgactttagagcattagatacattrtttgaaggwttagtrttaattattactggrytaggtatttacacattattaaattaycaagatmggaggggacaagatgaaagagaatga

SEQ ID NO: 7880 - DNA, 801 bp, Staphylococcus aureus
atgagtttggtttatytattaattgctatactwgtrattatggcgatgataytwytaayrtctaaacgtagagcawtggctaaatatgcmggrtacatagcgytgrytgcacctgtaatwkcatctatytattttttgwtwcaartwccatcagtarytaaacwgcawtatytktctryytcyattccrtggatkamswcattagatattaatktagatttacgtttagatggtttragtttaatgttttcycttattatttcmcttattggaatygcwgtattcttctatgcaacwcaatatttatcctctcgwaaagayaatttaccaaggttttayttwtayttaacgytatttatgttyagyatgmtyggtattgtattakcwgayaatacratattratgtayrtkttttgggaaytaackagygtatcatcatttytattratttcatattggtataacaayggwgayagtcaatttggtgcgatkcartcatttatgattacagtatttggtggwttggcrttattagttggttttatyatgytgtatatyatgacaggaacgaataayatcacwgasatattaggacaagcagatcatattaagaaycatgswttrtttatcccyatgattwtyatgtttttattaggtgcatttacaaartcwgcacaattyccatttcatatttggytaccwagrgcaatggcwgcrcctacacctgtaagtgcwtatttacattcagccackatggtwaaagctggtatctttttattacttmgatttacaccwttrtta

SEQ ID NO: 7881 - DNA, 801 bp, Staphylococcus aureus
ggtctwagcaatatgtayrtwtatatcgthacstttgtyggkttaataacwatgttatttggwtcaatyacagctttaaaacaatgggatttaaaaggwatcctagcrtaytcwacaatcagtcaactwggratgattatggcwatggtsggtatmggtggyggatatgctcaacaccaacaagacgcaatagcatctatttatgtatttgtrttatttgswgcrytrttycatctwatgaatcatgcmatyttyaartgtgcgcttttcatgggwgtaggkattttagatcatgaagcaggttcaagggayatacgaattttaagtggmatgcgtcaaytatttccwaaaatgaatctwgtyatgaygatwgcggckctatctatggctggwgtwccatttttaaatggatttttaagtaaagaaatgttyttagatgcwttaacacaaactggacaattrtcccaatttagtttgatttcaatgatakctatcgtrtktrtkggtgttattgckagtrtttttacattcacatatgcactwtacatggtwaaagaagtattttggacwaaatatgattctaargtktttactaaaaaaaatatccacgaaccatggttgtttagtttaccmtctcttatattaatggtgctagtacctgtaatcttttttgtrccaaatatatttgggaaggggattatcgttcyagcattaagagstgtatcaggtggtaatcatcaaattgatcmattggyaccacatgtttcgcaatggcatggatttaacataccgcttctttta

SEQ ID NO: 7882 - DNA, 395 bp, Staphylococcus aureus
aattattagactacgctgaagctggtgacaacattggtgcattattacgtggtgttgctcgtgaagacgtacaacgtggtcaagtattagctgctcctggttcaattacaccacatactgaattyaaagcagaagtatacgtattatcaaaagacgaaggtggacgtcacactccattcttctcaaactatcgtccacaattctatttccgtactactgacgtaactggtgttgttcacttaccagaaggtactgaaatggtaatgcctggtgataacgttgaaatgacagtagaattaatcgctccaatcgcgattgaagacggtactcgtttctcaatccgygaaggtggacgtactgtaggatcaggcgttgttactgaaatcattaaataa

SEQ ID NO: 7883 - DNA, 395 bp, Staphylococcus aureus
atggcaaaagaaaaattygatcgttctaaagaacatgccaatatcggtactatcggtcacgttgaccatggtaaaacaacattaacagcagcaatcgctactgtattagcaaaaaatggtgactcagttgcacaatcataygacatgattgacaacgctccagaagaaaaagaacgtggtatcacaatcaatacttcwcacattgagtaccaaactgacaaacgtcactacgctcacgttgactgcccaggacacgctgactaygttaaaaacatgatcactggtgctgctcaaatggacggyggtatcttagtagtatctgctgctgacggtccaatgccacaaactcgtgaacacattcttttatcacgtaacgttggtgtaccagcattagt

SEQ ID NO: 7884 - DNA, 395 bp, Staphylococcus aureus
agtattcttaaacaaagttgacatggttgacgatgaagaattattagaattagtagaaatggaagttcgtgacttattaagcgaatatgacttcccaggtgacgatgtacctgtaatcgctggttcagcattaaaagctttagaaggcgatgctcaatacgaagaaaaaatcttagaattaatggaagctgtagatacttacattccaactccagaacgtgattctgacaaaccattcatgatgccagttgaggacgtattctcaatcactggtcgtggtactgttgctacaggccgtgttgaacgtggtcaaatcaaagttggtgaagaagttgaaatcatcggtttacatgacacatctaaaacaactgttacaggtgttgaaatgttccgta

SEQ ID NO: 7885 - DNA, 218 bp, Staphylococcus aureus
ctgaattaaacattaacgacagyttaactgttgctgatgttaaagtaactggcgacttcaaaatcgaaaacgattcagctgaatcagtwgtaacagtagttgctccaactgaagaaccaactgaagaagaaatcgaagctatggaaggcgaacaacaaactgaagaaccagaagttgttggcgaaagcaaagaagacgaagaraaaactgaagagtaa

SEQ ID NO: 7886 - DNA, 218 bp, Staphylococcus aureus
atggcttcattaaagtcaatcatccgtcaaggtaaacaaacacgttcagatcttaaacaattaagaaaatctggtaaagtaccagcagtagtatacggttacggtactaaaaacgtgtcagttaaagttgatgaagtagaattcatcaaagttatccgtgaagtakgtcgtaacggtgttatcgaattaggcgttggttctaaaactatcaaagttat

SEQ ID NO: 7887 - DNA, 218 bp, Staphylococcus aureus
ggttgcagactaccaattcgatccacttaaaaaccaaattactcacattgacttcttagcaatcaatatgagtgaagaacgtactgttgaagtaccagttcaattagttggtgaagcagtaggcgctaaagaaggcggcgtagttgaacaaccattattcaacttagaagtaactgctactccagacaatattccagaagcaatcgaagtagacatta

SEQ ID NO: 7888 - DNA, 93 bp, Staphylococcus aureus
aacaacaaagctactgacgaattccaacgtctagctaaaatcagtgacgatatcattcgttacatggttattcgtgaagacgaagacaagtaa

SEQ ID NO: 7889 - DNA, 93 bp, Staphylococcus aureus
atgtacatcgtacgcccaaacattgaggaagatgctaaaaaagcgttagttgaacgtttcaacggyatcttagctactgaaggtgcagaagtt

SEQ ID NO: 7890 - DNA, 93 bp, Staphylococcus aureus
ttagaagcaaaagactggggtaaacgtcgcctagcttatgaaatcaatgatttcaaagatggcttctacaacatcgtacgtgttaaatctgat

SEQ ID NO: 7891 - DNA, 3414 bp, Staphylococcus aureus
atgagtaaaagacagaaagaatttcatgacagcttagcaaacgaaaaaacaagagtaagactttataaatctggaaaaaattgggtaaaatccggaattaaagaaatagaaatgttcaaaattatggggctaccatttattagtcatagtttagtgagtcaagataatcaaagcattagtaaaaaaatgacgggatacggactgaaaactacggcggttattggtggtgcattcacggtaaatatgttgcatgaccagcaagcttttgcggcttctgatgcaccattaacttctgaattaaacacacaaagtgaaacagtaggtaatcaaaactcaacgacaatcgaagcatcaacatcaacagccgattccacaagtgtaacgaaaaatagtagttcggtacaaacatcaaatagtgacacagtctcaagtgaaaagtctgaaaaggtcacttcgacaactaatagtacaagcaatcaacaagaaaaattgacatctacatcagaatcaacatcctcaaagaatactacatcaagttctgatactaaatctgtagcttcaacttcaagtacagaacaaccaattaatacatcaacaaatcaaagtactgcatcaaataacacttcacaaagcacaacgccatcttcggtcaacttaaacaaaactagcacaacgtcaactagcaccgcaccagtaaaacttcgaactttcagtcgcttagctatgtcaacatttgcgtcagcagcgacgacaaccgcagtaactgctaatacaattacagttaataaagataacttaaaacaatatatgacaacgtcaggtaatgctacctatgatcaaagtaccggtattgtgacgttaacacaggatgcatacagccaaaaaggtgccattacattaggaacacgtattgactctaataagagttttcatttttctggaaaagtaaatttaggtaataaatacgaaggtaatggaaatggtggagatggtatcggctttgccttttcgccaggtgtattaggtgaaacagggttaaacggtgccgcagtaggtattggtggcttaagtaacgcatttggcttcaaattggatacgtatcacaatacatctaaaccaaattcagctgcaaaggcgaatgctgacccatctaatgtagctggtggaggtgcgtttggtgcctttgtaacaacagatagttatggtgttgcgacaacgtatacatcaagttcaacagctgataatgctgcgaagttaaaagtgcaacctacgaacaacacgttccaagattttgatattaattataatggtgatacaaaagttatgactgtaacgtatgcaggtcaaacatggacacgtaatatttcagattggattgcaaaaagtggtacgaccaacttttcattatcaatgacagcctcaacaggtggcgcgacaaatttacaacaagtacaatttggaacattcgaatatacagagtctgctgttacacaagtgagatacgttgatgtaacaacaggtaaagatattattccaccaaaaacatattcaggaaatgttgatcaagtcgtgacaatcgataatcagcaatctgcattgactgctaaaggatataactacacgtccgtcgatagttcatatgcgtcaacttataatgatacaaataaaactgtaaaaatgacgaatgctggacaatcagtgacatattattttactgatgtaaaagcaccaactgtaactgtaggcaatcaaaccattgaagtgggtaaaacaatgaatcctgttgtgttgactacaacggataatggtactgggactgtgacaaatacagttacaggattaccaagcggattaagttatgatagtgcaacgaattcaatcattgggacgccaacgaaaattggtcaatcaacagtgacagttgtgtctactgaccaagcaaacaataaatcgacgacaacttttacaataaatgttgtggatacgacagcaccaacagtgacaccaataggagatcaatcatcagaagtgtattcgccaatatcaccgattaaaattgctacgcaggacaacagtggaaatgcggtgacgaatacagtgactggattgccatctggactaacattcgatagtacaaataataccattagtggtacaccaacaaacattggtacaagtactattacaatcgtttctacagatgcgagtggtaacaaaacgacaacaacttttaaatatgaagtaacaagaaatagcatgagtgattccgtatcaacatcaggaagtacacaacaatcccaaagtgtctcaacaagtaaagctgactcacaaagtgcatcaacgagtacatcaggatcgattgtggtatctacatcagctagtacctcgaaatcgacaagtgtaagcctatctgattctgtgagtgcatctaagtcattaagcacatctgaaagtaatagtgtatcaagctcaacaagcacaagtttagtgaattcacaaagtgtatcatcaagcatgtcggattcagctagtaaatcaacatcattaagcgattctatttcaaactctagcagtactgaaaaatccgaaagtctatcaacaagtacatctgattcattgcgtacatcaacgtcactcagtgactcattaagtatgagtacatcggggagcttgtctaagtcaaaaagtctatcaacaagtacatcagaatcgtctagtacatcagcatcattaagtgacagcacatcgaatgcaatcagcacatcagaatcattgagcgagtcagctagcacctcggactctatcagtatttcaaatagcatagccaactctcaaagtgcgtcaacaagcaaatcagattcacaaagtacatcaatatcattaagtacaagtgattcaaaatcgatgagtacatcagaatcattgagcgattcgacgagcacaagtggttctgtttctggatcactaagcatagcagcatcacaaagtgtctcaacaagtacatcagactcgatgagtacttcagagatagtaagtgactctatcagtacaagtgggtcattatctgcatcagacagtaaatcaatgtctgtaagtagttcaatgagcacgtctcagtcaggtagtacatcagaatcattaagtgattcacaaagtacatctgattctgatagtaagtcattatcactaagtactagtcaatcaggttcaacaagtacatcaacgtcgacaagtgcttcagtacgtacttcggaatcacaaagtacgtctggttcaatgagtgcaagtcaatccgattcaatgagcatatcaacgtcgtttagtgattcaacgagtgatagcaaatcagcatcaactgcatcaagtgaatcaatatcacaaagtgcttctacgagcacatctggttcggtaagt

SEQ ID NO: 7892 - DNA, 3414 bp, Staphylococcus aureus
acttcgacatcgttaagtacaagtaattcagaacgtacatcaacatctatgagtgattccacaagcttaagtacatcagagtctgattcaataagtgaatcaacgtcaacgagcgactctataagtgaagcaatatctgcttcagagagcacgtttatatcattaagtgaatcaaatagtactagcgattcagaatcacaaagtgcatctgcctttttaagtgaatcattaagtgaaagtacgtctgaatcaacatcagagtcagtgagtagttcgacaagtgagagtacgtcattatcagacagtacatcagaatctggtagcacatcaacatcattaagtaattcaacaagtggtagtgcgtccatttcaacatcgacaagtatcagtgaatcaacgtcaacgtttaagagcgagagtgtttcaacatcactaagtatgtcaacgagtacaagtttgtctgactctacaagtttgtcaacatcattaagtgattccacaagtgatagtaagtctgattcattaagtacatcaatgtcgacaagtgattcaatcagtacaagtaaatctgattccattagtacatccacatcattaagtggttctacaagtgaaagtgaatccgactcaacatcatcaagtgaaagtaaatccgattcaacatcaatgagcataagtatgtctcaatcaacatcaggaagtacaagtacgtcaacgagtacaagtttgtctgactcaacgagtacgtcattgtcactaagtgcatcaatgaatcaaagcggagtagactcaaactcagcaagccaaagtgcctcaaactcaacaagtacaagcacgagcgaatccgattcacaaagcacatcatcatatacaagtcagtcaacaagccaaagtgaatccacatcgacatcaacgtcactaagcgattcaacaagtatatctaaaagtacgagtcaatcaggttcggtaagcacatcagcgtcattaagtggttcagagagtgaatctgattcacaaagtatctcaacaagtgcaagtgaatcaacatcagaaagtgcgtcaacatcactcagtgactcaacaagtacaagtaactcaggatcagcaagtacgtcaacatcgctcagtaactcagcaagcgcaagtgaatccgattcgtcgtcaacatctttaagtgattcaacatctgcgtcaatgcaaagcagtgaatccgattcacaaagcacatcagcatcattaagtgattcgctaagtacatcaacttcaaaccgcatgtcgaccattgcaagtttatcaacatcggtaagtacatcagaatctggctcaacatcagaaagtacaagtgaatccgattcaacatcaacatcattaagcgattcacaaagcacatcaagaagtacaagtgcatctggatcagcaagtacatcaacatcaacaagtgactctcgtagtacatcagcttcaactagtacttcgatgcgtacaagtacaagtgattcacaaagtatgtcgctttcaacaagtacatcaacaagtatgagtgattcaacgtcattatctgatagtgttagtgattcaacatcagactcaacaagtgcgagtacatctggttcgatgagtgtgtctatatcgttaagtgattcgacaagcacatcaacatcggctagtgaagtaatgagcgcaagcatatctgattcacaaagtatgtcagaatctgtaaatgattcagaaagtgtaagcgaatctaattctgaaagtgactcaaaatcgatgagtggttcaacaagcgtaagtgattctggctcattgagcgtctcaacgtcattaagaaaatcagaaagtgtaagtgagtctagttcattgagtggctcacaatcgatgagcgattcagtaagcacaagcgattcgtcatcattaagtgtatcgacgtcactaagaagttcggaaagcgtgagtgaatctgattcattaagtgattcaaaatcgacaagtggttcgacttcaacaagtacatctggttcattgagtacctcaacatcattaagtggttcagaaagcgtaagcgagtctacctcgctaagtgattcaatatcaatgagtgattctactagtacaagtgactccgactcattaagtggatcaatatctttaagtggttccacaagtcttagcacttcggattcattaagtgattcaaaatcattgagtagctcgcaaagtatgagtggatcagaatcaacgtcaacaagtgtgagcgattcgcagtcaagctcaacaagtaatagtcaatttgactctatgagcatcagtgcatcagaaagcgactcaatgtctacaagtgattcgtctagcatcagtggatcaaattcaacgagtacatcactttcaacatctgactcaatgagcggaagcgtatcagtttcaacatcgacaagtttaagtgactcaatatcaggttcaacaagtttaagtgactcgagctcaacaagcacatctacatcattaagtgattcaatgtcacaaagccagtcaacaagtacaagtgcatctggttccttaagtacatcgatatcaacatcaatgtcaatgagtgctagtacatcgtcatcacaaagcacatcggtgtcgacatcattatcaacatcagacagtatcagtgattctacttcaataagtatcagtggttcacaaagtacagtagaatcagaatctacaagtgattcaacttctatcagtgactcagaatcattgagtacatcagattcagactcgacatcgacaagtacatcggactcaacaagtggttcaacttcaacaagcatatctgaatcattaagtacgtctggttcaggttcaacgagcgtatctgactcaacatcaatgagtgaatccgattcaacaagtgtttcaatgtcacaaagtatgtccggttcaacgtacaactcgacttcagtgagcgactcagaatcagtgtcaacaagcacatcaacgtcattgagcacatccgattcgacaagcacatccgaatcactgagtacatctatgtctggttcacaaagcatttctgactcgacatcaacaagtatgtccggctcaacaagtacatctgaatctaactcaatgcatccgtcagactcaatgagtatgcatcatactcacagcacgagcacatctcgcttatcaagtgaagcaacaacgagcacgagtgaatctcagtctacattaagtgcaacatctgaagtgactaaacataatggcacgccagcacaaagtgaaaaaagattgccagatacaggtgactcaataaaacaaaatggattactaggtggcgttatgacattattagttggtttaggtttaatgaagagaaagaaaaagaaagatgaaaatgatcaagatgattctcaagcataa

SEQ ID NO: 7893 - DNA, 3408 bp, Staphylococcus aureus
atgagtaaaagacagaaagcatttcatgacagcttagcaaacgaaaaaacaagagtaagactttataaatctggaaaaaattgggtaaaatccggaattaaagaaatagaaatgttcaaaattatggggctaccatttattagtcatagtttagtgagtcaagataatcaaagcattagtaaaaaaatgacgggatacggactgaaaactacggcggttattggtggtgcattcacggtaaatatgttgcatgaccagcaagcttttgcggcttctgatgcaccattaacttctgaattaaacacacaaagtgaaacagtaggtaatcaaaactcaacgacaatcgaagcatcaacatcaacagccgattccacaagtgtaacgaaaaatagtagttcggtacaaacatcaaatagtgacacagtctcaagtgaaaagtctgaaaaggtcacttcgacaactaatagtacaagcaatcaacaagagaaattgacatctacatcagaatcaacatcctcaaagaatactacatcaagttctgatactaaatctgtagcttcaacttcaagtacagaacaaccaattaatacatcaacaaatcaaagtactgcatcaaataacacttcacaaagcacaacgccatcttcggtcaacttaaacaaaactagcacaacgtcaactagcaccgcaccagtaaaacttcgaactttcagtcgcttagctatgtcaacatttgcgtcagcagcgacgacaaccgcagtaactgctaatacaattacagttaataaagataacttaaaacaatatatgacaacgtcaggtaatgctacctatgatcaaagtaccggtattgtgacgttaacacaggatgcatacagccaaaaaggtgctattacattaggaacacgtattgactctaataagagttttcatttttctggaaaagtaaatttaggtaacaaatatgaagggcatggaaatggtggagatggtatcggttttgccttttcaccaggtgtattaggtgaaacagggttaaacggtgccgcagtaggtattggtggcttaagtaacgcatttggcttcaaattggatacgtatcacaatacatctaaaccaaattcagctgcaaaggcgaatgctgacccatctaatgtagctggtggaggtgcgtttggtgcatttgtaacaacagatagttatggtgttgcracaacgtatacatcaagttcaacagctgataatgctgcgaagttaaatgttcaacctacaaataacacgttccaagattttgatattaactataatggtgatacaaaggttatgactgtcaaatatgcaggtcaaacatggacacgtaatatttcagattggattgcgaaaagtggtacgaccaacttttcattatcaatgacagcctcaacaggtggcgcgacaaatttacaacaagtacaatttggaacattcgaatatacagagtctgctgttacacaagtgagatacgttgatgtaacaacaggtaaagatattattccaccaaaaacatattcaggaaatgttgatcaagtcgtgacaatcgataatcagcaatctgcattgactgctaaaggatataactacacgtccgtcgatagttcatatgcgtcaacttataatgatacaaataaaactgtaaaaatgacgaatgctggacaatcagtgacatattattttactgatgtaaaagcaccaactgtaactgtaggcaatcaaaccatagaagtgggtaaaacaatgaatcctrttgtrttgactacaacggataatggtactgggactgtgacaaatacagttacaggattaccaagcggattaagttacgatagtgcaacgaattcaatcattgggacaccaacaaaaattggtcaatcaacagtgacagttgtgtctactgaccaagcaaataacaaatcgacgacaacttttacaataaatgttgtggatacgacagcaccaacagtgacaccaataggagatcaatcatcagaagtgtattcaccaatatccccgattaaaattgctacgcaagataacagtggaaatgcggtgacgaatacagtgactggattgccatccggactaacatttgatagtacaaataatactattagtggtacaccaacaaacattggtacaagtactatatcaatcgtttctacagatgcgagcggtaacaaaacgacgacaacttttaaatatgaagtaacaagaaatagcatgagtgattccgtatcaacatcaggaagtacacaacaatctcaaagtgtstcaacaagtaaagctgactcacaaagtgcatcaacgagtacatcaggatcgattgtggtatctacatcagctagtacctcgaaatcgacaagtgtaagcctatctgattctgtgagtgcatctaagtcattaagcacatctgaaagtaatagtgtatcaagctcaacaagcacaagtttagtgaattcacaaagtgtatcatcaagcatgtcrgrttcagytagtaaatcaacatcattaagcgattckatttcraactctarcagtactgaaaaatccgaaagtctatcaacaagtacatctgattcattgcgtacatcaacatcactcagtgactcattaagtatgagtacatcaggaagcttgtctaagtcacaaagcttatcaacgagtatatcagggtcgtctagtacatcagcatcattaagtgacagtacatcgaatgcaattagtacatcaacatcattgagcgagtcagctagcacctcggactctatcagtatttcaaatagcatagccaactctcaaagtgcgtcaacaagcaaatcagattcacaaagtacatcaatatcattaagtacaagtgattcaaaatcgatgagtacatcagaatcattgagcgattcgacgagcacaagtggttctgtttctggatcactaagcatagcagcatcacaaagtgtctcaacaagtacatcagactcgatgagtacttcagagatagtaagtgactctatcagtacaagtgggtcattatctgcatcagacagtaaatcaatgtcygtaagtagttcaatgagcacgtctcagtcaggtagtacatcagaatcattaagtgattcacaaagtacatctgattctgatagtaagtcattatcacwaagtactagtcaatcaggttcaacaagtacatcaacgtcgacaagtgcttcagtacgtacttcggaatcrcaaagtacgtctggttcaatgagtgcaagtcaatccgattcaatgagcatatcaacgtcgtttagtgattcaacgagtgatagcaaatcagcatcaactgcatcaagtgaatcaatatcacaaagtgcttctacgagcacatctggttcg

SEQ ID NO: 7894 - DNA, 3408 bp, Staphylococcus aureus
gtaagtacttcgacatcgttaagtacaagtaattcagaacgtacatcaacatctrtgagtgattccacaagcttaagtacatcagagtctgattcaataagtgaatcaacgtcaacgagcgaytctataagtgaagcaatatctgcttcagagagcacgtytatatcattaagtgaatcaaatagtactagcgattcagaatcacaaagtgcatctgcctttttaagtgaatcattaagtgaaagtacgtctgaatcaacatcagagtcagtgagtagttcgacaagtgagagtacgtcattatcagacagtacatcagaatctggtagcacatcaacatcattaagtaattcaacaagtggtagtrcgtccatttcaacatcgacaagtatcagtgaatcaacgtcaacgtttaagagcgagagtgtttcaacatcactgagtatgtcaacgagtacaagtttgtctractctacaagtttgtcaacatcattaagtgattccacaagtgatagtaagtctgattcattaagtacatcaatgtcgacaagtgattcaatcagtacaagtaaatctgattccattagtacatcyacatcattaagtggttctacaagtgaaagtgaatccgactcaacatcatcaagtgaaagtaaatccgattcaacatcaatgagcataagtatgtctcaatcaacatcaggaagtacaagtacgtcaacgagtacaagtttgtctgactcaacgagtacrtcattgtcactaagtgcmtcaatgaatcaaagcggagtagactcaaactcagcaagccaaagtgcctcaaactcaacaagtacaagcacgagcgaatccgattcacaaagcacatcawcatatacaagtcagtcaacaagccaaagtgaatcmacatcgacatcaacgtcactaagcgattcaacaagtatatctaaaagtacgagycaatcaggttcrryaagcacatcagcrtcattaagtggttcagagagtgaatctgattcacaaagtatctcaacaagtgcaagtgartcaacatcagaaagtgcgtcaacatcactcagtgactcaacaagtacaagtaactcaggatcagcaagtacgtcaacatcgctcagtaactcagcaagcgcaagtgaatccgattygtcgtcaacatctttaagtgattcaacatctgcgtcaatgcaaagcagtgaatccgattcacaaagcacatcagcatcattaagtgattcgctaagtacatcaacttcaaaccgcatgtcgaccattgcaagtttatcwacatcggtaagtacatcagartctggctcaacatcagaaagtacaagtgaatccgattcaacatcaacatcattaagcgattcacaaagcacatcaagaagtacaagtgcatcaggatcagcaagtacatcaacatcaacaagtgactctcgtagtacatcagcttcaactagtacttcgatgcgtacaagtactagtgattcacaaagtatgtcgctttcracaagtacatcaacaagtatgagtgattcaacgtcattatctgatagtgtkagtgattcaacatcagactcaacaagtgcgagtacatctggttcgatgagtgtrtctatatcgttaagtgattcgacaagtacatcaacatcggctagtgaagtaatgagcgcaagcatatctgattcacaaagtatgtcagaatctgtaaatgattcagaaagtgtaagtgaatctaattctgaaagtgactctaaatcgatgagtggctcaacaagtgtcagtgattctggctcattgagcgtctcaacgtcattaagaaaatcagaaagtgtaagcgagtcaagttcattgagtkgctcacaatcgatgagcgattcagtaagcacaagcgattcgtcatcattaagtgtatcgacgtcactaagaagttcagaaagcgtgagtgaatctgattcattaagtgattcaaaatcaacaagtggttcgacttcaacaagtacatctggttcattgagtacctcaacatcattaagtggttcagaaagcgtaagcgagtctacctcgctaagtgattcaatatcaatgagtgattctactagtacaagtgactccgactcattaagtggatcaatatctttaagtggttccacaagtcttagcacttcggattcattaagtgattcaaaatcattgagtagctcgcaaagtatgagtggatcagaatcaacgtcaacaagtgtgagcgattcgcagtcaagctcaacaagtaatagtcaatttgactctatgagcatcagtgcatcagaaagcgactcaatgtctacaagtgattcgtctarcatcagtggatcaaattcaacgagtacatcactttcaacatctgactcaatgagcggaagcgtatcagtttcaacatcgacaagtttaagtgactcaatatcaggttcaacaagtgtaagtgactcgagctcaacaagcacatctacatcattaagtgattcaatgtcacaaagccagtcaacaagtacaagtgcatctggttccttaagtacatcgatatcaacatcaatgtcaatgagtgctagtacatcgtcatcacaaagcacatcggtgtcgacatcattatcaacatcagacagtatcagtgattctacttcaataagtatcagtggttcacaaagtacagtagaatcagaatctacaagtgattcaacttctatcagtgactcagaatcattgagtacatcagattcagactcgacatcgacaagtacatcggactcaacaagtggttcaacttcaacaagcatatctgaatcattaagtacgtctggttcaggttcaacgagcgtatctgactcaacatcaatgagtgaatcyrattcawcragtgtttcaatgtcacaagacaaatcygactcaacatcaattagygactcagaatcagtgtcaacaagcacatcaacgtcattgagcacatccgattcgacaagcacatccgaatcrctgagtacatctatgtctggttcacaaagcatttctgactcaacatcaacaagtatgtccggctcaacaagtacatctgaatctaactcaatgcatccgtcagactcaatgagtatgcatcatactcacagcacgagcacatctcgcttatcaagtgaagcaacaacgagcacgagtgaatctcagtctacattaagtgcaacatctgaagtgactaaacataatggcacrccwgcacaaagtgaaaaaagattgccagatacaggtgactcaataaaacaaaatggattactaggtggcgttatgacattattagttggtttaggtttaatgaagagaaagaaaaagaaagatgaaaatgatcaagatgattctcaagcataa

SEQ ID NO: 7895 - DNA, 3393 bp, Staphylococcus aureus
atgagtaaaagacagaaagcatttcatgacagcttagcaaacgaaaaaacaagagtaagactttataaatctggaaaaaattgggtaaaatccggaattaaagaaatagaaatgttcaaaattatggggctaccatttattagtcatagtttagtgagtcaagataatcaaagcattagtaaaaaaatgacgggatacggactgaaaactacggcggttattggtggtgcattcacggtaaatatgttgcatgaccagcaagcttttgcggcttctgatgcaccattaacttctgaattaaacacacaaagtgaaacagtaggtaatcaaaactcaacgacaatcgaagcatcaacatcaacagccgattccacaagtgtaacgaaaaatagtagttcggtacaaacatcaaatagtgacacagtctcaagtgaaaagtctgaaaaggtcacttcgacaactaatagtacaagcaatcaacaagagaaattgacatctacatcagaatcaacatcctcaaagaatactacatcaagttctgatactaaatctgtagcttcaacttcaagtacagaacaaccaattaatacatcaacaaatcaaagtactgcatcaaataacacttcacaaagcacaacgccatcttcggtcaacttaaacaaaactagcacaacgtcaactagcaccgcaccagtaaaacttcgaactttcagtcgcttagctatgtcaacatttgcgtcagcagcgacgacaaccgcagtaactgctaatacaattacagttaataaagataacttaaaacaatatatgacaacgtcaggtaatgctacctatgatcaaagtaccggtattgtgacgttaacacaggatgcatacagccaaaaaggtgctattacattaggaacacgtattgactctaataagagttttcatttttctggaaaagtaaatttaggtaacaaatatgaagggcatggaaatggtggagatggtatcggttttgccttttcaccaggtgtattaggtgaaacagggttaaacggtgccgcagtaggtattggtggcttaagtaacgcatttggcttcaaattggatacgtatcacaatacatctaaaccaaattcagctgcaaaggcgaatgctgacccatctaatgtagctggtggaggtgcgtttggtgcatttgtaacaacagatagttatggtgttgcgacaacgtatacatcaagttcaacagctgataatgctgcgaagttaaatgttcaacctacaaataacacgttccaagattttgatattaactataatggtgatacaaaggttatgactgtcaaatatgcaggtcaaacatggacacgtaatatttcagattggattgcgaaaagtggtacgaccaacttttcattatcaatgacagcctcaacaggtggcgcgacaaatttacaacaagtacaatttggaacattcgaatatacagagtctgctgttacacaagtgagatacgttgatgtaacaacaggtaaagatattattccaccaaaaacatattcaggaaatgttgatcaagtcgtgacaatcgataatcagcaatctgcattgactgctaaaggatataactacacgtccgtcgatagttcatatgcgtcaacttataatgatacaaataaaactgtaaaaatgacgaatgctggacaatcagtgacatattattttactgatgtaaaagcaccaactgtaactgtaggcaatcaaaccatagaagtgggtaaaacaatgaatcctattgtattgactacaacggataatggtactgggactgtgacaaatacagttacaggattaccaagcggattaagttacgatagtgcaacgaattcaatcattgggacaccaacaaaaattggtcaatcaacagtgacagttgtgtctactgaccaagcaaataacaaatcgacgacaacttttacaataaatgttgtggatacgacagcaccaacagtgacaccaataggagatcaatcatcagaagtgtattcaccaatatccccgattaaaattgctacgcaagataacagtggaaatgcggtgacgaatacagtgactggattgccatccggactaacatttgatagtacaaataatactattagtggtacaccaacaaacattggtacaagtactatatcaatcgtttctacagatgcgagcggtaacaaaacgacgacaacttttaaatatgaagtaacaagaaatagcatgagtgattccgtatcaacatcaggaagtacacaacaatctcaaagtgtgtcaacaagtaaagctgactcacaaagtgcatcaacgagtacatcaggatcgattgtggtatctacatcagctagtacctcgaaatcgacaagtgtaagcctatctgattctgtgagtgcatctaagtcattaagcacatctgaaagtaatagtgtatcaagctcaacaagcacaagtttagtgaattcacaaagtgtatcatcaagcatgtcggattcagctagtaaatcaacatcattaagcgattctatttcaaactctagcagtactgaaaaatccgaaagtctatcaacaagtacatctgattcattgcgtacatcaacatcactcagtgactcattaagtatgagtacatcaggaagcttgtctaagtcacaaagcttatcaacgagtatatcagggtcgtctagtacatcagcatcattaagtgacagtacatcgaatgcaattagtacatcaacatcattgagcgagtcagctagcacctcggactctatcagtatttcaaatagcatagccaactctcaaagtgcgtcaacaagcaaatcagattcacaaagtacatcaatatcattaagtacaagtgattcaaaatcgatgagtacatcagaatcattgagcgattcgacgagcacaagtggttctgtttctggatcactaagcatagcagcatcacaaagtgtctcaacaagtacatcagactcgatgagtacttcagagatagtaagtgactctatcagtacaagtgggtcattatctgcatcagacagtaaatcaatgtccgtaagtagttcaatgagcacgtctcagtcaggtagtacatcagaatcattaagtgattcacaaagtacatctgattctgatagtaagtcattatcacaaagtactagtcaatcaggttcaacaagtacatcaacgtcgacaagtgcttcagtacgtacttcggaatcacaaagtacgtctggttcaatgagtgcaagtcaatccgattcaatgagcatatcaacgtcgtttagtgattcaacgagtgatagcaaatcagcatcaactgcatcaagtgaatcaatatcacaaagtgcttctacg

SEQ ID NO: 7896 - DNA, 3393 bp, Staphylococcus aureus
agcacatctggttcggtaagtacttcgacatcgttaagtacaagtaattcagaacgtacatcaacatctatgagtgattccacaagcttaagtacatcagagtctgattcaataagtgaatcaacgtcaacgagcgactctataagtgaagcaatatctgcttcagagagcacgtttatatcattaagtgaatcaaatagtactagcgattcagaatcacaaagtgcatctgcctttttaagtgaatcattaagtgaaagtacgtctgaatcaacatcagagtcagtgagtagttcgacaagtgagagtacgtcattatcagacagtacatcagaatctggtagcacatcaacatcattaagtaattcaacaagtggtagtacgtccatttcaacatcgacaagtatcagtgaatcaacgtcaacgtttaagagcgagagtgtttcaacatcactgagtatgtcaacgagtacaagtttgtctgactctacaagtttgtcaacatcattaagtgattccacaagtgatagtaagtctgattcattaagtacatcaatgtcgacaagtgattcaatcagtacaagtaaatctgattccattagtacatccacatcattaagtggttctacaagtgaaagtaaatccgattcaacatcaatgagcataagtatgtctcaatcaacatcaggaagtacaagtacgtcaacgagtacaagtttgtctgactcaacgagtacatcattgtcactaagtgcctcaatgaatcaaagcggagtagactcaaactcagcaagccaaagtgcctcaaactcaacaagtacaagcacgagcgaatccgattcacaaagcacatcawcatatacaagtcagtcaacaagccaaagtgaatcmacatcgacatcaacgtcactaagcgattcaacaagtatatctaaaagtacgagtcaatcaggttcggtaagcacatcagcgtcattaagtggttcagagagtgaatctgattcacaaagtatctcaacaagtgcaagtgagtcaacatcagaaagtgcgtcaacatcactcagtgactcaacaagtacaagtaactcaggatcagcaagtacgtcaacatcgctcagtaactcagcaagcgcaagtgaatccgatttgtcgtcaacatctttaagtgattcaacatctgcgtcaatgcaaagcagtgaatccgattcacaaagcacatcagcatcattaagtgattcgctaagtacatcaacttcaaaccgcatgtcgaccattgcaagtttatctacatcggtaagtacatcagagtctggctcaacatcagaaagtacaagtgaatccgattcaacatcaacatcattaagcgattcacaaagcacatcaagaagtacaagtgcatcaggatcagcaagtacatcaacatcaacaagtgactctcgtagtacatcagcttcaactagtacttcgatgcgtacaagtactagtgattcacaaagtatgtcgctttcgacaagtacatcaacaagtatgagtgattcaacgtcattatctgatagtgttagtgattcaacatcagactcaacaagtgcgagtacatctggttcgatgagtgtgtctatatcgttaagtgattcgacaagtacatcaacatcggctagtgaagtaatgagcgcaagcatatctgattcacaaagtatgtcagaatctgtaaatgattcagaaagtgtaagtgaatctaattctgaaagtgactctaaatcgatgagtggctcaacaagtgtcagtgattctggctcattgagcgtctcaacgtcattaagaaaatcagaaagtgtaagcgagtcaagttcattgagtkgctcacaatcgatgagcgattcagtaagcacaagcgattcgtcatcattaagtgtatcgacgtcactaagaagttcagaaagcgtgagtgaatctgattcattaagtgattcaaaatcaacaagtggttcgacttcaacaagtacatctggttcattgagtacctcaacatcattaagtggttcagaaagcgtaagcgagtctacctcgctaagtgattcaatatcaatgagtgattctactagtacaagtgactccgactcattaagtggatcaatatctttaagtggttccacaagtcttagcacttcggattcattaagtgattcaaaatcattgagtagctcgcaaagtatgagtggatcagaatcaacgtcaacaagtgtgagcgattcgcagtcaagctcaacaagtaatagtcaatttgactctatgagcatcagtgcatcagaaagcgactcaatgtctacaagtgattcgtctarcatcagtggatcaaattcaacgagtacatcactttcaacatctgactcaatgagcggaagcgtatcagtttcaacatcgacaagtttaagtgactcaatatcaggttcaacaagtgtaagtgactcgagctcaacaagcacatctacatcattaagtgattcaatgtcacaaagccagtcaacaagtacaagtgcatctggttccttaagtacatcgatatcaacatcaatgtcaatgagtgctagtacatcgtcatcacaaagcacatcggtgtcgacatcattatcaacatcagacagtatcagtgattctacttcaataagtatcagtggttcacaaagtacagtagaatcagaatctacaagtgattcaacttctatcagtgactcagaatcattgagtacatcagattcagactcgacatcgacaagtacatcggactcaacaagtggttcaacttcaacaagcatatctgaatcattaagtacgtctggttcaggttcaacgagcgtatctgactcaacatcaatgagtgaatcyrattcawcragtgtttcaatgtcacaagacaaatcygactcaacatcaattagygactcagaatcagtgtcaacaagcacatcaacgtcattgagcacatccgattcgacaagcacatccgaatcrctgagtacatctatgtctggttcacaaagcatttctgactcaacatcaacaagtatgtccggctcaacaagtacatctgaatctaactcaatgcatccgtcagactcaatgagtatgcatcatactcacagcacgagcacatctcgcttatcaagtgaagcaacaacgagcacgagtgaatctcagtctacattaagtgcaacatctgaagtgactaaacataatggcacrccwgcacaaagtgaaaaaagattgccagatacaggtgactcaataaaacaaaatggattactaggtggcgttatgacattattagttggtttaggtttaatgaagagaaagaaaaagaaagatgaaaatgatcaagatgattctcaagcataa

SEQ ID NO: 7897 - DNA, 149 bp, Staphylococcus aureus
aagcactaaaagcacaacatgatattaaaattgataaacgtaaaatggatttaccaaatggaattcattccctaggatatacgaatgtacctgttaaattagataaagaagttgaaggtacaattcgcgtacacacagttgaacaataa

SEQ ID NO: 7898 - DNA, 149 bp, Staphylococcus aureus
atgaaagtaatttttacacaagatgttaaaggtaaaggtaaaaaaggtgaagttaaagaagtaccagtaggttatgcaaataacttcttattgaaaaagaattatgctgtagaagcaacaccaggtaacctkaaacaattagagttaca

SEQ ID NO: 7899 - DNA, 149 bp, Staphylococcus aureus
gaaaaaacgtgcaaaacaagaacgccaacaagaaattgaagatgctaaagcattaaaagaaackttatcaaacattgaagttgaagtatcagcaaaaactggtgaaggtggtaaattgtttggrtcagtaagyacaaaacaaattgccg

SEQ ID NO: 7900 - DNA, 3588 bp, Staphylococcus aureus
atgattatgggyaatttgagatttcaacaggaatattttcgtatatacaaaaataatacagaatcaacgacacaccgtaatgcgtattgggttaaactcgctaaaaatrttgaagctactaaaatgatgtatgcattatcgacaattgtgcaacaacatgcatctataagacatttttttgatgttactaccgatgacaatttaacaatgatacttcatgaatttctgccttttattgagataaaacaagttccatcttcttccgcaaactatgatttagaagctttttttaagcaagaattaagtacttaccattttaatgattcacctttattcaaakttaaattgtttcagttcgctgatgctgcatatataytattagattttcatgtgtccattttcgatgatagtcaaattgatatttttcttgatgatttatgcaatgcatatcgtggcaatactgttattaacaatactcgacagcatgcacatwtaaatagaaatgatgataaagacaatcaagatgcatcgcatatagcattagactcaaactattttcggytagagaataactctgacatccatatygatagttatttwccaattaagcatccatttgarcaagctttatatcaaacgtatttgattgatgatatgacatcaatagatatggcatcgttggctgttagtgtgtatttagctaatcatataatgagtcaacaacatgatgtcacattaggtatacatgtaccatcacatttaccaaatgatttacacggaaatattgtgccrttaacgttaacaatcgatgcaaaagatgtatgtcaacgytttacaacagattttaataaawgtgtgttgcaaaatatgtcgcaattacagtgcgcgaagtcttcgctttcaytagagactatttttcattgttatcatcawatgatgtcttgttgtaatgatgttattgaggatgtacatcaaatacatgatgcacatacatctttagcggatattgaaatttttccacatcaacacgggttcaaaattatatataacagtgcagcatatgatttgctctcaatcgagacgctgagtgacttagttcgwaatatttatttgcaaattactraagaaaatggaaataaacgaacaactgtagatgaacttaatttgatgacagaacgtgatattcaattatatgacgatatcaatttaagtttrcctgagatagatgatgcgcaaacagttgttaccttatttgagcaacaagttgaagcaacrccgaatyatgtcgctgtgcaatttgacggagtgtttataacatatcaaacattgaatgcacgcgcgaatgatttagcacamcgtttgagaaaccagtatggtgttgaacctaatgatcgtgtcgctgtcatagctgaaaaaagtattgagatgatartagcgatgataggtgtgttgaaagctggtggggcttacgtgccaattgatcygaactatccaagtgatcgtcaggagtacattttaaaagatgyaacgcctaaagttgtwatmacrtaycaagywktatatgaaaatggtaaacraratattaatcacattgatttgaayaagatagcgtggaaaaatattgataatctttctaaatgtaacacgttagaagatcatgcwtatgttatttacacgtcggggacaactggtaaccctaaagggacactaattccgcaccgaggtattgttcgcttggtccatcraaatcattatgtaccattaaatgaaragacgacrattttgttatcaggaactatagcctttgaygctgcaacatttgaaatatatggtgcattgctmaatggtggaaarctgattgttgctaaaamagaacaattattaaatccaatagcgktagaacaattaatcaatgaaaatgacgtyaatactatgtggttaacctcctcattatttaatcagattgctagtgaacgaatagaagtattggtaycgttaaagtatttattaattggtggagaagtattgaatgctaagtgggtggatttgcttaatcaaaraccgaagcatcctcaaattattaatggttatggaccaactgaaaatacaacatttacaacgacgtataatatacctaacaaagttccaaatcgtattcctattggtaaaccgattctkggtactcatgtttatatcatgcaaggcgagcgtcggtgtggcgttggtattcctggagaattatgtacaagtggctttgggttrgctgcaggttatttaaatcagccagaattgacagcagataaatttatcaaagattcaaatataaatcagctgatgtatagaagtggtgatatcgtwcgtttgttacccgatggcaacatagattatttatatcgaaaggacaaacaagttaagattcgaggrtttaggattgagttgtcagaggttgagcatgcgctcgagcgtatacaaggtattaataaagcwgttgttattgttcaaaatcatgatcaagaycagtatatcgttgcttattatgaagcgatgcatacattatcacataataagattaaatcacaattacgtatgaccttacckgagtacatgataccagttaatttyatgcatattgagcaaattcctattactattaatgggaaattagataagaaggcattgcctatcatggactatgtcgatacggatgcctatgtagcaccgagtacagataccgaacacttgctatgccaaatttttgcagatattttacatgtgaatcaagtaggtattcatgataatttctttgaattaggtggccattcmttaaaagcaacgttagtggtgaatcggatagaggcatctactgggaaacgattacaaattggtgatttattacaaaagccaactgtatttgaactagcrcaagcgattgctaaggttcaagaacaaaactatgaagtgattccwgaarctatagttaaagatgattatgtgytgagctctgcacaaaagcgwatgtatttattatggaaatcaaaccataaagatacggtgtataacrtaccttttttatggcggttatcatcagracttaatgtagctcaattgcracaagcagtkcagcrtttgatagcgcgacatgagattytacgaacacaatatattgttgtagatgatgaggttcgacaacgtattgtggcagatgttgyagytgactttraagaagttaacacgcattttacggatgaacaagaaatyatgcgccaatttgtrgcaccttttaatttggaaaagccaagycaaattagagtgagatacattmgaagtccmttacatgcatacctstttatagatacrcatcatatyattaatgayggtatgagtaatatacaattaatgaatgatcttaacgcaytwtatcaacataaattattgttaccacttaaattgcaatataaagactatagtgartggatgtcgcatcgtgatatgacgaaacatagacaatattggttatctcaattcaaagatgaagtacctattttaagcttaccgacagactatgttagaccaaatattaaaacgaca

SEQ ID NO: 7901 - DNA, 3588 bp, Staphylococcus aureus
aatggagcaatgatgtcatttacaatgaatcaacaaatgagacagctacttcaaaagtatgtagaaaagcatcaaattactgattttatgttctttatgagtgtggtcatgacgttgttaagyagatatgctcgaaaagatgatgttgttgtcggtagtgtsatgagtgcgcgtatgcataaaggcacggagcaaatgctaggcatgtttgctaatacgttggtatatagagggcaaccrtcacytgataaaatgtggacacagtttttacaagaggttaaggaaatgagtttggaggcatacgagcatcaagaatacccattcgaatgtttagtaaatgacttagatcaatcacatgatgcctcacggaatccattatttgatgtcatgttagtactacaaaacaatgaaacgaatcatgctcattttgggcatagtaaattaacacacattcaacccaaatcrgtgacggcgaaatttgatttatctttcatcattgaagaagatygcgatgactatacaatcaatatcgagtataataccgatttatatcactcagaaacagttcgtcacatgggtaatcaatgtatgattatgattgattatattttgaagcatcaagatacactacaaattygtgatataccaaacggyacggaggaacttytaaattgggtcaatacgcatgttaacgatcgaatgcttaatgtcccgggaaataaatctatcataagttactttratgaagttgtctcacgacaaggtaatcatgttgcgctagtcatgaatgatttgacaatgacgtatgaaacattacrcaactatgtrgatgcyattgcgcacatgctcctatcaaatggtgtgggcaakggtcaacsrgttgcyttrwtwacagaacgtagttttgaaatgattgcggcgatgttggcgacagttaaagtaggtgcatcttatatacctatcgatattgattttccgaawaarcgacaaggtgcaattttggaggatgctaaagtaactgcagtcatgtcttacggcgttgaaattgaaacgacattaccagtcattcaattggaaaatgctaaaggytttgttgaatcaaaggaaaatgaacaatatgatgatttacatggcratcaactygaaaacacagcgatgttagataatgagatgtatgctatttacacatctggtacgaccgggatgcctaaaggggttgccatacgacaacgaaatttgttgaatttagtgcatgcatggtcaactgaattgcaattaggcgacaatgaagtatttttgcaacatgcaaatattgtttttgatgcatcagttatggagatttattgttgtttgttaaatggtcatacgcttgtgattccagatagagaggaacgtgttaatccagaacagttacaacaactcattaataagcatcgtgtgacggtkgcgtcgattccrttacagatgtgtagtrttatggaagacttttatattgaaaarttgattacaggcggggcaactagtacggcatcctttgttaaatatattgagaagcattgtggcacgtatttcaatgcctatggaccatctgagtcaacagtcatcacatcgtattggtcacatcawtgtggtgatttgatacctgagacgattccaattggcaaacccttatctaacatccaagtgtatattatgtcagatggtttgttatgcggtattggtatgccaggcgagttgtgtattgcaggtgatagtttagcgataggatatattaaycgtccrgaattaatggctgataaatggcaaaataatccatttggtaaaggaaagttgtatcatagtggtgatttagcacgttatacatctgatggtcaaattgaatttttrggaagaatagataaacaagtgaaagttaacgggtaccgtattgaacttgatgaaattgaaaatgyaatattagctattcgtggtatatctgattgtgttgthacagtwagtcactttgatacgcatgatatattgaatgcttattatgtcggagarcaacaartggarcaggatttgaagcaatatttaaatgatcakctgcctaagtatatgattcctaagactataacgyatatcgattrtatrccattaaccacgaatgacaaggtggatactacgcgtttgccaaatccatcamctatacaacagtctaataaagtrtatagcgaaccmtctaatgaaattgagcagacatttgttgatgtattyggagaggtrttgaaacaaaatgatgtcggtgttgacgatgatttctttgaacttggtggtaactcattagaggcgatgttagttgtctcgcatttaaaacgatttggccatcatatttcaatgcagacattataycaatataaaaccgtgcgacagattgttaattatatgyaccaaaatcaacaatcattagttgcattaccggataatctttcggaattacaaaagattgttatgtctcgttataayttgggtrttttagaggatagtctaagtcatcgacctmtaggaaawacactattgactggcgckacaggktttttaggtgcttatctgattgaagyactacaaggatacagtcatcgcatttattgtttcatacgtgctgataatgaggaaatagcawggtataagttgatgacgaatttaaatgattatttttcagaagagacggttgaaatratgttatcaaacattgaagtcattgttggtgatttcgagtgtatggatgatgttgttttaccwgaaaacatggatacrattattcatgcaggtgctcgtacrgatcactttggtgatgatgatgaatttgaaaaagtaaatgttcaaggtactgttgatgtcatacgtttggcacaacaacatcatgcaaggttaatatatgtgtctacgataagtgtgggaacttattttgatatagayacagaagatgtgacattttcagaagcggatgtctataaaggrcaactactaacatcaccatatacacggagyaaattttatagtgaattaaaagtattagaagctgtaaawaatggcttagatggtcgrattgtacgtgttggtaatttgacgartccwtacaatggaagatggcatatgagaaatataaagactaaccgtttttcaatggtaatgaatgatttgttacaactggattgtatcggggttagcmtsgctgaaatgcctgtagatttttcttttgtggatacgactgcaagacaaattgtcgcattagcacaggtcaacacrccacaaatcatttaccatgtgytatcacctaataaaatgccggtgaaatctttrttagaatgygttaagygcaaagaaattgaactcgtcagcgatgaatcatttaatgaaattttacagaaacaagacatgtacgaaacgattggattaactagtgttgaccgtgaacaacaactagcaatgatagatacaamattaacattaaaaataatgratcacatcagtgaaaaatggccaacgataactaacaattggctgtatcattgggcacaatatatcaaaacaatattcaataagtaa

SEQ ID NO: 7902 - DNA, 365 bp, Staphylococcus aureus
aaaacgacttatatttacttaataacaatttcctattacaaatcaaattagatttagattcattaactgcttttcaygagcaaattttagctagcctttctaaaaaagcacgttataatgtgacacatgttgattatgagttagataatccgcagaaaaaagatttattgtcyacatttcagcatgagttaataaatcayccttatcaaacggaatattcgtttgccaatgttatgcaaattgttgcagccatcgaagagtatcgacaccatttagagcatttagaccgcataagaattagctttttcacatatcatagrtctgatgcagacattgaaattgttgaagaagactttgatttataa

SEQ ID NO: 7903 - DNA, 365 bp, Staphylococcus aureus
ttgagactaggagctcggattttyaaaactggtatagccattattttagctatgtctatcgcttctttactaccggatgatgttggtctgaaagccttagctggtgtcagtgctgttgttgcaatgcaacctagtatttatcgttcatttaaaacagtttctgatcargcattrggtaacattataggtgccataytwtctgttacaatggtaacaatttttagtgataattttatcattatgggtgttaccgtcatagtacttattgctattttatttaaatttaatttagcacatgttgctactttggcgagtgtaacagcattaatcattatgggacaacataccggttctttctatattac

SEQ ID NO: 7904 - DNA, 365 bp, Staphylococcus aureus
ygccttttacaggtttgtacttgtaatgattggtgtcataagttcatctctagttaactttgtgtttctaccacctaaatttgaaacaaaaatttactataattcattaaatatatcctcagatatttttatgtggtttaaattagtattaaatgatacgacggagtttaataatattaaacaagatagtcataatttaaaacaacgtgtcgaaaagttagagaaaatttatgattactatagcgaagaacgtcctattacaaaaaaacatattcaccaacagaatagaaagaaaatacttttcagagaagtagttcagacgactagacaagcttatgaagtattaaacaaattgtcgcgttatc

SEQ ID NO: 7905 - DNA, 909 bp, Staphylococcus aureus; identical to SEQ ID NO: 53

SEQ ID NO: 7906 - DNA, 1362 bp, Staphylococcus aureus; identical to SEQ ID NO: 54

SEQ ID NO: 7907 - DNA, 702 bp, Staphylococcus aureus; identical to SEQ ID NO: 55

SEQ ID NO: 7908 - DNA, 1134 bp, Staphylococcus aureus; identical to SEQ ID NO: 56

SEQ ID NO: 7909 - DNA, 534 bp, Staphylococcus aureus; identical to SEQ ID NO: 57

SEQ ID NO: 7910 - DNA, 969 bp, Staphylococcus aureus; identical to SEQ ID NO: 58

SEQ ID NO: 7911 - DNA, 1350 bp, Staphylococcus aureus; identical to SEQ ID NO: 59

SEQ ID NO: 7912 - DNA, 627 bp, Staphylococcus aureus; identical to SEQ ID NO: 60

SEQ ID NO: 7913 - DNA, 276 bp, Staphylococcus aureus; identical to SEQ ID NO: 61

SEQ ID NO: 7914 - DNA, 252 bp, Staphylococcus aureus; identical to SEQ ID NO: 62

SEQ ID NO: 7915 - DNA, 624 bp, Staphylococcus aureus; identical to SEQ ID NO: 63

SEQ ID NO: 7916 - DNA, 630 bp, Staphylococcus aureus; identical to SEQ ID NO: 64

SEQ ID NO: 7917 - DNA, 249 bp, Staphylococcus aureus; identical to SEQ ID NO: 65

SEQ ID NO: 7918 - DNA, 309 bp, Staphylococcus aureus; identical to SEQ ID NO: 66

SEQ ID NO: 7919 - DNA, 1335 bp, Staphylococcus aureus; identical to SEQ ID NO: 67

SEQ ID NO: 7920 - DNA, 96 bp, Staphylococcus aureus; identical to SEQ ID NO: 68

SEQ ID NO: 7921 - DNA, 2136 bp, Staphylococcus aureus; identical to SEQ ID NO: 69

SEQ ID NO: 7922 - DNA, 93 bp, Staphylococcus aureus; identical to SEQ ID NO: 70

SEQ ID NO: 7923 - DNA, 132 bp, Staphylococcus aureus; identical to SEQ ID NO: 71

SEQ ID NO: 7924 - DNA, 129 bp, Staphylococcus aureus; identical to SEQ ID NO: 72

SEQ ID NO: 7925 - DNA, 858 bp, Staphylococcus aureus; identical to SEQ ID NO: 73

SEQ ID NO: 7926 - DNA, 192 bp, Staphylococcus aureus; identical to SEQ ID NO: 74

SEQ ID NO: 7927 - DNA, 1110 bp, Staphylococcus aureus; identical to SEQ ID NO: 75

SEQ ID NO: 7928 - DNA, 3168 bp, Staphylococcus aureus; identical to SEQ ID NO: 76

SEQ ID NO: 7929 - DNA, 195 bp, Staphylococcus aureus; identical to SEQ ID NO: 77

SEQ ID NO: 7930 - DNA, 765 bp, Staphylococcus aureus; identical to SEQ ID NO: 78

SEQ ID NO: 7931 - DNA, 1482 bp, Staphylococcus aureus; identical to SEQ ID NO: 79

SEQ ID NO: 7932 - DNA, 351 bp, Staphylococcus aureus; identical to SEQ ID NO: 80

SEQ ID NO: 7933 - DNA, 909 bp, Staphylococcus aureus; identical to SEQ ID NO: 81

SEQ ID NO: 7934 - DNA, 705 bp, Staphylococcus aureus; identical to SEQ ID NO: 82

SEQ ID NO: 7935 - DNA, 843 bp, Staphylococcus aureus; identical to SEQ ID NO: 83

SEQ ID NO: 7936 - DNA, 309 bp, Staphylococcus aureus; identical to SEQ ID NO: 84

SEQ ID NO: 7937 - DNA, 159 bp, Staphylococcus aureus; identical to SEQ ID NO: 85

SEQ ID NO: 7938 - DNA, 654 bp, Staphylococcus aureus; identical to SEQ ID NO: 86

SEQ ID NO: 7939 - DNA, 732 bp, Staphylococcus aureus; identical to SEQ ID NO: 87

SEQ ID NO: 7940 - DNA, 1023 bp, Staphylococcus aureus; identical to SEQ ID NO: 88

SEQ ID NO: 7941 - DNA, 630 bp, Staphylococcus aureus; identical to SEQ ID NO: 89

SEQ ID NO: 7942 - DNA, 117 bp, Staphylococcus aureus; identical to SEQ ID NO: 90

SEQ ID NO: 7943 - DNA, 963 bp, Staphylococcus aureus; identical to SEQ ID NO: 91

SEQ ID NO: 7944 - DNA, 189 bp, Staphylococcus aureus; identical to SEQ ID NO: 92

SEQ ID NO: 7945 - DNA, 1092 bp, Staphylococcus aureus; identical to SEQ ID NO: 93

SEQ ID NO: 7946 - DNA, 600 bp, Staphylococcus aureus; identical to SEQ ID NO: 94

SEQ ID NO: 7947 - DNA, 603 bp, Staphylococcus aureus; identical to SEQ ID NO: 95

SEQ ID NO: 7948 - DNA, 234 bp, Staphylococcus aureus; identical to SEQ ID NO: 96

SEQ ID NO: 7949 - DNA, 765 bp, Staphylococcus aureus; identical to SEQ ID NO: 97

SEQ ID NO: 7950 - DNA, 1377 bp, Staphylococcus aureus; identical to SEQ ID NO: 98

SEQ ID NO: 7951 - DNA, 330 bp, Staphylococcus aureus; identical to SEQ ID NO: 99

SEQ ID NO: 7952 - DNA, 312 bp, Staphylococcus aureus; identical to SEQ ID NO: 100

SEQ ID NO: 7953 - DNA, 447 bp, Staphylococcus aureus; identical to SEQ ID NO: 101

SEQ ID NO: 7954 - DNA, 534 bp, Staphylococcus aureus; identical to SEQ ID NO: 102

SEQ ID NO: 7955 - DNA, 486 bp, Staphylococcus aureus; identical to SEQ ID NO: 103

SEQ ID NO: 7956 - DNA, 3039 bp, Staphylococcus aureus; identical to SEQ ID NO: 104

SEQ ID NO: 7957 - DNA, 1449 bp, Staphylococcus aureus; identical to SEQ ID NO: 105

SEQ ID NO: 7958 - DNA, 1788 bp, Staphylococcus aureus; identical to SEQ ID NO: 106

SEQ ID NO: 7959 - DNA, 1167 bp, Staphylococcus aureus; identical to SEQ ID NO: 107

SEQ ID NO: 7960 - DNA, 252 bp, Staphylococcus aureus; identical to SEQ ID NO: 108

SEQ ID NO: 7961 - DNA, 585 bp, Staphylococcus aureus; identical to SEQ ID NO: 109

SEQ ID NO: 7962 - DNA, 1260 bp, Staphylococcus aureus; identical to SEQ ID NO: 110

SEQ ID NO: 7963 - DNA, 1770 bp, Staphylococcus aureus; identical to SEQ ID NO: 111

SEQ ID NO: 7964 - DNA, 1533 bp, Staphylococcus aureus; identical to SEQ ID NO: 112

SEQ ID NO: 7965 - DNA, 429 bp, Staphylococcus aureus; identical to SEQ ID NO: 113

SEQ ID NO: 7966 - DNA, 507 bp, Staphylococcus aureus; identical to SEQ ID NO: 114

SEQ ID NO: 7967 - DNA, 1281 bp, Staphylococcus aureus; identical to SEQ ID NO: 115

SEQ ID NO: 7968 - DNA, 1005 bp, Staphylococcus aureus; identical to SEQ ID NO: 116

SEQ ID NO: 7969 - DNA, 1062 bp, Staphylococcus aureus; identical to SEQ ID NO: 117

SEQ ID NO: 7970 - DNA, 606 bp, Staphylococcus aureus; identical to SEQ ID NO: 118

SEQ ID NO: 7971 - DNA, 915 bp, Staphylococcus aureus; identical to SEQ ID NO: 119

SEQ ID NO: 7972 - DNA, 672 bp, Staphylococcus aureus; identical to SEQ ID NO: 120

SEQ ID NO: 7973 - DNA, 1113 bp, Staphylococcus aureus; identical to SEQ ID NO: 121

SEQ ID NO: 7974 - DNA, 681 bp, Staphylococcus aureus; identical to SEQ ID NO: 122

SEQ ID NO: 7975 - DNA, 1179 bp, Staphylococcus aureus; identical to SEQ ID NO: 123

SEQ ID NO: 7976 - DNA, 222 bp, Staphylococcus aureus; identical to SEQ ID NO: 124

SEQ ID NO: 7977 - DNA, 723 bp, Staphylococcus aureus; identical to SEQ ID NO: 125

SEQ ID NO: 7978 - DNA, 804 bp, Staphylococcus aureus; identical to SEQ ID NO: 126

SEQ ID NO: 7979 - DNA, 1422 bp, Staphylococcus aureus; identical to SEQ ID NO: 127

SEQ ID NO: 7980 - DNA, 771 bp, Staphylococcus aureus; identical to SEQ ID NO: 128

SEQ ID NO: 7981 - DNA, 159 bp, Staphylococcus aureus; identical to SEQ ID NO: 129

SEQ ID NO: 7982 - DNA, 555 bp, Staphylococcus aureus; identical to SEQ ID NO: 130

SEQ ID NO: 7983 - DNA, 270 bp, Staphylococcus aureus; identical to SEQ ID NO: 131

SEQ ID NO: 7984 - DNA, 942 bp, Staphylococcus aureus; identical to SEQ ID NO: 132

SEQ ID NO: 7985 - DNA, 978 bp, Staphylococcus aureus; identical to SEQ ID NO: 133

SEQ ID NO: 7986 - DNA, 909 bp, Staphylococcus aureus; identical to SEQ ID NO: 134

SEQ ID NO: 7987 - DNA, 1206 bp, Staphylococcus aureus; identical to SEQ ID NO: 135

SEQ ID NO: 7988 - DNA, 828 bp, Staphylococcus aureus; identical to SEQ ID NO: 136

SEQ ID NO: 7989 - DNA, 1155 bp, Staphylococcus aureus; identical to SEQ ID NO: 137

SEQ ID NO: 7990 - DNA, 864 bp, Staphylococcus aureus; identical to SEQ ID NO: 138

SEQ ID NO: 7991 - DNA, 402 bp, Staphylococcus aureus; identical to SEQ ID NO: 139

SEQ ID NO: 7992 - DNA, 342 bp, Staphylococcus aureus; identical to SEQ ID NO: 140

SEQ ID NO: 7993 - DNA, 423 bp, Staphylococcus aureus; identical to SEQ ID NO: 141

SEQ ID NO: 7994 - DNA, 549 bp, Staphylococcus aureus; identical to SEQ ID NO: 142

SEQ ID NO: 7995 - DNA, 234 bp, Staphylococcus aureus; identical to SEQ ID NO: 143

SEQ ID NO: 7996 - DNA, 891 bp, Staphylococcus aureus; identical to SEQ ID NO: 144

SEQ ID NO: 7997 - DNA, 240 bp, Staphylococcus aureus; identical to SEQ ID NO: 145

SEQ ID NO: 7998 - DNA, 348 bp, Staphylococcus aureus; identical to SEQ ID NO: 146

SEQ ID NO: 7999 - DNA, 1878 bp, Staphylococcus aureus; identical to SEQ ID NO: 147

SEQ ID NO: 8000 - DNA, 327 bp, Staphylococcus aureus; identical to SEQ ID NO: 148

SEQ ID NO: 8001 - DNA, 288 bp, Staphylococcus aureus; identical to SEQ ID NO: 149

SEQ ID NO: 8002 - DNA, 744 bp, Staphylococcus aureus; identical to SEQ ID NO: 150

SEQ ID NO: 8003 - DNA, 96 bp, Staphylococcus aureus; identical to SEQ ID NO: 151

SEQ ID NO: 8004 - DNA, 1956 bp, Staphylococcus aureus; identical to SEQ ID NO: 152

SEQ ID NO: 8005 - DNA, 468 bp, Staphylococcus aureus; identical to SEQ ID NO: 153

SEQ ID NO: 8006 - DNA, 1401 bp, Staphylococcus aureus; identical to SEQ ID NO: 154

SEQ ID NO: 8007 - DNA, 150 bp, Staphylococcus aureus; identical to SEQ ID NO: 155

SEQ ID NO: 8008 - DNA, 1155 bp, Staphylococcus aureus; identical to SEQ ID NO: 156

SEQ ID NO: 8009 - DNA, 333 bp, Staphylococcus aureus; identical to SEQ ID NO: 157

SEQ ID NO: 8010 - DNA, 1827 bp, Staphylococcus aureus; identical to SEQ ID NO: 158

SEQ ID NO: 8011 - DNA, 408 bp, Staphylococcus aureus; identical to SEQ ID NO: 159

SEQ ID NO: 8012 - DNA, 492 bp, Staphylococcus aureus; identical to SEQ ID NO: 160

SEQ ID NO: 8013 - DNA, 690 bp, Staphylococcus aureus; identical to SEQ ID NO: 161

SEQ ID NO: 8014 - DNA, 1122 bp, Staphylococcus aureus; identical to SEQ ID NO: 162

SEQ ID NO: 8015 - DNA, 1083 bp, Staphylococcus aureus; identical to SEQ ID NO: 163

SEQ ID NO: 8016 - DNA, 699 bp, Staphylococcus aureus; identical to SEQ ID NO: 164

SEQ ID NO: 8017 - DNA, 3030 bp, Staphylococcus aureus; identical to SEQ ID NO: 165

SEQ ID NO: 8018 - DNA, 1125 bp, Staphylococcus aureus; identical to SEQ ID NO: 166

SEQ ID NO: 8019 - DNA, 1260 bp, Staphylococcus aureus; identical to SEQ ID NO: 167

SEQ ID NO: 8020 - DNA, 693 bp, Staphylococcus aureus; identical to SEQ ID NO: 168

SEQ ID NO: 8021 - DNA, 1488 bp, Staphylococcus aureus; identical to SEQ ID NO: 169

SEQ ID NO: 8022 - DNA, 1503 bp, Staphylococcus aureus; identical to SEQ ID NO: 170

SEQ ID NO: 8023 - DNA, 1647 bp, Staphylococcus aureus; identical to SEQ ID NO: 171

SEQ ID NO: 8024 - DNA, 639 bp, Staphylococcus aureus; identical to SEQ ID NO: 172

SEQ ID NO: 8025 - DNA, 1206 bp, Staphylococcus aureus; identical to SEQ ID NO: 173

SEQ ID NO: 8026 - DNA, 1215 bp, Staphylococcus aureus; identical to SEQ ID NO: 174

SEQ ID NO: 8027 - DNA, 2706 bp, Staphylococcus aureus; identical to SEQ ID NO: 175

SEQ ID NO: 8028 - DNA, 249 bp, Staphylococcus aureus; identical to SEQ ID NO: 176

SEQ ID NO: 8029 - DNA, 1278 bp, Staphylococcus aureus; identical to SEQ ID NO: 177

SEQ ID NO: 8030 - DNA, 465 bp, Staphylococcus aureus; identical to SEQ ID NO: 178

SEQ ID NO: 8031 - DNA, 330 bp, Staphylococcus aureus; identical to SEQ ID NO: 179

SEQ ID NO: 8032 - DNA, 240 bp, Staphylococcus aureus; identical to SEQ ID NO: 180

SEQ ID NO: 8033 - DNA, 468 bp, Staphylococcus aureus; identical to SEQ ID NO: 181

SEQ ID NO: 8034 - DNA, 1998 bp, Staphylococcus aureus; identical to SEQ ID NO: 182

SEQ ID NO: 8035 - DNA, 2955 bp, Staphylococcus aureus; identical to SEQ ID NO: 183

SEQ ID NO: 8036 - DNA, 2403 bp, Staphylococcus aureus; identical to SEQ ID NO: 184

SEQ ID NO: 8037 - DNA, 954 bp, Staphylococcus aureus; identical to SEQ ID NO: 185

SEQ ID NO: 8038 - DNA, 135 bp, Staphylococcus aureus; identical to SEQ ID NO: 186

SEQ ID NO: 8039 - DNA, 1476 bp, Staphylococcus aureus; identical to SEQ ID NO: 187

SEQ ID NO: 8040 - DNA, 798 bp, Staphylococcus aureus; identical to SEQ ID NO: 188

SEQ ID NO: 8041 - DNA, 399 bp, Staphylococcus aureus; identical to SEQ ID NO: 189

SEQ ID NO: 8042 - DNA, 852 bp, Staphylococcus aureus; identical to SEQ ID NO: 190

SEQ ID NO: 8043 - DNA, 738 bp, Staphylococcus aureus; identical to SEQ ID NO: 191

SEQ ID NO: 8044 - DNA, 168 bp, Staphylococcus aureus; identical to SEQ ID NO: 192

SEQ ID NO: 8045 - DNA, 1380 bp, Staphylococcus aureus; identical to SEQ ID NO: 193

SEQ ID NO: 8046 - DNA, 1209 bp, Staphylococcus aureus; identical to SEQ ID NO: 194

SEQ ID NO: 8047 - DNA, 192 bp, Staphylococcus aureus; identical to SEQ ID NO: 195

SEQ ID NO: 8048 - DNA, 2523 bp, Staphylococcus aureus; identical to SEQ ID NO: 196

SEQ ID NO: 8049 - DNA, 636 bp, Staphylococcus aureus; identical to SEQ ID NO: 197

SEQ ID NO: 8050 - DNA, 984 bp, Staphylococcus aureus; identical to SEQ ID NO: 198

SEQ ID NO: 8051 - DNA, 558 bp, Staphylococcus aureus; identical to SEQ ID NO: 199

SEQ ID NO: 8052 - DNA, 1347 bp, Staphylococcus aureus; identical to SEQ ID NO: 200

SEQ ID NO: 8053 - DNA, 1263 bp, Staphylococcus aureus; identical to SEQ ID NO: 201

SEQ ID NO: 8054 - DNA, 1605 bp, Staphylococcus aureus; identical to SEQ ID NO: 202

SEQ ID NO: 8055 - DNA, 1032 bp, Staphylococcus aureus; identical to SEQ ID NO: 203

SEQ ID NO: 8056 - DNA, 507 bp, Staphylococcus aureus; identical to SEQ ID NO: 204

SEQ ID NO: 8057 - DNA, 1407 bp, Staphylococcus aureus; identical to SEQ ID NO: 205

SEQ ID NO: 8058 - DNA, 1212 bp, Staphylococcus aureus; identical to SEQ ID NO: 206

SEQ ID NO: 8059 - DNA, 570 bp, Staphylococcus aureus; identical to SEQ ID NO: 207

SEQ ID NO: 8060 - DNA, 882 bp, Staphylococcus aureus; identical to SEQ ID NO: 208

SEQ ID NO: 8061 - DNA, 783 bp, Staphylococcus aureus; identical to SEQ ID NO: 209

SEQ ID NO: 8062 - DNA, 1122 bp, Staphylococcus aureus; identical to SEQ ID NO: 210

SEQ ID NO: 8063 - DNA, 633 bp, Staphylococcus aureus; identical to SEQ ID NO: 211

SEQ ID NO: 8064 - DNA, 1239 bp, Staphylococcus aureus; identical to SEQ ID NO: 212

SEQ ID NO: 8065 - DNA, 1215 bp, Staphylococcus aureus; identical to SEQ ID NO: 213

SEQ ID NO: 8066 - DNA, 1662 bp, Staphylococcus aureus; identical to SEQ ID NO: 214

SEQ ID NO: 8067 - DNA, 687 bp, Staphylococcus aureus; identical to SEQ ID NO: 215

SEQ ID NO: 8068 - DNA, 936 bp, Staphylococcus aureus; identical to SEQ ID NO: 216

SEQ ID NO: 8069 - DNA, 1263 bp, Staphylococcus aureus; identical to SEQ ID NO: 217

SEQ ID NO: 8070 - DNA, 687 bp, Staphylococcus aureus; identical to SEQ ID NO: 218

SEQ ID NO: 8071 - DNA, 888 bp, Staphylococcus aureus; identical to SEQ ID NO: 219

SEQ ID NO: 8072 - DNA, 285 bp, Staphylococcus aureus; identical to SEQ ID NO: 220

SEQ ID NO: 8073 - DNA, 1260 bp, Staphylococcus aureus; identical to SEQ ID NO: 221

SEQ ID NO: 8074 - DNA, 111 bp, Staphylococcus aureus; identical to SEQ ID NO: 222

SEQ ID NO: 8075 - DNA, 768 bp, Staphylococcus aureus; identical to SEQ ID NO: 223

SEQ ID NO: 8076 - DNA, 1020 bp, Staphylococcus aureus; identical to SEQ ID NO: 224

SEQ ID NO: 8077 - DNA, 1815 bp, Staphylococcus aureus; identical to SEQ ID NO: 225

SEQ ID NO: 8078 - DNA, 327 bp, Staphylococcus aureus; identical to SEQ ID NO: 226

SEQ ID NO: 8079 - DNA, 1233 bp, Staphylococcus aureus; identical to SEQ ID NO: 227

SEQ ID NO: 8080 - DNA, 1602 bp, Staphylococcus aureus; identical to SEQ ID NO: 228

SEQ ID NO: 8081 - DNA, 900 bp, Staphylococcus aureus; identical to SEQ ID NO: 229

SEQ ID NO: 8082 - DNA, 1206 bp, Staphylococcus aureus; identical to SEQ ID NO: 230

SEQ ID NO: 8083 - DNA, 96 bp, Staphylococcus aureus; identical to SEQ ID NO: 231

SEQ ID NO: 8084 - DNA, 990 bp, Staphylococcus aureus; identical to SEQ ID NO: 232

SEQ ID NO: 8085 - DNA, 648 bp, Staphylococcus aureus; identical to SEQ ID NO: 233

SEQ ID NO: 8086 - DNA, 888 bp, Staphylococcus aureus; identical to SEQ ID NO: 234

SEQ ID NO: 8087 - DNA, 723 bp, Staphylococcus aureus; identical to SEQ ID NO: 235

SEQ ID NO: 8088 - DNA, 1050 bp, Staphylococcus aureus; identical to SEQ ID NO: 236

SEQ ID NO: 8089 - DNA, 720 bp, Staphylococcus aureus; identical to SEQ ID NO: 237

SEQ ID NO: 8090 - DNA, 948 bp, Staphylococcus aureus; identical to SEQ ID NO: 238

SEQ ID NO: 8091 - DNA, 1263 bp, Staphylococcus aureus; identical to SEQ ID NO: 239

SEQ ID NO: 8092 - DNA, 444 bp, Staphylococcus aureus; identical to SEQ ID NO: 240

SEQ ID NO: 8093 - DNA, 1152 bp, Staphylococcus aureus; identical to SEQ ID NO: 241

SEQ ID NO: 8094 - DNA, 921 bp, Staphylococcus aureus; identical to SEQ ID NO: 242

SEQ ID NO: 8095 - DNA, 1086 bp, Staphylococcus aureus; identical to SEQ ID NO: 243

SEQ ID NO: 8096 - DNA, 1933 bp, Staphylococcus aureus; identical to SEQ ID NO: 244

SEQ ID NO: 8097 - DNA, 1266 bp, Staphylococcus aureus; identical to SEQ ID NO: 245

SEQ ID NO: 8098 - DNA, 270 bp, Staphylococcus aureus; identical to SEQ ID NO: 246

SEQ ID NO: 8099 - DNA, 1209 bp, Staphylococcus aureus; identical to SEQ ID NO: 247

SEQ ID NO: 8100 - DNA, 630 bp, Staphylococcus aureus; identical to SEQ ID NO: 248

SEQ ID NO: 8101 - DNA, 1137 bp, Staphylococcus aureus; identical to SEQ ID NO: 249

SEQ ID NO: 8102 - DNA, 1383 bp, Staphylococcus aureus; identical to SEQ ID NO: 250

SEQ ID NO: 8103 - DNA, 192 bp, Staphylococcus aureus; identical to SEQ ID NO: 251

SEQ ID NO: 8104 - DNA, 177 bp, Staphylococcus aureus; identical to SEQ ID NO: 252

SEQ ID NO: 8105 - DNA, 228 bp, Staphylococcus aureus; identical to SEQ ID NO: 253

SEQ ID NO: 8106 - DNA, 261 bp, Staphylococcus aureus; identical to SEQ ID NO: 254

SEQ ID NO: 8107 - DNA, 705 bp, Staphylococcus aureus; identical to SEQ ID NO: 255

SEQ ID NO: 8108 - DNA, 456 bp, Staphylococcus aureus; identical to SEQ ID NO: 256

SEQ ID NO: 8109 - DNA, 666 bp, Staphylococcus aureus; identical to SEQ ID NO: 257

SEQ ID NO: 8110 - DNA, 525 bp, Staphylococcus aureus; identical to SEQ ID NO: 258

SEQ ID NO: 8111 - DNA, 321 bp, Staphylococcus aureus; identical to SEQ ID NO: 259

SEQ ID NO: 8112 - DNA, 180 bp, Staphylococcus aureus; identical to SEQ ID NO: 260

SEQ ID NO: 8113 - DNA, 1056 bp, Staphylococcus aureus; identical to SEQ ID NO: 261

SEQ ID NO: 8114 - DNA, 324 bp, Staphylococcus aureus; identical to SEQ ID NO: 262

SEQ ID NO: 8115 - DNA, 96 bp, Staphylococcus aureus; identical to SEQ ID NO: 263

SEQ ID NO: 8116 - DNA, 1479 bp, Staphylococcus aureus; identical to SEQ ID NO: 264

SEQ ID NO: 8117 - DNA, 468 bp, Staphylococcus aureus; identical to SEQ ID NO: 265

SEQ ID NO: 8118 - DNA, 1146 bp, Staphylococcus aureus; identical to SEQ ID NO: 266

SEQ ID NO: 8119 - DNA, 1956 bp, Staphylococcus aureus; identical to SEQ ID NO: 267

SEQ ID NO: 8120 - DNA, 1341 bp, Staphylococcus aureus; identical to SEQ ID NO: 268

SEQ ID NO: 8121 - DNA, 1599 bp, Staphylococcus aureus; identical to SEQ ID NO: 269

SEQ ID NO: 8122 - DNA, 630 bp, Staphylococcus aureus; identical to SEQ ID NO: 270

SEQ ID NO: 8123 - DNA, 516 bp, Staphylococcus aureus; identical to SEQ ID NO: 271

SEQ ID NO: 8124 - DNA, 627 bp, Staphylococcus aureus; identical to SEQ ID NO: 272

SEQ ID NO: 8125 - DNA, 2184 bp, Staphylococcus aureus; identical to SEQ ID NO: 273

SEQ ID NO: 8126 - DNA, 1035 bp, Staphylococcus aureus; identical to SEQ ID NO: 274

SEQ ID NO: 8127 - DNA, 969 bp, Staphylococcus aureus; identical to SEQ ID NO: 275

SEQ ID NO: 8128 - DNA, 249 bp, Staphylococcus aureus; identical to SEQ ID NO: 276

SEQ ID NO: 8129 - DNA, 432 bp, Staphylococcus aureus; identical to SEQ ID NO: 277

SEQ ID NO: 8130 - DNA, 507 bp, Staphylococcus aureus; identical to SEQ ID NO: 278

SEQ ID NO: 8131 - DNA, 1278 bp, Staphylococcus aureus; identical to SEQ ID NO: 279

SEQ ID NO: 8132 - DNA, 262 bp, Staphylococcus aureus
ygttaaagctggtacgaaacttggwctagaaaaagaacaagttgaagaatctatacgcaaccttattataggtacaagtaagatgattgaacgttcagatttgagcatggctcaattaagaaaaaatattacctctaaaggtggtacgacacaagctggccttgatacattgtcacaatatgatttagtatctattttcgaagattgtctaaaygctgccgtcgaccgtagtattgaactttctaatrtagaagaccaataa

SEQ ID NO: 8133 - DNA, 262 bp, Staphylococcus aureus
atggcacaagctatatttacaggaattattaactcaagcaacttagatgccaatgatatatatttaacaaataaatctaatgaacaagctttaaaagcattcgctgaaaaactaggtgttaactatagttatgatgatgcgacattattaaaagatgcagattatgtwtttttaggtaccaaaccrcatgaytttgatgctctagcaacacgcatcaaaccacatatyacaaaagacaattgcttcatttcaattatggcag

SEQ ID NO: 8134 - DNA, 262 bp, Staphylococcus aureus
gtattccgattgattatattaaacarcaattagaatgccaaaatccagttgctagaattatgccaaacacaaatgcgcaagtyggacactcwgttactggcattagtttttcaaacaactttgaccctaaatctaaagatgaaattaacgatttagttaaagcatttggttcwgtaattgaagtatcagargatcatttacatcaagtaacagctatcaccggaagcggcccagcatttttatatcatgtattcgagcaata

SEQ ID NO: 8135 - DNA, 330 bp, Staphylococcus aureus; identical to SEQ ID NO: 283

SEQ ID NO: 8136 - DNA, 1488 bp, Staphylococcus aureus; identical to SEQ ID NO: 284

SEQ ID NO: 8137 - DNA, 1359 bp, Staphylococcus aureus; identical to SEQ ID NO: 285

SEQ ID NO: 8138 - DNA, 1485 bp, Staphylococcus aureus; identical to SEQ ID NO: 286

SEQ ID NO: 8139 - DNA, 1278 bp, Staphylococcus aureus; identical to SEQ ID NO: 287

SEQ ID NO: 8140 - DNA, 894 bp, Staphylococcus aureus; identical to SEQ ID NO: 288

SEQ ID NO: 8141 - DNA, 366 bp, Staphylococcus aureus; identical to SEQ ID NO: 289

SEQ ID NO: 8142 - DNA, 177 bp, Staphylococcus aureus; identical to SEQ ID NO: 290

SEQ ID NO: 8143 - DNA, 1170 bp, Staphylococcus aureus; identical to SEQ ID NO: 291

SEQ ID NO: 8144 - DNA, 582 bp, Staphylococcus aureus; identical to SEQ ID NO: 292

SEQ ID NO: 8145 - DNA, 654 bp, Staphylococcus aureus; identical to SEQ ID NO: 293

SEQ ID NO: 8146 - DNA, 219 bp, Staphylococcus aureus; identical to SEQ ID NO: 294

SEQ ID NO: 8147 - DNA, 387 bp, Staphylococcus aureus; identical to SEQ ID NO: 295

SEQ ID NO: 8148 - DNA, 1392 bp, Staphylococcus aureus; identical to SEQ ID NO: 296

SEQ ID NO: 8149 - DNA, 252 bp, Staphylococcus aureus; identical to SEQ ID NO: 297

SEQ ID NO: 8150 - DNA, 591 bp, Staphylococcus aureus; identical to SEQ ID NO: 298

SEQ ID NO: 8151 - DNA, 270 bp, Staphylococcus aureus; identical to SEQ ID NO: 299

SEQ ID NO: 8152 - DNA, 1560 bp, Staphylococcus aureus; identical to SEQ ID NO: 300

SEQ ID NO: 8153 - DNA, 1019 bp, Staphylococcus aureus; identical to SEQ ID NO: 301

SEQ ID NO: 8154 - DNA, 3690 bp, Staphylococcus aureus; identical to SEQ ID NO: 302

SEQ ID NO: 8155 - DNA, 924 bp, Staphylococcus aureus; identical to SEQ ID NO: 303

SEQ ID NO: 8156 - DNA, 1794 bp, Staphylococcus aureus; identical to SEQ ID NO: 304

SEQ ID NO: 8157 - DNA, 1770 bp, Staphylococcus aureus; identical to SEQ ID NO: 305

SEQ ID NO: 8158 - DNA, 960 bp, Staphylococcus aureus; identical to SEQ ID NO: 306

SEQ ID NO: 8159 - DNA, 996 bp, Staphylococcus aureus; identical to SEQ ID NO: 307

SEQ ID NO: 8160 - DNA, 1275 bp, Staphylococcus aureus; identical to SEQ ID NO: 308

SEQ ID NO: 8161 - DNA, 978 bp, Staphylococcus aureus; identical to SEQ ID NO: 309

SEQ ID NO: 8162 - DNA, 561 bp, Staphylococcus aureus; identical to SEQ ID NO: 310

SEQ ID NO: 8163 - DNA, 2406 bp, Staphylococcus aureus; identical to SEQ ID NO: 311

SEQ ID NO: 8164 - DNA, 414 bp, Staphylococcus aureus; identical to SEQ ID NO: 312

SEQ ID NO: 8165 - DNA, 132 bp, Staphylococcus aureus; identical to SEQ ID NO: 313

SEQ ID NO: 8166 - DNA, 270 bp, Staphylococcus aureus; identical to SEQ ID NO: 314

SEQ ID NO: 8167 - DNA, 123 bp, Staphylococcus aureus; identical to SEQ ID NO: 315

SEQ ID NO: 8168 - DNA, 537 bp, Staphylococcus aureus; identical to SEQ ID NO: 316

SEQ ID NO: 8169 - DNA, 1056 bp, Staphylococcus aureus; identical to SEQ ID NO: 317

SEQ ID NO: 8170 - DNA, 501 bp, Staphylococcus aureus; identical to SEQ ID NO: 318

SEQ ID NO: 8171 - DNA, 468 bp, Staphylococcus aureus; identical to SEQ ID NO: 319

SEQ ID NO: 8172 - DNA, 138 bp, Staphylococcus aureus; identical to SEQ ID NO: 320

SEQ ID NO: 8173 - DNA, 1548 bp, Staphylococcus aureus; identical to SEQ ID NO: 321

SEQ ID NO: 8174 - DNA, 465 bp, Staphylococcus aureus; identical to SEQ ID NO: 322

SEQ ID NO: 8175 - DNA, 267 bp, Staphylococcus aureus; identical to SEQ ID NO: 323

SEQ ID NO: 8176 - DNA, 603 bp, Staphylococcus aureus; identical to SEQ ID NO: 324

SEQ ID NO: 8177 - DNA, 252 bp, Staphylococcus aureus; identical to SEQ ID NO: 325

SEQ ID NO: 8178 - DNA, 513 bp, Staphylococcus aureus; identical to SEQ ID NO: 326

SEQ ID NO: 8179 - DNA, 447 bp, Staphylococcus aureus; identical to SEQ ID NO: 327

SEQ ID NO: 8180 - DNA, 96 bp, Staphylococcus aureus; identical to SEQ ID NO: 328

SEQ ID NO: 8181 - DNA, 1161 bp, Staphylococcus aureus; identical to SEQ ID NO: 329

SEQ ID NO: 8182 - DNA, 600 bp, Staphylococcus aureus; identical to SEQ ID NO: 330

SEQ ID NO: 8183 - DNA, 1605 bp, Staphylococcus aureus; identical to SEQ ID NO: 331

SEQ ID NO: 8184 - DNA, 363 bp, Staphylococcus aureus; identical to SEQ ID NO: 332

SEQ ID NO: 8185 - DNA, 1275 bp, Staphylococcus aureus; identical to SEQ ID NO: 333

SEQ ID NO: 8186 - DNA, 906 bp, Staphylococcus aureus; identical to SEQ ID NO: 334

SEQ ID NO: 8187 - DNA, 729 bp, Staphylococcus aureus; identical to SEQ ID NO: 335

SEQ ID NO: 8188 - DNA, 633 bp, Staphylococcus aureus; identical to SEQ ID NO: 336

SEQ ID NO: 8189 - DNA, 780 bp, Staphylococcus aureus; identical to SEQ ID NO: 337

SEQ ID NO: 8190 - DNA, 1170 bp, Staphylococcus aureus; identical to SEQ ID NO: 338

SEQ ID NO: 8191 - DNA, 1398 bp, Staphylococcus aureus; identical to SEQ ID NO: 339

SEQ ID NO: 8192 - DNA, 312 bp, Staphylococcus aureus; identical to SEQ ID NO: 340

SEQ ID NO: 8193 - DNA, 687 bp, Staphylococcus aureus; identical to SEQ ID NO: 341

SEQ ID NO: 8194 - DNA, 1269 bp, Staphylococcus aureus; identical to SEQ ID NO: 342

SEQ ID NO: 8195 - DNA, 867 bp, Staphylococcus aureus; identical to SEQ ID NO: 343

SEQ ID NO: 8196 - DNA, 945 bp, Staphylococcus aureus; identical to SEQ ID NO: 344

SEQ ID NO: 8197 - DNA, 954 bp, Staphylococcus aureus; identical to SEQ ID NO: 345

SEQ ID NO: 8198 - DNA, 102 bp, Staphylococcus aureus; identical to SEQ ID NO: 346

SEQ ID NO: 8199 - DNA, 741 bp, Staphylococcus aureus; identical to SEQ ID NO: 347

SEQ ID NO: 8200 - DNA, 231 bp, Staphylococcus aureus; identical to SEQ ID NO: 348

SEQ ID NO: 8201 - DNA, 564 bp, Staphylococcus aureus; identical to SEQ ID NO: 349

SEQ ID NO: 8202 - DNA, 468 bp, Staphylococcus aureus; identical to SEQ ID NO: 350

SEQ ID NO: 8203 - DNA, 1002 bp, Staphylococcus aureus; identical to SEQ ID NO: 351

SEQ ID NO: 8204 - DNA, 693 bp, Staphylococcus aureus; identical to SEQ ID NO: 352

SEQ ID NO: 8205 - DNA, 315 bp, Staphylococcus aureus; identical to SEQ ID NO: 353

SEQ ID NO: 8206 - DNA, 1116 bp, Staphylococcus aureus; identical to SEQ ID NO: 354

SEQ ID NO: 8207 - DNA, 1293 bp, Staphylococcus aureus; identical to SEQ ID NO: 355

SEQ ID NO: 8208 - DNA, 1008 bp, Staphylococcus aureus; identical to SEQ ID NO: 356

SEQ ID NO: 8209 - DNA, 396 bp, Staphylococcus aureus; identical to SEQ ID NO: 357

SEQ ID NO: 8210 - DNA, 1359 bp, Staphylococcus aureus; identical to SEQ ID NO: 358

SEQ ID NO: 8211 - DNA, 549 bp, Staphylococcus aureus; identical to SEQ ID NO: 359

SEQ ID NO: 8212 - DNA, 687 bp, Staphylococcus aureus; identical to SEQ ID NO: 360

SEQ ID NO: 8213 - DNA, 549 bp, Staphylococcus aureus; identical to SEQ ID NO: 361

SEQ ID NO: 8214 - DNA, 444 bp, Staphylococcus aureus; identical to SEQ ID NO: 362

SEQ ID NO: 8215 - DNA, 1266 bp, Staphylococcus aureus; identical to SEQ ID NO: 363

SEQ ID NO: 8216 - DNA, 636 bp, Staphylococcus aureus; identical to SEQ ID NO: 364

SEQ ID NO: 8217 - DNA, 1734 bp, Staphylococcus aureus; identical to SEQ ID NO: 365

SEQ ID NO: 8218 - DNA, 366 bp, Staphylococcus aureus; identical to SEQ ID NO: 366

SEQ ID NO: 8219 - DNA, 1764 bp, Staphylococcus aureus; identical to SEQ ID NO: 367

SEQ ID NO: 8220 - DNA, 354 bp, Staphylococcus aureus; identical to SEQ ID NO: 368

SEQ ID NO: 8221 - DNA, 636 bp, Staphylococcus aureus; identical to SEQ ID NO: 369

SEQ ID NO: 8222 - DNA, 762 bp, Staphylococcus aureus; identical to SEQ ID NO: 370

SEQ ID NO: 8223 - DNA, 105 bp, Staphylococcus aureus; identical to SEQ ID NO: 371

SEQ ID NO: 8224 - DNA, 1593 bp, Staphylococcus aureus; identical to SEQ ID NO: 372

SEQ ID NO: 8225 - DNA, 387 bp, Staphylococcus aureus; identical to SEQ ID NO: 373

SEQ ID NO: 8226 - DNA, 258 bp, Staphylococcus aureus; identical to SEQ ID NO: 374

SEQ ID NO: 8227 - DNA, 474 bp, Staphylococcus aureus; identical to SEQ ID NO: 375

SEQ ID NO: 8228 - DNA, 651 bp, Staphylococcus aureus; identical to SEQ ID NO: 376

SEQ ID NO: 8229 - DNA, 807 bp, Staphylococcus aureus; identical to SEQ ID NO: 377

SEQ ID NO: 8230 - DNA, 996 bp, Staphylococcus aureus; identical to SEQ ID NO: 378

SEQ ID NO: 8231 - DNA, 1830 bp, Staphylococcus aureus; identical to SEQ ID NO: 379

SEQ ID NO: 8232 - DNA, 627 bp, Staphylococcus aureus; identical to SEQ ID NO: 380

SEQ ID NO: 8233 - DNA, 102 bp, Staphylococcus aureus; identical to SEQ ID NO: 381

SEQ ID NO: 8234 - DNA, 852 bp, Staphylococcus aureus; identical to SEQ ID NO: 382

SEQ ID NO: 8235 - DNA, 198 bp, Staphylococcus aureus; identical to SEQ ID NO: 383

SEQ ID NO: 8236 - DNA, 441 bp, Staphylococcus aureus; identical to SEQ ID NO: 384

SEQ ID NO: 8237 - DNA, 348 bp, Staphylococcus aureus; identical to SEQ ID NO: 385

SEQ ID NO: 8238 - DNA, 573 bp, Staphylococcus aureus; identical to SEQ ID NO: 386

SEQ ID NO: 8239 - DNA, 936 bp, Staphylococcus aureus; identical to SEQ ID NO: 387

SEQ ID NO: 8240 - DNA, 975 bp, Staphylococcus aureus; identical to SEQ ID NO: 388

SEQ ID NO: 8241 - DNA, 99 bp, Staphylococcus aureus; identical to SEQ ID NO: 389

SEQ ID NO: 8242 - DNA, 1401 bp, Staphylococcus aureus; identical to SEQ ID NO: 390

SEQ ID NO: 8243 - DNA, 216 bp, Staphylococcus aureus; identical to SEQ ID NO: 391

SEQ ID NO: 8244 - DNA, 669 bp, Staphylococcus aureus; identical to SEQ ID NO: 392

SEQ ID NO: 8245 - DNA, 567 bp, Staphylococcus aureus; identical to SEQ ID NO: 393

SEQ ID NO: 8246 - DNA, 696 bp, Staphylococcus aureus; identical to SEQ ID NO: 394

SEQ ID NO: 8247 - DNA, 1032 bp, Staphylococcus aureus; identical to SEQ ID NO: 395

SEQ ID NO: 8248 - DNA, 1134 bp, Staphylococcus aureus; identical to SEQ ID NO: 396

SEQ ID NO: 8249 - DNA, 942 bp, Staphylococcus aureus; identical to SEQ ID NO: 397

SEQ ID NO: 8250 - DNA, 540 bp, Staphylococcus aureus; identical to SEQ ID NO: 398

SEQ ID NO: 8251 - DNA, 636 bp, Staphylococcus aureus; identical to SEQ ID NO: 399

SEQ ID NO: 8252 - DNA, 789 bp, Staphylococcus aureus; identical to SEQ ID NO: 400

SEQ ID NO: 8253 - DNA, 1227 bp, Staphylococcus aureus; identical to SEQ ID NO: 401

SEQ ID NO: 8254 - DNA, 768 bp, Staphylococcus aureus; identical to SEQ ID NO: 402

SEQ ID NO: 8255 - DNA, 117 bp, Staphylococcus aureus; identical to SEQ ID NO: 403

SEQ ID NO: 8256 - DNA, 423 bp, Staphylococcus aureus; identical to SEQ ID NO: 404

SEQ ID NO: 8257 - DNA, 600 bp, Staphylococcus aureus; identical to SEQ ID NO: 405

SEQ ID NO: 8258 - DNA, 366 bp, Staphylococcus aureus; identical to SEQ ID NO: 406

SEQ ID NO: 8259 - DNA, 558 bp, Staphylococcus aureus; identical to SEQ ID NO: 407

SEQ ID NO: 8260 - DNA, 1188 bp, Staphylococcus aureus; identical to SEQ ID NO: 408

SEQ ID NO: 8261 - DNA, 963 bp, Staphylococcus aureus; identical to SEQ ID NO: 409

SEQ ID NO: 8262 - DNA, 777 bp, Staphylococcus aureus; identical to SEQ ID NO: 410

SEQ ID NO: 8263 - DNA, 822 bp, Staphylococcus aureus; identical to SEQ ID NO: 411

SEQ ID NO: 8264 - DNA, 663 bp, Staphylococcus aureus; identical to SEQ ID NO: 412

SEQ ID NO: 8265 - DNA, 360 bp, Staphylococcus aureus; identical to SEQ ID NO: 413

SEQ ID NO: 8266 - DNA, 753 bp, Staphylococcus aureus; identical to SEQ ID NO: 414

SEQ ID NO: 8267 - DNA, 1077 bp, Staphylococcus aureus; identical to SEQ ID NO: 415

SEQ ID NO: 8268 - DNA, 267 bp, Staphylococcus aureus; identical to SEQ ID NO: 416

SEQ ID NO: 8269 - DNA, 1194 bp, Staphylococcus aureus; identical to SEQ ID NO: 417

SEQ ID NO: 8270 - DNA, 201 bp, Staphylococcus aureus; identical to SEQ ID NO: 418

SEQ ID NO: 8271 - DNA, 963 bp, Staphylococcus aureus; identical to SEQ ID NO: 419

SEQ ID NO: 8272 - DNA, 1023 bp, Staphylococcus aureus; identical to SEQ ID NO: 420

SEQ ID NO: 8273 - DNA, 2028 bp, Staphylococcus aureus; identical to SEQ ID NO: 421

SEQ ID NO: 8274 - DNA, 2454 bp, Staphylococcus aureus; identical to SEQ ID NO: 422

SEQ ID NO: 8275 - DNA, 639 bp, Staphylococcus aureus; identical to SEQ ID NO: 423

SEQ ID NO: 8276 - DNA, 1290 bp, Staphylococcus aureus; identical to SEQ ID NO: 424

SEQ ID NO: 8277 - DNA, 258 bp, Staphylococcus aureus; identical to SEQ ID NO: 425

SEQ ID NO: 8278 - DNA, 501 bp, Staphylococcus aureus; identical to SEQ ID NO: 426

SEQ ID NO: 8279 - DNA, 780 bp, Staphylococcus aureus; identical to SEQ ID NO: 427

SEQ ID NO: 8280 - DNA, 1185 bp, Staphylococcus aureus; identical to SEQ ID NO: 428

SEQ ID NO: 8281 - DNA, 1404 bp, Staphylococcus aureus; identical to SEQ ID NO: 429

SEQ ID NO: 8282 - DNA, 378 bp, Staphylococcus aureus; identical to SEQ ID NO: 430

SEQ ID NO: 8283 - DNA, 315 bp, Staphylococcus aureus; identical to SEQ ID NO: 431

SEQ ID NO: 8284 - DNA, 1794 bp, Staphylococcus aureus; identical to SEQ ID NO: 432

SEQ ID NO: 8285 - DNA, 2190 bp, Staphylococcus aureus; identical to SEQ ID NO: 433

SEQ ID NO: 8286 - DNA, 192 bp, Staphylococcus aureus; identical to SEQ ID NO: 434

SEQ ID NO: 8287 - DNA, 978 bp, Staphylococcus aureus; identical to SEQ ID NO: 435

SEQ ID NO: 8288 - DNA, 1152 bp, Staphylococcus aureus; identical to SEQ ID NO: 436

SEQ ID NO: 8289 - DNA, 1578 bp, Staphylococcus aureus; identical to SEQ ID NO: 437

SEQ ID NO: 8290 - DNA, 1146 bp, Staphylococcus aureus; identical to SEQ ID NO: 438

SEQ ID NO: 8291 - DNA, 465 bp, Staphylococcus aureus; identical to SEQ ID NO: 439

SEQ ID NO: 8292 - DNA, 1194 bp, Staphylococcus aureus; identical to SEQ ID NO: 440

SEQ ID NO: 8293 - DNA, 276 bp, Staphylococcus aureus; identical to SEQ ID NO: 441

SEQ ID NO: 8294 - DNA, 750 bp, Staphylococcus aureus; identical to SEQ ID NO: 442

SEQ ID NO: 8295 - DNA, 1218 bp, Staphylococcus aureus; identical to SEQ ID NO: 443

SEQ ID NO: 8296 - DNA, 816 bp, Staphylococcus aureus; identical to SEQ ID NO: 444

SEQ ID NO: 8297 - DNA, 1107 bp, Staphylococcus aureus; identical to SEQ ID NO: 445

SEQ ID NO: 8298 - DNA, 585 bp, Staphylococcus aureus; identical to SEQ ID NO: 446

SEQ ID NO: 8299 - DNA, 987 bp, Staphylococcus aureus; identical to SEQ ID NO: 447

SEQ ID NO: 8300 - DNA, 870 bp, Staphylococcus aureus; identical to SEQ ID NO: 448

SEQ ID NO: 8301 - DNA, 2229 bp, Staphylococcus aureus; identical to SEQ ID NO: 449

SEQ ID NO: 8302 - DNA, 1026 bp, Staphylococcus aureus; identical to SEQ ID NO: 450

SEQ ID NO: 8303 - DNA, 501 bp, Staphylococcus aureus; identical to SEQ ID NO: 451

SEQ ID NO: 8304 - DNA, 945 bp, Staphylococcus aureus; identical to SEQ ID NO: 452
  misc_feature (2)..(2): n is a, c, g, or t
  misc_feature (4)..(5): n is a, c, g, or t
  misc_feature (8)..(9): n is a, c, g, or t

SEQ ID NO: 8305 - DNA, 555 bp, Staphylococcus aureus; identical to SEQ ID NO: 453

SEQ ID NO: 8306 - DNA, 1599 bp, Staphylococcus aureus; identical to SEQ ID NO: 454

SEQ ID NO: 8307 - DNA, 354 bp, Staphylococcus aureus; identical to SEQ ID NO: 455

SEQ ID NO: 8308 - DNA, 681 bp, Staphylococcus aureus; identical to SEQ ID NO: 456

SEQ ID NO: 8309 - DNA, 1539 bp, Staphylococcus aureus; identical to SEQ ID NO: 457

SEQ ID NO: 8310 - DNA, 1218 bp, Staphylococcus aureus; identical to SEQ ID NO: 458

SEQ ID NO: 8311 - DNA, 684 bp, Staphylococcus aureus; identical to SEQ ID NO: 459

SEQ ID NO: 8312 - DNA, 1167 bp, Staphylococcus aureus; identical to SEQ ID NO: 460

SEQ ID NO: 8313 - DNA, 819 bp, Staphylococcus aureus; identical to SEQ ID NO: 461

SEQ ID NO: 8314 - DNA, 483 bp, Staphylococcus aureus; identical to SEQ ID NO: 462

SEQ ID NO: 8315 - DNA, 327 bp, Staphylococcus aureus; identical to SEQ ID NO: 463

SEQ ID NO: 8316 - DNA, 822 bp, Staphylococcus aureus; identical to SEQ ID NO: 464

SEQ ID NO: 8317 - DNA, 1077 bp, Staphylococcus aureus; identical to SEQ ID NO: 465

SEQ ID NO: 8318 - DNA, 795 bp, Staphylococcus aureus; identical to SEQ ID NO: 466

SEQ ID NO: 8319 - DNA, 366 bp, Staphylococcus aureus; identical to SEQ ID NO: 467

SEQ ID NO: 8320 - DNA, 561 bp, Staphylococcus aureus; identical to SEQ ID NO: 468

SEQ ID NO: 8321 - DNA, 720 bp, Staphylococcus aureus; identical to SEQ ID NO: 469

SEQ ID NO: 8322 - DNA, 819 bp, Staphylococcus aureus; identical to SEQ ID NO: 470

SEQ ID NO: 8323 - DNA, 930 bp, Staphylococcus aureus; identical to SEQ ID NO: 471

SEQ ID NO: 8324 - DNA, 423 bp, Staphylococcus aureus; identical to SEQ ID NO: 472

SEQ ID NO: 8325 - DNA, 1380 bp, Staphylococcus aureus; identical to SEQ ID NO: 473

SEQ ID NO: 8326 - DNA, 1251 bp, Staphylococcus aureus; identical to SEQ ID NO: 474

SEQ ID NO: 8327 - DNA, 1842 bp, Staphylococcus aureus; identical to SEQ ID NO: 475

SEQ ID NO: 8328 - DNA, 402 bp, Staphylococcus aureus; identical to SEQ ID NO: 476

SEQ ID NO: 8329 - DNA, 1041 bp, Staphylococcus aureus; identical to SEQ ID NO: 477

SEQ ID NO: 8330 - DNA, 564 bp, Staphylococcus aureus; identical to SEQ ID NO: 478

SEQ ID NO: 8331 - DNA, 696 bp, Staphylococcus aureus; identical to SEQ ID NO: 479

SEQ ID NO: 8332 - DNA, 1287 bp, Staphylococcus aureus; identical to SEQ ID NO: 480

SEQ ID NO: 8333 - DNA, 192 bp, Staphylococcus aureus; identical to SEQ ID NO: 481

SEQ ID NO: 8334 - DNA, 993 bp, Staphylococcus aureus; identical to SEQ ID NO: 482

SEQ ID NO: 8335 - DNA, 870 bp, Staphylococcus aureus; identical to SEQ ID NO: 483

SEQ ID NO: 8336 - DNA, 141 bp, Staphylococcus aureus; identical to SEQ ID NO: 484

SEQ ID NO: 8337 - DNA, 288 bp, Staphylococcus aureus; identical to SEQ ID NO: 485

SEQ ID NO: 8338 - DNA, 1224 bp, Staphylococcus aureus; identical to SEQ ID NO: 486

SEQ ID NO: 8339 - DNA, 327 bp, Staphylococcus aureus; identical to SEQ ID NO: 487

SEQ ID NO: 8340 - DNA, 1203 bp, Staphylococcus aureus; identical to SEQ ID NO: 488

SEQ ID NO: 8341 - DNA, 1308 bp, Staphylococcus aureus; identical to SEQ ID NO: 489

SEQ ID NO: 8342 - DNA, 255 bp, Staphylococcus aureus; identical to SEQ ID NO: 490

SEQ ID NO: 8343 - DNA, 744 bp, Staphylococcus aureus; identical to SEQ ID NO: 491

SEQ ID NO: 8344 - DNA, 1161 bp, Staphylococcus aureus; identical to SEQ ID NO: 492

SEQ ID NO: 8345 - DNA, 627 bp, Staphylococcus aureus; identical to SEQ ID NO: 493

SEQ ID NO: 8346 - DNA, 2862 bp, Staphylococcus aureus; identical to SEQ ID NO: 494

SEQ ID NO: 8347 - DNA, 786 bp, Staphylococcus aureus; identical to SEQ ID NO: 495

SEQ ID NO: 8348 - DNA, 393 bp, Staphylococcus aureus; identical to SEQ ID NO: 496

SEQ ID NO: 8349 - DNA, 1194 bp, Staphylococcus aureus; identical to SEQ ID NO: 497

SEQ ID NO: 8350 - DNA, 1578 bp, Staphylococcus aureus; identical to SEQ ID NO: 498

SEQ ID NO: 8351 - DNA, 3729 bp, Staphylococcus aureus; identical to SEQ ID NO: 499

SEQ ID NO: 8352 - DNA, 4122 bp, Staphylococcus aureus; identical to SEQ ID NO: 500

SEQ ID NO: 8353 - DNA, 360 bp, Staphylococcus aureus; identical to SEQ ID NO: 501

SEQ ID NO: 8354 - DNA, 627 bp, Staphylococcus aureus; identical to SEQ ID NO: 502

SEQ ID NO: 8355 - DNA, 867 bp, Staphylococcus aureus; identical to SEQ ID NO: 503

SEQ ID NO: 8356 - DNA, 105 bp, Staphylococcus aureus; identical to SEQ ID NO: 504

SEQ ID NO: 8357 - DNA, 1929 bp, Staphylococcus aureus; identical to SEQ ID NO: 505

SEQ ID NO: 8358 - DNA, 1611 bp, Staphylococcus aureus; identical to SEQ ID NO: 506

SEQ ID NO: 8359 - DNA, 1689 bp, Staphylococcus aureus; identical to SEQ ID NO: 507

SEQ ID NO: 8360 - DNA, 210 bp, Staphylococcus aureus; identical to SEQ ID NO: 508

SEQ ID NO: 8361 - DNA, 228 bp, Staphylococcus aureus; identical to SEQ ID NO: 509

SEQ ID NO: 8362 - DNA, 210 bp, Staphylococcus aureus; identical to SEQ ID NO: 510

SEQ ID NO: 8363 - DNA, 645 bp, Staphylococcus aureus; identical to SEQ ID NO: 511

SEQ ID NO: 8364 - DNA, 1104 bp, Staphylococcus aureus; identical to SEQ ID NO: 512

SEQ ID NO: 8365 - DNA, 1770 bp, Staphylococcus aureus; identical to SEQ ID NO: 513

SEQ ID NO: 8366 - DNA, 255 bp, Staphylococcus aureus; identical to SEQ ID NO: 514

SEQ ID NO: 8367 - DNA, 1359 bp, Staphylococcus aureus; identical to SEQ ID NO: 515

SEQ ID NO: 8368 - DNA, 195 bp, Staphylococcus aureus; identical to SEQ ID NO: 516

SEQ ID NO: 8369 - DNA, 1005 bp, Staphylococcus aureus; identical to SEQ ID NO: 517

SEQ ID NO: 8370 - DNA, 1554 bp, Staphylococcus aureus; identical to SEQ ID NO: 518

SEQ ID NO: 8371 - DNA, 1530 bp, Staphylococcus aureus; identical to SEQ ID NO: 519

SEQ ID NO: 8372 - DNA, 681 bp, Staphylococcus aureus; identical to SEQ ID NO: 520

SEQ ID NO: 8373 - DNA, 1047 bp, Staphylococcus aureus; identical to SEQ ID NO: 521

SEQ ID NO: 8374 - DNA, 765 bp, Staphylococcus aureus; identical to SEQ ID NO: 522

SEQ ID NO: 8375 - DNA, 1371 bp, Staphylococcus aureus; identical to SEQ ID NO: 523

SEQ ID NO: 8376 - DNA, 693 bp, Staphylococcus aureus; identical to SEQ ID NO: 524

SEQ ID NO: 8377 - DNA, 426 bp, Staphylococcus aureus; identical to SEQ ID NO: 525

SEQ ID NO: 8378 - DNA, 552 bp, Staphylococcus aureus; identical to SEQ ID NO: 526

SEQ ID NO: 8379 - DNA, 732 bp, Staphylococcus aureus; identical to SEQ ID NO: 527

SEQ ID NO: 8380 - DNA, 786 bp, Staphylococcus aureus; identical to SEQ ID NO: 528

SEQ ID NO: 8381 - DNA, 222 bp, Staphylococcus aureus; identical to SEQ ID NO: 529

SEQ ID NO: 8382 - DNA, 405 bp, Staphylococcus aureus; identical to SEQ ID NO: 530

SEQ ID NO: 8383 - DNA, 573 bp, Staphylococcus aureus; identical to SEQ ID NO: 531

SEQ ID NO: 8384 - DNA, 417 bp, Staphylococcus aureus; identical to SEQ ID NO: 532

SEQ ID NO: 8385 - DNA, 237 bp, Staphylococcus aureus; identical to SEQ ID NO: 533

SEQ ID NO: 8386 - DNA, 420 bp, Staphylococcus aureus; identical to SEQ ID NO: 534

SEQ ID NO: 8387 - DNA, 1269 bp, Staphylococcus aureus; identical to SEQ ID NO: 535

SEQ ID NO: 8388 - DNA, 1893 bp, Staphylococcus aureus; identical to SEQ ID NO: 536

SEQ ID NO: 8389 - DNA, 615 bp, Staphylococcus aureus; identical to SEQ ID NO: 537

SEQ ID NO: 8390 - DNA, 534 bp, Staphylococcus aureus; identical to SEQ ID NO: 538

SEQ ID NO: 8391 - DNA, 2658 bp, Staphylococcus aureus; identical to SEQ ID NO: 539

SEQ ID NO: 8392 - DNA, 1278 bp, Staphylococcus aureus; identical to SEQ ID NO: 540

SEQ ID NO: 8393 - DNA, 1824 bp, Staphylococcus aureus; identical to SEQ ID NO: 541

SEQ ID NO: 8394 - DNA, 696 bp, Staphylococcus aureus; identical to SEQ ID NO: 542

SEQ ID NO: 8395 - DNA, 1161 bp, Staphylococcus aureus; identical to SEQ ID NO: 543

SEQ ID NO: 8396 - DNA, 633 bp, Staphylococcus aureus; identical to SEQ ID NO: 544

SEQ ID NO: 8397 - DNA, 432 bp, Staphylococcus aureus; identical to SEQ ID NO: 545

SEQ ID NO: 8398 - DNA, 1968 bp, Staphylococcus aureus; identical to SEQ ID NO: 546

SEQ ID NO: 8399 - DNA, 99 bp, Staphylococcus aureus; identical to SEQ ID NO: 547

SEQ ID NO: 8400 - DNA, 192 bp, Staphylococcus aureus; identical to SEQ ID NO: 548

SEQ ID NO: 8401 - DNA, 1203 bp, Staphylococcus aureus; identical to SEQ ID NO: 549

SEQ ID NO: 8402 - DNA, 465 bp, Staphylococcus aureus; identical to SEQ ID NO: 550

SEQ ID NO: 8403 - DNA, 1485 bp, Staphylococcus aureus; identical to SEQ ID NO: 551

SEQ ID NO: 8404 - DNA, 594 bp, Staphylococcus aureus; identical to SEQ ID NO: 552

SEQ ID NO: 8405 - DNA, 123 bp, Staphylococcus aureus; identical to SEQ ID NO: 553

SEQ ID NO: 8406 - DNA, 648 bp, Staphylococcus aureus; identical to SEQ ID NO: 554

SEQ ID NO: 8407 - DNA, 873 bp, Staphylococcus aureus; identical to SEQ ID NO: 555

SEQ ID NO: 8408 - DNA, 501 bp, Staphylococcus aureus; identical to SEQ ID NO: 556

SEQ ID NO: 8409 - DNA, 441 bp, Staphylococcus aureus; identical to SEQ ID NO: 557

SEQ ID NO: 8410 - DNA, 435 bp, Staphylococcus aureus; identical to SEQ ID NO: 558

SEQ ID NO: 8411 - DNA, 522 bp, Staphylococcus aureus; identical to SEQ ID NO: 559

SEQ ID NO: 8412 - DNA, 672 bp, Staphylococcus aureus; identical to SEQ ID NO: 560

SEQ ID NO: 8413 - DNA, 804 bp, Staphylococcus aureus; identical to SEQ ID NO: 561

SEQ ID NO: 8414 - DNA, 801 bp, Staphylococcus aureus; identical to SEQ ID NO: 562

SEQ ID NO: 8415 - DNA, 471 bp, Staphylococcus aureus; identical to SEQ ID NO: 563

SEQ ID NO: 8416 - DNA, 567 bp, Staphylococcus aureus; identical to SEQ ID NO: 564

SEQ ID NO: 8417 - DNA, 177 bp, Staphylococcus aureus; identical to SEQ ID NO: 565

SEQ ID NO: 8418 - DNA, 711 bp, Staphylococcus aureus; identical to SEQ ID NO: 566

SEQ ID NO: 8419 - DNA, 153 bp, Staphylococcus aureus; identical to SEQ ID NO: 567

SEQ ID NO: 8420 - DNA, 321 bp, Staphylococcus aureus; identical to SEQ ID NO: 568

SEQ ID NO: 8421 - DNA, 168 bp, Staphylococcus aureus; identical to SEQ ID NO: 569

SEQ ID NO: 8422 - DNA, 981 bp, Staphylococcus aureus; identical to SEQ ID NO: 570

SEQ ID NO: 8423 - DNA, 96 bp, Staphylococcus aureus; identical to SEQ ID NO: 571

SEQ ID NO: 8424 - DNA, 1056 bp, Staphylococcus aureus; identical to SEQ ID NO: 572

SEQ ID NO: 8425 - DNA, 939 bp, Staphylococcus aureus; identical to SEQ ID NO: 573

SEQ ID NO: 8426 - DNA, 900 bp, Staphylococcus aureus; identical to SEQ ID NO: 574

SEQ ID NO: 8427 - DNA, 1035 bp, Staphylococcus aureus; identical to SEQ ID NO: 575

SEQ ID NO: 8428 - DNA, 681 bp, Staphylococcus aureus; identical to SEQ ID NO: 576

SEQ ID NO: 8429 - DNA, 1539 bp, Staphylococcus aureus; identical to SEQ ID NO: 577

SEQ ID NO: 8430 - DNA, 996 bp, Staphylococcus aureus; identical to SEQ ID NO: 578

SEQ ID NO: 8431 - DNA, 2133 bp, Staphylococcus aureus; identical to SEQ ID NO: 579

SEQ ID NO: 8432 - DNA, 969 bp, Staphylococcus aureus; identical to SEQ ID NO: 580

SEQ ID NO: 8433 - DNA, 435 bp, Staphylococcus aureus; identical to SEQ ID NO: 581

SEQ ID NO: 8434 - DNA, 357 bp, Staphylococcus aureus; identical to SEQ ID NO: 582

SEQ ID NO: 8435 - DNA, 243 bp, Staphylococcus aureus; identical to SEQ ID NO: 583

SEQ ID NO: 8436 - DNA, 1107 bp, Staphylococcus aureus; identical to SEQ ID NO: 584

SEQ ID NO: 8437 - DNA, 411 bp, Staphylococcus aureus; identical to SEQ ID NO: 585

SEQ ID NO: 8438 - DNA, 303 bp, Staphylococcus aureus; identical to SEQ ID NO: 586

SEQ ID NO: 8439 - DNA, 2067 bp, Staphylococcus aureus; identical to SEQ ID NO: 587

SEQ ID NO: 8440 - DNA, 1710 bp, Staphylococcus aureus; identical to SEQ ID NO: 588

SEQ ID NO: 8441 - DNA, 270 bp, Staphylococcus aureus; identical to SEQ ID NO: 589

SEQ ID NO: 8442 - DNA, 1740 bp, Staphylococcus aureus; identical to SEQ ID NO: 590

SEQ ID NO: 8443 - DNA, 870 bp, Staphylococcus aureus; identical to SEQ ID NO: 591

SEQ ID NO: 8444 - DNA, 219 bp, Staphylococcus aureus; identical to SEQ ID NO: 592

SEQ ID NO: 8445 - DNA, 1977 bp, Staphylococcus aureus; identical to SEQ ID NO: 593

SEQ ID NO: 8446 - DNA, 396 bp, Staphylococcus aureus; identical to SEQ ID NO: 594

SEQ ID NO: 8447 - DNA, 828 bp, Staphylococcus aureus; identical to SEQ ID NO: 595

SEQ ID NO: 8448 - DNA, 900 bp, Staphylococcus aureus; identical to SEQ ID NO: 596

SEQ ID NO: 8449 - DNA, 741 bp, Staphylococcus aureus; identical to SEQ ID NO: 597

SEQ ID NO: 8450 - DNA, 132 bp, Staphylococcus aureus; identical to SEQ ID NO: 598

SEQ ID NO: 8451 - DNA, 258 bp, Staphylococcus aureus; identical to SEQ ID NO: 599

SEQ ID NO: 8452 - DNA, 426 bp, Staphylococcus aureus; identical to SEQ ID NO: 600

SEQ ID NO: 8453 - DNA, 1281 bp, Staphylococcus aureus; identical to SEQ ID NO: 601

SEQ ID NO: 8454 - DNA, 522 bp, Staphylococcus aureus; identical to SEQ ID NO: 602

SEQ ID NO: 8455 - DNA, 244 bp, Staphylococcus aureus; identical to SEQ ID NO: 603

SEQ ID NO: 8456 - DNA, 390 bp, Staphylococcus aureus; identical to SEQ ID NO: 604

SEQ ID NO: 8457 - DNA, 1995 bp, Staphylococcus aureus; identical to SEQ ID NO: 605

SEQ ID NO: 8458 - DNA, 888 bp, Staphylococcus aureus; identical to SEQ ID NO: 606

SEQ ID NO: 8459 - DNA, 228 bp, Staphylococcus aureus; identical to SEQ ID NO: 607

SEQ ID NO: 8460 - DNA, 864 bp, Staphylococcus aureus; identical to SEQ ID NO: 608

SEQ ID NO: 8461 - DNA, 2490 bp, Staphylococcus aureus; identical to SEQ ID NO: 609

SEQ ID NO: 8462 - DNA, 165 bp, Staphylococcus aureus; identical to SEQ ID NO: 610

SEQ ID NO: 8463 - DNA, 165 bp, Staphylococcus aureus; identical to SEQ ID NO: 611

SEQ ID NO: 8464 - DNA, 318 bp, Staphylococcus aureus; identical to SEQ ID NO: 612

SEQ ID NO: 8465 - DNA, 1545 bp, Staphylococcus aureus; identical to SEQ ID NO: 613

SEQ ID NO: 8466 - DNA, 441 bp, Staphylococcus aureus; identical to SEQ ID NO: 614

SEQ ID NO: 8467 - DNA, 600 bp, Staphylococcus aureus; identical to SEQ ID NO: 615

SEQ ID NO: 8468 - DNA, 1017 bp, Staphylococcus aureus; identical to SEQ ID NO: 616

SEQ ID NO: 8469 - DNA, 666 bp, Staphylococcus aureus; identical to SEQ ID NO: 617

SEQ ID NO: 8470 - DNA, 648 bp, Staphylococcus aureus; identical to SEQ ID NO: 618

SEQ ID NO: 8471 - DNA, 156 bp, Staphylococcus aureus; identical to SEQ ID NO: 619

SEQ ID NO: 8472 - DNA, 1455 bp, Staphylococcus aureus; identical to SEQ ID NO: 620

SEQ ID NO: 8473 - DNA, 264 bp, Staphylococcus aureus; identical to SEQ ID NO: 621

SEQ ID NO: 8474 - DNA, 1212 bp, Staphylococcus aureus; identical to SEQ ID NO: 622

SEQ ID NO: 8475 - DNA, 999 bp, Staphylococcus aureus; identical to SEQ ID NO: 623

SEQ ID NO: 8476 - DNA, 237 bp, Staphylococcus aureus; identical to SEQ ID NO: 624

SEQ ID NO: 8477 - DNA, 168 bp, Staphylococcus aureus; identical to SEQ ID NO: 625

SEQ ID NO: 8478 - DNA, 1155 bp, Staphylococcus aureus; identical to SEQ ID NO: 626

SEQ ID NO: 8479 - DNA, 1408 bp, Staphylococcus aureus; identical to SEQ ID NO: 627

SEQ ID NO: 8480 - DNA, 495 bp, Staphylococcus aureus; identical to SEQ ID NO: 628

SEQ ID NO: 8481 - DNA, 798 bp, Staphylococcus aureus; identical to SEQ ID NO: 629

SEQ ID NO: 8482 - DNA, 864 bp, Staphylococcus aureus; identical to SEQ ID NO: 630

SEQ ID NO: 8483 - DNA, 303 bp, Staphylococcus aureus; identical to SEQ ID NO: 631

SEQ ID NO: 8484 - DNA, 1128 bp, Staphylococcus aureus; identical to SEQ ID NO: 632

SEQ ID NO: 8485 - DNA, 411 bp, Staphylococcus aureus; identical to SEQ ID NO: 633

SEQ ID NO: 8486 - DNA, 1374 bp, Staphylococcus aureus; identical to SEQ ID NO: 634

SEQ ID NO: 8487 - DNA, 1716 bp, Staphylococcus aureus; identical to SEQ ID NO: 635

SEQ ID NO: 8488 - DNA, 489 bp, Staphylococcus aureus; identical to SEQ ID NO: 636

SEQ ID NO: 8489 - DNA, 453 bp, Staphylococcus aureus; identical to SEQ ID NO: 637

SEQ ID NO: 8490 - DNA, 768 bp, Staphylococcus aureus; identical to SEQ ID NO: 638

SEQ ID NO: 8491 - DNA, 690 bp, Staphylococcus aureus; identical to SEQ ID NO: 639

SEQ ID NO: 8492 - DNA, 1812 bp, Staphylococcus aureus; identical to SEQ ID NO: 640

SEQ ID NO: 8493 - DNA, 615 bp, Staphylococcus aureus; identical to SEQ ID NO: 641

SEQ ID NO: 8494 - DNA, 489 bp, Staphylococcus aureus; identical to SEQ ID NO: 642

SEQ ID NO: 8495 - DNA, 876 bp, Staphylococcus aureus; identical to SEQ ID NO: 643

SEQ ID NO: 8496 - DNA, 384 bp, Staphylococcus aureus; identical to SEQ ID NO: 644

SEQ ID NO: 8497 - DNA, 837 bp, Staphylococcus aureus; identical to SEQ ID NO: 645

SEQ ID NO: 8498 - DNA, 702 bp, Staphylococcus aureus; identical to SEQ ID NO: 646

SEQ ID NO: 8499 - DNA, 804 bp, Staphylococcus aureus; identical to SEQ ID NO: 647

SEQ ID NO: 8500 - DNA, 1056 bp, Staphylococcus aureus; identical to SEQ ID NO: 648

SEQ ID NO: 8501 - DNA, 423 bp, Staphylococcus aureus; identical to SEQ ID NO: 649

SEQ ID NO: 8502 - DNA, 378 bp, Staphylococcus aureus; identical to SEQ ID NO: 650

SEQ ID NO: 8503 - DNA, 582 bp, Staphylococcus aureus; identical to SEQ ID NO: 651

SEQ ID NO: 8504 - DNA, 474 bp, Staphylococcus aureus; identical to SEQ ID NO: 652

SEQ ID NO: 8505 - DNA, 792 bp, Staphylococcus aureus; identical to SEQ ID NO: 653

SEQ ID NO: 8506 - DNA, 495 bp, Staphylococcus aureus; identical to SEQ ID NO: 654

SEQ ID NO: 8507 - DNA, 501 bp, Staphylococcus aureus; identical to SEQ ID NO: 655

SEQ ID NO: 8508 - DNA, 822 bp, Staphylococcus aureus; identical to SEQ ID NO: 656

SEQ ID NO: 8509 - DNA, 954 bp, Staphylococcus aureus; identical to SEQ ID NO: 657

SEQ ID NO: 8510 - DNA, 300 bp, Staphylococcus aureus; identical to SEQ ID NO: 658

SEQ ID NO: 8511 - DNA, 891 bp, Staphylococcus aureus; identical to SEQ ID NO: 659

SEQ ID NO: 8512 - DNA, 858 bp, Staphylococcus aureus; identical to SEQ ID NO: 660

SEQ ID NO: 8513 - DNA, 312 bp, Staphylococcus aureus; identical to SEQ ID NO: 661

SEQ ID NO: 8514 - DNA, 1320 bp, Staphylococcus aureus; identical to SEQ ID NO: 662

SEQ ID NO: 8515 - DNA, 675 bp, Staphylococcus aureus; identical to SEQ ID NO: 663

SEQ ID NO: 8516 - DNA, 330 bp, Staphylococcus aureus; identical to SEQ ID NO: 664

SEQ ID NO: 8517 - DNA, 1107 bp, Staphylococcus aureus; identical to SEQ ID NO: 665

SEQ ID NO: 8518 - DNA, 795 bp, Staphylococcus aureus; identical to SEQ ID NO: 666

SEQ ID NO: 8519 - DNA, 873 bp, Staphylococcus aureus; identical to SEQ ID NO: 667

SEQ ID NO: 8520 - DNA, 297 bp, Staphylococcus aureus; identical to SEQ ID NO: 668

SEQ ID NO: 8521 - DNA, 357 bp, Staphylococcus aureus; identical to SEQ ID NO: 669

SEQ ID NO: 8522 - DNA, 369 bp, Staphylococcus aureus; identical to SEQ ID NO: 670

SEQ ID NO: 8523 - DNA, 2790 bp, Staphylococcus aureus; identical to SEQ ID NO: 671

SEQ ID NO: 8524 - DNA, 627 bp, Staphylococcus aureus; identical to SEQ ID NO: 672

SEQ ID NO: 8525 - DNA, 186 bp, Staphylococcus aureus; identical to SEQ ID NO: 673

SEQ ID NO: 8526 - DNA, 948 bp, Staphylococcus aureus; identical to SEQ ID NO: 674

SEQ ID NO: 8527 - DNA, 531 bp, Staphylococcus aureus; identical to SEQ ID NO: 675

SEQ ID NO: 8528 - DNA, 765 bp, Staphylococcus aureus; identical to SEQ ID NO: 676

SEQ ID NO: 8529 - DNA, 810 bp, Staphylococcus aureus; identical to SEQ ID NO: 677

SEQ ID NO: 8530 - DNA, 885 bp, Staphylococcus aureus; identical to SEQ ID NO: 678

SEQ ID NO: 8531 - DNA, 723 bp, Staphylococcus aureus; identical to SEQ ID NO: 679

SEQ ID NO: 8532 - DNA, 420 bp, Staphylococcus aureus; identical to SEQ ID NO: 680

SEQ ID NO: 8533 - DNA, 588 bp, Staphylococcus aureus; identical to SEQ ID NO: 681

SEQ ID NO: 8534 - DNA, 1260 bp, Staphylococcus aureus; identical to SEQ ID NO: 682

SEQ ID NO: 8535 - DNA, 96 bp, Staphylococcus aureus; identical to SEQ ID NO: 683

SEQ ID NO: 8536 - DNA, 654 bp, Staphylococcus aureus; identical to SEQ ID NO: 684

SEQ ID NO: 8537 - DNA, 384 bp, Staphylococcus aureus; identical to SEQ ID NO: 685

SEQ ID NO: 8538 - DNA, 609 bp, Staphylococcus aureus; identical to SEQ ID NO: 686

SEQ ID NO: 8539 - DNA, 852 bp, Staphylococcus aureus; identical to SEQ ID NO: 687

SEQ ID NO: 8540 - DNA, 1209 bp, Staphylococcus aureus; identical to SEQ ID NO: 688

SEQ ID NO: 8541 - DNA, 819 bp, Staphylococcus aureus; identical to SEQ ID NO: 689

SEQ ID NO: 8542 - DNA, 492 bp, Staphylococcus aureus; identical to SEQ ID NO: 690

SEQ ID NO: 8543 - DNA, 705 bp, Staphylococcus aureus; identical to SEQ ID NO: 691

SEQ ID NO: 8544 - DNA, 865 bp, Staphylococcus aureus; identical to SEQ ID NO: 692

SEQ ID NO: 8545 - DNA, 420 bp, Staphylococcus aureus; identical to SEQ ID NO: 693

SEQ ID NO: 8546 - DNA, 960 bp, Staphylococcus aureus; identical to SEQ ID NO: 694

SEQ ID NO: 8547 - DNA, 639 bp, Staphylococcus aureus; identical to SEQ ID NO: 695

SEQ ID NO: 8548 - DNA, 1338 bp, Staphylococcus aureus; identical to SEQ ID NO: 696

SEQ ID NO: 8549 - DNA, 555 bp, Staphylococcus aureus; identical to SEQ ID NO: 697

SEQ ID NO: 8550 - DNA, 1497 bp, Staphylococcus aureus; identical to SEQ ID NO: 698

SEQ ID NO: 8551 - DNA, 969 bp, Staphylococcus aureus; identical to SEQ ID NO: 699

SEQ ID NO: 8552 - DNA, 1599 bp, Staphylococcus aureus; identical to SEQ ID NO: 700

SEQ ID NO: 8553 - DNA, 444 bp, Staphylococcus aureus; identical to SEQ ID NO: 701

SEQ ID NO: 8554 - DNA, 675 bp, Staphylococcus aureus; identical to SEQ ID NO: 702

SEQ ID NO: 8555 - DNA, 213 bp, Staphylococcus aureus; identical to SEQ ID NO: 703

SEQ ID NO: 8556 - DNA, 1374 bp, Staphylococcus aureus; identical to SEQ ID NO: 704

SEQ ID NO: 8557 - DNA, 1710 bp, Staphylococcus aureus; identical to SEQ ID NO: 705

SEQ ID NO: 8558 - DNA, 444 bp, Staphylococcus aureus; identical to SEQ ID NO: 706

SEQ ID NO: 8559 - DNA, 1491 bp, Staphylococcus aureus; identical to SEQ ID NO: 707

SEQ ID NO: 8560 - DNA, 456 bp, Staphylococcus aureus; identical to SEQ ID NO: 708

SEQ ID NO: 8561 - DNA, 687 bp, Staphylococcus aureus; identical to SEQ ID NO: 709

SEQ ID NO: 8562 - DNA, 1674 bp, Staphylococcus aureus; identical to SEQ ID NO: 710

SEQ ID NO: 8563 - DNA, 1623 bp, Staphylococcus aureus; identical to SEQ ID NO: 711

SEQ ID NO: 8564 - DNA, 600 bp, Staphylococcus aureus; identical to SEQ ID NO: 712

SEQ ID NO: 8565 - DNA, 102 bp, Staphylococcus aureus; identical to SEQ ID NO: 713

SEQ ID NO: 8566 - DNA, 924 bp, Staphylococcus aureus; identical to SEQ ID NO: 714

SEQ ID NO: 8567 - DNA, 1524 bp, Staphylococcus aureus; identical to SEQ ID NO: 715

SEQ ID NO: 8568 - DNA, 1047 bp, Staphylococcus aureus; identical to SEQ ID NO: 716

SEQ ID NO: 8569 - DNA, 108 bp, Staphylococcus aureus; identical to SEQ ID NO: 717

SEQ ID NO: 8570 - DNA, 90 bp, Staphylococcus aureus; identical to SEQ ID NO: 718

SEQ ID NO: 8571 - DNA, 537 bp, Staphylococcus aureus; identical to SEQ ID NO: 719

SEQ ID NO: 8572 - DNA, 624 bp, Staphylococcus aureus; identical to SEQ ID NO: 720

SEQ ID NO: 8573 - DNA, 1851 bp, Staphylococcus aureus; identical to SEQ ID NO: 721

SEQ ID NO: 8574 - DNA, 945 bp, Staphylococcus aureus; identical to SEQ ID NO: 722

SEQ ID NO: 8575 - DNA, 1371 bp, Staphylococcus aureus; identical to SEQ ID NO: 723

SEQ ID NO: 8576 - DNA, 384 bp, Staphylococcus aureus; identical to SEQ ID NO: 724

SEQ ID NO: 8577 - DNA, 112 bp, Staphylococcus aureus; identical to SEQ ID NO: 725

SEQ ID NO: 8578 - DNA, 2106 bp, Staphylococcus aureus; identical to SEQ ID NO: 726

SEQ ID NO: 8579 - DNA, 609 bp, Staphylococcus aureus; identical to SEQ ID NO: 727

SEQ ID NO: 8580 - DNA, 1881 bp, Staphylococcus aureus; identical to SEQ ID NO: 728

SEQ ID NO: 8581 - DNA, 498 bp, Staphylococcus aureus; identical to SEQ ID NO: 729

SEQ ID NO: 8582 - DNA, 231 bp, Staphylococcus aureus; identical to SEQ ID NO: 730

SEQ ID NO: 8583 - DNA, 483 bp, Staphylococcus aureus; identical to SEQ ID NO: 731

SEQ ID NO: 8584 - DNA, 438 bp, Staphylococcus aureus; identical to SEQ ID NO: 732

SEQ ID NO: 8585 - DNA, 1719 bp, Staphylococcus aureus; identical to SEQ ID NO: 733

SEQ ID NO: 8586 - DNA, 444 bp, Staphylococcus aureus; identical to SEQ ID NO: 734

SEQ ID NO: 8587 - DNA, 447 bp, Staphylococcus aureus; identical to SEQ ID NO: 735

SEQ ID NO: 8588 - DNA, 222 bp, Staphylococcus aureus; identical to SEQ ID NO: 736

SEQ ID NO: 8589 - DNA, 774 bp, Staphylococcus aureus; identical to SEQ ID NO: 737

SEQ ID NO: 8590 - DNA, 2001 bp, Staphylococcus aureus; identical to SEQ ID NO: 738

SEQ ID NO: 8591 - DNA, 1191 bp, Staphylococcus aureus; identical to SEQ ID NO: 739

SEQ ID NO: 8592 - DNA, 1113 bp, Staphylococcus aureus; identical to SEQ ID NO: 740

SEQ ID NO: 8593 - DNA, 570 bp, Staphylococcus aureus; identical to SEQ ID NO: 741

SEQ ID NO: 8594 - DNA, 756 bp, Staphylococcus aureus; identical to SEQ ID NO: 742

SEQ ID NO: 8595 - DNA, 915 bp, Staphylococcus aureus; identical to SEQ ID NO: 743

SEQ ID NO: 8596 - DNA, 123 bp, Staphylococcus aureus; identical to SEQ ID NO: 744

SEQ ID NO: 8597 - DNA, 132 bp, Staphylococcus aureus; identical to SEQ ID NO: 745

SEQ ID NO: 8598 - DNA, 111 bp, Staphylococcus aureus; identical to SEQ ID NO: 746

SEQ ID NO: 8599 - DNA, 888 bp, Staphylococcus aureus; identical to SEQ ID NO: 747

SEQ ID NO: 8600 - DNA, 1251 bp, Staphylococcus aureus; identical to SEQ ID NO: 748

SEQ ID NO: 8601 - DNA, 666 bp, Staphylococcus aureus; identical to SEQ ID NO: 749

SEQ ID NO: 8602 - DNA, 93 bp, Staphylococcus aureus; identical to SEQ ID NO: 750

SEQ ID NO: 8603 - DNA, 201 bp, Staphylococcus aureus; identical to SEQ ID NO: 751

SEQ ID NO: 8604 - DNA, 1311 bp, Staphylococcus aureus; identical to SEQ ID NO: 752

SEQ ID NO: 8605 - DNA, 1287 bp, Staphylococcus aureus; identical to SEQ ID NO: 753

SEQ ID NO: 8606 - DNA, 1314 bp, Staphylococcus aureus; identical to SEQ ID NO: 754

SEQ ID NO: 8607 - DNA, 930 bp, Staphylococcus aureus; identical to SEQ ID NO: 755

SEQ ID NO: 8608 - DNA, 456 bp, Staphylococcus aureus; identical to SEQ ID NO: 756

SEQ ID NO: 8609 - DNA, 123 bp, Staphylococcus aureus; identical to SEQ ID NO: 757

SEQ ID NO: 8610 - DNA, 762 bp, Staphylococcus aureus; identical to SEQ ID NO: 758

SEQ ID NO: 8611 - DNA, 948 bp, Staphylococcus aureus; identical to SEQ ID NO: 759

SEQ ID NO: 8612 - DNA, 2634 bp, Staphylococcus aureus; identical to SEQ ID NO: 760

SEQ ID NO: 8613 - DNA, 2742 bp, Staphylococcus aureus; identical to SEQ ID NO: 761

SEQ ID NO: 8614 - DNA, 2718 bp, Staphylococcus aureus; identical to SEQ ID NO: 762

SEQ ID NO: 8615 - DNA, 2622 bp, Staphylococcus aureus; identical to SEQ ID NO: 763

SEQ ID NO: 8616 - DNA, 978 bp, Staphylococcus aureus; identical to SEQ ID NO: 764

SEQ ID NO: 8617 - DNA, 705 bp, Staphylococcus aureus; identical to SEQ ID NO: 765

SEQ ID NO: 8618 - DNA, 1143 bp, Staphylococcus aureus; identical to SEQ ID NO: 766

SEQ ID NO: 8619 - DNA, 942 bp, Staphylococcus aureus; identical to SEQ ID NO: 767

SEQ ID NO: 8620 - DNA, 933 bp, Staphylococcus aureus; identical to SEQ ID NO: 768

SEQ ID NO: 8621 - DNA, 210 bp, Staphylococcus aureus; identical to SEQ ID NO: 769

SEQ ID NO: 8622 - DNA, 1389 bp, Staphylococcus aureus; identical to SEQ ID NO: 770

SEQ ID NO: 8623 - DNA, 1308 bp, Staphylococcus aureus; identical to SEQ ID NO: 771

SEQ ID NO: 8624 - DNA, 660 bp, Staphylococcus aureus; identical to SEQ ID NO: 772

SEQ ID NO: 8625 - DNA, 1431 bp, Staphylococcus aureus; identical to SEQ ID NO: 773

SEQ ID NO: 8626 - DNA, 1212 bp, Staphylococcus aureus; identical to SEQ ID NO: 774

SEQ ID NO: 8627 - DNA, 1011 bp, Staphylococcus aureus; identical to SEQ ID NO: 775

SEQ ID NO: 8628 - DNA, 258 bp, Staphylococcus aureus; identical to SEQ ID NO: 776

SEQ ID NO: 8629 - DNA, 1236 bp, Staphylococcus aureus; identical to SEQ ID NO: 777

SEQ ID NO: 8630 - DNA, 570 bp, Staphylococcus aureus; identical to SEQ ID NO: 778

SEQ ID NO: 8631 - DNA, 1410 bp, Staphylococcus aureus; identical to SEQ ID NO: 779

SEQ ID NO: 8632 - DNA, 450 bp, Staphylococcus aureus; identical to SEQ ID NO: 780

SEQ ID NO: 8633 - DNA, 2079 bp, Staphylococcus aureus; identical to SEQ ID NO: 781

SEQ ID NO: 8634 - DNA, 1497 bp, Staphylococcus aureus; identical to SEQ ID NO: 782

SEQ ID NO: 8635 - DNA, 1506 bp, Staphylococcus aureus; identical to SEQ ID NO: 783

SEQ ID NO: 8636 - DNA, 2982 bp, Staphylococcus aureus; identical to SEQ ID NO: 784

SEQ ID NO: 8637 - DNA, 1638 bp, Staphylococcus aureus; identical to SEQ ID NO: 785

SEQ ID NO: 8638 - DNA, 561 bp, Staphylococcus aureus; identical to SEQ ID NO: 786

SEQ ID NO: 8639 - DNA, 1353 bp, Staphylococcus aureus; identical to SEQ ID NO: 787

SEQ ID NO: 8640 - DNA, 1908 bp, Staphylococcus aureus; identical to SEQ ID NO: 788

SEQ ID NO: 8641 - DNA, 456 bp, Staphylococcus aureus; identical to SEQ ID NO: 789

SEQ ID NO: 8642 - DNA, 1359 bp, Staphylococcus aureus; identical to SEQ ID NO: 790

SEQ ID NO: 8643 - DNA, 1329 bp, Staphylococcus aureus; identical to SEQ ID NO: 791

SEQ ID NO: 8644 - DNA, 1164 bp, Staphylococcus aureus; identical to SEQ ID NO: 792

SEQ ID NO: 8645 - DNA, 957 bp, Staphylococcus aureus; identical to SEQ ID NO: 793

SEQ ID NO: 8646 - DNA, 750 bp, Staphylococcus aureus; identical to SEQ ID NO: 794

SEQ ID NO: 8647 - DNA, 1509 bp, Staphylococcus aureus; identical to SEQ ID NO: 795

SEQ ID NO: 8648 - DNA, 1542 bp, Staphylococcus aureus; identical to SEQ ID NO: 796

SEQ ID NO: 8649 - DNA, 2391 bp, Staphylococcus aureus; identical to SEQ ID NO: 797

SEQ ID NO: 8650 - DNA, 960 bp, Staphylococcus aureus; identical to SEQ ID NO: 798

SEQ ID NO: 8651 - DNA, 138 bp, Staphylococcus aureus; identical to SEQ ID NO: 799

SEQ ID NO: 8652 - DNA, 1569 bp, Staphylococcus aureus; identical to SEQ ID NO: 800

SEQ ID NO: 8653 - DNA, 120 bp, Staphylococcus aureus; identical to SEQ ID NO: 801

SEQ ID NO: 8654 - DNA, 1554 bp, Staphylococcus aureus; identical to SEQ ID NO: 802

SEQ ID NO: 8655 - DNA, 1809 bp, Staphylococcus aureus; identical to SEQ ID NO: 803

SEQ ID NO: 8656 - DNA, 1212 bp, Staphylococcus aureus; identical to SEQ ID NO: 804

SEQ ID NO: 8657 - DNA, 267 bp, Staphylococcus aureus; identical to SEQ ID NO: 805

SEQ ID NO: 8658 - DNA, 4056 bp, Staphylococcus aureus; identical to SEQ ID NO: 806

SEQ ID NO: 8659 - DNA, 309 bp, Staphylococcus aureus; identical to SEQ ID NO: 807

SEQ ID NO: 8660 - DNA, 744 bp, Staphylococcus aureus; identical to SEQ ID NO: 808

SEQ ID NO: 8661 - DNA, 693 bp, Staphylococcus aureus; identical to SEQ ID NO: 809

SEQ ID NO: 8662 - DNA, 612 bp, Staphylococcus aureus; identical to SEQ ID NO: 810

SEQ ID NO: 8663 - DNA, 612 bp, Staphylococcus aureus; identical to SEQ ID NO: 811

SEQ ID NO: 8664 - DNA, 1776 bp, Staphylococcus aureus; identical to SEQ ID NO: 812

SEQ ID NO: 8665 - DNA, 663 bp, Staphylococcus aureus; identical to SEQ ID NO: 813

SEQ ID NO: 8666 - DNA, 696 bp, Staphylococcus aureus; identical to SEQ ID NO: 814

SEQ ID NO: 8667 - DNA, 477 bp, Staphylococcus aureus; identical to SEQ ID NO: 815

SEQ ID NO: 8668 - DNA, 141 bp, Staphylococcus aureus; identical to SEQ ID NO: 816

SEQ ID NO: 8669 - DNA, 501 bp, Staphylococcus aureus; identical to SEQ ID NO: 817

SEQ ID NO: 8670 - DNA, 771 bp, Staphylococcus aureus; identical to SEQ ID NO: 818

SEQ ID NO: 8671 - DNA, 1965 bp, Staphylococcus aureus; identical to SEQ ID NO: 819

SEQ ID NO: 8672 - DNA, 768 bp, Staphylococcus aureus; identical to SEQ ID NO: 820

SEQ ID NO: 8673 - DNA, 1080 bp, Staphylococcus aureus; identical to SEQ ID NO: 821

SEQ ID NO: 8674 - DNA, 693 bp, Staphylococcus aureus; identical to SEQ ID NO: 822

SEQ ID NO: 8675 - DNA, 285 bp, Staphylococcus aureus; identical to SEQ ID NO: 823

SEQ ID NO: 8676 - DNA, 663 bp, Staphylococcus aureus; identical to SEQ ID NO: 824

SEQ ID NO: 8677 - DNA, 807 bp, Staphylococcus aureus; identical to SEQ ID NO: 825

SEQ ID NO: 8678 - DNA, 561 bp, Staphylococcus aureus; identical to SEQ ID NO: 826

SEQ ID NO: 8679 - DNA, 948 bp, Staphylococcus aureus; identical to SEQ ID NO: 827

SEQ ID NO: 8680 - DNA, 2043 bp, Staphylococcus aureus; identical to SEQ ID NO: 828

SEQ ID NO: 8681 - DNA, 390 bp, Staphylococcus aureus; identical to SEQ ID NO: 829

SEQ ID NO: 8682 - DNA, 732 bp, Staphylococcus aureus; identical to SEQ ID NO: 830

SEQ ID NO: 8683 - DNA, 213 bp, Staphylococcus aureus; identical to SEQ ID NO: 831

SEQ ID NO: 8684 - DNA, 2008 bp, Staphylococcus aureus; identical to SEQ ID NO: 832

SEQ ID NO: 8685 - DNA, 408 bp, Staphylococcus aureus; identical to SEQ ID NO: 833

SEQ ID NO: 8686 - DNA, 204 bp, Staphylococcus aureus; identical to SEQ ID NO: 834

SEQ ID NO: 8687 - DNA, 963 bp, Staphylococcus aureus; identical to SEQ ID NO: 835

SEQ ID NO: 8688 - DNA, 705 bp, Staphylococcus aureus; identical to SEQ ID NO: 836

SEQ ID NO: 8689 - DNA, 219 bp, Staphylococcus aureus; identical to SEQ ID NO: 837

SEQ ID NO: 8690 - DNA, 579 bp, Staphylococcus aureus; identical to SEQ ID NO: 838

SEQ ID NO: 8691 - DNA, 432 bp, Staphylococcus aureus; identical to SEQ ID NO: 839

SEQ ID NO: 8692 - DNA, 579 bp, Staphylococcus aureus; identical to SEQ ID NO: 840

SEQ ID NO: 8693 - DNA, 1167 bp, Staphylococcus aureus; identical to SEQ ID NO: 841

SEQ ID NO: 8694 - DNA, 1014 bp, Staphylococcus aureus; identical to SEQ ID NO: 842

SEQ ID NO: 8695 - DNA, 2106 bp, Staphylococcus aureus; identical to SEQ ID NO: 843

SEQ ID NO: 8696 - DNA, 1257 bp, Staphylococcus aureus; identical to SEQ ID NO: 844

SEQ ID NO: 8697 - DNA, 615 bp, Staphylococcus aureus; identical to SEQ ID NO: 845

SEQ ID NO: 8698 - DNA, 144 bp, Staphylococcus aureus; identical to SEQ ID NO: 846

SEQ ID NO: 8699 - DNA, 192 bp, Staphylococcus aureus; identical to SEQ ID NO: 847

SEQ ID NO: 8700 - DNA, 819 bp, Staphylococcus aureus; identical to SEQ ID NO: 848

SEQ ID NO: 8701 - DNA, 123 bp, Staphylococcus aureus; identical to SEQ ID NO: 849

SEQ ID NO: 8702 - DNA, 2409 bp, Staphylococcus aureus; identical to SEQ ID NO: 850

SEQ ID NO: 8703 - DNA, 1125 bp, Staphylococcus aureus; identical to SEQ ID NO: 851

SEQ ID NO: 8704 - DNA, 207 bp, Staphylococcus aureus; identical to SEQ ID NO: 852

SEQ ID NO: 8705 - DNA, 498 bp, Staphylococcus aureus; identical to SEQ ID NO: 853

SEQ ID NO: 8706 - DNA, 579 bp, Staphylococcus aureus; identical to SEQ ID NO: 854

SEQ ID NO: 8707 - DNA, 537 bp, Staphylococcus aureus; identical to SEQ ID NO: 855

SEQ ID NO: 8708 - DNA, 201 bp, Staphylococcus aureus; identical to SEQ ID NO: 856

SEQ ID NO: 8709 - DNA, 834 bp, Staphylococcus aureus; identical to SEQ ID NO: 857

SEQ ID NO: 8710 - DNA, 303 bp, Staphylococcus aureus; identical to SEQ ID NO: 858

SEQ ID NO: 8711 - DNA, 603 bp, Staphylococcus aureus; identical to SEQ ID NO: 859

SEQ ID NO: 8712 - DNA, 1713 bp, Staphylococcus aureus; identical to SEQ ID NO: 860

SEQ ID NO: 8713 - DNA, 555 bp, Staphylococcus aureus; identical to SEQ ID NO: 861

SEQ ID NO: 8714 - DNA, 231 bp, Staphylococcus aureus; identical to SEQ ID NO: 862

SEQ ID NO: 8715 - DNA, 849 bp, Staphylococcus aureus; identical to SEQ ID NO: 863

SEQ ID NO: 8716 - DNA, 558 bp, Staphylococcus aureus; identical to SEQ ID NO: 864

SEQ ID NO: 8717 - DNA, 972 bp, Staphylococcus aureus; identical to SEQ ID NO: 865

SEQ ID NO: 8718 - DNA, 705 bp, Staphylococcus aureus; identical to SEQ ID NO: 866

SEQ ID NO: 8719 - DNA, 768 bp, Staphylococcus aureus; identical to SEQ ID NO: 867

SEQ ID NO: 8720 - DNA, 339 bp, Staphylococcus aureus; identical to SEQ ID NO: 868

SEQ ID NO: 8721 - DNA, 1011 bp, Staphylococcus aureus; identical to SEQ ID NO: 869

SEQ ID NO: 8722 - DNA, 909 bp, Staphylococcus aureus; identical to SEQ ID NO: 870

SEQ ID NO: 8723 - DNA, 831 bp, Staphylococcus aureus; identical to SEQ ID NO: 871

SEQ ID NO: 8724 - DNA, 513 bp, Staphylococcus aureus; identical to SEQ ID NO: 872

SEQ ID NO: 8725 - DNA, 183 bp, Staphylococcus aureus; identical to SEQ ID NO: 873

SEQ ID NO: 8726 - DNA, 1065 bp, Staphylococcus aureus; identical to SEQ ID NO: 874

SEQ ID NO: 8727 - DNA, 498 bp, Staphylococcus aureus; identical to SEQ ID NO: 875

SEQ ID NO: 8728 - DNA, 1098 bp, Staphylococcus aureus; identical to SEQ ID NO: 876

SEQ ID NO: 8729 - DNA, 705 bp, Staphylococcus aureus; identical to SEQ ID NO: 877

SEQ ID NO: 8730 - DNA, 276 bp, Staphylococcus aureus; identical to SEQ ID NO: 878

SEQ ID NO: 8731 - DNA, 570 bp, Staphylococcus aureus; identical to SEQ ID NO: 879

SEQ ID NO: 8732 - DNA, 570 bp, Staphylococcus aureus; identical to SEQ ID NO: 880

SEQ ID NO: 8733 - DNA, 96 bp, Staphylococcus aureus; identical to SEQ ID NO: 881

SEQ ID NO: 8734 - DNA, 450 bp, Staphylococcus aureus; identical to SEQ ID NO: 882

SEQ ID NO: 8735 - DNA, 381 bp, Staphylococcus aureus; identical to SEQ ID NO: 883

SEQ ID NO: 8736 - DNA, 1683 bp, Staphylococcus aureus; identical to SEQ ID NO: 884

SEQ ID NO: 8737 - DNA, 354 bp, Staphylococcus aureus; identical to SEQ ID NO: 885

SEQ ID NO: 8738 - DNA, 861 bp, Staphylococcus aureus; identical to SEQ ID NO: 886

SEQ ID NO: 8739 - DNA, 840 bp, Staphylococcus aureus; identical to SEQ ID NO: 887

SEQ ID NO: 8740 - DNA, 1449 bp, Staphylococcus aureus; identical to SEQ ID NO: 888

SEQ ID NO: 8741 - DNA, 720 bp, Staphylococcus aureus; identical to SEQ ID NO: 889

SEQ ID NO: 8742 - DNA, 417 bp, Staphylococcus aureus; identical to SEQ ID NO: 890

SEQ ID NO: 8743 - DNA, 1878 bp, Staphylococcus aureus; identical to SEQ ID NO: 891

SEQ ID NO: 8744 - DNA, 891 bp, Staphylococcus aureus; identical to SEQ ID NO: 892

SEQ ID NO: 8745 - DNA, 1380 bp, Staphylococcus aureus; identical to SEQ ID NO: 893

SEQ ID NO: 8746 - DNA, 354 bp, Staphylococcus aureus; identical to SEQ ID NO: 894

SEQ ID NO: 8747 - DNA, 564 bp, Staphylococcus aureus; identical to SEQ ID NO: 895

SEQ ID NO: 8748 - DNA, 138 bp, Staphylococcus aureus; identical to SEQ ID NO: 896

SEQ ID NO: 8749 - DNA, 153 bp, Staphylococcus aureus; identical to SEQ ID NO: 897

SEQ ID NO: 8750 - DNA, 1272 bp, Staphylococcus aureus; identical to SEQ ID NO: 898

SEQ ID NO: 8751 - DNA, 273 bp, Staphylococcus aureus; identical to SEQ ID NO: 899

SEQ ID NO: 8752 - DNA, 1425 bp, Staphylococcus aureus; identical to SEQ ID NO: 900

SEQ ID NO: 8753 - DNA, 474 bp, Staphylococcus aureus; identical to SEQ ID NO: 901

SEQ ID NO: 8754 - DNA, 1875 bp, Staphylococcus aureus; identical to SEQ ID NO: 902

SEQ ID NO: 8755 - DNA, 1953 bp, Staphylococcus aureus; identical to SEQ ID NO: 903

SEQ ID NO: 8756 - DNA, 102 bp, Staphylococcus aureus; identical to SEQ ID NO: 904

SEQ ID NO: 8757 - DNA, 129 bp, Staphylococcus aureus; identical to SEQ ID NO: 905

SEQ ID NO: 8758 - DNA, 939 bp, Staphylococcus aureus; identical to SEQ ID NO: 906

SEQ ID NO: 8759 - DNA, 1860 bp, Staphylococcus aureus; identical to SEQ ID NO: 907

SEQ ID NO: 8760 - DNA, 360 bp, Staphylococcus aureus; identical to SEQ ID NO: 908

SEQ ID NO: 8761 - DNA, 1239 bp, Staphylococcus aureus; identical to SEQ ID NO: 909

SEQ ID NO: 8762 - DNA, 1269 bp, Staphylococcus aureus; identical to SEQ ID NO: 910

SEQ ID NO: 8763 - DNA, 306 bp, Staphylococcus aureus; identical to SEQ ID NO: 911

SEQ ID NO: 8764 - DNA, 900 bp, Staphylococcus aureus; identical to SEQ ID NO: 912

SEQ ID NO: 8765 - DNA, 1053 bp, Staphylococcus aureus; identical to SEQ ID NO: 913

SEQ ID NO: 8766 - DNA, 96 bp, Staphylococcus aureus; identical to SEQ ID NO: 914

SEQ ID NO: 8767 - DNA, 957 bp, Staphylococcus aureus; identical to SEQ ID NO: 915

SEQ ID NO: 8768 - DNA, 639 bp, Staphylococcus aureus; identical to SEQ ID NO: 916

SEQ ID NO: 8769 - DNA, 465 bp, Staphylococcus aureus; identical to SEQ ID NO: 917

SEQ ID NO: 8770 - DNA, 1419 bp, Staphylococcus aureus; identical to SEQ ID NO: 918

SEQ ID NO: 8771 - DNA, 204 bp, Staphylococcus aureus; identical to SEQ ID NO: 919

SEQ ID NO: 8772 - DNA, 1053 bp, Staphylococcus aureus; identical to SEQ ID NO: 920

SEQ ID NO: 8773 - DNA, 111 bp, Staphylococcus aureus; identical to SEQ ID NO: 921

SEQ ID NO: 8774 - DNA, 141 bp, Staphylococcus aureus; identical to SEQ ID NO: 922

SEQ ID NO: 8775 - DNA, 840 bp, Staphylococcus aureus; identical to SEQ ID NO: 923

SEQ ID NO: 8776 - DNA, 360 bp, Staphylococcus aureus; identical to SEQ ID NO: 924

SEQ ID NO: 8777 - DNA, 165 bp, Staphylococcus aureus; identical to SEQ ID NO: 925

SEQ ID NO: 8778 - DNA, 327 bp, Staphylococcus aureus; identical to SEQ ID NO: 926

SEQ ID NO: 8779 - DNA, 747 bp, Staphylococcus aureus; identical to SEQ ID NO: 927

SEQ ID NO: 8780 - DNA, 759 bp, Staphylococcus aureus; identical to SEQ ID NO: 928

SEQ ID NO: 8781 - DNA, 1881 bp, Staphylococcus aureus; identical to SEQ ID NO: 929

SEQ ID NO: 8782 - DNA, 96 bp, Staphylococcus aureus; identical to SEQ ID NO: 930

SEQ ID NO: 8783 - DNA, 195 bp, Staphylococcus aureus; identical to SEQ ID NO: 931

SEQ ID NO: 8784 - DNA, 156 bp, Staphylococcus aureus; identical to SEQ ID NO: 932

SEQ ID NO: 8785 - DNA, 537 bp, Staphylococcus aureus; identical to SEQ ID NO: 933

SEQ ID NO: 8786 - DNA, 141 bp, Staphylococcus aureus; identical to SEQ ID NO: 934

SEQ ID NO: 8787 - DNA, 228 bp, Staphylococcus aureus; identical to SEQ ID NO: 935

SEQ ID NO: 8788 - DNA, 117 bp, Staphylococcus aureus; identical to SEQ ID NO: 936

SEQ ID NO: 8789 - DNA, 1077 bp, Staphylococcus aureus; identical to SEQ ID NO: 937

SEQ ID NO: 8790 - DNA, 846 bp, Staphylococcus aureus; identical to SEQ ID NO: 938

SEQ ID NO: 8791 - DNA, 126 bp, Staphylococcus aureus; identical to SEQ ID NO: 939

SEQ ID NO: 8792 - DNA, 99 bp, Staphylococcus aureus; identical to SEQ ID NO: 940

SEQ ID NO: 8793 - DNA, 102 bp, Staphylococcus aureus; identical to SEQ ID NO: 941

SEQ ID NO: 8794 - DNA, 90 bp, Staphylococcus aureus; identical to SEQ ID NO: 942

SEQ ID NO: 8795 - DNA, 183 bp, Staphylococcus aureus; identical to SEQ ID NO: 943

SEQ ID NO: 8796 - DNA, 1041 bp, Staphylococcus aureus; identical to SEQ ID NO: 944

SEQ ID NO: 8797 - DNA, 183 bp, Staphylococcus aureus; identical to SEQ ID NO: 945

SEQ ID NO: 8798 - DNA, 102 bp, Staphylococcus aureus; identical to SEQ ID NO: 946

SEQ ID NO: 8799 - DNA, 105 bp, Staphylococcus aureus; identical to SEQ ID NO: 947

SEQ ID NO: 8800 - DNA, 132 bp, Staphylococcus aureus; identical to SEQ ID NO: 948

SEQ ID NO: 8801 - DNA, 111 bp, Staphylococcus aureus; identical to SEQ ID NO: 949

SEQ ID NO: 8802 - DNA, 1401 bp, Staphylococcus aureus; identical to SEQ ID NO: 950

SEQ ID NO: 8803 - DNA, 1068 bp, Staphylococcus aureus; identical to SEQ ID NO: 951

SEQ ID NO: 8804 - DNA, 969 bp, Staphylococcus aureus; identical to SEQ ID NO: 952

SEQ ID NO: 8805 - DNA, 309 bp, Staphylococcus aureus; identical to SEQ ID NO: 953

SEQ ID NO: 8806 - DNA, 114 bp, Staphylococcus aureus; identical to SEQ ID NO: 954

SEQ ID NO: 8807 - DNA, 480 bp, Staphylococcus aureus; identical to SEQ ID NO: 955

SEQ ID NO: 8808 - DNA, 126 bp, Staphylococcus aureus; identical to SEQ ID NO: 956

SEQ ID NO: 8809 - DNA, 90 bp, Staphylococcus aureus; identical to SEQ ID NO: 957

SEQ ID NO: 8810 - DNA, 1923 bp, Staphylococcus aureus; identical to SEQ ID NO: 958

SEQ ID NO: 8811 - DNA, 414 bp, Staphylococcus aureus; identical to SEQ ID NO: 959

SEQ ID NO: 8812 - DNA, 234 bp, Staphylococcus aureus; identical to SEQ ID NO: 960

SEQ ID NO: 8813 - DNA, 270 bp, Staphylococcus aureus; identical to SEQ ID NO: 961

SEQ ID NO: 8814 - DNA, 99 bp, Staphylococcus aureus; identical to SEQ ID NO: 962

SEQ ID NO: 8815 - DNA, 120 bp, Staphylococcus aureus; identical to SEQ ID NO: 963

SEQ ID NO: 8816 - DNA, 93 bp, Staphylococcus aureus; identical to SEQ ID NO: 964

SEQ ID NO: 8817 - DNA, 270 bp, Staphylococcus aureus; identical to SEQ ID NO: 965

SEQ ID NO: 8818 - DNA, 705 bp, Staphylococcus aureus; identical to SEQ ID NO: 966

SEQ ID NO: 8819 - DNA, 699 bp, Staphylococcus aureus; identical to SEQ ID NO: 967

SEQ ID NO: 8820 - DNA, 912 bp, Staphylococcus aureus; identical to SEQ ID NO: 968

SEQ ID NO: 8821 - DNA, 240 bp, Staphylococcus aureus; identical to SEQ ID NO: 969

SEQ ID NO: 8822 - DNA, 303 bp, Staphylococcus aureus; identical to SEQ ID NO: 970

SEQ ID NO: 8823 - DNA, 318 bp, Staphylococcus aureus; identical to SEQ ID NO: 971

SEQ ID NO: 8824 - DNA, 339 bp, Staphylococcus aureus; identical to SEQ ID NO: 972

SEQ ID NO: 8825 - DNA, 1380 bp, Staphylococcus aureus; identical to SEQ ID NO: 973

SEQ ID NO: 8826 - DNA, 762 bp, Staphylococcus aureus; identical to SEQ ID NO: 974

SEQ ID NO: 8827 - DNA, 141 bp, Staphylococcus aureus; identical to SEQ ID NO: 975

SEQ ID NO: 8828 - DNA, 192 bp, Staphylococcus aureus; identical to SEQ ID NO: 976

SEQ ID NO: 8829 - DNA, 126 bp, Staphylococcus aureus; identical to SEQ ID NO: 977

SEQ ID NO: 8830 - DNA, 171 bp, Staphylococcus aureus; identical to SEQ ID NO: 978

SEQ ID NO: 8831 - DNA, 153 bp, Staphylococcus aureus; identical to SEQ ID NO: 979

SEQ ID NO: 8832 - DNA, 282 bp, Staphylococcus aureus; identical to SEQ ID NO: 980

SEQ ID NO: 8833 - DNA, 2250 bp, Staphylococcus aureus; identical to SEQ ID NO: 981

SEQ ID NO: 8834 - DNA, 141 bp, Staphylococcus aureus; identical to SEQ ID NO: 982

SEQ ID NO: 8835 - DNA, 177 bp, Staphylococcus aureus; identical to SEQ ID NO: 983

SEQ ID NO: 8836 - DNA, 105 bp, Staphylococcus aureus; identical to SEQ ID NO: 984

SEQ ID NO: 8837 - DNA, 210 bp, Staphylococcus aureus; identical to SEQ ID NO: 985

SEQ ID NO: 8838 - DNA, 144 bp, Staphylococcus aureus; identical to SEQ ID NO: 986

SEQ ID NO: 8839 - DNA, 756 bp, Staphylococcus aureus; identical to SEQ ID NO: 987

SEQ ID NO: 8840 - DNA, 417 bp, Staphylococcus aureus; identical to SEQ ID NO: 988

SEQ ID NO: 8841 - DNA, 159 bp, Staphylococcus aureus; identical to SEQ ID NO: 989

SEQ ID NO: 8842 - DNA, 270 bp, Staphylococcus aureus; identical to SEQ ID NO: 990

SEQ ID NO: 8843 - DNA, 93 bp, Staphylococcus aureus; identical to SEQ ID NO: 991

SEQ ID NO: 8844 - DNA, 132 bp, Staphylococcus aureus; identical to SEQ ID NO: 992

SEQ ID NO: 8845 - DNA, 210 bp, Staphylococcus aureus; identical to SEQ ID NO: 993

SEQ ID NO: 8846 - DNA, 90 bp, Staphylococcus aureus; identical to SEQ ID NO: 994

SEQ ID NO: 8847 - DNA, 1764 bp, Staphylococcus aureus; identical to SEQ ID NO: 995

SEQ ID NO: 8848 - DNA, 783 bp, Staphylococcus aureus; identical to SEQ ID NO: 996

SEQ ID NO: 8849 - DNA, 201 bp, Staphylococcus aureus; identical to SEQ ID NO: 997

SEQ ID NO: 8850 - DNA, 81 bp, Staphylococcus aureus; identical to SEQ ID NO: 998

SEQ ID NO: 8851 - DNA, 1113 bp, Staphylococcus aureus; identical to SEQ ID NO: 999

SEQ ID NO: 8852 - DNA, 51 bp, Staphylococcus aureus; identical to SEQ ID NO: 1000

SEQ ID NO: 8853 - DNA, 885 bp, Staphylococcus aureus; identical to SEQ ID NO: 1001

SEQ ID NO: 8854 - DNA, 102 bp, Staphylococcus aureus; identical to SEQ ID NO: 1002

SEQ ID NO: 8855 - DNA, 975 bp, Staphylococcus aureus; identical to SEQ ID NO: 1003

SEQ ID NO: 8856 - DNA, 1143 bp, Staphylococcus aureus; identical to SEQ ID NO: 1004

SEQ ID NO: 8857 - DNA, 273 bp, Staphylococcus aureus; identical to SEQ ID NO: 1005

SEQ ID NO: 8858 - DNA, 111 bp, Staphylococcus aureus; identical to SEQ ID NO: 1006

SEQ ID NO: 8859 - DNA, 219 bp, Staphylococcus aureus; identical to SEQ ID NO: 1007

SEQ ID NO: 8860 - DNA, 1383 bp, Staphylococcus aureus; identical to SEQ ID NO: 1008

SEQ ID NO: 8861 - DNA, 810 bp, Staphylococcus aureus; identical to SEQ ID NO: 1009

SEQ ID NO: 8862 - DNA, 108 bp, Staphylococcus aureus; identical to SEQ ID NO: 1010

SEQ ID NO: 8863 - DNA, 1512 bp, Staphylococcus aureus; identical to SEQ ID NO: 1011

SEQ ID NO: 8864 - DNA, 936 bp, Staphylococcus aureus; identical to SEQ ID NO: 1012

SEQ ID NO: 8865 - DNA, 1215 bp, Staphylococcus aureus; identical to SEQ ID NO: 1013

SEQ ID NO: 8866 - DNA, 222 bp, Staphylococcus aureus; identical to SEQ ID NO: 1014

SEQ ID NO: 8867 - DNA, 183 bp, Staphylococcus aureus; identical to SEQ ID NO: 1015

SEQ ID NO: 8868 - DNA, 111 bp, Staphylococcus aureus; identical to SEQ ID NO: 1016

SEQ ID NO: 8869 - DNA, 1176 bp, Staphylococcus aureus; identical to SEQ ID NO: 1017

SEQ ID NO: 8870 - DNA, 198 bp, Staphylococcus aureus; identical to SEQ ID NO: 1018

SEQ ID NO: 8871 - DNA, 177 bp, Staphylococcus aureus; identical to SEQ ID NO: 1019

SEQ ID NO: 8872 - DNA, 2097 bp, Staphylococcus aureus; identical to SEQ ID NO: 1020

SEQ ID NO: 8873 - DNA, 663 bp, Staphylococcus aureus; identical to SEQ ID NO: 1021

SEQ ID NO: 8874 - DNA, 93 bp, Staphylococcus aureus; identical to SEQ ID NO: 1022

SEQ ID NO: 8875 - DNA, 174 bp, Staphylococcus aureus; identical to SEQ ID NO: 1023

SEQ ID NO: 8876 - DNA, 129 bp, Staphylococcus aureus; identical to SEQ ID NO: 1024

SEQ ID NO: 8877 - DNA, 192 bp, Staphylococcus aureus; identical to SEQ ID NO: 1025

SEQ ID NO: 8878 - DNA, 156 bp, Staphylococcus aureus; identical to SEQ ID NO: 1026

SEQ ID NO: 8879 - DNA, 150 bp, Staphylococcus aureus; identical to SEQ ID NO: 1027

SEQ ID NO: 8880 - DNA, 120 bp, Staphylococcus aureus; identical to SEQ ID NO: 1028

SEQ ID NO: 8881 - DNA, 468 bp, Staphylococcus aureus; identical to SEQ ID NO: 1029

SEQ ID NO: 8882 - DNA, 618 bp, Staphylococcus aureus; identical to SEQ ID NO: 1030

SEQ ID NO: 8883 - DNA, 192 bp, Staphylococcus aureus; identical to SEQ ID NO: 1031

SEQ ID NO: 8884 - DNA, 255 bp, Staphylococcus aureus; identical to SEQ ID NO: 1032

SEQ ID NO: 8885 - DNA, 234 bp, Staphylococcus aureus; identical to SEQ ID NO: 1033

SEQ ID NO: 8886 - DNA, 279 bp, Staphylococcus aureus; identical to SEQ ID NO: 1034

SEQ ID NO: 8887 - DNA, 1491 bp, Staphylococcus aureus; identical to SEQ ID NO: 1035

SEQ ID NO: 8888 - DNA, 359 bp, Staphylococcus aureus; identical to SEQ ID NO: 1036

SEQ ID NO: 8889 - DNA, 72 bp, Staphylococcus aureus; identical to SEQ ID NO: 1037

SEQ ID NO: 8890 - DNA, 89 bp, Staphylococcus aureus; identical to SEQ ID NO: 1038

SEQ ID NO: 8891 - DNA, 75 bp, Staphylococcus aureus; identical to SEQ ID NO: 1039

SEQ ID NO: 8892 - DNA, 74 bp, Staphylococcus aureus; identical to SEQ ID NO: 1040

SEQ ID NO: 8893 - DNA, 1260 bp, Staphylococcus aureus; identical to SEQ ID NO: 1041

SEQ ID NO: 8894 - DNA, 879 bp, Staphylococcus aureus; identical to SEQ ID NO: 1042

SEQ ID NO: 8895 - DNA, 89 bp, Staphylococcus aureus; identical to SEQ ID NO: 1043

SEQ ID NO: 8896 - DNA, 74 bp, Staphylococcus aureus; identical to SEQ ID NO: 1044

SEQ ID NO: 8897 - DNA, 76 bp, Staphylococcus aureus; identical to SEQ ID NO: 1045

SEQ ID NO: 8898 - DNA, 73 bp, Staphylococcus aureus; identical to SEQ ID NO: 1046

SEQ ID NO: 8899 - DNA, 74 bp, Staphylococcus aureus; identical to SEQ ID NO: 1047

SEQ ID NO: 8900 - DNA, 75 bp, Staphylococcus aureus; identical to SEQ ID NO: 1048

SEQ ID NO: 8901 - DNA, 84 bp, Staphylococcus aureus; identical to SEQ ID NO: 1049

SEQ ID NO: 8902 - DNA, 74 bp, Staphylococcus aureus; identical to SEQ ID NO: 1050

SEQ ID NO: 8903 - DNA, 77 bp, Staphylococcus aureus; identical to SEQ ID NO: 1051

SEQ ID NO: 8904 - DNA, 82 bp, Staphylococcus aureus; identical to SEQ ID NO: 1052

SEQ ID NO: 8905 - DNA, 86 bp, Staphylococcus aureus; identical to SEQ ID NO: 1053

SEQ ID NO: 8906 - DNA, 1056 bp, Staphylococcus aureus; identical to SEQ ID NO: 1054

SEQ ID NO: 8907 - DNA, 666 bp, Staphylococcus aureus; identical to SEQ ID NO: 1055

SEQ ID NO: 8908 - DNA, 363 bp, Staphylococcus aureus; identical to SEQ ID NO: 1056

SEQ ID NO: 8909 - DNA, 1044 bp, Staphylococcus aureus; identical to SEQ ID NO: 1057

SEQ ID NO: 8910 - DNA, 168 bp, Staphylococcus aureus; identical to SEQ ID NO: 1058

SEQ ID NO: 8911 - DNA, 675 bp, Staphylococcus aureus; identical to SEQ ID NO: 1059

SEQ ID NO: 8912 - DNA, 831 bp, Staphylococcus aureus; identical to SEQ ID NO: 1060

SEQ ID NO: 8913 - DNA, 1284 bp, Staphylococcus aureus; identical to SEQ ID NO: 1061

SEQ ID NO: 8914 - DNA, 1038 bp, Staphylococcus aureus; identical to SEQ ID NO: 1062

SEQ ID NO: 8915 - DNA, 1026 bp, Staphylococcus aureus; identical to SEQ ID NO: 1063

SEQ ID NO: 8916 - DNA, 1824 bp, Staphylococcus aureus; identical to SEQ ID NO: 1064

SEQ ID NO: 8917 - DNA, 3468 bp, Staphylococcus aureus; identical to SEQ ID NO: 1065

SEQ ID NO: 8918 - DNA, 711 bp, Staphylococcus aureus; identical to SEQ ID NO: 1066

SEQ ID NO: 8919 - DNA, 1542 bp, Staphylococcus aureus; identical to SEQ ID NO: 1067

SEQ ID NO: 8920 - DNA, 636 bp, Staphylococcus aureus; identical to SEQ ID NO: 1068

SEQ ID NO: 8921 - DNA, 1170 bp, Staphylococcus aureus; identical to SEQ ID NO: 1069

SEQ ID NO: 8922 - DNA, 753 bp, Staphylococcus aureus; identical to SEQ ID NO: 1070

SEQ ID NO: 8923 - DNA, 207 bp, Staphylococcus aureus; identical to SEQ ID NO: 1071

SEQ ID NO: 8924 - DNA, 783 bp, Staphylococcus aureus; identical to SEQ ID NO: 1072

SEQ ID NO: 8925 - DNA, 258 bp, Staphylococcus aureus; identical to SEQ ID NO: 1073

SEQ ID NO: 8926 - DNA, 921 bp, Staphylococcus aureus; identical to SEQ ID NO: 1074

SEQ ID NO: 8927 - DNA, 717 bp, Staphylococcus aureus; identical to SEQ ID NO: 1075

SEQ ID NO: 8928 - DNA, 1323 bp, Staphylococcus aureus; identical to SEQ ID NO: 1076

SEQ ID NO: 8929 - DNA, 186 bp, Staphylococcus aureus; identical to SEQ ID NO: 1077

SEQ ID NO: 8930 - DNA, 1026 bp, Staphylococcus aureus; identical to SEQ ID NO: 1078

SEQ ID NO: 8931 - DNA, 441 bp, Staphylococcus aureus; identical to SEQ ID NO: 1079

SEQ ID NO: 8932 - DNA, 691 bp, Staphylococcus aureus; identical to SEQ ID NO: 1080

SEQ ID NO: 8933 - DNA, 780 bp, Staphylococcus aureus; identical to SEQ ID NO: 1081

SEQ ID NO: 8934 - DNA, 537 bp, Staphylococcus aureus; identical to SEQ ID NO: 1082

SEQ ID NO: 8935 - DNA, 984 bp, Staphylococcus aureus; identical to SEQ ID NO: 1083

SEQ ID NO: 8936 - DNA, 243 bp, Staphylococcus aureus; identical to SEQ ID NO: 1084

SEQ ID NO: 8937 - DNA, 450 bp, Staphylococcus aureus; identical to SEQ ID NO: 1085

SEQ ID NO: 8938 - DNA, 1689 bp, Staphylococcus aureus; identical to SEQ ID NO: 1086

SEQ ID NO: 8939 - DNA, 375 bp, Staphylococcus aureus; identical to SEQ ID NO: 1087

SEQ ID NO: 8940 - DNA, 1723 bp, Staphylococcus aureus; identical to SEQ ID NO: 1088

SEQ ID NO: 8941 - DNA, 120 bp, Staphylococcus aureus; identical to SEQ ID NO: 1089

SEQ ID NO: 8942 - DNA, 705 bp, Staphylococcus aureus; identical to SEQ ID NO: 1090

SEQ ID NO: 8943 - DNA, 696 bp, Staphylococcus aureus; identical to SEQ ID NO: 1091

SEQ ID NO: 8944 - DNA, 696 bp, Staphylococcus aureus; identical to SEQ ID NO: 1092

SEQ ID NO: 8945 - DNA, 699 bp, Staphylococcus aureus; identical to SEQ ID NO: 1093

SEQ ID NO: 8946 - DNA, 1755 bp, Staphylococcus aureus; identical to SEQ ID NO: 1094

SEQ ID NO: 8947 - DNA, 894 bp, Staphylococcus aureus; identical to SEQ ID NO: 1095

SEQ ID NO: 8948 - DNA, 741 bp, Staphylococcus aureus; identical to SEQ ID NO: 1096

SEQ ID NO: 8949 - DNA, 114 bp, Staphylococcus aureus; identical to SEQ ID NO: 1097

SEQ ID NO: 8950 - DNA, 702 bp, Staphylococcus aureus; identical to SEQ ID NO: 1098

SEQ ID NO: 8951 - DNA, 1053 bp, Staphylococcus aureus; identical to SEQ ID NO: 1099

SEQ ID NO: 8952 - DNA, 444 bp, Staphylococcus aureus; identical to SEQ ID NO: 1100

SEQ ID NO: 8953 - DNA, 351 bp, Staphylococcus aureus; identical to SEQ ID NO: 1101

SEQ ID NO: 8954 - DNA, 468 bp, Staphylococcus aureus; identical to SEQ ID NO: 1102

SEQ ID NO: 8955 - DNA, 492 bp, Staphylococcus aureus; identical to SEQ ID NO: 1103

SEQ ID NO: 8956 - DNA, 756 bp, Staphylococcus aureus; identical to SEQ ID NO: 1104

SEQ ID NO: 8957 - DNA, 255 bp, Staphylococcus aureus; identical to SEQ ID NO: 1105

SEQ ID NO: 8958 - DNA, 153 bp, Staphylococcus aureus; identical to SEQ ID NO: 1106

SEQ ID NO: 8959 - DNA, 99 bp, Staphylococcus aureus; identical to SEQ ID NO: 1107

SEQ ID NO: 8960 - DNA, 702 bp, Staphylococcus aureus; identical to SEQ ID NO: 1108

SEQ ID NO: 8961 - DNA, 930 bp, Staphylococcus aureus; identical to SEQ ID NO: 1109

SEQ ID NO: 8962 - DNA, 3786 bp, Staphylococcus aureus; identical to SEQ ID NO: 1110

SEQ ID NO: 8963 - DNA, 3783 bp, Staphylococcus aureus; identical to SEQ ID NO: 1111

SEQ ID NO: 8964 - DNA, 3783 bp, Staphylococcus aureus; identical to SEQ ID NO: 1112

SEQ ID NO: 8965 - DNA, 1491 bp, Staphylococcus aureus; identical to SEQ ID NO: 1113

SEQ ID NO: 8966 - DNA, 1485 bp, Staphylococcus aureus; identical to SEQ ID NO: 1114

SEQ ID NO: 8967 - DNA, 4530 bp, Staphylococcus aureus; identical to SEQ ID NO: 1115

SEQ ID NO: 8968 - DNA, 4651 bp, Staphylococcus aureus; identical to SEQ ID NO: 1116

SEQ ID NO: 8969 - DNA, 120 bp, Staphylococcus aureus; identical to SEQ ID NO: 1117

SEQ ID NO: 8970 - DNA, 447 bp, Staphylococcus aureus; identical to SEQ ID NO: 1118

SEQ ID NO: 8971 - DNA, 96 bp, Staphylococcus aureus; identical to SEQ ID NO: 1119

SEQ ID NO: 8972 - DNA, 954 bp, Staphylococcus aureus; identical to SEQ ID NO: 1120

SEQ ID NO: 8973 - DNA, 381 bp, Staphylococcus aureus; identical to SEQ ID NO: 1121

SEQ ID NO: 8974 - DNA, 378 bp, Staphylococcus aureus; identical to SEQ ID NO: 1122

SEQ ID NO: 8975 - DNA, 342 bp, Staphylococcus aureus; identical to SEQ ID NO: 1123

SEQ ID NO: 8976 - DNA, 333 bp, Staphylococcus aureus; identical to SEQ ID NO: 1124

SEQ ID NO: 8977 - DNA, 792 bp, Staphylococcus aureus; identical to SEQ ID NO: 1125

SEQ ID NO: 8978 - DNA, 837 bp, Staphylococcus aureus; identical to SEQ ID NO: 1126

SEQ ID NO: 8979 - DNA, 843 bp, Staphylococcus aureus; identical to SEQ ID NO: 1127

SEQ ID NO: 8980 - DNA, 159 bp, Staphylococcus aureus; identical to SEQ ID NO: 1128

SEQ ID NO: 8981 - DNA, 1248 bp, Staphylococcus aureus; identical to SEQ ID NO: 1129

SEQ ID NO: 8982 - DNA, 93 bp, Staphylococcus aureus; identical to SEQ ID NO: 1130

SEQ ID NO: 8983 - DNA, 597 bp, Staphylococcus aureus; identical to SEQ ID NO: 1131

SEQ ID NO: 8984 - DNA, 1251 bp, Staphylococcus aureus; identical to SEQ ID NO: 1132

SEQ ID NO: 8985 - DNA, 1695 bp, Staphylococcus aureus; identical to SEQ ID NO: 1133

SEQ ID NO: 8986 - DNA, 468 bp, Staphylococcus aureus; identical to SEQ ID NO: 1134

SEQ ID NO: 8987 - DNA, 354 bp, Staphylococcus aureus; identical to SEQ ID NO: 1135

SEQ ID NO: 8988 - DNA, 489 bp, Staphylococcus aureus; identical to SEQ ID NO: 1136

SEQ ID NO: 8989 - DNA, 471 bp, Staphylococcus aureus; identical to SEQ ID NO: 1137

SEQ ID NO: 8990 - DNA, 204 bp, Staphylococcus aureus; identical to SEQ ID NO: 1138

SEQ ID NO: 8991 - DNA, 1437 bp, Staphylococcus aureus; identical to SEQ ID NO: 1139

SEQ ID NO: 8992 - DNA, 744 bp, Staphylococcus aureus; identical to SEQ ID NO: 1140

SEQ ID NO: 8993 - DNA, 171 bp, Staphylococcus aureus; identical to SEQ ID NO: 1141

SEQ ID NO: 8994 - DNA, 303 bp, Staphylococcus aureus; identical to SEQ ID NO: 1142

SEQ ID NO: 8995 - DNA, 753 bp, Staphylococcus aureus; identical to SEQ ID NO: 1143

SEQ ID NO: 8996 - DNA, 780 bp, Staphylococcus aureus; identical to SEQ ID NO: 1144

SEQ ID NO: 8997 - DNA, 861 bp, Staphylococcus aureus; identical to SEQ ID NO: 1145

SEQ ID NO: 8998 - DNA, 552 bp, Staphylococcus aureus; identical to SEQ ID NO: 1146

SEQ ID NO: 8999 - DNA, 190 bp, Staphylococcus aureus; identical to SEQ ID NO: 1147

SEQ ID NO: 9000 - DNA, 138 bp, Staphylococcus aureus; identical to SEQ ID NO: 1148

SEQ ID NO: 9001 - DNA, 198 bp, Staphylococcus aureus; identical to SEQ ID NO: 1149

SEQ ID NO: 9002 - DNA, 756 bp, Staphylococcus aureus; identical to SEQ ID NO: 1150

SEQ ID NO: 9003 - DNA, 750 bp, Staphylococcus aureus; identical to SEQ ID NO: 1151

SEQ ID NO: 9004 - DNA, 753 bp, Staphylococcus aureus; identical to SEQ ID NO: 1152

SEQ ID NO: 9005 - DNA, 261 bp, Staphylococcus aureus; identical to SEQ ID NO: 1153

SEQ ID NO: 9006 - DNA, 615 bp, Staphylococcus aureus; identical to SEQ ID NO: 1154

SEQ ID NO: 9007 - DNA, 393 bp, Staphylococcus aureus; identical to SEQ ID NO: 1155

SEQ ID NO: 9008 - DNA, 1296 bp, Staphylococcus aureus; identical to SEQ ID NO: 1156

SEQ ID NO: 9009 - DNA, 3465 bp, Staphylococcus aureus; identical to SEQ ID NO: 1157

SEQ ID NO: 9010 - DNA, 216 bp, Staphylococcus aureus; identical to SEQ ID NO: 1158

SEQ ID NO: 9011 - DNA, 906 bp, Staphylococcus aureus; identical to SEQ ID NO: 1159

SEQ ID NO: 9012 - DNA, 1047 bp, Staphylococcus aureus; identical to SEQ ID NO: 1160

SEQ ID NO: 9013 - DNA, 507 bp, Staphylococcus aureus; identical to SEQ ID NO: 1161

SEQ ID NO: 9014 - DNA, 114 bp, Staphylococcus aureus; identical to SEQ ID NO: 1162

SEQ ID NO: 9015 - DNA, 993 bp, Staphylococcus aureus; identical to SEQ ID NO: 1163

SEQ ID NO: 9016 - DNA, 798 bp, Staphylococcus aureus; identical to SEQ ID NO: 1164

SEQ ID NO: 9017 - DNA, 183 bp, Staphylococcus aureus; identical to SEQ ID NO: 1165

SEQ ID NO: 9018 - DNA, 189 bp, Staphylococcus aureus; identical to SEQ ID NO: 1166

SEQ ID NO: 9019 - DNA, 180 bp, Staphylococcus aureus; identical to SEQ ID NO: 1167

SEQ ID NO: 9020 - DNA, 951 bp, Staphylococcus aureus; identical to SEQ ID NO: 1168

SEQ ID NO: 9021 - DNA, 450 bp, Staphylococcus aureus; identical to SEQ ID NO: 1169

SEQ ID NO: 9022 - DNA, 636 bp, Staphylococcus aureus; identical to SEQ ID NO: 1170

SEQ ID NO: 9023 - DNA, 540 bp, Staphylococcus aureus; identical to SEQ ID NO: 1171

SEQ ID NO: 9024 - DNA, 144 bp, Staphylococcus aureus; identical to SEQ ID NO: 1172

SEQ ID NO: 9025 - DNA, 1038 bp, Staphylococcus aureus; identical to SEQ ID NO: 1173

SEQ ID NO: 9026 - DNA, 1827 bp, Staphylococcus aureus; identical to SEQ ID NO: 1174

SEQ ID NO: 9027 - DNA, 651 bp, Staphylococcus aureus; identical to SEQ ID NO: 1175

SEQ ID NO: 9028 - DNA, 690 bp, Staphylococcus aureus; identical to SEQ ID NO: 1176

SEQ ID NO: 9029 - DNA, 567 bp, Staphylococcus aureus; identical to SEQ ID NO: 1177

SEQ ID NO: 9030 - DNA, 105 bp, Staphylococcus aureus; identical to SEQ ID NO: 1178

SEQ ID NO: 9031 - DNA, 294 bp, Staphylococcus aureus; identical to SEQ ID NO: 1179

SEQ ID NO: 9032 - DNA, 459 bp, Staphylococcus aureus; identical to SEQ ID NO: 1180

SEQ ID NO: 9033 - DNA, 3030 bp, Staphylococcus aureus; identical to SEQ ID NO: 1181

SEQ ID NO: 9034 - DNA, 684 bp, Staphylococcus aureus; identical to SEQ ID NO: 1182

SEQ ID NO: 9035 - DNA, 132 bp, Staphylococcus aureus; identical to SEQ ID NO: 1183

SEQ ID NO: 9036 - DNA, 459 bp, Staphylococcus aureus; identical to SEQ ID NO: 1184

SEQ ID NO: 9037 - DNA, 876 bp, Staphylococcus aureus; identical to SEQ ID NO: 1185

SEQ ID NO: 9038 - DNA, 243 bp, Staphylococcus aureus; identical to SEQ ID NO: 1186

SEQ ID NO: 9039 - DNA, 444 bp, Staphylococcus aureus; identical to SEQ ID NO: 1187

SEQ ID NO: 9040 - DNA, 117 bp, Staphylococcus aureus; identical to SEQ ID NO: 1188

SEQ ID NO: 9041 - DNA, 1335 bp, Staphylococcus aureus; identical to SEQ ID NO: 1189

SEQ ID NO: 9042 - DNA, 618 bp, Staphylococcus aureus; identical to SEQ ID NO: 1190

SEQ ID NO: 9043 - DNA, 4440 bp, Staphylococcus aureus; identical to SEQ ID NO: 1191

SEQ ID NO: 9044 - DNA, 423 bp, Staphylococcus aureus; identical to SEQ ID NO: 1192

SEQ ID NO: 9045 - DNA, 4449 bp, Staphylococcus aureus; identical to SEQ ID NO: 1193

SEQ ID NO: 9046 - DNA, 393 bp, Staphylococcus aureus; identical to SEQ ID NO: 1194

SEQ ID NO: 9047 - DNA, 1056 bp, Staphylococcus aureus; identical to SEQ ID NO: 1195

SEQ ID NO: 9048 - DNA, 315 bp, Staphylococcus aureus; identical to SEQ ID NO: 1196

SEQ ID NO: 9049 - DNA, 687 bp, Staphylococcus aureus; identical to SEQ ID NO: 1197

SEQ ID NO: 9050 - DNA, 1335 bp, Staphylococcus aureus; identical to SEQ ID NO: 1198

SEQ ID NO: 9051 - DNA, 933 bp, Staphylococcus aureus; identical to SEQ ID NO: 1199

SEQ ID NO: 9052 - DNA, 675 bp, Staphylococcus aureus; identical to SEQ ID NO: 1200

SEQ ID NO: 9053 - DNA, 474 bp, Staphylococcus aureus; identical to SEQ ID NO: 1201

SEQ ID NO: 9054 - DNA, 318 bp, Staphylococcus aureus; identical to SEQ ID NO: 1202

SEQ ID NO: 9055 - DNA, 441 bp, Staphylococcus aureus; identical to SEQ ID NO: 1203

SEQ ID NO: 9056 - DNA, 120 bp, Staphylococcus aureus; identical to SEQ ID NO: 1204

SEQ ID NO: 9057 - DNA, 1845 bp, Staphylococcus aureus; identical to SEQ ID NO: 1205

SEQ ID NO: 9058 - DNA, 585 bp, Staphylococcus aureus; identical to SEQ ID NO: 1206

SEQ ID NO: 9059 - DNA, 1845 bp, Staphylococcus aureus; identical to SEQ ID NO: 1207

SEQ ID NO: 9060 - DNA, 714 bp, Staphylococcus aureus; identical to SEQ ID NO: 1208

SEQ ID NO: 9061 - DNA, 501 bp, Staphylococcus aureus; identical to SEQ ID NO: 1209

SEQ ID NO: 9062 - DNA, 462 bp, Staphylococcus aureus; identical to SEQ ID NO: 1210

SEQ ID NO: 9063 - DNA, 684 bp, Staphylococcus aureus; identical to SEQ ID NO: 1211

SEQ ID NO: 9064 - DNA, 420 bp, Staphylococcus aureus; identical to SEQ ID NO: 1212

SEQ ID NO: 9065 - DNA, 216 bp, Staphylococcus aureus; identical to SEQ ID NO: 1213

SEQ ID NO: 9066 - DNA, 258 bp, Staphylococcus aureus; identical to SEQ ID NO: 1214

SEQ ID NO: 9067 - DNA, 324 bp, Staphylococcus aureus; identical to SEQ ID NO: 1215

SEQ ID NO: 9068 - DNA, 612 bp, Staphylococcus aureus; identical to SEQ ID NO: 1216

SEQ ID NO: 9069 - DNA, 669 bp, Staphylococcus aureus; identical to SEQ ID NO: 1217

SEQ ID NO: 9070 - DNA, 216 bp, Staphylococcus aureus; identical to SEQ ID NO: 1218

SEQ ID NO: 9071 - DNA, 486 bp, Staphylococcus aureus; identical to SEQ ID NO: 1219

SEQ ID NO: 9072 - DNA, 264 bp, Staphylococcus aureus; identical to SEQ ID NO: 1220

SEQ ID NO: 9073 - DNA, 219 bp, Staphylococcus aureus; identical to SEQ ID NO: 1221

SEQ ID NO: 9074 - DNA, 918 bp, Staphylococcus aureus; identical to SEQ ID NO: 1222

SEQ ID NO: 9075 - DNA, 102 bp, Staphylococcus aureus; identical to SEQ ID NO: 1223

SEQ ID NO: 9076 - DNA, 1506 bp, Staphylococcus aureus; identical to SEQ ID NO: 1224

SEQ ID NO: 9077 - DNA, 132 bp, Staphylococcus aureus; identical to SEQ ID NO: 1225

SEQ ID NO: 9078 - DNA, 441 bp, Staphylococcus aureus; identical to SEQ ID NO: 1226

SEQ ID NO: 9079 - DNA, 501 bp, Staphylococcus aureus; identical to SEQ ID NO: 1227

SEQ ID NO: 9080 - DNA, 522 bp, Staphylococcus aureus; identical to SEQ ID NO: 1228

SEQ ID NO: 9081 - DNA, 501 bp, Staphylococcus aureus; identical to SEQ ID NO: 1229

SEQ ID NO: 9082 - DNA, 93 bp, Staphylococcus aureus; identical to SEQ ID NO: 1230

SEQ ID NO: 9083 - DNA, 144 bp, Staphylococcus aureus; identical to SEQ ID NO: 1231

SEQ ID NO: 9084 - DNA, 246 bp, Staphylococcus aureus; identical to SEQ ID NO: 1232

SEQ ID NO: 9085 - DNA, 789 bp, Staphylococcus aureus; identical to SEQ ID NO: 1233

SEQ ID NO: 9086 - DNA, 99 bp, Staphylococcus aureus; identical to SEQ ID NO: 1234

SEQ ID NO: 9087 - DNA, 315 bp, Staphylococcus aureus; identical to SEQ ID NO: 1235

SEQ ID NO: 9088 - DNA, 300 bp, Staphylococcus aureus; identical to SEQ ID NO: 1236

SEQ ID NO: 9089 - DNA, 933 bp, Staphylococcus aureus; identical to SEQ ID NO: 1237

SEQ ID NO: 9090 - DNA, 342 bp, Staphylococcus aureus; identical to SEQ ID NO: 1238

SEQ ID NO: 9091 - DNA, 1206 bp, Staphylococcus aureus; identical to SEQ ID NO: 1239

SEQ ID NO: 9092 - DNA, 681 bp, Staphylococcus aureus; identical to SEQ ID NO: 1240

SEQ ID NO: 9093 - DNA, 924 bp, Staphylococcus aureus; identical to SEQ ID NO: 1241

SEQ ID NO: 9094 - DNA, 519 bp, Staphylococcus aureus; identical to SEQ ID NO: 1242

SEQ ID NO: 9095 - DNA, 120 bp, Staphylococcus aureus; identical to SEQ ID NO: 1243

SEQ ID NO: 9096 - DNA, 1227 bp, Staphylococcus aureus; identical to SEQ ID NO: 1244

SEQ ID NO: 9097 - DNA, 495 bp, Staphylococcus aureus; identical to SEQ ID NO: 1245

SEQ ID NO: 9098 - DNA, 762 bp, Staphylococcus aureus; identical to SEQ ID NO: 1246

SEQ ID NO: 9099 - DNA, 1071 bp, Staphylococcus aureus; identical to SEQ ID NO: 1247

SEQ ID NO: 9100 - DNA, 642 bp, Staphylococcus aureus; identical to SEQ ID NO: 1248

SEQ ID NO: 9101 - DNA, 903 bp, Staphylococcus aureus; identical to SEQ ID NO: 1249

SEQ ID NO: 9102 - DNA, 111 bp, Staphylococcus aureus; identical to SEQ ID NO: 1250

SEQ ID NO: 9103 - DNA, 801 bp, Staphylococcus aureus; identical to SEQ ID NO: 1251

SEQ ID NO: 9104 - DNA, 756 bp, Staphylococcus aureus; identical to SEQ ID NO: 1252

SEQ ID NO: 9105 - DNA, 391 bp, Staphylococcus aureus; identical to SEQ ID NO: 1253

SEQ ID NO: 9106 - DNA, 324 bp, Staphylococcus aureus; identical to SEQ ID NO: 1254

SEQ ID NO: 9107 - DNA, 105 bp, Staphylococcus aureus; identical to SEQ ID NO: 1255

SEQ ID NO: 9108 - DNA, 117 bp, Staphylococcus aureus; identical to SEQ ID NO: 1256

SEQ ID NO: 9109 - DNA, 399 bp, Staphylococcus aureus; identical to SEQ ID NO: 1257

SEQ ID NO: 9110 - DNA, 144 bp, Staphylococcus aureus; identical to SEQ ID NO: 1258

SEQ ID NO: 9111 - DNA, 891 bp, Staphylococcus aureus; identical to SEQ ID NO: 1259

SEQ ID NO: 9112 - DNA, 729 bp, Staphylococcus aureus; identical to SEQ ID NO: 1260

SEQ ID NO: 9113 - DNA, 1050 bp, Staphylococcus aureus; identical to SEQ ID NO: 1261

SEQ ID NO: 9114 - DNA, 90 bp, Staphylococcus aureus; identical to SEQ ID NO: 1262

SEQ ID NO: 9115 - DNA, 678 bp, Staphylococcus aureus; identical to SEQ ID NO: 1263

SEQ ID NO: 9116 - DNA, 219 bp, Staphylococcus aureus; identical to SEQ ID NO: 1264

SEQ ID NO: 9117 - DNA, 1032 bp, Staphylococcus aureus; identical to SEQ ID NO: 1265

SEQ ID NO: 9118 - DNA, 285 bp, Staphylococcus aureus; identical to SEQ ID NO: 1266

SEQ ID NO: 9119 - DNA, 1119 bp, Staphylococcus aureus; identical to SEQ ID NO: 1267

SEQ ID NO: 9120 - DNA, 570 bp, Staphylococcus aureus; identical to SEQ ID NO: 1268

SEQ ID NO: 9121 - DNA, 162 bp, Staphylococcus aureus; identical to SEQ ID NO: 1269

SEQ ID NO: 9122 - DNA, 363 bp, Staphylococcus aureus; identical to SEQ ID NO: 1270

SEQ ID NO: 9123 - DNA, 924 bp, Staphylococcus aureus; identical to SEQ ID NO: 1271

SEQ ID NO: 9124 - DNA, 261 bp, Staphylococcus aureus; identical to SEQ ID NO: 1272

SEQ ID NO: 9125 - DNA, 1221 bp, Staphylococcus aureus; identical to SEQ ID NO: 1273

SEQ ID NO: 9126 - DNA, 117 bp, Staphylococcus aureus; identical to SEQ ID NO: 1274

SEQ ID NO: 9127 - DNA, 324 bp, Staphylococcus aureus; identical to SEQ ID NO: 1275

SEQ ID NO: 9128 - DNA, 903 bp, Staphylococcus aureus; identical to SEQ ID NO: 1276

SEQ ID NO: 9129 - DNA, 237 bp, Staphylococcus aureus; identical to SEQ ID NO: 1277

SEQ ID NO: 9130 - DNA, 609 bp, Staphylococcus aureus; identical to SEQ ID NO: 1278

SEQ ID NO: 9131 - DNA, 207 bp, Staphylococcus aureus; identical to SEQ ID NO: 1279

SEQ ID NO: 9132 - DNA, 2319 bp, Staphylococcus aureus; identical to SEQ ID NO: 1280

SEQ ID NO: 9133 - DNA, 261 bp, Staphylococcus aureus; identical to SEQ ID NO: 1281

SEQ ID NO: 9134 - DNA, 669 bp, Staphylococcus aureus; identical to SEQ ID NO: 1282

SEQ ID NO: 9135 - DNA, 618 bp, Staphylococcus aureus; identical to SEQ ID NO: 1283

SEQ ID NO: 9136 - DNA, 285 bp, Staphylococcus aureus; identical to SEQ ID NO: 1284

SEQ ID NO: 9137 - DNA, 495 bp, Staphylococcus aureus; identical to SEQ ID NO: 1285

SEQ ID NO: 9138 - DNA, 2076 bp, Staphylococcus aureus; identical to SEQ ID NO: 1286

SEQ ID NO: 9139 - DNA, 105 bp, Staphylococcus aureus; identical to SEQ ID NO: 1287

SEQ ID NO: 9140 - DNA, 423 bp, Staphylococcus aureus; identical to SEQ ID NO: 1288

SEQ ID NO: 9141 - DNA, 321 bp, Staphylococcus aureus; identical to SEQ ID NO: 1289

SEQ ID NO: 9142 - DNA, 135 bp, Staphylococcus aureus; identical to SEQ ID NO: 1290

SEQ ID NO: 9143 - DNA, 1221 bp, Staphylococcus aureus; identical to SEQ ID NO: 1291

SEQ ID NO: 9144 - DNA, 132 bp, Staphylococcus aureus; identical to SEQ ID NO: 1292

SEQ ID NO: 9145 - DNA, 2790 bp, Staphylococcus aureus; identical to SEQ ID NO: 1293

SEQ ID NO: 9146 - DNA, 2808 bp, Staphylococcus aureus; identical to SEQ ID NO: 1294

SEQ ID NO: 9147 - DNA, 2970 bp, Staphylococcus aureus; identical to SEQ ID NO: 1295

SEQ ID NO: 9148 - DNA, 3090 bp, Staphylococcus aureus; identical to SEQ ID NO: 1296

SEQ ID NO: 9149 - DNA, 432 bp, Staphylococcus aureus; identical to SEQ ID NO: 1297

SEQ ID NO: 9150 - DNA, 189 bp, Staphylococcus aureus; identical to SEQ ID NO: 1298

SEQ ID NO: 9151 - DNA, 459 bp, Staphylococcus aureus; identical to SEQ ID NO: 1299

SEQ ID NO: 9152 - DNA, 333 bp, Staphylococcus aureus; identical to SEQ ID NO: 1300

SEQ ID NO: 9153 - DNA, 120 bp, Staphylococcus aureus; identical to SEQ ID NO: 1301

SEQ ID NO: 9154 - DNA, 1257 bp, Staphylococcus aureus; identical to SEQ ID NO: 1302

SEQ ID NO: 9155 - DNA, 99 bp, Staphylococcus aureus; identical to SEQ ID NO: 1303

SEQ ID NO: 9156 - DNA, 558 bp, Staphylococcus aureus; identical to SEQ ID NO: 1304

SEQ ID NO: 9157 - DNA, 852 bp, Staphylococcus aureus; identical to SEQ ID NO: 1305

SEQ ID NO: 9158 - DNA, 315 bp, Staphylococcus aureus; identical to SEQ ID NO: 1306

SEQ ID NO: 9159 - DNA, 105 bp, Staphylococcus aureus; identical to SEQ ID NO: 1307

SEQ ID NO: 9160 - DNA, 258 bp, Staphylococcus aureus; identical to SEQ ID NO: 1308

SEQ ID NO: 9161 - DNA, 243 bp, Staphylococcus aureus; identical to SEQ ID NO: 1309

SEQ ID NO: 9162 - DNA, 420 bp, Staphylococcus aureus; identical to SEQ ID NO: 1310

SEQ ID NO: 9163 - DNA, 1065 bp, Staphylococcus aureus; identical to SEQ ID NO: 1311

SEQ ID NO: 9164 - DNA, 696 bp, Staphylococcus aureus; identical to SEQ ID NO: 1312

SEQ ID NO: 9165 - DNA, 1155 bp, Staphylococcus aureus; identical to SEQ ID NO: 1313

SEQ ID NO: 9166 - DNA, 357 bp, Staphylococcus aureus; identical to SEQ ID NO: 1314

SEQ ID NO: 9167 - DNA, 294 bp, Staphylococcus aureus; identical to SEQ ID NO: 1315

SEQ ID NO: 9168 - DNA, 114 bp, Staphylococcus aureus; identical to SEQ ID NO: 1316

SEQ ID NO: 9169 - DNA, 480 bp, Staphylococcus aureus; identical to SEQ ID NO: 1317

SEQ ID NO: 9170 - DNA, 240 bp, Staphylococcus aureus; identical to SEQ ID NO: 1318

SEQ ID NO: 9171 - DNA, 1497 bp, Staphylococcus aureus; identical to SEQ ID NO: 1319

SEQ ID NO: 9172 - DNA, 102 bp, Staphylococcus aureus; identical to SEQ ID NO: 1320

SEQ ID NO: 9173 - DNA, 342 bp, Staphylococcus aureus; identical to SEQ ID NO: 1321

SEQ ID NO: 9174 - DNA, 423 bp, Staphylococcus aureus; identical to SEQ ID NO: 1322

SEQ ID NO: 9175 - DNA, 429 bp, Staphylococcus aureus; identical to SEQ ID NO: 1323

SEQ ID NO: 9176 - DNA, 2406 bp, Staphylococcus aureus; identical to SEQ ID NO: 1324

SEQ ID NO: 9177 - DNA, 105 bp, Staphylococcus aureus; identical to SEQ ID NO: 1325

SEQ ID NO: 9178 - DNA, 384 bp, Staphylococcus aureus; identical to SEQ ID NO: 1326

SEQ ID NO: 9179 - DNA, 930 bp, Staphylococcus aureus; identical to SEQ ID NO: 1327

SEQ ID NO: 9180 - DNA, 294 bp, Staphylococcus aureus; identical to SEQ ID NO: 1328

SEQ ID NO: 9181 - DNA, 357 bp, Staphylococcus aureus; identical to SEQ ID NO: 1329

SEQ ID NO: 9182 - DNA, 1380 bp, Staphylococcus aureus; identical to SEQ ID NO: 1330

SEQ ID NO: 9183 - DNA, 228 bp, Staphylococcus aureus; identical to SEQ ID NO: 1331

SEQ ID NO: 9184 - DNA, 1158 bp, Staphylococcus aureus; identical to SEQ ID NO: 1332

SEQ ID NO: 9185 - DNA, 1221 bp, Staphylococcus aureus; identical to SEQ ID NO: 1333

SEQ ID NO: 9186 - DNA, 168 bp, Staphylococcus aureus; identical to SEQ ID NO: 1334

SEQ ID NO: 9187 - DNA, 1317 bp, Staphylococcus aureus; identical to SEQ ID NO: 1335

SEQ ID NO: 9188 - DNA, 1266 bp, Staphylococcus aureus; identical to SEQ ID NO: 1336

SEQ ID NO: 9189 - DNA, 825 bp, Staphylococcus aureus; identical to SEQ ID NO: 1337

SEQ ID NO: 9190 - DNA, 870 bp, Staphylococcus aureus; identical to SEQ ID NO: 1338

SEQ ID NO: 9191 - DNA, 186 bp, Staphylococcus aureus; identical to SEQ ID NO: 1339

SEQ ID NO: 9192 - DNA, 372 bp, Staphylococcus aureus; identical to SEQ ID NO: 1340

SEQ ID NO: 9193 - DNA, 195 bp, Staphylococcus aureus; identical to SEQ ID NO: 1341

SEQ ID NO: 9194 - DNA, 990 bp, Staphylococcus aureus; identical to SEQ ID NO: 1342

SEQ ID NO: 9195 - DNA, 183 bp, Staphylococcus aureus; identical to SEQ ID NO: 1343

SEQ ID NO: 9196 - DNA, 204 bp, Staphylococcus aureus; identical to SEQ ID NO: 1344

SEQ ID NO: 9197 - DNA, 807 bp, Staphylococcus aureus; identical to SEQ ID NO: 1345

SEQ ID NO: 9198 - DNA, 318 bp, Staphylococcus aureus; identical to SEQ ID NO: 1346

SEQ ID NO: 9199 - DNA, 594 bp, Staphylococcus aureus; identical to SEQ ID NO: 1347

SEQ ID NO: 9200 - DNA, 1086 bp, Staphylococcus aureus; identical to SEQ ID NO: 1348

SEQ ID NO: 9201 - DNA, 183 bp, Staphylococcus aureus; identical to SEQ ID NO: 1349

SEQ ID NO: 9202 - DNA, 231 bp, Staphylococcus aureus; identical to SEQ ID NO: 1350

SEQ ID NO: 9203 - DNA, 462 bp, Staphylococcus aureus; identical to SEQ ID NO: 1351

SEQ ID NO: 9204 - DNA, 1209 bp, Staphylococcus aureus; identical to SEQ ID NO: 1352

SEQ ID NO: 9205 - DNA, 1176 bp, Staphylococcus aureus; identical to SEQ ID NO: 1353

SEQ ID NO: 9206 - DNA, 531 bp, Staphylococcus aureus; identical to SEQ ID NO: 1354

SEQ ID NO: 9207 - DNA, 195 bp, Staphylococcus aureus; identical to SEQ ID NO: 1355

SEQ ID NO: 9208 - DNA, 987 bp, Staphylococcus aureus; identical to SEQ ID NO: 1356

SEQ ID NO: 9209 - DNA, 99 bp, Staphylococcus aureus; identical to SEQ ID NO: 1357

SEQ ID NO: 9210 - DNA, 426 bp, Staphylococcus aureus; identical to SEQ ID NO: 1358

SEQ ID NO: 9211 - DNA, 93 bp, Staphylococcus aureus; identical to SEQ ID NO: 1359

SEQ ID NO: 9212 - DNA, 129 bp, Staphylococcus aureus; identical to SEQ ID NO: 1360

SEQ ID NO: 9213 - DNA, 249 bp, Staphylococcus aureus; identical to SEQ ID NO: 1361

SEQ ID NO: 9214 - DNA, 291 bp, Staphylococcus aureus; identical to SEQ ID NO: 1362

SEQ ID NO: 9215 - DNA, 108 bp, Staphylococcus aureus; identical to SEQ ID NO: 1363

SEQ ID NO: 9216 - DNA, 777 bp, Staphylococcus aureus; identical to SEQ ID NO: 1364

SEQ ID NO: 9217 - DNA, 765 bp, Staphylococcus aureus; identical to SEQ ID NO: 1365

SEQ ID NO: 9218 - DNA, 939 bp, Staphylococcus aureus; identical to SEQ ID NO: 1366

SEQ ID NO: 9219 - DNA, 1296 bp, Staphylococcus aureus; identical to SEQ ID NO: 1367

SEQ ID NO: 9220 - DNA, 771 bp, Staphylococcus aureus; identical to SEQ ID NO: 1368

SEQ ID NO: 9221 - DNA, 279 bp, Staphylococcus aureus; identical to SEQ ID NO: 1369

SEQ ID NO: 9222 - DNA, 813 bp, Staphylococcus aureus; identical to SEQ ID NO: 1370

SEQ ID NO: 9223 - DNA, 111 bp, Staphylococcus aureus; identical to SEQ ID NO: 1371

SEQ ID NO: 9224 - DNA, 330 bp, Staphylococcus aureus; identical to SEQ ID NO: 1372

SEQ ID NO: 9225 - DNA, 744 bp, Staphylococcus aureus; identical to SEQ ID NO: 1373

SEQ ID NO: 9226 - DNA, 534 bp, Staphylococcus aureus; identical to SEQ ID NO: 1374

SEQ ID NO: 9227 - DNA, 1182 bp, Staphylococcus aureus; identical to SEQ ID NO: 1375

SEQ ID NO: 9228 - DNA, 690 bp, Staphylococcus aureus; identical to SEQ ID NO: 1376

SEQ ID NO: 9229 - DNA, 147 bp, Staphylococcus aureus; identical to SEQ ID NO: 1377

SEQ ID NO: 9230 - DNA, 1011 bp, Staphylococcus aureus; identical to SEQ ID NO: 1378

SEQ ID NO: 9231 - DNA, 1029 bp, Staphylococcus aureus; identical to SEQ ID NO: 1379

SEQ ID NO: 9232 - DNA, 1074 bp, Staphylococcus aureus; identical to SEQ ID NO: 1380

SEQ ID NO: 9233 - DNA, 102 bp, Staphylococcus aureus; identical to SEQ ID NO: 1381

SEQ ID NO: 9234 - DNA, 1155 bp, Staphylococcus aureus; identical to SEQ ID NO: 1382

SEQ ID NO: 9235 - DNA, 1011 bp, Staphylococcus aureus; identical to SEQ ID NO: 1383

SEQ ID NO: 9236 - DNA, 153 bp, Staphylococcus aureus; identical to SEQ ID NO: 1384

SEQ ID NO: 9237 - DNA, 3771 bp, Staphylococcus aureus; identical to SEQ ID NO: 1385

SEQ ID NO: 9238 - DNA, 3768 bp, Staphylococcus aureus; identical to SEQ ID NO: 1386

SEQ ID NO: 9239 - DNA, 435 bp, Staphylococcus aureus; identical to SEQ ID NO: 1387

SEQ ID NO: 9240 - DNA, 471 bp, Staphylococcus aureus; identical to SEQ ID NO: 1388

SEQ ID NO: 9241 - DNA, 1218 bp, Staphylococcus aureus; identical to SEQ ID NO: 1389

SEQ ID NO: 9242 - DNA, 1227 bp, Staphylococcus aureus; identical to SEQ ID NO: 1390

SEQ ID NO: 9243 - DNA, 279 bp, Staphylococcus aureus; identical to SEQ ID NO: 1391

SEQ ID NO: 9244 - DNA, 606 bp, Staphylococcus aureus; identical to SEQ ID NO: 1392

SEQ ID NO: 9245 - DNA, 429 bp, Staphylococcus aureus; identical to SEQ ID NO: 1393

SEQ ID NO: 9246 - DNA, 1662 bp, Staphylococcus aureus; identical to SEQ ID NO: 1394

SEQ ID NO: 9247 - DNA, 1989 bp, Staphylococcus aureus; identical to SEQ ID NO: 1395

SEQ ID NO: 9248 - DNA, 117 bp, Staphylococcus aureus; identical to SEQ ID NO: 1396

SEQ ID NO: 9249 - DNA, 1101 bp, Staphylococcus aureus; identical to SEQ ID NO: 1397

SEQ ID NO: 9250 - DNA, 318 bp, Staphylococcus aureus; identical to SEQ ID NO: 1398

SEQ ID NO: 9251 - DNA, 861 bp, Staphylococcus aureus; identical to SEQ ID NO: 1399

SEQ ID NO: 9252 - DNA, 807 bp, Staphylococcus aureus; identical to SEQ ID NO: 1400

SEQ ID NO: 9253 - DNA, 234 bp, Staphylococcus aureus; identical to SEQ ID NO: 1401

SEQ ID NO: 9254 - DNA, 1401 bp, Staphylococcus aureus; identical to SEQ ID NO: 1402

SEQ ID NO: 9255 - DNA, 198 bp, Staphylococcus aureus; identical to SEQ ID NO: 1403

SEQ ID NO: 9256 - DNA, 576 bp, Staphylococcus aureus; identical to SEQ ID NO: 1404

SEQ ID NO: 9257 - DNA, 1002 bp, Staphylococcus aureus; identical to SEQ ID NO: 1405

SEQ ID NO: 9258 - DNA, 234 bp, Staphylococcus aureus; identical to SEQ ID NO: 1406

SEQ ID NO: 9259 - DNA, 333 bp, Staphylococcus aureus; identical to SEQ ID NO: 1407

SEQ ID NO: 9260 - DNA, 255 bp, Staphylococcus aureus; identical to SEQ ID NO: 1408

SEQ ID NO: 9261 - DNA, 1776 bp, Staphylococcus aureus; identical to SEQ ID NO: 1409

SEQ ID NO: 9262 - DNA, 1758 bp, Staphylococcus aureus; identical to SEQ ID NO: 1410

SEQ ID NO: 9263 - DNA, 801 bp, Staphylococcus aureus; identical to SEQ ID NO: 1411

SEQ ID NO: 9264 - DNA, 1698 bp, Staphylococcus aureus; identical to SEQ ID NO: 1412

SEQ ID NO: 9265 - DNA, 241 bp, Staphylococcus aureus; identical to SEQ ID NO: 1413

SEQ ID NO: 9266 - DNA, 1023 bp, Staphylococcus aureus; identical to SEQ ID NO: 1414

SEQ ID NO: 9267 - DNA, 552 bp, Staphylococcus aureus; identical to SEQ ID NO: 1415

SEQ ID NO: 9268 - DNA, 180 bp, Staphylococcus aureus; identical to SEQ ID NO: 1416

SEQ ID NO: 9269 - DNA, 1026 bp, Staphylococcus aureus; identical to SEQ ID NO: 1417

SEQ ID NO: 9270 - DNA, 1353 bp, Staphylococcus aureus; identical to SEQ ID NO: 1418

SEQ ID NO: 9271 - DNA, 303 bp, Staphylococcus aureus; identical to SEQ ID NO: 1419

SEQ ID NO: 9272 - DNA, 420 bp, Staphylococcus aureus; identical to SEQ ID NO: 1420

SEQ ID NO: 9273 - DNA, 615 bp, Staphylococcus aureus; identical to SEQ ID NO: 1421

SEQ ID NO: 9274 - DNA, 1356 bp, Staphylococcus aureus; identical to SEQ ID NO: 1422

SEQ ID NO: 9275 - DNA, 192 bp, Staphylococcus aureus; identical to SEQ ID NO: 1423

SEQ ID NO: 9276 - DNA, 441 bp, Staphylococcus aureus; identical to SEQ ID NO: 1424

SEQ ID NO: 9277 - DNA, 168 bp, Staphylococcus aureus; identical to SEQ ID NO: 1425

SEQ ID NO: 9278 - DNA, 483 bp, Staphylococcus aureus; identical to SEQ ID NO: 1426

SEQ ID NO: 9279 - DNA, 927 bp, Staphylococcus aureus; identical to SEQ ID NO: 1427

SEQ ID NO: 9280 - DNA, 1062 bp, Staphylococcus aureus; identical to SEQ ID NO: 1428

SEQ ID NO: 9281 - DNA, 1071 bp, Staphylococcus aureus; identical to SEQ ID NO: 1429

SEQ ID NO: 9282 - DNA, 930 bp, Staphylococcus aureus; identical to SEQ ID NO: 1430

SEQ ID NO: 9283 - DNA, 1113 bp, Staphylococcus aureus; identical to SEQ ID NO: 1431

SEQ ID NO: 9284 - DNA, 2007 bp, Staphylococcus aureus; identical to SEQ ID NO: 1432

SEQ ID NO: 9285 - DNA, 261 bp, Staphylococcus aureus; identical to SEQ ID NO: 1433

SEQ ID NO: 9286 - DNA, 873 bp, Staphylococcus aureus; identical to SEQ ID NO: 1434

SEQ ID NO: 9287 - DNA, 390 bp, Staphylococcus aureus; identical to SEQ ID NO: 1435

SEQ ID NO: 9288 - DNA, 546 bp, Staphylococcus aureus; identical to SEQ ID NO: 1436

SEQ ID NO: 9289 - DNA, 1140 bp, Staphylococcus aureus; identical to SEQ ID NO: 1437

SEQ ID NO: 9290 - DNA, 855 bp, Staphylococcus aureus; identical to SEQ ID NO: 1438

SEQ ID NO: 9291 - DNA, 1939 bp, Staphylococcus aureus; identical to SEQ ID NO: 1439

SEQ ID NO: 9292 - DNA, 1230 bp, Staphylococcus aureus; identical to SEQ ID NO: 1440

SEQ ID NO: 9293 - DNA, 804 bp, Staphylococcus aureus; identical to SEQ ID NO: 1441

SEQ ID NO: 9294 - DNA, 1065 bp, Staphylococcus aureus; identical to SEQ ID NO: 1442

SEQ ID NO: 9295 - DNA, 1713 bp, Staphylococcus aureus; identical to SEQ ID NO: 1443

SEQ ID NO: 9296 - DNA, 171 bp, Staphylococcus aureus; identical to SEQ ID NO: 1444

SEQ ID NO: 9297 - DNA, 939 bp, Staphylococcus aureus; identical to SEQ ID NO: 1445

SEQ ID NO: 9298 - DNA, 714 bp, Staphylococcus aureus; identical to SEQ ID NO: 1446

SEQ ID NO: 9299 - DNA, 93 bp, Staphylococcus aureus; identical to SEQ ID NO: 1447

SEQ ID NO: 9300 - DNA, 402 bp, Staphylococcus aureus; identical to SEQ ID NO: 1448

SEQ ID NO: 9301 - DNA, 843 bp, Staphylococcus aureus; identical to SEQ ID NO: 1449

SEQ ID NO: 9302 - DNA, 291 bp, Staphylococcus aureus; identical to SEQ ID NO: 1450

SEQ ID NO: 9303 - DNA, 630 bp, Staphylococcus aureus; identical to SEQ ID NO: 1451

SEQ ID NO: 9304 - DNA, 1182 bp, Staphylococcus aureus; identical to SEQ ID NO: 1452

SEQ ID NO: 9305 - DNA, 234 bp, Staphylococcus aureus; identical to SEQ ID NO: 1453

SEQ ID NO: 9306 - DNA, 1578 bp, Staphylococcus aureus; identical to SEQ ID NO: 1454

SEQ ID NO: 9307 - DNA, 846 bp, Staphylococcus aureus; identical to SEQ ID NO: 1455

SEQ ID NO: 9308 - DNA, 717 bp, Staphylococcus aureus; identical to SEQ ID NO: 1456

SEQ ID NO: 9309 - DNA, 1098 bp, Staphylococcus aureus; identical to SEQ ID NO: 1457

SEQ ID NO: 9310 - DNA, 726 bp, Staphylococcus aureus; identical to SEQ ID NO: 1458

SEQ ID NO: 9311 - DNA, 504 bp, Staphylococcus aureus; identical to SEQ ID NO: 1459

SEQ ID NO: 9312 - DNA, 948 bp, Staphylococcus aureus; identical to SEQ ID NO: 1460

SEQ ID NO: 9313 - DNA, 243 bp, Staphylococcus aureus; identical to SEQ ID NO: 1461

SEQ ID NO: 9314 - DNA, 446 bp, Staphylococcus aureus; identical to SEQ ID NO: 1462

SEQ ID NO: 9315 - DNA, 612 bp, Staphylococcus aureus; identical to SEQ ID NO: 1463

SEQ ID NO: 9316 - DNA, 1698 bp, Staphylococcus aureus; identical to SEQ ID NO: 1464

SEQ ID NO: 9317 - DNA, 401 bp, Staphylococcus aureus; identical to SEQ ID NO: 1465

SEQ ID NO: 9318 - DNA, 279 bp, Staphylococcus aureus; identical to SEQ ID NO: 1466

SEQ ID NO: 9319 - DNA, 573 bp, Staphylococcus aureus; identical to SEQ ID NO: 1467

SEQ ID NO: 9320 - DNA, 189 bp, Staphylococcus aureus; identical to SEQ ID NO: 1468

SEQ ID NO: 9321 - DNA, 261 bp, Staphylococcus aureus; identical to SEQ ID NO: 1469

SEQ ID NO: 9322 - DNA, 753 bp, Staphylococcus aureus; identical to SEQ ID NO: 1470

SEQ ID NO: 9323 - DNA, 255 bp, Staphylococcus aureus; identical to SEQ ID NO: 1471

SEQ ID NO: 9324 - DNA, 582 bp, Staphylococcus aureus; identical to SEQ ID NO: 1472

SEQ ID NO: 9325 - DNA, 756 bp, Staphylococcus aureus; identical to SEQ ID NO: 1473

SEQ ID NO: 9326 - DNA, 2607 bp, Staphylococcus aureus; identical to SEQ ID NO: 1474

SEQ ID NO: 9327 - DNA, 579 bp, Staphylococcus aureus; identical to SEQ ID NO: 1475

SEQ ID NO: 9328 - DNA, 216 bp, Staphylococcus aureus; identical to SEQ ID NO: 1476

SEQ ID NO: 9329 - DNA, 207 bp, Staphylococcus aureus; identical to SEQ ID NO: 1477

SEQ ID NO: 9330 - DNA, 1269 bp, Staphylococcus aureus; identical to SEQ ID NO: 1478

SEQ ID NO: 9331 - DNA, 1467 bp, Staphylococcus aureus; identical to SEQ ID NO: 1479

SEQ ID NO: 9332 - DNA, 1542 bp, Staphylococcus aureus; identical to SEQ ID NO: 1480

SEQ ID NO: 9333 - DNA, 477 bp, Staphylococcus aureus; identical to SEQ ID NO: 1481

SEQ ID NO: 9334 - DNA, 681 bp, Staphylococcus aureus; identical to SEQ ID NO: 1482

SEQ ID NO: 9335 - DNA, 1026 bp, Staphylococcus aureus; identical to SEQ ID NO: 1483

SEQ ID NO: 9336 - DNA, 144 bp, Staphylococcus aureus; identical to SEQ ID NO: 1484

SEQ ID NO: 9337 - DNA, 855 bp, Staphylococcus aureus; identical to SEQ ID NO: 1485

SEQ ID NO: 9338 - DNA, 390 bp, Staphylococcus aureus; identical to SEQ ID NO: 1486

SEQ ID NO: 9339 - DNA, 1071 bp, Staphylococcus aureus; identical to SEQ ID NO: 1487

SEQ ID NO: 9340 - DNA, 1383 bp, Staphylococcus aureus; identical to SEQ ID NO: 1488

SEQ ID NO: 9341 - DNA, 732 bp, Staphylococcus aureus; identical to SEQ ID NO: 1489

SEQ ID NO: 9342 - DNA, 135 bp, Staphylococcus aureus; identical to SEQ ID NO: 1490

SEQ ID NO: 9343 - DNA, 315 bp, Staphylococcus aureus; identical to SEQ ID NO: 1491

SEQ ID NO: 9344 - DNA, 927 bp, Staphylococcus aureus; identical to SEQ ID NO: 1492

SEQ ID NO: 9345 - DNA, 1455 bp, Staphylococcus aureus; identical to SEQ ID NO: 1493

SEQ ID NO: 9346 - DNA, 879 bp, Staphylococcus aureus; identical to SEQ ID NO: 1494

SEQ ID NO: 9347 - DNA, 963 bp, Staphylococcus aureus; identical to SEQ ID NO: 1495

SEQ ID NO: 9348 - DNA, 102 bp, Staphylococcus aureus; identical to SEQ ID NO: 1496

SEQ ID NO: 9349 - DNA, 624 bp, Staphylococcus aureus; identical to SEQ ID NO: 1497

SEQ ID NO: 9350 - DNA, 1473 bp, Staphylococcus aureus; identical to SEQ ID NO: 1498

SEQ ID NO: 9351 - DNA, 438 bp, Staphylococcus aureus; identical to SEQ ID NO: 1499

SEQ ID NO: 9352 - DNA, 246 bp, Staphylococcus aureus; identical to SEQ ID NO: 1500

SEQ ID NO: 9353 - DNA, 1212 bp, Staphylococcus aureus; identical to SEQ ID NO: 1501

SEQ ID NO: 9354 - DNA, 297 bp, Staphylococcus aureus; identical to SEQ ID NO: 1502

SEQ ID NO: 9355 - DNA, 1233 bp, Staphylococcus aureus; identical to SEQ ID NO: 1503

SEQ ID NO: 9356 - DNA, 678 bp, Staphylococcus aureus; identical to SEQ ID NO: 1504

SEQ ID NO: 9357 - DNA, 609 bp, Staphylococcus aureus; identical to SEQ ID NO: 1505

SEQ ID NO: 9358 - DNA, 1509 bp, Staphylococcus aureus; identical to SEQ ID NO: 1506

SEQ ID NO: 9359 - DNA, 96 bp, Staphylococcus aureus; identical to SEQ ID NO: 1507

SEQ ID NO: 9360 - DNA, 510 bp, Staphylococcus aureus; identical to SEQ ID NO: 1508

SEQ ID NO: 9361 - DNA, 186 bp, Staphylococcus aureus; identical to SEQ ID NO: 1509

SEQ ID NO: 9362 - DNA, 4647 bp, Staphylococcus aureus; identical to SEQ ID NO: 1510

SEQ ID NO: 9363 - DNA, 996 bp, Staphylococcus aureus; identical to SEQ ID NO: 1511

SEQ ID NO: 9364 - DNA, 5097 bp, Staphylococcus aureus; identical to SEQ ID NO: 1512

SEQ ID NO: 9365 - DNA, 795 bp, Staphylococcus aureus; identical to SEQ ID NO: 1513

SEQ ID NO: 9366 - DNA, 1092 bp, Staphylococcus aureus; identical to SEQ ID NO: 1514

SEQ ID NO: 9367 - DNA, 777 bp, Staphylococcus aureus; identical to SEQ ID NO: 1515

SEQ ID NO: 9368 - DNA, 798 bp, Staphylococcus aureus; identical to SEQ ID NO: 1516

SEQ ID NO: 9369 - DNA, 474 bp, Staphylococcus aureus; identical to SEQ ID NO: 1517

SEQ ID NO: 9370 - DNA, 702 bp, Staphylococcus aureus; identical to SEQ ID NO: 1518

SEQ ID NO: 9371 - DNA, 774 bp, Staphylococcus aureus; identical to SEQ ID NO: 1519

SEQ ID NO: 9372 - DNA, 831 bp, Staphylococcus aureus; identical to SEQ ID NO: 1520

SEQ ID NO: 9373 - DNA, 1326 bp, Staphylococcus aureus; identical to SEQ ID NO: 1521

SEQ ID NO: 9374 - DNA, 1326 bp, Staphylococcus aureus; identical to SEQ ID NO: 1522

SEQ ID NO: 9375 - DNA, 1254 bp, Staphylococcus aureus; identical to SEQ ID NO: 1523

SEQ ID NO: 9376 - DNA, 324 bp, Staphylococcus aureus; identical to SEQ ID NO: 1524

SEQ ID NO: 9377 - DNA, 987 bp, Staphylococcus aureus; identical to SEQ ID NO: 1525

SEQ ID NO: 9378 - DNA, 345 bp, Staphylococcus aureus; identical to SEQ ID NO: 1526

SEQ ID NO: 9379 - DNA, 1203 bp, Staphylococcus aureus; identical to SEQ ID NO: 1527

SEQ ID NO: 9380 - DNA, 642 bp, Staphylococcus aureus; identical to SEQ ID NO: 1528

SEQ ID NO: 9381 - DNA, 126 bp, Staphylococcus aureus; identical to SEQ ID NO: 1529

SEQ ID NO: 9382 - DNA, 852 bp, Staphylococcus aureus; identical to SEQ ID NO: 1530

SEQ ID NO: 9383 - DNA, 1485 bp, Staphylococcus aureus; identical to SEQ ID NO: 1531

SEQ ID NO: 9384 - DNA, 919 bp, Staphylococcus aureus; identical to SEQ ID NO: 1532

SEQ ID NO: 9385 - DNA, 993 bp, Staphylococcus aureus; identical to SEQ ID NO: 1533

SEQ ID NO: 9386 - DNA, 927 bp, Staphylococcus aureus; identical to SEQ ID NO: 1534

SEQ ID NO: 9387 - DNA, 363 bp, Staphylococcus aureus; identical to SEQ ID NO: 1535

SEQ ID NO: 9388 - DNA, 984 bp, Staphylococcus aureus; identical to SEQ ID NO: 1536

SEQ ID NO: 9389 - DNA, 675 bp, Staphylococcus aureus; identical to SEQ ID NO: 1537

SEQ ID NO: 9390 - DNA, 903 bp, Staphylococcus aureus; identical to SEQ ID NO: 1538

SEQ ID NO: 9391 - DNA, 735 bp, Staphylococcus aureus; identical to SEQ ID NO: 1539

SEQ ID NO: 9392 - DNA, 1338 bp, Staphylococcus aureus; identical to SEQ ID NO: 1540

SEQ ID NO: 9393 - DNA, 309 bp, Staphylococcus aureus; identical to SEQ ID NO: 1541

SEQ ID NO: 9394 - DNA, 915 bp, Staphylococcus aureus; identical to SEQ ID NO: 1542

SEQ ID NO: 9395 - DNA, 1143 bp, Staphylococcus aureus; identical to SEQ ID NO: 1543

SEQ ID NO: 9396 - DNA, 1344 bp, Staphylococcus aureus; identical to SEQ ID NO: 1544

SEQ ID NO: 9397 - DNA, 264 bp, Staphylococcus aureus; identical to SEQ ID NO: 1545

SEQ ID NO: 9398 - DNA, 1026 bp, Staphylococcus aureus; identical to SEQ ID NO: 1546

SEQ ID NO: 9399 - DNA, 1887 bp, Staphylococcus aureus; identical to SEQ ID NO: 1547

SEQ ID NO: 9400 - DNA, 660 bp, Staphylococcus aureus; identical to SEQ ID NO: 1548

SEQ ID NO: 9401 - DNA, 792 bp, Staphylococcus aureus; identical to SEQ ID NO: 1549

SEQ ID NO: 9402 - DNA, 120 bp, Staphylococcus aureus; identical to SEQ ID NO: 1550

SEQ ID NO: 9403 - DNA, 756 bp, Staphylococcus aureus; identical to SEQ ID NO: 1551

SEQ ID NO: 9404 - DNA, 843 bp, Staphylococcus aureus; identical to SEQ ID NO: 1552

SEQ ID NO: 9405 - DNA, 204 bp, Staphylococcus aureus; identical to SEQ ID NO: 1553

SEQ ID NO: 9406 - DNA, 1005 bp, Staphylococcus aureus; identical to SEQ ID NO: 1554

SEQ ID NO: 9407 - DNA, 810 bp, Staphylococcus aureus; identical to SEQ ID NO: 1555

SEQ ID NO: 9408 - DNA, 804 bp, Staphylococcus aureus; identical to SEQ ID NO: 1556

SEQ ID NO: 9409 - DNA, 396 bp, Staphylococcus aureus; identical to SEQ ID NO: 1557

SEQ ID NO: 9410 - DNA, 1269 bp, Staphylococcus aureus; identical to SEQ ID NO: 1558

SEQ ID NO: 9411 - DNA, 138 bp, Staphylococcus aureus; identical to SEQ ID NO: 1559

SEQ ID NO: 9412 - DNA, 486 bp, Staphylococcus aureus; identical to SEQ ID NO: 1560

SEQ ID NO: 9413 - DNA, 2799 bp, Staphylococcus aureus; identical to SEQ ID NO: 1561

SEQ ID NO: 9414 - DNA, 2733 bp, Staphylococcus aureus; identical to SEQ ID NO: 1562

SEQ ID NO: 9415 - DNA, 4500 bp, Staphylococcus aureus; identical to SEQ ID NO: 1563

SEQ ID NO: 9416 - DNA, 1356 bp, Staphylococcus aureus; identical to SEQ ID NO: 1564

SEQ ID NO: 9417 - DNA, 297 bp, Staphylococcus aureus; identical to SEQ ID NO: 1565

SEQ ID NO: 9418 - DNA, 1464 bp, Staphylococcus aureus; identical to SEQ ID NO: 1566

SEQ ID NO: 9419 - DNA, 660 bp, Staphylococcus aureus; identical to SEQ ID NO: 1567

SEQ ID NO: 9420 - DNA, 1428 bp, Staphylococcus aureus; identical to SEQ ID NO: 1568

SEQ ID NO: 9421 - DNA, 615 bp, Staphylococcus aureus; identical to SEQ ID NO: 1569

SEQ ID NO: 9422 - DNA, 105 bp, Staphylococcus aureus; identical to SEQ ID NO: 1570

SEQ ID NO: 9423 - DNA, 1641 bp, Staphylococcus aureus; identical to SEQ ID NO: 1571

SEQ ID NO: 9424 - DNA, 1071 bp, Staphylococcus aureus; identical to SEQ ID NO: 1572

SEQ ID NO: 9425 - DNA, 690 bp, Staphylococcus aureus; identical to SEQ ID NO: 1573

SEQ ID NO: 9426 - DNA, 510 bp, Staphylococcus aureus; identical to SEQ ID NO: 1574

SEQ ID NO: 9427 - DNA, 525 bp, Staphylococcus aureus; identical to SEQ ID NO: 1575

SEQ ID NO: 9428 - DNA, 1491 bp, Staphylococcus aureus; identical to SEQ ID NO: 1576

SEQ ID NO: 9429 - DNA, 816 bp, Staphylococcus aureus; identical to SEQ ID NO: 1577

SEQ ID NO: 9430 - DNA, 1698 bp, Staphylococcus aureus; identical to SEQ ID NO: 1578

SEQ ID NO: 9431 - DNA, 222 bp, Staphylococcus aureus; identical to SEQ ID NO: 1579

SEQ ID NO: 9432 - DNA, 318 bp, Staphylococcus aureus; identical to SEQ ID NO: 1580

SEQ ID NO: 9433 - DNA, 501 bp, Staphylococcus aureus; identical to SEQ ID NO: 1581

SEQ ID NO: 9434 - DNA, 195 bp, Staphylococcus aureus; identical to SEQ ID NO: 1582

SEQ ID NO: 9435 - DNA, 597 bp, Staphylococcus aureus; identical to SEQ ID NO: 1583

SEQ ID NO: 9436 - DNA, 429 bp, Staphylococcus aureus; identical to SEQ ID NO: 1584

SEQ ID NO: 9437 - DNA, 93 bp, Staphylococcus aureus; identical to SEQ ID NO: 1585

SEQ ID NO: 9438 - DNA, 1338 bp, Staphylococcus aureus; identical to SEQ ID NO: 1586

SEQ ID NO: 9439 - DNA, 534 bp, Staphylococcus aureus; identical to SEQ ID NO: 1587

SEQ ID NO: 9440 - DNA, 186 bp, Staphylococcus aureus; identical to SEQ ID NO: 1588

SEQ ID NO: 9441 - DNA, 618 bp, Staphylococcus aureus; identical to SEQ ID NO: 1589

SEQ ID NO: 9442 - DNA, 840 bp, Staphylococcus aureus; identical to SEQ ID NO: 1590

SEQ ID NO: 9443 - DNA, 330 bp, Staphylococcus aureus; identical to SEQ ID NO: 1591

SEQ ID NO: 9444 - DNA, 480 bp, Staphylococcus aureus; identical to SEQ ID NO: 1592

SEQ ID NO: 9445 - DNA, 927 bp, Staphylococcus aureus; identical to SEQ ID NO: 1593

SEQ ID NO: 9446 - DNA, 957 bp, Staphylococcus aureus; identical to SEQ ID NO: 1594

SEQ ID NO: 9447 - DNA, 804 bp, Staphylococcus aureus; identical to SEQ ID NO: 1595

SEQ ID NO: 9448 - DNA, 348 bp, Staphylococcus aureus; identical to SEQ ID NO: 1596

SEQ ID NO: 9449 - DNA, 438 bp, Staphylococcus aureus; identical to SEQ ID NO: 1597

SEQ ID NO: 9450 - DNA, 726 bp, Staphylococcus aureus; identical to SEQ ID NO: 1598

SEQ ID NO: 9451 - DNA, 1125 bp, Staphylococcus aureus; identical to SEQ ID NO: 1599

SEQ ID NO: 9452 - DNA, 1746 bp, Staphylococcus aureus; identical to SEQ ID NO: 1600

SEQ ID NO: 9453 - DNA, 801 bp, Staphylococcus aureus; identical to SEQ ID NO: 1601

SEQ ID NO: 9454 - DNA, 249 bp, Staphylococcus aureus; identical to SEQ ID NO: 1602

SEQ ID NO: 9455 - DNA, 252 bp, Staphylococcus aureus; identical to SEQ ID NO: 1603

SEQ ID NO: 9456 - DNA, 840 bp, Staphylococcus aureus; identical to SEQ ID NO: 1604

SEQ ID NO: 9457 - DNA, 222 bp, Staphylococcus aureus; identical to SEQ ID NO: 1605

SEQ ID NO: 9458 - DNA, 1974 bp, Staphylococcus aureus; identical to SEQ ID NO: 1606

SEQ ID NO: 9459 - DNA, 774 bp, Staphylococcus aureus; identical to SEQ ID NO: 1607

SEQ ID NO: 9460 - DNA, 147 bp, Staphylococcus aureus; identical to SEQ ID NO: 1608

SEQ ID NO: 9461 - DNA, 537 bp, Staphylococcus aureus; identical to SEQ ID NO: 1609

SEQ ID NO: 9462 - DNA, 1392 bp, Staphylococcus aureus; identical to SEQ ID NO: 1610

SEQ ID NO: 9463 - DNA, 114 bp, Staphylococcus aureus; identical to SEQ ID NO: 1611

SEQ ID NO: 9464 - DNA, 894 bp, Staphylococcus aureus; identical to SEQ ID NO: 1612

SEQ ID NO: 9465 - DNA, 1323 bp, Staphylococcus aureus; identical to SEQ ID NO: 1613

SEQ ID NO: 9466 - DNA, 264 bp, Staphylococcus aureus; identical to SEQ ID NO: 1614

SEQ ID NO: 9467 - DNA, 849 bp, Staphylococcus aureus; identical to SEQ ID NO: 1615

SEQ ID NO: 9468 - DNA, 1119 bp, Staphylococcus aureus; identical to SEQ ID NO: 1616

SEQ ID NO: 9469 - DNA, 825 bp, Staphylococcus aureus; identical to SEQ ID NO: 1617

SEQ ID NO: 9470 - DNA, 879 bp, Staphylococcus aureus; identical to SEQ ID NO: 1618

SEQ ID NO: 9471 - DNA, 381 bp, Staphylococcus aureus; identical to SEQ ID NO: 1619

SEQ ID NO: 9472 - DNA, 3441 bp, Staphylococcus aureus; identical to SEQ ID NO: 1620

SEQ ID NO: 9473 - DNA, 1068 bp, Staphylococcus aureus; identical to SEQ ID NO: 1621

SEQ ID NO: 9474 - DNA, 774 bp, Staphylococcus aureus; identical to SEQ ID NO: 1622

SEQ ID NO: 9475 - DNA, 303 bp, Staphylococcus aureus; identical to SEQ ID NO: 1623

SEQ ID NO: 9476 - DNA, 333 bp, Staphylococcus aureus; identical to SEQ ID NO: 1624

SEQ ID NO: 9477 - DNA, 129 bp, Staphylococcus aureus; identical to SEQ ID NO: 1625

SEQ ID NO: 9478 - DNA, 1146 bp, Staphylococcus aureus; identical to SEQ ID NO: 1626

SEQ ID NO: 9479 - DNA, 1353 bp, Staphylococcus aureus; identical to SEQ ID NO: 1627

SEQ ID NO: 9480 - DNA, 345 bp, Staphylococcus aureus; identical to SEQ ID NO: 1628

SEQ ID NO: 9481 - DNA, 966 bp, Staphylococcus aureus; identical to SEQ ID NO: 1629

SEQ ID NO: 9482 - DNA, 564 bp, Staphylococcus aureus; identical to SEQ ID NO: 1630

SEQ ID NO: 9483 - DNA, 351 bp, Staphylococcus aureus; identical to SEQ ID NO: 1631

SEQ ID NO: 9484 - DNA, 573 bp, Staphylococcus aureus; identical to SEQ ID NO: 1632

SEQ ID NO: 9485 - DNA, 342 bp, Staphylococcus aureus; identical to SEQ ID NO: 1633

SEQ ID NO: 9486 - DNA, 3507 bp, Staphylococcus aureus; identical to SEQ ID NO: 1634

SEQ ID NO: 9487 - DNA, 660 bp, Staphylococcus aureus; identical to SEQ ID NO: 1635

SEQ ID NO: 9488 - DNA, 108 bp, Staphylococcus aureus; identical to SEQ ID NO: 1636

SEQ ID NO: 9489 - DNA, 1527 bp, Staphylococcus aureus; identical to SEQ ID NO: 1637

SEQ ID NO: 9490 - DNA, 687 bp, Staphylococcus aureus; identical to SEQ ID NO: 1638

SEQ ID NO: 9491 - DNA, 1194 bp, Staphylococcus aureus; identical to SEQ ID NO: 1639

SEQ ID NO: 9492 - DNA, 1293 bp, Staphylococcus aureus; identical to SEQ ID NO: 1640

SEQ ID NO: 9493 - DNA, 264 bp, Staphylococcus aureus; identical to SEQ ID NO: 1641

SEQ ID NO: 9494 - DNA, 2694 bp, Staphylococcus aureus; identical to SEQ ID NO: 1642

SEQ ID NO: 9495 - DNA, 1935 bp, Staphylococcus aureus; identical to SEQ ID NO: 1643

SEQ ID NO: 9496 - DNA, 1524 bp, Staphylococcus aureus; identical to SEQ ID NO: 1644

SEQ ID NO: 9497 - DNA, 1335 bp, Staphylococcus aureus; identical to SEQ ID NO: 1645

SEQ ID NO: 9498 - DNA, 957 bp, Staphylococcus aureus; identical to SEQ ID NO: 1646

SEQ ID NO: 9499 - DNA, 972 bp, Staphylococcus aureus; identical to SEQ ID NO: 1647

SEQ ID NO: 9500 - DNA, 402 bp, Staphylococcus aureus; identical to SEQ ID NO: 1648

SEQ ID NO: 9501 - DNA, 1101 bp, Staphylococcus aureus; identical to SEQ ID NO: 1649

SEQ ID NO: 9502 - DNA, 1296 bp, Staphylococcus aureus; identical to SEQ ID NO: 1650

SEQ ID NO: 9503 - DNA, 1143 bp, Staphylococcus aureus; identical to SEQ ID NO: 1651

SEQ ID NO: 9504 - DNA, 540 bp, Staphylococcus aureus; identical to SEQ ID NO: 1652

SEQ ID NO: 9505 - DNA, 318 bp, Staphylococcus aureus; identical to SEQ ID NO: 1653

SEQ ID NO: 9506 - DNA, 2094 bp, Staphylococcus aureus; identical to SEQ ID NO: 1654

SEQ ID NO: 9507 - DNA, 708 bp, Staphylococcus aureus; identical to SEQ ID NO: 1655

SEQ ID NO: 9508 - DNA, 882 bp, Staphylococcus aureus; identical to SEQ ID NO: 1656

SEQ ID NO: 9509 - DNA, 588 bp, Staphylococcus aureus; identical to SEQ ID NO: 1657

SEQ ID NO: 9510 - DNA, 933 bp, Staphylococcus aureus; identical to SEQ ID NO: 1658

SEQ ID NO: 9511 - DNA, 576 bp, Staphylococcus aureus; identical to SEQ ID NO: 1659

SEQ ID NO: 9512 - DNA, 654 bp, Staphylococcus aureus; identical to SEQ ID NO: 1660

SEQ ID NO: 9513 - DNA, 1104 bp, Staphylococcus aureus; identical to SEQ ID NO: 1661

SEQ ID NO: 9514 - DNA, 366 bp, Staphylococcus aureus; identical to SEQ ID NO: 1662

SEQ ID NO: 9515 - DNA, 1299 bp, Staphylococcus aureus; identical to SEQ ID NO: 1663

SEQ ID NO: 9516 - DNA, 477 bp, Staphylococcus aureus; identical to SEQ ID NO: 1664

SEQ ID NO: 9517 - DNA, 1065 bp, Staphylococcus aureus; identical to SEQ ID NO: 1665

SEQ ID NO: 9518 - DNA, 1194 bp, Staphylococcus aureus; identical to SEQ ID NO: 1666

SEQ ID NO: 9519 - DNA, 102 bp, Staphylococcus aureus; identical to SEQ ID NO: 1667

SEQ ID NO: 9520 - DNA, 90 bp, Staphylococcus aureus; identical to SEQ ID NO: 1668

SEQ ID NO: 9521 - DNA, 1167 bp, Staphylococcus aureus; identical to SEQ ID NO: 1669

SEQ ID NO: 9522 - DNA, 1488 bp, Staphylococcus aureus; identical to SEQ ID NO: 1670

SEQ ID NO: 9523 - DNA, 201 bp, Staphylococcus aureus; identical to SEQ ID NO: 1671

SEQ ID NO: 9524 - DNA, 888 bp, Staphylococcus aureus; identical to SEQ ID NO: 1672

SEQ ID NO: 9525 - DNA, 561 bp, Staphylococcus aureus; identical to SEQ ID NO: 1673

SEQ ID NO: 9526 - DNA, 450 bp, Staphylococcus aureus; identical to SEQ ID NO: 1674

SEQ ID NO: 9527 - DNA, 462 bp, Staphylococcus aureus; identical to SEQ ID NO: 1675

SEQ ID NO: 9528 - DNA, 567 bp, Staphylococcus aureus; identical to SEQ ID NO: 1676

SEQ ID NO: 9529 - DNA, 603 bp, Staphylococcus aureus; identical to SEQ ID NO: 1677

SEQ ID NO: 9530 - DNA, 1008 bp, Staphylococcus aureus; identical to SEQ ID NO: 1678

SEQ ID NO: 9531 - DNA, 573 bp, Staphylococcus aureus; identical to SEQ ID NO: 1679

SEQ ID NO: 9532 - DNA, 2457 bp, Staphylococcus aureus; identical to SEQ ID NO: 1680

SEQ ID NO: 9533 - DNA, 273 bp, Staphylococcus aureus; identical to SEQ ID NO: 1681

SEQ ID NO: 9534 - DNA, 165 bp, Staphylococcus aureus; identical to SEQ ID NO: 1682

SEQ ID NO: 9535 - DNA, 1365 bp, Staphylococcus aureus; identical to SEQ ID NO: 1683

SEQ ID NO: 9536 - DNA, 999 bp, Staphylococcus aureus; identical to SEQ ID NO: 1684

SEQ ID NO: 9537 - DNA, 1074 bp, Staphylococcus aureus; identical to SEQ ID NO: 1685

SEQ ID NO: 9538 - DNA, 1311 bp, Staphylococcus aureus; identical to SEQ ID NO: 1686

SEQ ID NO: 9539 - DNA, 204 bp, Staphylococcus aureus; identical to SEQ ID NO: 1687

SEQ ID NO: 9540 - DNA, 327 bp, Staphylococcus aureus; identical to SEQ ID NO: 1688

SEQ ID NO: 9541 - DNA, 1455 bp, Staphylococcus aureus; identical to SEQ ID NO: 1689

SEQ ID NO: 9542 - DNA, 1176 bp, Staphylococcus aureus; identical to SEQ ID NO: 1690

SEQ ID NO: 9543 - DNA, 642 bp, Staphylococcus aureus; identical to SEQ ID NO: 1691

SEQ ID NO: 9544 - DNA, 552 bp, Staphylococcus aureus; identical to SEQ ID NO: 1692

SEQ ID NO: 9545 - DNA, 987 bp, Staphylococcus aureus; identical to SEQ ID NO: 1693

SEQ ID NO: 9546 - DNA, 747 bp, Staphylococcus aureus; identical to SEQ ID NO: 1694

SEQ ID NO: 9547 - DNA, 525 bp, Staphylococcus aureus; identical to SEQ ID NO: 1695

SEQ ID NO: 9548 - DNA, 1461 bp, Staphylococcus aureus; identical to SEQ ID NO: 1696

SEQ ID NO: 9549 - DNA, 570 bp, Staphylococcus aureus; identical to SEQ ID NO: 1697

SEQ ID NO: 9550 - DNA, 1380 bp, Staphylococcus aureus; identical to SEQ ID NO: 1698

SEQ ID NO: 9551 - DNA, 219 bp, Staphylococcus aureus; identical to SEQ ID NO: 1699

SEQ ID NO: 9552 - DNA, 954 bp, Staphylococcus aureus; identical to SEQ ID NO: 1700

SEQ ID NO: 9553 - DNA, 549 bp, Staphylococcus aureus; identical to SEQ ID NO: 1701

SEQ ID NO: 9554 - DNA, 546 bp, Staphylococcus aureus; identical to SEQ ID NO: 1702

SEQ ID NO: 9555 - DNA, 432 bp, Staphylococcus aureus; identical to SEQ ID NO: 1703

SEQ ID NO: 9556 - DNA, 117 bp, Staphylococcus aureus; identical to SEQ ID NO: 1704

SEQ ID NO: 9557 - DNA, 384 bp, Staphylococcus aureus; identical to SEQ ID NO: 1705

SEQ ID NO: 9558 - DNA, 693 bp, Staphylococcus aureus; identical to SEQ ID NO: 1706

SEQ ID NO: 9559 - DNA, 501 bp, Staphylococcus aureus; identical to SEQ ID NO: 1707

SEQ ID NO: 9560 - DNA, 207 bp, Staphylococcus aureus; identical to SEQ ID NO: 1708

SEQ ID NO: 9561 - DNA, 369 bp, Staphylococcus aureus; identical to SEQ ID NO: 1709

SEQ ID NO: 9562 - DNA, 162 bp, Staphylococcus aureus; identical to SEQ ID NO: 1710

SEQ ID NO: 9563 - DNA, 609 bp, Staphylococcus aureus; identical to SEQ ID NO: 1711

SEQ ID NO: 9564 - DNA, 3552 bp, Staphylococcus aureus; identical to SEQ ID NO: 1712

SEQ ID NO: 9565 - DNA, 2163 bp, Staphylococcus aureus; identical to SEQ ID NO: 1713

SEQ ID NO: 9566 - DNA, 2163 bp, Staphylococcus aureus; identical to SEQ ID NO: 1714

SEQ ID NO: 9567 - DNA, 2046 bp, Staphylococcus aureus; identical to SEQ ID NO: 1715

SEQ ID NO: 9568 - DNA, 258 bp, Staphylococcus aureus; identical to SEQ ID NO: 1716

SEQ ID NO: 9569 - DNA, 3624 bp, Staphylococcus aureus; identical to SEQ ID NO: 1717

SEQ ID NO: 9570 - DNA, 255 bp, Staphylococcus aureus; identical to SEQ ID NO: 1718

SEQ ID NO: 9571 - DNA, 1752 bp, Staphylococcus aureus; identical to SEQ ID NO: 1719

SEQ ID NO: 9572 - DNA, 414 bp, Staphylococcus aureus; identical to SEQ ID NO: 1720

SEQ ID NO: 9573 - DNA, 726 bp, Staphylococcus aureus; identical to SEQ ID NO: 1721

SEQ ID NO: 9574 - DNA, 471 bp, Staphylococcus aureus; identical to SEQ ID NO: 1722

SEQ ID NO: 9575 - DNA, 738 bp, Staphylococcus aureus; identical to SEQ ID NO: 1723

SEQ ID NO: 9576 - DNA, 2082 bp, Staphylococcus aureus; identical to SEQ ID NO: 1724

SEQ ID NO: 9577 - DNA, 543 bp, Staphylococcus aureus; identical to SEQ ID NO: 1725

SEQ ID NO: 9578 - DNA, 861 bp, Staphylococcus aureus; identical to SEQ ID NO: 1726

SEQ ID NO: 9579 - DNA, 204 bp, Staphylococcus aureus; identical to SEQ ID NO: 1727

SEQ ID NO: 9580 - DNA, 732 bp, Staphylococcus aureus; identical to SEQ ID NO: 1728

SEQ ID NO: 9581 - DNA, 1188 bp, Staphylococcus aureus; identical to SEQ ID NO: 1729

SEQ ID NO: 9582 - DNA, 888 bp, Staphylococcus aureus; identical to SEQ ID NO: 1730

SEQ ID NO: 9583 - DNA, 879 bp, Staphylococcus aureus; identical to SEQ ID NO: 1731

SEQ ID NO: 9584 - DNA, 450 bp, Staphylococcus aureus; identical to SEQ ID NO: 1732

SEQ ID NO: 9585 - DNA, 1638 bp, Staphylococcus aureus; identical to SEQ ID NO: 1733

SEQ ID NO: 9586 - DNA, 543 bp, Staphylococcus aureus; identical to SEQ ID NO: 1734

SEQ ID NO: 9587 - DNA, 966 bp, Staphylococcus aureus; identical to SEQ ID NO: 1735

SEQ ID NO: 9588 - DNA, 249 bp, Staphylococcus aureus; identical to SEQ ID NO: 1736

SEQ ID NO: 9589 - DNA, 1077 bp, Staphylococcus aureus; identical to SEQ ID NO: 1737

SEQ ID NO: 9590 - DNA, 756 bp, Staphylococcus aureus; identical to SEQ ID NO: 1738

SEQ ID NO: 9591 - DNA, 141 bp, Staphylococcus aureus; identical to SEQ ID NO: 1739

SEQ ID NO: 9592 - DNA, 684 bp, Staphylococcus aureus; identical to SEQ ID NO: 1740

SEQ ID NO: 9593 - DNA, 921 bp, Staphylococcus aureus; identical to SEQ ID NO: 1741

SEQ ID NO: 9594 - DNA, 471 bp, Staphylococcus aureus; identical to SEQ ID NO: 1742

SEQ ID NO: 9595 - DNA, 1650 bp, Staphylococcus aureus; identical to SEQ ID NO: 1743

SEQ ID NO: 9596 - DNA, 870 bp, Staphylococcus aureus; identical to SEQ ID NO: 1744

SEQ ID NO: 9597 - DNA, 1020 bp, Staphylococcus aureus; identical to SEQ ID NO: 1745

SEQ ID NO: 9598 - DNA, 744 bp, Staphylococcus aureus; identical to SEQ ID NO: 1746

SEQ ID NO: 9599 - DNA, 495 bp, Staphylococcus aureus; identical to SEQ ID NO: 1747

SEQ ID NO: 9600 - DNA, 567 bp, Staphylococcus aureus; identical to SEQ ID NO: 1748

SEQ ID NO: 9601 - DNA, 372 bp, Staphylococcus aureus; identical to SEQ ID NO: 1749

SEQ ID NO: 9602 - DNA, 1407 bp, Staphylococcus aureus; identical to SEQ ID NO: 1750

SEQ ID NO: 9603 - DNA, 1134 bp, Staphylococcus aureus; identical to SEQ ID NO: 1751

SEQ ID NO: 9604 - DNA, 195 bp, Staphylococcus aureus; identical to SEQ ID NO: 1752

SEQ ID NO: 9605 - DNA, 981 bp, Staphylococcus aureus; identical to SEQ ID NO: 1753

SEQ ID NO: 9606 - DNA, 1473 bp, Staphylococcus aureus; identical to SEQ ID NO: 1754

SEQ ID NO: 9607 - DNA, 438 bp, Staphylococcus aureus; identical to SEQ ID NO: 1755

SEQ ID NO: 9608 - DNA, 759 bp, Staphylococcus aureus; identical to SEQ ID NO: 1756

SEQ ID NO: 9609 - DNA, 633 bp, Staphylococcus aureus; identical to SEQ ID NO: 1757

SEQ ID NO: 9610 - DNA, 1275 bp, Staphylococcus aureus; identical to SEQ ID NO: 1758

SEQ ID NO: 9611 - DNA, 504 bp, Staphylococcus aureus; identical to SEQ ID NO: 1759

SEQ ID NO: 9612 - DNA, 984 bp, Staphylococcus aureus; identical to SEQ ID NO: 1760

SEQ ID NO: 9613 - DNA, 657 bp, Staphylococcus aureus; identical to SEQ ID NO: 1761

SEQ ID NO: 9614 - DNA, 993 bp, Staphylococcus aureus; identical to SEQ ID NO: 1762

SEQ ID NO: 9615 - DNA, 1401 bp, Staphylococcus aureus; identical to SEQ ID NO: 1763

SEQ ID NO: 9616 - DNA, 1422 bp, Staphylococcus aureus; identical to SEQ ID NO: 1764

SEQ ID NO: 9617 - DNA, 603 bp, Staphylococcus aureus; identical to SEQ ID NO: 1765

SEQ ID NO: 9618 - DNA, 771 bp, Staphylococcus aureus; identical to SEQ ID NO: 1766

SEQ ID NO: 9619 - DNA, 1377 bp, Staphylococcus aureus; identical to SEQ ID NO: 1767

SEQ ID NO: 9620 - DNA, 1539 bp, Staphylococcus aureus; identical to SEQ ID NO: 1768

SEQ ID NO: 9621 - DNA, 1140 bp, Staphylococcus aureus; identical to SEQ ID NO: 1769

SEQ ID NO: 9622 - DNA, 453 bp, Staphylococcus aureus; identical to SEQ ID NO: 1770

SEQ ID NO: 9623 - DNA, 366 bp, Staphylococcus aureus; identical to SEQ ID NO: 1771

SEQ ID NO: 9624 - DNA, 882 bp, Staphylococcus aureus; identical to SEQ ID NO: 1772

SEQ ID NO: 9625 - DNA, 270 bp, Staphylococcus aureus; identical to SEQ ID NO: 1773

SEQ ID NO: 9626 - DNA, 231 bp, Staphylococcus aureus; identical to SEQ ID NO: 1774

SEQ ID NO: 9627 - DNA, 657 bp, Staphylococcus aureus; identical to SEQ ID NO: 1775

SEQ ID NO: 9628 - DNA, 1338 bp, Staphylococcus aureus; identical to SEQ ID NO: 1776

SEQ ID NO: 9629 - DNA, 381 bp, Staphylococcus aureus; identical to SEQ ID NO: 1777

SEQ ID NO: 9630 - DNA, 390 bp, Staphylococcus aureus; identical to SEQ ID NO: 1778

SEQ ID NO: 9631 - DNA, 369 bp, Staphylococcus aureus; identical to SEQ ID NO: 1779

SEQ ID NO: 9632 - DNA, 363 bp, Staphylococcus aureus; identical to SEQ ID NO: 1780

SEQ ID NO: 9633 - DNA, 1485 bp, Staphylococcus aureus; identical to SEQ ID NO: 1781

SEQ ID NO: 9634 - DNA, 1356 bp, Staphylococcus aureus; identical to SEQ ID NO: 1782

SEQ ID NO: 9635 - DNA, 987 bp, Staphylococcus aureus; identical to SEQ ID NO: 1783

SEQ ID NO: 9636 - DNA, 465 bp, Staphylococcus aureus; identical to SEQ ID NO: 1784

SEQ ID NO: 9637 - DNA, 837 bp, Staphylococcus aureus; identical to SEQ ID NO: 1785

SEQ ID NO: 9638 - DNA, 1021 bp, Staphylococcus aureus; identical to SEQ ID NO: 1786

SEQ ID NO: 9639 - DNA, 3153 bp, Staphylococcus aureus; identical to SEQ ID NO: 1787

SEQ ID NO: 9640 - DNA, 1242 bp, Staphylococcus aureus; identical to SEQ ID NO: 1788

SEQ ID NO: 9641 - DNA, 921 bp, Staphylococcus aureus; identical to SEQ ID NO: 1789

SEQ ID NO: 9642 - DNA, 342 bp, Staphylococcus aureus; identical to SEQ ID NO: 1790

SEQ ID NO: 9643 - DNA, 984 bp, Staphylococcus aureus; identical to SEQ ID NO: 1791

SEQ ID NO: 9644 - DNA, 591 bp, Staphylococcus aureus; identical to SEQ ID NO: 1792

SEQ ID NO: 9645 - DNA, 1077 bp, Staphylococcus aureus; identical to SEQ ID NO: 1793

SEQ ID NO: 9646 - DNA, 1047 bp, Staphylococcus aureus; identical to SEQ ID NO: 1794

SEQ ID NO: 9647 - DNA, 342 bp, Staphylococcus aureus; identical to SEQ ID NO: 1795

SEQ ID NO: 9648 - DNA, 1848 bp, Staphylococcus aureus; identical to SEQ ID NO: 1796

SEQ ID NO: 9649 - DNA, 1359 bp, Staphylococcus aureus; identical to SEQ ID NO: 1797

SEQ ID NO: 9650 - DNA, 1410 bp, Staphylococcus aureus; identical to SEQ ID NO: 1798

SEQ ID NO: 9651 - DNA, 2496 bp, Staphylococcus aureus; identical to SEQ ID NO: 1799

SEQ ID NO: 9652 - DNA, 1395 bp, Staphylococcus aureus; identical to SEQ ID NO: 1800

SEQ ID NO: 9653 - DNA, 1401 bp, Staphylococcus aureus; identical to SEQ ID NO: 1801

SEQ ID NO: 9654 - DNA, 624 bp, Staphylococcus aureus; identical to SEQ ID NO: 1802

SEQ ID NO: 9655 - DNA, 384 bp, Staphylococcus aureus; identical to SEQ ID NO: 1803

SEQ ID NO: 9656 - DNA, 639 bp, Staphylococcus aureus; identical to SEQ ID NO: 1804

SEQ ID NO: 9657 - DNA, 261 bp, Staphylococcus aureus; identical to SEQ ID NO: 1805

SEQ ID NO: 9658 - DNA, 615 bp, Staphylococcus aureus; identical to SEQ ID NO: 1806

SEQ ID NO: 9659 - DNA, 1056 bp, Staphylococcus aureus; identical to SEQ ID NO: 1807

SEQ ID NO: 9660 - DNA, 627 bp, Staphylococcus aureus; identical to SEQ ID NO: 1808

SEQ ID NO: 9661 - DNA, 1092 bp, Staphylococcus aureus; identical to SEQ ID NO: 1809

SEQ ID NO: 9662 - DNA, 483 bp, Staphylococcus aureus; identical to SEQ ID NO: 1810

SEQ ID NO: 9663 - DNA, 1032 bp, Staphylococcus aureus; identical to SEQ ID NO: 1811

SEQ ID NO: 9664 - DNA, 621 bp, Staphylococcus aureus; identical to SEQ ID NO: 1812

SEQ ID NO: 9665 - DNA, 300 bp, Staphylococcus aureus; identical to SEQ ID NO: 1813

SEQ ID NO: 9666 - DNA, 642 bp, Staphylococcus aureus; identical to SEQ ID NO: 1814

SEQ ID NO: 9667 - DNA, 321 bp, Staphylococcus aureus; identical to SEQ ID NO: 1815

SEQ ID NO: 9668 - DNA, 627 bp, Staphylococcus aureus; identical to SEQ ID NO: 1816

SEQ ID NO: 9669 - DNA, 282 bp, Staphylococcus aureus; identical to SEQ ID NO: 1817

SEQ ID NO: 9670 - DNA, 627 bp, Staphylococcus aureus; identical to SEQ ID NO: 1818

SEQ ID NO: 9671 - DNA, 558 bp, Staphylococcus aureus; identical to SEQ ID NO: 1819

SEQ ID NO: 9672 - DNA, 648 bp, Staphylococcus aureus; identical to SEQ ID NO: 1820

SEQ ID NO: 9673 - DNA, 1062 bp, Staphylococcus aureus; identical to SEQ ID NO: 1821

SEQ ID NO: 9674 - DNA, 636 bp, Staphylococcus aureus; identical to SEQ ID NO: 1822

SEQ ID NO: 9675 - DNA, 831 bp, Staphylococcus aureus; identical to SEQ ID NO: 1823

SEQ ID NO: 9676 - DNA, 624 bp, Staphylococcus aureus; identical to SEQ ID NO: 1824

SEQ ID NO: 9677 - DNA, 1473 bp, Staphylococcus aureus; identical to SEQ ID NO: 1825

SEQ ID NO: 9678 - DNA, 939 bp, Staphylococcus aureus; identical to SEQ ID NO: 1826

SEQ ID NO: 9679 - DNA, 1347 bp, Staphylococcus aureus; identical to SEQ ID NO: 1827

SEQ ID NO: 9680 - DNA, 537 bp, Staphylococcus aureus; identical to SEQ ID NO: 1828

SEQ ID NO: 9681 - DNA, 1092 bp, Staphylococcus aureus; identical to SEQ ID NO: 1829

SEQ ID NO: 9682 - DNA, 477 bp, Staphylococcus aureus; identical to SEQ ID NO: 1830

SEQ ID NO: 9683 - DNA, 525 bp, Staphylococcus aureus; identical to SEQ ID NO: 1831

SEQ ID NO: 9684 - DNA, 987 bp, Staphylococcus aureus; identical to SEQ ID NO: 1832

SEQ ID NO: 9685 - DNA, 1185 bp, Staphylococcus aureus; identical to SEQ ID NO: 1833

SEQ ID NO: 9686 - DNA, 1296 bp, Staphylococcus aureus; identical to SEQ ID NO: 1834

SEQ ID NO: 9687 - DNA, 498 bp, Staphylococcus aureus; identical to SEQ ID NO: 1835

SEQ ID NO: 9688 - DNA, 522 bp, Staphylococcus aureus; identical to SEQ ID NO: 1836

SEQ ID NO: 9689 - DNA, 447 bp, Staphylococcus aureus; identical to SEQ ID NO: 1837

SEQ ID NO: 9690 - DNA, 1011 bp, Staphylococcus aureus; identical to SEQ ID NO: 1838

SEQ ID NO: 9691 - DNA, 312 bp, Staphylococcus aureus; identical to SEQ ID NO: 1839

SEQ ID NO: 9692 - DNA, 1071 bp, Staphylococcus aureus; identical to SEQ ID NO: 1840

SEQ ID NO: 9693 - DNA, 429 bp, Staphylococcus aureus; identical to SEQ ID NO: 1841

SEQ ID NO: 9694 - DNA, 975 bp, Staphylococcus aureus; identical to SEQ ID NO: 1842

SEQ ID NO: 9695 - DNA, 1662 bp, Staphylococcus aureus; identical to SEQ ID NO: 1843

SEQ ID NO: 9696 - DNA, 624 bp, Staphylococcus aureus; identical to SEQ ID NO: 1844

SEQ ID NO: 9697 - DNA, 186 bp, Staphylococcus aureus; identical to SEQ ID NO: 1845

SEQ ID NO: 9698 - DNA, 636 bp, Staphylococcus aureus; identical to SEQ ID NO: 1846

SEQ ID NO: 9699 - DNA, 330 bp, Staphylococcus aureus; identical to SEQ ID NO: 1847

SEQ ID NO: 9700 - DNA, 888 bp, Staphylococcus aureus; identical to SEQ ID NO: 1848

SEQ ID NO: 9701 - DNA, 987 bp, Staphylococcus aureus; identical to SEQ ID NO: 1849

SEQ ID NO: 9702 - DNA, 204 bp, Staphylococcus aureus; identical to SEQ ID NO: 1850

SEQ ID NO: 9703 - DNA, 954 bp, Staphylococcus aureus; identical to SEQ ID NO: 1851

SEQ ID NO: 9704 - DNA, 720 bp, Staphylococcus aureus; identical to SEQ ID NO: 1852

SEQ ID NO: 9705 - DNA, 1464 bp, Staphylococcus aureus; identical to SEQ ID NO: 1853

SEQ ID NO: 9706 - DNA, 2670 bp, Staphylococcus aureus; identical to SEQ ID NO: 1854

SEQ ID NO: 9707 - DNA, 1356 bp, Staphylococcus aureus; identical to SEQ ID NO: 1855

SEQ ID NO: 9708 - DNA, 801 bp, Staphylococcus aureus; identical to SEQ ID NO: 1856

SEQ ID NO: 9709 - DNA, 594 bp, Staphylococcus aureus; identical to SEQ ID NO: 1857

SEQ ID NO: 9710 - DNA, 135 bp, Staphylococcus aureus; identical to SEQ ID NO: 1858

SEQ ID NO: 9711 - DNA, 507 bp, Staphylococcus aureus; identical to SEQ ID NO: 1859

SEQ ID NO: 9712 - DNA, 150 bp, Staphylococcus aureus; identical to SEQ ID NO: 1860

SEQ ID NO: 9713 - DNA, 717 bp, Staphylococcus aureus; identical to SEQ ID NO: 1861

SEQ ID NO: 9714 - DNA, 2076 bp, Staphylococcus aureus; identical to SEQ ID NO: 1862

SEQ ID NO: 9715 - DNA, 789 bp, Staphylococcus aureus; identical to SEQ ID NO: 1863

SEQ ID NO: 9716 - DNA, 600 bp, Staphylococcus aureus; identical to SEQ ID NO: 1864

SEQ ID NO: 9717 - DNA, 561 bp, Staphylococcus aureus; identical to SEQ ID NO: 1865

SEQ ID NO: 9718 - DNA, 411 bp, Staphylococcus aureus; identical to SEQ ID NO: 1866

SEQ ID NO: 9719 - DNA, 873 bp, Staphylococcus aureus; identical to SEQ ID NO: 1867

SEQ ID NO: 9720 - DNA, 141 bp, Staphylococcus aureus; identical to SEQ ID NO: 1868

SEQ ID NO: 9721 - DNA, 786 bp, Staphylococcus aureus; identical to SEQ ID NO: 1869

SEQ ID NO: 9722 - DNA, 891 bp, Staphylococcus aureus; identical to SEQ ID NO: 1870

SEQ ID NO: 9723 - DNA, 117 bp, Staphylococcus aureus; identical to SEQ ID NO: 1871

SEQ ID NO: 9724 - DNA, 1347 bp, Staphylococcus aureus; identical to SEQ ID NO: 1872

SEQ ID NO: 9725 - DNA, 1497 bp, Staphylococcus aureus; identical to SEQ ID NO: 1873

SEQ ID NO: 9726 - DNA, 1101 bp, Staphylococcus aureus; identical to SEQ ID NO: 1874

SEQ ID NO: 9727 - DNA, 771 bp, Staphylococcus aureus; identical to SEQ ID NO: 1875

SEQ ID NO: 9728 - DNA, 483 bp, Staphylococcus aureus; identical to SEQ ID NO: 1876

SEQ ID NO: 9729 - DNA, 678 bp, Staphylococcus aureus; identical to SEQ ID NO: 1877

SEQ ID NO: 9730 - DNA, 303 bp, Staphylococcus aureus; identical to SEQ ID NO: 1878

SEQ ID NO: 9731 - DNA, 1107 bp, Staphylococcus aureus; identical to SEQ ID NO: 1879

SEQ ID NO: 9732 - DNA, 438 bp, Staphylococcus aureus; identical to SEQ ID NO: 1880

SEQ ID NO: 9733 - DNA, 1818 bp, Staphylococcus aureus; identical to SEQ ID NO: 1881

SEQ ID NO: 9734 - DNA, 1800 bp, Staphylococcus aureus; identical to SEQ ID NO: 1882

SEQ ID NO: 9735 - DNA, 2043 bp, Staphylococcus aureus; identical to SEQ ID NO: 1883

SEQ ID NO: 9736 - DNA, 819 bp, Staphylococcus aureus; identical to SEQ ID NO: 1884

SEQ ID NO: 9737 - DNA, 180 bp, Staphylococcus aureus; identical to SEQ ID NO: 1885

SEQ ID NO: 9738 - DNA, 645 bp, Staphylococcus aureus; identical to SEQ ID NO: 1886

SEQ ID NO: 9739 - DNA, 540 bp, Staphylococcus aureus; identical to SEQ ID NO: 1887

SEQ ID NO: 9740 - DNA, 753 bp, Staphylococcus aureus; identical to SEQ ID NO: 1888

SEQ ID NO: 9741 - DNA, 834 bp, Staphylococcus aureus; identical to SEQ ID NO: 1889

SEQ ID NO: 9742 - DNA, 900 bp, Staphylococcus aureus; identical to SEQ ID NO: 1890

SEQ ID NO: 9743 - DNA, 1104 bp, Staphylococcus aureus; identical to SEQ ID NO: 1891

SEQ ID NO: 9744 - DNA, 405 bp, Staphylococcus aureus; identical to SEQ ID NO: 1892

SEQ ID NO: 9745 - DNA, 1062 bp, Staphylococcus aureus; identical to SEQ ID NO: 1893

SEQ ID NO: 9746 - DNA, 345 bp, Staphylococcus aureus; identical to SEQ ID NO: 1894

SEQ ID NO: 9747 - DNA, 399 bp, Staphylococcus aureus; identical to SEQ ID NO: 1895

SEQ ID NO: 9748 - DNA, 468 bp, Staphylococcus aureus; identical to SEQ ID NO: 1896

SEQ ID NO: 9749 - DNA, 596 bp, Staphylococcus aureus; identical to SEQ ID NO: 1897

SEQ ID NO: 9750 - DNA, 1641 bp, Staphylococcus aureus; identical to SEQ ID NO: 1898

SEQ ID NO: 9751 - DNA, 771 bp, Staphylococcus aureus; identical to SEQ ID NO: 1899

SEQ ID NO: 9752 - DNA, 1728 bp, Staphylococcus aureus; identical to SEQ ID NO: 1900

SEQ ID NO: 9753 - DNA, 948 bp, Staphylococcus aureus; identical to SEQ ID NO: 1901

SEQ ID NO: 9754 - DNA, 699 bp, Staphylococcus aureus; identical to SEQ ID NO: 1902

SEQ ID NO: 9755 - DNA, 90 bp, Staphylococcus aureus; identical to SEQ ID NO: 1903

SEQ ID NO: 9756 - DNA, 990 bp, Staphylococcus aureus; identical to SEQ ID NO: 1904

SEQ ID NO: 9757 - DNA, 834 bp, Staphylococcus aureus; identical to SEQ ID NO: 1905

SEQ ID NO: 9758 - DNA, 708 bp, Staphylococcus aureus; identical to SEQ ID NO: 1906

SEQ ID NO: 9759 - DNA, 798 bp, Staphylococcus aureus; identical to SEQ ID NO: 1907

SEQ ID NO: 9760 - DNA, 177 bp, Staphylococcus aureus; identical to SEQ ID NO: 1908

SEQ ID NO: 9761 - DNA, 1005 bp, Staphylococcus aureus; identical to SEQ ID NO: 1909

SEQ ID NO: 9762 - DNA, 1347 bp, Staphylococcus aureus; identical to SEQ ID NO: 1910

SEQ ID NO: 9763 - DNA, 1017 bp, Staphylococcus aureus; identical to SEQ ID NO: 1911

SEQ ID NO: 9764 - DNA, 753 bp, Staphylococcus aureus; identical to SEQ ID NO: 1912

SEQ ID NO: 9765 - DNA, 969 bp, Staphylococcus aureus; identical to SEQ ID NO: 1913

SEQ ID NO: 9766 - DNA, 939 bp, Staphylococcus aureus; identical to SEQ ID NO: 1914

SEQ ID NO: 9767 - DNA, 585 bp, Staphylococcus aureus; identical to SEQ ID NO: 1915

SEQ ID NO: 9768 - DNA, 1140 bp, Staphylococcus aureus; identical to SEQ ID NO: 1916

SEQ ID NO: 9769 - DNA, 363 bp, Staphylococcus aureus; identical to SEQ ID NO: 1917

SEQ ID NO: 9770 - DNA, 1833 bp, Staphylococcus aureus; identical to SEQ ID NO: 1918

SEQ ID NO: 9771 - DNA, 2046 bp, Staphylococcus aureus; identical to SEQ ID NO: 1919

SEQ ID NO: 9772 - DNA, 498 bp, Staphylococcus aureus; identical to SEQ ID NO: 1920

SEQ ID NO: 9773 - DNA, 627 bp, Staphylococcus aureus; identical to SEQ ID NO: 1921

SEQ ID NO: 9774 - DNA, 1068 bp, Staphylococcus aureus; identical to SEQ ID NO: 1922

SEQ ID NO: 9775 - DNA, 978 bp, Staphylococcus aureus; identical to SEQ ID NO: 1923

SEQ ID NO: 9776 - DNA, 1044 bp, Staphylococcus aureus; identical to SEQ ID NO: 1924

SEQ ID NO: 9777 - DNA, 1158 bp, Staphylococcus aureus; identical to SEQ ID NO: 1925

SEQ ID NO: 9778 - DNA, 429 bp, Staphylococcus aureus; identical to SEQ ID NO: 1926

SEQ ID NO: 9779 - DNA, 1824 bp, Staphylococcus aureus; identical to SEQ ID NO: 1927

SEQ ID NO: 9780 - DNA, 924 bp, Staphylococcus aureus; identical to SEQ ID NO: 1928

SEQ ID NO: 9781 - DNA, 975 bp, Staphylococcus aureus; identical to SEQ ID NO: 1929

SEQ ID NO: 9782 - DNA, 684 bp, Staphylococcus aureus; identical to SEQ ID NO: 1930

SEQ ID NO: 9783 - DNA, 2148 bp, Staphylococcus aureus; identical to SEQ ID NO: 1931

SEQ ID NO: 9784 - DNA, 432 bp, Staphylococcus aureus; identical to SEQ ID NO: 1932

SEQ ID NO: 9785 - DNA, 687 bp, Staphylococcus aureus; identical to SEQ ID NO: 1933

SEQ ID NO: 9786 - DNA, 1890 bp, Staphylococcus aureus; identical to SEQ ID NO: 1934

SEQ ID NO: 9787 - DNA, 717 bp, Staphylococcus aureus; identical to SEQ ID NO: 1935

SEQ ID NO: 9788 - DNA, 618 bp, Staphylococcus aureus; identical to SEQ ID NO: 1936

SEQ ID NO: 9789 - DNA, 354 bp, Staphylococcus aureus; identical to SEQ ID NO: 1937

SEQ ID NO: 9790 - DNA, 1593 bp, Staphylococcus aureus; identical to SEQ ID NO: 1938

SEQ ID NO: 9791 - DNA, 1008 bp, Staphylococcus aureus; identical to SEQ ID NO: 1939

SEQ ID NO: 9792 - DNA, 585 bp, Staphylococcus aureus; identical to SEQ ID NO: 1940

SEQ ID NO: 9793 - DNA, 645 bp, Staphylococcus aureus; identical to SEQ ID NO: 1941

SEQ ID NO: 9794 - DNA, 570 bp, Staphylococcus aureus; identical to SEQ ID NO: 1942

SEQ ID NO: 9795 - DNA, 2151 bp, Staphylococcus aureus; identical to SEQ ID NO: 1943

SEQ ID NO: 9796 - DNA, 291 bp, Staphylococcus aureus; identical to SEQ ID NO: 1944

SEQ ID NO: 9797 - DNA, 426 bp, Staphylococcus aureus; identical to SEQ ID NO: 1945

SEQ ID NO: 9798 - DNA, 807 bp, Staphylococcus aureus; identical to SEQ ID NO: 1946

SEQ ID NO: 9799 - DNA, 717 bp, Staphylococcus aureus; identical to SEQ ID NO: 1947

SEQ ID NO: 9800 - DNA, 1101 bp, Staphylococcus aureus; identical to SEQ ID NO: 1948

SEQ ID NO: 9801 - DNA, 474 bp, Staphylococcus aureus; identical to SEQ ID NO: 1949

SEQ ID NO: 9802 - DNA, 528 bp, Staphylococcus aureus; identical to SEQ ID NO: 1950

SEQ ID NO: 9803 - DNA, 117 bp, Staphylococcus aureus; identical to SEQ ID NO: 1951

SEQ ID NO: 9804 - DNA, 687 bp, Staphylococcus aureus; identical to SEQ ID NO: 1952

SEQ ID NO: 9805 - DNA, 645 bp, Staphylococcus aureus; identical to SEQ ID NO: 1953

SEQ ID NO: 9806 - DNA, 867 bp, Staphylococcus aureus; identical to SEQ ID NO: 1954

SEQ ID NO: 9807 - DNA, 1221 bp, Staphylococcus aureus; identical to SEQ ID NO: 1955

SEQ ID NO: 9808 - DNA, 1221 bp, Staphylococcus aureus; identical to SEQ ID NO: 1956

SEQ ID NO: 9809 - DNA, 1230 bp, Staphylococcus aureus; identical to SEQ ID NO: 1957

SEQ ID NO: 9810 - DNA, 2199 bp, Staphylococcus aureus; identical to SEQ ID NO: 1958

SEQ ID NO: 9811 - DNA, 774 bp, Staphylococcus aureus; identical to SEQ ID NO: 1959

SEQ ID NO: 9812 - DNA, 489 bp, Staphylococcus aureus; identical to SEQ ID NO: 1960

SEQ ID NO: 9813 - DNA, 753 bp, Staphylococcus aureus; identical to SEQ ID NO: 1961

SEQ ID NO: 9814 - DNA, 468 bp, Staphylococcus aureus; identical to SEQ ID NO: 1962

SEQ ID NO: 9815 - DNA, 444 bp, Staphylococcus aureus; identical to SEQ ID NO: 1963

SEQ ID NO: 9816 - DNA, 1362 bp, Staphylococcus aureus; identical to SEQ ID NO: 1964

SEQ ID NO: 9817 - DNA, 396 bp, Staphylococcus aureus; identical to SEQ ID NO: 1965

SEQ ID NO: 9818 - DNA, 450 bp, Staphylococcus aureus; identical to SEQ ID NO: 1966

SEQ ID NO: 9819 - DNA, 300 bp, Staphylococcus aureus; identical to SEQ ID NO: 1967

SEQ ID NO: 9820 - DNA, 915 bp, Staphylococcus aureus; identical to SEQ ID NO: 1968

SEQ ID NO: 9821 - DNA, 543 bp, Staphylococcus aureus; identical to SEQ ID NO: 1969

SEQ ID NO: 9822 - DNA, 735 bp, Staphylococcus aureus; identical to SEQ ID NO: 1970

SEQ ID NO: 9823 - DNA, 1632 bp, Staphylococcus aureus; identical to SEQ ID NO: 1971

SEQ ID NO: 9824 - DNA, 477 bp, Staphylococcus aureus; identical to SEQ ID NO: 1972

SEQ ID NO: 9825 - DNA, 1674 bp, Staphylococcus aureus; identical to SEQ ID NO: 1973

SEQ ID NO: 9826 - DNA, 624 bp, Staphylococcus aureus; identical to SEQ ID NO: 1974

SEQ ID NO: 9827 - DNA, 927 bp, Staphylococcus aureus; identical to SEQ ID NO: 1975

SEQ ID NO: 9828 - DNA, 1269 bp, Staphylococcus aureus; identical to SEQ ID NO: 1976

SEQ ID NO: 9829 - DNA, 924 bp, Staphylococcus aureus; identical to SEQ ID NO: 1977

SEQ ID NO: 9830 - DNA, 288 bp, Staphylococcus aureus; identical to SEQ ID NO: 1978

SEQ ID NO: 9831 - DNA, 639 bp, Staphylococcus aureus; identical to SEQ ID NO: 1979

SEQ ID NO: 9832 - DNA, 1179 bp, Staphylococcus aureus; identical to SEQ ID NO: 1980

SEQ ID NO: 9833 - DNA, 627 bp, Staphylococcus aureus; identical to SEQ ID NO: 1981

SEQ ID NO: 9834 - DNA, 1554 bp, Staphylococcus aureus; identical to SEQ ID NO: 1982

SEQ ID NO: 9835 - DNA, 309 bp, Staphylococcus aureus; identical to SEQ ID NO: 1983

SEQ ID NO: 9836 - DNA, 1374 bp, Staphylococcus aureus; identical to SEQ ID NO: 1984

SEQ ID NO: 9837 - DNA, 429 bp, Staphylococcus aureus; identical to SEQ ID NO: 1985

SEQ ID NO: 9838 - DNA, 1167 bp, Staphylococcus aureus; identical to SEQ ID NO: 1986

SEQ ID NO: 9839 - DNA, 261 bp, Staphylococcus aureus; identical to SEQ ID NO: 1987

SEQ ID NO: 9840 - DNA, 465 bp, Staphylococcus aureus; identical to SEQ ID NO: 1988

SEQ ID NO: 9841 - DNA, 2631 bp, Staphylococcus aureus; identical to SEQ ID NO: 1989

SEQ ID NO: 9842 - DNA, 483 bp, Staphylococcus aureus; identical to SEQ ID NO: 1990

SEQ ID NO: 9843 - DNA, 2478 bp, Staphylococcus aureus; identical to SEQ ID NO: 1991

SEQ ID NO: 9844 - DNA, 765 bp, Staphylococcus aureus; identical to SEQ ID NO: 1992

SEQ ID NO: 9845 - DNA, 669 bp, Staphylococcus aureus; identical to SEQ ID NO: 1993

SEQ ID NO: 9846 - DNA, 921 bp, Staphylococcus aureus; identical to SEQ ID NO: 1994

SEQ ID NO: 9847 - DNA, 1119 bp, Staphylococcus aureus; identical to SEQ ID NO: 1995

SEQ ID NO: 9848 - DNA, 1143 bp, Staphylococcus aureus; identical to SEQ ID NO: 1996

SEQ ID NO: 9849 - DNA, 1959 bp, Staphylococcus aureus; identical to SEQ ID NO: 1997

SEQ ID NO: 9850 - DNA, 1182 bp, Staphylococcus aureus; identical to SEQ ID NO: 1998

SEQ ID NO: 9851 - DNA, 1350 bp, Staphylococcus aureus; identical to SEQ ID NO: 1999

SEQ ID NO: 9852 - DNA, 183 bp, Staphylococcus aureus; identical to SEQ ID NO: 2000

SEQ ID NO: 9853 - DNA, 1389 bp, Staphylococcus aureus; identical to SEQ ID NO: 2001

SEQ ID NO: 9854 - DNA, 573 bp, Staphylococcus aureus; identical to SEQ ID NO: 2002

SEQ ID NO: 9855 - DNA, 840 bp, Staphylococcus aureus; identical to SEQ ID NO: 2003

SEQ ID NO: 9856 - DNA, 423 bp, Staphylococcus aureus; identical to SEQ ID NO: 2004

SEQ ID NO: 9857 - DNA, 984 bp, Staphylococcus aureus; identical to SEQ ID NO: 2005

SEQ ID NO: 9858 - DNA, 774 bp, Staphylococcus aureus; identical to SEQ ID NO: 2006

SEQ ID NO: 9859 - DNA, 594 bp, Staphylococcus aureus; identical to SEQ ID NO: 2007

SEQ ID NO: 9860 - DNA, 126 bp, Staphylococcus aureus; identical to SEQ ID NO: 2008

SEQ ID NO: 9861 - DNA, 177 bp, Staphylococcus aureus; identical to SEQ ID NO: 2009

SEQ ID NO: 9862 - DNA, 1152 bp, Staphylococcus aureus; identical to SEQ ID NO: 2010

SEQ ID NO: 9863 - DNA, 711 bp, Staphylococcus aureus; identical to SEQ ID NO: 2011

SEQ ID NO: 9864 - DNA, 1263 bp, Staphylococcus aureus; identical to SEQ ID NO: 2012

SEQ ID NO: 9865 - DNA, 1005 bp, Staphylococcus aureus; identical to SEQ ID NO: 2013

SEQ ID NO: 9866 - DNA, 876 bp, Staphylococcus aureus; identical to SEQ ID NO: 2014

SEQ ID NO: 9867 - DNA, 1941 bp, Staphylococcus aureus; identical to SEQ ID NO: 2015

SEQ ID NO: 9868 - DNA, 453 bp, Staphylococcus aureus; identical to SEQ ID NO: 2016

SEQ ID NO: 9869 - DNA, 1884 bp, Staphylococcus aureus; identical to SEQ ID NO: 2017

SEQ ID NO: 9870 - DNA, 2190 bp, Staphylococcus aureus; identical to SEQ ID NO: 2018

SEQ ID NO: 9871 - DNA, 1782 bp, Staphylococcus aureus; identical to SEQ ID NO: 2019

SEQ ID NO: 9872 - DNA, 519 bp, Staphylococcus aureus; identical to SEQ ID NO: 2020

SEQ ID NO: 9873 - DNA, 2274 bp, Staphylococcus aureus; identical to SEQ ID NO: 2021

SEQ ID NO: 9874 - DNA, 978 bp, Staphylococcus aureus; identical to SEQ ID NO: 2022

SEQ ID NO: 9875 - DNA, 120 bp, Staphylococcus aureus; identical to SEQ ID NO: 2023

SEQ ID NO: 9876 - DNA, 759 bp, Staphylococcus aureus; identical to SEQ ID NO: 2024

SEQ ID NO: 9877 - DNA, 1515 bp, Staphylococcus aureus; identical to SEQ ID NO: 2025

SEQ ID NO: 9878 - DNA, 2151 bp, Staphylococcus aureus; identical to SEQ ID NO: 2026

SEQ ID NO: 9879 - DNA, 1059 bp, Staphylococcus aureus; identical to SEQ ID NO: 2027

SEQ ID NO: 9880 - DNA, 261 bp, Staphylococcus aureus; identical to SEQ ID NO: 2028

SEQ ID NO: 9881 - DNA, 543 bp, Staphylococcus aureus; identical to SEQ ID NO: 2029

SEQ ID NO: 9882 - DNA, 1140 bp, Staphylococcus aureus; identical to SEQ ID NO: 2030

SEQ ID NO: 9883 - DNA, 1026 bp, Staphylococcus aureus; identical to SEQ ID NO: 2031

SEQ ID NO: 9884 - DNA, 399 bp, Staphylococcus aureus; identical to SEQ ID NO: 2032

SEQ ID NO: 9885 - DNA, 1005 bp, Staphylococcus aureus; identical to SEQ ID NO: 2033

SEQ ID NO: 9886 - DNA, 2106 bp, Staphylococcus aureus; identical to SEQ ID NO: 2034

SEQ ID NO: 9887 - DNA, 603 bp, Staphylococcus aureus; identical to SEQ ID NO: 2035

SEQ ID NO: 9888 - DNA, 972 bp, Staphylococcus aureus; identical to SEQ ID NO: 2036

SEQ ID NO: 9889 - DNA, 456 bp, Staphylococcus aureus; identical to SEQ ID NO: 2037

SEQ ID NO: 9890 - DNA, 102 bp, Staphylococcus aureus; identical to SEQ ID NO: 2038

SEQ ID NO: 9891 - DNA, 1293 bp, Staphylococcus aureus; identical to SEQ ID NO: 2039

SEQ ID NO: 9892 - DNA, 153 bp, Staphylococcus aureus; identical to SEQ ID NO: 2040

SEQ ID NO: 9893 - DNA, 285 bp, Staphylococcus aureus; identical to SEQ ID NO: 2041

SEQ ID NO: 9894 - DNA, 339 bp, Staphylococcus aureus; identical to SEQ ID NO: 2042

SEQ ID NO: 9895 - DNA, 1398 bp, Staphylococcus aureus; identical to SEQ ID NO: 2043

SEQ ID NO: 9896 - DNA, 1557 bp, Staphylococcus aureus; identical to SEQ ID NO: 2044

SEQ ID NO: 9897 - DNA, 957 bp, Staphylococcus aureus; identical to SEQ ID NO: 2045

SEQ ID NO: 9898 - DNA, 309 bp, Staphylococcus aureus; identical to SEQ ID NO: 2046

SEQ ID NO: 9899 - DNA, 762 bp, Staphylococcus aureus; identical to SEQ ID NO: 2047

SEQ ID NO: 9900 - DNA, 531 bp, Staphylococcus aureus; identical to SEQ ID NO: 2048

SEQ ID NO: 9901 - DNA, 1030 bp, Staphylococcus aureus; identical to SEQ ID NO: 2049

SEQ ID NO: 9902 - DNA, 843 bp, Staphylococcus aureus; identical to SEQ ID NO: 2050

SEQ ID NO: 9903 - DNA, 879 bp, Staphylococcus aureus; identical to SEQ ID NO: 2051

SEQ ID NO: 9904 - DNA, 474 bp, Staphylococcus aureus; identical to SEQ ID NO: 2052

SEQ ID NO: 9905 - DNA, 321 bp, Staphylococcus aureus; identical to SEQ ID NO: 2053

SEQ ID NO: 9906 - DNA, 285 bp, Staphylococcus aureus; identical to SEQ ID NO: 2054

SEQ ID NO: 9907 - DNA, 1125 bp, Staphylococcus aureus; identical to SEQ ID NO: 2055

SEQ ID NO: 9908 - DNA, 687 bp, Staphylococcus aureus; identical to SEQ ID NO: 2056

SEQ ID NO: 9909 - DNA, 1056 bp, Staphylococcus aureus; identical to SEQ ID NO: 2057

SEQ ID NO: 9910 - DNA, 708 bp, Staphylococcus aureus; identical to SEQ ID NO: 2058

SEQ ID NO: 9911 - DNA, 102 bp, Staphylococcus aureus; identical to SEQ ID NO: 2059

SEQ ID NO: 9912 - DNA, 867 bp, Staphylococcus aureus; identical to SEQ ID NO: 2060

SEQ ID NO: 9913 - DNA, 1272 bp, Staphylococcus aureus; identical to SEQ ID NO: 2061

SEQ ID NO: 9914 - DNA, 384 bp, Staphylococcus aureus; identical to SEQ ID NO: 2062

SEQ ID NO: 9915 - DNA, 1083 bp, Staphylococcus aureus; identical to SEQ ID NO: 2063

SEQ ID NO: 9916 - DNA, 2631 bp, Staphylococcus aureus; identical to SEQ ID NO: 2064

SEQ ID NO: 9917 - DNA, 675 bp, Staphylococcus aureus; identical to SEQ ID NO: 2065

SEQ ID NO: 9918 - DNA, 1074 bp, Staphylococcus aureus; identical to SEQ ID NO: 2066

SEQ ID NO: 9919 - DNA, 1515 bp, Staphylococcus aureus; identical to SEQ ID NO: 2067

SEQ ID NO: 9920 - DNA, 474 bp, Staphylococcus aureus; identical to SEQ ID NO: 2068

SEQ ID NO: 9921 - DNA, 969 bp, Staphylococcus aureus; identical to SEQ ID NO: 2069

SEQ ID NO: 9922 - DNA, 573 bp, Staphylococcus aureus; identical to SEQ ID NO: 2070

SEQ ID NO: 9923 - DNA, 102 bp, Staphylococcus aureus; identical to SEQ ID NO: 2071

SEQ ID NO: 9924 - DNA, 2532 bp, Staphylococcus aureus; identical to SEQ ID NO: 2072

SEQ ID NO: 9925 - DNA, 1287 bp, Staphylococcus aureus; identical to SEQ ID NO: 2073

SEQ ID NO: 9926 - DNA, 975 bp, Staphylococcus aureus; identical to SEQ ID NO: 2074

SEQ ID NO: 9927 - DNA, 669 bp, Staphylococcus aureus; identical to SEQ ID NO: 2075

SEQ ID NO: 9928 - DNA, 876 bp, Staphylococcus aureus; identical to SEQ ID NO: 2076

SEQ ID NO: 9929 - DNA, 927 bp, Staphylococcus aureus; identical to SEQ ID NO: 2077

SEQ ID NO: 9930 - DNA, 132 bp, Staphylococcus aureus; identical to SEQ ID NO: 2078

SEQ ID NO: 9931 - DNA, 840 bp, Staphylococcus aureus; identical to SEQ ID NO: 2079

SEQ ID NO: 9932 - DNA, 816 bp, Staphylococcus aureus; identical to SEQ ID NO: 2080

SEQ ID NO: 9933 - DNA, 651 bp, Staphylococcus aureus; identical to SEQ ID NO: 2081

SEQ ID NO: 9934 - DNA, 1347 bp, Staphylococcus aureus; identical to SEQ ID NO: 2082

SEQ ID NO: 9935 - DNA, 237 bp, Staphylococcus aureus; identical to SEQ ID NO: 2083

SEQ ID NO: 9936 - DNA, 591 bp, Staphylococcus aureus; identical to SEQ ID NO: 2084

SEQ ID NO: 9937 - DNA, 1992 bp, Staphylococcus aureus; identical to SEQ ID NO: 2085

SEQ ID NO: 9938 - DNA, 1263 bp, Staphylococcus aureus; identical to SEQ ID NO: 2086

SEQ ID NO: 9939 - DNA, 2847 bp, Staphylococcus aureus; identical to SEQ ID NO: 2087

SEQ ID NO: 9940 - DNA, 1302 bp, Staphylococcus aureus; identical to SEQ ID NO: 2088

SEQ ID NO: 9941 - DNA, 1593 bp, Staphylococcus aureus; identical to SEQ ID NO: 2089

SEQ ID NO: 9942 - DNA, 345 bp, Staphylococcus aureus; identical to SEQ ID NO: 2090

SEQ ID NO: 9943 - DNA, 933 bp, Staphylococcus aureus; identical to SEQ ID NO: 2091

SEQ ID NO: 9944 - DNA, 930 bp, Staphylococcus aureus; identical to SEQ ID NO: 2092

SEQ ID NO: 9945 - DNA, 840 bp, Staphylococcus aureus; identical to SEQ ID NO: 2093

SEQ ID NO: 9946 - DNA, 609 bp, Staphylococcus aureus; identical to SEQ ID NO: 2094

SEQ ID NO: 9947 - DNA, 486 bp, Staphylococcus aureus; identical to SEQ ID NO: 2095

SEQ ID NO: 9948 - DNA, 357 bp, Staphylococcus aureus; identical to SEQ ID NO: 2096

SEQ ID NO: 9949 - DNA, 1440 bp, Staphylococcus aureus; identical to SEQ ID NO: 2097

SEQ ID NO: 9950 - DNA, 201 bp, Staphylococcus aureus; identical to SEQ ID NO: 2098

SEQ ID NO: 9951 - DNA, 936 bp, Staphylococcus aureus; identical to SEQ ID NO: 2099

SEQ ID NO: 9952 - DNA, 528 bp, Staphylococcus aureus; identical to SEQ ID NO: 2100

SEQ ID NO: 9953 - DNA, 912 bp, Staphylococcus aureus; identical to SEQ ID NO: 2101

SEQ ID NO: 9954 - DNA, 1494 bp, Staphylococcus aureus; identical to SEQ ID NO: 2102

SEQ ID NO: 9955 - DNA, 996 bp, Staphylococcus aureus; identical to SEQ ID NO: 2103

SEQ ID NO: 9956 - DNA, 1938 bp, Staphylococcus aureus; identical to SEQ ID NO: 2104

SEQ ID NO: 9957 - DNA, 945 bp, Staphylococcus aureus; identical to SEQ ID NO: 2105

SEQ ID NO: 9958 - DNA, 120 bp, Staphylococcus aureus; identical to SEQ ID NO: 2106

SEQ ID NO: 9959 - DNA, 588 bp, Staphylococcus aureus; identical to SEQ ID NO: 2107

SEQ ID NO: 9960 - DNA, 921 bp, Staphylococcus aureus; identical to SEQ ID NO: 2108

SEQ ID NO: 9961 - DNA, 630 bp, Staphylococcus aureus; identical to SEQ ID NO: 2109

SEQ ID NO: 9962 - DNA, 1185 bp, Staphylococcus aureus; identical to SEQ ID NO: 2110

SEQ ID NO: 9963 - DNA, 1014 bp, Staphylococcus aureus; identical to SEQ ID NO: 2111

SEQ ID NO: 9964 - DNA, 471 bp, Staphylococcus aureus; identical to SEQ ID NO: 2112

SEQ ID NO: 9965 - DNA, 1011 bp, Staphylococcus aureus; identical to SEQ ID NO: 2113

SEQ ID NO: 9966 - DNA, 1026 bp, Staphylococcus aureus; identical to SEQ ID NO: 2114

SEQ ID NO: 9967 - DNA, 1191 bp, Staphylococcus aureus; identical to SEQ ID NO: 2115

SEQ ID NO: 9968 - DNA, 624 bp, Staphylococcus aureus; identical to SEQ ID NO: 2116

SEQ ID NO: 9969 - DNA, 762 bp, Staphylococcus aureus; identical to SEQ ID NO: 2117

SEQ ID NO: 9970 - DNA, 873 bp, Staphylococcus aureus; identical to SEQ ID NO: 2118

SEQ ID NO: 9971 - DNA, 1518 bp, Staphylococcus aureus; identical to SEQ ID NO: 2119

SEQ ID NO: 9972 - DNA, 2631 bp, Staphylococcus aureus; identical to SEQ ID NO: 2120

SEQ ID NO: 9973 - DNA, 1305 bp, Staphylococcus aureus; identical to SEQ ID NO: 2121

SEQ ID NO: 9974 - DNA, 1488 bp, Staphylococcus aureus; identical to SEQ ID NO: 2122

SEQ ID NO: 9975 - DNA, 459 bp, Staphylococcus aureus; identical to SEQ ID NO: 2123

SEQ ID NO: 9976 - DNA, 1662 bp, Staphylococcus aureus; identical to SEQ ID NO: 2124

SEQ ID NO: 9977 - DNA, 276 bp, Staphylococcus aureus; identical to SEQ ID NO: 2125

SEQ ID NO: 9978 - DNA, 705 bp, Staphylococcus aureus; identical to SEQ ID NO: 2126

SEQ ID NO: 9979 - DNA, 1269 bp, Staphylococcus aureus; identical to SEQ ID NO: 2127

SEQ ID NO: 9980 - DNA, 2373 bp, Staphylococcus aureus; identical to SEQ ID NO: 2128

SEQ ID NO: 9981 - DNA, 1122 bp, Staphylococcus aureus; identical to SEQ ID NO: 2129

SEQ ID NO: 9982 - DNA, 981 bp, Staphylococcus aureus; identical to SEQ ID NO: 2130

SEQ ID NO: 9983 - DNA, 2262 bp, Staphylococcus aureus; identical to SEQ ID NO: 2131

SEQ ID NO: 9984 - DNA, 465 bp, Staphylococcus aureus; identical to SEQ ID NO: 2132

SEQ ID NO: 9985 - DNA, 1758 bp, Staphylococcus aureus; identical to SEQ ID NO: 2133

SEQ ID NO: 9986 - DNA, 153 bp, Staphylococcus aureus; identical to SEQ ID NO: 2134

SEQ ID NO: 9987 - DNA, 924 bp, Staphylococcus aureus; identical to SEQ ID NO: 2135

SEQ ID NO: 9988 - DNA, 522 bp, Staphylococcus aureus; identical to SEQ ID NO: 2136

SEQ ID NO: 9989 - DNA, 945 bp, Staphylococcus aureus; identical to SEQ ID NO: 2137

SEQ ID NO: 9990 - DNA, 531 bp, Staphylococcus aureus; identical to SEQ ID NO: 2138

SEQ ID NO: 9991 - DNA, 858 bp, Staphylococcus aureus; identical to SEQ ID NO: 2139

SEQ ID NO: 9992 - DNA, 1527 bp, Staphylococcus aureus; identical to SEQ ID NO: 2140

SEQ ID NO: 9993 - DNA, 1230 bp, Staphylococcus aureus; identical to SEQ ID NO: 2141

SEQ ID NO: 9994 - DNA, 1503 bp, Staphylococcus aureus; identical to SEQ ID NO: 2142

SEQ ID NO: 9995 - DNA, 321 bp, Staphylococcus aureus; identical to SEQ ID NO: 2143

SEQ ID NO: 9996 - DNA, 3198 bp, Staphylococcus aureus; identical to SEQ ID NO: 2144

SEQ ID NO: 9997 - DNA, 942 bp, Staphylococcus aureus; identical to SEQ ID NO: 2145

SEQ ID NO: 9998 - DNA, 687 bp, Staphylococcus aureus; identical to SEQ ID NO: 2146

SEQ ID NO: 9999 - DNA, 1299 bp, Staphylococcus aureus; identical to SEQ ID NO: 2147

SEQ ID NO: 10000 - DNA, 201 bp, Staphylococcus aureus; identical to SEQ ID NO: 2148

SEQ ID NO: 10001 - DNA, 591 bp, Staphylococcus aureus; identical to SEQ ID NO: 2149

SEQ ID NO: 10002 - DNA, 1011 bp, Staphylococcus aureus; identical to SEQ ID NO: 2150

SEQ ID NO: 10003 - DNA, 1212 bp, Staphylococcus aureus; identical to SEQ ID NO: 2151

SEQ ID NO: 10004 - DNA, 147 bp, Staphylococcus aureus; identical to SEQ ID NO: 2152

SEQ ID NO: 10005 - DNA, 96 bp, Staphylococcus aureus; identical to SEQ ID NO: 2153

SEQ ID NO: 10006 - DNA, 591 bp, Staphylococcus aureus; identical to SEQ ID NO: 2154

SEQ ID NO: 10007 - DNA, 1119 bp, Staphylococcus aureus; identical to SEQ ID NO: 2155

SEQ ID NO: 10008 - DNA, 717 bp, Staphylococcus aureus; identical to SEQ ID NO: 2156

SEQ ID NO: 10009 - DNA, 1203 bp, Staphylococcus aureus; identical to SEQ ID NO: 2157

SEQ ID NO: 10010 - DNA, 540 bp, Staphylococcus aureus; identical to SEQ ID NO: 2158

SEQ ID NO: 10011 - DNA, 948 bp, Staphylococcus aureus; identical to SEQ ID NO: 2159

SEQ ID NO: 10012 - DNA, 357 bp, Staphylococcus aureus; identical to SEQ ID NO: 2160

SEQ ID NO: 10013 - DNA, 495 bp, Staphylococcus aureus; identical to SEQ ID NO: 2161

SEQ ID NO: 10014 - DNA, 381 bp, Staphylococcus aureus; identical to SEQ ID NO: 2162

SEQ ID NO: 10015 - DNA, 771 bp, Staphylococcus aureus; identical to SEQ ID NO: 2163

SEQ ID NO: 10016 - DNA, 1224 bp, Staphylococcus aureus; identical to SEQ ID NO: 2164

SEQ ID NO: 10017 - DNA, 93 bp, Staphylococcus aureus; identical to SEQ ID NO: 2165

SEQ ID NO: 10018 - DNA, 1140 bp, Staphylococcus aureus; identical to SEQ ID NO: 2166

SEQ ID NO: 10019 - DNA, 387 bp, Staphylococcus aureus; identical to SEQ ID NO: 2167

SEQ ID NO: 10020 - DNA, 1695 bp, Staphylococcus aureus; identical to SEQ ID NO: 2168

SEQ ID NO: 10021 - DNA, 297 bp, Staphylococcus aureus; identical to SEQ ID NO: 2169

SEQ ID NO: 10022 - DNA, 1755 bp, Staphylococcus aureus; identical to SEQ ID NO: 2170

SEQ ID NO: 10023 - DNA, 1506 bp, Staphylococcus aureus; identical to SEQ ID NO: 2171

SEQ ID NO: 10024 - DNA, 1026 bp, Staphylococcus aureus; identical to SEQ ID NO: 2172

SEQ ID NO: 10025 - DNA, 1131 bp, Staphylococcus aureus; identical to SEQ ID NO: 2173

SEQ ID NO: 10026 - DNA, 696 bp, Staphylococcus aureus; identical to SEQ ID NO: 2174

SEQ ID NO: 10027 - DNA, 96 bp, Staphylococcus aureus; identical to SEQ ID NO: 2175

SEQ ID NO: 10028 - DNA, 822 bp, Staphylococcus aureus; identical to SEQ ID NO: 2176

SEQ ID NO: 10029 - DNA, 618 bp, Staphylococcus aureus; identical to SEQ ID NO: 2177

SEQ ID NO: 10030 - DNA, 264 bp, Staphylococcus aureus; identical to SEQ ID NO: 2178

SEQ ID NO: 10031 - DNA, 1263 bp, Staphylococcus aureus; identical to SEQ ID NO: 2179

SEQ ID NO: 10032 - DNA, 273 bp, Staphylococcus aureus; identical to SEQ ID NO: 2180

SEQ ID NO: 10033 - DNA, 90 bp, Staphylococcus aureus; identical to SEQ ID NO: 2181

SEQ ID NO: 10034 - DNA, 2676 bp, Staphylococcus aureus; identical to SEQ ID NO: 2182

SEQ ID NO: 10035 - DNA, 381 bp, Staphylococcus aureus; identical to SEQ ID NO: 2183

SEQ ID NO: 10036 - DNA, 900 bp, Staphylococcus aureus; identical to SEQ ID NO: 2184

SEQ ID NO: 10037 - DNA, 1701 bp, Staphylococcus aureus; identical to SEQ ID NO: 2185

SEQ ID NO: 10038 - DNA, 573 bp, Staphylococcus aureus; identical to SEQ ID NO: 2186

SEQ ID NO: 10039 - DNA, 1050 bp, Staphylococcus aureus; identical to SEQ ID NO: 2187

SEQ ID NO: 10040 - DNA, 390 bp, Staphylococcus aureus; identical to SEQ ID NO: 2188

SEQ ID NO: 10041 - DNA, 345 bp, Staphylococcus aureus; identical to SEQ ID NO: 2189

SEQ ID NO: 10042 - DNA, 1707 bp, Staphylococcus aureus; identical to SEQ ID NO: 2190

SEQ ID NO: 10043 - DNA, 771 bp, Staphylococcus aureus; identical to SEQ ID NO: 2191

SEQ ID NO: 10044 - DNA, 696 bp, Staphylococcus aureus; identical to SEQ ID NO: 2192

SEQ ID NO: 10045 - DNA, 1467 bp, Staphylococcus aureus; identical to SEQ ID NO: 2193

SEQ ID NO: 10046 - DNA, 784 bp, Staphylococcus aureus; identical to SEQ ID NO: 2194

SEQ ID NO: 10047 - DNA, 990 bp, Staphylococcus aureus; identical to SEQ ID NO: 2195

SEQ ID NO: 10048 - DNA, 879 bp, Staphylococcus aureus; identical to SEQ ID NO: 2196

SEQ ID NO: 10049 - DNA, 1471 bp, Staphylococcus aureus; identical to SEQ ID NO: 2197

SEQ ID NO: 10050 - DNA, 1092 bp, Staphylococcus aureus; identical to SEQ ID NO: 2198

SEQ ID NO: 10051 - DNA, 1257 bp, Staphylococcus aureus; identical to SEQ ID NO: 2199

SEQ ID NO: 10052 - DNA, 1572 bp, Staphylococcus aureus; identical to SEQ ID NO: 2200

SEQ ID NO: 10053 - DNA, 363 bp, Staphylococcus aureus; identical to SEQ ID NO: 2201

SEQ ID NO: 10054 - DNA, 1518 bp, Staphylococcus aureus; identical to SEQ ID NO: 2202

SEQ ID NO: 10055 - DNA, 1359 bp, Staphylococcus aureus; identical to SEQ ID NO: 2203

SEQ ID NO: 10056 - DNA, 1191 bp, Staphylococcus aureus; identical to SEQ ID NO: 2204

SEQ ID NO: 10057 - DNA, 1047 bp, Staphylococcus aureus; identical to SEQ ID NO: 2205

SEQ ID NO: 10058 - DNA, 492 bp, Staphylococcus aureus; identical to SEQ ID NO: 2206

SEQ ID NO: 10059 - DNA, 642 bp, Staphylococcus aureus; identical to SEQ ID NO: 2207

SEQ ID NO: 10060 - DNA, 1314 bp, Staphylococcus aureus; identical to SEQ ID NO: 2208

SEQ ID NO: 10061 - DNA, 3825 bp, Staphylococcus aureus; identical to SEQ ID NO: 2209

SEQ ID NO: 10062 - DNA, 645 bp, Staphylococcus aureus; identical to SEQ ID NO: 2210

SEQ ID NO: 10063 - DNA, 261 bp, Staphylococcus aureus; identical to SEQ ID NO: 2211

SEQ ID NO: 10064 - DNA, 1131 bp, Staphylococcus aureus; identical to SEQ ID NO: 2212

SEQ ID NO: 10065 - DNA, 372 bp, Staphylococcus aureus; identical to SEQ ID NO: 2213

SEQ ID NO: 10066 - DNA, 597 bp, Staphylococcus aureus; identical to SEQ ID NO: 2214

SEQ ID NO: 10067 - DNA, 703 bp, Staphylococcus aureus; identical to SEQ ID NO: 2215

SEQ ID NO: 10068 - DNA, 858 bp, Staphylococcus aureus; identical to SEQ ID NO: 2216

SEQ ID NO: 10069 - DNA, 312 bp, Staphylococcus aureus; identical to SEQ ID NO: 2217

SEQ ID NO: 10070 - DNA, 507 bp, Staphylococcus aureus; identical to SEQ ID NO: 2218

SEQ ID NO: 10071 - DNA, 1077 bp, Staphylococcus aureus; identical to SEQ ID NO: 2219

SEQ ID NO: 10072 - DNA, 1680 bp, Staphylococcus aureus; identical to SEQ ID NO: 2220

SEQ ID NO: 10073 - DNA, 1644 bp, Staphylococcus aureus; identical to SEQ ID NO: 2221

SEQ ID NO: 10074 - DNA, 372 bp, Staphylococcus aureus; identical to SEQ ID NO: 2222

SEQ ID NO: 10075 - DNA, 1101 bp, Staphylococcus aureus; identical to SEQ ID NO: 2223

SEQ ID NO: 10076 - DNA, 498 bp, Staphylococcus aureus; identical to SEQ ID NO: 2224

SEQ ID NO: 10077 - DNA, 306 bp, Staphylococcus aureus; identical to SEQ ID NO: 2225

SEQ ID NO: 10078 - DNA, 843 bp, Staphylococcus aureus; identical to SEQ ID NO: 2226

SEQ ID NO: 10079 - DNA, 801 bp, Staphylococcus aureus; identical to SEQ ID NO: 2227

SEQ ID NO: 10080 - DNA, 645 bp, Staphylococcus aureus; identical to SEQ ID NO: 2228

SEQ ID NO: 10081 - DNA, 939 bp, Staphylococcus aureus; identical to SEQ ID NO: 2229

SEQ ID NO: 10082 - DNA, 978 bp, Staphylococcus aureus; identical to SEQ ID NO: 2230

SEQ ID NO: 10083 - DNA, 1737 bp, Staphylococcus aureus; identical to SEQ ID NO: 2231

SEQ ID NO: 10084 - DNA, 1413 bp, Staphylococcus aureus; identical to SEQ ID NO: 2232

SEQ ID NO: 10085 - DNA, 153 bp, Staphylococcus aureus; identical to SEQ ID NO: 2233

SEQ ID NO: 10086 - DNA, 726 bp, Staphylococcus aureus; identical to SEQ ID NO: 2234

SEQ ID NO: 10087 - DNA, 141 bp, Staphylococcus aureus; identical to SEQ ID NO: 2235

SEQ ID NO: 10088 - DNA, 849 bp, Staphylococcus aureus; identical to SEQ ID NO: 2236

SEQ ID NO: 10089 - DNA, 1410 bp, Staphylococcus aureus; identical to SEQ ID NO: 2237

SEQ ID NO: 10090 - DNA, 264 bp, Staphylococcus aureus; identical to SEQ ID NO: 2238

SEQ ID NO: 10091 - DNA, 474 bp, Staphylococcus aureus; identical to SEQ ID NO: 2239

SEQ ID NO: 10092 - DNA, 1944 bp, Staphylococcus aureus; identical to SEQ ID NO: 2240

SEQ ID NO: 10093 - DNA, 195 bp, Staphylococcus aureus; identical to SEQ ID NO: 2241

SEQ ID NO: 10094 - DNA, 423 bp, Staphylococcus aureus; identical to SEQ ID NO: 2242

SEQ ID NO: 10095 - DNA, 2121 bp, Staphylococcus aureus; identical to SEQ ID NO: 2243

SEQ ID NO: 10096 - DNA, 921 bp, Staphylococcus aureus; identical to SEQ ID NO: 2244

SEQ ID NO: 10097 - DNA, 486 bp, Staphylococcus aureus; identical to SEQ ID NO: 2245

SEQ ID NO: 10098 - DNA, 471 bp, Staphylococcus aureus; identical to SEQ ID NO: 2246

SEQ ID NO: 10099 - DNA, 894 bp, Staphylococcus aureus; identical to SEQ ID NO: 2247

SEQ ID NO: 10100 - DNA, 762 bp, Staphylococcus aureus; identical to SEQ ID NO: 2248

SEQ ID NO: 10101 - DNA, 696 bp, Staphylococcus aureus; identical to SEQ ID NO: 2249

SEQ ID NO: 10102 - DNA, 237 bp, Staphylococcus aureus; identical to SEQ ID NO: 2250

SEQ ID NO: 10103 - DNA, 651 bp, Staphylococcus aureus; identical to SEQ ID NO: 2251

SEQ ID NO: 10104 - DNA, 1308 bp, Staphylococcus aureus; identical to SEQ ID NO: 2252

SEQ ID NO: 10105 - DNA, 1662 bp, Staphylococcus aureus; identical to SEQ ID NO: 2253

SEQ ID NO: 10106 - DNA, 288 bp, Staphylococcus aureus; identical to SEQ ID NO: 2254

SEQ ID NO: 10107 - DNA, 1569 bp, Staphylococcus aureus; identical to SEQ ID NO: 2255

SEQ ID NO: 10108 - DNA, 396 bp, Staphylococcus aureus; identical to SEQ ID NO: 2256

SEQ ID NO: 10109 - DNA, 522 bp, Staphylococcus aureus; identical to SEQ ID NO: 2257

SEQ ID NO: 10110 - DNA, 207 bp, Staphylococcus aureus; identical to SEQ ID NO: 2258

SEQ ID NO: 10111 - DNA, 324 bp, Staphylococcus aureus; identical to SEQ ID NO: 2259

SEQ ID NO: 10112 - DNA, 1242 bp, Staphylococcus aureus; identical to SEQ ID NO: 2260

SEQ ID NO: 10113 - DNA, 465 bp, Staphylococcus aureus; identical to SEQ ID NO: 2261

SEQ ID NO: 10114 - DNA, 777 bp, Staphylococcus aureus; identical to SEQ ID NO: 2262

SEQ ID NO: 10115 - DNA, 1398 bp, Staphylococcus aureus; identical to SEQ ID NO: 2263

SEQ ID NO: 10116 - DNA, 2418 bp, Staphylococcus aureus; identical to SEQ ID NO: 2264

SEQ ID NO: 10117 - DNA, 975 bp, Staphylococcus aureus; identical to SEQ ID NO: 2265

SEQ ID NO: 10118 - DNA, 318 bp, Staphylococcus aureus; identical to SEQ ID NO: 2266

SEQ ID NO: 10119 - DNA, 135 bp, Staphylococcus aureus; identical to SEQ ID NO: 2267

SEQ ID NO: 10120 - DNA, 1182 bp, Staphylococcus aureus; identical to SEQ ID NO: 2268

SEQ ID NO: 10121 - DNA, 408 bp, Staphylococcus aureus; identical to SEQ ID NO: 2269

SEQ ID NO: 10122 - DNA, 684 bp, Staphylococcus aureus; identical to SEQ ID NO: 2270

SEQ ID NO: 10123 - DNA, 2019 bp, Staphylococcus aureus; identical to SEQ ID NO: 2271

SEQ ID NO: 10124 - DNA, 1281 bp, Staphylococcus aureus; identical to SEQ ID NO: 2272

SEQ ID NO: 10125 - DNA, 1077 bp, Staphylococcus aureus; identical to SEQ ID NO: 2273

SEQ ID NO: 10126 - DNA, 486 bp, Staphylococcus aureus; identical to SEQ ID NO: 2274

SEQ ID NO: 10127 - DNA, 2103 bp, Staphylococcus aureus; identical to SEQ ID NO: 2275

SEQ ID NO: 10128 - DNA, 465 bp, Staphylococcus aureus; identical to SEQ ID NO: 2276

SEQ ID NO: 10129 - DNA, 1641 bp, Staphylococcus aureus; identical to SEQ ID NO: 2277

SEQ ID NO: 10130 - DNA, 918 bp, Staphylococcus aureus; identical to SEQ ID NO: 2278

SEQ ID NO: 10131 - DNA, 1779 bp, Staphylococcus aureus; identical to SEQ ID NO: 2279

SEQ ID NO: 10132 - DNA, 1041 bp, Staphylococcus aureus; identical to SEQ ID NO: 2280

SEQ ID NO: 10133 - DNA, 402 bp, Staphylococcus aureus; identical to SEQ ID NO: 2281

SEQ ID NO: 10134 - DNA, 393 bp, Staphylococcus aureus; identical to SEQ ID NO: 2282

SEQ ID NO: 10135 - DNA, 384 bp, Staphylococcus aureus; identical to SEQ ID NO: 2283

SEQ ID NO: 10136 - DNA, 189 bp, Staphylococcus aureus; identical to SEQ ID NO: 2284

SEQ ID NO: 10137 - DNA, 1545 bp, Staphylococcus aureus; identical to SEQ ID NO: 2285

SEQ ID NO: 10138 - DNA, 1068 bp, Staphylococcus aureus; identical to SEQ ID NO: 2286

SEQ ID NO: 10139 - DNA, 561 bp, Staphylococcus aureus; identical to SEQ ID NO: 2287

SEQ ID NO: 10140 - DNA, 96 bp, Staphylococcus aureus; identical to SEQ ID NO: 2288

SEQ ID NO: 10141 - DNA, 828 bp, Staphylococcus aureus; identical to SEQ ID NO: 2289

SEQ ID NO: 10142 - DNA, 888 bp, Staphylococcus aureus; identical to SEQ ID NO: 2290

SEQ ID NO: 10143 - DNA, 366 bp, Staphylococcus aureus; identical to SEQ ID NO: 2291

SEQ ID NO: 10144 - DNA, 936 bp, Staphylococcus aureus; identical to SEQ ID NO: 2292

SEQ ID NO: 10145 - DNA, 720 bp, Staphylococcus aureus; identical to SEQ ID NO: 2293

SEQ ID NO: 10146 - DNA, 849 bp, Staphylococcus aureus; identical to SEQ ID NO: 2294

SEQ ID NO: 10147 - DNA, 117 bp, Staphylococcus aureus; identical to SEQ ID NO: 2295

SEQ ID NO: 10148 - DNA, 660 bp, Staphylococcus aureus; identical to SEQ ID NO: 2296

SEQ ID NO: 10149 - DNA, 1133 bp, Staphylococcus aureus; identical to SEQ ID NO: 2297

SEQ ID NO: 10150 - DNA, 939 bp, Staphylococcus aureus; identical to SEQ ID NO: 2298

SEQ ID NO: 10151 - DNA, 828 bp, Staphylococcus aureus; identical to SEQ ID NO: 2299

SEQ ID NO: 10152 - DNA, 465 bp, Staphylococcus aureus; identical to SEQ ID NO: 2300

SEQ ID NO: 10153 - DNA, 660 bp, Staphylococcus aureus; identical to SEQ ID NO: 2301

SEQ ID NO: 10154 - DNA, 900 bp, Staphylococcus aureus; identical to SEQ ID NO: 2302

SEQ ID NO: 10155 - DNA, 1569 bp, Staphylococcus aureus; identical to SEQ ID NO: 2303

SEQ ID NO: 10156 - DNA, 1320 bp, Staphylococcus aureus; identical to SEQ ID NO: 2304

SEQ ID NO: 10157 - DNA, 1182 bp, Staphylococcus aureus; identical to SEQ ID NO: 2305

SEQ ID NO: 10158 - DNA, 630 bp, Staphylococcus aureus; identical to SEQ ID NO: 2306

SEQ ID NO: 10159 - DNA, 918 bp, Staphylococcus aureus; identical to SEQ ID NO: 2307

SEQ ID NO: 10160 - DNA, 633 bp, Staphylococcus aureus; identical to SEQ ID NO: 2308

SEQ ID NO: 10161 - DNA, 393 bp, Staphylococcus aureus; identical to SEQ ID NO: 2309

SEQ ID NO: 10162 - DNA, 1005 bp, Staphylococcus aureus; identical to SEQ ID NO: 2310

SEQ ID NO: 10163 - DNA, 423 bp, Staphylococcus aureus; identical to SEQ ID NO: 2311

SEQ ID NO: 10164 - DNA, 486 bp, Staphylococcus aureus; identical to SEQ ID NO: 2312

SEQ ID NO: 10165 - DNA, 435 bp, Staphylococcus aureus; identical to SEQ ID NO: 2313

SEQ ID NO: 10166 - DNA, 1503 bp, Staphylococcus aureus; identical to SEQ ID NO: 2314

SEQ ID NO: 10167 - DNA, 189 bp, Staphylococcus aureus; identical to SEQ ID NO: 2315

SEQ ID NO: 10168 - DNA, 567 bp, Staphylococcus aureus; identical to SEQ ID NO: 2316

SEQ ID NO: 10169 - DNA, 780 bp, Staphylococcus aureus; identical to SEQ ID NO: 2317

SEQ ID NO: 10170 - DNA, 855 bp, Staphylococcus aureus; identical to SEQ ID NO: 2318

SEQ ID NO: 10171 - DNA, 729 bp, Staphylococcus aureus; identical to SEQ ID NO: 2319

SEQ ID NO: 10172 - DNA, 777 bp, Staphylococcus aureus; identical to SEQ ID NO: 2320

SEQ ID NO: 10173 - DNA, 960 bp, Staphylococcus aureus; identical to SEQ ID NO: 2321

SEQ ID NO: 10174 - DNA, 513 bp, Staphylococcus aureus; identical to SEQ ID NO: 2322

SEQ ID NO: 10175 - DNA, 108 bp, Staphylococcus aureus; identical to SEQ ID NO: 2323

SEQ ID NO: 10176 - DNA, 1711 bp, Staphylococcus aureus; identical to SEQ ID NO: 2324

SEQ ID NO: 10177 - DNA, 204 bp, Staphylococcus aureus; identical to SEQ ID NO: 2325

SEQ ID NO: 10178 - DNA, 714 bp, Staphylococcus aureus; identical to SEQ ID NO: 2326

SEQ ID NO: 10179 - DNA, 384 bp, Staphylococcus aureus; identical to SEQ ID NO: 2327

SEQ ID NO: 10180 - DNA, 1458 bp, Staphylococcus aureus; identical to SEQ ID NO: 2328

SEQ ID NO: 10181 - DNA, 834 bp, Staphylococcus aureus; identical to SEQ ID NO: 2329

SEQ ID NO: 10182 - DNA, 142 bp, Staphylococcus aureus; identical to SEQ ID NO: 2330

SEQ ID NO: 10183 - DNA, 1215 bp, Staphylococcus aureus; identical to SEQ ID NO: 2331

SEQ ID NO: 10184 - DNA, 912 bp, Staphylococcus aureus; identical to SEQ ID NO: 2332

SEQ ID NO: 10185 - DNA, 237 bp, Staphylococcus aureus; identical to SEQ ID NO: 2333

SEQ ID NO: 10186 - DNA, 1197 bp, Staphylococcus aureus; identical to SEQ ID NO: 2334

SEQ ID NO: 10187 - DNA, 1176 bp, Staphylococcus aureus; identical to SEQ ID NO: 2335

SEQ ID NO: 10188 - DNA, 324 bp, Staphylococcus aureus; identical to SEQ ID NO: 2336

SEQ ID NO: 10189 - DNA, 771 bp, Staphylococcus aureus; identical to SEQ ID NO: 2337

SEQ ID NO: 10190 - DNA, 783 bp, Staphylococcus aureus; identical to SEQ ID NO: 2338

SEQ ID NO: 10191 - DNA, 402 bp, Staphylococcus aureus; identical to SEQ ID NO: 2339

SEQ ID NO: 10192 - DNA, 410 bp, Staphylococcus aureus; identical to SEQ ID NO: 2340

SEQ ID NO: 10193 - DNA, 777 bp, Staphylococcus aureus; identical to SEQ ID NO: 2341

SEQ ID NO: 10194 - DNA, 237 bp, Staphylococcus aureus; identical to SEQ ID NO: 2342

SEQ ID NO: 10195 - DNA, 534 bp, Staphylococcus aureus; identical to SEQ ID NO: 2343

SEQ ID NO: 10196 - DNA, 360 bp, Staphylococcus aureus; identical to SEQ ID NO: 2344

SEQ ID NO: 10197 - DNA, 1002 bp, Staphylococcus aureus; identical to SEQ ID NO: 2345

SEQ ID NO: 10198 - DNA, 1287 bp, Staphylococcus aureus; identical to SEQ ID NO: 2346

SEQ ID NO: 10199 - DNA, 90 bp, Staphylococcus aureus; identical to SEQ ID NO: 2347

SEQ ID NO: 10200 - DNA, 1203 bp, Staphylococcus aureus; identical to SEQ ID NO: 2348

SEQ ID NO: 10201 - DNA, 1107 bp, Staphylococcus aureus; identical to SEQ ID NO: 2349

SEQ ID NO: 10202 - DNA, 1209 bp, Staphylococcus aureus; identical to SEQ ID NO: 2350

SEQ ID NO: 10203 - DNA, 1479 bp, Staphylococcus aureus; identical to SEQ ID NO: 2351

SEQ ID NO: 10204 - DNA, 2070 bp, Staphylococcus aureus; identical to SEQ ID NO: 2352

SEQ ID NO: 10205 - DNA, 1476 bp, Staphylococcus aureus; identical to SEQ ID NO: 2353

SEQ ID NO: 10206 - DNA, 483 bp, Staphylococcus aureus; identical to SEQ ID NO: 2354

SEQ ID NO: 10207 - DNA, 1317 bp, Staphylococcus aureus; identical to SEQ ID NO: 2355

SEQ ID NO: 10208 - DNA, 642 bp, Staphylococcus aureus; identical to SEQ ID NO: 2356

SEQ ID NO: 10209 - DNA, 375 bp, Staphylococcus aureus; identical to SEQ ID NO: 2357

SEQ ID NO: 10210 - DNA, 594 bp, Staphylococcus aureus; identical to SEQ ID NO: 2358

SEQ ID NO: 10211 - DNA, 174 bp, Staphylococcus aureus; identical to SEQ ID NO: 2359

SEQ ID NO: 10212 - DNA, 378 bp, Staphylococcus aureus; identical to SEQ ID NO: 2360

SEQ ID NO: 10213 - DNA, 381 bp, Staphylococcus aureus; identical to SEQ ID NO: 2361

SEQ ID NO: 10214 - DNA, 243 bp, Staphylococcus aureus; identical to SEQ ID NO: 2362

SEQ ID NO: 10215 - DNA, 1128 bp, Staphylococcus aureus; identical to SEQ ID NO: 2363

SEQ ID NO: 10216 - DNA, 1191 bp, Staphylococcus aureus; identical to SEQ ID NO: 2364

SEQ ID NO: 10217 - DNA, 4113 bp, Staphylococcus aureus; identical to SEQ ID NO: 2365

SEQ ID NO: 10218 - DNA, 1245 bp, Staphylococcus aureus; identical to SEQ ID NO: 2366

SEQ ID NO: 10219 - DNA, 1332 bp, Staphylococcus aureus; identical to SEQ ID NO: 2367

SEQ ID NO: 10220 - DNA, 765 bp, Staphylococcus aureus; identical to SEQ ID NO: 2368

SEQ ID NO: 10221 - DNA, 576 bp, Staphylococcus aureus; identical to SEQ ID NO: 2369

SEQ ID NO: 10222 - DNA, 843 bp, Staphylococcus aureus; identical to SEQ ID NO: 2370

SEQ ID NO: 10223 - DNA, 525 bp, Staphylococcus aureus; identical to SEQ ID NO: 2371

SEQ ID NO: 10224 - DNA, 1200 bp, Staphylococcus aureus; identical to SEQ ID NO: 2372

SEQ ID NO: 10225 - DNA, 1230 bp, Staphylococcus aureus; identical to SEQ ID NO: 2373

SEQ ID NO: 10226 - DNA, 585 bp, Staphylococcus aureus; identical to SEQ ID NO: 2374

SEQ ID NO: 10227 - DNA, 1740 bp, Staphylococcus aureus; identical to SEQ ID NO: 2375

SEQ ID NO: 10228 - DNA, 3477 bp, Staphylococcus aureus; identical to SEQ ID NO: 2376

SEQ ID NO: 10229 - DNA, 927 bp, Staphylococcus aureus; identical to SEQ ID NO: 2377

SEQ ID NO: 10230 - DNA, 1509 bp, Staphylococcus aureus; identical to SEQ ID NO: 2378

SEQ ID NO: 10231 - DNA, 3654 bp, Staphylococcus aureus; identical to SEQ ID NO: 2379

SEQ ID NO: 10232 - DNA, 627 bp, Staphylococcus aureus; identical to SEQ ID NO: 2380

SEQ ID NO: 10233 - DNA, 333 bp, Staphylococcus aureus; identical to SEQ ID NO: 2381

SEQ ID NO: 10234 - DNA, 480 bp, Staphylococcus aureus; identical to SEQ ID NO: 2382

SEQ ID NO: 10235 - DNA, 903 bp, Staphylococcus aureus; identical to SEQ ID NO: 2383

SEQ ID NO: 10236 - DNA, 2634 bp, Staphylococcus aureus; identical to SEQ ID NO: 2384

SEQ ID NO: 10237 - DNA, 585 bp, Staphylococcus aureus; identical to SEQ ID NO: 2385

SEQ ID NO: 10238 - DNA, 903 bp, Staphylococcus aureus; identical to SEQ ID NO: 2386

SEQ ID NO: 10239 - DNA, 1350 bp, Staphylococcus aureus; identical to SEQ ID NO: 2387

SEQ ID NO: 10240 - DNA, 1629 bp, Staphylococcus aureus; identical to SEQ ID NO: 2388

SEQ ID NO: 10241 - DNA, 351 bp, Staphylococcus aureus; identical to SEQ ID NO: 2389

SEQ ID NO: 10242 - DNA, 390 bp, Staphylococcus aureus; identical to SEQ ID NO: 2390

SEQ ID NO: 10243 - DNA, 267 bp, Staphylococcus aureus; identical to SEQ ID NO: 2391

SEQ ID NO: 10244 - DNA, 1815 bp, Staphylococcus aureus; identical to SEQ ID NO: 2392

SEQ ID NO: 10245 - DNA, 2610 bp, Staphylococcus aureus; identical to SEQ ID NO: 2393

SEQ ID NO: 10246 - DNA, 708 bp, Staphylococcus aureus; identical to SEQ ID NO: 2394

SEQ ID NO: 10247 - DNA, 405 bp, Staphylococcus aureus; identical to SEQ ID NO: 2395

SEQ ID NO: 10248 - DNA, 123 bp, Staphylococcus aureus; identical to SEQ ID NO: 2396

SEQ ID NO: 10249 - DNA, 1146 bp, Staphylococcus aureus; identical to SEQ ID NO: 2397

SEQ ID NO: 10250 - DNA, 699 bp, Staphylococcus aureus; identical to SEQ ID NO: 2398

SEQ ID NO: 10251 - DNA, 180 bp, Staphylococcus aureus; identical to SEQ ID NO: 2399

SEQ ID NO: 10252 - DNA, 783 bp, Staphylococcus aureus; identical to SEQ ID NO: 2400

SEQ ID NO: 10253 - DNA, 1920 bp, Staphylococcus aureus; identical to SEQ ID NO: 2401

SEQ ID NO: 10254 - DNA, 642 bp, Staphylococcus aureus; identical to SEQ ID NO: 2402

SEQ ID NO: 10255 - DNA, 759 bp, Staphylococcus aureus; identical to SEQ ID NO: 2403

SEQ ID NO: 10256 - DNA, 777 bp, Staphylococcus aureus; identical to SEQ ID NO: 2404

SEQ ID NO: 10257 - DNA, 579 bp, Staphylococcus aureus; identical to SEQ ID NO: 2405

SEQ ID NO: 10258 - DNA, 1800 bp, Staphylococcus aureus; identical to SEQ ID NO: 2406

SEQ ID NO: 10259 - DNA, 381 bp, Staphylococcus aureus; identical to SEQ ID NO: 2407

SEQ ID NO: 10260 - DNA, 1125 bp, Staphylococcus aureus; identical to SEQ ID NO: 2408

SEQ ID NO: 10261 - DNA, 693 bp, Staphylococcus aureus; identical to SEQ ID NO: 2409

SEQ ID NO: 10262 - DNA, 3552 bp, Staphylococcus aureus; identical to SEQ ID NO: 2410

SEQ ID NO: 10263 - DNA, 516 bp, Staphylococcus aureus; identical to SEQ ID NO: 2411

SEQ ID NO: 10264 - DNA, 1374 bp, Staphylococcus aureus; identical to SEQ ID NO: 2412

SEQ ID NO: 10265 - DNA, 435 bp, Staphylococcus aureus; identical to SEQ ID NO: 2413

SEQ ID NO: 10266 - DNA, 519 bp, Staphylococcus aureus; identical to SEQ ID NO: 2414

SEQ ID NO: 10267 - DNA, 2919 bp, Staphylococcus aureus; identical to SEQ ID NO: 2415

SEQ ID NO: 10268 - DNA, 942 bp, Staphylococcus aureus; identical to SEQ ID NO: 2416

SEQ ID NO: 10269 - DNA, 1245 bp, Staphylococcus aureus; identical to SEQ ID NO: 2417

SEQ ID NO: 10270 - DNA, 741 bp, Staphylococcus aureus; identical to SEQ ID NO: 2418

SEQ ID NO: 10271 - DNA, 1245 bp, Staphylococcus aureus; identical to SEQ ID NO: 2419

SEQ ID NO: 10272 - DNA, 2994 bp, Staphylococcus aureus; identical to SEQ ID NO: 2420

SEQ ID NO: 10273 - DNA, 465 bp, Staphylococcus aureus; identical to SEQ ID NO: 2421

SEQ ID NO: 10274 - DNA, 195 bp, Staphylococcus aureus; identical to SEQ ID NO: 2422

SEQ ID NO: 10275 - DNA, 849 bp, Staphylococcus aureus; identical to SEQ ID NO: 2423

SEQ ID NO: 10276 - DNA, 144 bp, Staphylococcus aureus; identical to SEQ ID NO: 2424

SEQ ID NO: 10277 - DNA, 424 bp, Staphylococcus aureus; identical to SEQ ID NO: 2425

SEQ ID NO: 10278 - DNA, 975 bp, Staphylococcus aureus; identical to SEQ ID NO: 2426

SEQ ID NO: 10279 - DNA, 1000 bp, Staphylococcus aureus; identical to SEQ ID NO: 2427

SEQ ID NO: 10280 - DNA, 1071 bp, Staphylococcus aureus; identical to SEQ ID NO: 2428

SEQ ID NO: 10281 - DNA, 936 bp, Staphylococcus aureus; identical to SEQ ID NO: 2429

SEQ ID NO: 10282 - DNA, 1387 bp, Staphylococcus aureus; identical to SEQ ID NO: 2430

SEQ ID NO: 10283 - DNA, 627 bp, Staphylococcus aureus; identical to SEQ ID NO: 2431

SEQ ID NO: 10284 - DNA, 1530 bp, Staphylococcus aureus; identical to SEQ ID NO: 2432

SEQ ID NO: 10285 - DNA, 1083 bp, Staphylococcus aureus; identical to SEQ ID NO: 2433

SEQ ID NO: 10286 - DNA, 1095 bp, Staphylococcus aureus; identical to SEQ ID NO: 2434

SEQ ID NO: 10287 - DNA, 1395 bp, Staphylococcus aureus; identical to SEQ ID NO: 2435

SEQ ID NO: 10288 - DNA, 558 bp, Staphylococcus aureus; identical to SEQ ID NO: 2436

SEQ ID NO: 10289 - DNA, 1251 bp, Staphylococcus aureus; identical to SEQ ID NO: 2437

SEQ ID NO: 10290 - DNA, 942 bp, Staphylococcus aureus; identical to SEQ ID NO: 2438

SEQ ID NO: 10291 - DNA, 555 bp, Staphylococcus aureus; identical to SEQ ID NO: 2439

SEQ ID NO: 10292 - DNA, 3076 bp, Staphylococcus aureus; identical to SEQ ID NO: 2440

SEQ ID NO: 10293 - DNA, 1656 bp, Staphylococcus aureus; identical to SEQ ID NO: 2441

SEQ ID NO: 10294 - DNA, 1401 bp, Staphylococcus aureus; identical to SEQ ID NO: 2442

SEQ ID NO: 10295 - DNA, 1716 bp, Staphylococcus aureus; identical to SEQ ID NO: 2443

SEQ ID NO: 10296 - DNA, 924 bp, Staphylococcus aureus; identical to SEQ ID NO: 2444

SEQ ID NO: 10297 - DNA, 987 bp, Staphylococcus aureus; identical to SEQ ID NO: 2445

SEQ ID NO: 10298 - DNA, 1038 bp, Staphylococcus aureus; identical to SEQ ID NO: 2446

SEQ ID NO: 10299 - DNA, 981 bp, Staphylococcus aureus; identical to SEQ ID NO: 2447

SEQ ID NO: 10300 - DNA, 108 bp, Staphylococcus aureus; identical to SEQ ID NO: 2448

SEQ ID NO: 10301 - DNA, 273 bp, Staphylococcus aureus; identical to SEQ ID NO: 2449

SEQ ID NO: 10302 - DNA, 963 bp, Staphylococcus aureus; identical to SEQ ID NO: 2450

SEQ ID NO: 10303 - DNA, 1224 bp, Staphylococcus aureus; identical to SEQ ID NO: 2451

SEQ ID NO: 10304 - DNA, 651 bp, Staphylococcus aureus; identical to SEQ ID NO: 2452

SEQ ID NO: 10305 - DNA, 882 bp, Staphylococcus aureus; identical to SEQ ID NO: 2453

SEQ ID NO: 10306 - DNA, 741 bp, Staphylococcus aureus; identical to SEQ ID NO: 2454

SEQ ID NO: 10307 - DNA, 1420 bp, Staphylococcus aureus; identical to SEQ ID NO: 2455

SEQ ID NO: 10308 - DNA, 396 bp, Staphylococcus aureus; identical to SEQ ID NO: 2456

SEQ ID NO: 10309 - DNA, 942 bp, Staphylococcus aureus; identical to SEQ ID NO: 2457

SEQ ID NO: 10310 - DNA, 720 bp, Staphylococcus aureus; identical to SEQ ID NO: 2458

SEQ ID NO: 10311 - DNA, 2937 bp, Staphylococcus aureus; identical to SEQ ID NO: 2459

SEQ ID NO: 10312 - DNA, 795 bp, Staphylococcus aureus; identical to SEQ ID NO: 2460

SEQ ID NO: 10313 - DNA, 777 bp, Staphylococcus aureus; identical to SEQ ID NO: 2461

SEQ ID NO: 10314 - DNA, 987 bp, Staphylococcus aureus; identical to SEQ ID NO: 2462

SEQ ID NO: 10315 - DNA, 1197 bp, Staphylococcus aureus; identical to SEQ ID NO: 2463

SEQ ID NO: 10316 - DNA, 1263 bp, Staphylococcus aureus; identical to SEQ ID NO: 2464

SEQ ID NO: 10317 - DNA, 771 bp, Staphylococcus aureus; identical to SEQ ID NO: 2465

SEQ ID NO: 10318 - DNA, 393 bp, Staphylococcus aureus; identical to SEQ ID NO: 2466

SEQ ID NO: 10319 - DNA, 1809 bp, Staphylococcus aureus; identical to SEQ ID NO: 2467

SEQ ID NO: 10320 - DNA, 96 bp, Staphylococcus aureus; identical to SEQ ID NO: 2468

SEQ ID NO: 10321 - DNA, 1047 bp, Staphylococcus aureus; identical to SEQ ID NO: 2469

SEQ ID NO: 10322 - DNA, 378 bp, Staphylococcus aureus; identical to SEQ ID NO: 2470

SEQ ID NO: 10323 - DNA, 348 bp, Staphylococcus aureus; identical to SEQ ID NO: 2471

SEQ ID NO: 10324 - DNA, 345 bp, Staphylococcus aureus; identical to SEQ ID NO: 2472

SEQ ID NO: 10325 - DNA, 354 bp, Staphylococcus aureus; identical to SEQ ID NO: 2473

SEQ ID NO: 10326 - DNA, 696 bp, Staphylococcus aureus; identical to SEQ ID NO: 2474

SEQ ID NO: 10327 - DNA, 870 bp, Staphylococcus aureus; identical to SEQ ID NO: 2475

SEQ ID NO: 10328 - DNA, 999 bp, Staphylococcus aureus; identical to SEQ ID NO: 2476

SEQ ID NO: 10329 - DNA, 417 bp, Staphylococcus aureus; identical to SEQ ID NO: 2477

SEQ ID NO: 10330 - DNA, 636 bp, Staphylococcus aureus; identical to SEQ ID NO: 2478

SEQ ID NO: 10331 - DNA, 1125 bp, Staphylococcus aureus; identical to SEQ ID NO: 2479

SEQ ID NO: 10332 - DNA, 1362 bp, Staphylococcus aureus; identical to SEQ ID NO: 2480

SEQ ID NO: 10333 - DNA, 810 bp, Staphylococcus aureus; identical to SEQ ID NO: 2481

SEQ ID NO: 10334 - DNA, 465 bp, Staphylococcus aureus; identical to SEQ ID NO: 2482

SEQ ID NO: 10335 - DNA, 855 bp, Staphylococcus aureus; identical to SEQ ID NO: 2483

SEQ ID NO: 10336 - DNA, 1386 bp, Staphylococcus aureus; identical to SEQ ID NO: 2484

SEQ ID NO: 10337 - DNA, 1113 bp, Staphylococcus aureus; identical to SEQ ID NO: 2485

SEQ ID NO: 10338 - DNA, 1845 bp, Staphylococcus aureus; identical to SEQ ID NO: 2486

SEQ ID NO: 10339 - DNA, 1386 bp, Staphylococcus aureus; identical to SEQ ID NO: 2487

SEQ ID NO: 10340 - DNA, 771 bp, Staphylococcus aureus; identical to SEQ ID NO: 2488

SEQ ID NO: 10341 - DNA, 396 bp, Staphylococcus aureus; identical to SEQ ID NO: 2489

SEQ ID NO: 10342 - DNA, 1569 bp, Staphylococcus aureus; identical to SEQ ID NO: 2490

SEQ ID NO: 10343 - DNA, 120 bp, Staphylococcus aureus; identical to SEQ ID NO: 2491

SEQ ID NO: 10344 - DNA, 132 bp, Staphylococcus aureus; identical to SEQ ID NO: 2492

SEQ ID NO: 10345 - DNA, 759 bp, Staphylococcus aureus; identical to SEQ ID NO: 2493

SEQ ID NO: 10346 - DNA, 600 bp, Staphylococcus aureus; identical to SEQ ID NO: 2494

SEQ ID NO: 10347 - DNA, 795 bp, Staphylococcus aureus; identical to SEQ ID NO: 2495

SEQ ID NO: 10348 - DNA, 1215 bp, Staphylococcus aureus; identical to SEQ ID NO: 2496

SEQ ID NO: 10349 - DNA, 690 bp, Staphylococcus aureus; identical to SEQ ID NO: 2497

SEQ ID NO: 10350 - DNA, 123 bp, Staphylococcus aureus; identical to SEQ ID NO: 2498

SEQ ID NO: 10351 - DNA, 510 bp, Staphylococcus aureus; identical to SEQ ID NO: 2499

SEQ ID NO: 10352 - DNA, 471 bp, Staphylococcus aureus; identical to SEQ ID NO: 2500

SEQ ID NO: 10353 - DNA, 1485 bp, Staphylococcus aureus; identical to SEQ ID NO: 2501

SEQ ID NO: 10354 - DNA, 1143 bp, Staphylococcus aureus; identical to SEQ ID NO: 2502

SEQ ID NO: 10355 - DNA, 261 bp, Staphylococcus aureus; identical to SEQ ID NO: 2503

SEQ ID NO: 10356 - DNA, 729 bp, Staphylococcus aureus; identical to SEQ ID NO: 2504

SEQ ID NO: 10357 - DNA, 516 bp, Staphylococcus aureus; identical to SEQ ID NO: 2505

SEQ ID NO: 10358 - DNA, 1764 bp, Staphylococcus aureus; identical to SEQ ID NO: 2506

SEQ ID NO: 10359 - DNA, 1041 bp, Staphylococcus aureus; identical to SEQ ID NO: 2507

SEQ ID NO: 10360 - DNA, 159 bp, Staphylococcus aureus; identical to SEQ ID NO: 2508

SEQ ID NO: 10361 - DNA, 1563 bp, Staphylococcus aureus; identical to SEQ ID NO: 2509

SEQ ID NO: 10362 - DNA, 1458 bp, Staphylococcus aureus; identical to SEQ ID NO: 2510

SEQ ID NO: 10363 - DNA, 204 bp, Staphylococcus aureus; identical to SEQ ID NO: 2511

SEQ ID NO: 10364 - DNA, 366 bp, Staphylococcus aureus; identical to SEQ ID NO: 2512

SEQ ID NO: 10365 - DNA, 576 bp, Staphylococcus aureus; identical to SEQ ID NO: 2513

SEQ ID NO: 10366 - DNA, 474 bp, Staphylococcus aureus; identical to SEQ ID NO: 2514

SEQ ID NO: 10367 - DNA, 804 bp, Staphylococcus aureus; identical to SEQ ID NO: 2515

SEQ ID NO: 10368 - DNA, 1062 bp, Staphylococcus aureus; identical to SEQ ID NO: 2516

SEQ ID NO: 10369 - DNA, 1149 bp, Staphylococcus aureus; identical to SEQ ID NO: 2517

SEQ ID NO: 10370 - DNA, 264 bp, Staphylococcus aureus; identical to SEQ ID NO: 2518

SEQ ID NO: 10371 - DNA, 447 bp, Staphylococcus aureus; identical to SEQ ID NO: 2519

SEQ ID NO: 10372 - DNA, 333 bp, Staphylococcus aureus; identical to SEQ ID NO: 2520

SEQ ID NO: 10373 - DNA, 822 bp, Staphylococcus aureus; identical to SEQ ID NO: 2521

SEQ ID NO: 10374 - DNA, 576 bp, Staphylococcus aureus; identical to SEQ ID NO: 2522

SEQ ID NO: 10375 - DNA, 951 bp, Staphylococcus aureus; identical to SEQ ID NO: 2523

SEQ ID NO: 10376 - DNA, 768 bp, Staphylococcus aureus; identical to SEQ ID NO: 2524

SEQ ID NO: 10377 - DNA, 456 bp, Staphylococcus aureus; identical to SEQ ID NO: 2525

SEQ ID NO: 10378 - DNA, 1359 bp, Staphylococcus aureus; identical to SEQ ID NO: 2526

SEQ ID NO: 10379 - DNA, 1737 bp, Staphylococcus aureus; identical to SEQ ID NO: 2527

SEQ ID NO: 10380 - DNA, 981 bp, Staphylococcus aureus; identical to SEQ ID NO: 2528

SEQ ID NO: 10381 - DNA, 705 bp, Staphylococcus aureus; identical to SEQ ID NO: 2529

SEQ ID NO: 10382 - DNA, 1512 bp, Staphylococcus aureus; identical to SEQ ID NO: 2530

SEQ ID NO: 10383 - DNA, 543 bp, Staphylococcus aureus; identical to SEQ ID NO: 2531

SEQ ID NO: 10384 - DNA, 219 bp, Staphylococcus aureus; identical to SEQ ID NO: 2532

SEQ ID NO: 10385 - DNA, 1038 bp, Staphylococcus aureus; identical to SEQ ID NO: 2533

SEQ ID NO: 10386 - DNA, 177 bp, Staphylococcus aureus; identical to SEQ ID NO: 2534

SEQ ID NO: 10387 - DNA, 837 bp, Staphylococcus aureus; identical to SEQ ID NO: 2535

SEQ ID NO: 10388 - DNA, 603 bp, Staphylococcus aureus; identical to SEQ ID NO: 2536

SEQ ID NO: 10389 - DNA, 1518 bp, Staphylococcus aureus; identical to SEQ ID NO: 2537

SEQ ID NO: 10390 - DNA, 672 bp, Staphylococcus aureus; identical to SEQ ID NO: 2538

SEQ ID NO: 10391 - DNA, 291 bp, Staphylococcus aureus; identical to SEQ ID NO: 2539

SEQ ID NO: 10392 - DNA, 1965 bp, Staphylococcus aureus; identical to SEQ ID NO: 2540

SEQ ID NO: 10393 - DNA, 819 bp, Staphylococcus aureus; identical to SEQ ID NO: 2541

SEQ ID NO: 10394 - DNA, 2292 bp, Staphylococcus aureus; identical to SEQ ID NO: 2542

SEQ ID NO: 10395 - DNA, 321 bp, Staphylococcus aureus; identical to SEQ ID NO: 2543

SEQ ID NO: 10396 - DNA, 810 bp, Staphylococcus aureus; identical to SEQ ID NO: 2544

SEQ ID NO: 10397 - DNA, 144 bp, Staphylococcus aureus; identical to SEQ ID NO: 2545

SEQ ID NO: 10398 - DNA, 267 bp, Staphylococcus aureus; identical to SEQ ID NO: 2546

SEQ ID NO: 10399 - DNA, 234 bp, Staphylococcus aureus; identical to SEQ ID NO: 2547

SEQ ID NO: 10400 - DNA, 405 bp, Staphylococcus aureus; identical to SEQ ID NO: 2548

SEQ ID NO: 10401 - DNA, 1671 bp, Staphylococcus aureus; identical to SEQ ID NO: 2549

SEQ ID NO: 10402 - DNA, 645 bp, Staphylococcus aureus; identical to SEQ ID NO: 2550

SEQ ID NO: 10403 - DNA, 642 bp, Staphylococcus aureus; identical to SEQ ID NO: 2551

SEQ ID NO: 10404 - DNA, 516 bp, Staphylococcus aureus; identical to SEQ ID NO: 2552

SEQ ID NO: 10405 - DNA, 762 bp, Staphylococcus aureus; identical to SEQ ID NO: 2553

SEQ ID NO: 10406 - DNA, 456 bp, Staphylococcus aureus; identical to SEQ ID NO: 2554

SEQ ID NO: 10407 - DNA, 822 bp, Staphylococcus aureus; identical to SEQ ID NO: 2555

SEQ ID NO: 10408 - DNA, 474 bp, Staphylococcus aureus; identical to SEQ ID NO: 2556

SEQ ID NO: 10409 - DNA, 288 bp, Staphylococcus aureus; identical to SEQ ID NO: 2557

SEQ ID NO: 10410 - DNA, 162 bp, Staphylococcus aureus; identical to SEQ ID NO: 2558

SEQ ID NO: 10411 - DNA, 411 bp, Staphylococcus aureus; identical to SEQ ID NO: 2559

SEQ ID NO: 10412 - DNA, 1497 bp, Staphylococcus aureus; identical to SEQ ID NO: 2560

SEQ ID NO: 10413 - DNA, 531 bp, Staphylococcus aureus; identical to SEQ ID NO: 2561

SEQ ID NO: 10414 - DNA, 132 bp, Staphylococcus aureus; identical to SEQ ID NO: 2562

SEQ ID NO: 10415 - DNA, 693 bp, Staphylococcus aureus; identical to SEQ ID NO: 2563

SEQ ID NO: 10416 - DNA, 762 bp, Staphylococcus aureus; identical to SEQ ID NO: 2564

SEQ ID NO: 10417 - DNA, 960 bp, Staphylococcus aureus; identical to SEQ ID NO: 2565

SEQ ID NO: 10418 - DNA, 1257 bp, Staphylococcus aureus; identical to SEQ ID NO: 2566

SEQ ID NO: 10419 - DNA, 459 bp, Staphylococcus aureus; identical to SEQ ID NO: 2567

SEQ ID NO: 10420 - DNA, 552 bp, Staphylococcus aureus; identical to SEQ ID NO: 2568

SEQ ID NO: 10421 - DNA, 207 bp, Staphylococcus aureus; identical to SEQ ID NO: 2569

SEQ ID NO: 10422 - DNA, 630 bp, Staphylococcus aureus; identical to SEQ ID NO: 2570

SEQ ID NO: 10423 - DNA, 1212 bp, Staphylococcus aureus; identical to SEQ ID NO: 2571

SEQ ID NO: 10424 - DNA, 219 bp, Staphylococcus aureus; identical to SEQ ID NO: 2572

SEQ ID NO: 10425 - DNA, 1044 bp, Staphylococcus aureus; identical to SEQ ID NO: 2573

SEQ ID NO: 10426 - DNA, 135 bp, Staphylococcus aureus; identical to SEQ ID NO: 2574

SEQ ID NO: 10427 - DNA, 654 bp, Staphylococcus aureus; identical to SEQ ID NO: 2575

SEQ ID NO: 10428 - DNA, 969 bp, Staphylococcus aureus; identical to SEQ ID NO: 2576

SEQ ID NO: 10429 - DNA, 402 bp, Staphylococcus aureus; identical to SEQ ID NO: 2577

SEQ ID NO: 10430 - DNA, 1674 bp, Staphylococcus aureus; identical to SEQ ID NO: 2578

SEQ ID NO: 10431 - DNA, 702 bp, Staphylococcus aureus; identical to SEQ ID NO: 2579

SEQ ID NO: 10432 - DNA, 696 bp, Staphylococcus aureus; identical to SEQ ID NO: 2580

SEQ ID NO: 10433 - DNA, 804 bp, Staphylococcus aureus; identical to SEQ ID NO: 2581

SEQ ID NO: 10434 - DNA, 387 bp, Staphylococcus aureus; identical to SEQ ID NO: 2582

SEQ ID NO: 10435 - DNA, 1047 bp, Staphylococcus aureus; identical to SEQ ID NO: 2583

SEQ ID NO: 10436 - DNA, 699 bp, Staphylococcus aureus; identical to SEQ ID NO: 2584

SEQ ID NO: 10437 - DNA, 1488 bp, Staphylococcus aureus; identical to SEQ ID NO: 2585

SEQ ID NO: 10438 - DNA, 822 bp, Staphylococcus aureus; identical to SEQ ID NO: 2586

SEQ ID NO: 10439 - DNA, 759 bp, Staphylococcus aureus; identical to SEQ ID NO: 2587

SEQ ID NO: 10440 - DNA, 420 bp, Staphylococcus aureus; identical to SEQ ID NO: 2588

SEQ ID NO: 10441 - DNA, 414 bp, Staphylococcus aureus; identical to SEQ ID NO: 2589

SEQ ID NO: 10442 - DNA, 114 bp, Staphylococcus aureus; identical to SEQ ID NO: 2590

SEQ ID NO: 10443 - DNA, 108 bp, Staphylococcus aureus; identical to SEQ ID NO: 2591

SEQ ID NO: 10444 - DNA, 108 bp, Staphylococcus aureus; identical to SEQ ID NO: 2592

SEQ ID NO: 10445 - DNA, 1194 bp, Staphylococcus aureus; identical to SEQ ID NO: 2593

SEQ ID NO: 10446 - DNA, 732 bp, Staphylococcus aureus; identical to SEQ ID NO: 2594

SEQ ID NO: 10447 - DNA, 216 bp, Staphylococcus aureus; identical to SEQ ID NO: 2595

SEQ ID NO: 10448 - DNA, 1167 bp, Staphylococcus aureus; identical to SEQ ID NO: 2596

SEQ ID NO: 10449 - DNA, 915 bp, Staphylococcus aureus; identical to SEQ ID NO: 2597

SEQ ID NO: 10450 - DNA, 420 bp, Staphylococcus aureus; identical to SEQ ID NO: 2598

SEQ ID NO: 10451 - DNA, 1314 bp, Staphylococcus aureus; identical to SEQ ID NO: 2599

SEQ ID NO: 10452 - DNA, 1125 bp, Staphylococcus aureus; identical to SEQ ID NO: 2600

SEQ ID NO: 10453 - DNA, 90 bp, Staphylococcus aureus; identical to SEQ ID NO: 2601

SEQ ID NO: 10454 - DNA, 705 bp, Staphylococcus aureus; identical to SEQ ID NO: 2602

SEQ ID NO: 10455 - DNA, 1071 bp, Staphylococcus aureus; identical to SEQ ID NO: 2603

SEQ ID NO: 10456 - DNA, 402 bp, Staphylococcus aureus; identical to SEQ ID NO: 2604

SEQ ID NO: 10457 - DNA, 264 bp, Staphylococcus aureus; identical to SEQ ID NO: 2605

SEQ ID NO: 10458 - DNA, 531 bp, Staphylococcus aureus; identical to SEQ ID NO: 2606

SEQ ID NO: 10459 - DNA, 444 bp, Staphylococcus aureus; identical to SEQ ID NO: 2607

SEQ ID NO: 10460 - DNA, 672 bp, Staphylococcus aureus; identical to SEQ ID NO: 2608

SEQ ID NO: 10461 - DNA, 1362 bp, Staphylococcus aureus; identical to SEQ ID NO: 2609

SEQ ID NO: 10462 - DNA, 228 bp, Staphylococcus aureus; identical to SEQ ID NO: 2610

SEQ ID NO: 10463 - DNA, 1170 bp, Staphylococcus aureus; identical to SEQ ID NO: 2611

SEQ ID NO: 10464 - DNA, 870 bp, Staphylococcus aureus; identical to SEQ ID NO: 2612

SEQ ID NO: 10465 - DNA, 159 bp, Staphylococcus aureus; identical to SEQ ID NO: 2613

SEQ ID NO: 10466 - DNA, 2190 bp, Staphylococcus aureus; identical to SEQ ID NO: 2614

SEQ ID NO: 10467 - DNA, 948 bp, Staphylococcus aureus; identical to SEQ ID NO: 2615

SEQ ID NO: 10468 - DNA, 1485 bp, Staphylococcus aureus; identical to SEQ ID NO: 2616

SEQ ID NO: 10469 - DNA, 144 bp, Staphylococcus aureus; identical to SEQ ID NO: 2617

SEQ ID NO: 10470 - DNA, 900 bp, Staphylococcus aureus; identical to SEQ ID NO: 2618

SEQ ID NO: 10471 - DNA, 1029 bp, Staphylococcus aureus; identical to SEQ ID NO: 2619

SEQ ID NO: 10472 - DNA, 1428 bp, Staphylococcus aureus; identical to SEQ ID NO: 2620

SEQ ID NO: 10473 - DNA, 567 bp, Staphylococcus aureus; identical to SEQ ID NO: 2621

SEQ ID NO: 10474 - DNA, 1458 bp, Staphylococcus aureus; identical to SEQ ID NO: 2622

SEQ ID NO: 10475 - DNA, 1479 bp, Staphylococcus aureus; identical to SEQ ID NO: 2623

SEQ ID NO: 10476 - DNA, 303 bp, Staphylococcus aureus; identical to SEQ ID NO: 2624

SEQ ID NO: 10477 - DNA, 1239 bp, Staphylococcus aureus; identical to SEQ ID NO: 2625

SEQ ID NO: 10478 - DNA, 405 bp, Staphylococcus aureus; identical to SEQ ID NO: 2626

SEQ ID NO: 10479 - DNA, 1248 bp, Staphylococcus aureus; identical to SEQ ID NO: 2627

SEQ ID NO: 10480 - DNA, 1200 bp, Staphylococcus aureus; identical to SEQ ID NO: 2628

SEQ ID NO: 10481 - DNA, 561 bp, Staphylococcus aureus; identical to SEQ ID NO: 2629

SEQ ID NO: 10482 - DNA, 1296 bp, Staphylococcus aureus; identical to SEQ ID NO: 2630

SEQ ID NO: 10483 - DNA, 2004 bp, Staphylococcus aureus; identical to SEQ ID NO: 2631

SEQ ID NO: 10484 - DNA, 1173 bp, Staphylococcus aureus; identical to SEQ ID NO: 2632

SEQ ID NO: 10485 - DNA, 2193 bp, Staphylococcus aureus; identical to SEQ ID NO: 2633

SEQ ID NO: 10486 - DNA, 543 bp, Staphylococcus aureus; identical to SEQ ID NO: 2634

SEQ ID NO: 10487 - DNA, 693 bp, Staphylococcus aureus; identical to SEQ ID NO: 2635

SEQ ID NO: 10488 - DNA, 1902 bp, Staphylococcus aureus; identical to SEQ ID NO: 2636

SEQ ID NO: 10489 - DNA, 267 bp, Staphylococcus aureus; identical to SEQ ID NO: 2637

SEQ ID NO: 10490 - DNA, 303 bp, Staphylococcus aureus; identical to SEQ ID NO: 2638

SEQ ID NO: 10491 - DNA, 1719 bp, Staphylococcus aureus; identical to SEQ ID NO: 2639

SEQ ID NO: 10492 - DNA, 1296 bp, Staphylococcus aureus; identical to SEQ ID NO: 2640

SEQ ID NO: 10493 - DNA, 684 bp, Staphylococcus aureus; identical to SEQ ID NO: 2641

SEQ ID NO: 10494 - DNA, 165 bp, Staphylococcus aureus; identical to SEQ ID NO: 2642

SEQ ID NO: 10495 - DNA, 315 bp, Staphylococcus aureus; identical to SEQ ID NO: 2643

SEQ ID NO: 10496 - DNA, 1296 bp, Staphylococcus aureus; identical to SEQ ID NO: 2644

SEQ ID NO: 10497 - DNA, 396 bp, Staphylococcus aureus; identical to SEQ ID NO: 2645

SEQ ID NO: 10498 - DNA, 294 bp, Staphylococcus aureus; identical to SEQ ID NO: 2646

SEQ ID NO: 10499 - DNA, 1935 bp, Staphylococcus aureus; identical to SEQ ID NO: 2647

SEQ ID NO: 10500 - DNA, 1362 bp, Staphylococcus aureus; identical to SEQ ID NO: 2648

SEQ ID NO: 10501 - DNA, 174 bp, Staphylococcus aureus; identical to SEQ ID NO: 2649

SEQ ID NO: 10502 - DNA, 312 bp, Staphylococcus aureus; identical to SEQ ID NO: 2650

SEQ ID NO: 10503 - DNA, 627 bp, Staphylococcus aureus; identical to SEQ ID NO: 2651

SEQ ID NO: 10504 - DNA, 555 bp, Staphylococcus aureus; identical to SEQ ID NO: 2652

SEQ ID NO: 10505 - DNA, 861 bp, Staphylococcus aureus; identical to SEQ ID NO: 2653

SEQ ID NO: 10506 - DNA, 342 bp, Staphylococcus aureus; identical to SEQ ID NO: 2654

SEQ ID NO: 10507 - DNA, 1020 bp, Staphylococcus aureus; identical to SEQ ID NO: 2655

SEQ ID NO: 10508 - DNA, 603 bp, Staphylococcus aureus; identical to SEQ ID NO: 2656

SEQ ID NO: 10509 - DNA, 996 bp, Staphylococcus aureus; identical to SEQ ID NO: 2657

SEQ ID NO: 10510 - DNA, 2130 bp, Staphylococcus aureus; identical to SEQ ID NO: 2658

SEQ ID NO: 10511 - DNA, 1434 bp, Staphylococcus aureus; identical to SEQ ID NO: 2659

SEQ ID NO: 10512 - DNA, 663 bp, Staphylococcus aureus; identical to SEQ ID NO: 2660

SEQ ID NO: 10513 - DNA, 822 bp, Staphylococcus aureus; identical to SEQ ID NO: 2661

SEQ ID NO: 10514 - DNA, 627 bp, Staphylococcus aureus; identical to SEQ ID NO: 2662

SEQ ID NO: 10515 - DNA, 1443 bp, Staphylococcus aureus; identical to SEQ ID NO: 2663

SEQ ID NO: 10516 - DNA, 696 bp, Staphylococcus aureus; identical to SEQ ID NO: 2664

SEQ ID NO: 10517 - DNA, 351 bp, Staphylococcus aureus; identical to SEQ ID NO: 2665

SEQ ID NO: 10518 - DNA, 1380 bp, Staphylococcus aureus; identical to SEQ ID NO: 2666

SEQ ID NO: 10519 - DNA, 882 bp, Staphylococcus aureus; identical to SEQ ID NO: 2667

SEQ ID NO: 10520 - DNA, 1113 bp, Staphylococcus aureus; identical to SEQ ID NO: 2668

SEQ ID NO: 10521 - DNA, 978 bp, Staphylococcus aureus; identical to SEQ ID NO: 2669

SEQ ID NO: 10522 - DNA, 1563 bp, Staphylococcus aureus; identical to SEQ ID NO: 2670

SEQ ID NO: 10523 - DNA, 1293 bp, Staphylococcus aureus; identical to SEQ ID NO: 2671

SEQ ID NO: 10524 - DNA, 1098 bp, Staphylococcus aureus; identical to SEQ ID NO: 2672

SEQ ID NO: 10525 - DNA, 1407 bp, Staphylococcus aureus; identical to SEQ ID NO: 2673

SEQ ID NO: 10526 - DNA, 171 bp, Staphylococcus aureus; identical to SEQ ID NO: 2674

SEQ ID NO: 10527 - DNA, 1674 bp, Staphylococcus aureus; identical to SEQ ID NO: 2675

SEQ ID NO: 10528 - DNA, 276 bp, Staphylococcus aureus; identical to SEQ ID NO: 2676

SEQ ID NO: 10529 - DNA, 1029 bp, Staphylococcus aureus; identical to SEQ ID NO: 2677

SEQ ID NO: 10530 - DNA, 540 bp, Staphylococcus aureus; identical to SEQ ID NO: 2678

SEQ ID NO: 10531 - DNA, 174 bp, Staphylococcus aureus; identical to SEQ ID NO: 2679

SEQ ID NO: 10532 - DNA, 1158 bp, Staphylococcus aureus; identical to SEQ ID NO: 2680

SEQ ID NO: 10533 - DNA, 1095 bp, Staphylococcus aureus; identical to SEQ ID NO: 2681

SEQ ID NO: 10534 - DNA, 843 bp, Staphylococcus aureus; identical to SEQ ID NO: 2682

SEQ ID NO: 10535 - DNA, 798 bp, Staphylococcus aureus; identical to SEQ ID NO: 2683

SEQ ID NO: 10536 - DNA, 483 bp, Staphylococcus aureus; identical to SEQ ID NO: 2684

SEQ ID NO: 10537 - DNA, 810 bp, Staphylococcus aureus; identical to SEQ ID NO: 2685

SEQ ID NO: 10538 - DNA, 525 bp, Staphylococcus aureus; identical to SEQ ID NO: 2686

SEQ ID NO: 10539 - DNA, 1074 bp, Staphylococcus aureus; identical to SEQ ID NO: 2687

SEQ ID NO: 10540 - DNA, 741 bp, Staphylococcus aureus; identical to SEQ ID NO: 2688

SEQ ID NO: 10541 - DNA, 1368 bp, Staphylococcus aureus; identical to SEQ ID NO: 2689

SEQ ID NO: 10542 - DNA, 570 bp, Staphylococcus aureus; identical to SEQ ID NO: 2690

SEQ ID NO: 10543 - DNA, 459 bp, Staphylococcus aureus; identical to SEQ ID NO: 2691

SEQ ID NO: 10544 - DNA, 447 bp, Staphylococcus aureus; identical to SEQ ID NO: 2692

SEQ ID NO: 10545 - DNA, 447 bp, Staphylococcus aureus; identical to SEQ ID NO: 2693

SEQ ID NO: 10546 - DNA, 600 bp, Staphylococcus aureus; identical to SEQ ID NO: 2694

SEQ ID NO: 10547 - DNA, 999 bp, Staphylococcus aureus; identical to SEQ ID NO: 2695

SEQ ID NO: 10548 - DNA, 1020 bp, Staphylococcus aureus; identical to SEQ ID NO: 2696

SEQ ID NO: 10549 - DNA, 873 bp, Staphylococcus aureus; identical to SEQ ID NO: 2697

SEQ ID NO: 10550 - DNA, 321 bp, Staphylococcus aureus; identical to SEQ ID NO: 2698

SEQ ID NO: 10551 - DNA, 450 bp, Staphylococcus aureus; identical to SEQ ID NO: 2699

SEQ ID NO: 10552 - DNA, 1821 bp, Staphylococcus aureus; identical to SEQ ID NO: 2700

SEQ ID NO: 10553 - DNA, 1155 bp, Staphylococcus aureus; identical to SEQ ID NO: 2701

SEQ ID NO: 10554 - DNA, 420 bp, Staphylococcus aureus; identical to SEQ ID NO: 2702

SEQ ID NO: 10555 - DNA, 681 bp, Staphylococcus aureus; identical to SEQ ID NO: 2703

SEQ ID NO: 10556 - DNA, 828 bp, Staphylococcus aureus; identical to SEQ ID NO: 2704

SEQ ID NO: 10557 - DNA, 897 bp, Staphylococcus aureus; identical to SEQ ID NO: 2705

SEQ ID NO: 10558 - DNA, 1848 bp, Staphylococcus aureus; identical to SEQ ID NO: 2706

SEQ ID NO: 10559 - DNA, 381 bp, Staphylococcus aureus; identical to SEQ ID NO: 2707

SEQ ID NO: 10560 - DNA, 276 bp, Staphylococcus aureus; identical to SEQ ID NO: 2708

SEQ ID NO: 10561 - DNA, 852 bp, Staphylococcus aureus; identical to SEQ ID NO: 2709

SEQ ID NO: 10562 - DNA, 1227 bp, Staphylococcus aureus; identical to SEQ ID NO: 2710

SEQ ID NO: 10563 - DNA, 96 bp, Staphylococcus aureus; identical to SEQ ID NO: 2711

SEQ ID NO: 10564 - DNA, 3453 bp, Staphylococcus aureus; identical to SEQ ID NO: 2712

SEQ ID NO: 10565 - DNA, 912 bp, Staphylococcus aureus; identical to SEQ ID NO: 2713

SEQ ID NO: 10566 - DNA, 462 bp, Staphylococcus aureus; identical to SEQ ID NO: 2714

SEQ ID NO: 10567 - DNA, 1056 bp, Staphylococcus aureus; identical to SEQ ID NO: 2715

SEQ ID NO: 10568 - DNA, 726 bp, Staphylococcus aureus; identical to SEQ ID NO: 2716

SEQ ID NO: 10569 - DNA, 1377 bp, Staphylococcus aureus; identical to SEQ ID NO: 2717

SEQ ID NO: 10570 - DNA, 666 bp, Staphylococcus aureus; identical to SEQ ID NO: 2718

SEQ ID NO: 10571 - DNA, 900 bp, Staphylococcus aureus; identical to SEQ ID NO: 2719

SEQ ID NO: 10572 - DNA, 375 bp, Staphylococcus aureus; identical to SEQ ID NO: 2720

SEQ ID NO: 10573 - DNA, 162 bp, Staphylococcus aureus; identical to SEQ ID NO: 2721

SEQ ID NO: 10574 - DNA, 351 bp, Staphylococcus aureus; identical to SEQ ID NO: 2722

SEQ ID NO: 10575 - DNA, 645 bp, Staphylococcus aureus; identical to SEQ ID NO: 2723

SEQ ID NO: 10576 - DNA, 408 bp, Staphylococcus aureus; identical to SEQ ID NO: 2724

SEQ ID NO: 10577 - DNA, 435 bp, Staphylococcus aureus; identical to SEQ ID NO: 2725

SEQ ID NO: 10578 - DNA, 444 bp, Staphylococcus aureus; identical to SEQ ID NO: 2726

SEQ ID NO: 10579 - DNA, 363 bp, Staphylococcus aureus; identical to SEQ ID NO: 2727

SEQ ID NO: 10580 - DNA, 285 bp, Staphylococcus aureus; identical to SEQ ID NO: 2728

SEQ ID NO: 10581 - DNA, 1146 bp, Staphylococcus aureus; identical to SEQ ID NO: 2729

SEQ ID NO: 10582 - DNA, 738 bp, Staphylococcus aureus; identical to SEQ ID NO: 2730

SEQ ID NO: 10583 - DNA, 1188 bp, Staphylococcus aureus; identical to SEQ ID NO: 2731

SEQ ID NO: 10584 - DNA, 1662 bp, Staphylococcus aureus; identical to SEQ ID NO: 2732

SEQ ID NO: 10585 - DNA, 345 bp, Staphylococcus aureus; identical to SEQ ID NO: 2733

SEQ ID NO: 10586 - DNA, 417 bp, Staphylococcus aureus; identical to SEQ ID NO: 2734

SEQ ID NO: 10587 - DNA, 255 bp, Staphylococcus aureus; identical to SEQ ID NO: 2735

SEQ ID NO: 10588 - DNA, 435 bp, Staphylococcus aureus; identical to SEQ ID NO: 2736

SEQ ID NO: 10589 - DNA, 201 bp, Staphylococcus aureus; identical to SEQ ID NO: 2737

SEQ ID NO: 10590 - DNA, 174 bp, Staphylococcus aureus; identical to SEQ ID NO: 2738

SEQ ID NO: 10591 - DNA, 543 bp, Staphylococcus aureus; identical to SEQ ID NO: 2739

SEQ ID NO: 10592 - DNA, 327 bp, Staphylococcus aureus; identical to SEQ ID NO: 2740

SEQ ID NO: 10593 - DNA, 1119 bp, Staphylococcus aureus; identical to SEQ ID NO: 2741

SEQ ID NO: 10594 - DNA, 483 bp, Staphylococcus aureus; identical to SEQ ID NO: 2742

SEQ ID NO: 10595 - DNA, 1617 bp, Staphylococcus aureus; identical to SEQ ID NO: 2743

SEQ ID NO: 10596 - DNA, 342 bp, Staphylococcus aureus; identical to SEQ ID NO: 2744

SEQ ID NO: 10597 - DNA, 351 bp, Staphylococcus aureus; identical to SEQ ID NO: 2745

SEQ ID NO: 10598 - DNA, 558 bp, Staphylococcus aureus; identical to SEQ ID NO: 2746

SEQ ID NO: 10599 - DNA, 285 bp, Staphylococcus aureus; identical to SEQ ID NO: 2747

SEQ ID NO: 10600 - DNA, 438 bp, Staphylococcus aureus; identical to SEQ ID NO: 2748

SEQ ID NO: 10601 - DNA, 174 bp, Staphylococcus aureus; identical to SEQ ID NO: 2749

SEQ ID NO: 10602 - DNA, 1248 bp, Staphylococcus aureus; identical to SEQ ID NO: 2750

SEQ ID NO: 10603 - DNA, 684 bp, Staphylococcus aureus; identical to SEQ ID NO: 2751

SEQ ID NO: 10604 - DNA, 135 bp, Staphylococcus aureus; identical to SEQ ID NO: 2752

SEQ ID NO: 10605 - DNA, 1077 bp, Staphylococcus aureus; identical to SEQ ID NO: 2753

SEQ ID NO: 10606 - DNA, 960 bp, Staphylococcus aureus; identical to SEQ ID NO: 2754

SEQ ID NO: 10607 - DNA, 879 bp, Staphylococcus aureus; identical to SEQ ID NO: 2755

SEQ ID NO: 10608 - DNA, 1485 bp, Staphylococcus aureus; identical to SEQ ID NO: 2756

SEQ ID NO: 10609 - DNA, 708 bp, Staphylococcus aureus; identical to SEQ ID NO: 2757

SEQ ID NO: 10610 - DNA, 660 bp, Staphylococcus aureus; identical to SEQ ID NO: 2758

SEQ ID NO: 10611 - DNA, 966 bp, Staphylococcus aureus; identical to SEQ ID NO: 2759

SEQ ID NO: 10612 - DNA, 951 bp, Staphylococcus aureus; identical to SEQ ID NO: 2760

SEQ ID NO: 10613 - DNA, 735 bp, Staphylococcus aureus; identical to SEQ ID NO: 2761

SEQ ID NO: 10614 - DNA, 1251 bp, Staphylococcus aureus; identical to SEQ ID NO: 2762

SEQ ID NO: 10615 - DNA, 324 bp, Staphylococcus aureus; identical to SEQ ID NO: 2763

SEQ ID NO: 10616 - DNA, 741 bp, Staphylococcus aureus; identical to SEQ ID NO: 2764

SEQ ID NO: 10617 - DNA, 225 bp, Staphylococcus aureus; identical to SEQ ID NO: 2765

SEQ ID NO: 10618 - DNA, 1344 bp, Staphylococcus aureus; identical to SEQ ID NO: 2766

SEQ ID NO: 10619 - DNA, 1059 bp, Staphylococcus aureus; identical to SEQ ID NO: 2767

SEQ ID NO: 10620 - DNA, 987 bp, Staphylococcus aureus; identical to SEQ ID NO: 2768

SEQ ID NO: 10621 - DNA, 2403 bp, Staphylococcus aureus; identical to SEQ ID NO: 2769

SEQ ID NO: 10622 - DNA, 636 bp, Staphylococcus aureus; identical to SEQ ID NO: 2770

SEQ ID NO: 10623 - DNA, 204 bp, Staphylococcus aureus; identical to SEQ ID NO: 2771

SEQ ID NO: 10624 - DNA, 267 bp, Staphylococcus aureus; identical to SEQ ID NO: 2772

SEQ ID NO: 10625 - DNA, 1026 bp, Staphylococcus aureus; identical to SEQ ID NO: 2773

SEQ ID NO: 10626 - DNA, 180 bp, Staphylococcus aureus; identical to SEQ ID NO: 2774

SEQ ID NO: 10627 - DNA, 1452 bp, Staphylococcus aureus; identical to SEQ ID NO: 2775

SEQ ID NO: 10628 - DNA, 522 bp, Staphylococcus aureus; identical to SEQ ID NO: 2776

SEQ ID NO: 10629 - DNA, 426 bp, Staphylococcus aureus; identical to SEQ ID NO: 2777

SEQ ID NO: 10630 - DNA, 417 bp, Staphylococcus aureus; identical to SEQ ID NO: 2778

SEQ ID NO: 10631 - DNA, 252 bp, Staphylococcus aureus; identical to SEQ ID NO: 2779

SEQ ID NO: 10632 - DNA, 198 bp, Staphylococcus aureus; identical to SEQ ID NO: 2780

SEQ ID NO: 10633 - DNA, 1713 bp, Staphylococcus aureus; identical to SEQ ID NO: 2781

SEQ ID NO: 10634 - DNA, 663 bp, Staphylococcus aureus; identical to SEQ ID NO: 2782

SEQ ID NO: 10635 - DNA, 2349 bp, Staphylococcus aureus; identical to SEQ ID NO: 2783

SEQ ID NO: 10636 - DNA, 435 bp, Staphylococcus aureus; identical to SEQ ID NO: 2784

SEQ ID NO: 10637 - DNA, 507 bp, Staphylococcus aureus; identical to SEQ ID NO: 2785

SEQ ID NO: 10638 - DNA, 1353 bp, Staphylococcus aureus; identical to SEQ ID NO: 2786

SEQ ID NO: 10639 - DNA, 921 bp, Staphylococcus aureus; identical to SEQ ID NO: 2787

SEQ ID NO: 10640 - DNA, 315 bp, Staphylococcus aureus; identical to SEQ ID NO: 2788

SEQ ID NO: 10641 - DNA, 153 bp, Staphylococcus aureus; identical to SEQ ID NO: 2789

SEQ ID NO: 10642 - DNA, 1782 bp, Staphylococcus aureus; identical to SEQ ID NO: 2790

SEQ ID NO: 10643 - DNA, 456 bp, Staphylococcus aureus; identical to SEQ ID NO: 2791

SEQ ID NO: 10644 - DNA, 615 bp, Staphylococcus aureus; identical to SEQ ID NO: 2792

SEQ ID NO: 10645 - DNA, 2151 bp, Staphylococcus aureus; identical to SEQ ID NO: 2793

SEQ ID NO: 10646 - DNA, 1767 bp, Staphylococcus aureus; identical to SEQ ID NO: 2794

SEQ ID NO: 10647 - DNA, 771 bp, Staphylococcus aureus; identical to SEQ ID NO: 2795

SEQ ID NO: 10648 - DNA, 816 bp, Staphylococcus aureus; identical to SEQ ID NO: 2796

SEQ ID NO: 10649 - DNA, 510 bp, Staphylococcus aureus; identical to SEQ ID NO: 2797

SEQ ID NO: 10650 - DNA, 801 bp, Staphylococcus aureus; identical to SEQ ID NO: 2798

SEQ ID NO: 10651 - DNA, 327 bp, Staphylococcus aureus; identical to SEQ ID NO: 2799

SEQ ID NO: 10652 - DNA, 186 bp, Staphylococcus aureus; identical to SEQ ID NO: 2800

SEQ ID NO: 10653 - DNA, 588 bp, Staphylococcus aureus; identical to SEQ ID NO: 2801

SEQ ID NO: 10654 - DNA, 1002 bp, Staphylococcus aureus; identical to SEQ ID NO: 2802

SEQ ID NO: 10655 - DNA, 258 bp, Staphylococcus aureus; identical to SEQ ID NO: 2803

SEQ ID NO: 10656 - DNA, 561 bp, Staphylococcus aureus; identical to SEQ ID NO: 2804

SEQ ID NO: 10657 - DNA, 459 bp, Staphylococcus aureus; identical to SEQ ID NO: 2805

SEQ ID NO: 10658 - DNA, 597 bp, Staphylococcus aureus; identical to SEQ ID NO: 2806

SEQ ID NO: 10659 - DNA, 363 bp, Staphylococcus aureus; identical to SEQ ID NO: 2807

SEQ ID NO: 10660 - DNA, 330 bp, Staphylococcus aureus; identical to SEQ ID NO: 2808

SEQ ID NO: 10661 - DNA, 171 bp, Staphylococcus aureus; identical to SEQ ID NO: 2809

SEQ ID NO: 10662 - DNA, 105 bp, Staphylococcus aureus; identical to SEQ ID NO: 2810

SEQ ID NO: 10663 - DNA, 1149 bp, Staphylococcus aureus; identical to SEQ ID NO: 2811

SEQ ID NO: 10664 - DNA, 1167 bp, Staphylococcus aureus; identical to SEQ ID NO: 2812

SEQ ID NO: 10665 - DNA, 507 bp, Staphylococcus aureus; identical to SEQ ID NO: 2813

SEQ ID NO: 10666 - DNA, 360 bp, Staphylococcus aureus; identical to SEQ ID NO: 2814

SEQ ID NO: 10667 - DNA, 2451 bp, Staphylococcus aureus; identical to SEQ ID NO: 2815

SEQ ID NO: 10668 - DNA, 492 bp, Staphylococcus aureus; identical to SEQ ID NO: 2816

SEQ ID NO: 10669 - DNA, 1611 bp, Staphylococcus aureus; identical to SEQ ID NO: 2817

SEQ ID NO: 10670 - DNA, 300 bp, Staphylococcus aureus; identical to SEQ ID NO: 2818

SEQ ID NO: 10671 - DNA, 132 bp, Staphylococcus aureus; identical to SEQ ID NO: 2819

SEQ ID NO: 10672 - DNA, 1347 bp, Staphylococcus aureus; identical to SEQ ID NO: 2820

SEQ ID NO: 10673 - DNA, 267 bp, Staphylococcus aureus; identical to SEQ ID NO: 2821

SEQ ID NO: 10674 - DNA, 777 bp, Staphylococcus aureus; identical to SEQ ID NO: 2822

SEQ ID NO: 10675 - DNA, 351 bp, Staphylococcus aureus; identical to SEQ ID NO: 2823

SEQ ID NO: 10676 - DNA, 1584 bp, Staphylococcus aureus; identical to SEQ ID NO: 2824

SEQ ID NO: 10677 - DNA, 93 bp, Staphylococcus aureus; identical to SEQ ID NO: 2825

SEQ ID NO: 10678 - DNA, 684 bp, Staphylococcus aureus; identical to SEQ ID NO: 2826

SEQ ID NO: 10679 - DNA, 480 bp, Staphylococcus aureus; identical to SEQ ID NO: 2827

SEQ ID NO: 10680 - DNA, 237 bp, Staphylococcus aureus; identical to SEQ ID NO: 2828

SEQ ID NO: 10681 - DNA, 330 bp, Staphylococcus aureus; identical to SEQ ID NO: 2829

SEQ ID NO: 10682 - DNA, 561 bp, Staphylococcus aureus; identical to SEQ ID NO: 2830

SEQ ID NO: 10683 - DNA, 465 bp, Staphylococcus aureus; identical to SEQ ID NO: 2831

SEQ ID NO: 10684 - DNA, 1974 bp, Staphylococcus aureus; identical to SEQ ID NO: 2832

SEQ ID NO: 10685 - DNA, 657 bp, Staphylococcus aureus; identical to SEQ ID NO: 2833

SEQ ID NO: 10686 - DNA, 981 bp, Staphylococcus aureus; identical to SEQ ID NO: 2834

SEQ ID NO: 10687 - DNA, 1002 bp, Staphylococcus aureus; identical to SEQ ID NO: 2835

SEQ ID NO: 10688 - DNA, 1677 bp, Staphylococcus aureus; identical to SEQ ID NO: 2836

SEQ ID NO: 10689 - DNA, 933 bp, Staphylococcus aureus; identical to SEQ ID NO: 2837

SEQ ID NO: 10690 - DNA, 108 bp, Staphylococcus aureus; identical to SEQ ID NO: 2838

SEQ ID NO: 10691 - DNA, 1557 bp, Staphylococcus aureus; identical to SEQ ID NO: 2839

SEQ ID NO: 10692 - DNA, 1521 bp, Staphylococcus aureus; identical to SEQ ID NO: 2840

SEQ ID NO: 10693 - DNA, 165 bp, Staphylococcus aureus; identical to SEQ ID NO: 2841

SEQ ID NO: 10694 - DNA, 1179 bp, Staphylococcus aureus; identical to SEQ ID NO: 2842

SEQ ID NO: 10695 - DNA, 1524 bp, Staphylococcus aureus; identical to SEQ ID NO: 2843

SEQ ID NO: 10696 - DNA, 198 bp, Staphylococcus aureus; identical to SEQ ID NO: 2844

SEQ ID NO: 10697 - DNA, 1359 bp, Staphylococcus aureus; identical to SEQ ID NO: 2845

SEQ ID NO: 10698 - DNA, 135 bp, Staphylococcus aureus; identical to SEQ ID NO: 2846

SEQ ID NO: 10699 - DNA, 1071 bp, Staphylococcus aureus; identical to SEQ ID NO: 2847

SEQ ID NO: 10700 - DNA, 135 bp, Staphylococcus aureus; identical to SEQ ID NO: 2848

SEQ ID NO: 10701 - DNA, 138 bp, Staphylococcus aureus; identical to SEQ ID NO: 2849

SEQ ID NO: 10702 - DNA, 696 bp, Staphylococcus aureus; identical to SEQ ID NO: 2850

SEQ ID NO: 10703 - DNA, 210 bp, Staphylococcus aureus; identical to SEQ ID NO: 2851

SEQ ID NO: 10704 - DNA, 1614 bp, Staphylococcus aureus; identical to SEQ ID NO: 2852

SEQ ID NO: 10705 - DNA, 294 bp, Staphylococcus aureus; identical to SEQ ID NO: 2853

SEQ ID NO: 10706 - DNA, 756 bp, Staphylococcus aureus; identical to SEQ ID NO: 2854

SEQ ID NO: 10707 - DNA, 1092 bp, Staphylococcus aureus; identical to SEQ ID NO: 2855

SEQ ID NO: 10708 - DNA, 432 bp, Staphylococcus aureus; identical to SEQ ID NO: 2856

SEQ ID NO: 10709 - DNA, 90 bp, Staphylococcus aureus; identical to SEQ ID NO: 2857

SEQ ID NO: 10710 - DNA, 936 bp, Staphylococcus aureus; identical to SEQ ID NO: 2858

SEQ ID NO: 10711 - DNA, 873 bp, Staphylococcus aureus; identical to SEQ ID NO: 2859

SEQ ID NO: 10712 - DNA, 402 bp, Staphylococcus aureus; identical to SEQ ID NO: 2860

SEQ ID NO: 10713 - DNA, 642 bp, Staphylococcus aureus; identical to SEQ ID NO: 2861

SEQ ID NO: 10714 - DNA, 2235 bp, Staphylococcus aureus; identical to SEQ ID NO: 2862

SEQ ID NO: 10715 - DNA, 801 bp, Staphylococcus aureus; identical to SEQ ID NO: 2863

SEQ ID NO: 10716 - DNA, 1428 bp, Staphylococcus aureus; identical to SEQ ID NO: 2864

SEQ ID NO: 10717 - DNA, 750 bp, Staphylococcus aureus; identical to SEQ ID NO: 2865

SEQ ID NO: 10718 - DNA, 989 bp, Staphylococcus aureus; identical to SEQ ID NO: 2866

SEQ ID NO: 10719 - DNA, 831 bp, Staphylococcus aureus; identical to SEQ ID NO: 2867

SEQ ID NO: 10720 - DNA, 840 bp, Staphylococcus aureus; identical to SEQ ID NO: 2868

SEQ ID NO: 10721 - DNA, 1545 bp, Staphylococcus aureus; identical to SEQ ID NO: 2869

SEQ ID NO: 10722 - DNA, 894 bp, Staphylococcus aureus; identical to SEQ ID NO: 2870

SEQ ID NO: 10723 - DNA, 1350 bp, Staphylococcus aureus; identical to SEQ ID NO: 2871

SEQ ID NO: 10724 - DNA, 690 bp, Staphylococcus aureus; identical to SEQ ID NO: 2872

SEQ ID NO: 10725 - DNA, 207 bp, Staphylococcus aureus; identical to SEQ ID NO: 2873

SEQ ID NO: 10726 - DNA, 1320 bp, Staphylococcus aureus; identical to SEQ ID NO: 2874

SEQ ID NO: 10727 - DNA, 129 bp, Staphylococcus aureus; identical to SEQ ID NO: 2875

SEQ ID NO: 10728 - DNA, 99 bp, Staphylococcus aureus; identical to SEQ ID NO: 2876

SEQ ID NO: 10729 - DNA, 1413 bp, Staphylococcus aureus; identical to SEQ ID NO: 2877

SEQ ID NO: 10730 - DNA, 696 bp, Staphylococcus aureus; identical to SEQ ID NO: 2878

SEQ ID NO: 10731 - DNA, 90 bp, Staphylococcus aureus; identical to SEQ ID NO: 2879

SEQ ID NO: 10732 - DNA, 291 bp, Staphylococcus aureus; identical to SEQ ID NO: 2880

SEQ ID NO: 10733 - DNA, 600 bp, Staphylococcus aureus; identical to SEQ ID NO: 2881

SEQ ID NO: 10734 - DNA, 111 bp, Staphylococcus aureus; identical to SEQ ID NO: 2882

SEQ ID NO: 10735 - DNA, 1195 bp, Staphylococcus aureus; identical to SEQ ID NO: 2883

SEQ ID NO: 10736 - DNA, 396 bp, Staphylococcus aureus; identical to SEQ ID NO: 2884

SEQ ID NO: 10737 - DNA, 441 bp, Staphylococcus aureus; identical to SEQ ID NO: 2885

SEQ ID NO: 10738 - DNA, 666 bp, Staphylococcus aureus; identical to SEQ ID NO: 2886

SEQ ID NO: 10739 - DNA, 675 bp, Staphylococcus aureus; identical to SEQ ID NO: 2887

SEQ ID NO: 10740 - DNA, 1266 bp, Staphylococcus aureus; identical to SEQ ID NO: 2888

SEQ ID NO: 10741 - DNA, 564 bp, Staphylococcus aureus; identical to SEQ ID NO: 2889

SEQ ID NO: 10742 - DNA, 234 bp, Staphylococcus aureus; identical to SEQ ID NO: 2890

SEQ ID NO: 10743 - DNA, 291 bp, Staphylococcus aureus; identical to SEQ ID NO: 2891

SEQ ID NO: 10744 - DNA, 405 bp, Staphylococcus aureus; identical to SEQ ID NO: 2892

SEQ ID NO: 10745 - DNA, 117 bp, Staphylococcus aureus; identical to SEQ ID NO: 2893

SEQ ID NO: 10746 - DNA, 99 bp, Staphylococcus aureus; identical to SEQ ID NO: 2894

SEQ ID NO: 10747 - DNA, 132 bp, Staphylococcus aureus; identical to SEQ ID NO: 2895

SEQ ID NO: 10748 - DNA, 807 bp, Staphylococcus aureus; identical to SEQ ID NO: 2896

SEQ ID NO: 10749 - DNA, 1413 bp, Staphylococcus aureus; identical to SEQ ID NO: 2897

SEQ ID NO: 10750 - DNA, 618 bp, Staphylococcus aureus; identical to SEQ ID NO: 2898

SEQ ID NO: 10751 - DNA, 867 bp, Staphylococcus aureus; identical to SEQ ID NO: 2899

SEQ ID NO: 10752 - DNA, 597 bp, Staphylococcus aureus; identical to SEQ ID NO: 2900

SEQ ID NO: 10753 - DNA, 1536 bp, Staphylococcus aureus; identical to SEQ ID NO: 2901

SEQ ID NO: 10754 - DNA, 846 bp, Staphylococcus aureus; identical to SEQ ID NO: 2902

SEQ ID NO: 10755 - DNA, 2754 bp, Staphylococcus aureus; identical to SEQ ID NO: 2903

SEQ ID NO: 10756 - DNA, 1509 bp, Staphylococcus aureus; identical to SEQ ID NO: 2904

SEQ ID NO: 10757 - DNA, 798 bp, Staphylococcus aureus; identical to SEQ ID NO: 2905

SEQ ID NO: 10758 - DNA, 540 bp, Staphylococcus aureus; identical to SEQ ID NO: 2906

SEQ ID NO: 10759 - DNA, 492 bp, Staphylococcus aureus; identical to SEQ ID NO: 2907

SEQ ID NO: 10760 - DNA, 522 bp, Staphylococcus aureus; identical to SEQ ID NO: 2908

SEQ ID NO: 10761 - DNA, 918 bp, Staphylococcus aureus; identical to SEQ ID NO: 2909

SEQ ID NO: 10762 - DNA, 213 bp, Staphylococcus aureus; identical to SEQ ID NO: 2910

SEQ ID NO: 10763 - DNA, 528 bp, Staphylococcus aureus; identical to SEQ ID NO: 2911

SEQ ID NO: 10764 - DNA, 729 bp, Staphylococcus aureus; identical to SEQ ID NO: 2912

SEQ ID NO: 10765 - DNA, 1308 bp, Staphylococcus aureus; identical to SEQ ID NO: 2913

SEQ ID NO: 10766 - DNA, 882 bp, Staphylococcus aureus; identical to SEQ ID NO: 2914

SEQ ID NO: 10767 - DNA, 1135 bp, Staphylococcus aureus; identical to SEQ ID NO: 2915

SEQ ID NO: 10768 - DNA, 1275 bp, Staphylococcus aureus; identical to SEQ ID NO: 2916

SEQ ID NO: 10769 - DNA, 630 bp, Staphylococcus aureus; identical to SEQ ID NO: 2917

SEQ ID NO: 10770 - DNA, 1101 bp, Staphylococcus aureus; identical to SEQ ID NO: 2918

SEQ ID NO: 10771 - DNA, 1239 bp, Staphylococcus aureus; identical to SEQ ID NO: 2919

SEQ ID NO: 10772 - DNA, 3174 bp, Staphylococcus aureus; identical to SEQ ID NO: 2920

SEQ ID NO: 10773 - DNA, 525 bp, Staphylococcus aureus; identical to SEQ ID NO: 2921

SEQ ID NO: 10774 - DNA, 744 bp, Staphylococcus aureus; identical to SEQ ID NO: 2922

SEQ ID NO: 10775 - DNA, 1308 bp, Staphylococcus aureus; identical to SEQ ID NO: 2923

SEQ ID NO: 10776 - DNA, 204 bp, Staphylococcus aureus; identical to SEQ ID NO: 2924

SEQ ID NO: 10777 - DNA, 693 bp, Staphylococcus aureus; identical to SEQ ID NO: 2925

SEQ ID NO: 10778 - DNA, 420 bp, Staphylococcus aureus; identical to SEQ ID NO: 2926

SEQ ID NO: 10779 - DNA, 612 bp, Staphylococcus aureus; identical to SEQ ID NO: 2927

SEQ ID NO: 10780 - DNA, 1098 bp, Staphylococcus aureus; identical to SEQ ID NO: 2928

SEQ ID NO: 10781 - DNA, 213 bp, Staphylococcus aureus; identical to SEQ ID NO: 2929

SEQ ID NO: 10782 - DNA, 837 bp, Staphylococcus aureus; identical to SEQ ID NO: 2930

SEQ ID NO: 10783 - DNA, 402 bp, Staphylococcus aureus; identical to SEQ ID NO: 2931

SEQ ID NO: 10784 - DNA, 1077 bp, Staphylococcus aureus; identical to SEQ ID NO: 2932

SEQ ID NO: 10785 - DNA, 624 bp, Staphylococcus aureus; identical to SEQ ID NO: 2933

SEQ ID NO: 10786 - DNA, 600 bp, Staphylococcus aureus; identical to SEQ ID NO: 2934

SEQ ID NO: 10787 - DNA, 189 bp, Staphylococcus aureus; identical to SEQ ID NO: 2935

SEQ ID NO: 10788 - DNA, 219 bp, Staphylococcus aureus; identical to SEQ ID NO: 2936

SEQ ID NO: 10789 - DNA, 255 bp, Staphylococcus aureus; identical to SEQ ID NO: 2937

SEQ ID NO: 10790 - DNA, 1200 bp, Staphylococcus aureus; identical to SEQ ID NO: 2938

SEQ ID NO: 10791 - DNA, 1317 bp, Staphylococcus aureus; identical to SEQ ID NO: 2939

SEQ ID NO: 10792 - DNA, 2409 bp, Staphylococcus aureus; identical to SEQ ID NO: 2940

SEQ ID NO: 10793 - DNA, 1428 bp, Staphylococcus aureus; identical to SEQ ID NO: 2941

SEQ ID NO: 10794 - DNA, 954 bp, Staphylococcus aureus; identical to SEQ ID NO: 2942

SEQ ID NO: 10795 - DNA, 336 bp, Staphylococcus aureus; identical to SEQ ID NO: 2943

SEQ ID NO: 10796 - DNA, 102 bp, Staphylococcus aureus; identical to SEQ ID NO: 2944

SEQ ID NO: 10797 - DNA, 489 bp, Staphylococcus aureus; identical to SEQ ID NO: 2945

SEQ ID NO: 10798 - DNA, 1260 bp, Staphylococcus aureus; identical to SEQ ID NO: 2946

SEQ ID NO: 10799 - DNA, 330 bp, Staphylococcus aureus; identical to SEQ ID NO: 2947

SEQ ID NO: 10800 - DNA, 1625 bp, Staphylococcus aureus; identical to SEQ ID NO: 2948

SEQ ID NO: 10801 - DNA, 894 bp, Staphylococcus aureus; identical to SEQ ID NO: 2949

SEQ ID NO: 10802 - DNA, 936 bp, Staphylococcus aureus; identical to SEQ ID NO: 2950

SEQ ID NO: 10803 - DNA, 861 bp, Staphylococcus aureus; identical to SEQ ID NO: 2951

SEQ ID NO: 10804 - DNA, 1308 bp, Staphylococcus aureus; identical to SEQ ID NO: 2952

SEQ ID NO: 10805 - DNA, 1611 bp, Staphylococcus aureus; identical to SEQ ID NO: 2953

SEQ ID NO: 10806 - DNA, 1095 bp, Staphylococcus aureus; identical to SEQ ID NO: 2954

SEQ ID NO: 10807 - DNA, 744 bp, Staphylococcus aureus; identical to SEQ ID NO: 2955

SEQ ID NO: 10808 - DNA, 861 bp, Staphylococcus aureus; identical to SEQ ID NO: 2956

SEQ ID NO: 10809 - DNA, 672 bp, Staphylococcus aureus; identical to SEQ ID NO: 2957

SEQ ID NO: 10810 - DNA, 1995 bp, Staphylococcus aureus; identical to SEQ ID NO: 2958

SEQ ID NO: 10811 - DNA, 1194 bp, Staphylococcus aureus; identical to SEQ ID NO: 2959

SEQ ID NO: 10812 - DNA, 876 bp, Staphylococcus aureus; identical to SEQ ID NO: 2960

SEQ ID NO: 10813 - DNA, 1185 bp, Staphylococcus aureus; identical to SEQ ID NO: 2961

SEQ ID NO: 10814 - DNA, 645 bp, Staphylococcus aureus; identical to SEQ ID NO: 2962

SEQ ID NO: 10815 - DNA, 351 bp, Staphylococcus aureus; identical to SEQ ID NO: 2963

SEQ ID NO: 10816 - DNA, 648 bp, Staphylococcus aureus; identical to SEQ ID NO: 2964

SEQ ID NO: 10817 - DNA, 1302 bp, Staphylococcus aureus; identical to SEQ ID NO: 2965

SEQ ID NO: 10818 - DNA, 1533 bp, Staphylococcus aureus; identical to SEQ ID NO: 2966

SEQ ID NO: 10819 - DNA, 408 bp, Staphylococcus aureus; identical to SEQ ID NO: 2967

SEQ ID NO: 10820 - DNA, 444 bp, Staphylococcus aureus; identical to SEQ ID NO: 2968

SEQ ID NO: 10821 - DNA, 1647 bp, Staphylococcus aureus; identical to SEQ ID NO: 2969

SEQ ID NO: 10822 - DNA, 414 bp, Staphylococcus aureus; identical to SEQ ID NO: 2970

SEQ ID NO: 10823 - DNA, 2061 bp, Staphylococcus aureus; identical to SEQ ID NO: 2971

SEQ ID NO: 10824 - DNA, 1374 bp, Staphylococcus aureus; identical to SEQ ID NO: 2972

SEQ ID NO: 10825 - DNA, 573 bp, Staphylococcus aureus; identical to SEQ ID NO: 2973

SEQ ID NO: 10826 - DNA, 240 bp, Staphylococcus aureus; identical to SEQ ID NO: 2974

SEQ ID NO: 10827 - DNA, 987 bp, Staphylococcus aureus; identical to SEQ ID NO: 2975

SEQ ID NO: 10828 - DNA, 939 bp, Staphylococcus aureus; identical to SEQ ID NO: 2976

SEQ ID NO: 10829 - DNA, 936 bp, Staphylococcus aureus; identical to SEQ ID NO: 2977

SEQ ID NO: 10830 - DNA, 666 bp, Staphylococcus aureus; identical to SEQ ID NO: 2978

SEQ ID NO: 10831 - DNA, 735 bp, Staphylococcus aureus; identical to SEQ ID NO: 2979

SEQ ID NO: 10832 - DNA, 204 bp, Staphylococcus aureus; identical to SEQ ID NO: 2980

SEQ ID NO: 10833 - DNA, 234 bp, Staphylococcus aureus; identical to SEQ ID NO: 2981

SEQ ID NO: 10834 - DNA, 1137 bp, Staphylococcus aureus; identical to SEQ ID NO: 2982

SEQ ID NO: 10835 - DNA, 732 bp, Staphylococcus aureus; identical to SEQ ID NO: 2983

SEQ ID NO: 10836 - DNA, 828 bp, Staphylococcus aureus; identical to SEQ ID NO: 2984

SEQ ID NO: 10837 - DNA, 633 bp, Staphylococcus aureus; identical to SEQ ID NO: 2985

SEQ ID NO: 10838 - DNA, 3567 bp, Staphylococcus aureus; identical to SEQ ID NO: 2986

SEQ ID NO: 10839 - DNA, 783 bp, Staphylococcus aureus; identical to SEQ ID NO: 2987

SEQ ID NO: 10840 - DNA, 2610 bp, Staphylococcus aureus; identical to SEQ ID NO: 2988

SEQ ID NO: 10841 - DNA, 882 bp, Staphylococcus aureus; identical to SEQ ID NO: 2989

SEQ ID NO: 10842 - DNA, 1251 bp, Staphylococcus aureus; identical to SEQ ID NO: 2990

SEQ ID NO: 10843 - DNA, 1806 bp, Staphylococcus aureus; identical to SEQ ID NO: 2991

SEQ ID NO: 10844 - DNA, 333 bp, Staphylococcus aureus; identical to SEQ ID NO: 2992

SEQ ID NO: 10845 - DNA, 1368 bp, Staphylococcus aureus; identical to SEQ ID NO: 2993

SEQ ID NO: 10846 - DNA, 1356 bp, Staphylococcus aureus; identical to SEQ ID NO: 2994

SEQ ID NO: 10847 - DNA, 276 bp, Staphylococcus aureus; identical to SEQ ID NO: 2995

SEQ ID NO: 10848 - DNA, 933 bp, Staphylococcus aureus; identical to SEQ ID NO: 2996

SEQ ID NO: 10849 - DNA, 504 bp, Staphylococcus aureus; identical to SEQ ID NO: 2997

SEQ ID NO: 10850 - DNA, 810 bp, Staphylococcus aureus; identical to SEQ ID NO: 2998

SEQ ID NO: 10851 - DNA, 738 bp, Staphylococcus aureus; identical to SEQ ID NO: 2999

SEQ ID NO: 10852 - DNA, 909 bp, Staphylococcus aureus; identical to SEQ ID NO: 3000

SEQ ID NO: 10853 - DNA, 1218 bp, Staphylococcus aureus; identical to SEQ ID NO: 3001

SEQ ID NO: 10854 - DNA, 351 bp, Staphylococcus aureus; identical to SEQ ID NO: 3002

SEQ ID NO: 10855 - DNA, 1065 bp, Staphylococcus aureus; identical to SEQ ID NO: 3003

SEQ ID NO: 10856 - DNA, 885 bp, Staphylococcus aureus; identical to SEQ ID NO: 3004

SEQ ID NO: 10857 - DNA, 1443 bp, Staphylococcus aureus; identical to SEQ ID NO: 3005

SEQ ID NO: 10858 - DNA, 768 bp, Staphylococcus aureus; identical to SEQ ID NO: 3006

SEQ ID NO: 10859 - DNA, 1167 bp, Staphylococcus aureus; identical to SEQ ID NO: 3007

SEQ ID NO: 10860 - DNA, 1344 bp, Staphylococcus aureus; identical to SEQ ID NO: 3008

SEQ ID NO: 10861 - DNA, 660 bp, Staphylococcus aureus; identical to SEQ ID NO: 3009

SEQ ID NO: 10862 - DNA, 669 bp, Staphylococcus aureus; identical to SEQ ID NO: 3010

SEQ ID NO: 10863 - DNA, 801 bp, Staphylococcus aureus; identical to SEQ ID NO: 3011

SEQ ID NO: 10864 - DNA, 909 bp, Staphylococcus aureus; identical to SEQ ID NO: 3012

SEQ ID NO: 10865 - DNA, 684 bp, Staphylococcus aureus; identical to SEQ ID NO: 3013

SEQ ID NO: 10866 - DNA, 1188 bp, Staphylococcus aureus; identical to SEQ ID NO: 3014

SEQ ID NO: 10867 - DNA, 1245 bp, Staphylococcus aureus; identical to SEQ ID NO: 3015

SEQ ID NO: 10868 - DNA, 516 bp, Staphylococcus aureus; identical to SEQ ID NO: 3016

SEQ ID NO: 10869 - DNA, 873 bp, Staphylococcus aureus; identical to SEQ ID NO: 3017

SEQ ID NO: 10870 - DNA, 1317 bp, Staphylococcus aureus; identical to SEQ ID NO: 3018

SEQ ID NO: 10871 - DNA, 2076 bp, Staphylococcus aureus; identical to SEQ ID NO: 3019

SEQ ID NO: 10872 - DNA, 969 bp, Staphylococcus aureus; identical to SEQ ID NO: 3020

SEQ ID NO: 10873 - DNA, 1308 bp, Staphylococcus aureus; identical to SEQ ID NO: 3021

SEQ ID NO: 10874 - DNA, 897 bp, Staphylococcus aureus; identical to SEQ ID NO: 3022

SEQ ID NO: 10875 - DNA, 984 bp, Staphylococcus aureus; identical to SEQ ID NO: 3023

SEQ ID NO: 10876 - DNA, 546 bp, Staphylococcus aureus; identical to SEQ ID NO: 3024

SEQ ID NO: 10877 - DNA, 1071 bp, Staphylococcus aureus; identical to SEQ ID NO: 3025

SEQ ID NO: 10878 - DNA, 1404 bp, Staphylococcus aureus; identical to SEQ ID NO: 3026

SEQ ID NO: 10879 - DNA, 1758 bp, Staphylococcus aureus; identical to SEQ ID NO: 3027

SEQ ID NO: 10880 - DNA, 96 bp, Staphylococcus aureus; identical to SEQ ID NO: 3028

SEQ ID NO: 10881 - DNA, 774 bp, Staphylococcus aureus; identical to SEQ ID NO: 3029

SEQ ID NO: 10882 - DNA, 1194 bp, Staphylococcus aureus; identical to SEQ ID NO: 3030

SEQ ID NO: 10883 - DNA, 687 bp, Staphylococcus aureus; identical to SEQ ID NO: 3031

SEQ ID NO: 10884 - DNA, 1314 bp, Staphylococcus aureus; identical to SEQ ID NO: 3032

SEQ ID NO: 10885 - DNA, 90 bp, Staphylococcus aureus; identical to SEQ ID NO: 3033

SEQ ID NO: 10886 - DNA, 510 bp, Staphylococcus aureus; identical to SEQ ID NO: 3034

SEQ ID NO: 10887 - DNA, 775 bp, Staphylococcus aureus; identical to SEQ ID NO: 3035

SEQ ID NO: 10888 - DNA, 240 bp, Staphylococcus aureus; identical to SEQ ID NO: 3036

SEQ ID NO: 10889 - DNA, 111 bp, Staphylococcus aureus; identical to SEQ ID NO: 3037

SEQ ID NO: 10890 - DNA, 537 bp, Staphylococcus aureus; identical to SEQ ID NO: 3038

SEQ ID NO: 10891 - DNA, 882 bp, Staphylococcus aureus; identical to SEQ ID NO: 3039

SEQ ID NO: 10892 - DNA, 1563 bp, Staphylococcus aureus; identical to SEQ ID NO: 3040

SEQ ID NO: 10893 - DNA, 723 bp, Staphylococcus aureus; identical to SEQ ID NO: 3041

SEQ ID NO: 10894 - DNA, 1008 bp, Staphylococcus aureus; identical to SEQ ID NO: 3042

SEQ ID NO: 10895 - DNA, 555 bp, Staphylococcus aureus; identical to SEQ ID NO: 3043

SEQ ID NO: 10896 - DNA, 1002 bp, Staphylococcus aureus; identical to SEQ ID NO: 3044

SEQ ID NO: 10897 - DNA, 771 bp, Staphylococcus aureus; identical to SEQ ID NO: 3045

SEQ ID NO: 10898 - DNA, 885 bp, Staphylococcus aureus; identical to SEQ ID NO: 3046

SEQ ID NO: 10899 - DNA, 783 bp, Staphylococcus aureus; identical to SEQ ID NO: 3047

SEQ ID NO: 10900 - DNA, 1413 bp, Staphylococcus aureus; identical to SEQ ID NO: 3048

SEQ ID NO: 10901 - DNA, 1185 bp, Staphylococcus aureus; identical to SEQ ID NO: 3049

SEQ ID NO: 10902 - DNA, 1713 bp, Staphylococcus aureus; identical to SEQ ID NO: 3050

SEQ ID NO: 10903 - DNA, 1704 bp, Staphylococcus aureus; identical to SEQ ID NO: 3051

SEQ ID NO: 10904 - DNA, 312 bp, Staphylococcus aureus; identical to SEQ ID NO: 3052

SEQ ID NO: 10905 - DNA, 765 bp, Staphylococcus aureus; identical to SEQ ID NO: 3053

SEQ ID NO: 10906 - DNA, 1206 bp, Staphylococcus aureus; identical to SEQ ID NO: 3054

SEQ ID NO: 10907 - DNA, 4311 bp, Staphylococcus aureus; identical to SEQ ID NO: 3055

SEQ ID NO: 10908 - DNA, 981 bp, Staphylococcus aureus; identical to SEQ ID NO: 3056

SEQ ID NO: 10909 - DNA, 468 bp, Staphylococcus aureus; identical to SEQ ID NO: 3057

SEQ ID NO: 10910 - DNA, 933 bp, Staphylococcus aureus; identical to SEQ ID NO: 3058

SEQ ID NO: 10911 - DNA, 1176 bp, Staphylococcus aureus; identical to SEQ ID NO: 3059

SEQ ID NO: 10912 - DNA, 516 bp, Staphylococcus aureus; identical to SEQ ID NO: 3060

SEQ ID NO: 10913 - DNA, 285 bp, Staphylococcus aureus; identical to SEQ ID NO: 3061

SEQ ID NO: 10914 - DNA, 429 bp, Staphylococcus aureus; identical to SEQ ID NO: 3062

SEQ ID NO: 10915 - DNA, 318 bp, Staphylococcus aureus; identical to SEQ ID NO: 3063

SEQ ID NO: 10916 - DNA, 2118 bp, Staphylococcus aureus; identical to SEQ ID NO: 3064

SEQ ID NO: 10917 - DNA, 792 bp, Staphylococcus aureus; identical to SEQ ID NO: 3065

SEQ ID NO: 10918 - DNA, 351 bp, Staphylococcus aureus; identical to SEQ ID NO: 3066

SEQ ID NO: 10919 - DNA, 606 bp, Staphylococcus aureus; identical to SEQ ID NO: 3067

SEQ ID NO: 10920 - DNA, 918 bp, Staphylococcus aureus; identical to SEQ ID NO: 3068

SEQ ID NO: 10921 - DNA, 972 bp, Staphylococcus aureus; identical to SEQ ID NO: 3069

SEQ ID NO: 10922 - DNA, 849 bp, Staphylococcus aureus; identical to SEQ ID NO: 3070

SEQ ID NO: 10923 - DNA, 270 bp, Staphylococcus aureus; identical to SEQ ID NO: 3071

SEQ ID NO: 10924 - DNA, 417 bp, Staphylococcus aureus; identical to SEQ ID NO: 3072

SEQ ID NO: 10925 - DNA, 1824 bp, Staphylococcus aureus; identical to SEQ ID NO: 3073

SEQ ID NO: 10926 - DNA, 714 bp, Staphylococcus aureus; identical to SEQ ID NO: 3074

SEQ ID NO: 10927 - DNA, 2097 bp, Staphylococcus aureus; identical to SEQ ID NO: 3075

SEQ ID NO: 10928 - DNA, 855 bp, Staphylococcus aureus; identical to SEQ ID NO: 3076

SEQ ID NO: 10929 - DNA, 816 bp, Staphylococcus aureus; identical to SEQ ID NO: 3077

SEQ ID NO: 10930 - DNA, 1572 bp, Staphylococcus aureus; identical to SEQ ID NO: 3078

SEQ ID NO: 10931 - DNA, 153 bp, Staphylococcus aureus; identical to SEQ ID NO: 3079

SEQ ID NO: 10932 - DNA, 2379 bp, Staphylococcus aureus; identical to SEQ ID NO: 3080

SEQ ID NO: 10933 - DNA, 705 bp, Staphylococcus aureus; identical to SEQ ID NO: 3081

SEQ ID NO: 10934 - DNA, 714 bp, Staphylococcus aureus; identical to SEQ ID NO: 3082

SEQ ID NO: 10935 - DNA, 1665 bp, Staphylococcus aureus; identical to SEQ ID NO: 3083

SEQ ID NO: 10936 - DNA, 138 bp, Staphylococcus aureus; identical to SEQ ID NO: 3084

SEQ ID NO: 10937 - DNA, 405 bp, Staphylococcus aureus; identical to SEQ ID NO: 3085

SEQ ID NO: 10938 - DNA, 285 bp, Staphylococcus aureus; identical to SEQ ID NO: 3086

SEQ ID NO: 10939 - DNA, 1266 bp, Staphylococcus aureus; identical to SEQ ID NO: 3087

SEQ ID NO: 10940 - DNA, 300 bp, Staphylococcus aureus; identical to SEQ ID NO: 3088

SEQ ID NO: 10941 - DNA, 1287 bp, Staphylococcus aureus; identical to SEQ ID NO: 3089

SEQ ID NO: 10942 - DNA, 705 bp, Staphylococcus aureus; identical to SEQ ID NO: 3090

SEQ ID NO: 10943 - DNA, 1137 bp, Staphylococcus aureus; identical to SEQ ID NO: 3091

SEQ ID NO: 10944 - DNA, 828 bp, Staphylococcus aureus; identical to SEQ ID NO: 3092

SEQ ID NO: 10945 - DNA, 792 bp, Staphylococcus aureus; identical to SEQ ID NO: 3093

SEQ ID NO: 10946 - DNA, 393 bp, Staphylococcus aureus; identical to SEQ ID NO: 3094

SEQ ID NO: 10947 - DNA, 1098 bp, Staphylococcus aureus; identical to SEQ ID NO: 3095

SEQ ID NO: 10948 - DNA, 579 bp, Staphylococcus aureus; identical to SEQ ID NO: 3096

SEQ ID NO: 10949 - DNA, 399 bp, Staphylococcus aureus; identical to SEQ ID NO: 3097

SEQ ID NO: 10950 - DNA, 1029 bp, Staphylococcus aureus; identical to SEQ ID NO: 3098

SEQ ID NO: 10951 - DNA, 1152 bp, Staphylococcus aureus; identical to SEQ ID NO: 3099

SEQ ID NO: 10952 - DNA, 438 bp, Staphylococcus aureus; identical to SEQ ID NO: 3100

SEQ ID NO: 10953 - DNA, 1044 bp, Staphylococcus aureus; identical to SEQ ID NO: 3101

SEQ ID NO: 10954 - DNA, 804 bp, Staphylococcus aureus; identical to SEQ ID NO: 3102

SEQ ID NO: 10955 - DNA, 807 bp, Staphylococcus aureus; identical to SEQ ID NO: 3103

SEQ ID NO: 10956 - DNA, 798 bp, Staphylococcus aureus; identical to SEQ ID NO: 3104

SEQ ID NO: 10957 - DNA, 861 bp, Staphylococcus aureus; identical to SEQ ID NO: 3105

SEQ ID NO: 10958 - DNA, 1761 bp, Staphylococcus aureus; identical to SEQ ID NO: 3106

SEQ ID NO: 10959 - DNA, 921 bp, Staphylococcus aureus; identical to SEQ ID NO: 3107

SEQ ID NO: 10960 - DNA, 867 bp, Staphylococcus aureus; identical to SEQ ID NO: 3108

SEQ ID NO: 10961 - DNA, 369 bp, Staphylococcus aureus; identical to SEQ ID NO: 3109

SEQ ID NO: 10962 - DNA, 294 bp, Staphylococcus aureus; identical to SEQ ID NO: 3110

SEQ ID NO: 10963 - DNA, 945 bp, Staphylococcus aureus; identical to SEQ ID NO: 3111

SEQ ID NO: 10964 - DNA, 1545 bp, Staphylococcus aureus; identical to SEQ ID NO: 3112

SEQ ID NO: 10965 - DNA, 390 bp, Staphylococcus aureus; identical to SEQ ID NO: 3113

SEQ ID NO: 10966 - DNA, 366 bp, Staphylococcus aureus; identical to SEQ ID NO: 3114

SEQ ID NO: 10967 - DNA, 366 bp, Staphylococcus aureus; identical to SEQ ID NO: 3115

SEQ ID NO: 10968 - DNA, 492 bp, Staphylococcus aureus; identical to SEQ ID NO: 3116

SEQ ID NO: 10969 - DNA, 1110 bp, Staphylococcus aureus; identical to SEQ ID NO: 3117

SEQ ID NO: 10970 - DNA, 2523 bp, Staphylococcus aureus; identical to SEQ ID NO: 3118

SEQ ID NO: 10971 - DNA, 219 bp, Staphylococcus aureus; identical to SEQ ID NO: 3119

SEQ ID NO: 10972 - DNA, 2010 bp, Staphylococcus aureus; identical to SEQ ID NO: 3120

SEQ ID NO: 10973 - DNA, 648 bp, Staphylococcus aureus; identical to SEQ ID NO: 3121

SEQ ID NO: 10974 - DNA, 543 bp, Staphylococcus aureus; identical to SEQ ID NO: 3122

SEQ ID NO: 10975 - DNA, 1293 bp, Staphylococcus aureus; identical to SEQ ID NO: 3123

SEQ ID NO: 10976 - DNA, 819 bp, Staphylococcus aureus; identical to SEQ ID NO: 3124

SEQ ID NO: 10977 - DNA, 441 bp, Staphylococcus aureus; identical to SEQ ID NO: 3125

SEQ ID NO: 10978 - DNA, 1497 bp, Staphylococcus aureus; identical to SEQ ID NO: 3126

SEQ ID NO: 10979 - DNA, 180 bp, Staphylococcus aureus; identical to SEQ ID NO: 3127

SEQ ID NO: 10980 - DNA, 1674 bp, Staphylococcus aureus; identical to SEQ ID NO: 3128

SEQ ID NO: 10981 - DNA, 501 bp, Staphylococcus aureus; identical to SEQ ID NO: 3129

SEQ ID NO: 10982 - DNA, 915 bp, Staphylococcus aureus; identical to SEQ ID NO: 3130

SEQ ID NO: 10983 - DNA, 360 bp, Staphylococcus aureus; identical to SEQ ID NO: 3131

SEQ ID NO: 10984 - DNA, 936 bp, Staphylococcus aureus; identical to SEQ ID NO: 3132

SEQ ID NO: 10985 - DNA, 417 bp, Staphylococcus aureus; identical to SEQ ID NO: 3133

SEQ ID NO: 10986 - DNA, 234 bp, Staphylococcus aureus; identical to SEQ ID NO: 3134

SEQ ID NO: 10987 - DNA, 399 bp, Staphylococcus aureus; identical to SEQ ID NO: 3135

SEQ ID NO: 10988 - DNA, 1239 bp, Staphylococcus aureus; identical to SEQ ID NO: 3136

SEQ ID NO: 10989 - DNA, 186 bp, Staphylococcus aureus; identical to SEQ ID NO: 3137

SEQ ID NO: 10990 - DNA, 1125 bp, Staphylococcus aureus; identical to SEQ ID NO: 3138

SEQ ID NO: 10991 - DNA, 1239 bp, Staphylococcus aureus; identical to SEQ ID NO: 3139

SEQ ID NO: 10992 - DNA, 492 bp, Staphylococcus aureus; identical to SEQ ID NO: 3140

SEQ ID NO: 10993 - DNA, 369 bp, Staphylococcus aureus; identical to SEQ ID NO: 3141

SEQ ID NO: 10994 - DNA, 318 bp, Staphylococcus aureus; identical to SEQ ID NO: 3142

SEQ ID NO: 10995 - DNA, 1341 bp, Staphylococcus aureus; identical to SEQ ID NO: 3143

SEQ ID NO: 10996 - DNA, 369 bp, Staphylococcus aureus; identical to SEQ ID NO: 3144

SEQ ID NO: 10997 - DNA, 264 bp, Staphylococcus aureus; identical to SEQ ID NO: 3145

SEQ ID NO: 10998 - DNA, 96 bp, Staphylococcus aureus; identical to SEQ ID NO: 3146

SEQ ID NO: 10999 - DNA, 198 bp, Staphylococcus aureus; identical to SEQ ID NO: 3147

SEQ ID NO: 11000 - DNA, 210 bp, Staphylococcus aureus; identical to SEQ ID NO: 3148

SEQ ID NO: 11001 - DNA, 171 bp, Staphylococcus aureus; identical to SEQ ID NO: 3149

SEQ ID NO: 11002 - DNA, 90 bp, Staphylococcus aureus; identical to SEQ ID NO: 3150

SEQ ID NO: 11003 - DNA, 225 bp, Staphylococcus aureus; identical to SEQ ID NO: 3151

SEQ ID NO: 11004 - DNA, 435 bp, Staphylococcus aureus; identical to SEQ ID NO: 3152

SEQ ID NO: 11005 - DNA, 654 bp, Staphylococcus aureus; identical to SEQ ID NO: 3153

SEQ ID NO: 11006 - DNA, 252 bp, Staphylococcus aureus; identical to SEQ ID NO: 3154

SEQ ID NO: 11007 - DNA, 354 bp, Staphylococcus aureus; identical to SEQ ID NO: 3155

SEQ ID NO: 11008 - DNA, 186 bp, Staphylococcus aureus; identical to SEQ ID NO: 3156

SEQ ID NO: 11009 - DNA, 279 bp, Staphylococcus aureus; identical to SEQ ID NO: 3157

SEQ ID NO: 11010 - DNA, 102 bp, Staphylococcus aureus; identical to SEQ ID NO: 3158

SEQ ID NO: 11011 - DNA, 834 bp, Staphylococcus aureus; identical to SEQ ID NO: 3159

SEQ ID NO: 11012 - DNA, 317 bp, Staphylococcus aureus; identical to SEQ ID NO: 3160

SEQ ID NO: 11013 - DNA, 317 bp, Staphylococcus aureus; identical to SEQ ID NO: 3161

SEQ ID NO: 11014 - DNA, 162 bp, Staphylococcus aureus; identical to SEQ ID NO: 3162

SEQ ID NO: 11015 - DNA, 162 bp, Staphylococcus aureus; identical to SEQ ID NO: 3163

SEQ ID NO: 11016 - DNA, 470 bp, Staphylococcus aureus; identical to SEQ ID NO: 3164

SEQ ID NO: 11017 - DNA, 470 bp, Staphylococcus aureus; identical to SEQ ID NO: 3165

SEQ ID NO: 11018 - DNA, 150 bp, Staphylococcus aureus; identical to SEQ ID NO: 3166

SEQ ID NO: 11019 - DNA, 150 bp, Staphylococcus aureus; identical to SEQ ID NO: 3167

SEQ ID NO: 11020 - DNA, 5249 bp, Staphylococcus aureus
gtgaattatcgtgataaaattcaaaagtttagtattcgtaaatatacagttggtacattttcaactgtcattgcgacattggtatttttaggattcaatacatcacaagcacatgctgctgaaacaaatcaaccagcaagcgtggttaaacagaaacaacaaagtaataatgaacagactgagaatcgagaatctcaagtacaaaattctcaaaattcacaaaatggtcaatcattatctgctactcatgaaaatgagcaaccaaatattagtcaagctaatttagtagatcaaaaagtagcgcaatcatctactactaatgatgaacaaccagcatctcaaaatgtaaatacaaagaaagattcggcaacggctgcgacaacacaaccagataaagaacaaagtaagcataaacaaaacgaaagtcaatctgctaataaaaatggaaacgacaatagagcggctcatgtagaaaatcatgaagcaaatgtagtaacagcttcagattcatctgataatggtaacgtacaacatgaccgaaatgaattacaagcgttttttgatgcaaattatcatgattatcgctttattgaccgtgaaaatgcagattctggcacatttaactatgtaaaaggcatttttgataagattaatacgttattaggcagtaatgatccaataaacaataaagacttgcaacttgcatacaaagaattggaacaagctgttgctttaattcgtacaatgcctcaacgtcaacagactagccgacgttcaaatagaattcaaacgcgttcggttgagtcaagagctgcagagcctagatcagtatcagactatcaaaatgcaaattcatcatattatgttgaaaatgctaatgatggttcgggctatcctgttggtacatatatcaatgcttctagtaaaggggcgccatataatttaccaactacaccatggaatacattgaaggcctctgactcaaaggaaattgctcttatgacagcgaaacaaactggagacgggtaccaatgggttattaagtttaataaaggacatgctccacatcaaaatatgatcttttggtttgcattaccagcagaccaagtgccagtaggaagaactgactttgtaacagttaattcagatggaacaaatgtacaatggagtcatggagcaggagcaggtgcaaataaaccacttcaacaaatgtgggaatatggagtaaatgatcctcatcgttcacatgactttaaaataagaaatagaagtggccaagtaatatatgactggccaactgtccatatttattctttagaagatttatctagagcgagtgattattttagtgaagctggagcgacacctgctactaaagcttttggtagacaaaattttgaatatattaatggtcaaaaacctgctgaatcaccgggtgttcctaaagtttatactttcatcggtcaaggtgatgcaagttatacaatttcatttaaaacacaaggtccaactgttaataaattgtactatgcagcaggtgggcgtgctttagagtacaatcaattatttatgtacagtcaactatacgtcgaatcaacgcaagaccatcaacaacgtcttaatggtttaagacaagtggttaatcgtacatatcgcataggtacaactaaacgtgtagaagtgagtcaaggaaatgtacaaacgaaaaaggtattagaaagtacaaacctaaatatagatgattttgttgatgatcctttaagttatgttaagacgccgagtaataaagtgttaggattttattcgaataatgcaaatactaatgcttttagaccgggtggagcccaacaattaaatgaatatcaattaagtcaattatttactgatcaaaaattacaagaagcagcaagaactagaaacccaataagattaatgattggtttcgactatcctgatgcttatggtaatagtgaaactttagttcctgttaacttaacggtattacctgaaatccaacataatattaaattctttaaaaatgacgatactcaaaatattgctgaaaaaccattttcaaaacaagctgggcatccagttttctatgtatatgcaggtaaccaagggaatgcttccgtgaatttaggtggtagcgtaacatctattcaaccattacgtattaatttaacaagtaatgagaattttacagataaagattggcaaattacaggtattccgcgtacattacacattgaaaactcgacaaatagacctaataatgccagagaacgcaatattgaacttgttggtaacttattaccaggggattactttggaacgatacgttttggacgtaaagaacaattattcgaaattcgtgttaaaccacatacaccaacaattacaacgacagctgagcaattaagaggtacagcattacaaaaagtgcctgttaatatttcgggaataccgttggatccatcggcattggtttatttagttgcaccaacaaatcaaactacgaatggtggtagtgaggcagatcaaataccatctggttatacgatacttgcgactggtacacctgatggggtgcataatacaattactatacgaccgcaagattatgttgtattcataccacctgtaggtaaacaaattagagcagtagtttattataataaagtagttgcatctaatatgagtaatgctgttactattttgccagatgacattccaccaacaatcaataatcctgttggaataaatgccaaatactatcgaggcgacgaagtcaactttacaatgggtgtctctgatagacattctggtataaaaaatacaactattacgacattgccgaatggttggacatcaaatttaacaaaagcggataagaataatggctcattatctattacaggtagagtgagtatgaatcaggcatttaacagtgatattacatttaaagtgtcagcgacagacaatgtcaataatacgacaaatgatagtcaatctaaacatgtttcaattcatgtaggtaaaattagtgaagatgctcatccgattgtattaggaaatactgagaaagttgtagtagtcaatccgactgctgtatctaatgatgaaaagcaaagcataattactgcctttatgaataaaaaccaaaatataagaggatatttagcatcaactgatccagtaactgtcgataataatggtaatgtcacattacattaccgtgatggctcatcgacaacgcttgatgctacaaatgtgatgacatacgaaccagttgtgaaacctgaataccaaactgtcaatgctgctaaaacagcaacggtaacgattgctaaaggacaatcatttagtattggtgatattaaacaatattttactttaagtaatggacaacctattccaagtggcacatttacaaatattacatctgatagaactattccaactgcacaagaagttagtcaaatgaacgcaggcacgcagttataccatataactgctacaaatgcgtatcataaagatagtgaagacttctatattagtttgaaaatcatcgatgtgaaacaaccagaaggcgatcaacgtgtatatcgtacatcaacatatgatttaactactgatgaaatctcaaaagtaaaacaagcatttattaatgcaaatagagatgtaattacgcttgccgaaggtgatatttcagttacaaatacacctaatggtgctaatgtaagtactattacagtaaatattaataaaggtcgattaacgaaatcattcgcgtcaaacctagctaatatgaatttcttgcgttgggttaatttcccacaagattatacagtgacatggacgaatgcaaaaattgcaaacagaccaacagatggtggtttatcatggtctgatgaccataaatctttaatttatcgttatgatgctacattaggtactcaaattacgacgaatgatattttaacaatgttaaaagcaacaactacagtgcctggattgcgaaataacattactggtaatgaaaaatcacaagcagaagctggcggaagacctaactttagaacgactggttattcacaatcaaatgcgacaactgatggtcaacgtcaatttacgttgaatggtcaagtgattcaagtgttagacatcatcaacccttcaaacggttatggtgggcaacctgttacaaattcaaatactcgtgcaaaccatagtaactcaactgttgttaacgtaaacgaaccggcagctaatggtgctggcgcatttacaattgaccacgttgtaaaaagtaattctacacataatgcaagtgatgcagtttataaagcacagttatacttaacgccatatggtccaaaacaatatgttgaacatttaaatcaaaatacaggaaatactactgacgctattaacatttattttgtaccaagtgacttagtgaatccaacaatttcagtaggtaattacactaatcatcaagtgttctcaggtgaaacatttacaaatactattacagcgaatgataactttggtgtgcaatctgtaactgtaccaaatacatcacaaattacaggtactgttgataataaccatcaacatgtttctgcaacggcaccaaatgtgacatcagcaactaataagacaatcaatttattagcaactgatacaagcggcaatacagctacaacttcgttcaatgtaacagtgaaacctttgcgtgataaatatcgagttggtacttcatcaacggctgctaatcctgtgagaattgccaatatttcgaataatgcgacagtatcacaagctgatcaaacgacaattattaattcgttaacgtttactgaaacagtaccaaatagaagttatgcaagagcaagtgcgaatgaaatcactagtaaaacagttagtaatgtcagtcgtactggaaataatgccaatgtcacagtaactgttacttatcaagatggaacaacatcaacagtgactgtacctgtaaagcatgtcattccagaaatcgttgcacattcgcattacactgtacaaggccaagacttcccagcaggtaatggttctagtgcatcagattactttaagttatctaatggtagtgacattgcagatgcaactattacatgggtaagtggacaagcgccaaataaagataatacacgtattggtgaagatataactgtaactgcacatatcttaattgatggcgaaacaac

SEQ ID NO: 11021 - DNA, 5249 bp, Staphylococcus aureus
gccgattacgaaaacagcaacatataaagtagtaagaactgtaccgaaacatgtctttgaaacagccagaggtgttttatacccaggtgtttcagatatgtatgatgcgaaacaatatgttaagccagtaaataattcttggtcgacaaatgcgcaacatatgaatttccaatttgttggaacatatggtcctaacaaagatgttgtaggcatatctactcgtcttattagagtgacatatgataatagacaaacagaagatttaactattttatctaaagttaaacctgacccacctagaattgacgcaaactctgtgacatataaagcaggtcttacaaaccaagaaattaaagttaataacgtattaaataactcgtcagtaaaattatttaaagcagataatacaccattaaatgtcacaaatattactcatggtagcggttttagttcggttgtgacagtaagtgacgcgttaccaaatggcggaattaaagcaaaatcttcaatttcaatgaacaatgtgacgtatacgacgcaagacgaacatggtcaagttgttacagtaacaagaaatgaatctgttgattcaaatgacagtgcaacagtaacagtgacaccacaattacaagcaactactgaaggcgctgtatttattaaaggtggcgacggttttgatttcggacacgtagaaagatttattcaaaacccgccacatggggcaacggttgcatggcatgatagtccagatacatggaagaatacagtcggtaacactcataaaactgcggttgtaacattacctaatggtcaaggtacgcgtaatgttgaagttccagtcaaagtttatccagttgctaatgcaaaggcgccatcacgtgatgtgaaaggtcaaaatttgactaatggaacggatgcgatgaactacattacatttgatccaaatacaaacacaaatggtatcactgcagcatgggcaaatagacaacaaccaaataaccaacaagcaggcgtgcaacatttaaatgtcgatgtcacatatccaggtatttcagctgctaaacgagttcctgttactgttaatgtatatcaatttgaattccctcaaactacttatacgacaacggttggaggcactttagcaagtggtacgcaagcatcaggatatgcacatatgcaaaatgctactggtttaccaacagatggatttacgtataaatggaatcgtgatactacaggtacaaatgacgcaaactggtcagctatgaataaaccgaatgtggctaaagtcgttaacgcaaaatatgacgtcatctataacggacatacttttgcaacatctttaccagcgaaatttgtagtaaaagatgtgcaaccagcgaaaccaactgtgactgaaacagcggcaggagcgattacaattgcacctggagcaaaccaaacagtgaatacacatgccggtaacgtaacgacatacgctgataaattagttattaaacgtaatggtaacgttgtgacgacatttacacgtcgcaataatacgagtccatgggtgaaagaagcatctgcagcaactgtagcaggtattgctggaactaataatggtattactgttgcagcaggtactttcaaccctgctgatacaattcaagttgttgcaacgcaaggaagcggagagacagtgagtgatgagcaacgtagtgatgatttcacagttgtcgcaccacaaccgaaccaagcgactactaagatttggcaaaatggtcatattgatatcacgcctaataatccatcaggacatttaattaatccaactcaagcaatggatattgcttacactgaaaaagtgggtaatggtgcagaacatagtaagacaattaatgttgttcgtggtcaaaataatcaatggacaattgcgaataagcctgactatgtaacgttagatgcacaaactggtaaagtgacgttcaatgccaatactataaaaccaaattcatcaatcacaattactccgaaagcaggtacaggtcactcagtaagtagtaatccaagtacattaactgcaccggcagctcatactgtcaacacaactgaaattgtgaaagattatggttcaaatgtaacagcagctgaaattaacaatgcagttcaagttgctaataaacgtactgcaacgattaaaaatggcacagcaatgcctactaatttagctggtggtagcacaacgacgattcctgtgacagtaacttacaatgatggtagtactgaagaagtacaagagtccattttcacaaaagcggataaacgtgagttaatcacagctaaaaatcatttagatgatccagtaagcactgaaggtaaaaagccaggtacaattacgcagtacaataatgcaatgcataatgcgcaacaacaaatcaatactgcgaaaacagaagcacaacaagtgattaataatgagcgtgcaacaccacaacaagtttctgacgcactaactaaagttcgtgcagcacaaactaagattgatcaagctaaagcattacttcaaaataaagaagataatagccaattagtaacgtctaaaaataacttacaaagttctgtgaaccaagtaccatcaactgctggtatgacgcaacaaagtattgataactataatgcgaagaagcgtgaagcagaaactgaaataactgcagctcaacgtgttattgacaatggcgatgcaactgcacaacaaatttcagatgaaaaacatcgtgtcgataacgcattaacagcattaaaccaagcgaaacatgatttaactgcagatacacatgccttagagcaagcagtgcaacaattgaatcgcacaggtacaacgactggtaagaagccggcaagtattactgcttacaataattcgattcgtgcacttcaaagtgacttaacaagtgctaaaaatagcgctaatgctattattcaaaagccaataagaacagtacaagaagtgcaatctgcgttaacaaatgtaaatcgtgtcaatgagcgattaacgcaagcaattaatcaattagtacctttagctgataatagtgctttaaaaactgctaagacgaaacttgatgaagaaatcaataaatcagtaactactgatggtatgacacaatcatcaatccaagcatatgaaaatgctaaacgtgcgggtcaaacagaatcaacaaatgcacaaaatgttattaacaatggtgatgcgactgaccaacaaattgccgcagaaaaaacaaaagtagaagaaaaatataatagcttaaaacaagcaattgctggattaactccagacttggcaccattacaaactgcaaaaactcagttgcaaaatgatattgatcagccaacgagtacgactggtatgacaagcgcatctattgcagcatttaatgaaaaactttcagcagctagaactaaaattcaagaaattgatcgtgtattagcctcacatccagatgttgcgacaatacgtcaaaacgtgacagcagcgaatgccgctaaatcagcacttgatcaagcacgtaatggcttaacagtcgataaagcgcctttagaaaatgcgaaaaatcaactacaatatagtattgacacgcaaacaagtacaactggtatgacacaagactctataaatgcatacaatgcgaagttaacagctgcacgtaataagattcaacaaatcaatcaagtattagcaggttcaccgactgtagaacaaattaatacaaatacgtctacagcaaatcaagctaaatctgatttagatcatgcacgtcaagctttaacaccagataaagcgccgcttcaaactgcgaaaacgcaattagaacaaagcattaatcaaccaacggatacaacaggtatgacgaccgcttcgttaaatgcgtacaaccaaaaattacaagcagcgcgtcaaaagttaactgaaattaatcaagtgttgaatggcaacccaactgtccaaaatatcaatgataaagtgacagaggcaaaccaagctaaggatcaattaaatacagcacgtcaaggtttaacattagatagacagccagcgttaacaacattacatggtgcatctaacttaaaccaagcacaacaaaataatttcacgcaacaaattaatgctgctcaaaatcatgctgcgcttgaaacaattaagtctaacattacggctttaaatactgcgatgacgaaattaaaagacagtgttgcggataataatacaattaaatcagatcaaaattacactgacgcaacaccagctaataaacaagcgtatgataatgcagttaatgcggctaaaggtgtcattggagaaacgactaatccaacgatggatgttaacacagtgaaccaaaaagcagcatctgttaaatcgacgaaagatgctttagatggtcaacaaaacttacaacgtgcgaaaacagaagcaacaaatgcgattacgcatgcaagtgatttaaaccaagcacaaaagaatgcattaacacaacaagtgaatagtgcacaaaacgtgcaagcagtaaatgatattaaacaaacgactcaaagcttaaatactgctatgacaggtttaaaacgtggcgttgctaatcataaccaagtcgtacaaagtgataattatgtcaacgcagatactaataagaaaaatgattacaacaatgcatacaaccatgcgaatgacattattaatggtaatgcacaacatccagttataacaccaagtgatgttaacaatgctttatcaaatgtcacaagtaaagaacatgcattgaatggtgaagctaagttaaatgctgcgaaacaagaagcgaatactgcattaggtcatttaaacaatttaaataatgcacaacgtcaaaacttacaatcgcaaattaatggtgcgcatcaaattgatgcagttaatacaattaagcaaaatgcaacaaacttgaatagtgcaatgggtaacttaagacaagctgttgcagataaagatcaagtgaaacgtacagaagattatgcggatgcagatacagctaaacaaaatgcatataacagtgcagtttcaagtgccgaaacaatcattaatcaaacaacaaatccaacgatgtctgttgatgatgttaatcgtgcaacttcagctgttacttctaataaaaatgcattaaatggttatgaaaaattagcacaatctaaaacagatgctgcaagagcaattgatgcattaccacatttaa

SEQ ID NO: 11022 - DNA, 5249 bp, Staphylococcus aureus
ataatgcacaaaaagcagatgttaaatctaaaattaatgctgcatcaaatattgctggcgtaaatactgttaaacaacaaggtacagatttaaatacagcgatgggtaacttgcaaggtgcaatcaatgatgaacaaacgacgcttaatagtcaaaactatcaagatgcgacacctagtaagaaaacagcatacacaaatgcggtacaagctgcgaaagatattttaaataaatcaaatggtcaaaataaaacgaaagatcaagttactgaagcgatgaatcaagtgaattctgctaaaaataacttagatggtacgcgtttattagatcaagcgaagcaaacagcaaaacagcagttaaataatatgacgcatttaacaactgcacaaaaaacgaatttaacaaaccaaattaatagtggtactactgtcgctggtgttcaaacggttcaatcaaatgccaatacattagatcaagccatgaatacgttaagacaaagtattgccaacaaagatgcgactaaagcaagtgaagattacgtagatgctaataatgataagcaaacagcatataacaacgcagtagctgctgctgaaacgattattaatgctaatagtaatccagaaatgaatccaagtacgattacacaaaaagcagagcaagtgaatagttctaaaacggcacttaacggtgatgaaaacttagctgctgcaaaacaaaatgcgaaaacgtacttaaacacattgacaagtattacagatgctcaaaagaacaatttgattagtcaaattactagtgcgacaagagtgagtggtgttgatactgtaaaacaaaatgcgcaacatctagaccaagctatggctagcttacagaatggtattaacaacgaatctcaagtgaaatcatctgagaaatatcgtgatgctgatacaaataaacaacaagagtatgataatgctattactgcagcgaaagcgattttaaataaatcgacaggtccaaacactgcgcaaaatgcagttgaagcagcattacaacgtgttaataatgcgaaagatgcattgaatggtgatgcaaaattaattgcagctcaaaacgcagcgaaacaacatttaggtactttaacgcatatcactacagctcaacgtaatgatttaacaaatcaaatttcacaagctacaaacttagctggtgttgaatctgttaaacaaaatgcgaatagtttagatggtgctatgggtaacttacaaacggctatcaacgataagtcaggaacattagcgagccaaaacttcttggatgctgatgagcaaaaacgtaatgcatacaatcaagctgtatcagcagccgaaaccattttaaataaacaaactggaccgaatacagcgaaaacagcagtcgaacaagcacttaataatgttaataatgcgaaacatgcattaaatggtacgcaaaacttaaacaatgcgaaacaagcagcgattacagcaatcaatggcgcatctgatttaaatcaaaaacaaaaagatgcattaaaagcacaagctaatggtgctcaacgcgtatctaatgcacaagatgtacagcacaatgcgactgaactgaacacggcaatgggcacattaaaacatgccatcgcagataagacgaatacgttagcaagcagtaaatatgttaatgccgatagcactaaacaaaatgcttacacaactaaagttaccaatgctgaacatattattagcggtacgccaacggttgttacgacaccttcagaagtaacagctgcagctaatcaagtaaacagcgcgaaacaagaattaaatggtgacgaaagattacgtgaagcaaaacaaaacgccaatactgctattgatgcattaacacaattaaatacacctcaaaaagctaaattaaaagaacaagtgggacaagccaatagattagaagacgtacaaactgttcaaacaaatggacaagcattgaacaatgcaatgaaaggcttaagagatagtattgctaacgaaacaacagtcaaaacaagtcaaaactatacagacgcaagtccgaataaccaatcaacatataatagcgctgtgtcaaatgcgaaaggtatcattaatcaaactaacaatccgactatggatactagtgcgattacccaagctacaacacaagtgaataatgctaaaaatggtttaaacggtgctgaaaacttaagaaatgcacaaaacactgctaagcaaaacttaaatacattatcacacttaacaaataaccaaaaatctgccatctcatcacaaattgatcgtgcaggtcatgtgagtgaggtaactgctactaaaaatgcagcaactgagttgaatacgcaaatgggtaacttggaacaagctatccatgatcaaaacacagttaaacaaagtgttaaatttactgatgcagataaagctaaacgtgatgcgtatacaaatgcggtaagcagagctgaagcaattctgaataaaacgcaaggtgcaaatacgtctaaacaagatgttgaagcggctattcaaaatgtttcaagtgctaaaaatgcattgaatggtgatcaaaacgttacaaatgcgaagaatgcagctaaaaatgcattaaataacttaacgtcaattaataatgcacaaaaacgtgacttaacaactaaaattgatcaagcaacaactgtagctggtgttgaagctgtatctaatacgagtacacaattgaatacagcgatggctaacttgcaaaatggtattaatgataaaacaaatacactagcaagtgaaaactatcatgatgctgattcagataagaaaactgcttatactcaagccgttacgaacgcagaaaatattttaaataaaaatagtggatcaaatttagacaaaactgccgttgaaaacgcgttgtcacaagttgctaatgcgaaaggtgccctaaatggtaaccataatttagagcaagctaaatcaaatgcaaacactactataaacggacttcaacatttaacaactgctcaaaaagataaattgaaacaacaagtgcaacaagcacaaaatgttgcaggtgtagatactgttaaatcaagtgccaacacattaaatggtgctatgggtacgttaagaaatagcatacaagataacacagctacgaaaaatggccaaaactatcttgatgctacagaacgtaacaaaacaaactataacaatgctgttgatagtgctaatggtgtcattaatgcaacaagcaatccaaatatggatgctaatgcaattaaccaaatcgctacacaagtgacatcaacgaaaaatgcattagatggtacacataatttaacgcaagcgaaacaaacagcaacaaatgccatcgatggtgctactaacttaaataaagcgcaaaaagatgcgttaaaagcacaagttacaagtgcgcaacgtgttgcaaatgtaacaagtatccaacaaactgcaaatgaacttaatacagctatgggtcaattacaacatggtattgatgatgaaaatgcaacaaaacaaactcaaaaatatcgtgacgctgaacaaagtaagaaaactgcttatgatcaagctgtagctgctgcgaaagcaattttaaataaacaaacaggttcaaattcagataaagcagcagttgaccgtgcattacaacaagtaacaagtacgaaagatgcattgaatggtgatgcaaaactggcagaagcgaaagcggcagctaaacaaaacttaggcactttaaaccatattacgaatgcacaacgtactgacttagaaggccaaaacaatcaagcgacgactgttgatggcgttaatactgtaaaaacaaatgccaatacattagacggcgcaatgaatagcttacaaggttcaatcaatgataaagatgcgacattaagaaatcaaaattatcttgatgcggatgaatcaaaacgaaatgcatatacgcaagctgtcacagcggctgaaggcattttaaataaacaaactggtggtaacacatctaaagcagacgttgataatgcattaaatgcagttacaagagcgaaagcggctttaaatggtgctgacaacttaagaaatgcgaaaacttcagcaacaaatacgattgatggtttacctaacttaacacaattacaaaaagacaacttgaagcatcaagttgaacaagcgcaaaatgtagcaggtgtaaatggtgttaaagataaaggtaatacgttaaatactgccatgggtgcattacgtacaagtatccaaaatgataatacgacgaaaacaagtcaaaattatcttgatgcatctgacagcaacaaaaataattacaatactgctgtaaataatgcaaatggtgttattaatgcaacgaacaatccaaatatggatgctaatgcgattaatggcatggcaaatcaagtcaatacaacaaaagcagcgttaaatggtgcacaaaacttagctcaagctaaaacaaatgcgacgaacacaattaacaacgcacatgacttaaaccaaaaacaaaaagatgcattaaaaacacaagttaacaatgcacaacgtgtatctgatgcaaataacgttcaacacactgcaactgaattgaacagtgcgatgacagcacttaaagcagctattgctgataaagaaagaacaaaagcaagcggtaattatgtcaatgctgatcaagaaaaacgtcaagcgtatgattcaaaagtgactaacgctgaaaatatcattagtggtacaccgaatgcgacattaacagtcaatgacgtaaatagtgcggcatcacaagtcaatgcggctaaaacagcattaaatggtgataacaacttacgtgtagcgaaagagcatgccaacaatacaattgacggcttagcacaattgaataatgcacaaaaagcaaaattaaaagaacaagttcaaagtgcaactacattagatggtgttcaaactgttaaaaatagttctcaaacgttgaatacagcgatgaaaggcttaagagatagtattgcgaatgaagcaacaattaaagcaggtcaaaactacactgacgcaagtccaaataatcgtaacgagtacgacagtgcagttactgcagcaaaagcaatcattaatcaaacatcgaacccaacgatggaaccaaatactattacgcaagtaacatcacaagtgacaactaaagaacaggcattaaatggtgcgcgaaacttagctcaagct

SEQ ID NO: 11023 - DNA, 5249 bp, Staphylococcus aureus
aagacaactgcgaaaaacaacttgaataacttaacatcaattaacaatgcacaaaaagatgcgttaacgcgtagcattgatggtgcaacaacagtagctggtgtaaatcaagaaactgcaaaagcaacagaattaaataacgcaatgcatagtttacaaaatggtatcaatgatgagacacaaacaaaacaaactcagaaatacctagatgcagagccaagtaagaaatcagcttatgatcaagcagtaaatgcagcgaaagcaattttaacaaaagctagtggtcaaaatgtagacaaagcagcagttgaacaagcattgcaaaatgtgaacagtacgaagacggcgttgaacggtgatgcgaaattaaatgaagctaaagcagctgcgaaacaaacgttaggtacattaacacacattaataatgcacaacgtacagcgttagacaatgaaattacacaagcaacaaatgttgaaggtgttaatacagttaaagccaaagcgcaacaattagatggtgctatgggtcaattagaaacatcaattcgtgataaagacacgacgttacaaagtcaaaattatcaagatgctgatgatgctaaacgaactgcttattctcaagcagtaaatgcagcagcaactattttaaataaaacagctggcggtaatacacctaaagcagatgttgaaagagcaatgcaagctgttacacaagcaaatactgcattaaacggtattcaaaacttagatcgtgcgaaacaggctgctaacacagcgattacaaatgcttcggacttaaatacaaaacaaaaagaagcattaaaagcacaagtaacaagtgcaggacgtgtatctgcagcaaatggtgttgaacatactgcgactgaattaaatactgcgatgacagctttaaagcgtgccattgctgataaagctgagacaaaagctagtggtaactatgtcaatgctgatgcgaataaacgtcaagcatatgatgaaaaagttacagctgccgaaaatatcgttagtggtacaccaacaccaacgttaacaccagcagatgttacaaatgcagcaacgcaagtaacgaatgctaagacgcagttaaacggtaatcataatttagaagtagcgaaacaaaatgctaacactgcaattgatggtttaacttctttaaatggtccgcaaaaagcaaaacttaaagaacaagtgggtcaagcgacgacgttgccaaatgttcaaactgttcgtgataatgcacaaacattaaacactgcaatgaaaggtctacgagatagcattgcgaatgaagcaacgattaaagcaggtcaaaactacacagatgcaagtcaaaacaaacaaactgactacaacagtgcagtcactgcagcaaaagcaatcattggtcaaacaactagtccatcaatgaatgcgcaagaaattaatcaagcgaaagaccaagtgacagctaaacaacaagcgttaaacggtcaagaaaacttaagaactgcgcaaacaaatgcgaagcaacatttgaacggcttaagtgacttaactgacgctcaaaaagatgcagtgaaacgtcaaatcgaaggtgcaacgcatgttaatgaagtaacacaagcacaaaataatgcggatgcattaaatacagctatgacgaacttgaaaaatggtattcaagatcagaatacgattaagcaaggtgttaacttcactgatgccgacgaagcgaaacgtaatgcatatacaaatgcagtgacgcaagctgaacaaattttaaataaagcacaaggtccaaatacttcaaaagacggtgtcgaaactgcgttagaaaatgtacaacgtgctaaaaacgaattgaacggtaatcaaaatgttgcgaacgctaagacaactgcgaaaaatgcattgaataacctaacatcaattaataatgcacaaaaagaagcattgaaatcacaaattgaaggtgcgacaacagttgcaggtgtaaatcaagtgtctacaacggcatctgaattaaatacagcaatgagcaacttacaaaatggtattaatgatgaagcagctacaaaagcagctcagaaatatactgatgcagatagagaaaaacaaactgcatacaatgacgctgtaacagcagctaaaacgttattagataaaacagctggttcaaatgacaataaagcagctgttgaacaagcattacaacgtgtgaatactgctaaaacagcattaaatggtgacgagcgattaaatgaagcgaagaacacagctaaacaacaagtagcgacaatgtcacacttaactgatgctcaaaaagcaaacttaacatcgcaaatcgaaagtggtacgactgttgcaggtgttcaaggtattcaagctaatgccggtactttagatcaagcaatgaatcaattaagacaaagtattgcttctaaagatgcgactaaatcaagcgaagattatcaagacgcgaatgcagatttacaaaatgcatacaatgatgcggtaactaatgctgaaggtattattagtgcaacgaataaccctgaaatgaatcctgatacaattaaccaaaaagcgagccaagtgaacagtgcgaagtctgcattgaacggtgatgaaaaattagcagcagcaaaacaaactgcgaaatcagatatcggtcgtttgacagacttgaacaatgcacaacgaactgcggcaaatgctgaagtggatcaagcaccaaatcttgcagctgtcacagcggctaaaaataaagcaacatcgttaaatacagcgatgggtaatttgaaacatgcacttgctgaaaaggataatacgaaacgtagtgtcaattacacagatgcggatcaaccaaaacaacaagcgtatgatactgcggttacacaagcagaagcaattactaatgctaatggcagcaacgcgaatgaaacacaagttcaagcagcactaaaccaattgaatcaagctaaaaatgacttgaatggtgataataaagttgctcaagcaaaagagtcagcgaaacgtgcattagcttcatatagtaacttgaataatgcgcaatcaactgcagcaactagtcaaattgacaatgcaacgacagtagcaggcgtaactgctgcacaaaatactgctaatgaattaaatacagcaatgggtcaacttcaaaatggtataaatgaccaaaacactgttaaacaacaagtgaactttacagatgctgaccaaggtaagaaagatgcttacacaaatgctgttacgaatgctcaaggtattttagataaagcacacggtcaaaatatgacgaaagcacaagttgaagctgcattaaatcaagtaacgactgctaagaatgctttaaacggtgacgcaaatgtaagacaagcaaaatcagatgcgaaagcaaacttaggtacattaacacacttaaataatgcacaaaaacaagatttaacatcacaaatcgaaggcgcaacaacagtcaacggtgtaaatggtgttaaaacgaaagcacaagacttagatggtgcaatgcaacgattacaatcagctatagcaaataaagatcaaactaaagcgagcgaaaattacatcgacgcagatccaactaagaaaacagcatttgataatgctatcacacaagctgaatcttacttaaataaagatcacggtgcgaataaagataagcaagctgttgaacaagcaattcaaagtgtaacgtctactgaaaatgctttgaacggtgacgcgaacttacaacgcgctaaaactgaagctatacaagctatcgataacttgacacatttgaatacaccacaaaaaacagcattaaaacaacaagtgaacgctgcgcaacgtgtatcaggtgtaactgatctgaaaaatagtgctacatcacttaataatgcgatggatcaattaaaacaagcaattgctgatcatgacacaattgtagctagtggtaattacactaacgcgagtcctgataagcaaggtgcttatactgatgcatataatgctgcgaaaaacattgtaaatggttcgcctaatgtgattacaaatgcagcagatgttacagcagcaacacaacgtgttaataatgctgaaacaggtttaaacggtgatacaaacttagcaactgcgaagcaacaagctaaagatgcattacgtcaaatgacacatttatctgatgcacaaaaacaaagtattactggtcaaattgatagcgcgacacaagtaactggcgttcaaagtgtgaaagacaacgcgacaaatcttgataatgcaatgaatcaacttcgaaatagtattgcgaataaagatgatgtaaaagcgagtcaaccatatgttgatgcagatagagataaacaaaatgcatacaatacagcagttacaaatgctgaaaatatcattaatgcaacgagtcagccgacacttgatccatctgcagtaacacaagcagctaatcaagtgagcactaacaaaactgcgcttaatggtgcacaaaacttagcgaataaaaagcaagaaacgactgctaacatcaaccaattaagtcatttaaataatgctcaaaagcaagatttaaatacgcaagtgacaaatgcaccaaatattagcacagtaaatcaagtgaaaactaaagctgaacaattagatcaagcaatggaacgtttaatcaacggaatccaagacaaagatcaagtgaaacaaagtgttaactttacagatgcagatccagaaaaacaaacagcatacaacaatgcggtaactgctgctgaaaatattattaatcaagcaaatggtacaaatgcgaaccaatcacaagttgaagcagcactttcaactgtaacaactacgaaacaagcgttgaatggtgatagaaaagtaacagatgctaaaaacaatgcaaaccaaacattatctacgttagataacttaaacaatgcacaaaaaggtgctgttactggaaacatcaatcaagcgcacactgtagctgaagtaacgcaagccattcaaaccgctcaggaactgaatacagcgatgggtaacttgaaaaatagcttgaatgataaagacactacacttggcagtcaaaactttgcagatgcagatccagagaagaaaaatgcatacaatgaagcggttcataatgctgaaaatattttaaataaatctacaggtacgaacgtgcctaaagatcaagttgaagcagctatgaatcaagtgaatgctac

SEQ ID NO: 11024 - DNA, 5249 bp, Staphylococcus aureus
aaaagcagcgcttaatggtactcaaaaccttgaaaaagctaaacaacacgcaaatacagcaattgacggtttaagccatttaacaaatgcacaaaaagaggcattaaaacaattggtacaacaatcgactactgttgcagaagcacaaggtaatgagcaaaaagcaaacaatgttgatgcagcaatggacaaattacgtcaaagtattgcagataatgcgacaacaaaacaaaaccaaaattatactgatgcaagtcagaataaaaaggatgcgtacaataatgctgtcacaactgcacaaggtattattgatcaaactacaagtccaactttagatccgactgttatcaatcaagctgctggacaagtaagcacaactaaaaatgcattaaatggtaatgaaaacctagaggcagcgaaacaacaagcgtcacaatcattaggttcattagataacttaaataatgcgcaaaaacaaacagttactgatcaaattaatggcgcgcatactgttgatgaagcaaatcaaattaagcaaaatgcgcaaaacttaaatacagcgatgggtaacttgaaacaagcgatagctgacaaagatgctacgaaagcgacagttaacttcactgatgcagatcaagcaaaacaacaagcatataacactgctgttacaaatgctgaaaatatcatttcaaaagctaatggcggcaatgcaacacaagctgaagttgaacaagcaatcaaacaagttaatgctgcaaaacaagcattaaatggtaatgccaacgttcaacatgcaaaagacgaagcaacagcattaattaatagctctaatgaccttaaccaagcacaaaaagacgcattaaaacaacaagttcaaaatgcaactactgtagctggtgtaaacaatgttaaacaaacagcacaagagttaaacaatgctatgacacaattaaaacaaggcattgcagataaagaacaaacaaaagctgatggtaactttgtcaatgcagatcctgataagcaaaatgcatataatcaagcagtagcgaaagctgaagcattaattagtgctacgcctgatgttgtcgttacacctagcgaaattactgcagcgttaaataaagttacgcaagctaaaaatgatttaaatggtaatacaaacttagcaacggcgaaacaaaatgttcaacatgctattgatcaattgccaaacttaaaccaagcgcaacgtgatgaatacagcaaacaaatcacgcaagcaacacttgtaccaaacgtcaatgctattcaacaagcggcgacaacgcttaatgacgcgatgacacaattgaaacaaggtattgcgaataaagcacaaattaaaggtagcgagaactatcacgatgctgatactgacaagcaaacagcatatgataatgcagtaacaaaagcagaagaattgttaaaacaaacaacaaatccaacaatggatccaaatacaattcaacaagcattaactaaagtgaatgacacaaatcaagcacttaacggtaatcaaaaattagctgatgccaaacaagatgctaagacaacacttggtacactagatcatttaaatgatgctcaaaaacaagcgctaacaactcaagttgaacaagcaccagatattgcaacagttaataatgttaagcaaaatgctcaaaatctgaataatgctatgactaacttaaacaatgcattacaagataaaactgagacattaaatagcattaactttactgatgcagatcaagctaagaaagatgcttatactaatgcggtttcacatgcagaaggtattttatctaaagcaaatggcagcaatgcaagtcaaactgaagtggaacaagcgatgcaacgtgtgaacgaagcgaaacaagcattgaatggtaatgacaatgtacaacgtgcaaaagatgcagcgaaacaagtgattacaaatgcaaatgatttaaatcaagcgcaaaaagatgcattaaaacaacaagtcgatgctgcgcaaactgttgcaaatgtaaacacgattaagcaaacagcacaagatttaaatcaagcaatgacacaattgaaacaaggtattgcagataaagaccaaactaaagcaaatggtaactttgtcaatgctgatactgataagcaaaatgcttacaacaatgcggtagcacatgctgaacaaataattagtggtacaccaaatgcaaacgtggatccacaacaagtggctcaagcgttacaacaagtgaatcaagctaagggtgatttaaacggtaaccataacttacaagttgctaaagacaatgcaaatacagccattgatcagttaccaaacttaaatcaaccacaaaaaacagcattaaaagaccaagtgtcgcatgcagaacttgttacaggtgttaatgctattaagcaaaatgctgatgcgttaaataatgcaatgggtacattgaaacaacaaattcaagcgaacagtcaagtaccacagtcagttgactttacacaagcggatcaagacaaacaacaagcatataacaatgcggctaaccaagcgcaacaaatcgcaaatggcataccaacacctgtattgacgcctgatacagtaacacaagcagtgacaactatgaatcaagcgaaagatgcattaaacggtgatgaaaaattagcacaagcgaaacaagaagctttagcaaatcttgatacgttacgcgatttaaatcaaccacaacgtgatgcattacgtaaccaaatcaatcaagcacaagcgttagctacagttgaacaaactaaacaaaatgcacaaaatgtgaatacagcaatgagtaacttgaaacaaggtattgcaaacaaagatactgtcaaagcaagtgagaactatcatgatgctgatgccgataagcaaacagcatatacaaatgcagtgtctcaagcggaaggtattatcaatcaaacgacaaatccaacgcttaacccagatgaaataacacgtgcattaactcaagtgactgatgctaaaaatggcttaaacggtgaagctaaattggcaactgaaaagcaaaatgctaaagatgccgtaagtgggatgacgcatttaaacgatgctcaaaaacaagcattaaaaggtcaaatcgatcaatcgcctgaaattgctacagtgaaccaagttaaacaaacagcaacgagcctagatcaagcaatggatcaattatcacaagctattaatgataaagctcaaacattagcggacggtaattacttaaatgcagatcctgacaaacaaaatgcgtataaacaggcagtagcaaaagctgaagcattattgaataaacaaagtggtactaatgaagtacaagcacaagttgaaagcatcactaatgaagtgaacgcagcgaaacaagcattaaatggtaatgacaatttggcaaatgcaaaacaacaagcaaaacaacaattggcgaacttaacacacttaaatgatgcacaaaaacaatcatttgaaagtcaaattacacaagcgccacttgttacagatgtcactacgattaatcaaaaagcacaaacgttagatcatgcgatggaattattaagaaatagtgttgcggataatcaaacgacattagcgtctgaagattatcatgatgcaactgcgcaaagacaaaatgactataaccaagctgtaacagctgctaataatatcattaatcaaactacatcgcctacgatgaatccagatgatgttaatggtgcaacgacacaagtgaataatacgaaagttgcattagatggtgatgaaaaccttgcagcagctaaacaacaagcaaacaacagacttgatcaattagatcatttgaataatgcgcaaaagcaacagttacaatcacaaattacgcaatcatctgatattgctgcagttaatggtcacaaacaaacagcagaatctttaaatactgcgatgggtaacttaattaatgcgattgcagatcatcaagccgttgaacaacgtggtaacttcatcaatgctgatactgataaacaaactgcttataatacagcggtaaatgaagcagcagcaatgattaacaaacaaactggtcaaaatgcgaaccaaacagaagtagaacaagctattactaaagttcaaacaacacttcaagcgttaaatggagaccataatttacaagttgctaaaacaaatgcgacgcaagcaattgatgctttaacaagcttaaatgatcctcaaaaaacagcattaaaagaccaagttacagctgcaactttagtaactgcagttcatcaaattgaacaaaatgcgaatacgcttaaccaagcaatgcatggtttaagacagagcattcaagataacgcagcaactaaagcaaatagcaaatatatcaacgaagatcaaccagagcaacaaaactatgatcaagctgttcaagccgcaaataatattatcaatgaacaaactgcaacattagataataatgcgattaatcaagcagcgacaactgtgaatacaacgaaagcagcattacatggtgatgtgaagttacaaaatgataaagatcatgctaagcaaacggttagtcaattagcacatctaaacaatgcacaaaaacatatggaagatacgttaattgatagtgaaacaactagaacagcagttaagcaagatttgactgaagcacaagcattagatcaacttatggatgcattacaacaaagtattgctgacaaagatgcaacacgtgcgagcagtgcatatgtcaatgcagaaccgaataaaaaacaatcctatgatgaagcagttcaaaatgctgagtctatcattgcaggattaaataatccaactatcaataaaggtaatgtatcaagtgcgactcaagcagtaatatcatctaaaaatgcattagatggtgttgaacgattagctcaagataagcaaactgctggaaattctctaaatcatttagatcaattaacaccagctcaacaacaagcgctagaaaatcaaattaataatgcaacaactcgtggcgaagtagcacaaaaattaactgaagcacaagcacttaaccaagcaatggaagctttacgtaatagcattcaagatcaacagcaaacggaagcgggtagcaagtttatcaatgaagataaaccacaaaaagatgcttaccaagcagcagttcaaaatgcaaaagatttaattaatcaaactaacaatccaacgcttgata

SEQ ID NO: 11025 - DNA, 5249 bp, Staphylococcus aureus
aagcacaagttgaacaattgacacaagctgttaaccaagctaaagataacctacacggtgatcaaaaacttgcagacgataaacaacatgcggttactgatttaaatcaattaaatggtttgaataatccgcaacgtcaagcacttgaaagccaaataaacaacgcagcaactcgtggcgaagtagcacaaaaattagctgaagcaaaagcgcttgatcaagcaatgcaagcattacgtaatagtattcaagatcaacaacaaacagaatctggtagcaagtttatcaatgaagataaaccgcaaaaagatgcttaccaagcagcagttcaaaatgcaaaagatttaattaaccaaacaggtaatccaacactcgacaaatcacaagtagaacaattgacacaagcagtaacaactgcaaaagataatctacatggtgatcaaaaacttgctcgtgatcaacaacaagcagtaacaactgtaaatgcattgccaaacttaaatcatgcacaacaacaagcattaactgatgctataaatgcagcgcctacaagaacagaggttgcacaacatgttcaaactgctactgaacttgatcacgcgatggaaacattgaaaaataaagttgatcaagtgaatacagataaggctcaaccaaattacactgaagcgtcaactgataaaaaagaagcagtagatcaagcgttacaagctgcagaaagcattacagatccaactaatggttcaaatgcgaataaagacgctgtagaccaagtattaactaagcttcaagaaaaagaaaatgagttaaatggtaatgagagagtcgctgaagctaaaacacaagcgaaacaaactattgaccaattaacacatttaaatgctgatcaaattgcaactgctaaacaaaacattgatcaagcgacgaaacttcaaccaattgctgaattagtagatcaagcaacgcaattgaatcaatctatggatcaattacaacaagcagttaatgaacatgctaacgttgagcaaactgtagattacacacaagcagattcagataaacaaaatgcttataaacaagctattgctgatgctgaaaatgtattgaaacaaaatgcgaataagcaacaagtggatcaagcacttcaaaatattttaaatgcaaaacaagcattaaatggtgatgaacgtgtagcacttgctaaaacaaatggtaaacatgacatcgaccaattgaatgcattaaacaatgctcaacaagatggatttaaaggtcgcatcgatcaatcaaacgatttaaatcaaatccaacaaattgtagatgaggctaaggcacttaatcgtgcaatggatcaattgtcacaagaaatcactgacaatgaaggacgcacgaaaggtagcacgaactatgtcaatgcagatacacaagtcaaacaagtatatgatgaaacggttgataaagcgaaacaagcacttgataaatcgactggtcaaaacttaactgcaaaacaagttatcaaattaaatgatgcagtcactgcagctaagaaagcattaaatggtgaagaaagacttaataatcgtaaagctgaagcattacaaagattggatcaattaacacatctaaacaatgctcaaagacaattagcaatccaacaaattaataatgctgaaacgctaaataaagcatctcgagcaattaatagagcaactaaattagataatgcaatgggtgcagtacaacaatatattgacgaacagcaccttggtgttatcagcagcacaaattacatcaatgcagatgacaatttgaaagcaaattatgataatgcaattgcgaatgcagcacatgagttagataaagtgcaaggtaatgcaattgcaaaagctgaagcagagcaattgaaacaaaatattatcgatgctcaaaatgcattaaatggagaccaaaaccttgcaaatgccaaagataaagcaaatgcgtttgttaattcgttaaatggattaaatcaacagcaacaagatcttgcacataaagcaattaacaatgccgatactgtatcagatgtaacagatattgttaataatcaaattgacttaaatgatgcaatggaaacattgaaacatttagttgacaatgaaattccaaatgcagagcaaactgtcaattaccaaaacgctgacgataatgctaaaacaaacttcgatgatgccaaacgtctagcaaatacattgctaaatagtgataacacaaatgtgaatgatatcaatggcgcaatccaagcagtcaatgatgcaatccataatcttaatggtgatcaacgactacaagatgctaaagacaaggcaattcaatctattaatcaagctttagctaataagctaaaagaaatcgaagcttcaaatgcgacggatcaagacaagcttattgcgaaaaataaagcagaagaattggcaaacagcatcatcaacaacattaataaagcaacaagtaatcaggctgtatctcaagttcaaacagcaggcaaccacgcgattgaacaagtgcatgccaatgaaataccaaaagcaaaaattgatgccaataaagacgttgataagcaagttcaagcattaattgacgaaattgatcgaaatccaaatctaacagataaggaaaaacaagcacttaaagatcgtattaatcaaatacttcaacaaggtcataacggcattaacaatgcgatgactaaagaagaaattgaacaagccaaagcacaacttgcgcaagcattacaagacatcaaagatttagtgaaagctaaagaagatgcgaaacaagatgttgataaacaagttcaagctttaattgacgaaatcgatcaaaatccaaatctaacagataaggaaaaacaagcacttaaagatcgtattaatcaaatacttcaacaaggtcataacgacattaacaatgcgatgacaaaagaagcaattgaacaagcaaaagaacgtttagcgcaagcattgcaagacatcaaagatttagtgaaagctaaagaagatgcgaaaaatgatattgataaacgtgtacaagctttaattgacgaaatcgatcaaaatccaaatctaacagataaggaaaaacaagcacttaaagatcgaattaatcaaatacttcaacaaggtcataacgacattaacaatgcgctgactaaagaagaaattgagcaggcaaaagcacaacttgcacaagcattgcaagacatcaaagatttagtgaaagctaaagaagatgcgaaaaatgcaataaaagccttagctaatgcgaagcgtgatcaaatcaattcaaatccagatttaacacctgagcaaaaagcaaaagcgctcaaagaaattgacgaagctgaaaaacgagcactacaaaacgttgagaatgctcaaactatagatcaattaaatcgaggattaaacttaggtttagatgacattagaaatacacatgtatgggaggttgatgaacaacctgctgtaaatgaaatttttgaagcaacacctgagcaaatcctagttaatggtgaactcattgtacatcgtgatgacatcattacagaacaagatattcttgcacacataaacttaattgatcagctttcagcagaagtcatcgatacaccatcaactgcaacgatttctgatagcttaacagcaaaagttgaagttacattgcttgatggatcaaaagtgattgttaatgttcctgtaaaagttgtagaaaaagaattgtcagtagtcaaacaacaggcaattgaatcaatcgaaaatgcggcacaacaaaagattaatgaaatcaataatagtgtgacattaacactggaacaaaaagaagctgcaattgcagaagttaataagcttaaacaacaagcaattgatcatgttaacaatgcacctgatgttcattcagttgaagaaattcaacaacaagaacaagcgcatattgaacaatttaatccagaacaatttacgattgaacaagcaaaatcaaatgcaattaaatcgattgaagatgcaattcaacatatgattgatgaaatcaaagctcgtactgatctaacagataaagagaagcaagaagctattgctaagttaaatcaattaaaagaacaagcaattcaagcgattcaacgtgcgcaaagcatcgatgaaataagtgagcaattggaacaatttaaagctcaaatgaaagcagctaatccaacagcaaaagaactagctaaacgcaagcaagaagctattagtagaattaaagacttttcaaatgaaaaaataaatagtattcgaaatagtgaaattggcacagctgatgaaaaacaagcagcaatgaatcaaattaacgaaattgtgcttgaaacaattagagatattaataatgcgcatacattacagcaagttgaggctgcattgaacaatggtattgctcgaatttcagcagtacaaattgtaacatctgatcgtgctaaacaatcgtcaagtactggaaatgaatctaatagccatttaacaattggttatggaactgcaaatcatccatttaacagttcgactattggacataaaaagaaacttgatgaagatgatgacattgatccacttcatatgcgtcactttagtaataatttcggtaatgttattaaaaacgctattggtgtggtgggtatctctggtttactagctagtttctggttcttcattgccaaacgtcgtcgtaaagaagatgaagaggaagaattagaaataagagataataataaagattcaataaaagagactttagacgatacaaaacatttaccacttttatttgcgaaacgtcgcagaaaagaagatgaagaagatgttactgttgaagaaaaagattcgctaaataatggcgagtcactcgataaagttaaacatacgccgttcttcttaccaaaacgtcgtcgtaaagaagatgaagaagatgtggaagttacaaatgaaaacacagatgaaaaagtgttgaaagataacgaacattcaccactcttattcgcaaaacgacgcaaagataaagaggaagatgttgaaacaacaactagtattgaatctaaagatgaggacgttcctttattattggctaaaaagaaaaatcaaaaagataaccaatccaaagacaaaaagtcagcatcaaaaaatacttctaaaaaggtagcagctaaaaagaagaaaaagaaagctaagaaaaataaaaaa

SEQ ID NO: 11026 - DNA, 99 bp, Staphylococcus aureus; identical to SEQ ID NO: 3174

SEQ ID NO: 11027 - DNA, 267 bp, Staphylococcus aureus; identical to SEQ ID NO: 3175

SEQ ID NO: 11028 - DNA, 495 bp, Staphylococcus aureus; identical to SEQ ID NO: 3176

SEQ ID NO: 11029 - DNA, 528 bp, Staphylococcus aureus; identical to SEQ ID NO: 3177

SEQ ID NO: 11030 - DNA, 543 bp, Staphylococcus aureus; identical to SEQ ID NO: 3178

SEQ ID NO: 11031 - DNA, 528 bp, Staphylococcus aureus; identical to SEQ ID NO: 3179

SEQ ID NO: 11032 - DNA, 813 bp, Staphylococcus aureus; identical to SEQ ID NO: 3180

SEQ ID NO: 11033 - DNA, 792 bp, Staphylococcus aureus; identical to SEQ ID NO: 3181

SEQ ID NO: 11034 - DNA, 282 bp, Staphylococcus aureus; identical to SEQ ID NO: 3182

SEQ ID NO: 11035 - DNA, 195 bp, Staphylococcus aureus; identical to SEQ ID NO: 3183

SEQ ID NO: 11036 - DNA, 438 bp, Staphylococcus aureus; identical to SEQ ID NO: 3184

SEQ ID NO: 11037 - DNA, 213 bp, Staphylococcus aureus; identical to SEQ ID NO: 3185

SEQ ID NO: 11038 - DNA, 423 bp, Staphylococcus aureus; identical to SEQ ID NO: 3186

SEQ ID NO: 11039 - DNA, 549 bp, Staphylococcus aureus; identical to SEQ ID NO: 3187

SEQ ID NO: 11040 - DNA, 297 bp, Staphylococcus aureus; identical to SEQ ID NO: 3188

SEQ ID NO: 11041 - DNA, 771 bp, Staphylococcus aureus; identical to SEQ ID NO: 3189

SEQ ID NO: 11042 - DNA, 504 bp, Staphylococcus aureus; identical to SEQ ID NO: 3190

SEQ ID NO: 11043 - DNA, 789 bp, Staphylococcus aureus; identical to SEQ ID NO: 3191

SEQ ID NO: 11044 - DNA, 786 bp, Staphylococcus aureus; identical to SEQ ID NO: 3192

SEQ ID NO: 11045 - DNA, 783 bp, Staphylococcus aureus; identical to SEQ ID NO: 3193

SEQ ID NO: 11046 - DNA, 795 bp, Staphylococcus aureus; identical to SEQ ID NO: 3194

SEQ ID NO: 11047 - DNA, 915 bp, Staphylococcus aureus; identical to SEQ ID NO: 3195

SEQ ID NO: 11048 - DNA, 249 bp, Staphylococcus aureus; identical to SEQ ID NO: 3196

SEQ ID NO: 11049 - DNA, 252 bp, Staphylococcus aureus; identical to SEQ ID NO: 3197

SEQ ID NO: 11050 - DNA, 207 bp, Staphylococcus aureus; identical to SEQ ID NO: 3198

SEQ ID NO: 11051 - DNA, 387 bp, Staphylococcus aureus; identical to SEQ ID NO: 3199

SEQ ID NO: 11052 - DNA, 174 bp, Staphylococcus aureus; identical to SEQ ID NO: 3200

SEQ ID NO: 11053 - DNA, 1536 bp, Staphylococcus aureus; identical to SEQ ID NO: 3201

SEQ ID NO: 11054 - DNA, 996 bp, Staphylococcus aureus; identical to SEQ ID NO: 3202

SEQ ID NO: 11055 - DNA, 333 bp, Staphylococcus aureus; identical to SEQ ID NO: 3203

SEQ ID NO: 11056 - DNA, 348 bp, Staphylococcus aureus; identical to SEQ ID NO: 3204

SEQ ID NO: 11057 - DNA, 729 bp, Staphylococcus aureus; identical to SEQ ID NO: 3205

SEQ ID NO: 11058 - DNA, 561 bp, Staphylococcus aureus; identical to SEQ ID NO: 3206

SEQ ID NO: 11059 - DNA, 492 bp, Staphylococcus aureus; identical to SEQ ID NO: 3207

SEQ ID NO: 11060 - DNA, 423 bp, Staphylococcus aureus; identical to SEQ ID NO: 3208

SEQ ID NO: 11061 - DNA, 357 bp, Staphylococcus aureus; identical to SEQ ID NO: 3209

SEQ ID NO: 11062 - DNA, 204 bp, Staphylococcus aureus; identical to SEQ ID NO: 3210

SEQ ID NO: 11063 - DNA, 93 bp, Staphylococcus aureus; identical to SEQ ID NO: 3211

SEQ ID NO: 11064 - DNA, 96 bp, Staphylococcus aureus; identical to SEQ ID NO: 3212

SEQ ID NO: 11065 - DNA, 126 bp, Staphylococcus aureus; identical to SEQ ID NO: 3213

SEQ ID NO: 11066 - DNA, 195 bp, Staphylococcus aureus; identical to SEQ ID NO: 3214

SEQ ID NO: 11067 - DNA, 282 bp, Staphylococcus aureus; identical to SEQ ID NO: 3215

SEQ ID NO: 11068 - DNA, 132 bp, Staphylococcus aureus; identical to SEQ ID NO: 3216

SEQ ID NO: 11069 - DNA, 492 bp, Staphylococcus aureus; identical to SEQ ID NO: 3217

SEQ ID NO: 11070 - DNA, 501 bp, Staphylococcus aureus; identical to SEQ ID NO: 3218

SEQ ID NO: 11071 - DNA, 186 bp, Staphylococcus aureus; identical to SEQ ID NO: 3219

SEQ ID NO: 11072 - DNA, 795 bp, Staphylococcus aureus; identical to SEQ ID NO: 3220

SEQ ID NO: 11073 - DNA, 192 bp, Staphylococcus aureus; identical to SEQ ID NO: 3221

SEQ ID NO: 11074 - DNA, 150 bp, Staphylococcus aureus; identical to SEQ ID NO: 3222

SEQ ID NO: 11075 - DNA, 75 bp, Staphylococcus aureus; identical to SEQ ID NO: 3223

SEQ ID NO: 11076 - DNA, 73 bp, Staphylococcus aureus; identical to SEQ ID NO: 3224

SEQ ID NO: 11077 - DNA, 93 bp, Staphylococcus aureus; identical to SEQ ID NO: 3225

SEQ ID NO: 11078 - DNA, 75 bp, Staphylococcus aureus; identical to SEQ ID NO: 3226

SEQ ID NO: 11079 - DNA, 89 bp, Staphylococcus aureus; identical to SEQ ID NO: 3227

SEQ ID NO: 11080 - DNA, 99 bp, Staphylococcus aureus; identical to SEQ ID NO: 3228

SEQ ID NO: 11081 - DNA, 771 bp, Staphylococcus aureus; identical to SEQ ID NO: 3229

SEQ ID NO: 11082 - DNA, 501 bp, Staphylococcus aureus; identical to SEQ ID NO: 3230

SEQ ID NO: 11083 - DNA, 492 bp, Staphylococcus aureus; identical to SEQ ID NO: 3231

SEQ ID NO: 11084 - DNA, 102 bp, Staphylococcus aureus; identical to SEQ ID NO: 3232

SEQ ID NO: 11085 - DNA, 714 bp, Staphylococcus aureus; identical to SEQ ID NO: 3233

SEQ ID NO: 11086 - DNA, 501 bp, Staphylococcus aureus; identical to SEQ ID NO: 3234

SEQ ID NO: 11087 - DNA, 501 bp, Staphylococcus aureus; identical to SEQ ID NO: 3235

SEQ ID NO: 11088 - DNA, 501 bp, Staphylococcus aureus; identical to SEQ ID NO: 3236

SEQ ID NO: 11089 - DNA, 501 bp, Staphylococcus aureus; identical to SEQ ID NO: 3237

SEQ ID NO: 11090 - DNA, 489 bp, Staphylococcus aureus; identical to SEQ ID NO: 3238

SEQ ID NO: 11091 - DNA, 159 bp, Staphylococcus aureus; identical to SEQ ID NO: 3239

SEQ ID NO: 11092 - DNA, 120 bp, Staphylococcus aureus; identical to SEQ ID NO: 3240

SEQ ID NO: 11093 - DNA, 219 bp, Staphylococcus aureus; identical to SEQ ID NO: 3241

SEQ ID NO: 11094 - DNA, 372 bp, Staphylococcus aureus; identical to SEQ ID NO: 3242

SEQ ID NO: 11095 - DNA, 207 bp, Staphylococcus aureus; identical to SEQ ID NO: 3243

SEQ ID NO: 11096 - DNA, 402 bp, Staphylococcus aureus; identical to SEQ ID NO: 3244

SEQ ID NO: 11097 - DNA, 405 bp, Staphylococcus aureus; identical to SEQ ID NO: 3245

SEQ ID NO: 11098 - DNA, 249 bp, Staphylococcus aureus; identical to SEQ ID NO: 3246

SEQ ID NO: 11099 - DNA, 207 bp, Staphylococcus aureus; identical to SEQ ID NO: 3247

SEQ ID NO: 11100 - DNA, 153 bp, Staphylococcus aureus; identical to SEQ ID NO: 3248

SEQ ID NO: 11101 - DNA, 438 bp, Staphylococcus aureus; identical to SEQ ID NO: 3249

SEQ ID NO: 11102 - DNA, 390 bp, Staphylococcus aureus; identical to SEQ ID NO: 3250

SEQ ID NO: 11103 - DNA, 201 bp, Staphylococcus aureus; identical to SEQ ID NO: 3251

SEQ ID NO: 11104 - DNA, 204 bp, Staphylococcus aureus; identical to SEQ ID NO: 3252

SEQ ID NO: 11105 - DNA, 699 bp, Staphylococcus aureus; identical to SEQ ID NO: 3253

SEQ ID NO: 11106 - DNA, 684 bp, Staphylococcus aureus; identical to SEQ ID NO: 3254

SEQ ID NO: 11107 - DNA, 843 bp, Staphylococcus aureus; identical to SEQ ID NO: 3255

SEQ ID NO: 11108 - DNA, 801 bp, Staphylococcus aureus; identical to SEQ ID NO: 3256

SEQ ID NO: 11109 - DNA, 792 bp, Staphylococcus aureus; identical to SEQ ID NO: 3257

SEQ ID NO: 11110 - DNA, 801 bp, Staphylococcus aureus; identical to SEQ ID NO: 3258

SEQ ID NO: 11111 - DNA, 738 bp, Staphylococcus aureus; identical to SEQ ID NO: 3259

SEQ ID NO: 11112 - DNA, 816 bp, Staphylococcus aureus; identical to SEQ ID NO: 3260

SEQ ID NO: 11113 - DNA, 819 bp, Staphylococcus aureus; identical to SEQ ID NO: 3261

SEQ ID NO: 11114 - DNA, 297 bp, Staphylococcus aureus; identical to SEQ ID NO: 3262

SEQ ID NO: 11115 - DNA, 99 bp, Staphylococcus aureus; identical to SEQ ID NO: 3263

SEQ ID NO: 11116 - DNA, 771 bp, Staphylococcus aureus; identical to SEQ ID NO: 3264

SEQ ID NO: 11117 - DNA, 426 bp, Staphylococcus aureus; identical to SEQ ID NO: 3265

SEQ ID NO: 11118 - DNA, 345 bp, Staphylococcus aureus; identical to SEQ ID NO: 3266

SEQ ID NO: 11119 - DNA, 1041 bp, Staphylococcus aureus; identical to SEQ ID NO: 3267

SEQ ID NO: 11120 - DNA, 825 bp, Staphylococcus aureus; identical to SEQ ID NO: 3268

SEQ ID NO: 11121 - DNA, 768 bp, Staphylococcus aureus; identical to SEQ ID NO: 3269

SEQ ID NO: 11122 - DNA, 1023 bp, Staphylococcus aureus; identical to SEQ ID NO: 3270

SEQ ID NO: 11123 - DNA, 210 bp, Staphylococcus aureus; identical to SEQ ID NO: 3271

SEQ ID NO: 11124 - DNA, 1347 bp, Staphylococcus aureus; identical to SEQ ID NO: 3272

SEQ ID NO: 11125 - DNA, 1629 bp, Staphylococcus aureus; identical to SEQ ID NO: 3273

SEQ ID NO: 11126 - DNA, 285 bp, Staphylococcus aureus; identical to SEQ ID NO: 3274

SEQ ID NO: 11127 - DNA, 594 bp, Staphylococcus aureus; identical to SEQ ID NO: 3275

SEQ ID NO: 11128 - DNA, 225 bp, Staphylococcus aureus; identical to SEQ ID NO: 3276

SEQ ID NO: 11129 - DNA, 528 bp, Staphylococcus aureus; identical to SEQ ID NO: 3277

SEQ ID NO: 11130 - DNA, 783 bp, Staphylococcus aureus; identical to SEQ ID NO: 3278

SEQ ID NO: 11131 - DNA, 1893 bp, Staphylococcus aureus; identical to SEQ ID NO: 3279

SEQ ID NO: 11132 - DNA, 1086 bp, Staphylococcus aureus; identical to SEQ ID NO: 3280

SEQ ID NO: 11133 - DNA, 346 bp, Staphylococcus aureus; identical to SEQ ID NO: 3281

SEQ ID NO: 11134 - DNA, 570 bp, Staphylococcus aureus; identical to SEQ ID NO: 3282

SEQ ID NO: 11135 - DNA, 111 bp, Staphylococcus aureus; identical to SEQ ID NO: 3283

SEQ ID NO: 11136 - DNA, 807 bp, Staphylococcus aureus; identical to SEQ ID NO: 3284

SEQ ID NO: 11137 - DNA, 675 bp, Staphylococcus aureus; identical to SEQ ID NO: 3285

SEQ ID NO: 11138 - DNA, 206 bp, Staphylococcus aureus; identical to SEQ ID NO: 3286

SEQ ID NO: 11139 - DNA, 699 bp, Staphylococcus aureus; identical to SEQ ID NO: 3287

SEQ ID NO: 11140 - DNA, 684 bp, Staphylococcus aureus; identical to SEQ ID NO: 3288

SEQ ID NO: 11141 - DNA, 609 bp, Staphylococcus aureus; identical to SEQ ID NO: 3289

SEQ ID NO: 11142 - DNA, 528 bp, Staphylococcus aureus; identical to SEQ ID NO: 3290

SEQ ID NO: 11143 - DNA, 732 bp, Staphylococcus aureus; identical to SEQ ID NO: 3291

SEQ ID NO: 11144 - DNA, 705 bp, Staphylococcus aureus; identical to SEQ ID NO: 3292

SEQ ID NO: 11145 - DNA, 438 bp, Staphylococcus aureus; identical to SEQ ID NO: 3293

SEQ ID NO: 11146 - DNA, 300 bp, Staphylococcus aureus; identical to SEQ ID NO: 3294

SEQ ID NO: 11147 - DNA, 330 bp, Staphylococcus aureus; identical to SEQ ID NO: 3295

SEQ ID NO: 11148 - DNA, 771 bp, Staphylococcus aureus; identical to SEQ ID NO: 3296

SEQ ID NO: 11149 - DNA, 501 bp, Staphylococcus aureus; identical to SEQ ID NO: 3297

SEQ ID NO: 11150 - DNA, 399 bp, Staphylococcus aureus; identical to SEQ ID NO: 3298

SEQ ID NO: 11151 - DNA, 294 bp, Staphylococcus aureus; identical to SEQ ID NO: 3299

SEQ ID NO: 11152 - DNA, 486 bp, Staphylococcus aureus; identical to SEQ ID NO: 3300

SEQ ID NO: 11153 - DNA, 570 bp, Staphylococcus aureus; identical to SEQ ID NO: 3301

SEQ ID NO: 11154 - DNA, 795 bp, Staphylococcus aureus; identical to SEQ ID NO: 3302

SEQ ID NO: 11155 - DNA, 813 bp, Staphylococcus aureus; identical to SEQ ID NO: 3303

SEQ ID NO: 11156 - DNA, 804 bp, Staphylococcus aureus; identical to SEQ ID NO: 3304

SEQ ID NO: 11157 - DNA, 411 bp, Staphylococcus aureus; identical to SEQ ID NO: 3305

SEQ ID NO: 11158 - DNA, 372 bp, Staphylococcus aureus; identical to SEQ ID NO: 3306

SEQ ID NO: 11159 - DNA, 816 bp, Staphylococcus aureus; identical to SEQ ID NO: 3307

SEQ ID NO: 11160 - DNA, 867 bp, Staphylococcus aureus; identical to SEQ ID NO: 3308

SEQ ID NO: 11161 - DNA, 345 bp, Staphylococcus aureus; identical to SEQ ID NO: 3309

SEQ ID NO: 11162 - DNA, 1041 bp, Staphylococcus aureus; identical to SEQ ID NO: 3310

SEQ ID NO: 11163 - DNA, 762 bp, Staphylococcus aureus; identical to SEQ ID NO: 3311

SEQ ID NO: 11164 - DNA, 336 bp, Staphylococcus aureus; identical to SEQ ID NO: 3312

SEQ ID NO: 11165 - DNA, 1026 bp, Staphylococcus aureus; identical to SEQ ID NO: 3313

SEQ ID NO: 11166 - DNA, 585 bp, Staphylococcus aureus; identical to SEQ ID NO: 3314

SEQ ID NO: 11167 - DNA, 300 bp, Staphylococcus aureus; identical to SEQ ID NO: 3315

SEQ ID NO: 11168 - DNA, 504 bp, Staphylococcus aureus; identical to SEQ ID NO: 3316

SEQ ID NO: 11169 - DNA, 144 bp, Staphylococcus aureus; identical to SEQ ID NO: 3317

SEQ ID NO: 11170 - DNA, 357 bp, Staphylococcus aureus; identical to SEQ ID NO: 3318

SEQ ID NO: 11171 - DNA, 282 bp, Staphylococcus aureus; identical to SEQ ID NO: 3319

SEQ ID NO: 11172 - DNA, 801 bp, Staphylococcus aureus; identical to SEQ ID NO: 3320

SEQ ID NO: 11173 - DNA, 204 bp, Staphylococcus aureus; identical to SEQ ID NO: 3321

SEQ ID NO: 11174 - DNA, 114 bp, Staphylococcus aureus; identical to SEQ ID NO: 3322

SEQ ID NO: 11175 - DNA, 207 bp, Staphylococcus aureus; identical to SEQ ID NO: 3323

SEQ ID NO: 11176 - DNA, 1020 bp, Staphylococcus aureus; identical to SEQ ID NO: 3324

SEQ ID NO: 11177 - DNA, 1020 bp, Staphylococcus aureus; identical to SEQ ID NO: 3325

SEQ ID NO: 11178 - DNA, 234 bp, Staphylococcus aureus; identical to SEQ ID NO: 3326

SEQ ID NO: 11179 - DNA, 513 bp, Staphylococcus aureus; identical to SEQ ID NO: 3327

SEQ ID NO: 11180 - DNA, 567 bp, Staphylococcus aureus; identical to SEQ ID NO: 3328

SEQ ID NO: 11181 - DNA, 1149 bp, Staphylococcus aureus; identical to SEQ ID NO: 3329

SEQ ID NO: 11182 - DNA, 294 bp, Staphylococcus aureus; identical to SEQ ID NO: 3330

SEQ ID NO: 11183 - DNA, 282 bp, Staphylococcus aureus; identical to SEQ ID NO: 3331

SEQ ID NO: 11184 - DNA, 246 bp, Staphylococcus aureus; identical to SEQ ID NO: 3332

SEQ ID NO: 11185 - DNA, 774 bp, Staphylococcus aureus; identical to SEQ ID NO: 3333

SEQ ID NO: 11186 - DNA, 663 bp, Staphylococcus aureus; identical to SEQ ID NO: 3334

SEQ ID NO: 11187 - DNA, 5850 bp, Staphylococcus aureus
gtgaattatcgtgataaaattcaaaagtttagtattcgtaaatatacagttggtacattttcaactgtcattgcgacattggtatttttaggattcaatacatcacaagcacatgctgctgaaacaaatcaaccagcaagcgtggttaaacagaaacaacaaagtaataatgaacagactgagaatcgagaatctcaagtacaaaattctcaaaattcacaaaatrgtcaatcattatcygctactcatgaaaatgagcaaccaaatawtagtcaagctaatttagtaratcaaaaagtagcgcaatcatctactactaatgatgaacaaccagcatctcaaaatgtaaatacaaagaaagattcggcaacggctgcgacaacacaaccagataaagaasaargtaagcataaacaaaacgaaagtcaatctgctaataaaaatggaaacgacaatagagcggctcatktagaaaatcatgaagcaaatgtagtaacagcttcagattcatctgataatggtaacgtacaacatgaccgaaatgaattacaagcrttttttgatgcaaattatcatgattatcgctttattgaccgtgaaaatgcagattctggcacatttaactatgtaaaaggcatttttgahaagattaatackttattaggcagtaatgatccaatwaacaataaagacttgcaacttgcatacaaagaattggaacaagctgttgctttaattcgtacaatgcctcaacgtcaacaractagccgwcgwtcaaayagaattcaaacgcgttckgttgagtcwagagctgcagagcctagatcagtatcagactatcaaaatgcaaattcatcatattatgttgaaaatgctaatgatggttcrggmtatcctgtwggtacatatatcaatgcttctagtaaaggggcgccatataatttaccaactacaccatggaatacattgaaggcctctgactcaaaggaaattgctcttatgacagcgaaacaaactggagayggstaccaatgggttattaagtttaataaaggacatgctccacatcaaaatatgatyttytggtttgcattaccagcagaccaagtgccagtaggaagaactgactttgtaacagttaattcagatggaacaaatgtacaatggagtcatggagcagragcaggtgcaaataaaccacttcaacaaatgtgggaatatggagtaaatgatcctsatcgttcacatgactttaaaataagaaatagaagtggccaagtaatatatrrctggccaactgtccatrtttattctttagaagatttatctagagcgagtgattattttagtgaagctggagcracasctgctactaaagcwtttggtagacaaaattttgaatatattaatggtcaaaaacctgctgaatcaccgggtgttcctaaagtttatactttcatcggtcaaggtgatgcaagttatacaatttcatttaaaacacaaggtccaactgttaataaattgtaytatgcagcaggtgggcgtgctttagagtacaatcaattatttatgtacagtcaactatacgtcgaatcaacgcaagaccatcaacaacgtcttaatggtttaagacaagtggttaatcgtacatatcgcataggtacaactaaacgtgtagaagtgagtcaaggaaatgtacaaacgaaaaaggtattagaaagtacaaacctaaatatagatgattttgttgatgatccwttaagttatgttaagacgccgagtaataaagtgttaggwttttayycramtaatgcaamtactaaygcttttagaccgggkggmgyycarsaattaaatgaatatcaattaagtcaattatttactgatcaaaaattacaagaagcagcaagaactagaaacccaataagattaatgattggtttcgactatcctgatgsttatggtaatagtgaaactttagttcctgttaacttaacggtattacctgaaatccaacataatattaaattctttaaaaatgacgatactcaaaayattgctgaaaaaccattttcaaaacaagctgggcatccagttttctatgtatatgcaggtaaccaagggaatgcttccgtgaatttaggtggtagcgtaacatctattcaaccattacgtattaatttaacaagtaatgagaattttacagataaagattggcaaattacaggtattccgcgtacattacacattgaaaactcgacaaatagamctaataatgcyagagaacgyaayattgaacttgttggtaayttattaccaggggattactttggwacgatacgttttggacgtaaagaacaattattygaaattcgtgttaaaccacatacaccaacaattacaacgacagctgagcaattaagaggtacagcattacaaaaagtgcctgttaatatttcgggaataccgttggatccatcggcattggtttatttagttgcaccaacaaatcaaactacgaatggtggtagtgaggcagatcaaataccatctggttatacgatacttgcgactggtacacctgatggggtgcataatacaattactatacgaccgcaagattatgttgtattcataccacctgtaggtaaacaaattagagcagtagtttattataataaagtagttgcatctaatatgagtaatgctgttactattttgccagatgacattccaccaacaatcaataatcctgttggaataaatgccaaatactatcgaggcgacgaagtcaactttacaatgggwgtctctgatagacattctggtataaaaaatacaactattackacwttgccrartggttggacatcaaatttaacwaaakcsgayaasaawaayggctcattakctattacaggtagagtswstatgaatcaggcrtttaacagtgatattacatttaaagtrtcagcgacagayaatgtcaataatacgacaaatgatagtcaatctaaacatgtktcaattcatgtaggtaaaattagtgaagatgctcatccgattgtattaggaaatactgagaaagttgtagtagtcaatccgactgctgtatctaatgatgaaaagcaaagcataattactgcctttatgaataaaaaccaaaatataagaggatatttagcatcaactgatccagtaactgtcgataataatggtaaygtcacattacattacygtgatggctcatcracaacgcttgatgctacaaatgtgatgacatacgaaccagttgtgaaayctgaataycaaactgycaatgcwgctaaaacagcaacggtaacgattgctaaaggacaatcatttartattggtgatattaaacaatattttactttaagtaatggacaasctattccaartggcacatttacaaatattacatctgatagaactattcyaactgcacaagaagttagtcaaatgaaygcaggyacgcagttataycatatarytgctwcaaatgcrtatcataaagayastgaagayttctatattagtttraaaatcrtygatgtgaaacaaccwgaaggcgatcaacgtgtmtatcgtacrtcaacatatgatttaachactgatgaaatctcaaaagtaaaacaagcwtttattaatgcaaatagagatgtaattacgcttgccgarggtratatttcagttacaaatacacctaatggtgctaatgtaagtactattacagtaaatattaataaaggtcgattaacgaaatcattcgcgtcwaacctagctaatatgaatttcttgcgttgggttaatttcccrcaagattatacagtgacatggacgaatgcaaaaattgcaaacagaccaacagatggtggtttatcatggtcygatgaccataaatctttaatttatcgttatgatgctacattaggyacwcaaattacrackaatgatattttaacratgytaaaagcracwactacagtgcctggattgcgwaataayattactggtaatgaaaaakcacaagcagaagcwggyggaagaccwaactwtagaacractggttattcacaatcaaatgcgacaactgatggtcaacgtcaatttacgttgaatggtcaagtgattcaartrttagacatcatcaacccttcaaacggttatggtgggcaacctgttacaaattcaaatactcgtgcaaaccatagtaactcaactgttgttaacgtaaacgaaccggcagctaatggtgctrgcgcatttacaattgaccacgttgtaaaaagtaattctacacataatgcaagtgatgcagtttataaagcrcagttatacttaacgccatatggtccaaaacaatatgttgaacatttaaatcaaaatacaggaaatactactgacgctattaacatttattttgtaccaagtgayttagtgaatccaacaatttcagtaggtaattacactaatcatcaagtgttctcaggtgaaacatttacaaatackattacagcgaatgataactttggtgtgcaatckgtaactgtaccaaatacatcacaaattacaggyactgttgataataaccatcaacatgtttctgcaacggcaccaaatgtgacatcagcaactartaagacaatcaatttattagcaactgatacaagyggyaatacagctacaacttcrttcaatgtaacagtgaaacctttgcgtgataaatatcgagttggtacttcatcaacggctgctaatcctgtkagaattgccaatatttcgaataatgcgacagtatcacaagctgatcaaacrrcaattattaattcrttaacgtttacwwgwaayagyaccaaatagaarytatgcaasagcaagygcraatgaaatcactagtaaaacagttagtaatgtcagtcgtactggaaataatgccaatgtyacagtaactgytactyatcaagatggaacaacatcaacagtgactgtacctgtaaagcatgtcattccagaaatcgttgcacattcgcattacactgtacaaggccaagacttcccagcaggtaatggttctagtgcakcagattactttaagttatctaatggtagtgmcattscagatgcaackattacatgggtaagtggacaagcgccaaataaagataatacacgtattggtgaagatataacwgtaactgcacatatcttaattgatggygaaacaacgccgattacgaaaacagcaacatataaagtagtaagwacwgtaccgaarcatgtctttgaracrrmyagaggtgytktrtwcccaggtgtwtcwgatrtgtatgatgcgaaacaatatgttaarccagtwaatrattcttggwcgacaaatgcgcaacrtatgaatttycaatttrywrrwwcatatggwccwaryaaagatgtkgtwggyatwtcwacdmgkswtattmgagtkacwtatgataatmrmcaaacdsaagatttmamkattttakcwaaagttaaaccwgayccaccdmgaattgaygsmaactctgtgacwtataaagcaggtcttacwaaccaasaaattaaarttaataaygtrttaartarytcrtcwrtwaaattatttaaagcagataatacrccattaamkrtyacaaayaykactyatggtagyggtwwtastkcrgttgtracrgtaagtgaygcgttaccaaatggygkrattaargcaarrtcttcwatywcaatgaayaatgtgacgtayackackcaagaygaacatggtcragytgwtasagtaacaagaaatgaatctgttgattcaaatgayag

SEQ ID NO: 11188 - DNA, 5850 bp, Staphylococcus aureus
tgcwwcwgtwacagtracaccacaattacaagcaactactgaaggygctgtatttattaaaggtggcgacggttttgatttcggwcaygtagaamgatttattcaaaayccgccacatggggcaacggtygcatggcatgatagtccagatacatggaagaatacagtcggyaacacwcataaaactgcggttgtaacattacctartggtcaaggtacgcgtaatgttgaagttccagtcaaagtttatccagttgctaatgcwaaggcgccatcacgtgatgtgaaaggtcaaaatttgacwmatggwacrraygckatkraytacattacatttgatccaaatacwaayacraatggtatyacwgcagcatgggcaaatagacaacaaccaaataaccarcaagcaggcgtkcaacatttaaatgtcgatgtcacatatccaggtatttcagctgctaaacgagttcctgtwactgtkaaygtatatcaatttgaattccctcaaactacttatacracaacrgttggwggcactttagcaagtggtacgcaagcatcaggatatgcacatatgcaaaaygctwcwggtttaccaacagatggatttacgtataaatggaatcgtgatactacrggtacaaaygaygcaaactggkcagcwatgaataaaccraatrykgcwmaagtcgttaaygcaaaatatgaygtcatctataayggacatacwtttgcaacatctttaccagcgaaatttgtagtaaaagatgtkcaaccagcgaaaccaactgtsactgaaacagcggcaggagcgattacaattgcacctggwgcraaccaaacagtsaatacwcatgchggtaaygtwacgacataygctgayaaattagttattaaacgtaatggwaaygttgtracgacatttacacgtcgyaataatacragyccatgggtgaaagaagcatcwgcagmwamtgtarcaggtattgytggaactaataatggtattactgtkgcagcaggtactttcaaycctgctgatacaattcaagttgttgcaacrcaaggwagyggmgaracartvagtgaygagcaacgtagtgatgatttcacagttgtcgcaccacaaccgaaccaagcgactackaaratttggcaaaatggtcatattgatatcacgcctaataatccatcaggacatttaattaatccaacwcaagcaatggatattgcttacactgaaaaagtgggtaatggtgcagaacatagtaagacaattaatgttgttcgtggtcaaaataatcaatggacaattgcgaataagcctgactatgtaacgttagatgcacaaactggtaaagtgacgttcaatgccaatactataaaaccaaattcatcaatcacaattactccgaaagcaggtacaggtcactcagtaagtagtaatccaagtacattaactgcaccggcagctcatactgtcaacacaactgaaattgtgaaagattatggttcaaatgtaacagcagctgaaattaacaatgcagttcaagttgctaataaacgtactgcaacgattaaaaatggcacagcaatgcctactaatttagctggtggtagcacaacgacgattcctgtgacagtaacttacaatgatggtagtactgaagaagtacaagagtccattttcacaaaagcggataaacgtgagttaatcacagctaaaaatcatttagatgatccagtaagcactgaaggtaaaaagccaggtacaattacgcagtacaataatgcaatkcataatgcgcaacaacaaatcaatacygcraaaacagaagcrcaacaagtgattaataatgakcgtgcaacaccacaacaagtttctgacgcaytaactaaagttcgtgcagcacaaactaagattgatcaagctaaagcattacttcaaaataaagaagataatagccaattagtaacrtctaaaaataacttacaaagttctgtgaaccaagtaccatcaactgctggtatgacgcaacaaagtattgataactataatgcgaagaagcgtgaagcagaaactgaaataactgcagcwcaacgtgttatwgacaatggmgatgcaacwscrcarcaaatttcagakgaaaaacatcgtgtcgataacgcattaacagcattaaaccaagcgaaacawratttaactrcagatacacatrccttagagcaagcagtgcaacaattgaatcgcacaggtacaacgactggtaagaarccrgcaagtattactgcktayaataattcratkcrtgcrcttcaarswgacttaacaagtgctaaaaatagygctaatgctatyattcaraagccaataagawcagtrcaagargtrcaawcwgcrttaacaaatgtaaatcgtgtyaatgagcgattaacgcaagcaattaatcaattagtacctttagctgataatagtgctttaaraactgctaagacgaaacttgatgaagaaatcaataaatcagtaactactgatggtatgacacaatcatcaatccaagcatatgaaaatgctaaacgtgcrggtcaaacagaawcaacaaatgcacaaaatgttattaacaatggtgaygcracwgaccaacaaattgccgmagaaaaaacaaaagtagaagaaaaatataatagcttaaaacaagcaattgctggattaacwccagacttggcaccattacaaactgcaaaaactcagttgcaaaatgatattgatcagccaacgagtacgactggtatgacaagcrcatctrttgcwgcatttaatgamaaactttcagcagctagaactaaaattcaagaaattgatcgygtaytrgcmtcwcatccagatgtwgcracratwcgtcaaaacgtgacagcagcgaatgcygctaaawcagcacttgatcaagcrcgyaatggcttaacagtygataaagcrcctttagaaaatgcgaaaaatcaactacaacatagtattgayacgcaaacaagtacaactggtatgacacaagactctataaatgcatacaatgcgaagttaacagctgcacgtaataagrttcaacaaatcaatcaagtattagcaggttcacckactgtagawcaaattaatacaaatacgtctrcagcaaatcaagckaaatctgatttagatcatgcacgtcaagckttaacaccagataaagcrccgcttcaaamtgcgaaaacgcaattagaacaaagcattaatcaaccaacrgatacaacaggtatgacraccgcttcgttaaatgcrtacaaccaaaaattacaagcagcrcgtcaaaagttaactgaaattaatcaagtgttgaatggcaacccaactgtccaaaatatcaatgataaagtgrcagaggcaaaccaagctaaggatcaattaaatacagcacgtcaaggtttaacattagatagacagccagcgttaacaacattacatggtgcatctaacttaaaccaagcacaacaaaataatttcacgcaacaaattaatgctgctcaaaatcatgctgckcttgaaacaattaagtctaacattacggctttaaatactgcgatgacgaaattaaaagacagtgttgcggataataatacaattaaatcagrtcaaaattacactgacgcaacaccagctaataaacaagcstatgataatgcagttaatgcggctaaaggtgtcattggagaaacgactaatccaacgatggatgttaacacagtgaaccaaaaagcagcatctgttaaatcgacgaaagatgctttagatggtcaacaaaacttacaacgtgcgaaaacagaagcaacaaatgcgattacgcatgcaagtgatttaaaccaagcacaaaagaatgcattaacacaacaagtgaatagtgcacaaaaygtrcawgcagtaaatgatattaaacaaacgactcaaagcttaaatactgctatgacaggtttaaaacgtggcgttgctaatcataaycaagtcgtacaaagtgataattatgtcaacgcagatactaataagaaaaatgattacaacaatgcatacaaccatgcgaatgacattattaatggtaatgcacaacatccagttataacaccaagtgatgttaacaatgctttatcaaatgtcacwagtaaagaacatgcattgaatggtgaagctaagttaaatgctgcgaaacaagaagcgaayactgcattaggtcawttaaayaayttraataatgyrcaacgtcaaaacttacaatcgcaaattaatrgtgcrcatcaaatygakrcagttaatacrattaagcaaaatgcaacaaacttraatagtgcaatgggtaacttaagacaagctgttgcagataaagatcaagtgaaacgtacagaagattatgcggatgcagatacagctaaacaaaatgcatataacagtgcagtttcaagtgcygaaacaatyattaatcaaacarcwaatccracratgtctgttgatgatgttaatcgtgcaacttcagctgttactwctaataaaaatgcattaaatggtkatgaaaaattagyacaatctaaaacagatgctgcaagagcaattgatgcattaccacatttaaataatgcacaaaaagcagatgttaaatctaaaattaatgctgcatcaaatattgctggygtaaatacygttaaacaacaaggtacagatttaaatacagcgatgggtaacttgcarggtgcaatcaatgatgaacaaacgacgcttaatagtcaaaaytatcaagatgcgacacctagtaagaaaacagcatacacaaatgcggtrcaagctgcgaaagatattttaaataaatcaaatggtcaaaataaaacgaaagatcaagttactgaagcgatgaatcaaktgaattckgctaaaaataacttagatggtacgcgtttattagatcaagcgaagcaaacagcraaacagcagttaaataatatgacgcatttaacaactgcacaaaaaacgaatttaacaaaycaaattaatagtggtactactgtygctggtgttcawacggttcaatcaaatgccaayacattagatcaagcsatgaatacgttaagacaaagtattgcyaacaawgatgcgactaaagcaagtgaagattacgtagatgctaataatgataagcaaacagcatataacaacgcrgtagctgctgctgaaacgattattaatgcdaatagtaatccagaaatgaatccaagtacgattacacaaaaagcagagcaagtgaatagttctaaaacggcacttaacggtgatgaaaacttagctrckgcaaaacaaaatgcgaaaacgtacttaaacacattracragtattacagatgctcaaaagaacaatttgattagtcaaattastagtgcgacaagagtkagtggtgttgatactgtaaaacaaaatgcrcaacatytagaycaagctatggctarcttrcarartggtattaacaacgaatctcaagtkaaatcatctgagaaatatcgtgatgctgatacaaataaacaacaagagtatgataatgctattactgcagcgaaagcgattttaaataaatcracaggtccaaacactgcgcaaaatgcagttgaagcagcattrcaacgtgtkaatamtgcgaaagatgcattgaatggygatgcaaaattaattgcagctcaaaacgcagcgaaacaacatttaggtactttaacgcatatcactacagcwcaacgyaatgatttaacaaatcaaatttcayaagctacaaacttagctggtgttgaatc

SEQ ID NO: 11189 - DNA, 5035 bp, Staphylococcus aureus
atgggtaacttacaaacggctatcaacgataagtcaggaacattagcgagccaaaacttcttggatgctgatgagcaaaaacgtaatgcttacaatcaagctatatcagctgccgaaaccattttaaataaacaaactggaccgaatacagcgaaaacagcggttgaacaagcacttaataatgttaatagtgcgaaacatgcattaaatggtacgcaaaacttaaataatgcgaaacaagcagcgattacagcaattaatggcgcatctgatttaaatcaaaaacaaaaagatgcattaaaagcacaagctaatggtgctcaacgcgtatctaatgcaaatgatgtacaacgtaatgcgactgaactgaacacggcaatgggtcaattacaacatgccatcgcagataagacgaatacgttagcaagcagtaaatatgtcaacgccgatagcactaaacaaaatgcttacacaactaaagttaccaatgctgaacatattattagcggtacgccaacggttgttacaacaccttcagaagtaacagctgcagctaatcaagtaaacagcgcgaaacaagaattaaatggtgacgaaagattacgtgttgcaaaacaaaacgccaatactgctattgatgcattaacgcaattaaatactcctcaaaaagctaaattaaaagaacaagtgggacaagccaatagattagaagacgtacaatctgttcaaacaaatggacaatcattgaacaatgcaatgaaaggcttaagagatagtattgctaacgaaacaacagtcaaagcaagtcaaaactatacagacgcaagtccgaataaccaatcaacatataatagcgctgtgtcaaatgcgaaaggtatcattaatcaaactaacaatccaactatggatactagtgcgattacccaagctacaacacaagtgaataatgctaaaaatggtttaaacggtgctgaaaacttaagaaatgcacaaaacactgctaagcaaaacttaaatacgttatcacacttaacaaataaccaaaaatctgcaatctcatcacaaattgatcgtgcaggtcatgtgagtgaggtaacagctgctaaaaatgcagcaactgagttaaacgcgcaaatgggcaacttggaacaagctatccatgatcaaaacacagttaaacaaggtgttaacttcactgatgcagataaagctaaacgtgatgcktatacaaatgcggtaagcagagcwgaarcaattctgaataaaacgcaaggtgcaaatacgtctaaacaagatgttgaagcggctattcaaaatgttwcaagtgctaaaaatgcattgaatggtgatcaaaacgttacaaatgcgaagaatgcagctaaaaatgcattaaataacttaacgtcaattaataatgcacaaaaacgtgacttaacaactaaaattgatcaagcaacaacwgtagctggtgttgaagckgtatctaatacaggtacacaattgaatacagcgatggctaacttgcaaaatggtattaatgataaagcraatacwytagcragygaaaactatcatgatgctgattcagataagaaaactgcttatactcaagccgttrcgaacgcagaaaatattttaaataaaaatagtggatcaaatttagataaagctgccgttgaaaacgcgttgtcacaagtkrcwaatgcgaaaggtgccctaaatggtaaccataatttagagcaagctaaatcaaatgcaaacactactataaacggmcttcaacatttaacaacwgcwcaaaaagataaattgaaacaacaagtgcaacaagcacaaaatgttgcaggtgtagatactgttaaatcaagtgccaacacattaaatggtgctatgggtacgttaagaaatagcatwcaagataacacagctacgaaaaatggccaaaactatcttgatgctacagramgtaacaaaacaaactataacaatgctgttgatagtgctaatggtgtcattaatgcaacaagcaatccaaatatggatgctaatgcaattaaccaaatcgctacacaagtgacatcaacgaaaaatgcattagatggtacacataatttaacgcaagcgaaacaaacagcaacaaatgccatcgatggtgctactaacttaaataaagcgcaaaaagatgcgttraaagcacaagtkacaagtgcgcaacgtgttgcaaatgtaacaagtatccaacaaactgcaaatgaacttaatacagctatgggtcaattacaacatggtattgatgatgaaaatgcaacaaaacaaactcaaaaatatcgtgacgctgaacaaagtaagaaaactgcttatgatcaagctgtagctgctgcgaaagcaattttaaataaacaaacaggttcmaattcagataaagcagcagttgaccgtgcattacaacaagtaacaagtacgaaagatgcattgaatggkgatgcwaaactggcagaagcgaaagcggcagctaracaaaacttaggyactttaaaccatattacgaatgcacaacgtactgcgttagaaggtcaaatcaatcaagcgacgactgttgatggcgttaatactgtaaaaacaaatgccaatacattagacgrcgcwatgaatagcttacaaggtgcaatcaatgataaagatgckacattaagaaatcaaaattatcttgatgcagatgaatcaaaacgaaatgcatatacgcaagctgtcacagcggctgaaggcattttaaataaacaaacwggtggtaacacatctaaagcagacgttgataatgcattaaatgcagttacaagagcgaaagcggctttaaatggtgctgaaaacttaagaaatgcgaaaacttcagcaacaaatacgattaatggtttacctaacttaacacaattacaaaaagacaacttgaagcatcaagttgaacaagcgcaaaatgtagywggtgtaaatggtgttaaagataaaggtaatacmttaaatactgccatgggtgcattacgtacaagtatccaaaatgataatacgacgaaaacaagtcaaaattatcttgatgcatctgatagcaacaaaaataattacaatactgctgtaaataatgcaaatggtgttattaatgcaacgaacaatccaaatatggatgctaatgcgattaatgrcatggcaaatcaagtcaatacaacaaaagcagcgttaaatggtgyacaaaacttagctcaagctaaaacaaatgcgacgaacacaattaacaacgcrcawgacttaaaccaaaaacaaaaagatgcattaaaaacacaagttaacaatgcacaacgtgtatctgatgcaaataacgttcaacatacagctactgaattgaacggtgcgatgacagcacttaaagcagctattgckgataaagaaagaacaaaagcaagcggtaattatgtcaatgctgatcaagaaaaacgtcaagcgtatgattcaaaagtgactaacgctgaaaatatcattaatggtacaccraatgcgacattaacagtcaatgaygtaaatagtgcgrcwtcacaagtcaatgcggctaaaacagcattaaatggygataacaacttacgtgtwgckaaagarmatgctaayaatacaattgayggcttagcacaattgaataatgyacaaaaagcaaaattaaaagaacaagttcaaagtgcaactacattagawggtgttcaaactgttaaaaatagttctcaaacgttgaatacagcgatgaaaggcttaagagatagtattgcgaatgaagcaacrattaaagcaggtcaaaactacactgacgcaagtccaamtaatcgtaacgagtacgacagcgcagttactgcagcaaaagcaatcattaatcaaacatcgaacccaacgatggaaccaaatactattacgcaagcaacatcacaagtgacaactaaagaacatgcattaaatggtgcgcaaaacttagctcaagctaagacaacwgcgaaaaacaacttraataacttaacatcaattaacaatgcacaaaaagatgcgttaacgcgtarcattgatggtgcaactacagtagctggtgtaaatcaagaaactgcmaaagcaacagaattaaataacgcaatgcayagtttacaaaatggtatcaatgatgagacacaaacaaaacaaactcagaaatacctagatgcwgagccaartaagaaatcagcttatgatcaagcwgtaaatgcagcraaagcaattttaacaaaagctagtggtcaaaatgtagacaaagcagcagttgaacaagcattacaaaatgtgaacagtacgaagacggcgttgaacggtgatgcgaaattaaatgaagctaaagctgctgcgaaacaaacgttaggtacattaacacacattaataatgcacaacgtaatgcgttagataatgaaattacacaagcaacaaatgttgaaggtgttaatacagttaaagccaaagcgcaacaattagatggtgctatgggtcaattagaaacatcaattcgtgataaagacacgacgttacaaagtcaaaattatcaagatgctgatgatgctaaacgaacggcttattctcaagcagtaaatgcagcagcaactattttaaataaaacagctggmggwaatacacctaaagcagatgtygaaagagcaatgcaagctgttrcacaagcmaatactgcattaaacggtattcaaaacttagaacgtgcgaaacaggctgckaacacagcgattacaaaygcttcggacttaaatacaaaacaaaaagaagcattraaagcacaagtaacaagtgcaggacgcgtatctgcagcaaatggtgttgaacatactgcgactgaawtaaatactgcgatgacagctttaaaacgtgcyattgctgataaagctgacacaaaarctagtggtaaytatgtcaatgctgatgcgaataaacgycaagcatatgatgaaaaagtgacagctgcmgaamrta

SEQ ID NO: 11190 - DNA, 5035 bp, Staphylococcus aureus
tcgttartggtacaccaacaccaacgttaacaccatcagatgttacaaatgcagcaacgcaagtaacgaatgcgaagacgcagttaaacggtaatcataatttagaagtagcgaaacaaaatgctaacacagcaattgatggtttaacttctttaaatggtccgcaaaaagcaaaacttaaagaacaagtgggtcaagcgacgacgttgccaaatgttcaaactgttcgtgataatgcacaaacattaaacactgcaatgaaaggtctacgagatagcattgcgaatgaagcaacgattaaagcaggtcaaaactacacagatgcaagtcmwaayaawcrwartgamtacrayartgcagtcactgcagcaaaagcaatcattggtcaaacaactagtccatcaatgawtgcgcaagaaattaatcaagcgaaagaccaagtgacagctaaacaacaagcgttaaacggtcaagaaaacttaagaactgcgcaaacaaatgcgaagcaacatttgaatggcttaagtgacttaactaatgcwcaaaaagawgcrgcgaaacgycaaatcgarggtgcaacgcatgttaatgaagtaacacaagcrcaaaataatgcggaygcattaaatacagctatgacgaacttgaaaaatggtattcaagatcaraatacgattaagcaaggtgttaacttcactgatgcagatgaagcgaaacgtaatgcatatacaaatgcagtgacgcaagctgaacaaattttaaataaagcacaaggtccaaatactgcaaaagacrrtgtygaawctgcgttacaaaatgtacaacgtgctaaaaacgaattgaacggtaatcaaaatgttgcgaaygctaagacaactgcgaaaaatgcattgaataacytwacatcaatyaayaaygcacaaaaagmagcrttgaaatcacaaattgaaggtgckacaacagttgcaggtgtaaatcaagtgtctacaayrgcatctgaattaaatactgcaatgagcaacttacaacgtggtattaaygaygaagcagctacaaaagcagctcagaaatatactgawgcagatagagataaacaaactgcatacaatgatgctgtaacrgcagctaaaacgttattagataaaacagctggywcaaatgamaataaagyagccgttgaacaagcattacaacgtgtgaatactgctaaaacwgcattaaatggtgaygcgcgmttaaatgaagcgaagaacacagctaaacaacaaktagcgacaatgtcacayttaactratgctcaaaaagcaaacttaacakmrcaaatygaamgtggtacractgttgcwggtgttcaaggyatycaagcwaatgcyggtactttaratcaagcaatgaatcaattaagacaaagtattgcttctaaagatgcgactaaatcaagcgaagattatcaagacgcgaatgcagatttacaaaatgcatacaatgatgcggtaactaatgctgaaggtattattagtgcaacgaataaccctgaaatgaatcctgatacaattaaccaaaaagcgagccaagtgaacagtgcgaagtctgcattgaacggtgatgaaaaattagcagcagyaaaacaaactgcgaaatcagatatcggtcgtttgacagacttgaacaatgcacaacgaactgcggcaaatgctgaagtggatcaagcaccaaatcttgcagctgtyacagcggctaaaaataaagcaacatcgttaaacacagcgatgggtaatttgaaacatgcacttgctgaaaaggataatacgaaacgtagtgtcaattacacagatgcggatcaaccaaaacaacaagcgtatgatactgcrgttacacaagcagaagcaattactaatgcwaatggcagyaacgcgaatgaaacammagttcaagcagcrctwaaccaattgaatcaagctaaaaaygacttgaatggtgataataaagttgctcaagcraaagarwcagcraaacgtgcattagcttcatatagtaacttgaataaygcgcaatcaactgcagcaactagtcaaattgacaatgcaacgacagtagcagrygtaactgctgcacaaaatactgctaatgaattaaatacagcaatgggtcaacttcaaaatggtattaatgaccaaaacactgttaaacaacaagtgaactttacagatgctgaccaaggtaagaaagatgcttacacaaatgctgttacgaatgctcaaggtattttagataaagcaaacggtcaaaatatgacaaaagcacaagttgaagctgcattaaatcaagtaacgactgctaagaatgctttaaacggtgatgcaaatgtaagacaagcaaaatcagatgcgaaagcaaayttaggtacattaacacacttaaataatgcacaaaaacaagatttaacatcacaaatcgaaggtgcaacaacagtyaacggtgtaaatagtgttaaaacgaaagcacaagacttagatggtgcaatgcaacgattagagtcagcaatcgcaaataaagatcaaactaaagcgagcgaaaactacatygacgcagatccaactaagaaaacagcatttgataatgcyatcacacaagctgaatcttacttaaataaagatcatggtacgaataaagataagcaagctgttgaacaagcaattcaaagtgtaacgtctactgaaaatgctttgaacggtgacgcgaacttacaaygcgctaaaactgaagcwacacaagctatcgataacttgacacawttgaatacaccrcaaaaaacagcattraaacaacaagtgaaygctgcrcaacgygtatcaggtgtaactgatctgaaaaatagtgctacatcacttrataatgcgatggatcaattaaaacaagsaattgstgatcatgacacaattgtwgctggtggtaattacactaacgcaagtcctgataarcaaggtgcttayactgatgcatataatgctgcgaaraayatygtaaatggttcacctaatgtgattacaaatgcagcagatgttactgcggcaacacaacgtgtcaataatgctgaaacaagtttaaatggtgatwcaaacttagcaactgcgaagcaacaagctaaagatgcattacgtcaaatgacacatttatctgatgcacaaaaacaaagtattactggtcaaattgatagcgcgacacaagtaactggtgtacaaagtgtgaaagacaatgcaacaaatcttgacaatgcaatgaatcaacttcgaaatagtattgcgaataaagatgaagtaaaagcgagtcaaccatatgttgatgcagatacagataaacaaaatgcatacaatacagcagttacaagtgctgaaaatatcattaatgcaacgagtcagccaacacttgatccatctgcagtaacacaagcagctaatcaagtgaacactaacaaaactgcgcttaatggtgcgcaaaacttagcaaataaaaagcaagaaacaactgctaacatcaaccrattaagtcatttaaayaatgctcaaaagcaagatttaaatacacaagtgacaaatgcaccaaatattagcacagtaaatcaagtgaaaactaaagctgaacaattagatcaagcaatggaacgtttaatcaacggaatccaagacaaagatcaagtgaaacaaagtgttaactttacagatgcagatccagaaaaacaaacagcatacaacaatgcggtaactgctgctgaaaatattattaatcaagcaaatggtacaaatgcgaaccaatcacaagttgaagcagcactttcaactgtaacaactactaaacaagcgttgaatggtgatagaaaagtaacagatgctaaaaacaatgcaaaccaaacattatctacgttagataacttaaacaatgcacaaaaaggtgctgttactggaaacatcaatcaagcgcacactgtagctgaagtaacgcaagccattcaaaccgctcaggaactgaatacagcgatgggtaacttgaaaaatagcttgaatgataaagacactacacttggcagtcaaaactttgcagatgcagatccagagaagaaaaatgcatacaatgaagcggttcgtaatgctgaaaatattttaaataaatctacaggtacraacgtgcctaaagatcaagttgaagcagctatgaatcaagtgaatactacaaaagcagcgcttaatggtactcaaaaccttgaaaaagckaaacaacacgcaaatacagcaattgacggtttaagccatttaacaaatgcacaaaaagaggcattaaaacaattggtacaacaatcgactactgttgcagaagcacaaggtaatgaacaaaaagcaaacaatgttgatgcagcaatggacaaattacgtcaaagtattgcagataatgcgacaacaaaacaaaaccaaaattatactgatkmaagtccgaataaaaaggatgcgtacaataatgctgtcacaactgcacaaggtattattgatcaaactacaaacccttcattagatccgactgttatcaatcaagctgctggacaagtaagcacgtctaaaaatgctttaaatggtaatgaaaacttagaggcagcgaagcaacaagcaacgcaatctttaggttcattagacaacttaaataatgcgcaaaaacaagctgttactaatcaaattaatggcgcgcatactgttgatgaagcaaatcaaattaagcaaaatgcgcaaaacttaaatactgcgatgggtaacttgaaacaagcgatagctgataaagatgctacgaaagcaacagttaacttcactgatgcagatcaagcaaaacaacaagcatataacactgcagttacaaatgctgaaaatatcatttcaaaagctaatggtggtaatgcaacacaaactgaagttgaacaagcaatccaacaagtaaatgcagcaaaacaagcattaaatggtaatgccaacgttcaacatgcaaaagacgaagc

SEQ ID NO: 11191 - DNA, 5035 bp, Staphylococcus aureus
acagcattaattaataactctaatgatcttaaccaagcacagaaagatgcattaaaacaacaagtacaaaatgcaactactgtagctggtgtaaacaatgttaaacaaacggcgcaagagttaaacaatgcgatgacacaattaaaacaaggcattgcagataaagaacaaacaaaagctgatggtaactttgtcaatgcagattctgacaagcaaaatgcatataatcaagcagtagcgaaagctgaagcattaattagtggtacgcctgatgttgtcgttacacctagcgaaattactgcagcgttaaataaagttacgcaagctaaaaatgatttaaatggtaatacaaacttagcaacggcgaaacaaaatgttcaacatgctattgatcaattgccaaacttaaaccaagcgcaacgtgatgaatacagcaaacaaatcacgcaagcaacacttgtaccaaacgtcaatgctattcaacaagcggcaacaacgcttaatgacgcgatgacacaattgaaacaaggtattgcgaataaagcacaaattaaaggtagcgagaactatcacgatgctgatactgacaagcaaacagcatatgataatgcagtaacaaaagcagaagaattgttaaaacaaacaacaaatccaacaatggatccaaatacaattcaacaagcattaactaaagtgaatgacacaaatcaagcacttaacggtaatcaaaaattagctgatgccaaacaagatgctaagacaacacttggtacactagatcatttaaatgatgctcaaaaacaagcgctaacaactcaagttgaacaagcaccagatattgcaacagttaataatgttaagcaaaatgctcaaaatctgaataatgctatgactaacttaaacaatgcattacaagataaaactgagacattaaatagcattaactttactgatgcagatcaagctaagaaagatgattatactaatgcggtttcacatgcagaaggtattttatctaaagcaaatggcagcaatgcaagtcaaactgaagtggaacaagcgatgcaacgtgtgaacgaagcgaaacaagcattgaatggtaatgacaatgtacaacgtgcaaaagatgcagcgaaacaagtaattacaaatgcaaatgatttaaatcaagcgcaaaaagatgcattaaaacaacaagtcgatgctgcgcaaactgttgcaaatgtaaacacgattaagcaaacagcacaagatttaaatcaagcaatgacacaattgaaacaaggtattgcagataaagaccaaactaaagcaaatggtaactttgtcaatgctgatactgataagcaaaatgcatataacaatgcggtagcgcatgctgaacaaatcattagtggtacaccaaatgcaaacgtggatccacaacaagtggctcaagcgttacaacaagtgaatcaagctaagggtgatttaaacggtaaccayaacttacaagttgctaaagacaatgcaaatacagccattgatcagttaccaaacttaaatcaaccacaaaaaacagcattaaaagaccaagtgtcgcatgcagaacttgttacaggtgttaatgctattaagcaaaatgctgatgcgttaaataatgcaatgggtacgttgaaacaacaaattcaagcgaatagtcaagtaccacaatcagttgactttacacaagcggatcaagacaaacaacaagcttataacaatgcagctaaccaagcgcaacaaatcgcaaatggcacaccaacacctgtattggcgcctgatacagtaacaaaagcagttacaactatgaatcaagcgaaagatgcattaaacggtgatgaaaaattagcgcaagcgaaacaagatgctttagcaaatcttgatacgttacgtgacttaaatcaaccacaacgtgatgcattacgaaaccaaatcaatcaagcacaagctttagctacagttgaacaaactaaacaaaatgcacaaaatgtgaatacagcaatgggtaacttgaaacaaggtattgcaaataaagatactgtgaaagcaagtgagaactaccacgatgctgatgtcgataagcaaacagcatatacaaatgcagtgtctcaagcggaaggtattatcaatcaaacgacaaatccaacgcttaacccagatgacattactcgtgcattaactcaagtgactgatgctaaaaatagcttaaacggtgaagctaaattagccactgaaaagcaaaatgctaaagatgccgtaagtggaatgacgcatttaaacgatgctcaaaaacaagcattaaaaggtcaaatcgatcaatcgcctgaaattgctacagtgaaccaagttaaacaaacagcaacgagcctagatcaagcaatggatcaattatcacaagctattaatgataaagatcaaatattagcggacggtaattacttaaatgcagatcctgacaaacaaaatgcgtataaacaggcagtagcaaaagctgaagcattattgaataaacaaagtggtactaatgaagtacaagcacaagttgaaagcatcactaatgaagtgaacgcagcgaaacaagcattaaatggtaatgacaatttggcaaatgcaaaacaacaagcaaaacaacaattggcgaacttaacacacttaaatgatgcacaaaaacaatcatttgaaagtcaaattacacaagcgccacttgttacagatgtcactacgattaatcaaaaagcacaaacgttagatcatgcgatggaattattaagaaatagtgttgcggataatcaaacgacattagcgtctgaagattatcatgatgcaactgcgcaaagacaaaatgactataacaaagctgtaacagctgctaataatatcattaatcaaactacatcgcctacgatgaatccagatgatgttaatggtgcaacgacacaagtgaataatacgaaagttgcattagatggtgatgaaaaccttgcagcagctaaacaacaagcaaacaacagacttgatcaattagatcatttgaataatgcgcaaaagcaacagttacaatcacaaattacgcaatcatctgatattgctgcagttaatggtcacaaacaaacagcagaatctttaaatactgcgatgggtaacttaattaatgcgattgcagatcatcaagccgttgaacaacgtggtaacttcatcaatgctgatactgataaacaaactgcttataatacagcggtaaatgaagcagcagcaatgattaacaaacaaactggtcaaaatgcgaaccaaacagaagtagaacaagctattactaaagttcaaacaacacttcaagcgttaaatggagatcataatttacaagttgctaaaacaaatgcgacgcaagcaattgatgttttaacaagcttaaatgatcctcaaaaaacagcattaaaagaccaagttacagctgcaactttagtaactgcagttcatcaaattgaacaaaatgcgaatacgcttaaccaagcaatgcatggtttaagacagagcattcaagataacgcagcaactaaagcaaatagcaaatatatcaacgaagatcaaccagagcaacaaaactatgatcaagctgttcaagccgcaaataatattatcaatgaacaaactgcaacattagataataatgcgattaatcaagtagcggcaactgtgaatacaacgaaagcagcattacatggtgatgtgaaattacaaaatgataaagatcatgctaaacaaacggttagccaattagcacatctaaacaatgcacaaaaacatatggaagatacgttaattgatagtgaaacaactagaacagcagttaagcaagatttgactgaagtacaagcattagatcaacttatggatgcattacaacaaagtattgctgacaaagatgcaacacgtgcgagcagtgcatatgtcaatgcagaaccgaataaaaaacaagcctatgatgaagcagttcaaaatgctgagtctatcattgcaggattaaataatccaactatcaataaaggtaatgtatcaagtgcgactcaagcagtaatatcatctaaaaatgcattagatggtgttgaacgattagctcaagataagcaaactgctggaaattctctaaatcatttagatcaattaacaccagctcaacaacaagcgctagaaaatcaaattaataatgcaacaactygtgataaagtggctgaaatcattgcacaagcgcaagcattaaatgaagcgatgaaagcattaaaagaaagtattaaggatcaaccacaaactgaagcaagtagtaaatttattaacgaggatcaagcgcaaaaagatgcatatacgcaagcagtacaacacgcgaaagatttgattaacaaaacaactgatcctacattagctaaatcaatcattgatcaagcgacacaggcagtgactgatgctaaaaacaatttacatggtgatcaaaaactagctcaagataagcaacgtgcaacagaaacgttaaataacttgtctaacttgaatacaccacaacgtcaagcacttgaaaatcaaatcaataatgcagcaactcgtggtgaagtagcacaaaaattaactgaagcacaagcacttaaccaagcaatggaagctttacgtaatagcattcaagatcaacaacaaacagaatctggtagcaagtttattaatgaagataaaccgcaaaaagatgcttaccaagcagcagttcaaaatgcaaaagatttaattaaccaaacaggtaatccaacgcttgataaagcacaagttgaacaattgacacatgcttttaaacaagctaaagataacctacacggtgatcaaaaacttgcagacgataaacaacatgcggttactgatttaaatcaattaaatggtttgaataatccgcaacgtcaagcacttgaaagccaaataaacaacgcagcaactcgtggcgaagtagcgcaaaaattagctgaagcaaaagcgcttg

SEQ ID NO: 11192 - DNA, 5035 bp, Staphylococcus aureus
atcaagcaatgcaagcattacgaaatagtattcaagatcaacaacaaacggaagcgggtagcaagtttatcaatgaagataaaccgcaaaaagatgcttaccaagcagcagttcaaaatgcaaaagatttaattaaccaaacaggtaatccaacactcgacaaatcacaagtagaacaattaacacaagcagtaacaactgcaaaagataatctacatggtgatcaaaaacttgctcgtgatcaacaacaagcagtaacaactgtaaatgcattgccaaacttaaatcatgcacaacaacaaacattaactgatgctataaatgcagcgcctacaagaacagaggttgcacaacatgttcaaactgctactgaacttgatcacgcgatggaaacattgaaaaataaagttgatcaagtgaatacagataaggctcaaccaaattacactgaagcgtcaactgataaaaaagaagcagtagatcaagcgttacaagctgcacaaagcattacagatccaactaatggttcaaatgcgaataaagacgctgtagaacaagcattaactaagcttcaagaaaaagtgaatgagttaaatggtaatgagagagtcgctgaagctaaaacacaagcgaaacaaactattgaccaattaacacatttaaatgctgatcaaattgcaactgctaaacaaaatattgatcaagcgacgaaacttcaaccaatcgctgaattagtagatcaagcaacgcaattgaaccaatcaatggatcaattacaacaagcagttaatgaacatgctaacgttgagcaaactatagattacacacaagcagattcagataagcaaaaggcttataaacaagcgattgctgatgctgaaaatgtattgaaacaaaatgcgaataagcaacaagtggatcaagcacttcaaaatattttaaatgcaaaacaagcattaaatggtgatgaacgtgtagcacttgctaaaacaaatggtaaacatgacatcgaccaattgaatgcattaaacaatgctcaacaagatggatttaaaggtcgcatcgatcaatcaaacgatttaaatcaaatccaacaaattgtagatgaggctaaggcacttaatcgtgcaatggatcaattgtcacaagaaatcactggcaatgaaggacgcacgaaaggtagcacgaactatgtcaatgcagatacacaagtcaaacaagtatatgatgaagcggttgataaagcgaaacaagcacttgataaatcgtctgggcaaaacttaactgcagaacaagttatcaaattaaatgatgcagtcactgcagctaagaaagcattaaatggtgaagaaagacttaataatcgtaaagctgaagcattacaaagattggatcaattaacacatctaaacaatgctcaaagacaattagcaatccaacaaattaataatgctgaaacgctaaataaagcatctcgagcaattaatagagcaactaaattagataatgcaatgggtgcagtacaacaatatattgacgaacagcaccttggtgttatcagcagcacaaattacatcaatgcagatgacaatttgaaagcaaattatgataatgcaattgcgaatgcagcacatgagttagataaagtgcaaggtaatgcaattgcaaaagctgaagcagagcaattgaaacaaaatattatcgatgctcaaaatgcattaaatggagaccaaaaccttgcaaatgccaaagataaagcaaatgcgtttgttaattcgttaaatggattaaatcaacagcaacaagatcttgcacataaagcaattaacaatgccgatactgtatcagatgtaacagatattgttaataatcaaattgacttaaatgatgcaatggaaacattgaaacatttagttgacaatgaaattccaaatgcagagcaaactgtcaattaccaaaacgctgacgataatgctaaaacaaacttcgatgatgccaaacgtctagcaaatacattgctaaatagtgataacacaaatgtgaatgatatcaatggcgcaatccaagcagtcaatgatgcaatccataatcttaatggtgatcaacgactacaagatgctaaagacaaggcaattcaatcaattaatcaagctttagctaataagctaaaagaaatcgaagcttcaaatgcgacggatcaagacaagcttattgcgaaaaataaagcagaagaattggcaaacagcatcatcaacaacattaataaagcaacaagtaatcaggctgtatctcaagttcaaacagcaggcaaccacgcgattgaacaagtgcatgctaatgaaataccaaaagcaaaaattgatgccaataaagacgttgataagcaagttcaagcattaattgacgaaattgatcgaaatccaaatctaacagataaggaaaaacaagcacttaaagatcgtattaatcaaatacttcaacaaggtcataacgacattaacaatgcgctgactaaagaagaaattgaacaagctaaagcacaacttgcgcaagcattacaagacatcaaagatttagtgaaagctaaagaagatgcgaaacaagatgttgataaacaagttcaagcattaattgacgaaatcgatcaaaatccaaatctaacagataaggaaaaacaagcacttaaagatcgtattaatcaaatacttcaacaaggtcataacggcattaacaatgcgatgactaaagaagaaattgaacaagccaaagcacaacttgcacaagcattaaaagaaattaaagatttagtgaaagctaaagaaaatgcgaaacaagatgttgataaacaagttcaagcattaattgacgaaatcgatcaaaatccaaatctaacagataaggaaaaacaagcgcttaaagatcgaatcaatcaaatactgcaacaaggtcataacgacattaacaatgcgatgactaaagaagaaattgaacaagccaaagcacaacttgcacaagcattacaagacatcaaagatttagtgaaagctaaagaagatgcgaaaaatgcaataaaagccttagctaatgcgaagcgtgatcaaatcaattcaaatccagatttaacacctgagcaaaaagcaaaagcgctcaaagaaattgacgaagctgaaaaacgagcactacaaaacgttgagaatgctcaaactatagatcaattaaatcgaggattaaacttaggtttagatgacattagaaatacacatgtatgggaggttgatgaacaacctgctgtaaatgaaatttttgaagcaacacctgagcaaatcctagttaatggtgaactcattgtacatcgtgatgacatcattacagaacaagatattcttgcacacataaacttaattgatcagctttcagcagaagttattgatacaccatcaactgcaacgatttctgatagcttaacagcaaaagttgaagttacattgcttgatggatcaaaagtgattgttaatgttcctgtaaaagttgtagaaaaagaattgtcagtagtcaaacaacaggcaattgaatcaatcgaaaatgcggcacaacaaaagattgatgaaatcaataatagtgtgacattaacactggaacaaaaagaagctgcaattgcagaagttaataagcttaaacaacaagcaattgatcatgttaacaatgcacctgatgttcattcagttgaagaaattcaacaacaagaacaagcgtatattgaacaatttaatccagaacaatttacgattgaacaagcaaaatcaaatgcaattaaatcgattgaagatgcaattcaacatatgattgatgaaatcaaagctcgtactgatctaacagataaagagaagcaagaagctattgctaagttaaatcaattaaaagaacaagcaattcaagcgattcaacgtgcgcaaagcatcagtgaaataactgagcaattggaacaatttaaagctcaaatgaaagcagctaatccaacagcaaaagaactagctaaacgcaagcaagaagctattagtagaattaaagacttttcaaatgaaaaaataaatagtattcgaaatagtgaaattggcacagctgatgaaaaacaagcagcaatgaatcaaattaacgaaattgtgcttgaaacaattagagatattaataatgcgcatacattacagcaagttgaggctgcattgaacaatggtattgctcgaatttcagcagtacaaattgtaatatctgatcgtgctaaacaatcgtcaagtactggaaatgaatctaatagccatttaacaattggttatggaactgcaaatcatccatttaacagttcgactattggacataaaaagaaacttgatgaagatgatgacattgatccacttcatatgcgtcactttagtaataatttcggtaatgttattaaaaacgctattggtgtggtgggtatctctggcttactagctagtttctggttcttcattgccaaacgtcgtcgtaaagaagatgaagaggaagaattagaaataagagataataataaagattcaataaaagagactttagacgatacaaaacatttaccacttttatttgcgaaacgtcgcagaaaagaagatgaagaagatgttactgttgaagaaaaagattcgctaaataatggcgagtcactcgataaagttaaacatacgccgttcttcttaccaaaacgtcgtcgtaaagaagatgaagaagatgtggaagttacaaatgaaaacacagatgaaaaagtgttgaaagataacgaacattcaccactcttattcgcaaaacgacgcaaagataaagaggaagatgttgaaacaacaactagtattgaatctaaagatgaggacgttcctttattattggctaaaaagaaaaatcaaaaagataaccaatccaaagacaaaaagtcagcatcaaaaaatacttctaaaaaggtagcagctaaaaagaagaaaaagaaatctaagaaaaataaaaaata

SEQ ID NO: 11193 - DNA, 5076 bp, Staphylococcus aureus
agtggatcaaatttagacaaaactgccgttgaaaacgcgttgtcacaagttgctaatgcgaaaggtgccctaaatggtaaccataatttagagcaagctaaatcaaatgcaaacactactataaacggacttcaacatttaacaactgctcaaaaagataaattgaaacaacaagtgcaacaagcacaaaatgttgcaggtgtagatactgttaaatcaagtgccaacacattaaatggtgctatgggtacgttaagaaatagcatacaagataacacagctacgaaaaatggccaaaactatcttgatgctacagaacgtaacaaaacaaactataacaatgctgttgatagtgctaatggtgtcattaatgcaacaagcaatccaaatatggatgctaatgcaattaaccaaatcgctacacaagtgacatcaacgaaaaatgcattagatggtacacataatttaacgcaagcgaaacaaacagcaacaaatgccatcgatggtgctactaacttaaataaagcgcaaaaagatgcgttaaaagcacaagttacaagtgcgcaacgtgttgcaaatgtaacaagtatccaacaaactgcaaatgaacttaatacagctatgggtcaattacaacatggtattgatgatgaaaatgcaacaaaacaaactcaaaaatatcgtgacgctgaacaaagtaagaaaactgcttatgatcaagctgtagctgctgcgaaagcaattttaaataaacaaacaggttcaaattcagataaagcagcagttgaccgtgcattacaacaagtaacaagtacgaaagatgcattgaatggtgatgcaaaactggcagaagcgaaagcggcagctaaacaaaacttaggcactttaaaccatattacgaatgcacaacgtactgacttagaaggccaaatcaatcaagcgacgactgttgatggcgttaatactgtaaaaacaaatgccaatacattagacggcgcaatgaatagcttacaaggttcaatcaatgataaagatgcgacattaagaaatcaaaattatcttgatgcggatgaatcaaaacgaaatgcatatacgcaagctgtcacagcggctgaaggcattttaaataaacaaactggtggtaacacatctaaagcagacgttgataatgcattaaatgcagttacaagagcgaaagcggctttaaatggtgctgacaacttaagaaatgcgaaaacttcagcaacaaatacgattgatggtttacctaacttaacacaattacaaaaagacaacttgaagcatcaagttgaacaagcgcaaaatgtagcaggtgtaaatggtgttaaagataaaggtaatacgttaaatactgccatgggtgcattacgtacaagtatccaaaatgataatacgacgaaaacaagtcaaaattatcttgatgcatctgacagcaacaaaaataattacaatactgctgtaaataatgcaaatggtgttattaatgcaacgaacaatccaaatatggatgctaatgcgattaatggcatggcaaatcaagtcaatacaacaaaagcagcgttaaatggtgcacaaaacttagctcaagctaaaacaaatgcgacgaacacaattaacaacgcacatgacttaaaccaaaaacaaaaagatgcattaaaaacacaagttaacaatgcacaacgtgtatctgatgcaaataacgttcaacacactgcaactgaattgaacagtgcgatgacagcacttaaagcagctattgctgataaagaaagaacaaaagcaagcggtaattatgtcaatgctgatcaagaaaaacgtcaagcgtatgattcaaaagtgactaacgctgaaaatatcattagtggtacaccgaatgcgacattaacagtcaatgacgtaaatagtgcggcatcacaagtcaatgcggctaaaacagcattaaatggtgataacaacttacgtgtagcgaaagagcatgccaacaatacaattgacggcttagcacaattgaataatgcacaaaaagcaaaattaaaagaacaagttcaaagtgcaactacattagatggtgttcaaactgttaaaaatagttctcaaacgttgaatacagcgatgaaaggcttaagagatagtattgcgaatgaagcaacaattaaagcaggtcaaaactacactgacgcaagtccaaataatcgtaacgagtacgacagtgcagttactgcagcaaaagcaatcattaatcaaacatcgaacccaacgatggaaccaaatactattacgcaagtaacatcacaagtgacaactaaagaacaggcattaaatggtgcgcgaaacttagctcaagctaagacaactgcgaaaaacaacttgaataacttaacatcaattaacaatgcacaaaaagatgcgttaacgcgtagcattgatggtgcaacaacagtagctggtgtaaatcaagaaactgcaaaagcaacagaattaaataacgcaatgcatagtttacaaaatggtatcaatgatgagacacaaacaaaacaaactcagaaatacctagatgcagagccaagtaagaaatcagcttatgatcaagcagtaaatgcagcgaaagcaattttaacaaaagctagtggtcaaaatgtagacaaagcagcagttgaacaagcattgcaaaatgtgaacagtacgaagacggcgttgaacggtgatgcgaaattaaatgaagctaaagcagctgcgaaacaaacgttaggtacattaacacacattaataatgcacaacgtacagcgttagacaatgaaattacacaagcaacaaatgttgaaggtgttaatacagttaaagccaaagcgcaacaattagatggtgctatgggtcaattagaaacatcaattcgtgataaagacacgacgttacaaagtcaaaattatcaagatgctgatgatgctaaacgaactgcttattctcaagcagtaaatgcagcagcaactattttaaataaaacagctggcggtaatacacctaaagcagatgttgaaagagcaatgcaagctgttacacaagcaaatactgcattaaacggtattcaaaacttagatcgtgcgaaacaggctgctaacacagcgattacaaatgcttcggacttaaatacaaaacaaaaagaagcattaaaagcacaagtaacaagtgcaggacgtgtatctgcagcaaatggtgttgaacatactgcgactgaattaaatactgcgatgacagctttaaagcgtgccattgctgataaagctgagacaaaagctagtggtaactatgtcaatgctgatgcgaataaacgtcaagcatatgatgaaaaagttacagctgccgaaaatatcgttagtggtacaccaacaccaacgttaacaccagcagatgttacaaatgcagcaacgcaagtaacgaatgctaagacgcagttaaacggtaatcataatttagaagtagcgaaacaaaatgctaacactgcaattgatggtttaacttctttaaatggtccgcaaaaagcaaaacttaaagaacaagtgggtcaagcgacgacgttgccaaatgttcaaactgttcgtgataatgcacaaacattaaacactgcaatgaaaggtctacgagatagcattgcgaatgaagcaacgattaaagcaggtcaaaactacacagatgcaagtcaaaacaaacaaactgactacaacagtgcagtcactgcagcaaaagcaatcattggtcaaacaactagtccatcaatgaatgcgcaagaaattaatcaagcgaaagaccaagtgacagctaaacaacaagcgttaaacggtcaagaaaacttaagaactgcgcaaacaaatgcgaagcaacatttgaacggcttaagtgacttaactgacgctcaaaaagatgcagtgaaacgtcaaatcgaaggtgcaacgcatgttaatgaagtaacacaagcacaaaataatgcggatgcattaaatacagctatgacgaacttgaaaaatggtattcaagatcagaatacgattaagcaaggtgttaacttcactgatgccgacgaagcgaaacgtaatgcatatacaaatgcagtgacgcaagctgaacaaattttaaataaagcacaaggtccaaatacttcaaaagacggtgtcgaaactgcgttagaaaatgtacaacgtgctaaaaacgaattgaacggtaatcaaaatgttgcgaacgctaagacaactgcgaaaaatgcattgaataacctaacatcaattaataatgcacaaaaagaagcattgaaatcacaaattgaaggtgcgacaacagttgcaggtgtaaatcaagtgtctacaacggcatctgaattaaatacagcaatgagcaacttacaaaatggtattaatgatgaagcagctacaaaagcagcgcttaatggtactcaaaaccttgaaaaagctaaacaacacgcaaatacagcaattgacggtttaagccatttaacaaatgcacaaaaagaggcattaaaacaattggtacaacaatcgactactgttgcagaagcacaaggtaatgagcaaaaagcaaacaatgttgatgcagcaatggacaaattacgtcaaagtattgcagataatgcgacaacaaaacaaaaccaaaattatactgatgcaagtcagaataaaaaggatgcgtacaataatgctgtcacaactgcacaaggtattattgatcaaactacaagtccaactttagatccgactgttatcaatcaagctgctggacaagtaagcacaactaaaaatgcattaaatggtaatgaaaacctagaggcagcgaaacaacaagcgtcacaatcattaggttcattagataacttaaataatgcgcaaaaacaaacagttactgatcaaattaatggcgcgcatactgttgatgaagcaaatcaaattaagcaaaatgcgcaaaacttaaatacagcgatgggtaacttgaaacaagcgatagctgacaaagatgctacgaaagcgacagttaacttcactgatgcagat

SEQ ID NO: 11194 - DNA, 5076 bp, Staphylococcus aureus
caagcaaaacaacaagcatataacactgctgttacaaatgctgaaaatatcatttcaaaagctaatggcggcaatgcaacacaagctgaagttgaacaagcaatcaaacaagttaatgctgcaaaacaagcattaaatggtaatgccaacgttcaacatgcaaaagacgaagcaacagcattaattaatagctctaatgaccttaaccaagcacaaaaagacgcattaaaacaacaagttcaaaatgcaactactgtagctggtgtaaacaatgttaaacaaacagcacaagagttaaacaatgctatgacacaattaaaacaaggcattgcagataaagaacaaacaaaagctgatggtaactttgtcaatgcagatcctgataagcaaaatgcatataatcaagcagtagcgaaagctgaagcattaattagtgctacgcctgatgttgtcgttacacctagcgaaattactgcagcgttaaataaagttacgcaagctaaaaatgatttaaatggtaatacaaacttagcaacggcgaaacaaaatgttcaacatgctattgatcaattgccaaacttaaaccaagcgcaacgtgatgaatacagcaaacaaatcacgcaagcaacacttgtaccaaacgtcaatgctattcaacaagcggcgacaacgcttaatgacgcgatgacacaattgaaacaaggtattgcgaataaagcacaaattaaaggtagcgagaactatcacgatgctgatactgacaagcaaacagcatatgataatgcagtaacaaaagcagaagaattgttaaaacaaacaacaaatccaacaatggatccaaatacaattcaacaagcattaactaaagtgaatgacacaaatcaagcacttaacggtaatcaaaaattagctgatgccaaacaagatgctaagacaacacttggtacactagatcatttaaatgatgctcaaaaacaagcgctaacaactcaagttgaacaagcaccagatattgcaacagttaataatgttaagcaaaatgctcaaaatctgaataatgctatgactaacttaaacaatgcattacaagataaaactgagacattaaatagcattaactttactgatgcagatcaagctaagaaagatgcttatactaatgcggtttcacatgcagaaggtattttatctaaagcaaatggcagcaatgcaagtcaaactgaagtggaacaagcgatgcaacgtgtgaacgaagcgaaacaagcattgaatggtaatgacaatgtacaacgtgcaaaagatgcagcgaaacaagtgattacaaatgcaaatgatttaaatcaagcaatgacacaattgaaacaaggtattgcagataaagaccaaactaaagcaaatggtaactttgtcaatgctgatactgataagcaaaatgcttacaacaatgcggtagcacatgctgaacaaataattagtggtacaccaaatgcaaacgtggatccacaacaagtggctcaagcgttacaacaagtgaatcaagctaagggtgatttaaacggtaaccataacttacaagttgctaaagacaatgcaaatacagccattgatcagttaccaaacttaaatcaaccacaaaaaacagcattaaaagaccaagtgtcgcatgcagaacttgttacaggtgttaatgctattaagcaaaatgctgatgcgttaaataatgcaatgggtacattgaaacaacaaattcaagcgaacagtcaagtaccacagtcagttgactttacacaagcggatcaagacaaacaacaagcatataacaatgcggctaaccaagcgcaacaaatcgcaaatggcataccaacacctgtattgacgcctgatacagtaacacaagcagtgacaactatgaatcaagcgaaagatgcattaaacggtgatgaaaaattagcacaagcgaaacaagaagctttagcaaatcttgatacgttacgcgatttaaatcaaccacaacgtgatgcattacgtaaccaaatcaatcaagcacaagcgttagctacagttgaacaaactaaacaaaatgcacaaaatgtgaatacagcaatgagtaacttgaaacaaggtattgcaaacaaagatactgtcaaagcaagtgagaactatcatgatgctgatgccgataagcaaacagcatatacaaatgcagtgtctcaagcggaaggtattatcaatcaaacgacaaatccaacgcttaacccagatgaaataacacgtgcattaactcaagtgactgatgctaaaaatggcttaaacggtgaagctaaattggcaactgaaaagcaaaatgctaaagatgccgtaagtgggatgacgcatttaaacgatgctcaaaaacaagcattaaaaggtcaaatcgatcaatcgcctgaaattgctacagtgaaccaagttaaacaaacagcaacgagcctagatcaagcaatggatcaattatcacaagctattaatgataaagctcaaacattagcggacggtaattacttaaatgcagatcctgacaaacaaaatgcgtataaacaggcagtagcaaaagctgaagcattattgaataaacaaagtggtactaatgaagtacaagcacaagttgaaagcatcactaatgaagtgaacgcagcgaaacaagcattaaatggtaatgacaatttggcaaatgcaaaacaacaagcaaaacaacaattggcgaacttaacacacttaaatgatgcacaaaaacaatcatttgaaagtcaaattacacaagcgccacttgttacagatgtcactacgattaatcaaaaagcacaaacgttagatcatgcgatggaattattaagaaatagtgttgcggataatcaaacgacattagcgtctgaagattatcatgatgcaactgcgcaaagacaaaatgactataaccaagctgtaacagctgctaataatataattaatcaaactacatcgcctacgatgaatccagatgatgttaatggtgcaacgacacaagtgaataatacgaaagttgcattagatggtgatgaaaaccttgcagcagctaaacaacaagcaaacaacagacttgatcaattagatcatttgaataatgcgcaaaagcaacagttacaatcacaaattacgcaatcatctgatattgctgcagttaatggtcacaaacaaacagcagaatctttaaatactgcgatgggtaacttaattaatgcgattgcagatcatcaagccgttgaacaacgtggtaacttcatcaatgctgatactgataaacaaactgcttataatacagcggtaaatgaagcagcagcaatgattaacaaacaaactggtcaaaatgcgaaccaaacagaagtagaacaagctattactaaagttcaaacaacacttcaagcgttaaatggagaccataatttacaagttgctaaaacaaatgcgacgcaagcaattgatgctttaacaagcttaaatgatcctcaaaaaacagcattaaaagaccaagttacagctgcaactttagtaactgcagttcatcaaattgaacaaaatgcgaatacgcttaaccaagcaatgcatggtttaagacagagcattcaagataacgcagcaactaaagcaaatagcaaatatatcaacgaagatcaaccagagcaacaaaactatgatcaagctgttcaagccgcaaataatattatcaatgaacaaactgcaacattagataataatgcgattaatcaagcagcgacaactgtgaatacaacgaaagcagcattacatggtgatgtgaagttacaaaatgataaagatcatgctaagcaaacggttagtcaattagcacatctaaacaatgcacaaaaacatatggaagatacgttaattgatagtgaaacaactagaacagcagttaagcaagatttgactgaagcacaagcattagatcaacttatggatgcattacaacaaagtattgctgacaaagatgcaacacgtgcgagcagtgcatatgtcaatgcagaaccgaataaaaaacaatcctatgatgaagcagttcaaaatgctgagtctatcattgcaggattaaataatccaactatcaataaaggtaatgtatcaagtgcgactcaagcagtaatatcatctaaaaatgcattagatggtgttgaacgattagctcaagataagcaaactgctggaaattctctaaatcatttagatcaattaacaccagctcaacaacaagcgctagaaaatcaaattaataatgcaacaactcgtgataaagtggctgaaatcattgcacaagcgcaagcattaaatgaagcgatgaaagcattaaaagaaagtattaaggatcaaccacaaactgaagcaagtagtaaatttattaacgaggatcaagcgcaaaaagatgcttatacgcaagcagtacaacacgcgaaagatttgattaacaaaacaactgatcctacattagctaaatcaatcattgatcaagcgacacaggcagtgacagatgctaaaaacaatttacatggtgatcaaaaactagctcaagataagcaacgtgcaacagaaacgttaaataacttgtctaacttgaatacaccacaacgtcaagcacttgaaaatcaaattaataatgcagcaactcgtggcgaagtagcacaaaaattaactgaagcacaagcacttaaccaagcaatggaagctttacgtaatagcattcaagatcaacagcaaacggaagcgggtagcaagtttatcaatgaagataaaccacaaaaagatgcttaccaagcagcagttcaaaatgcaaaagatttaattaatcaaactaacaatccaacgcttgataaagcacaagttgaacaattgacacaagctgttaaccaagctaaagataacctacacggtgatcaaaaacttgcagacgataaacaacatgcggttactgatttaaatcaattaaatggtttgaataatccgcaacgtcaagcacttgaaagccaaataaacaacgcagcaactcgt

SEQ ID NO: 11195 - DNA, 5076 bp, Staphylococcus aureus
ggcgaagtagcacaaaaattagctgaagcaaaagcgcttgatcaagcaatgcaagcattacgtaatagtattcaagatcaacaacaaacagaatctggtagcaagtttatcaatgaagataaaccgcaaaaagatgcttaccaagcagcagttcaaaatgcaaaagatttaattaaccaaacaggtaatccaacactcgacaaatcacaagtagaacaattgacacaagcagtaacaactgcaaaagataatctacatggtgatcaaaaacttgctcgtgatcaacaacaagcagtaacaactgtaaatgcattgccaaacttaaatcatgcacaacaacaagcattaactgatgctataaatgcagcgcctacaagaacagaggttgcacaacatgttcaaactgctactgaacttgatcacgcgatggaaacattgaaaaataaagttgatcaagtgaatacagataaggctcaaccaaattacactgaagcgtcaactgataaaaaagaagcagtagatcaagcgttacaagctgcagaaagcattacagatccaactaatggttcaaatgcgaataaagacgctgtagaccaagtattaactaagcttcaagaaaaagaaaatgagttaaatggtaatgagagagtcgctgaagctaaaacacaagcgaaacaaactattgaccaattaacacatttaaatgctgatcaaattgcaactgctaaacaaaacattgatcaagcgacgaaacttcaaccaattgctgaattagtagatcaagcaacgcaattgaatcaatctatggatcaattacaacaagcagttaatgaacatgctaacgttgagcaaactgtagattacacacaagcagattcagataaacaaaatgcttataaacaagctattgctgatgctgaaaatgtattgaaacaaaatgcgaataagcaacaagtggatcaagcacttcaaaatattttaaatgcaaaacaagcattaaatggtgatgaacgtgtagcacttgctaaaacaaatggtaaacatgacatcgaccaattgaatgcattaaacaatgctcaacaagatggatttaaaggtcgcatcgatcaatcaaacgatttaaatcaaatccaacaaattgtagatgaggctaaggcacttaatcgtgcaatggatcaattgtcacaagaaatcactgacaatgaaggacgcacgaaaggtagcacgaactatgtcaatgcagatacacaagtcaaacaagtatatgatgaaacggttgataaagcgaaacaagcacttgataaatcgactggtcaaaacttaactgcaaaacaagttatcaaattaaatgatgcagtcactgcagctaagaaagcattaaatggtgaagaaagacttaataatcgtaaagctgaagcattacaaagattggatcaattaacacatctaaacaatgctcaaagacaattagcaatccaacaaattaataatgctgaaacgctaaataaagcatctcgagcaattaatagagcaactaaattagataatgcaatgggttcagtacaacaatatattgacgaacagcaccttggtgttatcagcagcacaaattacatcaatgcagatgacaatttgaaagcaaattatgataatgcaattgcgaatgcagcacatgagttagataaagtgcaaggtaatgcaattgcaaaagctgaagcagagcaattgaaacaaaatattatcgatgctcaaaatgcattaaatggagaccaaaaccttgcaaatgccaaagataaagcaaatgcgtttgttaattcgttaaatggattaaatcaacagcaacaagatcttgcacataaagcaattaacaatgccgatactgtatcagatgtaacagatattgttaataatcaaattgacttaaatgatgcaatggaaacattgaaacatttagttgacaatgaaattccaaatgcagagcaaactgtcaattaccaaaacgctgacgataatgctaaaacaaacttcgatgatgccaaacgtctagcaaatacattgctaaatagtgataacacaaatgtgaatgatatcaatggcgcaatccaagcagtcaatgatgcaatccataatcttaatggtgatcaacgactacaagatgctaaagacaaggcaattcaatctattaatcaagctttagctaataagctaaaagaaatcgaagcttcaaatgcgacggatcaagacaagcttattgcgaaaaataaagcagaagaattggcaaacagcatcatcaacaacattaataaagcaacaagtaatcaggctgtatctcaagttcaaacagcaggcaaccacgcgattgaacaagtgcatgccaatgaaataccaaaagcaaaaattgatgccaataaagacgttgataagcaagttcaagcattaattgacgaaattgatcgaaatccaaatctaacagataaggaaaaacaagcacttaaagatcgtattaatcaaatacttcaacaaggtcataacggcattaacaatgcgatgactaaagaagaaattgaacaagccaaagcacaacttgcgcaagcattacaagacatcaaagatttagtgaaagctaaagaagatgcgaaacaagatgttgataaacaagttcaagctttaattgacgaaatcgatcaaaatccaaatctaacagataaggaaaaacaagcacttaaagatcgtattaatcaaatacttcaacaaggtcataacgacattaacaatgcgatgacaaaagaagcaattgaacaagcaaaagaacgtttagcgcaagcattgcaagacatcaaagatttagtgaaagctaaagaagatgcgaaaaatgatattgataaacgtgtacaagctttaattgacgaaatcgatcaaaatccaaatctaacagataaggaaaaacaagcacttaaagatcgaattaatcaaatacttcaacaaggtcataacgacattaacaatgcgctgactaaagaagaaattgagcaggcaaaagcacaacttgcacaagcattgcaagacatcaaagatttagtgaaagctaaagaagatgcgaaaaatgcaataaaagccttagctaatgcgaagcgtgatcaaatcaattcaaatccagatttaacacctgagcaaaaagcaaaagcgctcaaagaaattgacgaagctgaaaaacgagcactacaaaacgttgagaatgctcaaactatagatcaattaaatcgaggattaaacttaggtttagatgacattagaaatacacatgtatgggaggttgatgaacaacctgctgtaaatgaaatttttgaagcaacacctgagcaaatcctagttaatggtgaactcattgtacatcgtgatgacatcattacagaacaagatattcttgcacacataaacttaattgatcagctttcagcagaagtcatcgatacaccatcaactgcaacgatttctgatagcttaacagcaaaagttgaagttacattgcttgatggatcaaaagtgattgttaatgttcctgtaaaagttgtagaaaaagaattgtcagtagtcaaacaacaggcaattgaatcaatcgaaaatgcggcacaacaaaagattaatgaaatcaataatagtgtgacattaacactggaacaaaaagaagctgcaattgcagaagttaataagcttaaacaacaagcaattgatcatgttaacaatgcacctgatgttcattcagttgaagaaattcaacaacaagaacaagcgcatattgaacaatttaatccagaacaatttacgattgaacaagcaaaatcaaatgcaattaaatcgattgaagatgcaattcaacatatgattgatgaaatcaaagctcgtactgatctaacagataaagagaagcaagaagctattgctaagttaaatcaattaaaagaacaagcaattcaagcgattcaacgtgcgcaaagcatcgatgaaataagtgagcaattggaacaatttaaagctcaaatgaaagcagctaatccaacagcaaaagaactagctaaacgcaagcaagaagctattagtagaattaaagacttttcaaatgaaaaaataaatagtattcgaaatagtgaaattggcacagctgatgaaaaacaagcagcaatgaatcaaattaacgaaattgtgcttgaaacaattagagatattaataatgcgcatacattacagcaagttgaggctgcattgaacaatggtattgctcgaatttcagcagtacaaattgtaacatctgatcgtgctaaacaatcgtcaagtactggaaatgaatctaatagccatttaacaattggttatggaactgcaaatcatccatttaacagttcgactattggacataaaaagaaacttgatgaagatgatgacattgatccacttcatatgcgtcactttagtaataatttcggtaatgttattaaaaacgctattggtgtggtgggtatctctggtttactagctagtttctggttcttcattgccaaacgtcgtcgtaaagaagatgaagaggaagaattagaaataagagataataataaagattcaataaaagagactttagacgatacaaaacatttaccacttttatttgcgaaacgtcgcagaaaagaagatgaagaagatgttactgttgaagaaaaagattcgctaaataatggcgagtcactcgataaagttaaacatacgccgttcttcttaccaaaacgtcgtcgtaaagaagatgaagaagatgtggaagttacaaatgaaaacacagatgaaaaagtgttgaaagataacgaacattcaccactcttattcgcaaaacgacgcaaagataaagaggaagatgttgaaacaacaactagtattgaatctaaagatgaggacgttcctttattattggctaaaaagaaaaatcaaaaagataaccaatccaaagacaaaaagtcagcatcaaaaaatacttctaaaaaggtagcagctaaaaagaagaaaaagaaagctaagaaaaataaaaaataa

SEQ ID NO: 11196 - DNA, 744 bp, Staphylococcus aureus; identical to SEQ ID NO: 3344

SEQ ID NO: 11197 - DNA, 717 bp, Staphylococcus aureus; identical to SEQ ID NO: 3345

SEQ ID NO: 11198 - DNA, 717 bp, Staphylococcus aureus; identical to SEQ ID NO: 3346

SEQ ID NO: 11199 - DNA, 552 bp, Staphylococcus aureus; identical to SEQ ID NO: 3347

SEQ ID NO: 11200 - DNA, 765 bp, Staphylococcus aureus; identical to SEQ ID NO: 3348

SEQ ID NO: 11201 - DNA, 165 bp, Staphylococcus aureus; identical to SEQ ID NO: 3349

SEQ ID NO: 11202 - DNA, 1770 bp, Staphylococcus aureus; identical to SEQ ID NO: 3350

SEQ ID NO: 11203 - DNA, 1746 bp, Staphylococcus aureus; identical to SEQ ID NO: 3351

SEQ ID NO: 11204 - DNA, 321 bp, Staphylococcus aureus; identical to SEQ ID NO: 3352

SEQ ID NO: 11205 - DNA, 300 bp, Staphylococcus aureus; identical to SEQ ID NO: 3353

SEQ ID NO: 11206 - DNA, 3057 bp, Staphylococcus aureus; identical to SEQ ID NO: 3354

SEQ ID NO: 11207 - DNA, 3117 bp, Staphylococcus aureus; identical to SEQ ID NO: 3355

SEQ ID NO: 11208 - DNA, 2847 bp, Staphylococcus aureus; identical to SEQ ID NO: 3356

SEQ ID NO: 11209 - DNA, 2886 bp, Staphylococcus aureus; identical to SEQ ID NO: 3357

SEQ ID NO: 11210 - DNA, 621 bp, Staphylococcus aureus; identical to SEQ ID NO: 3358

SEQ ID NO: 11211 - DNA, 612 bp, Staphylococcus aureus; identical to SEQ ID NO: 3359

SEQ ID NO: 11212 - DNA, 681 bp, Staphylococcus aureus; identical to SEQ ID NO: 3360

SEQ ID NO: 11213 - DNA, 742 bp, Staphylococcus aureus; identical to SEQ ID NO: 3361

SEQ ID NO: 11214 - DNA, 429 bp, Staphylococcus aureus; identical to SEQ ID NO: 3362

SEQ ID NO: 11215 - DNA, 393 bp, Staphylococcus aureus; identical to SEQ ID NO: 3363

SEQ ID NO: 11216 - DNA, 117 bp, Staphylococcus aureus; identical to SEQ ID NO: 3364

SEQ ID NO: 11217 - DNA, 1431 bp, Staphylococcus aureus; identical to SEQ ID NO: 3365

SEQ ID NO: 11218 - DNA, 405 bp, Staphylococcus aureus; identical to SEQ ID NO: 3366

SEQ ID NO: 11219 - DNA, 2862 bp, Staphylococcus aureus; identical to SEQ ID NO: 3367

SEQ ID NO: 11220 - DNA, 2844 bp, Staphylococcus aureus; identical to SEQ ID NO: 3368

SEQ ID NO: 11221 - DNA, 4158 bp, Staphylococcus aureus; identical to SEQ ID NO: 3369

SEQ ID NO: 11222 - DNA, 3426 bp, Staphylococcus aureus; identical to SEQ ID NO: 3370

SEQ ID NO: 11223 - DNA, 3501 bp, Staphylococcus aureus; identical to SEQ ID NO: 3371

SEQ ID NO: 11224 - DNA, 894 bp, Staphylococcus aureus; identical to SEQ ID NO: 3372

SEQ ID NO: 11225 - DNA, 636 bp, Staphylococcus aureus; identical to SEQ ID NO: 3373

SEQ ID NO: 11226 - DNA, 1515 bp, Staphylococcus aureus; identical to SEQ ID NO: 3374

SEQ ID NO: 11227 - DNA, 861 bp, Staphylococcus aureus; identical to SEQ ID NO: 3375

SEQ ID NO: 11228 - DNA, 498 bp, Staphylococcus aureus; identical to SEQ ID NO: 3376

SEQ ID NO: 11229 - DNA, 468 bp, Staphylococcus aureus; identical to SEQ ID NO: 3377

SEQ ID NO: 11230 - DNA, 463 bp, Staphylococcus aureus; identical to SEQ ID NO: 3378

SEQ ID NO: 11231 - DNA, 461 bp, Staphylococcus aureus; identical to SEQ ID NO: 3379

SEQ ID NO: 11232 - DNA, 157 bp, Staphylococcus aureus; identical to SEQ ID NO: 3380

SEQ ID NO: 11233 - DNA, 318 bp, Staphylococcus aureus; identical to SEQ ID NO: 3381

SEQ ID NO: 11234 - DNA, 1500 bp, Staphylococcus aureus; identical to SEQ ID NO: 3382

SEQ ID NO: 11235 - DNA, 615 bp, Staphylococcus aureus; identical to SEQ ID NO: 3383

SEQ ID NO: 11236 - DNA, 1272 bp, Staphylococcus aureus; identical to SEQ ID NO: 3384

SEQ ID NO: 11237 - DNA, 558 bp, Staphylococcus aureus; identical to SEQ ID NO: 3385

SEQ ID NO: 11238 - DNA, 780 bp, Staphylococcus aureus; identical to SEQ ID NO: 3386

SEQ ID NO: 11239 - DNA, 1617 bp, Staphylococcus aureus; identical to SEQ ID NO: 3387

SEQ ID NO: 11240 - DNA, 366 bp, Staphylococcus aureus; identical to SEQ ID NO: 3388

SEQ ID NO: 11241 - DNA, 397 bp, Staphylococcus aureus; identical to SEQ ID NO: 3389

SEQ ID NO: 11242 - DNA, 435 bp, Staphylococcus aureus; identical to SEQ ID NO: 3390

SEQ ID NO: 11243 - DNA, 2715 bp, Staphylococcus aureus; identical to SEQ ID NO: 3391

SEQ ID NO: 11244 - DNA, 1050 bp, Staphylococcus aureus; identical to SEQ ID NO: 3392

SEQ ID NO: 11245 - DNA, 1467 bp, Staphylococcus aureus; identical to SEQ ID NO: 3393

SEQ ID NO: 11246 - DNA, 225 bp, Staphylococcus aureus; identical to SEQ ID NO: 3394

SEQ ID NO: 11247 - DNA, 225 bp, Staphylococcus aureus; identical to SEQ ID NO: 3395

SEQ ID NO: 11248 - DNA, 1035 bp, Staphylococcus aureus; identical to SEQ ID NO: 3396

SEQ ID NO: 11249 - DNA, 453 bp, Staphylococcus aureus; identical to SEQ ID NO: 3397

SEQ ID NO: 11250 - DNA, 678 bp, Staphylococcus aureus; identical to SEQ ID NO: 3398

SEQ ID NO: 11251 - DNA, 531 bp, Staphylococcus aureus; identical to SEQ ID NO: 3399

SEQ ID NO: 11252 - DNA, 771 bp, Staphylococcus aureus; identical to SEQ ID NO: 3400

SEQ ID NO: 11253 - DNA, 792 bp, Staphylococcus aureus; identical to SEQ ID NO: 3401

SEQ ID NO: 11254 - DNA, 732 bp, Staphylococcus aureus; identical to SEQ ID NO: 3402

SEQ ID NO: 11255 - DNA, 390 bp, Staphylococcus aureus; identical to SEQ ID NO: 3403

SEQ ID NO: 11256 - DNA, 816 bp, Staphylococcus aureus; identical to SEQ ID NO: 3404

SEQ ID NO: 11257 - DNA, 1443 bp, Staphylococcus aureus; identical to SEQ ID NO: 3405

SEQ ID NO: 11258 - DNA, 342 bp, Staphylococcus aureus; identical to SEQ ID NO: 3406

SEQ ID NO: 11259 - DNA, 417 bp, Staphylococcus aureus; identical to SEQ ID NO: 3407

SEQ ID NO: 11260 - DNA, 381 bp, Staphylococcus aureus; identical to SEQ ID NO: 3408

SEQ ID NO: 11261 - DNA, 768 bp, Staphylococcus aureus; identical to SEQ ID NO: 3409

SEQ ID NO: 11262 - DNA, 279 bp, Staphylococcus aureus; identical to SEQ ID NO: 3410

SEQ ID NO: 11263 - DNA, 1356 bp, Staphylococcus aureus; identical to SEQ ID NO: 3411

SEQ ID NO: 11264 - DNA, 2000 bp, Staphylococcus aureus; identical to SEQ ID NO: 3412

SEQ ID NO: 11265 - DNA, 528 bp, Staphylococcus aureus; identical to SEQ ID NO: 3413

SEQ ID NO: 11266 - DNA, 528 bp, Staphylococcus aureus; identical to SEQ ID NO: 3414

SEQ ID NO: 11267 - DNA, 159 bp, Staphylococcus aureus; identical to SEQ ID NO: 3415

SEQ ID NO: 11268 - DNA, 76 bp, Staphylococcus aureus; identical to SEQ ID NO: 3416

SEQ ID NO: 11269 - DNA, 1050 bp, Staphylococcus aureus; identical to SEQ ID NO: 3417

SEQ ID NO: 11270 - DNA, 74 bp, Staphylococcus aureus; identical to SEQ ID NO: 3418

SEQ ID NO: 11271 - DNA, 77 bp, Staphylococcus aureus; identical to SEQ ID NO: 3419

SEQ ID NO: 11272 - DNA, 76 bp, Staphylococcus aureus; identical to SEQ ID NO: 3420

SEQ ID NO: 11273 - DNA, 76 bp, Staphylococcus aureus; identical to SEQ ID NO: 3421

SEQ ID NO: 11274 - DNA, 115 bp, Staphylococcus aureus; identical to SEQ ID NO: 3422

SEQ ID NO: 11275 - DNA, 77 bp, Staphylococcus aureus; identical to SEQ ID NO: 3423

SEQ ID NO: 11276 - DNA, 1555 bp, Staphylococcus aureus; identical to SEQ ID NO: 3424

SEQ ID NO: 11277 - DNA, 324 bp, Staphylococcus aureus; identical to SEQ ID NO: 3425

SEQ ID NO: 11278 - DNA, 315 bp, Staphylococcus aureus; identical to SEQ ID NO: 3426

SEQ ID NO: 11279 - DNA, 201 bp, Staphylococcus aureus; identical to SEQ ID NO: 3427

SEQ ID NO: 11280 - DNA, 405 bp, Staphylococcus aureus; identical to SEQ ID NO: 3428

SEQ ID NO: 11281 - DNA, 1239 bp, Staphylococcus aureus; identical to SEQ ID NO: 3429

SEQ ID NO: 11282 - DNA, 1173 bp, Staphylococcus aureus; identical to SEQ ID NO: 3430

SEQ ID NO: 11283 - DNA, 1899 bp, Staphylococcus aureus; identical to SEQ ID NO: 3431

SEQ ID NO: 11284 - DNA, 453 bp, Staphylococcus aureus; identical to SEQ ID NO: 3432

SEQ ID NO: 11285 - DNA, 174 bp, Staphylococcus aureus; identical to SEQ ID NO: 3433

SEQ ID NO: 11286 - DNA, 387 bp, Staphylococcus aureus; identical to SEQ ID NO: 3434

SEQ ID NO: 11287 - DNA, 186 bp, Staphylococcus aureus; identical to SEQ ID NO: 3435

SEQ ID NO: 11288 - DNA, 1911 bp, Staphylococcus aureus; identical to SEQ ID NO: 3436

SEQ ID NO: 11289 - DNA, 1902 bp, Staphylococcus aureus; identical to SEQ ID NO: 3437

SEQ ID NO: 11290 - DNA, 948 bp, Staphylococcus aureus; identical to SEQ ID NO: 3438

SEQ ID NO: 11291 - DNA, 345 bp, Staphylococcus aureus; identical to SEQ ID NO: 3439

SEQ ID NO: 11292 - DNA, 366 bp, Staphylococcus aureus; identical to SEQ ID NO: 3440

SEQ ID NO: 11293 - DNA, 582 bp, Staphylococcus aureus; identical to SEQ ID NO: 3441

SEQ ID NO: 11294 - DNA, 384 bp, Staphylococcus aureus; identical to SEQ ID NO: 3442

SEQ ID NO: 11295 - DNA, 975 bp, Staphylococcus aureus; identical to SEQ ID NO: 3443

SEQ ID NO: 11296 - DNA, 186 bp, Staphylococcus aureus; identical to SEQ ID NO: 3444

SEQ ID NO: 11297 - DNA, 1677 bp, Staphylococcus aureus; identical to SEQ ID NO: 3445

SEQ ID NO: 11298 - DNA, 732 bp, Staphylococcus aureus; identical to SEQ ID NO: 3446

SEQ ID NO: 11299 - DNA, 1344 bp, Staphylococcus aureus; identical to SEQ ID NO: 3447

SEQ ID NO: 11300 - DNA, 516 bp, Staphylococcus aureus; identical to SEQ ID NO: 3448

SEQ ID NO: 11301 - DNA, 304 bp, Staphylococcus aureus; identical to SEQ ID NO: 3449

SEQ ID NO: 11302 - DNA, 426 bp, Staphylococcus aureus; identical to SEQ ID NO: 3450

SEQ ID NO: 11303 - DNA, 216 bp, Staphylococcus aureus; identical to SEQ ID NO: 3451

SEQ ID NO: 11304 - DNA, 1242 bp, Staphylococcus aureus; identical to SEQ ID NO: 3452

SEQ ID NO: 11305 - DNA, 357 bp, Staphylococcus aureus; identical to SEQ ID NO: 3453

SEQ ID NO: 11306 - DNA, 801 bp, Staphylococcus aureus; identical to SEQ ID NO: 3454

SEQ ID NO: 11307 - DNA, 330 bp, Staphylococcus aureus; identical to SEQ ID NO: 3455

SEQ ID NO: 11308 - DNA, 222 bp, Staphylococcus aureus; identical to SEQ ID NO: 3456

SEQ ID NO: 11309 - DNA, 825 bp, Staphylococcus aureus; identical to SEQ ID NO: 3457

SEQ ID NO: 11310 - DNA, 780 bp, Staphylococcus aureus; identical to SEQ ID NO: 3458

SEQ ID NO: 11311 - DNA, 309 bp, Staphylococcus aureus; identical to SEQ ID NO: 3459

SEQ ID NO: 11312 - DNA, 219 bp, Staphylococcus aureus; identical to SEQ ID NO: 3460

SEQ ID NO: 11313 - DNA, 222 bp, Staphylococcus aureus; identical to SEQ ID NO: 3461

SEQ ID NO: 11314 - DNA, 345 bp, Staphylococcus aureus; identical to SEQ ID NO: 3462

SEQ ID NO: 11315 - DNA, 204 bp, Staphylococcus aureus; identical to SEQ ID NO: 3463

SEQ ID NO: 11316 - DNA, 204 bp, Staphylococcus aureus; identical to SEQ ID NO: 3464

SEQ ID NO: 11317 - DNA, 288 bp, Staphylococcus aureus; identical to SEQ ID NO: 3465

SEQ ID NO: 11318 - DNA, 372 bp, Staphylococcus aureus; identical to SEQ ID NO: 3466

SEQ ID NO: 11319 - DNA, 186 bp, Staphylococcus aureus; identical to SEQ ID NO: 3467

SEQ ID NO: 11320 - DNA, 348 bp, Staphylococcus aureus; identical to SEQ ID NO: 3468

SEQ ID NO: 11321 - DNA, 336 bp, Staphylococcus aureus; identical to SEQ ID NO: 3469

SEQ ID NO: 11322 - DNA, 171 bp, Staphylococcus aureus; identical to SEQ ID NO: 3470

SEQ ID NO: 11323 - DNA, 2415 bp, Staphylococcus aureus; identical to SEQ ID NO: 3471

SEQ ID NO: 11324 - DNA, 1500 bp, Staphylococcus aureus; identical to SEQ ID NO: 3472

SEQ ID NO: 11325 - DNA, 1911 bp, Staphylococcus aureus; identical to SEQ ID NO: 3473

SEQ ID NO: 11326 - DNA, 291 bp, Staphylococcus aureus; identical to SEQ ID NO: 3474

SEQ ID NO: 11327 - DNA, 1584 bp, Staphylococcus aureus; identical to SEQ ID NO: 3475

SEQ ID NO: 11328 - DNA, 825 bp, Staphylococcus aureus; identical to SEQ ID NO: 3476

SEQ ID NO: 11329 - DNA, 3112 bp, Staphylococcus aureus
aaagaaaagaaattgaaaagcttgaaaatcaaagacgtgayatcactgttaaagaattgagtaagactgaaaaagagcaagagcgtattttagtaagaatgcaaagaaacagaaatkcttattcaatagacgaagcgagcaaagcaattaaagaagcagaaaaagcaagaaaagcaaraaaaaaagaagtggayaagcartatgaagatgatgtcattgctataaaaaataacgtcaacctttctaagtctgaaaaagataaattrttagctattgctgatcaaagacataargatgaagtaagaaargcaaaatctaaaaaagatgctgtagtagaygttgttaaaaagcaaaataaagatattgataaagaratggatttatccagtggwcgtgtatataaaaatactgaaaartggtggaatggycttaaaagttggtggtctaacttyagagaagaccaaaagaaraaaagygataartacgctaaagaacaagaagaaacagctcgtagaaacagagaaaatataaagaaatggtttggaaatgcttgggacggcgtaaaaastaaaactggygaagcctttagtaaaatgggcagaaatgctaatcattttggcggcgaaatgaaaaaaatgtggagyggaatcaaaggrattccaagcaaattaagttcargttggagctcagccaaaagttctgtaggataycacactaaggctatagctaatagtactggtaaatggtttggaaaagcttggcaatctgttaaatcgacwacaggaagtatttacaatcaaactaagcaaaagtattcagatgcytcagataaagcttgggcgcattcaaaatctatttggaraggsacatcaaaatggtttagcaaygcatataaaagtgcaaagggytggctaayrgatatggctaataaatckcgckcgaaatgggataatatttctagtacagcwtggtcgaatgcaaaatccgtttggaaaggmacatcgaaatggtttrgtaactcatacaaatctttaaaaggttggactggrgatatgtattcaagagcccacgatcgttttgatgcaatttcaagttcggcatggtctaacgctaaatcagtatttaatggttttagaaaatggctatcmaraacatatgawtggattagagatattggtaaagacatgggaagagctgcggctgatttaggtaaaaatgttgctaataaagctattggcggtttgaatagcatgattggcggtattaataaaatatctaaagccattactgataaaaatctcatcaagccaatacctacattgtctactggtactttagcaggaaagggtgtagctaccgataattcrggagcattaacgcaaccgacatttgctgtattaaatgatagaggttctggaaacgcyccaggyggtggagttcaagaartaattcacagggctgacggaacattccatgcaccccaaggacgagatgtggttgttccactaggagttggrgatagygtaataaatgcyaatgacactctgaagttacagcgkatgggtgttttrccaaarttycatggwggtacgaaaaagaaarawtggmtrgamcaasttamwgrwaatmtwggtaaaaaagcaggrgamttyggwkctamagctaaaaacacagckcataatatcaaaaaaggtgcagaagaaatggttgaagcvgcaggcgataaaatcaaagatggtgcatcttggttaggcgataaaatcggcgatgtgtgggattaygtacaacatccagggaaactagtaaataaagtaatgtcaggtttaaatattaattttggaggcggagctaacgctacagtaaaaattgctaaaggcgcrtactcattgctcaaaaagaaattagtagacaaagtaaaatcgtggtttgaagattttggtggyggaggcgatggaagctatctatttgaccatccaatttggcaaaggtttgggagytacacaggtggacttaactttaatggcggtcgtcactatggtatcgactttsrwatgcctacwggaacgaacatttatgctgttaaaggcggtatagctgataaagtatggactgattacggtggcggtaattctatacaaattaagaccggtgctaacgaatggaactggtatatgcatttatctaagcaattagcaagacaaggccaacgtattaaagctggtcaactgatagggaaatcaggtgctacaggtaatttcgttagaggagcacacttacatttccaattgatgcaagggtcgcatccagggaatgatacagctaaagatccagaaaaatggttgaagtcacttaaaggtagtggcgttcgaagtggttcaggtgttaataaggctgcatctgcttgggcaggcgatatacgtcgtgcagcaaaacgaatgggkgttaatgttacttcggstgaygtaggaaatatyattagcttgattcaacacgaatcaggaggaaatgcaggtataactcaatctagtkcgcttagagacatcaacgttttacagggcaatccagcaaaaggattgcttcaatatatcccacaaacatttagacattatgctgttagaggtcacaacaatatatatagtggttacgatcagttattagcgttctttaacaacagmtattggcgctcacagtttaacccaagaggtggttggtctccaagtggtccaagaagatatgcgaatggtggtttgattacaaagcatcaacttgctgaagtgggtgaaggagataaacaggagatggttatccctttaactagacgtaaacgagcaattcaattaactgaacaggttatgcgcatcatcggtatggatggcaagccaaataacatcactgtaaataatgatacttcwacagttgaaaaattgttraaacaaattgttatgttaagtgataaaggaaataaattaacagatgcrttgattcaaactgtttcttctcaggataataacttaggttctaatgatgcaattagaggtttagaaaaaatattgtcaaaacaaagtgggcatagagcaaatgcaaataattatatgggaggtttgactaatta

SEQ ID NO: 11330 - DNA, 3112 bp, Staphylococcus aureus
ttggaagctagaaaggaggttaatatgaatgaaaaagtagaaggcatgaccttggagctgaaattagaccatttaggtgtccaagaaggcatgaaaggtttaaagcgacaattaggtgttgttaatagtgaaatgaaagctaatctgtcagcatttgataagtctgaaaaatcaatggaaaaatatcaggcgagaattaaggggttaaatgataggcttaaagttcaaaaaaagatgtattctcaagtagaagatgagcttaaacaagttaacgctaattaccaaaaagctaaatccagtgtaaaagatgttgagaaagcatatttaaagttagtagaagccaataaaaaagaaaaattagctcttgataaatctaaagaagccttaaaatcatcgaatacagaacttaaaaaagctgaaaatcaatataaacgtacaaatcaacgtaaacaagatgcgtatcaaaaacttaaacagttgagagatgcagaacaaaagcttaagaatagtaaccaagctactactgcacaactaaaaagagcaagtgacgcagtacagaagcagtccgctaagcataaagcacttgttgaacaatataaacaagaaggcaatcaagttcaaaaactaaaagtgcaaaatgacaatctttcaaaatcaaatgataaaattgaaagttcttacgctaaaactaatactaaattaaagcaaacagaaaaagaatttaatgatttaaacaatactattaagaatcatagcgctaatgtcgcaaaagctgaaacagctgttaataaagaaaaagctgctttaaataatttggagcgttcaatagataaagcttcatccgaaatgaagacttttaacaaagaacaaatgatagctcaaagtcatttcggtaaacttgcaagtcaagcggatgtcatgtcaaagaaatttagttctattggagacaaaatgacttccctgggacgtacaatgacgatgggcgtatctacaccrattactttaggkttaggtgcagcattaaaaacragtgcagactttgaaggscaaatgtctcgagttggagcgattgcrcaagcaagcagtaaagacttraaaagcatgtctaatcaagcrgttgacttaggagctaaaacmagtaaaagtgctaacgaagttgctaaaggtatggaagaattggcagctttaggmtttaatgccaaacaaacaatggaggctatgccaggtgttatcagygcagcagaagcaagtggtgcagaaatggctacaactgcaactgtaatggcttcagcgattaactctttcggtttaaaagcatctgatgcaaatcatgttgctgatttacttgcgagatcagcaaatgatagtgctgcagatattcartayatgggagatgcattraartatgcwggtactccwgcaaaagcattaggagtttcaatagaggacacttcygcagcaattgaagttttatctaactcaggtttagagggktctcaagcaggtactgcmytaagagcttcrtttatyaggctagctaatccaagtaaaartacagctaaggaaatgaaaaaattaggtattcatttgtctgatgctaaaggtsartttgttggmatgggygaattgattagacagttccaagataayatgaaaggcatgacgagagaacaaaaaytagcwacagtggctacaatagttggyactgaagcagcaagtggatttttagccttgattgaagcgggwccagataaaattaatagctatagyaaatcmttraagaaytcyaatggygaaagtaaaaaagcagcwgatttgatgaaagataayctcaaaggygctctggaacaattaggtggcgcttttgaatcrttagcaatygaagtyggtaaagatttaacgcctatgattagagcaggwgcggaaggwttaacaaaattagttgatggatttacacatctycctggttgggttagaaargcttcrgtaggmttagcamtttttggtgcakcwattgghcctgcwgttcttgctggwggsttattaatacgtrcagttggragygckgctaaaggmtatgcrtcattaaatagacgyattgctgaaaatacaathctktcwaatacyaattcaaaagcaatgaaatctttaggtcttcaaacmttatttcttggttctacaacaggaaaaacgtcaaaaggctttaaaggrttagccggagctatgwtgtttaatttaaaacctataaatgttttgaaaaattctgcaaagctagcaattttaccgttcaaacttttgaaaaacggtttaggattagcygcaaaatcyttatttgcagtaagtggaggcgcaagatttgckggtgtagccttaargtttttaacaggacctataggtkctacaataactgctattacaattgcrtataaagtttttaaaaccgcatatgatcgtgtggaatggttcagaaacggtattaacggtttaggagaaactataaagttttttggtggyaaaattattggcggygctgttagraagctaggagagtttaaaaaytatcttggaagtatmggcaaaagcttcaaagaaaagttttcaaargatatgaaagatggttataaatcwttragygacgatgaccttctsaaagtaggagtcaacaagtttaaaggatttatgcaaaccatgggcacagcttctaaaaaagcrtctgatactgtaaaagtgttrgggaaaggtgtttcaaaagaaacagaaaaagctttagaaaaataygtrcaytattctgaagaraayarcagaatcatggaaaaagtacgtttaaactcgggtcaratawcagaagacaaagcaaaaaaacttttgaaaattgaarcggatttatctaataaccttatagctgaaatagaaaaaagaaataaaaaggaactcgaaaaaactcaagaacttattgataagtatagtgcrttcgatgaacaagaaaagcaaaacattttaactmgaactaaagaaaaaaatgacttgcgaattaaaaaagagcaagaactcaatcagaaaatcaaagaattgaaagaaaaagctttragtgatggtcagatttcagaaaatg

SEQ ID NO: 11331 - DNA, 159 bp, Staphylococcus aureus; identical to SEQ ID NO: 3479

SEQ ID NO: 11332 - DNA, 351 bp, Staphylococcus aureus; identical to SEQ ID NO: 3480

SEQ ID NO: 11333 - DNA, 456 bp, Staphylococcus aureus; identical to SEQ ID NO: 3481

SEQ ID NO: 11334 - DNA, 186 bp, Staphylococcus aureus; identical to SEQ ID NO: 3482

SEQ ID NO: 11335 - DNA, 642 bp, Staphylococcus aureus; identical to SEQ ID NO: 3483

SEQ ID NO: 11336 - DNA, 396 bp, Staphylococcus aureus; identical to SEQ ID NO: 3484

SEQ ID NO: 11337 - DNA, 402 bp, Staphylococcus aureus; identical to SEQ ID NO: 3485

SEQ ID NO: 11338 - DNA, 333 bp, Staphylococcus aureus; identical to SEQ ID NO: 3486

SEQ ID NO: 11339 - DNA, 279 bp, Staphylococcus aureus; identical to SEQ ID NO: 3487

SEQ ID NO: 11340 - DNA, 1209 bp, Staphylococcus aureus; identical to SEQ ID NO: 3488

SEQ ID NO: 11341 - DNA, 786 bp, Staphylococcus aureus; identical to SEQ ID NO: 3489

SEQ ID NO: 11342 - DNA, 1239 bp, Staphylococcus aureus; identical to SEQ ID NO: 3490

SEQ ID NO: 11343 - DNA, 1701 bp, Staphylococcus aureus; identical to SEQ ID NO: 3491

SEQ ID NO: 11344 - DNA, 399 bp, Staphylococcus aureus; identical to SEQ ID NO: 3492

SEQ ID NO: 11345 - DNA, 243 bp, Staphylococcus aureus; identical to SEQ ID NO: 3493

SEQ ID NO: 11346 - DNA, 315 bp, Staphylococcus aureus; identical to SEQ ID NO: 3494

SEQ ID NO: 11347 - DNA, 1378 bp, Staphylococcus aureus; identical to SEQ ID NO: 3495

SEQ ID NO: 11348 - DNA, 2448 bp, Staphylococcus aureus; identical to SEQ ID NO: 3496

SEQ ID NO: 11349 - DNA, 234 bp, Staphylococcus aureus; identical to SEQ ID NO: 3497

SEQ ID NO: 11350 - DNA, 405 bp, Staphylococcus aureus; identical to SEQ ID NO: 3498

SEQ ID NO: 11351 - DNA, 186 bp, Staphylococcus aureus; identical to SEQ ID NO: 3499

SEQ ID NO: 11352 - DNA, 1962 bp, Staphylococcus aureus; identical to SEQ ID NO: 3500

SEQ ID NO: 11353 - DNA, 612 bp, Staphylococcus aureus; identical to SEQ ID NO: 3501

SEQ ID NO: 11354 - DNA, 405 bp, Staphylococcus aureus; identical to SEQ ID NO: 3502

SEQ ID NO: 11355 - DNA, 1167 bp, Staphylococcus aureus; identical to SEQ ID NO: 3503

SEQ ID NO: 11356 - DNA, 363 bp, Staphylococcus aureus; identical to SEQ ID NO: 3504

SEQ ID NO: 11357 - DNA, 336 bp, Staphylococcus aureus; identical to SEQ ID NO: 3505

SEQ ID NO: 11358 - DNA, 246 bp, Staphylococcus aureus; identical to SEQ ID NO: 3506

SEQ ID NO: 11359 - DNA, 867 bp, Staphylococcus aureus; identical to SEQ ID NO: 3507

SEQ ID NO: 11360 - DNA, 729 bp, Staphylococcus aureus; identical to SEQ ID NO: 3508

SEQ ID NO: 11361 - DNA, 735 bp, Staphylococcus aureus; identical to SEQ ID NO: 3509

SEQ ID NO: 11362 - DNA, 1413 bp, Staphylococcus aureus; identical to SEQ ID NO: 3510

SEQ ID NO: 11363 - DNA, 1611 bp, Staphylococcus aureus; identical to SEQ ID NO: 3511

SEQ ID NO: 11364 - DNA, 1587 bp, Staphylococcus aureus; identical to SEQ ID NO: 3512

SEQ ID NO: 11365 - DNA, 1575 bp, Staphylococcus aureus; identical to SEQ ID NO: 3513

SEQ ID NO: 11366 - DNA, 1002 bp, Staphylococcus aureus; identical to SEQ ID NO: 3514

SEQ ID NO: 11367 - DNA, 999 bp, Staphylococcus aureus; identical to SEQ ID NO: 3515

SEQ ID NO: 11368 - DNA, 402 bp, Staphylococcus aureus; identical to SEQ ID NO: 3516

SEQ ID NO: 11369 - DNA, 558 bp, Staphylococcus aureus; identical to SEQ ID NO: 3517

SEQ ID NO: 11370 - DNA, 810 bp, Staphylococcus aureus; identical to SEQ ID NO: 3518

SEQ ID NO: 11371 - DNA, 1401 bp, Staphylococcus aureus; identical to SEQ ID NO: 3519

SEQ ID NO: 11372 - DNA, 213 bp, Staphylococcus aureus; identical to SEQ ID NO: 3520

SEQ ID NO: 11373 - DNA, 312 bp, Staphylococcus aureus; identical to SEQ ID NO: 3521

SEQ ID NO: 11374 - DNA, 393 bp, Staphylococcus aureus; identical to SEQ ID NO: 3522

SEQ ID NO: 11375 - DNA, 1005 bp, Staphylococcus aureus; identical to SEQ ID NO: 3523

SEQ ID NO: 11376 - DNA, 669 bp, Staphylococcus aureus; identical to SEQ ID NO: 3524

SEQ ID NO: 11377 - DNA, 726 bp, Staphylococcus aureus; identical to SEQ ID NO: 3525

SEQ ID NO: 11378 - DNA, 1411 bp, Staphylococcus aureus; identical to SEQ ID NO: 3526

SEQ ID NO: 11379 - DNA, 2022 bp, Staphylococcus aureus; identical to SEQ ID NO: 3527

SEQ ID NO: 11380 - DNA, 789 bp, Staphylococcus aureus; identical to SEQ ID NO: 3528

SEQ ID NO: 11381 - DNA, 756 bp, Staphylococcus aureus; identical to SEQ ID NO: 3529

SEQ ID NO: 11382 - DNA, 555 bp, Staphylococcus aureus; identical to SEQ ID NO: 3530

SEQ ID NO: 11383 - DNA, 258 bp, Staphylococcus aureus; identical to SEQ ID NO: 3531

SEQ ID NO: 11384 - DNA, 201 bp, Staphylococcus aureus; identical to SEQ ID NO: 3532

SEQ ID NO: 11385 - DNA, 624 bp, Staphylococcus aureus; identical to SEQ ID NO: 3533

SEQ ID NO: 11386 - DNA, 1017 bp, Staphylococcus aureus; identical to SEQ ID NO: 3534

SEQ ID NO: 11387 - DNA, 850 bp, Staphylococcus aureus; identical to SEQ ID NO: 3535

SEQ ID NO: 11388 - DNA, 1032 bp, Staphylococcus aureus; identical to SEQ ID NO: 3536

SEQ ID NO: 11389 - DNA, 663 bp, Staphylococcus aureus; identical to SEQ ID NO: 3537

SEQ ID NO: 11390 - DNA, 228 bp, Staphylococcus aureus; identical to SEQ ID NO: 3538

SEQ ID NO: 11391 - DNA, 351 bp, Staphylococcus aureus; identical to SEQ ID NO: 3539

SEQ ID NO: 11392 - DNA, 198 bp, Staphylococcus aureus; identical to SEQ ID NO: 3540

SEQ ID NO: 11393 - DNA, 198 bp, Staphylococcus aureus; identical to SEQ ID NO: 3541

SEQ ID NO: 11394 - DNA, 735 bp, Staphylococcus aureus; identical to SEQ ID NO: 3542

SEQ ID NO: 11395 - DNA, 567 bp, Staphylococcus aureus; identical to SEQ ID NO: 3543

SEQ ID NO: 11396 - DNA, 1008 bp, Staphylococcus aureus; identical to SEQ ID NO: 3544

SEQ ID NO: 11397 - DNA, 402 bp, Staphylococcus aureus; identical to SEQ ID NO: 3545

SEQ ID NO: 11398 - DNA, 1362 bp, Staphylococcus aureus; identical to SEQ ID NO: 3546

SEQ ID NO: 11399 - DNA, 549 bp, Staphylococcus aureus; identical to SEQ ID NO: 3547

SEQ ID NO: 11400 - DNA, 411 bp, Staphylococcus aureus; identical to SEQ ID NO: 3548

SEQ ID NO: 11401 - DNA, 345 bp, Staphylococcus aureus; identical to SEQ ID NO: 3549

SEQ ID NO: 11402 - DNA, 315 bp, Staphylococcus aureus; identical to SEQ ID NO: 3550

SEQ ID NO: 11403 - DNA, 624 bp, Staphylococcus aureus; identical to SEQ ID NO: 3551

SEQ ID NO: 11404 - DNA, 2430 bp, Staphylococcus aureus; identical to SEQ ID NO: 3552

SEQ ID NO: 11405 - DNA, 2436 bp, Staphylococcus aureus; identical to SEQ ID NO: 3553

SEQ ID NO: 11406 - DNA, 2457 bp, Staphylococcus aureus; identical to SEQ ID NO: 3554

SEQ ID NO: 11407 - DNA, 438 bp, Staphylococcus aureus; identical to SEQ ID NO: 3555

SEQ ID NO: 11408 - DNA, 741 bp, Staphylococcus aureus; identical to SEQ ID NO: 3556

SEQ ID NO: 11409 - DNA, 174 bp, Staphylococcus aureus; identical to SEQ ID NO: 3557

SEQ ID NO: 11410 - DNA, 306 bp, Staphylococcus aureus; identical to SEQ ID NO: 3558

SEQ ID NO: 11411 - DNA, 636 bp, Staphylococcus aureus; identical to SEQ ID NO: 3559

SEQ ID NO: 11412 - DNA, 588 bp, Staphylococcus aureus; identical to SEQ ID NO: 3560

SEQ ID NO: 11413 - DNA, 627 bp, Staphylococcus aureus; identical to SEQ ID NO: 3561

SEQ ID NO: 11414 - DNA, 780 bp, Staphylococcus aureus; identical to SEQ ID NO: 3562

SEQ ID NO: 11415 - DNA, 171 bp, Staphylococcus aureus; identical to SEQ ID NO: 3563

SEQ ID NO: 11416 - DNA, 1024 bp, Staphylococcus aureus; identical to SEQ ID NO: 3564

SEQ ID NO: 11417 - DNA, 741 bp, Staphylococcus aureus; identical to SEQ ID NO: 3565

SEQ ID NO: 11418 - DNA, 291 bp, Staphylococcus aureus; identical to SEQ ID NO: 3566

SEQ ID NO: 11419 - DNA, 546 bp, Staphylococcus aureus; identical to SEQ ID NO: 3567

SEQ ID NO: 11420 - DNA, 201 bp, Staphylococcus aureus; identical to SEQ ID NO: 3568

SEQ ID NO: 11421 - DNA, 198 bp, Staphylococcus aureus; identical to SEQ ID NO: 3569

SEQ ID NO: 11422 - DNA, 598 bp, Staphylococcus aureus; identical to SEQ ID NO: 3570

SEQ ID NO: 11423 - DNA, 291 bp, Staphylococcus aureus; identical to SEQ ID NO: 3571

SEQ ID NO: 11424 - DNA, 166 bp, Staphylococcus aureus; identical to SEQ ID NO: 3572

SEQ ID NO: 11425 - DNA, 138 bp, Staphylococcus aureus; identical to SEQ ID NO: 3573

SEQ ID NO: 11426 - DNA, 168 bp, Staphylococcus aureus; identical to SEQ ID NO: 3574

SEQ ID NO: 11427 - DNA, 177 bp, Staphylococcus aureus; identical to SEQ ID NO: 3575

SEQ ID NO: 11428 - DNA, 282 bp, Staphylococcus aureus; identical to SEQ ID NO: 3576

SEQ ID NO: 11429 - DNA, 186 bp, Staphylococcus aureus; identical to SEQ ID NO: 3577

SEQ ID NO: 11430 - DNA, 522 bp, Staphylococcus aureus; identical to SEQ ID NO: 3578

SEQ ID NO: 11431 - DNA, 585 bp, Staphylococcus aureus; identical to SEQ ID NO: 3579

SEQ ID NO: 11432 - DNA, 462 bp, Staphylococcus aureus; identical to SEQ ID NO: 3580

SEQ ID NO: 11433 - DNA, 201 bp, Staphylococcus aureus; identical to SEQ ID NO: 3581

SEQ ID NO: 11434 - DNA, 453 bp, Staphylococcus aureus; identical to SEQ ID NO: 3582

SEQ ID NO: 11435 - DNA, 168 bp, Staphylococcus aureus; identical to SEQ ID NO: 3583

SEQ ID NO: 11436 - DNA, 765 bp, Staphylococcus aureus; identical to SEQ ID NO: 3584

SEQ ID NO: 11437 - DNA, 702 bp, Staphylococcus aureus; identical to SEQ ID NO: 3585

SEQ ID NO: 11438 - DNA, 996 bp, Staphylococcus aureus; identical to SEQ ID NO: 3586

SEQ ID NO: 11439 - DNA, 744 bp, Staphylococcus aureus; identical to SEQ ID NO: 3587

SEQ ID NO: 11440 - DNA, 696 bp, Staphylococcus aureus; identical to SEQ ID NO: 3588

SEQ ID NO: 11441 - DNA, 624 bp, Staphylococcus aureus; identical to SEQ ID NO: 3589

SEQ ID NO: 11442 - DNA, 909 bp, Staphylococcus aureus; identical to SEQ ID NO: 3590

SEQ ID NO: 11443 - DNA, 1287 bp, Staphylococcus aureus; identical to SEQ ID NO: 3591

SEQ ID NO: 11444 - DNA, 282 bp, Staphylococcus aureus; identical to SEQ ID NO: 3592

SEQ ID NO: 11445 - DNA, 702 bp, Staphylococcus aureus; identical to SEQ ID NO: 3593

SEQ ID NO: 11446 - DNA, 816 bp, Staphylococcus aureus; identical to SEQ ID NO: 3594

SEQ ID NO: 11447 - DNA, 288 bp, Staphylococcus aureus; identical to SEQ ID NO: 3595

SEQ ID NO: 11448 - DNA, 1656 bp, Staphylococcus aureus; identical to SEQ ID NO: 3596

SEQ ID NO: 11449 - DNA, 266 bp, Staphylococcus aureus; identical to SEQ ID NO: 3597

SEQ ID NO: 11450 - DNA, 816 bp, Staphylococcus aureus; identical to SEQ ID NO: 3598

SEQ ID NO: 11451 - DNA, 225 bp, Staphylococcus aureus; identical to SEQ ID NO: 3599

SEQ ID NO: 11452 - DNA, 297 bp, Staphylococcus aureus; identical to SEQ ID NO: 3600

SEQ ID NO: 11453 - DNA, 222 bp, Staphylococcus aureus; identical to SEQ ID NO: 3601

SEQ ID NO: 11454 - DNA, 659 bp, Staphylococcus aureus; identical to SEQ ID NO: 3602

SEQ ID NO: 11455 - DNA, 208 bp, Staphylococcus aureus; identical to SEQ ID NO: 3603

SEQ ID NO: 11456 - DNA, 1005 bp, Staphylococcus aureus; identical to SEQ ID NO: 3604

SEQ ID NO: 11457 - DNA, 981 bp, Staphylococcus aureus; identical to SEQ ID NO: 3605

SEQ ID NO: 11458 - DNA, 936 bp, Staphylococcus aureus; identical to SEQ ID NO: 3606

SEQ ID NO: 11459 - DNA, 657 bp, Staphylococcus aureus; identical to SEQ ID NO: 3607

SEQ ID NO: 11460 - DNA, 1242 bp, Staphylococcus aureus; identical to SEQ ID NO: 3608

SEQ ID NO: 11461 - DNA, 656 bp, Staphylococcus aureus; identical to SEQ ID NO: 3609

SEQ ID NO: 11462 - DNA, 423 bp, Staphylococcus aureus; identical to SEQ ID NO: 3610

SEQ ID NO: 11463 - DNA, 434 bp, Staphylococcus aureus; identical to SEQ ID NO: 3611

SEQ ID NO: 11464 - DNA, 829 bp, Staphylococcus aureus; identical to SEQ ID NO: 3612

SEQ ID NO: 11465 - DNA, 1977 bp, Staphylococcus aureus; identical to SEQ ID NO: 3613

SEQ ID NO: 11466 - DNA, 1911 bp, Staphylococcus aureus; identical to SEQ ID NO: 3614

SEQ ID NO: 11467 - DNA, 2148 bp, Staphylococcus aureus; identical to SEQ ID NO: 3615

SEQ ID NO: 11468 - DNA, 1939 bp, Staphylococcus aureus; identical to SEQ ID NO: 3616

SEQ ID NO: 11469 - DNA, 1902 bp, Staphylococcus aureus; identical to SEQ ID NO: 3617

SEQ ID NO: 11470 - DNA, 1830 bp, Staphylococcus aureus; identical to SEQ ID NO: 3618

SEQ ID NO: 11471 - DNA, 1356 bp, Staphylococcus aureus; identical to SEQ ID NO: 3619

SEQ ID NO: 11472 - DNA, 144 bp, Staphylococcus aureus; identical to SEQ ID NO: 3620

SEQ ID NO: 11473 - DNA, 906 bp, Staphylococcus aureus; identical to SEQ ID NO: 3621

SEQ ID NO: 11474 - DNA, 924 bp, Staphylococcus aureus; identical to SEQ ID NO: 3622

SEQ ID NO: 11475 - DNA, 951 bp, Staphylococcus aureus; identical to SEQ ID NO: 3623

SEQ ID NO: 11476 - DNA, 919 bp, Staphylococcus aureus; identical to SEQ ID NO: 3624

SEQ ID NO: 11477 - DNA, 957 bp, Staphylococcus aureus; identical to SEQ ID NO: 3625

SEQ ID NO: 11478 - DNA, 915 bp, Staphylococcus aureus; identical to SEQ ID NO: 3626

SEQ ID NO: 11479 - DNA, 918 bp, Staphylococcus aureus; identical to SEQ ID NO: 3627

SEQ ID NO: 11480 - DNA, 930 bp, Staphylococcus aureus; identical to SEQ ID NO: 3628

SEQ ID NO: 11481 - DNA, 909 bp, Staphylococcus aureus; identical to SEQ ID NO: 3629

SEQ ID NO: 11482 - DNA, 768 bp, Staphylococcus aureus; identical to SEQ ID NO: 3630

SEQ ID NO: 11483 - DNA, 132 bp, Staphylococcus aureus; identical to SEQ ID NO: 3631

SEQ ID NO: 11484 - DNA, 618 bp, Staphylococcus aureus; identical to SEQ ID NO: 3632

SEQ ID NO: 11485 - DNA, 567 bp, Staphylococcus aureus; identical to SEQ ID NO: 3633

SEQ ID NO: 11486 - DNA, 558 bp, Staphylococcus aureus; identical to SEQ ID NO: 3634

SEQ ID NO: 11487 - DNA, 472 bp, Staphylococcus aureus; identical to SEQ ID NO: 3635

SEQ ID NO: 11488 - DNA, 1227 bp, Staphylococcus aureus; identical to SEQ ID NO: 3636

SEQ ID NO: 11489 - DNA, 174 bp, Staphylococcus aureus; identical to SEQ ID NO: 3637

SEQ ID NO: 11490 - DNA, 537 bp, Staphylococcus aureus; identical to SEQ ID NO: 3638

SEQ ID NO: 11491 - DNA, 1467 bp, Staphylococcus aureus; identical to SEQ ID NO: 3639

SEQ ID NO: 11492 - DNA, 327 bp, Staphylococcus aureus; identical to SEQ ID NO: 3640

SEQ ID NO: 11493 - DNA, 318 bp, Staphylococcus aureus; identical to SEQ ID NO: 3641

SEQ ID NO: 11494 - DNA, 1474 bp, Staphylococcus aureus; identical to SEQ ID NO: 3642

SEQ ID NO: 11495 - DNA, 2834 bp, Staphylococcus aureus; identical to SEQ ID NO: 3643

SEQ ID NO: 11496 - DNA, 327 bp, Staphylococcus aureus; identical to SEQ ID NO: 3644

SEQ ID NO: 11497 - DNA, 334 bp, Staphylococcus aureus; identical to SEQ ID NO: 3645

SEQ ID NO: 11498 - DNA, 270 bp, Staphylococcus aureus; identical to SEQ ID NO: 3646

SEQ ID NO: 11499 - DNA, 249 bp, Staphylococcus aureus; identical to SEQ ID NO: 3647

SEQ ID NO: 11500 - DNA, 309 bp, Staphylococcus aureus; identical to SEQ ID NO: 3648

SEQ ID NO: 11501 - DNA, 372 bp, Staphylococcus aureus; identical to SEQ ID NO: 3649

SEQ ID NO: 11502 - DNA, 432 bp, Staphylococcus aureus; identical to SEQ ID NO: 3650

SEQ ID NO: 11503 - DNA, 485 bp, Staphylococcus aureus; identical to SEQ ID NO: 3651

SEQ ID NO: 11504 - DNA, 381 bp, Staphylococcus aureus; identical to SEQ ID NO: 3652

SEQ ID NO: 11505 - DNA, 378 bp, Staphylococcus aureus; identical to SEQ ID NO: 3653

SEQ ID NO: 11506 - DNA, 324 bp, Staphylococcus aureus; identical to SEQ ID NO: 3654

SEQ ID NO: 11507 - DNA, 360 bp, Staphylococcus aureus; identical to SEQ ID NO: 3655

SEQ ID NO: 11508 - DNA, 1014 bp, Staphylococcus aureus; identical to SEQ ID NO: 3656

SEQ ID NO: 11509 - DNA, 1675 bp, Staphylococcus aureus; identical to SEQ ID NO: 3657

SEQ ID NO: 11510 - DNA, 1636 bp, Staphylococcus aureus; identical to SEQ ID NO: 3658

SEQ ID NO: 11511 - DNA, 710 bp, Staphylococcus aureus; identical to SEQ ID NO: 3659

SEQ ID NO: 11512 - DNA, 357 bp, Staphylococcus aureus; identical to SEQ ID NO: 3660

SEQ ID NO: 11513 - DNA, 405 bp, Staphylococcus aureus; identical to SEQ ID NO: 3661

SEQ ID NO: 11514 - DNA, 390 bp, Staphylococcus aureus; identical to SEQ ID NO: 3662

SEQ ID NO: 11515 - DNA, 243 bp, Staphylococcus aureus; identical to SEQ ID NO: 3663

SEQ ID NO: 11516 - DNA, 153 bp, Staphylococcus aureus; identical to SEQ ID NO: 3664

SEQ ID NO: 11517 - DNA, 378 bp, Staphylococcus aureus; identical to SEQ ID NO: 3665

SEQ ID NO: 11518 - DNA, 486 bp, Staphylococcus aureus; identical to SEQ ID NO: 3666

SEQ ID NO: 11519 - DNA, 957 bp, Staphylococcus aureus; identical to SEQ ID NO: 3667

SEQ ID NO: 11520 - DNA, 108 bp, Staphylococcus aureus; identical to SEQ ID NO: 3668

SEQ ID NO: 11521 - DNA, 516 bp, Staphylococcus aureus; identical to SEQ ID NO: 3669

SEQ ID NO: 11522 - DNA, 118 bp, Staphylococcus aureus; identical to SEQ ID NO: 3670

SEQ ID NO: 11523 - DNA, 118 bp, Staphylococcus aureus; identical to SEQ ID NO: 3671

SEQ ID NO: 11524 - DNA, 74 bp, Staphylococcus aureus; identical to SEQ ID NO: 3672

SEQ ID NO: 11525 - DNA, 84 bp, Staphylococcus aureus; identical to SEQ ID NO: 3673

SEQ ID NO: 11526 - DNA, 75 bp, Staphylococcus aureus; identical to SEQ ID NO: 3674

SEQ ID NO: 11527 - DNA, 74 bp, Staphylococcus aureus; identical to SEQ ID NO: 3675

SEQ ID NO: 11528 - DNA, 99 bp, Staphylococcus aureus; identical to SEQ ID NO: 3676

SEQ ID NO: 11529 - DNA, 117 bp, Staphylococcus aureus; identical to SEQ ID NO: 3677

SEQ ID NO: 11530 - DNA, 93 bp, Staphylococcus aureus; identical to SEQ ID NO: 3678

SEQ ID NO: 11531 - DNA, 99 bp, Staphylococcus aureus; identical to SEQ ID NO: 3679

SEQ ID NO: 11532 - DNA, 93 bp, Staphylococcus aureus; identical to SEQ ID NO: 3680

SEQ ID NO: 11533 - DNA, 76 bp, Staphylococcus aureus; identical to SEQ ID NO: 3681

SEQ ID NO: 11534 - DNA, 90 bp, Staphylococcus aureus; identical to SEQ ID NO: 3682

SEQ ID NO: 11535 - DNA, 102 bp, Staphylococcus aureus; identical to SEQ ID NO: 3683

SEQ ID NO: 11536 - DNA, 99 bp, Staphylococcus aureus; identical to SEQ ID NO: 3684

SEQ ID NO: 11537 - DNA, 501 bp, Staphylococcus aureus; identical to SEQ ID NO: 3685

SEQ ID NO: 11538 - DNA, 348 bp, Staphylococcus aureus; identical to SEQ ID NO: 3686

SEQ ID NO: 11539 - DNA, 1536 bp, Staphylococcus aureus; identical to SEQ ID NO: 3687

SEQ ID NO: 11540 - DNA, 190 bp, Staphylococcus aureus; identical to SEQ ID NO: 3688

SEQ ID NO: 11541 - DNA, 231 bp, Staphylococcus aureus; identical to SEQ ID NO: 3689

SEQ ID NO: 11542 - DNA, 207 bp, Staphylococcus aureus; identical to SEQ ID NO: 3690

SEQ ID NO: 11543 - DNA, 189 bp, Staphylococcus aureus; identical to SEQ ID NO: 3691

SEQ ID NO: 11544 - DNA, 207 bp, Staphylococcus aureus; identical to SEQ ID NO: 3692

SEQ ID NO: 11545 - DNA, 159 bp, Staphylococcus aureus; identical to SEQ ID NO: 3693

SEQ ID NO: 11546 - DNA, 117 bp, Staphylococcus aureus; identical to SEQ ID NO: 3694

SEQ ID NO: 11547 - DNA, 141 bp, Staphylococcus aureus; identical to SEQ ID NO: 3695

SEQ ID NO: 11548 - DNA, 675 bp, Staphylococcus aureus; identical to SEQ ID NO: 3696

SEQ ID NO: 11549 - DNA, 507 bp, Staphylococcus aureus; identical to SEQ ID NO: 3697

SEQ ID NO: 11550 - DNA, 312 bp, Staphylococcus aureus; identical to SEQ ID NO: 3698

SEQ ID NO: 11551 - DNA, 297 bp, Staphylococcus aureus; identical to SEQ ID NO: 3699

SEQ ID NO: 11552 - DNA, 96 bp, Staphylococcus aureus; identical to SEQ ID NO: 3700

SEQ ID NO: 11553 - DNA, 720 bp, Staphylococcus aureus; identical to SEQ ID NO: 3701

SEQ ID NO: 11554 - DNA, 548 bp, Staphylococcus aureus; identical to SEQ ID NO: 3702

SEQ ID NO: 11555 - DNA, 261 bp, Staphylococcus aureus; identical to SEQ ID NO: 3703

SEQ ID NO: 11556 - DNA, 186 bp, Staphylococcus aureus; identical to SEQ ID NO: 3704

SEQ ID NO: 11557 - DNA, 726 bp, Staphylococcus aureus; identical to SEQ ID NO: 3705

SEQ ID NO: 11558 - DNA, 201 bp, Staphylococcus aureus; identical to SEQ ID NO: 3706

SEQ ID NO: 11559 - DNA, 132 bp, Staphylococcus aureus; identical to SEQ ID NO: 3707

SEQ ID NO: 11560 - DNA, 1041 bp, Staphylococcus aureus; identical to SEQ ID NO: 3708

SEQ ID NO: 11561 - DNA, 444 bp, Staphylococcus aureus; identical to SEQ ID NO: 3709

SEQ ID NO: 11562 - DNA, 186 bp, Staphylococcus aureus; identical to SEQ ID NO: 3710

SEQ ID NO: 11563 - DNA, 378 bp, Staphylococcus aureus; identical to SEQ ID NO: 3711

SEQ ID NO: 11564 - DNA, 912 bp, Staphylococcus aureus; identical to SEQ ID NO: 3712

SEQ ID NO: 11565 - DNA, 591 bp, Staphylococcus aureus; identical to SEQ ID NO: 3713

SEQ ID NO: 11566 - DNA, 474 bp, Staphylococcus aureus; identical to SEQ ID NO: 3714

SEQ ID NO: 11567 - DNA, 123 bp, Staphylococcus aureus; identical to SEQ ID NO: 3715

SEQ ID NO: 11568 - DNA, 474 bp, Staphylococcus aureus; identical to SEQ ID NO: 3716

SEQ ID NO: 11569 - DNA, 648 bp, Staphylococcus aureus; identical to SEQ ID NO: 3717

SEQ ID NO: 11570 - DNA, 402 bp, Staphylococcus aureus; identical to SEQ ID NO: 3718

SEQ ID NO: 11571 - DNA, 1443 bp, Staphylococcus aureus; identical to SEQ ID NO: 3719

SEQ ID NO: 11572 - DNA, 315 bp, Staphylococcus aureus; identical to SEQ ID NO: 3720

SEQ ID NO: 11573 - DNA, 825 bp, Staphylococcus aureus; identical to SEQ ID NO: 3721

SEQ ID NO: 11574 - DNA, 141 bp, Staphylococcus aureus; identical to SEQ ID NO: 3722

SEQ ID NO: 11575 - DNA, 109 bp, Staphylococcus aureus; identical to SEQ ID NO: 3723

SEQ ID NO: 11576 - DNA, 420 bp, Staphylococcus aureus; identical to SEQ ID NO: 3724

SEQ ID NO: 11577 - DNA, 420 bp, Staphylococcus aureus; identical to SEQ ID NO: 3725

SEQ ID NO: 11578 - DNA, 423 bp, Staphylococcus aureus; identical to SEQ ID NO: 3726

SEQ ID NO: 11579 - DNA, 795 bp, Staphylococcus aureus; identical to SEQ ID NO: 3727

SEQ ID NO: 11580 - DNA, 786 bp, Staphylococcus aureus; identical to SEQ ID NO: 3728

SEQ ID NO: 11581 - DNA, 702 bp, Staphylococcus aureus; identical to SEQ ID NO: 3729

SEQ ID NO: 11582 - DNA, 120 bp, Staphylococcus aureus; identical to SEQ ID NO: 3730

SEQ ID NO: 11583 - DNA, 300 bp, Staphylococcus aureus; identical to SEQ ID NO: 3731

SEQ ID NO: 11584 - DNA, 111 bp, Staphylococcus aureus; identical to SEQ ID NO: 3732

SEQ ID NO: 11585 - DNA, 1530 bp, Staphylococcus aureus; identical to SEQ ID NO: 3733

SEQ ID NO: 11586 - DNA, 756 bp, Staphylococcus aureus; identical to SEQ ID NO: 3734

SEQ ID NO: 11587 - DNA, 390 bp, Staphylococcus aureus; identical to SEQ ID NO: 3735

SEQ ID NO: 11588 - DNA, 438 bp, Staphylococcus aureus; identical to SEQ ID NO: 3736

SEQ ID NO: 11589 - DNA, 174 bp, Staphylococcus aureus; identical to SEQ ID NO: 3737

SEQ ID NO: 11590 - DNA, 237 bp, Staphylococcus aureus; identical to SEQ ID NO: 3738

SEQ ID NO: 11591 - DNA, 249 bp, Staphylococcus aureus; identical to SEQ ID NO: 3739

SEQ ID NO: 11592 - DNA, 594 bp, Staphylococcus aureus; identical to SEQ ID NO: 3740

SEQ ID NO: 11593 - DNA, 444 bp, Staphylococcus aureus; identical to SEQ ID NO: 3741

SEQ ID NO: 11594 - DNA, 501 bp, Staphylococcus aureus; identical to SEQ ID NO: 3742

SEQ ID NO: 11595 - DNA, 720 bp, Staphylococcus aureus; identical to SEQ ID NO: 3743

SEQ ID NO: 11596 - DNA, 396 bp, Staphylococcus aureus; identical to SEQ ID NO: 3744

SEQ ID NO: 11597 - DNA, 207 bp, Staphylococcus aureus; identical to SEQ ID NO: 3745

SEQ ID NO: 11598 - DNA, 262 bp, Staphylococcus aureus; identical to SEQ ID NO: 3746

SEQ ID NO: 11599 - DNA, 243 bp, Staphylococcus aureus; identical to SEQ ID NO: 3747

SEQ ID NO: 11600 - DNA, 264 bp, Staphylococcus aureus; identical to SEQ ID NO: 3748

SEQ ID NO: 11601 - DNA, 474 bp, Staphylococcus aureus; identical to SEQ ID NO: 3749

SEQ ID NO: 11602 - DNA, 648 bp, Staphylococcus aureus; identical to SEQ ID NO: 3750

SEQ ID NO: 11603 - DNA, 402 bp, Staphylococcus aureus; identical to SEQ ID NO: 3751

SEQ ID NO: 11604 - DNA, 315 bp, Staphylococcus aureus; identical to SEQ ID NO: 3752

SEQ ID NO: 11605 - DNA, 852 bp, Staphylococcus aureus; identical to SEQ ID NO: 3753

SEQ ID NO: 11606 - DNA, 414 bp, Staphylococcus aureus; identical to SEQ ID NO: 3754

SEQ ID NO: 11607 - DNA, 420 bp, Staphylococcus aureus; identical to SEQ ID NO: 3755

SEQ ID NO: 11608 - DNA, 423 bp, Staphylococcus aureus; identical to SEQ ID NO: 3756

SEQ ID NO: 11609 - DNA, 330 bp, Staphylococcus aureus; identical to SEQ ID NO: 3757

SEQ ID NO: 11610 - DNA, 429 bp, Staphylococcus aureus; identical to SEQ ID NO: 3758

SEQ ID NO: 11611 - DNA, 1530 bp, Staphylococcus aureus; identical to SEQ ID NO: 3759

SEQ ID NO: 11612 - DNA, 504 bp, Staphylococcus aureus; identical to SEQ ID NO: 3760

SEQ ID NO: 11613 - DNA, 327 bp, Staphylococcus aureus; identical to SEQ ID NO: 3761

SEQ ID NO: 11614 - DNA, 327 bp, Staphylococcus aureus; identical to SEQ ID NO: 3762

SEQ ID NO: 11615 - DNA, 120 bp, Staphylococcus aureus; identical to SEQ ID NO: 3763

SEQ ID NO: 11616 - DNA, 420 bp, Staphylococcus aureus; identical to SEQ ID NO: 3764

SEQ ID NO: 11617 - DNA, 420 bp, Staphylococcus aureus; identical to SEQ ID NO: 3765

SEQ ID NO: 11618 - DNA, 486 bp, Staphylococcus aureus; identical to SEQ ID NO: 3766

SEQ ID NO: 11619 - DNA, 825 bp, Staphylococcus aureus; identical to SEQ ID NO: 3767

SEQ ID NO: 11620 - DNA, 594 bp, Staphylococcus aureus; identical to SEQ ID NO: 3768

SEQ ID NO: 11621 - DNA, 237 bp, Staphylococcus aureus; identical to SEQ ID NO: 3769

SEQ ID NO: 11622 - DNA, 243 bp, Staphylococcus aureus; identical to SEQ ID NO: 3770

SEQ ID NO: 11623 - DNA, 321 bp, Staphylococcus aureus; identical to SEQ ID NO: 3771

SEQ ID NO: 11624 - DNA, 1440 bp, Staphylococcus aureus; identical to SEQ ID NO: 3772

SEQ ID NO: 11625 - DNA, 405 bp, Staphylococcus aureus; identical to SEQ ID NO: 3773

SEQ ID NO: 11626 - DNA, 129 bp, Staphylococcus aureus; identical to SEQ ID NO: 3774

SEQ ID NO: 11627 - DNA, 177 bp, Staphylococcus aureus; identical to SEQ ID NO: 3775

SEQ ID NO: 11628 - DNA, 90 bp, Staphylococcus aureus; identical to SEQ ID NO: 3776

SEQ ID NO: 11629 - DNA, 180 bp, Staphylococcus aureus; identical to SEQ ID NO: 3777

SEQ ID NO: 11630 - DNA, 93 bp, Staphylococcus aureus; identical to SEQ ID NO: 3778

SEQ ID NO: 11631 - DNA, 76 bp, Staphylococcus aureus; identical to SEQ ID NO: 3779

SEQ ID NO: 11632 - DNA, 89 bp, Staphylococcus aureus; identical to SEQ ID NO: 3780

SEQ ID NO: 11633 - DNA, 72 bp, Staphylococcus aureus; identical to SEQ ID NO: 3781

SEQ ID NO: 11634 - DNA, 519 bp, Staphylococcus aureus; identical to SEQ ID NO: 3782

SEQ ID NO: 11635 - DNA, 312 bp, Staphylococcus aureus; identical to SEQ ID NO: 3783

SEQ ID NO: 11636 - DNA, 297 bp, Staphylococcus aureus; identical to SEQ ID NO: 3784

SEQ ID NO: 11637 - DNA, 339 bp, Staphylococcus aureus; identical to SEQ ID NO: 3785

SEQ ID NO: 11638 - DNA, 255 bp, Staphylococcus aureus; identical to SEQ ID NO: 3786

SEQ ID NO: 11639 - DNA, 201 bp, Staphylococcus aureus; identical to SEQ ID NO: 3787

SEQ ID NO: 11640 - DNA, 732 bp, Staphylococcus aureus; identical to SEQ ID NO: 3788

SEQ ID NO: 11641 - DNA, 1041 bp, Staphylococcus aureus; identical to SEQ ID NO: 3789

SEQ ID NO: 11642 - DNA, 570 bp, Staphylococcus aureus; identical to SEQ ID NO: 3790

SEQ ID NO: 11643 - DNA, 255 bp, Staphylococcus aureus; identical to SEQ ID NO: 3791

SEQ ID NO: 11644 - DNA, 720 bp, Staphylococcus aureus; identical to SEQ ID NO: 3792

SEQ ID NO: 11645 - DNA, 150 bp, Staphylococcus aureus; identical to SEQ ID NO: 3793

SEQ ID NO: 11646 - DNA, 208 bp, Staphylococcus aureus; identical to SEQ ID NO: 3794

SEQ ID NO: 11647 - DNA, 249 bp, Staphylococcus aureus; identical to SEQ ID NO: 3795

SEQ ID NO: 11648 - DNA, 249 bp, Staphylococcus aureus; identical to SEQ ID NO: 3796

SEQ ID NO: 11649 - DNA, 261 bp, Staphylococcus aureus; identical to SEQ ID NO: 3797

SEQ ID NO: 11650 - DNA, 162 bp, Staphylococcus aureus; identical to SEQ ID NO: 3798

SEQ ID NO: 11651 - DNA, 324 bp, Staphylococcus aureus; identical to SEQ ID NO: 3799

SEQ ID NO: 11652 - DNA, 570 bp, Staphylococcus aureus; identical to SEQ ID NO: 3800

SEQ ID NO: 11653 - DNA, 342 bp, Staphylococcus aureus; identical to SEQ ID NO: 3801

SEQ ID NO: 11654 - DNA, 528 bp, Staphylococcus aureus; identical to SEQ ID NO: 3802

SEQ ID NO: 11655 - DNA, 219 bp, Staphylococcus aureus; identical to SEQ ID NO: 3803

SEQ ID NO: 11656 - DNA, 579 bp, Staphylococcus aureus; identical to SEQ ID NO: 3804

SEQ ID NO: 11657 - DNA, 642 bp, Staphylococcus aureus; identical to SEQ ID NO: 3805

SEQ ID NO: 11658 - DNA, 210 bp, Staphylococcus aureus; identical to SEQ ID NO: 3806

SEQ ID NO: 11659 - DNA, 402 bp, Staphylococcus aureus; identical to SEQ ID NO: 3807

SEQ ID NO: 11660 - DNA, 315 bp, Staphylococcus aureus; identical to SEQ ID NO: 3808

SEQ ID NO: 11661 - DNA, 420 bp, Staphylococcus aureus; identical to SEQ ID NO: 3809

SEQ ID NO: 11662 - DNA, 411 bp, Staphylococcus aureus; identical to SEQ ID NO: 3810

SEQ ID NO: 11663 - DNA, 774 bp, Staphylococcus aureus; identical to SEQ ID NO: 3811

SEQ ID NO: 11664 - DNA, 201 bp, Staphylococcus aureus; identical to SEQ ID NO: 3812

SEQ ID NO: 11665 - DNA, 159 bp, Staphylococcus aureus; identical to SEQ ID NO: 3813

SEQ ID NO: 11666 - DNA, 783 bp, Staphylococcus aureus; identical to SEQ ID NO: 3814

SEQ ID NO: 11667 - DNA, 1893 bp, Staphylococcus aureus; identical to SEQ ID NO: 3815

SEQ ID NO: 11668 - DNA, 1086 bp, Staphylococcus aureus
gtgarggttcaaaggatagaagtggagaataagccgtatccattgtatttattactagataaagaataccagctaawwgaaysmktmwwgaaatttattaaatacttagataatactggtaagtctcctaataccattaaggcatactgctatcatttaaagttgctgtacgagttcatggaacagagaggtgttattcttaatgatattaactttgagttgttagcagacttcgtaggttggttgagatatccttcagcatcaaatgtaattgatcttcagtcaaaaaaagccataagagaagaaacgacagtgaatacaattttaaatgtagttatgagttttcttgattatttaagtagattaggagaatttaaatcaattgatgtatttaaacaagcaaagggaagaaatttcaaaggatttttacatcatgttaataagggtagataccaaaagaatgtcttaaagttaagggttaaaaagaaacagataagaacattgagatcaaaggaagttaagcaaattattgatgcttgtcatacgaaaagagataaattaattttaatgcttatgtatgagggtggtttaagaatcggtgaagtgttatcgcttaggcttgaagatattgtcacttgggacaatcaaatccatttaacacctagagatgttaatgttaatgaagcttatattaaattaaggaaggaaagaacaatacatgtgagtaaagaacttatgtcactttatacagattacttgatatatgagtatagtgaggaattggagcatgattatgtttttatttccttaaaagaaggctattttgggaaaccactaaagtaccaaagtgttcttgatctagttagaagaatagttaaaaggactggaatagaatttacatcacatatgcttcgccacactcacgcaacgcagctaattagggaaggatgggatgttgcgttcgttcaaaagagattaggtcacgcacatgttcagacaacgttaaatacctatgttcatctttcagatcaggatatgaaaaatgagtttaataaatacctcgagagaaaggagcataagaaatga

SEQ ID NO: 11669 - DNA, 153 bp, Staphylococcus aureus; identical to SEQ ID NO: 3817

SEQ ID NO: 11670 - DNA, 132 bp, Staphylococcus aureus; identical to SEQ ID NO: 3818

SEQ ID NO: 11671 - DNA, 240 bp, Staphylococcus aureus; identical to SEQ ID NO: 3819

SEQ ID NO: 11672 - DNA, 162 bp, Staphylococcus aureus; identical to SEQ ID NO: 3820

SEQ ID NO: 11673 - DNA, 249 bp, Staphylococcus aureus; identical to SEQ ID NO: 3821

SEQ ID NO: 11674 - DNA, 165 bp, Staphylococcus aureus; identical to SEQ ID NO: 3822

SEQ ID NO: 11675 - DNA, 153 bp, Staphylococcus aureus; identical to SEQ ID NO: 3823

SEQ ID NO: 11676 - DNA, 228 bp, Staphylococcus aureus; identical to SEQ ID NO: 3824

SEQ ID NO: 11677 - DNA, 150 bp, Staphylococcus aureus; identical to SEQ ID NO: 3825

SEQ ID NO: 11678 - DNA, 168 bp, Staphylococcus aureus; identical to SEQ ID NO: 3826

SEQ ID NO: 11679 - DNA, 213 bp, Staphylococcus aureus; identical to SEQ ID NO: 3827

SEQ ID NO: 11680 - DNA, 201 bp, Staphylococcus aureus; identical to SEQ ID NO: 3828

SEQ ID NO: 11681 - DNA, 339 bp, Staphylococcus aureus; identical to SEQ ID NO: 3829

SEQ ID NO: 11682 - DNA, 195 bp, Staphylococcus aureus; identical to SEQ ID NO: 3830

SEQ ID NO: 11683 - DNA, 315 bp, Staphylococcus aureus; identical to SEQ ID NO: 3831

SEQ ID NO: 11684 - DNA, 225 bp, Staphylococcus aureus; identical to SEQ ID NO: 3832

SEQ ID NO: 11685 - DNA, 351 bp, Staphylococcus aureus; identical to SEQ ID NO: 3833

SEQ ID NO: 11686 - DNA, 156 bp, Staphylococcus aureus; identical to SEQ ID NO: 3834

SEQ ID NO: 11687 - DNA, 123 bp, Staphylococcus aureus; identical to SEQ ID NO: 3835

SEQ ID NO: 11688 - DNA, 393 bp, Staphylococcus aureus; identical to SEQ ID NO: 3836

SEQ ID NO: 11689 - DNA, 522 bp, Staphylococcus aureus; identical to SEQ ID NO: 3837

SEQ ID NO: 11690 - DNA, 129 bp, Staphylococcus aureus; identical to SEQ ID NO: 3838

SEQ ID NO: 11691 - DNA, 213 bp, Staphylococcus aureus; identical to SEQ ID NO: 3839

SEQ ID NO: 11692 - DNA, 1626 bp, Staphylococcus aureus; identical to SEQ ID NO: 3840

SEQ ID NO: 11693 - DNA, 207 bp, Staphylococcus aureus; identical to SEQ ID NO: 3841

SEQ ID NO: 11694 - DNA, 243 bp, Staphylococcus aureus; identical to SEQ ID NO: 3842

SEQ ID NO: 11695 - DNA, 333 bp, Staphylococcus aureus; identical to SEQ ID NO: 3843

SEQ ID NO: 11696 - DNA, 414 bp, Staphylococcus aureus; identical to SEQ ID NO: 3844

SEQ ID NO: 11697 - DNA, 1644 bp, Staphylococcus aureus; identical to SEQ ID NO: 3845

SEQ ID NO: 11698 - DNA, 339 bp, Staphylococcus aureus; identical to SEQ ID NO: 3846

SEQ ID NO: 11699 - DNA, 681 bp, Staphylococcus aureus; identical to SEQ ID NO: 3847

SEQ ID NO: 11700 - DNA, 354 bp, Staphylococcus aureus; identical to SEQ ID NO: 3848

SEQ ID NO: 11701 - DNA, 408 bp, Staphylococcus aureus; identical to SEQ ID NO: 3849

SEQ ID NO: 11702 - DNA, 1350 bp, Staphylococcus aureus; identical to SEQ ID NO: 3850

SEQ ID NO: 11703 - DNA, 2244 bp, Staphylococcus aureus; identical to SEQ ID NO: 3851

SEQ ID NO: 11704 - DNA, 135 bp, Staphylococcus aureus; identical to SEQ ID NO: 3852

SEQ ID NO: 11705 - DNA, 303 bp, Staphylococcus aureus; identical to SEQ ID NO: 3853

SEQ ID NO: 11706 - DNA, 249 bp, Staphylococcus aureus; identical to SEQ ID NO: 3854

SEQ ID NO: 11707 - DNA, 324 bp, Staphylococcus aureus; identical to SEQ ID NO: 3855

SEQ ID NO: 11708 - DNA, 303 bp, Staphylococcus aureus; identical to SEQ ID NO: 3856

SEQ ID NO: 11709 - DNA, 528 bp, Staphylococcus aureus; identical to SEQ ID NO: 3857

SEQ ID NO: 11710 - DNA, 489 bp, Staphylococcus aureus; identical to SEQ ID NO: 3858

SEQ ID NO: 11711 - DNA, 144 bp, Staphylococcus aureus; identical to SEQ ID NO: 3859

SEQ ID NO: 11712 - DNA, 309 bp, Staphylococcus aureus; identical to SEQ ID NO: 3860

SEQ ID NO: 11713 - DNA, 345 bp, Staphylococcus aureus; identical to SEQ ID NO: 3861

SEQ ID NO: 11714 - DNA, 873 bp, Staphylococcus aureus; identical to SEQ ID NO: 3862

SEQ ID NO: 11715 - DNA, 312 bp, Staphylococcus aureus; identical to SEQ ID NO: 3863

SEQ ID NO: 11716 - DNA, 342 bp, Staphylococcus aureus; identical to SEQ ID NO: 3864

SEQ ID NO: 11717 - DNA, 231 bp, Staphylococcus aureus; identical to SEQ ID NO: 3865

SEQ ID NO: 11718 - DNA, 234 bp, Staphylococcus aureus; identical to SEQ ID NO: 3866

SEQ ID NO: 11719 - DNA, 318 bp, Staphylococcus aureus; identical to SEQ ID NO: 3867

SEQ ID NO: 11720 - DNA, 327 bp, Staphylococcus aureus; identical to SEQ ID NO: 3868

SEQ ID NO: 11721 - DNA, 375 bp, Staphylococcus aureus; identical to SEQ ID NO: 3869

SEQ ID NO: 11722 - DNA, 636 bp, Staphylococcus aureus; identical to SEQ ID NO: 3870

SEQ ID NO: 11723 - DNA, 234 bp, Staphylococcus aureus; identical to SEQ ID NO: 3871

SEQ ID NO: 11724 - DNA, 1041 bp, Staphylococcus aureus; identical to SEQ ID NO: 3872

SEQ ID NO: 11725 - DNA, 330 bp, Staphylococcus aureus; identical to SEQ ID NO: 3873

SEQ ID NO: 11726 - DNA, 261 bp, Staphylococcus aureus; identical to SEQ ID NO: 3874

SEQ ID NO: 11727 - DNA, 960 bp, Staphylococcus aureus; identical to SEQ ID NO: 3875

SEQ ID NO: 11728 - DNA, 747 bp, Staphylococcus aureus; identical to SEQ ID NO: 3876

SEQ ID NO: 11729 - DNA, 168 bp, Staphylococcus aureus; identical to SEQ ID NO: 3877

SEQ ID NO: 11730 - DNA, 924 bp, Staphylococcus aureus; identical to SEQ ID NO: 3878

SEQ ID NO: 11731 - DNA, 393 bp, Staphylococcus aureus; identical to SEQ ID NO: 3879

SEQ ID NO: 11732 - DNA, 1725 bp, Staphylococcus aureus; identical to SEQ ID NO: 3880

SEQ ID NO: 11733 - DNA, 273 bp, Staphylococcus aureus; identical to SEQ ID NO: 3881

SEQ ID NO: 11734 - DNA, 807 bp, Staphylococcus aureus; identical to SEQ ID NO: 3882

SEQ ID NO: 11735 - DNA, 555 bp, Staphylococcus aureus; identical to SEQ ID NO: 3883

SEQ ID NO: 11736 - DNA, 4914 bp, Staphylococcus aureus; identical to SEQ ID NO: 3884

SEQ ID NO: 11737 - DNA, 456 bp, Staphylococcus aureus; identical to SEQ ID NO: 3885

SEQ ID NO: 11738 - DNA, 372 bp, Staphylococcus aureus; identical to SEQ ID NO: 3886

SEQ ID NO: 11739 - DNA, 618 bp, Staphylococcus aureus; identical to SEQ ID NO: 3887

SEQ ID NO: 11740 - DNA, 912 bp, Staphylococcus aureus; identical to SEQ ID NO: 3888

SEQ ID NO: 11741 - DNA, 573 bp, Staphylococcus aureus; identical to SEQ ID NO: 3889

SEQ ID NO: 11742 - DNA, 189 bp, Staphylococcus aureus; identical to SEQ ID NO: 3890

SEQ ID NO: 11743 - DNA, 204 bp, Staphylococcus aureus; identical to SEQ ID NO: 3891

SEQ ID NO: 11744 - DNA, 2898 bp, Staphylococcus aureus; identical to SEQ ID NO: 3892

SEQ ID NO: 11745 - DNA, 2163 bp, Staphylococcus aureus; identical to SEQ ID NO: 3893

SEQ ID NO: 11746 - DNA, 602 bp, Staphylococcus aureus; identical to SEQ ID NO: 3894

SEQ ID NO: 11747 - DNA, 930 bp, Staphylococcus aureus; identical to SEQ ID NO: 3895

SEQ ID NO: 11748 - DNA, 339 bp, Staphylococcus aureus; identical to SEQ ID NO: 3896

SEQ ID NO: 11749 - DNA, 1575 bp, Staphylococcus aureus; identical to SEQ ID NO: 3897

SEQ ID NO: 11750 - DNA, 738 bp, Staphylococcus aureus; identical to SEQ ID NO: 3898

SEQ ID NO: 11751 - DNA, 921 bp, Staphylococcus aureus; identical to SEQ ID NO: 3899

SEQ ID NO: 11752 - DNA, 771 bp, Staphylococcus aureus; identical to SEQ ID NO: 3900

SEQ ID NO: 11753 - DNA, 945 bp, Staphylococcus aureus; identical to SEQ ID NO: 3901

SEQ ID NO: 11754 - DNA, 470 bp, Staphylococcus aureus; identical to SEQ ID NO: 3902

SEQ ID NO: 11755 - DNA, 642 bp, Staphylococcus aureus; identical to SEQ ID NO: 3903

SEQ ID NO: 11756 - DNA, 261 bp, Staphylococcus aureus; identical to SEQ ID NO: 3904

SEQ ID NO: 11757 - DNA, 228 bp, Staphylococcus aureus; identical to SEQ ID NO: 3905

SEQ ID NO: 11758 - DNA, 804 bp, Staphylococcus aureus; identical to SEQ ID NO: 3906

SEQ ID NO: 11759 - DNA, 1137 bp, Staphylococcus aureus; identical to SEQ ID NO: 3907

SEQ ID NO: 11760 - DNA, 570 bp, Staphylococcus aureus; identical to SEQ ID NO: 3908

SEQ ID NO: 11761 - DNA, 342 bp, Staphylococcus aureus; identical to SEQ ID NO: 3909

SEQ ID NO: 11762 - DNA, 219 bp, Staphylococcus aureus; identical to SEQ ID NO: 3910

SEQ ID NO: 11763 - DNA, 579 bp, Staphylococcus aureus; identical to SEQ ID NO: 3911

SEQ ID NO: 11764 - DNA, 462 bp, Staphylococcus aureus; identical to SEQ ID NO: 3912

SEQ ID NO: 11765 - DNA, 586 bp, Staphylococcus aureus; identical to SEQ ID NO: 3913

SEQ ID NO: 11766 - DNA, 3415 bp, Staphylococcus aureus
atgggaaataaacaaggttttttaccaaacaagttaaataagtactctatcagaaaattcacagtgggtactgcgtcgttgcttgtgggaacaacacttttttttggaattggaagtgaggcgcaagcagcagaattagatacgatcacaaaagaagatgttaagagccaagacaaaggtgaagcattagacataaaaaatattaaagaatcagaaaaagatgttactactgaagatgacaacaatgcggaagtacaaaatagtgctcagacagttgacaaatcagaaaattccaatgacactgctgttgaatctacgaatgacagtgtgaaaacagatgaaacaaaagaaacatcggaaaataaatctgcacaagatgatgataacattaaagaggactcaaatactcaagaagaatcaacgaatacatcatcacaatcttctgaagttcctcaaactaaaaaagacacaaatgaaacatcagaaacagcaatagatgaagatgcatctaccaaagaacaaaataataaagacaacgatactgcacaagatgatgataacattaaagaggactcaaatactcaagaagaatcaacgaatacatcatcacaatcttctgaagttcctcaaactaaaaaagaacaaccagacaaatcatctaattcaattaaagagccagataaacaacaagaagaagtagcaaaagaagaaaaagctattactgaaatagctgataaaaataaagaattagaattaaagaataataaaactgataaaaatgaagaatctgaattagaaagtaacttatcttcttcagaaaataagaaggatacagttgaatctttcttaaatagtcaactgtccgattcagaaaccaaaaaaatcatggaaaatgctaacattgactatgataaagcaacagatgaagaaattaatacagaaattttaagagcgtcattaattgaaatggcgaacaataagaaaaaaacagaaactttagcaacaccacaaagaactatgttccgtgctatggctacaccaacagcattgcgtgcagcagttaaccaagatgaagaactacaaaaatctttaggttacacagataattatacatttgcttcaatgttatttgatccaggtaaattagattctgatgacgcattaaatagtaatataattccatttgacctacatagttacatgtcaggagcaaactctggaaacagatataaaattgatttgaaattagatccaattattgctgagcatgtcactaaaatttcagcgaatccttctggaagcaataaacccgttgagtttgtaagaaataaagatgaaaatggtaatctaacagatacttgggaagtcaactttattcgtgcaaatgatggtttatttggaggtgcagaaattctttcacaatatactgctaagaatggcaaaatagaattggacgatacagttggtaatatcatatctaacgctggcaatttatctaataataaattgaatcatcaggtgtttgttcgagattctagagaaaataaaattgttcgtacttctgaaagcagtggttatttcttaacaaaagctgatgatgatttagttaatttagaaaataatgtatctacagaaaataataatgcatttaaagcaagtagcggttcagctacatataatgaaaacgttggagaatttggtggtattttaattgaccaacaaatcatgaagaacggtattttctcatatagtaaaacaaaagctaaccaatgggcatacaattatcaaattgataaagacttactaccctatatcgaaggtgtagaattgcaccaatacgattataaaggcttaaatggttttgacaaaaattatgatgcaaaaaataaagttgctgacttaaccattgacgaggttggtaatggcacaattacgagtgacaatttaaataaactaatcgaatttaataatgcattaccagaaactgtaggcgttagagtcgtacttaaattgaataaaagcgtaaataacattttaacaaaagatgcaaaatatgattcagaaggtaatttgattagagaaacaacaaaacaaaaagaagatttcacatttgctggttatttaacagatagtaaaggggcattaattaataatactttaggcacttcaacactagcgctacaagattatgataaagatggtttattagatagatatgaacgtcaattatcattatctgatgcagaaaacgaagatactgatggcgatggtaagaatgatggcgatgaagttgtaaattataaaacatcgccacttgtaggcaaaccgcaagcagcagatattacaacagaagacacagtcgtttctggttctgttcctcttaaagaaggtgcagcaacacaaacagctaaagtaattaatgcagagggtacaacagttggtacagcaactgtaaattcagatggtcattctcagtgtcaattccaaattcaccagaaggcacctatactattgcaattgattcaccaaattatgataatggatgaagtaaacacttttgaaattgttgataattctaaactaccagcaccatctattaatcctgttgacgataacgatcaacaaattgttgtaaatggtacgtcaggttcaactgtgacagtaacagatagtaataataatgttttaggtactgtaacaattccagcagatgatacaagtgcagcaattaatgttgatactcctttagaagcaggtacagtattaacttcaacagctagtaaggacggcaaaacaagtgatgtatctgatcaaatcacagtaacagatgcgacagcgccagatgcaccaacattagatgaagtaaatacagatgcaacacaagttacaggtcaagcagaaccaaattcaacagttaaattaacgttccctgatggcacaactgctacgggtactgcagatgatcaagggaattacacaattgatattccatccaatgttgacctaaacggtggcgaagagctacaagtaacggcaactgacaaagacggcaatacttctgaaccaagctcagcgaacgttacagacacaactgctcctgatgcaccaacggtgaatgatgtgactagtgacgctactcaagttacaggtcaagcagaaccaaattcaacagttaaattaacgttccctgatggcacaactgctacgggtactgcagatgatcaagggaattacacaattgatattccatccaatgttgacctaaacggtggcgaagagctacaagtaacggcaactgacaaagacggcaatacttctgaaccaagctcagcgaacgttacagacacaactgctcctgatgcaccaacggtgaatgatgtgactagtgacgctactcaagttacaggtcaagcag

SEQ ID NO: 11767 - DNA, 3415 bp, Staphylococcus aureus
aaccaaattcaacagttaaattaacgttccctgatggcacaactgctacaggtactgcagatgatcaagggaattacacaattgatattccatccaatgttgacctaaacggtggcgaagagctacaagtaacggcaactgacaaagacggcaatacttctgaaccaagctcagcgaacgttacagacacaactgctcctgatgcaccaacggtgaatgatgtgactagtgacgctactcaagttacaggtcaagcagaaccaaattcaacagttaaattaacgttccctgatggcacaactgctacgggtactgcagatgatcaagggaattacacaattgatattccatccaatgttgacctaaacggtggcgaagagctacaagtaacggcaactgacaaagacggcaatacttctgaaccaagctcagcgaacgttacagacacaactgctcctgatgcaccaacggtgaatgatgtgactagtgacgctactcaagttacaggtcaagcagaaccaaattcaacagttaaattaacgttccctgatggcacaactgctacgggtactgcagatgatcaagggaattacacaattgatattccatccaatgttgacctaaacggtggcgaagagctacaagtaacggcaactgacaaagacggcaatacttctgaaccaagctcagcgaacgttacagacacaactgctcctgatgcaccaacggtgaatgatgtgactagtgacgctactcaagttacaggtcaagcagaaccaaattcaacagttaaattaacgttccctgatggcacaactgctacgggtactgcagatgatcaagggaattacacaattgatattccatccaatgttgacctaaacggtggcgaagagctacaagtaacggcaactgacaaagacggcaatacttctgaaccaagctcagcgaacgttacagacacaactgctcctgatgcaccaacggtgaatgatgtgactagtgacgctactcaagttacaggtcaagcagaaccaaattcaacagttaaattaacgttccctgatggcacaactgctacgggtactgcagatgatcaagggaattacacaattgatattccatccaatgttgacctaaacggtggcgaagagctacaagtaacggcaactgacaaagacggcaatacttctgaaccaagctcagcgaacgttacagacacaactgctcctgatgcaccaacggtgaatgatgtgactagtgacgctactcaagttacaggtcaagcagaaccaaattcaacagttaaattaacgttccctgatggcacaactgctacgggtactgcagatgatcaagggaattacacaattgatattccatccaatggtgacctaaacggtggcgaagagctacaagtaacggcaactgacaaagacggcaatacttctgaaccaagctcagcgaacgttacagacacaactgcttctgatgcaccaacggtgaatgatgtgactagtgacgctactcaagttacaggtcaagcagaaccaaattcaacagttaaattaacgttccctgatggcacaactgctacgggtactgcagatgatcaagggaattacacaattgatattccatccaatgttgacctaaacggtggcgaagagctacaagtaacggcaactgacaaagacggcaatacttctgaaccaagctcagcgaacgttacagacacaactgctcctgatgcaccaacggtgaatgatgtgactagtgacgctactcaagttacaggtcaagcagaaccaaattcaacagttaaattaacgttccctgatggcacaactgctacgggtactgcagatgatcaagggaattacacaattgatattccatccaatgttgacctaaacggtggcgaagagctacaagtaacggcaactgacaaagacggcaatacttctgaaccaaagctcacgaacgttacagacacaactgcttctgatgcaccaacggtgaatgatgtgactagtgacgcttctcaagttacaggtcaagcagaaccaaattcaacagttaaattaacgttccctgatggcacaactgctacgggtactgcagatgatcaagggaattacacaattgatattccatccaatgttgacctaaacggtggcgaagagctacaagtaacggcaactgacaaagacggcaatacttctgaaccaagctcagcgaacgttacagacacaactgctcctgatgcaccaacggtgaatgatgtgactagtgacgctactcaagttacaggtcaagcagaaccaaattcaacagttaaattaacgttccctgatggcacaactgctacgggtactgcagatgatcaagggaattacacaattgatattccatccaatggtgacctaaacggtggcgaaaagctacaagtaacggcaactgacaaagacggcaatacttctgaaccaagctcagcgaacgttacagacacaactgctcctgatgcaccaacggtgaatgatgtgactagtgacgctactcaagttacaggtcaagcagaaccaaattcaacagttaaattaacgttccctgatggcacaactgctacgggtactgcagatgatcaagggaattacacaattgatattccatccaatgttgacctaaacggtggcgaagagctacaagtaacggcaactgacaaagacggcaatacttctgaaccaagctcagcgaacgttacagacacaactgctcctgatgcaccaacggtgaatgatgtgactagtgacgctactcaagttacaggtcaagcagaaccaaattcaacagttaaattaacgttccctgatggcacaactgctacgggtactgcagatgatcaagggaattacacaattgatattccatccaatgttgacctaaacggtggcgaagagctacaagtaacggcaactgacaaagacggcaatacttctgaaagtaccaatacgactataatcgattctgatgacaactctgataacggaaataattcaggtgctggagacacttcagattctgatgacaactctggtaacggagataattcaggtgctggagacaattcagattctgatgacaactctgataacggaaataattcaggtgctggagacaattcagattctgatgacaactctgataacgaagataattcaagctctaacaaagattcaattaatcaagactcaaatgtaaatagtaatgatagtaaacatgataaacaaaatgaattaccagaaacgggtgaaaaagaagtacgtaatggtacattatttggaacgttatttgctggtttaggttctctattattatttaccaaacgtcgtagaaaagaaaatgataaaaaata

SEQ ID NO: 11768 - DNA, 144 bp, Staphylococcus aureus; identical to SEQ ID NO: 3916

SEQ ID NO: 11769 - DNA, 3948 bp, Staphylococcus aureus; identical to SEQ ID NO: 3917

SEQ ID NO: 11770 - DNA, 1755 bp, Staphylococcus aureus; identical to SEQ ID NO: 3918

SEQ ID NO: 11771 - DNA, 639 bp, Staphylococcus aureus; identical to SEQ ID NO: 3919

SEQ ID NO: 11772 - DNA, 114 bp, Staphylococcus aureus; identical to SEQ ID NO: 3920

SEQ ID NO: 11773 - DNA, 1405 bp, Staphylococcus aureus; identical to SEQ ID NO: 3921

SEQ ID NO: 11774 - DNA, 1431 bp, Staphylococcus aureus; identical to SEQ ID NO: 3922

SEQ ID NO: 11775 - DNA, 1365 bp, Staphylococcus aureus; identical to SEQ ID NO: 3923

SEQ ID NO: 11776 - DNA, 1470 bp, Staphylococcus aureus; identical to SEQ ID NO: 3924

SEQ ID NO: 11777 - DNA, 1410 bp, Staphylococcus aureus; identical to SEQ ID NO: 3925

SEQ ID NO: 11778 - DNA, 1383 bp, Staphylococcus aureus; identical to SEQ ID NO: 3926

SEQ ID NO: 11779 - DNA, 1467 bp, Staphylococcus aureus; identical to SEQ ID NO: 3927

SEQ ID NO: 11780 - DNA, 1431 bp, Staphylococcus aureus; identical to SEQ ID NO: 3928

SEQ ID NO: 11781 - DNA, 1377 bp, Staphylococcus aureus; identical to SEQ ID NO: 3929

SEQ ID NO: 11782 - DNA, 1359 bp, Staphylococcus aureus; identical to SEQ ID NO: 3930

SEQ ID NO: 11783 - DNA, 1386 bp, Staphylococcus aureus; identical to SEQ ID NO: 3931

SEQ ID NO: 11784 - DNA, 1383 bp, Staphylococcus aureus; identical to SEQ ID NO: 3932

SEQ ID NO: 11785 - DNA, 186 bp, Staphylococcus aureus; identical to SEQ ID NO: 3933

SEQ ID NO: 11786 - DNA, 753 bp, Staphylococcus aureus; identical to SEQ ID NO: 3934

SEQ ID NO: 11787 - DNA, 666 bp, Staphylococcus aureus; identical to SEQ ID NO: 3935

SEQ ID NO: 11788 - DNA, 162 bp, Staphylococcus aureus; identical to SEQ ID NO: 3936

SEQ ID NO: 11789 - DNA, 321 bp, Staphylococcus aureus; identical to SEQ ID NO: 3937

SEQ ID NO: 11790 - DNA, 372 bp, Staphylococcus aureus; identical to SEQ ID NO: 3938

SEQ ID NO: 11791 - DNA, 756 bp, Staphylococcus aureus; identical to SEQ ID NO: 3939

SEQ ID NO: 11792 - DNA, 528 bp, Staphylococcus aureus; identical to SEQ ID NO: 3940

SEQ ID NO: 11793 - DNA, 426 bp, Staphylococcus aureus; identical to SEQ ID NO: 3941

SEQ ID NO: 11794 - DNA, 153 bp, Staphylococcus aureus; identical to SEQ ID NO: 3942

SEQ ID NO: 11795 - DNA, 285 bp, Staphylococcus aureus; identical to SEQ ID NO: 3943

SEQ ID NO: 11796 - DNA, 174 bp, Staphylococcus aureus; identical to SEQ ID NO: 3944

SEQ ID NO: 11797 - DNA, 402 bp, Staphylococcus aureus; identical to SEQ ID NO: 3945

SEQ ID NO: 11798 - DNA, 372 bp, Staphylococcus aureus; identical to SEQ ID NO: 3946

SEQ ID NO: 11799 - DNA, 1218 bp, Staphylococcus aureus; identical to SEQ ID NO: 3947

SEQ ID NO: 11800 - DNA, 1452 bp, Staphylococcus aureus; identical to SEQ ID NO: 3948

SEQ ID NO: 11801 - DNA, 963 bp, Staphylococcus aureus; identical to SEQ ID NO: 3949

SEQ ID NO: 11802 - DNA, 597 bp, Staphylococcus aureus; identical to SEQ ID NO: 3950

SEQ ID NO: 11803 - DNA, 825 bp, Staphylococcus aureus; identical to SEQ ID NO: 3951

SEQ ID NO: 11804 - DNA, 327 bp, Staphylococcus aureus; identical to SEQ ID NO: 3952

SEQ ID NO: 11805 - DNA, 315 bp, Staphylococcus aureus; identical to SEQ ID NO: 3953

SEQ ID NO: 11806 - DNA, 336 bp, Staphylococcus aureus; identical to SEQ ID NO: 3954

SEQ ID NO: 11807 - DNA, 351 bp, Staphylococcus aureus; identical to SEQ ID NO: 3955

SEQ ID NO: 11808 - DNA, 438 bp, Staphylococcus aureus; identical to SEQ ID NO: 3956

SEQ ID NO: 11809 - DNA, 147 bp, Staphylococcus aureus; identical to SEQ ID NO: 3957

SEQ ID NO: 11810 - DNA, 561 bp, Staphylococcus aureus; identical to SEQ ID NO: 3958

SEQ ID NO: 11811 - DNA, 495 bp, Staphylococcus aureus; identical to SEQ ID NO: 3959

SEQ ID NO: 11812 - DNA, 342 bp, Staphylococcus aureus; identical to SEQ ID NO: 3960

SEQ ID NO: 11813 - DNA, 2970 bp, Staphylococcus aureus; identical to SEQ ID NO: 3961

SEQ ID NO: 11814 - DNA, 936 bp, Staphylococcus aureus; identical to SEQ ID NO: 3962

SEQ ID NO: 11815 - DNA, 1887 bp, Staphylococcus aureus; identical to SEQ ID NO: 3963

SEQ ID NO: 11816 - DNA, 1899 bp, Staphylococcus aureus; identical to SEQ ID NO: 3964

SEQ ID NO: 11817 - DNA, 1824 bp, Staphylococcus aureus; identical to SEQ ID NO: 3965

SEQ ID NO: 11818 - DNA, 717 bp, Staphylococcus aureus; identical to SEQ ID NO: 3966

SEQ ID NO: 11819 - DNA, 1875 bp, Staphylococcus aureus; identical to SEQ ID NO: 3967

SEQ ID NO: 11820 - DNA, 276 bp, Staphylococcus aureus; identical to SEQ ID NO: 3968

SEQ ID NO: 11821 - DNA, 1413 bp, Staphylococcus aureus; identical to SEQ ID NO: 3969

SEQ ID NO: 11822 - DNA, 180 bp, Staphylococcus aureus; identical to SEQ ID NO: 3970

SEQ ID NO: 11823 - DNA, 483 bp, Staphylococcus aureus; identical to SEQ ID NO: 3971

SEQ ID NO: 11824 - DNA, 456 bp, Staphylococcus aureus; identical to SEQ ID NO: 3972

SEQ ID NO: 11825 - DNA, 969 bp, Staphylococcus aureus; identical to SEQ ID NO: 3973

SEQ ID NO: 11826 - DNA, 486 bp, Staphylococcus aureus; identical to SEQ ID NO: 3974

SEQ ID NO: 11827 - DNA, 369 bp, Staphylococcus aureus; identical to SEQ ID NO: 3975

SEQ ID NO: 11828 - DNA, 582 bp, Staphylococcus aureus; identical to SEQ ID NO: 3976

SEQ ID NO: 11829 - DNA, 834 bp, Staphylococcus aureus; identical to SEQ ID NO: 3977

SEQ ID NO: 11830 - DNA, 774 bp, Staphylococcus aureus; identical to SEQ ID NO: 3978

SEQ ID NO: 11831 - DNA, 1470 bp, Staphylococcus aureus; identical to SEQ ID NO: 3979

SEQ ID NO: 11832 - DNA, 1239 bp, Staphylococcus aureus; identical to SEQ ID NO: 3980

SEQ ID NO: 11833 - DNA, 744 bp, Staphylococcus aureus; identical to SEQ ID NO: 3981

SEQ ID NO: 11834 - DNA, 666 bp, Staphylococcus aureus; identical to SEQ ID NO: 3982

SEQ ID NO: 11835 - DNA, 1176 bp, Staphylococcus aureus; identical to SEQ ID NO: 3983

SEQ ID NO: 11836 - DNA, 1350 bp, Staphylococcus aureus; identical to SEQ ID NO: 3984

SEQ ID NO: 11837 - DNA, 1275 bp, Staphylococcus aureus; identical to SEQ ID NO: 3985

SEQ ID NO: 11838 - DNA, 1143 bp, Staphylococcus aureus; identical to SEQ ID NO: 3986

SEQ ID NO: 11839 - DNA, 687 bp, Staphylococcus aureus; identical to SEQ ID NO: 3987

SEQ ID NO: 11840 - DNA, 768 bp, Staphylococcus aureus; identical to SEQ ID NO: 3988

SEQ ID NO: 11841 - DNA, 1800 bp, Staphylococcus aureus; identical to SEQ ID NO: 3989

SEQ ID NO: 11842 - DNA, 1323 bp, Staphylococcus aureus; identical to SEQ ID NO: 3990

SEQ ID NO: 11843 - DNA, 1191 bp, Staphylococcus aureus; identical to SEQ ID NO: 3991

SEQ ID NO: 11844 - DNA, 519 bp, Staphylococcus aureus; identical to SEQ ID NO: 3992

SEQ ID NO: 11845 - DNA, 1068 bp, Staphylococcus aureus; identical to SEQ ID NO: 3993

SEQ ID NO: 11846 - DNA, 1005 bp, Staphylococcus aureus; identical to SEQ ID NO: 3994

SEQ ID NO: 11847 - DNA, 639 bp, Staphylococcus aureus; identical to SEQ ID NO: 3995

SEQ ID NO: 11848 - DNA, 169 bp, Staphylococcus aureus; identical to SEQ ID NO: 3996

SEQ ID NO: 11849 - DNA, 1269 bp, Staphylococcus aureus; identical to SEQ ID NO: 3997

SEQ ID NO: 11850 - DNA, 1212 bp, Staphylococcus aureus; identical to SEQ ID NO: 3998

SEQ ID NO: 11851 - DNA, 180 bp, Staphylococcus aureus; identical to SEQ ID NO: 3999

SEQ ID NO: 11852 - DNA, 136 bp, Staphylococcus aureus; identical to SEQ ID NO: 4000

SEQ ID NO: 11853 - DNA, 870 bp, Staphylococcus aureus; identical to SEQ ID NO: 4001

SEQ ID NO: 11854 - DNA, 536 bp, Staphylococcus aureus; identical to SEQ ID NO: 4002

SEQ ID NO: 11855 - DNA, 465 bp, Staphylococcus aureus; identical to SEQ ID NO: 4003

SEQ ID NO: 11856 - DNA, 324 bp, Staphylococcus aureus; identical to SEQ ID NO: 4004

SEQ ID NO: 11857 - DNA, 1659 bp, Staphylococcus aureus; identical to SEQ ID NO: 4005

SEQ ID NO: 11858 - DNA, 459 bp, Staphylococcus aureus; identical to SEQ ID NO: 4006

SEQ ID NO: 11859 - DNA, 270 bp, Staphylococcus aureus; identical to SEQ ID NO: 4007

SEQ ID NO: 11860 - DNA, 249 bp, Staphylococcus aureus; identical to SEQ ID NO: 4008

SEQ ID NO: 11861 - DNA, 549 bp, Staphylococcus aureus; identical to SEQ ID NO: 4009

SEQ ID NO: 11862 - DNA, 285 bp, Staphylococcus aureus; identical to SEQ ID NO: 4010

SEQ ID NO: 11863 - DNA, 255 bp, Staphylococcus aureus; identical to SEQ ID NO: 4011

SEQ ID NO: 11864 - DNA, 5742 bp, Staphylococcus aureus
gtgaaagacaacgcgacaaatcttgataatgcaatgaatcaacttcgaaatagtattgcgaataaagatgatgtaaaagcgagtcaaccatatgttgatgcagatagagataaacaaaatgcatacaatacagcagttacaaatgctgaaaatatcattaatgcaacgagtcagccgacacttgatccatctgcagtaacacaagcagctaatcaagtgagcactaacaaaactgcgcttaatggtgcacaaaacttagcgaataaaaagcaagaaacgactgctaacatcaaccaattaagtcatttaaataatgctcaaaagcaagatttaaatacgcaagtgacaaatgcaccaaatattagcacagtaaatcaagtgaaaactaaagctgaacaattagatcaagcaatggaacgtttaatcaacggaatccaagacaaagatcaagtgaaacaaagtgttaactttacagatgcagatccagaaaaacaaacagcatacaacaatgcggtaactgctgctgaaaatattattaatcaagcaaatggtacaaatgcgaaccaatcacaagttgaagcagcactttcaactgtaacaactacgaaacaagcgttgaatggtgatagaaaagtaacagatgctaaaaacaatgcaaaccaaacattatctacgttagataacttaaacaatgcacaaaaaggtgctgttactggaaacatcaatcaagcgcacactgtagctgaagtaacgcaagccattcaaaccgctcaggaactgaatacagcgatgggtaacttgaaaaatagcttgaatgataaagacactacacttggcagtcaaaactttgcagatgcagatccagagaagaaaaatgcatacaatgaagcggttcataatgctgaaaatattttaaataaatctacaggtacgaacgtgcctaaagatcaagttgaagcagctatgaatcaagtgaatgctacaaaagcagcgcttaatggtactcaaaaccttgaaaaagctaaacaacacgcaaatacagcaattgacggtttaagccatttaacaaatgcacaaaaagaggcattaaaacaattggtacaacaatcgactactgttgcagaagcacaaggtaatgagcaaaaagcaaacaatgttgatgcagcaatggacaaattacgtcaaagtattgcagataatgcgacaacaaaacaaaaccaaaattatactgatgcaagtcagaataaaaaggatgcgtacaataatgctgtcacaactgcacaaggtattattgatcaaactacaagtccaactttagatccgactgttatcaatcaagctgctggacaagtaagcacaactaaaaatgcattaaatggtaatgaaaacctagaggcagcgaaacaacaagcgtcacaatcattaggttcattagataacttaaataatgcgcaaaaacaaacagttactgatcaaattaatggcgcgcatactgttgatgaagcaaatcaaattaagcaaaatgcgcaaaacttaaatacagcgatgggtaacttgaaacaagcgatagctgacaaagatgctacgaaagcgacagttaacttcactgatgcagatcaagcaaaacaacaagcatataacactgctgttacaaatgctgaaaatatcatttcaaaagctaatggcggcaatgcaacacaagctgaagttgaacaagcaatcaaacaagttaatgctgcaaaacaagcattaaatggtaatgccaacgttcaacatgcaaaagacgaagcaacagcattaattaatagctctaatgaccttaaccaagcacaaaaagacgcattaaaacaacaagttcaaaatgcaactactgtagctggtgtaaacaatgttaaacaaacagcacaagagttaaacaatgctatgacacaattaaaacaaggcattgcagataaagaacaaacaaaagctgatggtaactttgtcaatgcagatcctgataagcaaaatgcatataatcaagcagtagcgaaagctgaagcattaattagtgctacgcctgatgttgtcgttacacctagcgaaattactgcagcgttaaataaagttacgcaagctaaaaatgatttaaatggtaatacaaacttagcaacggcgaaacaaaatgttcaacatgctattgatcaattgccaaacttaaaccaagcgcaacgtgatgaatacagcaaacaaatcacgcaagcaacacttgtaccaaacgtcaatgctattcaacaagcggcgacaacgcttaatgacgcgatgacacaattgaaacaaggtattgcgaataaagcacaaattaaaggtagcgagaactatcacgatgctgatactgacaagcaaacagcatatgataatgcagtaacaaaagcagaagaattgttaaaacaaacaacaaatccaacaatggatccaaatacaattcaacaagcattaactaaagtgaatgacacaaatcaagcacttaacggtaatcaaaaattagctgatgccaaacaagatgctaagacaacacttggtacactagatcatttaaatgatgctcaaaaacaagcgctaacaactcaagttgaacaagcaccagatattgcaacagttaataatgttaagcaaaatgctcaaaatctgaataatgctatgactaacttaaacaatgcattacaagataaaactgagacattaaatagcattaactttactgatgcagatcaagctaagaaagatgcttatactaatgcggtttcacatgcagaaggtattttatctaaagcaaatggcagcaatgcaagtcaaactgaagtggaacaagcgatgcaacgtgtgaacgaagcgaaacaagcattgaatggtaatgacaatgtacaacgtgcaaaagatgcagcgaaacaagtgattacaaatgcaaatgatttaaatcaagcgcaaaaagatgcattaaaacaacaagtcgatgctgcgcaaactgttgcaaatgtaaacacgattaagcaaacagcacaagatttaaatcaagcaatgacacaattgaaacaaggtattgcagataaagaccaaactaaagcaaatggtaactttgtcaatgctgatactgataagcaaaatgcttacaacaatgcggtagcacatgctgaacaaataattagtggtacaccaaatgcaaacgtggatccacaacaagtggctcaagcgttacaacaagtgaatcaagctaagggtgatttaaacggtaaccataacttacaagttgctaaagacaatgcaaatacagccattgatcagttaccaaacttaaatcaaccacaaaaaacagcattaaaagaccaagtgtcgcatgcagaacttgttacaggtgttaatgctattaagcaaaatgctgatgcgttaaataatgcaatgggtacattgaaacaacaaattcaagcgaacagtcaagtaccacagtcagttgactttacacaagcggatcaagacaaacaacaagcatataacaatgcggctaaccaagcgcaacaaatcgcaaatggcataccaacacctgtattgacgcctgatacagtaacacaagcagtgacaactatgaatcaagcgaaagatgcattaaacggtgatgaaaaattagcacaagcgaaacaagaagctttagcaaatcttgatacgttacgcgatttaaatcaaccacaacgtgatgcattacgtaaccaaatcaatcaagcacaagcgttagctacagttgaacaaactaaacaaaatgcacaaaatgtgaatacagcaatgagtaacttgaaacaaggtattgcaaacaaagatactgtcaaagcaagtgagaactatcatgatgctgatgccgataagcaaacagcatatacaaatgcagtgtctcaagcggaaggtattatcaatcaaacgacaaatccaacgcttaacccagatgaaataacacgtgcattaactcaagtgactgatgctaaaaatggcttaaacggtgaagctaaattggcaactgaaaagcaaaatgctaaagatgccgtaagtgggatgacgcatttaaacgatgctcaaaaacaagcattaaaaggtcaaatcgatcaatcgcctgaaattgctacagtgaaccaagttaaacaaacagcaacgagcctagatcaagcaatggatcaattatcacaagctattaatgataaagctcaaacattagcggacggtaattacttaaatgcagatcctgacaaacaaaatgcgtataaacaggcagtagcaaaagctgaagcattattgaataaacaaagtggtactaatgaagtacaagcacaagttgaaagcatcactaatgaagtgaacgcagcgaaacaagcattaaatggtaatgacaatttggcaaatgcaaaacaacaagcaaaacaacaattggcgaacttaacacacttaaatgatgcacaaaaacaatcatttgaaagtcaaattacacaagcgccacttgttacagatgtcactacgattaatcaaaaagcacaaacgttagatcatgcgatggaattattaagaaatagtgttgcggataatcaaacgacattagcgtctgaagattatcatgatgcaactgcgcaaagacaaaatgactataaccaagctgtaacagctgctaataatatcattaatcaaactacatcgcctacgatgaatccagatgatgttaatggtgcaacgacacaagtgaataatacgaaagttgcattagatggtgatgaaaaccttgcagcagctaaacaacaagcaaacaacagacttgatcaattagatcatttgaataatgcgcaaaagcaacagttacaatcacaaattacgcaatcatctgatattgctgcagttaatggtcacaaacaaacagcagaatctttaaatactgcgatgggtaacttaattaatgcgattgcagatcatcaagccgttgaacaacgtggtaacttcatcaatgctgatactgataaacaaactgcttataatacagcggtaaatgaagcagcagcaatgattaacaaacaaactggtcaaaatgcgaaccaaacagaagtagaacaagctattactaaagttcaaacaacacttcaagcgttaaatggagaccataatttacaagttgctaaaacaaatgcgacgcaagcaattgatgctttaacaagcttaaatgatcctcaaaaaacagcattaaaagaccaagttacagctgcaactttagtaactgcagttcatcaaattgaacaaaatgcgaatacgcttaaccaagcaatgcatggtttaagacagagcattcaagataacgcagcaactaaagcaaatagcaaatatatcaacgaagatcaaccagagcaacaaaactatgatcaagctgttcaagccgcaaataatattatcaatgaacaaactgcaacattagataataatgcgattaatcaagcagcgacaactgtgaatacaacgaaagcagcattacatggtgatgtgaagttacaaaatgataaagatcatgctaagcaaacggttagtcaattagcacatctaaacaatgcacaaaaacatatggaagatacgttaattgatagtgaaacaactagaacagcagttaagcaagatttgactgaagcacaagcattagatcaacttatggatgcattacaacaaagtattgctgacaaagatgcaaca

SEQ ID NO: 11865 - DNA, 5742 bp, Staphylococcus aureus
cgtgcgagcagtgcatatgtcaatgcagaaccgaataaaaaacaatcctatgatgaagcagttcaaaatgctgagtctatcattgcaggattaaataatccaactatcaataaaggtaatgtatcaagtgcgactcaagcagtaatatcatctaaaaatgcattagatggtgttgaacgattagctcaagataagcaaactgctggaaattctctaaatcatttagatcaattaacaccagctcaacaacaagcgctagaaaatcaaattaataatgcaacaactcgtggcgaagtagcacaaaaattaactgaagcacaagcacttaaccaagcaatggaagctttacgtaatagcattcaagatcaacagcaaacggaagcgggtagcaagtttatcaatgaagataaaccacaaaaagatgcttaccaagcagcagttcaaaatgcaaaagatttaattaatcaaactaacaatccaacgcttgataaagcacaagttgaacaattgacacaagctgttaaccaagctaaagataacctacacggtgatcaaaaacttgcagacgataaacaacatgcggttactgatttaaatcaattaaatggtttgaataatccgcaacgtcaagcacttgaaagccaaataaacaacgcagcaactcgtggcgaagtagcacaaaaattagctgaagcaaaagcgcttgatcaagcaatgcaagcattacgtaatagtattcaagatcaacaacaaacagaatctggtagcaagtttatcaatgaagataaaccgcaaaaagatgcttaccaagcagcagttcaaaatgcaaaagatttaattaaccaaacaggtaatccaacactcgacaaatcacaagtagaacaattgacacaagcagtaacaactgcaaaagataatctacatggtgatcaaaaacttgctcgtgatcaacaacaagcagtaacaactgtaaatgcattgccaaacttaaatcatgcacaacaacaagcattaactgatgctataaatgcagcgcctacaagaacagaggttgcacaacatgttcaaactgctactgaacttgatcacgcgatggaaacattgaaaaataaagttgatcaagtgaatacagataaggctcaaccaaattacactgaagcgtcaactgataaaaaagaagcagtagatcaagcgttacaagctgcagaaagcattacagatccaactaatggttcaaatgcgaataaagacgctgtagaccaagtattaactaagcttcaagaaaaagaaaatgagttaaatggtaatgagagagtcgctgaagctaaaacacaagcgaaacaaactattgaccaattaacacatttaaatgctgatcaaattgcaactgctaaacaaaacattgatcaagcgacgaaacttcaaccaattgctgaattagtagatcaagcaacgcaattgaatcaatctatggatcaattacaacaagcagttaatgaacatgctaacgttgagcaaactgtagattacacacaagcagattcagataaacaaaatgcttataaacaagctattgctgatgctgaaaatgtattgaaacaaaatgcgaataagcaacaagtggatcaagcacttcaaaatattttaaatgcaaaacaagcattaaatggtgatgaacgtgtagcacttgctaaaacaaatggtaaacatgacatcgaccaattgaatgcattaaacaatgctcaacaagatggatttaaaggtcgcatcgatcaatcaaacgatttaaatcaaatccaacaaattgtagatgaggctaaggcacttaatcgtgcaatggatcaattgtcacaagaaatcactgacaatgaaggacgcacgaaaggtagcacgaactatgtcaatgcagatacacaagtcaaacaagtatatgatgaaacggttgataaagcgaaacaagcacttgataaatcgactggtcaaaacttaactgcaaaacaagttatcaaattaaatgatgcagtcactgcagctaagaaagcattaaatggtgaagaaagacttaataatcgtaaagctgaagcattacaaagattggatcaattaacacatctaaacaatgctcaaagacaattagcaatccaacaaattaataatgctgaaacgctaaataaagcatctcgagcaattaatagagcaactaaattagataatgcaatgggtgcagtacaacaatatattgacgaacagcaccttggtgttatcagcagcacaaattacatcaatgcagatgacaatttgaaagcaaattatgataatgcaattgcgaatgcagcacatgagttagataaagtgcaaggtaatgcaattgcaaaagctgaagcagagcaattgaaacaaaatattatcgatgctcaaaatgcattaaatggagaccaaaaccttgcaaatgccaaagataaagcaaatgcgtttgttaattcgttaaatggattaaatcaacagcaacaagatcttgcacataaagcaattaacaatgccgatactgtatcagatgtaacagatattgttaataatcaaattgacttaaatgatgcaatggaaacattgaaacatttagttgacaatgaaattccaaatgcagagcaaactgtcaattaccaaaacgctgacgataatgctaaaacaaacttcgatgatgccaaacgtctagcaaatacattgctaaatagtgataacacaaatgtgaatgatatcaatggcgcaatccaagcagtcaatgatgcaatccataatcttaatggtgatcaacgactacaagatgctaaagacaaggcaattcaatctattaatcaagctttagctaataagctaaaagaaatcgaagcttcaaatgcgacggatcaagacaagcttattgcgaaaaataaagcagaagaattggcaaacagcatcatcaacaacattaataaagcaacaagtaatcaggctgtatctcaagttcaaacagcaggcaaccacgcgattgaacaagtgcatgccaatgaaataccaaaagcaaaaattgatgccaataaagacgttgataagcaagttcaagcattaattgacgaaattgatcgaaatccaaatctaacagataaggaaaaacaagcacttaaagatcgtattaatcaaatacttcaacaaggtcataacggcattaacaatgcgatgactaaagaagaaattgaacaagccaaagcacaacttgcgcaagcattacaagacatcaaagatttagtgaaagctaaagaagatgcgaaacaagatgttgataaacaagttcaagctttaattgacgaaatcgatcaaaatccaaatctaacagataaggaaaaacaagcacttaaagatcgtattaatcaaatacttcaacaaggtcataacgacattaacaatgcgatgacaaaagaagcaattgaacaagcaaaagaacgtttagcgcaagcattgcaagacatcaaagatttagtgaaagctaaagaagatgcgaaaaatgatattgataaacgtgtacaagctttaattgacgaaatcgatcaaaatccaaatctaacagataaggaaaaacaagcacttaaagatcgaattaatcaaatacttcaacaaggtcataacgacattaacaatgcgctgactaaagaagaaattgagcaggcaaaagcacaacttgcacaagcattgcaagacatcaaagatttagtgaaagctaaagaagatgcgaaaaatgcaataaaagccttagctaatgcgaagcgtgatcaaatcaattcaaatccagatttaacacctgagcaaaaagcaaaagcgctcaaagaaattgacgaagctgaaaaacgagcactacaaaacgttgagaatgctcaaactatagatcaattaaatcgaggattaaacttaggtttagatgacattagaaatacacatgtatgggaggttgatgaacaacctgctgtaaatgaaatttttgaagcaacacctgagcaaatcctagttaatggtgaactcattgtacatcgtgatgacatcattacagaacaagatattcttgcacacataaacttaattgatcagctttcagcagaagtcatcgatacaccatcaactgcaacgatttctgatagcttaacagcaaaagttgaagttacattgcttgatggatcaaaagtgattgttaatgttcctgtaaaagttgtagaaaaagaattgtcagtagtcaaacaacaggcaattgaatcaatcgaaaatgcggcacaacaaaagattaatgaaatcaataatagtgtgacattaacactggaacaaaaagaagctgcaattgcagaagttaataagcttaaacaacaagcaattgatcatgttaacaatgcacctgatgttcattcagttgaagaaattcaacaacaagaacaagcgcatattgaacaatttaatccagaacaatttacgattgaacaagcaaaatcaaatgcaattaaatcgattgaagatgcaattcaacatatgattgatgaaatcaaagctcgtactgatctaacagataaagagaagcaagaagctattgctaagttaaatcaattaaaagaacaagcaattcaagcgattcaacgtgcgcaaagcatcgatgaaataagtgagcaattggaacaatttaaagctcaaatgaaagcagctaatccaacagcaaaagaactagctaaacgcaagcaagaagctattagtagaattaaagacttttcaaatgaaaaaataaatagtattcgaaatagtgaaattggcacagctgatgaaaaacaagcagcaatgaatcaaattaacgaaattgtgcttgaaacaattagagatattaataatgcgcatacattacagcaagttgaggctgcattgaacaatggtattgctcgaatttcagcagtacaaattgtaacatctgatcgtgctaaacaatcgtcaagtactggaaatgaatctaatagccatttaacaattggttatggaactgcaaatcatccatttaacagttcgactattggacataaaaagaaacttgatgaagatgatgacattgatccacttcatatgcgtcactttagtaataatttcggtaatgttattaaaaacgctattggtgtggtgggtatctctggtttactagctagtttctggttcttcattgccaaacgtcgtcgtaaagaagatgaagaggaagaattagaaataagagataataataaagattcaataaaagagactttagacgatacaaaacatttaccacttttatttgcgaaacgtcgcagaaaagaagatgaagaagatgttactgttgaagaaaaagattcgctaaataatggcgagtcactcgataaagttaaacatacgccgttcttcttaccaaaacgtcgtcgtaaagaagatgaagaagatgtggaagttacaaatgaaaacacagatgaaaaagtgttgaaagataacgaacattcaccactcttattcgcaaaacgacgcaaagataaagaggaagatgttgaaacaacaactagtattgaatctaaagatgaggacgttcctttattattggctaaaaagaaaaatcaaaaagataaccaatccaaagacaaaaagtcagcatcaaaaaatacttctaaaaaggtagcagctaaaaagaagaaaaagaaagctaagaaaaataaaaaataa

SEQ ID NO: 11866 - DNA, 5652 bp, Staphylococcus aureus
gtgtctaaagatcaagttgaagcagctatgaatcaagtgaatactacaaaagcagcgcttaatggtactcaaaaccttgaaaaagctaaacaacacgcaaatacagcgattgacggtttaagccatttaacaaatgcacaaaaagaggcattaaaacaattggtacaacaatcgactactgttgcagaagcacaaggtaatgaacaaaaagcaaacaatgttgatgcagcaatggacaaattacgtcaaagtattgcagataatgcgacaacaaaacaaaaccaaaattatactgattcaagtccgaataaaaaggatgcgtacaataatgctgtcacaactgcacaaggtattattgatcaaacgacaagtccaactttagatccgactgttatcaatcaagctgctggacaagtaagcacaactaaaaatgcattaaatggtaatgaaaacctagaggcagcgaaacaacaagcgacacaatcattaggttcattagacaacttaaataatgcgcaaaaacaagcagttactgatcaaattaatggcgcgcatactgttgatgaagcaaatcaaattaaacaaaatgcgcaaaacttaaatacagcgatgggtaacttgaaacaagcgattgctgacaaagatgctacgaaagcaacagtaaacttcactgatgcagatcaagcaaaacaacaagcatataacactgctgttacaaatgctgaaaacatcatttcaaaagctaatggtggcaatgcaacacaaactgaagttgaacaagcaatccaacaagttaatgctgcaaaacaagcattaaatggtaatgccaacgttcaacatgcgaaagacgaagcaacagcattaattaatagctctaatgaccttaaccaagcacaaaaagacgcattaaaacagcaagttcaaaatgcaactactgtagctggtgtaaacaatgttaaacaaacagcgcaagagttaaacaatgcaatgacacaattaaaacaaggcattgcagataaagaacaaacaaaagctgatggtaactttgtcaatgcagatcctgacaaacaaaatgcatataaacaagcagtagcaaaagctgaagcattaattagcggcacacctgatgttgtcgttacacctagcgaaattactgcagcgttaaataaagttacacaagctaaaaatgatttaaatggtaatacgaacttagcaacaacgaaacaaaatgttcaacatgctattgatcaattgccaaacttgaatcaagcgcaacgtgatgaatacagcaaacaaattacgcaagcaacacttgtaccaaacgtcaatgctattcaacaagcggcaactacgcttaatgatgcgatgacacaattgaaacaaggtattgcgaataaagcacaaattaaaggtagcgagaactatcacgatgctgatactgacaagcaaacagcatatgataatgcagtaacaaaagcagaagaattgttaaaacaaacaacaaatccaacaatggatccaaatacaattcaacaagcattaactaaagtgaatgatacaaatcaagcacttaacggtaatcaaaaattagctgatgctaaacaagctgctaagacaaatcttggcacattagatcatttaaatgatgcgcaaaaacaagcgttaacaacacaagttgaacaagcaccagatattgcaacagttaataatgttaagcaaaatgctcaaaatctgaataatgctatgactaacttaagtaatgcattacaagataaaactgagacattaaatagcattaactttactgatgcagatcaagctaagaaagatgcttatactaatgcggttgcacatgcagaaggtattttatctaaagcaaatggcagcaatgcaagtcaaaccgaagtggaacaagcgatgcaacgcgtgaacgaagcgaaacaagcattgaatggtaatgacaatgtacaacgtgcaaaagatgcagcgaaacaagtgattacaaatgcgaatgatttaaatcaagcgcaaaaagatgcgttaaaacaacaagtcgatgctgcgcaaactgttgcaaatgtaaacacgattaagcaaacagcacaagatttaaatcaagcaatgacacaattgaaacaaggtattgcagataaagaccaaactaaagcaaatggtaactttgtcaatgctgatactgataagcaaaatgcatacaacaatgcggtagcacatgctgaacaaatcattagtggtacaccaaatgcaaacgtggatccacaacaagtggctcaagcgttacaacaagtgactcaagctaagggtgatttaaacggtaaccataacttacaagttgctaaagacaatgcgaatactgccattgatcagttaccaaacttaaatcaaacacaaaaaacagcattaaaagaccaagtgtcacatgcagaacttgttacaggtgttaatgctattaagcaaaatgctgatgcattaaataatgcaatgggtacgttgaaacaacaaattcaagcaaacagtcaagtaccacaatcagttgactttacacaagcggatcaagacaaacaacaagcatataacaatgcagctaaccaagcgcaacaaattgcaaatggcacaccaacacctgtattgacgcctgacgcagtaacacaagcagttactacaatgaatcaagcgaaagatgcattaaacggtgatgaaaaattagcgcaagcgaaacaagatgcaatagcaaatctagatacgttgcgtgacttaaatcaaccacaacgtgatgcgttacgtaatcaaatcaatcaagcacaagcgttagctacagttgaacaaactaaacaaaatgcacaaaatgttaatacagcaatgagtaacttgaaacaaggtattgcaaataaagataccgtcaaagcaagtgaaaactatcacgatgctgatgccgataagcaaacagcatatacaaatgcagtgtctcaagcggaaggtattatcaatcaaacgacaaatccaatgcttaacccagatgatattactcgtgcattaactcaagtgactgatgctaaaaatggcttaaacggtgaagctaaattggcaactgaaaagcaaaatgctaaagatgctgtcaatgcaatgacgcatttgaacgatgctcaaaaacaagcattaaaaggacaaatcgatcaatcgcctgaaattgctatagtgaaccaagttaaacaaacagcaacgagcctagatcatgcaatggatcaattatcacaagctattaatgataaagctcaaacattagcggacggtaattacttaaatgcagatcctgacaaacaaaatgcgtataaacaggcagtagcaaaagctgaagcattattgaataaacaaagtggtactaatgaagtacaagcacaagttgaaagcatcactaatgaagtgaacgcagcgaaacaagcattaaatggtaatgataatttagcgaatgctaagcaacaagcgaaacaacaactggcgaatctaacacacttaaatgatgcacaaaaacaatcatttgaaagtcaaattacacaagcgccacttgttacagatgtcactacaattaatcaaaaagcacaagcgttagatcatgcaatggatcaattatcacaagctattaatgataaagctcaaacattagcggacggtaattacttaaatgcagatcctgacaaacaaaatgcgtataaacaggcagtagcaaaagctgaagcattattgaataaacaaagtggtactaatgaagtacaagcacaagttgaaagcatcactaatgaagtgaacgcagcgaaacaagcattaaatggtaatgataatttagcgaatgctaagcaacaagcgaaacaacaactggcgaatctaacacacttaaatgatgcacaaaaacaatcatttgaaagtcaaattacacaagcgccacttgttacagatgtcactacaattaatcaaaaagcacaagcgttagatcatgcgatggaattattaagaaatagtgttgcggataatcaagcgacattagcgtctgaagattatcatgatgcaactgcgcaaagacaaaatgactataaccaagcagtaacagctactaataatatcattaaccaaacaacatcacctacaatgaatccagatgaagttaatcgtgcaacgacacaagtgaataacacgaaagttgcattagatggtgatgaaaaccttgtagcagctaagcaacaagcgaacaatagacttgatcaattagatcatttaaataatgcgcaaaagcaacagttacaatcacaaattacgcaatcatctgatattgctgcagttaatggtcacaaacaaacagcagaatctttaaatacagcaatgggtaacttaattaatgcgattgcagatcatcaaaccgttgaacaacttggtaacttcgtcaatgctgatactgataaacaaactgcttatactacagcggtaaatgaagcagaagccatgattaacaaacaaactggtcaaaatgcgaaccaaacagaagtagaacaagctattactaaagttcaaacaacacttcaagcgttaaatggagatcataatttacaagttgctaaagcaaatgcgacgcaagcaattgatgctttaacaagcttaaatgatcctcaaaaaacagcattaaaagaccaagttactgctgcaactttagtaactgcagttcatcaaattgaacaaaatgcgaatacgcttaaccaagcaatgcatggcttaagagaaagtattcaagataacgcagcaactaaagcaaatagcaaatatatcaacgaagatcaatcagaacaacaaaactacgatcaagcagtgcaagccgcaaataatattatcaatgaacaaacagcaacattagataataatgcaattaatcaagcagcgacaactgtgaatacaacgaaagcagcattacatggtgatgtgaaattacaaaatgataaagatcatgcgaaacaaacagttagtcaattaacacatttaaacaatgctcaaaaacatatggaagatacgttgattgatagtgaaacaactagaacagccgttaaccatgatttgactgaagcacaagcattagatcaacttatggatgcattacaacaaagtattgctgacaaagatgcaacacgtgcgagcagtgcatatgtcaatgcagaaccgaataaaaaacaatcatatgatgaagcagttcaaaatgctgagtctatcattgcgggattaaataatccgactatcaataaaggtaatgtaacaagtgcgacacaagctgtaacatcatctaaaaatgcattagacggtgttgaacgattagcgcaagataagcaaactgctggaaattctctaaatcatttagaccaattaacaccagcacaacaacaagcactagaaaatcaaattaataatgcaacaactcgtgataaagtggctgaaattattgcacaagcgcaagcattaaatgaagcgatgaaagcattaaaagaaagtattaaagatcaaccacaaactgaagcaagtagtaaatttattaatgaagatcaagcacaaaaagatgcttatacgcaagctgtacaacacgcgaaagatttgattaacaaa

SEQ ID NO: 11867 - DNA, 5652 bp, Staphylococcus aureus
acaactgatcctacattagctaaatcaatcattgatcaagcgacacaggcagtgactgatgctaaaaataatttacatggtgatcaaaaactagatcaagataagcaacgtgcaacagaaacgttaaataacttgtctaacttgaatacaccacaacgtcaagcacttgaaaatcaaatcaataatgcagcaactcgtggcgaagtagcacaaaaattaactgaagcagaagcacttaaccaagcaatggaagctttacgtaatagcattcaagatcaacagcaaacggaagcgggtagcaagtttatcaatgaagataaaccacaaaaagatgcttaccaagcagcagttcaaaatgcaaaagatttaattaatcaaactaacaatccaacgcttgataaagcacaagttgaacaattgacacaagctgttaaccaagctaaagataacctacacggtgatcaaaaacttgcagacgataaacaacatgcggttactgatttaaatcaattaaatggtttgaataatccgcaacgtcaagcacttgaaagccaaataaacaacgcagcaactcgtgatgaagtagcgcaaaaattagctgaagcaaaagcgcttgatcaagcaatgcaagcattacgtaatagtattcaagatcaacaacaaacagaatctggtagcaagtttatcaatgaagataaaccgcaaaaagatgcttaccaagcagcagttcaaaatgcaaaagatttaattaaccaaacaggtaatccaacactcgacaaatcacaagtagaacaattgacacaagcagtaacaactgcaaaagataacctacatggtgatcaaaaacttgctcgtgatcaactacaagcagtaacaactgtaaatgcattgccaaacttaaatcatgcacaacaacaagcattaactgatgctataaatgcagcgcctacaagaacagaggttgcacaacatgttcaaactgctactgaacttgatcacgcgatggaaacattgaaaaataaagttgatcaagtgaatacagataaggctcaaccaaattacactgaagcgtcaactgataaaaaagaagcagtagatcaagcgttacaagctgcagaaagcattacagatccaactaatggttcaaatgcgaataaagacgctgtagaccaagcattaactaagcttcaagaaaaagtgaatgagttaaatggtaatgagagagtcgctgaagctaaaacacaagcgaaacaaactattgaccaattaacacatttaaatgctgatcaaattgcaactgctaaacaaaatattgatcaagcgacgaaacttcaaccaatcgctgaattagtagatcaagcaacgcaattgaaccaatcaatggatcaattacaacaagcagttaatgaacatgctaacgttgagcaaactgtagattacacacaagcagatttagataagcaaaatgcttataaacaagctattgctgatgccgaaaatgtattgaaacaaaatgcgaataagcaacaagtggatcaagcacttcaaaatattttaaatgcaaaacaagcattaaatggtgatgaacgtgtagcacttgctaaaacaaatggtaaacatgatatagagcaattgaatgcattaaacaatgctcaacaagatggatttaaaggtcgcatcgatcaatcaaacgatttaaatcaaatccaacaaattgtagatgaggctaaggcacttaatcgtgtaatggatcaattgtcacaaggaatcactggcaatgaaggacgcacgaaaggtagcacgaactatgtcaatgcagatacacaagttaaacaagtgtatgatgaagcggttgataaagcgaaacaagcacttgataaatcgacaggtcaaaacttaactgcagaacaagttatcaaattaaatgatgcagtcactgcagcaaagaaagcattaaatggtgaagaaaaacttaataatcgtaagtctgaagcattacaaagattggatcaattaacacatctaaacaatgctcaaagacaattagcaatccaacaaattaataatgctgaaacgctaaataaagcatctcgagcaattaatagagcaactaaattagataatgcaatgggtgcagtacaacaatatattgacgaacagcaccttggtgttatcagcagcacaaattacatcaatgcagatgataatttgaaagcaaattatgataatgcaattgcgaatgcagcacatgagttagataaagtgcaaggtaatgcaattgcaaaagctgaagcagagcaattgaaacaaaatattattgatgctcaaaatgcattaaatggagaccaaaaccttgcaaatgccaaagataaagcaaatgcgtttgttaattcgttaaatggattaaatcaacagcaacaacatcttgcacataatgcaattaacaatgccgatactgtatcagatgtaacagatattgttaataatcaaattgacttaaatgatgcaatggaaacattgaaacatttagttgacaatgaaattccaaatgcagagcaaactgtcaattaccaaaacgctgaagataatgctaaaacaaacttcgatgatgctaaacgtctagcaaatacattgctaaatagtgataacacaaatgtgaatgatattaacggcgcaattcaaacagtcaatgatgcaatccaaaatcttaatggtgatcaacgactacaagatgctaaagacaaggcaattcaatctattaatcaagctttagctaataagctaaaagaaatcgaagcttcaaatgcgacggatcaagacaagcttattgcgaaaaataaagcagaagaattggcaaacagcatcatcaacaacattaataaagcaacaagtaatcaggatgtatctcaagttcaaacagctggcaaccatgcgattgaacaagtgcatgccaatgaaataccgaaagctaaaattgatgcgaataaagatgttgacaagcaagttcaagcattaattgacgaaattgatcgaaatccaattctaacagataaggaaaaacaagcgcttaaagatcgaattaaccaaatacttcaacaaggtcataacgacattaacaatgcgatgactaaagaagaaattgaacaagccaaagcacaacttggacaagcgttacaagacattaaagatttagtgaaagctaaagaaagcgcgaaacaagatattgataagcaagttcaagcattaattgacgaaattgatcgaaatccaattctaacagataaggaaaaacaagcgcttaaagatcgaataaatcaaatcctgcaacaaggtcataacggcattaacaatgcgatgactaaagaagaaattgaacaagccaaagcacaacttggacaagcgttacaagacattaaagatttagtgaaagctaaagaaagcgcgaaacaagatattgataagcaagttcaagcattaattgacgaaattgatcgaaatccaaatctaacagataaggaaaaacaagcgcttaaagatcgaataaatcaaatcttgcaacaaggtcataacggcattaacaatgcgatgactaaagaagaaattgagcatgccaaagcgcagcttgcacaagcattacaagacattaaagatttagtgaaagctaaagaagatgcgaaaaatgcaattaaagcattagcaaatgcgaagcgtgatcaaatcaattcaaaccctgatttaacacttgaacaaaaagcaaaagcgctcaaagaaattgacgaagctgaaaaacgagcactagaaaacattgaaaatgctcaaactaaagatcaattaaatcaaggattaaatttaggattagatgatattagaaatacacatgtatgggaagttgatgcacaacctgctgtaaatgaaatttttgacgcaactcctgaacaaatccttgtaaatggcgaactcattgtccatcgtgatgacatcattacagaacaagatattcttgcacacatcaacttaattgatcaacttacagcggaaattattgatacaccgtcaactgcaacaatttctgatagtttaacagcaaaagttgaagtaacattgcttgatggatcaaaagtgattgttaatgttcctgtgaaagtagtagaaaaagaattgacagtagttaaacagcaggcgattgaatcaattgaaaatgcggcacaacaaaagattaatgaaatcaataatcacgcaacattaacacctgaacaaaaagaagctgcgattgcggaagttaataagcttaaacaacaagctattgagcaaattaacaacgcagcagatgttcatacggtggaagaagttcaacaccaagaacaggcgcatattgaacaattcaatccagatcaatttacaattgaccaagccaaatcaaatgccattaaatcaatttctgatgctatccaacatatgattgatgaaattaatgctagtaaggatttaactgataaagagaagcaagaagctatatctaaattaaatcagttaaaagatcaatcaattcaggcgattcaacgtgcgcaaagcatcgatgaaattgcgcaacaattagagcaatttaaagcgcaactaaaagcggccaatccatttgctaaagaattggaaaaccgtaaaaaagctgcgatttcaaaaattaaagatatttctacagataaaattgatcgcattagaaatagcacaattggaactgctgaagaaagacaagcagcaatgaatcgaattaacgaaattgtgcttgaaacaatcaaagatattaataatgcgcaaacgccacaacaagttgaggctgcattgaataatggtatcgcacgaattttagcagtacaaattgtaacatcagatcatagcaaaccttcatcaaattcagatggtcaatctaatagtcatttacacgttggttatggcactgtaaatcatccattcaatagttcgcctattggacataagaagaaattggatcaagatgatgaaatcgatccacttcatatgcgtcatttcggtgaccgaattggtaatgttatcaaaaacgcacttggcgttgttggtatttctggattacttgctagcttctggttcttcattgcgaaacgtcgtcgtaaagaggatgaagaggaagaattggaaattagagataatagcaaagacaagaagaaaggttcaatagaaggtactaaacatttaccacttttatttgcgaaacgtcgtagaaaagaagatgaagaagatgctattgttgaagaaaaagattcgctaaacaatgacgagtcactcgataaagttaaacatacgccgttcttcttacctaaacgtcgcagaaaagaagatgaagaagatgtggaagttacaaatgaaaacacagatgaaaaagtgttgcaagataacgaacattcaccggtcttaatcgcaaaacgactcaaagataaagatggaaatgttgaaacaacaactagtattgaatctaaagatgaagacgttcctttattattggctaaaaagaaaaatcaaaaagataaccaatccaaagggaaaaagtcggcatcaaaaaaaccttctaaaaaggtagcagctaaaaagaagaaaaagaaatctaaaaaaaataaaaaataa

SEQ ID NO: 11868 - DNA, 1065 bp, Staphylococcus aureus; identical to SEQ ID NO: 4016

SEQ ID NO: 11869 - DNA, 231 bp, Staphylococcus aureus; identical to SEQ ID NO: 4017

SEQ ID NO: 11870 - DNA, 132 bp, Staphylococcus aureus; identical to SEQ ID NO: 4018

SEQ ID NO: 11871 - DNA, 222 bp, Staphylococcus aureus; identical to SEQ ID NO: 4019

SEQ ID NO: 11872 - DNA, 222 bp, Staphylococcus aureus; identical to SEQ ID NO: 4020

SEQ ID NO: 11873 - DNA, 135 bp, Staphylococcus aureus; identical to SEQ ID NO: 4021

SEQ ID NO: 11874 - DNA, 117 bp, Staphylococcus aureus; identical to SEQ ID NO: 4022

SEQ ID NO: 11875 - DNA, 189 bp, Staphylococcus aureus; identical to SEQ ID NO: 4023

SEQ ID NO: 11876 - DNA, 201 bp, Staphylococcus aureus; identical to SEQ ID NO: 4024

SEQ ID NO: 11877 - DNA, 120 bp, Staphylococcus aureus; identical to SEQ ID NO: 4025

SEQ ID NO: 11878 - DNA, 198 bp, Staphylococcus aureus; identical to SEQ ID NO: 4026

SEQ ID NO: 11879 - DNA, 129 bp, Staphylococcus aureus; identical to SEQ ID NO: 4027

SEQ ID NO: 11880 - DNA, 165 bp, Staphylococcus aureus; identical to SEQ ID NO: 4028

SEQ ID NO: 11881 - DNA, 219 bp, Staphylococcus aureus; identical to SEQ ID NO: 4029

SEQ ID NO: 11882 - DNA, 147 bp, Staphylococcus aureus; identical to SEQ ID NO: 4030

SEQ ID NO: 11883 - DNA, 198 bp, Staphylococcus aureus; identical to SEQ ID NO: 4031

SEQ ID NO: 11884 - DNA, 600 bp, Staphylococcus aureus; identical to SEQ ID NO: 4032

SEQ ID NO: 11885 - DNA, 207 bp, Staphylococcus aureus; identical to SEQ ID NO: 4033

SEQ ID NO: 11886 - DNA, 42 bp, Staphylococcus aureus; identical to SEQ ID NO: 4034

SEQ ID NO: 11887 - DNA, 120 bp, Staphylococcus aureus; identical to SEQ ID NO: 4035

SEQ ID NO: 11888 - DNA, 99 bp, Staphylococcus aureus; identical to SEQ ID NO: 4036

SEQ ID NO: 11889 - DNA, 108 bp, Staphylococcus aureus; identical to SEQ ID NO: 4037

SEQ ID NO: 11890 - DNA, 333 bp, Staphylococcus aureus; identical to SEQ ID NO: 4038

SEQ ID NO: 11891 - DNA, 114 bp, Staphylococcus aureus; identical to SEQ ID NO: 4039

SEQ ID NO: 11892 - DNA, 330 bp, Staphylococcus aureus; identical to SEQ ID NO: 4040

SEQ ID NO: 11893 - DNA, 993 bp, Staphylococcus aureus; identical to SEQ ID NO: 4041

SEQ ID NO: 11894 - DNA, 420 bp, Staphylococcus aureus; identical to SEQ ID NO: 4042

SEQ ID NO: 11895 - DNA, 144 bp, Staphylococcus aureus; identical to SEQ ID NO: 4043

SEQ ID NO: 11896 - DNA, 243 bp, Staphylococcus aureus; identical to SEQ ID NO: 4044

SEQ ID NO: 11897 - DNA, 252 bp, Staphylococcus aureus; identical to SEQ ID NO: 4045

SEQ ID NO: 11898 - DNA, 552 bp, Staphylococcus aureus; identical to SEQ ID NO: 4046

SEQ ID NO: 11899 - DNA, 258 bp, Staphylococcus aureus; identical to SEQ ID NO: 4047

SEQ ID NO: 11900 - DNA, 105 bp, Staphylococcus aureus; identical to SEQ ID NO: 4048

SEQ ID NO: 11901 - DNA, 252 bp, Staphylococcus aureus; identical to SEQ ID NO: 4049

SEQ ID NO: 11902 - DNA, 387 bp, Staphylococcus aureus; identical to SEQ ID NO: 4050

SEQ ID NO: 11903 - DNA, 345 bp, Staphylococcus aureus; identical to SEQ ID NO: 4051

SEQ ID NO: 11904 - DNA, 930 bp, Staphylococcus aureus; identical to SEQ ID NO: 4052

SEQ ID NO: 11905 - DNA, 435 bp, Staphylococcus aureus; identical to SEQ ID NO: 4053

SEQ ID NO: 11906 - DNA, 288 bp, Staphylococcus aureus; identical to SEQ ID NO: 4054

SEQ ID NO: 11907 - DNA, 243 bp, Staphylococcus aureus; identical to SEQ ID NO: 4055

SEQ ID NO: 11908 - DNA, 399 bp, Staphylococcus aureus; identical to SEQ ID NO: 4056

SEQ ID NO: 11909 - DNA, 159 bp, Staphylococcus aureus; identical to SEQ ID NO: 4057

SEQ ID NO: 11910 - DNA, 99 bp, Staphylococcus aureus; identical to SEQ ID NO: 4058

SEQ ID NO: 11911 - DNA, 2985 bp, Staphylococcus aureus; identical to SEQ ID NO: 4059

SEQ ID NO: 11912 - DNA, 4047 bp, Staphylococcus aureus; identical to SEQ ID NO: 4060

SEQ ID NO: 11913 - DNA, 1014 bp, Staphylococcus aureus; identical to SEQ ID NO: 4061

SEQ ID NO: 11914 - DNA, 126 bp, Staphylococcus aureus; identical to SEQ ID NO: 4062

SEQ ID NO: 11915 - DNA, 237 bp, Staphylococcus aureus; identical to SEQ ID NO: 4063

SEQ ID NO: 11916 - DNA, 600 bp, Staphylococcus aureus; identical to SEQ ID NO: 4064

SEQ ID NO: 11917 - DNA, 126 bp, Staphylococcus aureus; identical to SEQ ID NO: 4065

SEQ ID NO: 11918 - DNA, 114 bp, Staphylococcus aureus; identical to SEQ ID NO: 4066

SEQ ID NO: 11919 - DNA, 162 bp, Staphylococcus aureus; identical to SEQ ID NO: 4067

SEQ ID NO: 11920 - DNA, 105 bp, Staphylococcus aureus; identical to SEQ ID NO: 4068

SEQ ID NO: 11921 - DNA, 165 bp, Staphylococcus aureus; identical to SEQ ID NO: 4069

SEQ ID NO: 11922 - DNA, 108 bp, Staphylococcus aureus; identical to SEQ ID NO: 4070

SEQ ID NO: 11923 - DNA, 174 bp, Staphylococcus aureus; identical to SEQ ID NO: 4071

SEQ ID NO: 11924 - DNA, 117 bp, Staphylococcus aureus; identical to SEQ ID NO: 4072

SEQ ID NO: 11925 - DNA, 93 bp, Staphylococcus aureus; identical to SEQ ID NO: 4073

SEQ ID NO: 11926 - DNA, 114 bp, Staphylococcus aureus; identical to SEQ ID NO: 4074

SEQ ID NO: 11927 - DNA, 99 bp, Staphylococcus aureus; identical to SEQ ID NO: 4075

SEQ ID NO: 11928 - DNA, 90 bp, Staphylococcus aureus; identical to SEQ ID NO: 4076

SEQ ID NO: 11929 - DNA, 129 bp, Staphylococcus aureus; identical to SEQ ID NO: 4077

SEQ ID NO: 11930 - DNA, 90 bp, Staphylococcus aureus; identical to SEQ ID NO: 4078

SEQ ID NO: 11931 - DNA, 99 bp, Staphylococcus aureus; identical to SEQ ID NO: 4079

SEQ ID NO: 11932 - DNA, 114 bp, Staphylococcus aureus; identical to SEQ ID NO: 4080

SEQ ID NO: 11933 - DNA, 90 bp, Staphylococcus aureus; identical to SEQ ID NO: 4081

SEQ ID NO: 11934 - DNA, 159 bp, Staphylococcus aureus; identical to SEQ ID NO: 4082

SEQ ID NO: 11935 - DNA, 105 bp, Staphylococcus aureus; identical to SEQ ID NO: 4083

SEQ ID NO: 11936 - DNA, 90 bp, Staphylococcus aureus; identical to SEQ ID NO: 4084

SEQ ID NO: 11937 - DNA, 126 bp, Staphylococcus aureus; identical to SEQ ID NO: 4085

SEQ ID NO: 11938 - DNA, 90 bp, Staphylococcus aureus; identical to SEQ ID NO: 4086

SEQ ID NO: 11939 - DNA, 120 bp, Staphylococcus aureus; identical to SEQ ID NO: 4087

SEQ ID NO: 11940 - DNA, 192 bp, Staphylococcus aureus; identical to SEQ ID NO: 4088

SEQ ID NO: 11941 - DNA, 138 bp, Staphylococcus aureus; identical to SEQ ID NO: 4089

SEQ ID NO: 11942 - DNA, 108 bp, Staphylococcus aureus; identical to SEQ ID NO: 4090

SEQ ID NO: 11943 - DNA, 144 bp, Staphylococcus aureus; identical to SEQ ID NO: 4091

SEQ ID NO: 11944 - DNA, 108 bp, Staphylococcus aureus; identical to SEQ ID NO: 4092

SEQ ID NO: 11945 - DNA, 429 bp, Staphylococcus aureus; identical to SEQ ID NO: 4093

SEQ ID NO: 11946 - DNA, 438 bp, Staphylococcus aureus; identical to SEQ ID NO: 4094

SEQ ID NO: 11947 - DNA, 171 bp, Staphylococcus aureus; identical to SEQ ID NO: 4095

SEQ ID NO: 11948 - DNA, 150 bp, Staphylococcus aureus; identical to SEQ ID NO: 4096

SEQ ID NO: 11949 - DNA, 90 bp, Staphylococcus aureus; identical to SEQ ID NO: 4097

SEQ ID NO: 11950 - DNA, 294 bp, Staphylococcus aureus; identical to SEQ ID NO: 4098

SEQ ID NO: 11951 - DNA, 879 bp, Staphylococcus aureus; identical to SEQ ID NO: 4099

SEQ ID NO: 11952 - DNA, 150 bp, Staphylococcus aureus; identical to SEQ ID NO: 4100

SEQ ID NO: 11953 - DNA, 99 bp, Staphylococcus aureus; identical to SEQ ID NO: 4101

SEQ ID NO: 11954 - DNA, 114 bp, Staphylococcus aureus; identical to SEQ ID NO: 4102

SEQ ID NO: 11955 - DNA, 153 bp, Staphylococcus aureus; identical to SEQ ID NO: 4103

SEQ ID NO: 11956 - DNA, 4143 bp, Staphylococcus aureus; identical to SEQ ID NO: 4104

SEQ ID NO: 11957 - DNA, 105 bp, Staphylococcus aureus; identical to SEQ ID NO: 4105

SEQ ID NO: 11958 - DNA, 147 bp, Staphylococcus aureus; identical to SEQ ID NO: 4106

SEQ ID NO: 11959 - DNA, 222 bp, Staphylococcus aureus; identical to SEQ ID NO: 4107

SEQ ID NO: 11960 - DNA, 159 bp, Staphylococcus aureus; identical to SEQ ID NO: 4108

SEQ ID NO: 11961 - DNA, 102 bp, Staphylococcus aureus; identical to SEQ ID NO: 4109

SEQ ID NO: 11962 - DNA, 105 bp, Staphylococcus aureus; identical to SEQ ID NO: 4110

SEQ ID NO: 11963 - DNA, 144 bp, Staphylococcus aureus; identical to SEQ ID NO: 4111

SEQ ID NO: 11964 - DNA, 102 bp, Staphylococcus aureus; identical to SEQ ID NO: 4112

SEQ ID NO: 11965 - DNA, 111 bp, Staphylococcus aureus; identical to SEQ ID NO: 4113

SEQ ID NO: 11966 - DNA, 132 bp, Staphylococcus aureus; identical to SEQ ID NO: 4114

SEQ ID NO: 11967 - DNA, 105 bp, Staphylococcus aureus; identical to SEQ ID NO: 4115

SEQ ID NO: 11968 - DNA, 93 bp, Staphylococcus aureus; identical to SEQ ID NO: 4116

SEQ ID NO: 11969 - DNA, 132 bp, Staphylococcus aureus; identical to SEQ ID NO: 4117

SEQ ID NO: 11970 - DNA, 177 bp, Staphylococcus aureus; identical to SEQ ID NO: 4118

SEQ ID NO: 11971 - DNA, 201 bp, Staphylococcus aureus; identical to SEQ ID NO: 4119

SEQ ID NO: 11972 - DNA, 243 bp, Staphylococcus aureus; identical to SEQ ID NO: 4120

SEQ ID NO: 11973 - DNA, 246 bp, Staphylococcus aureus; identical to SEQ ID NO: 4121

SEQ ID NO: 11974 - DNA, 129 bp, Staphylococcus aureus; identical to SEQ ID NO: 4122

SEQ ID NO: 11975 - DNA, 96 bp, Staphylococcus aureus; identical to SEQ ID NO: 4123

SEQ ID NO: 11976 - DNA, 123 bp, Staphylococcus aureus; identical to SEQ ID NO: 4124

SEQ ID NO: 11977 - DNA, 135 bp, Staphylococcus aureus; identical to SEQ ID NO: 4125

SEQ ID NO: 11978 - DNA, 159 bp, Staphylococcus aureus; identical to SEQ ID NO: 4126

SEQ ID NO: 11979 - DNA, 111 bp, Staphylococcus aureus; identical to SEQ ID NO: 4127

SEQ ID NO: 11980 - DNA, 108 bp, Staphylococcus aureus; identical to SEQ ID NO: 4128

SEQ ID NO: 11981 - DNA, 93 bp, Staphylococcus aureus; identical to SEQ ID NO: 4129

SEQ ID NO: 11982 - DNA, 135 bp, Staphylococcus aureus; identical to SEQ ID NO: 4130

SEQ ID NO: 11983 - DNA, 105 bp, Staphylococcus aureus; identical to SEQ ID NO: 4131

SEQ ID NO: 11984 - DNA, 93 bp, Staphylococcus aureus; identical to SEQ ID NO: 4132

SEQ ID NO: 11985 - DNA, 162 bp, Staphylococcus aureus; identical to SEQ ID NO: 4133

SEQ ID NO: 11986 - DNA, 123 bp, Staphylococcus aureus; identical to SEQ ID NO: 4134

SEQ ID NO: 11987 - DNA, 123 bp, Staphylococcus aureus; identical to SEQ ID NO: 4135

SEQ ID NO: 11988 - DNA, 114 bp, Staphylococcus aureus; identical to SEQ ID NO: 4136

SEQ ID NO: 11989 - DNA, 96 bp, Staphylococcus aureus; identical to SEQ ID NO: 4137

SEQ ID NO: 11990 - DNA, 144 bp, Staphylococcus aureus; identical to SEQ ID NO: 4138

SEQ ID NO: 11991 - DNA, 141 bp, Staphylococcus aureus; identical to SEQ ID NO: 4139

SEQ ID NO: 11992 - DNA, 775 bp, Staphylococcus aureus; identical to SEQ ID NO: 4140

SEQ ID NO: 11993 - DNA, 132 bp, Staphylococcus aureus; identical to SEQ ID NO: 4141

SEQ ID NO: 11994 - DNA, 114 bp, Staphylococcus aureus; identical to SEQ ID NO: 4142

SEQ ID NO: 11995 - DNA, 225 bp, Staphylococcus aureus; identical to SEQ ID NO: 4143

SEQ ID NO: 11996 - DNA, 360 bp, Staphylococcus aureus; identical to SEQ ID NO: 4144

SEQ ID NO: 11997 - DNA, 150 bp, Staphylococcus aureus; identical to SEQ ID NO: 4145

SEQ ID NO: 11998 - DNA, 120 bp, Staphylococcus aureus; identical to SEQ ID NO: 4146

SEQ ID NO: 11999 - DNA, 138 bp, Staphylococcus aureus; identical to SEQ ID NO: 4147

SEQ ID NO: 12000 - DNA, 123 bp, Staphylococcus aureus; identical to SEQ ID NO: 4148

SEQ ID NO: 12001 - DNA, 114 bp, Staphylococcus aureus; identical to SEQ ID NO: 4149

SEQ ID NO: 12002 - DNA, 114 bp, Staphylococcus aureus; identical to SEQ ID NO: 4150

SEQ ID NO: 12003 - DNA, 597 bp, Staphylococcus aureus; identical to SEQ ID NO: 4151

SEQ ID NO: 12004 - DNA, 771 bp, Staphylococcus aureus; identical to SEQ ID NO: 4152

SEQ ID NO: 12005 - DNA, 111 bp, Staphylococcus aureus; identical to SEQ ID NO: 4153

SEQ ID NO: 12006 - DNA, 117 bp, Staphylococcus aureus; identical to SEQ ID NO: 4154

SEQ ID NO: 12007 - DNA, 141 bp, Staphylococcus aureus; identical to SEQ ID NO: 4155

SEQ ID NO: 12008 - DNA, 126 bp, Staphylococcus aureus; identical to SEQ ID NO: 4156

SEQ ID NO: 12009 - DNA, 114 bp, Staphylococcus aureus; identical to SEQ ID NO: 4157

SEQ ID NO: 12010 - DNA, 120 bp, Staphylococcus aureus; identical to SEQ ID NO: 4158

SEQ ID NO: 12011 - DNA, 102 bp, Staphylococcus aureus; identical to SEQ ID NO: 4159

SEQ ID NO: 12012 - DNA, 138 bp, Staphylococcus aureus; identical to SEQ ID NO: 4160

SEQ ID NO: 12013 - DNA, 168 bp, Staphylococcus aureus; identical to SEQ ID NO: 4161

SEQ ID NO: 12014 - DNA, 96 bp, Staphylococcus aureus; identical to SEQ ID NO: 4162

SEQ ID NO: 12015 - DNA, 129 bp, Staphylococcus aureus; identical to SEQ ID NO: 4163

SEQ ID NO: 12016 - DNA, 99 bp, Staphylococcus aureus; identical to SEQ ID NO: 4164

SEQ ID NO: 12017 - DNA, 105 bp, Staphylococcus aureus; identical to SEQ ID NO: 4165

SEQ ID NO: 12018 - DNA, 123 bp, Staphylococcus aureus; identical to SEQ ID NO: 4166

SEQ ID NO: 12019 - DNA, 90 bp, Staphylococcus aureus; identical to SEQ ID NO: 4167

SEQ ID NO: 12020 - DNA, 99 bp, Staphylococcus aureus; identical to SEQ ID NO: 4168

SEQ ID NO: 12021 - DNA, 108 bp, Staphylococcus aureus; identical to SEQ ID NO: 4169

SEQ ID NO: 12022 - DNA, 63 bp, Staphylococcus aureus; identical to SEQ ID NO: 4170

SEQ ID NO: 12023 - DNA, 966 bp, Staphylococcus aureus; identical to SEQ ID NO: 4171

SEQ ID NO: 12024 - DNA, 1377 bp, Staphylococcus aureus; identical to SEQ ID NO: 4172

SEQ ID NO: 12025 - DNA, 270 bp, Staphylococcus aureus; identical to SEQ ID NO: 4173

SEQ ID NO: 12026 - DNA, 342 bp, Staphylococcus aureus; identical to SEQ ID NO: 4174

SEQ ID NO: 12027 - DNA, 96 bp, Staphylococcus aureus; identical to SEQ ID NO: 4175

SEQ ID NO: 12028 - DNA, 123 bp, Staphylococcus aureus; identical to SEQ ID NO: 4176

SEQ ID NO: 12029 - DNA, 120 bp, Staphylococcus aureus; identical to SEQ ID NO: 4177

SEQ ID NO: 12030 - DNA, 159 bp, Staphylococcus aureus; identical to SEQ ID NO: 4178

SEQ ID NO: 12031 - DNA, 96 bp, Staphylococcus aureus; identical to SEQ ID NO: 4179

SEQ ID NO: 12032 - DNA, 93 bp, Staphylococcus aureus; identical to SEQ ID NO: 4180

SEQ ID NO: 12033 - DNA, 93 bp, Staphylococcus aureus; identical to SEQ ID NO: 4181

SEQ ID NO: 12034 - DNA, 90 bp, Staphylococcus aureus; identical to SEQ ID NO: 4182

SEQ ID NO: 12035 - DNA, 102 bp, Staphylococcus aureus; identical to SEQ ID NO: 4183

SEQ ID NO: 12036 - DNA, 138 bp, Staphylococcus aureus; identical to SEQ ID NO: 4184

SEQ ID NO: 12037 - DNA, 165 bp, Staphylococcus aureus; identical to SEQ ID NO: 4185

SEQ ID NO: 12038 - DNA, 195 bp, Staphylococcus aureus; identical to SEQ ID NO: 4186

SEQ ID NO: 12039 - DNA, 135 bp, Staphylococcus aureus; identical to SEQ ID NO: 4187

SEQ ID NO: 12040 - DNA, 132 bp, Staphylococcus aureus; identical to SEQ ID NO: 4188

SEQ ID NO: 12041 - DNA, 96 bp, Staphylococcus aureus; identical to SEQ ID NO: 4189

SEQ ID NO: 12042 - DNA, 114 bp, Staphylococcus aureus; identical to SEQ ID NO: 4190

SEQ ID NO: 12043 - DNA, 201 bp, Staphylococcus aureus; identical to SEQ ID NO: 4191

SEQ ID NO: 12044 - DNA, 144 bp, Staphylococcus aureus; identical to SEQ ID NO: 4192

SEQ ID NO: 12045 - DNA, 1005 bp, Staphylococcus aureus; identical to SEQ ID NO: 4193

SEQ ID NO: 12046 - DNA, 246 bp, Staphylococcus aureus; identical to SEQ ID NO: 4194

SEQ ID NO: 12047 - DNA, 99 bp, Staphylococcus aureus; identical to SEQ ID NO: 4195

SEQ ID NO: 12048 - DNA, 174 bp, Staphylococcus aureus; identical to SEQ ID NO: 4196

SEQ ID NO: 12049 - DNA, 114 bp, Staphylococcus aureus; identical to SEQ ID NO: 4197

SEQ ID NO: 12050 - DNA, 150 bp, Staphylococcus aureus; identical to SEQ ID NO: 4198

SEQ ID NO: 12051 - DNA, 123 bp, Staphylococcus aureus; identical to SEQ ID NO: 4199

SEQ ID NO: 12052 - DNA, 90 bp, Staphylococcus aureus; identical to SEQ ID NO: 4200

SEQ ID NO: 12053 - DNA, 129 bp, Staphylococcus aureus; identical to SEQ ID NO: 4201

SEQ ID NO: 12054 - DNA, 126 bp, Staphylococcus aureus; identical to SEQ ID NO: 4202

SEQ ID NO: 12055 - DNA, 93 bp, Staphylococcus aureus; identical to SEQ ID NO: 4203

SEQ ID NO: 12056 - DNA, 2718 bp, Staphylococcus aureus; identical to SEQ ID NO: 4204

SEQ ID NO: 12057 - DNA, 3411 bp, Staphylococcus aureus; identical to SEQ ID NO: 4205

SEQ ID NO: 12058 - DNA, 201 bp, Staphylococcus aureus; identical to SEQ ID NO: 4206

SEQ ID NO: 12059 - DNA, 96 bp, Staphylococcus aureus; identical to SEQ ID NO: 4207

SEQ ID NO: 12060 - DNA, 99 bp, Staphylococcus aureus; identical to SEQ ID NO: 4208

SEQ ID NO: 12061 - DNA, 99 bp, Staphylococcus aureus; identical to SEQ ID NO: 4209

SEQ ID NO: 12062 - DNA, 423 bp, Staphylococcus aureus; identical to SEQ ID NO: 4210

SEQ ID NO: 12063 - DNA, 300 bp, Staphylococcus aureus; identical to SEQ ID NO: 4211

SEQ ID NO: 12064 - DNA, 333 bp, Staphylococcus aureus; identical to SEQ ID NO: 4212

SEQ ID NO: 12065 - DNA, 132 bp, Staphylococcus aureus; identical to SEQ ID NO: 4213

SEQ ID NO: 12066 - DNA, 102 bp, Staphylococcus aureus; identical to SEQ ID NO: 4214

SEQ ID NO: 12067 - DNA, 141 bp, Staphylococcus aureus; identical to SEQ ID NO: 4215

SEQ ID NO: 12068 - DNA, 2187 bp, Staphylococcus aureus; identical to SEQ ID NO: 4216

SEQ ID NO: 12069 - DNA, 96 bp, Staphylococcus aureus; identical to SEQ ID NO: 4217

SEQ ID NO: 12070 - DNA, 123 bp, Staphylococcus aureus; identical to SEQ ID NO: 4218

SEQ ID NO: 12071 - DNA, 93 bp, Staphylococcus aureus; identical to SEQ ID NO: 4219

SEQ ID NO: 12072 - DNA, 612 bp, Staphylococcus aureus; identical to SEQ ID NO: 4220

SEQ ID NO: 12073 - DNA, 1614 bp, Staphylococcus aureus; identical to SEQ ID NO: 4221

SEQ ID NO: 12074 - DNA, 93 bp, Staphylococcus aureus; identical to SEQ ID NO: 4222

SEQ ID NO: 12075 - DNA, 723 bp, Staphylococcus aureus; identical to SEQ ID NO: 4223

SEQ ID NO: 12076 - DNA, 105 bp, Staphylococcus aureus; identical to SEQ ID NO: 4224

SEQ ID NO: 12077 - DNA, 90 bp, Staphylococcus aureus; identical to SEQ ID NO: 4225

SEQ ID NO: 12078 - DNA, 348 bp, Staphylococcus aureus; identical to SEQ ID NO: 4226

SEQ ID NO: 12079 - DNA, 132 bp, Staphylococcus aureus; identical to SEQ ID NO: 4227

SEQ ID NO: 12080 - DNA, 102 bp, Staphylococcus aureus; identical to SEQ ID NO: 4228

SEQ ID NO: 12081 - DNA, 102 bp, Staphylococcus aureus; identical to SEQ ID NO: 4229

SEQ ID NO: 12082 - DNA, 183 bp, Staphylococcus aureus; identical to SEQ ID NO: 4230

SEQ ID NO: 12083 - DNA, 144 bp, Staphylococcus aureus; identical to SEQ ID NO: 4231

SEQ ID NO: 12084 - DNA, 132 bp, Staphylococcus aureus; identical to SEQ ID NO: 4232

SEQ ID NO: 12085 - DNA, 90 bp, Staphylococcus aureus; identical to SEQ ID NO: 4233

SEQ ID NO: 12086 - DNA, 204 bp, Staphylococcus aureus; identical to SEQ ID NO: 4234

SEQ ID NO: 12087 - DNA, 132 bp, Staphylococcus aureus; identical to SEQ ID NO: 4235

SEQ ID NO: 12088 - DNA, 108 bp, Staphylococcus aureus; identical to SEQ ID NO: 4236

SEQ ID NO: 12089 - DNA, 204 bp, Staphylococcus aureus; identical to SEQ ID NO: 4237

SEQ ID NO: 12090 - DNA, 201 bp, Staphylococcus aureus; identical to SEQ ID NO: 4238

SEQ ID NO: 12091 - DNA, 102 bp, Staphylococcus aureus; identical to SEQ ID NO: 4239

SEQ ID NO: 12092 - DNA, 123 bp, Staphylococcus aureus; identical to SEQ ID NO: 4240

SEQ ID NO: 12093 - DNA, 123 bp, Staphylococcus aureus; identical to SEQ ID NO: 4241

SEQ ID NO: 12094 - DNA, 5456 bp, Staphylococcus aureus
gtgaattatcgtgataaaattcaaaagtttagtattcgtaagtataccgttggaacattctcgacggtcattgcgacgttagtatttctaggattaaacacatcacaagcacaagctgctgagacaaatcaaccagctagtgcattaaaacagaaacaacaaaatggtgatacgcagactgagaatcgagaagtagaagttcaaaattcacaaaatggtcaatcattatctgcgcctattgaaaatgaacaaccaaataataatcaaacaaaccatgtagatgctagtgcagtacaatcatctacaacagaacatgaccaaccagtatctcaaaatgagcaagcaaagaaagatacggcagctgctacgccaacacaatcggctaaagcggcaagtaagcatgaacaaagcgaaagtcgcgctgctaacaaaaaggaaaacgacaataaagcgacacatgtagaaagtcatgaagcaaatgtagtcacagcttcagattcatcagatagtggtaacgtacaacacgatcgtaatgaattacaagcattttttgatgctaattaccatgattatcgctttattgaccgcgaaaatgcagattctgggacatttaactatgtaaaaggcatttttgacaagatcaatacgttattaggtagtaatgatccaataaacaataaagacttgcaacttgcatacaaagaattagaacaagctgttgctttaattcgtacaatgcctcaacgtcaacaaacaagtcgacgctcaagtagaattcaaacgcgttcgattgaatcaagagctgcagaaccaagatcagtatcagactatcaaaacgcaaactcatcatattacgttgaaaatgctaatgatggttctgggtatcctgtaggtacatatattaatgcttctagtaagggggcaccatataatttacctactacgccatggaatacgttaaaagcatcagacgcaaaagaaatcgcacttattacagcaaagcaaactggagacggttatcaatgggtgattaagtttaacaaaggtcatgcaccacatgaaaatatgatctactggtttgcactaccggccggacaaactccagttggtcgaacggagtttgtaacagtgaatgcagacggcacaaatgtacaatggagtaacggtgcaggagccggtgcgaacaaaccacttccagaaatgtggccatatggggtaaacgactcacgttcgtgggactacaaaattagaaataggagtgggcaggtgatttatgattggccaactgtccatattaatagcttaaaggatttagcacgtgcaagtgactattttagtgaagctggagcaacacctgctacaaaagcttttggtagacaaacattcgaatatattaatggtgaaaggccgacagaatcacctggtgtaccaaaagtttatacatttattggtaaaggtgatgcaagttatacgatttcatttaaaacgcaaggtccaacaattgataagctgtactatgcagcaggtgggcgtgctttagaatacaatcaattatttatgtatagtcagttatatgtcgaatcaacacaagactatcaacaacgtcttaatggtttaagacaagtggttaatcgtacttatcgtataggtacaactaaacgagtagaagtgagtcaaggaaatgtacaaacaaaaaaggtattagaaagtacgaacctaaatatagatgactttatggatgatccattaagttatgttaagacaccaagtaataaagtattaggtttttatccaactagtgcaaacactaacgcttttagaccgggtggagtcaatccattaaatgaatatcaattaagtcaattatttactgatgataaattgcaacaggcagctagaactggcagcccaatacgattaatgattggtttcgactatcctgatgcttttggtaacggtgaaactttagtgcctgttaacttaacagtattacctgaaattcaacataacattaaattctttaaaaatgatgacggtcaaaatattgctgataaacctgcttcaaaacaagctggacatccggttttctatgtatatgcaggtaatcaagggaatgcttcagtaaacttaggtggtagtgtaacatctatacaaccgttacgtattaatttaacaagtaatgaaaactttacagataaagattggcaaattacaggtattccacgtacattacacattgagaattcaacaaatagaactaataatgctagagaacgtaatattgaactggttggtaatttattaccaggcgattactttggaacaatacgatttggacgtaaagaacaattattcgagattcgtgttaagccacatacgcctagaattactacaacagcagaagaattaagaggtacagcattacaaaaggtacctgtaaccgttacggatattccattggatccatctgcattagtatatttagttatacctacgtctcaaacaagagatggtggttctgaggcagatcaaataccatcaggttatacaaaaattgcgacgggtacacctgatggggttcattcaacgataacgatacgaccagaagattatgtagtatttatacctccggtaggtaatcaaattagggcgttaatattttacaataatgtagttgcctcaaatatgagtaatgcagtaactattttacctgatgatattccaccgacaattaataacccagttggattaaatgcgaaatattatcgtggcgatgaagttagctttactatgggggtttcagatagacattctggattaaaaagtacaactattacgacattgccaagtggttggacatcaaatttaactaaatccgacaagaaaaacggctcattagctatttcaggtagagtctctatgaatcaggcctataatagtgatattacattcaaagtgtcagcaaccgacaatgtcaataatacgacgaatgatagtcagtctaaacatgtgacagtgcatgtaggtaaaattagtgatgatgcgcatccaattgtcttaggaaattctgaaaaagttgtcgttgtaaatccgactgctttaactggtgatgaaaagcaacgtattactactgcgtttatgaataaaaaccaaaatataagaggttatttagcttcatcaaatccagttacagtagataatcatggtaatgtcacattgcaatatcgtgatgggtcatcaactacgcttgatgcgacaaacgtgatgacatacgaaccagttgttaagcctgaatatcaaactgctaatgctgctaaaacggcaacggttacaattgctaaagggcaatcttttaatattggagatatcaaacaatatttcactttaagtaatggacaagcgattccaagcagttcatttacaaacattacatcggatagaacgattccaactgcgcaagaagttagtcaaatgaacgctggcacacagctatatcatatagttgctacaaatgcgtatcataaagacactgaagatttctatatcactttgaaaatcattgatgtgaaacaaccagaaggtgatcaacgtgtatatcgtatgtcaacatatgatataactactgatgaaatttcaaaagtgaaacaagcatttatcaatgccaatagagatgcgatttcatttgcagaaggagatatttcagtaacaaatacaccgaatggttctaatgtgagtaccattactgtcaatataaataaaggtcgattaacgaaatcgttcacatcaaatcttaataatatgaacttcttacgttgggttaacttccctcaagattatacagtgacatggacaaacgcaaaaattgcaaatagaccgactgatggtggtttatcatggtctgatgatcataaatcattaatttatcgctatgatgcaacattaggtacgcaaattacgacgaatgatattttaactttgttaaaagcgacaacaacggtgcctggattacgtaataacattgctggtaatgaaaaagcacaagcagaagctggtggtagaccaaactataaaacaactggttattcacaatcaaatccaacatctgatggtcaacgacaatttacgttgaatggtcaagtcattcaaataatggatattattaatccttcaaatggatttggtgggcaacctgttacaaattcaaatgtccgtgcgaaccacagtaactcgactgtcgttagtgttaatgaatcagcagctaatggtgcgggtgcatttacaatagatcatgtagtaaaaaataattctacgcataatgcagctgatgcagtttataaagcgcagttatacttatcgccatatggaccaaaacaatatgttgaacatttaaatcaaaatacggacaatacgaatgaagcaattaacatttattttgtacctagtgatctagtaaatccaacgatttcagtaggtaattacacaaatcatcaagtattctctggtgaaacatttaccaatacgattacagcgaatgataattttggtgtgcaatctgtaacagtaccaacgacatcacaattgacaggcactgttgataataatcatcaacatgtttcagcaacagcaccaaatgtgacatctactacaaataaaacaattaatttggttgcaactgatacaagcggtaatactgcaacaacgtcattcaatgtcacaattaaacctttacgtgataaatatcgagttggaacatcatcaacggctgctaatccagtgagaattgccaatatttcgaataatgcgacagtatcgcaagctgatcaaacagcaattattaattcattaacgtttacaagcaatgcaccaaatagaaactatgcaacagcaagtgcaaatgaaatcactagtaaaacagtgagtaatgtgagtcgtacaggaaataacgcacaagtaactgtaactgttacttatcaagatggaacaacatcaacagtgacagtacctgtaaagcgtgttattccagaaatcgttgcacattcgcattacactgtacaagggcaagacttcccaacaggtaatggagcaagtgcatctgattactttaaattatcgaatggtagtgccattccagatgcgacgataacatgggtaagtggtcaagcgccaaacaaaaataatacaactataggtcaagatatcaatgtaactgcacatatcttaattgatggtgaaacaaccccaattacgaaaacagcaacatataaagtggtaagaactgtaccaaagcaagtctttgaaacagccagaggtgtcttatacccaggtgtttcagatatgtatgatgcgaaacaatatgttaagccagtaaataattcttggtcgacaaatgcgcaacatatgaatttccaatttacaaattcatatggaccaagtaaagatgtagtaggtatttcaac

SEQ ID NO: 12095 - DNA, 5456 bp, Staphylococcus aureus
aagggatatccgagttacttatgataatcaccaaacacaaattatcaagattttatctaaagttaagcctgatccaccgagaattgacggaaactctgtgacatacaaagcaggcttaactaaccaacaaatcaagattaataatgttttaagtagttcttctattaaattatttaaagcagataatacaccattaacaattactaacacgacttatggtagtggaaatactgcagtagttactgtaagtgatgcgttaccaaatggtgaaattaaagcaagatcttcgatttcaatgaataatgtaacttatacgacacaagacgaacatggacgagctatagatgtaacaagaaatgaatctgttgattcaaatgacagtgcttctgtacatgtgacacctcaattacaagcgactactgaaggcgctgtatttattaaaggtggcgacggttttgatttcggtcatgtagaacgatttattcaaaatccaccacatggggcaacggttgcatggcatgataatccagatacatggaagaatacagtcggaaacactcataaaactgcggttgtaacattaccaaatggtcaagggacacgtaatgtagaagtacctgtcaaagtttatccagttgctaatgccaaagcgccatctcgtgatgttaaaggtcaaaatttgactaatggaacggatgcgataaactacattacatttgatccaaatacaaacacaaatggtatcactgcagtatgggcaaatagacaacaaccaaataaccaacaagcaggcgttcaacatttaaatgtcgatgtaacatatccaggtatttcagctgcaaaacgtgtacctgttactgtgaatgtatatcaatttgaattccctcaaacttcttatacaacaacagttggtggcactttagcaagtggtacgcaagcatcaggatatgcacatatacaaaatgctactggtttaccaacagatggatttacgtataaatggaataatgcagcaacaggtacaaacgatgcaaactgggcagcaatgaataaaccaaatactgcacaagtcattaatgcaaaatatgatgtcatctataatggacatacatttgcaacatctctaccagcgaagtttgtagtaaaagatgttcaaccagcgaaaccaactgttacagaaacggcagcaggagtaattacgattgcacctggagcaaaccaaacagtgaatacacatgccggtaacgtaacgacatacgctgataaattagttattaaacgtaatggtaatgttgtgacgacatttactcgtcataataatacgagtccatgggtgaaagaagcatctgcagcaaatgtagcaggtattgctggaacgaataatggtattactgttgcagctggtactttcaatcctgctgatacaattcaagctgttgcaacacaaggtagtggtgaaacaatcagtgacgaacaacgtagtgatgatttcacagttgtcgcacctcaaccgaaccaagcgactactaagatttggcaaaatggtcatgttgatatcacgcctaataacccgtctggacatttaattaatccaactcaagcaatggatattgcttacactgaaaaagtgggtaatggtgcagaacatagtaagacacttaatgctgttcgtggtcaaaataatcaatggacaatcgccaataaacctgactatgtaacgctagatgcacatactggtaaagtgacgttcaatgccaatactattaagccaaattcagcaatcaccattacaccgaaagcaggtactggtcactcagcaagcagtaatccaagtacattaactgcaccggcagcacatactgtcaacacaactgaaattgtaaaagattatggttcaaatgtaacagcagctgaaattaacaatgcagttcaagttgctaataaacgtactgcaacgattaaaaatggcacagcaatgcctactaatttagctggtggtagtacaacgacgatccctgtgacagtaacttacaatgatagcagtactgaagaagtacaagagtccattttcacaaaagcggataaacgtgagttaatcacagctaaaaatcatttagatgatccagtgagtacagatggtaaaaagccaggtacaattacgcagtacaataatgcaattcataatgcgcaacaacaaatcaatactgcgaaaacagaagcgcaacaagtgattaatgatgagcgtgcaacaccacaacaagtgaacgcagcattatctaaagttcaagctgcacaaactaagataaatgaagctaaagcattacttcaaaataaagaagataatagccaattagtaacatctaaaaataacttacaaagttctgtgaaccaagtaccatcaactactggtatgacgcaacaaagtattgataactataatgcgaagaaacgtgaagcagaatctgaaattacagcagctcaacgtgtcattgataatggtgacgcaacagcacaacaaatttcagatgaaaaacatcgtgtcgataacgcattaacagcattaaaccaagcgaaacaaaatttaacagcagatacacatgaattagagcaagcagtacatcaattgaatcgtacaggtacaacgacaggtaagaaaccagcaagtatcactgcatacaataattcgattcgtgcacttcaaagtgacttaacaagtgctaaaaatagtgccaacgctattattcagaagccaattagatcagtgcaagaggtacaaacagcattaacgaatgtaaatcgtgtaaatgaccgattaacgctagctattaatcaattagtacctttagctgataatagtgctttaagaactgctaaaacgaaacttgatgaagaaatcaataaatcagtaactactgatggtatgacacaatcatcaatccaagcatatgaaaatgctaaacgtgcgggtcaaacagaatcaacaaatgcacaaaatgttattaacaatggtgacgcaacagaccaacaaattgccgcaaaaaaaactaaagtagaagaaaaatataatggcttaaaacaagctattgccggattaacaccagacttggcaccattacaagctgcgaaaactcagttgcaaaatgatattgatcaaccaacgagcacgacaggtatgacaagtgcatcagttgctgcatttaatgacaaactttcagcagctagaactaaaattcaagaaattgatcgcgtactagcatcgcatccagatgttgcaacaattcgacaaaacgtgacagcagcgaatgctactaaaacagcacttgatcaagcacgcaatggcttaacagtagataaggcgcctttagaaaatgcgaaaaatcaactacaacaaagtattgatacgcaaacaagtacaactggtatgacgcaagattctattaatgcatacaatgcgaagttaacagctgcacgtaataagattcaacaaatcaatcaagtattagctggttcacctactgtagatcaaattaatacaaatacgtctgcagcaaatcaagcgaaatctgatttggatcatgcgcgtcaagctttaacaccagataaagcaccgcttcaaactgcgaaaacgcaattagaacaaagcattaatcaaccaacggatacaacaggtatgacgaccgcttcgttaaatgcgtacaaccaaaaattacaagcagcgcgtcaaaagttaactgaaattaatcaagtgttgaatggcaacccaacggtccaaaatatcaatgataaagtggcagaggcaaaccaagctaaggatcaattaaatacagcacgtcaaggtttaacattagatagacaaccagcgtttacaacattacatggtgcatctaacttaaaccaagcacaacaaaataatttcacgcaacaaattaatgctgcaccaaatcatgctgcacttgaaacgatcaagtctaacattacagctttaaataatgcgatgacaaaattaaaagacagtgttgcggataataattcgattaaatcaggtcaaaattacactgacgcaacaacggctaataaacaagcgtatgacaatgcagttaatgcagctaaaggtgtcattggagaaacgactaatccaacgatggatgttaatacagtgaaccaaaaagcagaaacagtgaaatctacaaaaggcgctttagatggtcaacaaaacttacaacgtgcgaaaacagaagcaacaaatgcgattacgcatgcaagtgatttaaaccaaacacaaaagaatgcattaacacaacaagtaaataatgcacaaaatgtacaagcagtaaatgatattaaacaaacgactcaaagcttaaatactgctatgacaggtttaaaacgtggcgttgctaatcataaccaagtcgtacaaagtgataattatgtcaacgcagatactaataagaaaaatgattacaacaatgcatacaaccatgcgaatgacattattaatggtaatgcacaacatccagttataacaccaagtgatgttaacaatgctttatcaaatgtcacaagtaaagaacaggcattgaatggtgaagctaagttaaatgctgcgaagcaagaagcgaacacagcattaggtcaattaaataacttgaataatgcacaacgtcaaaacttacaatcgcaaattaatggtgcgcatcaaatcgagacagttaatacgattaagcaaaatgcaactaacttaaatagtgcaatgggtaacttaagacaagctgttgcagataaagagcaagtgaaacgtacagaagattatgcggatgcagatacagctaaacaaaatgcatataatagcgccgtttcaagtgctgaaacaatcattaatcaaacaacaaatccaacgatgtctgttaatgatgttaacagtgcaacttcagctgttactactaataaaaatgcattaaatggtgatgaaaaattagcacaatctaaaacagatgctgcaagtgcaattgatgcattaccacatttaaataatgctcaaaaagcagatgttaaatctaaaattaatgctgcatcaaatattgctggtgtaaatactgttaaacaacaaggtacagatttaaatacagcgatgggtaacttgcaaggtgcaatcaatgatgaacaaacgacattaaatagtcaaaattatcaagatgcgacaccaagtaagaaaacagcatacacaaatgcggtacaagcagcgaaagatattttaaacaaatcaaatggtcaaaataaaacgaaggatcaagttacagaagcgatgaatcaagtgaattcggctaaaaataacttagatggtacgcgtttattagatcaagcaaagcaaacagcgaaacagcagttaaataatatgacgcatttaacaactgctcaaaaaacgcatttaacaaatcaaattaatagtggtacta

SEQ ID NO: 12096 - DNA, 5456 bp, Staphylococcus aureus
ctgtcgctggtgttcatacggctcaatcaaatgcgaatacattagatcaagcgatgaatacgttaagacaaagtattgccaacaaagatgcgactaaagcaagtgaagattacgtagatgctaataatgataagcaaacagcatataacaacgcagtagctgctgccgaaacgattattaatgcgaatagtaatccagaaatgaatccaagtacgattacacaaaaagcagagcaagtgaatagttctaaaacggcacttaacggtgatgaaaacttagctacggcaaaactaaatgcaaaaacatacttaaacacattgacaagtattactgatgctcaaaagaacaatttgattagtcaaattagtagtgcgacaagagtgagtagtgttgatactgtaaaacaaaatgcgcaacatctagaccaagctatggctagcttgcaaaatggtattaacaacgaatctcaagtgaaatcatctgagaaatatcgtgatgctgacacaaataaacaacaagagtatgataatgctattactgcagctaaagcgattttaaataaacaacatggtccaaacactgcgcaaaatgcagttgaagcagcattgcaacgtgtgaaaactgcgaaaaatgcattgaatggtgatgccaaattaattgcagctcaaaacgcagcgaaacaacatctaggtactttaacgcatatcactacagcacaacgcaatgatttaacaaatcaaatttcacaagctacaaacttagctggtgttgaatctgttaagcaaagtgcgaatagtttagatggtgctatgggtaacttacaaacggctatcaacgataagtcaggaacattagcgagccaaaacttcctagatgctgatgagcaaaaacgtaatgcttacaatcaagctgtatcaaatgccgaaacaattttaaataaacaaactggaccgaatacagcgaaaactgcagtcgaacaagcacttaataatgttaatagtgcgaaacatgcattaaatggtacgcaaaacttaaataatgcgaaacaagcagcgattacagcaatcaatggcgcatctgatttaaatcaacatcaaaaagatgcattaaaagcacaagctaatggtgctcaacgcgtatctaatgcacaagatgtacaacgtaatgcgactgaactgaacacggcaatgggtcaattacaacatgccatcgcagataagacgactacgttagcaagcagtaaatttgttaacgccgatagcactaaacaaaatgtttacacaactaaagttaccaatgctgaacatattattagcggtacgccaacggttgttacgacaccttcagaagtaacagctgcagctaatcaagtaaacagcgcaaaacaagaattaaatggtgacgaaagattacgtgttgcaaaacaaaacgccaatactgctattgatgcattaacgcaattaaatacacctcaaaaagctaaattaaaagaacaagtgggacaagccaatagattagaagacgtacaatctgttcaaacaaatggacaatcattgaacaatgcaatgaaaggcttaagagatagtattgctaacgaaacaacagtcaaagcaagtcaaaactatacagacgcaagtccgaataaccaatcaacatacaatagcgctgtgtcaaatgcgaaaggtatcattaatcaaactaacaatccgactatggatgctagtgcgattacccaagctacaacacaagtgaataatgctaaaaatggtttaaacggtgctgaaaacttaagaaatgcacaaaacactgctaagcaaaacttaaatacgttatcacacttaacaaataaccaaaaatctgcaatctcatcacaaattgatcgtgcaggtcatgtgagtgaggtaacagctgctaaaaatgcagcaactgagttaaacacgcaaatgggcaacttggaacaagctatccatgatcaaaacacagttaaacaaggtgttaacttcactgatgcagataaagccaaacgtgatgcgtatacaaatgcggtaagcagagcagaaacaattctgaacaaaacgcaaggtgcaaatacgcctaaacaagatgtagaagcggctattcaaagtgttactagcgctaaaaatgcattgaatggtgatcaaaatgtcacaaatgcgaagaatgcagctaaacatgcattaaataatttaacttcaattaataatgcacaaaaacgtgacttaacaactaaaattgatcaagcaacaacagtatctggtgttgaagcggtatctaatacaggtacgcaattgaatacagcgatggctaacttgcaaaatggtattaatgataaaacgaatactttagcgagcgaaaactatcatgatgctgattcagataagaaaactgcttatactcaagccgttacgaacgcagaaaatattttaaataaaaatagtggatcaaatttagacaaagctgccgttgaaaacgcgttgtcacaagtgacaaatgcgaaaggtgccctaaatggtaaccataatttagagcaagctaaatcaaatgcaaacactactataaacggacttcaacatttaacaactgctcaaaaagataaattgaaacaacaagtgcaacaagcacaaaatgttgcaggtgtagatactgttaaatcaagtgccaacacattaaatggtgctatgggtacgttaagaaatagcattcaagataacgcagctacgaaaaatggccaaaactatcttgatgctacagaaagtaacaaaacaaactataacaatgctgttgatagtgctaatggtgtcattaatgcaacaagcaatccaaatatggatgctaatgcaattaaccaaatcgctacacaagtgacatcaacgaaaaatgcattagatggtacacataatttaacgcaagcgaaacaaacagcaacaaatgcgattgatggtgctactaacttaaataaagcgcaaaaagatgcgttaaaagcacaagttacaagtgcgcaacgtgttgcaaatgtaacaagtatccaacaaactgcaaatgaacttaatacagctatgggtcaattacaacatggtattgatgatgaaaatgcaacaaaacaaactcaaaaatatcgtgatgcagagcaaagtaagaaaactgcttatgatcaagctgtagctgctgcgaaagcaattttaaataaacaaactggatcaaattcagataaagcagcagttgaccgtgcattacaacaagtaacaagtacgaaagatgcattgaatggggatgctaaactggcagaagcgaaagcggcagctaaacaaaacttaggcactttaaaccatattacgaatgcacaacgtactgacttagaaggccaaatcaatcaagcgacgactgttgatggcgttaatactgtgaaaacaaatgccaatacattagacggcgcaatgaatagcttgcaaggttcaatcaatgataaagatgcgacattaagaaatcaaaattatcttgatgcggatgaatcaaaacgaaatgcatatacgcaagctgtcacagcggctgaaggcattttaaataaacaaactggtggtaacacatctaaagcagacgttgataatgcattaaatgcagttacaagagcgaaagcggctttaaatggtgctgacaacttaagaaatgcgaaaacttcagcaactaatacgattaatggtttaccacacttaacacaattacaaaaagacaacttgaagcatcaagttgaacaagcgcaaaatgtagctggtgtaaatggtgttaaagataaaggtaatacattaaatactgccatgggtgcattacgtacaagtatccaaaatgataatacgacgaaaacaagtcaaaattatcttgatgcatctgatatcaacaaaaataattacaatactgctgtaaataatgcaaatggtgttattaatgcaacgaacaatccaaatatggatgctaatgcgattaatggcatggcaaatcaagtcaatacaacaaaagcagcgttaaatggtgtacaaaacttagctcaagctaaaacaaatgcgacgaacacaattaataacgcacatgacttaaatcaaaaacaaaaagatgcattaaaaacacaagttaacaatgcacaacgtgtatctgatgcaaataacgttcaacatacagctactgaattgaacggcgcgatgacagtacttaaagcagctattgctgataaagaaagaacaaaagcaagcggaaattatgtcaatgctgatcaagaaaaacgtcaagcgtatgattcaaaagtgactaacgccgaaaatatcattaatggtacaccgaatgcgacattaacagtcaatgacgtaaatagtgcaacttcacaagtgaatgcagctaaaacagtattaaatggtgataacaacttacgtgttgcgaaagagcatgccaacaatacaattgatggcttagcgcaattgaataatgcacaaaaagcaaaattaaaagaacaagttcaaagtgcaactacattagatggcgttcaaactgttaaaaatagttctcaaacgttgaatacagcgatgaaaggcttaagagatagtattgcgaatgaagcaacaattaaagcaggtcaaaactacactgacgcaagtccaaataatcgtaacgagtacgacagcgcagttactgcagcaaaagcaatcattaatcaaacatcgaacccaacgatggaaccaaatactattacgcaagcaacatcgcaagtgacaactaaagaacaagcattaaatggtgcgcaaaacttagctcaagctaagacaactgcgaaaaacaacttgaataacttaacatcaattaacaatgcacaaaaagatgcgttaacgcgtagcattgatggtgcaacaacagtagctggtgtaaatcaagaaactgtcaaagcaactgaattaaataacgcaatgcacagtttacaaaatggtatcaatgatgagacacaaacaaaacaaactcagaaatacctagatgcagagccaagtaagaaatcagcttatgatcaagcagtaaatgcagcgaaagcaattttaacaaaagctagtggtcaaaatgtagacaaagcagcagttgaacaagcattacaaaatgtgaatagtactaagacagcgttgaacggtgatgctaaattaaatgaagctaaagccgctgcgaaacaaacgttaggtacattaacacacattaataatgcacaacgtacagcgttagataatgaaattacacaagcaacaaatgttgaaggtgttaatacagttaaagccaaagcgcaacaattagatggtgctatgggtcaattagaaacatcaattcgtgataaagacacgacgttacaaagtcaaaattatcaagatgctgatgatgcgaaacgaactgcttattctcaagcagtaaatgca

SEQ ID NO: 12097 - DNA, 5456 bp, Staphylococcus aureus
gcagctacaattttaaataaaacatctggcggtaatacacctaaagcagatgtcgaaagagcaatgcaagctgttacacaagccaatactgcattaaacggtattcaaaacttagaacgtgcgaaacaggctgctaacacagcgattacaaatgcttcggacttaaatacaaaacaaaaagaagcattgaaagcacaagtaacaagtgcaggacgcgtatctgtagcaaatggtgttgaacatactgctactgaattaaatactgcgatgacagctttaaaacgtgccattgctgataaagctgacacaaaagctagtggtaactatgtcaatgctgatgcgaataaacgccaagcatatgatgaaaaagtgacagctgcagaaaatatcgttagtggtacaccaacaccaacgttaacaccatcagatgttacaaacgcagcaacgcaagtaacgaatgcgaagacgcagttaaacggtaatcataatttagaagtagcgaaacaaaatgccaacacagcaattgatggtttaacttctttaaatggtccgcaaaaagcaaaacttaaagaacaagtgggtcaagcgacaacgttgccaaatgttcaaactgttcgtgataatgcacaaacattaaacactgcaatgaaaggtctacgagatagcattgcgaatgaggcgacgattaaagcagaacaaaactacacggatgcaagtcctaataatcgtagtgaatacgatagtgcagtcactgcagcaaaagcaatcattggtcaaacatcaagtccaacaatgaatgctcaagaaatcaatcaagcgaaagaccaagtgacagctaaacaacaagcgttaaacggtcaagaaaacttaacaaacgcacaaataaatgcgaaacaacatttgaatggcttaagtgacttaactaatgcacaaaaagatgcagcaaaacgccaaatcgaaggtgcaacgcatgttagtgaagtaacacaagcgcaaaataatgcggacgcattaaatacagctatgacgaacttgaaaaatggtattcaagatcaaaatacgattaagcaaggtgttaacttcactgatgcagatgaagcgaaacgtaatgcatatacaaatgcagtgacgcaagctgaacaaattttaaataaagtacaaggtccaaatactgcaaaagacaatgttgaatctgcgttacaaaatgtacaacgtgctaaaaacgatttgaacggtaatcaaaatgttgcaaatgctaagacaactgcgaaaaatgcattaaataatttaacatcaattaataatgcacaaaacgaagcgttgaaatcacaaattgatagtgcgacaacagttgcaggtgtaaatcaagtgtctgcaacggcatctgaattaaatacagcaatgagcaacttacaaaatggtattaatgatgaagcagctacaaaagcagctcagaaatatactgatgcagatagtgataaacaaactgcatacaatgatgctgtaacagcagctaaaacgttattagataaaacagctggcacaaatgacaataaagcagccgttgaacaagcattacaacgtgtgaatactgctaaaactgcattaaatggtgacgcgcgattaaatcaagcgaagaacacagctaaacaacaattagcgacaatgtcacatttaactgatgctcaaaaagcaaacttaacatcgcaaatcgaacgcggtacgactgttgcaggtgttcaaggtattcaagctaatgccggtactttaaatgaagcaatgaatcaattgagacaaagcattgcttctaaagatgcgactaaagcgagcgaagattatcatgatgcgaatacagatttacaaaatgcatacaatgatgcggtaactaatgctgaaggtattattagtgcaacgaataaccctgaaatgaatccagatacgattaatcaaaaagcgagccaagtgaacagtgcgaagtctgcattgaacggtgatgaaaaattagcagcagcaaaacaaactgcgaaatcagacatcggtcgtttaacagacttgaacaatgcacaacgaactgcggcaaatgctgaagtggatcaagcaccaaatcttgcagctgtcacagcggctaaaaataaagcaacatcgttaaatacagcgatgggtaatttgaaacatgcacttgctgaaaaggataatacgaaacgtagtgtcaattacacagatgcggatcaacctaaacaacaagcgtatgatactgcggttacacaagcagaagcaattactaatgctaatggcagcaacgcgaatgaaacacaagttcaagcagcgcttaaccaattgaatcaagctaaaaatgacttgaatggtgataataaagttgctcaagctaaagaaactgcgaaacgtgcattagcttcatatagtaacttgaataatgcgcaatcaactgcagcaactagtcaaattgacaatgcaacgacagtagcaggcgtaactgctgcacaaaatactgctaatgagttaaatacagcaatgggtcaacttcaaaatggtattaatgaccaaaacactgttaaacaacaagtgaactttacagatgctgaccaaggtaagaaagatgcttacacaaatgctgttacgaatgctcaaggtattttagataaagcacacggtcaaaatatgacgaaagcacaagttgaagctgcattaaatcaagtaacgactgctaagaatgctttaaacggtgacgcaaatgtaagacaagcaaaatcagatgcgaaagcaaacttaggcacattaacacacttaaataatgcacaaaaacaagatttaacatcacaaatcgaaggcgcaacaacagtcaacggtgtaaatggtgttaaaacgaaagcacaagacttagatggtgcaatgcaacgattacaatcagcaatcgcaaataaagatcaaactaaagcgagcgaaaattacatcgacgcagatccaactaacaaaacagcatttgataatgccatcacacaagcagaatcatacttaaataaagatcacggtgcgaataaagataagcaagctgttgaacaagcaattcaaagtgtaacgtctactgaaaatgctttgaacggtgacgcaaacttacaacgtgctaaaactgaagctacgcaagctatcgataacttgacacatttgaatacaccacaaaaaacagcattaaaacaacaagtgaatgctgcgcaacgtgtatcaggtgtaactgatctgaaaaatagtgctacatcacttaataatgcgatggatcaattaaaacaagcaattgctgatcatgacacaattgtagctggtggtaattacactaacgcgagtcctgataagcaaggtgcttatactgatgcatataatgctgcgaaaaacattgtaaatggttcacctaatgtgattacaaatgcagcagatgttacagcagcaacacaacgtgtcaataatgctgaaacaggtttaaacggtgatacaaacttagcaactgcgaagcaacaggctaaagatgcattacgtcaaatgacacatttatctgatgcacaaaaacaaagtattactgttcaaattgataatgcgacacaagtaactggcgttcaaagtgtgaaagacaacgcgacaaatcttgataatgcaatgaatcaacttcgaaatagtattgcgaataaagatgaagtaaaagcgagtcaaccatatgttgatgcagatagagataaacaaaatgcatacaacacagctgttacaagtgctgaaaatatcattaatgcaacgagtcagccgacacttgatccatctgcagtaacacaagcagctaatcaagtgaacactaacaaaactgcgcttaatggtgcacaaaacttagcaaataaaaagcaagaaacaactgccaacatcaaccaattaagtcatttaaataatgctcaaaagcaagatttaaatacgcaagtgacaaatgcaccaaatattagcacagtaagtcaagtgaaaactaaagctgaacaattagatcaagcaatggaacgtttaatcaacggaatccaagacaaagatcaagtgaaacaaagtgttaactttacagatgcagatccagaaaaacaaacagcatacaacaatgcggtaactgctgctgaaaatattattaatcaagcaaatggtacaaatgcgaaccaatcacaggttgaagcagcactttcaactgtaacaactactaaacaagcattgaatggtgatagaaaagtaacagatgctaaaaacaatgcaaaccaaacattatctacgttagataacttaaacaatgcgcaaaaaggtgctgttactggaaacatcaatcaagcgcacactgttgctgaagtaacgcaagccattcaaacagctcaggaactaaatacagcgatgggtaacttgaaaaatagcttgaatgataaagacactacacttggcagtcaaaactttgcagatgcagatccagagaagaaaaatgcatacaatgaagcggttcgtaatgctgaaaatattttaaataaatctacaggtacaaacgtgtctaaagatcaagttgaagcagctatgaatcaagtgaatactacaaaagcagcgcttaatggtactcaaaaccttgaaaaagctaaacaacacgcaaatacagcgattgacggtttaagccatttaacaaatgcacaaaaagaggcattaaaacaattggtacaacaatcgactactgttgcagaagcacaaggtaatgaacaaaaagcaaacaatgttgatgcagcaatggacaaattacgtcaaagtattgcagataatgcgacaacaaaacaaaaccaaaattatactgattcaagtccgaataaaaaggatgcgtacaataatgctgtcacaactgcacaaggtattattgatcaaacgacaagtccaactttagatccgactgttatcaatcaagctgctggacaagtaagcacaactaaaaatgcattaaatggtaatgaaaacctagaggcagcgaaacaacaagcgacacaatcattaggttcattagacaacttaaataatgcgcaaaaacaagcagttactgatcaaattaatggcgcgcatactgttgatgaagcaaatcaaattaaacaaaatgcgcaaaacttaaatacagcgatgggtaacttgaaacaagcgattgctgacaaagatgctacgaaagcaacagtaaacttcactgatgcagatcaagcaaaacaacaagcatataacactgctgttacaaatgctgaaaacatcatttcaaaagctaatggtggcaatgcaacacaaactgaagttgaacaagcaatccaacaagttaatgctgcaaaacaagcattaaatggtaatgccaacgttcaacatgcgaaagacgaagcaacagcattaattaatagctctaatgaccttaa

SEQ ID NO: 12098 - DNA, 5456 bp, Staphylococcus aureus
ccaagcacaaaaagacgcattaaaacagcaagttcaaaatgcaactactgtagctggtgtaaacaatgttaaacaaacagcgcaagagttaaacaatgcaatgacacaattaaaacaaggcattgcagataaagaacaaacaaaagctgatggtaactttgtcaatgcagatcctgacaaacaaaatgcatataaacaagcagtagcaaaagctgaagcattaattagcggcacacctgatgttgtcgttacacctagcgaaattactgcagcgttaaataaagttacacaagctaaaaatgatttaaatggtaatacgaacttagcaacaacgaaacaaaatgttcaacatgctattgatcaattgccaaacttgaatcaagcgcaacgtgatgaatacagcaaacaaattacgcaagcaacacttgtaccaaacgtcaatgctattcaacaagcggcaactacgcttaatgatgcgatgacacaattgaaacaaggtattgcgaataaagcacaaattaaaggtagcgagaactatcacgatgctgatactgacaagcaaacagcatatgataatgcagtaacaaaagcagaagaattgttaaaacaaacaacaaatccaacaatggatccaaatacaattcaacaagcattaactaaagtgaatgatacaaatcaagcacttaacggtaatcaaaaattagctgatgctaaacaagctgctaagacaaatcttggcacattagatcatttaaatgatgcgcaaaaacaagcgttaacaacacaagttgaacaagcaccagatattgcaacagttaataatgttaagcaaaatgctcaaaatctgaataatgctatgactaacttaagtaatgcattacaagataaaactgagacattaaatagcattaactttactgatgcagatcaagctaagaaagatgcttatactaatgcggttgcacatgcagaaggtattttatctaaagcaaatggcagcaatgcaagtcaaaccgaagtggaacaagcgatgcaacgcgtgaacgaagcgaaacaagcattgaatggtaatgacaatgtacaacgtgcaaaagatgcagcgaaacaagtgattacaaatgcgaatgatttaaatcaagcgcaaaaagatgcgttaaaacaacaagtcgatgctgcgcaaactgttgcaaatgtaaacacgattaagcaaacagcacaagatttaaatcaagcaatgacacaattgaaacaaggtattgcagataaagaccaaactaaagcaaatggtaactttgtcaatgctgatactgataagcaaaatgcatacaacaatgcggtagcacatgctgaacaaatcattagtggtacaccaaatgcaaacgtggatccacaacaagtggctcaagcgttacaacaagtgactcaagctaagggtgatttaaacggtaaccataacttacaagttgctaaagacaatgcgaatactgccattgatcagttaccaaacttaaatcaaacacaaaaaacagcattaaaagaccaagtgtcacatgcagaacttgttacaggtgttaatgctattaagcaaaatgctgatgcattaaataatgcaatgggtacgttgaaacaacaaattcaagcaaacagtcaagtaccacaatcagttgactttacacaagcggatcaagacaaacaacaagcatataacaatgcagctaaccaagcgcaacaaattgcaaatggcacaccaacacctgtattgacgcctgacgcagtaacacaagcagttactacaatgaatcaagcgaaagatgcattaaacggtgatgaaaaattagcgcaagcgaaacaagatgcaatagcaaatctagatacgttgcgtgacttaaatcaaccacaacgtgatgcgttacgtaatcaaatcaatcaagcacaagcgttagctacagttgaacaaactaaacaaaatgcacaaaatgttaatacagcaatgagtaacttgaaacaaggtattgcaaataaagataccgtcaaagcaagtgaaaactatcacgatgctgatgccgataagcaaacagcatatacaaatgcagtgtctcaagcggaaggtattatcaatcaaacgacaaatccaatgcttaacccagatgatattactcgtgcattaactcaagtgactgatgctaaaaatggcttaaacggtgaagctaaattggcaactgaaaagcaaaatgctaaagatgctgtcaatgcaatgacgcatttgaacgatgctcaaaaacaagcattaaaaggacaaatcgatcaatcgcctgaaattgctatagtgaaccaagttaaacaaacagcaacgagcctagatcatgcaatggatcaattatcacaagctattaatgataaagctcaaacattagcggacggtaattacttaaatgcagatcctgacaaacaaaatgcgtataaacaggcagtagcaaaagctgaagcattattgaataaacaaagtggtactaatgaagtacaagcacaagttgaaagcatcactaatgaagtgaacgcagcgaaacaagcattaaatggtaatgataatttagcgaatgctaagcaacaagcgaaacaacaactggcgaatctaacacacttaaatgatgcacaaaaacaatcatttgaaagtcaaattacacaagcgccacttgttacagatgtcactacaattaatcaaaaagcacaagcgttagatcatgcaatggatcaattatcacaagctattaatgataaagctcaaacattagcggacggtaattacttaaatgcagatcctgacaaacaaaatgcgtataaacaggcagtagcaaaagctgaagcattattgaataaacaaagtggtactaatgaagtacaagcacaagttgaaagcatcactaatgaagtgaacgcagcgaaacaagcattaaatggtaatgataatttagcgaatgctaagcaacaagcgaaacaacaactggcgaatctaacacacttaaatgatgcacaaaaacaatcatttgaaagtcaaattacacaagcgccacttgttacagatgtcactacaattaatcaaaaagcacaagcgttagatcatgcgatggaattattaagaaatagtgttgcggataatcaagcgacattagcgtctgaagattatcatgatgcaactgcgcaaagacaaaatgactataaccaagcagtaacagctactaataatatcattaaccaaacaacatcacctacaatgaatccagatgaagttaatcgtgcaacgacacaagtgaataacacgaaagttgcattagatggtgatgaaaaccttgtagcagctaagcaacaagcgaacaatagacttgatcaattagatcatttaaataatgcgcaaaagcaacagttacaatcacaaattacgcaatcatctgatattgctgcagttaatggtcacaaacaaacagcagaatctttaaatacagcaatgggtaacttaattaatgcgattgcagatcatcaaaccgttgaacaacttggtaacttcgtcaatgctgatactgataaacaaactgcttatactacagcggtaaatgaagcagaagccatgattaacaaacaaactggtcaaaatgcgaaccaaacagaagtagaacaagctattactaaagttcaaacaacacttcaagcgttaaatggagatcataatttacaagttgctaaagcaaatgcgacgcaagcaattgatgctttaacaagcttaaatgatcctcaaaaaacagcattaaaagaccaagttactgctgcaactttagtaactgcagttcatcaaattgaacaaaatgcgaatacgcttaaccaagcaatgcatggcttaagagaaagtattcaagataacgcagcaactaaagcaaatagcaaatatatcaacgaagatcaatcagaacaacaaaactacgatcaagcagtgcaagccgcaaataatattatcaatgaacaaacagcaacattagataataatgcaattaatcaagcagcgacaactgtgaatacaacgaaagcagcattacatggtgatgtgaaattacaaaatgataaagatcatgcgaaacaaacagttagtcaattaacacatttaaacaatgctcaaaaacatatggaagatacgttgattgatagtgaaacaactagaacagccgttaaccatgatttgactgaagcacaagcattagatcaacttatggatgcattacaacaaagtattgctgacaaagatgcaacacgtgcgagcagtgcatatgtcaatgcagaaccgaataaaaaacaatcatatgatgaagcagttcaaaatgctgagtctatcattgcgggattaaataatccgactatcaataaaggtaatgtaacaagtgcgacacaagctgtaacatcatctaaaaatgcattagacggtgttgaacgattagcgcaagataagcaaactgctggaaattctctaaatcatttagaccaattaacaccagcacaacaacaagcactagaaaatcaaattaataatgcaacaactcgtgataaagtggctgaaattattgcacaagcgcaagcattaaatgaagcgatgaaagcattaaaagaaagtattaaagatcaaccacaaactgaagcaagtagtaaatttattaatgaagatcaagcacaaaaagatgcttatacgcaagctgtacaacacgcgaaagatttgattaacaaaacaactgatcctacattagctaaatcaatcattgatcaagcgacacaggcagtgactgatgctaaaaataatttacatggtgatcaaaaactagatcaagataagcaacgtgcaacagaaacgttaaataacttgtctaacttgaatacaccacaacgtcaagcacttgaaaatcaaatcaataatgcagcaactcgtggcgaagtagcacaaaaattaactgaagcagaagcacttaaccaagcaatggaagctttacgtaatagcattcaagatcaacagcaaacggaagcgggtagcaagtttatcaatgaagataaaccacaaaaagatgcttaccaagcagcagttcaaaatgcaaaagatttaattaatcaaactaacaatccaacgcttgataaagcacaagttgaacaattgacacaagctgttaaccaagctaaagataacctacacggtgatcaaaaacttgcagacgataaacaacatgcggttactgatttaaatcaattaaatggtttgaataatccgcaacgtcaagcacttgaaagccaaataaacaacgcagcaactcgtgatgaagtagcgcaaaaattagctgaagcaaaagcgcttgatcaagcaatgcaagcattacgtaatagtattcaagatcaacaacaaacagaatctggtagcaagtttatcaatg

SEQ ID NO: 12099 - DNA, 5456 bp, Staphylococcus aureus
aagataaaccgcaaaaagatgcttaccaagcagcagttcaaaatgcaaaagatttaattaaccaaacaggtaatccaacactcgacaaatcacaagtagaacaattgacacaagcagtaacaactgcaaaagataacctacatggtgatcaaaaacttgctcgtgatcaactacaagcagtaacaactgtaaatgcattgccaaacttaaatcatgcacaacaacaagcattaactgatgctataaatgcagcgcctacaagaacagaggttgcacaacatgttcaaactgctactgaacttgatcacgcgatggaaacattgaaaaataaagttgatcaagtgaatacagataaggctcaaccaaattacactgaagcgtcaactgataaaaaagaagcagtagatcaagcgttacaagctgcagaaagcattacagatccaactaatggttcaaatgcgaataaagacgctgtagaccaagcattaactaagcttcaagaaaaagtgaatgagttaaatggtaatgagagagtcgctgaagctaaaacacaagcgaaacaaactattgaccaattaacacatttaaatgctgatcaaattgcaactgctaaacaaaatattgatcaagcgacgaaacttcaaccaatcgctgaattagtagatcaagcaacgcaattgaaccaatcaatggatcaattacaacaagcagttaatgaacatgctaacgttgagcaaactgtagattacacacaagcagatttagataagcaaaatgcttataaacaagctattgctgatgccgaaaatgtattgaaacaaaatgcgaataagcaacaagtggatcaagcacttcaaaatattttaaatgcaaaacaagcattaaatggtgatgaacgtgtagcacttgctaaaacaaatggtaaacatgatatagagcaattgaatgcattaaacaatgctcaacaagatggatttaaaggtcgcatcgatcaatcaaacgatttaaatcaaatccaacaaattgtagatgaggctaaggcacttaatcgtgtaatggatcaattgtcacaaggaatcactggcaatgaaggacgcacgaaaggtagcacgaactatgtcaatgcagatacacaagttaaacaagtgtatgatgaagcggttgataaagcgaaacaagcacttgataaatcgacaggtcaaaacttaactgcagaacaagttatcaaattaaatgatgcagtcactgcagcaaagaaagcattaaatggtgaagaaaaacttaataatcgtaagtctgaagcattacaaagattggatcaattaacacatctaaacaatgctcaaagacaattagcaatccaacaaattaataatgctgaaacgctaaataaagcatctcgagcaattaatagagcaactaaattagataatgcaatgggtgcagtacaacaatatattgacgaacagcaccttggtgttatcagcagcacaaattacatcaatgcagatgataatttgaaagcaaattatgataatgcaattgcgaatgcagcacatgagttagataaagtgcaaggtaatgcaattgcaaaagctgaagcagagcaattgaaacaaaatattattgatgctcaaaatgcattaaatggagaccaaaaccttgcaaatgccaaagataaagcaaatgcgtttgttaattcgttaaatggattaaatcaacagcaacaacatcttgcacataatgcaattaacaatgccgatactgtatcagatgtaacagatattgttaataatcaaattgacttaaatgatgcaatggaaacattgaaacatttagttgacaatgaaattccaaatgcagagcaaactgtcaattaccaaaacgctgaagataatgctaaaacaaacttcgatgatgctaaacgtctagcaaatacattgctaaatagtgataacacaaatgtgaatgatattaacggcgcaattcaaacagtcaatgatgcaatccaaaatcttaatggtgatcaacgactacaagatgctaaagacaaggcaattcaatctattaatcaagctttagctaataagctaaaagaaatcgaagcttcaaatgcgacggatcaagacaagcttattgcgaaaaataaagcagaagaattggcaaacagcatcatcaacaacattaataaagcaacaagtaatcaggatgtatctcaagttcaaacagctggcaaccatgcgattgaacaagtgcatgccaatgaaataccgaaagctaaaattgatgcgaataaagatgttgacaagcaagttcaagcattaattgacgaaattgatcgaaatccaattctaacagataaggaaaaacaagcgcttaaagatcgaattaaccaaatacttcaacaaggtcataacgacattaacaatgcgatgactaaagaagaaattgaacaagccaaagcacaacttggacaagcgttacaagacattaaagatttagtgaaagctaaagaaagcgcgaaacaagatattgataagcaagttcaagcattaattgacgaaattgatcgaaatccaattctaacagataaggaaaaacaagcgcttaaagatcgaataaatcaaatcctgcaacaaggtcataacggcattaacaatgcgatgactaaagaagaaattgaacaagccaaagcacaacttggacaagcgttacaagacattaaagatttagtgaaagctaaagaaagcgcgaaacaagatattgataagcaagttcaagcattaattgacgaaattgatcgaaatccaaatctaacagataaggaaaaacaagcgcttaaagatcgaataaatcaaatcttgcaacaaggtcataacggcattaacaatgcgatgactaaagaagaaattgagcatgccaaagcgcagcttgcacaagcattacaagacattaaagatttagtgaaagctaaagaagatgcgaaaaatgcaattaaagcattagcaaatgcgaagcgtgatcaaatcaattcaaaccctgatttaacacttgaacaaaaagcaaaagcgctcaaagaaattgacgaagctgaaaaacgagcactagaaaacattgaaaatgctcaaactaaagatcaattaaatcaaggattaaatttaggattagatgatattagaaatacacatgtatgggaagttgatgcacaacctgctgtaaatgaaatttttgacgcaactcctgaacaaatccttgtaaatggcgaactcattgtccatcgtgatgacatcattacagaacaagatattcttgcacacatcaacttaattgatcaacttacagcggaaattattgatacaccgtcaactgcaacaatttctgatagtttaacagcaaaagttgaagtaacattgcttgatggatcaaaagtgattgttaatgttcctgtgaaagtagtagaaaaagaattgacagtagttaaacagcaggcgattgaatcaattgaaaatgcggcacaacaaaagattaatgaaatcaataatcacgcaacattaacacctgaacaaaaagaagctgcgattgcggaagttaataagcttaaacaacaagctattgagcaaattaacaacgcagcagatgttcatacggtggaagaagttcaacaccaagaacaggcgcatattgaacaattcaatccagatcaatttacaattgaccaagccaaatcaaatgccattaaatcaatttctgatgctatccaacatatgattgatgaaattaatgctagtaaggatttaactgataaagagaagcaagaagctatatctaaattaaatcagttaaaagatcaatcaattcaggcgattcaacgtgcgcaaagcatcgatgaaattgcgcaacaattagagcaatttaaagcgcaactaaaagcggccaatccatttgctaaagaattggaaaaccgtaaaaaagctgcgatttcaaaaattaaagatatttctacagataaaattgatcgcattagaaatagcacaattggaactgctgaagaaagacaagcagcaatgaatcgaattaacgaaattgtgcttgaaacaatcaaagatattaataatgcgcaaacgccacaacaagttgaggctgcattgaataatggtatcgcacgaattttagcagtacaaattgtaacatcagatcatagcaaaccttcatcaaattcagatggtcaatctaatagtcatttacacgttggttatggcactgtaaatcatccattcaatagttcgcctattggacataagaagaaattggatcaagatgatgaaatcgatccacttcatatgcgtcatttcggtgaccgaattggtaatgttatcaaaaacgcacttggcgttgttggtatttctggattacttgctagcttctggttcttcattgcgaaacgtcgtcgtaaagagatgaagaggaagaattggaaattagagataatagcaaagacaagaagaaaggttcaatagaaggtactaaacatttaccacttttatttgcgaaacgtcgtagaaaagaagatgaagaagatgctattgttgaagaaaaagattcgctaaacaatgacgagtcactcgataaagttaaacatacgccgttcttcttacctaaacgtcgcagaaaagaagatgaagaagatgtggaagttacaaatgaaaacacagatgaaaaagtgttgcaagataacgaacattcaccggtcttaatcgcaaaacgactcaaagataaagatggaaatgttgaaacaacaactagtattgaatctaaagatgaagacgttcctttattattggctaaaaagaaaaatcaaaaagataaccaatccaaagggaaaaagtcggcatcaaaaaaaccttctaaaaaggtagcagctaaaaagaagaaaaagaaatctaaaaaaaataaaaaaatgaagaggaagaattggaaattagagataatagcaaagacaagaagaaaggttcaatagaaggtactaaacatttaccacttttatttgcgaaacgtcgtagaaaagaagatgaagaagatgctattgttgaagaaaaagattcgctaaacaatgacgagtcactcgataaagttaaacatacgccgttcttcttacctaaacgtcgcagaaaagaagatgaagaagatgtggaagttacaaatgaaaacacagatgaaaaagtgttgcaagataacgaacattcaccggtcttaatcgcaaaacgactcaaagataaagatggaaatgttgaaacaacaactagtattgaatctaaagatgaagacgttcctttattattggctaaaaagaaaaatcaaaaagataaccaatccaaagggaaaaagtcggcatcaaaaaaaccttctaaaaaggtagcagctaaaaagaagaaaaagaaatctaaaaaaaataaaaa

SEQ ID NO: 12100 - DNA, 312 bp, Staphylococcus aureus; identical to SEQ ID NO: 4248

SEQ ID NO: 12101 - DNA, 120 bp, Staphylococcus aureus; identical to SEQ ID NO: 4249

SEQ ID NO: 12102 - DNA, 234 bp, Staphylococcus aureus; identical to SEQ ID NO: 4250

SEQ ID NO: 12103 - DNA, 213 bp, Staphylococcus aureus; identical to SEQ ID NO: 4251

SEQ ID NO: 12104 - DNA, 108 bp, Staphylococcus aureus; identical to SEQ ID NO: 4252

SEQ ID NO: 12105 - DNA, 165 bp, Staphylococcus aureus; identical to SEQ ID NO: 4253

SEQ ID NO: 12106 - DNA, 117 bp, Staphylococcus aureus; identical to SEQ ID NO: 4254

SEQ ID NO: 12107 - DNA, 108 bp, Staphylococcus aureus; identical to SEQ ID NO: 4255

SEQ ID NO: 12108 - DNA, 90 bp, Staphylococcus aureus; identical to SEQ ID NO: 4256

SEQ ID NO: 12109 - DNA, 636 bp, Staphylococcus aureus; identical to SEQ ID NO: 4257

SEQ ID NO: 12110 - DNA, 156 bp, Staphylococcus aureus; identical to SEQ ID NO: 4258

SEQ ID NO: 12111 - DNA, 93 bp, Staphylococcus aureus; identical to SEQ ID NO: 4259

SEQ ID NO: 12112 - DNA, 441 bp, Staphylococcus aureus; identical to SEQ ID NO: 4260

SEQ ID NO: 12113 - DNA, 633 bp, Staphylococcus aureus; identical to SEQ ID NO: 4261

SEQ ID NO: 12114 - DNA, 618 bp, Staphylococcus aureus; identical to SEQ ID NO: 4262

SEQ ID NO: 12115 - DNA, 135 bp, Staphylococcus aureus; identical to SEQ ID NO: 4263

SEQ ID NO: 12116 - DNA, 222 bp, Staphylococcus aureus; identical to SEQ ID NO: 4264

SEQ ID NO: 12117 - DNA, 339 bp, Staphylococcus aureus; identical to SEQ ID NO: 4265

SEQ ID NO: 12118 - DNA, 738 bp, Staphylococcus aureus; identical to SEQ ID NO: 4266

SEQ ID NO: 12119 - DNA, 243 bp, Staphylococcus aureus; identical to SEQ ID NO: 4267

SEQ ID NO: 12120 - DNA, 513 bp, Staphylococcus aureus; identical to SEQ ID NO: 4268

SEQ ID NO: 12121 - DNA, 204 bp, Staphylococcus aureus; identical to SEQ ID NO: 4269

SEQ ID NO: 12122 - DNA, 186 bp, Staphylococcus aureus; identical to SEQ ID NO: 4270

SEQ ID NO: 12123 - DNA, 117 bp, Staphylococcus aureus; identical to SEQ ID NO: 4271

SEQ ID NO: 12124 - DNA, 195 bp, Staphylococcus aureus; identical to SEQ ID NO: 4272

SEQ ID NO: 12125 - DNA, 150 bp, Staphylococcus aureus; identical to SEQ ID NO: 4273

SEQ ID NO: 12126 - DNA, 96 bp, Staphylococcus aureus; identical to SEQ ID NO: 4274

SEQ ID NO: 12127 - DNA, 579 bp, Staphylococcus aureus; identical to SEQ ID NO: 4275

SEQ ID NO: 12128 - DNA, 99 bp, Staphylococcus aureus; identical to SEQ ID NO: 4276

SEQ ID NO: 12129 - DNA, 159 bp, Staphylococcus aureus; identical to SEQ ID NO: 4277

SEQ ID NO: 12130 - DNA, 99 bp, Staphylococcus aureus; identical to SEQ ID NO: 4278

SEQ ID NO: 12131 - DNA, 96 bp, Staphylococcus aureus; identical to SEQ ID NO: 4279

SEQ ID NO: 12132 - DNA, 294 bp, Staphylococcus aureus; identical to SEQ ID NO: 4280

SEQ ID NO: 12133 - DNA, 186 bp, Staphylococcus aureus; identical to SEQ ID NO: 4281

SEQ ID NO: 12134 - DNA, 1224 bp, Staphylococcus aureus; identical to SEQ ID NO: 4282

SEQ ID NO: 12135 - DNA, 297 bp, Staphylococcus aureus; identical to SEQ ID NO: 4283

SEQ ID NO: 12136 - DNA, 159 bp, Staphylococcus aureus; identical to SEQ ID NO: 4284

SEQ ID NO: 12137 - DNA, 147 bp, Staphylococcus aureus; identical to SEQ ID NO: 4285

SEQ ID NO: 12138 - DNA, 96 bp, Staphylococcus aureus; identical to SEQ ID NO: 4286

SEQ ID NO: 12139 - DNA, 465 bp, Staphylococcus aureus; identical to SEQ ID NO: 4287

SEQ ID NO: 12140 - DNA, 114 bp, Staphylococcus aureus; identical to SEQ ID NO: 4288

SEQ ID NO: 12141 - DNA, 486 bp, Staphylococcus aureus; identical to SEQ ID NO: 4289

SEQ ID NO: 12142 - DNA, 123 bp, Staphylococcus aureus; identical to SEQ ID NO: 4290

SEQ ID NO: 12143 - DNA, 114 bp, Staphylococcus aureus; identical to SEQ ID NO: 4291

SEQ ID NO: 12144 - DNA, 180 bp, Staphylococcus aureus; identical to SEQ ID NO: 4292

SEQ ID NO: 12145 - DNA, 285 bp, Staphylococcus aureus; identical to SEQ ID NO: 4293

SEQ ID NO: 12146 - DNA, 90 bp, Staphylococcus aureus; identical to SEQ ID NO: 4294

SEQ ID NO: 12147 - DNA, 195 bp, Staphylococcus aureus; identical to SEQ ID NO: 4295

SEQ ID NO: 12148 - DNA, 144 bp, Staphylococcus aureus; identical to SEQ ID NO: 4296

SEQ ID NO: 12149 - DNA, 90 bp, Staphylococcus aureus; identical to SEQ ID NO: 4297

SEQ ID NO: 12150 - DNA, 111 bp, Staphylococcus aureus; identical to SEQ ID NO: 4298

SEQ ID NO: 12151 - DNA, 192 bp, Staphylococcus aureus; identical to SEQ ID NO: 4299

SEQ ID NO: 12152 - DNA, 105 bp, Staphylococcus aureus; identical to SEQ ID NO: 4300

SEQ ID NO: 12153 - DNA, 2919 bp, Staphylococcus aureus; identical to SEQ ID NO: 4301

SEQ ID NO: 12154 - DNA, 111 bp, Staphylococcus aureus; identical to SEQ ID NO: 4302

SEQ ID NO: 12155 - DNA, 138 bp, Staphylococcus aureus; identical to SEQ ID NO: 4303

SEQ ID NO: 12156 - DNA, 498 bp, Staphylococcus aureus; identical to SEQ ID NO: 4304

SEQ ID NO: 12157 - DNA, 111 bp, Staphylococcus aureus; identical to SEQ ID NO: 4305

SEQ ID NO: 12158 - DNA, 111 bp, Staphylococcus aureus; identical to SEQ ID NO: 4306

SEQ ID NO: 12159 - DNA, 471 bp, Staphylococcus aureus; identical to SEQ ID NO: 4307

SEQ ID NO: 12160 - DNA, 1887 bp, Staphylococcus aureus; identical to SEQ ID NO: 4308

SEQ ID NO: 12161 - DNA, 420 bp, Staphylococcus aureus; identical to SEQ ID NO: 4309

SEQ ID NO: 12162 - DNA, 189 bp, Staphylococcus aureus; identical to SEQ ID NO: 4310

SEQ ID NO: 12163 - DNA, 126 bp, Staphylococcus aureus; identical to SEQ ID NO: 4311

SEQ ID NO: 12164 - DNA, 120 bp, Staphylococcus aureus; identical to SEQ ID NO: 4312

SEQ ID NO: 12165 - DNA, 165 bp, Staphylococcus aureus; identical to SEQ ID NO: 4313

SEQ ID NO: 12166 - DNA, 111 bp, Staphylococcus aureus; identical to SEQ ID NO: 4314

SEQ ID NO: 12167 - DNA, 129 bp, Staphylococcus aureus; identical to SEQ ID NO: 4315

SEQ ID NO: 12168 - DNA, 99 bp, Staphylococcus aureus; identical to SEQ ID NO: 4316

SEQ ID NO: 12169 - DNA, 123 bp, Staphylococcus aureus; identical to SEQ ID NO: 4317

SEQ ID NO: 12170 - DNA, 189 bp, Staphylococcus aureus; identical to SEQ ID NO: 4318

SEQ ID NO: 12171 - DNA, 108 bp, Staphylococcus aureus; identical to SEQ ID NO: 4319

SEQ ID NO: 12172 - DNA, 138 bp, Staphylococcus aureus; identical to SEQ ID NO: 4320

SEQ ID NO: 12173 - DNA, 1536 bp, Staphylococcus aureus; identical to SEQ ID NO: 4321

SEQ ID NO: 12174 - DNA, 108 bp, Staphylococcus aureus; identical to SEQ ID NO: 4322

SEQ ID NO: 12175 - DNA, 753 bp, Staphylococcus aureus; identical to SEQ ID NO: 4323

SEQ ID NO: 12176 - DNA, 132 bp, Staphylococcus aureus; identical to SEQ ID NO: 4324

SEQ ID NO: 12177 - DNA, 156 bp, Staphylococcus aureus; identical to SEQ ID NO: 4325

SEQ ID NO: 12178 - DNA, 525 bp, Staphylococcus aureus; identical to SEQ ID NO: 4326

SEQ ID NO: 12179 - DNA, 201 bp, Staphylococcus aureus; identical to SEQ ID NO: 4327

SEQ ID NO: 12180 - DNA, 96 bp, Staphylococcus aureus; identical to SEQ ID NO: 4328

SEQ ID NO: 12181 - DNA, 102 bp, Staphylococcus aureus; identical to SEQ ID NO: 4329

SEQ ID NO: 12182 - DNA, 183 bp, Staphylococcus aureus; identical to SEQ ID NO: 4330

SEQ ID NO: 12183 - DNA, 150 bp, Staphylococcus aureus; identical to SEQ ID NO: 4331

SEQ ID NO: 12184 - DNA, 129 bp, Staphylococcus aureus; identical to SEQ ID NO: 4332

SEQ ID NO: 12185 - DNA, 255 bp, Staphylococcus aureus; identical to SEQ ID NO: 4333

SEQ ID NO: 12186 - DNA, 96 bp, Staphylococcus aureus; identical to SEQ ID NO: 4334

SEQ ID NO: 12187 - DNA, 96 bp, Staphylococcus aureus; identical to SEQ ID NO: 4335

SEQ ID NO: 12188 - DNA, 108 bp, Staphylococcus aureus; identical to SEQ ID NO: 4336

SEQ ID NO: 12189 - DNA, 147 bp, Staphylococcus aureus; identical to SEQ ID NO: 4337

SEQ ID NO: 12190 - DNA, 117 bp, Staphylococcus aureus; identical to SEQ ID NO: 4338

SEQ ID NO: 12191 - DNA, 216 bp, Staphylococcus aureus; identical to SEQ ID NO: 4339

SEQ ID NO: 12192 - DNA, 4095 bp, Staphylococcus aureus; identical to SEQ ID NO: 4340

SEQ ID NO: 12193 - DNA, 159 bp, Staphylococcus aureus; identical to SEQ ID NO: 4341

SEQ ID NO: 12194 - DNA, 99 bp, Staphylococcus aureus; identical to SEQ ID NO: 4342

SEQ ID NO: 12195 - DNA, 144 bp, Staphylococcus aureus; identical to SEQ ID NO: 4343

SEQ ID NO: 12196 - DNA, 108 bp, Staphylococcus aureus; identical to SEQ ID NO: 4344

SEQ ID NO: 12197 - DNA, 102 bp, Staphylococcus aureus; identical to SEQ ID NO: 4345

SEQ ID NO: 12198 - DNA, 3750 bp, Staphylococcus aureus; identical to SEQ ID NO: 4346

SEQ ID NO: 12199 - DNA, 117 bp, Staphylococcus aureus; identical to SEQ ID NO: 4347

SEQ ID NO: 12200 - DNA, 159 bp, Staphylococcus aureus; identical to SEQ ID NO: 4348

SEQ ID NO: 12201 - DNA, 108 bp, Staphylococcus aureus; identical to SEQ ID NO: 4349

SEQ ID NO: 12202 - DNA, 90 bp, Staphylococcus aureus; identical to SEQ ID NO: 4350

SEQ ID NO: 12203 - DNA, 117 bp, Staphylococcus aureus; identical to SEQ ID NO: 4351

SEQ ID NO: 12204 - DNA, 138 bp, Staphylococcus aureus; identical to SEQ ID NO: 4352

SEQ ID NO: 12205 - DNA, 102 bp, Staphylococcus aureus; identical to SEQ ID NO: 4353

SEQ ID NO: 12206 - DNA, 237 bp, Staphylococcus aureus; identical to SEQ ID NO: 4354

SEQ ID NO: 12207 - DNA, 102 bp, Staphylococcus aureus; identical to SEQ ID NO: 4355

SEQ ID NO: 12208 - DNA, 5736 bp, Staphylococcus aureus; identical to SEQ ID NO: 4356

SEQ ID NO: 12209 - DNA, 114 bp, Staphylococcus aureus; identical to SEQ ID NO: 4357

SEQ ID NO: 12210 - DNA, 2160 bp, Staphylococcus aureus; identical to SEQ ID NO: 4358

SEQ ID NO: 12211 - DNA, 126 bp, Staphylococcus aureus; identical to SEQ ID NO: 4359

SEQ ID NO: 12212 - DNA, 159 bp, Staphylococcus aureus; identical to SEQ ID NO: 4360

SEQ ID NO: 12213 - DNA, 108 bp, Staphylococcus aureus; identical to SEQ ID NO: 4361

SEQ ID NO: 12214 - DNA, 168 bp, Staphylococcus aureus; identical to SEQ ID NO: 4362

SEQ ID NO: 12215 - DNA, 213 bp, Staphylococcus aureus; identical to SEQ ID NO: 4363

SEQ ID NO: 12216 - DNA, 102 bp, Staphylococcus aureus; identical to SEQ ID NO: 4364

SEQ ID NO: 12217 - DNA, 105 bp, Staphylococcus aureus; identical to SEQ ID NO: 4365

SEQ ID NO: 12218 - DNA, 1152 bp, Staphylococcus aureus; identical to SEQ ID NO: 4366

SEQ ID NO: 12219 - DNA, 105 bp, Staphylococcus aureus; identical to SEQ ID NO: 4367

SEQ ID NO: 12220 - DNA, 102 bp, Staphylococcus aureus; identical to SEQ ID NO: 4368

SEQ ID NO: 12221 - DNA, 96 bp, Staphylococcus aureus; identical to SEQ ID NO: 4369

SEQ ID NO: 12222 - DNA, 93 bp, Staphylococcus aureus; identical to SEQ ID NO: 4370

SEQ ID NO: 12223 - DNA, 129 bp, Staphylococcus aureus; identical to SEQ ID NO: 4371

SEQ ID NO: 12224 - DNA, 108 bp, Staphylococcus aureus; identical to SEQ ID NO: 4372

SEQ ID NO: 12225 - DNA, 123 bp, Staphylococcus aureus; identical to SEQ ID NO: 4373

SEQ ID NO: 12226 - DNA, 117 bp, Staphylococcus aureus; identical to SEQ ID NO: 4374

SEQ ID NO: 12227 - DNA, 183 bp, Staphylococcus aureus; identical to SEQ ID NO: 4375

SEQ ID NO: 12228 - DNA, 2871 bp, Staphylococcus aureus; identical to SEQ ID NO: 4376

SEQ ID NO: 12229 - DNA, 3069 bp, Staphylococcus aureus; identical to SEQ ID NO: 4377

SEQ ID NO: 12230 - DNA, 498 bp, Staphylococcus aureus; identical to SEQ ID NO: 4378

SEQ ID NO: 12231 - DNA, 171 bp, Staphylococcus aureus; identical to SEQ ID NO: 4379

SEQ ID NO: 12232 - DNA, 96 bp, Staphylococcus aureus; identical to SEQ ID NO: 4380

SEQ ID NO: 12233 - DNA, 111 bp, Staphylococcus aureus; identical to SEQ ID NO: 4381

SEQ ID NO: 12234 - DNA, 171 bp, Staphylococcus aureus; identical to SEQ ID NO: 4382

SEQ ID NO: 12235 - DNA, 111 bp, Staphylococcus aureus; identical to SEQ ID NO: 4383

SEQ ID NO: 12236 - DNA, 156 bp, Staphylococcus aureus; identical to SEQ ID NO: 4384

SEQ ID NO: 12237 - DNA, 279 bp, Staphylococcus aureus; identical to SEQ ID NO: 4385

SEQ ID NO: 12238 - DNA, 612 bp, Staphylococcus aureus; identical to SEQ ID NO: 4386

SEQ ID NO: 12239 - DNA, 135 bp, Staphylococcus aureus; identical to SEQ ID NO: 4387

SEQ ID NO: 12240 - DNA, 183 bp, Staphylococcus aureus; identical to SEQ ID NO: 4388

SEQ ID NO: 12241 - DNA, 111 bp, Staphylococcus aureus; identical to SEQ ID NO: 4389

SEQ ID NO: 12242 - DNA, 273 bp, Staphylococcus aureus; identical to SEQ ID NO: 4390

SEQ ID NO: 12243 - DNA, 90 bp, Staphylococcus aureus; identical to SEQ ID NO: 4391

SEQ ID NO: 12244 - DNA, 285 bp, Staphylococcus aureus; identical to SEQ ID NO: 4392

SEQ ID NO: 12245 - DNA, 165 bp, Staphylococcus aureus; identical to SEQ ID NO: 4393

SEQ ID NO: 12246 - DNA, 144 bp, Staphylococcus aureus; identical to SEQ ID NO: 4394

SEQ ID NO: 12247 - DNA, 708 bp, Staphylococcus aureus; identical to SEQ ID NO: 4395

SEQ ID NO: 12248 - DNA, 348 bp, Staphylococcus aureus; identical to SEQ ID NO: 4396

SEQ ID NO: 12249 - DNA, 987 bp, Staphylococcus aureus; identical to SEQ ID NO: 4397

SEQ ID NO: 12250 - DNA, 2763 bp, Staphylococcus aureus; identical to SEQ ID NO: 4398

SEQ ID NO: 12251 - DNA, 192 bp, Staphylococcus aureus; identical to SEQ ID NO: 4399

SEQ ID NO: 12252 - DNA, 279 bp, Staphylococcus aureus; identical to SEQ ID NO: 4400

SEQ ID NO: 12253 - DNA, 324 bp, Staphylococcus aureus; identical to SEQ ID NO: 4401

SEQ ID NO: 12254 - DNA, 177 bp, Staphylococcus aureus; identical to SEQ ID NO: 4402

SEQ ID NO: 12255 - DNA, 216 bp, Staphylococcus aureus; identical to SEQ ID NO: 4403

SEQ ID NO: 12256 - DNA, 2106 bp, Staphylococcus aureus; identical to SEQ ID NO: 4404

SEQ ID NO: 12257 - DNA, 105 bp, Staphylococcus aureus; identical to SEQ ID NO: 4405

SEQ ID NO: 12258 - DNA, 501 bp, Staphylococcus aureus; identical to SEQ ID NO: 4406

SEQ ID NO: 12259 - DNA, 93 bp, Staphylococcus aureus; identical to SEQ ID NO: 4407

SEQ ID NO: 12260 - DNA, 156 bp, Staphylococcus aureus; identical to SEQ ID NO: 4408

SEQ ID NO: 12261 - DNA, 111 bp, Staphylococcus aureus; identical to SEQ ID NO: 4409

SEQ ID NO: 12262 - DNA, 108 bp, Staphylococcus aureus; identical to SEQ ID NO: 4410

SEQ ID NO: 12263 - DNA, 159 bp, Staphylococcus aureus; identical to SEQ ID NO: 4411

SEQ ID NO: 12264 - DNA, 144 bp, Staphylococcus aureus; identical to SEQ ID NO: 4412

SEQ ID NO: 12265 - DNA, 162 bp, Staphylococcus aureus; identical to SEQ ID NO: 4413

SEQ ID NO: 12266 - DNA, 216 bp, Staphylococcus aureus; identical to SEQ ID NO: 4414

SEQ ID NO: 12267 - DNA, 162 bp, Staphylococcus aureus; identical to SEQ ID NO: 4415

SEQ ID NO: 12268 - DNA, 114 bp, Staphylococcus aureus; identical to SEQ ID NO: 4416

SEQ ID NO: 12269 - DNA, 96 bp, Staphylococcus aureus; identical to SEQ ID NO: 4417

SEQ ID NO: 12270 - DNA, 93 bp, Staphylococcus aureus; identical to SEQ ID NO: 4418

SEQ ID NO: 12271 - DNA, 105 bp, Staphylococcus aureus; identical to SEQ ID NO: 4419

SEQ ID NO: 12272 - DNA, 102 bp, Staphylococcus aureus; identical to SEQ ID NO: 4420

SEQ ID NO: 12273 - DNA, 138 bp, Staphylococcus aureus; identical to SEQ ID NO: 4421

SEQ ID NO: 12274 - DNA, 75 bp, Staphylococcus aureus; identical to SEQ ID NO: 4422

SEQ ID NO: 12275 - DNA, 111 bp, Staphylococcus aureus; identical to SEQ ID NO: 4423

SEQ ID NO: 12276 - DNA, 285 bp, Staphylococcus aureus; identical to SEQ ID NO: 4424

SEQ ID NO: 12277 - DNA, 141 bp, Staphylococcus aureus; identical to SEQ ID NO: 4425

SEQ ID NO: 12278 - DNA, 135 bp, Staphylococcus aureus; identical to SEQ ID NO: 4426

SEQ ID NO: 12279 - DNA, 159 bp, Staphylococcus aureus; identical to SEQ ID NO: 4427

SEQ ID NO: 12280 - DNA, 90 bp, Staphylococcus aureus; identical to SEQ ID NO: 4428

SEQ ID NO: 12281 - DNA, 450 bp, Staphylococcus aureus; identical to SEQ ID NO: 4429

SEQ ID NO: 12282 - DNA, 240 bp, Staphylococcus aureus; identical to SEQ ID NO: 4430

SEQ ID NO: 12283 - DNA, 162 bp, Staphylococcus aureus; identical to SEQ ID NO: 4431

SEQ ID NO: 12284 - DNA, 123 bp, Staphylococcus aureus; identical to SEQ ID NO: 4432

SEQ ID NO: 12285 - DNA, 96 bp, Staphylococcus aureus; identical to SEQ ID NO: 4433

SEQ ID NO: 12286 - DNA, 213 bp, Staphylococcus aureus; identical to SEQ ID NO: 4434

SEQ ID NO: 12287 - DNA, 120 bp, Staphylococcus aureus; identical to SEQ ID NO: 4435

SEQ ID NO: 12288 - DNA, 96 bp, Staphylococcus aureus; identical to SEQ ID NO: 4436

SEQ ID NO: 12289 - DNA, 402 bp, Staphylococcus aureus; identical to SEQ ID NO: 4437

SEQ ID NO: 12290 - DNA, 111 bp, Staphylococcus aureus; identical to SEQ ID NO: 4438

SEQ ID NO: 12291 - DNA, 96 bp, Staphylococcus aureus; identical to SEQ ID NO: 4439

SEQ ID NO: 12292 - DNA, 99 bp, Staphylococcus aureus; identical to SEQ ID NO: 4440

SEQ ID NO: 12293 - DNA, 102 bp, Staphylococcus aureus; identical to SEQ ID NO: 4441

SEQ ID NO: 12294 - DNA, 90 bp, Staphylococcus aureus; identical to SEQ ID NO: 4442

SEQ ID NO: 12295 - DNA, 117 bp, Staphylococcus aureus; identical to SEQ ID NO: 4443

SEQ ID NO: 12296 - DNA, 210 bp, Staphylococcus aureus; identical to SEQ ID NO: 4444

SEQ ID NO: 12297 - DNA, 177 bp, Staphylococcus aureus; identical to SEQ ID NO: 4445

SEQ ID NO: 12298 - DNA, 375 bp, Staphylococcus aureus; identical to SEQ ID NO: 4446

SEQ ID NO: 12299 - DNA, 277 bp, Staphylococcus aureus; identical to SEQ ID NO: 4447

SEQ ID NO: 12300 - DNA, 277 bp, Staphylococcus aureus; identical to SEQ ID NO: 4448

SEQ ID NO: 12301 - DNA, 380 bp, Staphylococcus aureus; identical to SEQ ID NO: 4449

SEQ ID NO: 12302 - DNA, 380 bp, Staphylococcus aureus; identical to SEQ ID NO: 4450

SEQ ID NO: 12303 - DNA, 87 bp, Staphylococcus aureus; identical to SEQ ID NO: 4451

SEQ ID NO: 12304 - DNA, 87 bp, Staphylococcus aureus; identical to SEQ ID NO: 4452

SEQ ID NO: 12305 - DNA, 286 bp, Staphylococcus aureus; identical to SEQ ID NO: 4453

SEQ ID NO: 12306 - DNA, 286 bp, Staphylococcus aureus; identical to SEQ ID NO: 4454

SEQ ID NO: 12307 - DNA, 378 bp, Staphylococcus aureus; identical to SEQ ID NO: 4455

SEQ ID NO: 12308 - DNA, 378 bp, Staphylococcus aureus; identical to SEQ ID NO: 4456

SEQ ID NO: 12309 - DNA, 650 bp, Staphylococcus aureus; identical to SEQ ID NO: 4457

SEQ ID NO: 12310 - DNA, 650 bp, Staphylococcus aureus; identical to SEQ ID NO: 4458

SEQ ID NO: 12311 - DNA, 269 bp, Staphylococcus aureus; identical to SEQ ID NO: 4459

SEQ ID NO: 12312 - DNA, 269 bp, Staphylococcus aureus; identical to SEQ ID NO: 4460

SEQ ID NO: 12313 - DNA, 235 bp, Staphylococcus aureus; identical to SEQ ID NO: 4461

SEQ ID NO: 12314 - DNA, 235 bp, Staphylococcus aureus; identical to SEQ ID NO: 4462

SEQ ID NO: 12315 - DNA, 76 bp, Staphylococcus aureus; identical to SEQ ID NO: 4463

SEQ ID NO: 12316 - DNA, 76 bp, Staphylococcus aureus; identical to SEQ ID NO: 4464

SEQ ID NO: 12317 - DNA, 112 bp, Staphylococcus aureus; identical to SEQ ID NO: 4465

SEQ ID NO: 12318 - DNA, 112 bp, Staphylococcus aureus; identical to SEQ ID NO: 4466

SEQ ID NO: 12319 - DNA, 429 bp, Staphylococcus aureus; identical to SEQ ID NO: 4467

SEQ ID NO: 12320 - DNA, 429 bp, Staphylococcus aureus; identical to SEQ ID NO: 4468

SEQ ID NO: 12321 - DNA, 613 bp, Staphylococcus aureus; identical to SEQ ID NO: 4469

SEQ ID NO: 12322 - DNA, 613 bp, Staphylococcus aureus; identical to SEQ ID NO: 4470

SEQ ID NO: 12323 - DNA, 388 bp, Staphylococcus aureus; identical to SEQ ID NO: 4471

SEQ ID NO: 12324 - DNA, 388 bp, Staphylococcus aureus; identical to SEQ ID NO: 4472

SEQ ID NO: 12325 - DNA, 185 bp, Staphylococcus aureus; identical to SEQ ID NO: 4473

SEQ ID NO: 12326 - DNA, 185 bp, Staphylococcus aureus; identical to SEQ ID NO: 4474

SEQ ID NO: 12327 - DNA, 178 bp, Staphylococcus aureus; identical to SEQ ID NO: 4475

SEQ ID NO: 12328 - DNA, 178 bp, Staphylococcus aureus; identical to SEQ ID NO: 4476

SEQ ID NO: 12329 - DNA, 282 bp, Staphylococcus aureus; identical to SEQ ID NO: 4477

SEQ ID NO: 12330 - DNA, 282 bp, Staphylococcus aureus; identical to SEQ ID NO: 4478

SEQ ID NO: 12331 - DNA, 185 bp, Staphylococcus aureus; identical to SEQ ID NO: 4479

SEQ ID NO: 12332 - DNA, 185 bp, Staphylococcus aureus; identical to SEQ ID NO: 4480

SEQ ID NO: 12333 - DNA, 131 bp, Staphylococcus aureus; identical to SEQ ID NO: 4481

SEQ ID NO: 12334 - DNA, 131 bp, Staphylococcus aureus; identical to SEQ ID NO: 4482

SEQ ID NO: 12335 - DNA, 90 bp, Staphylococcus aureus; identical to SEQ ID NO: 4483

SEQ ID NO: 12336 - DNA, 90 bp, Staphylococcus aureus; identical to SEQ ID NO: 4484

SEQ ID NO: 12337 - DNA, 118 bp, Staphylococcus aureus; identical to SEQ ID NO: 4485

SEQ ID NO: 12338 - DNA, 118 bp, Staphylococcus aureus; identical to SEQ ID NO: 4486

SEQ ID NO: 12339 - DNA, 216 bp, Staphylococcus aureus; identical to SEQ ID NO: 4487

SEQ ID NO: 12340 - DNA, 216 bp, Staphylococcus aureus; identical to SEQ ID NO: 4488

SEQ ID NO: 12341 - DNA, 123 bp, Staphylococcus aureus; identical to SEQ ID NO: 4489

SEQ ID NO: 12342 - DNA, 123 bp, Staphylococcus aureus; identical to SEQ ID NO: 4490

SEQ ID NO: 12343 - DNA, 83 bp, Staphylococcus aureus; identical to SEQ ID NO: 4491

SEQ ID NO: 12344 - DNA, 83 bp, Staphylococcus aureus; identical to SEQ ID NO: 4492

SEQ ID NO: 12345 - DNA, 112 bp, Staphylococcus aureus; identical to SEQ ID NO: 4493

SEQ ID NO: 12346 - DNA, 112 bp, Staphylococcus aureus; identical to SEQ ID NO: 4494

SEQ ID NO: 12347 - DNA, 228 bp, Staphylococcus aureus; identical to SEQ ID NO: 4495

SEQ ID NO: 12348 - DNA, 228 bp, Staphylococcus aureus; identical to SEQ ID NO: 4496

SEQ ID NO: 12349 - DNA, 96 bp, Staphylococcus aureus; identical to SEQ ID NO: 4497

SEQ ID NO: 12350 - DNA, 96 bp, Staphylococcus aureus; identical to SEQ ID NO: 4498

SEQ ID NO: 12351 - DNA, 99 bp, Staphylococcus aureus; identical to SEQ ID NO: 4499

SEQ ID NO: 12352 - DNA, 99 bp, Staphylococcus aureus; identical to SEQ ID NO: 4500

SEQ ID NO: 12353 - DNA, 101 bp, Staphylococcus aureus; identical to SEQ ID NO: 4501

SEQ ID NO: 12354 - DNA, 101 bp, Staphylococcus aureus; identical to SEQ ID NO: 4502

SEQ ID NO: 12355 - DNA, 173 bp, Staphylococcus aureus; identical to SEQ ID NO: 4503

SEQ ID NO: 12356 - DNA, 173 bp, Staphylococcus aureus; identical to SEQ ID NO: 4504

SEQ ID NO: 12357 - DNA, 113 bp, Staphylococcus aureus; identical to SEQ ID NO: 4505

SEQ ID NO: 12358 - DNA, 113 bp, Staphylococcus aureus; identical to SEQ ID NO: 4506

SEQ ID NO: 12359 - DNA, 135 bp, Staphylococcus aureus; identical to SEQ ID NO: 4507

SEQ ID NO: 12360 - DNA, 135 bp, Staphylococcus aureus; identical to SEQ ID NO: 4508

SEQ ID NO: 12361 - DNA, 288 bp, Staphylococcus aureus; identical to SEQ ID NO: 4509

SEQ ID NO: 12362 - DNA, 288 bp, Staphylococcus aureus; identical to SEQ ID NO: 4510

SEQ ID NO: 12363 - DNA, 517 bp, Staphylococcus aureus; identical to SEQ ID NO: 4511

SEQ ID NO: 12364 - DNA, 517 bp, Staphylococcus aureus; identical to SEQ ID NO: 4512

SEQ ID NO: 12365 - DNA, 192 bp, Staphylococcus aureus; identical to SEQ ID NO: 4513

SEQ ID NO: 12366 - DNA, 192 bp, Staphylococcus aureus; identical to SEQ ID NO: 4514

SEQ ID NO: 12367 - DNA, 250 bp, Staphylococcus aureus; identical to SEQ ID NO: 4515

SEQ ID NO: 12368 - DNA, 250 bp, Staphylococcus aureus; identical to SEQ ID NO: 4516

SEQ ID NO: 12369 - DNA, 66 bp, Staphylococcus aureus; identical to SEQ ID NO: 4517

SEQ ID NO: 12370 - DNA, 66 bp, Staphylococcus aureus; identical to SEQ ID NO: 4518

SEQ ID NO: 12371 - DNA, 170 bp, Staphylococcus aureus; identical to SEQ ID NO: 4519

SEQ ID NO: 12372 - DNA, 170 bp, Staphylococcus aureus; identical to SEQ ID NO: 4520

SEQ ID NO: 12373 - DNA, 209 bp, Staphylococcus aureus; identical to SEQ ID NO: 4521

SEQ ID NO: 12374 - DNA, 209 bp, Staphylococcus aureus; identical to SEQ ID NO: 4522

SEQ ID NO: 12375 - DNA, 745 bp, Staphylococcus aureus; identical to SEQ ID NO: 4523

SEQ ID NO: 12376 - DNA, 745 bp, Staphylococcus aureus; identical to SEQ ID NO: 4524

SEQ ID NO: 12377 - DNA, 146 bp, Staphylococcus aureus; identical to SEQ ID NO: 4525

SEQ ID NO: 12378 - DNA, 146 bp, Staphylococcus aureus; identical to SEQ ID NO: 4526

SEQ ID NO: 12379 - DNA, 543 bp, Staphylococcus aureus; identical to SEQ ID NO: 4527

SEQ ID NO: 12380 - DNA, 543 bp, Staphylococcus aureus; identical to SEQ ID NO: 4528

SEQ ID NO: 12381 - DNA, 62 bp, Staphylococcus aureus; identical to SEQ ID NO: 4529

SEQ ID NO: 12382 - DNA, 62 bp, Staphylococcus aureus; identical to SEQ ID NO: 4530

SEQ ID NO: 12383 - DNA, 114 bp, Staphylococcus aureus; identical to SEQ ID NO: 4531

SEQ ID NO: 12384 - DNA, 114 bp, Staphylococcus aureus; identical to SEQ ID NO: 4532

SEQ ID NO: 12385 - DNA, 348 bp, Staphylococcus aureus; identical to SEQ ID NO: 4533

SEQ ID NO: 12386 - DNA, 348 bp, Staphylococcus aureus; identical to SEQ ID NO: 4534

SEQ ID NO: 12387 - DNA, 161 bp, Staphylococcus aureus; identical to SEQ ID NO: 4535

SEQ ID NO: 12388 - DNA, 161 bp, Staphylococcus aureus; identical to SEQ ID NO: 4536

SEQ ID NO: 12389 - DNA, 98 bp, Staphylococcus aureus; identical to SEQ ID NO: 4537

SEQ ID NO: 12390 - DNA, 98 bp, Staphylococcus aureus; identical to SEQ ID NO: 4538

SEQ ID NO: 12391 - DNA, 97 bp, Staphylococcus aureus; identical to SEQ ID NO: 4539

SEQ ID NO: 12392 - DNA, 97 bp, Staphylococcus aureus; identical to SEQ ID NO: 4540

SEQ ID NO: 12393 - DNA, 136 bp, Staphylococcus aureus; identical to SEQ ID NO: 4541

SEQ ID NO: 12394 - DNA, 136 bp, Staphylococcus aureus; identical to SEQ ID NO: 4542

SEQ ID NO: 12395 - DNA, 270 bp, Staphylococcus aureus; identical to SEQ ID NO: 4543

SEQ ID NO: 12396 - DNA, 270 bp, Staphylococcus aureus; identical to SEQ ID NO: 4544

SEQ ID NO: 12397 - DNA, 298 bp, Staphylococcus aureus; identical to SEQ ID NO: 4545

SEQ ID NO: 12398 - DNA, 298 bp, Staphylococcus aureus; identical to SEQ ID NO: 4546

SEQ ID NO: 12399 - DNA, 308 bp, Staphylococcus aureus; identical to SEQ ID NO: 4547

SEQ ID NO: 12400 - DNA, 308 bp, Staphylococcus aureus; identical to SEQ ID NO: 4548

SEQ ID NO: 12401 - DNA, 198 bp, Staphylococcus aureus; identical to SEQ ID NO: 4549

SEQ ID NO: 12402 - DNA, 198 bp, Staphylococcus aureus; identical to SEQ ID NO: 4550

SEQ ID NO: 12403 - DNA, 266 bp, Staphylococcus aureus; identical to SEQ ID NO: 4551

SEQ ID NO: 12404 - DNA, 266 bp, Staphylococcus aureus; identical to SEQ ID NO: 4552

SEQ ID NO: 12405 - DNA, 56 bp, Staphylococcus aureus; identical to SEQ ID NO: 4553

SEQ ID NO: 12406 - DNA, 56 bp, Staphylococcus aureus; identical to SEQ ID NO: 4554

SEQ ID NO: 12407 - DNA, 205 bp, Staphylococcus aureus; identical to SEQ ID NO: 4555

SEQ ID NO: 12408 - DNA, 205 bp, Staphylococcus aureus; identical to SEQ ID NO: 4556

SEQ ID NO: 12409 - DNA, 220 bp, Staphylococcus aureus; identical to SEQ ID NO: 4557

SEQ ID NO: 12410 - DNA, 220 bp, Staphylococcus aureus; identical to SEQ ID NO: 4558

SEQ ID NO: 12411 - DNA, 51 bp, Staphylococcus aureus; identical to SEQ ID NO: 4559

SEQ ID NO: 12412 - DNA, 51 bp, Staphylococcus aureus; identical to SEQ ID NO: 4560

SEQ ID NO: 12413 - DNA, 67 bp, Staphylococcus aureus; identical to SEQ ID NO: 4561

SEQ ID NO: 12414 - DNA, 67 bp, Staphylococcus aureus; identical to SEQ ID NO: 4562

SEQ ID NO: 12415 - DNA, 64 bp, Staphylococcus aureus; identical to SEQ ID NO: 4563

SEQ ID NO: 12416 - DNA, 64 bp, Staphylococcus aureus; identical to SEQ ID NO: 4564

SEQ ID NO: 12417 - DNA, 66 bp, Staphylococcus aureus; identical to SEQ ID NO: 4565

SEQ ID NO: 12418 - DNA, 66 bp, Staphylococcus aureus; identical to SEQ ID NO: 4566

SEQ ID NO: 12419 - DNA, 96 bp, Staphylococcus aureus; identical to SEQ ID NO: 4567

SEQ ID NO: 12420 - DNA, 96 bp, Staphylococcus aureus; identical to SEQ ID NO: 4568

SEQ ID NO: 12421 - DNA, 150 bp, Staphylococcus aureus; identical to SEQ ID NO: 4569

SEQ ID NO: 12422 - DNA, 150 bp, Staphylococcus aureus; identical to SEQ ID NO: 4570

SEQ ID NO: 12423 - DNA, 162 bp, Staphylococcus aureus; identical to SEQ ID NO: 4571

SEQ ID NO: 12424 - DNA, 162 bp, Staphylococcus aureus; identical to SEQ ID NO: 4572

SEQ ID NO: 12425 - DNA, 202 bp, Staphylococcus aureus; identical to SEQ ID NO: 4573

SEQ ID NO: 12426 - DNA, 202 bp, Staphylococcus aureus; identical to SEQ ID NO: 4574

SEQ ID NO: 12427 - DNA, 91 bp, Staphylococcus aureus; identical to SEQ ID NO: 4575

SEQ ID NO: 12428 - DNA, 91 bp, Staphylococcus aureus; identical to SEQ ID NO: 4576

SEQ ID NO: 12429 - DNA, 56 bp, Staphylococcus aureus; identical to SEQ ID NO: 4577

SEQ ID NO: 12430 - DNA, 56 bp, Staphylococcus aureus; identical to SEQ ID NO: 4578

SEQ ID NO: 12431 - DNA, 173 bp, Staphylococcus aureus; identical to SEQ ID NO: 4579

SEQ ID NO: 12432 - DNA, 173 bp, Staphylococcus aureus; identical to SEQ ID NO: 4580

SEQ ID NO: 12433 - DNA, 189 bp, Staphylococcus aureus; identical to SEQ ID NO: 4581

SEQ ID NO: 12434 - DNA, 189 bp, Staphylococcus aureus; identical to SEQ ID NO: 4582

SEQ ID NO: 12435 - DNA, 261 bp, Staphylococcus aureus; identical to SEQ ID NO: 4583

SEQ ID NO: 12436 - DNA, 261 bp, Staphylococcus aureus; identical to SEQ ID NO: 4584

SEQ ID NO: 12437 - DNA, 112 bp, Staphylococcus aureus; identical to SEQ ID NO: 4585

SEQ ID NO: 12438 - DNA, 112 bp, Staphylococcus aureus; identical to SEQ ID NO: 4586

SEQ ID NO: 12439 - DNA, 101 bp, Staphylococcus aureus; identical to SEQ ID NO: 4587

SEQ ID NO: 12440 - DNA, 101 bp, Staphylococcus aureus; identical to SEQ ID NO: 4588

SEQ ID NO: 12441 - DNA, 360 bp, Staphylococcus aureus; identical to SEQ ID NO: 4589

SEQ ID NO: 12442 - DNA, 360 bp, Staphylococcus aureus; identical to SEQ ID NO: 4590

SEQ ID NO: 12443 - DNA, 368 bp, Staphylococcus aureus; identical to SEQ ID NO: 4591

SEQ ID NO: 12444 - DNA, 368 bp, Staphylococcus aureus; identical to SEQ ID NO: 4592

SEQ ID NO: 12445 - DNA, 230 bp, Staphylococcus aureus; identical to SEQ ID NO: 4593

SEQ ID NO: 12446 - DNA, 230 bp, Staphylococcus aureus; identical to SEQ ID NO: 4594

SEQ ID NO: 12447 - DNA, 195 bp, Staphylococcus aureus; identical to SEQ ID NO: 4595

SEQ ID NO: 12448 - DNA, 195 bp, Staphylococcus aureus; identical to SEQ ID NO: 4596

SEQ ID NO: 12449 - DNA, 211 bp, Staphylococcus aureus; identical to SEQ ID NO: 4597

SEQ ID NO: 12450 - DNA, 211 bp, Staphylococcus aureus; identical to SEQ ID NO: 4598

SEQ ID NO: 12451 - DNA, 81 bp, Staphylococcus aureus; identical to SEQ ID NO: 4599

SEQ ID NO: 12452 - DNA, 81 bp, Staphylococcus aureus; identical to SEQ ID NO: 4600

SEQ ID NO: 12453 - DNA, 209 bp, Staphylococcus aureus; identical to SEQ ID NO: 4601

SEQ ID NO: 12454 - DNA, 209 bp, Staphylococcus aureus; identical to SEQ ID NO: 4602

SEQ ID NO: 12455 - DNA, 267 bp, Staphylococcus aureus; identical to SEQ ID NO: 4603

SEQ ID NO: 12456 - DNA, 267 bp, Staphylococcus aureus; identical to SEQ ID NO: 4604

SEQ ID NO: 12457 - DNA, 366 bp, Staphylococcus aureus; identical to SEQ ID NO: 4605

SEQ ID NO: 12458 - DNA, 366 bp, Staphylococcus aureus; identical to SEQ ID NO: 4606

SEQ ID NO: 12459 - DNA, 52 bp, Staphylococcus aureus; identical to SEQ ID NO: 4607

SEQ ID NO: 12460 - DNA, 52 bp, Staphylococcus aureus; identical to SEQ ID NO: 4608

SEQ ID NO: 12461 - DNA, 57 bp, Staphylococcus aureus; identical to SEQ ID NO: 4609

SEQ ID NO: 12462 - DNA, 57 bp, Staphylococcus aureus; identical to SEQ ID NO: 4610

SEQ ID NO: 12463 - DNA, 167 bp, Staphylococcus aureus; identical to SEQ ID NO: 4611

SEQ ID NO: 12464 - DNA, 167 bp, Staphylococcus aureus; identical to SEQ ID NO: 4612

SEQ ID NO: 12465 - DNA, 80 bp, Staphylococcus aureus; identical to SEQ ID NO: 4613

SEQ ID NO: 12466 - DNA, 80 bp, Staphylococcus aureus; identical to SEQ ID NO: 4614

SEQ ID NO: 12467 - DNA, 128 bp, Staphylococcus aureus; identical to SEQ ID NO: 4615

SEQ ID NO: 12468 - DNA, 128 bp, Staphylococcus aureus; identical to SEQ ID NO: 4616

SEQ ID NO: 12469 - DNA, 194 bp, Staphylococcus aureus; identical to SEQ ID NO: 4617

SEQ ID NO: 12470 - DNA, 194 bp, Staphylococcus aureus; identical to SEQ ID NO: 4618

SEQ ID NO: 12471 - DNA, 228 bp, Staphylococcus aureus; identical to SEQ ID NO: 4619

SEQ ID NO: 12472 - DNA, 228 bp, Staphylococcus aureus; identical to SEQ ID NO: 4620

SEQ ID NO: 12473 - DNA, 50 bp, Staphylococcus aureus; identical to SEQ ID NO: 4621

SEQ ID NO: 12474 - DNA, 50 bp, Staphylococcus aureus; identical to SEQ ID NO: 4622

SEQ ID NO: 12475 - DNA, 156 bp, Staphylococcus aureus; identical to SEQ ID NO: 4623

SEQ ID NO: 12476 - DNA, 156 bp, Staphylococcus aureus; identical to SEQ ID NO: 4624

SEQ ID NO: 12477 - DNA, 384 bp, Staphylococcus aureus; identical to SEQ ID NO: 4625

SEQ ID NO: 12478 - DNA, 384 bp, Staphylococcus aureus; identical to SEQ ID NO: 4626

SEQ ID NO: 12479 - DNA, 342 bp, Staphylococcus aureus; identical to SEQ ID NO: 4627

SEQ ID NO: 12480 - DNA, 342 bp, Staphylococcus aureus; identical to SEQ ID NO: 4628

SEQ ID NO: 12481 - DNA, 53 bp, Staphylococcus aureus; identical to SEQ ID NO: 4629

SEQ ID NO: 12482 - DNA, 53 bp, Staphylococcus aureus; identical to SEQ ID NO: 4630

SEQ ID NO: 12483 - DNA, 64 bp, Staphylococcus aureus; identical to SEQ ID NO: 4631

SEQ ID NO: 12484 - DNA, 64 bp, Staphylococcus aureus; identical to SEQ ID NO: 4632

SEQ ID NO: 12485 - DNA, 426 bp, Staphylococcus aureus; identical to SEQ ID NO: 4633

SEQ ID NO: 12486 - DNA, 426 bp, Staphylococcus aureus; identical to SEQ ID NO: 4634

SEQ ID NO: 12487 - DNA, 161 bp, Staphylococcus aureus; identical to SEQ ID NO: 4635

SEQ ID NO: 12488 - DNA, 161 bp, Staphylococcus aureus; identical to SEQ ID NO: 4636

SEQ ID NO: 12489 - DNA, 286 bp, Staphylococcus aureus; identical to SEQ ID NO: 4637

SEQ ID NO: 12490 - DNA, 286 bp, Staphylococcus aureus; identical to SEQ ID NO: 4638

SEQ ID NO: 12491 - DNA, 178 bp, Staphylococcus aureus; identical to SEQ ID NO: 4639

SEQ ID NO: 12492 - DNA, 178 bp, Staphylococcus aureus; identical to SEQ ID NO: 4640

SEQ ID NO: 12493 - DNA, 341 bp, Staphylococcus aureus; identical to SEQ ID NO: 4641

SEQ ID NO: 12494 - DNA, 341 bp, Staphylococcus aureus; identical to SEQ ID NO: 4642

SEQ ID NO: 12495 - DNA, 225 bp, Staphylococcus aureus; identical to SEQ ID NO: 4643

SEQ ID NO: 12496 - DNA, 225 bp, Staphylococcus aureus; identical to SEQ ID NO: 4644

SEQ ID NO: 12497 - DNA, 166 bp, Staphylococcus aureus; identical to SEQ ID NO: 4645

SEQ ID NO: 12498 - DNA, 166 bp, Staphylococcus aureus; identical to SEQ ID NO: 4646

SEQ ID NO: 12499 - DNA, 130 bp, Staphylococcus aureus; identical to SEQ ID NO: 4647

SEQ ID NO: 12500 - DNA, 130 bp, Staphylococcus aureus; identical to SEQ ID NO: 4648

SEQ ID NO: 12501 - DNA, 446 bp, Staphylococcus aureus; identical to SEQ ID NO: 4649

SEQ ID NO: 12502 - DNA, 446 bp, Staphylococcus aureus; identical to SEQ ID NO: 4650

SEQ ID NO: 12503 - DNA, 327 bp, Staphylococcus aureus; identical to SEQ ID NO: 4651

SEQ ID NO: 12504 - DNA, 327 bp, Staphylococcus aureus; identical to SEQ ID NO: 4652

SEQ ID NO: 12505 - DNA, 254 bp, Staphylococcus aureus; identical to SEQ ID NO: 4653

SEQ ID NO: 12506 - DNA, 254 bp, Staphylococcus aureus; identical to SEQ ID NO: 4654

SEQ ID NO: 12507 - DNA, 258 bp, Staphylococcus aureus; identical to SEQ ID NO: 4655

SEQ ID NO: 12508 - DNA, 258 bp, Staphylococcus aureus; identical to SEQ ID NO: 4656

SEQ ID NO: 12509 - DNA, 142 bp, Staphylococcus aureus; identical to SEQ ID NO: 4657

SEQ ID NO: 12510 - DNA, 142 bp, Staphylococcus aureus; identical to SEQ ID NO: 4658

SEQ ID NO: 12511 - DNA, 66 bp, Staphylococcus aureus; identical to SEQ ID NO: 4659

SEQ ID NO: 12512 - DNA, 66 bp, Staphylococcus aureus; identical to SEQ ID NO: 4660

SEQ ID NO: 12513 - DNA, 584 bp, Staphylococcus aureus; identical to SEQ ID NO: 4661

SEQ ID NO: 12514 - DNA, 584 bp, Staphylococcus aureus; identical to SEQ ID NO: 4662

SEQ ID NO: 12515 - DNA, 193 bp, Staphylococcus aureus; identical to SEQ ID NO: 4663

SEQ ID NO: 12516 - DNA, 193 bp, Staphylococcus aureus; identical to SEQ ID NO: 4664

SEQ ID NO: 12517 - DNA, 212 bp, Staphylococcus aureus; identical to SEQ ID NO: 4665

SEQ ID NO: 12518 - DNA, 212 bp, Staphylococcus aureus; identical to SEQ ID NO: 4666

SEQ ID NO: 12519 - DNA, 125 bp, Staphylococcus aureus; identical to SEQ ID NO: 4667

SEQ ID NO: 12520 - DNA, 125 bp, Staphylococcus aureus; identical to SEQ ID NO: 4668

SEQ ID NO: 12521 - DNA, 206 bp, Staphylococcus aureus; identical to SEQ ID NO: 4669

SEQ ID NO: 12522 - DNA, 206 bp, Staphylococcus aureus; identical to SEQ ID NO: 4670

SEQ ID NO: 12523 - DNA, 58 bp, Staphylococcus aureus; identical to SEQ ID NO: 4671

SEQ ID NO: 12524 - DNA, 58 bp, Staphylococcus aureus; identical to SEQ ID NO: 4672

SEQ ID NO: 12525 - DNA, 373 bp, Staphylococcus aureus; identical to SEQ ID NO: 4673

SEQ ID NO: 12526 - DNA, 373 bp, Staphylococcus aureus; identical to SEQ ID NO: 4674

SEQ ID NO: 12527 - DNA, 264 bp, Staphylococcus aureus; identical to SEQ ID NO: 4675

SEQ ID NO: 12528 - DNA, 264 bp, Staphylococcus aureus; identical to SEQ ID NO: 4676

SEQ ID NO: 12529 - DNA, 312 bp, Staphylococcus aureus; identical to SEQ ID NO: 4677

SEQ ID NO: 12530 - DNA, 312 bp, Staphylococcus aureus; identical to SEQ ID NO: 4678

SEQ ID NO: 12531 - DNA, 188 bp, Staphylococcus aureus; identical to SEQ ID NO: 4679

SEQ ID NO: 12532 - DNA, 188 bp, Staphylococcus aureus; identical to SEQ ID NO: 4680

SEQ ID NO: 12533 - DNA, 136 bp, Staphylococcus aureus; identical to SEQ ID NO: 4681

SEQ ID NO: 12534 - DNA, 136 bp, Staphylococcus aureus; identical to SEQ ID NO: 4682

SEQ ID NO: 12535 - DNA, 383 bp, Staphylococcus aureus; identical to SEQ ID NO: 4683

SEQ ID NO: 12536 - DNA, 383 bp, Staphylococcus aureus; identical to SEQ ID NO: 4684

SEQ ID NO: 12537 - DNA, 70 bp, Staphylococcus aureus; identical to SEQ ID NO: 4685

SEQ ID NO: 12538 - DNA, 70 bp, Staphylococcus aureus; identical to SEQ ID NO: 4686

SEQ ID NO: 12539 - DNA, 54 bp, Staphylococcus aureus; identical to SEQ ID NO: 4687

SEQ ID NO: 12540 - DNA, 54 bp, Staphylococcus aureus; identical to SEQ ID NO: 4688

SEQ ID NO: 12541 - DNA, 360 bp, Staphylococcus aureus; identical to SEQ ID NO: 4689

SEQ ID NO: 12542 - DNA, 360 bp, Staphylococcus aureus; identical to SEQ ID NO: 4690

SEQ ID NO: 12543 - DNA, 154 bp, Staphylococcus aureus; identical to SEQ ID NO: 4691

SEQ ID NO: 12544 - DNA, 154 bp, Staphylococcus aureus; identical to SEQ ID NO: 4692

SEQ ID NO: 12545 - DNA, 358 bp, Staphylococcus aureus; identical to SEQ ID NO: 4693

SEQ ID NO: 12546 - DNA, 358 bp, Staphylococcus aureus; identical to SEQ ID NO: 4694

SEQ ID NO: 12547 - DNA, 441 bp, Staphylococcus aureus; identical to SEQ ID NO: 4695

SEQ ID NO: 12548 - DNA, 441 bp, Staphylococcus aureus; identical to SEQ ID NO: 4696

SEQ ID NO: 12549 - DNA, 104 bp, Staphylococcus aureus; identical to SEQ ID NO: 4697

SEQ ID NO: 12550 - DNA, 104 bp, Staphylococcus aureus; identical to SEQ ID NO: 4698

SEQ ID NO: 12551 - DNA, 163 bp, Staphylococcus aureus; identical to SEQ ID NO: 4699

SEQ ID NO: 12552 - DNA, 163 bp, Staphylococcus aureus; identical to SEQ ID NO: 4700

SEQ ID NO: 12553 - DNA, 189 bp, Staphylococcus aureus; identical to SEQ ID NO: 4701

SEQ ID NO: 12554 - DNA, 189 bp, Staphylococcus aureus; identical to SEQ ID NO: 4702

SEQ ID NO: 12555 - DNA, 185 bp, Staphylococcus aureus; identical to SEQ ID NO: 4703

SEQ ID NO: 12556 - DNA, 185 bp, Staphylococcus aureus; identical to SEQ ID NO: 4704

SEQ ID NO: 12557 - DNA, 86 bp, Staphylococcus aureus; identical to SEQ ID NO: 4705

SEQ ID NO: 12558 - DNA, 86 bp, Staphylococcus aureus; identical to SEQ ID NO: 4706

SEQ ID NO: 12559 - DNA, 185 bp, Staphylococcus aureus; identical to SEQ ID NO: 4707

SEQ ID NO: 12560 - DNA, 185 bp, Staphylococcus aureus; identical to SEQ ID NO: 4708

SEQ ID NO: 12561 - DNA, 66 bp, Staphylococcus aureus; identical to SEQ ID NO: 4709

SEQ ID NO: 12562 - DNA, 66 bp, Staphylococcus aureus; identical to SEQ ID NO: 4710

SEQ ID NO: 12563 - DNA, 351 bp, Staphylococcus aureus; identical to SEQ ID NO: 4711

SEQ ID NO: 12564 - DNA, 351 bp, Staphylococcus aureus; identical to SEQ ID NO: 4712

SEQ ID NO: 12565 - DNA, 313 bp, Staphylococcus aureus; identical to SEQ ID NO: 4713

SEQ ID NO: 12566 - DNA, 313 bp, Staphylococcus aureus; identical to SEQ ID NO: 4714

SEQ ID NO: 12567 - DNA, 197 bp, Staphylococcus aureus; identical to SEQ ID NO: 4715

SEQ ID NO: 12568 - DNA, 197 bp, Staphylococcus aureus; identical to SEQ ID NO: 4716

SEQ ID NO: 12569 - DNA, 51 bp, Staphylococcus aureus; identical to SEQ ID NO: 4717

SEQ ID NO: 12570 - DNA, 51 bp, Staphylococcus aureus; identical to SEQ ID NO: 4718

SEQ ID NO: 12571 - DNA, 97 bp, Staphylococcus aureus; identical to SEQ ID NO: 4719

SEQ ID NO: 12572 - DNA, 97 bp, Staphylococcus aureus; identical to SEQ ID NO: 4720

SEQ ID NO: 12573 - DNA, 313 bp, Staphylococcus aureus; identical to SEQ ID NO: 4721

SEQ ID NO: 12574 - DNA, 313 bp, Staphylococcus aureus; identical to SEQ ID NO: 4722

SEQ ID NO: 12575 - DNA, 171 bp, Staphylococcus aureus; identical to SEQ ID NO: 4723

SEQ ID NO: 12576 - DNA, 171 bp, Staphylococcus aureus; identical to SEQ ID NO: 4724

SEQ ID NO: 12577 - DNA, 361 bp, Staphylococcus aureus; identical to SEQ ID NO: 4725

SEQ ID NO: 12578 - DNA, 361 bp, Staphylococcus aureus; identical to SEQ ID NO: 4726

SEQ ID NO: 12579 - DNA, 219 bp, Staphylococcus aureus; identical to SEQ ID NO: 4727

SEQ ID NO: 12580 - DNA, 219 bp, Staphylococcus aureus; identical to SEQ ID NO: 4728

SEQ ID NO: 12581 - DNA, 68 bp, Staphylococcus aureus; identical to SEQ ID NO: 4729

SEQ ID NO: 12582 - DNA, 68 bp, Staphylococcus aureus; identical to SEQ ID NO: 4730

SEQ ID NO: 12583 - DNA, 527 bp, Staphylococcus aureus; identical to SEQ ID NO: 4731

SEQ ID NO: 12584 - DNA, 527 bp, Staphylococcus aureus; identical to SEQ ID NO: 4732

SEQ ID NO: 12585 - DNA, 166 bp, Staphylococcus aureus; identical to SEQ ID NO: 4733

SEQ ID NO: 12586 - DNA, 166 bp, Staphylococcus aureus; identical to SEQ ID NO: 4734

SEQ ID NO: 12587 - DNA, 124 bp, Staphylococcus aureus; identical to SEQ ID NO: 4735

SEQ ID NO: 12588 - DNA, 124 bp, Staphylococcus aureus; identical to SEQ ID NO: 4736

SEQ ID NO: 12589 - DNA, 275 bp, Staphylococcus aureus; identical to SEQ ID NO: 4737

SEQ ID NO: 12590 - DNA, 275 bp, Staphylococcus aureus; identical to SEQ ID NO: 4738

SEQ ID NO: 12591 - DNA, 84 bp, Staphylococcus aureus; identical to SEQ ID NO: 4739

SEQ ID NO: 12592 - DNA, 84 bp, Staphylococcus aureus; identical to SEQ ID NO: 4740

SEQ ID NO: 12593 - DNA, 244 bp, Staphylococcus aureus; identical to SEQ ID NO: 4741

SEQ ID NO: 12594 - DNA, 244 bp, Staphylococcus aureus; identical to SEQ ID NO: 4742

SEQ ID NO: 12595 - DNA, 118 bp, Staphylococcus aureus; identical to SEQ ID NO: 4743

SEQ ID NO: 12596 - DNA, 118 bp, Staphylococcus aureus; identical to SEQ ID NO: 4744

SEQ ID NO: 12597 - DNA, 107 bp, Staphylococcus aureus; identical to SEQ ID NO: 4745

SEQ ID NO: 12598 - DNA, 107 bp, Staphylococcus aureus; identical to SEQ ID NO: 4746

SEQ ID NO: 12599 - DNA, 148 bp, Staphylococcus aureus; identical to SEQ ID NO: 4747

SEQ ID NO: 12600 - DNA, 148 bp, Staphylococcus aureus; identical to SEQ ID NO: 4748

SEQ ID NO: 12601 - DNA, 109 bp, Staphylococcus aureus; identical to SEQ ID NO: 4749

SEQ ID NO: 12602 - DNA, 109 bp, Staphylococcus aureus; identical to SEQ ID NO: 4750

SEQ ID NO: 12603 - DNA, 237 bp, Staphylococcus aureus; identical to SEQ ID NO: 4751

SEQ ID NO: 12604 - DNA, 237 bp, Staphylococcus aureus; identical to SEQ ID NO: 4752

SEQ ID NO: 12605 - DNA, 100 bp, Staphylococcus aureus; identical to SEQ ID NO: 4753

SEQ ID NO: 12606 - DNA, 100 bp, Staphylococcus aureus; identical to SEQ ID NO: 4754

SEQ ID NO: 12607 - DNA, 139 bp, Staphylococcus aureus; identical to SEQ ID NO: 4755

SEQ ID NO: 12608 - DNA, 139 bp, Staphylococcus aureus; identical to SEQ ID NO: 4756

SEQ ID NO: 12609 - DNA, 139 bp, Staphylococcus aureus; identical to SEQ ID NO: 4757

SEQ ID NO: 12610 - DNA, 139 bp, Staphylococcus aureus; identical to SEQ ID NO: 4758

SEQ ID NO: 12611 - DNA, 127 bp, Staphylococcus aureus; identical to SEQ ID NO: 4759

SEQ ID NO: 12612 - DNA, 127 bp, Staphylococcus aureus; identical to SEQ ID NO: 4760

SEQ ID NO: 12613 - DNA, 233 bp, Staphylococcus aureus; identical to SEQ ID NO: 4761

SEQ ID NO: 12614 - DNA, 233 bp, Staphylococcus aureus; identical to SEQ ID NO: 4762

SEQ ID NO: 12615 - DNA, 325 bp, Staphylococcus aureus; identical to SEQ ID NO: 4763

SEQ ID NO: 12616 - DNA, 325 bp, Staphylococcus aureus; identical to SEQ ID NO: 4764

SEQ ID NO: 12617 - DNA, 51 bp, Staphylococcus aureus; identical to SEQ ID NO: 4765

SEQ ID NO: 12618 - DNA, 51 bp, Staphylococcus aureus; identical to SEQ ID NO: 4766

SEQ ID NO: 12619 - DNA, 67 bp, Staphylococcus aureus; identical to SEQ ID NO: 4767

SEQ ID NO: 12620 - DNA, 67 bp, Staphylococcus aureus; identical to SEQ ID NO: 4768

SEQ ID NO: 12621 - DNA, 330 bp, Staphylococcus aureus; identical to SEQ ID NO: 4769

SEQ ID NO: 12622 - DNA, 330 bp, Staphylococcus aureus; identical to SEQ ID NO: 4770

SEQ ID NO: 12623 - DNA, 197 bp, Staphylococcus aureus; identical to SEQ ID NO: 4771

SEQ ID NO: 12624 - DNA, 197 bp, Staphylococcus aureus; identical to SEQ ID NO: 4772

SEQ ID NO: 12625 - DNA, 82 bp, Staphylococcus aureus; identical to SEQ ID NO: 4773

SEQ ID NO: 12626 - DNA, 82 bp, Staphylococcus aureus; identical to SEQ ID NO: 4774

SEQ ID NO: 12627 - DNA, 202 bp, Staphylococcus aureus; identical to SEQ ID NO: 4775

SEQ ID NO: 12628 - DNA, 202 bp, Staphylococcus aureus; identical to SEQ ID NO: 4776

SEQ ID NO: 12629 - DNA, 145 bp, Staphylococcus aureus; identical to SEQ ID NO: 4777

SEQ ID NO: 12630 - DNA, 145 bp, Staphylococcus aureus; identical to SEQ ID NO: 4778

SEQ ID NO: 12631 - DNA, 134 bp, Staphylococcus aureus; identical to SEQ ID NO: 4779

SEQ ID NO: 12632 - DNA, 134 bp, Staphylococcus aureus; identical to SEQ ID NO: 4780

SEQ ID NO: 12633 - DNA, 131 bp, Staphylococcus aureus; identical to SEQ ID NO: 4781

SEQ ID NO: 12634 - DNA, 131 bp, Staphylococcus aureus; identical to SEQ ID NO: 4782

SEQ ID NO: 12635 - DNA, 500 bp, Staphylococcus aureus; identical to SEQ ID NO: 4783

SEQ ID NO: 12636 - DNA, 500 bp, Staphylococcus aureus; identical to SEQ ID NO: 4784

SEQ ID NO: 12637 - DNA, 149 bp, Staphylococcus aureus; identical to SEQ ID NO: 4785

SEQ ID NO: 12638 - DNA, 149 bp, Staphylococcus aureus; identical to SEQ ID NO: 4786

SEQ ID NO: 12639 - DNA, 215 bp, Staphylococcus aureus; identical to SEQ ID NO: 4787

SEQ ID NO: 12640 - DNA, 215 bp, Staphylococcus aureus; identical to SEQ ID NO: 4788

SEQ ID NO: 12641 - DNA, 236 bp, Staphylococcus aureus; identical to SEQ ID NO: 4789

SEQ ID NO: 12642 - DNA, 236 bp, Staphylococcus aureus; identical to SEQ ID NO: 4790

SEQ ID NO: 12643 - DNA, 583 bp, Staphylococcus aureus; identical to SEQ ID NO: 4791

SEQ ID NO: 12644 - DNA, 583 bp, Staphylococcus aureus; identical to SEQ ID NO: 4792

SEQ ID NO: 12645 - DNA, 165 bp, Staphylococcus aureus; identical to SEQ ID NO: 4793

SEQ ID NO: 12646 - DNA, 165 bp, Staphylococcus aureus; identical to SEQ ID NO: 4794

SEQ ID NO: 12647 - DNA, 342 bp, Staphylococcus aureus; identical to SEQ ID NO: 4795

SEQ ID NO: 12648 - DNA, 342 bp, Staphylococcus aureus; identical to SEQ ID NO: 4796

SEQ ID NO: 12649 - DNA, 104 bp, Staphylococcus aureus; identical to SEQ ID NO: 4797

SEQ ID NO: 12650 - DNA, 104 bp, Staphylococcus aureus; identical to SEQ ID NO: 4798

SEQ ID NO: 12651 - DNA, 116 bp, Staphylococcus aureus; identical to SEQ ID NO: 4799

SEQ ID NO: 12652 - DNA, 116 bp, Staphylococcus aureus; identical to SEQ ID NO: 4800

SEQ ID NO: 12653 - DNA, 276 bp, Staphylococcus aureus; identical to SEQ ID NO: 4801

SEQ ID NO: 12654 - DNA, 276 bp, Staphylococcus aureus; identical to SEQ ID NO: 4802

SEQ ID NO: 12655 - DNA, 139 bp, Staphylococcus aureus; identical to SEQ ID NO: 4803

SEQ ID NO: 12656 - DNA, 139 bp, Staphylococcus aureus; identical to SEQ ID NO: 4804

SEQ ID NO: 12657 - DNA, 130 bp, Staphylococcus aureus; identical to SEQ ID NO: 4805

SEQ ID NO: 12658 - DNA, 130 bp, Staphylococcus aureus; identical to SEQ ID NO: 4806

SEQ ID NO: 12659 - DNA, 345 bp, Staphylococcus aureus; identical to SEQ ID NO: 4807

SEQ ID NO: 12660 - DNA, 345 bp, Staphylococcus aureus; identical to SEQ ID NO: 4808

SEQ ID NO: 12661 - DNA, 241 bp, Staphylococcus aureus; identical to SEQ ID NO: 4809

SEQ ID NO: 12662 - DNA, 241 bp, Staphylococcus aureus; identical to SEQ ID NO: 4810

SEQ ID NO: 12663 - DNA, 72 bp, Staphylococcus aureus; identical to SEQ ID NO: 4811

SEQ ID NO: 12664 - DNA, 72 bp, Staphylococcus aureus; identical to SEQ ID NO: 4812

SEQ ID NO: 12665 - DNA, 96 bp, Staphylococcus aureus; identical to SEQ ID NO: 4813

SEQ ID NO: 12666 - DNA, 96 bp, Staphylococcus aureus; identical to SEQ ID NO: 4814

SEQ ID NO: 12667 - DNA, 159 bp, Staphylococcus aureus; identical to SEQ ID NO: 4815

SEQ ID NO: 12668 - DNA, 159 bp, Staphylococcus aureus; identical to SEQ ID NO: 4816

SEQ ID NO: 12669 - DNA, 315 bp, Staphylococcus aureus; identical to SEQ ID NO: 4817

SEQ ID NO: 12670 - DNA, 315 bp, Staphylococcus aureus; identical to SEQ ID NO: 4818

SEQ ID NO: 12671 - DNA, 93 bp, Staphylococcus aureus; identical to SEQ ID NO: 4819

SEQ ID NO: 12672 - DNA, 93 bp, Staphylococcus aureus; identical to SEQ ID NO: 4820

SEQ ID NO: 12673 - DNA, 211 bp, Staphylococcus aureus; identical to SEQ ID NO: 4821

SEQ ID NO: 12674 - DNA, 211 bp, Staphylococcus aureus; identical to SEQ ID NO: 4822

SEQ ID NO: 12675 - DNA, 106 bp, Staphylococcus aureus; identical to SEQ ID NO: 4823

SEQ ID NO: 12676 - DNA, 106 bp, Staphylococcus aureus; identical to SEQ ID NO: 4824

SEQ ID NO: 12677 - DNA, 103 bp, Staphylococcus aureus; identical to SEQ ID NO: 4825

SEQ ID NO: 12678 - DNA, 103 bp, Staphylococcus aureus; identical to SEQ ID NO: 4826

SEQ ID NO: 12679 - DNA, 63 bp, Staphylococcus aureus; identical to SEQ ID NO: 4827

SEQ ID NO: 12680 - DNA, 63 bp, Staphylococcus aureus; identical to SEQ ID NO: 4828

SEQ ID NO: 12681 - DNA, 249 bp, Staphylococcus aureus; identical to SEQ ID NO: 4829

SEQ ID NO: 12682 - DNA, 249 bp, Staphylococcus aureus; identical to SEQ ID NO: 4830

SEQ ID NO: 12683 - DNA, 58 bp, Staphylococcus aureus; identical to SEQ ID NO: 4831

SEQ ID NO: 12684 - DNA, 58 bp, Staphylococcus aureus; identical to SEQ ID NO: 4832

SEQ ID NO: 12685 - DNA, 86 bp, Staphylococcus aureus; identical to SEQ ID NO: 4833

SEQ ID NO: 12686 - DNA, 86 bp, Staphylococcus aureus; identical to SEQ ID NO: 4834

SEQ ID NO: 12687 - DNA, 266 bp, Staphylococcus aureus; identical to SEQ ID NO: 4835

SEQ ID NO: 12688 - DNA, 266 bp, Staphylococcus aureus; identical to SEQ ID NO: 4836

SEQ ID NO: 12689 - DNA, 186 bp, Staphylococcus aureus; identical to SEQ ID NO: 4837

SEQ ID NO: 12690 - DNA, 186 bp, Staphylococcus aureus; identical to SEQ ID NO: 4838

SEQ ID NO: 12691 - DNA, 55 bp, Staphylococcus aureus; identical to SEQ ID NO: 4839

SEQ ID NO: 12692 - DNA, 55 bp, Staphylococcus aureus; identical to SEQ ID NO: 4840

SEQ ID NO: 12693 - DNA, 107 bp, Staphylococcus aureus; identical to SEQ ID NO: 4841

SEQ ID NO: 12694 - DNA, 107 bp, Staphylococcus aureus; identical to SEQ ID NO: 4842

SEQ ID NO: 12695 - DNA, 239 bp, Staphylococcus aureus; identical to SEQ ID NO: 4843

SEQ ID NO: 12696 - DNA, 239 bp, Staphylococcus aureus; identical to SEQ ID NO: 4844

SEQ ID NO: 12697 - DNA, 386 bp, Staphylococcus aureus; identical to SEQ ID NO: 4845

SEQ ID NO: 12698 - DNA, 386 bp, Staphylococcus aureus; identical to SEQ ID NO: 4846

SEQ ID NO: 12699 - DNA, 538 bp, Staphylococcus aureus; identical to SEQ ID NO: 4847

SEQ ID NO: 12700 - DNA, 538 bp, Staphylococcus aureus; identical to SEQ ID NO: 4848

SEQ ID NO: 12701 - DNA, 82 bp, Staphylococcus aureus; identical to SEQ ID NO: 4849

SEQ ID NO: 12702 - DNA, 82 bp, Staphylococcus aureus; identical to SEQ ID NO: 4850

SEQ ID NO: 12703 - DNA, 670 bp, Staphylococcus aureus; identical to SEQ ID NO: 4851

SEQ ID NO: 12704 - DNA, 670 bp, Staphylococcus aureus; identical to SEQ ID NO: 4852

SEQ ID NO: 12705 - DNA, 153 bp, Staphylococcus aureus; identical to SEQ ID NO: 4853

SEQ ID NO: 12706 - DNA, 153 bp, Staphylococcus aureus; identical to SEQ ID NO: 4854

SEQ ID NO: 12707 - DNA, 85 bp, Staphylococcus aureus; identical to SEQ ID NO: 4855

SEQ ID NO: 12708 - DNA, 85 bp, Staphylococcus aureus; identical to SEQ ID NO: 4856

SEQ ID NO: 12709 - DNA, 243 bp, Staphylococcus aureus; identical to SEQ ID NO: 4857

SEQ ID NO: 12710 - DNA, 243 bp, Staphylococcus aureus; identical to SEQ ID NO: 4858

SEQ ID NO: 12711 - DNA, 51 bp, Staphylococcus aureus; identical to SEQ ID NO: 4859

SEQ ID NO: 12712 - DNA, 51 bp, Staphylococcus aureus; identical to SEQ ID NO: 4860

SEQ ID NO: 12713 - DNA, 276 bp, Staphylococcus aureus; identical to SEQ ID NO: 4861

SEQ ID NO: 12714 - DNA, 276 bp, Staphylococcus aureus; identical to SEQ ID NO: 4862

SEQ ID NO: 12715 - DNA, 270 bp, Staphylococcus aureus; identical to SEQ ID NO: 4863

SEQ ID NO: 12716 - DNA, 270 bp, Staphylococcus aureus; identical to SEQ ID NO: 4864

SEQ ID NO: 12717 - DNA, 100 bp, Staphylococcus aureus; identical to SEQ ID NO: 4865

SEQ ID NO: 12718 - DNA, 100 bp, Staphylococcus aureus; identical to SEQ ID NO: 4866

SEQ ID NO: 12719 - DNA, 152 bp, Staphylococcus aureus; identical to SEQ ID NO: 4867

SEQ ID NO: 12720 - DNA, 152 bp, Staphylococcus aureus; identical to SEQ ID NO: 4868

SEQ ID NO: 12721 - DNA, 180 bp, Staphylococcus aureus; identical to SEQ ID NO: 4869

SEQ ID NO: 12722 - DNA, 180 bp, Staphylococcus aureus; identical to SEQ ID NO: 4870

SEQ ID NO: 12723 - DNA, 136 bp, Staphylococcus aureus; identical to SEQ ID NO: 4871

SEQ ID NO: 12724 - DNA, 136 bp, Staphylococcus aureus; identical to SEQ ID NO: 4872

SEQ ID NO: 12725 - DNA, 299 bp, Staphylococcus aureus; identical to SEQ ID NO: 4873

SEQ ID NO: 12726 - DNA, 299 bp, Staphylococcus aureus; identical to SEQ ID NO: 4874

SEQ ID NO: 12727 - DNA, 153 bp, Staphylococcus aureus; identical to SEQ ID NO: 4875

SEQ ID NO: 12728 - DNA, 153 bp, Staphylococcus aureus; identical to SEQ ID NO: 4876

SEQ ID NO: 12729 - DNA, 65 bp, Staphylococcus aureus; identical to SEQ ID NO: 4877

SEQ ID NO: 12730 - DNA, 65 bp, Staphylococcus aureus; identical to SEQ ID NO: 4878

SEQ ID NO: 12731 - DNA, 140 bp, Staphylococcus aureus; identical to SEQ ID NO: 4879

SEQ ID NO: 12732 - DNA, 140 bp, Staphylococcus aureus; identical to SEQ ID NO: 4880

SEQ ID NO: 12733 - DNA, 72 bp, Staphylococcus aureus; identical to SEQ ID NO: 4881

SEQ ID NO: 12734 - DNA, 72 bp, Staphylococcus aureus; identical to SEQ ID NO: 4882

SEQ ID NO: 12735 - DNA, 78 bp, Staphylococcus aureus; identical to SEQ ID NO: 4883

SEQ ID NO: 12736 - DNA, 78 bp, Staphylococcus aureus; identical to SEQ ID NO: 4884

SEQ ID NO: 12737 - DNA, 441 bp, Staphylococcus aureus; identical to SEQ ID NO: 4885

SEQ ID NO: 12738 - DNA, 441 bp, Staphylococcus aureus; identical to SEQ ID NO: 4886

SEQ ID NO: 12739 - DNA, 79 bp, Staphylococcus aureus; identical to SEQ ID NO: 4887

SEQ ID NO: 12740 - DNA, 79 bp, Staphylococcus aureus; identical to SEQ ID NO: 4888

SEQ ID NO: 12741 - DNA, 85 bp, Staphylococcus aureus; identical to SEQ ID NO: 4889

SEQ ID NO: 12742 - DNA, 85 bp, Staphylococcus aureus; identical to SEQ ID NO: 4890

SEQ ID NO: 12743 - DNA, 561 bp, Staphylococcus aureus; identical to SEQ ID NO: 4891

SEQ ID NO: 12744 - DNA, 561 bp, Staphylococcus aureus; identical to SEQ ID NO: 4892

SEQ ID NO: 12745 - DNA, 257 bp, Staphylococcus aureus; identical to SEQ ID NO: 4893

SEQ ID NO: 12746 - DNA, 257 bp, Staphylococcus aureus; identical to SEQ ID NO: 4894

SEQ ID NO: 12747 - DNA, 117 bp, Staphylococcus aureus; identical to SEQ ID NO: 4895

SEQ ID NO: 12748 - DNA, 117 bp, Staphylococcus aureus; identical to SEQ ID NO: 4896

SEQ ID NO: 12749 - DNA, 142 bp, Staphylococcus aureus; identical to SEQ ID NO: 4897

SEQ ID NO: 12750 - DNA, 142 bp, Staphylococcus aureus; identical to SEQ ID NO: 4898

SEQ ID NO: 12751 - DNA, 512 bp, Staphylococcus aureus; identical to SEQ ID NO: 4899

SEQ ID NO: 12752 - DNA, 512 bp, Staphylococcus aureus; identical to SEQ ID NO: 4900

SEQ ID NO: 12753 - DNA, 112 bp, Staphylococcus aureus; identical to SEQ ID NO: 4901

SEQ ID NO: 12754 - DNA, 112 bp, Staphylococcus aureus; identical to SEQ ID NO: 4902

SEQ ID NO: 12755 - DNA, 391 bp, Staphylococcus aureus; identical to SEQ ID NO: 4903

SEQ ID NO: 12756 - DNA, 391 bp, Staphylococcus aureus; identical to SEQ ID NO: 4904

SEQ ID NO: 12757 - DNA, 313 bp, Staphylococcus aureus; identical to SEQ ID NO: 4905

SEQ ID NO: 12758 - DNA, 313 bp, Staphylococcus aureus; identical to SEQ ID NO: 4906

SEQ ID NO: 12759 - DNA, 66 bp, Staphylococcus aureus; identical to SEQ ID NO: 4907

SEQ ID NO: 12760 - DNA, 66 bp, Staphylococcus aureus; identical to SEQ ID NO: 4908

SEQ ID NO: 12761 - DNA, 416 bp, Staphylococcus aureus; identical to SEQ ID NO: 4909

SEQ ID NO: 12762 - DNA, 416 bp, Staphylococcus aureus; identical to SEQ ID NO: 4910

SEQ ID NO: 12763 - DNA, 72 bp, Staphylococcus aureus; identical to SEQ ID NO: 4911

SEQ ID NO: 12764 - DNA, 72 bp, Staphylococcus aureus; identical to SEQ ID NO: 4912

SEQ ID NO: 12765 - DNA, 271 bp, Staphylococcus aureus; identical to SEQ ID NO: 4913

SEQ ID NO: 12766 - DNA, 271 bp, Staphylococcus aureus; identical to SEQ ID NO: 4914

SEQ ID NO: 12767 - DNA, 151 bp, Staphylococcus aureus; identical to SEQ ID NO: 4915

SEQ ID NO: 12768 - DNA, 151 bp, Staphylococcus aureus; identical to SEQ ID NO: 4916

SEQ ID NO: 12769 - DNA, 118 bp, Staphylococcus aureus; identical to SEQ ID NO: 4917

SEQ ID NO: 12770 - DNA, 118 bp, Staphylococcus aureus; identical to SEQ ID NO: 4918

SEQ ID NO: 12771 - DNA, 111 bp, Staphylococcus aureus; identical to SEQ ID NO: 4919

SEQ ID NO: 12772 - DNA, 111 bp, Staphylococcus aureus; identical to SEQ ID NO: 4920

SEQ ID NO: 12773 - DNA, 177 bp, Staphylococcus aureus; identical to SEQ ID NO: 4921

SEQ ID NO: 12774 - DNA, 177 bp, Staphylococcus aureus; identical to SEQ ID NO: 4922

SEQ ID NO: 12775 - DNA, 91 bp, Staphylococcus aureus; identical to SEQ ID NO: 4923

SEQ ID NO: 12776 - DNA, 91 bp, Staphylococcus aureus; identical to SEQ ID NO: 4924

SEQ ID NO: 12777 - DNA, 445 bp, Staphylococcus aureus; identical to SEQ ID NO: 4925

SEQ ID NO: 12778 - DNA, 445 bp, Staphylococcus aureus; identical to SEQ ID NO: 4926

SEQ ID NO: 12779 - DNA, 338 bp, Staphylococcus aureus; identical to SEQ ID NO: 4927

SEQ ID NO: 12780 - DNA, 338 bp, Staphylococcus aureus; identical to SEQ ID NO: 4928

SEQ ID NO: 12781 - DNA, 376 bp, Staphylococcus aureus; identical to SEQ ID NO: 4929

SEQ ID NO: 12782 - DNA, 376 bp, Staphylococcus aureus; identical to SEQ ID NO: 4930

SEQ ID NO: 12783 - DNA, 365 bp, Staphylococcus aureus; identical to SEQ ID NO: 4931

SEQ ID NO: 12784 - DNA, 365 bp, Staphylococcus aureus; identical to SEQ ID NO: 4932

SEQ ID NO: 12785 - DNA, 52 bp, Staphylococcus aureus; identical to SEQ ID NO: 4933

SEQ ID NO: 12786 - DNA, 52 bp, Staphylococcus aureus; identical to SEQ ID NO: 4934

SEQ ID NO: 12787 - DNA, 382 bp, Staphylococcus aureus; identical to SEQ ID NO: 4935

SEQ ID NO: 12788 - DNA, 382 bp, Staphylococcus aureus; identical to SEQ ID NO: 4936

SEQ ID NO: 12789 - DNA, 108 bp, Staphylococcus aureus; identical to SEQ ID NO: 4937

SEQ ID NO: 12790 - DNA, 108 bp, Staphylococcus aureus; identical to SEQ ID NO: 4938

SEQ ID NO: 12791 - DNA, 212 bp, Staphylococcus aureus; identical to SEQ ID NO: 4939

SEQ ID NO: 12792 - DNA, 212 bp, Staphylococcus aureus; identical to SEQ ID NO: 4940

SEQ ID NO: 12793 - DNA, 60 bp, Staphylococcus aureus; identical to SEQ ID NO: 4941

SEQ ID NO: 12794 - DNA, 60 bp, Staphylococcus aureus; identical to SEQ ID NO: 4942

SEQ ID NO: 12795 - DNA, 56 bp, Staphylococcus aureus; identical to SEQ ID NO: 4943

SEQ ID NO: 12796 - DNA, 56 bp, Staphylococcus aureus; identical to SEQ ID NO: 4944

SEQ ID NO: 12797 - DNA, 51 bp, Staphylococcus aureus; identical to SEQ ID NO: 4945

SEQ ID NO: 12798 - DNA, 51 bp, Staphylococcus aureus; identical to SEQ ID NO: 4946

SEQ ID NO: 12799 - DNA, 134 bp, Staphylococcus aureus; identical to SEQ ID NO: 4947

SEQ ID NO: 12800 - DNA, 134 bp, Staphylococcus aureus; identical to SEQ ID NO: 4948

SEQ ID NO: 12801 - DNA, 288 bp, Staphylococcus aureus; identical to SEQ ID NO: 4949

SEQ ID NO: 12802 - DNA, 288 bp, Staphylococcus aureus; identical to SEQ ID NO: 4950

SEQ ID NO: 12803 - DNA, 118 bp, Staphylococcus aureus; identical to SEQ ID NO: 4951

SEQ ID NO: 12804 - DNA, 118 bp, Staphylococcus aureus; identical to SEQ ID NO: 4952

SEQ ID NO: 12805 - DNA, 106 bp, Staphylococcus aureus; identical to SEQ ID NO: 4953

SEQ ID NO: 12806 - DNA, 106 bp, Staphylococcus aureus; identical to SEQ ID NO: 4954

SEQ ID NO: 12807 - DNA, 1030 bp, Staphylococcus aureus; identical to SEQ ID NO: 4955

SEQ ID NO: 12808 - DNA, 1030 bp, Staphylococcus aureus; identical to SEQ ID NO: 4956

SEQ ID NO: 12809 - DNA, 161 bp, Staphylococcus aureus; identical to SEQ ID NO: 4957

SEQ ID NO: 12810 - DNA, 161 bp, Staphylococcus aureus; identical to SEQ ID NO: 4958

SEQ ID NO: 12811 - DNA, 228 bp, Staphylococcus aureus; identical to SEQ ID NO: 4959

SEQ ID NO: 12812 - DNA, 228 bp, Staphylococcus aureus; identical to SEQ ID NO: 4960

SEQ ID NO: 12813 - DNA, 95 bp, Staphylococcus aureus; identical to SEQ ID NO: 4961

SEQ ID NO: 12814 - DNA, 95 bp, Staphylococcus aureus; identical to SEQ ID NO: 4962

SEQ ID NO: 12815 - DNA, 161 bp, Staphylococcus aureus; identical to SEQ ID NO: 4963

SEQ ID NO: 12816 - DNA, 161 bp, Staphylococcus aureus; identical to SEQ ID NO: 4964

SEQ ID NO: 12817 - DNA, 166 bp, Staphylococcus aureus; identical to SEQ ID NO: 4965

SEQ ID NO: 12818 - DNA, 166 bp, Staphylococcus aureus; identical to SEQ ID NO: 4966

SEQ ID NO: 12819 - DNA, 294 bp, Staphylococcus aureus; identical to SEQ ID NO: 4967

SEQ ID NO: 12820 - DNA, 294 bp, Staphylococcus aureus; identical to SEQ ID NO: 4968

SEQ ID NO: 12821 - DNA, 222 bp, Staphylococcus aureus; identical to SEQ ID NO: 4969

SEQ ID NO: 12822 - DNA, 222 bp, Staphylococcus aureus; identical to SEQ ID NO: 4970

SEQ ID NO: 12823 - DNA, 184 bp, Staphylococcus aureus; identical to SEQ ID NO: 4971

SEQ ID NO: 12824 - DNA, 184 bp, Staphylococcus aureus; identical to SEQ ID NO: 4972

SEQ ID NO: 12825 - DNA, 139 bp, Staphylococcus aureus; identical to SEQ ID NO: 4973

SEQ ID NO: 12826 - DNA, 139 bp, Staphylococcus aureus; identical to SEQ ID NO: 4974

SEQ ID NO: 12827 - DNA, 168 bp, Staphylococcus aureus; identical to SEQ ID NO: 4975

SEQ ID NO: 12828 - DNA, 168 bp, Staphylococcus aureus; identical to SEQ ID NO: 4976

SEQ ID NO: 12829 - DNA, 120 bp, Staphylococcus aureus; identical to SEQ ID NO: 4977

SEQ ID NO: 12830 - DNA, 120 bp, Staphylococcus aureus; identical to SEQ ID NO: 4978

SEQ ID NO: 12831 - DNA, 180 bp, Staphylococcus aureus; identical to SEQ ID NO: 4979

SEQ ID NO: 12832 - DNA, 180 bp, Staphylococcus aureus; identical to SEQ ID NO: 4980

SEQ ID NO: 12833 - DNA, 269 bp, Staphylococcus aureus; identical to SEQ ID NO: 4981

SEQ ID NO: 12834 - DNA, 269 bp, Staphylococcus aureus; identical to SEQ ID NO: 4982

SEQ ID NO: 12835 - DNA, 468 bp, Staphylococcus aureus; identical to SEQ ID NO: 4983

SEQ ID NO: 12836 - DNA, 468 bp, Staphylococcus aureus; identical to SEQ ID NO: 4984

SEQ ID NO: 12837 - DNA, 63 bp, Staphylococcus aureus; identical to SEQ ID NO: 4985

SEQ ID NO: 12838 - DNA, 63 bp, Staphylococcus aureus; identical to SEQ ID NO: 4986

SEQ ID NO: 12839 - DNA, 404 bp, Staphylococcus aureus; identical to SEQ ID NO: 4987

SEQ ID NO: 12840 - DNA, 404 bp, Staphylococcus aureus; identical to SEQ ID NO: 4988

SEQ ID NO: 12841 - DNA, 140 bp, Staphylococcus aureus; identical to SEQ ID NO: 4989

SEQ ID NO: 12842 - DNA, 140 bp, Staphylococcus aureus; identical to SEQ ID NO: 4990

SEQ ID NO: 12843 - DNA, 68 bp, Staphylococcus aureus; identical to SEQ ID NO: 4991

SEQ ID NO: 12844 - DNA, 68 bp, Staphylococcus aureus; identical to SEQ ID NO: 4992

SEQ ID NO: 12845 - DNA, 89 bp, Staphylococcus aureus; identical to SEQ ID NO: 4993

SEQ ID NO: 12846 - DNA, 89 bp, Staphylococcus aureus; identical to SEQ ID NO: 4994

SEQ ID NO: 12847 - DNA, 205 bp, Staphylococcus aureus; identical to SEQ ID NO: 4995

SEQ ID NO: 12848 - DNA, 205 bp, Staphylococcus aureus; identical to SEQ ID NO: 4996

SEQ ID NO: 12849 - DNA, 553 bp, Staphylococcus aureus; identical to SEQ ID NO: 4997

SEQ ID NO: 12850 - DNA, 553 bp, Staphylococcus aureus; identical to SEQ ID NO: 4998

SEQ ID NO: 12851 - DNA, 214 bp, Staphylococcus aureus; identical to SEQ ID NO: 4999

SEQ ID NO: 12852 - DNA, 214 bp, Staphylococcus aureus; identical to SEQ ID NO: 5000

SEQ ID NO: 12853 - DNA, 162 bp, Staphylococcus aureus; identical to SEQ ID NO: 5001

SEQ ID NO: 12854 - DNA, 162 bp, Staphylococcus aureus; identical to SEQ ID NO: 5002

SEQ ID NO: 12855 - DNA, 91 bp, Staphylococcus aureus; identical to SEQ ID NO: 5003

SEQ ID NO: 12856 - DNA, 91 bp, Staphylococcus aureus; identical to SEQ ID NO: 5004

SEQ ID NO: 12857 - DNA, 90 bp, Staphylococcus aureus; identical to SEQ ID NO: 5005

SEQ ID NO: 12858 - DNA, 90 bp, Staphylococcus aureus; identical to SEQ ID NO: 5006

SEQ ID NO: 12859 - DNA, 490 bp, Staphylococcus aureus; identical to SEQ ID NO: 5007

SEQ ID NO: 12860 - DNA, 490 bp, Staphylococcus aureus; identical to SEQ ID NO: 5008

SEQ ID NO: 12861 - DNA, 92 bp, Staphylococcus aureus; identical to SEQ ID NO: 5009

SEQ ID NO: 12862 - DNA, 92 bp, Staphylococcus aureus; identical to SEQ ID NO: 5010

SEQ ID NO: 12863 - DNA, 90 bp, Staphylococcus aureus; identical to SEQ ID NO: 5011

SEQ ID NO: 12864 - DNA, 90 bp, Staphylococcus aureus; identical to SEQ ID NO: 5012

SEQ ID NO: 12865 - DNA, 122 bp, Staphylococcus aureus; identical to SEQ ID NO: 5013

SEQ ID NO: 12866 - DNA, 122 bp, Staphylococcus aureus; identical to SEQ ID NO: 5014

SEQ ID NO: 12867 - DNA, 273 bp, Staphylococcus aureus; identical to SEQ ID NO: 5015

SEQ ID NO: 12868 - DNA, 273 bp, Staphylococcus aureus; identical to SEQ ID NO: 5016

SEQ ID NO: 12869 - DNA, 104 bp, Staphylococcus aureus; identical to SEQ ID NO: 5017

SEQ ID NO: 12870 - DNA, 104 bp, Staphylococcus aureus; identical to SEQ ID NO: 5018

SEQ ID NO: 12871 - DNA, 166 bp, Staphylococcus aureus; identical to SEQ ID NO: 5019

SEQ ID NO: 12872 - DNA, 166 bp, Staphylococcus aureus; identical to SEQ ID NO: 5020

SEQ ID NO: 12873 - DNA, 99 bp, Staphylococcus aureus; identical to SEQ ID NO: 5021

SEQ ID NO: 12874 - DNA, 99 bp, Staphylococcus aureus; identical to SEQ ID NO: 5022

SEQ ID NO: 12875 - DNA, 309 bp, Staphylococcus aureus; identical to SEQ ID NO: 5023

SEQ ID NO: 12876 - DNA, 309 bp, Staphylococcus aureus; identical to SEQ ID NO: 5024

SEQ ID NO: 12877 - DNA, 211 bp, Staphylococcus aureus; identical to SEQ ID NO: 5025

SEQ ID NO: 12878 - DNA, 211 bp, Staphylococcus aureus; identical to SEQ ID NO: 5026

SEQ ID NO: 12879 - DNA, 146 bp, Staphylococcus aureus; identical to SEQ ID NO: 5027

SEQ ID NO: 12880 - DNA, 146 bp, Staphylococcus aureus; identical to SEQ ID NO: 5028

SEQ ID NO: 12881 - DNA, 149 bp, Staphylococcus aureus; identical to SEQ ID NO: 5029

SEQ ID NO: 12882 - DNA, 149 bp, Staphylococcus aureus; identical to SEQ ID NO: 5030

SEQ ID NO: 12883 - DNA, 310 bp, Staphylococcus aureus; identical to SEQ ID NO: 5031

SEQ ID NO: 12884 - DNA, 310 bp, Staphylococcus aureus; identical to SEQ ID NO: 5032

SEQ ID NO: 12885 - DNA, 179 bp, Staphylococcus aureus; identical to SEQ ID NO: 5033

SEQ ID NO: 12886 - DNA, 179 bp, Staphylococcus aureus; identical to SEQ ID NO: 5034

SEQ ID NO: 12887 - DNA, 256 bp, Staphylococcus aureus; identical to SEQ ID NO: 5035

SEQ ID NO: 12888 - DNA, 256 bp, Staphylococcus aureus; identical to SEQ ID NO: 5036

SEQ ID NO: 12889 - DNA, 227 bp, Staphylococcus aureus; identical to SEQ ID NO: 5037

SEQ ID NO: 12890 - DNA, 227 bp, Staphylococcus aureus; identical to SEQ ID NO: 5038

SEQ ID NO: 12891 - DNA, 178 bp, Staphylococcus aureus; identical to SEQ ID NO: 5039

SEQ ID NO: 12892 - DNA, 178 bp, Staphylococcus aureus; identical to SEQ ID NO: 5040

SEQ ID NO: 12893 - DNA, 215 bp, Staphylococcus aureus; identical to SEQ ID NO: 5041

SEQ ID NO: 12894 - DNA, 215 bp, Staphylococcus aureus; identical to SEQ ID NO: 5042

SEQ ID NO: 12895 - DNA, 116 bp, Staphylococcus aureus; identical to SEQ ID NO: 5043

SEQ ID NO: 12896 - DNA, 116 bp, Staphylococcus aureus; identical to SEQ ID NO: 5044

SEQ ID NO: 12897 - DNA, 168 bp, Staphylococcus aureus; identical to SEQ ID NO: 5045

SEQ ID NO: 12898 - DNA, 168 bp, Staphylococcus aureus; identical to SEQ ID NO: 5046

SEQ ID NO: 12899 - DNA, 558 bp, Staphylococcus aureus; identical to SEQ ID NO: 5047

SEQ ID NO: 12900 - DNA, 558 bp, Staphylococcus aureus; identical to SEQ ID NO: 5048

SEQ ID NO: 12901 - DNA, 121 bp, Staphylococcus aureus; identical to SEQ ID NO: 5049

SEQ ID NO: 12902 - DNA, 121 bp, Staphylococcus aureus; identical to SEQ ID NO: 5050

SEQ ID NO: 12903 - DNA, 168 bp, Staphylococcus aureus; identical to SEQ ID NO: 5051

SEQ ID NO: 12904 - DNA, 168 bp, Staphylococcus aureus; identical to SEQ ID NO: 5052

SEQ ID NO: 12905 - DNA, 162 bp, Staphylococcus aureus; identical to SEQ ID NO: 5053

SEQ ID NO: 12906 - DNA, 162 bp, Staphylococcus aureus; identical to SEQ ID NO: 5054

SEQ ID NO: 12907 - DNA, 138 bp, Staphylococcus aureus; identical to SEQ ID NO: 5055

SEQ ID NO: 12908 - DNA, 138 bp, Staphylococcus aureus; identical to SEQ ID NO: 5056

SEQ ID NO: 12909 - DNA, 205 bp, Staphylococcus aureus; identical to SEQ ID NO: 5057

SEQ ID NO: 12910 - DNA, 205 bp, Staphylococcus aureus; identical to SEQ ID NO: 5058

SEQ ID NO: 12911 - DNA, 93 bp, Staphylococcus aureus; identical to SEQ ID NO: 5059

SEQ ID NO: 12912 - DNA, 93 bp, Staphylococcus aureus; identical to SEQ ID NO: 5060

SEQ ID NO: 12913 - DNA, 103 bp, Staphylococcus aureus; identical to SEQ ID NO: 5061

SEQ ID NO: 12914 - DNA, 103 bp, Staphylococcus aureus; identical to SEQ ID NO: 5062

SEQ ID NO: 12915 - DNA, 207 bp, Staphylococcus aureus; identical to SEQ ID NO: 5063

SEQ ID NO: 12916 - DNA, 207 bp, Staphylococcus aureus; identical to SEQ ID NO: 5064

SEQ ID NO: 12917 - DNA, 157 bp, Staphylococcus aureus; identical to SEQ ID NO: 5065

SEQ ID NO: 12918 - DNA, 157 bp, Staphylococcus aureus; identical to SEQ ID NO: 5066

SEQ ID NO: 12919 - DNA, 484 bp, Staphylococcus aureus; identical to SEQ ID NO: 5067

SEQ ID NO: 12920 - DNA, 484 bp, Staphylococcus aureus; identical to SEQ ID NO: 5068

SEQ ID NO: 12921 - DNA, 556 bp, Staphylococcus aureus; identical to SEQ ID NO: 5069

SEQ ID NO: 12922 - DNA, 556 bp, Staphylococcus aureus; identical to SEQ ID NO: 5070

SEQ ID NO: 12923 - DNA, 304 bp, Staphylococcus aureus; identical to SEQ ID NO: 5071

SEQ ID NO: 12924 - DNA, 304 bp, Staphylococcus aureus; identical to SEQ ID NO: 5072

SEQ ID NO: 12925 - DNA, 80 bp, Staphylococcus aureus; identical to SEQ ID NO: 5073

SEQ ID NO: 12926 - DNA, 80 bp, Staphylococcus aureus; identical to SEQ ID NO: 5074

SEQ ID NO: 12927 - DNA, 115 bp, Staphylococcus aureus; identical to SEQ ID NO: 5075

SEQ ID NO: 12928 - DNA, 115 bp, Staphylococcus aureus; identical to SEQ ID NO: 5076

SEQ ID NO: 12929 - DNA, 55 bp, Staphylococcus aureus; identical to SEQ ID NO: 5077

SEQ ID NO: 12930 - DNA, 55 bp, Staphylococcus aureus; identical to SEQ ID NO: 5078

SEQ ID NO: 12931 - DNA, 137 bp, Staphylococcus aureus; identical to SEQ ID NO: 5079

SEQ ID NO: 12932 - DNA, 137 bp, Staphylococcus aureus; identical to SEQ ID NO: 5080

SEQ ID NO: 12933 - DNA, 207 bp, Staphylococcus aureus; identical to SEQ ID NO: 5081

SEQ ID NO: 12934 - DNA, 207 bp, Staphylococcus aureus; identical to SEQ ID NO: 5082

SEQ ID NO: 12935 - DNA, 271 bp, Staphylococcus aureus; identical to SEQ ID NO: 5083

SEQ ID NO: 12936 - DNA, 271 bp, Staphylococcus aureus; identical to SEQ ID NO: 5084

SEQ ID NO: 12937 - DNA, 174 bp, Staphylococcus aureus; identical to SEQ ID NO: 5085

SEQ ID NO: 12938 - DNA, 174 bp, Staphylococcus aureus; identical to SEQ ID NO: 5086

SEQ ID NO: 12939 - DNA, 214 bp, Staphylococcus aureus; identical to SEQ ID NO: 5087

SEQ ID NO: 12940 - DNA, 214 bp, Staphylococcus aureus; identical to SEQ ID NO: 5088

SEQ ID NO: 12941 - DNA, 136 bp, Staphylococcus aureus; identical to SEQ ID NO: 5089

SEQ ID NO: 12942 - DNA, 136 bp, Staphylococcus aureus; identical to SEQ ID NO: 5090

SEQ ID NO: 12943 - DNA, 72 bp, Staphylococcus aureus; identical to SEQ ID NO: 5091

SEQ ID NO: 12944 - DNA, 72 bp, Staphylococcus aureus; identical to SEQ ID NO: 5092

SEQ ID NO: 12945 - DNA, 97 bp, Staphylococcus aureus; identical to SEQ ID NO: 5093

SEQ ID NO: 12946 - DNA, 97 bp, Staphylococcus aureus; identical to SEQ ID NO: 5094

SEQ ID NO: 12947 - DNA, 65 bp, Staphylococcus aureus; identical to SEQ ID NO: 5095

SEQ ID NO: 12948 - DNA, 65 bp, Staphylococcus aureus; identical to SEQ ID NO: 5096

SEQ ID NO: 12949 - DNA, 57 bp, Staphylococcus aureus; identical to SEQ ID NO: 5097

SEQ ID NO: 12950 - DNA, 57 bp, Staphylococcus aureus; identical to SEQ ID NO: 5098

SEQ ID NO: 12951 - DNA, 216 bp, Staphylococcus aureus; identical to SEQ ID NO: 5099

SEQ ID NO: 12952 - DNA, 216 bp, Staphylococcus aureus; identical to SEQ ID NO: 5100

SEQ ID NO: 12953 - DNA, 281 bp, Staphylococcus aureus; identical to SEQ ID NO: 5101

SEQ ID NO: 12954 - DNA, 281 bp, Staphylococcus aureus; identical to SEQ ID NO: 5102

SEQ ID NO: 12955 - DNA, 206 bp, Staphylococcus aureus; identical to SEQ ID NO: 5103

SEQ ID NO: 12956 - DNA, 206 bp, Staphylococcus aureus; identical to SEQ ID NO: 5104

SEQ ID NO: 12957 - DNA, 269 bp, Staphylococcus aureus; identical to SEQ ID NO: 5105

SEQ ID NO: 12958 - DNA, 269 bp, Staphylococcus aureus; identical to SEQ ID NO: 5106

SEQ ID NO: 12959 - DNA, 158 bp, Staphylococcus aureus; identical to SEQ ID NO: 5107

SEQ ID NO: 12960 - DNA, 158 bp, Staphylococcus aureus; identical to SEQ ID NO: 5108

SEQ ID NO: 12961 - DNA, 145 bp, Staphylococcus aureus; identical to SEQ ID NO: 5109

SEQ ID NO: 12962 - DNA, 145 bp, Staphylococcus aureus; identical to SEQ ID NO: 5110

SEQ ID NO: 12963 - DNA, 335 bp, Staphylococcus aureus; identical to SEQ ID NO: 5111

SEQ ID NO: 12964 - DNA, 335 bp, Staphylococcus aureus; identical to SEQ ID NO: 5112

SEQ ID NO: 12965 - DNA, 106 bp, Staphylococcus aureus; identical to SEQ ID NO: 5113

SEQ ID NO: 12966 - DNA, 106 bp, Staphylococcus aureus; identical to SEQ ID NO: 5114

SEQ ID NO: 12967 - DNA, 115 bp, Staphylococcus aureus; identical to SEQ ID NO: 5115

SEQ ID NO: 12968 - DNA, 115 bp, Staphylococcus aureus; identical to SEQ ID NO: 5116

SEQ ID NO: 12969 - DNA, 146 bp, Staphylococcus aureus; identical to SEQ ID NO: 5117

SEQ ID NO: 12970 - DNA, 146 bp, Staphylococcus aureus; identical to SEQ ID NO: 5118

SEQ ID NO: 12971 - DNA, 428 bp, Staphylococcus aureus; identical to SEQ ID NO: 5119

SEQ ID NO: 12972 - DNA, 428 bp, Staphylococcus aureus; identical to SEQ ID NO: 5120

SEQ ID NO: 12973 - DNA, 366 bp, Staphylococcus aureus; identical to SEQ ID NO: 5121

SEQ ID NO: 12974 - DNA, 366 bp, Staphylococcus aureus; identical to SEQ ID NO: 5122

SEQ ID NO: 12975 - DNA, 393 bp, Staphylococcus aureus; identical to SEQ ID NO: 5123

SEQ ID NO: 12976 - DNA, 393 bp, Staphylococcus aureus; identical to SEQ ID NO: 5124

SEQ ID NO: 12977 - DNA, 120 bp, Staphylococcus aureus; identical to SEQ ID NO: 5125

SEQ ID NO: 12978 - DNA, 120 bp, Staphylococcus aureus; identical to SEQ ID NO: 5126

SEQ ID NO: 12979 - DNA, 124 bp, Staphylococcus aureus; identical to SEQ ID NO: 5127

SEQ ID NO: 12980 - DNA, 124 bp, Staphylococcus aureus; identical to SEQ ID NO: 5128

SEQ ID NO: 12981 - DNA, 65 bp, Staphylococcus aureus; identical to SEQ ID NO: 5129

SEQ ID NO: 12982 - DNA, 65 bp, Staphylococcus aureus; identical to SEQ ID NO: 5130

SEQ ID NO: 12983 - DNA, 58 bp, Staphylococcus aureus; identical to SEQ ID NO: 5131

SEQ ID NO: 12984 - DNA, 58 bp, Staphylococcus aureus; identical to SEQ ID NO: 5132

SEQ ID NO: 12985 - DNA, 278 bp, Staphylococcus aureus; identical to SEQ ID NO: 5133

SEQ ID NO: 12986 - DNA, 278 bp, Staphylococcus aureus; identical to SEQ ID NO: 5134

SEQ ID NO: 12987 - DNA, 76 bp, Staphylococcus aureus; identical to SEQ ID NO: 5135

SEQ ID NO: 12988 - DNA, 76 bp, Staphylococcus aureus; identical to SEQ ID NO: 5136

SEQ ID NO: 12989 - DNA, 112 bp, Staphylococcus aureus; identical to SEQ ID NO: 5137

SEQ ID NO: 12990 - DNA, 112 bp, Staphylococcus aureus; identical to SEQ ID NO: 5138

SEQ ID NO: 12991 - DNA, 501 bp, Staphylococcus aureus; identical to SEQ ID NO: 5139

SEQ ID NO: 12992 - DNA, 501 bp, Staphylococcus aureus; identical to SEQ ID NO: 5140

SEQ ID NO: 12993 - DNA, 334 bp, Staphylococcus aureus; identical to SEQ ID NO: 5141

SEQ ID NO: 12994 - DNA, 334 bp, Staphylococcus aureus; identical to SEQ ID NO: 5142

SEQ ID NO: 12995 - DNA, 200 bp, Staphylococcus aureus; identical to SEQ ID NO: 5143

SEQ ID NO: 12996 - DNA, 200 bp, Staphylococcus aureus; identical to SEQ ID NO: 5144

SEQ ID NO: 12997 - DNA, 506 bp, Staphylococcus aureus; identical to SEQ ID NO: 5145

SEQ ID NO: 12998 - DNA, 506 bp, Staphylococcus aureus; identical to SEQ ID NO: 5146

SEQ ID NO: 12999 - DNA, 183 bp, Staphylococcus aureus; identical to SEQ ID NO: 5147

SEQ ID NO: 13000 - DNA, 183 bp, Staphylococcus aureus; identical to SEQ ID NO: 5148

SEQ ID NO: 13001 - DNA, 132 bp, Staphylococcus aureus; identical to SEQ ID NO: 5149

SEQ ID NO: 13002 - DNA, 132 bp, Staphylococcus aureus; identical to SEQ ID NO: 5150

SEQ ID NO: 13003 - DNA, 120 bp, Staphylococcus aureus; identical to SEQ ID NO: 5151

SEQ ID NO: 13004 - DNA, 120 bp, Staphylococcus aureus; identical to SEQ ID NO: 5152

SEQ ID NO: 13005 - DNA, 140 bp, Staphylococcus aureus; identical to SEQ ID NO: 5153

SEQ ID NO: 13006 - DNA, 140 bp, Staphylococcus aureus; identical to SEQ ID NO: 5154

SEQ ID NO: 13007 - DNA, 548 bp, Staphylococcus aureus; identical to SEQ ID NO: 5155

SEQ ID NO: 13008 - DNA, 548 bp, Staphylococcus aureus; identical to SEQ ID NO: 5156

SEQ ID NO: 13009 - DNA, 167 bp, Staphylococcus aureus; identical to SEQ ID NO: 5157

SEQ ID NO: 13010 - DNA, 167 bp, Staphylococcus aureus; identical to SEQ ID NO: 5158

SEQ ID NO: 13011 - DNA, 587 bp, Staphylococcus aureus; identical to SEQ ID NO: 5159

SEQ ID NO: 13012 - DNA, 587 bp, Staphylococcus aureus; identical to SEQ ID NO: 5160

SEQ ID NO: 13013 - DNA, 176 bp, Staphylococcus aureus; identical to SEQ ID NO: 5161

SEQ ID NO: 13014 - DNA, 176 bp, Staphylococcus aureus; identical to SEQ ID NO: 5162

SEQ ID NO: 13015 - DNA, 51 bp, Staphylococcus aureus; identical to SEQ ID NO: 5163

SEQ ID NO: 13016 - DNA, 51 bp, Staphylococcus aureus; identical to SEQ ID NO: 5164

SEQ ID NO: 13017 - DNA, 468 bp, Staphylococcus aureus; identical to SEQ ID NO: 5165

SEQ ID NO: 13018 - DNA, 468 bp, Staphylococcus aureus; identical to SEQ ID NO: 5166

SEQ ID NO: 13019 - DNA, 139 bp, Staphylococcus aureus; identical to SEQ ID NO: 5167

SEQ ID NO: 13020 - DNA, 139 bp, Staphylococcus aureus; identical to SEQ ID NO: 5168

SEQ ID NO: 13021 - DNA, 66 bp, Staphylococcus aureus; identical to SEQ ID NO: 5169

SEQ ID NO: 13022 - DNA, 66 bp, Staphylococcus aureus; identical to SEQ ID NO: 5170

SEQ ID NO: 13023 - DNA, 66 bp, Staphylococcus aureus; identical to SEQ ID NO: 5171

SEQ ID NO: 13024 - DNA, 66 bp, Staphylococcus aureus; identical to SEQ ID NO: 5172

SEQ ID NO: 13025 - DNA, 179 bp, Staphylococcus aureus; identical to SEQ ID NO: 5173

SEQ ID NO: 13026 - DNA, 179 bp, Staphylococcus aureus; identical to SEQ ID NO: 5174

SEQ ID NO: 13027 - DNA, 129 bp, Staphylococcus aureus; identical to SEQ ID NO: 5175

SEQ ID NO: 13028 - DNA, 129 bp, Staphylococcus aureus; identical to SEQ ID NO: 5176

SEQ ID NO: 13029 - DNA, 167 bp, Staphylococcus aureus; identical to SEQ ID NO: 5177

SEQ ID NO: 13030 - DNA, 167 bp, Staphylococcus aureus; identical to SEQ ID NO: 5178

SEQ ID NO: 13031 - DNA, 498 bp, Staphylococcus aureus; identical to SEQ ID NO: 5179

SEQ ID NO: 13032 - DNA, 498 bp, Staphylococcus aureus; identical to SEQ ID NO: 5180

SEQ ID NO: 13033 - DNA, 75 bp, Staphylococcus aureus; identical to SEQ ID NO: 5181

SEQ ID NO: 13034 - DNA, 75 bp, Staphylococcus aureus; identical to SEQ ID NO: 5182

SEQ ID NO: 13035 - DNA, 83 bp, Staphylococcus aureus; identical to SEQ ID NO: 5183

SEQ ID NO: 13036 - DNA, 83 bp, Staphylococcus aureus; identical to SEQ ID NO: 5184

SEQ ID NO: 13037 - DNA, 182 bp, Staphylococcus aureus; identical to SEQ ID NO: 5185

SEQ ID NO: 13038 - DNA, 182 bp, Staphylococcus aureus; identical to SEQ ID NO: 5186

SEQ ID NO: 13039 - DNA, 251 bp, Staphylococcus aureus; identical to SEQ ID NO: 5187

SEQ ID NO: 13040 - DNA, 251 bp, Staphylococcus aureus; identical to SEQ ID NO: 5188

SEQ ID NO: 13041 - DNA, 101 bp, Staphylococcus aureus; identical to SEQ ID NO: 5189

SEQ ID NO: 13042 - DNA, 101 bp, Staphylococcus aureus; identical to SEQ ID NO: 5190

SEQ ID NO: 13043 - DNA, 54 bp, Staphylococcus aureus; identical to SEQ ID NO: 5191

SEQ ID NO: 13044 - DNA, 54 bp, Staphylococcus aureus; identical to SEQ ID NO: 5192

SEQ ID NO: 13045 - DNA, 135 bp, Staphylococcus aureus; identical to SEQ ID NO: 5193

SEQ ID NO: 13046 - DNA, 135 bp, Staphylococcus aureus; identical to SEQ ID NO: 5194

SEQ ID NO: 13047 - DNA, 161 bp, Staphylococcus aureus; identical to SEQ ID NO: 5195

SEQ ID NO: 13048 - DNA, 161 bp, Staphylococcus aureus; identical to SEQ ID NO: 5196

SEQ ID NO: 13049 - DNA, 168 bp, Staphylococcus aureus; identical to SEQ ID NO: 5197

SEQ ID NO: 13050 - DNA, 168 bp, Staphylococcus aureus; identical to SEQ ID NO: 5198

SEQ ID NO: 13051 - DNA, 251 bp, Staphylococcus aureus; identical to SEQ ID NO: 5199

SEQ ID NO: 13052 - DNA, 251 bp, Staphylococcus aureus; identical to SEQ ID NO: 5200

SEQ ID NO: 13053 - DNA, 148 bp, Staphylococcus aureus; identical to SEQ ID NO: 5201

SEQ ID NO: 13054 - DNA, 148 bp, Staphylococcus aureus; identical to SEQ ID NO: 5202

SEQ ID NO: 13055 - DNA, 446 bp, Staphylococcus aureus; identical to SEQ ID NO: 5203

SEQ ID NO: 13056 - DNA, 446 bp, Staphylococcus aureus; identical to SEQ ID NO: 5204

SEQ ID NO: 13057 - DNA, 88 bp, Staphylococcus aureus; identical to SEQ ID NO: 5205

SEQ ID NO: 13058 - DNA, 88 bp, Staphylococcus aureus; identical to SEQ ID NO: 5206

SEQ ID NO: 13059 - DNA, 194 bp, Staphylococcus aureus; identical to SEQ ID NO: 5207

SEQ ID NO: 13060 - DNA, 194 bp, Staphylococcus aureus; identical to SEQ ID NO: 5208

SEQ ID NO: 13061 - DNA, 158 bp, Staphylococcus aureus; identical to SEQ ID NO: 5209

SEQ ID NO: 13062 - DNA, 158 bp, Staphylococcus aureus; identical to SEQ ID NO: 5210

SEQ ID NO: 13063 - DNA, 339 bp, Staphylococcus aureus; identical to SEQ ID NO: 5211

SEQ ID NO: 13064 - DNA, 339 bp, Staphylococcus aureus; identical to SEQ ID NO: 5212

SEQ ID NO: 13065 - DNA, 1013 bp, Staphylococcus aureus; identical to SEQ ID NO: 5213

SEQ ID NO: 13066 - DNA, 1013 bp, Staphylococcus aureus; identical to SEQ ID NO: 5214

SEQ ID NO: 13067 - DNA, 121 bp, Staphylococcus aureus; identical to SEQ ID NO: 5215

SEQ ID NO: 13068 - DNA, 121 bp, Staphylococcus aureus; identical to SEQ ID NO: 5216

SEQ ID NO: 13069 - DNA, 79 bp, Staphylococcus aureus; identical to SEQ ID NO: 5217

SEQ ID NO: 13070 - DNA, 79 bp, Staphylococcus aureus; identical to SEQ ID NO: 5218

SEQ ID NO: 13071 - DNA, 235 bp, Staphylococcus aureus; identical to SEQ ID NO: 5219

SEQ ID NO: 13072 - DNA, 235 bp, Staphylococcus aureus; identical to SEQ ID NO: 5220

SEQ ID NO: 13073 - DNA, 60 bp, Staphylococcus aureus; identical to SEQ ID NO: 5221

SEQ ID NO: 13074 - DNA, 60 bp, Staphylococcus aureus; identical to SEQ ID NO: 5222

SEQ ID NO: 13075 - DNA, 325 bp, Staphylococcus aureus; identical to SEQ ID NO: 5223

SEQ ID NO: 13076 - DNA, 325 bp, Staphylococcus aureus; identical to SEQ ID NO: 5224

SEQ ID NO: 13077 - DNA, 99 bp, Staphylococcus aureus; identical to SEQ ID NO: 5225

SEQ ID NO: 13078 - DNA, 99 bp, Staphylococcus aureus; identical to SEQ ID NO: 5226

SEQ ID NO: 13079 - DNA, 62 bp, Staphylococcus aureus; identical to SEQ ID NO: 5227

SEQ ID NO: 13080 - DNA, 62 bp, Staphylococcus aureus; identical to SEQ ID NO: 5228

SEQ ID NO: 13081 - DNA, 116 bp, Staphylococcus aureus; identical to SEQ ID NO: 5229

SEQ ID NO: 13082 - DNA, 116 bp, Staphylococcus aureus; identical to SEQ ID NO: 5230

SEQ ID NO: 13083 - DNA, 420 bp, Staphylococcus aureus; identical to SEQ ID NO: 5231

SEQ ID NO: 13084 - DNA, 420 bp, Staphylococcus aureus; identical to SEQ ID NO: 5232

SEQ ID NO: 13085 - DNA, 68 bp, Staphylococcus aureus; identical to SEQ ID NO: 5233

SEQ ID NO: 13086 - DNA, 68 bp, Staphylococcus aureus; identical to SEQ ID NO: 5234

SEQ ID NO: 13087 - DNA, 207 bp, Staphylococcus aureus; identical to SEQ ID NO: 5235

SEQ ID NO: 13088 - DNA, 207 bp, Staphylococcus aureus; identical to SEQ ID NO: 5236

SEQ ID NO: 13089 - DNA, 255 bp, Staphylococcus aureus; identical to SEQ ID NO: 5237

SEQ ID NO: 13090 - DNA, 255 bp, Staphylococcus aureus; identical to SEQ ID NO: 5238

SEQ ID NO: 13091 - DNA, 181 bp, Staphylococcus aureus; identical to SEQ ID NO: 5239

SEQ ID NO: 13092 - DNA, 181 bp, Staphylococcus aureus; identical to SEQ ID NO: 5240

SEQ ID NO: 13093 - DNA, 281 bp, Staphylococcus aureus; identical to SEQ ID NO: 5241

SEQ ID NO: 13094 - DNA, 281 bp, Staphylococcus aureus; identical to SEQ ID NO: 5242

SEQ ID NO: 13095 - DNA, 236 bp, Staphylococcus aureus; identical to SEQ ID NO: 5243

SEQ ID NO: 13096 - DNA, 236 bp, Staphylococcus aureus; identical to SEQ ID NO: 5244

SEQ ID NO: 13097 - DNA, 115 bp, Staphylococcus aureus; identical to SEQ ID NO: 5245

SEQ ID NO: 13098 - DNA, 115 bp, Staphylococcus aureus; identical to SEQ ID NO: 5246

SEQ ID NO: 13099 - DNA, 457 bp, Staphylococcus aureus; identical to SEQ ID NO: 5247

SEQ ID NO: 13100 - DNA, 457 bp, Staphylococcus aureus; identical to SEQ ID NO: 5248

SEQ ID NO: 13101 - DNA, 150 bp, Staphylococcus aureus; identical to SEQ ID NO: 5249

SEQ ID NO: 13102 - DNA, 150 bp, Staphylococcus aureus; identical to SEQ ID NO: 5250

SEQ ID NO: 13103 - DNA, 328 bp, Staphylococcus aureus; identical to SEQ ID NO: 5251

SEQ ID NO: 13104 - DNA, 328 bp, Staphylococcus aureus; identical to SEQ ID NO: 5252

SEQ ID NO: 13105 - DNA, 208 bp, Staphylococcus aureus; identical to SEQ ID NO: 5253

SEQ ID NO: 13106 - DNA, 208 bp, Staphylococcus aureus; identical to SEQ ID NO: 5254

SEQ ID NO: 13107 - DNA, 112 bp, Staphylococcus aureus; identical to SEQ ID NO: 5255

SEQ ID NO: 13108 - DNA, 112 bp, Staphylococcus aureus; identical to SEQ ID NO: 5256

SEQ ID NO: 13109 - DNA, 81 bp, Staphylococcus aureus; identical to SEQ ID NO: 5257

SEQ ID NO: 13110 - DNA, 81 bp, Staphylococcus aureus; identical to SEQ ID NO: 5258

SEQ ID NO: 13111 - DNA, 722 bp, Staphylococcus aureus; identical to SEQ ID NO: 5259

SEQ ID NO: 13112 - DNA, 722 bp, Staphylococcus aureus; identical to SEQ ID NO: 5260

SEQ ID NO: 13113 - DNA, 587 bp, Staphylococcus aureus; identical to SEQ ID NO: 5261

SEQ ID NO: 13114 - DNA, 587 bp, Staphylococcus aureus; identical to SEQ ID NO: 5262

SEQ ID NO: 13115 - DNA, 360 bp, Staphylococcus aureus; identical to SEQ ID NO: 5263

SEQ ID NO: 13116 - DNA, 360 bp, Staphylococcus aureus; identical to SEQ ID NO: 5264

SEQ ID NO: 13117 - DNA, 696 bp, Staphylococcus aureus; identical to SEQ ID NO: 5265

SEQ ID NO: 13118 - DNA, 696 bp, Staphylococcus aureus; identical to SEQ ID NO: 5266

SEQ ID NO: 13119 - DNA, 79 bp, Staphylococcus aureus; identical to SEQ ID NO: 5267

SEQ ID NO: 13120 - DNA, 79 bp, Staphylococcus aureus; identical to SEQ ID NO: 5268

SEQ ID NO: 13121 - DNA, 243 bp, Staphylococcus aureus; identical to SEQ ID NO: 5269

SEQ ID NO: 13122 - DNA, 243 bp, Staphylococcus aureus; identical to SEQ ID NO: 5270

SEQ ID NO: 13123 - DNA, 89 bp, Staphylococcus aureus; identical to SEQ ID NO: 5271

SEQ ID NO: 13124 - DNA, 89 bp, Staphylococcus aureus; identical to SEQ ID NO: 5272

SEQ ID NO: 13125 - DNA, 147 bp, Staphylococcus aureus; identical to SEQ ID NO: 5273

SEQ ID NO: 13126 - DNA, 147 bp, Staphylococcus aureus; identical to SEQ ID NO: 5274

SEQ ID NO: 13127 - DNA, 92 bp, Staphylococcus aureus; identical to SEQ ID NO: 5275

SEQ ID NO: 13128 - DNA, 92 bp, Staphylococcus aureus; identical to SEQ ID NO: 5276

SEQ ID NO: 13129 - DNA, 60 bp, Staphylococcus aureus; identical to SEQ ID NO: 5277

SEQ ID NO: 13130 - DNA, 60 bp, Staphylococcus aureus; identical to SEQ ID NO: 5278

SEQ ID NO: 13131 - DNA, 98 bp, Staphylococcus aureus; identical to SEQ ID NO: 5279

SEQ ID NO: 13132 - DNA, 98 bp, Staphylococcus aureus; identical to SEQ ID NO: 5280

SEQ ID NO: 13133 - DNA, 126 bp, Staphylococcus aureus; identical to SEQ ID NO: 5281

SEQ ID NO: 13134 - DNA, 126 bp, Staphylococcus aureus; identical to SEQ ID NO: 5282

SEQ ID NO: 13135 - DNA, 66 bp, Staphylococcus aureus; identical to SEQ ID NO: 5283

SEQ ID NO: 13136 - DNA, 66 bp, Staphylococcus aureus; identical to SEQ ID NO: 5284

SEQ ID NO: 13137 - DNA, 137 bp, Staphylococcus aureus; identical to SEQ ID NO: 5285

SEQ ID NO: 13138 - DNA, 137 bp, Staphylococcus aureus; identical to SEQ ID NO: 5286

SEQ ID NO: 13139 - DNA, 79 bp, Staphylococcus aureus; identical to SEQ ID NO: 5287

SEQ ID NO: 13140 - DNA, 79 bp, Staphylococcus aureus; identical to SEQ ID NO: 5288

SEQ ID NO: 13141 - DNA, 95 bp, Staphylococcus aureus; identical to SEQ ID NO: 5289

SEQ ID NO: 13142 - DNA, 95 bp, Staphylococcus aureus; identical to SEQ ID NO: 5290

SEQ ID NO: 13143 - DNA, 218 bp, Staphylococcus aureus; identical to SEQ ID NO: 5291

SEQ ID NO: 13144 - DNA, 218 bp, Staphylococcus aureus; identical to SEQ ID NO: 5292

SEQ ID NO: 13145 - DNA, 126 bp, Staphylococcus aureus; identical to SEQ ID NO: 5293

SEQ ID NO: 13146 - DNA, 126 bp, Staphylococcus aureus; identical to SEQ ID NO: 5294

SEQ ID NO: 13147 - DNA, 226 bp, Staphylococcus aureus; identical to SEQ ID NO: 5295

SEQ ID NO: 13148 - DNA, 226 bp, Staphylococcus aureus; identical to SEQ ID NO: 5296

SEQ ID NO: 13149 - DNA, 102 bp, Staphylococcus aureus; identical to SEQ ID NO: 5297

SEQ ID NO: 13150 - DNA, 102 bp, Staphylococcus aureus; identical to SEQ ID NO: 5298

SEQ ID NO: 13151 - DNA, 282 bp, Staphylococcus aureus; identical to SEQ ID NO: 5299

SEQ ID NO: 13152 - DNA, 282 bp, Staphylococcus aureus; identical to SEQ ID NO: 5300

SEQ ID NO: 13153 - DNA, 85 bp, Staphylococcus aureus; identical to SEQ ID NO: 5301

SEQ ID NO: 13154 - DNA, 85 bp, Staphylococcus aureus; identical to SEQ ID NO: 5302

SEQ ID NO: 13155 - DNA, 61 bp, Staphylococcus aureus; identical to SEQ ID NO: 5303

SEQ ID NO: 13156 - DNA, 61 bp, Staphylococcus aureus; identical to SEQ ID NO: 5304

SEQ ID NO: 13157 - DNA, 51 bp, Staphylococcus aureus; identical to SEQ ID NO: 5305

SEQ ID NO: 13158 - DNA, 51 bp, Staphylococcus aureus; identical to SEQ ID NO: 5306

SEQ ID NO: 13159 - DNA, 182 bp, Staphylococcus aureus; identical to SEQ ID NO: 5307

SEQ ID NO: 13160 - DNA, 182 bp, Staphylococcus aureus; identical to SEQ ID NO: 5308

SEQ ID NO: 13161 - DNA, 208 bp, Staphylococcus aureus; identical to SEQ ID NO: 5309

SEQ ID NO: 13162 - DNA, 208 bp, Staphylococcus aureus; identical to SEQ ID NO: 5310

SEQ ID NO: 13163 - DNA, 292 bp, Staphylococcus aureus; identical to SEQ ID NO: 5311

SEQ ID NO: 13164 - DNA, 292 bp, Staphylococcus aureus; identical to SEQ ID NO: 5312

SEQ ID NO: 13165 - DNA, 173 bp, Staphylococcus aureus; identical to SEQ ID NO: 5313

SEQ ID NO: 13166 - DNA, 173 bp, Staphylococcus aureus; identical to SEQ ID NO: 5314

SEQ ID NO: 13167 - DNA, 252 bp, Staphylococcus aureus; identical to SEQ ID NO: 5315

SEQ ID NO: 13168 - DNA, 252 bp, Staphylococcus aureus; identical to SEQ ID NO: 5316

SEQ ID NO: 13169 - DNA, 307 bp, Staphylococcus aureus; identical to SEQ ID NO: 5317

SEQ ID NO: 13170 - DNA, 307 bp, Staphylococcus aureus; identical to SEQ ID NO: 5318

SEQ ID NO: 13171 - DNA, 220 bp, Staphylococcus aureus; identical to SEQ ID NO: 5319

SEQ ID NO: 13172 - DNA, 220 bp, Staphylococcus aureus; identical to SEQ ID NO: 5320

SEQ ID NO: 13173 - DNA, 221 bp, Staphylococcus aureus; identical to SEQ ID NO: 5321

SEQ ID NO: 13174 - DNA, 221 bp, Staphylococcus aureus; identical to SEQ ID NO: 5322

SEQ ID NO: 13175 - DNA, 131 bp, Staphylococcus aureus; identical to SEQ ID NO: 5323

SEQ ID NO: 13176 - DNA, 131 bp, Staphylococcus aureus; identical to SEQ ID NO: 5324

SEQ ID NO: 13177 - DNA, 71 bp, Staphylococcus aureus; identical to SEQ ID NO: 5325

SEQ ID NO: 13178 - DNA, 71 bp, Staphylococcus aureus; identical to SEQ ID NO: 5326

SEQ ID NO: 13179 - DNA, 333 bp, Staphylococcus aureus; identical to SEQ ID NO: 5327

SEQ ID NO: 13180 - DNA, 333 bp, Staphylococcus aureus; identical to SEQ ID NO: 5328

SEQ ID NO: 13181 - DNA, 279 bp, Staphylococcus aureus; identical to SEQ ID NO: 5329

SEQ ID NO: 13182 - DNA, 279 bp, Staphylococcus aureus; identical to SEQ ID NO: 5330

SEQ ID NO: 13183 - DNA, 98 bp, Staphylococcus aureus; identical to SEQ ID NO: 5331

SEQ ID NO: 13184 - DNA, 98 bp, Staphylococcus aureus; identical to SEQ ID NO: 5332

SEQ ID NO: 13185 - DNA, 350 bp, Staphylococcus aureus; identical to SEQ ID NO: 5333

SEQ ID NO: 13186 - DNA, 350 bp, Staphylococcus aureus; identical to SEQ ID NO: 5334

SEQ ID NO: 13187 - DNA, 65 bp, Staphylococcus aureus; identical to SEQ ID NO: 5335

SEQ ID NO: 13188 - DNA, 65 bp, Staphylococcus aureus; identical to SEQ ID NO: 5336

SEQ ID NO: 13189 - DNA, 87 bp, Staphylococcus aureus; identical to SEQ ID NO: 5337

SEQ ID NO: 13190 - DNA, 87 bp, Staphylococcus aureus; identical to SEQ ID NO: 5338

SEQ ID NO: 13191 - DNA, 473 bp, Staphylococcus aureus; identical to SEQ ID NO: 5339

SEQ ID NO: 13192 - DNA, 473 bp, Staphylococcus aureus; identical to SEQ ID NO: 5340

SEQ ID NO: 13193 - DNA, 275 bp, Staphylococcus aureus; identical to SEQ ID NO: 5341

SEQ ID NO: 13194 - DNA, 275 bp, Staphylococcus aureus; identical to SEQ ID NO: 5342

SEQ ID NO: 13195 - DNA, 221 bp, Staphylococcus aureus; identical to SEQ ID NO: 5343

SEQ ID NO: 13196 - DNA, 221 bp, Staphylococcus aureus; identical to SEQ ID NO: 5344

SEQ ID NO: 13197 - DNA, 144 bp, Staphylococcus aureus; identical to SEQ ID NO: 5345

SEQ ID NO: 13198 - DNA, 144 bp, Staphylococcus aureus; identical to SEQ ID NO: 5346

SEQ ID NO: 13199 - DNA, 132 bp, Staphylococcus aureus; identical to SEQ ID NO: 5347

SEQ ID NO: 13200 - DNA, 132 bp, Staphylococcus aureus; identical to SEQ ID NO: 5348

SEQ ID NO: 13201 - DNA, 113 bp, Staphylococcus aureus; identical to SEQ ID NO: 5349

SEQ ID NO: 13202 - DNA, 113 bp, Staphylococcus aureus; identical to SEQ ID NO: 5350

SEQ ID NO: 13203 - DNA, 293 bp, Staphylococcus aureus; identical to SEQ ID NO: 5351

SEQ ID NO: 13204 - DNA, 293 bp, Staphylococcus aureus; identical to SEQ ID NO: 5352

SEQ ID NO: 13205 - DNA, 269 bp, Staphylococcus aureus; identical to SEQ ID NO: 5353

SEQ ID NO: 13206 - DNA, 269 bp, Staphylococcus aureus; identical to SEQ ID NO: 5354

SEQ ID NO: 13207 - DNA, 340 bp, Staphylococcus aureus; identical to SEQ ID NO: 5355

SEQ ID NO: 13208 - DNA, 340 bp, Staphylococcus aureus; identical to SEQ ID NO: 5356

SEQ ID NO: 13209 - DNA, 421 bp, Staphylococcus aureus; identical to SEQ ID NO: 5357

SEQ ID NO: 13210 - DNA, 421 bp, Staphylococcus aureus; identical to SEQ ID NO: 5358

SEQ ID NO: 13211 - DNA, 220 bp, Staphylococcus aureus; identical to SEQ ID NO: 5359

SEQ ID NO: 13212 - DNA, 220 bp, Staphylococcus aureus; identical to SEQ ID NO: 5360

SEQ ID NO: 13213 - DNA, 117 bp, Staphylococcus aureus; identical to SEQ ID NO: 5361

SEQ ID NO: 13214 - DNA, 117 bp, Staphylococcus aureus; identical to SEQ ID NO: 5362

SEQ ID NO: 13215 - DNA, 132 bp, Staphylococcus aureus; identical to SEQ ID NO: 5363

SEQ ID NO: 13216 - DNA, 132 bp, Staphylococcus aureus; identical to SEQ ID NO: 5364

SEQ ID NO: 13217 - DNA, 118 bp, Staphylococcus aureus; identical to SEQ ID NO: 5365

SEQ ID NO: 13218 - DNA, 118 bp, Staphylococcus aureus; identical to SEQ ID NO: 5366

SEQ ID NO: 13219 - DNA, 197 bp, Staphylococcus aureus; identical to SEQ ID NO: 5367

SEQ ID NO: 13220 - DNA, 197 bp, Staphylococcus aureus; identical to SEQ ID NO: 5368

SEQ ID NO: 13221 - DNA, 55 bp, Staphylococcus aureus; identical to SEQ ID NO: 5369

SEQ ID NO: 13222 - DNA, 55 bp, Staphylococcus aureus; identical to SEQ ID NO: 5370

SEQ ID NO: 13223 - DNA, 126 bp, Staphylococcus aureus; identical to SEQ ID NO: 5371

SEQ ID NO: 13224 - DNA, 126 bp, Staphylococcus aureus; identical to SEQ ID NO: 5372

SEQ ID NO: 13225 - DNA, 119 bp, Staphylococcus aureus; identical to SEQ ID NO: 5373

SEQ ID NO: 13226 - DNA, 119 bp, Staphylococcus aureus; identical to SEQ ID NO: 5374

SEQ ID NO: 13227 - DNA, 153 bp, Staphylococcus aureus; identical to SEQ ID NO: 5375

SEQ ID NO: 13228 - DNA, 153 bp, Staphylococcus aureus; identical to SEQ ID NO: 5376

SEQ ID NO: 13229 - DNA, 423 bp, Staphylococcus aureus; identical to SEQ ID NO: 5377

SEQ ID NO: 13230 - DNA, 423 bp, Staphylococcus aureus; identical to SEQ ID NO: 5378

SEQ ID NO: 13231 - DNA, 186 bp, Staphylococcus aureus; identical to SEQ ID NO: 5379

SEQ ID NO: 13232 - DNA, 186 bp, Staphylococcus aureus; identical to SEQ ID NO: 5380

SEQ ID NO: 13233 - DNA, 195 bp, Staphylococcus aureus; identical to SEQ ID NO: 5381

SEQ ID NO: 13234 - DNA, 195 bp, Staphylococcus aureus; identical to SEQ ID NO: 5382

SEQ ID NO: 13235 - DNA, 317 bp, Staphylococcus aureus; identical to SEQ ID NO: 5383

SEQ ID NO: 13236 - DNA, 317 bp, Staphylococcus aureus; identical to SEQ ID NO: 5384

SEQ ID NO: 13237 - DNA, 164 bp, Staphylococcus aureus; identical to SEQ ID NO: 5385

SEQ ID NO: 13238 - DNA, 164 bp, Staphylococcus aureus; identical to SEQ ID NO: 5386

SEQ ID NO: 13239 - DNA, 143 bp, Staphylococcus aureus; identical to SEQ ID NO: 5387

SEQ ID NO: 13240 - DNA, 143 bp, Staphylococcus aureus; identical to SEQ ID NO: 5388

SEQ ID NO: 13241 - DNA, 230 bp, Staphylococcus aureus; identical to SEQ ID NO: 5389

SEQ ID NO: 13242 - DNA, 230 bp, Staphylococcus aureus; identical to SEQ ID NO: 5390

SEQ ID NO: 13243 - DNA, 60 bp, Staphylococcus aureus; identical to SEQ ID NO: 5391

SEQ ID NO: 13244 - DNA, 60 bp, Staphylococcus aureus; identical to SEQ ID NO: 5392

SEQ ID NO: 13245 - DNA, 413 bp, Staphylococcus aureus; identical to SEQ ID NO: 5393

SEQ ID NO: 13246 - DNA, 413 bp, Staphylococcus aureus; identical to SEQ ID NO: 5394

SEQ ID NO: 13247 - DNA, 289 bp, Staphylococcus aureus; identical to SEQ ID NO: 5395

SEQ ID NO: 13248 - DNA, 289 bp, Staphylococcus aureus; identical to SEQ ID NO: 5396

SEQ ID NO: 13249 - DNA, 154 bp, Staphylococcus aureus; identical to SEQ ID NO: 5397

SEQ ID NO: 13250 - DNA, 154 bp, Staphylococcus aureus; identical to SEQ ID NO: 5398

SEQ ID NO: 13251 - DNA, 150 bp, Staphylococcus aureus; identical to SEQ ID NO: 5399

SEQ ID NO: 13252 - DNA, 150 bp, Staphylococcus aureus; identical to SEQ ID NO: 5400

SEQ ID NO: 13253 - DNA, 173 bp, Staphylococcus aureus; identical to SEQ ID NO: 5401

SEQ ID NO: 13254 - DNA, 173 bp, Staphylococcus aureus; identical to SEQ ID NO: 5402

SEQ ID NO: 13255 - DNA, 221 bp, Staphylococcus aureus; identical to SEQ ID NO: 5403

SEQ ID NO: 13256 - DNA, 221 bp, Staphylococcus aureus; identical to SEQ ID NO: 5404

SEQ ID NO: 13257 - DNA, 310 bp, Staphylococcus aureus; identical to SEQ ID NO: 5405

SEQ ID NO: 13258 - DNA, 310 bp, Staphylococcus aureus; identical to SEQ ID NO: 5406

SEQ ID NO: 13259 - DNA, 236 bp, Staphylococcus aureus; identical to SEQ ID NO: 5407

SEQ ID NO: 13260 - DNA, 236 bp, Staphylococcus aureus; identical to SEQ ID NO: 5408

SEQ ID NO: 13261 - DNA, 66 bp, Staphylococcus aureus; identical to SEQ ID NO: 5409

SEQ ID NO: 13262 - DNA, 66 bp, Staphylococcus aureus; identical to SEQ ID NO: 5410

SEQ ID NO: 13263 - DNA, 350 bp, Staphylococcus aureus; identical to SEQ ID NO: 5411

SEQ ID NO: 13264 - DNA, 350 bp, Staphylococcus aureus; identical to SEQ ID NO: 5412

SEQ ID NO: 13265 - DNA, 142 bp, Staphylococcus aureus; identical to SEQ ID NO: 5413

SEQ ID NO: 13266 - DNA, 142 bp, Staphylococcus aureus; identical to SEQ ID NO: 5414

SEQ ID NO: 13267 - DNA, 110 bp, Staphylococcus aureus; identical to SEQ ID NO: 5415

SEQ ID NO: 13268 - DNA, 110 bp, Staphylococcus aureus; identical to SEQ ID NO: 5416

SEQ ID NO: 13269 - DNA, 306 bp, Staphylococcus aureus; identical to SEQ ID NO: 5417

SEQ ID NO: 13270 - DNA, 306 bp, Staphylococcus aureus; identical to SEQ ID NO: 5418

SEQ ID NO: 13271 - DNA, 186 bp, Staphylococcus aureus; identical to SEQ ID NO: 5419

SEQ ID NO: 13272 - DNA, 186 bp, Staphylococcus aureus; identical to SEQ ID NO: 5420

SEQ ID NO: 13273 - DNA, 242 bp, Staphylococcus aureus; identical to SEQ ID NO: 5421

SEQ ID NO: 13274 - DNA, 242 bp, Staphylococcus aureus; identical to SEQ ID NO: 5422

SEQ ID NO: 13275 - DNA, 702 bp, Staphylococcus aureus; identical to SEQ ID NO: 5423

SEQ ID NO: 13276 - DNA, 702 bp, Staphylococcus aureus; identical to SEQ ID NO: 5424

SEQ ID NO: 13277 - DNA, 160 bp, Staphylococcus aureus; identical to SEQ ID NO: 5425

SEQ ID NO: 13278 - DNA, 160 bp, Staphylococcus aureus; identical to SEQ ID NO: 5426

SEQ ID NO: 13279 - DNA, 327 bp, Staphylococcus aureus; identical to SEQ ID NO: 5427

SEQ ID NO: 13280 - DNA, 327 bp, Staphylococcus aureus; identical to SEQ ID NO: 5428

SEQ ID NO: 13281 - DNA, 52 bp, Staphylococcus aureus; identical to SEQ ID NO: 5429

SEQ ID NO: 13282 - DNA, 52 bp, Staphylococcus aureus; identical to SEQ ID NO: 5430

SEQ ID NO: 13283 - DNA, 138 bp, Staphylococcus aureus; identical to SEQ ID NO: 5431

SEQ ID NO: 13284 - DNA, 138 bp, Staphylococcus aureus; identical to SEQ ID NO: 5432

SEQ ID NO: 13285 - DNA, 129 bp, Staphylococcus aureus; identical to SEQ ID NO: 5433

SEQ ID NO: 13286 - DNA, 129 bp, Staphylococcus aureus; identical to SEQ ID NO: 5434

SEQ ID NO: 13287 - DNA, 338 bp, Staphylococcus aureus; identical to SEQ ID NO: 5435

SEQ ID NO: 13288 - DNA, 338 bp, Staphylococcus aureus; identical to SEQ ID NO: 5436

SEQ ID NO: 13289 - DNA, 115 bp, Staphylococcus aureus; identical to SEQ ID NO: 5437

SEQ ID NO: 13290 - DNA, 115 bp, Staphylococcus aureus; identical to SEQ ID NO: 5438

SEQ ID NO: 13291 - DNA, 91 bp, Staphylococcus aureus; identical to SEQ ID NO: 5439

SEQ ID NO: 13292 - DNA, 91 bp, Staphylococcus aureus; identical to SEQ ID NO: 5440

SEQ ID NO: 13293 - DNA, 184 bp, Staphylococcus aureus; identical to SEQ ID NO: 5441

SEQ ID NO: 13294 - DNA, 184 bp, Staphylococcus aureus; identical to SEQ ID NO: 5442

SEQ ID NO: 13295 - DNA, 201 bp, Staphylococcus aureus; identical to SEQ ID NO: 5443

SEQ ID NO: 13296 - DNA, 201 bp, Staphylococcus aureus; identical to SEQ ID NO: 5444

SEQ ID NO: 13297 - DNA, 191 bp, Staphylococcus aureus; identical to SEQ ID NO: 5445

SEQ ID NO: 13298 - DNA, 191 bp, Staphylococcus aureus; identical to SEQ ID NO: 5446

SEQ ID NO: 13299 - DNA, 59 bp, Staphylococcus aureus; identical to SEQ ID NO: 5447

SEQ ID NO: 13300 - DNA, 59 bp, Staphylococcus aureus; identical to SEQ ID NO: 5448

SEQ ID NO: 13301 - DNA, 287 bp, Staphylococcus aureus; identical to SEQ ID NO: 5449

SEQ ID NO: 13302 - DNA, 287 bp, Staphylococcus aureus; identical to SEQ ID NO: 5450

SEQ ID NO: 13303 - DNA, 138 bp, Staphylococcus aureus; identical to SEQ ID NO: 5451

SEQ ID NO: 13304 - DNA, 138 bp, Staphylococcus aureus; identical to SEQ ID NO: 5452

SEQ ID NO: 13305 - DNA, 262 bp, Staphylococcus aureus; identical to SEQ ID NO: 5453

SEQ ID NO: 13306 - DNA, 262 bp, Staphylococcus aureus; identical to SEQ ID NO: 5454

SEQ ID NO: 13307 - DNA, 220 bp, Staphylococcus aureus; identical to SEQ ID NO: 5455

SEQ ID NO: 13308 - DNA, 220 bp, Staphylococcus aureus; identical to SEQ ID NO: 5456

SEQ ID NO: 13309 - DNA, 352 bp, Staphylococcus aureus; identical to SEQ ID NO: 5457

SEQ ID NO: 13310 - DNA, 352 bp, Staphylococcus aureus; identical to SEQ ID NO: 5458

SEQ ID NO: 13311 - DNA, 239 bp, Staphylococcus aureus; identical to SEQ ID NO: 5459

SEQ ID NO: 13312 - DNA, 239 bp, Staphylococcus aureus; identical to SEQ ID NO: 5460

SEQ ID NO: 13313 - DNA, 340 bp, Staphylococcus aureus; identical to SEQ ID NO: 5461

SEQ ID NO: 13314 - DNA, 340 bp, Staphylococcus aureus; identical to SEQ ID NO: 5462

SEQ ID NO: 13315 - DNA, 356 bp, Staphylococcus aureus; identical to SEQ ID NO: 5463

SEQ ID NO: 13316 - DNA, 356 bp, Staphylococcus aureus; identical to SEQ ID NO: 5464

SEQ ID NO: 13317 - DNA, 135 bp, Staphylococcus aureus; identical to SEQ ID NO: 5465

SEQ ID NO: 13318 - DNA, 135 bp, Staphylococcus aureus; identical to SEQ ID NO: 5466

SEQ ID NO: 13319 - DNA, 312 bp, Staphylococcus aureus; identical to SEQ ID NO: 5467

SEQ ID NO: 13320 - DNA, 312 bp, Staphylococcus aureus; identical to SEQ ID NO: 5468

SEQ ID NO: 13321 - DNA, 61 bp, Staphylococcus aureus; identical to SEQ ID NO: 5469

SEQ ID NO: 13322 - DNA, 61 bp, Staphylococcus aureus; identical to SEQ ID NO: 5470

SEQ ID NO: 13323 - DNA, 87 bp, Staphylococcus aureus; identical to SEQ ID NO: 5471

SEQ ID NO: 13324 - DNA, 87 bp, Staphylococcus aureus; identical to SEQ ID NO: 5472

SEQ ID NO: 13325 - DNA, 187 bp, Staphylococcus aureus; identical to SEQ ID NO: 5473

SEQ ID NO: 13326 - DNA, 187 bp, Staphylococcus aureus; identical to SEQ ID NO: 5474

SEQ ID NO: 13327 - DNA, 340 bp, Staphylococcus aureus; identical to SEQ ID NO: 5475

SEQ ID NO: 13328 - DNA, 340 bp, Staphylococcus aureus; identical to SEQ ID NO: 5476

SEQ ID NO: 13329 - DNA, 224 bp, Staphylococcus aureus; identical to SEQ ID NO: 5477

SEQ ID NO: 13330 - DNA, 224 bp, Staphylococcus aureus; identical to SEQ ID NO: 5478

SEQ ID NO: 13331 - DNA, 72 bp, Staphylococcus aureus; identical to SEQ ID NO: 5479

SEQ ID NO: 13332 - DNA, 72 bp, Staphylococcus aureus; identical to SEQ ID NO: 5480

SEQ ID NO: 13333 - DNA, 154 bp, Staphylococcus aureus; identical to SEQ ID NO: 5481

SEQ ID NO: 13334 - DNA, 154 bp, Staphylococcus aureus; identical to SEQ ID NO: 5482

SEQ ID NO: 13335 - DNA, 207 bp, Staphylococcus aureus; identical to SEQ ID NO: 5483

SEQ ID NO: 13336 - DNA, 207 bp, Staphylococcus aureus; identical to SEQ ID NO: 5484

SEQ ID NO: 13337 - DNA, 140 bp, Staphylococcus aureus; identical to SEQ ID NO: 5485

SEQ ID NO: 13338 - DNA, 140 bp, Staphylococcus aureus; identical to SEQ ID NO: 5486

SEQ ID NO: 13339 - DNA, 147 bp, Staphylococcus aureus; identical to SEQ ID NO: 5487

SEQ ID NO: 13340 - DNA, 147 bp, Staphylococcus aureus; identical to SEQ ID NO: 5488

SEQ ID NO: 13341 - DNA, 82 bp, Staphylococcus aureus; identical to SEQ ID NO: 5489

SEQ ID NO: 13342 - DNA, 82 bp, Staphylococcus aureus; identical to SEQ ID NO: 5490

SEQ ID NO: 13343 - DNA, 150 bp, Staphylococcus aureus; identical to SEQ ID NO: 5491

SEQ ID NO: 13344 - DNA, 150 bp, Staphylococcus aureus; identical to SEQ ID NO: 5492

SEQ ID NO: 13345 - DNA, 143 bp, Staphylococcus aureus; identical to SEQ ID NO: 5493

SEQ ID NO: 13346 - DNA, 143 bp, Staphylococcus aureus; identical to SEQ ID NO: 5494

SEQ ID NO: 13347 - DNA, 157 bp, Staphylococcus aureus; identical to SEQ ID NO: 5495

SEQ ID NO: 13348 - DNA, 157 bp, Staphylococcus aureus; identical to SEQ ID NO: 5496

SEQ ID NO: 13349 - DNA, 64 bp, Staphylococcus aureus; identical to SEQ ID NO: 5497

SEQ ID NO: 13350 - DNA, 64 bp, Staphylococcus aureus; identical to SEQ ID NO: 5498

SEQ ID NO: 13351 - DNA, 101 bp, Staphylococcus aureus; identical to SEQ ID NO: 5499

SEQ ID NO: 13352 - DNA, 101 bp, Staphylococcus aureus; identical to SEQ ID NO: 5500

SEQ ID NO: 13353 - DNA, 316 bp, Staphylococcus aureus; identical to SEQ ID NO: 5501

SEQ ID NO: 13354 - DNA, 316 bp, Staphylococcus aureus; identical to SEQ ID NO: 5502

SEQ ID NO: 13355 - DNA, 260 bp, Staphylococcus aureus; identical to SEQ ID NO: 5503

SEQ ID NO: 13356 - DNA, 260 bp, Staphylococcus aureus; identical to SEQ ID NO: 5504

SEQ ID NO: 13357 - DNA, 91 bp, Staphylococcus aureus; identical to SEQ ID NO: 5505

SEQ ID NO: 13358 - DNA, 91 bp, Staphylococcus aureus; identical to SEQ ID NO: 5506

SEQ ID NO: 13359 - DNA, 112 bp, Staphylococcus aureus; identical to SEQ ID NO: 5507

SEQ ID NO: 13360 - DNA, 112 bp, Staphylococcus aureus; identical to SEQ ID NO: 5508

SEQ ID NO: 13361 - DNA, 252 bp, Staphylococcus aureus; identical to SEQ ID NO: 5509

SEQ ID NO: 13362 - DNA, 252 bp, Staphylococcus aureus; identical to SEQ ID NO: 5510

SEQ ID NO: 13363 - DNA, 249 bp, Staphylococcus aureus; identical to SEQ ID NO: 5511

SEQ ID NO: 13364 - DNA, 249 bp, Staphylococcus aureus; identical to SEQ ID NO: 5512

SEQ ID NO: 13365 - DNA, 353 bp, Staphylococcus aureus; identical to SEQ ID NO: 5513

SEQ ID NO: 13366 - DNA, 353 bp, Staphylococcus aureus; identical to SEQ ID NO: 5514

SEQ ID NO: 13367 - DNA, 233 bp, Staphylococcus aureus; identical to SEQ ID NO: 5515

SEQ ID NO: 13368 - DNA, 233 bp, Staphylococcus aureus; identical to SEQ ID NO: 5516

SEQ ID NO: 13369 - DNA, 327 bp, Staphylococcus aureus; identical to SEQ ID NO: 5517

SEQ ID NO: 13370 - DNA, 327 bp, Staphylococcus aureus; identical to SEQ ID NO: 5518

SEQ ID NO: 13371 - DNA, 97 bp, Staphylococcus aureus; identical to SEQ ID NO: 5519

SEQ ID NO: 13372 - DNA, 97 bp, Staphylococcus aureus; identical to SEQ ID NO: 5520

SEQ ID NO: 13373 - DNA, 150 bp, Staphylococcus aureus; identical to SEQ ID NO: 5521

SEQ ID NO: 13374 - DNA, 150 bp, Staphylococcus aureus; identical to SEQ ID NO: 5522

SEQ ID NO: 13375 - DNA, 187 bp, Staphylococcus aureus; identical to SEQ ID NO: 5523

SEQ ID NO: 13376 - DNA, 187 bp, Staphylococcus aureus; identical to SEQ ID NO: 5524

SEQ ID NO: 13377 - DNA, 364 bp, Staphylococcus aureus; identical to SEQ ID NO: 5525

SEQ ID NO: 13378 - DNA, 364 bp, Staphylococcus aureus; identical to SEQ ID NO: 5526

SEQ ID NO: 13379 - DNA, 98 bp, Staphylococcus aureus; identical to SEQ ID NO: 5527

SEQ ID NO: 13380 - DNA, 98 bp, Staphylococcus aureus; identical to SEQ ID NO: 5528

SEQ ID NO: 13381 - DNA, 50 bp, Staphylococcus aureus; identical to SEQ ID NO: 5529

SEQ ID NO: 13382 - DNA, 50 bp, Staphylococcus aureus; identical to SEQ ID NO: 5530

SEQ ID NO: 13383 - DNA, 129 bp, Staphylococcus aureus; identical to SEQ ID NO: 5531

SEQ ID NO: 13384 - DNA, 129 bp, Staphylococcus aureus; identical to SEQ ID NO: 5532

SEQ ID NO: 13385 - DNA, 100 bp, Staphylococcus aureus; identical to SEQ ID NO: 5533

SEQ ID NO: 13386 - DNA, 100 bp, Staphylococcus aureus; identical to SEQ ID NO: 5534

SEQ ID NO: 13387 - DNA, 254 bp, Staphylococcus aureus; identical to SEQ ID NO: 5535

SEQ ID NO: 13388 - DNA, 254 bp, Staphylococcus aureus; identical to SEQ ID NO: 5536

SEQ ID NO: 13389 - DNA, 262 bp, Staphylococcus aureus; identical to SEQ ID NO: 5537

SEQ ID NO: 13390 - DNA, 262 bp, Staphylococcus aureus; identical to SEQ ID NO: 5538

SEQ ID NO: 13391 - DNA, 58 bp, Staphylococcus aureus; identical to SEQ ID NO: 5539

SEQ ID NO: 13392 - DNA, 58 bp, Staphylococcus aureus; identical to SEQ ID NO: 5540

SEQ ID NO: 13393 - DNA, 316 bp, Staphylococcus aureus; identical to SEQ ID NO: 5541

SEQ ID NO: 13394 - DNA, 316 bp, Staphylococcus aureus; identical to SEQ ID NO: 5542

SEQ ID NO: 13395 - DNA, 139 bp, Staphylococcus aureus; identical to SEQ ID NO: 5543

SEQ ID NO: 13396 - DNA, 139 bp, Staphylococcus aureus; identical to SEQ ID NO: 5544

SEQ ID NO: 13397 - DNA, 222 bp, Staphylococcus aureus; identical to SEQ ID NO: 5545

SEQ ID NO: 13398 - DNA, 222 bp, Staphylococcus aureus; identical to SEQ ID NO: 5546

SEQ ID NO: 13399 - DNA, 62 bp, Staphylococcus aureus; identical to SEQ ID NO: 5547

SEQ ID NO: 13400 - DNA, 62 bp, Staphylococcus aureus; identical to SEQ ID NO: 5548

SEQ ID NO: 13401 - DNA, 410 bp, Staphylococcus aureus; identical to SEQ ID NO: 5549

SEQ ID NO: 13402 - DNA, 410 bp, Staphylococcus aureus; identical to SEQ ID NO: 5550

SEQ ID NO: 13403 - DNA, 55 bp, Staphylococcus aureus; identical to SEQ ID NO: 5551

SEQ ID NO: 13404 - DNA, 55 bp, Staphylococcus aureus; identical to SEQ ID NO: 5552

SEQ ID NO: 13405 - DNA, 248 bp, Staphylococcus aureus; identical to SEQ ID NO: 5553

SEQ ID NO: 13406 - DNA, 248 bp, Staphylococcus aureus; identical to SEQ ID NO: 5554

SEQ ID NO: 13407 - DNA, 130 bp, Staphylococcus aureus; identical to SEQ ID NO: 5555

SEQ ID NO: 13408 - DNA, 130 bp, Staphylococcus aureus; identical to SEQ ID NO: 5556

SEQ ID NO: 13409 - DNA, 63 bp, Staphylococcus aureus; identical to SEQ ID NO: 5557

SEQ ID NO: 13410 - DNA, 63 bp, Staphylococcus aureus; identical to SEQ ID NO: 5558

SEQ ID NO: 13411 - DNA, 415 bp, Staphylococcus aureus; identical to SEQ ID NO: 5559

SEQ ID NO: 13412 - DNA, 415 bp, Staphylococcus aureus; identical to SEQ ID NO: 5560

SEQ ID NO: 13413 - DNA, 361 bp, Staphylococcus aureus; identical to SEQ ID NO: 5561

SEQ ID NO: 13414 - DNA, 361 bp, Staphylococcus aureus; identical to SEQ ID NO: 5562

SEQ ID NO: 13415 - DNA, 307 bp, Staphylococcus aureus; identical to SEQ ID NO: 5563

SEQ ID NO: 13416 - DNA, 307 bp, Staphylococcus aureus; identical to SEQ ID NO: 5564

SEQ ID NO: 13417 - DNA, 67 bp, Staphylococcus aureus; identical to SEQ ID NO: 5565

SEQ ID NO: 13418 - DNA, 67 bp, Staphylococcus aureus; identical to SEQ ID NO: 5566

SEQ ID NO: 13419 - DNA, 125 bp, Staphylococcus aureus; identical to SEQ ID NO: 5567

SEQ ID NO: 13420 - DNA, 125 bp, Staphylococcus aureus; identical to SEQ ID NO: 5568

SEQ ID NO: 13421 - DNA, 143 bp, Staphylococcus aureus; identical to SEQ ID NO: 5569

SEQ ID NO: 13422 - DNA, 143 bp, Staphylococcus aureus; identical to SEQ ID NO: 5570

SEQ ID NO: 13423 - DNA, 241 bp, Staphylococcus aureus; identical to SEQ ID NO: 5571

SEQ ID NO: 13424 - DNA, 241 bp, Staphylococcus aureus; identical to SEQ ID NO: 5572

SEQ ID NO: 13425 - DNA, 94 bp, Staphylococcus aureus; identical to SEQ ID NO: 5573

SEQ ID NO: 13426 - DNA, 94 bp, Staphylococcus aureus; identical to SEQ ID NO: 5574

SEQ ID NO: 13427 - DNA, 71 bp, Staphylococcus aureus; identical to SEQ ID NO: 5575

SEQ ID NO: 13428 - DNA, 71 bp, Staphylococcus aureus; identical to SEQ ID NO: 5576

SEQ ID NO: 13429 - DNA, 324 bp, Staphylococcus aureus; identical to SEQ ID NO: 5577

SEQ ID NO: 13430 - DNA, 324 bp, Staphylococcus aureus; identical to SEQ ID NO: 5578

SEQ ID NO: 13431 - DNA, 159 bp, Staphylococcus aureus; identical to SEQ ID NO: 5579

SEQ ID NO: 13432 - DNA, 159 bp, Staphylococcus aureus; identical to SEQ ID NO: 5580

SEQ ID NO: 13433 - DNA, 83 bp, Staphylococcus aureus; identical to SEQ ID NO: 5581

SEQ ID NO: 13434 - DNA, 83 bp, Staphylococcus aureus; identical to SEQ ID NO: 5582

SEQ ID NO: 13435 - DNA, 328 bp, Staphylococcus aureus; identical to SEQ ID NO: 5583

SEQ ID NO: 13436 - DNA, 328 bp, Staphylococcus aureus; identical to SEQ ID NO: 5584

SEQ ID NO: 13437 - DNA, 171 bp, Staphylococcus aureus; identical to SEQ ID NO: 5585

SEQ ID NO: 13438 - DNA, 171 bp, Staphylococcus aureus; identical to SEQ ID NO: 5586

SEQ ID NO: 13439 - DNA, 51 bp, Staphylococcus aureus; identical to SEQ ID NO: 5587

SEQ ID NO: 13440 - DNA, 51 bp, Staphylococcus aureus; identical to SEQ ID NO: 5588

SEQ ID NO: 13441 - DNA, 113 bp, Staphylococcus aureus; identical to SEQ ID NO: 5589

SEQ ID NO: 13442 - DNA, 113 bp, Staphylococcus aureus; identical to SEQ ID NO: 5590

SEQ ID NO: 13443 - DNA, 458 bp, Staphylococcus aureus; identical to SEQ ID NO: 5591

SEQ ID NO: 13444 - DNA, 458 bp, Staphylococcus aureus; identical to SEQ ID NO: 5592

SEQ ID NO: 13445 - DNA, 202 bp, Staphylococcus aureus; identical to SEQ ID NO: 5593

SEQ ID NO: 13446 - DNA, 202 bp, Staphylococcus aureus; identical to SEQ ID NO: 5594

SEQ ID NO: 13447 - DNA, 58 bp, Staphylococcus aureus; identical to SEQ ID NO: 5595

SEQ ID NO: 13448 - DNA, 58 bp, Staphylococcus aureus; identical to SEQ ID NO: 5596

SEQ ID NO: 13449 - DNA, 109 bp, Staphylococcus aureus; identical to SEQ ID NO: 5597

SEQ ID NO: 13450 - DNA, 109 bp, Staphylococcus aureus; identical to SEQ ID NO: 5598

SEQ ID NO: 13451 - DNA, 310 bp, Staphylococcus aureus; identical to SEQ ID NO: 5599

SEQ ID NO: 13452 - DNA, 310 bp, Staphylococcus aureus; identical to SEQ ID NO: 5600

SEQ ID NO: 13453 - DNA, 256 bp, Staphylococcus aureus; identical to SEQ ID NO: 5601

SEQ ID NO: 13454 - DNA, 256 bp, Staphylococcus aureus; identical to SEQ ID NO: 5602

SEQ ID NO: 13455 - DNA, 294 bp, Staphylococcus aureus; identical to SEQ ID NO: 5603

SEQ ID NO: 13456 - DNA, 294 bp, Staphylococcus aureus; identical to SEQ ID NO: 5604

SEQ ID NO: 13457 - DNA, 54 bp, Staphylococcus aureus; identical to SEQ ID NO: 5605

SEQ ID NO: 13458 - DNA, 54 bp, Staphylococcus aureus; identical to SEQ ID NO: 5606

SEQ ID NO: 13459 - DNA, 242 bp, Staphylococcus aureus; identical to SEQ ID NO: 5607

SEQ ID NO: 13460 - DNA, 242 bp, Staphylococcus aureus; identical to SEQ ID NO: 5608

SEQ ID NO: 13461 - DNA, 211 bp, Staphylococcus aureus; identical to SEQ ID NO: 5609

SEQ ID NO: 13462 - DNA, 211 bp, Staphylococcus aureus; identical to SEQ ID NO: 5610

SEQ ID NO: 13463 - DNA, 50 bp, Staphylococcus aureus; identical to SEQ ID NO: 5611

SEQ ID NO: 13464 - DNA, 50 bp, Staphylococcus aureus; identical to SEQ ID NO: 5612

SEQ ID NO: 13465 - DNA, 293 bp, Staphylococcus aureus; identical to SEQ ID NO: 5613

SEQ ID NO: 13466 - DNA, 293 bp, Staphylococcus aureus; identical to SEQ ID NO: 5614

SEQ ID NO: 13467 - DNA, 370 bp, Staphylococcus aureus; identical to SEQ ID NO: 5615

SEQ ID NO: 13468 - DNA, 370 bp, Staphylococcus aureus; identical to SEQ ID NO: 5616

SEQ ID NO: 13469 - DNA, 120 bp, Staphylococcus aureus; identical to SEQ ID NO: 5617

SEQ ID NO: 13470 - DNA, 120 bp, Staphylococcus aureus; identical to SEQ ID NO: 5618

SEQ ID NO: 13471 - DNA, 459 bp, Staphylococcus aureus; identical to SEQ ID NO: 5619

SEQ ID NO: 13472 - DNA, 459 bp, Staphylococcus aureus; identical to SEQ ID NO: 5620

SEQ ID NO: 13473 - DNA, 103 bp, Staphylococcus aureus; identical to SEQ ID NO: 5621

SEQ ID NO: 13474 - DNA, 103 bp, Staphylococcus aureus; identical to SEQ ID NO: 5622

SEQ ID NO: 13475 - DNA, 185 bp, Staphylococcus aureus; identical to SEQ ID NO: 5623

SEQ ID NO: 13476 - DNA, 185 bp, Staphylococcus aureus; identical to SEQ ID NO: 5624

SEQ ID NO: 13477 - DNA, 277 bp, Staphylococcus aureus; identical to SEQ ID NO: 5625

SEQ ID NO: 13478 - DNA, 277 bp, Staphylococcus aureus; identical to SEQ ID NO: 5626

SEQ ID NO: 13479 - DNA, 196 bp, Staphylococcus aureus; identical to SEQ ID NO: 5627

SEQ ID NO: 13480 - DNA, 196 bp, Staphylococcus aureus; identical to SEQ ID NO: 5628

SEQ ID NO: 13481 - DNA, 270 bp, Staphylococcus aureus; identical to SEQ ID NO: 5629

SEQ ID NO: 13482 - DNA, 270 bp, Staphylococcus aureus; identical to SEQ ID NO: 5630

SEQ ID NO: 13483 - DNA, 144 bp, Staphylococcus aureus; identical to SEQ ID NO: 5631

SEQ ID NO: 13484 - DNA, 144 bp, Staphylococcus aureus; identical to SEQ ID NO: 5632

SEQ ID NO: 13485 - DNA, 193 bp, Staphylococcus aureus; identical to SEQ ID NO: 5633

SEQ ID NO: 13486 - DNA, 193 bp, Staphylococcus aureus; identical to SEQ ID NO: 5634

SEQ ID NO: 13487 - DNA, 112 bp, Staphylococcus aureus; identical to SEQ ID NO: 5635

SEQ ID NO: 13488 - DNA, 112 bp, Staphylococcus aureus; identical to SEQ ID NO: 5636

SEQ ID NO: 13489 - DNA, 432 bp, Staphylococcus aureus; identical to SEQ ID NO: 5637

SEQ ID NO: 13490 - DNA, 432 bp, Staphylococcus aureus; identical to SEQ ID NO: 5638

SEQ ID NO: 13491 - DNA, 301 bp, Staphylococcus aureus; identical to SEQ ID NO: 5639

SEQ ID NO: 13492 - DNA, 301 bp, Staphylococcus aureus; identical to SEQ ID NO: 5640

SEQ ID NO: 13493 - DNA, 59 bp, Staphylococcus aureus; identical to SEQ ID NO: 5641

SEQ ID NO: 13494 - DNA, 59 bp, Staphylococcus aureus; identical to SEQ ID NO: 5642

SEQ ID NO: 13495 - DNA, 82 bp, Staphylococcus aureus; identical to SEQ ID NO: 5643

SEQ ID NO: 13496 - DNA, 82 bp, Staphylococcus aureus; identical to SEQ ID NO: 5644

SEQ ID NO: 13497 - DNA, 135 bp, Staphylococcus aureus; identical to SEQ ID NO: 5645

SEQ ID NO: 13498 - DNA, 135 bp, Staphylococcus aureus; identical to SEQ ID NO: 5646

SEQ ID NO: 13499 - DNA, 180 bp, Staphylococcus aureus; identical to SEQ ID NO: 5647

SEQ ID NO: 13500 - DNA, 180 bp, Staphylococcus aureus; identical to SEQ ID NO: 5648

SEQ ID NO: 13501 - DNA, 141 bp, Staphylococcus aureus; identical to SEQ ID NO: 5649

SEQ ID NO: 13502 - DNA, 141 bp, Staphylococcus aureus; identical to SEQ ID NO: 5650

SEQ ID NO: 13503 - DNA, 209 bp, Staphylococcus aureus; identical to SEQ ID NO: 5651

SEQ ID NO: 13504 - DNA, 209 bp, Staphylococcus aureus; identical to SEQ ID NO: 5652

SEQ ID NO: 13505 - DNA, 80 bp, Staphylococcus aureus; identical to SEQ ID NO: 5653

SEQ ID NO: 13506 - DNA, 80 bp, Staphylococcus aureus; identical to SEQ ID NO: 5654

SEQ ID NO: 13507 - DNA, 198 bp, Staphylococcus aureus; identical to SEQ ID NO: 5655

SEQ ID NO: 13508 - DNA, 198 bp, Staphylococcus aureus; identical to SEQ ID NO: 5656

SEQ ID NO: 13509 - DNA, 208 bp, Staphylococcus aureus; identical to SEQ ID NO: 5657

SEQ ID NO: 13510 - DNA, 208 bp, Staphylococcus aureus; identical to SEQ ID NO: 5658

SEQ ID NO: 13511 - DNA, 326 bp, Staphylococcus aureus; identical to SEQ ID NO: 5659

SEQ ID NO: 13512 - DNA, 326 bp, Staphylococcus aureus; identical to SEQ ID NO: 5660

SEQ ID NO: 13513 - DNA, 173 bp, Staphylococcus aureus; identical to SEQ ID NO: 5661

SEQ ID NO: 13514 - DNA, 173 bp, Staphylococcus aureus; identical to SEQ ID NO: 5662

SEQ ID NO: 13515 - DNA, 87 bp, Staphylococcus aureus; identical to SEQ ID NO: 5663

SEQ ID NO: 13516 - DNA, 87 bp, Staphylococcus aureus; identical to SEQ ID NO: 5664

SEQ ID NO: 13517 - DNA, 82 bp, Staphylococcus aureus; identical to SEQ ID NO: 5665

SEQ ID NO: 13518 - DNA, 82 bp, Staphylococcus aureus; identical to SEQ ID NO: 5666

SEQ ID NO: 13519 - DNA, 487 bp, Staphylococcus aureus; identical to SEQ ID NO: 5667

SEQ ID NO: 13520 - DNA, 487 bp, Staphylococcus aureus; identical to SEQ ID NO: 5668

SEQ ID NO: 13521 - DNA, 63 bp, Staphylococcus aureus; identical to SEQ ID NO: 5669

SEQ ID NO: 13522 - DNA, 63 bp, Staphylococcus aureus; identical to SEQ ID NO: 5670

SEQ ID NO: 13523 - DNA, 89 bp, Staphylococcus aureus; identical to SEQ ID NO: 5671

SEQ ID NO: 13524 - DNA, 89 bp, Staphylococcus aureus; identical to SEQ ID NO: 5672

SEQ ID NO: 13525 - DNA, 51 bp, Staphylococcus aureus; identical to SEQ ID NO: 5673

SEQ ID NO: 13526 - DNA, 51 bp, Staphylococcus aureus; identical to SEQ ID NO: 5674

SEQ ID NO: 13527 - DNA, 181 bp, Staphylococcus aureus; identical to SEQ ID NO: 5675

SEQ ID NO: 13528 - DNA, 181 bp, Staphylococcus aureus; identical to SEQ ID NO: 5676

SEQ ID NO: 13529 - DNA, 237 bp, Staphylococcus aureus; identical to SEQ ID NO: 5677

SEQ ID NO: 13530 - DNA, 237 bp, Staphylococcus aureus; identical to SEQ ID NO: 5678

SEQ ID NO: 13531 - DNA, 81 bp, Staphylococcus aureus; identical to SEQ ID NO: 5679

SEQ ID NO: 13532 - DNA, 81 bp, Staphylococcus aureus; identical to SEQ ID NO: 5680

SEQ ID NO: 13533 - DNA, 527 bp, Staphylococcus aureus; identical to SEQ ID NO: 5681

SEQ ID NO: 13534 - DNA, 527 bp, Staphylococcus aureus; identical to SEQ ID NO: 5682

SEQ ID NO: 13535 - DNA, 195 bp, Staphylococcus aureus; identical to SEQ ID NO: 5683

SEQ ID NO: 13536 - DNA, 195 bp, Staphylococcus aureus; identical to SEQ ID NO: 5684

SEQ ID NO: 13537 - DNA, 152 bp, Staphylococcus aureus; identical to SEQ ID NO: 5685

SEQ ID NO: 13538 - DNA, 152 bp, Staphylococcus aureus; identical to SEQ ID NO: 5686

SEQ ID NO: 13539 - DNA, 72 bp, Staphylococcus aureus; identical to SEQ ID NO: 5687

SEQ ID NO: 13540 - DNA, 72 bp, Staphylococcus aureus; identical to SEQ ID NO: 5688

SEQ ID NO: 13541 - DNA, 227 bp, Staphylococcus aureus; identical to SEQ ID NO: 5689

SEQ ID NO: 13542 - DNA, 227 bp, Staphylococcus aureus; identical to SEQ ID NO: 5690

SEQ ID NO: 13543 - DNA, 154 bp, Staphylococcus aureus; identical to SEQ ID NO: 5691

SEQ ID NO: 13544 - DNA, 154 bp, Staphylococcus aureus; identical to SEQ ID NO: 5692

SEQ ID NO: 13545 - DNA, 450 bp, Staphylococcus aureus; identical to SEQ ID NO: 5693

SEQ ID NO: 13546 - DNA, 450 bp, Staphylococcus aureus; identical to SEQ ID NO: 5694

SEQ ID NO: 13547 - DNA, 247 bp, Staphylococcus aureus; identical to SEQ ID NO: 5695

SEQ ID NO: 13548 - DNA, 247 bp, Staphylococcus aureus; identical to SEQ ID NO: 5696

SEQ ID NO: 13549 - DNA, 243 bp, Staphylococcus aureus; identical to SEQ ID NO: 5697

SEQ ID NO: 13550 - DNA, 243 bp, Staphylococcus aureus; identical to SEQ ID NO: 5698

SEQ ID NO: 13551 - DNA, 265 bp, Staphylococcus aureus; identical to SEQ ID NO: 5699

SEQ ID NO: 13552 - DNA, 265 bp, Staphylococcus aureus; identical to SEQ ID NO: 5700

SEQ ID NO: 13553 - DNA, 95 bp, Staphylococcus aureus; identical to SEQ ID NO: 5701

SEQ ID NO: 13554 - DNA, 95 bp, Staphylococcus aureus; identical to SEQ ID NO: 5702

SEQ ID NO: 13555 - DNA, 188 bp, Staphylococcus aureus; identical to SEQ ID NO: 5703

SEQ ID NO: 13556 - DNA, 188 bp, Staphylococcus aureus; identical to SEQ ID NO: 5704

SEQ ID NO: 13557 - DNA, 190 bp, Staphylococcus aureus; identical to SEQ ID NO: 5705

SEQ ID NO: 13558 - DNA, 190 bp, Staphylococcus aureus; identical to SEQ ID NO: 5706

SEQ ID NO: 13559 - DNA, 200 bp, Staphylococcus aureus; identical to SEQ ID NO: 5707

SEQ ID NO: 13560 - DNA, 200 bp, Staphylococcus aureus; identical to SEQ ID NO: 5708

SEQ ID NO: 13561 - DNA, 267 bp, Staphylococcus aureus; identical to SEQ ID NO: 5709

SEQ ID NO: 13562 - DNA, 267 bp, Staphylococcus aureus; identical to SEQ ID NO: 5710

SEQ ID NO: 13563 - DNA, 381 bp, Staphylococcus aureus; identical to SEQ ID NO: 5711

SEQ ID NO: 13564 - DNA, 381 bp, Staphylococcus aureus; identical to SEQ ID NO: 5712

SEQ ID NO: 13565 - DNA, 151 bp, Staphylococcus aureus; identical to SEQ ID NO: 5713

SEQ ID NO: 13566 - DNA, 151 bp, Staphylococcus aureus; identical to SEQ ID NO: 5714

SEQ ID NO: 13567 - DNA, 424 bp, Staphylococcus aureus; identical to SEQ ID NO: 5715

SEQ ID NO: 13568 - DNA, 424 bp, Staphylococcus aureus; identical to SEQ ID NO: 5716

SEQ ID NO: 13569 - DNA, 53 bp, Staphylococcus aureus; identical to SEQ ID NO: 5717

SEQ ID NO: 13570 - DNA, 53 bp, Staphylococcus aureus; identical to SEQ ID NO: 5718

SEQ ID NO: 13571 - DNA, 153 bp, Staphylococcus aureus; identical to SEQ ID NO: 5719

SEQ ID NO: 13572 - DNA, 153 bp, Staphylococcus aureus; identical to SEQ ID NO: 5720

SEQ ID NO: 13573 - DNA, 236 bp, Staphylococcus aureus; identical to SEQ ID NO: 5721

SEQ ID NO: 13574 - DNA, 236 bp, Staphylococcus aureus; identical to SEQ ID NO: 5722

SEQ ID NO: 13575 - DNA, 197 bp, Staphylococcus aureus; identical to SEQ ID NO: 5723

SEQ ID NO: 13576 - DNA, 197 bp, Staphylococcus aureus; identical to SEQ ID NO: 5724

SEQ ID NO: 13577 - DNA, 132 bp, Staphylococcus aureus; identical to SEQ ID NO: 5725

SEQ ID NO: 13578 - DNA, 132 bp, Staphylococcus aureus; identical to SEQ ID NO: 5726

SEQ ID NO: 13579 - DNA, 87 bp, Staphylococcus aureus; identical to SEQ ID NO: 5727

SEQ ID NO: 13580 - DNA, 87 bp, Staphylococcus aureus; identical to SEQ ID NO: 5728

SEQ ID NO: 13581 - DNA, 330 bp, Staphylococcus aureus; identical to SEQ ID NO: 5729

SEQ ID NO: 13582 - DNA, 330 bp, Staphylococcus aureus; identical to SEQ ID NO: 5730

SEQ ID NO: 13583 - DNA, 292 bp, Staphylococcus aureus; identical to SEQ ID NO: 5731

SEQ ID NO: 13584 - DNA, 292 bp, Staphylococcus aureus; identical to SEQ ID NO: 5732

SEQ ID NO: 13585 - DNA, 171 bp, Staphylococcus aureus; identical to SEQ ID NO: 5733

SEQ ID NO: 13586 - DNA, 171 bp, Staphylococcus aureus; identical to SEQ ID NO: 5734

SEQ ID NO: 13587 - DNA, 90 bp, Staphylococcus aureus; identical to SEQ ID NO: 5735

SEQ ID NO: 13588 - DNA, 90 bp, Staphylococcus aureus; identical to SEQ ID NO: 5736

SEQ ID NO: 13589 - DNA, 167 bp, Staphylococcus aureus; identical to SEQ ID NO: 5737

SEQ ID NO: 13590 - DNA, 167 bp, Staphylococcus aureus; identical to SEQ ID NO: 5738

SEQ ID NO: 13591 - DNA, 143 bp, Staphylococcus aureus; identical to SEQ ID NO: 5739

SEQ ID NO: 13592 - DNA, 143 bp, Staphylococcus aureus; identical to SEQ ID NO: 5740

SEQ ID NO: 13593 - DNA, 73 bp, Staphylococcus aureus; identical to SEQ ID NO: 5741

SEQ ID NO: 13594 - DNA, 73 bp, Staphylococcus aureus; identical to SEQ ID NO: 5742

SEQ ID NO: 13595 - DNA, 282 bp, Staphylococcus aureus; identical to SEQ ID NO: 5743

SEQ ID NO: 13596 - DNA, 282 bp, Staphylococcus aureus; identical to SEQ ID NO: 5744

SEQ ID NO: 13597 - DNA, 183 bp, Staphylococcus aureus; identical to SEQ ID NO: 5745

SEQ ID NO: 13598 - DNA, 183 bp, Staphylococcus aureus; identical to SEQ ID NO: 5746

SEQ ID NO: 13599 - DNA, 156 bp, Staphylococcus aureus; identical to SEQ ID NO: 5747

SEQ ID NO: 13600 - DNA, 156 bp, Staphylococcus aureus; identical to SEQ ID NO: 5748

SEQ ID NO: 13601 - DNA, 153 bp, Staphylococcus aureus; identical to SEQ ID NO: 5749

SEQ ID NO: 13602 - DNA, 153 bp, Staphylococcus aureus; identical to SEQ ID NO: 5750

SEQ ID NO: 13603 - DNA, 101 bp, Staphylococcus aureus; identical to SEQ ID NO: 5751

SEQ ID NO: 13604 - DNA, 101 bp, Staphylococcus aureus; identical to SEQ ID NO: 5752

SEQ ID NO: 13605 - DNA, 83 bp, Staphylococcus aureus; identical to SEQ ID NO: 5753

SEQ ID NO: 13606 - DNA, 83 bp, Staphylococcus aureus; identical to SEQ ID NO: 5754

SEQ ID NO: 13607 - DNA, 302 bp, Staphylococcus aureus; identical to SEQ ID NO: 5755

SEQ ID NO: 13608 - DNA, 302 bp, Staphylococcus aureus; identical to SEQ ID NO: 5756

SEQ ID NO: 13609 - DNA, 74 bp, Staphylococcus aureus; identical to SEQ ID NO: 5757

SEQ ID NO: 13610 - DNA, 74 bp, Staphylococcus aureus; identical to SEQ ID NO: 5758

SEQ ID NO: 13611 - DNA, 426 bp, Staphylococcus aureus; identical to SEQ ID NO: 5759

SEQ ID NO: 13612 - DNA, 426 bp, Staphylococcus aureus; identical to SEQ ID NO: 5760

SEQ ID NO: 13613 - DNA, 139 bp, Staphylococcus aureus; identical to SEQ ID NO: 5761

SEQ ID NO: 13614 - DNA, 139 bp, Staphylococcus aureus; identical to SEQ ID NO: 5762

SEQ ID NO: 13615 - DNA, 277 bp, Staphylococcus aureus; identical to SEQ ID NO: 5763

SEQ ID NO: 13616 - DNA, 277 bp, Staphylococcus aureus; identical to SEQ ID NO: 5764

SEQ ID NO: 13617 - DNA, 212 bp, Staphylococcus aureus; identical to SEQ ID NO: 5765

SEQ ID NO: 13618 - DNA, 212 bp, Staphylococcus aureus; identical to SEQ ID NO: 5766

SEQ ID NO: 13619 - DNA, 62 bp, Staphylococcus aureus; identical to SEQ ID NO: 5767

SEQ ID NO: 13620 - DNA, 62 bp, Staphylococcus aureus; identical to SEQ ID NO: 5768

SEQ ID NO: 13621 - DNA, 238 bp, Staphylococcus aureus; identical to SEQ ID NO: 5769

SEQ ID NO: 13622 - DNA, 238 bp, Staphylococcus aureus; identical to SEQ ID NO: 5770

SEQ ID NO: 13623 - DNA, 69 bp, Staphylococcus aureus; identical to SEQ ID NO: 5771

SEQ ID NO: 13624 - DNA, 69 bp, Staphylococcus aureus; identical to SEQ ID NO: 5772

SEQ ID NO: 13625 - DNA, 61 bp, Staphylococcus aureus; identical to SEQ ID NO: 5773

SEQ ID NO: 13626 - DNA, 61 bp, Staphylococcus aureus; identical to SEQ ID NO: 5774

SEQ ID NO: 13627 - DNA, 78 bp, Staphylococcus aureus; identical to SEQ ID NO: 5775

SEQ ID NO: 13628 - DNA, 78 bp, Staphylococcus aureus; identical to SEQ ID NO: 5776

SEQ ID NO: 13629 - DNA, 79 bp, Staphylococcus aureus; identical to SEQ ID NO: 5777

SEQ ID NO: 13630 - DNA, 79 bp, Staphylococcus aureus; identical to SEQ ID NO: 5778

SEQ ID NO: 13631 - DNA, 153 bp, Staphylococcus aureus; identical to SEQ ID NO: 5779

SEQ ID NO: 13632 - DNA, 153 bp, Staphylococcus aureus; identical to SEQ ID NO: 5780

SEQ ID NO: 13633 - DNA, 202 bp, Staphylococcus aureus; identical to SEQ ID NO: 5781

SEQ ID NO: 13634 - DNA, 202 bp, Staphylococcus aureus; identical to SEQ ID NO: 5782

SEQ ID NO: 13635 - DNA, 208 bp, Staphylococcus aureus; identical to SEQ ID NO: 5783

SEQ ID NO: 13636 - DNA, 208 bp, Staphylococcus aureus; identical to SEQ ID NO: 5784

SEQ ID NO: 13637 - DNA, 61 bp, Staphylococcus aureus; identical to SEQ ID NO: 5785

SEQ ID NO: 13638 - DNA, 61 bp, Staphylococcus aureus; identical to SEQ ID NO: 5786

SEQ ID NO: 13639 - DNA, 242 bp, Staphylococcus aureus; identical to SEQ ID NO: 5787

SEQ ID NO: 13640 - DNA, 242 bp, Staphylococcus aureus; identical to SEQ ID NO: 5788

SEQ ID NO: 13641 - DNA, 379 bp, Staphylococcus aureus; identical to SEQ ID NO: 5789

SEQ ID NO: 13642 - DNA, 379 bp, Staphylococcus aureus; identical to SEQ ID NO: 5790

SEQ ID NO: 13643 - DNA, 431 bp, Staphylococcus aureus; identical to SEQ ID NO: 5791

SEQ ID NO: 13644 - DNA, 431 bp, Staphylococcus aureus; identical to SEQ ID NO: 5792

SEQ ID NO: 13645 - DNA, 319 bp, Staphylococcus aureus; identical to SEQ ID NO: 5793

SEQ ID NO: 13646 - DNA, 319 bp, Staphylococcus aureus; identical to SEQ ID NO: 5794

SEQ ID NO: 13647 - DNA, 72 bp, Staphylococcus aureus; identical to SEQ ID NO: 5795

SEQ ID NO: 13648 - DNA, 72 bp, Staphylococcus aureus; identical to SEQ ID NO: 5796

SEQ ID NO: 13649 - DNA, 172 bp, Staphylococcus aureus; identical to SEQ ID NO: 5797

SEQ ID NO: 13650 - DNA, 172 bp, Staphylococcus aureus; identical to SEQ ID NO: 5798

SEQ ID NO: 13651 - DNA, 66 bp, Staphylococcus aureus; identical to SEQ ID NO: 5799

SEQ ID NO: 13652 - DNA, 66 bp, Staphylococcus aureus; identical to SEQ ID NO: 5800

SEQ ID NO: 13653 - DNA, 165 bp, Staphylococcus aureus; identical to SEQ ID NO: 5801

SEQ ID NO: 13654 - DNA, 165 bp, Staphylococcus aureus; identical to SEQ ID NO: 5802

SEQ ID NO: 13655 - DNA, 323 bp, Staphylococcus aureus; identical to SEQ ID NO: 5803

SEQ ID NO: 13656 - DNA, 323 bp, Staphylococcus aureus; identical to SEQ ID NO: 5804

SEQ ID NO: 13657 - DNA, 51 bp, Staphylococcus aureus; identical to SEQ ID NO: 5805

SEQ ID NO: 13658 - DNA, 51 bp, Staphylococcus aureus; identical to SEQ ID NO: 5806

SEQ ID NO: 13659 - DNA, 235 bp, Staphylococcus aureus; identical to SEQ ID NO: 5807

SEQ ID NO: 13660 - DNA, 235 bp, Staphylococcus aureus; identical to SEQ ID NO: 5808

SEQ ID NO: 13661 - DNA, 157 bp, Staphylococcus aureus; identical to SEQ ID NO: 5809

SEQ ID NO: 13662 - DNA, 157 bp, Staphylococcus aureus; identical to SEQ ID NO: 5810

SEQ ID NO: 13663 - DNA, 193 bp, Staphylococcus aureus; identical to SEQ ID NO: 5811

SEQ ID NO: 13664 - DNA, 193 bp, Staphylococcus aureus; identical to SEQ ID NO: 5812

SEQ ID NO: 13665 - DNA, 162 bp, Staphylococcus aureus; identical to SEQ ID NO: 5813

SEQ ID NO: 13666 - DNA, 162 bp, Staphylococcus aureus; identical to SEQ ID NO: 5814

SEQ ID NO: 13667 - DNA, 669 bp, Staphylococcus aureus; identical to SEQ ID NO: 5815

SEQ ID NO: 13668 - DNA, 669 bp, Staphylococcus aureus; identical to SEQ ID NO: 5816

SEQ ID NO: 13669 - DNA, 132 bp, Staphylococcus aureus; identical to SEQ ID NO: 5817

SEQ ID NO: 13670 - DNA, 132 bp, Staphylococcus aureus; identical to SEQ ID NO: 5818

SEQ ID NO: 13671 - DNA, 149 bp, Staphylococcus aureus; identical to SEQ ID NO: 5819

SEQ ID NO: 13672 - DNA, 149 bp, Staphylococcus aureus; identical to SEQ ID NO: 5820

SEQ ID NO: 13673 - DNA, 198 bp, Staphylococcus aureus; identical to SEQ ID NO: 5821

SEQ ID NO: 13674 - DNA, 198 bp, Staphylococcus aureus; identical to SEQ ID NO: 5822

SEQ ID NO: 13675 - DNA, 102 bp, Staphylococcus aureus; identical to SEQ ID NO: 5823

SEQ ID NO: 13676 - DNA, 102 bp, Staphylococcus aureus; identical to SEQ ID NO: 5824

SEQ ID NO: 13677 - DNA, 621 bp, Staphylococcus aureus; identical to SEQ ID NO: 5825

SEQ ID NO: 13678 - DNA, 621 bp, Staphylococcus aureus; identical to SEQ ID NO: 5826

SEQ ID NO: 13679 - DNA, 413 bp, Staphylococcus aureus; identical to SEQ ID NO: 5827

SEQ ID NO: 13680 - DNA, 413 bp, Staphylococcus aureus; identical to SEQ ID NO: 5828

SEQ ID NO: 13681 - DNA, 80 bp, Staphylococcus aureus; identical to SEQ ID NO: 5829

SEQ ID NO: 13682 - DNA, 80 bp, Staphylococcus aureus; identical to SEQ ID NO: 5830

SEQ ID NO: 13683 - DNA, 673 bp, Staphylococcus aureus; identical to SEQ ID NO: 5831

SEQ ID NO: 13684 - DNA, 673 bp, Staphylococcus aureus; identical to SEQ ID NO: 5832

SEQ ID NO: 13685 - DNA, 131 bp, Staphylococcus aureus; identical to SEQ ID NO: 5833

SEQ ID NO: 13686 - DNA, 131 bp, Staphylococcus aureus; identical to SEQ ID NO: 5834

SEQ ID NO: 13687 - DNA, 94 bp, Staphylococcus aureus; identical to SEQ ID NO: 5835

SEQ ID NO: 13688 - DNA, 94 bp, Staphylococcus aureus; identical to SEQ ID NO: 5836

SEQ ID NO: 13689 - DNA, 437 bp, Staphylococcus aureus; identical to SEQ ID NO: 5837

SEQ ID NO: 13690 - DNA, 437 bp, Staphylococcus aureus; identical to SEQ ID NO: 5838

SEQ ID NO: 13691 - DNA, 171 bp, Staphylococcus aureus; identical to SEQ ID NO: 5839

SEQ ID NO: 13692 - DNA, 171 bp, Staphylococcus aureus; identical to SEQ ID NO: 5840

SEQ ID NO: 13693 - DNA, 306 bp, Staphylococcus aureus; identical to SEQ ID NO: 5841

SEQ ID NO: 13694 - DNA, 306 bp, Staphylococcus aureus; identical to SEQ ID NO: 5842

SEQ ID NO: 13695 - DNA, 305 bp, Staphylococcus aureus; identical to SEQ ID NO: 5843

SEQ ID NO: 13696 - DNA, 305 bp, Staphylococcus aureus; identical to SEQ ID NO: 5844

SEQ ID NO: 13697 - DNA, 248 bp, Staphylococcus aureus; identical to SEQ ID NO: 5845

SEQ ID NO: 13698 - DNA, 248 bp, Staphylococcus aureus; identical to SEQ ID NO: 5846

SEQ ID NO: 13699 - DNA, 468 bp, Staphylococcus aureus; identical to SEQ ID NO: 5847

SEQ ID NO: 13700 - DNA, 468 bp, Staphylococcus aureus; identical to SEQ ID NO: 5848

SEQ ID NO: 13701 - DNA, 355 bp, Staphylococcus aureus; identical to SEQ ID NO: 5849

SEQ ID NO: 13702 - DNA, 355 bp, Staphylococcus aureus; identical to SEQ ID NO: 5850

SEQ ID NO: 13703 - DNA, 57 bp, Staphylococcus aureus; identical to SEQ ID NO: 5851

SEQ ID NO: 13704 - DNA, 57 bp, Staphylococcus aureus; identical to SEQ ID NO: 5852

SEQ ID NO: 13705 - DNA, 132 bp, Staphylococcus aureus; identical to SEQ ID NO: 5853

SEQ ID NO: 13706 - DNA, 132 bp, Staphylococcus aureus; identical to SEQ ID NO: 5854

SEQ ID NO: 13707 - DNA, 108 bp, Staphylococcus aureus; identical to SEQ ID NO: 5855

SEQ ID NO: 13708 - DNA, 108 bp, Staphylococcus aureus; identical to SEQ ID NO: 5856

SEQ ID NO: 13709 - DNA, 194 bp, Staphylococcus aureus; identical to SEQ ID NO: 5857

SEQ ID NO: 13710 - DNA, 194 bp, Staphylococcus aureus; identical to SEQ ID NO: 5858

SEQ ID NO: 13711 - DNA, 143 bp, Staphylococcus aureus; identical to SEQ ID NO: 5859

SEQ ID NO: 13712 - DNA, 143 bp, Staphylococcus aureus; identical to SEQ ID NO: 5860

SEQ ID NO: 13713 - DNA, 291 bp, Staphylococcus aureus; identical to SEQ ID NO: 5861

SEQ ID NO: 13714 - DNA, 291 bp, Staphylococcus aureus; identical to SEQ ID NO: 5862

SEQ ID NO: 13715 - DNA, 105 bp, Staphylococcus aureus; identical to SEQ ID NO: 5863

SEQ ID NO: 13716 - DNA, 105 bp, Staphylococcus aureus; identical to SEQ ID NO: 5864

SEQ ID NO: 13717 - DNA, 259 bp, Staphylococcus aureus; identical to SEQ ID NO: 5865

SEQ ID NO: 13718 - DNA, 259 bp, Staphylococcus aureus; identical to SEQ ID NO: 5866

SEQ ID NO: 13719 - DNA, 83 bp, Staphylococcus aureus; identical to SEQ ID NO: 5867

SEQ ID NO: 13720 - DNA, 83 bp, Staphylococcus aureus; identical to SEQ ID NO: 5868

SEQ ID NO: 13721 - DNA, 220 bp, Staphylococcus aureus; identical to SEQ ID NO: 5869

SEQ ID NO: 13722 - DNA, 220 bp, Staphylococcus aureus; identical to SEQ ID NO: 5870

SEQ ID NO: 13723 - DNA, 290 bp, Staphylococcus aureus; identical to SEQ ID NO: 5871

SEQ ID NO: 13724 - DNA, 290 bp, Staphylococcus aureus; identical to SEQ ID NO: 5872

SEQ ID NO: 13725 - DNA, 60 bp, Staphylococcus aureus; identical to SEQ ID NO: 5873

SEQ ID NO: 13726 - DNA, 60 bp, Staphylococcus aureus; identical to SEQ ID NO: 5874

SEQ ID NO: 13727 - DNA, 105 bp, Staphylococcus aureus; identical to SEQ ID NO: 5875

SEQ ID NO: 13728 - DNA, 105 bp, Staphylococcus aureus; identical to SEQ ID NO: 5876

SEQ ID NO: 13729 - DNA, 321 bp, Staphylococcus aureus; identical to SEQ ID NO: 5877

SEQ ID NO: 13730 - DNA, 321 bp, Staphylococcus aureus; identical to SEQ ID NO: 5878

SEQ ID NO: 13731 - DNA, 399 bp, Staphylococcus aureus; identical to SEQ ID NO: 5879

SEQ ID NO: 13732 - DNA, 399 bp, Staphylococcus aureus; identical to SEQ ID NO: 5880

SEQ ID NO: 13733 - DNA, 217 bp, Staphylococcus aureus; identical to SEQ ID NO: 5881

SEQ ID NO: 13734 - DNA, 217 bp, Staphylococcus aureus; identical to SEQ ID NO: 5882

SEQ ID NO: 13735 - DNA, 109 bp, Staphylococcus aureus; identical to SEQ ID NO: 5883

SEQ ID NO: 13736 - DNA, 109 bp, Staphylococcus aureus; identical to SEQ ID NO: 5884

SEQ ID NO: 13737 - DNA, 436 bp, Staphylococcus aureus; identical to SEQ ID NO: 5885

SEQ ID NO: 13738 - DNA, 436 bp, Staphylococcus aureus; identical to SEQ ID NO: 5886

SEQ ID NO: 13739 - DNA, 77 bp, Staphylococcus aureus; identical to SEQ ID NO: 5887

SEQ ID NO: 13740 - DNA, 77 bp, Staphylococcus aureus; identical to SEQ ID NO: 5888

SEQ ID NO: 13741 - DNA, 57 bp, Staphylococcus aureus; identical to SEQ ID NO: 5889

SEQ ID NO: 13742 - DNA, 57 bp, Staphylococcus aureus; identical to SEQ ID NO: 5890

SEQ ID NO: 13743 - DNA, 274 bp, Staphylococcus aureus; identical to SEQ ID NO: 5891

SEQ ID NO: 13744 - DNA, 274 bp, Staphylococcus aureus; identical to SEQ ID NO: 5892

SEQ ID NO: 13745 - DNA, 215 bp, Staphylococcus aureus; identical to SEQ ID NO: 5893

SEQ ID NO: 13746 - DNA, 215 bp, Staphylococcus aureus; identical to SEQ ID NO: 5894

SEQ ID NO: 13747 - DNA, 505 bp, Staphylococcus aureus; identical to SEQ ID NO: 5895

SEQ ID NO: 13748 - DNA, 505 bp, Staphylococcus aureus; identical to SEQ ID NO: 5896

SEQ ID NO: 13749 - DNA, 162 bp, Staphylococcus aureus; identical to SEQ ID NO: 5897

SEQ ID NO: 13750 - DNA, 162 bp, Staphylococcus aureus; identical to SEQ ID NO: 5898

SEQ ID NO: 13751 - DNA, 199 bp, Staphylococcus aureus; identical to SEQ ID NO: 5899

SEQ ID NO: 13752 - DNA, 199 bp, Staphylococcus aureus; identical to SEQ ID NO: 5900

SEQ ID NO: 13753 - DNA, 227 bp, Staphylococcus aureus; identical to SEQ ID NO: 5901

SEQ ID NO: 13754 - DNA, 227 bp, Staphylococcus aureus; identical to SEQ ID NO: 5902

SEQ ID NO: 13755 - DNA, 273 bp, Staphylococcus aureus; identical to SEQ ID NO: 5903

SEQ ID NO: 13756 - DNA, 273 bp, Staphylococcus aureus; identical to SEQ ID NO: 5904

SEQ ID NO: 13757 - DNA, 442 bp, Staphylococcus aureus; identical to SEQ ID NO: 5905

SEQ ID NO: 13758 - DNA, 442 bp, Staphylococcus aureus; identical to SEQ ID NO: 5906

SEQ ID NO: 13759 - DNA, 189 bp, Staphylococcus aureus; identical to SEQ ID NO: 5907

SEQ ID NO: 13760 - DNA, 189 bp, Staphylococcus aureus; identical to SEQ ID NO: 5908

SEQ ID NO: 13761 - DNA, 217 bp, Staphylococcus aureus; identical to SEQ ID NO: 5909

SEQ ID NO: 13762 - DNA, 217 bp, Staphylococcus aureus; identical to SEQ ID NO: 5910

SEQ ID NO: 13763 - DNA, 312 bp, Staphylococcus aureus; identical to SEQ ID NO: 5911

SEQ ID NO: 13764 - DNA, 312 bp, Staphylococcus aureus; identical to SEQ ID NO: 5912

SEQ ID NO: 13765 - DNA, 115 bp, Staphylococcus aureus; identical to SEQ ID NO: 5913

SEQ ID NO: 13766 - DNA, 115 bp, Staphylococcus aureus; identical to SEQ ID NO: 5914

SEQ ID NO: 13767 - DNA, 434 bp, Staphylococcus aureus; identical to SEQ ID NO: 5915

SEQ ID NO: 13768 - DNA, 434 bp, Staphylococcus aureus; identical to SEQ ID NO: 5916

SEQ ID NO: 13769 - DNA, 187 bp, Staphylococcus aureus; identical to SEQ ID NO: 5917

SEQ ID NO: 13770 - DNA, 187 bp, Staphylococcus aureus; identical to SEQ ID NO: 5918

SEQ ID NO: 13771 - DNA, 102 bp, Staphylococcus aureus; identical to SEQ ID NO: 5919

SEQ ID NO: 13772 - DNA, 102 bp, Staphylococcus aureus; identical to SEQ ID NO: 5920

SEQ ID NO: 13773 - DNA, 79 bp, Staphylococcus aureus; identical to SEQ ID NO: 5921

SEQ ID NO: 13774 - DNA, 79 bp, Staphylococcus aureus; identical to SEQ ID NO: 5922

SEQ ID NO: 13775 - DNA, 400 bp, Staphylococcus aureus; identical to SEQ ID NO: 5923

SEQ ID NO: 13776 - DNA, 400 bp, Staphylococcus aureus; identical to SEQ ID NO: 5924

SEQ ID NO: 13777 - DNA, 108 bp, Staphylococcus aureus; identical to SEQ ID NO: 5925

SEQ ID NO: 13778 - DNA, 108 bp, Staphylococcus aureus; identical to SEQ ID NO: 5926

SEQ ID NO: 13779 - DNA, 59 bp, Staphylococcus aureus; identical to SEQ ID NO: 5927

SEQ ID NO: 13780 - DNA, 59 bp, Staphylococcus aureus; identical to SEQ ID NO: 5928

SEQ ID NO: 13781 - DNA, 172 bp, Staphylococcus aureus; identical to SEQ ID NO: 5929

SEQ ID NO: 13782 - DNA, 172 bp, Staphylococcus aureus; identical to SEQ ID NO: 5930

SEQ ID NO: 13783 - DNA, 179 bp, Staphylococcus aureus; identical to SEQ ID NO: 5931

SEQ ID NO: 13784 - DNA, 179 bp, Staphylococcus aureus; identical to SEQ ID NO: 5932

SEQ ID NO: 13785 - DNA, 155 bp, Staphylococcus aureus; identical to SEQ ID NO: 5933

SEQ ID NO: 13786 - DNA, 155 bp, Staphylococcus aureus; identical to SEQ ID NO: 5934

SEQ ID NO: 13787 - DNA, 417 bp, Staphylococcus aureus; identical to SEQ ID NO: 5935

SEQ ID NO: 13788 - DNA, 417 bp, Staphylococcus aureus; identical to SEQ ID NO: 5936

SEQ ID NO: 13789 - DNA, 65 bp, Staphylococcus aureus; identical to SEQ ID NO: 5937

SEQ ID NO: 13790 - DNA, 65 bp, Staphylococcus aureus; identical to SEQ ID NO: 5938

SEQ ID NO: 13791 - DNA, 66 bp, Staphylococcus aureus; identical to SEQ ID NO: 5939

SEQ ID NO: 13792 - DNA, 66 bp, Staphylococcus aureus; identical to SEQ ID NO: 5940

SEQ ID NO: 13793 - DNA, 138 bp, Staphylococcus aureus; identical to SEQ ID NO: 5941

SEQ ID NO: 13794 - DNA, 138 bp, Staphylococcus aureus; identical to SEQ ID NO: 5942

SEQ ID NO: 13795 - DNA, 83 bp, Staphylococcus aureus; identical to SEQ ID NO: 5943

SEQ ID NO: 13796 - DNA, 83 bp, Staphylococcus aureus; identical to SEQ ID NO: 5944

SEQ ID NO: 13797 - DNA, 319 bp, Staphylococcus aureus; identical to SEQ ID NO: 5945

SEQ ID NO: 13798 - DNA, 319 bp, Staphylococcus aureus; identical to SEQ ID NO: 5946

SEQ ID NO: 13799 - DNA, 211 bp, Staphylococcus aureus; identical to SEQ ID NO: 5947

SEQ ID NO: 13800 - DNA, 211 bp, Staphylococcus aureus; identical to SEQ ID NO: 5948

SEQ ID NO: 13801 - DNA, 257 bp, Staphylococcus aureus; identical to SEQ ID NO: 5949

SEQ ID NO: 13802 - DNA, 257 bp, Staphylococcus aureus; identical to SEQ ID NO: 5950

SEQ ID NO: 13803 - DNA, 289 bp, Staphylococcus aureus; identical to SEQ ID NO: 5951

SEQ ID NO: 13804 - DNA, 289 bp, Staphylococcus aureus; identical to SEQ ID NO: 5952

SEQ ID NO: 13805 - DNA, 344 bp, Staphylococcus aureus; identical to SEQ ID NO: 5953

SEQ ID NO: 13806 - DNA, 344 bp, Staphylococcus aureus; identical to SEQ ID NO: 5954

SEQ ID NO: 13807 - DNA, 168 bp, Staphylococcus aureus; identical to SEQ ID NO: 5955

SEQ ID NO: 13808 - DNA, 168 bp, Staphylococcus aureus; identical to SEQ ID NO: 5956

SEQ ID NO: 13809 - DNA, 114 bp, Staphylococcus aureus; identical to SEQ ID NO: 5957

SEQ ID NO: 13810 - DNA, 114 bp, Staphylococcus aureus; identical to SEQ ID NO: 5958

SEQ ID NO: 13811 - DNA, 368 bp, Staphylococcus aureus; identical to SEQ ID NO: 5959

SEQ ID NO: 13812 - DNA, 368 bp, Staphylococcus aureus; identical to SEQ ID NO: 5960

SEQ ID NO: 13813 - DNA, 185 bp, Staphylococcus aureus; identical to SEQ ID NO: 5961

SEQ ID NO: 13814 - DNA, 185 bp, Staphylococcus aureus; identical to SEQ ID NO: 5962

SEQ ID NO: 13815 - DNA, 256 bp, Staphylococcus aureus; identical to SEQ ID NO: 5963

SEQ ID NO: 13816 - DNA, 256 bp, Staphylococcus aureus; identical to SEQ ID NO: 5964

SEQ ID NO: 13817 - DNA, 51 bp, Staphylococcus aureus; identical to SEQ ID NO: 5965

SEQ ID NO: 13818 - DNA, 51 bp, Staphylococcus aureus; identical to SEQ ID NO: 5966

SEQ ID NO: 13819 - DNA, 223 bp, Staphylococcus aureus; identical to SEQ ID NO: 5967

SEQ ID NO: 13820 - DNA, 223 bp, Staphylococcus aureus; identical to SEQ ID NO: 5968

SEQ ID NO: 13821 - DNA, 164 bp, Staphylococcus aureus; identical to SEQ ID NO: 5969

SEQ ID NO: 13822 - DNA, 164 bp, Staphylococcus aureus; identical to SEQ ID NO: 5970

SEQ ID NO: 13823 - DNA, 353 bp, Staphylococcus aureus; identical to SEQ ID NO: 5971

SEQ ID NO: 13824 - DNA, 353 bp, Staphylococcus aureus; identical to SEQ ID NO: 5972

SEQ ID NO: 13825 - DNA, 296 bp, Staphylococcus aureus; identical to SEQ ID NO: 5973

SEQ ID NO: 13826 - DNA, 296 bp, Staphylococcus aureus; identical to SEQ ID NO: 5974

SEQ ID NO: 13827 - DNA, 173 bp, Staphylococcus aureus; identical to SEQ ID NO: 5975

SEQ ID NO: 13828 - DNA, 173 bp, Staphylococcus aureus; identical to SEQ ID NO: 5976

SEQ ID NO: 13829 - DNA, 95 bp, Staphylococcus aureus; identical to SEQ ID NO: 5977

SEQ ID NO: 13830 - DNA, 95 bp, Staphylococcus aureus; identical to SEQ ID NO: 5978

SEQ ID NO: 13831 - DNA, 302 bp, Staphylococcus aureus; identical to SEQ ID NO: 5979

SEQ ID NO: 13832 - DNA, 302 bp, Staphylococcus aureus; identical to SEQ ID NO: 5980

SEQ ID NO: 13833 - DNA, 282 bp, Staphylococcus aureus; identical to SEQ ID NO: 5981

SEQ ID NO: 13834 - DNA, 282 bp, Staphylococcus aureus; identical to SEQ ID NO: 5982

SEQ ID NO: 13835 - DNA, 109 bp, Staphylococcus aureus; identical to SEQ ID NO: 5983

SEQ ID NO: 13836 - DNA, 109 bp, Staphylococcus aureus; identical to SEQ ID NO: 5984

SEQ ID NO: 13837 - DNA, 149 bp, Staphylococcus aureus; identical to SEQ ID NO: 5985

SEQ ID NO: 13838 - DNA, 149 bp, Staphylococcus aureus; identical to SEQ ID NO: 5986

SEQ ID NO: 13839 - DNA, 221 bp, Staphylococcus aureus; identical to SEQ ID NO: 5987

SEQ ID NO: 13840 - DNA, 221 bp, Staphylococcus aureus; identical to SEQ ID NO: 5988

SEQ ID NO: 13841 - DNA, 111 bp, Staphylococcus aureus; identical to SEQ ID NO: 5989

SEQ ID NO: 13842 - DNA, 111 bp, Staphylococcus aureus; identical to SEQ ID NO: 5990

SEQ ID NO: 13843 - DNA, 242 bp, Staphylococcus aureus; identical to SEQ ID NO: 5991

SEQ ID NO: 13844 - DNA, 242 bp, Staphylococcus aureus; identical to SEQ ID NO: 5992

SEQ ID NO: 13845 - DNA, 78 bp, Staphylococcus aureus; identical to SEQ ID NO: 5993

SEQ ID NO: 13846 - DNA, 78 bp, Staphylococcus aureus; identical to SEQ ID NO: 5994

SEQ ID NO: 13847 - DNA, 305 bp, Staphylococcus aureus; identical to SEQ ID NO: 5995

SEQ ID NO: 13848 - DNA, 305 bp, Staphylococcus aureus; identical to SEQ ID NO: 5996

SEQ ID NO: 13849 - DNA, 687 bp, Staphylococcus aureus; identical to SEQ ID NO: 5997

SEQ ID NO: 13850 - DNA, 687 bp, Staphylococcus aureus; identical to SEQ ID NO: 5998

SEQ ID NO: 13851 - DNA, 296 bp, Staphylococcus aureus; identical to SEQ ID NO: 5999

SEQ ID NO: 13852 - DNA, 296 bp, Staphylococcus aureus; identical to SEQ ID NO: 6000

SEQ ID NO: 13853 - DNA, 373 bp, Staphylococcus aureus; identical to SEQ ID NO: 6001

SEQ ID NO: 13854 - DNA, 373 bp, Staphylococcus aureus; identical to SEQ ID NO: 6002

SEQ ID NO: 13855 - DNA, 260 bp, Staphylococcus aureus; identical to SEQ ID NO: 6003

SEQ ID NO: 13856 - DNA, 260 bp, Staphylococcus aureus; identical to SEQ ID NO: 6004

SEQ ID NO: 13857 - DNA, 369 bp, Staphylococcus aureus; identical to SEQ ID NO: 6005

SEQ ID NO: 13858 - DNA, 369 bp, Staphylococcus aureus; identical to SEQ ID NO: 6006

SEQ ID NO: 13859 - DNA, 511 bp, Staphylococcus aureus; identical to SEQ ID NO: 6007

SEQ ID NO: 13860 - DNA, 511 bp, Staphylococcus aureus; identical to SEQ ID NO: 6008

SEQ ID NO: 13861 - DNA, 410 bp, Staphylococcus aureus; identical to SEQ ID NO: 6009

SEQ ID NO: 13862 - DNA, 410 bp, Staphylococcus aureus; identical to SEQ ID NO: 6010

SEQ ID NO: 13863 - DNA, 215 bp, Staphylococcus aureus; identical to SEQ ID NO: 6011

SEQ ID NO: 13864 - DNA, 215 bp, Staphylococcus aureus; identical to SEQ ID NO: 6012

SEQ ID NO: 13865 - DNA, 183 bp, Staphylococcus aureus; identical to SEQ ID NO: 6013

SEQ ID NO: 13866 - DNA, 183 bp, Staphylococcus aureus; identical to SEQ ID NO: 6014

SEQ ID NO: 13867 - DNA, 112 bp, Staphylococcus aureus; identical to SEQ ID NO: 6015

SEQ ID NO: 13868 - DNA, 112 bp, Staphylococcus aureus; identical to SEQ ID NO: 6016

SEQ ID NO: 13869 - DNA, 144 bp, Staphylococcus aureus; identical to SEQ ID NO: 6017

SEQ ID NO: 13870 - DNA, 144 bp, Staphylococcus aureus; identical to SEQ ID NO: 6018

SEQ ID NO: 13871 - DNA, 273 bp, Staphylococcus aureus; identical to SEQ ID NO: 6019

SEQ ID NO: 13872 - DNA, 273 bp, Staphylococcus aureus; identical to SEQ ID NO: 6020

SEQ ID NO: 13873 - DNA, 53 bp, Staphylococcus aureus; identical to SEQ ID NO: 6021

SEQ ID NO: 13874 - DNA, 53 bp, Staphylococcus aureus; identical to SEQ ID NO: 6022

SEQ ID NO: 13875 - DNA, 80 bp, Staphylococcus aureus; identical to SEQ ID NO: 6023

SEQ ID NO: 13876 - DNA, 80 bp, Staphylococcus aureus; identical to SEQ ID NO: 6024

SEQ ID NO: 13877 - DNA, 57 bp, Staphylococcus aureus; identical to SEQ ID NO: 6025

SEQ ID NO: 13878 - DNA, 57 bp, Staphylococcus aureus; identical to SEQ ID NO: 6026

SEQ ID NO: 13879 - DNA, 292 bp, Staphylococcus aureus; identical to SEQ ID NO: 6027

SEQ ID NO: 13880 - DNA, 292 bp, Staphylococcus aureus; identical to SEQ ID NO: 6028

SEQ ID NO: 13881 - DNA, 138 bp, Staphylococcus aureus; identical to SEQ ID NO: 6029

SEQ ID NO: 13882 - DNA, 138 bp, Staphylococcus aureus; identical to SEQ ID NO: 6030

SEQ ID NO: 13883 - DNA, 197 bp, Staphylococcus aureus; identical to SEQ ID NO: 6031

SEQ ID NO: 13884 - DNA, 197 bp, Staphylococcus aureus; identical to SEQ ID NO: 6032

SEQ ID NO: 13885 - DNA, 90 bp, Staphylococcus aureus; identical to SEQ ID NO: 6033

SEQ ID NO: 13886 - DNA, 90 bp, Staphylococcus aureus; identical to SEQ ID NO: 6034

SEQ ID NO: 13887 - DNA, 453 bp, Staphylococcus aureus; identical to SEQ ID NO: 6035

SEQ ID NO: 13888 - DNA, 453 bp, Staphylococcus aureus; identical to SEQ ID NO: 6036

SEQ ID NO: 13889 - DNA, 156 bp, Staphylococcus aureus; identical to SEQ ID NO: 6037

SEQ ID NO: 13890 - DNA, 156 bp, Staphylococcus aureus; identical to SEQ ID NO: 6038

SEQ ID NO: 13891 - DNA, 379 bp, Staphylococcus aureus; identical to SEQ ID NO: 6039

SEQ ID NO: 13892 - DNA, 379 bp, Staphylococcus aureus; identical to SEQ ID NO: 6040

SEQ ID NO: 13893 - DNA, 65 bp, Staphylococcus aureus; identical to SEQ ID NO: 6041

SEQ ID NO: 13894 - DNA, 65 bp, Staphylococcus aureus; identical to SEQ ID NO: 6042

SEQ ID NO: 13895 - DNA, 136 bp, Staphylococcus aureus; identical to SEQ ID NO: 6043

SEQ ID NO: 13896 - DNA, 136 bp, Staphylococcus aureus; identical to SEQ ID NO: 6044

SEQ ID NO: 13897 - DNA, 120 bp, Staphylococcus aureus; identical to SEQ ID NO: 6045

SEQ ID NO: 13898 - DNA, 120 bp, Staphylococcus aureus; identical to SEQ ID NO: 6046

SEQ ID NO: 13899 - DNA, 230 bp, Staphylococcus aureus; identical to SEQ ID NO: 6047

SEQ ID NO: 13900 - DNA, 230 bp, Staphylococcus aureus; identical to SEQ ID NO: 6048

SEQ ID NO: 13901 - DNA, 96 bp, Staphylococcus aureus; identical to SEQ ID NO: 6049

SEQ ID NO: 13902 - DNA, 96 bp, Staphylococcus aureus; identical to SEQ ID NO: 6050

SEQ ID NO: 13903 - DNA, 123 bp, Staphylococcus aureus; identical to SEQ ID NO: 6051

SEQ ID NO: 13904 - DNA, 123 bp, Staphylococcus aureus; identical to SEQ ID NO: 6052

SEQ ID NO: 13905 - DNA, 121 bp, Staphylococcus aureus; identical to SEQ ID NO: 6053

SEQ ID NO: 13906 - DNA, 121 bp, Staphylococcus aureus; identical to SEQ ID NO: 6054

SEQ ID NO: 13907 - DNA, 268 bp, Staphylococcus aureus; identical to SEQ ID NO: 6055

SEQ ID NO: 13908 - DNA, 268 bp, Staphylococcus aureus; identical to SEQ ID NO: 6056

SEQ ID NO: 13909 - DNA, 292 bp, Staphylococcus aureus; identical to SEQ ID NO: 6057

SEQ ID NO: 13910 - DNA, 292 bp, Staphylococcus aureus; identical to SEQ ID NO: 6058

SEQ ID NO: 13911 - DNA, 179 bp, Staphylococcus aureus; identical to SEQ ID NO: 6059

SEQ ID NO: 13912 - DNA, 179 bp, Staphylococcus aureus; identical to SEQ ID NO: 6060

SEQ ID NO: 13913 - DNA, 206 bp, Staphylococcus aureus; identical to SEQ ID NO: 6061

SEQ ID NO: 13914 - DNA, 206 bp, Staphylococcus aureus; identical to SEQ ID NO: 6062

SEQ ID NO: 13915 - DNA, 134 bp, Staphylococcus aureus; identical to SEQ ID NO: 6063

SEQ ID NO: 13916 - DNA, 134 bp, Staphylococcus aureus; identical to SEQ ID NO: 6064

SEQ ID NO: 13917 - DNA, 113 bp, Staphylococcus aureus; identical to SEQ ID NO: 6065

SEQ ID NO: 13918 - DNA, 113 bp, Staphylococcus aureus; identical to SEQ ID NO: 6066

SEQ ID NO: 13919 - DNA, 131 bp, Staphylococcus aureus; identical to SEQ ID NO: 6067

SEQ ID NO: 13920 - DNA, 131 bp, Staphylococcus aureus; identical to SEQ ID NO: 6068

SEQ ID NO: 13921 - DNA, 499 bp, Staphylococcus aureus; identical to SEQ ID NO: 6069

SEQ ID NO: 13922 - DNA, 499 bp, Staphylococcus aureus; identical to SEQ ID NO: 6070

SEQ ID NO: 13923 - DNA, 480 bp, Staphylococcus aureus; identical to SEQ ID NO: 6071

SEQ ID NO: 13924 - DNA, 480 bp, Staphylococcus aureus; identical to SEQ ID NO: 6072

SEQ ID NO: 13925 - DNA, 202 bp, Staphylococcus aureus; identical to SEQ ID NO: 6073

SEQ ID NO: 13926 - DNA, 202 bp, Staphylococcus aureus; identical to SEQ ID NO: 6074

SEQ ID NO: 13927 - DNA, 136 bp, Staphylococcus aureus; identical to SEQ ID NO: 6075

SEQ ID NO: 13928 - DNA, 136 bp, Staphylococcus aureus; identical to SEQ ID NO: 6076

SEQ ID NO: 13929 - DNA, 144 bp, Staphylococcus aureus; identical to SEQ ID NO: 6077

SEQ ID NO: 13930 - DNA, 144 bp, Staphylococcus aureus; identical to SEQ ID NO: 6078

SEQ ID NO: 13931 - DNA, 136 bp, Staphylococcus aureus; identical to SEQ ID NO: 6079

SEQ ID NO: 13932 - DNA, 136 bp, Staphylococcus aureus; identical to SEQ ID NO: 6080

SEQ ID NO: 13933 - DNA, 164 bp, Staphylococcus aureus; identical to SEQ ID NO: 6081

SEQ ID NO: 13934 - DNA, 164 bp, Staphylococcus aureus; identical to SEQ ID NO: 6082

SEQ ID NO: 13935 - DNA, 423 bp, Staphylococcus aureus; identical to SEQ ID NO: 6083

SEQ ID NO: 13936 - DNA, 423 bp, Staphylococcus aureus; identical to SEQ ID NO: 6084

SEQ ID NO: 13937 - DNA, 247 bp, Staphylococcus aureus; identical to SEQ ID NO: 6085

SEQ ID NO: 13938 - DNA, 247 bp, Staphylococcus aureus; identical to SEQ ID NO: 6086

SEQ ID NO: 13939 - DNA, 288 bp, Staphylococcus aureus; identical to SEQ ID NO: 6087

SEQ ID NO: 13940 - DNA, 288 bp, Staphylococcus aureus; identical to SEQ ID NO: 6088

SEQ ID NO: 13941 - DNA, 229 bp, Staphylococcus aureus; identical to SEQ ID NO: 6089

SEQ ID NO: 13942 - DNA, 229 bp, Staphylococcus aureus; identical to SEQ ID NO: 6090

SEQ ID NO: 13943 - DNA, 123 bp, Staphylococcus aureus; identical to SEQ ID NO: 6091

SEQ ID NO: 13944 - DNA, 123 bp, Staphylococcus aureus; identical to SEQ ID NO: 6092

SEQ ID NO: 13945 - DNA, 234 bp, Staphylococcus aureus; identical to SEQ ID NO: 6093

SEQ ID NO: 13946 - DNA, 234 bp, Staphylococcus aureus; identical to SEQ ID NO: 6094

SEQ ID NO: 13947 - DNA, 204 bp, Staphylococcus aureus; identical to SEQ ID NO: 6095

SEQ ID NO: 13948 - DNA, 204 bp, Staphylococcus aureus; identical to SEQ ID NO: 6096

SEQ ID NO: 13949 - DNA, 139 bp, Staphylococcus aureus; identical to SEQ ID NO: 6097

SEQ ID NO: 13950 - DNA, 139 bp, Staphylococcus aureus; identical to SEQ ID NO: 6098

SEQ ID NO: 13951 - DNA, 183 bp, Staphylococcus aureus; identical to SEQ ID NO: 6099

SEQ ID NO: 13952 - DNA, 183 bp, Staphylococcus aureus; identical to SEQ ID NO: 6100

SEQ ID NO: 13953 - DNA, 126 bp, Staphylococcus aureus; identical to SEQ ID NO: 6101

SEQ ID NO: 13954 - DNA, 126 bp, Staphylococcus aureus; identical to SEQ ID NO: 6102

SEQ ID NO: 13955 - DNA, 61 bp, Staphylococcus aureus; identical to SEQ ID NO: 6103

SEQ ID NO: 13956 - DNA, 61 bp, Staphylococcus aureus; identical to SEQ ID NO: 6104

SEQ ID NO: 13957 - DNA, 146 bp, Staphylococcus aureus; identical to SEQ ID NO: 6105

SEQ ID NO: 13958 - DNA, 146 bp, Staphylococcus aureus; identical to SEQ ID NO: 6106

SEQ ID NO: 13959 - DNA, 109 bp, Staphylococcus aureus; identical to SEQ ID NO: 6107

SEQ ID NO: 13960 - DNA, 109 bp, Staphylococcus aureus; identical to SEQ ID NO: 6108

SEQ ID NO: 13961 - DNA, 195 bp, Staphylococcus aureus; identical to SEQ ID NO: 6109

SEQ ID NO: 13962 - DNA, 195 bp, Staphylococcus aureus; identical to SEQ ID NO: 6110

SEQ ID NO: 13963 - DNA, 577 bp, Staphylococcus aureus; identical to SEQ ID NO: 6111

SEQ ID NO: 13964 - DNA, 577 bp, Staphylococcus aureus; identical to SEQ ID NO: 6112

SEQ ID NO: 13965 - DNA, 63 bp, Staphylococcus aureus; identical to SEQ ID NO: 6113

SEQ ID NO: 13966 - DNA, 63 bp, Staphylococcus aureus; identical to SEQ ID NO: 6114

SEQ ID NO: 13967 - DNA, 142 bp, Staphylococcus aureus; identical to SEQ ID NO: 6115

SEQ ID NO: 13968 - DNA, 142 bp, Staphylococcus aureus; identical to SEQ ID NO: 6116

SEQ ID NO: 13969 - DNA, 239 bp, Staphylococcus aureus; identical to SEQ ID NO: 6117

SEQ ID NO: 13970 - DNA, 239 bp, Staphylococcus aureus; identical to SEQ ID NO: 6118

SEQ ID NO: 13971 - DNA, 196 bp, Staphylococcus aureus; identical to SEQ ID NO: 6119

SEQ ID NO: 13972 - DNA, 196 bp, Staphylococcus aureus; identical to SEQ ID NO: 6120

SEQ ID NO: 13973 - DNA, 170 bp, Staphylococcus aureus; identical to SEQ ID NO: 6121

SEQ ID NO: 13974 - DNA, 170 bp, Staphylococcus aureus; identical to SEQ ID NO: 6122

SEQ ID NO: 13975 - DNA, 162 bp, Staphylococcus aureus; identical to SEQ ID NO: 6123

SEQ ID NO: 13976 - DNA, 162 bp, Staphylococcus aureus; identical to SEQ ID NO: 6124

SEQ ID NO: 13977 - DNA, 72 bp, Staphylococcus aureus; identical to SEQ ID NO: 6125

SEQ ID NO: 13978 - DNA, 72 bp, Staphylococcus aureus; identical to SEQ ID NO: 6126

SEQ ID NO: 13979 - DNA, 114 bp, Staphylococcus aureus; identical to SEQ ID NO: 6127

SEQ ID NO: 13980 - DNA, 114 bp, Staphylococcus aureus; identical to SEQ ID NO: 6128

SEQ ID NO: 13981 - DNA, 180 bp, Staphylococcus aureus; identical to SEQ ID NO: 6129

SEQ ID NO: 13982 - DNA, 180 bp, Staphylococcus aureus; identical to SEQ ID NO: 6130

SEQ ID NO: 13983 - DNA, 525 bp, Staphylococcus aureus; identical to SEQ ID NO: 6131

SEQ ID NO: 13984 - DNA, 525 bp, Staphylococcus aureus; identical to SEQ ID NO: 6132

SEQ ID NO: 13985 - DNA, 283 bp, Staphylococcus aureus; identical to SEQ ID NO: 6133

SEQ ID NO: 13986 - DNA, 283 bp, Staphylococcus aureus; identical to SEQ ID NO: 6134

SEQ ID NO: 13987 - DNA, 470 bp, Staphylococcus aureus; identical to SEQ ID NO: 6135

SEQ ID NO: 13988 - DNA, 470 bp, Staphylococcus aureus; identical to SEQ ID NO: 6136

SEQ ID NO: 13989 - DNA, 116 bp, Staphylococcus aureus; identical to SEQ ID NO: 6137

SEQ ID NO: 13990 - DNA, 116 bp, Staphylococcus aureus; identical to SEQ ID NO: 6138

SEQ ID NO: 13991 - DNA, 399 bp, Staphylococcus aureus; identical to SEQ ID NO: 6139

SEQ ID NO: 13992 - DNA, 399 bp, Staphylococcus aureus; identical to SEQ ID NO: 6140

SEQ ID NO: 13993 - DNA, 191 bp, Staphylococcus aureus; identical to SEQ ID NO: 6141

SEQ ID NO: 13994 - DNA, 191 bp, Staphylococcus aureus; identical to SEQ ID NO: 6142

SEQ ID NO: 13995 - DNA, 85 bp, Staphylococcus aureus; identical to SEQ ID NO: 6143

SEQ ID NO: 13996 - DNA, 85 bp, Staphylococcus aureus; identical to SEQ ID NO: 6144

SEQ ID NO: 13997 - DNA, 199 bp, Staphylococcus aureus; identical to SEQ ID NO: 6145

SEQ ID NO: 13998 - DNA, 199 bp, Staphylococcus aureus; identical to SEQ ID NO: 6146

SEQ ID NO: 13999 - DNA, 75 bp, Staphylococcus aureus; identical to SEQ ID NO: 6147

SEQ ID NO: 14000 - DNA, 75 bp, Staphylococcus aureus; identical to SEQ ID NO: 6148

SEQ ID NO: 14001 - DNA, 202 bp, Staphylococcus aureus; identical to SEQ ID NO: 6149

SEQ ID NO: 14002 - DNA, 202 bp, Staphylococcus aureus; identical to SEQ ID NO: 6150

SEQ ID NO: 14003 - DNA, 253 bp, Staphylococcus aureus; identical to SEQ ID NO: 6151

SEQ ID NO: 14004 - DNA, 253 bp, Staphylococcus aureus; identical to SEQ ID NO: 6152

SEQ ID NO: 14005 - DNA, 84 bp, Staphylococcus aureus; identical to SEQ ID NO: 6153

SEQ ID NO: 14006 - DNA, 84 bp, Staphylococcus aureus; identical to SEQ ID NO: 6154

SEQ ID NO: 14007 - DNA, 58 bp, Staphylococcus aureus; identical to SEQ ID NO: 6155

SEQ ID NO: 14008 - DNA, 58 bp, Staphylococcus aureus; identical to SEQ ID NO: 6156

SEQ ID NO: 14009 - DNA, 230 bp, Staphylococcus aureus; identical to SEQ ID NO: 6157

SEQ ID NO: 14010 - DNA, 230 bp, Staphylococcus aureus; identical to SEQ ID NO: 6158

SEQ ID NO: 14011 - DNA, 94 bp, Staphylococcus aureus; identical to SEQ ID NO: 6159

SEQ ID NO: 14012 - DNA, 94 bp, Staphylococcus aureus; identical to SEQ ID NO: 6160

SEQ ID NO: 14013 - DNA, 475 bp, Staphylococcus aureus; identical to SEQ ID NO: 6161

SEQ ID NO: 14014 - DNA, 475 bp, Staphylococcus aureus; identical to SEQ ID NO: 6162

SEQ ID NO: 14015 - DNA, 303 bp, Staphylococcus aureus; identical to SEQ ID NO: 6163

SEQ ID NO: 14016 - DNA, 303 bp, Staphylococcus aureus; identical to SEQ ID NO: 6164

SEQ ID NO: 14017 - DNA, 205 bp, Staphylococcus aureus; identical to SEQ ID NO: 6165

SEQ ID NO: 14018 - DNA, 205 bp, Staphylococcus aureus; identical to SEQ ID NO: 6166

SEQ ID NO: 14019 - DNA, 83 bp, Staphylococcus aureus; identical to SEQ ID NO: 6167

SEQ ID NO: 14020 - DNA, 83 bp, Staphylococcus aureus; identical to SEQ ID NO: 6168

SEQ ID NO: 14021 - DNA, 433 bp, Staphylococcus aureus; identical to SEQ ID NO: 6169

SEQ ID NO: 14022 - DNA, 433 bp, Staphylococcus aureus; identical to SEQ ID NO: 6170

SEQ ID NO: 14023 - DNA, 58 bp, Staphylococcus aureus; identical to SEQ ID NO: 6171

SEQ ID NO: 14024 - DNA, 58 bp, Staphylococcus aureus; identical to SEQ ID NO: 6172

SEQ ID NO: 14025 - DNA, 200 bp, Staphylococcus aureus; identical to SEQ ID NO: 6173

SEQ ID NO: 14026 - DNA, 200 bp, Staphylococcus aureus; identical to SEQ ID NO: 6174

SEQ ID NO: 14027 - DNA, 565 bp, Staphylococcus aureus; identical to SEQ ID NO: 6175

SEQ ID NO: 14028 - DNA, 565 bp, Staphylococcus aureus; identical to SEQ ID NO: 6176

SEQ ID NO: 14029 - DNA, 327 bp, Staphylococcus aureus; identical to SEQ ID NO: 6177

SEQ ID NO: 14030 - DNA, 327 bp, Staphylococcus aureus; identical to SEQ ID NO: 6178

SEQ ID NO: 14031 - DNA, 321 bp, Staphylococcus aureus; identical to SEQ ID NO: 6179

SEQ ID NO: 14032 - DNA, 321 bp, Staphylococcus aureus; identical to SEQ ID NO: 6180

SEQ ID NO: 14033 - DNA, 243 bp, Staphylococcus aureus; identical to SEQ ID NO: 6181

SEQ ID NO: 14034 - DNA, 243 bp, Staphylococcus aureus; identical to SEQ ID NO: 6182

SEQ ID NO: 14035 - DNA, 118 bp, Staphylococcus aureus; identical to SEQ ID NO: 6183

SEQ ID NO: 14036 - DNA, 118 bp, Staphylococcus aureus; identical to SEQ ID NO: 6184

SEQ ID NO: 14037 - DNA, 78 bp, Staphylococcus aureus; identical to SEQ ID NO: 6185

SEQ ID NO: 14038 - DNA, 78 bp, Staphylococcus aureus; identical to SEQ ID NO: 6186

SEQ ID NO: 14039 - DNA, 53 bp, Staphylococcus aureus; identical to SEQ ID NO: 6187

SEQ ID NO: 14040 - DNA, 53 bp, Staphylococcus aureus; identical to SEQ ID NO: 6188

SEQ ID NO: 14041 - DNA, 385 bp, Staphylococcus aureus; identical to SEQ ID NO: 6189

SEQ ID NO: 14042 - DNA, 385 bp, Staphylococcus aureus; identical to SEQ ID NO: 6190

SEQ ID NO: 14043 - DNA, 54 bp, Staphylococcus aureus; identical to SEQ ID NO: 6191

SEQ ID NO: 14044 - DNA, 54 bp, Staphylococcus aureus; identical to SEQ ID NO: 6192

SEQ ID NO: 14045 - DNA, 430 bp, Staphylococcus aureus; identical to SEQ ID NO: 6193

SEQ ID NO: 14046 - DNA, 430 bp, Staphylococcus aureus; identical to SEQ ID NO: 6194

SEQ ID NO: 14047 - DNA, 170 bp, Staphylococcus aureus; identical to SEQ ID NO: 6195

SEQ ID NO: 14048 - DNA, 170 bp, Staphylococcus aureus; identical to SEQ ID NO: 6196

SEQ ID NO: 14049 - DNA, 221 bp, Staphylococcus aureus; identical to SEQ ID NO: 6197

SEQ ID NO: 14050 - DNA, 221 bp, Staphylococcus aureus; identical to SEQ ID NO: 6198

SEQ ID NO: 14051 - DNA, 528 bp, Staphylococcus aureus; identical to SEQ ID NO: 6199

SEQ ID NO: 14052 - DNA, 528 bp, Staphylococcus aureus; identical to SEQ ID NO: 6200

SEQ ID NO: 14053 - DNA, 76 bp, Staphylococcus aureus; identical to SEQ ID NO: 6201

SEQ ID NO: 14054 - DNA, 76 bp, Staphylococcus aureus; identical to SEQ ID NO: 6202

SEQ ID NO: 14055 - DNA, 114 bp, Staphylococcus aureus; identical to SEQ ID NO: 6203

SEQ ID NO: 14056 - DNA, 114 bp, Staphylococcus aureus; identical to SEQ ID NO: 6204

SEQ ID NO: 14057 - DNA, 124 bp, Staphylococcus aureus; identical to SEQ ID NO: 6205

SEQ ID NO: 14058 - DNA, 124 bp, Staphylococcus aureus; identical to SEQ ID NO: 6206

SEQ ID NO: 14059 - DNA, 152 bp, Staphylococcus aureus; identical to SEQ ID NO: 6207

SEQ ID NO: 14060 - DNA, 152 bp, Staphylococcus aureus; identical to SEQ ID NO: 6208

SEQ ID NO: 14061 - DNA, 107 bp, Staphylococcus aureus; identical to SEQ ID NO: 6209

SEQ ID NO: 14062 - DNA, 107 bp, Staphylococcus aureus; identical to SEQ ID NO: 6210

SEQ ID NO: 14063 - DNA, 105 bp, Staphylococcus aureus; identical to SEQ ID NO: 6211

SEQ ID NO: 14064 - DNA, 105 bp, Staphylococcus aureus; identical to SEQ ID NO: 6212

SEQ ID NO: 14065 - DNA, 401 bp, Staphylococcus aureus; identical to SEQ ID NO: 6213

SEQ ID NO: 14066 - DNA, 401 bp, Staphylococcus aureus; identical to SEQ ID NO: 6214

SEQ ID NO: 14067 - DNA, 57 bp, Staphylococcus aureus; identical to SEQ ID NO: 6215

SEQ ID NO: 14068 - DNA, 57 bp, Staphylococcus aureus; identical to SEQ ID NO: 6216

SEQ ID NO: 14069 - DNA, 89 bp, Staphylococcus aureus; identical to SEQ ID NO: 6217

SEQ ID NO: 14070 - DNA, 89 bp, Staphylococcus aureus; identical to SEQ ID NO: 6218

SEQ ID NO: 14071 - DNA, 57 bp, Staphylococcus aureus; identical to SEQ ID NO: 6219

SEQ ID NO: 14072 - DNA, 57 bp, Staphylococcus aureus; identical to SEQ ID NO: 6220

SEQ ID NO: 14073 - DNA, 132 bp, Staphylococcus aureus; identical to SEQ ID NO: 6221

SEQ ID NO: 14074 - DNA, 132 bp, Staphylococcus aureus; identical to SEQ ID NO: 6222

SEQ ID NO: 14075 - DNA, 77 bp, Staphylococcus aureus; identical to SEQ ID NO: 6223

SEQ ID NO: 14076 - DNA, 77 bp, Staphylococcus aureus; identical to SEQ ID NO: 6224

SEQ ID NO: 14077 - DNA, 104 bp, Staphylococcus aureus; identical to SEQ ID NO: 6225

SEQ ID NO: 14078 - DNA, 104 bp, Staphylococcus aureus; identical to SEQ ID NO: 6226

SEQ ID NO: 14079 - DNA, 81 bp, Staphylococcus aureus; identical to SEQ ID NO: 6227

SEQ ID NO: 14080 - DNA, 81 bp, Staphylococcus aureus; identical to SEQ ID NO: 6228

SEQ ID NO: 14081 - DNA, 215 bp, Staphylococcus aureus; identical to SEQ ID NO: 6229

SEQ ID NO: 14082 - DNA, 215 bp, Staphylococcus aureus; identical to SEQ ID NO: 6230

SEQ ID NO: 14083 - DNA, 141 bp, Staphylococcus aureus; identical to SEQ ID NO: 6231

SEQ ID NO: 14084 - DNA, 141 bp, Staphylococcus aureus; identical to SEQ ID NO: 6232

SEQ ID NO: 14085 - DNA, 60 bp, Staphylococcus aureus; identical to SEQ ID NO: 6233

SEQ ID NO: 14086 - DNA, 60 bp, Staphylococcus aureus; identical to SEQ ID NO: 6234

SEQ ID NO: 14087 - DNA, 121 bp, Staphylococcus aureus; identical to SEQ ID NO: 6235

SEQ ID NO: 14088 - DNA, 121 bp, Staphylococcus aureus; identical to SEQ ID NO: 6236

SEQ ID NO: 14089 - DNA, 229 bp, Staphylococcus aureus; identical to SEQ ID NO: 6237

SEQ ID NO: 14090 - DNA, 229 bp, Staphylococcus aureus; identical to SEQ ID NO: 6238

SEQ ID NO: 14091 - DNA, 81 bp, Staphylococcus aureus; identical to SEQ ID NO: 6239

SEQ ID NO: 14092 - DNA, 81 bp, Staphylococcus aureus; identical to SEQ ID NO: 6240

SEQ ID NO: 14093 - DNA, 193 bp, Staphylococcus aureus; identical to SEQ ID NO: 6241

SEQ ID NO: 14094 - DNA, 193 bp, Staphylococcus aureus; identical to SEQ ID NO: 6242

SEQ ID NO: 14095 - DNA, 301 bp, Staphylococcus aureus; identical to SEQ ID NO: 6243

SEQ ID NO: 14096 - DNA, 301 bp, Staphylococcus aureus; identical to SEQ ID NO: 6244

SEQ ID NO: 14097 - DNA, 315 bp, Staphylococcus aureus; identical to SEQ ID NO: 6245

SEQ ID NO: 14098 - DNA, 315 bp, Staphylococcus aureus; identical to SEQ ID NO: 6246

SEQ ID NO: 14099 - DNA, 67 bp, Staphylococcus aureus; identical to SEQ ID NO: 6247

SEQ ID NO: 14100 - DNA, 67 bp, Staphylococcus aureus; identical to SEQ ID NO: 6248

SEQ ID NO: 14101 - DNA, 151 bp, Staphylococcus aureus; identical to SEQ ID NO: 6249

SEQ ID NO: 14102 - DNA, 151 bp, Staphylococcus aureus; identical to SEQ ID NO: 6250

SEQ ID NO: 14103 - DNA, 129 bp, Staphylococcus aureus; identical to SEQ ID NO: 6251

SEQ ID NO: 14104 - DNA, 129 bp, Staphylococcus aureus; identical to SEQ ID NO: 6252

SEQ ID NO: 14105 - DNA, 76 bp, Staphylococcus aureus; identical to SEQ ID NO: 6253

SEQ ID NO: 14106 - DNA, 76 bp, Staphylococcus aureus; identical to SEQ ID NO: 6254

SEQ ID NO: 14107 - DNA, 179 bp, Staphylococcus aureus; identical to SEQ ID NO: 6255

SEQ ID NO: 14108 - DNA, 179 bp, Staphylococcus aureus; identical to SEQ ID NO: 6256

SEQ ID NO: 14109 - DNA, 150 bp, Staphylococcus aureus; identical to SEQ ID NO: 6257

SEQ ID NO: 14110 - DNA, 150 bp, Staphylococcus aureus; identical to SEQ ID NO: 6258

SEQ ID NO: 14111 - DNA, 431 bp, Staphylococcus aureus; identical to SEQ ID NO: 6259

SEQ ID NO: 14112 - DNA, 431 bp, Staphylococcus aureus; identical to SEQ ID NO: 6260

SEQ ID NO: 14113 - DNA, 59 bp, Staphylococcus aureus; identical to SEQ ID NO: 6261

SEQ ID NO: 14114 - DNA, 59 bp, Staphylococcus aureus; identical to SEQ ID NO: 6262

SEQ ID NO: 14115 - DNA, 473 bp, Staphylococcus aureus; identical to SEQ ID NO: 6263

SEQ ID NO: 14116 - DNA, 473 bp, Staphylococcus aureus; identical to SEQ ID NO: 6264

SEQ ID NO: 14117 - DNA, 104 bp, Staphylococcus aureus; identical to SEQ ID NO: 6265

SEQ ID NO: 14118 - DNA, 104 bp, Staphylococcus aureus; identical to SEQ ID NO: 6266

SEQ ID NO: 14119 - DNA, 63 bp, Staphylococcus aureus; identical to SEQ ID NO: 6267

SEQ ID NO: 14120 - DNA, 63 bp, Staphylococcus aureus; identical to SEQ ID NO: 6268

SEQ ID NO: 14121 - DNA, 157 bp, Staphylococcus aureus; identical to SEQ ID NO: 6269

SEQ ID NO: 14122 - DNA, 157 bp, Staphylococcus aureus; identical to SEQ ID NO: 6270

SEQ ID NO: 14123 - DNA, 364 bp, Staphylococcus aureus; identical to SEQ ID NO: 6271

SEQ ID NO: 14124 - DNA, 364 bp, Staphylococcus aureus; identical to SEQ ID NO: 6272

SEQ ID NO: 14125 - DNA, 158 bp, Staphylococcus aureus; identical to SEQ ID NO: 6273

SEQ ID NO: 14126 - DNA, 158 bp, Staphylococcus aureus; identical to SEQ ID NO: 6274

SEQ ID NO: 14127 - DNA, 96 bp, Staphylococcus aureus; identical to SEQ ID NO: 6275

SEQ ID NO: 14128 - DNA, 96 bp, Staphylococcus aureus; identical to SEQ ID NO: 6276

SEQ ID NO: 14129 - DNA, 51 bp, Staphylococcus aureus; identical to SEQ ID NO: 6277

SEQ ID NO: 14130 - DNA, 51 bp, Staphylococcus aureus; identical to SEQ ID NO: 6278

SEQ ID NO: 14131 - DNA, 154 bp, Staphylococcus aureus; identical to SEQ ID NO: 6279

SEQ ID NO: 14132 - DNA, 154 bp, Staphylococcus aureus; identical to SEQ ID NO: 6280

SEQ ID NO: 14133 - DNA, 112 bp, Staphylococcus aureus; identical to SEQ ID NO: 6281

SEQ ID NO: 14134 - DNA, 112 bp, Staphylococcus aureus; identical to SEQ ID NO: 6282

SEQ ID NO: 14135 - DNA, 120 bp, Staphylococcus aureus; identical to SEQ ID NO: 6283

SEQ ID NO: 14136 - DNA, 120 bp, Staphylococcus aureus; identical to SEQ ID NO: 6284

SEQ ID NO: 14137 - DNA, 275 bp, Staphylococcus aureus; identical to SEQ ID NO: 6285

SEQ ID NO: 14138 - DNA, 275 bp, Staphylococcus aureus; identical to SEQ ID NO: 6286

SEQ ID NO: 14139 - DNA, 143 bp, Staphylococcus aureus; identical to SEQ ID NO: 6287

SEQ ID NO: 14140 - DNA, 143 bp, Staphylococcus aureus; identical to SEQ ID NO: 6288

SEQ ID NO: 14141 - DNA, 113 bp, Staphylococcus aureus; identical to SEQ ID NO: 6289

SEQ ID NO: 14142 - DNA, 113 bp, Staphylococcus aureus; identical to SEQ ID NO: 6290

SEQ ID NO: 14143 - DNA, 130 bp, Staphylococcus aureus; identical to SEQ ID NO: 6291

SEQ ID NO: 14144 - DNA, 130 bp, Staphylococcus aureus; identical to SEQ ID NO: 6292

SEQ ID NO: 14145 - DNA, 223 bp, Staphylococcus aureus; identical to SEQ ID NO: 6293

SEQ ID NO: 14146 - DNA, 223 bp, Staphylococcus aureus; identical to SEQ ID NO: 6294

SEQ ID NO: 14147 - DNA, 60 bp, Staphylococcus aureus; identical to SEQ ID NO: 6295

SEQ ID NO: 14148 - DNA, 60 bp, Staphylococcus aureus; identical to SEQ ID NO: 6296

SEQ ID NO: 14149 - DNA, 334 bp, Staphylococcus aureus; identical to SEQ ID NO: 6297

SEQ ID NO: 14150 - DNA, 334 bp, Staphylococcus aureus; identical to SEQ ID NO: 6298

SEQ ID NO: 14151 - DNA, 149 bp, Staphylococcus aureus; identical to SEQ ID NO: 6299

SEQ ID NO: 14152 - DNA, 149 bp, Staphylococcus aureus; identical to SEQ ID NO: 6300

SEQ ID NO: 14153 - DNA, 181 bp, Staphylococcus aureus; identical to SEQ ID NO: 6301

SEQ ID NO: 14154 - DNA, 181 bp, Staphylococcus aureus; identical to SEQ ID NO: 6302

SEQ ID NO: 14155 - DNA, 219 bp, Staphylococcus aureus; identical to SEQ ID NO: 6303

SEQ ID NO: 14156 - DNA, 219 bp, Staphylococcus aureus; identical to SEQ ID NO: 6304

SEQ ID NO: 14157 - DNA, 292 bp, Staphylococcus aureus; identical to SEQ ID NO: 6305

SEQ ID NO: 14158 - DNA, 292 bp, Staphylococcus aureus; identical to SEQ ID NO: 6306

SEQ ID NO: 14159 - DNA, 135 bp, Staphylococcus aureus; identical to SEQ ID NO: 6307

SEQ ID NO: 14160 - DNA, 135 bp, Staphylococcus aureus; identical to SEQ ID NO: 6308

SEQ ID NO: 14161 - DNA, 68 bp, Staphylococcus aureus; identical to SEQ ID NO: 6309

SEQ ID NO: 14162 - DNA, 68 bp, Staphylococcus aureus; identical to SEQ ID NO: 6310

SEQ ID NO: 14163 - DNA, 100 bp, Staphylococcus aureus; identical to SEQ ID NO: 6311

SEQ ID NO: 14164 - DNA, 100 bp, Staphylococcus aureus; identical to SEQ ID NO: 6312

SEQ ID NO: 14165 - DNA, 276 bp, Staphylococcus aureus; identical to SEQ ID NO: 6313

SEQ ID NO: 14166 - DNA, 276 bp, Staphylococcus aureus; identical to SEQ ID NO: 6314

SEQ ID NO: 14167 - DNA, 130 bp, Staphylococcus aureus; identical to SEQ ID NO: 6315

SEQ ID NO: 14168 - DNA, 130 bp, Staphylococcus aureus; identical to SEQ ID NO: 6316

SEQ ID NO: 14169 - DNA, 345 bp, Staphylococcus aureus; identical to SEQ ID NO: 6317

SEQ ID NO: 14170 - DNA, 345 bp, Staphylococcus aureus; identical to SEQ ID NO: 6318

SEQ ID NO: 14171 - DNA, 56 bp, Staphylococcus aureus; identical to SEQ ID NO: 6319

SEQ ID NO: 14172 - DNA, 56 bp, Staphylococcus aureus; identical to SEQ ID NO: 6320

SEQ ID NO: 14173 - DNA, 91 bp, Staphylococcus aureus; identical to SEQ ID NO: 6321

SEQ ID NO: 14174 - DNA, 91 bp, Staphylococcus aureus; identical to SEQ ID NO: 6322

SEQ ID NO: 14175 - DNA, 106 bp, Staphylococcus aureus; identical to SEQ ID NO: 6323

SEQ ID NO: 14176 - DNA, 106 bp, Staphylococcus aureus; identical to SEQ ID NO: 6324

SEQ ID NO: 14177 - DNA, 201 bp, Staphylococcus aureus; identical to SEQ ID NO: 6325

SEQ ID NO: 14178 - DNA, 201 bp, Staphylococcus aureus; identical to SEQ ID NO: 6326

SEQ ID NO: 14179 - DNA, 347 bp, Staphylococcus aureus; identical to SEQ ID NO: 6327

SEQ ID NO: 14180 - DNA, 347 bp, Staphylococcus aureus; identical to SEQ ID NO: 6328

SEQ ID NO: 14181 - DNA, 142 bp, Staphylococcus aureus; identical to SEQ ID NO: 6329

SEQ ID NO: 14182 - DNA, 142 bp, Staphylococcus aureus; identical to SEQ ID NO: 6330

SEQ ID NO: 14183 - DNA, 107 bp, Staphylococcus aureus; identical to SEQ ID NO: 6331

SEQ ID NO: 14184 - DNA, 107 bp, Staphylococcus aureus; identical to SEQ ID NO: 6332

SEQ ID NO: 14185 - DNA, 325 bp, Staphylococcus aureus; identical to SEQ ID NO: 6333

SEQ ID NO: 14186 - DNA, 325 bp, Staphylococcus aureus; identical to SEQ ID NO: 6334

SEQ ID NO: 14187 - DNA, 284 bp, Staphylococcus aureus; identical to SEQ ID NO: 6335

SEQ ID NO: 14188 - DNA, 284 bp, Staphylococcus aureus; identical to SEQ ID NO: 6336

SEQ ID NO: 14189 - DNA, 62 bp, Staphylococcus aureus; identical to SEQ ID NO: 6337

SEQ ID NO: 14190 - DNA, 62 bp, Staphylococcus aureus; identical to SEQ ID NO: 6338

SEQ ID NO: 14191 - DNA, 342 bp, Staphylococcus aureus; identical to SEQ ID NO: 6339

SEQ ID NO: 14192 - DNA, 342 bp, Staphylococcus aureus; identical to SEQ ID NO: 6340

SEQ ID NO: 14193 - DNA, 124 bp, Staphylococcus aureus; identical to SEQ ID NO: 6341

SEQ ID NO: 14194 - DNA, 124 bp, Staphylococcus aureus; identical to SEQ ID NO: 6342

SEQ ID NO: 14195 - DNA, 61 bp, Staphylococcus aureus; identical to SEQ ID NO: 6343

SEQ ID NO: 14196 - DNA, 61 bp, Staphylococcus aureus; identical to SEQ ID NO: 6344

SEQ ID NO: 14197 - DNA, 134 bp, Staphylococcus aureus; identical to SEQ ID NO: 6345

SEQ ID NO: 14198 - DNA, 134 bp, Staphylococcus aureus; identical to SEQ ID NO: 6346

SEQ ID NO: 14199 - DNA, 230 bp, Staphylococcus aureus; identical to SEQ ID NO: 6347

SEQ ID NO: 14200 - DNA, 230 bp, Staphylococcus aureus; identical to SEQ ID NO: 6348

SEQ ID NO: 14201 - DNA, 236 bp, Staphylococcus aureus; identical to SEQ ID NO: 6349

SEQ ID NO: 14202 - DNA, 236 bp, Staphylococcus aureus; identical to SEQ ID NO: 6350

SEQ ID NO: 14203 - DNA, 99 bp, Staphylococcus aureus; identical to SEQ ID NO: 6351

SEQ ID NO: 14204 - DNA, 99 bp, Staphylococcus aureus; identical to SEQ ID NO: 6352

SEQ ID NO: 14205 - DNA, 84 bp, Staphylococcus aureus; identical to SEQ ID NO: 6353

SEQ ID NO: 14206 - DNA, 84 bp, Staphylococcus aureus; identical to SEQ ID NO: 6354

SEQ ID NO: 14207 - DNA, 160 bp, Staphylococcus aureus; identical to SEQ ID NO: 6355

SEQ ID NO: 14208 - DNA, 160 bp, Staphylococcus aureus; identical to SEQ ID NO: 6356

SEQ ID NO: 14209 - DNA, 85 bp, Staphylococcus aureus; identical to SEQ ID NO: 6357

SEQ ID NO: 14210 - DNA, 85 bp, Staphylococcus aureus; identical to SEQ ID NO: 6358

SEQ ID NO: 14211 - DNA, 145 bp, Staphylococcus aureus; identical to SEQ ID NO: 6359

SEQ ID NO: 14212 - DNA, 145 bp, Staphylococcus aureus; identical to SEQ ID NO: 6360

SEQ ID NO: 14213 - DNA, 460 bp, Staphylococcus aureus; identical to SEQ ID NO: 6361

SEQ ID NO: 14214 - DNA, 460 bp, Staphylococcus aureus; identical to SEQ ID NO: 6362

SEQ ID NO: 14215 - DNA, 427 bp, Staphylococcus aureus; identical to SEQ ID NO: 6363

SEQ ID NO: 14216 - DNA, 427 bp, Staphylococcus aureus; identical to SEQ ID NO: 6364

SEQ ID NO: 14217 - DNA, 132 bp, Staphylococcus aureus; identical to SEQ ID NO: 6365

SEQ ID NO: 14218 - DNA, 132 bp, Staphylococcus aureus; identical to SEQ ID NO: 6366

SEQ ID NO: 14219 - DNA, 274 bp, Staphylococcus aureus; identical to SEQ ID NO: 6367

SEQ ID NO: 14220 - DNA, 274 bp, Staphylococcus aureus; identical to SEQ ID NO: 6368

SEQ ID NO: 14221 - DNA, 176 bp, Staphylococcus aureus; identical to SEQ ID NO: 6369

SEQ ID NO: 14222 - DNA, 176 bp, Staphylococcus aureus; identical to SEQ ID NO: 6370

SEQ ID NO: 14223 - DNA, 122 bp, Staphylococcus aureus; identical to SEQ ID NO: 6371

SEQ ID NO: 14224 - DNA, 122 bp, Staphylococcus aureus; identical to SEQ ID NO: 6372

SEQ ID NO: 14225 - DNA, 103 bp, Staphylococcus aureus; identical to SEQ ID NO: 6373

SEQ ID NO: 14226 - DNA, 103 bp, Staphylococcus aureus; identical to SEQ ID NO: 6374

SEQ ID NO: 14227 - DNA, 72 bp, Staphylococcus aureus; identical to SEQ ID NO: 6375

SEQ ID NO: 14228 - DNA, 72 bp, Staphylococcus aureus; identical to SEQ ID NO: 6376

SEQ ID NO: 14229 - DNA, 202 bp, Staphylococcus aureus; identical to SEQ ID NO: 6377

SEQ ID NO: 14230 - DNA, 202 bp, Staphylococcus aureus; identical to SEQ ID NO: 6378

SEQ ID NO: 14231 - DNA, 73 bp, Staphylococcus aureus; identical to SEQ ID NO: 6379

SEQ ID NO: 14232 - DNA, 73 bp, Staphylococcus aureus; identical to SEQ ID NO: 6380

SEQ ID NO: 14233 - DNA, 159 bp, Staphylococcus aureus; identical to SEQ ID NO: 6381

SEQ ID NO: 14234 - DNA, 159 bp, Staphylococcus aureus; identical to SEQ ID NO: 6382

SEQ ID NO: 14235 - DNA, 116 bp, Staphylococcus aureus; identical to SEQ ID NO: 6383

SEQ ID NO: 14236 - DNA, 116 bp, Staphylococcus aureus; identical to SEQ ID NO: 6384

SEQ ID NO: 14237 - DNA, 228 bp, Staphylococcus aureus; identical to SEQ ID NO: 6385

SEQ ID NO: 14238 - DNA, 228 bp, Staphylococcus aureus; identical to SEQ ID NO: 6386

SEQ ID NO: 14239 - DNA, 269 bp, Staphylococcus aureus; identical to SEQ ID NO: 6387

SEQ ID NO: 14240 - DNA, 269 bp, Staphylococcus aureus; identical to SEQ ID NO: 6388

SEQ ID NO: 14241 - DNA, 402 bp, Staphylococcus aureus; identical to SEQ ID NO: 6389

SEQ ID NO: 14242 - DNA, 402 bp, Staphylococcus aureus; identical to SEQ ID NO: 6390

SEQ ID NO: 14243 - DNA, 222 bp, Staphylococcus aureus; identical to SEQ ID NO: 6391

SEQ ID NO: 14244 - DNA, 222 bp, Staphylococcus aureus; identical to SEQ ID NO: 6392

SEQ ID NO: 14245 - DNA, 72 bp, Staphylococcus aureus; identical to SEQ ID NO: 6393

SEQ ID NO: 14246 - DNA, 72 bp, Staphylococcus aureus; identical to SEQ ID NO: 6394

SEQ ID NO: 14247 - DNA, 216 bp, Staphylococcus aureus; identical to SEQ ID NO: 6395

SEQ ID NO: 14248 - DNA, 216 bp, Staphylococcus aureus; identical to SEQ ID NO: 6396

SEQ ID NO: 14249 - DNA, 153 bp, Staphylococcus aureus; identical to SEQ ID NO: 6397

SEQ ID NO: 14250 - DNA, 153 bp, Staphylococcus aureus; identical to SEQ ID NO: 6398

SEQ ID NO: 14251 - DNA, 150 bp, Staphylococcus aureus; identical to SEQ ID NO: 6399

SEQ ID NO: 14252 - DNA, 150 bp, Staphylococcus aureus; identical to SEQ ID NO: 6400

SEQ ID NO: 14253 - DNA, 162 bp, Staphylococcus aureus; identical to SEQ ID NO: 6401

SEQ ID NO: 14254 - DNA, 162 bp, Staphylococcus aureus; identical to SEQ ID NO: 6402

SEQ ID NO: 14255 - DNA, 141 bp, Staphylococcus aureus; identical to SEQ ID NO: 6403

SEQ ID NO: 14256 - DNA, 141 bp, Staphylococcus aureus; identical to SEQ ID NO: 6404

SEQ ID NO: 14257 - DNA, 153 bp, Staphylococcus aureus; identical to SEQ ID NO: 6405

SEQ ID NO: 14258 - DNA, 153 bp, Staphylococcus aureus; identical to SEQ ID NO: 6406

SEQ ID NO: 14259 - DNA, 425 bp, Staphylococcus aureus; identical to SEQ ID NO: 6407

SEQ ID NO: 14260 - DNA, 425 bp, Staphylococcus aureus; identical to SEQ ID NO: 6408

SEQ ID NO: 14261 - DNA, 201 bp, Staphylococcus aureus; identical to SEQ ID NO: 6409

SEQ ID NO: 14262 - DNA, 201 bp, Staphylococcus aureus; identical to SEQ ID NO: 6410

SEQ ID NO: 14263 - DNA, 92 bp, Staphylococcus aureus; identical to SEQ ID NO: 6411

SEQ ID NO: 14264 - DNA, 92 bp, Staphylococcus aureus; identical to SEQ ID NO: 6412

SEQ ID NO: 14265 - DNA, 210 bp, Staphylococcus aureus; identical to SEQ ID NO: 6413

SEQ ID NO: 14266 - DNA, 210 bp, Staphylococcus aureus; identical to SEQ ID NO: 6414

SEQ ID NO: 14267 - DNA, 169 bp, Staphylococcus aureus; identical to SEQ ID NO: 6415

SEQ ID NO: 14268 - DNA, 169 bp, Staphylococcus aureus; identical to SEQ ID NO: 6416

SEQ ID NO: 14269 - DNA, 293 bp, Staphylococcus aureus; identical to SEQ ID NO: 6417

SEQ ID NO: 14270 - DNA, 293 bp, Staphylococcus aureus; identical to SEQ ID NO: 6418

SEQ ID NO: 14271 - DNA, 498 bp, Staphylococcus aureus; identical to SEQ ID NO: 6419

SEQ ID NO: 14272 - DNA, 498 bp, Staphylococcus aureus; identical to SEQ ID NO: 6420

SEQ ID NO: 14273 - DNA, 155 bp, Staphylococcus aureus; identical to SEQ ID NO: 6421

SEQ ID NO: 14274 - DNA, 155 bp, Staphylococcus aureus; identical to SEQ ID NO: 6422

SEQ ID NO: 14275 - DNA, 189 bp, Staphylococcus aureus; identical to SEQ ID NO: 6423

SEQ ID NO: 14276 - DNA, 189 bp, Staphylococcus aureus; identical to SEQ ID NO: 6424

SEQ ID NO: 14277 - DNA, 347 bp, Staphylococcus aureus; identical to SEQ ID NO: 6425

SEQ ID NO: 14278 - DNA, 347 bp, Staphylococcus aureus; identical to SEQ ID NO: 6426

SEQ ID NO: 14279 - DNA, 347 bp, Staphylococcus aureus; identical to SEQ ID NO: 6427

SEQ ID NO: 14280 - DNA, 347 bp, Staphylococcus aureus; identical to SEQ ID NO: 6428

SEQ ID NO: 14281 - DNA, 268 bp, Staphylococcus aureus; identical to SEQ ID NO: 6429

SEQ ID NO: 14282 - DNA, 268 bp, Staphylococcus aureus; identical to SEQ ID NO: 6430

SEQ ID NO: 14283 - DNA, 194 bp, Staphylococcus aureus; identical to SEQ ID NO: 6431

SEQ ID NO: 14284 - DNA, 194 bp, Staphylococcus aureus; identical to SEQ ID NO: 6432

SEQ ID NO: 14285 - DNA, 449 bp, Staphylococcus aureus; identical to SEQ ID NO: 6433

SEQ ID NO: 14286 - DNA, 449 bp, Staphylococcus aureus; identical to SEQ ID NO: 6434

SEQ ID NO: 14287 - DNA, 103 bp, Staphylococcus aureus; identical to SEQ ID NO: 6435

SEQ ID NO: 14288 - DNA, 103 bp, Staphylococcus aureus; identical to SEQ ID NO: 6436

SEQ ID NO: 14289 - DNA, 67 bp, Staphylococcus aureus; identical to SEQ ID NO: 6437

SEQ ID NO: 14290 - DNA, 67 bp, Staphylococcus aureus; identical to SEQ ID NO: 6438

SEQ ID NO: 14291 - DNA, 204 bp, Staphylococcus aureus; identical to SEQ ID NO: 6439

SEQ ID NO: 14292 - DNA, 204 bp, Staphylococcus aureus; identical to SEQ ID NO: 6440

SEQ ID NO: 14293 - DNA, 304 bp, Staphylococcus aureus; identical to SEQ ID NO: 6441

SEQ ID NO: 14294 - DNA, 304 bp, Staphylococcus aureus; identical to SEQ ID NO: 6442

SEQ ID NO: 14295 - DNA, 123 bp, Staphylococcus aureus; identical to SEQ ID NO: 6443

SEQ ID NO: 14296 - DNA, 123 bp, Staphylococcus aureus; identical to SEQ ID NO: 6444

SEQ ID NO: 14297 - DNA, 92 bp, Staphylococcus aureus; identical to SEQ ID NO: 6445

SEQ ID NO: 14298 - DNA, 92 bp, Staphylococcus aureus; identical to SEQ ID NO: 6446

SEQ ID NO: 14299 - DNA, 245 bp, Staphylococcus aureus; identical to SEQ ID NO: 6447

SEQ ID NO: 14300 - DNA, 245 bp, Staphylococcus aureus; identical to SEQ ID NO: 6448

SEQ ID NO: 14301 - DNA, 87 bp, Staphylococcus aureus; identical to SEQ ID NO: 6449

SEQ ID NO: 14302 - DNA, 87 bp, Staphylococcus aureus; identical to SEQ ID NO: 6450

SEQ ID NO: 14303 - DNA, 80 bp, Staphylococcus aureus; identical to SEQ ID NO: 6451

SEQ ID NO: 14304 - DNA, 80 bp, Staphylococcus aureus; identical to SEQ ID NO: 6452

SEQ ID NO: 14305 - DNA, 97 bp, Staphylococcus aureus; identical to SEQ ID NO: 6453

SEQ ID NO: 14306 - DNA, 97 bp, Staphylococcus aureus; identical to SEQ ID NO: 6454

SEQ ID NO: 14307 - DNA, 112 bp, Staphylococcus aureus; identical to SEQ ID NO: 6455

SEQ ID NO: 14308 - DNA, 112 bp, Staphylococcus aureus; identical to SEQ ID NO: 6456

SEQ ID NO: 14309 - DNA, 76 bp, Staphylococcus aureus; identical to SEQ ID NO: 6457

SEQ ID NO: 14310 - DNA, 76 bp, Staphylococcus aureus; identical to SEQ ID NO: 6458

SEQ ID NO: 14311 - DNA, 136 bp, Staphylococcus aureus; identical to SEQ ID NO: 6459

SEQ ID NO: 14312 - DNA, 136 bp, Staphylococcus aureus; identical to SEQ ID NO: 6460

SEQ ID NO: 14313 - DNA, 243 bp, Staphylococcus aureus; identical to SEQ ID NO: 6461

SEQ ID NO: 14314 - DNA, 243 bp, Staphylococcus aureus; identical to SEQ ID NO: 6462

SEQ ID NO: 14315 - DNA, 86 bp, Staphylococcus aureus; identical to SEQ ID NO: 6463

SEQ ID NO: 14316 - DNA, 86 bp, Staphylococcus aureus; identical to SEQ ID NO: 6464

SEQ ID NO: 14317 - DNA, 151 bp, Staphylococcus aureus; identical to SEQ ID NO: 6465

SEQ ID NO: 14318 - DNA, 151 bp, Staphylococcus aureus; identical to SEQ ID NO: 6466

SEQ ID NO: 14319 - DNA, 114 bp, Staphylococcus aureus; identical to SEQ ID NO: 6467

SEQ ID NO: 14320 - DNA, 114 bp, Staphylococcus aureus; identical to SEQ ID NO: 6468

SEQ ID NO: 14321 - DNA, 67 bp, Staphylococcus aureus; identical to SEQ ID NO: 6469

SEQ ID NO: 14322 - DNA, 67 bp, Staphylococcus aureus; identical to SEQ ID NO: 6470

SEQ ID NO: 14323 - DNA, 106 bp, Staphylococcus aureus; identical to SEQ ID NO: 6471

SEQ ID NO: 14324 - DNA, 106 bp, Staphylococcus aureus; identical to SEQ ID NO: 6472

SEQ ID NO: 14325 - DNA, 127 bp, Staphylococcus aureus; identical to SEQ ID NO: 6473

SEQ ID NO: 14326 - DNA, 127 bp, Staphylococcus aureus; identical to SEQ ID NO: 6474

SEQ ID NO: 14327 - DNA, 171 bp, Staphylococcus aureus; identical to SEQ ID NO: 6475

SEQ ID NO: 14328 - DNA, 171 bp, Staphylococcus aureus; identical to SEQ ID NO: 6476

SEQ ID NO: 14329 - DNA, 93 bp, Staphylococcus aureus; identical to SEQ ID NO: 6477

SEQ ID NO: 14330 - DNA, 93 bp, Staphylococcus aureus; identical to SEQ ID NO: 6478

SEQ ID NO: 14331 - DNA, 381 bp, Staphylococcus aureus; identical to SEQ ID NO: 6479

SEQ ID NO: 14332 - DNA, 381 bp, Staphylococcus aureus; identical to SEQ ID NO: 6480

SEQ ID NO: 14333 - DNA, 130 bp, Staphylococcus aureus; identical to SEQ ID NO: 6481

SEQ ID NO: 14334 - DNA, 130 bp, Staphylococcus aureus; identical to SEQ ID NO: 6482

SEQ ID NO: 14335 - DNA, 110 bp, Staphylococcus aureus; identical to SEQ ID NO: 6483

SEQ ID NO: 14336 - DNA, 110 bp, Staphylococcus aureus; identical to SEQ ID NO: 6484

SEQ ID NO: 14337 - DNA, 439 bp, Staphylococcus aureus; identical to SEQ ID NO: 6485

SEQ ID NO: 14338 - DNA, 439 bp, Staphylococcus aureus; identical to SEQ ID NO: 6486

SEQ ID NO: 14339 - DNA, 168 bp, Staphylococcus aureus; identical to SEQ ID NO: 6487

SEQ ID NO: 14340 - DNA, 168 bp, Staphylococcus aureus; identical to SEQ ID NO: 6488

SEQ ID NO: 14341 - DNA, 97 bp, Staphylococcus aureus; identical to SEQ ID NO: 6489

SEQ ID NO: 14342 - DNA, 97 bp, Staphylococcus aureus; identical to SEQ ID NO: 6490

SEQ ID NO: 14343 - DNA, 76 bp, Staphylococcus aureus; identical to SEQ ID NO: 6491

SEQ ID NO: 14344 - DNA, 76 bp, Staphylococcus aureus; identical to SEQ ID NO: 6492

SEQ ID NO: 14345 - DNA, 241 bp, Staphylococcus aureus; identical to SEQ ID NO: 6493

SEQ ID NO: 14346 - DNA, 241 bp, Staphylococcus aureus; identical to SEQ ID NO: 6494

SEQ ID NO: 14347 - DNA, 693 bp, Staphylococcus aureus; identical to SEQ ID NO: 6495

SEQ ID NO: 14348 - DNA, 693 bp, Staphylococcus aureus; identical to SEQ ID NO: 6496

SEQ ID NO: 14349 - DNA, 73 bp, Staphylococcus aureus; identical to SEQ ID NO: 6497

SEQ ID NO: 14350 - DNA, 73 bp, Staphylococcus aureus; identical to SEQ ID NO: 6498

SEQ ID NO: 14351 - DNA, 73 bp, Staphylococcus aureus; identical to SEQ ID NO: 6499

SEQ ID NO: 14352 - DNA, 73 bp, Staphylococcus aureus; identical to SEQ ID NO: 6500

SEQ ID NO: 14353 - DNA, 99 bp, Staphylococcus aureus; identical to SEQ ID NO: 6501

SEQ ID NO: 14354 - DNA, 99 bp, Staphylococcus aureus; identical to SEQ ID NO: 6502

SEQ ID NO: 14355 - DNA, 64 bp, Staphylococcus aureus; identical to SEQ ID NO: 6503

SEQ ID NO: 14356 - DNA, 64 bp, Staphylococcus aureus; identical to SEQ ID NO: 6504

SEQ ID NO: 14357 - DNA, 86 bp, Staphylococcus aureus; identical to SEQ ID NO: 6505

SEQ ID NO: 14358 - DNA, 86 bp, Staphylococcus aureus; identical to SEQ ID NO: 6506

SEQ ID NO: 14359 - DNA, 124 bp, Staphylococcus aureus; identical to SEQ ID NO: 6507

SEQ ID NO: 14360 - DNA, 124 bp, Staphylococcus aureus; identical to SEQ ID NO: 6508

SEQ ID NO: 14361 - DNA, 59 bp, Staphylococcus aureus; identical to SEQ ID NO: 6509

SEQ ID NO: 14362 - DNA, 59 bp, Staphylococcus aureus; identical to SEQ ID NO: 6510

SEQ ID NO: 14363 - DNA, 151 bp, Staphylococcus aureus; identical to SEQ ID NO: 6511

SEQ ID NO: 14364 - DNA, 151 bp, Staphylococcus aureus; identical to SEQ ID NO: 6512

SEQ ID NO: 14365 - DNA, 344 bp, Staphylococcus aureus; identical to SEQ ID NO: 6513

SEQ ID NO: 14366 - DNA, 344 bp, Staphylococcus aureus; identical to SEQ ID NO: 6514

SEQ ID NO: 14367 - DNA, 113 bp, Staphylococcus aureus; identical to SEQ ID NO: 6515

SEQ ID NO: 14368 - DNA, 113 bp, Staphylococcus aureus; identical to SEQ ID NO: 6516

SEQ ID NO: 14369 - DNA, 257 bp, Staphylococcus aureus; identical to SEQ ID NO: 6517

SEQ ID NO: 14370 - DNA, 257 bp, Staphylococcus aureus; identical to SEQ ID NO: 6518

SEQ ID NO: 14371 - DNA, 190 bp, Staphylococcus aureus; identical to SEQ ID NO: 6519

SEQ ID NO: 14372 - DNA, 190 bp, Staphylococcus aureus; identical to SEQ ID NO: 6520

SEQ ID NO: 14373 - DNA, 365 bp, Staphylococcus aureus; identical to SEQ ID NO: 6521

SEQ ID NO: 14374 - DNA, 365 bp, Staphylococcus aureus; identical to SEQ ID NO: 6522

SEQ ID NO: 14375 - DNA, 116 bp, Staphylococcus aureus; identical to SEQ ID NO: 6523

SEQ ID NO: 14376 - DNA, 116 bp, Staphylococcus aureus; identical to SEQ ID NO: 6524

SEQ ID NO: 14377 - DNA, 325 bp, Staphylococcus aureus; identical to SEQ ID NO: 6525

SEQ ID NO: 14378 - DNA, 325 bp, Staphylococcus aureus; identical to SEQ ID NO: 6526

SEQ ID NO: 14379 - DNA, 290 bp, Staphylococcus aureus; identical to SEQ ID NO: 6527

SEQ ID NO: 14380 - DNA, 290 bp, Staphylococcus aureus; identical to SEQ ID NO: 6528

SEQ ID NO: 14381 - DNA, 109 bp, Staphylococcus aureus; identical to SEQ ID NO: 6529

SEQ ID NO: 14382 - DNA, 109 bp, Staphylococcus aureus; identical to SEQ ID NO: 6530

SEQ ID NO: 14383 - DNA, 122 bp, Staphylococcus aureus; identical to SEQ ID NO: 6531

SEQ ID NO: 14384 - DNA, 122 bp, Staphylococcus aureus; identical to SEQ ID NO: 6532

SEQ ID NO: 14385 - DNA, 510 bp, Staphylococcus aureus; identical to SEQ ID NO: 6533

SEQ ID NO: 14386 - DNA, 510 bp, Staphylococcus aureus; identical to SEQ ID NO: 6534

SEQ ID NO: 14387 - DNA, 111 bp, Staphylococcus aureus; identical to SEQ ID NO: 6535

SEQ ID NO: 14388 - DNA, 111 bp, Staphylococcus aureus; identical to SEQ ID NO: 6536

SEQ ID NO: 14389 - DNA, 121 bp, Staphylococcus aureus; identical to SEQ ID NO: 6537

SEQ ID NO: 14390 - DNA, 121 bp, Staphylococcus aureus; identical to SEQ ID NO: 6538

SEQ ID NO: 14391 - DNA, 480 bp, Staphylococcus aureus; identical to SEQ ID NO: 6539

SEQ ID NO: 14392 - DNA, 480 bp, Staphylococcus aureus; identical to SEQ ID NO: 6540

SEQ ID NO: 14393 - DNA, 522 bp, Staphylococcus aureus; identical to SEQ ID NO: 6541

SEQ ID NO: 14394 - DNA, 522 bp, Staphylococcus aureus; identical to SEQ ID NO: 6542

SEQ ID NO: 14395 - DNA, 86 bp, Staphylococcus aureus; identical to SEQ ID NO: 6543

SEQ ID NO: 14396 - DNA, 86 bp, Staphylococcus aureus; identical to SEQ ID NO: 6544

SEQ ID NO: 14397 - DNA, 275 bp, Staphylococcus aureus; identical to SEQ ID NO: 6545

SEQ ID NO: 14398 - DNA, 275 bp, Staphylococcus aureus; identical to SEQ ID NO: 6546

SEQ ID NO: 14399 - DNA, 121 bp, Staphylococcus aureus; identical to SEQ ID NO: 6547

SEQ ID NO: 14400 - DNA, 121 bp, Staphylococcus aureus; identical to SEQ ID NO: 6548

SEQ ID NO: 14401 - DNA, 112 bp, Staphylococcus aureus; identical to SEQ ID NO: 6549

SEQ ID NO: 14402 - DNA, 112 bp, Staphylococcus aureus; identical to SEQ ID NO: 6550

SEQ ID NO: 14403 - DNA, 295 bp, Staphylococcus aureus; identical to SEQ ID NO: 6551

SEQ ID NO: 14404 - DNA, 295 bp, Staphylococcus aureus; identical to SEQ ID NO: 6552

SEQ ID NO: 14405 - DNA, 439 bp, Staphylococcus aureus; identical to SEQ ID NO: 6553

SEQ ID NO: 14406 - DNA, 439 bp, Staphylococcus aureus; identical to SEQ ID NO: 6554

SEQ ID NO: 14407 - DNA, 259 bp, Staphylococcus aureus; identical to SEQ ID NO: 6555

SEQ ID NO: 14408 - DNA, 259 bp, Staphylococcus aureus; identical to SEQ ID NO: 6556

SEQ ID NO: 14409 - DNA, 177 bp, Staphylococcus aureus; identical to SEQ ID NO: 6557

SEQ ID NO: 14410 - DNA, 177 bp, Staphylococcus aureus; identical to SEQ ID NO: 6558

SEQ ID NO: 14411 - DNA, 313 bp, Staphylococcus aureus; identical to SEQ ID NO: 6559

SEQ ID NO: 14412 - DNA, 313 bp, Staphylococcus aureus; identical to SEQ ID NO: 6560

SEQ ID NO: 14413 - DNA, 62 bp, Staphylococcus aureus; identical to SEQ ID NO: 6561

SEQ ID NO: 14414 - DNA, 62 bp, Staphylococcus aureus; identical to SEQ ID NO: 6562

SEQ ID NO: 14415 - DNA, 211 bp, Staphylococcus aureus; identical to SEQ ID NO: 6563

SEQ ID NO: 14416 - DNA, 211 bp, Staphylococcus aureus; identical to SEQ ID NO: 6564

SEQ ID NO: 14417 - DNA, 118 bp, Staphylococcus aureus; identical to SEQ ID NO: 6565

SEQ ID NO: 14418 - DNA, 118 bp, Staphylococcus aureus; identical to SEQ ID NO: 6566

SEQ ID NO: 14419 - DNA, 269 bp, Staphylococcus aureus; identical to SEQ ID NO: 6567

SEQ ID NO: 14420 - DNA, 269 bp, Staphylococcus aureus; identical to SEQ ID NO: 6568

SEQ ID NO: 14421 - DNA, 123 bp, Staphylococcus aureus; identical to SEQ ID NO: 6569

SEQ ID NO: 14422 - DNA, 123 bp, Staphylococcus aureus; identical to SEQ ID NO: 6570

SEQ ID NO: 14423 - DNA, 77 bp, Staphylococcus aureus; identical to SEQ ID NO: 6571

SEQ ID NO: 14424 - DNA, 77 bp, Staphylococcus aureus; identical to SEQ ID NO: 6572

SEQ ID NO: 14425 - DNA, 158 bp, Staphylococcus aureus; identical to SEQ ID NO: 6573

SEQ ID NO: 14426 - DNA, 158 bp, Staphylococcus aureus; identical to SEQ ID NO: 6574

SEQ ID NO: 14427 - DNA, 311 bp, Staphylococcus aureus; identical to SEQ ID NO: 6575

SEQ ID NO: 14428 - DNA, 311 bp, Staphylococcus aureus; identical to SEQ ID NO: 6576

SEQ ID NO: 14429 - DNA, 74 bp, Staphylococcus aureus; identical to SEQ ID NO: 6577

SEQ ID NO: 14430 - DNA, 74 bp, Staphylococcus aureus; identical to SEQ ID NO: 6578

SEQ ID NO: 14431 - DNA, 197 bp, Staphylococcus aureus; identical to SEQ ID NO: 6579

SEQ ID NO: 14432 - DNA, 197 bp, Staphylococcus aureus; identical to SEQ ID NO: 6580

SEQ ID NO: 14433 - DNA, 326 bp, Staphylococcus aureus; identical to SEQ ID NO: 6581

SEQ ID NO: 14434 - DNA, 326 bp, Staphylococcus aureus; identical to SEQ ID NO: 6582

SEQ ID NO: 14435 - DNA, 362 bp, Staphylococcus aureus; identical to SEQ ID NO: 6583

SEQ ID NO: 14436 - DNA, 362 bp, Staphylococcus aureus; identical to SEQ ID NO: 6584

SEQ ID NO: 14437 - DNA, 62 bp, Staphylococcus aureus; identical to SEQ ID NO: 6585

SEQ ID NO: 14438 - DNA, 62 bp, Staphylococcus aureus; identical to SEQ ID NO: 6586

SEQ ID NO: 14439 - DNA, 157 bp, Staphylococcus aureus; identical to SEQ ID NO: 6587

SEQ ID NO: 14440 - DNA, 157 bp, Staphylococcus aureus; identical to SEQ ID NO: 6588

SEQ ID NO: 14441 - DNA, 120 bp, Staphylococcus aureus; identical to SEQ ID NO: 6589

SEQ ID NO: 14442 - DNA, 120 bp, Staphylococcus aureus; identical to SEQ ID NO: 6590

SEQ ID NO: 14443 - DNA, 57 bp, Staphylococcus aureus; identical to SEQ ID NO: 6591

SEQ ID NO: 14444 - DNA, 57 bp, Staphylococcus aureus; identical to SEQ ID NO: 6592

SEQ ID NO: 14445 - DNA, 82 bp, Staphylococcus aureus; identical to SEQ ID NO: 6593

SEQ ID NO: 14446 - DNA, 82 bp, Staphylococcus aureus; identical to SEQ ID NO: 6594

SEQ ID NO: 14447 - DNA, 435 bp, Staphylococcus aureus; identical to SEQ ID NO: 6595

SEQ ID NO: 14448 - DNA, 435 bp, Staphylococcus aureus; identical to SEQ ID NO: 6596

SEQ ID NO: 14449 - DNA, 308 bp, Staphylococcus aureus; identical to SEQ ID NO: 6597

SEQ ID NO: 14450 - DNA, 308 bp, Staphylococcus aureus; identical to SEQ ID NO: 6598

SEQ ID NO: 14451 - DNA, 150 bp, Staphylococcus aureus; identical to SEQ ID NO: 6599

SEQ ID NO: 14452 - DNA, 150 bp, Staphylococcus aureus; identical to SEQ ID NO: 6600

SEQ ID NO: 14453 - DNA, 206 bp, Staphylococcus aureus; identical to SEQ ID NO: 6601

SEQ ID NO: 14454 - DNA, 206 bp, Staphylococcus aureus; identical to SEQ ID NO: 6602

SEQ ID NO: 14455 - DNA, 195 bp, Staphylococcus aureus; identical to SEQ ID NO: 6603

SEQ ID NO: 14456 - DNA, 195 bp, Staphylococcus aureus; identical to SEQ ID NO: 6604

SEQ ID NO: 14457 - DNA, 201 bp, Staphylococcus aureus; identical to SEQ ID NO: 6605

SEQ ID NO: 14458 - DNA, 201 bp, Staphylococcus aureus; identical to SEQ ID NO: 6606

SEQ ID NO: 14459 - DNA, 154 bp, Staphylococcus aureus; identical to SEQ ID NO: 6607

SEQ ID NO: 14460 - DNA, 154 bp, Staphylococcus aureus; identical to SEQ ID NO: 6608

SEQ ID NO: 14461 - DNA, 637 bp, Staphylococcus aureus; identical to SEQ ID NO: 6609

SEQ ID NO: 14462 - DNA, 637 bp, Staphylococcus aureus; identical to SEQ ID NO: 6610

SEQ ID NO: 14463 - DNA, 494 bp, Staphylococcus aureus; identical to SEQ ID NO: 6611

SEQ ID NO: 14464 - DNA, 494 bp, Staphylococcus aureus; identical to SEQ ID NO: 6612

SEQ ID NO: 14465 - DNA, 249 bp, Staphylococcus aureus; identical to SEQ ID NO: 6613

SEQ ID NO: 14466 - DNA, 249 bp, Staphylococcus aureus; identical to SEQ ID NO: 6614

SEQ ID NO: 14467 - DNA, 50 bp, Staphylococcus aureus; identical to SEQ ID NO: 6615

SEQ ID NO: 14468 - DNA, 50 bp, Staphylococcus aureus; identical to SEQ ID NO: 6616

SEQ ID NO: 14469 - DNA, 402 bp, Staphylococcus aureus; identical to SEQ ID NO: 6617

SEQ ID NO: 14470 - DNA, 402 bp, Staphylococcus aureus; identical to SEQ ID NO: 6618

SEQ ID NO: 14471 - DNA, 282 bp, Staphylococcus aureus; identical to SEQ ID NO: 6619

SEQ ID NO: 14472 - DNA, 282 bp, Staphylococcus aureus; identical to SEQ ID NO: 6620

SEQ ID NO: 14473 - DNA, 153 bp, Staphylococcus aureus; identical to SEQ ID NO: 6621

SEQ ID NO: 14474 - DNA, 153 bp, Staphylococcus aureus; identical to SEQ ID NO: 6622

SEQ ID NO: 14475 - DNA, 280 bp, Staphylococcus aureus; identical to SEQ ID NO: 6623

SEQ ID NO: 14476 - DNA, 280 bp, Staphylococcus aureus; identical to SEQ ID NO: 6624

SEQ ID NO: 14477 - DNA, 214 bp, Staphylococcus aureus; identical to SEQ ID NO: 6625

SEQ ID NO: 14478 - DNA, 214 bp, Staphylococcus aureus; identical to SEQ ID NO: 6626

SEQ ID NO: 14479 - DNA, 55 bp, Staphylococcus aureus; identical to SEQ ID NO: 6627

SEQ ID NO: 14480 - DNA, 55 bp, Staphylococcus aureus; identical to SEQ ID NO: 6628

SEQ ID NO: 14481 - DNA, 400 bp, Staphylococcus aureus; identical to SEQ ID NO: 6629

SEQ ID NO: 14482 - DNA, 400 bp, Staphylococcus aureus; identical to SEQ ID NO: 6630

SEQ ID NO: 14483 - DNA, 94 bp, Staphylococcus aureus; identical to SEQ ID NO: 6631

SEQ ID NO: 14484 - DNA, 94 bp, Staphylococcus aureus; identical to SEQ ID NO: 6632

SEQ ID NO: 14485 - DNA, 57 bp, Staphylococcus aureus; identical to SEQ ID NO: 6633

SEQ ID NO: 14486 - DNA, 57 bp, Staphylococcus aureus; identical to SEQ ID NO: 6634

SEQ ID NO: 14487 - DNA, 162 bp, Staphylococcus aureus; identical to SEQ ID NO: 6635

SEQ ID NO: 14488 - DNA, 162 bp, Staphylococcus aureus; identical to SEQ ID NO: 6636

SEQ ID NO: 14489 - DNA, 123 bp, Staphylococcus aureus; identical to SEQ ID NO: 6637

SEQ ID NO: 14490 - DNA, 123 bp, Staphylococcus aureus; identical to SEQ ID NO: 6638

SEQ ID NO: 14491 - DNA, 133 bp, Staphylococcus aureus; identical to SEQ ID NO: 6639

SEQ ID NO: 14492 - DNA, 133 bp, Staphylococcus aureus; identical to SEQ ID NO: 6640

SEQ ID NO: 14493 - DNA, 141 bp, Staphylococcus aureus; identical to SEQ ID NO: 6641

SEQ ID NO: 14494 - DNA, 141 bp, Staphylococcus aureus; identical to SEQ ID NO: 6642

SEQ ID NO: 14495 - DNA, 110 bp, Staphylococcus aureus; identical to SEQ ID NO: 6643

SEQ ID NO: 14496 - DNA, 110 bp, Staphylococcus aureus; identical to SEQ ID NO: 6644

SEQ ID NO: 14497 - DNA, 508 bp, Staphylococcus aureus; identical to SEQ ID NO: 6645

SEQ ID NO: 14498 - DNA, 508 bp, Staphylococcus aureus; identical to SEQ ID NO: 6646

SEQ ID NO: 14499 - DNA, 204 bp, Staphylococcus aureus; identical to SEQ ID NO: 6647

SEQ ID NO: 14500 - DNA, 204 bp, Staphylococcus aureus; identical to SEQ ID NO: 6648

SEQ ID NO: 14501 - DNA, 120 bp, Staphylococcus aureus; identical to SEQ ID NO: 6649

SEQ ID NO: 14502 - DNA, 120 bp, Staphylococcus aureus; identical to SEQ ID NO: 6650

SEQ ID NO: 14503 - DNA, 294 bp, Staphylococcus aureus; identical to SEQ ID NO: 6651

SEQ ID NO: 14504 - DNA, 294 bp, Staphylococcus aureus; identical to SEQ ID NO: 6652

SEQ ID NO: 14505 - DNA, 237 bp, Staphylococcus aureus; identical to SEQ ID NO: 6653

SEQ ID NO: 14506 - DNA, 237 bp, Staphylococcus aureus; identical to SEQ ID NO: 6654

SEQ ID NO: 14507 - DNA, 103 bp, Staphylococcus aureus; identical to SEQ ID NO: 6655

SEQ ID NO: 14508 - DNA, 103 bp, Staphylococcus aureus; identical to SEQ ID NO: 6656

SEQ ID NO: 14509 - DNA, 101 bp, Staphylococcus aureus; identical to SEQ ID NO: 6657

SEQ ID NO: 14510 - DNA, 101 bp, Staphylococcus aureus; identical to SEQ ID NO: 6658

SEQ ID NO: 14511 - DNA, 68 bp, Staphylococcus aureus; identical to SEQ ID NO: 6659

SEQ ID NO: 14512 - DNA, 68 bp, Staphylococcus aureus; identical to SEQ ID NO: 6660

SEQ ID NO: 14513 - DNA, 178 bp, Staphylococcus aureus; identical to SEQ ID NO: 6661

SEQ ID NO: 14514 - DNA, 178 bp, Staphylococcus aureus; identical to SEQ ID NO: 6662

SEQ ID NO: 14515 - DNA, 355 bp, Staphylococcus aureus; identical to SEQ ID NO: 6663

SEQ ID NO: 14516 - DNA, 355 bp, Staphylococcus aureus; identical to SEQ ID NO: 6664

SEQ ID NO: 14517 - DNA, 162 bp, Staphylococcus aureus; identical to SEQ ID NO: 6665

SEQ ID NO: 14518 - DNA, 162 bp, Staphylococcus aureus; identical to SEQ ID NO: 6666

SEQ ID NO: 14519 - DNA, 452 bp, Staphylococcus aureus; identical to SEQ ID NO: 6667

SEQ ID NO: 14520 - DNA, 452 bp, Staphylococcus aureus; identical to SEQ ID NO: 6668

SEQ ID NO: 14521 - DNA, 195 bp, Staphylococcus aureus; identical to SEQ ID NO: 6669

SEQ ID NO: 14522 - DNA, 195 bp, Staphylococcus aureus; identical to SEQ ID NO: 6670

SEQ ID NO: 14523 - DNA, 119 bp, Staphylococcus aureus; identical to SEQ ID NO: 6671

SEQ ID NO: 14524 - DNA, 119 bp, Staphylococcus aureus; identical to SEQ ID NO: 6672

SEQ ID NO: 14525 - DNA, 138 bp, Staphylococcus aureus; identical to SEQ ID NO: 6673

SEQ ID NO: 14526 - DNA, 138 bp, Staphylococcus aureus; identical to SEQ ID NO: 6674

SEQ ID NO: 14527 - DNA, 158 bp, Staphylococcus aureus; identical to SEQ ID NO: 6675

SEQ ID NO: 14528 - DNA, 158 bp, Staphylococcus aureus; identical to SEQ ID NO: 6676

SEQ ID NO: 14529 - DNA, 150 bp, Staphylococcus aureus; identical to SEQ ID NO: 6677

SEQ ID NO: 14530 - DNA, 150 bp, Staphylococcus aureus; identical to SEQ ID NO: 6678

SEQ ID NO: 14531 - DNA, 257 bp, Staphylococcus aureus; identical to SEQ ID NO: 6679

SEQ ID NO: 14532 - DNA, 257 bp, Staphylococcus aureus; identical to SEQ ID NO: 6680

SEQ ID NO: 14533 - DNA, 379 bp, Staphylococcus aureus; identical to SEQ ID NO: 6681

SEQ ID NO: 14534 - DNA, 379 bp, Staphylococcus aureus; identical to SEQ ID NO: 6682

SEQ ID NO: 14535 - DNA, 50 bp, Staphylococcus aureus; identical to SEQ ID NO: 6683

SEQ ID NO: 14536 - DNA, 50 bp, Staphylococcus aureus; identical to SEQ ID NO: 6684

SEQ ID NO: 14537 - DNA, 90 bp, Staphylococcus aureus; identical to SEQ ID NO: 6685

SEQ ID NO: 14538 - DNA, 90 bp, Staphylococcus aureus; identical to SEQ ID NO: 6686

SEQ ID NO: 14539 - DNA, 92 bp, Staphylococcus aureus; identical to SEQ ID NO: 6687

SEQ ID NO: 14540 - DNA, 92 bp, Staphylococcus aureus; identical to SEQ ID NO: 6688

SEQ ID NO: 14541 - DNA, 214 bp, Staphylococcus aureus; identical to SEQ ID NO: 6689

SEQ ID NO: 14542 - DNA, 214 bp, Staphylococcus aureus; identical to SEQ ID NO: 6690

SEQ ID NO: 14543 - DNA, 740 bp, Staphylococcus aureus; identical to SEQ ID NO: 6691

SEQ ID NO: 14544 - DNA, 740 bp, Staphylococcus aureus; identical to SEQ ID NO: 6692

SEQ ID NO: 14545 - DNA, 96 bp, Staphylococcus aureus; identical to SEQ ID NO: 6693

SEQ ID NO: 14546 - DNA, 96 bp, Staphylococcus aureus; identical to SEQ ID NO: 6694

SEQ ID NO: 14547 - DNA, 80 bp, Staphylococcus aureus; identical to SEQ ID NO: 6695

SEQ ID NO: 14548 - DNA, 80 bp, Staphylococcus aureus; identical to SEQ ID NO: 6696

SEQ ID NO: 14549 - DNA, 209 bp, Staphylococcus aureus; identical to SEQ ID NO: 6697

SEQ ID NO: 14550 - DNA, 209 bp, Staphylococcus aureus; identical to SEQ ID NO: 6698

SEQ ID NO: 14551 - DNA, 189 bp, Staphylococcus aureus; identical to SEQ ID NO: 6699

SEQ ID NO: 14552 - DNA, 189 bp, Staphylococcus aureus; identical to SEQ ID NO: 6700

SEQ ID NO: 14553 - DNA, 290 bp, Staphylococcus aureus; identical to SEQ ID NO: 6701

SEQ ID NO: 14554 - DNA, 290 bp, Staphylococcus aureus; identical to SEQ ID NO: 6702

SEQ ID NO: 14555 - DNA, 105 bp, Staphylococcus aureus; identical to SEQ ID NO: 6703

SEQ ID NO: 14556 - DNA, 105 bp, Staphylococcus aureus; identical to SEQ ID NO: 6704

SEQ ID NO: 14557 - DNA, 72 bp, Staphylococcus aureus; identical to SEQ ID NO: 6705

SEQ ID NO: 14558 - DNA, 72 bp, Staphylococcus aureus; identical to SEQ ID NO: 6706

SEQ ID NO: 14559 - DNA, 151 bp, Staphylococcus aureus; identical to SEQ ID NO: 6707

SEQ ID NO: 14560 - DNA, 151 bp, Staphylococcus aureus; identical to SEQ ID NO: 6708

SEQ ID NO: 14561 - DNA, 260 bp, Staphylococcus aureus; identical to SEQ ID NO: 6709

SEQ ID NO: 14562 - DNA, 260 bp, Staphylococcus aureus; identical to SEQ ID NO: 6710

SEQ ID NO: 14563 - DNA, 259 bp, Staphylococcus aureus; identical to SEQ ID NO: 6711

SEQ ID NO: 14564 - DNA, 259 bp, Staphylococcus aureus; identical to SEQ ID NO: 6712

SEQ ID NO: 14565 - DNA, 339 bp, Staphylococcus aureus; identical to SEQ ID NO: 6713

SEQ ID NO: 14566 - DNA, 339 bp, Staphylococcus aureus; identical to SEQ ID NO: 6714

SEQ ID NO: 14567 - DNA, 130 bp, Staphylococcus aureus; identical to SEQ ID NO: 6715

SEQ ID NO: 14568 - DNA, 130 bp, Staphylococcus aureus; identical to SEQ ID NO: 6716

SEQ ID NO: 14569 - DNA, 223 bp, Staphylococcus aureus; identical to SEQ ID NO: 6717

SEQ ID NO: 14570 - DNA, 223 bp, Staphylococcus aureus; identical to SEQ ID NO: 6718

SEQ ID NO: 14571 - DNA, 259 bp, Staphylococcus aureus; identical to SEQ ID NO: 6719

SEQ ID NO: 14572 - DNA, 259 bp, Staphylococcus aureus; identical to SEQ ID NO: 6720

SEQ ID NO: 14573 - DNA, 89 bp, Staphylococcus aureus; identical to SEQ ID NO: 6721

SEQ ID NO: 14574 - DNA, 89 bp, Staphylococcus aureus; identical to SEQ ID NO: 6722

SEQ ID NO: 14575 - DNA, 140 bp, Staphylococcus aureus; identical to SEQ ID NO: 6723

SEQ ID NO: 14576 - DNA, 140 bp, Staphylococcus aureus; identical to SEQ ID NO: 6724

SEQ ID NO: 14577 - DNA, 277 bp, Staphylococcus aureus; identical to SEQ ID NO: 6725

SEQ ID NO: 14578 - DNA, 277 bp, Staphylococcus aureus; identical to SEQ ID NO: 6726

SEQ ID NO: 14579 - DNA, 112 bp, Staphylococcus aureus; identical to SEQ ID NO: 6727

SEQ ID NO: 14580 - DNA, 112 bp, Staphylococcus aureus; identical to SEQ ID NO: 6728

SEQ ID NO: 14581 - DNA, 216 bp, Staphylococcus aureus; identical to SEQ ID NO: 6729

SEQ ID NO: 14582 - DNA, 216 bp, Staphylococcus aureus; identical to SEQ ID NO: 6730

SEQ ID NO: 14583 - DNA, 137 bp, Staphylococcus aureus; identical to SEQ ID NO: 6731

SEQ ID NO: 14584 - DNA, 137 bp, Staphylococcus aureus; identical to SEQ ID NO: 6732

SEQ ID NO: 14585 - DNA, 172 bp, Staphylococcus aureus; identical to SEQ ID NO: 6733

SEQ ID NO: 14586 - DNA, 172 bp, Staphylococcus aureus; identical to SEQ ID NO: 6734

SEQ ID NO: 14587 - DNA, 135 bp, Staphylococcus aureus; identical to SEQ ID NO: 6735

SEQ ID NO: 14588 - DNA, 135 bp, Staphylococcus aureus; identical to SEQ ID NO: 6736

SEQ ID NO: 14589 - DNA, 85 bp, Staphylococcus aureus; identical to SEQ ID NO: 6737

SEQ ID NO: 14590 - DNA, 85 bp, Staphylococcus aureus; identical to SEQ ID NO: 6738

SEQ ID NO: 14591 - DNA, 222 bp, Staphylococcus aureus; identical to SEQ ID NO: 6739

SEQ ID NO: 14592 - DNA, 222 bp, Staphylococcus aureus; identical to SEQ ID NO: 6740

SEQ ID NO: 14593 - DNA, 85 bp, Staphylococcus aureus; identical to SEQ ID NO: 6741

SEQ ID NO: 14594 - DNA, 85 bp, Staphylococcus aureus; identical to SEQ ID NO: 6742

SEQ ID NO: 14595 - DNA, 256 bp, Staphylococcus aureus; identical to SEQ ID NO: 6743

SEQ ID NO: 14596 - DNA, 256 bp, Staphylococcus aureus; identical to SEQ ID NO: 6744

SEQ ID NO: 14597 - DNA, 67 bp, Staphylococcus aureus; identical to SEQ ID NO: 6745

SEQ ID NO: 14598 - DNA, 67 bp, Staphylococcus aureus; identical to SEQ ID NO: 6746

SEQ ID NO: 14599 - DNA, 246 bp, Staphylococcus aureus; identical to SEQ ID NO: 6747

SEQ ID NO: 14600 - DNA, 246 bp, Staphylococcus aureus; identical to SEQ ID NO: 6748

SEQ ID NO: 14601 - DNA, 169 bp, Staphylococcus aureus; identical to SEQ ID NO: 6749

SEQ ID NO: 14602 - DNA, 169 bp, Staphylococcus aureus; identical to SEQ ID NO: 6750

SEQ ID NO: 14603 - DNA, 80 bp, Staphylococcus aureus; identical to SEQ ID NO: 6751

SEQ ID NO: 14604 - DNA, 80 bp, Staphylococcus aureus; identical to SEQ ID NO: 6752

SEQ ID NO: 14605 - DNA, 58 bp, Staphylococcus aureus; identical to SEQ ID NO: 6753

SEQ ID NO: 14606 - DNA, 58 bp, Staphylococcus aureus; identical to SEQ ID NO: 6754

SEQ ID NO: 14607 - DNA, 213 bp, Staphylococcus aureus; identical to SEQ ID NO: 6755

SEQ ID NO: 14608 - DNA, 213 bp, Staphylococcus aureus; identical to SEQ ID NO: 6756

SEQ ID NO: 14609 - DNA, 366 bp, Staphylococcus aureus; identical to SEQ ID NO: 6757

SEQ ID NO: 14610 - DNA, 366 bp, Staphylococcus aureus; identical to SEQ ID NO: 6758

SEQ ID NO: 14611 - DNA, 88 bp, Staphylococcus aureus; identical to SEQ ID NO: 6759

SEQ ID NO: 14612 - DNA, 88 bp, Staphylococcus aureus; identical to SEQ ID NO: 6760

SEQ ID NO: 14613 - DNA, 171 bp, Staphylococcus aureus; identical to SEQ ID NO: 6761

SEQ ID NO: 14614 - DNA, 171 bp, Staphylococcus aureus; identical to SEQ ID NO: 6762

SEQ ID NO: 14615 - DNA, 108 bp, Staphylococcus aureus; identical to SEQ ID NO: 6763

SEQ ID NO: 14616 - DNA, 108 bp, Staphylococcus aureus; identical to SEQ ID NO: 6764

SEQ ID NO: 14617 - DNA, 791 bp, Staphylococcus aureus; identical to SEQ ID NO: 6765

SEQ ID NO: 14618 - DNA, 791 bp, Staphylococcus aureus; identical to SEQ ID NO: 6766

SEQ ID NO: 14619 - DNA, 295 bp, Staphylococcus aureus; identical to SEQ ID NO: 6767

SEQ ID NO: 14620 - DNA, 295 bp, Staphylococcus aureus; identical to SEQ ID NO: 6768

SEQ ID NO: 14621 - DNA, 270 bp, Staphylococcus aureus; identical to SEQ ID NO: 6769

SEQ ID NO: 14622 - DNA, 270 bp, Staphylococcus aureus; identical to SEQ ID NO: 6770

SEQ ID NO: 14623 - DNA, 138 bp, Staphylococcus aureus; identical to SEQ ID NO: 6771

SEQ ID NO: 14624 - DNA, 138 bp, Staphylococcus aureus; identical to SEQ ID NO: 6772

SEQ ID NO: 14625 - DNA, 204 bp, Staphylococcus aureus; identical to SEQ ID NO: 6773

SEQ ID NO: 14626 - DNA, 204 bp, Staphylococcus aureus; identical to SEQ ID NO: 6774

SEQ ID NO: 14627 - DNA, 368 bp, Staphylococcus aureus; identical to SEQ ID NO: 6775

SEQ ID NO: 14628 - DNA, 368 bp, Staphylococcus aureus; identical to SEQ ID NO: 6776

SEQ ID NO: 14629 - DNA, 52 bp, Staphylococcus aureus; identical to SEQ ID NO: 6777

SEQ ID NO: 14630 - DNA, 52 bp, Staphylococcus aureus; identical to SEQ ID NO: 6778

SEQ ID NO: 14631 - DNA, 196 bp, Staphylococcus aureus; identical to SEQ ID NO: 6779

SEQ ID NO: 14632 - DNA, 196 bp, Staphylococcus aureus; identical to SEQ ID NO: 6780

SEQ ID NO: 14633 - DNA, 51 bp, Staphylococcus aureus; identical to SEQ ID NO: 6781

SEQ ID NO: 14634 - DNA, 51 bp, Staphylococcus aureus; identical to SEQ ID NO: 6782

SEQ ID NO: 14635 - DNA, 119 bp, Staphylococcus aureus; identical to SEQ ID NO: 6783

SEQ ID NO: 14636 - DNA, 119 bp, Staphylococcus aureus; identical to SEQ ID NO: 6784

SEQ ID NO: 14637 - DNA, 269 bp, Staphylococcus aureus; identical to SEQ ID NO: 6785

SEQ ID NO: 14638 - DNA, 269 bp, Staphylococcus aureus; identical to SEQ ID NO: 6786

SEQ ID NO: 14639 - DNA, 185 bp, Staphylococcus aureus; identical to SEQ ID NO: 6787

SEQ ID NO: 14640 - DNA, 185 bp, Staphylococcus aureus; identical to SEQ ID NO: 6788

SEQ ID NO: 14641 - DNA, 143 bp, Staphylococcus aureus; identical to SEQ ID NO: 6789

SEQ ID NO: 14642 - DNA, 143 bp, Staphylococcus aureus; identical to SEQ ID NO: 6790

SEQ ID NO: 14643 - DNA, 379 bp, Staphylococcus aureus; identical to SEQ ID NO: 6791

SEQ ID NO: 14644 - DNA, 379 bp, Staphylococcus aureus; identical to SEQ ID NO: 6792

SEQ ID NO: 14645 - DNA, 56 bp, Staphylococcus aureus; identical to SEQ ID NO: 6793

SEQ ID NO: 14646 - DNA, 56 bp, Staphylococcus aureus; identical to SEQ ID NO: 6794

SEQ ID NO: 14647 - DNA, 59 bp, Staphylococcus aureus; identical to SEQ ID NO: 6795

SEQ ID NO: 14648 - DNA, 59 bp, Staphylococcus aureus; identical to SEQ ID NO: 6796

SEQ ID NO: 14649 - DNA, 120 bp, Staphylococcus aureus; identical to SEQ ID NO: 6797

SEQ ID NO: 14650 - DNA, 120 bp, Staphylococcus aureus; identical to SEQ ID NO: 6798

SEQ ID NO: 14651 - DNA, 65 bp, Staphylococcus aureus; identical to SEQ ID NO: 6799

SEQ ID NO: 14652 - DNA, 65 bp, Staphylococcus aureus; identical to SEQ ID NO: 6800

SEQ ID NO: 14653 - DNA, 73 bp, Staphylococcus aureus; identical to SEQ ID NO: 6801

SEQ ID NO: 14654 - DNA, 73 bp, Staphylococcus aureus; identical to SEQ ID NO: 6802

SEQ ID NO: 14655 - DNA, 258 bp, Staphylococcus aureus; identical to SEQ ID NO: 6803

SEQ ID NO: 14656 - DNA, 258 bp, Staphylococcus aureus; identical to SEQ ID NO: 6804

SEQ ID NO: 14657 - DNA, 199 bp, Staphylococcus aureus; identical to SEQ ID NO: 6805

SEQ ID NO: 14658 - DNA, 199 bp, Staphylococcus aureus; identical to SEQ ID NO: 6806

SEQ ID NO: 14659 - DNA, 278 bp, Staphylococcus aureus; identical to SEQ ID NO: 6807

SEQ ID NO: 14660 - DNA, 278 bp, Staphylococcus aureus; identical to SEQ ID NO: 6808

SEQ ID NO: 14661 - DNA, 212 bp, Staphylococcus aureus; identical to SEQ ID NO: 6809

SEQ ID NO: 14662 - DNA, 212 bp, Staphylococcus aureus; identical to SEQ ID NO: 6810

SEQ ID NO: 14663 - DNA, 97 bp, Staphylococcus aureus; identical to SEQ ID NO: 6811

SEQ ID NO: 14664 - DNA, 97 bp, Staphylococcus aureus; identical to SEQ ID NO: 6812

SEQ ID NO: 14665 - DNA, 371 bp, Staphylococcus aureus; identical to SEQ ID NO: 6813

SEQ ID NO: 14666 - DNA, 371 bp, Staphylococcus aureus; identical to SEQ ID NO: 6814

SEQ ID NO: 14667 - DNA, 316 bp, Staphylococcus aureus; identical to SEQ ID NO: 6815

SEQ ID NO: 14668 - DNA, 316 bp, Staphylococcus aureus; identical to SEQ ID NO: 6816

SEQ ID NO: 14669 - DNA, 682 bp, Staphylococcus aureus; identical to SEQ ID NO: 6817

SEQ ID NO: 14670 - DNA, 682 bp, Staphylococcus aureus; identical to SEQ ID NO: 6818

SEQ ID NO: 14671 - DNA, 94 bp, Staphylococcus aureus; identical to SEQ ID NO: 6819

SEQ ID NO: 14672 - DNA, 94 bp, Staphylococcus aureus; identical to SEQ ID NO: 6820

SEQ ID NO: 14673 - DNA, 369 bp, Staphylococcus aureus; identical to SEQ ID NO: 6821

SEQ ID NO: 14674 - DNA, 369 bp, Staphylococcus aureus; identical to SEQ ID NO: 6822

SEQ ID NO: 14675 - DNA, 88 bp, Staphylococcus aureus; identical to SEQ ID NO: 6823

SEQ ID NO: 14676 - DNA, 88 bp, Staphylococcus aureus; identical to SEQ ID NO: 6824

SEQ ID NO: 14677 - DNA, 138 bp, Staphylococcus aureus; identical to SEQ ID NO: 6825

SEQ ID NO: 14678 - DNA, 138 bp, Staphylococcus aureus; identical to SEQ ID NO: 6826

SEQ ID NO: 14679 - DNA, 52 bp, Staphylococcus aureus; identical to SEQ ID NO: 6827

SEQ ID NO: 14680 - DNA, 52 bp, Staphylococcus aureus; identical to SEQ ID NO: 6828

SEQ ID NO: 14681 - DNA, 55 bp, Staphylococcus aureus; identical to SEQ ID NO: 6829

SEQ ID NO: 14682 - DNA, 55 bp, Staphylococcus aureus; identical to SEQ ID NO: 6830

SEQ ID NO: 14683 - DNA, 193 bp, Staphylococcus aureus; identical to SEQ ID NO: 6831

SEQ ID NO: 14684 - DNA, 193 bp, Staphylococcus aureus; identical to SEQ ID NO: 6832

SEQ ID NO: 14685 - DNA, 108 bp, Staphylococcus aureus; identical to SEQ ID NO: 6833

SEQ ID NO: 14686 - DNA, 108 bp, Staphylococcus aureus; identical to SEQ ID NO: 6834

SEQ ID NO: 14687 - DNA, 55 bp, Staphylococcus aureus; identical to SEQ ID NO: 6835

SEQ ID NO: 14688 - DNA, 55 bp, Staphylococcus aureus; identical to SEQ ID NO: 6836

SEQ ID NO: 14689 - DNA, 60 bp, Staphylococcus aureus; identical to SEQ ID NO: 6837

SEQ ID NO: 14690 - DNA, 60 bp, Staphylococcus aureus; identical to SEQ ID NO: 6838

SEQ ID NO: 14691 - DNA, 53 bp, Staphylococcus aureus; identical to SEQ ID NO: 6839

SEQ ID NO: 14692 - DNA, 53 bp, Staphylococcus aureus; identical to SEQ ID NO: 6840

SEQ ID NO: 14693 - DNA, 125 bp, Staphylococcus aureus; identical to SEQ ID NO: 6841

SEQ ID NO: 14694 - DNA, 125 bp, Staphylococcus aureus; identical to SEQ ID NO: 6842

SEQ ID NO: 14695 - DNA, 231 bp, Staphylococcus aureus; identical to SEQ ID NO: 6843

SEQ ID NO: 14696 - DNA, 231 bp, Staphylococcus aureus; identical to SEQ ID NO: 6844

SEQ ID NO: 14697 - DNA, 65 bp, Staphylococcus aureus; identical to SEQ ID NO: 6845

SEQ ID NO: 14698 - DNA, 65 bp, Staphylococcus aureus; identical to SEQ ID NO: 6846

SEQ ID NO: 14699 - DNA, 54 bp, Staphylococcus aureus; identical to SEQ ID NO: 6847

SEQ ID NO: 14700 - DNA, 54 bp, Staphylococcus aureus; identical to SEQ ID NO: 6848

SEQ ID NO: 14701 - DNA, 50 bp, Staphylococcus aureus; identical to SEQ ID NO: 6849

SEQ ID NO: 14702 - DNA, 50 bp, Staphylococcus aureus; identical to SEQ ID NO: 6850

SEQ ID NO: 14703 - DNA, 159 bp, Staphylococcus aureus; identical to SEQ ID NO: 6851

SEQ ID NO: 14704 - DNA, 159 bp, Staphylococcus aureus; identical to SEQ ID NO: 6852

SEQ ID NO: 14705 - DNA, 99 bp, Staphylococcus aureus; identical to SEQ ID NO: 6853

SEQ ID NO: 14706 - DNA, 99 bp, Staphylococcus aureus; identical to SEQ ID NO: 6854

SEQ ID NO: 14707 - DNA, 62 bp, Staphylococcus aureus; identical to SEQ ID NO: 6855

SEQ ID NO: 14708 - DNA, 62 bp, Staphylococcus aureus; identical to SEQ ID NO: 6856

SEQ ID NO: 14709 - DNA, 237 bp, Staphylococcus aureus; identical to SEQ ID NO: 6857

SEQ ID NO: 14710 - DNA, 237 bp, Staphylococcus aureus; identical to SEQ ID NO: 6858

SEQ ID NO: 14711 - DNA, 308 bp, Staphylococcus aureus; identical to SEQ ID NO: 6859

SEQ ID NO: 14712 - DNA, 308 bp, Staphylococcus aureus; identical to SEQ ID NO: 6860

SEQ ID NO: 14713 - DNA, 73 bp, Staphylococcus aureus; identical to SEQ ID NO: 6861

SEQ ID NO: 14714 - DNA, 73 bp, Staphylococcus aureus; identical to SEQ ID NO: 6862

SEQ ID NO: 14715 - DNA, 84 bp, Staphylococcus aureus; identical to SEQ ID NO: 6863

SEQ ID NO: 14716 - DNA, 84 bp, Staphylococcus aureus; identical to SEQ ID NO: 6864

SEQ ID NO: 14717 - DNA, 398 bp, Staphylococcus aureus; identical to SEQ ID NO: 6865

SEQ ID NO: 14718 - DNA, 398 bp, Staphylococcus aureus; identical to SEQ ID NO: 6866

SEQ ID NO: 14719 - DNA, 579 bp, Staphylococcus aureus; identical to SEQ ID NO: 6867

SEQ ID NO: 14720 - DNA, 579 bp, Staphylococcus aureus; identical to SEQ ID NO: 6868

SEQ ID NO: 14721 - DNA, 168 bp, Staphylococcus aureus; identical to SEQ ID NO: 6869

SEQ ID NO: 14722 - DNA, 168 bp, Staphylococcus aureus; identical to SEQ ID NO: 6870

SEQ ID NO: 14723 - DNA, 786 bp, Staphylococcus aureus; identical to SEQ ID NO: 6871

SEQ ID NO: 14724 - DNA, 786 bp, Staphylococcus aureus; identical to SEQ ID NO: 6872

SEQ ID NO: 14725 - DNA, 152 bp, Staphylococcus aureus; identical to SEQ ID NO: 6873

SEQ ID NO: 14726 - DNA, 152 bp, Staphylococcus aureus; identical to SEQ ID NO: 6874

SEQ ID NO: 14727 - DNA, 69 bp, Staphylococcus aureus; identical to SEQ ID NO: 6875

SEQ ID NO: 14728 - DNA, 69 bp, Staphylococcus aureus; identical to SEQ ID NO: 6876

SEQ ID NO: 14729 - DNA, 444 bp, Staphylococcus aureus; identical to SEQ ID NO: 6877

SEQ ID NO: 14730 - DNA, 444 bp, Staphylococcus aureus; identical to SEQ ID NO: 6878

SEQ ID NO: 14731 - DNA, 154 bp, Staphylococcus aureus; identical to SEQ ID NO: 6879

SEQ ID NO: 14732 - DNA, 154 bp, Staphylococcus aureus; identical to SEQ ID NO: 6880

SEQ ID NO: 14733 - DNA, 449 bp, Staphylococcus aureus; identical to SEQ ID NO: 6881

SEQ ID NO: 14734 - DNA, 449 bp, Staphylococcus aureus; identical to SEQ ID NO: 6882

SEQ ID NO: 14735 - DNA, 309 bp, Staphylococcus aureus; identical to SEQ ID NO: 6883

SEQ ID NO: 14736 - DNA, 309 bp, Staphylococcus aureus; identical to SEQ ID NO: 6884

SEQ ID NO: 14737 - DNA, 64 bp, Staphylococcus aureus; identical to SEQ ID NO: 6885

SEQ ID NO: 14738 - DNA, 64 bp, Staphylococcus aureus; identical to SEQ ID NO: 6886

SEQ ID NO: 14739 - DNA, 68 bp, Staphylococcus aureus; identical to SEQ ID NO: 6887

SEQ ID NO: 14740 - DNA, 68 bp, Staphylococcus aureus; identical to SEQ ID NO: 6888

SEQ ID NO: 14741 - DNA, 75 bp, Staphylococcus aureus; identical to SEQ ID NO: 6889

SEQ ID NO: 14742 - DNA, 75 bp, Staphylococcus aureus; identical to SEQ ID NO: 6890

SEQ ID NO: 14743 - DNA, 174 bp, Staphylococcus aureus; identical to SEQ ID NO: 6891

SEQ ID NO: 14744 - DNA, 174 bp, Staphylococcus aureus; identical to SEQ ID NO: 6892

SEQ ID NO: 14745 - DNA, 196 bp, Staphylococcus aureus; identical to SEQ ID NO: 6893

SEQ ID NO: 14746 - DNA, 196 bp, Staphylococcus aureus; identical to SEQ ID NO: 6894

SEQ ID NO: 14747 - DNA, 142 bp, Staphylococcus aureus; identical to SEQ ID NO: 6895

SEQ ID NO: 14748 - DNA, 142 bp, Staphylococcus aureus; identical to SEQ ID NO: 6896

SEQ ID NO: 14749 - DNA, 67 bp, Staphylococcus aureus; identical to SEQ ID NO: 6897

SEQ ID NO: 14750 - DNA, 67 bp, Staphylococcus aureus; identical to SEQ ID NO: 6898

SEQ ID NO: 14751 - DNA, 86 bp, Staphylococcus aureus; identical to SEQ ID NO: 6899

SEQ ID NO: 14752 - DNA, 86 bp, Staphylococcus aureus; identical to SEQ ID NO: 6900

SEQ ID NO: 14753 - DNA, 422 bp, Staphylococcus aureus; identical to SEQ ID NO: 6901

SEQ ID NO: 14754 - DNA, 422 bp, Staphylococcus aureus; identical to SEQ ID NO: 6902

SEQ ID NO: 14755 - DNA, 182 bp, Staphylococcus aureus; identical to SEQ ID NO: 6903

SEQ ID NO: 14756 - DNA, 182 bp, Staphylococcus aureus; identical to SEQ ID NO: 6904

SEQ ID NO: 14757 - DNA, 72 bp, Staphylococcus aureus; identical to SEQ ID NO: 6905

SEQ ID NO: 14758 - DNA, 72 bp, Staphylococcus aureus; identical to SEQ ID NO: 6906

SEQ ID NO: 14759 - DNA, 190 bp, Staphylococcus aureus; identical to SEQ ID NO: 6907

SEQ ID NO: 14760 - DNA, 190 bp, Staphylococcus aureus; identical to SEQ ID NO: 6908

SEQ ID NO: 14761 - DNA, 148 bp, Staphylococcus aureus; identical to SEQ ID NO: 6909

SEQ ID NO: 14762 - DNA, 148 bp, Staphylococcus aureus; identical to SEQ ID NO: 6910

SEQ ID NO: 14763 - DNA, 130 bp, Staphylococcus aureus; identical to SEQ ID NO: 6911

SEQ ID NO: 14764 - DNA, 130 bp, Staphylococcus aureus; identical to SEQ ID NO: 6912

SEQ ID NO: 14765 - DNA, 91 bp, Staphylococcus aureus; identical to SEQ ID NO: 6913

SEQ ID NO: 14766 - DNA, 91 bp, Staphylococcus aureus; identical to SEQ ID NO: 6914

SEQ ID NO: 14767 - DNA, 59 bp, Staphylococcus aureus; identical to SEQ ID NO: 6915

SEQ ID NO: 14768 - DNA, 59 bp, Staphylococcus aureus; identical to SEQ ID NO: 6916

SEQ ID NO: 14769 - DNA, 303 bp, Staphylococcus aureus; identical to SEQ ID NO: 6917

SEQ ID NO: 14770 - DNA, 303 bp, Staphylococcus aureus; identical to SEQ ID NO: 6918

SEQ ID NO: 14771 - DNA, 252 bp, Staphylococcus aureus; identical to SEQ ID NO: 6919

SEQ ID NO: 14772 - DNA, 252 bp, Staphylococcus aureus; identical to SEQ ID NO: 6920

SEQ ID NO: 14773 - DNA, 361 bp, Staphylococcus aureus; identical to SEQ ID NO: 6921

SEQ ID NO: 14774 - DNA, 361 bp, Staphylococcus aureus; identical to SEQ ID NO: 6922

SEQ ID NO: 14775 - DNA, 58 bp, Staphylococcus aureus; identical to SEQ ID NO: 6923

SEQ ID NO: 14776 - DNA, 58 bp, Staphylococcus aureus; identical to SEQ ID NO: 6924

SEQ ID NO: 14777 - DNA, 153 bp, Staphylococcus aureus; identical to SEQ ID NO: 6925

SEQ ID NO: 14778 - DNA, 153 bp, Staphylococcus aureus; identical to SEQ ID NO: 6926

SEQ ID NO: 14779 - DNA, 510 bp, Staphylococcus aureus; identical to SEQ ID NO: 6927

SEQ ID NO: 14780 - DNA, 510 bp, Staphylococcus aureus; identical to SEQ ID NO: 6928

SEQ ID NO: 14781 - DNA, 65 bp, Staphylococcus aureus; identical to SEQ ID NO: 6929

SEQ ID NO: 14782 - DNA, 65 bp, Staphylococcus aureus; identical to SEQ ID NO: 6930

SEQ ID NO: 14783 - DNA, 52 bp, Staphylococcus aureus; identical to SEQ ID NO: 6931

SEQ ID NO: 14784 - DNA, 52 bp, Staphylococcus aureus; identical to SEQ ID NO: 6932

SEQ ID NO: 14785 - DNA, 150 bp, Staphylococcus aureus; identical to SEQ ID NO: 6933

SEQ ID NO: 14786 - DNA, 150 bp, Staphylococcus aureus; identical to SEQ ID NO: 6934

SEQ ID NO: 14787 - DNA, 92 bp, Staphylococcus aureus; identical to SEQ ID NO: 6935

SEQ ID NO: 14788 - DNA, 92 bp, Staphylococcus aureus; identical to SEQ ID NO: 6936

SEQ ID NO: 14789 - DNA, 118 bp, Staphylococcus aureus; identical to SEQ ID NO: 6937

SEQ ID NO: 14790 - DNA, 118 bp, Staphylococcus aureus; identical to SEQ ID NO: 6938

SEQ ID NO: 14791 - DNA, 573 bp, Staphylococcus aureus; identical to SEQ ID NO: 6939

SEQ ID NO: 14792 - DNA, 573 bp, Staphylococcus aureus; identical to SEQ ID NO: 6940

SEQ ID NO: 14793 - DNA, 433 bp, Staphylococcus aureus; identical to SEQ ID NO: 6941

SEQ ID NO: 14794 - DNA, 433 bp, Staphylococcus aureus; identical to SEQ ID NO: 6942

SEQ ID NO: 14795 - DNA, 118 bp, Staphylococcus aureus; identical to SEQ ID NO: 6943

SEQ ID NO: 14796 - DNA, 118 bp, Staphylococcus aureus; identical to SEQ ID NO: 6944

SEQ ID NO: 14797 - DNA, 286 bp, Staphylococcus aureus; identical to SEQ ID NO: 6945

SEQ ID NO: 14798 - DNA, 286 bp, Staphylococcus aureus; identical to SEQ ID NO: 6946

SEQ ID NO: 14799 - DNA, 84 bp, Staphylococcus aureus; identical to SEQ ID NO: 6947

SEQ ID NO: 14800 - DNA, 84 bp, Staphylococcus aureus; identical to SEQ ID NO: 6948

SEQ ID NO: 14801 - DNA, 65 bp, Staphylococcus aureus; identical to SEQ ID NO: 6949

SEQ ID NO: 14802 - DNA, 65 bp, Staphylococcus aureus; identical to SEQ ID NO: 6950

SEQ ID NO: 14803 - DNA, 98 bp, Staphylococcus aureus; identical to SEQ ID NO: 6951

SEQ ID NO: 14804 - DNA, 98 bp, Staphylococcus aureus; identical to SEQ ID NO: 6952

SEQ ID NO: 14805 - DNA, 66 bp, Staphylococcus aureus; identical to SEQ ID NO: 6953

SEQ ID NO: 14806 - DNA, 66 bp, Staphylococcus aureus; identical to SEQ ID NO: 6954

SEQ ID NO: 14807 - DNA, 175 bp, Staphylococcus aureus; identical to SEQ ID NO: 6955

SEQ ID NO: 14808 - DNA, 175 bp, Staphylococcus aureus; identical to SEQ ID NO: 6956

SEQ ID NO: 14809 - DNA, 62 bp, Staphylococcus aureus; identical to SEQ ID NO: 6957

SEQ ID NO: 14810 - DNA, 62 bp, Staphylococcus aureus; identical to SEQ ID NO: 6958

SEQ ID NO: 14811 - DNA, 516 bp, Staphylococcus aureus; identical to SEQ ID NO: 6959

SEQ ID NO: 14812 - DNA, 516 bp, Staphylococcus aureus; identical to SEQ ID NO: 6960

SEQ ID NO: 14813 - DNA, 206 bp, Staphylococcus aureus; identical to SEQ ID NO: 6961

SEQ ID NO: 14814 - DNA, 206 bp, Staphylococcus aureus; identical to SEQ ID NO: 6962

SEQ ID NO: 14815 - DNA, 263 bp, Staphylococcus aureus; identical to SEQ ID NO: 6963

SEQ ID NO: 14816 - DNA, 263 bp, Staphylococcus aureus; identical to SEQ ID NO: 6964

SEQ ID NO: 14817 - DNA, 127 bp, Staphylococcus aureus; identical to SEQ ID NO: 6965

SEQ ID NO: 14818 - DNA, 127 bp, Staphylococcus aureus; identical to SEQ ID NO: 6966

SEQ ID NO: 14819 - DNA, 159 bp, Staphylococcus aureus; identical to SEQ ID NO: 6967

SEQ ID NO: 14820 - DNA, 159 bp, Staphylococcus aureus; identical to SEQ ID NO: 6968

SEQ ID NO: 14821 - DNA, 85 bp, Staphylococcus aureus; identical to SEQ ID NO: 6969

SEQ ID NO: 14822 - DNA, 85 bp, Staphylococcus aureus; identical to SEQ ID NO: 6970

SEQ ID NO: 14823 - DNA, 103 bp, Staphylococcus aureus; identical to SEQ ID NO: 6971

SEQ ID NO: 14824 - DNA, 103 bp, Staphylococcus aureus; identical to SEQ ID NO: 6972

SEQ ID NO: 14825 - DNA, 155 bp, Staphylococcus aureus; identical to SEQ ID NO: 6973

SEQ ID NO: 14826 - DNA, 155 bp, Staphylococcus aureus; identical to SEQ ID NO: 6974

SEQ ID NO: 14827 - DNA, 388 bp, Staphylococcus aureus; identical to SEQ ID NO: 6975

SEQ ID NO: 14828 - DNA, 388 bp, Staphylococcus aureus; identical to SEQ ID NO: 6976

SEQ ID NO: 14829 - DNA, 131 bp, Staphylococcus aureus; identical to SEQ ID NO: 6977

SEQ ID NO: 14830 - DNA, 131 bp, Staphylococcus aureus; identical to SEQ ID NO: 6978

SEQ ID NO: 14831 - DNA, 58 bp, Staphylococcus aureus; identical to SEQ ID NO: 6979

SEQ ID NO: 14832 - DNA, 58 bp, Staphylococcus aureus; identical to SEQ ID NO: 6980

SEQ ID NO: 14833 - DNA, 65 bp, Staphylococcus aureus; identical to SEQ ID NO: 6981

SEQ ID NO: 14834 - DNA, 65 bp, Staphylococcus aureus; identical to SEQ ID NO: 6982

SEQ ID NO: 14835 - DNA, 561 bp, Staphylococcus aureus; identical to SEQ ID NO: 6983

SEQ ID NO: 14836 - DNA, 561 bp, Staphylococcus aureus; identical to SEQ ID NO: 6984

SEQ ID NO: 14837 - DNA, 197 bp, Staphylococcus aureus; identical to SEQ ID NO: 6985

SEQ ID NO: 14838 - DNA, 197 bp, Staphylococcus aureus; identical to SEQ ID NO: 6986

SEQ ID NO: 14839 - DNA, 67 bp, Staphylococcus aureus; identical to SEQ ID NO: 6987

SEQ ID NO: 14840 - DNA, 67 bp, Staphylococcus aureus; identical to SEQ ID NO: 6988

SEQ ID NO: 14841 - DNA, 106 bp, Staphylococcus aureus; identical to SEQ ID NO: 6989

SEQ ID NO: 14842 - DNA, 106 bp, Staphylococcus aureus; identical to SEQ ID NO: 6990

SEQ ID NO: 14843 - DNA, 207 bp, Staphylococcus aureus; identical to SEQ ID NO: 6991

SEQ ID NO: 14844 - DNA, 207 bp, Staphylococcus aureus; identical to SEQ ID NO: 6992

SEQ ID NO: 14845 - DNA, 117 bp, Staphylococcus aureus; identical to SEQ ID NO: 6993

SEQ ID NO: 14846 - DNA, 117 bp, Staphylococcus aureus; identical to SEQ ID NO: 6994

SEQ ID NO: 14847 - DNA, 246 bp, Staphylococcus aureus; identical to SEQ ID NO: 6995

SEQ ID NO: 14848 - DNA, 246 bp, Staphylococcus aureus; identical to SEQ ID NO: 6996

SEQ ID NO: 14849 - DNA, 106 bp, Staphylococcus aureus; identical to SEQ ID NO: 6997

SEQ ID NO: 14850 - DNA, 106 bp, Staphylococcus aureus; identical to SEQ ID NO: 6998

SEQ ID NO: 14851 - DNA, 85 bp, Staphylococcus aureus; identical to SEQ ID NO: 6999

SEQ ID NO: 14852 - DNA, 85 bp, Staphylococcus aureus; identical to SEQ ID NO: 7000

SEQ ID NO: 14853 - DNA, 465 bp, Staphylococcus aureus; identical to SEQ ID NO: 7001

SEQ ID NO: 14854 - DNA, 465 bp, Staphylococcus aureus; identical to SEQ ID NO: 7002

SEQ ID NO: 14855 - DNA, 217 bp, Staphylococcus aureus; identical to SEQ ID NO: 7003

SEQ ID NO: 14856 - DNA, 217 bp, Staphylococcus aureus; identical to SEQ ID NO: 7004

SEQ ID NO: 14857 - DNA, 108 bp, Staphylococcus aureus; identical to SEQ ID NO: 7005

SEQ ID NO: 14858 - DNA, 108 bp, Staphylococcus aureus; identical to SEQ ID NO: 7006

SEQ ID NO: 14859 - DNA, 335 bp, Staphylococcus aureus; identical to SEQ ID NO: 7007

SEQ ID NO: 14860 - DNA, 335 bp, Staphylococcus aureus; identical to SEQ ID NO: 7008

SEQ ID NO: 14861 - DNA, 111 bp, Staphylococcus aureus; identical to SEQ ID NO: 7009

SEQ ID NO: 14862 - DNA, 111 bp, Staphylococcus aureus; identical to SEQ ID NO: 7010

SEQ ID NO: 14863 - DNA, 278 bp, Staphylococcus aureus; identical to SEQ ID NO: 7011

SEQ ID NO: 14864 - DNA, 278 bp, Staphylococcus aureus; identical to SEQ ID NO: 7012

SEQ ID NO: 14865 - DNA, 51 bp, Staphylococcus aureus; identical to SEQ ID NO: 7013

SEQ ID NO: 14866 - DNA, 51 bp, Staphylococcus aureus; identical to SEQ ID NO: 7014

SEQ ID NO: 14867 - DNA, 130 bp, Staphylococcus aureus; identical to SEQ ID NO: 7015

SEQ ID NO: 14868 - DNA, 130 bp, Staphylococcus aureus; identical to SEQ ID NO: 7016

SEQ ID NO: 14869 - DNA, 311 bp, Staphylococcus aureus; identical to SEQ ID NO: 7017

SEQ ID NO: 14870 - DNA, 311 bp, Staphylococcus aureus; identical to SEQ ID NO: 7018

SEQ ID NO: 14871 - DNA, 310 bp, Staphylococcus aureus; identical to SEQ ID NO: 7019

SEQ ID NO: 14872 - DNA, 310 bp, Staphylococcus aureus; identical to SEQ ID NO: 7020

SEQ ID NO: 14873 - DNA, 151 bp, Staphylococcus aureus; identical to SEQ ID NO: 7021

SEQ ID NO: 14874 - DNA, 151 bp, Staphylococcus aureus; identical to SEQ ID NO: 7022

SEQ ID NO: 14875 - DNA, 169 bp, Staphylococcus aureus; identical to SEQ ID NO: 7023

SEQ ID NO: 14876 - DNA, 169 bp, Staphylococcus aureus; identical to SEQ ID NO: 7024

SEQ ID NO: 14877 - DNA, 313 bp, Staphylococcus aureus; identical to SEQ ID NO: 7025

SEQ ID NO: 14878 - DNA, 313 bp, Staphylococcus aureus; identical to SEQ ID NO: 7026

SEQ ID NO: 14879 - DNA, 120 bp, Staphylococcus aureus; identical to SEQ ID NO: 7027

SEQ ID NO: 14880 - DNA, 120 bp, Staphylococcus aureus; identical to SEQ ID NO: 7028

SEQ ID NO: 14881 - DNA, 199 bp, Staphylococcus aureus; identical to SEQ ID NO: 7029

SEQ ID NO: 14882 - DNA, 199 bp, Staphylococcus aureus; identical to SEQ ID NO: 7030

SEQ ID NO: 14883 - DNA, 456 bp, Staphylococcus aureus; identical to SEQ ID NO: 7031

SEQ ID NO: 14884 - DNA, 456 bp, Staphylococcus aureus; identical to SEQ ID NO: 7032

SEQ ID NO: 14885 - DNA, 671 bp, Staphylococcus aureus; identical to SEQ ID NO: 7033

SEQ ID NO: 14886 - DNA, 671 bp, Staphylococcus aureus; identical to SEQ ID NO: 7034

SEQ ID NO: 14887 - DNA, 357 bp, Staphylococcus aureus; identical to SEQ ID NO: 7035

SEQ ID NO: 14888 - DNA, 357 bp, Staphylococcus aureus; identical to SEQ ID NO: 7036

SEQ ID NO: 14889 - DNA, 151 bp, Staphylococcus aureus; identical to SEQ ID NO: 7037

SEQ ID NO: 14890 - DNA, 151 bp, Staphylococcus aureus; identical to SEQ ID NO: 7038

SEQ ID NO: 14891 - DNA, 66 bp, Staphylococcus aureus; identical to SEQ ID NO: 7039

SEQ ID NO: 14892 - DNA, 66 bp, Staphylococcus aureus; identical to SEQ ID NO: 7040

SEQ ID NO: 14893 - DNA, 215 bp, Staphylococcus aureus; identical to SEQ ID NO: 7041

SEQ ID NO: 14894 - DNA, 215 bp, Staphylococcus aureus; identical to SEQ ID NO: 7042

SEQ ID NO: 14895 - DNA, 110 bp, Staphylococcus aureus; identical to SEQ ID NO: 7043

SEQ ID NO: 14896 - DNA, 110 bp, Staphylococcus aureus; identical to SEQ ID NO: 7044

SEQ ID NO: 14897 - DNA, 321 bp, Staphylococcus aureus; identical to SEQ ID NO: 7045

SEQ ID NO: 14898 - DNA, 321 bp, Staphylococcus aureus; identical to SEQ ID NO: 7046

SEQ ID NO: 14899 - DNA, 60 bp, Staphylococcus aureus; identical to SEQ ID NO: 7047

SEQ ID NO: 14900 - DNA, 60 bp, Staphylococcus aureus; identical to SEQ ID NO: 7048

SEQ ID NO: 14901 - DNA, 324 bp, Staphylococcus aureus; identical to SEQ ID NO: 7049

SEQ ID NO: 14902 - DNA, 324 bp, Staphylococcus aureus; identical to SEQ ID NO: 7050

SEQ ID NO: 14903 - DNA, 147 bp, Staphylococcus aureus; identical to SEQ ID NO: 7051

SEQ ID NO: 14904 - DNA, 147 bp, Staphylococcus aureus; identical to SEQ ID NO: 7052

SEQ ID NO: 14905 - DNA, 166 bp, Staphylococcus aureus; identical to SEQ ID NO: 7053

SEQ ID NO: 14906 - DNA, 166 bp, Staphylococcus aureus; identical to SEQ ID NO: 7054

SEQ ID NO: 14907 - DNA, 131 bp, Staphylococcus aureus; identical to SEQ ID NO: 7055

SEQ ID NO: 14908 - DNA, 131 bp, Staphylococcus aureus; identical to SEQ ID NO: 7056

SEQ ID NO: 14909 - DNA, 67 bp, Staphylococcus aureus; identical to SEQ ID NO: 7057

SEQ ID NO: 14910 - DNA, 67 bp, Staphylococcus aureus; identical to SEQ ID NO: 7058

SEQ ID NO: 14911 - DNA, 231 bp, Staphylococcus aureus; identical to SEQ ID NO: 7059

SEQ ID NO: 14912 - DNA, 231 bp, Staphylococcus aureus; identical to SEQ ID NO: 7060

SEQ ID NO: 14913 - DNA, 467 bp, Staphylococcus aureus; identical to SEQ ID NO: 7061

SEQ ID NO: 14914 - DNA, 467 bp, Staphylococcus aureus; identical to SEQ ID NO: 7062

SEQ ID NO: 14915 - DNA, 57 bp, Staphylococcus aureus; identical to SEQ ID NO: 7063

SEQ ID NO: 14916 - DNA, 57 bp, Staphylococcus aureus; identical to SEQ ID NO: 7064

SEQ ID NO: 14917 - DNA, 318 bp, Staphylococcus aureus; identical to SEQ ID NO: 7065

SEQ ID NO: 14918 - DNA, 318 bp, Staphylococcus aureus; identical to SEQ ID NO: 7066

SEQ ID NO: 14919 - DNA, 277 bp, Staphylococcus aureus; identical to SEQ ID NO: 7067

SEQ ID NO: 14920 - DNA, 277 bp, Staphylococcus aureus; identical to SEQ ID NO: 7068

SEQ ID NO: 14921 - DNA, 188 bp, Staphylococcus aureus; identical to SEQ ID NO: 7069

SEQ ID NO: 14922 - DNA, 188 bp, Staphylococcus aureus; identical to SEQ ID NO: 7070

SEQ ID NO: 14923 - DNA, 186 bp, Staphylococcus aureus; identical to SEQ ID NO: 7071

SEQ ID NO: 14924 - DNA, 186 bp, Staphylococcus aureus; identical to SEQ ID NO: 7072

SEQ ID NO: 14925 - DNA, 88 bp, Staphylococcus aureus; identical to SEQ ID NO: 7073

SEQ ID NO: 14926 - DNA, 88 bp, Staphylococcus aureus; identical to SEQ ID NO: 7074

SEQ ID NO: 14927 - DNA, 147 bp, Staphylococcus aureus; identical to SEQ ID NO: 7075

SEQ ID NO: 14928 - DNA, 147 bp, Staphylococcus aureus; identical to SEQ ID NO: 7076

SEQ ID NO: 14929 - DNA, 322 bp, Staphylococcus aureus; identical to SEQ ID NO: 7077

SEQ ID NO: 14930 - DNA, 322 bp, Staphylococcus aureus; identical to SEQ ID NO: 7078

SEQ ID NO: 14931 - DNA, 98 bp, Staphylococcus aureus; identical to SEQ ID NO: 7079

SEQ ID NO: 14932 - DNA, 98 bp, Staphylococcus aureus; identical to SEQ ID NO: 7080

SEQ ID NO: 14933 - DNA, 176 bp, Staphylococcus aureus; identical to SEQ ID NO: 7081

SEQ ID NO: 14934 - DNA, 176 bp, Staphylococcus aureus; identical to SEQ ID NO: 7082

SEQ ID NO: 14935 - DNA, 176 bp, Staphylococcus aureus; identical to SEQ ID NO: 7083

SEQ ID NO: 14936 - DNA, 176 bp, Staphylococcus aureus; identical to SEQ ID NO: 7084

SEQ ID NO: 14937 - DNA, 68 bp, Staphylococcus aureus; identical to SEQ ID NO: 7085

SEQ ID NO: 14938 - DNA, 68 bp, Staphylococcus aureus; identical to SEQ ID NO: 7086

SEQ ID NO: 14939 - DNA, 235 bp, Staphylococcus aureus; identical to SEQ ID NO: 7087

SEQ ID NO: 14940 - DNA, 235 bp, Staphylococcus aureus; identical to SEQ ID NO: 7088

SEQ ID NO: 14941 - DNA, 319 bp, Staphylococcus aureus; identical to SEQ ID NO: 7089

SEQ ID NO: 14942 - DNA, 319 bp, Staphylococcus aureus; identical to SEQ ID NO: 7090

SEQ ID NO: 14943 - DNA, 101 bp, Staphylococcus aureus; identical to SEQ ID NO: 7091

SEQ ID NO: 14944 - DNA, 101 bp, Staphylococcus aureus; identical to SEQ ID NO: 7092

SEQ ID NO: 14945 - DNA, 160 bp, Staphylococcus aureus; identical to SEQ ID NO: 7093

SEQ ID NO: 14946 - DNA, 160 bp, Staphylococcus aureus; identical to SEQ ID NO: 7094

SEQ ID NO: 14947 - DNA, 62 bp, Staphylococcus aureus; identical to SEQ ID NO: 7095

SEQ ID NO: 14948 - DNA, 62 bp, Staphylococcus aureus; identical to SEQ ID NO: 7096

SEQ ID NO: 14949 - DNA, 174 bp, Staphylococcus aureus; identical to SEQ ID NO: 7097

SEQ ID NO: 14950 - DNA, 174 bp, Staphylococcus aureus; identical to SEQ ID NO: 7098

SEQ ID NO: 14951 - DNA, 307 bp, Staphylococcus aureus; identical to SEQ ID NO: 7099

SEQ ID NO: 14952 - DNA, 307 bp, Staphylococcus aureus; identical to SEQ ID NO: 7100

SEQ ID NO: 14953 - DNA, 234 bp, Staphylococcus aureus; identical to SEQ ID NO: 7101

SEQ ID NO: 14954 - DNA, 234 bp, Staphylococcus aureus; identical to SEQ ID NO: 7102

SEQ ID NO: 14955 - DNA, 277 bp, Staphylococcus aureus; identical to SEQ ID NO: 7103

SEQ ID NO: 14956 - DNA, 277 bp, Staphylococcus aureus; identical to SEQ ID NO: 7104

SEQ ID NO: 14957 - DNA, 265 bp, Staphylococcus aureus; identical to SEQ ID NO: 7105

SEQ ID NO: 14958 - DNA, 265 bp, Staphylococcus aureus; identical to SEQ ID NO: 7106

SEQ ID NO: 14959 - DNA, 71 bp, Staphylococcus aureus; identical to SEQ ID NO: 7107

SEQ ID NO: 14960 - DNA, 71 bp, Staphylococcus aureus; identical to SEQ ID NO: 7108

SEQ ID NO: 14961 - DNA, 250 bp, Staphylococcus aureus; identical to SEQ ID NO: 7109

SEQ ID NO: 14962 - DNA, 250 bp, Staphylococcus aureus; identical to SEQ ID NO: 7110

SEQ ID NO: 14963 - DNA, 86 bp, Staphylococcus aureus; identical to SEQ ID NO: 7111

SEQ ID NO: 14964 - DNA, 86 bp, Staphylococcus aureus; identical to SEQ ID NO: 7112

SEQ ID NO: 14965 - DNA, 232 bp, Staphylococcus aureus; identical to SEQ ID NO: 7113

SEQ ID NO: 14966 - DNA, 232 bp, Staphylococcus aureus; identical to SEQ ID NO: 7114

SEQ ID NO: 14967 - DNA, 69 bp, Staphylococcus aureus; identical to SEQ ID NO: 7115

SEQ ID NO: 14968 - DNA, 69 bp, Staphylococcus aureus; identical to SEQ ID NO: 7116

SEQ ID NO: 14969 - DNA, 241 bp, Staphylococcus aureus; identical to SEQ ID NO: 7117

SEQ ID NO: 14970 - DNA, 241 bp, Staphylococcus aureus; identical to SEQ ID NO: 7118

SEQ ID NO: 14971 - DNA, 59 bp, Staphylococcus aureus; identical to SEQ ID NO: 7119

SEQ ID NO: 14972 - DNA, 59 bp, Staphylococcus aureus; identical to SEQ ID NO: 7120

SEQ ID NO: 14973 - DNA, 210 bp, Staphylococcus aureus; identical to SEQ ID NO: 7121

SEQ ID NO: 14974 - DNA, 210 bp, Staphylococcus aureus; identical to SEQ ID NO: 7122

SEQ ID NO: 14975 - DNA, 294 bp, Staphylococcus aureus; identical to SEQ ID NO: 7123

SEQ ID NO: 14976 - DNA, 294 bp, Staphylococcus aureus; identical to SEQ ID NO: 7124

SEQ ID NO: 14977 - DNA, 383 bp, Staphylococcus aureus; identical to SEQ ID NO: 7125

SEQ ID NO: 14978 - DNA, 383 bp, Staphylococcus aureus; identical to SEQ ID NO: 7126

SEQ ID NO: 14979 - DNA, 233 bp, Staphylococcus aureus; identical to SEQ ID NO: 7127

SEQ ID NO: 14980 - DNA, 233 bp, Staphylococcus aureus; identical to SEQ ID NO: 7128

SEQ ID NO: 14981 - DNA, 128 bp, Staphylococcus aureus; identical to SEQ ID NO: 7129

SEQ ID NO: 14982 - DNA, 128 bp, Staphylococcus aureus; identical to SEQ ID NO: 7130

SEQ ID NO: 14983 - DNA, 164 bp, Staphylococcus aureus; identical to SEQ ID NO: 7131

SEQ ID NO: 14984 - DNA, 164 bp, Staphylococcus aureus; identical to SEQ ID NO: 7132

SEQ ID NO: 14985 - DNA, 185 bp, Staphylococcus aureus; identical to SEQ ID NO: 7133

SEQ ID NO: 14986 - DNA, 185 bp, Staphylococcus aureus; identical to SEQ ID NO: 7134

SEQ ID NO: 14987 - DNA, 244 bp, Staphylococcus aureus; identical to SEQ ID NO: 7135

SEQ ID NO: 14988 - DNA, 244 bp, Staphylococcus aureus; identical to SEQ ID NO: 7136

SEQ ID NO: 14989 - DNA, 83 bp, Staphylococcus aureus; identical to SEQ ID NO: 7137

SEQ ID NO: 14990 - DNA, 83 bp, Staphylococcus aureus; identical to SEQ ID NO: 7138

SEQ ID NO: 14991 - DNA, 307 bp, Staphylococcus aureus; identical to SEQ ID NO: 7139

SEQ ID NO: 14992 - DNA, 307 bp, Staphylococcus aureus; identical to SEQ ID NO: 7140

SEQ ID NO: 14993 - DNA, 649 bp, Staphylococcus aureus; identical to SEQ ID NO: 7141

SEQ ID NO: 14994 - DNA, 649 bp, Staphylococcus aureus; identical to SEQ ID NO: 7142

SEQ ID NO: 14995 - DNA, 284 bp, Staphylococcus aureus; identical to SEQ ID NO: 7143

SEQ ID NO: 14996 - DNA, 284 bp, Staphylococcus aureus; identical to SEQ ID NO: 7144

SEQ ID NO: 14997 - DNA, 77 bp, Staphylococcus aureus; identical to SEQ ID NO: 7145

SEQ ID NO: 14998 - DNA, 77 bp, Staphylococcus aureus; identical to SEQ ID NO: 7146

SEQ ID NO: 14999 - DNA, 239 bp, Staphylococcus aureus; identical to SEQ ID NO: 7147

SEQ ID NO: 15000 - DNA, 239 bp, Staphylococcus aureus; identical to SEQ ID NO: 7148

SEQ ID NO: 15001 - DNA, 426 bp, Staphylococcus aureus; identical to SEQ ID NO: 7149

SEQ ID NO: 15002 - DNA, 426 bp, Staphylococcus aureus; identical to SEQ ID NO: 7150

SEQ ID NO: 15003 - DNA, 74 bp, Staphylococcus aureus; identical to SEQ ID NO: 7151

SEQ ID NO: 15004 - DNA, 74 bp, Staphylococcus aureus; identical to SEQ ID NO: 7152

SEQ ID NO: 15005 - DNA, 192 bp, Staphylococcus aureus; identical to SEQ ID NO: 7153

SEQ ID NO: 15006 - DNA, 192 bp, Staphylococcus aureus; identical to SEQ ID NO: 7154

SEQ ID NO: 15007 - DNA, 356 bp, Staphylococcus aureus; identical to SEQ ID NO: 7155

SEQ ID NO: 15008 - DNA, 356 bp, Staphylococcus aureus; identical to SEQ ID NO: 7156

SEQ ID NO: 15009 - DNA, 190 bp, Staphylococcus aureus; identical to SEQ ID NO: 7157

SEQ ID NO: 15010 - DNA, 190 bp, Staphylococcus aureus; identical to SEQ ID NO: 7158

SEQ ID NO: 15011 - DNA, 112 bp, Staphylococcus aureus; identical to SEQ ID NO: 7159

SEQ ID NO: 15012 - DNA, 112 bp, Staphylococcus aureus; identical to SEQ ID NO: 7160

SEQ ID NO: 15013 - DNA, 180 bp, Staphylococcus aureus; identical to SEQ ID NO: 7161

SEQ ID NO: 15014 - DNA, 180 bp, Staphylococcus aureus; identical to SEQ ID NO: 7162

SEQ ID NO: 15015 - DNA, 120 bp, Staphylococcus aureus; identical to SEQ ID NO: 7163

SEQ ID NO: 15016 - DNA, 120 bp, Staphylococcus aureus; identical to SEQ ID NO: 7164

SEQ ID NO: 15017 - DNA, 119 bp, Staphylococcus aureus; identical to SEQ ID NO: 7165

SEQ ID NO: 15018 - DNA, 119 bp, Staphylococcus aureus; identical to SEQ ID NO: 7166

SEQ ID NO: 15019 - DNA, 132 bp, Staphylococcus aureus; identical to SEQ ID NO: 7167

SEQ ID NO: 15020 - DNA, 132 bp, Staphylococcus aureus; identical to SEQ ID NO: 7168

SEQ ID NO: 15021 - DNA, 179 bp, Staphylococcus aureus; identical to SEQ ID NO: 7169

SEQ ID NO: 15022 - DNA, 179 bp, Staphylococcus aureus; identical to SEQ ID NO: 7170

SEQ ID NO: 15023 - DNA, 183 bp, Staphylococcus aureus; identical to SEQ ID NO: 7171

SEQ ID NO: 15024 - DNA, 183 bp, Staphylococcus aureus; identical to SEQ ID NO: 7172

SEQ ID NO: 15025 - DNA, 116 bp, Staphylococcus aureus; identical to SEQ ID NO: 7173

SEQ ID NO: 15026 - DNA, 116 bp, Staphylococcus aureus; identical to SEQ ID NO: 7174

SEQ ID NO: 15027 - DNA, 388 bp, Staphylococcus aureus; identical to SEQ ID NO: 7175

SEQ ID NO: 15028 - DNA, 388 bp, Staphylococcus aureus; identical to SEQ ID NO: 7176

SEQ ID NO: 15029 - DNA, 161 bp, Staphylococcus aureus; identical to SEQ ID NO: 7177

SEQ ID NO: 15030 - DNA, 161 bp, Staphylococcus aureus; identical to SEQ ID NO: 7178

SEQ ID NO: 15031 - DNA, 101 bp, Staphylococcus aureus; identical to SEQ ID NO: 7179

SEQ ID NO: 15032 - DNA, 101 bp, Staphylococcus aureus; identical to SEQ ID NO: 7180

SEQ ID NO: 15033 - DNA, 126 bp, Staphylococcus aureus; identical to SEQ ID NO: 7181

SEQ ID NO: 15034 - DNA, 126 bp, Staphylococcus aureus; identical to SEQ ID NO: 7182

SEQ ID NO: 15035 - DNA, 103 bp, Staphylococcus aureus; identical to SEQ ID NO: 7183

SEQ ID NO: 15036 - DNA, 103 bp, Staphylococcus aureus; identical to SEQ ID NO: 7184

SEQ ID NO: 15037 - DNA, 62 bp, Staphylococcus aureus; identical to SEQ ID NO: 7185

SEQ ID NO: 15038 - DNA, 62 bp, Staphylococcus aureus; identical to SEQ ID NO: 7186

SEQ ID NO: 15039 - DNA, 169 bp, Staphylococcus aureus; identical to SEQ ID NO: 7187

SEQ ID NO: 15040 - DNA, 169 bp, Staphylococcus aureus; identical to SEQ ID NO: 7188

SEQ ID NO: 15041 - DNA, 242 bp, Staphylococcus aureus; identical to SEQ ID NO: 7189

SEQ ID NO: 15042 - DNA, 242 bp, Staphylococcus aureus; identical to SEQ ID NO: 7190

SEQ ID NO: 15043 - DNA, 171 bp, Staphylococcus aureus; identical to SEQ ID NO: 7191

SEQ ID NO: 15044 - DNA, 171 bp, Staphylococcus aureus; identical to SEQ ID NO: 7192

SEQ ID NO: 15045 - DNA, 76 bp, Staphylococcus aureus; identical to SEQ ID NO: 7193

SEQ ID NO: 15046 - DNA, 76 bp, Staphylococcus aureus; identical to SEQ ID NO: 7194

SEQ ID NO: 15047 - DNA, 120 bp, Staphylococcus aureus; identical to SEQ ID NO: 7195

SEQ ID NO: 15048 - DNA, 120 bp, Staphylococcus aureus; identical to SEQ ID NO: 7196

SEQ ID NO: 15049 - DNA, 397 bp, Staphylococcus aureus; identical to SEQ ID NO: 7197

SEQ ID NO: 15050 - DNA, 397 bp, Staphylococcus aureus; identical to SEQ ID NO: 7198

SEQ ID NO: 15051 - DNA, 213 bp, Staphylococcus aureus; identical to SEQ ID NO: 7199

SEQ ID NO: 15052 - DNA, 213 bp, Staphylococcus aureus; identical to SEQ ID NO: 7200

SEQ ID NO: 15053 - DNA, 77 bp, Staphylococcus aureus; identical to SEQ ID NO: 7201

SEQ ID NO: 15054 - DNA, 77 bp, Staphylococcus aureus; identical to SEQ ID NO: 7202

SEQ ID NO: 15055 - DNA, 259 bp, Staphylococcus aureus; identical to SEQ ID NO: 7203

SEQ ID NO: 15056 - DNA, 259 bp, Staphylococcus aureus; identical to SEQ ID NO: 7204

SEQ ID NO: 15057 - DNA, 188 bp, Staphylococcus aureus; identical to SEQ ID NO: 7205

SEQ ID NO: 15058 - DNA, 188 bp, Staphylococcus aureus; identical to SEQ ID NO: 7206

SEQ ID NO: 15059 - DNA, 427 bp, Staphylococcus aureus; identical to SEQ ID NO: 7207

SEQ ID NO: 15060 - DNA, 427 bp, Staphylococcus aureus; identical to SEQ ID NO: 7208

SEQ ID NO: 15061 - DNA, 63 bp, Staphylococcus aureus; identical to SEQ ID NO: 7209

SEQ ID NO: 15062 - DNA, 63 bp, Staphylococcus aureus; identical to SEQ ID NO: 7210

SEQ ID NO: 15063 - DNA, 609 bp, Staphylococcus aureus; identical to SEQ ID NO: 7211

SEQ ID NO: 15064 - DNA, 609 bp, Staphylococcus aureus; identical to SEQ ID NO: 7212

SEQ ID NO: 15065 - DNA, 287 bp, Staphylococcus aureus; identical to SEQ ID NO: 7213

SEQ ID NO: 15066 - DNA, 287 bp, Staphylococcus aureus; identical to SEQ ID NO: 7214

SEQ ID NO: 15067 - DNA, 94 bp, Staphylococcus aureus; identical to SEQ ID NO: 7215

SEQ ID NO: 15068 - DNA, 94 bp, Staphylococcus aureus; identical to SEQ ID NO: 7216

SEQ ID NO: 15069 - DNA, 247 bp, Staphylococcus aureus; identical to SEQ ID NO: 7217

SEQ ID NO: 15070 - DNA, 247 bp, Staphylococcus aureus; identical to SEQ ID NO: 7218

SEQ ID NO: 15071 - DNA, 236 bp, Staphylococcus aureus; identical to SEQ ID NO: 7219

SEQ ID NO: 15072 - DNA, 236 bp, Staphylococcus aureus; identical to SEQ ID NO: 7220

SEQ ID NO: 15073 - DNA, 360 bp, Staphylococcus aureus; identical to SEQ ID NO: 7221

SEQ ID NO: 15074 - DNA, 360 bp, Staphylococcus aureus; identical to SEQ ID NO: 7222

SEQ ID NO: 15075 - DNA, 91 bp, Staphylococcus aureus; identical to SEQ ID NO: 7223

SEQ ID NO: 15076 - DNA, 91 bp, Staphylococcus aureus; identical to SEQ ID NO: 7224

SEQ ID NO: 15077 - DNA, 310 bp, Staphylococcus aureus; identical to SEQ ID NO: 7225

SEQ ID NO: 15078 - DNA, 310 bp, Staphylococcus aureus; identical to SEQ ID NO: 7226

SEQ ID NO: 15079 - DNA, 209 bp, Staphylococcus aureus; identical to SEQ ID NO: 7227

SEQ ID NO: 15080 - DNA, 209 bp, Staphylococcus aureus; identical to SEQ ID NO: 7228

SEQ ID NO: 15081 - DNA, 509 bp, Staphylococcus aureus; identical to SEQ ID NO: 7229

SEQ ID NO: 15082 - DNA, 509 bp, Staphylococcus aureus; identical to SEQ ID NO: 7230

SEQ ID NO: 15083 - DNA, 132 bp, Staphylococcus aureus; identical to SEQ ID NO: 7231

SEQ ID NO: 15084 - DNA, 132 bp, Staphylococcus aureus; identical to SEQ ID NO: 7232

SEQ ID NO: 15085 - DNA, 384 bp, Staphylococcus aureus; identical to SEQ ID NO: 7233

SEQ ID NO: 15086 - DNA, 384 bp, Staphylococcus aureus; identical to SEQ ID NO: 7234

SEQ ID NO: 15087 - DNA, 444 bp, Staphylococcus aureus; identical to SEQ ID NO: 7235

SEQ ID NO: 15088 - DNA, 444 bp, Staphylococcus aureus; identical to SEQ ID NO: 7236

SEQ ID NO: 15089 - DNA, 386 bp, Staphylococcus aureus; identical to SEQ ID NO: 7237

SEQ ID NO: 15090 - DNA, 386 bp, Staphylococcus aureus; identical to SEQ ID NO: 7238

SEQ ID NO: 15091 - DNA, 279 bp, Staphylococcus aureus; identical to SEQ ID NO: 7239

SEQ ID NO: 15092 - DNA, 279 bp, Staphylococcus aureus; identical to SEQ ID NO: 7240

SEQ ID NO: 15093 - DNA, 95 bp, Staphylococcus aureus; identical to SEQ ID NO: 7241

SEQ ID NO: 15094 - DNA, 95 bp, Staphylococcus aureus; identical to SEQ ID NO: 7242

SEQ ID NO: 15095 - DNA, 74 bp, Staphylococcus aureus; identical to SEQ ID NO: 7243

SEQ ID NO: 15096 - DNA, 74 bp, Staphylococcus aureus; identical to SEQ ID NO: 7244

SEQ ID NO: 15097 - DNA, 135 bp, Staphylococcus aureus; identical to SEQ ID NO: 7245

SEQ ID NO: 15098 - DNA, 135 bp, Staphylococcus aureus; identical to SEQ ID NO: 7246

SEQ ID NO: 15099 - DNA, 65 bp, Staphylococcus aureus; identical to SEQ ID NO: 7247

SEQ ID NO: 15100 - DNA, 65 bp, Staphylococcus aureus; identical to SEQ ID NO: 7248

SEQ ID NO: 15101 - DNA, 329 bp, Staphylococcus aureus; identical to SEQ ID NO: 7249

SEQ ID NO: 15102 - DNA, 329 bp, Staphylococcus aureus; identical to SEQ ID NO: 7250

SEQ ID NO: 15103 - DNA, 57 bp, Staphylococcus aureus; identical to SEQ ID NO: 7251

SEQ ID NO: 15104 - DNA, 57 bp, Staphylococcus aureus; identical to SEQ ID NO: 7252

SEQ ID NO: 15105 - DNA, 166 bp, Staphylococcus aureus; identical to SEQ ID NO: 7253

SEQ ID NO: 15106 - DNA, 166 bp, Staphylococcus aureus; identical to SEQ ID NO: 7254

SEQ ID NO: 15107 - DNA, 158 bp, Staphylococcus aureus; identical to SEQ ID NO: 7255

SEQ ID NO: 15108 - DNA, 158 bp, Staphylococcus aureus; identical to SEQ ID NO: 7256

SEQ ID NO: 15109 - DNA, 486 bp, Staphylococcus aureus; identical to SEQ ID NO: 7257

SEQ ID NO: 15110 - DNA, 486 bp, Staphylococcus aureus; identical to SEQ ID NO: 7258

SEQ ID NO: 15111 - DNA, 110 bp, Staphylococcus aureus; identical to SEQ ID NO: 7259

SEQ ID NO: 15112 - DNA, 110 bp, Staphylococcus aureus; identical to SEQ ID NO: 7260

SEQ ID NO: 15113 - DNA, 275 bp, Staphylococcus aureus; identical to SEQ ID NO: 7261

SEQ ID NO: 15114 - DNA, 275 bp, Staphylococcus aureus; identical to SEQ ID NO: 7262

SEQ ID NO: 15115 - DNA, 159 bp, Staphylococcus aureus; identical to SEQ ID NO: 7263

SEQ ID NO: 15116 - DNA, 159 bp, Staphylococcus aureus; identical to SEQ ID NO: 7264

SEQ ID NO: 15117 - DNA, 241 bp, Staphylococcus aureus; identical to SEQ ID NO: 7265

SEQ ID NO: 15118 - DNA, 241 bp, Staphylococcus aureus; identical to SEQ ID NO: 7266

SEQ ID NO: 15119 - DNA, 255 bp, Staphylococcus aureus; identical to SEQ ID NO: 7267

SEQ ID NO: 15120 - DNA, 255 bp, Staphylococcus aureus; identical to SEQ ID NO: 7268

SEQ ID NO: 15121 - DNA, 289 bp, Staphylococcus aureus; identical to SEQ ID NO: 7269

SEQ ID NO: 15122 - DNA, 289 bp, Staphylococcus aureus; identical to SEQ ID NO: 7270

SEQ ID NO: 15123 - DNA, 65 bp, Staphylococcus aureus; identical to SEQ ID NO: 7271

SEQ ID NO: 15124 - DNA, 65 bp, Staphylococcus aureus; identical to SEQ ID NO: 7272

SEQ ID NO: 15125 - DNA, 173 bp, Staphylococcus aureus; identical to SEQ ID NO: 7273

SEQ ID NO: 15126 - DNA, 173 bp, Staphylococcus aureus; identical to SEQ ID NO: 7274

SEQ ID NO: 15127 - DNA, 133 bp, Staphylococcus aureus; identical to SEQ ID NO: 7275

SEQ ID NO: 15128 - DNA, 133 bp, Staphylococcus aureus; identical to SEQ ID NO: 7276

SEQ ID NO: 15129 - DNA, 52 bp, Staphylococcus aureus; identical to SEQ ID NO: 7277

SEQ ID NO: 15130 - DNA, 52 bp, Staphylococcus aureus; identical to SEQ ID NO: 7278

SEQ ID NO: 15131 - DNA, 76 bp, Staphylococcus aureus; identical to SEQ ID NO: 7279

SEQ ID NO: 15132 - DNA, 76 bp, Staphylococcus aureus; identical to SEQ ID NO: 7280

SEQ ID NO: 15133 - DNA, 74 bp, Staphylococcus aureus; identical to SEQ ID NO: 7281

SEQ ID NO: 15134 - DNA, 74 bp, Staphylococcus aureus; identical to SEQ ID NO: 7282

SEQ ID NO: 15135 - DNA, 215 bp, Staphylococcus aureus; identical to SEQ ID NO: 7283

SEQ ID NO: 15136 - DNA, 215 bp, Staphylococcus aureus; identical to SEQ ID NO: 7284

SEQ ID NO: 15137 - DNA, 332 bp, Staphylococcus aureus; identical to SEQ ID NO: 7285

SEQ ID NO: 15138 - DNA, 332 bp, Staphylococcus aureus; identical to SEQ ID NO: 7286

SEQ ID NO: 15139 - DNA, 55 bp, Staphylococcus aureus; identical to SEQ ID NO: 7287

SEQ ID NO: 15140 - DNA, 55 bp, Staphylococcus aureus; identical to SEQ ID NO: 7288

SEQ ID NO: 15141 - DNA, 107 bp, Staphylococcus aureus; identical to SEQ ID NO: 7289

SEQ ID NO: 15142 - DNA, 107 bp, Staphylococcus aureus; identical to SEQ ID NO: 7290

SEQ ID NO: 15143 - DNA, 207 bp, Staphylococcus aureus; identical to SEQ ID NO: 7291

SEQ ID NO: 15144 - DNA, 207 bp, Staphylococcus aureus; identical to SEQ ID NO: 7292

SEQ ID NO: 15145 - DNA, 183 bp, Staphylococcus aureus; identical to SEQ ID NO: 7293

SEQ ID NO: 15146 - DNA, 183 bp, Staphylococcus aureus; identical to SEQ ID NO: 7294

SEQ ID NO: 15147 - DNA, 120 bp, Staphylococcus aureus; identical to SEQ ID NO: 7295

SEQ ID NO: 15148 - DNA, 120 bp, Staphylococcus aureus; identical to SEQ ID NO: 7296

SEQ ID NO: 15149 - DNA, 226 bp, Staphylococcus aureus; identical to SEQ ID NO: 7297

SEQ ID NO: 15150 - DNA, 226 bp, Staphylococcus aureus; identical to SEQ ID NO: 7298

SEQ ID NO: 15151 - DNA, 113 bp, Staphylococcus aureus; identical to SEQ ID NO: 7299

SEQ ID NO: 15152 - DNA, 113 bp, Staphylococcus aureus; identical to SEQ ID NO: 7300

SEQ ID NO: 15153 - DNA, 239 bp, Staphylococcus aureus; identical to SEQ ID NO: 7301

SEQ ID NO: 15154 - DNA, 239 bp, Staphylococcus aureus; identical to SEQ ID NO: 7302

SEQ ID NO: 15155 - DNA, 194 bp, Staphylococcus aureus; identical to SEQ ID NO: 7303

SEQ ID NO: 15156 - DNA, 194 bp, Staphylococcus aureus; identical to SEQ ID NO: 7304

SEQ ID NO: 15157 - DNA, 230 bp, Staphylococcus aureus; identical to SEQ ID NO: 7305

SEQ ID NO: 15158 - DNA, 230 bp, Staphylococcus aureus; identical to SEQ ID NO: 7306

SEQ ID NO: 15159 - DNA, 135 bp, Staphylococcus aureus; identical to SEQ ID NO: 7307

SEQ ID NO: 15160 - DNA, 135 bp, Staphylococcus aureus; identical to SEQ ID NO: 7308

SEQ ID NO: 15161 - DNA, 162 bp, Staphylococcus aureus; identical to SEQ ID NO: 7309

SEQ ID NO: 15162 - DNA, 162 bp, Staphylococcus aureus; identical to SEQ ID NO: 7310

SEQ ID NO: 15163 - DNA, 65 bp, Staphylococcus aureus; identical to SEQ ID NO: 7311

SEQ ID NO: 15164 - DNA, 65 bp, Staphylococcus aureus; identical to SEQ ID NO: 7312

SEQ ID NO: 15165 - DNA, 323 bp, Staphylococcus aureus; identical to SEQ ID NO: 7313

SEQ ID NO: 15166 - DNA, 323 bp, Staphylococcus aureus; identical to SEQ ID NO: 7314

SEQ ID NO: 15167 - DNA, 316 bp, Staphylococcus aureus; identical to SEQ ID NO: 7315

SEQ ID NO: 15168 - DNA, 316 bp, Staphylococcus aureus; identical to SEQ ID NO: 7316

SEQ ID NO: 15169 - DNA, 153 bp, Staphylococcus aureus; identical to SEQ ID NO: 7317

SEQ ID NO: 15170 - DNA, 153 bp, Staphylococcus aureus; identical to SEQ ID NO: 7318

SEQ ID NO: 15171 - DNA, 185 bp, Staphylococcus aureus; identical to SEQ ID NO: 7319

SEQ ID NO: 15172 - DNA, 185 bp, Staphylococcus aureus; identical to SEQ ID NO: 7320

SEQ ID NO: 15173 - DNA, 149 bp, Staphylococcus aureus; identical to SEQ ID NO: 7321

SEQ ID NO: 15174 - DNA, 149 bp, Staphylococcus aureus; identical to SEQ ID NO: 7322

SEQ ID NO: 15175 - DNA, 104 bp, Staphylococcus aureus; identical to SEQ ID NO: 7323

SEQ ID NO: 15176 - DNA, 104 bp, Staphylococcus aureus; identical to SEQ ID NO: 7324

SEQ ID NO: 15177 - DNA, 52 bp, Staphylococcus aureus; identical to SEQ ID NO: 7325

SEQ ID NO: 15178 - DNA, 52 bp, Staphylococcus aureus; identical to SEQ ID NO: 7326

SEQ ID NO: 15179 - DNA, 65 bp, Staphylococcus aureus; identical to SEQ ID NO: 7327

SEQ ID NO: 15180 - DNA, 65 bp, Staphylococcus aureus; identical to SEQ ID NO: 7328

SEQ ID NO: 15181 - DNA, 160 bp, Staphylococcus aureus; identical to SEQ ID NO: 7329

SEQ ID NO: 15182 - DNA, 160 bp, Staphylococcus aureus; identical to SEQ ID NO: 7330

SEQ ID NO: 15183 - DNA, 84 bp, Staphylococcus aureus; identical to SEQ ID NO: 7331

SEQ ID NO: 15184 - DNA, 84 bp, Staphylococcus aureus; identical to SEQ ID NO: 7332

SEQ ID NO: 15185 - DNA, 1487 bp, Staphylococcus aureus; identical to SEQ ID NO: 7333

SEQ ID NO: 15186 - DNA, 1487 bp, Staphylococcus aureus; identical to SEQ ID NO: 7334

SEQ ID NO: 15187 - DNA, 70 bp, Staphylococcus aureus; identical to SEQ ID NO: 7335

SEQ ID NO: 15188 - DNA, 70 bp, Staphylococcus aureus; identical to SEQ ID NO: 7336

SEQ ID NO: 15189 - DNA, 99 bp, Staphylococcus aureus; identical to SEQ ID NO: 7337

SEQ ID NO: 15190 - DNA, 99 bp, Staphylococcus aureus; identical to SEQ ID NO: 7338

SEQ ID NO: 15191 - DNA, 317 bp, Staphylococcus aureus; identical to SEQ ID NO: 7339

SEQ ID NO: 15192 - DNA, 317 bp, Staphylococcus aureus; identical to SEQ ID NO: 7340

SEQ ID NO: 15193 - DNA, 181 bp, Staphylococcus aureus; identical to SEQ ID NO: 7341

SEQ ID NO: 15194 - DNA, 181 bp, Staphylococcus aureus; identical to SEQ ID NO: 7342

SEQ ID NO: 15195 - DNA, 396 bp, Staphylococcus aureus; identical to SEQ ID NO: 7343

SEQ ID NO: 15196 - DNA, 396 bp, Staphylococcus aureus; identical to SEQ ID NO: 7344

SEQ ID NO: 15197 - DNA, 170 bp, Staphylococcus aureus; identical to SEQ ID NO: 7345

SEQ ID NO: 15198 - DNA, 170 bp, Staphylococcus aureus; identical to SEQ ID NO: 7346

SEQ ID NO: 15199 - DNA, 106 bp, Staphylococcus aureus; identical to SEQ ID NO: 7347

SEQ ID NO: 15200 - DNA, 106 bp, Staphylococcus aureus; identical to SEQ ID NO: 7348

SEQ ID NO: 15201 - DNA, 71 bp, Staphylococcus aureus; identical to SEQ ID NO: 7349

SEQ ID NO: 15202 - DNA, 71 bp, Staphylococcus aureus; identical to SEQ ID NO: 7350

SEQ ID NO: 15203 - DNA, 181 bp, Staphylococcus aureus; identical to SEQ ID NO: 7351

SEQ ID NO: 15204 - DNA, 181 bp, Staphylococcus aureus; identical to SEQ ID NO: 7352

SEQ ID NO: 15205 - DNA, 257 bp, Staphylococcus aureus; identical to SEQ ID NO: 7353

SEQ ID NO: 15206 - DNA, 257 bp, Staphylococcus aureus; identical to SEQ ID NO: 7354

SEQ ID NO: 15207 - DNA, 308 bp, Staphylococcus aureus; identical to SEQ ID NO: 7355

SEQ ID NO: 15208 - DNA, 308 bp, Staphylococcus aureus; identical to SEQ ID NO: 7356

SEQ ID NO: 15209 - DNA, 65 bp, Staphylococcus aureus; identical to SEQ ID NO: 7357

SEQ ID NO: 15210 - DNA, 65 bp, Staphylococcus aureus; identical to SEQ ID NO: 7358

SEQ ID NO: 15211 - DNA, 229 bp, Staphylococcus aureus; identical to SEQ ID NO: 7359

SEQ ID NO: 15212 - DNA, 229 bp, Staphylococcus aureus; identical to SEQ ID NO: 7360

SEQ ID NO: 15213 - DNA, 233 bp, Staphylococcus aureus; identical to SEQ ID NO: 7361

SEQ ID NO: 15214 - DNA, 233 bp, Staphylococcus aureus; identical to SEQ ID NO: 7362

SEQ ID NO: 15215 - DNA, 216 bp, Staphylococcus aureus; identical to SEQ ID NO: 7363

SEQ ID NO: 15216 - DNA, 216 bp, Staphylococcus aureus; identical to SEQ ID NO: 7364

SEQ ID NO: 15217 - DNA, 83 bp, Staphylococcus aureus; identical to SEQ ID NO: 7365

SEQ ID NO: 15218 - DNA, 83 bp, Staphylococcus aureus; identical to SEQ ID NO: 7366

SEQ ID NO: 15219 - DNA, 185 bp, Staphylococcus aureus; identical to SEQ ID NO: 7367

SEQ ID NO: 15220 - DNA, 185 bp, Staphylococcus aureus; identical to SEQ ID NO: 7368

SEQ ID NO: 15221 - DNA, 207 bp, Staphylococcus aureus; identical to SEQ ID NO: 7369

SEQ ID NO: 15222 - DNA, 207 bp, Staphylococcus aureus; identical to SEQ ID NO: 7370

SEQ ID NO: 15223 - DNA, 168 bp, Staphylococcus aureus; identical to SEQ ID NO: 7371

SEQ ID NO: 15224 - DNA, 168 bp, Staphylococcus aureus; identical to SEQ ID NO: 7372

SEQ ID NO: 15225 - DNA, 254 bp, Staphylococcus aureus; identical to SEQ ID NO: 7373

SEQ ID NO: 15226 - DNA, 254 bp, Staphylococcus aureus; identical to SEQ ID NO: 7374

SEQ ID NO: 15227 - DNA, 96 bp, Staphylococcus aureus; identical to SEQ ID NO: 7375

SEQ ID NO: 15228 - DNA, 96 bp, Staphylococcus aureus; identical to SEQ ID NO: 7376

SEQ ID NO: 15229 - DNA, 120 bp, Staphylococcus aureus; identical to SEQ ID NO: 7377

SEQ ID NO: 15230 - DNA, 120 bp, Staphylococcus aureus; identical to SEQ ID NO: 7378

SEQ ID NO: 15231 - DNA, 101 bp, Staphylococcus aureus; identical to SEQ ID NO: 7379

SEQ ID NO: 15232 - DNA, 101 bp, Staphylococcus aureus; identical to SEQ ID NO: 7380

SEQ ID NO: 15233 - DNA, 156 bp, Staphylococcus aureus; identical to SEQ ID NO: 7381

SEQ ID NO: 15234 - DNA, 156 bp, Staphylococcus aureus; identical to SEQ ID NO: 7382

SEQ ID NO: 15235 - DNA, 326 bp, Staphylococcus aureus; identical to SEQ ID NO: 7383

SEQ ID NO: 15236 - DNA, 326 bp, Staphylococcus aureus; identical to SEQ ID NO: 7384

SEQ ID NO: 15237 - DNA, 433 bp, Staphylococcus aureus; identical to SEQ ID NO: 7385

SEQ ID NO: 15238 - DNA, 433 bp, Staphylococcus aureus; identical to SEQ ID NO: 7386

SEQ ID NO: 15239 - DNA, 94 bp, Staphylococcus aureus; identical to SEQ ID NO: 7387

SEQ ID NO: 15240 - DNA, 94 bp, Staphylococcus aureus; identical to SEQ ID NO: 7388

SEQ ID NO: 15241 - DNA, 439 bp, Staphylococcus aureus; identical to SEQ ID NO: 7389

SEQ ID NO: 15242 - DNA, 439 bp, Staphylococcus aureus; identical to SEQ ID NO: 7390

SEQ ID NO: 15243 - DNA, 386 bp, Staphylococcus aureus; identical to SEQ ID NO: 7391

SEQ ID NO: 15244 - DNA, 386 bp, Staphylococcus aureus; identical to SEQ ID NO: 7392

SEQ ID NO: 15245 - DNA, 51 bp, Staphylococcus aureus; identical to SEQ ID NO: 7393

SEQ ID NO: 15246 - DNA, 51 bp, Staphylococcus aureus; identical to SEQ ID NO: 7394

SEQ ID NO: 15247 - DNA, 225 bp, Staphylococcus aureus; identical to SEQ ID NO: 7395

SEQ ID NO: 15248 - DNA, 225 bp, Staphylococcus aureus; identical to SEQ ID NO: 7396

SEQ ID NO: 15249 - DNA, 87 bp, Staphylococcus aureus; identical to SEQ ID NO: 7397

SEQ ID NO: 15250 - DNA, 87 bp, Staphylococcus aureus; identical to SEQ ID NO: 7398

SEQ ID NO: 15251 - DNA, 319 bp, Staphylococcus aureus; identical to SEQ ID NO: 7399

SEQ ID NO: 15252 - DNA, 319 bp, Staphylococcus aureus; identical to SEQ ID NO: 7400

SEQ ID NO: 15253 - DNA, 145 bp, Staphylococcus aureus; identical to SEQ ID NO: 7401

SEQ ID NO: 15254 - DNA, 145 bp, Staphylococcus aureus; identical to SEQ ID NO: 7402

SEQ ID NO: 15255 - DNA, 267 bp, Staphylococcus aureus; identical to SEQ ID NO: 7403

SEQ ID NO: 15256 - DNA, 267 bp, Staphylococcus aureus; identical to SEQ ID NO: 7404

SEQ ID NO: 15257 - DNA, 59 bp, Staphylococcus aureus; identical to SEQ ID NO: 7405

SEQ ID NO: 15258 - DNA, 59 bp, Staphylococcus aureus; identical to SEQ ID NO: 7406

SEQ ID NO: 15259 - DNA, 181 bp, Staphylococcus aureus; identical to SEQ ID NO: 7407

SEQ ID NO: 15260 - DNA, 181 bp, Staphylococcus aureus; identical to SEQ ID NO: 7408

SEQ ID NO: 15261 - DNA, 59 bp, Staphylococcus aureus; identical to SEQ ID NO: 7409

SEQ ID NO: 15262 - DNA, 59 bp, Staphylococcus aureus; identical to SEQ ID NO: 7410

SEQ ID NO: 15263 - DNA, 62 bp, Staphylococcus aureus; identical to SEQ ID NO: 7411

SEQ ID NO: 15264 - DNA, 62 bp, Staphylococcus aureus; identical to SEQ ID NO: 7412

SEQ ID NO: 15265 - DNA, 285 bp, Staphylococcus aureus; identical to SEQ ID NO: 7413

SEQ ID NO: 15266 - DNA, 285 bp, Staphylococcus aureus; identical to SEQ ID NO: 7414

SEQ ID NO: 15267 - DNA, 138 bp, Staphylococcus aureus; identical to SEQ ID NO: 7415

SEQ ID NO: 15268 - DNA, 138 bp, Staphylococcus aureus; identical to SEQ ID NO: 7416

SEQ ID NO: 15269 - DNA, 83 bp, Staphylococcus aureus; identical to SEQ ID NO: 7417

SEQ ID NO: 15270 - DNA, 83 bp, Staphylococcus aureus; identical to SEQ ID NO: 7418

SEQ ID NO: 15271 - DNA, 97 bp, Staphylococcus aureus; identical to SEQ ID NO: 7419

SEQ ID NO: 15272 - DNA, 97 bp, Staphylococcus aureus; identical to SEQ ID NO: 7420

SEQ ID NO: 15273 - DNA, 91 bp, Staphylococcus aureus; identical to SEQ ID NO: 7421

SEQ ID NO: 15274 - DNA, 91 bp, Staphylococcus aureus; identical to SEQ ID NO: 7422

SEQ ID NO: 15275 - DNA, 225 bp, Staphylococcus aureus; identical to SEQ ID NO: 7423

SEQ ID NO: 15276 - DNA, 225 bp, Staphylococcus aureus; identical to SEQ ID NO: 7424

SEQ ID NO: 15277 - DNA, 293 bp, Staphylococcus aureus; identical to SEQ ID NO: 7425

SEQ ID NO: 15278 - DNA, 293 bp, Staphylococcus aureus; identical to SEQ ID NO: 7426

SEQ ID NO: 15279 - DNA, 324 bp, Staphylococcus aureus; identical to SEQ ID NO: 7427

SEQ ID NO: 15280 - DNA, 324 bp, Staphylococcus aureus; identical to SEQ ID NO: 7428

SEQ ID NO: 15281 - DNA, 83 bp, Staphylococcus aureus; identical to SEQ ID NO: 7429

SEQ ID NO: 15282 - DNA, 83 bp, Staphylococcus aureus; identical to SEQ ID NO: 7430

SEQ ID NO: 15283 - DNA, 308 bp, Staphylococcus aureus; identical to SEQ ID NO: 7431

SEQ ID NO: 15284 - DNA, 308 bp, Staphylococcus aureus; identical to SEQ ID NO: 7432

SEQ ID NO: 15285 - DNA, 61 bp, Staphylococcus aureus; identical to SEQ ID NO: 7433

SEQ ID NO: 15286 - DNA, 61 bp, Staphylococcus aureus; identical to SEQ ID NO: 7434

SEQ ID NO: 15287 - DNA, 395 bp, Staphylococcus aureus; identical to SEQ ID NO: 7435

SEQ ID NO: 15288 - DNA, 395 bp, Staphylococcus aureus; identical to SEQ ID NO: 7436

SEQ ID NO: 15289 - DNA, 247 bp, Staphylococcus aureus; identical to SEQ ID NO: 7437

SEQ ID NO: 15290 - DNA, 247 bp, Staphylococcus aureus; identical to SEQ ID NO: 7438

SEQ ID NO: 15291 - DNA, 58 bp, Staphylococcus aureus; identical to SEQ ID NO: 7439

SEQ ID NO: 15292 - DNA, 58 bp, Staphylococcus aureus; identical to SEQ ID NO: 7440

SEQ ID NO: 15293 - DNA, 219 bp, Staphylococcus aureus; identical to SEQ ID NO: 7441

SEQ ID NO: 15294 - DNA, 219 bp, Staphylococcus aureus; identical to SEQ ID NO: 7442

SEQ ID NO: 15295 - DNA, 113 bp, Staphylococcus aureus; identical to SEQ ID NO: 7443

SEQ ID NO: 15296 - DNA, 113 bp, Staphylococcus aureus; identical to SEQ ID NO: 7444

SEQ ID NO: 15297 - DNA, 58 bp, Staphylococcus aureus; identical to SEQ ID NO: 7445

SEQ ID NO: 15298 - DNA, 58 bp, Staphylococcus aureus; identical to SEQ ID NO: 7446

SEQ ID NO: 15299 - DNA, 54 bp, Staphylococcus aureus; identical to SEQ ID NO: 7447

SEQ ID NO: 15300 - DNA, 54 bp, Staphylococcus aureus; identical to SEQ ID NO: 7448

SEQ ID NO: 15301 - DNA, 132 bp, Staphylococcus aureus; identical to SEQ ID NO: 7449

SEQ ID NO: 15302 - DNA, 132 bp, Staphylococcus aureus; identical to SEQ ID NO: 7450

SEQ ID NO: 15303 - DNA, 148 bp, Staphylococcus aureus; identical to SEQ ID NO: 7451

SEQ ID NO: 15304 - DNA, 148 bp, Staphylococcus aureus; identical to SEQ ID NO: 7452

SEQ ID NO: 15305 - DNA, 87 bp, Staphylococcus aureus; identical to SEQ ID NO: 7453

SEQ ID NO: 15306 - DNA, 87 bp, Staphylococcus aureus; identical to SEQ ID NO: 7454

SEQ ID NO: 15307 - DNA, 142 bp, Staphylococcus aureus; identical to SEQ ID NO: 7455

SEQ ID NO: 15308 - DNA, 142 bp, Staphylococcus aureus; identical to SEQ ID NO: 7456

SEQ ID NO: 15309 - DNA, 85 bp, Staphylococcus aureus; identical to SEQ ID NO: 7457

SEQ ID NO: 15310 - DNA, 85 bp, Staphylococcus aureus; identical to SEQ ID NO: 7458

SEQ ID NO: 15311 - DNA, 60 bp, Staphylococcus aureus; identical to SEQ ID NO: 7459

SEQ ID NO: 15312 - DNA, 60 bp, Staphylococcus aureus; identical to SEQ ID NO: 7460

SEQ ID NO: 15313 - DNA, 282 bp, Staphylococcus aureus; identical to SEQ ID NO: 7461

SEQ ID NO: 15314 - DNA, 282 bp, Staphylococcus aureus; identical to SEQ ID NO: 7462

SEQ ID NO: 15315 - DNA, 99 bp, Staphylococcus aureus; identical to SEQ ID NO: 7463

SEQ ID NO: 15316 - DNA, 99 bp, Staphylococcus aureus; identical to SEQ ID NO: 7464

SEQ ID NO: 15317 - DNA, 195 bp, Staphylococcus aureus; identical to SEQ ID NO: 7465

SEQ ID NO: 15318 - DNA, 195 bp, Staphylococcus aureus; identical to SEQ ID NO: 7466

SEQ ID NO: 15319 - DNA, 112 bp, Staphylococcus aureus; identical to SEQ ID NO: 7467

SEQ ID NO: 15320 - DNA, 112 bp, Staphylococcus aureus; identical to SEQ ID NO: 7468

SEQ ID NO: 15321 - DNA, 361 bp, Staphylococcus aureus; identical to SEQ ID NO: 7469

SEQ ID NO: 15322 - DNA, 361 bp, Staphylococcus aureus; identical to SEQ ID NO: 7470

SEQ ID NO: 15323 - DNA, 266 bp, Staphylococcus aureus; identical to SEQ ID NO: 7471

SEQ ID NO: 15324 - DNA, 266 bp, Staphylococcus aureus; identical to SEQ ID NO: 7472

SEQ ID NO: 15325 - DNA, 159 bp, Staphylococcus aureus; identical to SEQ ID NO: 7473

SEQ ID NO: 15326 - DNA, 159 bp, Staphylococcus aureus; identical to SEQ ID NO: 7474

SEQ ID NO: 15327 - DNA, 288 bp, Staphylococcus aureus; identical to SEQ ID NO: 7475

SEQ ID NO: 15328 - DNA, 288 bp, Staphylococcus aureus; identical to SEQ ID NO: 7476

SEQ ID NO: 15329 - DNA, 141 bp, Staphylococcus aureus; identical to SEQ ID NO: 7477

SEQ ID NO: 15330 - DNA, 141 bp, Staphylococcus aureus; identical to SEQ ID NO: 7478

SEQ ID NO: 15331 - DNA, 435 bp, Staphylococcus aureus; identical to SEQ ID NO: 7479

SEQ ID NO: 15332 - DNA, 435 bp, Staphylococcus aureus; identical to SEQ ID NO: 7480

SEQ ID NO: 15333 - DNA, 116 bp, Staphylococcus aureus; identical to SEQ ID NO: 7481

SEQ ID NO: 15334 - DNA, 116 bp, Staphylococcus aureus; identical to SEQ ID NO: 7482

SEQ ID NO: 15335 - DNA, 165 bp, Staphylococcus aureus; identical to SEQ ID NO: 7483

SEQ ID NO: 15336 - DNA, 165 bp, Staphylococcus aureus; identical to SEQ ID NO: 7484

SEQ ID NO: 15337 - DNA, 105 bp, Staphylococcus aureus; identical to SEQ ID NO: 7485

SEQ ID NO: 15338 - DNA, 105 bp, Staphylococcus aureus; identical to SEQ ID NO: 7486

SEQ ID NO: 15339 - DNA, 243 bp, Staphylococcus aureus; identical to SEQ ID NO: 7487

SEQ ID NO: 15340 - DNA, 243 bp, Staphylococcus aureus; identical to SEQ ID NO: 7488

SEQ ID NO: 15341 - DNA, 111 bp, Staphylococcus aureus; identical to SEQ ID NO: 7489

SEQ ID NO: 15342 - DNA, 111 bp, Staphylococcus aureus; identical to SEQ ID NO: 7490

SEQ ID NO: 15343 - DNA, 100 bp, Staphylococcus aureus; identical to SEQ ID NO: 7491

SEQ ID NO: 15344 - DNA, 100 bp, Staphylococcus aureus; identical to SEQ ID NO: 7492

SEQ ID NO: 15345 - DNA, 111 bp, Staphylococcus aureus; identical to SEQ ID NO: 7493

SEQ ID NO: 15346 - DNA, 111 bp, Staphylococcus aureus; identical to SEQ ID NO: 7494

SEQ ID NO: 15347 - DNA, 105 bp, Staphylococcus aureus; identical to SEQ ID NO: 7495

SEQ ID NO: 15348 - DNA, 105 bp, Staphylococcus aureus; identical to SEQ ID NO: 7496

SEQ ID NO: 15349 - DNA, 283 bp, Staphylococcus aureus; identical to SEQ ID NO: 7497

SEQ ID NO: 15350 - DNA, 283 bp, Staphylococcus aureus; identical to SEQ ID NO: 7498

SEQ ID NO: 15351 - DNA, 143 bp, Staphylococcus aureus; identical to SEQ ID NO: 7499

SEQ ID NO: 15352 - DNA, 143 bp, Staphylococcus aureus; identical to SEQ ID NO: 7500

SEQ ID NO: 15353 - DNA, 107 bp, Staphylococcus aureus; identical to SEQ ID NO: 7501

SEQ ID NO: 15354 - DNA, 107 bp, Staphylococcus aureus; identical to SEQ ID NO: 7502

SEQ ID NO: 15355 - DNA, 387 bp, Staphylococcus aureus; identical to SEQ ID NO: 7503

SEQ ID NO: 15356 - DNA, 387 bp, Staphylococcus aureus; identical to SEQ ID NO: 7504

SEQ ID NO: 15357 - DNA, 304 bp, Staphylococcus aureus; identical to SEQ ID NO: 7505

SEQ ID NO: 15358 - DNA, 304 bp, Staphylococcus aureus; identical to SEQ ID NO: 7506

SEQ ID NO: 15359 - DNA, 320 bp, Staphylococcus aureus; identical to SEQ ID NO: 7507

SEQ ID NO: 15360 - DNA, 320 bp, Staphylococcus aureus; identical to SEQ ID NO: 7508

SEQ ID NO: 15361 - DNA, 210 bp, Staphylococcus aureus; identical to SEQ ID NO: 7509

SEQ ID NO: 15362 - DNA, 210 bp, Staphylococcus aureus; identical to SEQ ID NO: 7510

SEQ ID NO: 15363 - DNA, 100 bp, Staphylococcus aureus; identical to SEQ ID NO: 7511

SEQ ID NO: 15364 - DNA, 100 bp, Staphylococcus aureus; identical to SEQ ID NO: 7512

SEQ ID NO: 15365 - DNA, 102 bp, Staphylococcus aureus; identical to SEQ ID NO: 7513

SEQ ID NO: 15366 - DNA, 102 bp, Staphylococcus aureus; identical to SEQ ID NO: 7514

SEQ ID NO: 15367 - DNA, 79 bp, Staphylococcus aureus; identical to SEQ ID NO: 7515

SEQ ID NO: 15368 - DNA, 79 bp, Staphylococcus aureus; identical to SEQ ID NO: 7516

SEQ ID NO: 15369 - DNA, 397 bp, Staphylococcus aureus; identical to SEQ ID NO: 7517

SEQ ID NO: 15370 - DNA, 397 bp, Staphylococcus aureus; identical to SEQ ID NO: 7518

SEQ ID NO: 15371 - DNA, 116 bp, Staphylococcus aureus; identical to SEQ ID NO: 7519

SEQ ID NO: 15372 - DNA, 116 bp, Staphylococcus aureus; identical to SEQ ID NO: 7520

SEQ ID NO: 15373 - DNA, 164 bp, Staphylococcus aureus; identical to SEQ ID NO: 7521

SEQ ID NO: 15374 - DNA, 164 bp, Staphylococcus aureus; identical to SEQ ID NO: 7522

SEQ ID NO: 15375 - DNA, 230 bp, Staphylococcus aureus; identical to SEQ ID NO: 7523

SEQ ID NO: 15376 - DNA, 230 bp, Staphylococcus aureus; identical to SEQ ID NO: 7524

SEQ ID NO: 15377 - DNA, 66 bp, Staphylococcus aureus; identical to SEQ ID NO: 7525

SEQ ID NO: 15378 - DNA, 66 bp, Staphylococcus aureus; identical to SEQ ID NO: 7526

SEQ ID NO: 15379 - DNA, 275 bp, Staphylococcus aureus; identical to SEQ ID NO: 7527

SEQ ID NO: 15380 - DNA, 275 bp, Staphylococcus aureus; identical to SEQ ID NO: 7528

SEQ ID NO: 15381 - DNA, 546 bp, Staphylococcus aureus; identical to SEQ ID NO: 7529

SEQ ID NO: 15382 - DNA, 546 bp, Staphylococcus aureus; identical to SEQ ID NO: 7530

SEQ ID NO: 15383 - DNA, 443 bp, Staphylococcus aureus; identical to SEQ ID NO: 7531

SEQ ID NO: 15384 - DNA, 443 bp, Staphylococcus aureus; identical to SEQ ID NO: 7532

SEQ ID NO: 15385 - DNA, 213 bp, Staphylococcus aureus; identical to SEQ ID NO: 7533

SEQ ID NO: 15386 - DNA, 213 bp, Staphylococcus aureus; identical to SEQ ID NO: 7534

SEQ ID NO: 15387 - DNA, 58 bp, Staphylococcus aureus; identical to SEQ ID NO: 7535

SEQ ID NO: 15388 - DNA, 58 bp, Staphylococcus aureus; identical to SEQ ID NO: 7536

SEQ ID NO: 15389 - DNA, 341 bp, Staphylococcus aureus; identical to SEQ ID NO: 7537

SEQ ID NO: 15390 - DNA, 341 bp, Staphylococcus aureus; identical to SEQ ID NO: 7538

SEQ ID NO: 15391 - DNA, 104 bp, Staphylococcus aureus; identical to SEQ ID NO: 7539

SEQ ID NO: 15392 - DNA, 104 bp, Staphylococcus aureus; identical to SEQ ID NO: 7540

SEQ ID NO: 15393 - DNA, 77 bp, Staphylococcus aureus; identical to SEQ ID NO: 7541

SEQ ID NO: 15394 - DNA, 77 bp, Staphylococcus aureus; identical to SEQ ID NO: 7542

SEQ ID NO: 15395 - DNA, 225 bp, Staphylococcus aureus; identical to SEQ ID NO: 7543

SEQ ID NO: 15396 - DNA, 225 bp, Staphylococcus aureus; identical to SEQ ID NO: 7544

SEQ ID NO: 15397 - DNA, 170 bp, Staphylococcus aureus; identical to SEQ ID NO: 7545

SEQ ID NO: 15398 - DNA, 170 bp, Staphylococcus aureus; identical to SEQ ID NO: 7546

SEQ ID NO: 15399 - DNA, 120 bp, Staphylococcus aureus; identical to SEQ ID NO: 7547

SEQ ID NO: 15400 - DNA, 120 bp, Staphylococcus aureus; identical to SEQ ID NO: 7548

SEQ ID NO: 15401 - DNA, 155 bp, Staphylococcus aureus; identical to SEQ ID NO: 7549

SEQ ID NO: 15402 - DNA, 155 bp, Staphylococcus aureus; identical to SEQ ID NO: 7550

SEQ ID NO: 15403 - DNA, 246 bp, Staphylococcus aureus; identical to SEQ ID NO: 7551

SEQ ID NO: 15404 - DNA, 246 bp, Staphylococcus aureus; identical to SEQ ID NO: 7552

SEQ ID NO: 15405 - DNA, 247 bp, Staphylococcus aureus; identical to SEQ ID NO: 7553

SEQ ID NO: 15406 - DNA, 247 bp, Staphylococcus aureus; identical to SEQ ID NO: 7554

SEQ ID NO: 15407 - DNA, 161 bp, Staphylococcus aureus; identical to SEQ ID NO: 7555

SEQ ID NO: 15408 - DNA, 161 bp, Staphylococcus aureus; identical to SEQ ID NO: 7556

SEQ ID NO: 15409 - DNA, 114 bp, Staphylococcus aureus; identical to SEQ ID NO: 7557

SEQ ID NO: 15410 - DNA, 114 bp, Staphylococcus aureus; identical to SEQ ID NO: 7558

SEQ ID NO: 15411 - DNA, 147 bp, Staphylococcus aureus; identical to SEQ ID NO: 7559

SEQ ID NO: 15412 - DNA, 147 bp, Staphylococcus aureus; identical to SEQ ID NO: 7560

SEQ ID NO: 15413 - DNA, 71 bp, Staphylococcus aureus; identical to SEQ ID NO: 7561

SEQ ID NO: 15414 - DNA, 71 bp, Staphylococcus aureus; identical to SEQ ID NO: 7562

SEQ ID NO: 15415 - DNA, 549 bp, Staphylococcus aureus; identical to SEQ ID NO: 7563

SEQ ID NO: 15416 - DNA, 549 bp, Staphylococcus aureus; identical to SEQ ID NO: 7564

SEQ ID NO: 15417 - DNA, 146 bp, Staphylococcus aureus; identical to SEQ ID NO: 7565

SEQ ID NO: 15418 - DNA, 146 bp, Staphylococcus aureus; identical to SEQ ID NO: 7566

SEQ ID NO: 15419 - DNA, 80 bp, Staphylococcus aureus; identical to SEQ ID NO: 7567

SEQ ID NO: 15420 - DNA, 80 bp, Staphylococcus aureus; identical to SEQ ID NO: 7568

SEQ ID NO: 15421 - DNA, 120 bp, Staphylococcus aureus; identical to SEQ ID NO: 7569

SEQ ID NO: 15422 - DNA, 120 bp, Staphylococcus aureus; identical to SEQ ID NO: 7570

SEQ ID NO: 15423 - DNA, 65 bp, Staphylococcus aureus; identical to SEQ ID NO: 7571

SEQ ID NO: 15424 - DNA, 65 bp, Staphylococcus aureus; identical to SEQ ID NO: 7572

SEQ ID NO: 15425 - DNA, 149 bp, Staphylococcus aureus; identical to SEQ ID NO: 7573

SEQ ID NO: 15426 - DNA, 149 bp, Staphylococcus aureus; identical to SEQ ID NO: 7574

SEQ ID NO: 15427 - DNA, 92 bp, Staphylococcus aureus; identical to SEQ ID NO: 7575

SEQ ID NO: 15428 - DNA, 92 bp, Staphylococcus aureus; identical to SEQ ID NO: 7576

SEQ ID NO: 15429 - DNA, 50 bp, Staphylococcus aureus; identical to SEQ ID NO: 7577

SEQ ID NO: 15430 - DNA, 50 bp, Staphylococcus aureus; identical to SEQ ID NO: 7578

SEQ ID NO: 15431 - DNA, 212 bp, Staphylococcus aureus; identical to SEQ ID NO: 7579

SEQ ID NO: 15432 - DNA, 212 bp, Staphylococcus aureus; identical to SEQ ID NO: 7580

SEQ ID NO: 15433 - DNA, 157 bp, Staphylococcus aureus; identical to SEQ ID NO: 7581

SEQ ID NO: 15434 - DNA, 157 bp, Staphylococcus aureus; identical to SEQ ID NO: 7582

SEQ ID NO: 15435 - DNA, 389 bp, Staphylococcus aureus; identical to SEQ ID NO: 7583

SEQ ID NO: 15436 - DNA, 389 bp, Staphylococcus aureus; identical to SEQ ID NO: 7584

SEQ ID NO: 15437 - DNA, 138 bp, Staphylococcus aureus; identical to SEQ ID NO: 7585

SEQ ID NO: 15438 - DNA, 138 bp, Staphylococcus aureus; identical to SEQ ID NO: 7586

SEQ ID NO: 15439 - DNA, 254 bp, Staphylococcus aureus; identical to SEQ ID NO: 7587

SEQ ID NO: 15440 - DNA, 254 bp, Staphylococcus aureus; identical to SEQ ID NO: 7588

SEQ ID NO: 15441 - DNA, 164 bp, Staphylococcus aureus; identical to SEQ ID NO: 7589

SEQ ID NO: 15442 - DNA, 164 bp, Staphylococcus aureus; identical to SEQ ID NO: 7590

SEQ ID NO: 15443 - DNA, 408 bp, Staphylococcus aureus; identical to SEQ ID NO: 7591

SEQ ID NO: 15444 - DNA, 408 bp, Staphylococcus aureus; identical to SEQ ID NO: 7592

SEQ ID NO: 15445 - DNA, 68 bp, Staphylococcus aureus; identical to SEQ ID NO: 7593

SEQ ID NO: 15446 - DNA, 68 bp, Staphylococcus aureus; identical to SEQ ID NO: 7594

SEQ ID NO: 15447 - DNA, 144 bp, Staphylococcus aureus; identical to SEQ ID NO: 7595

SEQ ID NO: 15448 - DNA, 144 bp, Staphylococcus aureus; identical to SEQ ID NO: 7596

SEQ ID NO: 15449 - DNA, 95 bp, Staphylococcus aureus; identical to SEQ ID NO: 7597

SEQ ID NO: 15450 - DNA, 95 bp, Staphylococcus aureus; identical to SEQ ID NO: 7598

SEQ ID NO: 15451 - DNA, 111 bp, Staphylococcus aureus; identical to SEQ ID NO: 7599

SEQ ID NO: 15452 - DNA, 111 bp, Staphylococcus aureus; identical to SEQ ID NO: 7600

SEQ ID NO: 15453 - DNA, 61 bp, Staphylococcus aureus; identical to SEQ ID NO: 7601

SEQ ID NO: 15454 - DNA, 61 bp, Staphylococcus aureus; identical to SEQ ID NO: 7602

SEQ ID NO: 15455 - DNA, 238 bp, Staphylococcus aureus; identical to SEQ ID NO: 7603

SEQ ID NO: 15456 - DNA, 238 bp, Staphylococcus aureus; identical to SEQ ID NO: 7604

SEQ ID NO: 15457 - DNA, 239 bp, Staphylococcus aureus; identical to SEQ ID NO: 7605

SEQ ID NO: 15458 - DNA, 239 bp, Staphylococcus aureus; identical to SEQ ID NO: 7606

SEQ ID NO: 15459 - DNA, 364 bp, Staphylococcus aureus; identical to SEQ ID NO: 7607

SEQ ID NO: 15460 - DNA, 364 bp, Staphylococcus aureus; identical to SEQ ID NO: 7608

SEQ ID NO: 15461 - DNA, 90 bp, Staphylococcus aureus; identical to SEQ ID NO: 7609

SEQ ID NO: 15462 - DNA, 90 bp, Staphylococcus aureus; identical to SEQ ID NO: 7610

SEQ ID NO: 15463 - DNA, 305 bp, Staphylococcus aureus; identical to SEQ ID NO: 7611

SEQ ID NO: 15464 - DNA, 305 bp, Staphylococcus aureus; identical to SEQ ID NO: 7612

SEQ ID NO: 15465 - DNA, 165 bp, Staphylococcus aureus; identical to SEQ ID NO: 7613

SEQ ID NO: 15466 - DNA, 165 bp, Staphylococcus aureus; identical to SEQ ID NO: 7614

SEQ ID NO: 15467 - DNA, 360 bp, Staphylococcus aureus; identical to SEQ ID NO: 7615

SEQ ID NO: 15468 - DNA, 360 bp, Staphylococcus aureus; identical to SEQ ID NO: 7616

SEQ ID NO: 15469 - DNA, 512 bp, Staphylococcus aureus; identical to SEQ ID NO: 7617

SEQ ID NO: 15470 - DNA, 512 bp, Staphylococcus aureus; identical to SEQ ID NO: 7618

SEQ ID NO: 15471 - DNA, 275 bp, Staphylococcus aureus; identical to SEQ ID NO: 7619

SEQ ID NO: 15472 - DNA, 275 bp, Staphylococcus aureus; identical to SEQ ID NO: 7620

SEQ ID NO: 15473 - DNA, 607 bp, Staphylococcus aureus; identical to SEQ ID NO: 7621

SEQ ID NO: 15474 - DNA, 607 bp, Staphylococcus aureus; identical to SEQ ID NO: 7622

SEQ ID NO: 15475 - DNA, 50 bp, Staphylococcus aureus; identical to SEQ ID NO: 7623

SEQ ID NO: 15476 - DNA, 50 bp, Staphylococcus aureus; identical to SEQ ID NO: 7624

SEQ ID NO: 15477 - DNA, 63 bp, Staphylococcus aureus; identical to SEQ ID NO: 7625

SEQ ID NO: 15478 - DNA, 63 bp, Staphylococcus aureus; identical to SEQ ID NO: 7626

SEQ ID NO: 15479 - DNA, 106 bp, Staphylococcus aureus; identical to SEQ ID NO: 7627

SEQ ID NO: 15480 - DNA, 106 bp, Staphylococcus aureus; identical to SEQ ID NO: 7628

SEQ ID NO: 15481 - DNA, 219 bp, Staphylococcus aureus; identical to SEQ ID NO: 7629

SEQ ID NO: 15482 - DNA, 219 bp, Staphylococcus aureus; identical to SEQ ID NO: 7630

SEQ ID NO: 15483 - DNA, 72 bp, Staphylococcus aureus; identical to SEQ ID NO: 7631

SEQ ID NO: 15484 - DNA, 72 bp, Staphylococcus aureus; identical to SEQ ID NO: 7632

SEQ ID NO: 15485 - DNA, 70 bp, Staphylococcus aureus; identical to SEQ ID NO: 7633

SEQ ID NO: 15486 - DNA, 70 bp, Staphylococcus aureus; identical to SEQ ID NO: 7634

SEQ ID NO: 15487 - DNA, 130 bp, Staphylococcus aureus; identical to SEQ ID NO: 7635

SEQ ID NO: 15488 - DNA, 130 bp, Staphylococcus aureus; identical to SEQ ID NO: 7636

SEQ ID NO: 15489 - DNA, 146 bp, Staphylococcus aureus; identical to SEQ ID NO: 7637

SEQ ID NO: 15490 - DNA, 146 bp, Staphylococcus aureus; identical to SEQ ID NO: 7638

SEQ ID NO: 15491 - DNA, 96 bp, Staphylococcus aureus; identical to SEQ ID NO: 7639

SEQ ID NO: 15492 - DNA, 96 bp, Staphylococcus aureus; identical to SEQ ID NO: 7640

SEQ ID NO: 15493 - DNA, 332 bp, Staphylococcus aureus; identical to SEQ ID NO: 7641

SEQ ID NO: 15494 - DNA, 332 bp, Staphylococcus aureus; identical to SEQ ID NO: 7642

SEQ ID NO: 15495 - DNA, 191 bp, Staphylococcus aureus; identical to SEQ ID NO: 7643

SEQ ID NO: 15496 - DNA, 191 bp, Staphylococcus aureus; identical to SEQ ID NO: 7644

SEQ ID NO: 15497 - DNA, 66 bp, Staphylococcus aureus; identical to SEQ ID NO: 7645

SEQ ID NO: 15498 - DNA, 66 bp, Staphylococcus aureus; identical to SEQ ID NO: 7646

SEQ ID NO: 15499 - DNA, 217 bp, Staphylococcus aureus; identical to SEQ ID NO: 7647

SEQ ID NO: 15500 - DNA, 217 bp, Staphylococcus aureus; identical to SEQ ID NO: 7648

SEQ ID NO: 15501 - DNA, 154 bp, Staphylococcus aureus; identical to SEQ ID NO: 7649

SEQ ID NO: 15502 - DNA, 154 bp, Staphylococcus aureus; identical to SEQ ID NO: 7650

SEQ ID NO: 15503 - DNA, 353 bp, Staphylococcus aureus; identical to SEQ ID NO: 7651

SEQ ID NO: 15504 - DNA, 353 bp, Staphylococcus aureus; identical to SEQ ID NO: 7652

SEQ ID NO: 15505 - DNA, 80 bp, Staphylococcus aureus; identical to SEQ ID NO: 7653

SEQ ID NO: 15506 - DNA, 80 bp, Staphylococcus aureus; identical to SEQ ID NO: 7654

SEQ ID NO: 15507 - DNA, 97 bp, Staphylococcus aureus; identical to SEQ ID NO: 7655

SEQ ID NO: 15508 - DNA, 97 bp, Staphylococcus aureus; identical to SEQ ID NO: 7656

SEQ ID NO: 15509 - DNA, 252 bp, Staphylococcus aureus; identical to SEQ ID NO: 7657

SEQ ID NO: 15510 - DNA, 252 bp, Staphylococcus aureus; identical to SEQ ID NO: 7658

SEQ ID NO: 15511 - DNA, 342 bp, Staphylococcus aureus; identical to SEQ ID NO: 7659

SEQ ID NO: 15512 - DNA, 342 bp, Staphylococcus aureus; identical to SEQ ID NO: 7660

SEQ ID NO: 15513 - DNA, 72 bp, Staphylococcus aureus; identical to SEQ ID NO: 7661

SEQ ID NO: 15514 - DNA, 72 bp, Staphylococcus aureus; identical to SEQ ID NO: 7662

SEQ ID NO: 15515 - DNA, 85 bp, Staphylococcus aureus; identical to SEQ ID NO: 7663

SEQ ID NO: 15516 - DNA, 85 bp, Staphylococcus aureus; identical to SEQ ID NO: 7664

SEQ ID NO: 15517 - DNA, 277 bp, Staphylococcus aureus; identical to SEQ ID NO: 7665

SEQ ID NO: 15518 - DNA, 277 bp, Staphylococcus aureus; identical to SEQ ID NO: 7666

SEQ ID NO: 15519 - DNA, 685 bp, Staphylococcus aureus; identical to SEQ ID NO: 7667

SEQ ID NO: 15520 - DNA, 685 bp, Staphylococcus aureus; identical to SEQ ID NO: 7668

SEQ ID NO: 15521 - DNA, 80 bp, Staphylococcus aureus; identical to SEQ ID NO: 7669

SEQ ID NO: 15522 - DNA, 80 bp, Staphylococcus aureus; identical to SEQ ID NO: 7670

SEQ ID NO: 15523 - DNA, 221 bp, Staphylococcus aureus; identical to SEQ ID NO: 7671

SEQ ID NO: 15524 - DNA, 221 bp, Staphylococcus aureus; identical to SEQ ID NO: 7672

SEQ ID NO: 15525 - DNA, 122 bp, Staphylococcus aureus; identical to SEQ ID NO: 7673

SEQ ID NO: 15526 - DNA, 122 bp, Staphylococcus aureus; identical to SEQ ID NO: 7674

SEQ ID NO: 15527 - DNA, 193 bp, Staphylococcus aureus; identical to SEQ ID NO: 7675

SEQ ID NO: 15528 - DNA, 193 bp, Staphylococcus aureus; identical to SEQ ID NO: 7676

SEQ ID NO: 15529 - DNA, 208 bp, Staphylococcus aureus; identical to SEQ ID NO: 7677

SEQ ID NO: 15530 - DNA, 208 bp, Staphylococcus aureus; identical to SEQ ID NO: 7678

SEQ ID NO: 15531 - DNA, 59 bp, Staphylococcus aureus; identical to SEQ ID NO: 7679

SEQ ID NO: 15532 - DNA, 59 bp, Staphylococcus aureus; identical to SEQ ID NO: 7680

SEQ ID NO: 15533 - DNA, 172 bp, Staphylococcus aureus; identical to SEQ ID NO: 7681

SEQ ID NO: 15534 - DNA, 172 bp, Staphylococcus aureus; identical to SEQ ID NO: 7682

SEQ ID NO: 15535 - DNA, 279 bp, Staphylococcus aureus; identical to SEQ ID NO: 7683

SEQ ID NO: 15536 - DNA, 279 bp, Staphylococcus aureus; identical to SEQ ID NO: 7684

SEQ ID NO: 15537 - DNA, 277 bp, Staphylococcus aureus; identical to SEQ ID NO: 7685

SEQ ID NO: 15538 - DNA, 277 bp, Staphylococcus aureus; identical to SEQ ID NO: 7686

SEQ ID NO: 15539 - DNA, 152 bp, Staphylococcus aureus; identical to SEQ ID NO: 7687

SEQ ID NO: 15540 - DNA, 152 bp, Staphylococcus aureus; identical to SEQ ID NO: 7688

SEQ ID NO: 15541 - DNA, 69 bp, Staphylococcus aureus; identical to SEQ ID NO: 7689

SEQ ID NO: 15542 - DNA, 69 bp, Staphylococcus aureus; identical to SEQ ID NO: 7690

SEQ ID NO: 15543 - DNA, 88 bp, Staphylococcus aureus; identical to SEQ ID NO: 7691

SEQ ID NO: 15544 - DNA, 88 bp, Staphylococcus aureus; identical to SEQ ID NO: 7692

SEQ ID NO: 15545 - DNA, 170 bp, Staphylococcus aureus; identical to SEQ ID NO: 7693

SEQ ID NO: 15546 - DNA, 170 bp, Staphylococcus aureus; identical to SEQ ID NO: 7694

SEQ ID NO: 15547 - DNA, 132 bp, Staphylococcus aureus; identical to SEQ ID NO: 7695

SEQ ID NO: 15548 - DNA, 132 bp, Staphylococcus aureus; identical to SEQ ID NO: 7696

SEQ ID NO: 15549 - DNA, 67 bp, Staphylococcus aureus; identical to SEQ ID NO: 7697

SEQ ID NO: 15550 - DNA, 67 bp, Staphylococcus aureus; identical to SEQ ID NO: 7698

SEQ ID NO: 15551 - DNA, 99 bp, Staphylococcus aureus; identical to SEQ ID NO: 7699

SEQ ID NO: 15552 - DNA, 99 bp, Staphylococcus aureus; identical to SEQ ID NO: 7700

SEQ ID NO: 15553 - DNA, 189 bp, Staphylococcus aureus; identical to SEQ ID NO: 7701

SEQ ID NO: 15554 - DNA, 189 bp, Staphylococcus aureus; identical to SEQ ID NO: 7702

SEQ ID NO: 15555 - DNA, 306 bp, Staphylococcus aureus; identical to SEQ ID NO: 7703

SEQ ID NO: 15556 - DNA, 306 bp, Staphylococcus aureus; identical to SEQ ID NO: 7704

SEQ ID NO: 15557 - DNA, 75 bp, Staphylococcus aureus; identical to SEQ ID NO: 7705

SEQ ID NO: 15558 - DNA, 75 bp, Staphylococcus aureus; identical to SEQ ID NO: 7706

SEQ ID NO: 15559 - DNA, 62 bp, Staphylococcus aureus; identical to SEQ ID NO: 7707

SEQ ID NO: 15560 - DNA, 62 bp, Staphylococcus aureus; identical to SEQ ID NO: 7708

SEQ ID NO: 15561 - DNA, 249 bp, Staphylococcus aureus; identical to SEQ ID NO: 7709

SEQ ID NO: 15562 - DNA, 249 bp, Staphylococcus aureus; identical to SEQ ID NO: 7710

SEQ ID NO: 15563 - DNA, 655 bp, Staphylococcus aureus; identical to SEQ ID NO: 7711

SEQ ID NO: 15564 - DNA, 655 bp, Staphylococcus aureus; identical to SEQ ID NO: 7712

SEQ ID NO: 15565 - DNA, 655 bp, Staphylococcus aureus; identical to SEQ ID NO: 7713

SEQ ID NO: 15566 - DNA, 655 bp, Staphylococcus aureus; identical to SEQ ID NO: 7714

SEQ ID NO: 15567 - DNA, 107 bp, Staphylococcus aureus; identical to SEQ ID NO: 7715

SEQ ID NO: 15568 - DNA, 107 bp, Staphylococcus aureus; identical to SEQ ID NO: 7716

SEQ ID NO: 15569 - DNA, 197 bp, Staphylococcus aureus; identical to SEQ ID NO: 7717

SEQ ID NO: 15570 - DNA, 197 bp, Staphylococcus aureus; identical to SEQ ID NO: 7718

SEQ ID NO: 15571 - DNA, 70 bp, Staphylococcus aureus; identical to SEQ ID NO: 7719

SEQ ID NO: 15572 - DNA, 70 bp, Staphylococcus aureus; identical to SEQ ID NO: 7720

SEQ ID NO: 15573 - DNA, 105 bp, Staphylococcus aureus; identical to SEQ ID NO: 7721

SEQ ID NO: 15574 - DNA, 105 bp, Staphylococcus aureus; identical to SEQ ID NO: 7722

SEQ ID NO: 15575 - DNA, 181 bp, Staphylococcus aureus; identical to SEQ ID NO: 7723

SEQ ID NO: 15576 - DNA, 181 bp, Staphylococcus aureus; identical to SEQ ID NO: 7724

SEQ ID NO: 15577 - DNA, 115 bp, Staphylococcus aureus; identical to SEQ ID NO: 7725

SEQ ID NO: 15578 - DNA, 115 bp, Staphylococcus aureus; identical to SEQ ID NO: 7726

SEQ ID NO: 15579 - DNA, 349 bp, Staphylococcus aureus; identical to SEQ ID NO: 7727

SEQ ID NO: 15580 - DNA, 349 bp, Staphylococcus aureus; identical to SEQ ID NO: 7728

SEQ ID NO: 15581 - DNA, 98 bp, Staphylococcus aureus; identical to SEQ ID NO: 7729

SEQ ID NO: 15582 - DNA, 98 bp, Staphylococcus aureus; identical to SEQ ID NO: 7730

SEQ ID NO: 15583 - DNA, 90 bp, Staphylococcus aureus; identical to SEQ ID NO: 7731

SEQ ID NO: 15584 - DNA, 90 bp, Staphylococcus aureus; identical to SEQ ID NO: 7732

SEQ ID NO: 15585 - DNA, 346 bp, Staphylococcus aureus; identical to SEQ ID NO: 7733

SEQ ID NO: 15586 - DNA, 346 bp, Staphylococcus aureus; identical to SEQ ID NO: 7734

SEQ ID NO: 15587 - DNA, 315 bp, Staphylococcus aureus; identical to SEQ ID NO: 7735

SEQ ID NO: 15588 - DNA, 315 bp, Staphylococcus aureus; identical to SEQ ID NO: 7736

SEQ ID NO: 15589 - DNA, 423 bp, Staphylococcus aureus; identical to SEQ ID NO: 7737

SEQ ID NO: 15590 - DNA, 423 bp, Staphylococcus aureus; identical to SEQ ID NO: 7738

SEQ ID NO: 15591 - DNA, 257 bp, Staphylococcus aureus; identical to SEQ ID NO: 7739

SEQ ID NO: 15592 - DNA, 257 bp, Staphylococcus aureus; identical to SEQ ID NO: 7740

SEQ ID NO: 15593 - DNA, 239 bp, Staphylococcus aureus; identical to SEQ ID NO: 7741

SEQ ID NO: 15594 - DNA, 239 bp, Staphylococcus aureus; identical to SEQ ID NO: 7742

SEQ ID NO: 15595 - DNA, 111 bp, Staphylococcus aureus; identical to SEQ ID NO: 7743

SEQ ID NO: 15596 - DNA, 111 bp, Staphylococcus aureus; identical to SEQ ID NO: 7744

SEQ ID NO: 15597 - DNA, 210 bp, Staphylococcus aureus; identical to SEQ ID NO: 7745

SEQ ID NO: 15598 - DNA, 210 bp, Staphylococcus aureus; identical to SEQ ID NO: 7746

SEQ ID NO: 15599 - DNA, 264 bp, Staphylococcus aureus; identical to SEQ ID NO: 7747

SEQ ID NO: 15600 - DNA, 264 bp, Staphylococcus aureus; identical to SEQ ID NO: 7748

SEQ ID NO: 15601 - DNA, 168 bp, Staphylococcus aureus; identical to SEQ ID NO: 7749

SEQ ID NO: 15602 - DNA, 168 bp, Staphylococcus aureus; identical to SEQ ID NO: 7750

SEQ ID NO: 15603 - DNA, 240 bp, Staphylococcus aureus; identical to SEQ ID NO: 7751

SEQ ID NO: 15604 - DNA, 240 bp, Staphylococcus aureus; identical to SEQ ID NO: 7752

SEQ ID NO: 15605 - DNA, 129 bp, Staphylococcus aureus; identical to SEQ ID NO: 7753

SEQ ID NO: 15606 - DNA, 129 bp, Staphylococcus aureus; identical to SEQ ID NO: 7754

SEQ ID NO: 15607 - DNA, 387 bp, Staphylococcus aureus; identical to SEQ ID NO: 7755

SEQ ID NO: 15608 - DNA, 387 bp, Staphylococcus aureus; identical to SEQ ID NO: 7756

SEQ ID NO: 15609 - DNA, 234 bp, Staphylococcus aureus; identical to SEQ ID NO: 7757

SEQ ID NO: 15610 - DNA, 234 bp, Staphylococcus aureus; identical to SEQ ID NO: 7758

SEQ ID NO: 15611 - DNA, 52 bp, Staphylococcus aureus; identical to SEQ ID NO: 7759

SEQ ID NO: 15612 - DNA, 52 bp, Staphylococcus aureus; identical to SEQ ID NO: 7760

SEQ ID NO: 15613 - DNA, 78 bp, Staphylococcus aureus; identical to SEQ ID NO: 7761

SEQ ID NO: 15614 - DNA, 78 bp, Staphylococcus aureus; identical to SEQ ID NO: 7762

SEQ ID NO: 15615 - DNA, 234 bp, Staphylococcus aureus; identical to SEQ ID NO: 7763

SEQ ID NO: 15616 - DNA, 234 bp, Staphylococcus aureus; identical to SEQ ID NO: 7764

SEQ ID NO: 15617 - DNA, 848 bp, Staphylococcus aureus; identical to SEQ ID NO: 7765

SEQ ID NO: 15618 - DNA, 848 bp, Staphylococcus aureus; identical to SEQ ID NO: 7766

SEQ ID NO: 15619 - DNA, 163 bp, Staphylococcus aureus; identical to SEQ ID NO: 7767

SEQ ID NO: 15620 - DNA, 163 bp, Staphylococcus aureus; identical to SEQ ID NO: 7768

SEQ ID NO: 15621 - DNA, 142 bp, Staphylococcus aureus; identical to SEQ ID NO: 7769

SEQ ID NO: 15622 - DNA, 142 bp, Staphylococcus aureus; identical to SEQ ID NO: 7770

SEQ ID NO: 15623 - DNA, 718 bp, Staphylococcus aureus; identical to SEQ ID NO: 7771

SEQ ID NO: 15624 - DNA, 718 bp, Staphylococcus aureus; identical to SEQ ID NO: 7772

SEQ ID NO: 15625 - DNA, 159 bp, Staphylococcus aureus; identical to SEQ ID NO: 7773

SEQ ID NO: 15626 - DNA, 159 bp, Staphylococcus aureus; identical to SEQ ID NO: 7774

SEQ ID NO: 15627 - DNA, 303 bp, Staphylococcus aureus; identical to SEQ ID NO: 7775

SEQ ID NO: 15628 - DNA, 303 bp, Staphylococcus aureus; identical to SEQ ID NO: 7776

SEQ ID NO: 15629 - DNA, 117 bp, Staphylococcus aureus; identical to SEQ ID NO: 7777

SEQ ID NO: 15630 - DNA, 117 bp, Staphylococcus aureus; identical to SEQ ID NO: 7778

SEQ ID NO: 15631 - DNA, 52 bp, Staphylococcus aureus; identical to SEQ ID NO: 7779

SEQ ID NO: 15632 - DNA, 52 bp, Staphylococcus aureus; identical to SEQ ID NO: 7780

SEQ ID NO: 15633 - DNA, 378 bp, Staphylococcus aureus; identical to SEQ ID NO: 7781

SEQ ID NO: 15634 - DNA, 378 bp, Staphylococcus aureus; identical to SEQ ID NO: 7782

SEQ ID NO: 15635 - DNA, 150 bp, Staphylococcus aureus; identical to SEQ ID NO: 7783

SEQ ID NO: 15636 - DNA, 150 bp, Staphylococcus aureus; identical to SEQ ID NO: 7784

SEQ ID NO: 15637 - DNA, 156 bp, Staphylococcus aureus; identical to SEQ ID NO: 7785

SEQ ID NO: 15638 - DNA, 156 bp, Staphylococcus aureus; identical to SEQ ID NO: 7786

SEQ ID NO: 15639 - DNA, 151 bp, Staphylococcus aureus; identical to SEQ ID NO: 7787

SEQ ID NO: 15640 - DNA, 151 bp, Staphylococcus aureus; identical to SEQ ID NO: 7788

SEQ ID NO: 15641 - DNA, 118 bp, Staphylococcus aureus; identical to SEQ ID NO: 7789

SEQ ID NO: 15642 - DNA, 118 bp, Staphylococcus aureus; identical to SEQ ID NO: 7790

SEQ ID NO: 15643 - DNA, 166 bp, Staphylococcus aureus; identical to SEQ ID NO: 7791

SEQ ID NO: 15644 - DNA, 166 bp, Staphylococcus aureus; identical to SEQ ID NO: 7792

SEQ ID NO: 15645 - DNA, 237 bp, Staphylococcus aureus; identical to SEQ ID NO: 7793

SEQ ID NO: 15646 - DNA, 237 bp, Staphylococcus aureus; identical to SEQ ID NO: 7794

SEQ ID NO: 15647 - DNA, 147 bp, Staphylococcus aureus; identical to SEQ ID NO: 7795

SEQ ID NO: 15648 - DNA, 147 bp, Staphylococcus aureus; identical to SEQ ID NO: 7796

SEQ ID NO: 15649 - DNA, 187 bp, Staphylococcus aureus; identical to SEQ ID NO: 7797

SEQ ID NO: 15650 - DNA, 187 bp, Staphylococcus aureus; identical to SEQ ID NO: 7798

SEQ ID NO: 15651 - DNA, 162 bp, Staphylococcus aureus; identical to SEQ ID NO: 7799

SEQ ID NO: 15652 - DNA, 162 bp, Staphylococcus aureus; identical to SEQ ID NO: 7800

SEQ ID NO: 15653 - DNA, 161 bp, Staphylococcus aureus; identical to SEQ ID NO: 7801

SEQ ID NO: 15654 - DNA, 161 bp, Staphylococcus aureus; identical to SEQ ID NO: 7802

SEQ ID NO: 15655 - DNA, 68 bp, Staphylococcus aureus; identical to SEQ ID NO: 7803

SEQ ID NO: 15656 - DNA, 68 bp, Staphylococcus aureus; identical to SEQ ID NO: 7804

SEQ ID NO: 15657 - DNA, 76 bp, Staphylococcus aureus; identical to SEQ ID NO: 7805

SEQ ID NO: 15658 - DNA, 76 bp, Staphylococcus aureus; identical to SEQ ID NO: 7806

SEQ ID NO: 15659 - DNA, 133 bp, Staphylococcus aureus; identical to SEQ ID NO: 7807

SEQ ID NO: 15660 - DNA, 133 bp, Staphylococcus aureus; identical to SEQ ID NO: 7808

SEQ ID NO: 15661 - DNA, 282 bp, Staphylococcus aureus; identical to SEQ ID NO: 7809

SEQ ID NO: 15662 - DNA, 282 bp, Staphylococcus aureus; identical to SEQ ID NO: 7810

SEQ ID NO: 15663 - DNA, 91 bp, Staphylococcus aureus; identical to SEQ ID NO: 7811

SEQ ID NO: 15664 - DNA, 91 bp, Staphylococcus aureus; identical to SEQ ID NO: 7812

SEQ ID NO: 15665 - DNA, 391 bp, Staphylococcus aureus; identical to SEQ ID NO: 7813

SEQ ID NO: 15666 - DNA, 391 bp, Staphylococcus aureus; identical to SEQ ID NO: 7814

SEQ ID NO: 15667 - DNA, 117 bp, Staphylococcus aureus; identical to SEQ ID NO: 7815

SEQ ID NO: 15668 - DNA, 117 bp, Staphylococcus aureus; identical to SEQ ID NO: 7816

SEQ ID NO: 15669 - DNA, 259 bp, Staphylococcus aureus; identical to SEQ ID NO: 7817

SEQ ID NO: 15670 - DNA, 259 bp, Staphylococcus aureus; identical to SEQ ID NO: 7818

SEQ ID NO: 15671 - DNA, 67 bp, Staphylococcus aureus; identical to SEQ ID NO: 7819

SEQ ID NO: 15672 - DNA, 67 bp, Staphylococcus aureus; identical to SEQ ID NO: 7820

SEQ ID NO: 15673 - DNA, 187 bp, Staphylococcus aureus; identical to SEQ ID NO: 7821

SEQ ID NO: 15674 - DNA, 187 bp, Staphylococcus aureus; identical to SEQ ID NO: 7822

SEQ ID NO: 15675 - DNA, 113 bp, Staphylococcus aureus; identical to SEQ ID NO: 7823

SEQ ID NO: 15676 - DNA, 113 bp, Staphylococcus aureus; identical to SEQ ID NO: 7824

SEQ ID NO: 15677 - DNA, 66 bp, Staphylococcus aureus; identical to SEQ ID NO: 7825

SEQ ID NO: 15678 - DNA, 66 bp, Staphylococcus aureus; identical to SEQ ID NO: 7826

SEQ ID NO: 15679 - DNA, 156 bp, Staphylococcus aureus; identical to SEQ ID NO: 7827

SEQ ID NO: 15680 - DNA, 156 bp, Staphylococcus aureus; identical to SEQ ID NO: 7828

SEQ ID NO: 15681 - DNA, 126 bp, Staphylococcus aureus; identical to SEQ ID NO: 7829

SEQ ID NO: 15682 - DNA, 126 bp, Staphylococcus aureus; identical to SEQ ID NO: 7830

SEQ ID NO: 15683 - DNA, 948 bp, Staphylococcus aureus; identical to SEQ ID NO: 7831

SEQ ID NO: 15684 - DNA, 48 bp, Staphylococcus aureus; identical to SEQ ID NO: 7832

SEQ ID NO: 15685 - DNA, 849 bp, Staphylococcus aureus; identical to SEQ ID NO: 7833

SEQ ID NO: 15686 - DNA, 609 bp, Staphylococcus aureus; identical to SEQ ID NO: 7834

SEQ ID NO: 15687 - DNA, 1293 bp, Staphylococcus aureus; identical to SEQ ID NO: 7835

SEQ ID NO: 15688 - DNA, 786 bp, Staphylococcus aureus; identical to SEQ ID NO: 7836

SEQ ID NO: 15689 - DNA, 87 bp, Staphylococcus aureus; identical to SEQ ID NO: 7837

SEQ ID NO: 15690 - DNA, 466 bp, Staphylococcus aureus; identical to SEQ ID NO: 7838
  misc_feature (146)..(146): n is a, c, g, or t
  misc_feature (161)..(161): n is a, c, g, or t

SEQ ID NO: 15691 - DNA, 450 bp, Staphylococcus aureus; identical to SEQ ID NO: 7839

SEQ ID NO: 15692 - DNA, 393 bp, Staphylococcus aureus; identical to SEQ ID NO: 7840

SEQ ID NO: 15693 - DNA, 52 bp, Staphylococcus aureus; identical to SEQ ID NO: 7841

SEQ ID NO: 15694 - DNA, 558 bp, Staphylococcus aureus; identical to SEQ ID NO: 7842

SEQ ID NO: 15695 - DNA, 1404 bp, Staphylococcus aureus; identical to SEQ ID NO: 7843

SEQ ID NO: 15696 - DNA, 1887 bp, Staphylococcus aureus; identical to SEQ ID NO: 7844

SEQ ID NO: 15697 - DNA, 174 bp, Staphylococcus aureus; identical to SEQ ID NO: 7845

SEQ ID NO: 15698 - DNA, 285 bp, Staphylococcus aureus; identical to SEQ ID NO: 7846

SEQ ID NO: 15699 - DNA, 555 bp, Staphylococcus aureus; identical to SEQ ID NO: 7847

SEQ ID NO: 15700 - DNA, 836 bp, Staphylococcus aureus; identical to SEQ ID NO: 7848

SEQ ID NO: 15701 - DNA, 162 bp, Staphylococcus aureus; identical to SEQ ID NO: 7849

SEQ ID NO: 15702 - DNA, 184 bp, Staphylococcus aureus; identical to SEQ ID NO: 7850

SEQ ID NO: 15703 - DNA, 3516 bp, Staphylococcus aureus; identical to SEQ ID NO: 7851

SEQ ID NO: 15704 - DNA, 4248 bp, Staphylococcus aureus; identical to SEQ ID NO: 7852

SEQ ID NO: 15705 - DNA, 25 bp, Probe sequence
aagtatgttagatatgataggcggt

SEQ ID NO: 15706 - DNA, 25 bp, Probe sequence
agtatgttagatatgataggcggta

SEQ ID NO: 15707 - DNA, 25 bp, Probe sequence
acacaatgatagcaactgttagaga

SEQ ID NO: 15708 - DNA, 25 bp, Probe sequence
cacaatgatagcaactgttagagaa

SEQ ID NO: 15709 - DNA, 25 bp, Probe sequence
aagtggagaagtaatagaggtagat

SEQ ID NO: 15710 - DNA, 25 bp, Probe sequence
ggagaagtaatagaggtagataagc

SEQ ID NO: 15711 - DNA, 25 bp, Probe sequence
gtatgttagatatgataggcggtaa

SEQ ID NO: 15712 - DNA, 25 bp, Probe sequence
taagtatgttagatatgataggcgg

SEQ ID NO: 15713 - DNA, 25 bp, Probe sequence
aatagcagaaggaacaaatacaagc

SEQ ID NO: 15714 - DNA, 25 bp, Probe sequence
agtatgttagatatgattggcggaa

SEQ ID NO: 15715 - DNA, 25 bp, Probe sequence
aagtatgttagatatgattggcgga

SEQ ID NO: 15716 - DNA, 25 bp, Probe sequence
taagtatgttagatatgattggcgg

SEQ ID NO: 15717 - DNA, 25 bp, Probe sequence
gagaagtcatagaggtagacaagtt

SEQ ID NO: 15718 - DNA, 25 bp, Probe sequence
ggagaagtcatagaggtagacaagt

SEQ ID NO: 15719 - DNA, 25 bp, Probe sequence
tggagaagtcatagaggtagacaag

SEQ ID NO: 15720 - DNA, 25 bp, Probe sequence
aagtggagaagtcatagaggtagac

SEQ ID NO: 15721 - DNA, 25 bp, Probe sequence
gtggagaagtcatagaggtagacaa

SEQ ID NO: 15722 - DNA, 25 bp, Probe sequence
agtggagaagtcatagaggtagaca

SEQ ID NO: 15723 - DNA, 25 bp, Probe sequence
atcgtccagaatcattattagatgc

SEQ ID NO: 15724 - DNA, 25 bp, Probe sequence
aatgaatcagttgttggtaaggcac

SEQ ID NO: 15725 - DNA, 25 bp, Probe sequence
attatctgaattaggtctaggttgc

SEQ ID NO: 15726 - DNA, 25 bp, Probe sequence
atctgaattaggtctaggttgcatg

SEQ ID NO: 15727 - DNA, 25 bp, Probe sequence
gtgcttacggtatttcttctattcg

SEQ ID NO: 15728 - DNA, 25 bp, Probe sequence
gaattaggtctaggttgcatgagtt

SEQ ID NO: 15729 - DNA, 25 bp, Probe sequence
gatgttaaagtattggcaagaggac

SEQ ID NO: 15730 - DNA, 25 bp, Probe sequence
tgatgttaaagtattggcaagagga

SEQ ID NO: 15731 - DNA, 25 bp, Probe sequence
ttatctgaattaggtctaggttgca

SEQ ID NO: 15732 - DNA, 25 bp, Probe sequence
tgatattacgccaccagattatgaa

SEQ ID NO: 15733 - DNA, 25 bp, Probe sequence
ttgatattacgccaccagattatga

SEQ ID NO: 15734 - DNA, 25 bp, Probe sequence
gttgatattacgccaccagattatg

SEQ ID NO: 15735 - DNA, 25 bp, Probe sequence
tgttgatattacgccaccagattat

SEQ ID NO: 15736 - DNA, 25 bp, Probe sequence
ttgttgatattacgccaccagatta

SEQ ID NO: 15737 - DNA, 25 bp, Probe sequence
attgttgatattacgccaccagatt

SEQ ID NO: 15738 - DNA, 25 bp, Probe sequence
aattgttgatattacgccaccagat

SEQ ID NO: 15739 - DNA, 25 bp, Probe sequence
ctaattgttgatattacgccaccag

SEQ ID NO: 15740 - DNA, 25 bp, Probe sequence
taattgttgatattacgccaccaga

SEQ ID NO: 15741 - DNA, 25 bp, Probe sequence
atcattcagcattacattctcgttg

SEQ ID NO: 15742 - DNA, 25 bp, Probe sequence
aatcattcagcattacattctcgtt

SEQ ID NO: 15743 - DNA, 25 bp, Probe sequence
acgattaagtggtattcctattgag

SEQ ID NO: 15744 - DNA, 25 bp, Probe sequence
atgagtgccacatatacacatagtt

SEQ ID NO: 15745 - DNA, 25 bp, Probe sequence
aacgattaagtggtattcctattga

SEQ ID NO: 15746 - DNA, 25 bp, Probe sequence
ggttatgagtgccacatatacacat

SEQ ID NO: 15747 - DNA, 25 bp, Probe sequence
cgatacacttgctggtatgattaca

SEQ ID NO: 15748 - DNA, 25 bp, Probe sequence
tatgagtgccacatatacacatagt

SEQ ID NO: 15749 - DNA, 25 bp, Probe sequence
gatacacttgctggtatgattacaa

SEQ ID NO: 15750 - DNA, 25 bp, Probe sequence
cgataatgatgaggttgaagttgaa

SEQ ID NO: 15751 - DNA, 25 bp, Probe sequence
aactgtagatggcgaagatattgtc

SEQ ID NO: 15752 - DNA, 25 bp, Probe sequence
ctgtagatggcgaagatattgtcaa

SEQ ID NO: 15753 - DNA, 25 bp, Probe sequence
ctaactggtgtgaactggcttatac

SEQ ID NO: 15754 - DNA, 25 bp, Probe sequence
tgtagatggcgaagatattgtcaat

SEQ ID NO: 15755 - DNA, 25 bp, Probe sequence
actaactggtgtgaactggcttata

SEQ ID NO: 15756 - DNA, 25 bp, Probe sequence
tactaactggtgtgaactggcttat

SEQ ID NO: 15757 - DNA, 25 bp, Probe sequence
actgtagatggcgaagatattgtca

SEQ ID NO: 15758 - DNA, 25 bp, Probe sequence
ggcttagatccagatcaatatcctt

SEQ ID NO: 15759 - DNA, 25 bp, Probe sequence
acttctatgatgtctatcttggtgt

SEQ ID NO: 15760 - DNA, 25 bp, Probe sequence
ctatgatgtctatcttggtgtatgg

SEQ ID NO: 15761 - DNA, 25 bp, Probe sequence
aacttctatgatgtctatcttggtg

SEQ ID NO: 15762 - DNA, 25 bp, Probe sequence
tctatgatgtctatcttggtgtatg

SEQ ID NO: 15763 - DNA, 25 bp, Probe sequence
cttctatgatgtctatcttggtgta

SEQ ID NO: 15764 - DNA, 25 bp, Probe sequence
ttcatattctgctatggcttgcttc

SEQ ID NO: 15765 - DNA, 25 bp, Probe sequence
tgtgtatttgtggataactctgtgg

SEQ ID NO: 15766 - DNA, 25 bp, Probe sequence
ttgtgtatttgtggataactctgtg

SEQ ID NO: 15767 - DNA, 25 bp, Probe sequence
tatgatgtctatcttggtgtatggg

SEQ ID NO: 15768 - DNA, 25 bp, Probe sequence
ggtggtaaggaaggtctaagtattg

SEQ ID NO: 15769 - DNA, 25 bp, Probe sequence
tggtggtaaggaaggtctaagtatt

SEQ ID NO: 15770 - DNA, 25 bp, Probe sequence
ttggtggtaaggaaggtctaagtat

SEQ ID NO: 15771 - DNA, 25 bp, Probe sequence
gtggtaaggaaggtctaagtattgc

SEQ ID NO: 15772 - DNA, 25 bp, Probe sequence
cttggtggtaaggaaggtctaagta

SEQ ID NO: 15773 - DNA, 25 bp, Probe sequence
atcttggtggtaaggaaggtctaag

SEQ ID NO: 15774 - DNA, 25 bp, Probe sequence
actgctagatgtattggatagtcac

SEQ ID NO: 15775 - DNA, 25 bp, Probe sequence
cactgctagatgtattggatagtca

SEQ ID NO: 15776 - DNA, 25 bp, Probe sequence
catcttggtggtaaggaaggtctaa

SEQ ID NO: 15777 - DNA, 25 bp, Probe sequence
accatactattcaacaacgactcaa

SEQ ID NO: 15778 - DNA, 25 bp, Probe sequence
aaccatactattcaacaacgactca

SEQ ID NO: 15779 - DNA, 25 bp, Probe sequence
gctgtgttcaattattaccttcaag

SEQ ID NO: 15780 - DNA, 25 bp, Probe sequence
tctgataatataggcgaacaagtca

SEQ ID NO: 15781 - DNA, 25 bp, Probe sequence
atctgataatataggcgaacaagtc

SEQ ID NO: 15782 - DNA, 25 bp, Probe sequence
tcagtacaacgatatacgaagaagc

SEQ ID NO: 15783 - DNA, 25 bp, Probe sequence
gtcagtacaacgatatacgaagaag

SEQ ID NO: 15784 - DNA, 25 bp, Probe sequence
ctgataatataggcgaacaagtcaa

SEQ ID NO: 15785 - DNA, 25 bp, Probe sequence
gaactgattcaacaaggacaatgtg

SEQ ID NO: 15786 - DNA, 25 bp, Probe sequence
tgtagaagtaggaagatattgttcg

SEQ ID NO: 15787 - DNA, 25 bp, Probe sequence
aagtgattaagaagcgatttgacaa

SEQ ID NO: 15788 - DNA, 25 bp, Probe sequence
aaagtgattaagaagcgatttgaca

SEQ ID NO: 15789 - DNA, 25 bp, Probe sequence
agtgattaagaagcgatttgacaat

SEQ ID NO: 15790 - DNA, 25 bp, Probe sequence
gcttggcgtatattacaaactcaaa

SEQ ID NO: 15791 - DNA, 25 bp, Probe sequence
acattggtgaatacagttatattgg

SEQ ID NO: 15792 - DNA, 25 bp, Probe sequence
atagactttaatgaccaaccaagcc

SEQ ID NO: 15793 - DNA, 25 bp, Probe sequence
tatagactttaatgaccaaccaagc

SEQ ID NO: 15794 - DNA, 25 bp, Probe sequence
cattggtgaatacagttatattgga

SEQ ID NO: 15795 - DNA, 25 bp, Probe sequence
aatggctgaagacaaatacactttc

SEQ ID NO: 15796 - DNA, 25 bp, Probe sequence
caatggctgaagacaaatacacttt

SEQ ID NO: 15797 - DNA, 25 bp, Probe sequence
agcgattgtaactcttaaagaagga

SEQ ID NO: 15798 - DNA, 25 bp, Probe sequence
aagcgattgtaactcttaaagaagg

SEQ ID NO: 15799 - DNA, 25 bp, Probe sequence
ccgttaccaaggctatacaaacaaa

SEQ ID NO: 15800 - DNA, 25 bp, Probe sequence
gcgattgtaactcttaaagaaggat

SEQ ID NO: 15801 - DNA, 25 bp, Probe sequence
atggctgaagacaaatacactttcg

SEQ ID NO: 15802 - DNA, 25 bp, Probe sequence
gcaatggctgaagacaaatacactt

SEQ ID NO: 15803 - DNA, 25 bp, Probe sequence
aaagcgattgtaactcttaaagaag

SEQ ID NO: 15804 - DNA, 25 bp, Probe sequence
cctgaagatgatataagtaacggta

SEQ ID NO: 15805 - DNA, 25 bp, Probe sequence
tacctgaagatgatataagtaacgg

SEQ ID NO: 15806 - DNA, 25 bp, Probe sequence
acctgaagatgatataagtaacggt

SEQ ID NO: 15807 - DNA, 25 bp, Probe sequence
agtaacggtaaaggttcagtaactt

SEQ ID NO: 15808 - DNA, 25 bp, Probe sequence
aagtaacggtaaaggttcagtaact

SEQ ID NO: 15809 - DNA, 25 bp, Probe sequence
taagtaacggtaaaggttcagtaac

SEQ ID NO: 15810 - DNA, 25 bp, Probe sequence
ataagtaacggtaaaggttcagtaa

SEQ ID NO: 15811 - DNA, 25 bp, Probe sequence
agagactttatcgagaagcaagaat

SEQ ID NO: 15812 - DNA, 25 bp, Probe sequence
aagagactttatcgagaagcaagaa

SEQ ID NO: 15813 - DNA, 25 bp, Probe sequence
aagagaatggcttaactgtagttga

SEQ ID NO: 15814 - DNA, 25 bp, Probe sequence
tcaagagaatggcttaactgtagtt

SEQ ID NO: 15815 - DNA, 25 bp, Probe sequence
tgttaagaatcgttcagcagtaagc

SEQ ID NO: 15816 - DNA, 25 bp, Probe sequence
agagaatggcttaactgtagttgac

SEQ ID NO: 15817 - DNA, 25 bp, Probe sequence
caagagaatggcttaactgtagttg

SEQ ID NO: 15818 - DNA, 25 bp, Probe sequence
ctgttaagaatcgttcagcagtaag

SEQ ID NO: 15819 - DNA, 25 bp, Probe sequence
gagaatggcttaactgtagttgacg

SEQ ID NO: 15820 - DNA, 25 bp, Probe sequence
gttaagaatcgttcagcagtaagcg

SEQ ID NO: 15821 - DNA, 25 bp, Probe sequence
ggtattgagccaaataatagcgttt

SEQ ID NO: 15822 - DNA, 25 bp, Probe sequence
gaagtaggtcaagaagtctcagtag

SEQ ID NO: 15823 - DNA, 25 bp, Probe sequence
cttacgaagtaggtcaagaagtctc

SEQ ID NO: 15824 - DNA, 25 bp, Probe sequence
ttacgaagtaggtcaagaagtctca

SEQ ID NO: 15825 - DNA, 25 bp, Probe sequence
agtaggtcaagaagtctcagtagat

SEQ ID NO: 15826 - DNA, 25 bp, Probe sequence
aagtaggtcaagaagtctcagtaga

SEQ ID NO: 15827 - DNA, 25 bp, Probe sequence
cgaagtaggtcaagaagtctcagta

SEQ ID NO: 15828 - DNA, 25 bp, Probe sequence
tacgaagtaggtcaagaagtctcag

SEQ ID NO: 15829 - DNA, 25 bp, Probe sequence
gatgcttacgaagtaggtcaagaag

SEQ ID NO: 15830 - DNA, 25 bp, Probe sequence
aggtcaagaagtctcagtagatact

SEQ ID NO: 15831 - DNA, 25 bp, Probe sequence
tatttcctgaatctgaactcgtagc

SEQ ID NO: 15832 - DNA, 25 bp, Probe sequence
gctatttcctgaatctgaactcgta

SEQ ID NO: 15833 - DNA, 25 bp, Probe sequence
ttcatgccatagacagaatatacat

SEQ ID NO: 15834 - DNA, 25 bp, Probe sequence
ctatttcctgaatctgaactcgtag

SEQ ID NO: 15835 - DNA, 25 bp, Probe sequence
ttcctgaatctgaactcgtagcatg

SEQ ID NO: 15836 - DNA, 25 bp, Probe sequence
tttcctgaatctgaactcgtagcat

SEQ ID NO: 15837 - DNA, 25 bp, Probe sequence
atttcctgaatctgaactcgtagca

SEQ ID NO: 15838 - DNA, 25 bp, Probe sequence
taaagggctatttcctgaatctgaa

SEQ ID NO: 15839 - DNA, 25 bp, Probe sequence
gtaaagggctatttcctgaatctga

SEQ ID NO: 15840 - DNA, 25 bp, Probe sequence
caattccgttaccaactgagaaatc

SEQ ID NO: 15841 - DNA, 25 bp, Probe sequence
gaccaattccgttaccaactgagaa

SEQ ID NO: 15842 - DNA, 25 bp, Probe sequence
atcagcagagaagattgtagaaaca

SEQ ID NO: 15843 - DNA, 25 bp, Probe sequence
gagaagattgtagaaacagcgaaac

SEQ ID NO: 15844 - DNA, 25 bp, Probe sequence
agagaagattgtagaaacagcgaaa

SEQ ID NO: 15845 - DNA, 25 bp, Probe sequence
tcagcagagaagattgtagaaacag

SEQ ID NO: 15846 - DNA, 25 bp, Probe sequence
ccaattccgttaccaactgagaaat

SEQ ID NO: 15847 - DNA, 25 bp, Probe sequence
cagagaagattgtagaaacagcgaa

SEQ ID NO: 15848 - DNA, 25 bp, Probe sequence
ctggtgtagacatcgaaatcaaatt

SEQ ID NO: 15849 - DNA, 25 bp, Probe sequence
taagattccaagtattgaaccaacg

SEQ ID NO: 15850 - DNA, 25 bp, Probe sequence
gttggtatgttcactggattgattc

SEQ ID NO: 15851 - DNA, 25 bp, Probe sequence
ttggtatgttcactggattgattca

SEQ ID NO: 15852 - DNA, 25 bp, Probe sequence
tggaacaactacaacaacttcttat

SEQ ID NO: 15853 - DNA, 25 bp, Probe sequence
ttggaacaactacaacaacttctta

SEQ ID NO: 15854 - DNA, 25 bp, Probe sequence
ggtagagcattgttctcagattctt

SEQ ID NO: 15855 - DNA, 25 bp, Probe sequence
tggtatgttcactggattgattcaa

SEQ ID NO: 15856 - DNA, 25 bp, Probe sequence
ttagtggtggtaggtgtattaatgg

SEQ ID NO: 15857 - DNA, 25 bp, Probe sequence
cgttggtatgttcactggattgatt

SEQ ID NO: 15858 - DNA, 25 bp, Probe sequence
attattacagttcgcagcttagatc

SEQ ID NO: 15859 - DNA, 25 bp, Probe sequence
ttattacagttcgcagcttagatcg

SEQ ID NO: 15860 - DNA, 25 bp, Probe sequence
aattattacagttcgcagcttagat

SEQ ID NO: 15861 - DNA, 25 bp, Probe sequence
attacaaattattacagttcgcagc

SEQ ID NO: 15862 - DNA, 25 bp, Probe sequence
acaaattattacagttcgcagctta

SEQ ID NO: 15863 - DNA, 25 bp, Probe sequence
tacaaattattacagttcgcagctt

SEQ ID NO: 15864 - DNA, 25 bp, Probe sequence
ttacaaattattacagttcgcagct

SEQ ID NO: 15865 - DNA, 25 bp, Probe sequence
tattacagttcgcagcttagatcgc

SEQ ID NO: 15866 - DNA, 25 bp, Probe sequence
aaattattacagttcgcagcttaga

SEQ ID NO: 15867 - DNA, 25 bp, Probe sequence
gtcgtaacctatccaagaacagatt

SEQ ID NO: 15868 - DNA, 25 bp, Probe sequence
tcagacaccaacgattcaattagta

SEQ ID NO: 15869 - DNA, 25 bp, Probe sequence
tcgtaacctatccaagaacagattc

SEQ ID NO: 15870 - DNA, 25 bp, Probe sequence
cgtaacctatccaagaacagattca

SEQ ID NO: 15871 - DNA, 25 bp, Probe sequence
cagacaccaacgattcaattagtaa

SEQ ID NO: 15872 - DNA, 25 bp, Probe sequence
ttcagacaccaacgattcaattagt

SEQ ID NO: 15873 - DNA, 25 bp, Probe sequence
agtcgtaacctatccaagaacagat

SEQ ID NO: 15874 - DNA, 25 bp, Probe sequence
aagtcgtaacctatccaagaacaga

SEQ ID NO: 15875 - DNA, 25 bp, Probe sequence
gcaattattcctacagaagtgagac

SEQ ID NO: 15876 - DNA, 25 bp, Probe sequence
agattagtggaatagatgaagcacg

SEQ ID NO: 15877 - DNA, 25 bp, Probe sequence
aagattagtggaatagatgaagcac

SEQ ID NO: 15878 - DNA, 25 bp, Probe sequence
attagtggaatagatgaagcacgtt

SEQ ID NO: 15879 - DNA, 25 bp, Probe sequence
aaagattagtggaatagatgaagca

SEQ ID NO: 15880 - DNA, 25 bp, Probe sequence
gattagtggaatagatgaagcacgt

SEQ ID NO: 15881 - DNA, 25 bp, Probe sequence
ttagtggaatagatgaagcacgttc

SEQ ID NO: 15882 - DNA, 25 bp, Probe sequence
caaagattagtggaatagatgaagc

SEQ ID NO: 15883 - DNA, 25 bp, Probe sequence
acaatacatttaacacatcatttgc

SEQ ID NO: 15884 - DNA, 25 bp, Probe sequence
tagtggaatagatgaagcacgttcg

SEQ ID NO: 15885 - DNA, 25 bp, Probe sequence
taaataaacaaaacggcaattccca

SEQ ID NO: 15886 - DNA, 25 bp, Probe sequence
ataaacaaaacggcaattcccattt

SEQ ID NO: 15887 - DNA, 25 bp, Probe sequence
aataaacaaaacggcaattcccatt

SEQ ID NO: 15888 - DNA, 25 bp, Probe sequence
aaataaacaaaacggcaattcccat

SEQ ID NO: 15889 - DNA, 25 bp, Probe sequence
ataaataaacaaaacggcaattccc

SEQ ID NO: 15890 - DNA, 25 bp, Probe sequence
ggcaattcccattttgttgaaatag

SEQ ID NO: 15891 - DNA, 25 bp, Probe sequence
tttgttgaaatagaaattaccgttt

SEQ ID NO: 15892 - DNA, 25 bp, Probe sequence
gataaataaacaaaacggcaattcc

SEQ ID NO: 15893 - DNA, 25 bp, Probe sequence
cggcaattcccattttgttgaaata

SEQ ID NO: 15894 - DNA, 25 bp, Probe sequence
taatgtcatgatgtgttattgcgtt

SEQ ID NO: 15895 - DNA, 25 bp, Probe sequence
ttaatgtcatgatgtgttattgcgt

SEQ ID NO: 15896 - DNA, 25 bp, Probe sequence
attaatgtcatgatgtgttattgcg

SEQ ID NO: 15897 - DNA, 25 bp, Probe sequence
atgatgtgttattgcgttttgtttt

SEQ ID NO: 15898 - DNA, 25 bp, Probe sequence
catgatgtgttattgcgttttgttt

SEQ ID NO: 15899 - DNA, 25 bp, Probe sequence
gattaatgtcatgatgtgttattgc

SEQ ID NO: 15900 - DNA, 25 bp, Probe sequence
aatgtcatgatgtgttattgcgttt

SEQ ID NO: 15901 - DNA, 25 bp, Probe sequence
tggcgcatacttgatatatgaatat

SEQ ID NO: 15902 - DNA, 25 bp, Probe sequence
atggcgcatacttgatatatgaata

SEQ ID NO: 15903 - DNA, 25 bp, Probe sequence
ggtatgatgactggtgctatgaata

SEQ ID NO: 15904 - DNA, 25 bp, Probe sequence
taggtatgatgactggtgctatgaa

SEQ ID NO: 15905 - DNA, 25 bp, Probe sequence
aggtatgatgactggtgctatgaat

SEQ ID NO: 15906 - DNA, 25 bp, Probe sequence
acagatagtcaagtcattgctacat

SEQ ID NO: 15907 - DNA, 25 bp, Probe sequence
aacagatagtcaagtcattgctaca

SEQ ID NO: 15908 - DNA, 25 bp, Probe sequence
caacagatagtcaagtcattgctac

SEQ ID NO: 15909 - DNA, 25 bp, Probe sequence
gtaggtatgatgactggtgctatga

SEQ ID NO: 15910 - DNA, 25 bp, Probe sequence
gtcaagtcattgctacattagttct

SEQ ID NO: 15911 - DNA, 25 bp, Probe sequence
agtcaagtcattgctacattagttc

SEQ ID NO: 15912 - DNA, 25 bp, Probe sequence
tttgctgtttattcgtttgatgaaa

SEQ ID NO: 15913 - DNA, 25 bp, Probe sequence
tttgaataatgaagaatacgaaggg

SEQ ID NO: 15914 - DNA, 25 bp, Probe sequence
tgctgtttattcgtttgatgaaact

SEQ ID NO: 15915 - DNA, 25 bp, Probe sequence
gctgtttattcgtttgatgaaactg

SEQ ID NO: 15916 - DNA, 25 bp, Probe sequence
ttgctgtttattcgtttgatgaaac

SEQ ID NO: 15917 - DNA, 25 bp, Probe sequence
tgtttattcgtttgatgaaactgag

SEQ ID NO: 15918 - DNA, 25 bp, Probe sequence
ctgtttattcgtttgatgaaactga

SEQ ID NO: 15919 - DNA, 25 bp, Probe sequence
attttgctgtttattcgtttgatga

SEQ ID NO: 15920 - DNA, 25 bp, Probe sequence
gtttattcgtttgatgaaactgaga

SEQ ID NO: 15921 - DNA, 25 bp, Probe sequence
aaggaagcgaatgttattacgaatg

SEQ ID NO: 15922 - DNA, 25 bp, Probe sequence
gaaggaagcgaatgttattacgaat

SEQ ID NO: 15923 - DNA, 25 bp, Probe sequence
aggatataagaaggaagcgaatgtt

SEQ ID NO: 15924 - DNA, 25 bp, Probe sequence
aaggatataagaaggaagcgaatgt

SEQ ID NO: 15925 - DNA, 25 bp, Probe sequence
agaaggaagcgaatgttattacgaa

SEQ ID NO: 15926 - DNA, 25 bp, Probe sequence
aagaaggaagcgaatgttattacga

SEQ ID NO: 15927 - DNA, 25 bp, Probe sequence
gtaatggacagaggatatgaagagt

SEQ ID NO: 15928 - DNA, 25 bp, Probe sequence
taagaaggaagcgaatgttattacg

SEQ ID NO: 15929 - DNA, 25 bp, Probe sequence
taatgccttcgtaacagtaagtcat

SEQ ID NO: 15930 - DNA, 25 bp, Probe sequence
atggttgaatatgataatgacacgc

SEQ ID NO: 15931 - DNA, 25 bp, Probe sequence
caagatgccaatacagttcaagtag

SEQ ID NO: 15932 - DNA, 25 bp, Probe sequence
tcaagatgccaatacagttcaagta

SEQ ID NO: 15933 - DNA, 25 bp, Probe sequence
tgatgtagaagcggataaggttatt

SEQ ID NO: 15934 - DNA, 25 bp, Probe sequence
ttgatgtagaagcggataaggttat

SEQ ID NO: 15935 - DNA, 25 bp, Probe sequence
ataatataagtggtatgccgacagc

SEQ ID NO: 15936 - DNA, 25 bp, Probe sequence
gttgaatatgataatgacacgccta

SEQ ID NO: 15937 - DNA, 25 bp, Probe sequence
attatcgtcttcttaccacttgtgt

SEQ ID NO: 15938 - DNA, 25 bp, Probe sequence
ttatcgtcttcttaccacttgtgtt

SEQ ID NO: 15939 - DNA, 25 bp, Probe sequence
cagtcatacataggcaaattagtca

SEQ ID NO: 15940 - DNA, 25 bp, Probe sequence
acagtcatacataggcaaattagtc

SEQ ID NO: 15941 - DNA, 25 bp, Probe sequence
aggcaaattagtcaaattaacgctt

SEQ ID NO: 15942 - DNA, 25 bp, Probe sequence
taggcaaattagtcaaattaacgct

SEQ ID NO: 15943 - DNA, 25 bp, Probe sequence
agtcatacataggcaaattagtcaa

SEQ ID NO: 15944 - DNA, 25 bp, Probe sequence
ggcaaattagtcaaattaacgctta

SEQ ID NO: 15945 - DNA, 25 bp, Probe sequence
tgaatttacagtcatacataggcaa

SEQ ID NO: 15946 - DNA, 25 bp, Probe sequence
ataggcaaattagtcaaattaacgc

SEQ ID NO: 15947 - DNA, 25 bp, Probe sequence
tacagtcatacataggcaaattagt

SEQ ID NO: 15948 - DNA, 25 bp, Probe sequence
cacaagcaacttcaccatattcaat

SEQ ID NO: 15949 - DNA, 25 bp, Probe sequence
acaagcaacttcaccatattcaatt

SEQ ID NO: 15950 - DNA, 25 bp, Probe sequence
attgttcaagagaagtatgagcaag

SEQ ID NO: 15951 - DNA, 25 bp, Probe sequence
ttgttcaagagaagtatgagcaagg

SEQ ID NO: 15952 - DNA, 25 bp, Probe sequence
aattgttcaagagaagtatgagcaa

SEQ ID NO: 15953 - DNA, 25 bp, Probe sequence
ttgatatggacattgtagaagagaa

SEQ ID NO: 15954 - DNA, 25 bp, Probe sequence
gcacaagcaacttcaccatattcaa

SEQ ID NO: 15955 - DNA, 25 bp, Probe sequence
tatcagaggtgctatttatcgcttt

SEQ ID NO: 15956 - DNA, 25 bp, Probe sequence
ttatcagaggtgctatttatcgctt

SEQ ID NO: 15957 - DNA, 25 bp, Probe sequence
ggtggcttatgaacatgatattaca

SEQ ID NO: 15958 - DNA, 25 bp, Probe sequence
gtggcttatgaacatgatattacaa

SEQ ID NO: 15959 - DNA, 25 bp, Probe sequence
gggtggcttatgaacatgatattac

SEQ ID NO: 15960 - DNA, 25 bp, Probe sequence
agggtggcttatgaacatgatatta

SEQ ID NO: 15961 - DNA, 25 bp, Probe sequence
aagggtggcttatgaacatgatatt

SEQ ID NO: 15962 - DNA, 25 bp, Probe sequence
taatgattccatgtaagccagatca

SEQ ID NO: 15963 - DNA, 25 bp, Probe sequence
ctagtgactggcatcaaattgaata

SEQ ID NO: 15964 - DNA, 25 bp, Probe sequence
tggtactgataacaaacaagttcaa

SEQ ID NO: 15965 - DNA, 25 bp, Probe sequence
ttagccattggattcatcattaatt

SEQ ID NO: 15966 - DNA, 25 bp, Probe sequence
ctgaaacggatgaaagacaagtatt

SEQ ID NO: 15967 - DNA, 25 bp, Probe sequence
atagaagcagaaagggagttaagtc

SEQ ID NO: 15968 - DNA, 25 bp, Probe sequence
tgaaacggatgaaagacaagtattc

SEQ ID NO: 15969 - DNA, 25 bp, Probe sequence
tctgaaacggatgaaagacaagtat

SEQ ID NO: 15970 - DNA, 25 bp, Probe sequence
ttctgaaacggatgaaagacaagta

SEQ ID NO: 15971 - DNA, 25 bp, Probe sequence
gaaacggatgaaagacaagtattct

SEQ ID NO: 15972 - DNA, 25 bp, Probe sequence
tagaagcagaaagggagttaagtca

SEQ ID NO: 15973 - DNA, 25 bp, Probe sequence
tatagaagcagaaagggagttaagt

SEQ ID NO: 15974 - DNA, 25 bp, Probe sequence
gaaagggagttaagtcagttaaagc

SEQ ID NO: 15975 - DNA, 25 bp, Probe sequence
gtcacatattagaaccaatcagcaa

SEQ ID NO: 15976 - DNA, 25 bp, Probe sequence
attagaaccaatcagcaatctcaga

SEQ ID NO: 15977 - DNA, 25 bp, Probe sequence
cgtcacatattagaaccaatcagca

SEQ ID NO: 15978 - DNA, 25 bp, Probe sequence
tcacatattagaaccaatcagcaat

SEQ ID NO: 15979 - DNA, 25 bp, Probe sequence
cacatattagaaccaatcagcaatc

SEQ ID NO: 15980 - DNA, 25 bp, Probe sequence
ttagaaccaatcagcaatctcagat

SEQ ID NO: 15981 - DNA, 25 bp, Probe sequence
tattagaaccaatcagcaatctcag

SEQ ID NO: 15982 - DNA, 25 bp, Probe sequence
acatattagaaccaatcagcaatct

SEQ ID NO: 15983 - DNA, 25 bp, Probe sequence
atattagaaccaatcagcaatctca

SEQ ID NO: 15984 - DNA, 25 bp, Probe sequence
atatgaggattgtgatgctgttatt

SEQ ID NO: 15985 - DNA, 25 bp, Probe sequence
gctactagactattggattggagtt

SEQ ID NO: 15986 - DNA, 25 bp, Probe sequence
agctactagactattggattggagt

SEQ ID NO: 15987 - DNA, 25 bp, Probe sequence
gattgtgatgctgttatttatgcct

SEQ ID NO: 15988 - DNA, 25 bp, Probe sequence
aggattgtgatgctgttatttatgc

SEQ ID NO: 15989 - DNA, 25 bp, Probe sequence
ggattgtgatgctgttatttatgcc

SEQ ID NO: 15990 - DNA, 25 bp, Probe sequence
agagtggttagacaaagtggaattt

SEQ ID NO: 15991 - DNA, 25 bp, Probe sequence
acgcttcaaataatataacgcaaga

SEQ ID NO: 15992 - DNA, 25 bp, Probe sequence
gagagtggttagacaaagtggaatt

SEQ ID NO: 15993 - DNA, 25 bp, Probe sequence
tacctatttggcataaagtgagtgt

SEQ ID NO: 15994 - DNA, 25 bp, Probe sequence
atttggcataaagtgagtgttgaag

SEQ ID NO: 15995 - DNA, 25 bp, Probe sequence
ctatttggcataaagtgagtgttga

SEQ ID NO: 15996 - DNA, 25 bp, Probe sequence
cctatttggcataaagtgagtgttg

SEQ ID NO: 15997 - DNA, 25 bp, Probe sequence
acctatttggcataaagtgagtgtt

SEQ ID NO: 15998 - DNA, 25 bp, Probe sequence
tatttggcataaagtgagtgttgaa

SEQ ID NO: 15999 - DNA, 25 bp, Probe sequence
ttggcataaagtgagtgttgaagat

SEQ ID NO: 16000 - DNA, 25 bp, Probe sequence
taagcaattagttacaaagcagcaa

SEQ ID NO: 16001 - DNA, 25 bp, Probe sequence
ttacctatttggcataaagtgagtg

SEQ ID NO: 16002 - DNA, 25 bp, Probe sequence
agtggactaatctattgaacgaacc

SEQ ID NO: 16003 - DNA, 25 bp, Probe sequence
aagtggactaatctattgaacgaac

SEQ ID NO: 16004 - DNA, 25 bp, Probe sequence
ttatcctgtaggtactgagttatcg

SEQ ID NO: 16005 - DNA, 25 bp, Probe sequence
tatcctgtaggtactgagttatcga

SEQ ID NO: 16006 - DNA, 25 bp, Probe sequence
ggtggattgatgggagttaagtatt

SEQ ID NO: 16007 - DNA, 25 bp, Probe sequence
taaaggtggattgatgggagttaag

SEQ ID NO: 16008 - DNA, 25 bp, Probe sequence
ctaaaggtggattgatgggagttaa

SEQ ID NO: 16009 - DNA, 25 bp, Probe sequence
tctaaaggtggattgatgggagtta

SEQ ID NO: 16010 - DNA, 25 bp, Probe sequence
aggtggattgatgggagttaagtat

SEQ ID NO: 16011 - DNA, 25 bp, Probe sequence
taagacaatgagcattaacagaagc

SEQ ID NO: 16012 - DNA, 25 bp, Probe sequence
cgagataagacaatgagcattaaca

SEQ ID NO: 16013 - DNA, 25 bp, Probe sequence
agataagacaatgagcattaacaga

SEQ ID NO: 16014 - DNA, 25 bp, Probe sequence
gttgaaggagatacaccgaagtatg

SEQ ID NO: 16015 - DNA, 25 bp, Probe sequence
aagacaatgagcattaacagaagcg

SEQ ID NO: 16016 - DNA, 25 bp, Probe sequence
gagataagacaatgagcattaacag

SEQ ID NO: 16017 - DNA, 25 bp, Probe sequence
tgttgaaggagatacaccgaagtat

SEQ ID NO: 16018 - DNA, 25 bp, Probe sequence
tcgagataagacaatgagcattaac

SEQ ID NO: 16019 - DNA, 25 bp, Probe sequence
atttaccatctacacatacgacagt

SEQ ID NO: 16020 - DNA, 25 bp, Probe sequence
aataccttcatcaagtcaactggag

SEQ ID NO: 16021 - DNA, 25 bp, Probe sequence
ataccttcatcaagtcaactggaga

SEQ ID NO: 16022 - DNA, 25 bp, Probe sequence
taccttcatcaagtcaactggagaa

SEQ ID NO: 16023 - DNA, 25 bp, Probe sequence
aaataccttcatcaagtcaactgga

SEQ ID NO: 16024 - DNA, 25 bp, Probe sequence
gaaataccttcatcaagtcaactgg

SEQ ID NO: 16025 - DNA, 25 bp, Probe sequence
tggaatgataattcttctaaccgaa

SEQ ID NO: 16026 - DNA, 25 bp, Probe sequence
atggaatgataattcttctaaccga

SEQ ID NO: 16027 - DNA, 25 bp, Probe sequence
gatggaatgataattcttctaaccg

SEQ ID NO: 16028 - DNA, 25 bp, Probe sequence
aggaatctgatacatcactctttct

SEQ ID NO: 16029 - DNA, 25 bp, Probe sequence
ttatggttaggtgcgtctctattaa

SEQ ID NO: 16030 - DNA, 25 bp, Probe sequence
cagttcaatggttagagtcaggaat

SEQ ID NO: 16031 - DNA, 25 bp, Probe sequence
agttcaatggttagagtcaggaata

SEQ ID NO: 16032 - DNA, 25 bp, Probe sequence
tagcagtattaggtggattgtggtt

SEQ ID NO: 16033 - DNA, 25 bp, Probe sequence
ttagcagtattaggtggattgtggt

SEQ ID NO: 16034 - DNA, 25 bp, Probe sequence
gttcaatggttagagtcaggaatat

SEQ ID NO: 16035 - DNA, 25 bp, Probe sequence
tatggttaggtgcgtctctattaat

SEQ ID NO: 16036 - DNA, 25 bp, Probe sequence
gcagttcaatggttagagtcaggaa

SEQ ID NO: 16037 - DNA, 25 bp, Probe sequence
tttatggttaggtgcgtctctatta

SEQ ID NO: 16038 - DNA, 25 bp, Probe sequence
tggatgctattgatgatacgctatt

SEQ ID NO: 16039 - DNA, 25 bp, Probe sequence
ttggatgctattgatgatacgctat

SEQ ID NO: 16040 - DNA, 25 bp, Probe sequence
ggatgttggtaatgataatggatgg

SEQ ID NO: 16041 - DNA, 25 bp, Probe sequence
tggatgttggtaatgataatggatg

SEQ ID NO: 16042 - DNA, 25 bp, Probe sequence
atggctagaatcgctaaggtatatg

SEQ ID NO: 16043 - DNA, 25 bp, Probe sequence
aatggctagaatcgctaaggtatat

SEQ ID NO: 16044 - DNA, 25 bp, Probe sequence
atggatgttggtaatgataatggat

SEQ ID NO: 16045 - DNA, 25 bp, Probe sequence
cgatattcagatgagagaactgctc

SEQ ID NO: 16046 - DNA, 25 bp, Probe sequence
tggctagaatcgctaaggtatatgc

SEQ ID NO: 16047 - DNA, 25 bp, Probe sequence
tgtggttatcatattgctgaagatt

SEQ ID NO: 16048 - DNA, 25 bp, Probe sequence
ttgtggttatcatattgctgaagat

SEQ ID NO: 16049 - DNA, 25 bp, Probe sequence
attgtggttatcatattgctgaaga

SEQ ID NO: 16050 - DNA, 25 bp, Probe sequence
aattgtggttatcatattgctgaag

SEQ ID NO: 16051 - DNA, 25 bp, Probe sequence
tcttgagaaatatgatgtgacacct

SEQ ID NO: 16052 - DNA, 25 bp, Probe sequence
acagtataatgaagtggctttacag

SEQ ID NO: 16053 - DNA, 25 bp, Probe sequence
caaggcgtaacgaataaaggtaatt

SEQ ID NO: 16054 - DNA, 25 bp, Probe sequence
aaggcgtaacgaataaaggtaattt

SEQ ID NO: 16055 - DNA, 25 bp, Probe sequence
aacagtataatgaagtggctttaca

SEQ ID NO: 16056 - DNA, 25 bp, Probe sequence
gtagcagaagcaaatagagttatcg

SEQ ID NO: 16057 - DNA, 25 bp, Probe sequence
tagcagaagcaaatagagttatcgc

SEQ ID NO: 16058 - DNA, 25 bp, Probe sequence
agtagcagaagcaaatagagttatc

SEQ ID NO: 16059 - DNA, 25 bp, Probe sequence
aaagtagcagaagcaaatagagtta

SEQ ID NO: 16060 - DNA, 25 bp, Probe sequence
aagtagcagaagcaaatagagttat

SEQ ID NO: 16061 - DNA, 25 bp, Probe sequence
gcaaatagagttatcgctaaatctt

SEQ ID NO: 16062 - DNA, 25 bp, Probe sequence
cagaagcaaatagagttatcgctaa

SEQ ID NO: 16063 - DNA, 25 bp, Probe sequence
gcagaagcaaatagagttatcgcta

SEQ ID NO: 16064 - DNA, 25 bp, Probe sequence
aaaagtagcagaagcaaatagagtt

SEQ ID NO: 16065 - DNA, 25 bp, Probe sequence
acttgtggagtgactatatgattga

SEQ ID NO: 16066 - DNA, 25 bp, Probe sequence
cttgtggagtgactatatgattgaa

SEQ ID NO: 16067 - DNA, 25 bp, Probe sequence
ggatacttgtggagtgactatatga

SEQ ID NO: 16068 - DNA, 25 bp, Probe sequence
aggatacttgtggagtgactatatg

SEQ ID NO: 16069 - DNA, 25 bp, Probe sequence
aaggatacttgtggagtgactatat

SEQ ID NO: 16070 - DNA, 25 bp, Probe sequence
cttcgttgttgttaatatagcatca

SEQ ID NO: 16071 - DNA, 25 bp, Probe sequence
acttcgttgttgttaatatagcatc

SEQ ID NO: 16072 - DNA, 25 bp, Probe sequence
ggtacttcgttgttgttaatatagc

SEQ ID NO: 16073 - DNA, 25 bp, Probe sequence
tacttgtggagtgactatatgattg

SEQ ID NO: 16074 - DNA, 25 bp, Probe sequence
tgattcggaaactggagatatacaa

SEQ ID NO: 16075 - DNA, 25 bp, Probe sequence
atgattcggaaactggagatataca

SEQ ID NO: 16076 - DNA, 25 bp, Probe sequence
tgtatgattcggaaactggagatat

SEQ ID NO: 16077 - DNA, 25 bp, Probe sequence
atgtatgattcggaaactggagata

SEQ ID NO: 16078 - DNA, 25 bp, Probe sequence
gattcggaaactggagatatacaaa

SEQ ID NO: 16079 - DNA, 25 bp, Probe sequence
tatgattcggaaactggagatatac

SEQ ID NO: 16080 - DNA, 25 bp, Probe sequence
gtatgattcggaaactggagatata

SEQ ID NO: 16081 - DNA, 25 bp, Probe sequence
aaacgtgtggatttcttaaagttct

SEQ ID NO: 16082 - DNA, 25 bp, Probe sequence
acgtgtggatttcttaaagttctat

SEQ ID NO: 16083 - DNA, 25 bp, Probe sequence
ttcagtgtacatccaatgctaagtt

SEQ ID NO: 16084 - DNA, 25 bp, Probe sequence
attgctgaaatatcgtctatacttt

SEQ ID NO: 16085 - DNA, 25 bp, Probe sequence
aattgctgaaatatcgtctatactt

SEQ ID NO: 16086 - DNA, 25 bp, Probe sequence
tcagtgtacatccaatgctaagttt

SEQ ID NO: 16087 - DNA, 25 bp, Probe sequence
tttcagtgtacatccaatgctaagt

SEQ ID NO: 16088 - DNA, 25 bp, Probe sequence
cagtgtacatccaatgctaagtttg

SEQ ID NO: 16089 - DNA, 25 bp, Probe sequence
ttgctgaaatatcgtctatacttta

SEQ ID NO: 16090 - DNA, 25 bp, Probe sequence
gtgtacatccaatgctaagtttgtt

SEQ ID NO: 16091 - DNA, 25 bp, Probe sequence
gtacatccaatgctaagtttgtttt

SEQ ID NO: 16092 - DNA, 25 bp, Probe sequence
atgaagcaacatcctgaagaagaat

SEQ ID NO: 16093 - DNA, 25 bp, Probe sequence
tgaagcaacatcctgaagaagaatt

SEQ ID NO: 16094 - DNA, 25 bp, Probe sequence
gaagcaacatcctgaagaagaattg

SEQ ID NO: 16095 - DNA, 25 bp, Probe sequence
tctgttgatacaccaatgattactg

SEQ ID NO: 16096 - DNA, 25 bp, Probe sequence
aagcaacatcctgaagaagaattgt

SEQ ID NO: 16097 - DNA, 25 bp, Probe sequence
catgaagcaacatcctgaagaagaa

SEQ ID NO: 16098 - DNA, 25 bp, Probe sequence
ttctgttgatacaccaatgattact

SEQ ID NO: 16099 - DNA, 25 bp, Probe sequence
ctgttgatacaccaatgattactgg

SEQ ID NO: 16100 - DNA, 25 bp, Probe sequence
aataattcttgcaggtggtcattca

SEQ ID NO: 16101 - DNA, 25 bp, Probe sequence
ttacgacaggcaatggttcaattaa

SEQ ID NO: 16102 - DNA, 25 bp, Probe sequence
gttacgacaggcaatggttcaatta

SEQ ID NO: 16103 - DNA, 25 bp, Probe sequence
ttagcagatactgataatggtctcg

SEQ ID NO: 16104 - DNA, 25 bp, Probe sequence
tacgacaggcaatggttcaattaat

SEQ ID NO: 16105 - DNA, 25 bp, Probe sequence
aatatgttacgacaggcaatggttc

SEQ ID NO: 16106 - DNA, 25 bp, Probe sequence
atactgataatggtctcgatgcaat

SEQ ID NO: 16107 - DNA, 25 bp, Probe sequence
gatactgataatggtctcgatgcaa

SEQ ID NO: 16108 - DNA, 25 bp, Probe sequence
tactgataatggtctcgatgcaatg

SEQ ID NO: 16109 - DNA, 25 bp, Probe sequence
ctgataatggtctcgatgcaatgaa

SEQ ID NO: 16110 - DNA, 25 bp, Probe sequence
gtttcaagttgctgtaaatgaggaa

SEQ ID NO: 16111 - DNA, 25 bp, Probe sequence
aagtttcaagttgctgtaaatgagg

SEQ ID NO: 16112 - DNA, 25 bp, Probe sequence
tttcaagttgctgtaaatgaggaat

SEQ ID NO: 16113 - DNA, 25 bp, Probe sequence
ttcaagttgctgtaaatgaggaatt

SEQ ID NO: 16114 - DNA, 25 bp, Probe sequence
agtttcaagttgctgtaaatgagga

SEQ ID NO: 16115 - DNA, 25 bp, Probe sequence
aagttgctgtaaatgaggaatttgt

SEQ ID NO: 16116 - DNA, 25 bp, Probe sequence
caagttgctgtaaatgaggaatttg

SEQ ID NO: 16117 - DNA, 25 bp, Probe sequence
tcaagttgctgtaaatgaggaattt

SEQ ID NO: 16118 - DNA, 25 bp, Probe sequence
aaagtttcaagttgctgtaaatgag

SEQ ID NO: 16119 - DNA, 25 bp, Probe sequence
aggcacatggattattaattctgaa

SEQ ID NO: 16120 - DNA, 25 bp, Probe sequence
aaggcacatggattattaattctga

SEQ ID NO: 16121 - DNA, 25 bp, Probe sequence
atatgatataccgacgaataaagcg

SEQ ID NO: 16122 - DNA, 25 bp, Probe sequence
gtgaaagatatgatataccgacgaa

SEQ ID NO: 16123 - DNA, 25 bp, Probe sequence
gttctttgttcaatatggcaacttt

SEQ ID NO: 16124 - DNA, 25 bp, Probe sequence
catgggtaaagaagcggaaattaaa

SEQ ID NO: 16125 - DNA, 25 bp, Probe sequence
cccgatttattcagcgaaatatcaa

SEQ ID NO: 16126 - DNA, 25 bp, Probe sequence
ccgatttattcagcgaaatatcaac

SEQ ID NO: 16127 - DNA, 25 bp, Probe sequence
taagttctttgttcaatatggcaac

SEQ ID NO: 16128 - DNA, 25 bp, Probe sequence
attagataacggtggtgtcaatgaa

SEQ ID NO: 16129 - DNA, 25 bp, Probe sequence
atacaatcctgctccgttagaagta

SEQ ID NO: 16130 - DNA, 25 bp, Probe sequence
tacaatcctgctccgttagaagtaa

SEQ ID NO: 16131 - DNA, 25 bp, Probe sequence
catacaatcctgctccgttagaagt

SEQ ID NO: 16132 - DNA, 25 bp, Probe sequence
acttgctaccgaaccacataatgaa

SEQ ID NO: 16133 - DNA, 25 bp, Probe sequence
aacttgctaccgaaccacataatga

SEQ ID NO: 16134 - DNA, 25 bp, Probe sequence
agttcgatgtctccgttattattcc

SEQ ID NO: 16135 - DNA, 25 bp, Probe sequence
acttagttcgatgtctccgttatta

SEQ ID NO: 16136 - DNA, 25 bp, Probe sequence
cacttagttcgatgtctccgttatt

SEQ ID NO: 16137 - DNA, 25 bp, Probe sequence
atagtgaagagtcaaatgctaaggt

SEQ ID NO: 16138 - DNA, 25 bp, Probe sequence
tagtgaagagtcaaatgctaaggtg

SEQ ID NO: 16139 - DNA, 25 bp, Probe sequence
tgaagagtcaaatgctaaggtgaga

SEQ ID NO: 16140 - DNA, 25 bp, Probe sequence
gtgaagagtcaaatgctaaggtgag

SEQ ID NO: 16141 - DNA, 25 bp, Probe sequence
taaggtgagacgactagttgaagaa

SEQ ID NO: 16142 - DNA, 25 bp, Probe sequence
agtgaagagtcaaatgctaaggtga

SEQ ID NO: 16143 - DNA, 25 bp, Probe sequence
tatagtgaagagtcaaatgctaagg

SEQ ID NO: 16144 - DNA, 25 bp, Probe sequence
gaagagtcaaatgctaaggtgagac

SEQ ID NO: 16145 - DNA, 25 bp, Probe sequence
ctaaggtgagacgactagttgaaga

SEQ ID NO: 16146 - DNA, 25 bp, Probe sequence
ccgttatctaatcctatgtctgacc

SEQ ID NO: 16147 - DNA, 25 bp, Probe sequence
tccgttatctaatcctatgtctgac

SEQ ID NO: 16148 - DNA, 25 bp, Probe sequence
ggagatagttggatggtaggtgatt

SEQ ID NO: 16149 - DNA, 25 bp, Probe sequence
taggagatagttggatggtaggtga

SEQ ID NO: 16150 - DNA, 25 bp, Probe sequence
atccgttatctaatcctatgtctga

SEQ ID NO: 16151 - DNA, 25 bp, Probe sequence
ctaggagatagttggatggtaggtg

SEQ ID NO: 16152 - DNA, 25 bp, Probe sequence
cctgatccgttatctaatcctatgt

SEQ ID NO: 16153 - DNA, 25 bp, Probe sequence
aggagatagttggatggtaggtgat

SEQ ID NO: 16154 - DNA, 25 bp, Probe sequence
tgatccgttatctaatcctatgtct

SEQ ID NO: 16155 - DNA, 25 bp, Probe sequence
acgataacgagtattgttcatagaa

SEQ ID NO: 16156 - DNA, 25 bp, Probe sequence
aacgataacgagtattgttcataga

SEQ ID NO: 16157 - DNA, 25 bp, Probe sequence
aatatgaagcgtatattccaatggc

SEQ ID NO: 16158 - DNA, 25 bp, Probe sequence
tggcacaaattggagatgaaataaa

SEQ ID NO: 16159 - DNA, 25 bp, Probe sequence
acgagtattgttcatagaatagggc

SEQ ID NO: 16160 - DNA, 25 bp, Probe sequence
atgaatatcaaggtgcagtagttgt

SEQ ID NO: 16161 - DNA, 25 bp, Probe sequence
tgaatatcaaggtgcagtagttgtt

SEQ ID NO: 16162 - DNA, 25 bp, Probe sequence
aatgaatatcaaggtgcagtagttg

SEQ ID NO: 16163 - DNA, 25 bp, Probe sequence
ttggcacaaattggagatgaaataa

SEQ ID NO: 16164 - DNA, 25 bp, Probe sequence
ggtagccatcattattgtaggtgta

SEQ ID NO: 16165 - DNA, 25 bp, Probe sequence
cattggcgtatgtatggataagtaa

SEQ ID NO: 16166 - DNA, 25 bp, Probe sequence
gtagccatcattattgtaggtgtat

SEQ ID NO: 16167 - DNA, 25 bp, Probe sequence
aacaagatcgctatggtagaacatt

SEQ ID NO: 16168 - DNA, 25 bp, Probe sequence
acaagatcgctatggtagaacattg

SEQ ID NO: 16169 - DNA, 25 bp, Probe sequence
agccatcattattgtaggtgtatta

SEQ ID NO: 16170 - DNA, 25 bp, Probe sequence
tagccatcattattgtaggtgtatt

SEQ ID NO: 16171 - DNA, 25 bp, Probe sequence
caagatcgctatggtagaacattgg

SEQ ID NO: 16172 - DNA, 25 bp, Probe sequence
ccatcattattgtaggtgtattagc

SEQ ID NO: 16173 - DNA, 25 bp, Probe sequence
gtaagacaacattgatgaggcatat

SEQ ID NO: 16174 - DNA, 25 bp, Probe sequence
accaatatcgtattagttgaaggct

SEQ ID NO: 16175 - DNA, 25 bp, Probe sequence
caccaatatcgtattagttgaaggc

SEQ ID NO: 16176 - DNA, 25 bp, Probe sequence
aagacaacattgatgaggcatattg

SEQ ID NO: 16177 - DNA, 25 bp, Probe sequence
ggtaagacaacattgatgaggcata

SEQ ID NO: 16178 - DNA, 25 bp, Probe sequence
ccaatatcgtattagttgaaggctt

SEQ ID NO: 16179 - DNA, 25 bp, Probe sequence
taagacaacattgatgaggcatatt

SEQ ID NO: 16180 - DNA, 25 bp, Probe sequence
acaccaatatcgtattagttgaagg

SEQ ID NO: 16181 - DNA, 25 bp, Probe sequence
acattgatgaggcatattgtctctt

SEQ ID NO: 16182 - DNA, 25 bp, Probe sequence
ctgttagacctgaagaagaatacga

SEQ ID NO: 16183 - DNA, 25 bp, Probe sequence
actgttagacctgaagaagaatacg

SEQ ID NO: 16184 - DNA, 25 bp, Probe sequence
tagatacagtgacctaccagaagat

SEQ ID NO: 16185 - DNA, 25 bp, Probe sequence
ttgaatatacagagccgaagatgaa

SEQ ID NO: 16186 - DNA, 25 bp, Probe sequence
gaatatacagagccgaagatgaact

SEQ ID NO: 16187 - DNA, 25 bp, Probe sequence
attgaatatacagagccgaagatga

SEQ ID NO: 16188 - DNA, 25 bp, Probe sequence
ttatctcattcaacattctgctggt

SEQ ID NO: 16189 - DNA, 25 bp, Probe sequence
tgaatatacagagccgaagatgaac

SEQ ID NO: 16190 - DNA, 25 bp, Probe sequence
attatctcattcaacattctgctgg

SEQ ID NO: 16191 - DNA, 25 bp, Probe sequence
aagtggtaatgattggattggtagt

SEQ ID NO: 16192 - DNA, 25 bp, Probe sequence
agtggtaatgattggattggtagta

SEQ ID NO: 16193 - DNA, 25 bp, Probe sequence
ctaacgaatatcagactgtaggacc

SEQ ID NO: 16194 - DNA, 25 bp, Probe sequence
tctaacgaatatcagactgtaggac

SEQ ID NO: 16195 - DNA, 25 bp, Probe sequence
gtggtaatgattggattggtagtat

SEQ ID NO: 16196 - DNA, 25 bp, Probe sequence
agcggaattgagtggattggatata

SEQ ID NO: 16197 - DNA, 25 bp, Probe sequence
gcggaattgagtggattggatatat

SEQ ID NO: 16198 - DNA, 25 bp, Probe sequence
ttctaacgaatatcagactgtagga

SEQ ID NO: 16199 - DNA, 25 bp, Probe sequence
tggtaatgattggattggtagtatc

SEQ ID NO: 16200 - DNA, 25 bp, Probe sequence
tagacacgaaccttagagatacaga

SEQ ID NO: 16201 - DNA, 25 bp, Probe sequence
gtagacacgaaccttagagatacag

SEQ ID NO: 16202 - DNA, 25 bp, Probe sequence
atccaacttcctaacgacttattct

SEQ ID NO: 16203 - DNA, 25 bp, Probe sequence
agacacgaaccttagagatacagaa

SEQ ID NO: 16204 - DNA, 25 bp, Probe sequence
attattcacaacggttctgccttat

SEQ ID NO: 16205 - DNA, 25 bp, Probe sequence
cacgaaccttagagatacagaagat

SEQ ID NO: 16206 - DNA, 25 bp, Probe sequence
ccaacttcctaacgacttattctac

SEQ ID NO: 16207 - DNA, 25 bp, Probe sequence
tccaacttcctaacgacttattcta

SEQ ID NO: 16208 - DNA, 25 bp, Probe sequence
cgagttagtgatggacagttgttat

SEQ ID NO: 16209 - DNA, 25 bp, Probe sequence
ttcatatctacaaggtggaacactt

SEQ ID NO: 16210 - DNA, 25 bp, Probe sequence
tcatatctacaaggtggaacactta

SEQ ID NO: 16211 - DNA, 25 bp, Probe sequence
catatctacaaggtggaacacttaa

SEQ ID NO: 16212 - DNA, 25 bp, Probe sequence
accacataacatcattattgagttg

SEQ ID NO: 16213 - DNA, 25 bp, Probe sequence
ccacataacatcattattgagttga

SEQ ID NO: 16214 - DNA, 25 bp, Probe sequence
cagcggcaattagtggtatttatat

SEQ ID NO: 16215 - DNA, 25 bp, Probe sequence
taaacaaggctacggtagaaagatt

SEQ ID NO: 16216 - DNA, 25 bp, Probe sequence
ataaacaaggctacggtagaaagat

SEQ ID NO: 16217 - DNA, 25 bp, Probe sequence
caccagataaggaagagaaactagc

SEQ ID NO: 16218 - DNA, 25 bp, Probe sequence
taatggacaagcgtactacaatact

SEQ ID NO: 16219 - DNA, 25 bp, Probe sequence
ggataatggacaagcgtactacaat

SEQ ID NO: 16220 - DNA, 25 bp, Probe sequence
ggacaagcgtactacaatactgaat

SEQ ID NO: 16221 - DNA, 25 bp, Probe sequence
aatggacaagcgtactacaatactg

SEQ ID NO: 16222 - DNA, 25 bp, Probe sequence
acaagcgtactacaatactgaatac

SEQ ID NO: 16223 - DNA, 25 bp, Probe sequence
ataatggacaagcgtactacaatac

SEQ ID NO: 16224 - DNA, 25 bp, Probe sequence
gataatggacaagcgtactacaata

SEQ ID NO: 16225 - DNA, 25 bp, Probe sequence
gacaagcgtactacaatactgaata

SEQ ID NO: 16226 - DNA, 25 bp, Probe sequence
atggacaagcgtactacaatactga

SEQ ID NO: 16227 - DNA, 25 bp, Probe sequence
tagataagcaagatcaagcaatagc

SEQ ID NO: 16228 - DNA, 25 bp, Probe sequence
acatagataagcaagatcaagcaat

SEQ ID NO: 16229 - DNA, 25 bp, Probe sequence
tacatagataagcaagatcaagcaa

SEQ ID NO: 16230 - DNA, 25 bp, Probe sequence
atacatagataagcaagatcaagca

SEQ ID NO: 16231 - DNA, 25 bp, Probe sequence
tgtagtaggtgagcaacgtattaag

SEQ ID NO: 16232 - DNA, 25 bp, Probe sequence
gcgttactatacatagataagcaag

SEQ ID NO: 16233 - DNA, 25 bp, Probe sequence
tagtaggtgagcaacgtattaagga

SEQ ID NO: 16234 - DNA, 25 bp, Probe sequence
gtagtaggtgagcaacgtattaagg

SEQ ID NO: 16235 - DNA, 25 bp, Probe sequence
cgtaagcgtttaagtgatattgtga

SEQ ID NO: 16236 - DNA, 25 bp, Probe sequence
attatattgactgaatctgacgctg

SEQ ID NO: 16237 - DNA, 25 bp, Probe sequence
gcaacaggaagcgaattattagatg

SEQ ID NO: 16238 - DNA, 25 bp, Probe sequence
ttatattgactgaatctgacgctgc

SEQ ID NO: 16239 - DNA, 25 bp, Probe sequence
tatattgactgaatctgacgctgct

SEQ ID NO: 16240 - DNA, 25 bp, Probe sequence
caacaggaagcgaattattagatgt

SEQ ID NO: 16241 - DNA, 25 bp, Probe sequence
tattatattgactgaatctgacgct

SEQ ID NO: 16242 - DNA, 25 bp, Probe sequence
ctactgtagtaccttcaggattcaa

SEQ ID NO: 16243 - DNA, 25 bp, Probe sequence
acaggaagcgaattattagatgtta

SEQ ID NO: 16244 - DNA, 25 bp, Probe sequence
actgtagtaccttcaggattcaata

SEQ ID NO: 16245 - DNA, 25 bp, Probe sequence
tgcctatatctagttgtatcgttgt

SEQ ID NO: 16246 - DNA, 25 bp, Probe sequence
tatctagttgtatcgttgttgaagc

SEQ ID NO: 16247 - DNA, 25 bp, Probe sequence
gtgcctatatctagttgtatcgttg

SEQ ID NO: 16248 - DNA, 25 bp, Probe sequence
agtgcctatatctagttgtatcgtt

SEQ ID NO: 16249 - DNA, 25 bp, Probe sequence
acttgagtaacaattatggcatacc

SEQ ID NO: 16250 - DNA, 25 bp, Probe sequence
cttgagtaacaattatggcatacct

SEQ ID NO: 16251 - DNA, 25 bp, Probe sequence
catactcatacagtctctgaacgat

SEQ ID NO: 16252 - DNA, 25 bp, Probe sequence
atcatactcatacagtctctgaacg

SEQ ID NO: 16253 - DNA, 25 bp, Probe sequence
agtaacaattatggcatacctatgg

SEQ ID NO: 16254 - DNA, 25 bp, Probe sequence
cgaagaagcatctcaatacgatata

SEQ ID NO: 16255 - DNA, 25 bp, Probe sequence
attatcgaagaagcatctcaatacg

SEQ ID NO: 16256 - DNA, 25 bp, Probe sequence
cgtattatcgaagaagcatctcaat

SEQ ID NO: 16257 - DNA, 25 bp, Probe sequence
ttgccttacacagtttgaatagttt

SEQ ID NO: 16258 - DNA, 25 bp, Probe sequence
attgccttacacagtttgaatagtt

SEQ ID NO: 16259 - DNA, 25 bp, Probe sequence
agaaacaatcaaccatacaacagaa

SEQ ID NO: 16260 - DNA, 25 bp, Probe sequence
agagcaaattaaacagcaagtaagt

SEQ ID NO: 16261 - DNA, 25 bp, Probe sequence
aattgccttacacagtttgaatagt

SEQ ID NO: 16262 - DNA, 25 bp, Probe sequence
gtcaatgtttcaagtcgtattatcg

SEQ ID NO: 16263 - DNA, 25 bp, Probe sequence
taagcgtgtgtatgaccagttaata

SEQ ID NO: 16264 - DNA, 25 bp, Probe sequence
gcgtgtgtatgaccagttaatagaa

SEQ ID NO: 16265 - DNA, 25 bp, Probe sequence
aagcgtgtgtatgaccagttaatag

SEQ ID NO: 16266 - DNA, 25 bp, Probe sequence
ctaagcgtgtgtatgaccagttaat

SEQ ID NO: 16267 - DNA, 25 bp, Probe sequence
agcgtgtgtatgaccagttaataga

SEQ ID NO: 16268 - DNA, 25 bp, Probe sequence
atcaaggatagaccgacagataagc

SEQ ID NO: 16269 - DNA, 25 bp, Probe sequence
actgaaggttatggttatgtaagag

SEQ ID NO: 16270 - DNA, 25 bp, Probe sequence
gtatcaaggatagaccgacagataa

SEQ ID NO: 16271 - DNA, 25 bp, Probe sequence
gatagaccgacagataagcaactta

SEQ ID NO: 16272 - DNA, 25 bp, Probe sequence
ggtgaagaagtggttagaagaagat

SEQ ID NO: 16273 - DNA, 25 bp, Probe sequence
aggtgaagaagtggttagaagaaga

SEQ ID NO: 16274 - DNA, 25 bp, Probe sequence
caggtgaagaagtggttagaagaag

SEQ ID NO: 16275 - DNA, 25 bp, Probe sequence
ttgagttatgttgaagatgttggca

SEQ ID NO: 16276 - DNA, 25 bp, Probe sequence
tgagttatgttgaagatgttggcac

SEQ ID NO: 16277 - DNA, 25 bp, Probe sequence
gcaggtgaagaagtggttagaagaa

SEQ ID NO: 16278 - DNA, 25 bp, Probe sequence
gagttatgttgaagatgttggcacg

SEQ ID NO: 16279 - DNA, 25 bp, Probe sequence
tttgagttatgttgaagatgttggc

SEQ ID NO: 16280 - DNA, 25 bp, Probe sequence
aattgaatcgtacagttaaagcagc

SEQ ID NO: 16281 - DNA, 25 bp, Probe sequence
atatgccgctgttatagttggattg

SEQ ID NO: 16282 - DNA, 25 bp, Probe sequence
tatagttggattggaatcatcaccg

SEQ ID NO: 16283 - DNA, 25 bp, Probe sequence
gaggaattgaaccaactgtagattg

SEQ ID NO: 16284 - DNA, 25 bp, Probe sequence
gctgttatagttggattggaatcat

SEQ ID NO: 16285 - DNA, 25 bp, Probe sequence
ggaggaattgaaccaactgtagatt

SEQ ID NO: 16286 - DNA, 25 bp, Probe sequence
attaggattaggtactgtcggatct

SEQ ID NO: 16287 - DNA, 25 bp, Probe sequence
cgctgttatagttggattggaatca

SEQ ID NO: 16288 - DNA, 25 bp, Probe sequence
ttatagttggattggaatcatcacc

SEQ ID NO: 16289 - DNA, 25 bp, Probe sequence
ttaggattaggtactgtcggatctg

SEQ ID NO: 16290 - DNA, 25 bp, Probe sequence
ggagatgtaccaagttatccgtatt

SEQ ID NO: 16291 - DNA, 25 bp, Probe sequence
gatgaaagtattaacggaacaacca

SEQ ID NO: 16292 - DNA, 25 bp, Probe sequence
aagagatgcgatgaaagtattaacg

SEQ ID NO: 16293 - DNA, 25 bp, Probe sequence
cgatgaaagtattaacggaacaacc

SEQ ID NO: 16294 - DNA, 25 bp, Probe sequence
acgatggcaacaagtttacaattaa

SEQ ID NO: 16295 - DNA, 25 bp, Probe sequence
tggagatgtaccaagttatccgtat

SEQ ID NO: 16296 - DNA, 25 bp, Probe sequence
gatgcgatgaaagtattaacggaac

SEQ ID NO: 16297 - DNA, 25 bp, Probe sequence
agatgcgatgaaagtattaacggaa

SEQ ID NO: 16298 - DNA, 25 bp, Probe sequence
gacgatggcaacaagtttacaatta

SEQ ID NO: 16299 - DNA, 25 bp, Probe sequence
gatggcaaggattagtagaagagtt

SEQ ID NO: 16300 - DNA, 25 bp, Probe sequence
atgagaagatggcaaggattagtag

SEQ ID NO: 16301 - DNA, 25 bp, Probe sequence
aagatggcaaggattagtagaagag

SEQ ID NO: 16302 - DNA, 25 bp, Probe sequence
gaagatggcaaggattagtagaaga

SEQ ID NO: 16303 - DNA, 25 bp, Probe sequence
agaagatggcaaggattagtagaag

SEQ ID NO: 16304 - DNA, 25 bp, Probe sequence
gagaagatggcaaggattagtagaa

SEQ ID NO: 16305 - DNA, 25 bp, Probe sequence
tatatgtgaagtatgaaggtgccaa

SEQ ID NO: 16306 - DNA, 25 bp, Probe sequence
ttatatgtgaagtatgaaggtgcca

SEQ ID NO: 16307 - DNA, 25 bp, Probe sequence
atatgtgaagtatgaaggtgccaat

SEQ ID NO: 16308 - DNA, 25 bp, Probe sequence
atgaagctattatcgaagtgaatgg

SEQ ID NO: 16309 - DNA, 25 bp, Probe sequence
gcagatgaagctattatcgaagtga

SEQ ID NO: 16310 - DNA, 25 bp, Probe sequence
cagatgaagctattatcgaagtgaa

SEQ ID NO: 16311 - DNA, 25 bp, Probe sequence
cacttagcacgaaaccagatttaat

SEQ ID NO: 16312 - DNA, 25 bp, Probe sequence
acttagcacgaaaccagatttaatt

SEQ ID NO: 16313 - DNA, 25 bp, Probe sequence
aattcaacaacgacgtattggatat

SEQ ID NO: 16314 - DNA, 25 bp, Probe sequence
caaactatgaagcagaacaaatggc

SEQ ID NO: 16315 - DNA, 25 bp, Probe sequence
tcaaactatgaagcagaacaaatgg

SEQ ID NO: 16316 - DNA, 25 bp, Probe sequence
gatgaagctattatcgaagtgaatg

SEQ ID NO: 16317 - DNA, 25 bp, Probe sequence
gcattagcacagcacaattatgaat

SEQ ID NO: 16318 - DNA, 25 bp, Probe sequence
gatgtgattgtaacgataccaactt

SEQ ID NO: 16319 - DNA, 25 bp, Probe sequence
atgagaagtgatattccattggcaa

SEQ ID NO: 16320 - DNA, 25 bp, Probe sequence
ggatgtgattgtaacgataccaact

SEQ ID NO: 16321 - DNA, 25 bp, Probe sequence
agaagtgatattccattggcaagag

SEQ ID NO: 16322 - DNA, 25 bp, Probe sequence
gagaagtgatattccattggcaaga

SEQ ID NO: 16323 - DNA, 25 bp, Probe sequence
tgagaagtgatattccattggcaag

SEQ ID NO: 16324 - DNA, 25 bp, Probe sequence
tagcacagcacaattatgaattagc

SEQ ID NO: 16325 - DNA, 25 bp, Probe sequence
cagcacaattatgaattagcaggta

SEQ ID NO: 16326 - DNA, 25 bp, Probe sequence
agtcgcattctctattgtggttata

SEQ ID NO: 16327 - DNA, 25 bp, Probe sequence
tagtcgcattctctattgtggttat

SEQ ID NO: 16328 - DNA, 25 bp, Probe sequence
gtcgcattctctattgtggttatat

SEQ ID NO: 16329 - DNA, 25 bp, Probe sequence
ctagtcgcattctctattgtggtta

SEQ ID NO: 16330 - DNA, 25 bp, Probe sequence
cgcattctctattgtggttatatct

SEQ ID NO: 16331 - DNA, 25 bp, Probe sequence
tcgcattctctattgtggttatatc

SEQ ID NO: 16332 - DNA, 25 bp, Probe sequence
tgtgatagcatctgtcattgttagt

SEQ ID NO: 16333 - DNA, 25 bp, Probe sequence
ctgtgatagcatctgtcattgttag

SEQ ID NO: 16334 - DNA, 25 bp, Probe sequence
acttcttagtggaacaaggtagaga

SEQ ID NO: 16335 - DNA, 25 bp, Probe sequence
cgacagcaacttgttgataagataa

SEQ ID NO: 16336 - DNA, 25 bp, Probe sequence
acaatcgagagatacagaagaagtt

SEQ ID NO: 16337 - DNA, 25 bp, Probe sequence
aacaatcgagagatacagaagaagt

SEQ ID NO: 16338 - DNA, 25 bp, Probe sequence
acgacagcaacttgttgataagata

SEQ ID NO: 16339 - DNA, 25 bp, Probe sequence
cgagagatacagaagaagttaattg

SEQ ID NO: 16340 - DNA, 25 bp, Probe sequence
gcagacattatatgaagctcaacag

SEQ ID NO: 16341 - DNA, 25 bp, Probe sequence
aacgacagcaacttgttgataagat

SEQ ID NO: 16342 - DNA, 25 bp, Probe sequence
agataatgacagtgataatcaacct

SEQ ID NO: 16343 - DNA, 25 bp, Probe sequence
caatcgagagatacagaagaagtta

SEQ ID NO: 16344 - DNA, 25 bp, Probe sequence
tcgtatacaacatgaagaggtgatt

SEQ ID NO: 16345 - DNA, 25 bp, Probe sequence
gtcgtatacaacatgaagaggtgat

SEQ ID NO: 16346 - DNA, 25 bp, Probe sequence
gagcacactgattaatatcttagga

SEQ ID NO: 16347 - DNA, 25 bp, Probe sequence
agatcgagagtatcatggtgaatat

SEQ ID NO: 16348 - DNA, 25 bp, Probe sequence
atagatcgagagtatcatggtgaat

SEQ ID NO: 16349 - DNA, 25 bp, Probe sequence
agagcacactgattaatatcttagg

SEQ ID NO: 16350 - DNA, 25 bp, Probe sequence
tgaaggaagtaattatcagacacaa

SEQ ID NO: 16351 - DNA, 25 bp, Probe sequence
ttgaaggaagtaattatcagacaca

SEQ ID NO: 16352 - DNA, 25 bp, Probe sequence
cgtatacaacatgaagaggtgatta

SEQ ID NO: 16353 - DNA, 25 bp, Probe sequence
ttgctggtattggagttatgaatgt

SEQ ID NO: 16354 - DNA, 25 bp, Probe sequence
attgctggtattggagttatgaatg

SEQ ID NO: 16355 - DNA, 25 bp, Probe sequence
tgctggtattggagttatgaatgtc

SEQ ID NO: 16356 - DNA, 25 bp, Probe sequence
gagttctgtcataattgcggttagt

SEQ ID NO: 16357 - DNA, 25 bp, Probe sequence
actatattctgactcatctaccgtt

SEQ ID NO: 16358 - DNA, 25 bp, Probe sequence
aactatattctgactcatctaccgt

SEQ ID NO: 16359 - DNA, 25 bp, Probe sequence
agttctgtcataattgcggttagtg

SEQ ID NO: 16360 - DNA, 25 bp, Probe sequence
gctggtattggagttatgaatgtca

SEQ ID NO: 16361 - DNA, 25 bp, Probe sequence
ttgagttctgtcataattgcggtta

SEQ ID NO: 16362 - DNA, 25 bp, Probe sequence
tataatggaagtagtgtttggaacg

SEQ ID NO: 16363 - DNA, 25 bp, Probe sequence
ataatggaagtagtgtttggaacgc

SEQ ID NO: 16364 - DNA, 25 bp, Probe sequence
acaggaatcaaaggttcagctataa

SEQ ID NO: 16365 - DNA, 25 bp, Probe sequence
gacaggaatcaaaggttcagctata

SEQ ID NO: 16366 - DNA, 25 bp, Probe sequence
aggaatcaaaggttcagctataact

SEQ ID NO: 16367 - DNA, 25 bp, Probe sequence
caggaatcaaaggttcagctataac

SEQ ID NO: 16368 - DNA, 25 bp, Probe sequence
gtcgtgcaacagtaatgagatttat

SEQ ID NO: 16369 - DNA, 25 bp, Probe sequence
tcgtgcaacagtaatgagatttatc

SEQ ID NO: 16370 - DNA, 25 bp, Probe sequence
ctgccttatataatggaagtagtgt

SEQ ID NO: 16371 - DNA, 25 bp, Probe sequence
taagtttagaagtgggagcatcaat

SEQ ID NO: 16372 - DNA, 25 bp, Probe sequence
aaagcacagtcatttaatcaaacca

SEQ ID NO: 16373 - DNA, 25 bp, Probe sequence
aagcacagtcatttaatcaaaccac

SEQ ID NO: 16374 - DNA, 25 bp, Probe sequence
aagtttagaagtgggagcatcaatt

SEQ ID NO: 16375 - DNA, 25 bp, Probe sequence
ctaagtttagaagtgggagcatcaa

SEQ ID NO: 16376 - DNA, 25 bp, Probe sequence
tgaatgctaagtttagaagtgggag

SEQ ID NO: 16377 - DNA, 25 bp, Probe sequence
gtgaatgctaagtttagaagtggga

SEQ ID NO: 16378 - DNA, 25 bp, Probe sequence
atgtgaatgctaagtttagaagtgg

SEQ ID NO: 16379 - DNA, 25 bp, Probe sequence
tgtgaatgctaagtttagaagtggg

SEQ ID NO: 16380 - DNA, 25 bp, Probe sequence
ctacgacaagtaagccattcttctt

SEQ ID NO: 16381 - DNA, 25 bp, Probe sequence
ggtatgattccaactgctagagatt

SEQ ID NO: 16382 - DNA, 25 bp, Probe sequence
aggtatgattccaactgctagagat

SEQ ID NO: 16383 - DNA, 25 bp, Probe sequence
ctactgaaggtatgattccaactgc

SEQ ID NO: 16384 - DNA, 25 bp, Probe sequence
tgtgttcaatgataatgtagatgct

SEQ ID NO: 16385 - DNA, 25 bp, Probe sequence
gtgtgttcaatgataatgtagatgc

SEQ ID NO: 16386 - DNA, 25 bp, Probe sequence
aaggtatgattccaactgctagaga

SEQ ID NO: 16387 - DNA, 25 bp, Probe sequence
gaaggtatgattccaactgctagag

SEQ ID NO: 16388 - DNA, 25 bp, Probe sequence
actgaaggtatgattccaactgcta

SEQ ID NO: 16389 - DNA, 25 bp, Probe sequence
caactgatggatacggctatgaata

SEQ ID NO: 16390 - DNA, 25 bp, Probe sequence
aactgatggatacggctatgaatat

SEQ ID NO: 16391 - DNA, 25 bp, Probe sequence
actgatggatacggctatgaatata

SEQ ID NO: 16392 - DNA, 25 bp, Probe sequence
agtatggtatcacgatgagtatcct

SEQ ID NO: 16393 - DNA, 25 bp, Probe sequence
aagtatggtatcacgatgagtatcc

SEQ ID NO: 16394 - DNA, 25 bp, Probe sequence
tggtatcacgatgagtatcctctaa

SEQ ID NO: 16395 - DNA, 25 bp, Probe sequence
atggtatcacgatgagtatcctcta

SEQ ID NO: 16396 - DNA, 25 bp, Probe sequence
tatggtatcacgatgagtatcctct

SEQ ID NO: 16397 - DNA, 25 bp, Probe sequence
gtatggtatcacgatgagtatcctc

SEQ ID NO: 16398 - DNA, 25 bp, Probe sequence
tattggcgttgtagatgtcattgaa

SEQ ID NO: 16399 - DNA, 25 bp, Probe sequence
taatgaacctattggcgttgtagat

SEQ ID NO: 16400 - DNA, 25 bp, Probe sequence
ataatgaacctattggcgttgtaga

SEQ ID NO: 16401 - DNA, 25 bp, Probe sequence
aataatgaacctattggcgttgtag

SEQ ID NO: 16402 - DNA, 25 bp, Probe sequence
ctattggcgttgtagatgtcattga

SEQ ID NO: 16403 - DNA, 25 bp, Probe sequence
aatgaacctattggcgttgtagatg

SEQ ID NO: 16404 - DNA, 25 bp, Probe sequence
cctattggcgttgtagatgtcattg

SEQ ID NO: 16405 - DNA, 25 bp, Probe sequence
actaggtattatggaattgtatgcc

SEQ ID NO: 16406 - DNA, 25 bp, Probe sequence
acctattggcgttgtagatgtcatt

SEQ ID NO: 16407 - DNA, 25 bp, Probe sequence
taatcctgagcgtattgaaatgaaa

SEQ ID NO: 16408 - DNA, 25 bp, Probe sequence
cgtaataatcctgagcgtattgaaa

SEQ ID NO: 16409 - DNA, 25 bp, Probe sequence
ataatcctgagcgtattgaaatgaa

SEQ ID NO: 16410 - DNA, 25 bp, Probe sequence
aataatcctgagcgtattgaaatga

SEQ ID NO: 16411 - DNA, 25 bp, Probe sequence
ttgcccaagattaaacaaatatacg

SEQ ID NO: 16412 - DNA, 25 bp, Probe sequence
tgcccaagattaaacaaatatacgt

SEQ ID NO: 16413 - DNA, 25 bp, Probe sequence
taataatcctgagcgtattgaaatg

SEQ ID NO: 16414 - DNA, 25 bp, Probe sequence
gtaataatcctgagcgtattgaaat

SEQ ID NO: 16415 - DNA, 25 bp, Probe sequence
acgtaataatcctgagcgtattgaa

SEQ ID NO: 16416 - DNA, 25 bp, Probe sequence
tatggcacattaagtgttatcgtct

SEQ ID NO: 16417 - DNA, 25 bp, Probe sequence
atatggcacattaagtgttatcgtc

SEQ ID NO: 16418 - DNA, 25 bp, Probe sequence
atggcacattaagtgttatcgtctt

SEQ ID NO: 16419 - DNA, 25 bp, Probe sequence
aatatggcacattaagtgttatcgt

SEQ ID NO: 16420 - DNA, 25 bp, Probe sequence
ctttacttaatcactcgcagtttcg

SEQ ID NO: 16421 - DNA, 25 bp, Probe sequence
gctttacttaatcactcgcagtttc

SEQ ID NO: 16422 - DNA, 25 bp, Probe sequence
tttacttaatcactcgcagtttcgt

SEQ ID NO: 16423 - DNA, 25 bp, Probe sequence
gttattggtacattgattatgggca

SEQ ID NO: 16424 - DNA, 25 bp, Probe sequence
ttacttaatcactcgcagtttcgtc

SEQ ID NO: 16425 - DNA, 25 bp, Probe sequence
ttaccaagagattcatcacctacac

SEQ ID NO: 16426 - DNA, 25 bp, Probe sequence
attaccaagagattcatcacctaca

SEQ ID NO: 16427 - DNA, 25 bp, Probe sequence
aattaccaagagattcatcacctac

SEQ ID NO: 16428 - DNA, 25 bp, Probe sequence
taccaagagattcatcacctacacg

SEQ ID NO: 16429 - DNA, 25 bp, Probe sequence
tttgaaatgtctcgtattgcgttta

SEQ ID NO: 16430 - DNA, 25 bp, Probe sequence
ttgaaatgtctcgtattgcgtttag

SEQ ID NO: 16431 - DNA, 25 bp, Probe sequence
atttgaaatgtctcgtattgcgttt

SEQ ID NO: 16432 - DNA, 25 bp, Probe sequence
aatttgaaatgtctcgtattgcgtt

SEQ ID NO: 16433 - DNA, 25 bp, Probe sequence
aagatgtaaagtaactggaagacct

SEQ ID NO: 16434 - DNA, 25 bp, Probe sequence
gcgatatagagattgatatggttgc

SEQ ID NO: 16435 - DNA, 25 bp, Probe sequence
actgcttatattggtaacaaggact

SEQ ID NO: 16436 - DNA, 25 bp, Probe sequence
gactgcttatattggtaacaaggac

SEQ ID NO: 16437 - DNA, 25 bp, Probe sequence
aacgactgcttatattggtaacaag

SEQ ID NO: 16438 - DNA, 25 bp, Probe sequence
cgactgcttatattggtaacaagga

SEQ ID NO: 16439 - DNA, 25 bp, Probe sequence
acgactgcttatattggtaacaagg

SEQ ID NO: 16440 - DNA, 25 bp, Probe sequence
ctgcttatattggtaacaaggactt

SEQ ID NO: 16441 - DNA, 25 bp, Probe sequence
ttaacgactgcttatattggtaaca

SEQ ID NO: 16442 - DNA, 25 bp, Probe sequence
cgatatagagattgatatggttgct

SEQ ID NO: 16443 - DNA, 25 bp, Probe sequence
gccagaaggtgttagagaattagaa

SEQ ID NO: 16444 - DNA, 25 bp, Probe sequence
ggtctgaatgtgatacaactatcca

SEQ ID NO: 16445 - DNA, 25 bp, Probe sequence
aggtctgaatgtgatacaactatcc

SEQ ID NO: 16446 - DNA, 25 bp, Probe sequence
aagtaggtctgaatgtgatacaact

SEQ ID NO: 16447 - DNA, 25 bp, Probe sequence
cgccagaaggtgttagagaattaga

SEQ ID NO: 16448 - DNA, 25 bp, Probe sequence
agtaggtctgaatgtgatacaacta

SEQ ID NO: 16449 - DNA, 25 bp, Probe sequence
ttgattgccgatggtggtataagaa

SEQ ID NO: 16450 - DNA, 25 bp, Probe sequence
gtctgaatgtgatacaactatccaa

SEQ ID NO: 16451 - DNA, 25 bp, Probe sequence
acgccagaaggtgttagagaattag

SEQ ID NO: 16452 - DNA, 25 bp, Probe sequence
gtcgtggtggagaagtattatatca

SEQ ID NO: 16453 - DNA, 25 bp, Probe sequence
ggtcgtggtggagaagtattatatc

SEQ ID NO: 16454 - DNA, 25 bp, Probe sequence
tggtggagaagtattatatcaagca

SEQ ID NO: 16455 - DNA, 25 bp, Probe sequence
gtggtggagaagtattatatcaagc

SEQ ID NO: 16456 - DNA, 25 bp, Probe sequence
tcgtggtggagaagtattatatcaa

SEQ ID NO: 16457 - DNA, 25 bp, Probe sequence
cgtggtggagaagtattatatcaag

SEQ ID NO: 16458 - DNA, 25 bp, Probe sequence
tatgctggtgattacattgtgagta

SEQ ID NO: 16459 - DNA, 25 bp, Probe sequence
atatgctggtgattacattgtgagt

SEQ ID NO: 16460 - DNA, 25 bp, Probe sequence
attatacacttacggcgataactgg

SEQ ID NO: 16461 - DNA, 25 bp, Probe sequence
ggcaatacgcttaacaatatacgat

SEQ ID NO: 16462 - DNA, 25 bp, Probe sequence
aggcaatacgcttaacaatatacga

SEQ ID NO: 16463 - DNA, 25 bp, Probe sequence
aacacgcatcaataacattacaagc

SEQ ID NO: 16464 - DNA, 25 bp, Probe sequence
taggcaatacgcttaacaatatacg

SEQ ID NO: 16465 - DNA, 25 bp, Probe sequence
gcatcaataacattacaagcgaatt

SEQ ID NO: 16466 - DNA, 25 bp, Probe sequence
tatatgacgcttcacacgattacat

SEQ ID NO: 16467 - DNA, 25 bp, Probe sequence
atcacgagtgttgtattaggcaata

SEQ ID NO: 16468 - DNA, 25 bp, Probe sequence
ttatatgacgcttcacacgattaca

SEQ ID NO: 16469 - DNA, 25 bp, Probe sequence
gaattatatgacgcttcacacgatt

SEQ ID NO: 16470 - DNA, 25 bp, Probe sequence
acctaatgacgaagcaatcactatt

SEQ ID NO: 16471 - DNA, 25 bp, Probe sequence
gacctaatgacgaagcaatcactat

SEQ ID NO: 16472 - DNA, 25 bp, Probe sequence
cgagacagagatattgatggtgtta

SEQ ID NO: 16473 - DNA, 25 bp, Probe sequence
agacctaatgacgaagcaatcacta

SEQ ID NO: 16474 - DNA, 25 bp, Probe sequence
tagacctaatgacgaagcaatcact

SEQ ID NO: 16475 - DNA, 25 bp, Probe sequence
gtagacctaatgacgaagcaatcac

SEQ ID NO: 16476 - DNA, 25 bp, Probe sequence
cgatgcgattcaatcacaatattct

SEQ ID NO: 16477 - DNA, 25 bp, Probe sequence
acgagacagagatattgatggtgtt

SEQ ID NO: 16478 - DNA, 25 bp, Probe sequence
taattgcacgagacagagatattga

SEQ ID NO: 16479 - DNA, 25 bp, Probe sequence
cacagcattatctattggttggcat

SEQ ID NO: 16480 - DNA, 25 bp, Probe sequence
ttatggtctcaagatatgttggagc

SEQ ID NO: 16481 - DNA, 25 bp, Probe sequence
attatctattggttggcatgtgagt

SEQ ID NO: 16482 - DNA, 25 bp, Probe sequence
tagttaatagagcagttagtgaagc

SEQ ID NO: 16483 - DNA, 25 bp, Probe sequence
cattatctattggttggcatgtgag

SEQ ID NO: 16484 - DNA, 25 bp, Probe sequence
ggtctcaagatatgttggagcaatt

SEQ ID NO: 16485 - DNA, 25 bp, Probe sequence
tatggtctcaagatatgttggagca

SEQ ID NO: 16486 - DNA, 25 bp, Probe sequence
ttatctattggttggcatgtgagtg

SEQ ID NO: 16487 - DNA, 25 bp, Probe sequence
tggtgtgaagacatatacatcaatg

SEQ ID NO: 16488 - DNA, 25 bp, Probe sequence
atggtcaagttagtagtatctatgc

SEQ ID NO: 16489 - DNA, 25 bp, Probe sequence
agattgttaaaggtagagtgcgtta

SEQ ID NO: 16490 - DNA, 25 bp, Probe sequence
gattgttaaaggtagagtgcgttac

SEQ ID NO: 16491 - DNA, 25 bp, Probe sequence
ttaatgaatatggtacgaagtggta

SEQ ID NO: 16492 - DNA, 25 bp, Probe sequence
aagcatcgacgtaataatgtaacag

SEQ ID NO: 16493 - DNA, 25 bp, Probe sequence
tgaatatggtacgaagtggtatacg

SEQ ID NO: 16494 - DNA, 25 bp, Probe sequence
agtagtatctatgcacatcaaggat

SEQ ID NO: 16495 - DNA, 25 bp, Probe sequence
tggtcaagttagtagtatctatgca

SEQ ID NO: 16496 - DNA, 25 bp, Probe sequence
gagattgttaaaggtagagtgcgtt

SEQ ID NO: 16497 - DNA, 25 bp, Probe sequence
atatgcttgaagataacggcgatat

SEQ ID NO: 16498 - DNA, 25 bp, Probe sequence
cggaaatacaaagtagttatggcat

SEQ ID NO: 16499 - DNA, 25 bp, Probe sequence
ataacggcgatatcagattgctata

SEQ ID NO: 16500 - DNA, 25 bp, Probe sequence
taacggcgatatcagattgctatat

SEQ ID NO: 16501 - DNA, 25 bp, Probe sequence
ttgaagataacggcgatatcagatt

SEQ ID NO: 16502 - DNA, 25 bp, Probe sequence
catatgcttgaagataacggcgata

SEQ ID NO: 16503 - DNA, 25 bp, Probe sequence
cttgaagataacggcgatatcagat

SEQ ID NO: 16504 - DNA, 25 bp, Probe sequence
gataacggcgatatcagattgctat

SEQ ID NO: 16505 - DNA, 25 bp, Probe sequence
tgaagataacggcgatatcagattg

SEQ ID NO: 16506 - DNA, 25 bp, Probe sequence
atgctggaataatctcaactgtagt

SEQ ID NO: 16507 - DNA, 25 bp, Probe sequence
gctggaataatctcaactgtagtca

SEQ ID NO: 16508 - DNA, 25 bp, Probe sequence
tgctggaataatctcaactgtagtc

SEQ ID NO: 16509 - DNA, 25 bp, Probe sequence
gatgctggaataatctcaactgtag

SEQ ID NO: 16510 - DNA, 25 bp, Probe sequence
aatcctaacttgccaatgaatccag

SEQ ID NO: 16511 - DNA, 25 bp, Probe sequence
tgatgctggaataatctcaactgta

SEQ ID NO: 16512 - DNA, 25 bp, Probe sequence
aagtgatgctggaataatctcaact

SEQ ID NO: 16513 - DNA, 25 bp, Probe sequence
agtgatgctggaataatctcaactg

SEQ ID NO: 16514 - DNA, 25 bp, Probe sequence
ctggaataatctcaactgtagtcaa

SEQ ID NO: 16515 - DNA, 25 bp, Probe sequence
gcatactatcattattggcaatcgt

SEQ ID NO: 16516 - DNA, 25 bp, Probe sequence
agcatactatcattattggcaatcg

SEQ ID NO: 16517 - DNA, 25 bp, Probe sequence
atcattattggcaatcgttagagat

SEQ ID NO: 16518 - DNA, 25 bp, Probe sequence
actatcattattggcaatcgttaga

SEQ ID NO: 16519 - DNA, 25 bp, Probe sequence
tatcattattggcaatcgttagaga

SEQ ID NO: 16520 - DNA, 25 bp, Probe sequence
ctatcattattggcaatcgttagag

SEQ ID NO: 16521 - DNA, 25 bp, Probe sequence
catactatcattattggcaatcgtt

SEQ ID NO: 16522 - DNA, 25 bp, Probe sequence
gcaagcatctatcactttcatttca

SEQ ID NO: 16523 - DNA, 25 bp, Probe sequence
tcattattggcaatcgttagagatt

SEQ ID NO: 16524 - DNA, 25 bp, Probe sequence
cgacaaagaaactggcgaaataata

SEQ ID NO: 16525 - DNA, 25 bp, Probe sequence
acccttcaatagcacatttcctaaa

SEQ ID NO: 16526 - DNA, 25 bp, Probe sequence
aacccttcaatagcacatttcctaa

SEQ ID NO: 16527 - DNA, 25 bp, Probe sequence
aaacccttcaatagcacatttccta

SEQ ID NO: 16528 - DNA, 25 bp, Probe sequence
taaacccttcaatagcacatttcct

SEQ ID NO: 16529 - DNA, 25 bp, Probe sequence
acaacgccctctttcataactatat

SEQ ID NO: 16530 - DNA, 25 bp, Probe sequence
gacaacgccctctttcataactata

SEQ ID NO: 16531 - DNA, 25 bp, Probe sequence
ttaaacccttcaatagcacatttcc

SEQ ID NO: 16532 - DNA, 25 bp, Probe sequence
aatcttctgcattgccattagtaat

SEQ ID NO: 16533 - DNA, 25 bp, Probe sequence
tacgaacataaagaccctacaaaca

SEQ ID NO: 16534 - DNA, 25 bp, Probe sequence
aaagcatacgaacataaagacccta

SEQ ID NO: 16535 - DNA, 25 bp, Probe sequence
taaagcatacgaacataaagaccct

SEQ ID NO: 16536 - DNA, 25 bp, Probe sequence
cgaacataaagaccctacaaacaat

SEQ ID NO: 16537 - DNA, 25 bp, Probe sequence
acgaacataaagaccctacaaacaa

SEQ ID NO: 16538 - DNA, 25 bp, Probe sequence
aagcatacgaacataaagaccctac

SEQ ID NO: 16539 - DNA, 25 bp, Probe sequence
ataaagcatacgaacataaagaccc

SEQ ID NO: 16540 - DNA, 25 bp, Probe sequence
gcatacgaacataaagaccctacaa

SEQ ID NO: 16541 - DNA, 25 bp, Probe sequence
atacgaacataaagaccctacaaac

SEQ ID NO: 16542 - DNA, 25 bp, Probe sequence
ttaatggcaatcgcactaggatata

SEQ ID NO: 16543 - DNA, 25 bp, Probe sequence
taatggcaatcgcactaggatatac

SEQ ID NO: 16544 - DNA, 25 bp, Probe sequence
ctaggtacaacaacattgcttgaac

SEQ ID NO: 16545 - DNA, 25 bp, Probe sequence
actaggtacaacaacattgcttgaa

SEQ ID NO: 16546 - DNA, 25 bp, Probe sequence
aactaggtacaacaacattgcttga

SEQ ID NO: 16547 - DNA, 25 bp, Probe sequence
caactaggtacaacaacattgcttg

SEQ ID NO: 16548 - DNA, 25 bp, Probe sequence
attaatggcaatcgcactaggatat

SEQ ID NO: 16549 - DNA, 25 bp, Probe sequence
tattaatggcaatcgcactaggata

SEQ ID NO: 16550 - DNA, 25 bp, Probe sequence
atggcaatcgcactaggatatacat

SEQ ID NO: 16551 - DNA, 25 bp, Probe sequence
gtaggattaactcaagaagaagcaa

SEQ ID NO: 16552 - DNA, 25 bp, Probe sequence
agtaggattaactcaagaagaagca

SEQ ID NO: 16553 - DNA, 25 bp, Probe sequence
tgatccagaaggtaatgatgtaaca

SEQ ID NO: 16554 - DNA, 25 bp, Probe sequence
gatccagaaggtaatgatgtaacac

SEQ ID NO: 16555 - DNA, 25 bp, Probe sequence
aagtaggattaactcaagaagaagc

SEQ ID NO: 16556 - DNA, 25 bp, Probe sequence
ttgatccagaaggtaatgatgtaac

SEQ ID NO: 16557 - DNA, 25 bp, Probe sequence
atccagaaggtaatgatgtaacacc

SEQ ID NO: 16558 - DNA, 25 bp, Probe sequence
aagtaattgatccagaaggtaatga

SEQ ID NO: 16559 - DNA, 25 bp, Probe sequence
attgatccagaaggtaatgatgtaa

SEQ ID NO: 16560 - DNA, 25 bp, Probe sequence
aagagattgctaagtgctcagagtt

SEQ ID NO: 16561 - DNA, 25 bp, Probe sequence
agattgctaagtgctcagagttcaa

SEQ ID NO: 16562 - DNA, 25 bp, Probe sequence
atttagtcaacgcaacatttcaagt

SEQ ID NO: 16563 - DNA, 25 bp, Probe sequence
gatttagtcaacgcaacatttcaag

SEQ ID NO: 16564 - DNA, 25 bp, Probe sequence
agagattgctaagtgctcagagttc

SEQ ID NO: 16565 - DNA, 25 bp, Probe sequence
gaagtttacaagacgaaagaacagt

SEQ ID NO: 16566 - DNA, 25 bp, Probe sequence
caacgcaacatttcaagttaagaag

SEQ ID NO: 16567 - DNA, 25 bp, Probe sequence
ttagtcaacgcaacatttcaagtta

SEQ ID NO: 16568 - DNA, 25 bp, Probe sequence
acgcaacatttcaagttaagaagtt

SEQ ID NO: 16569 - DNA, 25 bp, Probe sequence
taccagaagatgtagttgaagaagg

SEQ ID NO: 16570 - DNA, 25 bp, Probe sequence
aatatgaatgttatccgtcctgctg

SEQ ID NO: 16571 - DNA, 25 bp, Probe sequence
ggaagttgccttagaatctgaatct

SEQ ID NO: 16572 - DNA, 25 bp, Probe sequence
tctggtactgttattcaagcaatca

SEQ ID NO: 16573 - DNA, 25 bp, Probe sequence
atatgaatgttatccgtcctgctga

SEQ ID NO: 16574 - DNA, 25 bp, Probe sequence
tatgaatgttatccgtcctgctgat

SEQ ID NO: 16575 - DNA, 25 bp, Probe sequence
tgtaccagaagatgtagttgaagaa

SEQ ID NO: 16576 - DNA, 25 bp, Probe sequence
ttctggtactgttattcaagcaatc

SEQ ID NO: 16577 - DNA, 25 bp, Probe sequence
gattctggtactgttattcaagcaa

SEQ ID NO: 16578 - DNA, 25 bp, Probe sequence
cgttgaaatgtttgttgaatatgta

SEQ ID NO: 16579 - DNA, 25 bp, Probe sequence
acgttgaaatgtttgttgaatatgt

SEQ ID NO: 16580 - DNA, 25 bp, Probe sequence
tgatggtcaaactataatgttcaaa

SEQ ID NO: 16581 - DNA, 25 bp, Probe sequence
atgaatttgaaggggcatttatagc

SEQ ID NO: 16582 - DNA, 25 bp, Probe sequence
tgaatttgaaggggcatttatagca

SEQ ID NO: 16583 - DNA, 25 bp, Probe sequence
aatttgaaggggcatttatagcaac

SEQ ID NO: 16584 - DNA, 25 bp, Probe sequence
gaatttgaaggggcatttatagcaa

SEQ ID NO: 16585 - DNA, 25 bp, Probe sequence
atgatggtcaaactataatgttcaa

SEQ ID NO: 16586 - DNA, 25 bp, Probe sequence
atttgaaggggcatttatagcaaca

SEQ ID NO: 16587 - DNA, 25 bp, Probe sequence
agaaatgcttcgtatgatgatgatg

SEQ ID NO: 16588 - DNA, 25 bp, Probe sequence
gataaagaaagcgggtgaaacaatg

SEQ ID NO: 16589 - DNA, 25 bp, Probe sequence
aaattcagtaggataaagaaagcgg

SEQ ID NO: 16590 - DNA, 25 bp, Probe sequence
gaaatgcttcgtatgatgatgatgc

SEQ ID NO: 16591 - DNA, 25 bp, Probe sequence
aagaaatgcttcgtatgatgatgat

SEQ ID NO: 16592 - DNA, 25 bp, Probe sequence
aattcagtaggataaagaaagcggg

SEQ ID NO: 16593 - DNA, 25 bp, Probe sequence
gtaggataaagaaagcgggtgaaac

SEQ ID NO: 16594 - DNA, 25 bp, Probe sequence
agtaggataaagaaagcgggtgaaa

SEQ ID NO: 16595 - DNA, 25 bp, Probe sequence
attcagtaggataaagaaagcgggt

SEQ ID NO: 16596 - DNA, 25 bp, Probe sequence
tgagcttagtgactatattgaacgt

SEQ ID NO: 16597 - DNA, 25 bp, Probe sequence
atgagcttagtgactatattgaacg

SEQ ID NO: 16598 - DNA, 25 bp, Probe sequence
acggttaaagaattacagggtgaat

SEQ ID NO: 16599 - DNA, 25 bp, Probe sequence
attgacggttaaagaattacagggt

SEQ ID NO: 16600 - DNA, 25 bp, Probe sequence
gacggttaaagaattacagggtgaa

SEQ ID NO: 16601 - DNA, 25 bp, Probe sequence
ttgacggttaaagaattacagggtg

SEQ ID NO: 16602 - DNA, 25 bp, Probe sequence
tatgataattctgattccaatagcg

SEQ ID NO: 16603 - DNA, 25 bp, Probe sequence
cggttaaagaattacagggtgaatt

SEQ ID NO: 16604 - DNA, 25 bp, Probe sequence
aattgacggttaaagaattacaggg

SEQ ID NO: 16605 - DNA, 25 bp, Probe sequence
aagtaaattcgcaattgatagaggc

SEQ ID NO: 16606 - DNA, 25 bp, Probe sequence
agtaaattcgcaattgatagaggct

SEQ ID NO: 16607 - DNA, 25 bp, Probe sequence
gtaaattcgcaattgatagaggcta

SEQ ID NO: 16608 - DNA, 25 bp, Probe sequence
aattcgcaattgatagaggctattt

SEQ ID NO: 16609 - DNA, 25 bp, Probe sequence
aaattcgcaattgatagaggctatt

SEQ ID NO: 16610 - DNA, 25 bp, Probe sequence
taaattcgcaattgatagaggctat

SEQ ID NO: 16611 - DNA, 25 bp, Probe sequence
aattgatagaggctattttccagat

SEQ ID NO: 16612 - DNA, 25 bp, Probe sequence
tgatagaggctattttccagatatg

SEQ ID NO: 16613 - DNA, 25 bp, Probe sequence
aaagtaaattcgcaattgatagagg

SEQ ID NO: 16614 - DNA, 25 bp, Probe sequence
tatgttgtgttgttgaagtaagtgc

SEQ ID NO: 16615 - DNA, 25 bp, Probe sequence
tgtatgttgtgttgttgaagtaagt

SEQ ID NO: 16616 - DNA, 25 bp, Probe sequence
agtgtatgttgtgttgttgaagtaa

SEQ ID NO: 16617 - DNA, 25 bp, Probe sequence
gtccaacatctcattcaattaacca

SEQ ID NO: 16618 - DNA, 25 bp, Probe sequence
agtccaacatctcattcaattaacc

SEQ ID NO: 16619 - DNA, 25 bp, Probe sequence
gtatgttgtgttgttgaagtaagtg

SEQ ID NO: 16620 - DNA, 25 bp, Probe sequence
gtgtatgttgtgttgttgaagtaag

SEQ ID NO: 16621 - DNA, 25 bp, Probe sequence
atagtgtatgttgtgttgttgaagt

SEQ ID NO: 16622 - DNA, 25 bp, Probe sequence
tgatagtgtatgttgtgttgttgaa

SEQ ID NO: 16623 - DNA, 25 bp, Probe sequence
tagcattctgtatgattgttccttg

SEQ ID NO: 16624 - DNA, 25 bp, Probe sequence
cattctgtatgattgttccttggag

SEQ ID NO: 16625 - DNA, 25 bp, Probe sequence
ttctgtatgattgttccttggagag

SEQ ID NO: 16626 - DNA, 25 bp, Probe sequence
attctgtatgattgttccttggaga

SEQ ID NO: 16627 - DNA, 25 bp, Probe sequence
agcattctgtatgattgttccttgg

SEQ ID NO: 16628 - DNA, 25 bp, Probe sequence
ttagcattctgtatgattgttcctt

SEQ ID NO: 16629 - DNA, 25 bp, Probe sequence
gcattctgtatgattgttccttgga

SEQ ID NO: 16630 - DNA, 25 bp, Probe sequence
attagcattctgtatgattgttcct

SEQ ID NO: 16631 - DNA, 25 bp, Probe sequence
tattagcattctgtatgattgttcc

SEQ ID NO: 16632 - DNA, 25 bp, Probe sequence
ggaattatagtaggcagttggatgt

SEQ ID NO: 16633 - DNA, 25 bp, Probe sequence
aggaattatagtaggcagttggatg

SEQ ID NO: 16634 - DNA, 25 bp, Probe sequence
ggtaggaattatagtaggcagttgg

SEQ ID NO: 16635 - DNA, 25 bp, Probe sequence
gtaggaattatagtaggcagttgga

SEQ ID NO: 16636 - DNA, 25 bp, Probe sequence
cggtaggaattatagtaggcagttg

SEQ ID NO: 16637 - DNA, 25 bp, Probe sequence
tagcggtaggaattatagtaggcag

SEQ ID NO: 16638 - DNA, 25 bp, Probe sequence
ctagcggtaggaattatagtaggca

SEQ ID NO: 16639 - DNA, 25 bp, Probe sequence
gaattatagtaggcagttggatgtt

SEQ ID NO: 16640 - DNA, 25 bp, Probe sequence
taggaattatagtaggcagttggat

SEQ ID NO: 16641 - DNA, 25 bp, Probe sequence
tgatttagtgaggtttgagaagaca

SEQ ID NO: 16642 - DNA, 25 bp, Probe sequence
atgatttagtgaggtttgagaagac

SEQ ID NO: 16643 - DNA, 25 bp, Probe sequence
tgatgatttagtgaggtttgagaag

SEQ ID NO: 16644 - DNA, 25 bp, Probe sequence
tgaggtttgagaagacaagaatgat

SEQ ID NO: 16645 - DNA, 25 bp, Probe sequence
ttagtgaggtttgagaagacaagaa

SEQ ID NO: 16646 - DNA, 25 bp, Probe sequence
tttagtgaggtttgagaagacaaga

SEQ ID NO: 16647 - DNA, 25 bp, Probe sequence
tagtgaggtttgagaagacaagaat

SEQ ID NO: 16648 - DNA, 25 bp, Probe sequence
ggtttgagaagacaagaatgattga

SEQ ID NO: 16649 - DNA, 25 bp, Probe sequence
aggtttgagaagacaagaatgattg

SEQ ID NO: 16650 - DNA, 25 bp, Probe sequence
tgaatggaatgagactctaactaag

SEQ ID NO: 16651 - DNA, 25 bp, Probe sequence
gtataataacaagccttcgacactg

SEQ ID NO: 16652 - DNA, 25 bp, Probe sequence
tgagtataataacaagccttcgaca

SEQ ID NO: 16653 - DNA, 25 bp, Probe sequence
gagtataataacaagccttcgacac

SEQ ID NO: 16654 - DNA, 25 bp, Probe sequence
gaatggaatgagactctaactaaga

SEQ ID NO: 16655 - DNA, 25 bp, Probe sequence
ttgaatggaatgagactctaactaa

SEQ ID NO: 16656 - DNA, 25 bp, Probe sequence
attgtgtgcatggttgaatagtatc

SEQ ID NO: 16657 - DNA, 25 bp, Probe sequence
atacccactccctttacaatagaac

SEQ ID NO: 16658 - DNA, 25 bp, Probe sequence
agtataataacaagccttcgacact

SEQ ID NO: 16659 - DNA, 25 bp, Probe sequence
gcaggagtaggaacagttactattc

SEQ ID NO: 16660 - DNA, 25 bp, Probe sequence
tgcaggagtaggaacagttactatt

SEQ ID NO: 16661 - DNA, 25 bp, Probe sequence
cagtaattgggacagttagtggagg

SEQ ID NO: 16662 - DNA, 25 bp, Probe sequence
attccagtaattgggacagttagtg

SEQ ID NO: 16663 - DNA, 25 bp, Probe sequence
gtgcaggagtaggaacagttactat

SEQ ID NO: 16664 - DNA, 25 bp, Probe sequence
tattccagtaattgggacagttagt

SEQ ID NO: 16665 - DNA, 25 bp, Probe sequence
actattccagtaattgggacagtta

SEQ ID NO: 16666 - DNA, 25 bp, Probe sequence
tactattccagtaattgggacagtt

SEQ ID NO: 16667 - DNA, 25 bp, Probe sequence
ctattccagtaattgggacagttag

SEQ ID NO: 16668 - DNA, 25 bp, Probe sequence
ctatggtagtatcgtcaagagaaga

SEQ ID NO: 16669 - DNA, 25 bp, Probe sequence
attatgccgaagatattctgctgaa

SEQ ID NO: 16670 - DNA, 25 bp, Probe sequence
aattatgccgaagatattctgctga

SEQ ID NO: 16671 - DNA, 25 bp, Probe sequence
tctatggtagtatcgtcaagagaag

SEQ ID NO: 16672 - DNA, 25 bp, Probe sequence
tatggtagtatcgtcaagagaagat

SEQ ID NO: 16673 - DNA, 25 bp, Probe sequence
tagtaatgtcaagattccgtgtatc

SEQ ID NO: 16674 - DNA, 25 bp, Probe sequence
gctacttagatggaatgaagagaat

SEQ ID NO: 16675 - DNA, 25 bp, Probe sequence
atctgaattatgttatggacttggt

SEQ ID NO: 16676 - DNA, 25 bp, Probe sequence
ttagtaatgtcaagattccgtgtat

SEQ ID NO: 16677 - DNA, 25 bp, Probe sequence
tgggaatgaacctgatgatatagag

SEQ ID NO: 16678 - DNA, 25 bp, Probe sequence
ttgggaatgaacctgatgatataga

SEQ ID NO: 16679 - DNA, 25 bp, Probe sequence
aaactacaacgacaaattgctaagg

SEQ ID NO: 16680 - DNA, 25 bp, Probe sequence
tttgggaatgaacctgatgatatag

SEQ ID NO: 16681 - DNA, 25 bp, Probe sequence
aactacaacgacaaattgctaagga

SEQ ID NO: 16682 - DNA, 25 bp, Probe sequence
actacaacgacaaattgctaaggag

SEQ ID NO: 16683 - DNA, 25 bp, Probe sequence
acctaaatattctacccaagcacaa

SEQ ID NO: 16684 - DNA, 25 bp, Probe sequence
aacctaaatattctacccaagcaca

SEQ ID NO: 16685 - DNA, 25 bp, Probe sequence
cctgatgatatagaggtattggatt

SEQ ID NO: 16686 - DNA, 25 bp, Probe sequence
taggcgataatgtaagatacgatgg

SEQ ID NO: 16687 - DNA, 25 bp, Probe sequence
cgataatgtaagatacgatggtggt

SEQ ID NO: 16688 - DNA, 25 bp, Probe sequence
tgtaagatacgatggtggtaatcaa

SEQ ID NO: 16689 - DNA, 25 bp, Probe sequence
atgtaagatacgatggtggtaatca

SEQ ID NO: 16690 - DNA, 25 bp, Probe sequence
tgataggcgataatgtaagatacga

SEQ ID NO: 16691 - DNA, 25 bp, Probe sequence
gcgataatgtaagatacgatggtgg

SEQ ID NO: 16692 - DNA, 25 bp, Probe sequence
ggcgataatgtaagatacgatggtg

SEQ ID NO: 16693 - DNA, 25 bp, Probe sequence
aggcgataatgtaagatacgatggt

SEQ ID NO: 16694 - DNA, 25 bp, Probe sequence
ttgataggcgataatgtaagatacg

SEQ ID NO: 16695 - DNA, 25 bp, Probe sequence
ggttaggagagttgagtgagtattc

SEQ ID NO: 16696 - DNA, 25 bp, Probe sequence
aggttaggagagttgagtgagtatt

SEQ ID NO: 16697 - DNA, 25 bp, Probe sequence
gaggttaggagagttgagtgagtat

SEQ ID NO: 16698 - DNA, 25 bp, Probe sequence
gagagttgagtgagtattcagttga

SEQ ID NO: 16699 - DNA, 25 bp, Probe sequence
taggagagttgagtgagtattcagt

SEQ ID NO: 16700 - DNA, 25 bp, Probe sequence
attgaggttaggagagttgagtgag

SEQ ID NO: 16701 - DNA, 25 bp, Probe sequence
tagcattgaggttaggagagttgag

SEQ ID NO: 16702 - DNA, 25 bp, Probe sequence
gttaggagagttgagtgagtattca

SEQ ID NO: 16703 - DNA, 25 bp, Probe sequence
ttaggagagttgagtgagtattcag

SEQ ID NO: 16704 - DNA, 25 bp, Probe sequence
ttaactattggaacggttgaatcag

SEQ ID NO: 16705 - DNA, 25 bp, Probe sequence
taactattggaacggttgaatcagt

SEQ ID NO: 16706 - DNA, 25 bp, Probe sequence
attaactattggaacggttgaatca

SEQ ID NO: 16707 - DNA, 25 bp, Probe sequence
cattaactattggaacggttgaatc

SEQ ID NO: 16708 - DNA, 25 bp, Probe sequence
aattatacatacagcagactggcac

SEQ ID NO: 16709 - DNA, 25 bp, Probe sequence
ttgattatgtcatgctaggtcactt

SEQ ID NO: 16710 - DNA, 25 bp, Probe sequence
tatacatacagcagactggcactta

SEQ ID NO: 16711 - DNA, 25 bp, Probe sequence
tgattatgtcatgctaggtcacttg

SEQ ID NO: 16712 - DNA, 25 bp, Probe sequence
gattatgtcatgctaggtcacttgc

SEQ ID NO: 16713 - DNA, 25 bp, Probe sequence
tgttcaagtgattattccatcttca

SEQ ID NO: 16714 - DNA, 25 bp, Probe sequence
agcttaggtcgtgttattgatgtac

SEQ ID NO: 16715 - DNA, 25 bp, Probe sequence
taatggcagagcatgtaactgataa

SEQ ID NO: 16716 - DNA, 25 bp, Probe sequence
ttgttcaagtgattattccatcttc

SEQ ID NO: 16717 - DNA, 25 bp, Probe sequence
aatggcagagcatgtaactgataat

SEQ ID NO: 16718 - DNA, 25 bp, Probe sequence
gtaatggcagagcatgtaactgata

SEQ ID NO: 16719 - DNA, 25 bp, Probe sequence
atggcagagcatgtaactgataatc

SEQ ID NO: 16720 - DNA, 25 bp, Probe sequence
tacttcatgcaatcgaattagaacg

SEQ ID NO: 16721 - DNA, 25 bp, Probe sequence
gttcaagtgattattccatcttcat

SEQ ID NO: 16722 - DNA, 25 bp, Probe sequence
aagcagacagagatactacatcaac

SEQ ID NO: 16723 - DNA, 25 bp, Probe sequence
gcagacagagatactacatcaacta

SEQ ID NO: 16724 - DNA, 25 bp, Probe sequence
agcagacagagatactacatcaact

SEQ ID NO: 16725 - DNA, 25 bp, Probe sequence
agcaagccaagtatagagttaataa

SEQ ID NO: 16726 - DNA, 25 bp, Probe sequence
atagcaagccaagtatagagttaat

SEQ ID NO: 16727 - DNA, 25 bp, Probe sequence
cagacagagatactacatcaactaa

SEQ ID NO: 16728 - DNA, 25 bp, Probe sequence
tggcggtataagtaagacaaatagt

SEQ ID NO: 16729 - DNA, 25 bp, Probe sequence
aaagcagacagagatactacatcaa

SEQ ID NO: 16730 - DNA, 25 bp, Probe sequence
tagcaagccaagtatagagttaata

SEQ ID NO: 16731 - DNA, 25 bp, Probe sequence
cactgatagatgaatactctgctgt

SEQ ID NO: 16732 - DNA, 25 bp, Probe sequence
acactgatagatgaatactctgctg

SEQ ID NO: 16733 - DNA, 25 bp, Probe sequence
aggtagtaagcaagagttagagaat

SEQ ID NO: 16734 - DNA, 25 bp, Probe sequence
actgatagatgaatactctgctgtt

SEQ ID NO: 16735 - DNA, 25 bp, Probe sequence
tcaatgtccgatatgtggtaatgaa

SEQ ID NO: 16736 - DNA, 25 bp, Probe sequence
atcaatgtccgatatgtggtaatga

SEQ ID NO: 16737 - DNA, 25 bp, Probe sequence
ggtagtaagcaagagttagagaatc

SEQ ID NO: 16738 - DNA, 25 bp, Probe sequence
ctgatagatgaatactctgctgttc

SEQ ID NO: 16739 - DNA, 25 bp, Probe sequence
gagatcaatgtccgatatgtggtaa

SEQ ID NO: 16740 - DNA, 25 bp, Probe sequence
caatggaagatgctatcgtattagt

SEQ ID NO: 16741 - DNA, 25 bp, Probe sequence
gaagagtaggtattgttccgttatt

SEQ ID NO: 16742 - DNA, 25 bp, Probe sequence
ttggtatcggagataatgtgcttaa

SEQ ID NO: 16743 - DNA, 25 bp, Probe sequence
attggtatcggagataatgtgctta

SEQ ID NO: 16744 - DNA, 25 bp, Probe sequence
gattggtatcggagataatgtgctt

SEQ ID NO: 16745 - DNA, 25 bp, Probe sequence
ctacaatgacagtgttagatgacaa

SEQ ID NO: 16746 - DNA, 25 bp, Probe sequence
tctacaatgacagtgttagatgaca

SEQ ID NO: 16747 - DNA, 25 bp, Probe sequence
aagagtaggtattgttccgttatta

SEQ ID NO: 16748 - DNA, 25 bp, Probe sequence
agagtaggtattgttccgttattaa

SEQ ID NO: 16749 - DNA, 25 bp, Probe sequence
gcgacttagcaatggtattaaatga

SEQ ID NO: 16750 - DNA, 25 bp, Probe sequence
ggcgacttagcaatggtattaaatg

SEQ ID NO: 16751 - DNA, 25 bp, Probe sequence
aggcgacttagcaatggtattaaat

SEQ ID NO: 16752 - DNA, 25 bp, Probe sequence
aaggcgacttagcaatggtattaaa

SEQ ID NO: 16753 - DNA, 25 bp, Probe sequence
aaaggcgacttagcaatggtattaa

SEQ ID NO: 16754 - DNA, 25 bp, Probe sequence
tgaccgacaaattgaattagaagaa

SEQ ID NO: 16755 - DNA, 25 bp, Probe sequence
cgattcaaagatgaggaaggtaaag

SEQ ID NO: 16756 - DNA, 25 bp, Probe sequence
atatttgagaataagggtggcactg

SEQ ID NO: 16757 - DNA, 25 bp, Probe sequence
acttgaccgacaaattgaattagaa

SEQ ID NO: 16758 - DNA, 25 bp, Probe sequence
aaggacgatgaagattatgaaggac

SEQ ID NO: 16759 - DNA, 25 bp, Probe sequence
taaggacgatgaagattatgaagga

SEQ ID NO: 16760 - DNA, 25 bp, Probe sequence
acgatgaagattatgaaggacttga

SEQ ID NO: 16761 - DNA, 25 bp, Probe sequence
aggacgatgaagattatgaaggact

SEQ ID NO: 16762 - DNA, 25 bp, Probe sequence
gacgatgaagattatgaaggacttg

SEQ ID NO: 16763 - DNA, 25 bp, Probe sequence
ggacgatgaagattatgaaggactt

SEQ ID NO: 16764 - DNA, 25 bp, Probe sequence
tgtgagtggttatagagaaggtaat

SEQ ID NO: 16765 - DNA, 25 bp, Probe sequence
atgtgagtggttatagagaaggtaa

SEQ ID NO: 16766 - DNA, 25 bp, Probe sequence
aatgtgagtggttatagagaaggta

SEQ ID NO: 16767 - DNA, 25 bp, Probe sequence
cgatgaagaggatgaagaagtagaa

SEQ ID NO: 16768 - DNA, 25 bp, Probe sequence
gacgatgaagaggatgaagaagtag

SEQ ID NO: 16769 - DNA, 25 bp, Probe sequence
acgatgaagaggatgaagaagtaga

SEQ ID NO: 16770 - DNA, 25 bp, Probe sequence
tgacgatgaagaggatgaagaagta

SEQ ID NO: 16771 - DNA, 25 bp, Probe sequence
tgaagaggatgaagaagtagaagaa

SEQ ID NO: 16772 - DNA, 25 bp, Probe sequence
atgaagaggatgaagaagtagaaga

SEQ ID NO: 16773 - DNA, 25 bp, Probe sequence
gatgaagaggatgaagaagtagaag

SEQ ID NO: 16774 - DNA, 25 bp, Probe sequence
ttaggtgacgatgaagaggatgaag

SEQ ID NO: 16775 - DNA, 25 bp, Probe sequence
tcagttgaaggaggatatggtgatt

SEQ ID NO: 16776 - DNA, 25 bp, Probe sequence
aggtgatgatgaagaagatgaagaa

SEQ ID NO: 16777 - DNA, 25 bp, Probe sequence
ggtgatgatgaagaagatgaagaag

SEQ ID NO: 16778 - DNA, 25 bp, Probe sequence
taggtgatgatgaagaagatgaaga

SEQ ID NO: 16779 - DNA, 25 bp, Probe sequence
gtgatgatgaagaagatgaagaagt

SEQ ID NO: 16780 - DNA, 25 bp, Probe sequence
ggctatgatgttcaaggtaatccat

SEQ ID NO: 16781 - DNA, 25 bp, Probe sequence
ttaggtgatgatgaagaagatgaag

SEQ ID NO: 16782 - DNA, 25 bp, Probe sequence
gtcggctatgatgttcaaggtaatc

SEQ ID NO: 16783 - DNA, 25 bp, Probe sequence
tacatacacaacaccacgatatgaa

SEQ ID NO: 16784 - DNA, 25 bp, Probe sequence
ctacatacacaacaccacgatatga

SEQ ID NO: 16785 - DNA, 25 bp, Probe sequence
agcgattatcatcattgttgttact

SEQ ID NO: 16786 - DNA, 25 bp, Probe sequence
aagcgattatcatcattgttgttac

SEQ ID NO: 16787 - DNA, 25 bp, Probe sequence
caagcgattatcatcattgttgtta

SEQ ID NO: 16788 - DNA, 25 bp, Probe sequence
gcgattatcatcattgttgttacta

SEQ ID NO: 16789 - DNA, 25 bp, Probe sequence
tcaagagtcaacaagaagattatga

SEQ ID NO: 16790 - DNA, 25 bp, Probe sequence
tattaggcatcgagacaggtaagaa

SEQ ID NO: 16791 - DNA, 25 bp, Probe sequence
tcgtgttcttctgtatattccttat

SEQ ID NO: 16792 - DNA, 25 bp, Probe sequence
atcgtgttcttctgtatattcctta

SEQ ID NO: 16793 - DNA, 25 bp, Probe sequence
tatcgtgttcttctgtatattcctt

SEQ ID NO: 16794 - DNA, 25 bp, Probe sequence
caacatcaatatgcgagtgacattc

SEQ ID NO: 16795 - DNA, 25 bp, Probe sequence
ggtataggagcattcgatagtagtg

SEQ ID NO: 16796 - DNA, 25 bp, Probe sequence
tggtataggagcattcgatagtagt

SEQ ID NO: 16797 - DNA, 25 bp, Probe sequence
ttggtataggagcattcgatagtag

SEQ ID NO: 16798 - DNA, 25 bp, Probe sequence
tgccaatgtcggaatctgaagttaa

SEQ ID NO: 16799 - DNA, 25 bp, Probe sequence
ttagtagaaacaggtaacggcaaat

SEQ ID NO: 16800 - DNA, 25 bp, Probe sequence
attagtagaaacaggtaacggcaaa

SEQ ID NO: 16801 - DNA, 25 bp, Probe sequence
tagtagaaacaggtaacggcaaatc

SEQ ID NO: 16802 - DNA, 25 bp, Probe sequence
gaacaatggacatcaccagataagg

SEQ ID NO: 16803 - DNA, 25 bp, Probe sequence
tctaatccaccaatcttgccattaa

SEQ ID NO: 16804 - DNA, 25 bp, Probe sequence
ctctaatccaccaatcttgccatta

SEQ ID NO: 16805 - DNA, 25 bp, Probe sequence
tactctaatccaccaatcttgccat

SEQ ID NO: 16806 - DNA, 25 bp, Probe sequence
cagttacaggatatggagacactta

SEQ ID NO: 16807 - DNA, 25 bp, Probe sequence
ttactctaatccaccaatcttgcca

SEQ ID NO: 16808 - DNA, 25 bp, Probe sequence
ggtactcatcatggataagcaatct

SEQ ID NO: 16809 - DNA, 25 bp, Probe sequence
tggtactcatcatggataagcaatc

SEQ ID NO: 16810 - DNA, 25 bp, Probe sequence
agtaaggttggaaggatcatcaatt

SEQ ID NO: 16811 - DNA, 25 bp, Probe sequence
aagtaaggttggaaggatcatcaat

SEQ ID NO: 16812 - DNA, 25 bp, Probe sequence
atcaatagcatcattcagcagtatc

SEQ ID NO: 16813 - DNA, 25 bp, Probe sequence
tcaatagcatcattcagcagtatcg

SEQ ID NO: 16814 - DNA, 25 bp, Probe sequence
aatcaatagcatcattcagcagtat

SEQ ID NO: 16815 - DNA, 25 bp, Probe sequence
ttaggatataccattgacgagttca

SEQ ID NO: 16816 - DNA, 25 bp, Probe sequence
cctggattaactaacatggcatcta

SEQ ID NO: 16817 - DNA, 25 bp, Probe sequence
ggattaactaacatggcatctacga

SEQ ID NO: 16818 - DNA, 25 bp, Probe sequence
tggattaactaacatggcatctacg

SEQ ID NO: 16819 - DNA, 25 bp, Probe sequence
ctggattaactaacatggcatctac

SEQ ID NO: 16820 - DNA, 25 bp, Probe sequence
gattaactaacatggcatctacgat

SEQ ID NO: 16821 - DNA, 25 bp, Probe sequence
aaggtaatgacggtgaagatgtata

SEQ ID NO: 16822 - DNA, 25 bp, Probe sequence
aggtaatgacggtgaagatgtatat

SEQ ID NO: 16823 - DNA, 25 bp, Probe sequence
tgaggacctattagtgacatctgta

SEQ ID NO: 16824 - DNA, 25 bp, Probe sequence
gacatctgtattatctggtaaccgt

SEQ ID NO: 16825 - DNA, 25 bp, Probe sequence
tgacatctgtattatctggtaaccg

SEQ ID NO: 16826 - DNA, 25 bp, Probe sequence
cagataccgttgatagtgttgtaac

SEQ ID NO: 16827 - DNA, 25 bp, Probe sequence
gattgctgatgaggacctattagtg

SEQ ID NO: 16828 - DNA, 25 bp, Probe sequence
atgaggacctattagtgacatctgt

SEQ ID NO: 16829 - DNA, 25 bp, Probe sequence
attgctgatgaggacctattagtga

SEQ ID NO: 16830 - DNA, 25 bp, Probe sequence
atattagcgattgtagtggcatatt

SEQ ID NO: 16831 - DNA, 25 bp, Probe sequence
aatattagcgattgtagtggcatat

SEQ ID NO: 16832 - DNA, 25 bp, Probe sequence
cagagatagaacaacgatgaaagta

SEQ ID NO: 16833 - DNA, 25 bp, Probe sequence
tcagagatagaacaacgatgaaagt

SEQ ID NO: 16834 - DNA, 25 bp, Probe sequence
tattagcgattgtagtggcatattt

SEQ ID NO: 16835 - DNA, 25 bp, Probe sequence
gtaatattagcgattgtagtggcat

SEQ ID NO: 16836 - DNA, 25 bp, Probe sequence
cgtaatattagcgattgtagtggca

SEQ ID NO: 16837 - DNA, 25 bp, Probe sequence
agagatagaacaacgatgaaagtaa

SEQ ID NO: 16838 - DNA, 25 bp, Probe sequence
taatattagcgattgtagtggcata

SEQ ID NO: 16839 - DNA, 25 bp, Probe sequence
aacattaccatcaattccagaacag

SEQ ID NO: 16840 - DNA, 25 bp, Probe sequence
ggaatgcgtataggcgagttattag

SEQ ID NO: 16841 - DNA, 25 bp, Probe sequence
attaccatcaattccagaacagcaa

SEQ ID NO: 16842 - DNA, 25 bp, Probe sequence
gtataggcgagttattagcacttca

SEQ ID NO: 16843 - DNA, 25 bp, Probe sequence
tataggcgagttattagcacttcaa

SEQ ID NO: 16844 - DNA, 25 bp, Probe sequence
acactctattagatgaatggcttga

SEQ ID NO: 16845 - DNA, 25 bp, Probe sequence
cacactctattagatgaatggcttg

SEQ ID NO: 16846 - DNA, 25 bp, Probe sequence
tcacactctattagatgaatggctt

SEQ ID NO: 16847 - DNA, 25 bp, Probe sequence
cattaccatcaattccagaacagca

SEQ ID NO: 16848 - DNA, 25 bp, Probe sequence
aagcagaagtgttatatgaggaact

SEQ ID NO: 16849 - DNA, 25 bp, Probe sequence
caacctggatgctatatgaacggaa

SEQ ID NO: 16850 - DNA, 25 bp, Probe sequence
cgtaaagcagaagtgttatatgagg

SEQ ID NO: 16851 - DNA, 25 bp, Probe sequence
aaagcagaagtgttatatgaggaac

SEQ ID NO: 16852 - DNA, 25 bp, Probe sequence
gtaaagcagaagtgttatatgagga

SEQ ID NO: 16853 - DNA, 25 bp, Probe sequence
ataaagatagaagaaactgaccagc

SEQ ID NO: 16854 - DNA, 25 bp, Probe sequence
aacctggatgctatatgaacggaaa

SEQ ID NO: 16855 - DNA, 25 bp, Probe sequence
cagaagtgttatatgaggaacttgc

SEQ ID NO: 16856 - DNA, 25 bp, Probe sequence
gcagaagtgttatatgaggaacttg

SEQ ID NO: 16857 - DNA, 25 bp, Probe sequence
ggattaactgaagaagagattgaag

SEQ ID NO: 16858 - DNA, 25 bp, Probe sequence
actgaagaagagattgaagaagtaa

SEQ ID NO: 16859 - DNA, 25 bp, Probe sequence
aactgaagaagagattgaagaagta

SEQ ID NO: 16860 - DNA, 25 bp, Probe sequence
taactgaagaagagattgaagaagt

SEQ ID NO: 16861 - DNA, 25 bp, Probe sequence
agggattaactgaagaagagattga

SEQ ID NO: 16862 - DNA, 25 bp, Probe sequence
aacttgcagattacttcaatgtacc

SEQ ID NO: 16863 - DNA, 25 bp, Probe sequence
ttcaacaacttgcagattacttcaa

SEQ ID NO: 16864 - DNA, 25 bp, Probe sequence
caacaacttgcagattacttcaatg

SEQ ID NO: 16865 - DNA, 25 bp, Probe sequence
tcaacaacttgcagattacttcaat

SEQ ID NO: 16866 - DNA, 25 bp, Probe sequence
aaactctacacatcattcatccaaa

SEQ ID NO: 16867 - DNA, 25 bp, Probe sequence
gaataacgatagtccttatccatct

SEQ ID NO: 16868 - DNA, 25 bp, Probe sequence
agaataacgatagtccttatccatc

SEQ ID NO: 16869 - DNA, 25 bp, Probe sequence
tatacataagagattgctcactcaa

SEQ ID NO: 16870 - DNA, 25 bp, Probe sequence
aataacgatagtccttatccatctt

SEQ ID NO: 16871 - DNA, 25 bp, Probe sequence
aagaataacgatagtccttatccat

SEQ ID NO: 16872 - DNA, 25 bp, Probe sequence
agagttgtcagtttagatcatgttt

SEQ ID NO: 16873 - DNA, 25 bp, Probe sequence
acataagagattgctcactcaatat

SEQ ID NO: 16874 - DNA, 25 bp, Probe sequence
atacataagagattgctcactcaat

SEQ ID NO: 16875 - DNA, 25 bp, Probe sequence
aactacaggttccacagaattgatt

SEQ ID NO: 16876 - DNA, 25 bp, Probe sequence
caactacaggttccacagaattgat

SEQ ID NO: 16877 - DNA, 25 bp, Probe sequence
tatgctgaaactgataagatgggtg

SEQ ID NO: 16878 - DNA, 25 bp, Probe sequence
gcggttggattatatatcgaagtta

SEQ ID NO: 16879 - DNA, 25 bp, Probe sequence
gctgaaactgataagatgggtgtaa

SEQ ID NO: 16880 - DNA, 25 bp, Probe sequence
ttatgctgaaactgataagatgggt

SEQ ID NO: 16881 - DNA, 25 bp, Probe sequence
gttatgctgaaactgataagatggg

SEQ ID NO: 16882 - DNA, 25 bp, Probe sequence
cgttatgctgaaactgataagatgg

SEQ ID NO: 16883 - DNA, 25 bp, Probe sequence
ctacaggttccacagaattgatttg

SEQ ID NO: 16884 - DNA, 25 bp, Probe sequence
ttatgactgatgctgatactgatgg

SEQ ID NO: 16885 - DNA, 25 bp, Probe sequence
aattccaagcgatattaccattacg

SEQ ID NO: 16886 - DNA, 25 bp, Probe sequence
agagcattaccattatgaagaagga

SEQ ID NO: 16887 - DNA, 25 bp, Probe sequence
tatgactgatgctgatactgatggt

SEQ ID NO: 16888 - DNA, 25 bp, Probe sequence
cgatgaagtattgaatggttacggt

SEQ ID NO: 16889 - DNA, 25 bp, Probe sequence
gatgaagtattgaatggttacggta

SEQ ID NO: 16890 - DNA, 25 bp, Probe sequence
attatgactgatgctgatactgatg

SEQ ID NO: 16891 - DNA, 25 bp, Probe sequence
gagcattaccattatgaagaaggaa

SEQ ID NO: 16892 - DNA, 25 bp, Probe sequence
aagagcattaccattatgaagaagg

SEQ ID NO: 16893 - DNA, 25 bp, Probe sequence
tcaatacacggatacaccatcttat

SEQ ID NO: 16894 - DNA, 25 bp, Probe sequence
atcaatacacggatacaccatctta

SEQ ID NO: 16895 - DNA, 25 bp, Probe sequence
gttatatgactgatacggaacctgg

SEQ ID NO: 16896 - DNA, 25 bp, Probe sequence
ataactgttcaagatattgccaagc

SEQ ID NO: 16897 - DNA, 25 bp, Probe sequence
ttatatgactgatacggaacctggt

SEQ ID NO: 16898 - DNA, 25 bp, Probe sequence
gatcaatacacggatacaccatctt

SEQ ID NO: 16899 - DNA, 25 bp, Probe sequence
tgataactgttcaagatattgccaa

SEQ ID NO: 16900 - DNA, 25 bp, Probe sequence
caatacacggatacaccatcttata

SEQ ID NO: 16901 - DNA, 25 bp, Probe sequence
gataactgttcaagatattgccaag

SEQ ID NO: 16902 - DNA, 25 bp, Probe sequence
gcgacagatataccaccacataatt

SEQ ID NO: 16903 - DNA, 25 bp, Probe sequence
gttatggtgcctagtgaagaagtta

SEQ ID NO: 16904 - DNA, 25 bp, Probe sequence
tatggtgcctagtgaagaagttatt

SEQ ID NO: 16905 - DNA, 25 bp, Probe sequence
ttatggtgcctagtgaagaagttat

SEQ ID NO: 16906 - DNA, 25 bp, Probe sequence
gaagttatggtgcctagtgaagaag

SEQ ID NO: 16907 - DNA, 25 bp, Probe sequence
aagatgtgaacagtgaatcaatcaa

SEQ ID NO: 16908 - DNA, 25 bp, Probe sequence
agtgaatggttctacaggtatatct

SEQ ID NO: 16909 - DNA, 25 bp, Probe sequence
agaagttatggtgcctagtgaagaa

SEQ ID NO: 16910 - DNA, 25 bp, Probe sequence
aagaagttatggtgcctagtgaaga

SEQ ID NO: 16911 - DNA, 25 bp, Probe sequence
actggtaataagatacacaatccgt

SEQ ID NO: 16912 - DNA, 25 bp, Probe sequence
gcggtgttgatgtagtaagtaatga

SEQ ID NO: 16913 - DNA, 25 bp, Probe sequence
cggtgttgatgtagtaagtaatgat

SEQ ID NO: 16914 - DNA, 25 bp, Probe sequence
ctggtaataagatacacaatccgtt

SEQ ID NO: 16915 - DNA, 25 bp, Probe sequence
ggcggtgttgatgtagtaagtaatg

SEQ ID NO: 16916 - DNA, 25 bp, Probe sequence
tactggtaataagatacacaatccg

SEQ ID NO: 16917 - DNA, 25 bp, Probe sequence
agtgacggattgtactacttcattc

SEQ ID NO: 16918 - DNA, 25 bp, Probe sequence
tacttcattcctagtgagcagtcaa

SEQ ID NO: 16919 - DNA, 25 bp, Probe sequence
gatacattcactgttgatggtgttc

SEQ ID NO: 16920 - DNA, 25 bp, Probe sequence
aggaatcgttacaattgctgatatt

SEQ ID NO: 16921 - DNA, 25 bp, Probe sequence
aaggaatcgttacaattgctgatat

SEQ ID NO: 16922 - DNA, 25 bp, Probe sequence
ggaatcgttacaattgctgatatta

SEQ ID NO: 16923 - DNA, 25 bp, Probe sequence
aacctgacaagattcttatattcat

SEQ ID NO: 16924 - DNA, 25 bp, Probe sequence
actaaaggaatcgttacaattgctg

SEQ ID NO: 16925 - DNA, 25 bp, Probe sequence
ctaaaggaatcgttacaattgctga

SEQ ID NO: 16926 - DNA, 25 bp, Probe sequence
aagaataagaaacctgacaagattc

SEQ ID NO: 16927 - DNA, 25 bp, Probe sequence
aaaggaatcgttacaattgctgata

SEQ ID NO: 16928 - DNA, 25 bp, Probe sequence
taaaggaatcgttacaattgctgat

SEQ ID NO: 16929 - DNA, 25 bp, Probe sequence
cgttaattgtaccgattatggctat

SEQ ID NO: 16930 - DNA, 25 bp, Probe sequence
taatccaatcattaggtgtgttctt

SEQ ID NO: 16931 - DNA, 25 bp, Probe sequence
ttaatccaatcattaggtgtgttct

SEQ ID NO: 16932 - DNA, 25 bp, Probe sequence
gagagttggtactggtaatattgct

SEQ ID NO: 16933 - DNA, 25 bp, Probe sequence
agagttggtactggtaatattgctg

SEQ ID NO: 16934 - DNA, 25 bp, Probe sequence
ggtggtccagcttactatattacta

SEQ ID NO: 16935 - DNA, 25 bp, Probe sequence
ggtactggtaatattgctggtgttg

SEQ ID NO: 16936 - DNA, 25 bp, Probe sequence
gttggtactggtaatattgctggtg

SEQ ID NO: 16937 - DNA, 25 bp, Probe sequence
gagttggtactggtaatattgctgg

SEQ ID NO: 16938 - DNA, 25 bp, Probe sequence
ttggtgcttgcggattagattctat

SEQ ID NO: 16939 - DNA, 25 bp, Probe sequence
ttagttggtgcttgcggattagatt

SEQ ID NO: 16940 - DNA, 25 bp, Probe sequence
tataaagcaatacgaggagaaggtg

SEQ ID NO: 16941 - DNA, 25 bp, Probe sequence
ggaacaccaactattagcggaagaa

SEQ ID NO: 16942 - DNA, 25 bp, Probe sequence
ttagttatcgtttagttggtgcttg

SEQ ID NO: 16943 - DNA, 25 bp, Probe sequence
cgcctcatttagttatcgtttagtt

SEQ ID NO: 16944 - DNA, 25 bp, Probe sequence
gataagttaatatgttcgtggttga

SEQ ID NO: 16945 - DNA, 25 bp, Probe sequence
agataagttaatatgttcgtggttg

SEQ ID NO: 16946 - DNA, 25 bp, Probe sequence
tttagttatcgtttagttggtgctt

SEQ ID NO: 16947 - DNA, 25 bp, Probe sequence
catcgctacaggtcttctaactcaa

SEQ ID NO: 16948 - DNA, 25 bp, Probe sequence
tacagtcatcgctacaggtcttcta

SEQ ID NO: 16949 - DNA, 25 bp, Probe sequence
gtcatcgctacaggtcttctaactc

SEQ ID NO: 16950 - DNA, 25 bp, Probe sequence
cagtcatcgctacaggtcttctaac

SEQ ID NO: 16951 - DNA, 25 bp, Probe sequence
attattgcatctacagtcatcgcta

SEQ ID NO: 16952 - DNA, 25 bp, Probe sequence
gctacaggtcttctaactcaaacta

SEQ ID NO: 16953 - DNA, 25 bp, Probe sequence
tcatcgctacaggtcttctaactca

SEQ ID NO: 16954 - DNA, 25 bp, Probe sequence
atctacagtcatcgctacaggtctt

SEQ ID NO: 16955 - DNA, 25 bp, Probe sequence
taattattgcatctacagtcatcgc

SEQ ID NO: 16956 - DNA, 25 bp, Probe sequence
tctaatactgcgatgaatgttgatt

SEQ ID NO: 16957 - DNA, 25 bp, Probe sequence
tatcattgaatcagaccttgtgaca

SEQ ID NO: 16958 - DNA, 25 bp, Probe sequence
ttctaatactgcgatgaatgttgat

SEQ ID NO: 16959 - DNA, 25 bp, Probe sequence
atatcattgaatcagaccttgtgac

SEQ ID NO: 16960 - DNA, 25 bp, Probe sequence
ttgtgacaactgttgataaggaatc

SEQ ID NO: 16961 - DNA, 25 bp, Probe sequence
cttgtgacaactgttgataaggaat

SEQ ID NO: 16962 - DNA, 25 bp, Probe sequence
atcattgaatcagaccttgtgacaa

SEQ ID NO: 16963 - DNA, 25 bp, Probe sequence
ttgaacaacaatgtcgtagtatgta

SEQ ID NO: 16964 - DNA, 25 bp, Probe sequence
agaccttgtgacaactgttgataag

SEQ ID NO: 16965 - DNA, 25 bp, Probe sequence
ggtccatatctcatactatccatca

SEQ ID NO: 16966 - DNA, 25 bp, Probe sequence
gcaatatagtgaaacagccaatgaa

SEQ ID NO: 16967 - DNA, 25 bp, Probe sequence
gtattgtttcggtgttcttatttgc

SEQ ID NO: 16968 - DNA, 25 bp, Probe sequence
ctttagcatatacgattgggattgg

SEQ ID NO: 16969 - DNA, 25 bp, Probe sequence
gtccatatctcatactatccatcat

SEQ ID NO: 16970 - DNA, 25 bp, Probe sequence
tggtccatatctcatactatccatc

SEQ ID NO: 16971 - DNA, 25 bp, Probe sequence
ctatgagtattgtttcggtgttctt

SEQ ID NO: 16972 - DNA, 25 bp, Probe sequence
tgtgattgtaggtccaatagttgaa

SEQ ID NO: 16973 - DNA, 25 bp, Probe sequence
ttgtgattgtaggtccaatagttga

SEQ ID NO: 16974 - DNA, 25 bp, Probe sequence
aagtggtggtgaatctataattgaa

SEQ ID NO: 16975 - DNA, 25 bp, Probe sequence
tggtggtgaatctataattgaatga

SEQ ID NO: 16976 - DNA, 25 bp, Probe sequence
gtggtggtgaatctataattgaatg

SEQ ID NO: 16977 - DNA, 25 bp, Probe sequence
agtggtggtgaatctataattgaat

SEQ ID NO: 16978 - DNA, 25 bp, Probe sequence
taagtggtggtgaatctataattga

SEQ ID NO: 16979 - DNA, 25 bp, Probe sequence
cgtttcgttactgtaaagggtattt

SEQ ID NO: 16980 - DNA, 25 bp, Probe sequence
ttaagtggtggtgaatctataattg

SEQ ID NO: 16981 - DNA, 25 bp, Probe sequence
tttcgttactgtaaagggtatttgt

SEQ ID NO: 16982 - DNA, 25 bp, Probe sequence
gtttcgttactgtaaagggtatttg

SEQ ID NO: 16983 - DNA, 25 bp, Probe sequence
caatgtcaggatgtaactcaggtat

SEQ ID NO: 16984 - DNA, 25 bp, Probe sequence
aaggtgtggaactgataggtattac

SEQ ID NO: 16985 - DNA, 25 bp, Probe sequence
caaggtgtggaactgataggtatta

SEQ ID NO: 16986 - DNA, 25 bp, Probe sequence
aatgtcaggatgtaactcaggtatt

SEQ ID NO: 16987 - DNA, 25 bp, Probe sequence
tggtgtcatcttcttaacgattgta

SEQ ID NO: 16988 - DNA, 25 bp, Probe sequence
attggtgtcatcttcttaacgattg

SEQ ID NO: 16989 - DNA, 25 bp, Probe sequence
tgtcatcttcttaacgattgtaacg

SEQ ID NO: 16990 - DNA, 25 bp, Probe sequence
gtcatcttcttaacgattgtaacga

SEQ ID NO: 16991 - DNA, 25 bp, Probe sequence
ttggtgtcatcttcttaacgattgt

SEQ ID NO: 16992 - DNA, 25 bp, Probe sequence
attgcttggtattgtaggcgttatt

SEQ ID NO: 16993 - DNA, 25 bp, Probe sequence
caagttggttcatacattcaaggac

SEQ ID NO: 16994 - DNA, 25 bp, Probe sequence
tcaagttggttcatacattcaagga

SEQ ID NO: 16995 - DNA, 25 bp, Probe sequence
ttcaagttggttcatacattcaagg

SEQ ID NO: 16996 - DNA, 25 bp, Probe sequence
aattgcttggtattgtaggcgttat

SEQ ID NO: 16997 - DNA, 25 bp, Probe sequence
agttggttcatacattcaaggacaa

SEQ ID NO: 16998 - DNA, 25 bp, Probe sequence
aagttggttcatacattcaaggaca

SEQ ID NO: 16999 - DNA, 25 bp, Probe sequence
gttcaagttggttcatacattcaag

SEQ ID NO: 17000 - DNA, 25 bp, Probe sequence
gtgttcaagttggttcatacattca

SEQ ID NO: 17001 - DNA, 25 bp, Probe sequence
atttaacaaacagacaccatttcgc

SEQ ID NO: 17002 - DNA, 25 bp, Probe sequence
tatttaacaaacagacaccatttcg

SEQ ID NO: 17003 - DNA, 25 bp, Probe sequence
ttggtgattggtcctatatttaaca

SEQ ID NO: 17004 - DNA, 25 bp, Probe sequence
tcctatatttaacaaacagacacca

SEQ ID NO: 17005 - DNA, 25 bp, Probe sequence
ttgttgttggttcaatgatttactt

SEQ ID NO: 17006 - DNA, 25 bp, Probe sequence
tttgttgttggttcaatgatttact

SEQ ID NO: 17007 - DNA, 25 bp, Probe sequence
tggtgattggtcctatatttaacaa

SEQ ID NO: 17008 - DNA, 25 bp, Probe sequence
tgttgttggttcaatgatttactta

SEQ ID NO: 17009 - DNA, 25 bp, Probe sequence
tggtcctatatttaacaaacagaca

SEQ ID NO: 17010 - DNA, 25 bp, Probe sequence
tatcaagttacagatcaacacatgc

SEQ ID NO: 17011 - DNA, 25 bp, Probe sequence
attagatggttgccagagttagatt

SEQ ID NO: 17012 - DNA, 25 bp, Probe sequence
aattagatggttgccagagttagat

SEQ ID NO: 17013 - DNA, 25 bp, Probe sequence
atcaagttacagatcaacacatgcc

SEQ ID NO: 17014 - DNA, 25 bp, Probe sequence
caagttacagatcaacacatgcctt

SEQ ID NO: 17015 - DNA, 25 bp, Probe sequence
ttctatcaagttacagatcaacaca

SEQ ID NO: 17016 - DNA, 25 bp, Probe sequence
tacgctgagtatttaggctatgatg

SEQ ID NO: 17017 - DNA, 25 bp, Probe sequence
ttacgctgagtatttaggctatgat

SEQ ID NO: 17018 - DNA, 25 bp, Probe sequence
attacgctgagtatttaggctatga

SEQ ID NO: 17019 - DNA, 25 bp, Probe sequence
agttgttggtagagaagatgttgaa

SEQ ID NO: 17020 - DNA, 25 bp, Probe sequence
ggtagttgttggtagagaagatgtt

SEQ ID NO: 17021 - DNA, 25 bp, Probe sequence
tagaggtagttgttggtagagaaga

SEQ ID NO: 17022 - DNA, 25 bp, Probe sequence
gaggtagttgttggtagagaagatg

SEQ ID NO: 17023 - DNA, 25 bp, Probe sequence
agaggtagttgttggtagagaagat

SEQ ID NO: 17024 - DNA, 25 bp, Probe sequence
tagttgttggtagagaagatgttga

SEQ ID NO: 17025 - DNA, 25 bp, Probe sequence
gtagttgttggtagagaagatgttg

SEQ ID NO: 17026 - DNA, 25 bp, Probe sequence
aggtagttgttggtagagaagatgt

SEQ ID NO: 17027 - DNA, 25 bp, Probe sequence
atagaggtagttgttggtagagaag

SEQ ID NO: 17028 - DNA, 25 bp, Probe sequence
tcaagaactcatacgaagatgtcaa

SEQ ID NO: 17029 - DNA, 25 bp, Probe sequence
atcaagaactcatacgaagatgtca

SEQ ID NO: 17030 - DNA, 25 bp, Probe sequence
ccaatcaagaactcatacgaagatg

SEQ ID NO: 17031 - DNA, 25 bp, Probe sequence
caagaactcatacgaagatgtcaat

SEQ ID NO: 17032 - DNA, 25 bp, Probe sequence
caatcaagaactcatacgaagatgt

SEQ ID NO: 17033 - DNA, 25 bp, Probe sequence
gccaatcaagaactcatacgaagat

SEQ ID NO: 17034 - DNA, 25 bp, Probe sequence
aatcaagaactcatacgaagatgtc

SEQ ID NO: 17035 - DNA, 25 bp, Probe sequence
agaactcatacgaagatgtcaatac

SEQ ID NO: 17036 - DNA, 25 bp, Probe sequence
caatagcggtgtagaatatgccaag

SEQ ID NO: 17037 - DNA, 25 bp, Probe sequence
cgatgtagtgagttcaatatatggt

SEQ ID NO: 17038 - DNA, 25 bp, Probe sequence
agaccgacgattaataatgaattgt

SEQ ID NO: 17039 - DNA, 25 bp, Probe sequence
gaccgacgattaataatgaattgtt

SEQ ID NO: 17040 - DNA, 25 bp, Probe sequence
aagaccgacgattaataatgaattg

SEQ ID NO: 17041 - DNA, 25 bp, Probe sequence
acctctattgatgaattgccacaat

SEQ ID NO: 17042 - DNA, 25 bp, Probe sequence
tcgatgtagtgagttcaatatatgg

SEQ ID NO: 17043 - DNA, 25 bp, Probe sequence
cgtatataacaaagacagggaaggt

SEQ ID NO: 17044 - DNA, 25 bp, Probe sequence
tataacaaagacagggaaggtcatt

SEQ ID NO: 17045 - DNA, 25 bp, Probe sequence
atataacaaagacagggaaggtcat

SEQ ID NO: 17046 - DNA, 25 bp, Probe sequence
caacaacattctcagatacagactt

SEQ ID NO: 17047 - DNA, 25 bp, Probe sequence
gcaacaacattctcagatacagact

SEQ ID NO: 17048 - DNA, 25 bp, Probe sequence
ttattacaggtgtcatcggtatgtt

SEQ ID NO: 17049 - DNA, 25 bp, Probe sequence
tggtctgtggcatgattgttaatat

SEQ ID NO: 17050 - DNA, 25 bp, Probe sequence
atggtctgtggcatgattgttaata

SEQ ID NO: 17051 - DNA, 25 bp, Probe sequence
ggtctgtggcatgattgttaatatt

SEQ ID NO: 17052 - DNA, 25 bp, Probe sequence
caggtgctgtaggtcaattattcaa

SEQ ID NO: 17053 - DNA, 25 bp, Probe sequence
tatgggattatttggtgcgattcta

SEQ ID NO: 17054 - DNA, 25 bp, Probe sequence
tcaaaggtaagtctaaatcaacgga

SEQ ID NO: 17055 - DNA, 25 bp, Probe sequence
attgcgttatattccacctgaagat

SEQ ID NO: 17056 - DNA, 25 bp, Probe sequence
ttgcgttatattccacctgaagatt

SEQ ID NO: 17057 - DNA, 25 bp, Probe sequence
ttaatgaggatgagcgacagttaag

SEQ ID NO: 17058 - DNA, 25 bp, Probe sequence
cattgcgttatattccacctgaaga

SEQ ID NO: 17059 - DNA, 25 bp, Probe sequence
acattatcaatccaagtatgcgtaa

SEQ ID NO: 17060 - DNA, 25 bp, Probe sequence
ttacattatcaatccaagtatgcgt

SEQ ID NO: 17061 - DNA, 25 bp, Probe sequence
taatgaggatgagcgacagttaagt

SEQ ID NO: 17062 - DNA, 25 bp, Probe sequence
ttattaatgaggatgagcgacagtt

SEQ ID NO: 17063 - DNA, 25 bp, Probe sequence
tacattatcaatccaagtatgcgta

SEQ ID NO: 17064 - DNA, 25 bp, Probe sequence
cgttgtaggtattactgagccatta

SEQ ID NO: 17065 - DNA, 25 bp, Probe sequence
tgatgttaccattagcagcaattac

SEQ ID NO: 17066 - DNA, 25 bp, Probe sequence
gtgatgttaccattagcagcaatta

SEQ ID NO: 17067 - DNA, 25 bp, Probe sequence
gttgtaggtattactgagccattag

SEQ ID NO: 17068 - DNA, 25 bp, Probe sequence
gatgttaccattagcagcaattact

SEQ ID NO: 17069 - DNA, 25 bp, Probe sequence
ttgtaggtattactgagccattaga

SEQ ID NO: 17070 - DNA, 25 bp, Probe sequence
ccattagcagcaattacttgtgtta

SEQ ID NO: 17071 - DNA, 25 bp, Probe sequence
ttaccattagcagcaattacttgtg

SEQ ID NO: 17072 - DNA, 25 bp, Probe sequence
gttaccattagcagcaattacttgt

SEQ ID NO: 17073 - DNA, 25 bp, Probe sequence
gagacacagaagaagcaattcaatt

SEQ ID NO: 17074 - DNA, 25 bp, Probe sequence
aatggaacgaacacatattgattct

SEQ ID NO: 17075 - DNA, 25 bp, Probe sequence
cttcaggtccatatcataagcaatt

SEQ ID NO: 17076 - DNA, 25 bp, Probe sequence
catattatggttcagatgcttcagc

SEQ ID NO: 17077 - DNA, 25 bp, Probe sequence
tggaacgaacacatattgattctat

SEQ ID NO: 17078 - DNA, 25 bp, Probe sequence
atggaacgaacacatattgattcta

SEQ ID NO: 17079 - DNA, 25 bp, Probe sequence
ggagacacagaagaagcaattcaat

SEQ ID NO: 17080 - DNA, 25 bp, Probe sequence
cgctgtattactgctcatgttgata

SEQ ID NO: 17081 - DNA, 25 bp, Probe sequence
aggagacacagaagaagcaattcaa

SEQ ID NO: 17082 - DNA, 25 bp, Probe sequence
gttaagatgactatcggtatgcctg

SEQ ID NO: 17083 - DNA, 25 bp, Probe sequence
ttaagatgactatcggtatgcctgg

SEQ ID NO: 17084 - DNA, 25 bp, Probe sequence
cgttaagatgactatcggtatgcct

SEQ ID NO: 17085 - DNA, 25 bp, Probe sequence
taagatgactatcggtatgcctgga

SEQ ID NO: 17086 - DNA, 25 bp, Probe sequence
atgactatcggtatgcctggactaa

SEQ ID NO: 17087 - DNA, 25 bp, Probe sequence
tacgttaagatgactatcggtatgc

SEQ ID NO: 17088 - DNA, 25 bp, Probe sequence
ccagaacgaataaagagattgaagc

SEQ ID NO: 17089 - DNA, 25 bp, Probe sequence
gccagaacgaataaagagattgaag

SEQ ID NO: 17090 - DNA, 25 bp, Probe sequence
tgaatacgttaagatgactatcggt

SEQ ID NO: 17091 - DNA, 25 bp, Probe sequence
acgatgatgatagatgagcagtata

SEQ ID NO: 17092 - DNA, 25 bp, Probe sequence
gaacgatgatgatagatgagcagta

SEQ ID NO: 17093 - DNA, 25 bp, Probe sequence
cgatgatgatagatgagcagtatat

SEQ ID NO: 17094 - DNA, 25 bp, Probe sequence
aacgatgatgatagatgagcagtat

SEQ ID NO: 17095 - DNA, 25 bp, Probe sequence
tatagtggtggtgttggatacataa

SEQ ID NO: 17096 - DNA, 25 bp, Probe sequence
ttatagtggtggtgttggatacata

SEQ ID NO: 17097 - DNA, 25 bp, Probe sequence
caaccattcatgcctacacaagatt

SEQ ID NO: 17098 - DNA, 25 bp, Probe sequence
cgaacgatgatgatagatgagcagt

SEQ ID NO: 17099 - DNA, 25 bp, Probe sequence
gccatcaagaatttacaaatatgcg

SEQ ID NO: 17100 - DNA, 25 bp, Probe sequence
tattgattggcggaacattattagc

SEQ ID NO: 17101 - DNA, 25 bp, Probe sequence
cgtattgattggcggaacattatta

SEQ ID NO: 17102 - DNA, 25 bp, Probe sequence
agtcggtattattcaacacaatggt

SEQ ID NO: 17103 - DNA, 25 bp, Probe sequence
tatcgtattgattggcggaacatta

SEQ ID NO: 17104 - DNA, 25 bp, Probe sequence
tagtcggtattattcaacacaatgg

SEQ ID NO: 17105 - DNA, 25 bp, Probe sequence
tcattggtctcatagatggttcatt

SEQ ID NO: 17106 - DNA, 25 bp, Probe sequence
aatcattggtctcatagatggttca

SEQ ID NO: 17107 - DNA, 25 bp, Probe sequence
ggaatcattggtctcatagatggtt

SEQ ID NO: 17108 - DNA, 25 bp, Probe sequence
atcgtattgattggcggaacattat

SEQ ID NO: 17109 - DNA, 25 bp, Probe sequence
agtaagtgtgtctatcgtgttcatt

SEQ ID NO: 17110 - DNA, 25 bp, Probe sequence
ttagtaagtgtgtctatcgtgttca

SEQ ID NO: 17111 - DNA, 25 bp, Probe sequence
tagtaagtgtgtctatcgtgttcat

SEQ ID NO: 17112 - DNA, 25 bp, Probe sequence
attagtaagtgtgtctatcgtgttc

SEQ ID NO: 17113 - DNA, 25 bp, Probe sequence
tattagtaagtgtgtctatcgtgtt

SEQ ID NO: 17114 - DNA, 25 bp, Probe sequence
gtctcagggttactttacattggat

SEQ ID NO: 17115 - DNA, 25 bp, Probe sequence
tctcagggttactttacattggatt

SEQ ID NO: 17116 - DNA, 25 bp, Probe sequence
gtaagtgtgtctatcgtgttcattt

SEQ ID NO: 17117 - DNA, 25 bp, Probe sequence
tcagggttactttacattggatttg

SEQ ID NO: 17118 - DNA, 25 bp, Probe sequence
atgtagcgattaactatcttccgag

SEQ ID NO: 17119 - DNA, 25 bp, Probe sequence
gatgtagcgattaactatcttccga

SEQ ID NO: 17120 - DNA, 25 bp, Probe sequence
gcatatcaacaattaggtggcttag

SEQ ID NO: 17121 - DNA, 25 bp, Probe sequence
aacaagcatatcaacaattaggtgg

SEQ ID NO: 17122 - DNA, 25 bp, Probe sequence
aaggaattagagtgaactgtgtagc

SEQ ID NO: 17123 - DNA, 25 bp, Probe sequence
gaacaagcatatcaacaattaggtg

SEQ ID NO: 17124 - DNA, 25 bp, Probe sequence
catatcaacaattaggtggcttaga

SEQ ID NO: 17125 - DNA, 25 bp, Probe sequence
tagcgattaactatcttccgagtga

SEQ ID NO: 17126 - DNA, 25 bp, Probe sequence
gtagcgattaactatcttccgagtg

SEQ ID NO: 17127 - DNA, 25 bp, Probe sequence
agttaatgacttacctgaacgagat

SEQ ID NO: 17128 - DNA, 25 bp, Probe sequence
gttaatgacttacctgaacgagatt

SEQ ID NO: 17129 - DNA, 25 bp, Probe sequence
cagttaatgacttacctgaacgaga

SEQ ID NO: 17130 - DNA, 25 bp, Probe sequence
cttatgcgttgtgacaatctatctg

SEQ ID NO: 17131 - DNA, 25 bp, Probe sequence
tacagttaatgacttacctgaacga

SEQ ID NO: 17132 - DNA, 25 bp, Probe sequence
gtcctacagttaatgacttacctga

SEQ ID NO: 17133 - DNA, 25 bp, Probe sequence
acagttaatgacttacctgaacgag

SEQ ID NO: 17134 - DNA, 25 bp, Probe sequence
tatgcgttgtgacaatctatctgaa

SEQ ID NO: 17135 - DNA, 25 bp, Probe sequence
ttatgcgttgtgacaatctatctga

SEQ ID NO: 17136 - DNA, 25 bp, Probe sequence
ggtaatacttggaatgtcattgctg

SEQ ID NO: 17137 - DNA, 25 bp, Probe sequence
tggtaatacttggaatgtcattgct

SEQ ID NO: 17138 - DNA, 25 bp, Probe sequence
gtggtaatacttggaatgtcattgc

SEQ ID NO: 17139 - DNA, 25 bp, Probe sequence
tgtggtaatacttggaatgtcattg

SEQ ID NO: 17140 - DNA, 25 bp, Probe sequence
gcgttaattggttctcatagtgaat

SEQ ID NO: 17141 - DNA, 25 bp, Probe sequence
tgcgttaattggttctcatagtgaa

SEQ ID NO: 17142 - DNA, 25 bp, Probe sequence
ttgcgttaattggttctcatagtga

SEQ ID NO: 17143 - DNA, 25 bp, Probe sequence
gtaatacttggaatgtcattgctga

SEQ ID NO: 17144 - DNA, 25 bp, Probe sequence
tcatgtggtaatacttggaatgtca

SEQ ID NO: 17145 - DNA, 25 bp, Probe sequence
gttacacggcacagaatctattgat

SEQ ID NO: 17146 - DNA, 25 bp, Probe sequence
tacagttacacggcacagaatctat

SEQ ID NO: 17147 - DNA, 25 bp, Probe sequence
atacagttacacggcacagaatcta

SEQ ID NO: 17148 - DNA, 25 bp, Probe sequence
agttacacggcacagaatctattga

SEQ ID NO: 17149 - DNA, 25 bp, Probe sequence
cagttacacggcacagaatctattg

SEQ ID NO: 17150 - DNA, 25 bp, Probe sequence
caatacagttacacggcacagaatc

SEQ ID NO: 17151 - DNA, 25 bp, Probe sequence
acagttacacggcacagaatctatt

SEQ ID NO: 17152 - DNA, 25 bp, Probe sequence
aatacagttacacggcacagaatct

SEQ ID NO: 17153 - DNA, 25 bp, Probe sequence
aattaacacaatacagttacacggc

SEQ ID NO: 17154 - DNA, 25 bp, Probe sequence
acaattaacacaggtgataaggcta

SEQ ID NO: 17155 - DNA, 25 bp, Probe sequence
tacaattaacacaggtgataaggct

SEQ ID NO: 17156 - DNA, 25 bp, Probe sequence
caattaacacaggtgataaggctaa

SEQ ID NO: 17157 - DNA, 25 bp, Probe sequence
gtacaattaacacaggtgataaggc

SEQ ID NO: 17158 - DNA, 25 bp, Probe sequence
ggtacaattaacacaggtgataagg

SEQ ID NO: 17159 - DNA, 25 bp, Probe sequence
cggtaaggtcatcgtagataacaca

SEQ ID NO: 17160 - DNA, 25 bp, Probe sequence
attaacacaggtgataaggctaatt

SEQ ID NO: 17161 - DNA, 25 bp, Probe sequence
aattaacacaggtgataaggctaat

SEQ ID NO: 17162 - DNA, 25 bp, Probe sequence
agagtggttatggattagatagaga

SEQ ID NO: 17163 - DNA, 25 bp, Probe sequence
gaacattcttattaccacgacattg

SEQ ID NO: 17164 - DNA, 25 bp, Probe sequence
ttaataatgcgttaggtcaagcgtt

SEQ ID NO: 17165 - DNA, 25 bp, Probe sequence
taatgccagcaattattgagttgaa

SEQ ID NO: 17166 - DNA, 25 bp, Probe sequence
ttaatgccagcaattattgagttga

SEQ ID NO: 17167 - DNA, 25 bp, Probe sequence
aattaataatgcgttaggtcaagcg

SEQ ID NO: 17168 - DNA, 25 bp, Probe sequence
taataatgcgttaggtcaagcgttg

SEQ ID NO: 17169 - DNA, 25 bp, Probe sequence
attaataatgcgttaggtcaagcgt

SEQ ID NO: 17170 - DNA, 25 bp, Probe sequence
aacattcttattaccacgacattgg

SEQ ID NO: 17171 - DNA, 25 bp, Probe sequence
attaatgccagcaattattgagttg

SEQ ID NO: 17172 - DNA, 25 bp, Probe sequence
gcaaccgttagcaattactatgaat

SEQ ID NO: 17173 - DNA, 25 bp, Probe sequence
tattgcttggttaggctatggagaa

SEQ ID NO: 17174 - DNA, 25 bp, Probe sequence
tattcgtcaagtagccttcaataac

SEQ ID NO: 17175 - DNA, 25 bp, Probe sequence
aaccgttagcaattactatgaatca

SEQ ID NO: 17176 - DNA, 25 bp, Probe sequence
tatattggttctcaaggtattgtgc

SEQ ID NO: 17177 - DNA, 25 bp, Probe sequence
caaccgttagcaattactatgaatc

SEQ ID NO: 17178 - DNA, 25 bp, Probe sequence
gtattgcttggttaggctatggaga

SEQ ID NO: 17179 - DNA, 25 bp, Probe sequence
cgcaaccgttagcaattactatgaa

SEQ ID NO: 17180 - DNA, 25 bp, Probe sequence
atattcgtcaagtagccttcaataa

SEQ ID NO: 17181 - DNA, 25 bp, Probe sequence
tgtctacggcttaattattcctgat

SEQ ID NO: 17182 - DNA, 25 bp, Probe sequence
gtgtctacggcttaattattcctga

SEQ ID NO: 17183 - DNA, 25 bp, Probe sequence
gtctacggcttaattattcctgatt

SEQ ID NO: 17184 - DNA, 25 bp, Probe sequence
ggtgtctacggcttaattattcctg

SEQ ID NO: 17185 - DNA, 25 bp, Probe sequence
cggaaggctttatttatactgtgac

SEQ ID NO: 17186 - DNA, 25 bp, Probe sequence
atgcggaaggctttatttatactgt

SEQ ID NO: 17187 - DNA, 25 bp, Probe sequence
gttatcatggaagcaggtcaacaag

SEQ ID NO: 17188 - DNA, 25 bp, Probe sequence
gagtcaattaaagcgatagccaatg

SEQ ID NO: 17189 - DNA, 25 bp, Probe sequence
gttagttgcgatgactactgatgac

SEQ ID NO: 17190 - DNA, 25 bp, Probe sequence
agttagtattgctgagatgaatcca

SEQ ID NO: 17191 - DNA, 25 bp, Probe sequence
ggtatattaggctatgctgttgaca

SEQ ID NO: 17192 - DNA, 25 bp, Probe sequence
taaggtgtcttcagttagtattgct

SEQ ID NO: 17193 - DNA, 25 bp, Probe sequence
tagtattgctgagatgaatccaaca

SEQ ID NO: 17194 - DNA, 25 bp, Probe sequence
agtattgctgagatgaatccaacat

SEQ ID NO: 17195 - DNA, 25 bp, Probe sequence
ccaagtgataaggtgtcttcagtta

SEQ ID NO: 17196 - DNA, 25 bp, Probe sequence
tatggactggaaggttagatagtga

SEQ ID NO: 17197 - DNA, 25 bp, Probe sequence
gtatattaggctatgctgttgacaa

SEQ ID NO: 17198 - DNA, 25 bp, Probe sequence
attccaagtgataaggtgtcttcag

SEQ ID NO: 17199 - DNA, 25 bp, Probe sequence
gcgagataacttacaacaacaactt

SEQ ID NO: 17200 - DNA, 25 bp, Probe sequence
gtaatgctggtaatgattggttctt

SEQ ID NO: 17201 - DNA, 25 bp, Probe sequence
agcgagataacttacaacaacaact

SEQ ID NO: 17202 - DNA, 25 bp, Probe sequence
aagcgagataacttacaacaacaac

SEQ ID NO: 17203 - DNA, 25 bp, Probe sequence
caagcgagataacttacaacaacaa

SEQ ID NO: 17204 - DNA, 25 bp, Probe sequence
aacaagcgagataacttacaacaac

SEQ ID NO: 17205 - DNA, 25 bp, Probe sequence
ggtaatgctggtaatgattggttct

SEQ ID NO: 17206 - DNA, 25 bp, Probe sequence
aggtaatgctggtaatgattggttc

SEQ ID NO: 17207 - DNA, 25 bp, Probe sequence
acaagcgagataacttacaacaaca

SEQ ID NO: 17208 - DNA, 25 bp, Probe sequence
aattgatggtgctgatgaagtagat

SEQ ID NO: 17209 - DNA, 25 bp, Probe sequence
attgatggtgctgatgaagtagatc

SEQ ID NO: 17210 - DNA, 25 bp, Probe sequence
atatggcagatcaagttattgtagg

SEQ ID NO: 17211 - DNA, 25 bp, Probe sequence
cttcttagatatggcagatcaagtt

SEQ ID NO: 17212 - DNA, 25 bp, Probe sequence
gtacaatggaattactcttacctca

SEQ ID NO: 17213 - DNA, 25 bp, Probe sequence
tacaatggaattactcttacctcaa

SEQ ID NO: 17214 - DNA, 25 bp, Probe sequence
ttgatggtgctgatgaagtagatcc

SEQ ID NO: 17215 - DNA, 25 bp, Probe sequence
acaggaagtacaatggaattactct

SEQ ID NO: 17216 - DNA, 25 bp, Probe sequence
agatgtcaaagcactcaagttaatg

SEQ ID NO: 17217 - DNA, 25 bp, Probe sequence
ttcacaacaattcacctcaagcaag

SEQ ID NO: 17218 - DNA, 25 bp, Probe sequence
gatgaaacgacaaccaaagataagg

SEQ ID NO: 17219 - DNA, 25 bp, Probe sequence
ggatgaaacgacaaccaaagataag

SEQ ID NO: 17220 - DNA, 25 bp, Probe sequence
gttcacaacaattcacctcaagcaa

SEQ ID NO: 17221 - DNA, 25 bp, Probe sequence
aacgacaaccaaagataaggcataa

SEQ ID NO: 17222 - DNA, 25 bp, Probe sequence
aaacgacaaccaaagataaggcata

SEQ ID NO: 17223 - DNA, 25 bp, Probe sequence
gatacacaaacaccaatgaacccta

SEQ ID NO: 17224 - DNA, 25 bp, Probe sequence
atacacaaacaccaatgaaccctac

SEQ ID NO: 17225 - DNA, 25 bp, Probe sequence
ttaattacaggcgtacatggatata

SEQ ID NO: 17226 - DNA, 25 bp, Probe sequence
cattatgacagcaagtccagagatg

SEQ ID NO: 17227 - DNA, 25 bp, Probe sequence
acattatgacagcaagtccagagat

SEQ ID NO: 17228 - DNA, 25 bp, Probe sequence
gctgacttgtttatttgtggtagag

SEQ ID NO: 17229 - DNA, 25 bp, Probe sequence
agagatggctgacttgtttatttgt

SEQ ID NO: 17230 - DNA, 25 bp, Probe sequence
gagatggctgacttgtttatttgtg

SEQ ID NO: 17231 - DNA, 25 bp, Probe sequence
accatctgatatcgaagttgaacat

SEQ ID NO: 17232 - DNA, 25 bp, Probe sequence
atggctgacttgtttatttgtggta

SEQ ID NO: 17233 - DNA, 25 bp, Probe sequence
ggctgacttgtttatttgtggtaga

SEQ ID NO: 17234 - DNA, 25 bp, Probe sequence
taatgcaccatctgatatcgaagtt

SEQ ID NO: 17235 - DNA, 25 bp, Probe sequence
tacaactgagtatgatacatcgagc

SEQ ID NO: 17236 - DNA, 25 bp, Probe sequence
gagtatgatacatcgagccaagtac

SEQ ID NO: 17237 - DNA, 25 bp, Probe sequence
accattagcatatattgaccttgat

SEQ ID NO: 17238 - DNA, 25 bp, Probe sequence
tgagtatgatacatcgagccaagta

SEQ ID NO: 17239 - DNA, 25 bp, Probe sequence
atatagttacccgtgagaatgatgg

SEQ ID NO: 17240 - DNA, 25 bp, Probe sequence
atttatatcgtgaaactgaagagcg

SEQ ID NO: 17241 - DNA, 25 bp, Probe sequence
gagaatgatggctttgaagtagttt

SEQ ID NO: 17242 - DNA, 25 bp, Probe sequence
tgagaatgatggctttgaagtagtt

SEQ ID NO: 17243 - DNA, 25 bp, Probe sequence
tttatatcgtgaaactgaagagcgt

SEQ ID NO: 17244 - DNA, 25 bp, Probe sequence
aatcgtatcaaatgaagtgacatca

SEQ ID NO: 17245 - DNA, 25 bp, Probe sequence
aagaatcgtatcaaatgaagtgaca

SEQ ID NO: 17246 - DNA, 25 bp, Probe sequence
agaatcgtatcaaatgaagtgacat

SEQ ID NO: 17247 - DNA, 25 bp, Probe sequence
caagaatcgtatcaaatgaagtgac

SEQ ID NO: 17248 - DNA, 25 bp, Probe sequence
tcaagaatcgtatcaaatgaagtga

SEQ ID NO: 17249 - DNA, 25 bp, Probe sequence
gaatcgtatcaaatgaagtgacatc

SEQ ID NO: 17250 - DNA, 25 bp, Probe sequence
gaataggttatcaagaatcgtatca

SEQ ID NO: 17251 - DNA, 25 bp, Probe sequence
atcaagaatcgtatcaaatgaagtg

SEQ ID NO: 17252 - DNA, 25 bp, Probe sequence
aggttatcaagaatcgtatcaaatg

SEQ ID NO: 17253 - DNA, 25 bp, Probe sequence
ttataggaccatcagaagcatacac

SEQ ID NO: 17254 - DNA, 25 bp, Probe sequence
tataggaccatcagaagcatacaca

SEQ ID NO: 17255 - DNA, 25 bp, Probe sequence
ttgatgatgattggaattatgctgc

SEQ ID NO: 17256 - DNA, 25 bp, Probe sequence
attataggaccatcagaagcataca

SEQ ID NO: 17257 - DNA, 25 bp, Probe sequence
ataggaccatcagaagcatacacac

SEQ ID NO: 17258 - DNA, 25 bp, Probe sequence
attgatgatgattggaattatgctg

SEQ ID NO: 17259 - DNA, 25 bp, Probe sequence
tattataggaccatcagaagcatac

SEQ ID NO: 17260 - DNA, 25 bp, Probe sequence
atcagaagcatacacacacgcaata

SEQ ID NO: 17261 - DNA, 25 bp, Probe sequence
tcagaagcatacacacacgcaatat

SEQ ID NO: 17262 - DNA, 25 bp, Probe sequence
tacgaattatggagcaagagtagtg

SEQ ID NO: 17263 - DNA, 25 bp, Probe sequence
ttacgaattatggagcaagagtagt

SEQ ID NO: 17264 - DNA, 25 bp, Probe sequence
gaattatggagcaagagtagtgtct

SEQ ID NO: 17265 - DNA, 25 bp, Probe sequence
aggaagatatagcggtagaattgat

SEQ ID NO: 17266 - DNA, 25 bp, Probe sequence
cgaattatggagcaagagtagtgtc

SEQ ID NO: 17267 - DNA, 25 bp, Probe sequence
taggaagatatagcggtagaattga

SEQ ID NO: 17268 - DNA, 25 bp, Probe sequence
acgaattatggagcaagagtagtgt

SEQ ID NO: 17269 - DNA, 25 bp, Probe sequence
aataatgtcgttgataatcatcgca

SEQ ID NO: 17270 - DNA, 25 bp, Probe sequence
ataatgtcgttgataatcatcgcat

SEQ ID NO: 17271 - DNA, 25 bp, Probe sequence
gacattactacagaacagccactta

SEQ ID NO: 17272 - DNA, 25 bp, Probe sequence
acattactacagaacagccacttaa

SEQ ID NO: 17273 - DNA, 25 bp, Probe sequence
tagacattactacagaacagccact

SEQ ID NO: 17274 - DNA, 25 bp, Probe sequence
ggatgcgtcaacctcattactatat

SEQ ID NO: 17275 - DNA, 25 bp, Probe sequence
atgcgtcaacctcattactatatgg

SEQ ID NO: 17276 - DNA, 25 bp, Probe sequence
gatgcgtcaacctcattactatatg

SEQ ID NO: 17277 - DNA, 25 bp, Probe sequence
aaccatatcttgaatcagaagcatc

SEQ ID NO: 17278 - DNA, 25 bp, Probe sequence
caaccatatcttgaatcagaagcat

SEQ ID NO: 17279 - DNA, 25 bp, Probe sequence
accatatcttgaatcagaagcatca

SEQ ID NO: 17280 - DNA, 25 bp, Probe sequence
tactcatgttatatggtgtcattgc

SEQ ID NO: 17281 - DNA, 25 bp, Probe sequence
ctcatgttatatggtgtcattgcga

SEQ ID NO: 17282 - DNA, 25 bp, Probe sequence
actcatgttatatggtgtcattgcg

SEQ ID NO: 17283 - DNA, 25 bp, Probe sequence
catttcaatcatttccatcattcgg

SEQ ID NO: 17284 - DNA, 25 bp, Probe sequence
gcgacatttcaatcatttccatcat

SEQ ID NO: 17285 - DNA, 25 bp, Probe sequence
gtcgtagataaacaaatgccagata

SEQ ID NO: 17286 - DNA, 25 bp, Probe sequence
tcatgttatatggtgtcattgcgac

SEQ ID NO: 17287 - DNA, 25 bp, Probe sequence
ggtcgtagataaacaaatgccagat

SEQ ID NO: 17288 - DNA, 25 bp, Probe sequence
ccatcattcggaagagtatatgcag

SEQ ID NO: 17289 - DNA, 25 bp, Probe sequence
cactgacattacttggtatgattgc

SEQ ID NO: 17290 - DNA, 25 bp, Probe sequence
atcattagtgagaagcgagtaagtc

SEQ ID NO: 17291 - DNA, 25 bp, Probe sequence
aatcattagtgagaagcgagtaagt

SEQ ID NO: 17292 - DNA, 25 bp, Probe sequence
acaatcattagtgagaagcgagtaa

SEQ ID NO: 17293 - DNA, 25 bp, Probe sequence
caatcattagtgagaagcgagtaag

SEQ ID NO: 17294 - DNA, 25 bp, Probe sequence
cattagtgagaagcgagtaagtcat

SEQ ID NO: 17295 - DNA, 25 bp, Probe sequence
gacaatcattagtgagaagcgagta

SEQ ID NO: 17296 - DNA, 25 bp, Probe sequence
tcattagtgagaagcgagtaagtca

SEQ ID NO: 17297 - DNA, 25 bp, Probe sequence
attagtgagaagcgagtaagtcatg

SEQ ID NO: 17298 - DNA, 25 bp, Probe sequence
ctattactggatgagcctactaacg

SEQ ID NO: 17299 - DNA, 25 bp, Probe sequence
actattactggatgagcctactaac

SEQ ID NO: 17300 - DNA, 25 bp, Probe sequence
gaccactatgcttatgaagatgaac

SEQ ID NO: 17301 - DNA, 25 bp, Probe sequence
ggaccactatgcttatgaagatgaa

SEQ ID NO: 17302 - DNA, 25 bp, Probe sequence
tattactggatgagcctactaacgg

SEQ ID NO: 17303 - DNA, 25 bp, Probe sequence
accactatgcttatgaagatgaacg

SEQ ID NO: 17304 - DNA, 25 bp, Probe sequence
aggaccactatgcttatgaagatga

SEQ ID NO: 17305 - DNA, 25 bp, Probe sequence
caggaccactatgcttatgaagatg

SEQ ID NO: 17306 - DNA, 25 bp, Probe sequence
acaggaccactatgcttatgaagat

SEQ ID NO: 17307 - DNA, 25 bp, Probe sequence
tatattcattgagaaggttggtggc

SEQ ID NO: 17308 - DNA, 25 bp, Probe sequence
gattccaagttgtagaaccatcatt

SEQ ID NO: 17309 - DNA, 25 bp, Probe sequence
ttccaagttgtagaaccatcattac

SEQ ID NO: 17310 - DNA, 25 bp, Probe sequence
acattagaggcatcattcatagtga

SEQ ID NO: 17311 - DNA, 25 bp, Probe sequence
cgattccaagttgtagaaccatcat

SEQ ID NO: 17312 - DNA, 25 bp, Probe sequence
aacgattccaagttgtagaaccatc

SEQ ID NO: 17313 - DNA, 25 bp, Probe sequence
tcagttgacgattgagaatgaagac

SEQ ID NO: 17314 - DNA, 25 bp, Probe sequence
attccaagttgtagaaccatcatta

SEQ ID NO: 17315 - DNA, 25 bp, Probe sequence
cagttgacgattgagaatgaagacg

SEQ ID NO: 17316 - DNA, 25 bp, Probe sequence
agaactggcattattattgacaacc

SEQ ID NO: 17317 - DNA, 25 bp, Probe sequence
ttaattgtcgttgtaagtgctatgg

SEQ ID NO: 17318 - DNA, 25 bp, Probe sequence
gaactggcattattattgacaaccg

SEQ ID NO: 17319 - DNA, 25 bp, Probe sequence
acaagaactggcattattattgaca

SEQ ID NO: 17320 - DNA, 25 bp, Probe sequence
aagaactggcattattattgacaac

SEQ ID NO: 17321 - DNA, 25 bp, Probe sequence
acaacaagaactggcattattattg

SEQ ID NO: 17322 - DNA, 25 bp, Probe sequence
aacaacaagaactggcattattatt

SEQ ID NO: 17323 - DNA, 25 bp, Probe sequence
caagaactggcattattattgacaa

SEQ ID NO: 17324 - DNA, 25 bp, Probe sequence
aacaagaactggcattattattgac

SEQ ID NO: 17325 - DNA, 25 bp, Probe sequence
ctagtgctaatgatacttaacatgc

SEQ ID NO: 17326 - DNA, 25 bp, Probe sequence
tctagtgctaatgatacttaacatg

SEQ ID NO: 17327 - DNA, 25 bp, Probe sequence
agtgctaatgatacttaacatgcaa

SEQ ID NO: 17328 - DNA, 25 bp, Probe sequence
tagtgctaatgatacttaacatgca

SEQ ID NO: 17329 - DNA, 25 bp, Probe sequence
atctagtgctaatgatacttaacat

SEQ ID NO: 17330 - DNA, 25 bp, Probe sequence
aacatatctagtgctaatgatactt

SEQ ID NO: 17331 - DNA, 25 bp, Probe sequence
gtgctaatgatacttaacatgcaaa

SEQ ID NO: 17332 - DNA, 25 bp, Probe sequence
aaacatatctagtgctaatgatact

SEQ ID NO: 17333 - DNA, 25 bp, Probe sequence
tgctaatgatacttaacatgcaaaa

SEQ ID NO: 17334 - DNA, 25 bp, Probe sequence
agtagacaatccagagaacaatgaa

SEQ ID NO: 17335 - DNA, 25 bp, Probe sequence
gagtggcatatacaacatatcaagc

SEQ ID NO: 17336 - DNA, 25 bp, Probe sequence
acgagtggcatatacaacatatcaa

SEQ ID NO: 17337 - DNA, 25 bp, Probe sequence
aacgagtggcatatacaacatatca

SEQ ID NO: 17338 - DNA, 25 bp, Probe sequence
cgagtggcatatacaacatatcaag

SEQ ID NO: 17339 - DNA, 25 bp, Probe sequence
taatgtgttaccgcatattgatgtg

SEQ ID NO: 17340 - DNA, 25 bp, Probe sequence
tagtagacaatccagagaacaatga

SEQ ID NO: 17341 - DNA, 25 bp, Probe sequence
tccagagaacaatgaatatccaatg

SEQ ID NO: 17342 - DNA, 25 bp, Probe sequence
caatccagagaacaatgaatatcca

SEQ ID NO: 17343 - DNA, 25 bp, Probe sequence
tccaatgattatgacagtattcagt

SEQ ID NO: 17344 - DNA, 25 bp, Probe sequence
agatcaagacgtagtgaatattggt

SEQ ID NO: 17345 - DNA, 25 bp, Probe sequence
gagatcaagacgtagtgaatattgg

SEQ ID NO: 17346 - DNA, 25 bp, Probe sequence
ggagatcaagacgtagtgaatattg

SEQ ID NO: 17347 - DNA, 25 bp, Probe sequence
agtattcctatgctttgacagtaag

SEQ ID NO: 17348 - DNA, 25 bp, Probe sequence
ttccaatgattatgacagtattcag

SEQ ID NO: 17349 - DNA, 25 bp, Probe sequence
gatcaagacgtagtgaatattggta

SEQ ID NO: 17350 - DNA, 25 bp, Probe sequence
gatagtattcctatgctttgacagt

SEQ ID NO: 17351 - DNA, 25 bp, Probe sequence
tgatagtattcctatgctttgacag

SEQ ID NO: 17352 - DNA, 25 bp, Probe sequence
aatcatcgttaatggaactactgct

SEQ ID NO: 17353 - DNA, 25 bp, Probe sequence
caatcatcgttaatggaactactgc

SEQ ID NO: 17354 - DNA, 25 bp, Probe sequence
gcaatcatcgttaatggaactactg

SEQ ID NO: 17355 - DNA, 25 bp, Probe sequence
agcaatcatcgttaatggaactact

SEQ ID NO: 17356 - DNA, 25 bp, Probe sequence
aagcaatcatcgttaatggaactac

SEQ ID NO: 17357 - DNA, 25 bp, Probe sequence
caagcaatcatcgttaatggaacta

SEQ ID NO: 17358 - DNA, 25 bp, Probe sequence
cattggttagcctagaagatacaga

SEQ ID NO: 17359 - DNA, 25 bp, Probe sequence
ggttatctctgttattgccaatgtc

SEQ ID NO: 17360 - DNA, 25 bp, Probe sequence
ccattggttagcctagaagatacag

SEQ ID NO: 17361 - DNA, 25 bp, Probe sequence
aagcaacaacgccatatcaacaata

SEQ ID NO: 17362 - DNA, 25 bp, Probe sequence
aaagcaacaacgccatatcaacaat

SEQ ID NO: 17363 - DNA, 25 bp, Probe sequence
gaaagcaacaacgccatatcaacaa

SEQ ID NO: 17364 - DNA, 25 bp, Probe sequence
attgtcggtgaacatgaagttctat

SEQ ID NO: 17365 - DNA, 25 bp, Probe sequence
ttgtcggtgaacatgaagttctatt

SEQ ID NO: 17366 - DNA, 25 bp, Probe sequence
gattgtcggtgaacatgaagttcta

SEQ ID NO: 17367 - DNA, 25 bp, Probe sequence
tacgattgtcggtgaacatgaagtt

SEQ ID NO: 17368 - DNA, 25 bp, Probe sequence
gaaatcgttggggtcattgaaaata

SEQ ID NO: 17369 - DNA, 25 bp, Probe sequence
aaatcgttggggtcattgaaaatac

SEQ ID NO: 17370 - DNA, 25 bp, Probe sequence
tctcctcaagaattagttatgcctg

SEQ ID NO: 17371 - DNA, 25 bp, Probe sequence
ctcctcaagaattagttatgcctga

SEQ ID NO: 17372 - DNA, 25 bp, Probe sequence
acagtctacagttgagtcattactt

SEQ ID NO: 17373 - DNA, 25 bp, Probe sequence
tcctcaagaattagttatgcctgaa

SEQ ID NO: 17374 - DNA, 25 bp, Probe sequence
cctcaagaattagttatgcctgaag

SEQ ID NO: 17375 - DNA, 25 bp, Probe sequence
cagtctacagttgagtcattacttg

SEQ ID NO: 17376 - DNA, 25 bp, Probe sequence
agtctacagttgagtcattacttga

SEQ ID NO: 17377 - DNA, 25 bp, Probe sequence
gtgacttggttagataatatagcgt

SEQ ID NO: 17378 - DNA, 25 bp, Probe sequence
tgtgacttggttagataatatagcg

SEQ ID NO: 17379 - DNA, 25 bp, Probe sequence
gattgatatgaatgctactctcggt

SEQ ID NO: 17380 - DNA, 25 bp, Probe sequence
tgattgatatgaatgctactctcgg

SEQ ID NO: 17381 - DNA, 25 bp, Probe sequence
attgatatgaatgctactctcggtg

SEQ ID NO: 17382 - DNA, 25 bp, Probe sequence
ttattgaagatggtgctgtcgttat

SEQ ID NO: 17383 - DNA, 25 bp, Probe sequence
attattgaagatggtgctgtcgtta

SEQ ID NO: 17384 - DNA, 25 bp, Probe sequence
tattgaagatggtgctgtcgttatg

SEQ ID NO: 17385 - DNA, 25 bp, Probe sequence
atgattgatatgaatgctactctcg

SEQ ID NO: 17386 - DNA, 25 bp, Probe sequence
ttgatatgaatgctactctcggtgg

SEQ ID NO: 17387 - DNA, 25 bp, Probe sequence
ttgaagatggtgctgtcgttatgat

SEQ ID NO: 17388 - DNA, 25 bp, Probe sequence
cattcgctatacattcaacatatcg

SEQ ID NO: 17389 - DNA, 25 bp, Probe sequence
acattcgctatacattcaacatatc

SEQ ID NO: 17390 - DNA, 25 bp, Probe sequence
ttagaagtggatgatgcaattaacg

SEQ ID NO: 17391 - DNA, 25 bp, Probe sequence
gctgggatttatggtatgaactttg

SEQ ID NO: 17392 - DNA, 25 bp, Probe sequence
gatgcgactattgtttggtatgatt

SEQ ID NO: 17393 - DNA, 25 bp, Probe sequence
aaagatgcgactattgtttggtatg

SEQ ID NO: 17394 - DNA, 25 bp, Probe sequence
tggtatgaactttgtaaatatgccg

SEQ ID NO: 17395 - DNA, 25 bp, Probe sequence
agatgcgactattgtttggtatgat

SEQ ID NO: 17396 - DNA, 25 bp, Probe sequence
atgcgactattgtttggtatgattt

SEQ ID NO: 17397 - DNA, 25 bp, Probe sequence
agtagttggcttaggttatattggt

SEQ ID NO: 17398 - DNA, 25 bp, Probe sequence
cagtagttggcttaggttatattgg

SEQ ID NO: 17399 - DNA, 25 bp, Probe sequence
gtagttggcttaggttatattggtt

SEQ ID NO: 17400 - DNA, 25 bp, Probe sequence
acagtagttggcttaggttatattg

SEQ ID NO: 17401 - DNA, 25 bp, Probe sequence
cgatgtgcttggtgttgatattaat

SEQ ID NO: 17402 - DNA, 25 bp, Probe sequence
aattgaaggtatctacaacgccaga

SEQ ID NO: 17403 - DNA, 25 bp, Probe sequence
aatcaagaaccagacatagaagtat

SEQ ID NO: 17404 - DNA, 25 bp, Probe sequence
aacagtagttggcttaggttatatt

SEQ ID NO: 17405 - DNA, 25 bp, Probe sequence
gatgtgcttggtgttgatattaatc

SEQ ID NO: 17406 - DNA, 25 bp, Probe sequence
agcgttaatgaacttggaccttata

SEQ ID NO: 17407 - DNA, 25 bp, Probe sequence
tagcgttaatgaacttggaccttat

SEQ ID NO: 17408 - DNA, 25 bp, Probe sequence
atagcgttaatgaacttggacctta

SEQ ID NO: 17409 - DNA, 25 bp, Probe sequence
attgatagcgttaatgaacttggac

SEQ ID NO: 17410 - DNA, 25 bp, Probe sequence
tgattgatagcgttaatgaacttgg

SEQ ID NO: 17411 - DNA, 25 bp, Probe sequence
gattgatagcgttaatgaacttgga

SEQ ID NO: 17412 - DNA, 25 bp, Probe sequence
aacttggaccttatatcgttatcgc

SEQ ID NO: 17413 - DNA, 25 bp, Probe sequence
gaacttggaccttatatcgttatcg

SEQ ID NO: 17414 - DNA, 25 bp, Probe sequence
gcgttaatgaacttggaccttatat

SEQ ID NO: 17415 - DNA, 25 bp, Probe sequence
acttagaaggtaatggctcacatac

SEQ ID NO: 17416 - DNA, 25 bp, Probe sequence
catacttagaaggtaatggctcaca

SEQ ID NO: 17417 - DNA, 25 bp, Probe sequence
atacttagaaggtaatggctcacat

SEQ ID NO: 17418 - DNA, 25 bp, Probe sequence
gaaggtaatggctcacatacgatag

SEQ ID NO: 17419 - DNA, 25 bp, Probe sequence
cttagaaggtaatggctcacatacg

SEQ ID NO: 17420 - DNA, 25 bp, Probe sequence
agaaggtaatggctcacatacgata

SEQ ID NO: 17421 - DNA, 25 bp, Probe sequence
tagaaggtaatggctcacatacgat

SEQ ID NO: 17422 - DNA, 25 bp, Probe sequence
gcatacttagaaggtaatggctcac

SEQ ID NO: 17423 - DNA, 25 bp, Probe sequence
ttagaaggtaatggctcacatacga

SEQ ID NO: 17424 - DNA, 25 bp, Probe sequence
cgtgttatgaatagcgttgtcaata

SEQ ID NO: 17425 - DNA, 25 bp, Probe sequence
tatatattcacggtggattcaatgc

SEQ ID NO: 17426 - DNA, 25 bp, Probe sequence
gtgttatgaatagcgttgtcaataa

SEQ ID NO: 17427 - DNA, 25 bp, Probe sequence
ccgtgttatgaatagcgttgtcaat

SEQ ID NO: 17428 - DNA, 25 bp, Probe sequence
tatgaggttgtactgcctatctatc

SEQ ID NO: 17429 - DNA, 25 bp, Probe sequence
acattatatgaggttgtactgccta

SEQ ID NO: 17430 - DNA, 25 bp, Probe sequence
atgaggttgtactgcctatctatcc

SEQ ID NO: 17431 - DNA, 25 bp, Probe sequence
aacaagatgcggttctaagtcagtt

SEQ ID NO: 17432 - DNA, 25 bp, Probe sequence
tccaaagacaccagagtttcatatt

SEQ ID NO: 17433 - DNA, 25 bp, Probe sequence
aacatcactacgagaagcaattcaa

SEQ ID NO: 17434 - DNA, 25 bp, Probe sequence
caacatcactacgagaagcaattca

SEQ ID NO: 17435 - DNA, 25 bp, Probe sequence
acaacatcactacgagaagcaattc

SEQ ID NO: 17436 - DNA, 25 bp, Probe sequence
cacaacatcactacgagaagcaatt

SEQ ID NO: 17437 - DNA, 25 bp, Probe sequence
tgccgtcgttgacatattactataa

SEQ ID NO: 17438 - DNA, 25 bp, Probe sequence
ttgccgtcgttgacatattactata

SEQ ID NO: 17439 - DNA, 25 bp, Probe sequence
gccgtcgttgacatattactataac

SEQ ID NO: 17440 - DNA, 25 bp, Probe sequence
ccgtcgttgacatattactataacc

SEQ ID NO: 17441 - DNA, 25 bp, Probe sequence
gaccatatagttcactgaatcaaca

SEQ ID NO: 17442 - DNA, 25 bp, Probe sequence
ggtccaacattatcaggttatattg

SEQ ID NO: 17443 - DNA, 25 bp, Probe sequence
ggattgttattattacctggttctc

SEQ ID NO: 17444 - DNA, 25 bp, Probe sequence
atgatggttggacgtgtattacaag

SEQ ID NO: 17445 - DNA, 25 bp, Probe sequence
cctggttctctaattatgggtctac

SEQ ID NO: 17446 - DNA, 25 bp, Probe sequence
tacaagatcatatgcgtgaattagc

SEQ ID NO: 17447 - DNA, 25 bp, Probe sequence
gtgcgatttcaatgaatttcccaat

SEQ ID NO: 17448 - DNA, 25 bp, Probe sequence
catgatggttggacgtgtattacaa

SEQ ID NO: 17449 - DNA, 25 bp, Probe sequence
aatgtttgcgattggtattatcttt

SEQ ID NO: 17450 - DNA, 25 bp, Probe sequence
cgggattcatgttagtaaacggtat

SEQ ID NO: 17451 - DNA, 25 bp, Probe sequence
aatgaagaagcagatgacagtgtaa

SEQ ID NO: 17452 - DNA, 25 bp, Probe sequence
ggcgaattaacaatggatggtatta

SEQ ID NO: 17453 - DNA, 25 bp, Probe sequence
ttacgagttaatccaggtgttgaag

SEQ ID NO: 17454 - DNA, 25 bp, Probe sequence
attacgagttaatccaggtgttgaa

SEQ ID NO: 17455 - DNA, 25 bp, Probe sequence
tgtattacgagttaatccaggtgtt

SEQ ID NO: 17456 - DNA, 25 bp, Probe sequence
ttgtattacgagttaatccaggtgt

SEQ ID NO: 17457 - DNA, 25 bp, Probe sequence
atggcgaattaacaatggatggtat

SEQ ID NO: 17458 - DNA, 25 bp, Probe sequence
tattacgagttaatccaggtgttga

SEQ ID NO: 17459 - DNA, 25 bp, Probe sequence
gtattacgagttaatccaggtgttg

SEQ ID NO: 17460 - DNA, 25 bp, Probe sequence
atgaactataacattgtcggtactg

SEQ ID NO: 17461 - DNA, 25 bp, Probe sequence
tgaactataacattgtcggtactgt

SEQ ID NO: 17462 - DNA, 25 bp, Probe sequence
ggatgacgcagatatagagagattt

SEQ ID NO: 17463 - DNA, 25 bp, Probe sequence
ttcaaggcgtcggatttagatattt

SEQ ID NO: 17464 - DNA, 25 bp, Probe sequence
gggatgacgcagatatagagagatt

SEQ ID NO: 17465 - DNA, 25 bp, Probe sequence
gttcaaggcgtcggatttagatatt

SEQ ID NO: 17466 - DNA, 25 bp, Probe sequence
gatgacgcagatatagagagattta

SEQ ID NO: 17467 - DNA, 25 bp, Probe sequence
aatgaactataacattgtcggtact

SEQ ID NO: 17468 - DNA, 25 bp, Probe sequence
gccatcaacttgaagagttagaact

SEQ ID NO: 17469 - DNA, 25 bp, Probe sequence
caggaattggtattacgctcattat

SEQ ID NO: 17470 - DNA, 25 bp, Probe sequence
gtctaacgcacaattaacattatcg

SEQ ID NO: 17471 - DNA, 25 bp, Probe sequence
gcaggaattggtattacgctcatta

SEQ ID NO: 17472 - DNA, 25 bp, Probe sequence
attattctgtctggcgtatggtctt

SEQ ID NO: 17473 - DNA, 25 bp, Probe sequence
tattgatgcttgttaatggtattgc

SEQ ID NO: 17474 - DNA, 25 bp, Probe sequence
ttgtattaccaatgctcattcaagg

SEQ ID NO: 17475 - DNA, 25 bp, Probe sequence
ttacgctcattatatcaagtcaact

SEQ ID NO: 17476 - DNA, 25 bp, Probe sequence
aattattctgtctggcgtatggtct

SEQ ID NO: 17477 - DNA, 25 bp, Probe sequence
tggtattacgctcattatatcaagt

SEQ ID NO: 17478 - DNA, 25 bp, Probe sequence
ttatacgacagttagacagagacct

SEQ ID NO: 17479 - DNA, 25 bp, Probe sequence
tgatatgtctattggtattgttggc

SEQ ID NO: 17480 - DNA, 25 bp, Probe sequence
gatatgtctattggtattgttggct

SEQ ID NO: 17481 - DNA, 25 bp, Probe sequence
gtctcaacgaagatgattatgaacg

SEQ ID NO: 17482 - DNA, 25 bp, Probe sequence
atatgtctattggtattgttggctt

SEQ ID NO: 17483 - DNA, 25 bp, Probe sequence
tatacgacagttagacagagacctg

SEQ ID NO: 17484 - DNA, 25 bp, Probe sequence
tttatacgacagttagacagagacc

SEQ ID NO: 17485 - DNA, 25 bp, Probe sequence
aaacacgaattactttggatgaggt

SEQ ID NO: 17486 - DNA, 25 bp, Probe sequence
ttgatatgtctattggtattgttgg

SEQ ID NO: 17487 - DNA, 25 bp, Probe sequence
tacacagcgtaacattattgagaca

SEQ ID NO: 17488 - DNA, 25 bp, Probe sequence
gtacacagcgtaacattattgagac

SEQ ID NO: 17489 - DNA, 25 bp, Probe sequence
acacagcgtaacattattgagacaa

SEQ ID NO: 17490 - DNA, 25 bp, Probe sequence
gctgtcactgatacaactaatgatt

SEQ ID NO: 17491 - DNA, 25 bp, Probe sequence
cgtacacagcgtaacattattgaga

SEQ ID NO: 17492 - DNA, 25 bp, Probe sequence
cattaattattcaacaacacggtcg

SEQ ID NO: 17493 - DNA, 25 bp, Probe sequence
attaattattcaacaacacggtcgc

SEQ ID NO: 17494 - DNA, 25 bp, Probe sequence
gatgttggtcctattggagatactt

SEQ ID NO: 17495 - DNA, 25 bp, Probe sequence
aagatgttggtcctattggagatac

SEQ ID NO: 17496 - DNA, 25 bp, Probe sequence
ttacaacacagacgaagacgattaa

SEQ ID NO: 17497 - DNA, 25 bp, Probe sequence
agtgaatgcgattgagaataatgat

SEQ ID NO: 17498 - DNA, 25 bp, Probe sequence
tagtgaatgcgattgagaataatga

SEQ ID NO: 17499 - DNA, 25 bp, Probe sequence
ttagtgaatgcgattgagaataatg

SEQ ID NO: 17500 - DNA, 25 bp, Probe sequence
gtgaatgcgattgagaataatgata

SEQ ID NO: 17501 - DNA, 25 bp, Probe sequence
aaacatttacaacacagacgaagac

SEQ ID NO: 17502 - DNA, 25 bp, Probe sequence
caaataaagtgacgccaataggtaa

SEQ ID NO: 17503 - DNA, 25 bp, Probe sequence
tttacaacacagacgaagacgatta

SEQ ID NO: 17504 - DNA, 25 bp, Probe sequence
tacaacacagacgaagacgattaaa

SEQ ID NO: 17505 - DNA, 25 bp, Probe sequence
cagcaagaagtagcagatatattgg

SEQ ID NO: 17506 - DNA, 25 bp, Probe sequence
acagcaagaagtagcagatatattg

SEQ ID NO: 17507 - DNA, 25 bp, Probe sequence
aacagcaagaagtagcagatatatt

SEQ ID NO: 17508 - DNA, 25 bp, Probe sequence
tgaaacagcaagaagtagcagatat

SEQ ID NO: 17509 - DNA, 25 bp, Probe sequence
gaaacagcaagaagtagcagatata

SEQ ID NO: 17510 - DNA, 25 bp, Probe sequence
ttgaaacagcaagaagtagcagata

SEQ ID NO: 17511 - DNA, 25 bp, Probe sequence
atgttacagtttacgctttagcaaa

SEQ ID NO: 17512 - DNA, 25 bp, Probe sequence
aatgttacagtttacgctttagcaa

SEQ ID NO: 17513 - DNA, 25 bp, Probe sequence
taatgttacagtttacgctttagca

SEQ ID NO: 17514 - DNA, 25 bp, Probe sequence
ttgaagatataccaagagacgaatg

SEQ ID NO: 17515 - DNA, 25 bp, Probe sequence
tgaagatataccaagagacgaatgg

SEQ ID NO: 17516 - DNA, 25 bp, Probe sequence
gaagatataccaagagacgaatgga

SEQ ID NO: 17517 - DNA, 25 bp, Probe sequence
aagatataccaagagacgaatggaa

SEQ ID NO: 17518 - DNA, 25 bp, Probe sequence
agatataccaagagacgaatggaat

SEQ ID NO: 17519 - DNA, 25 bp, Probe sequence
gatataccaagagacgaatggaatc

SEQ ID NO: 17520 - DNA, 25 bp, Probe sequence
atcaatacagttaccaagctgacaa

SEQ ID NO: 17521 - DNA, 25 bp, Probe sequence
aatcaatacagttaccaagctgaca

SEQ ID NO: 17522 - DNA, 25 bp, Probe sequence
atataccaagagacgaatggaatcg

SEQ ID NO: 17523 - DNA, 25 bp, Probe sequence
gatagagaacttcaatacagagcga

SEQ ID NO: 17524 - DNA, 25 bp, Probe sequence
agatagagaacttcaatacagagcg

SEQ ID NO: 17525 - DNA, 25 bp, Probe sequence
agagaacttcaatacagagcgaata

SEQ ID NO: 17526 - DNA, 25 bp, Probe sequence
tagagaacttcaatacagagcgaat

SEQ ID NO: 17527 - DNA, 25 bp, Probe sequence
atagagaacttcaatacagagcgaa

SEQ ID NO: 17528 - DNA, 25 bp, Probe sequence
gagaacttcaatacagagcgaataa

SEQ ID NO: 17529 - DNA, 25 bp, Probe sequence
agaacttcaatacagagcgaataat

SEQ ID NO: 17530 - DNA, 25 bp, Probe sequence
gaagagatcatgcgtcagtagaatc

SEQ ID NO: 17531 - DNA, 25 bp, Probe sequence
agaagagatcatgcgtcagtagaat

SEQ ID NO: 17532 - DNA, 25 bp, Probe sequence
agacatgactcaagacgaattaagg

SEQ ID NO: 17533 - DNA, 25 bp, Probe sequence
aagacatgactcaagacgaattaag

SEQ ID NO: 17534 - DNA, 25 bp, Probe sequence
gattgggaatgttgttgatattgct

SEQ ID NO: 17535 - DNA, 25 bp, Probe sequence
gtgtgattgggaatgttgttgatat

SEQ ID NO: 17536 - DNA, 25 bp, Probe sequence
tgattgggaatgttgttgatattgc

SEQ ID NO: 17537 - DNA, 25 bp, Probe sequence
ttgggaatgttgttgatattgctaa

SEQ ID NO: 17538 - DNA, 25 bp, Probe sequence
tgtgattgggaatgttgttgatatt

SEQ ID NO: 17539 - DNA, 25 bp, Probe sequence
tgactcaagacgaattaagggattt

SEQ ID NO: 17540 - DNA, 25 bp, Probe sequence
atgactcaagacgaattaagggatt

SEQ ID NO: 17541 - DNA, 25 bp, Probe sequence
tcattgccaacatacaagtgattaa

SEQ ID NO: 17542 - DNA, 25 bp, Probe sequence
acaatcattgccaacatacaagtga

SEQ ID NO: 17543 - DNA, 25 bp, Probe sequence
cacaatcattgccaacatacaagtg

SEQ ID NO: 17544 - DNA, 25 bp, Probe sequence
atttcagcaactttaggtaatgtca

SEQ ID NO: 17545 - DNA, 25 bp, Probe sequence
tttcagcaactttaggtaatgtcat

SEQ ID NO: 17546 - DNA, 25 bp, Probe sequence
ctttggtatttcagcaactttaggt

SEQ ID NO: 17547 - DNA, 25 bp, Probe sequence
tctttggtatttcagcaactttagg

SEQ ID NO: 17548 - DNA, 25 bp, Probe sequence
tggtatttcagcaactttaggtaat

SEQ ID NO: 17549 - DNA, 25 bp, Probe sequence
gtcgcatatattattggtcaacata

SEQ ID NO: 17550 - DNA, 25 bp, Probe sequence
gtattagaagtcatcaatcatcgca

SEQ ID NO: 17551 - DNA, 25 bp, Probe sequence
attagaagtcatcaatcatcgcatt

SEQ ID NO: 17552 - DNA, 25 bp, Probe sequence
agtattagaagtcatcaatcatcgc

SEQ ID NO: 17553 - DNA, 25 bp, Probe sequence
ggcaagtattagaagtcatcaatca

SEQ ID NO: 17554 - DNA, 25 bp, Probe sequence
taatgcgattatgacagatattgcg

SEQ ID NO: 17555 - DNA, 25 bp, Probe sequence
aggcaagtattagaagtcatcaatc

SEQ ID NO: 17556 - DNA, 25 bp, Probe sequence
ttagaagtcatcaatcatcgcatta

SEQ ID NO: 17557 - DNA, 25 bp, Probe sequence
gtaaggcaagtattagaagtcatca

SEQ ID NO: 17558 - DNA, 25 bp, Probe sequence
tgtaaggcaagtattagaagtcatc

SEQ ID NO: 17559 - DNA, 25 bp, Probe sequence
cgatattaggcggattgttaagtca

SEQ ID NO: 17560 - DNA, 25 bp, Probe sequence
acgatattaggcggattgttaagtc

SEQ ID NO: 17561 - DNA, 25 bp, Probe sequence
aacgatattaggcggattgttaagt

SEQ ID NO: 17562 - DNA, 25 bp, Probe sequence
cgagtgattgaattagaagatggca

SEQ ID NO: 17563 - DNA, 25 bp, Probe sequence
gagtgattgaattagaagatggcaa

SEQ ID NO: 17564 - DNA, 25 bp, Probe sequence
gatattaggcggattgttaagtcaa

SEQ ID NO: 17565 - DNA, 25 bp, Probe sequence
gaatgtatatccgcatcagttatct

SEQ ID NO: 17566 - DNA, 25 bp, Probe sequence
agaagatcgcttgaatgtatatccg

SEQ ID NO: 17567 - DNA, 25 bp, Probe sequence
cttgaatgtatatccgcatcagtta

SEQ ID NO: 17568 - DNA, 25 bp, Probe sequence
tgatattaattatacggcagacacg

SEQ ID NO: 17569 - DNA, 25 bp, Probe sequence
acgataaaccagaagtaacaagaga

SEQ ID NO: 17570 - DNA, 25 bp, Probe sequence
gctacgataaaccagaagtaacaag

SEQ ID NO: 17571 - DNA, 25 bp, Probe sequence
tagaatcatggaacctcctagtaca

SEQ ID NO: 17572 - DNA, 25 bp, Probe sequence
cgataaaccagaagtaacaagagac

SEQ ID NO: 17573 - DNA, 25 bp, Probe sequence
tacgctacgataaaccagaagtaac

SEQ ID NO: 17574 - DNA, 25 bp, Probe sequence
agaatcatggaacctcctagtacaa

SEQ ID NO: 17575 - DNA, 25 bp, Probe sequence
cgctacgataaaccagaagtaacaa

SEQ ID NO: 17576 - DNA, 25 bp, Probe sequence
tttacgctacgataaaccagaagta

SEQ ID NO: 17577 - DNA, 25 bp, Probe sequence
tgtgtatgtaacagaagacttcagt

SEQ ID NO: 17578 - DNA, 25 bp, Probe sequence
ttgtgtatgtaacagaagacttcag

SEQ ID NO: 17579 - DNA, 25 bp, Probe sequence
aagtcttaccgatatgattggttct

SEQ ID NO: 17580 - DNA, 25 bp, Probe sequence
agtcttaccgatatgattggttcta

SEQ ID NO: 17581 - DNA, 25 bp, Probe sequence
attgtgtatgtaacagaagacttca

SEQ ID NO: 17582 - DNA, 25 bp, Probe sequence
gtgtatgtaacagaagacttcagta

SEQ ID NO: 17583 - DNA, 25 bp, Probe sequence
agtttgctatacctgtcataaccaa

SEQ ID NO: 17584 - DNA, 25 bp, Probe sequence
cattgtgtatgtaacagaagacttc

SEQ ID NO: 17585 - DNA, 25 bp, Probe sequence
gctatacctgtcataaccaaattca

SEQ ID NO: 17586 - DNA, 25 bp, Probe sequence
ttgtcttattagttgctgatgtcac

SEQ ID NO: 17587 - DNA, 25 bp, Probe sequence
tgattgtcttattagttgctgatgt

SEQ ID NO: 17588 - DNA, 25 bp, Probe sequence
attgtcttattagttgctgatgtca

SEQ ID NO: 17589 - DNA, 25 bp, Probe sequence
tgtcttattagttgctgatgtcaca

SEQ ID NO: 17590 - DNA, 25 bp, Probe sequence
gattgtcttattagttgctgatgtc

SEQ ID NO: 17591 - DNA, 25 bp, Probe sequence
gtcttattagttgctgatgtcacat

SEQ ID NO: 17592 - DNA, 25 bp, Probe sequence
tcactgttacattgaacgaagttgt

SEQ ID NO: 17593 - DNA, 25 bp, Probe sequence
ttgattgtcttattagttgctgatg

SEQ ID NO: 17594 - DNA, 25 bp, Probe sequence
tcttattagttgctgatgtcacatt

SEQ ID NO: 17595 - DNA, 25 bp, Probe sequence
gcattgaataaggttaatacggcat

SEQ ID NO: 17596 - DNA, 25 bp, Probe sequence
attgtgctattgaacgataacggat

SEQ ID NO: 17597 - DNA, 25 bp, Probe sequence
caacttagtgatacgcaacagaatc

SEQ ID NO: 17598 - DNA, 25 bp, Probe sequence
ttccattgtgctattgaacgataac

SEQ ID NO: 17599 - DNA, 25 bp, Probe sequence
ttgtgctattgaacgataacggatt

SEQ ID NO: 17600 - DNA, 25 bp, Probe sequence
cattgtgctattgaacgataacgga

SEQ ID NO: 17601 - DNA, 25 bp, Probe sequence
tccattgtgctattgaacgataacg

SEQ ID NO: 17602 - DNA, 25 bp, Probe sequence
gcaacttagtgatacgcaacagaat

SEQ ID NO: 17603 - DNA, 25 bp, Probe sequence
cattgaataaggttaatacggcatt

SEQ ID NO: 17604 - DNA, 25 bp, Probe sequence
gctggagcaagtaatattgttaaga

SEQ ID NO: 17605 - DNA, 25 bp, Probe sequence
aagaaggtggatttggtgactatta

SEQ ID NO: 17606 - DNA, 25 bp, Probe sequence
agctggagcaagtaatattgttaag

SEQ ID NO: 17607 - DNA, 25 bp, Probe sequence
agaaggtggatttggtgactattaa

SEQ ID NO: 17608 - DNA, 25 bp, Probe sequence
gaagaaggtggatttggtgactatt

SEQ ID NO: 17609 - DNA, 25 bp, Probe sequence
aagctggagcaagtaatattgttaa

SEQ ID NO: 17610 - DNA, 25 bp, Probe sequence
aacagtgatttgatgatggagcata

SEQ ID NO: 17611 - DNA, 25 bp, Probe sequence
agaagaaggtggatttggtgactat

SEQ ID NO: 17612 - DNA, 25 bp, Probe sequence
aagaagaaggtggatttggtgacta

SEQ ID NO: 17613 - DNA, 25 bp, Probe sequence
ggattattgattgttggtggaatgt

SEQ ID NO: 17614 - DNA, 25 bp, Probe sequence
aggattattgattgttggtggaatg

SEQ ID NO: 17615 - DNA, 25 bp, Probe sequence
caggattattgattgttggtggaat

SEQ ID NO: 17616 - DNA, 25 bp, Probe sequence
gattattgattgttggtggaatgtc

SEQ ID NO: 17617 - DNA, 25 bp, Probe sequence
tattgattgttggtggaatgtcatc

SEQ ID NO: 17618 - DNA, 25 bp, Probe sequence
ttattgattgttggtggaatgtcat

SEQ ID NO: 17619 - DNA, 25 bp, Probe sequence
attattgattgttggtggaatgtca

SEQ ID NO: 17620 - DNA, 25 bp, Probe sequence
attgattgttggtggaatgtcatct

SEQ ID NO: 17621 - DNA, 25 bp, Probe sequence
acaggattattgattgttggtggaa

SEQ ID NO: 17622 - DNA, 25 bp, Probe sequence
tctaatgatgagcgtatggatgatt

SEQ ID NO: 17623 - DNA, 25 bp, Probe sequence
atctaatgatgagcgtatggatgat

SEQ ID NO: 17624 - DNA, 25 bp, Probe sequence
tgttatctaatgatgagcgtatgga

SEQ ID NO: 17625 - DNA, 25 bp, Probe sequence
tatctaatgatgagcgtatggatga

SEQ ID NO: 17626 - DNA, 25 bp, Probe sequence
atcttaattggtggcggtattatga

SEQ ID NO: 17627 - DNA, 25 bp, Probe sequence
catcttaattggtggcggtattatg

SEQ ID NO: 17628 - DNA, 25 bp, Probe sequence
tcatcttaattggtggcggtattat

SEQ ID NO: 17629 - DNA, 25 bp, Probe sequence
tcttaattggtggcggtattatgag

SEQ ID NO: 17630 - DNA, 25 bp, Probe sequence
atgttatctaatgatgagcgtatgg

SEQ ID NO: 17631 - DNA, 25 bp, Probe sequence
taattcagccattagttaaggacaa

SEQ ID NO: 17632 - DNA, 25 bp, Probe sequence
ttaattcagccattagttaaggaca

SEQ ID NO: 17633 - DNA, 25 bp, Probe sequence
gggttatttaagtggaagaacgatt

SEQ ID NO: 17634 - DNA, 25 bp, Probe sequence
aattcagccattagttaaggacaaa

SEQ ID NO: 17635 - DNA, 25 bp, Probe sequence
cgggttatttaagtggaagaacgat

SEQ ID NO: 17636 - DNA, 25 bp, Probe sequence
ttcgggttatttaagtggaagaacg

SEQ ID NO: 17637 - DNA, 25 bp, Probe sequence
ggttatttaagtggaagaacgattt

SEQ ID NO: 17638 - DNA, 25 bp, Probe sequence
attaattcagccattagttaaggac

SEQ ID NO: 17639 - DNA, 25 bp, Probe sequence
aagtggaagaacgatttatatcaat

SEQ ID NO: 17640 - DNA, 25 bp, Probe sequence
agagtaattggcacagattatgaca

SEQ ID NO: 17641 - DNA, 25 bp, Probe sequence
gagagtaattggcacagattatgac

SEQ ID NO: 17642 - DNA, 25 bp, Probe sequence
cgagagtaattggcacagattatga

SEQ ID NO: 17643 - DNA, 25 bp, Probe sequence
cgtatgagtcaagcgaataatccat

SEQ ID NO: 17644 - DNA, 25 bp, Probe sequence
gagtaattggcacagattatgacaa

SEQ ID NO: 17645 - DNA, 25 bp, Probe sequence
gtacatggtgatactacaacgactt

SEQ ID NO: 17646 - DNA, 25 bp, Probe sequence
cgagtcatggtaagtaatattgctg

SEQ ID NO: 17647 - DNA, 25 bp, Probe sequence
ggtattaaggaatcatacagagcgt

SEQ ID NO: 17648 - DNA, 25 bp, Probe sequence
tggtattaaggaatcatacagagcg

SEQ ID NO: 17649 - DNA, 25 bp, Probe sequence
gttgtcttactatgtggttctggta

SEQ ID NO: 17650 - DNA, 25 bp, Probe sequence
tatcaatgactcaagagaacaacga

SEQ ID NO: 17651 - DNA, 25 bp, Probe sequence
ttgtcttactatgtggttctggtat

SEQ ID NO: 17652 - DNA, 25 bp, Probe sequence
aacatacattacaattcacttcgca

SEQ ID NO: 17653 - DNA, 25 bp, Probe sequence
ttatcaatgactcaagagaacaacg

SEQ ID NO: 17654 - DNA, 25 bp, Probe sequence
aaggttgtcttactatgtggttctg

SEQ ID NO: 17655 - DNA, 25 bp, Probe sequence
acatacattacaattcacttcgcat

SEQ ID NO: 17656 - DNA, 25 bp, Probe sequence
tacattacaattcacttcgcatcaa

SEQ ID NO: 17657 - DNA, 25 bp, Probe sequence
tacgatatgctacaacctaatcctt

SEQ ID NO: 17658 - DNA, 25 bp, Probe sequence
cgtattctaatgtgatgcgaagtat

SEQ ID NO: 17659 - DNA, 25 bp, Probe sequence
ttggtcaaggtgaattagcgattaa

SEQ ID NO: 17660 - DNA, 25 bp, Probe sequence
agcatacttgatgaaccatataaca

SEQ ID NO: 17661 - DNA, 25 bp, Probe sequence
atgatgactacggtattattgctaa

SEQ ID NO: 17662 - DNA, 25 bp, Probe sequence
atatgatgactacggtattattgct

SEQ ID NO: 17663 - DNA, 25 bp, Probe sequence
cttggtcaaggtgaattagcgatta

SEQ ID NO: 17664 - DNA, 25 bp, Probe sequence
tggtcaaggtgaattagcgattaat

SEQ ID NO: 17665 - DNA, 25 bp, Probe sequence
aggttcaagtggtcatcatggtaat

SEQ ID NO: 17666 - DNA, 25 bp, Probe sequence
agttagcatacttgatgaaccatat

SEQ ID NO: 17667 - DNA, 25 bp, Probe sequence
tggttcacttcttgtatctgctaat

SEQ ID NO: 17668 - DNA, 25 bp, Probe sequence
aacaagttggtaaggaatcagaatt

SEQ ID NO: 17669 - DNA, 25 bp, Probe sequence
ggttcacttcttgtatctgctaata

SEQ ID NO: 17670 - DNA, 25 bp, Probe sequence
acaagttggtaaggaatcagaatta

SEQ ID NO: 17671 - DNA, 25 bp, Probe sequence
gtggttcacttcttgtatctgctaa

SEQ ID NO: 17672 - DNA, 25 bp, Probe sequence
tatctgctaatacagttggtggtgt

SEQ ID NO: 17673 - DNA, 25 bp, Probe sequence
gtatctgctaatacagttggtggtg

SEQ ID NO: 17674 - DNA, 25 bp, Probe sequence
taggttggataggtgtgtttatgac

SEQ ID NO: 17675 - DNA, 25 bp, Probe sequence
agtattaggtgtttctcaatcagca

SEQ ID NO: 17676 - DNA, 25 bp, Probe sequence
ttatactggacaagcaatggttact

SEQ ID NO: 17677 - DNA, 25 bp, Probe sequence
tgattatactggacaagcaatggtt

SEQ ID NO: 17678 - DNA, 25 bp, Probe sequence
tatactggacaagcaatggttactg

SEQ ID NO: 17679 - DNA, 25 bp, Probe sequence
attatactggacaagcaatggttac

SEQ ID NO: 17680 - DNA, 25 bp, Probe sequence
cgataaccagcaacaatctaattca

SEQ ID NO: 17681 - DNA, 25 bp, Probe sequence
acgataaccagcaacaatctaattc

SEQ ID NO: 17682 - DNA, 25 bp, Probe sequence
gattatactggacaagcaatggtta

SEQ ID NO: 17683 - DNA, 25 bp, Probe sequence
aacgataaccagcaacaatctaatt

SEQ ID NO: 17684 - DNA, 25 bp, Probe sequence
attgtaacggttgattatactggac

SEQ ID NO: 17685 - DNA, 25 bp, Probe sequence
aagatggtgcgaatgttggttatat

SEQ ID NO: 17686 - DNA, 25 bp, Probe sequence
ttatcaagaagatggtgcgaatgtt

SEQ ID NO: 17687 - DNA, 25 bp, Probe sequence
gaagatggtgcgaatgttggttata

SEQ ID NO: 17688 - DNA, 25 bp, Probe sequence
agatggtgcgaatgttggttatata

SEQ ID NO: 17689 - DNA, 25 bp, Probe sequence
tatcaagaagatggtgcgaatgttg

SEQ ID NO: 17690 - DNA, 25 bp, Probe sequence
agaagatggtgcgaatgttggttat

SEQ ID NO: 17691 - DNA, 25 bp, Probe sequence
aagaagatggtgcgaatgttggtta

SEQ ID NO: 17692 - DNA, 25 bp, Probe sequence
tttatcaagaagatggtgcgaatgt

SEQ ID NO: 17693 - DNA, 25 bp, Probe sequence
cgtttggttcttactatgatgacaa

SEQ ID NO: 17694 - DNA, 25 bp, Probe sequence
tacaccttcaacaactgattacaac

SEQ ID NO: 17695 - DNA, 25 bp, Probe sequence
ttcgtacaccttcaacaactgatta

SEQ ID NO: 17696 - DNA, 25 bp, Probe sequence
ccatattccttatcagtatcaacca

SEQ ID NO: 17697 - DNA, 25 bp, Probe sequence
accatattccttatcagtatcaacc

SEQ ID NO: 17698 - DNA, 25 bp, Probe sequence
gtacaccttcaacaactgattacaa

SEQ ID NO: 17699 - DNA, 25 bp, Probe sequence
tcgtacaccttcaacaactgattac

SEQ ID NO: 17700 - DNA, 25 bp, Probe sequence
acaccttcaacaactgattacaacg

SEQ ID NO: 17701 - DNA, 25 bp, Probe sequence
ttaatgtcaactatcctaagcggag

SEQ ID NO: 17702 - DNA, 25 bp, Probe sequence
cgtacaccttcaacaactgattaca

SEQ ID NO: 17703 - DNA, 25 bp, Probe sequence
cggtggattaacaggtatattcaac

SEQ ID NO: 17704 - DNA, 25 bp, Probe sequence
catagccaacaagaatatccacagt

SEQ ID NO: 17705 - DNA, 25 bp, Probe sequence
acatagccaacaagaatatccacag

SEQ ID NO: 17706 - DNA, 25 bp, Probe sequence
gacatagccaacaagaatatccaca

SEQ ID NO: 17707 - DNA, 25 bp, Probe sequence
gcggtggattaacaggtatattcaa

SEQ ID NO: 17708 - DNA, 25 bp, Probe sequence
atagccaacaagaatatccacagtt

SEQ ID NO: 17709 - DNA, 25 bp, Probe sequence
attctcaccaacacaattagcatca

SEQ ID NO: 17710 - DNA, 25 bp, Probe sequence
tagccaacaagaatatccacagttc

SEQ ID NO: 17711 - DNA, 25 bp, Probe sequence
cagcggtggattaacaggtatattc

SEQ ID NO: 17712 - DNA, 25 bp, Probe sequence
ttgcgagatatgtctgtaagattga

SEQ ID NO: 17713 - DNA, 25 bp, Probe sequence
tgcgagatatgtctgtaagattgat

SEQ ID NO: 17714 - DNA, 25 bp, Probe sequence
ggattgcgagatatgtctgtaagat

SEQ ID NO: 17715 - DNA, 25 bp, Probe sequence
attgcgagatatgtctgtaagattg

SEQ ID NO: 17716 - DNA, 25 bp, Probe sequence
gattgcgagatatgtctgtaagatt

SEQ ID NO: 17717 - DNA, 25 bp, Probe sequence
ctggattgcgagatatgtctgtaag

SEQ ID NO: 17718 - DNA, 25 bp, Probe sequence
tggattgcgagatatgtctgtaaga

SEQ ID NO: 17719 - DNA, 25 bp, Probe sequence
aacatatatccaaccagatgcgaat

SEQ ID NO: 17720 - DNA, 25 bp, Probe sequence
acatatatccaaccagatgcgaatg

SEQ ID NO: 17721 - DNA, 25 bp, Probe sequence
gatggtatggttattgaagcgttag

SEQ ID NO: 17722 - DNA, 25 bp, Probe sequence
tctacttgttattcatactggtggc

SEQ ID NO: 17723 - DNA, 25 bp, Probe sequence
ctacttgttattcatactggtggca

SEQ ID NO: 17724 - DNA, 25 bp, Probe sequence
atggtatggttattgaagcgttagg

SEQ ID NO: 17725 - DNA, 25 bp, Probe sequence
cgcattagaaggcattcaacaatta

SEQ ID NO: 17726 - DNA, 25 bp, Probe sequence
cgatggtatggttattgaagcgtta

SEQ ID NO: 17727 - DNA, 25 bp, Probe sequence
tacttgttattcatactggtggcac

SEQ ID NO: 17728 - DNA, 25 bp, Probe sequence
gcattagaaggcattcaacaattag

SEQ ID NO: 17729 - DNA, 25 bp, Probe sequence
tattgtgagtccaacttacgcatac

SEQ ID NO: 17730 - DNA, 25 bp, Probe sequence
atatgattacgacgacgaaggtatt

SEQ ID NO: 17731 - DNA, 25 bp, Probe sequence
tatgattacgacgacgaaggtattg

SEQ ID NO: 17732 - DNA, 25 bp, Probe sequence
tatatgattacgacgacgaaggtat

SEQ ID NO: 17733 - DNA, 25 bp, Probe sequence
tatatatgattacgacgacgaaggt

SEQ ID NO: 17734 - DNA, 25 bp, Probe sequence
atatatgattacgacgacgaaggta

SEQ ID NO: 17735 - DNA, 25 bp, Probe sequence
gcagaagtacctgaggaattatatg

SEQ ID NO: 17736 - DNA, 25 bp, Probe sequence
gatggatgccctacagattctatta

SEQ ID NO: 17737 - DNA, 25 bp, Probe sequence
tggatgccctacagattctattaaa

SEQ ID NO: 17738 - DNA, 25 bp, Probe sequence
cgccagatatatatgattacgacga

SEQ ID NO: 17739 - DNA, 25 bp, Probe sequence
actggtacaacacaattatcacttg

SEQ ID NO: 17740 - DNA, 25 bp, Probe sequence
tactggtacaacacaattatcactt

SEQ ID NO: 17741 - DNA, 25 bp, Probe sequence
ttactggtacaacacaattatcact

SEQ ID NO: 17742 - DNA, 25 bp, Probe sequence
cgttactataggtatgatggtgaca

SEQ ID NO: 17743 - DNA, 25 bp, Probe sequence
tcgttactataggtatgatggtgac

SEQ ID NO: 17744 - DNA, 25 bp, Probe sequence
ggtaaatcatactctccagaagcat

SEQ ID NO: 17745 - DNA, 25 bp, Probe sequence
aaggattcttccaagtcactggtaa

SEQ ID NO: 17746 - DNA, 25 bp, Probe sequence
gtaaatcatactctccagaagcatt

SEQ ID NO: 17747 - DNA, 25 bp, Probe sequence
atcgttactataggtatgatggtga

SEQ ID NO: 17748 - DNA, 25 bp, Probe sequence
cttgttaccattatcgccgcaataa

SEQ ID NO: 17749 - DNA, 25 bp, Probe sequence
gctaaagatagagatgcgttatacc

SEQ ID NO: 17750 - DNA, 25 bp, Probe sequence
aagatagagatgcgttataccttaa

SEQ ID NO: 17751 - DNA, 25 bp, Probe sequence
agatagagatgcgttataccttaat

SEQ ID NO: 17752 - DNA, 25 bp, Probe sequence
tgttaccattatcgccgcaataatt

SEQ ID NO: 17753 - DNA, 25 bp, Probe sequence
ttgttaccattatcgccgcaataat

SEQ ID NO: 17754 - DNA, 25 bp, Probe sequence
tgctaaagatagagatgcgttatac

SEQ ID NO: 17755 - DNA, 25 bp, Probe sequence
aaatgctaaagatagagatgcgtta

SEQ ID NO: 17756 - DNA, 25 bp, Probe sequence
aatgctaaagatagagatgcgttat

SEQ ID NO: 17757 - DNA, 25 bp, Probe sequence
gaatcaacaagtagaggttaagcag

SEQ ID NO: 17758 - DNA, 25 bp, Probe sequence
gtgttatggtatggctaggtatgaa

SEQ ID NO: 17759 - DNA, 25 bp, Probe sequence
taggtgttatggtatggctaggtat

SEQ ID NO: 17760 - DNA, 25 bp, Probe sequence
ttaggtgttatggtatggctaggta

SEQ ID NO: 17761 - DNA, 25 bp, Probe sequence
tatggtatggctaggtatgaagtca

SEQ ID NO: 17762 - DNA, 25 bp, Probe sequence
gttatggtatggctaggtatgaagt

SEQ ID NO: 17763 - DNA, 25 bp, Probe sequence
tgttatggtatggctaggtatgaag

SEQ ID NO: 17764 - DNA, 25 bp, Probe sequence
aatcaacaagtagaggttaagcagg

SEQ ID NO: 17765 - DNA, 25 bp, Probe sequence
ggaatcaacaagtagaggttaagca

SEQ ID NO: 17766 - DNA, 25 bp, Probe sequence
ggatagaactgacttgtcatctgat

SEQ ID NO: 17767 - DNA, 25 bp, Probe sequence
ttgtggatagaactgacttgtcatc

SEQ ID NO: 17768 - DNA, 25 bp, Probe sequence
gttgtggatagaactgacttgtcat

SEQ ID NO: 17769 - DNA, 25 bp, Probe sequence
tggatagaactgacttgtcatctga

SEQ ID NO: 17770 - DNA, 25 bp, Probe sequence
gtggatagaactgacttgtcatctg

SEQ ID NO: 17771 - DNA, 25 bp, Probe sequence
tgtggatagaactgacttgtcatct

SEQ ID NO: 17772 - DNA, 25 bp, Probe sequence
agttgtgaaagaagttgtggataga

SEQ ID NO: 17773 - DNA, 25 bp, Probe sequence
gaaagttgtgaaagaagttgtggat

SEQ ID NO: 17774 - DNA, 25 bp, Probe sequence
gttgtgaaagaagttgtggatagaa

SEQ ID NO: 17775 - DNA, 25 bp, Probe sequence
ggtgcgttaagtaactatcaacaag

SEQ ID NO: 17776 - DNA, 25 bp, Probe sequence
aggtgcgttaagtaactatcaacaa

SEQ ID NO: 17777 - DNA, 25 bp, Probe sequence
aaggtgcgttaagtaactatcaaca

SEQ ID NO: 17778 - DNA, 25 bp, Probe sequence
gtgcgttaagtaactatcaacaagt

SEQ ID NO: 17779 - DNA, 25 bp, Probe sequence
aaccttcgtcttcaacaccattaag

SEQ ID NO: 17780 - DNA, 25 bp, Probe sequence
caaccttcgtcttcaacaccattaa

SEQ ID NO: 17781 - DNA, 25 bp, Probe sequence
gatgtaggttatcaagttgccgaag

SEQ ID NO: 17782 - DNA, 25 bp, Probe sequence
ccttcgtcttcaacaccattaagtt

SEQ ID NO: 17783 - DNA, 25 bp, Probe sequence
attgtgattcaaccttcgtcttcaa

SEQ ID NO: 17784 - DNA, 25 bp, Probe sequence
atcgtcttaggtgctgtagttgata

SEQ ID NO: 17785 - DNA, 25 bp, Probe sequence
tcgtcttaggtgctgtagttgataa

SEQ ID NO: 17786 - DNA, 25 bp, Probe sequence
taatgttggtggaggtattatggca

SEQ ID NO: 17787 - DNA, 25 bp, Probe sequence
catcgtcttaggtgctgtagttgat

SEQ ID NO: 17788 - DNA, 25 bp, Probe sequence
ttatttggttatctgtttggtgctg

SEQ ID NO: 17789 - DNA, 25 bp, Probe sequence
atcaggttgggcatacttcttatac

SEQ ID NO: 17790 - DNA, 25 bp, Probe sequence
catcaggttgggcatacttcttata

SEQ ID NO: 17791 - DNA, 25 bp, Probe sequence
tcaggtatcggtattatgtttgtcc

SEQ ID NO: 17792 - DNA, 25 bp, Probe sequence
atttgtttatttcgtgcgttatggt

SEQ ID NO: 17793 - DNA, 25 bp, Probe sequence
gaacatattgccatcatcggtattg

SEQ ID NO: 17794 - DNA, 25 bp, Probe sequence
gtggtggttattatgaatcaagtgg

SEQ ID NO: 17795 - DNA, 25 bp, Probe sequence
cgtggtggttattatgaatcaagtg

SEQ ID NO: 17796 - DNA, 25 bp, Probe sequence
tcgtggtggttattatgaatcaagt

SEQ ID NO: 17797 - DNA, 25 bp, Probe sequence
atcgtggtggttattatgaatcaag

SEQ ID NO: 17798 - DNA, 25 bp, Probe sequence
attccatctctaccaacaagacaat

SEQ ID NO: 17799 - DNA, 25 bp, Probe sequence
tattccatctctaccaacaagacaa

SEQ ID NO: 17800 - DNA, 25 bp, Probe sequence
ttccatctctaccaacaagacaatt

SEQ ID NO: 17801 - DNA, 25 bp, Probe sequence
atattccatctctaccaacaagaca

SEQ ID NO: 17802 - DNA, 25 bp, Probe sequence
attagtgttaggtgttgtcgtagga

SEQ ID NO: 17803 - DNA, 25 bp, Probe sequence
cattagtgttaggtgttgtcgtagg

SEQ ID NO: 17804 - DNA, 25 bp, Probe sequence
gcattagtgttaggtgttgtcgtag

SEQ ID NO: 17805 - DNA, 25 bp, Probe sequence
tgaagctgtgttctggatgattaat

SEQ ID NO: 17806 - DNA, 25 bp, Probe sequence
ttattggtgttgaccgtatcttaga

SEQ ID NO: 17807 - DNA, 25 bp, Probe sequence
ttgaagctgtgttctggatgattaa

SEQ ID NO: 17808 - DNA, 25 bp, Probe sequence
cttgaagctgtgttctggatgatta

SEQ ID NO: 17809 - DNA, 25 bp, Probe sequence
cacagatgtatggaatgcacttaac

SEQ ID NO: 17810 - DNA, 25 bp, Probe sequence
tagttgcatggatgtgtggtattaa

SEQ ID NO: 17811 - DNA, 25 bp, Probe sequence
tagaagacttgctcattgatggtaa

SEQ ID NO: 17812 - DNA, 25 bp, Probe sequence
ttagaagacttgctcattgatggta

SEQ ID NO: 17813 - DNA, 25 bp, Probe sequence
tccatacagattagaagagacagat

SEQ ID NO: 17814 - DNA, 25 bp, Probe sequence
atccatacagattagaagagacaga

SEQ ID NO: 17815 - DNA, 25 bp, Probe sequence
ccatacagattagaagagacagatg

SEQ ID NO: 17816 - DNA, 25 bp, Probe sequence
aatgattgtcggcttatctccagaa

SEQ ID NO: 17817 - DNA, 25 bp, Probe sequence
acagagtccttatgacgaagattaa

SEQ ID NO: 17818 - DNA, 25 bp, Probe sequence
aacagagtccttatgacgaagatta

SEQ ID NO: 17819 - DNA, 25 bp, Probe sequence
atgattgtcggcttatctccagaag

SEQ ID NO: 17820 - DNA, 25 bp, Probe sequence
aagatgaacctggtgtaacttatgt

SEQ ID NO: 17821 - DNA, 25 bp, Probe sequence
gatgaacctggtgtaacttatgttg

SEQ ID NO: 17822 - DNA, 25 bp, Probe sequence
agatgaacctggtgtaacttatgtt

SEQ ID NO: 17823 - DNA, 25 bp, Probe sequence
atgaacctggtgtaacttatgttgt

SEQ ID NO: 17824 - DNA, 25 bp, Probe sequence
tgaacctggtgtaacttatgttgtg

SEQ ID NO: 17825 - DNA, 25 bp, Probe sequence
gaacctggtgtaacttatgttgtgc

SEQ ID NO: 17826 - DNA, 25 bp, Probe sequence
ttgaaggctttgatacagagactaa

SEQ ID NO: 17827 - DNA, 25 bp, Probe sequence
gttgaaggctttgatacagagacta

SEQ ID NO: 17828 - DNA, 25 bp, Probe sequence
aggattatttgttgaaggctttgat

SEQ ID NO: 17829 - DNA, 25 bp, Probe sequence
tcgttatgcttgtatcagttgtatt

SEQ ID NO: 17830 - DNA, 25 bp, Probe sequence
ttatcgttatgcttgtatcagttgt

SEQ ID NO: 17831 - DNA, 25 bp, Probe sequence
atcgttatgcttgtatcagttgtat

SEQ ID NO: 17832 - DNA, 25 bp, Probe sequence
tcattatcgttatgcttgtatcagt

SEQ ID NO: 17833 - DNA, 25 bp, Probe sequence
tatcgttatgcttgtatcagttgta

SEQ ID NO: 17834 - DNA, 25 bp, Probe sequence
attatcgttatgcttgtatcagttg

SEQ ID NO: 17835 - DNA, 25 bp, Probe sequence
cattatcgttatgcttgtatcagtt

SEQ ID NO: 17836 - DNA, 25 bp, Probe sequence
cttgtatcagttgtattagcattgt

SEQ ID NO: 17837 - DNA, 25 bp, Probe sequence
cgttatgcttgtatcagttgtatta

SEQ ID NO: 17838 - DNA, 25 bp, Probe sequence
attgacaaagtagatgctggtattc

SEQ ID NO: 17839 - DNA, 25 bp, Probe sequence
ggaattgacaaagtagatgctggta

SEQ ID NO: 17840 - DNA, 25 bp, Probe sequence
gttggtgttacatcagttcctaaat

SEQ ID NO: 17841 - DNA, 25 bp, Probe sequence
gaattgacaaagtagatgctggtat

SEQ ID NO: 17842 - DNA, 25 bp, Probe sequence
aaggtggctttcaacttacattaca

SEQ ID NO: 17843 - DNA, 25 bp, Probe sequence
ttgacaaagtagatgctggtattcg

SEQ ID NO: 17844 - DNA, 25 bp, Probe sequence
aattgacaaagtagatgctggtatt

SEQ ID NO: 17845 - DNA, 25 bp, Probe sequence
aaatggtatcgtatcaatgatgggt

SEQ ID NO: 17846 - DNA, 25 bp, Probe sequence
caaatggtatcgtatcaatgatggg

SEQ ID NO: 17847 - DNA, 25 bp, Probe sequence
attattgttagctggatgtggatca

SEQ ID NO: 17848 - DNA, 25 bp, Probe sequence
cattattgttagctggatgtggatc

SEQ ID NO: 17849 - DNA, 25 bp, Probe sequence
cacacttcatacaaagatgctatcg

SEQ ID NO: 17850 - DNA, 25 bp, Probe sequence
tcacacttcatacaaagatgctatc

SEQ ID NO: 17851 - DNA, 25 bp, Probe sequence
ctcacacttcatacaaagatgctat

SEQ ID NO: 17852 - DNA, 25 bp, Probe sequence
gctcacacttcatacaaagatgcta

SEQ ID NO: 17853 - DNA, 25 bp, Probe sequence
acatactacgacaaagttgctaaag

SEQ ID NO: 17854 - DNA, 25 bp, Probe sequence
ttattgttagctggatgtggatcac

SEQ ID NO: 17855 - DNA, 25 bp, Probe sequence
aacatactacgacaaagttgctaaa

SEQ ID NO: 17856 - DNA, 25 bp, Probe sequence
ccaaaggttacgggaataaagaaat

SEQ ID NO: 17857 - DNA, 25 bp, Probe sequence
aaggttacgggaataaagaaattgc

SEQ ID NO: 17858 - DNA, 25 bp, Probe sequence
taatggtgcgaaaggttacatattg

SEQ ID NO: 17859 - DNA, 25 bp, Probe sequence
tggtgcgaaaggttacatattgaaa

SEQ ID NO: 17860 - DNA, 25 bp, Probe sequence
tattgccaaaggttacgggaataaa

SEQ ID NO: 17861 - DNA, 25 bp, Probe sequence
atggtgcgaaaggttacatattgaa

SEQ ID NO: 17862 - DNA, 25 bp, Probe sequence
aatggtgcgaaaggttacatattga

SEQ ID NO: 17863 - DNA, 25 bp, Probe sequence
cttattgccaaaggttacgggaata

SEQ ID NO: 17864 - DNA, 25 bp, Probe sequence
tattgccacttattgccaaaggtta

SEQ ID NO: 17865 - DNA, 25 bp, Probe sequence
tgctgcgattggattagtaatgaat

SEQ ID NO: 17866 - DNA, 25 bp, Probe sequence
attgctgcgattggattagtaatga

SEQ ID NO: 17867 - DNA, 25 bp, Probe sequence
ttgctgcgattggattagtaatgaa

SEQ ID NO: 17868 - DNA, 25 bp, Probe sequence
gctgcgattggattagtaatgaatc

SEQ ID NO: 17869 - DNA, 25 bp, Probe sequence
ctgcgattggattagtaatgaatct

SEQ ID NO: 17870 - DNA, 25 bp, Probe sequence
ttaactgaagaccaacgcaaatatc

SEQ ID NO: 17871 - DNA, 25 bp, Probe sequence
cttaactgaagaccaacgcaaatat

SEQ ID NO: 17872 - DNA, 25 bp, Probe sequence
taactgaagaccaacgcaaatatcg

SEQ ID NO: 17873 - DNA, 25 bp, Probe sequence
tgcgattggattagtaatgaatcta

SEQ ID NO: 17874 - DNA, 25 bp, Probe sequence
tctcgcaatattcctatgacaatgt

SEQ ID NO: 17875 - DNA, 25 bp, Probe sequence
tcgcaatattcctatgacaatgttc

SEQ ID NO: 17876 - DNA, 25 bp, Probe sequence
ctcgcaatattcctatgacaatgtt

SEQ ID NO: 17877 - DNA, 25 bp, Probe sequence
atattcctatgacaatgttcaggca

SEQ ID NO: 17878 - DNA, 25 bp, Probe sequence
tattcctatgacaatgttcaggcaa

SEQ ID NO: 17879 - DNA, 25 bp, Probe sequence
tatgacaatgttcaggcaacgattc

SEQ ID NO: 17880 - DNA, 25 bp, Probe sequence
ctatgacaatgttcaggcaacgatt

SEQ ID NO: 17881 - DNA, 25 bp, Probe sequence
cgcaatattcctatgacaatgttca

SEQ ID NO: 17882 - DNA, 25 bp, Probe sequence
attcctatgacaatgttcaggcaac

SEQ ID NO: 17883 - DNA, 25 bp, Probe sequence
tccaaggtgtaactgaagattctac

SEQ ID NO: 17884 - DNA, 25 bp, Probe sequence
cattccaaggtgtaactgaagattc

SEQ ID NO: 17885 - DNA, 25 bp, Probe sequence
attccaaggtgtaactgaagattct

SEQ ID NO: 17886 - DNA, 25 bp, Probe sequence
ttccaaggtgtaactgaagattcta

SEQ ID NO: 17887 - DNA, 25 bp, Probe sequence
gttcgtatgccaatctcagagttag

SEQ ID NO: 17888 - DNA, 25 bp, Probe sequence
tgacagagattcaatggaacaagtt

SEQ ID NO: 17889 - DNA, 25 bp, Probe sequence
cgtatgccaatctcagagttagaag

SEQ ID NO: 17890 - DNA, 25 bp, Probe sequence
agttcgtatgccaatctcagagtta

SEQ ID NO: 17891 - DNA, 25 bp, Probe sequence
gtatgccaatctcagagttagaagc

SEQ ID NO: 17892 - DNA, 25 bp, Probe sequence
gcttagcagttaagttagtagacaa

SEQ ID NO: 17893 - DNA, 25 bp, Probe sequence
agcttagcagttaagttagtagaca

SEQ ID NO: 17894 - DNA, 25 bp, Probe sequence
tagcagttaagttagtagacaaagc

SEQ ID NO: 17895 - DNA, 25 bp, Probe sequence
gctgtttcaaataacgctgataata

SEQ ID NO: 17896 - DNA, 25 bp, Probe sequence
gtagacaaagctgctcaaagtaatt

SEQ ID NO: 17897 - DNA, 25 bp, Probe sequence
tagtagacaaagctgctcaaagtaa

SEQ ID NO: 17898 - DNA, 25 bp, Probe sequence
ttagtagacaaagctgctcaaagta

SEQ ID NO: 17899 - DNA, 25 bp, Probe sequence
taagttagtagacaaagctgctcaa

SEQ ID NO: 17900 - DNA, 25 bp, Probe sequence
ttaagttagtagacaaagctgctca

SEQ ID NO: 17901 - DNA, 25 bp, Probe sequence
tgatccaagagctgaagagaatatt

SEQ ID NO: 17902 - DNA, 25 bp, Probe sequence
aatgatccaagagctgaagagaata

SEQ ID NO: 17903 - DNA, 25 bp, Probe sequence
gcctatgtgattcaagcacttagaa

SEQ ID NO: 17904 - DNA, 25 bp, Probe sequence
atgatccaagagctgaagagaatat

SEQ ID NO: 17905 - DNA, 25 bp, Probe sequence
actttctgattatctaccgttgatg

SEQ ID NO: 17906 - DNA, 25 bp, Probe sequence
tgaactttctgattatctaccgttg

SEQ ID NO: 17907 - DNA, 25 bp, Probe sequence
cattatgattattgaggatggaaca

SEQ ID NO: 17908 - DNA, 25 bp, Probe sequence
gaactttctgattatctaccgttga

SEQ ID NO: 17909 - DNA, 25 bp, Probe sequence
aatgaactttctgattatctaccgt

SEQ ID NO: 17910 - DNA, 25 bp, Probe sequence
tgtccttacctgatgttgttgataa

SEQ ID NO: 17911 - DNA, 25 bp, Probe sequence
ttatgtccttacctgatgttgttga

SEQ ID NO: 17912 - DNA, 25 bp, Probe sequence
acttatgtccttacctgatgttgtt

SEQ ID NO: 17913 - DNA, 25 bp, Probe sequence
atgtccttacctgatgttgttgata

SEQ ID NO: 17914 - DNA, 25 bp, Probe sequence
tatgtccttacctgatgttgttgat

SEQ ID NO: 17915 - DNA, 25 bp, Probe sequence
cttatgtccttacctgatgttgttg

SEQ ID NO: 17916 - DNA, 25 bp, Probe sequence
tacttatgtccttacctgatgttgt

SEQ ID NO: 17917 - DNA, 25 bp, Probe sequence
gtcgctacactctaattctaggatt

SEQ ID NO: 17918 - DNA, 25 bp, Probe sequence
atacttatgtccttacctgatgttg

SEQ ID NO: 17919 - DNA, 25 bp, Probe sequence
cgtgatgaagatggcattgtattag

SEQ ID NO: 17920 - DNA, 25 bp, Probe sequence
gtgatgaagatggcattgtattagt

SEQ ID NO: 17921 - DNA, 25 bp, Probe sequence
atgaagatggcattgtattagttga

SEQ ID NO: 17922 - DNA, 25 bp, Probe sequence
tgatgaagatggcattgtattagtt

SEQ ID NO: 17923 - DNA, 25 bp, Probe sequence
gatgaagatggcattgtattagttg

SEQ ID NO: 17924 - DNA, 25 bp, Probe sequence
ttatgtgaacattgcttgaatccaa

SEQ ID NO: 17925 - DNA, 25 bp, Probe sequence
acgtgatgaagatggcattgtatta

SEQ ID NO: 17926 - DNA, 25 bp, Probe sequence
aacgtgatgaagatggcattgtatt

SEQ ID NO: 17927 - DNA, 25 bp, Probe sequence
ttgggtactaaatcgtaaagggaaa

SEQ ID NO: 17928 - DNA, 25 bp, Probe sequence
atggcacaagtaatggttagtatca

SEQ ID NO: 17929 - DNA, 25 bp, Probe sequence
atctatggcacaagtaatggttagt

SEQ ID NO: 17930 - DNA, 25 bp, Probe sequence
tggcacaagtaatggttagtatcac

SEQ ID NO: 17931 - DNA, 25 bp, Probe sequence
tctatggcacaagtaatggttagta

SEQ ID NO: 17932 - DNA, 25 bp, Probe sequence
tcatctatggcacaagtaatggtta

SEQ ID NO: 17933 - DNA, 25 bp, Probe sequence
catctatggcacaagtaatggttag

SEQ ID NO: 17934 - DNA, 25 bp, Probe sequence
ttcatctatggcacaagtaatggtt

SEQ ID NO: 17935 - DNA, 25 bp, Probe sequence
ccttctgatgtattagacgaacctt

SEQ ID NO: 17936 - DNA, 25 bp, Probe sequence
aaccttctgatgtattagacgaacc

SEQ ID NO: 17937 - DNA, 25 bp, Probe sequence
tagttatgttatgtggctgtcaagg

SEQ ID NO: 17938 - DNA, 25 bp, Probe sequence
acttagttatgttatgtggctgtca

SEQ ID NO: 17939 - DNA, 25 bp, Probe sequence
ttagttatgttatgtggctgtcaag

SEQ ID NO: 17940 - DNA, 25 bp, Probe sequence
cttagttatgttatgtggctgtcaa

SEQ ID NO: 17941 - DNA, 25 bp, Probe sequence
gattggctagaagtgtataaccgta

SEQ ID NO: 17942 - DNA, 25 bp, Probe sequence
tggctagaagtgtataaccgtaatg

SEQ ID NO: 17943 - DNA, 25 bp, Probe sequence
aggaggttaattggcttgaagatta

SEQ ID NO: 17944 - DNA, 25 bp, Probe sequence
ttggctagaagtgtataaccgtaat

SEQ ID NO: 17945 - DNA, 25 bp, Probe sequence
attggctagaagtgtataaccgtaa

SEQ ID NO: 17946 - DNA, 25 bp, Probe sequence
attgtaggactacttggtgttatcg

SEQ ID NO: 17947 - DNA, 25 bp, Probe sequence
aacattacatgaagcgattacgatg

SEQ ID NO: 17948 - DNA, 25 bp, Probe sequence
cattacatgaagcgattacgatgag

SEQ ID NO: 17949 - DNA, 25 bp, Probe sequence
acattacatgaagcgattacgatga

SEQ ID NO: 17950 - DNA, 25 bp, Probe sequence
attacatgaagcgattacgatgagc

SEQ ID NO: 17951 - DNA, 25 bp, Probe sequence
catattgtaggactacttggtgtta

SEQ ID NO: 17952 - DNA, 25 bp, Probe sequence
ttgtaggactacttggtgttatcga

SEQ ID NO: 17953 - DNA, 25 bp, Probe sequence
tattgtaggactacttggtgttatc

SEQ ID NO: 17954 - DNA, 25 bp, Probe sequence
ttatcggtacaatactgacacctac

SEQ ID NO: 17955 - DNA, 25 bp, Probe sequence
tggtcctattgtatcgttaagtgaa

SEQ ID NO: 17956 - DNA, 25 bp, Probe sequence
ttggtcctattgtatcgttaagtga

SEQ ID NO: 17957 - DNA, 25 bp, Probe sequence
ttattgtactccatcactgaaggtc

SEQ ID NO: 17958 - DNA, 25 bp, Probe sequence
gttattgtactccatcactgaaggt

SEQ ID NO: 17959 - DNA, 25 bp, Probe sequence
ggttattgtactccatcactgaagg

SEQ ID NO: 17960 - DNA, 25 bp, Probe sequence
atgttaataatgttgtcaacgcctt

SEQ ID NO: 17961 - DNA, 25 bp, Probe sequence
gatgttaataatgttgtcaacgcct

SEQ ID NO: 17962 - DNA, 25 bp, Probe sequence
agatgttaataatgttgtcaacgcc

SEQ ID NO: 17963 - DNA, 25 bp, Probe sequence
tattgtactccatcactgaaggtca

SEQ ID NO: 17964 - DNA, 25 bp, Probe sequence
cgagaactatggactaattgcctta

SEQ ID NO: 17965 - DNA, 25 bp, Probe sequence
atatgttgttagagcatcacttcca

SEQ ID NO: 17966 - DNA, 25 bp, Probe sequence
ctatgtctagttgtatggctgttga

SEQ ID NO: 17967 - DNA, 25 bp, Probe sequence
aatatgttgttagagcatcacttcc

SEQ ID NO: 17968 - DNA, 25 bp, Probe sequence
tatgtctagttgtatggctgttgaa

SEQ ID NO: 17969 - DNA, 25 bp, Probe sequence
tatgttgttagagcatcacttccaa

SEQ ID NO: 17970 - DNA, 25 bp, Probe sequence
atgtctagttgtatggctgttgaag

SEQ ID NO: 17971 - DNA, 25 bp, Probe sequence
ttattgtactctatcgctgaaggtc

SEQ ID NO: 17972 - DNA, 25 bp, Probe sequence
gttattgtactctatcgctgaaggt

SEQ ID NO: 17973 - DNA, 25 bp, Probe sequence
gctattagtatcggtatcatcgcat

SEQ ID NO: 17974 - DNA, 25 bp, Probe sequence
tcttactgattccattaaccatcgt

SEQ ID NO: 17975 - DNA, 25 bp, Probe sequence
tacctcaatatgcttgtcatcactt

SEQ ID NO: 17976 - DNA, 25 bp, Probe sequence
ttacctcaatatgcttgtcatcact

SEQ ID NO: 17977 - DNA, 25 bp, Probe sequence
ttcttactgattccattaaccatcg

SEQ ID NO: 17978 - DNA, 25 bp, Probe sequence
attagtatcggtatcatcgcattga

SEQ ID NO: 17979 - DNA, 25 bp, Probe sequence
tattagtatcggtatcatcgcattg

SEQ ID NO: 17980 - DNA, 25 bp, Probe sequence
attacctcaatatgcttgtcatcac

SEQ ID NO: 17981 - DNA, 25 bp, Probe sequence
actgattccattaaccatcgtactt

SEQ ID NO: 17982 - DNA, 25 bp, Probe sequence
agagaacacttgctgctattgaatc

SEQ ID NO: 17983 - DNA, 25 bp, Probe sequence
gagaacacttgctgctattgaatca

SEQ ID NO: 17984 - DNA, 25 bp, Probe sequence
cgaactatgcttatcacctaagtca

SEQ ID NO: 17985 - DNA, 25 bp, Probe sequence
aattgatgaagatgccatgacctac

SEQ ID NO: 17986 - DNA, 25 bp, Probe sequence
aatccttatcatgctatcaatccag

SEQ ID NO: 17987 - DNA, 25 bp, Probe sequence
gaactatgcttatcacctaagtcaa

SEQ ID NO: 17988 - DNA, 25 bp, Probe sequence
agaacacttgctgctattgaatcag

SEQ ID NO: 17989 - DNA, 25 bp, Probe sequence
cagagaacacttgctgctattgaat

SEQ ID NO: 17990 - DNA, 25 bp, Probe sequence
attgatgaagatgccatgacctact

SEQ ID NO: 17991 - DNA, 25 bp, Probe sequence
ttatatgacgaaggttatggctgtt

SEQ ID NO: 17992 - DNA, 25 bp, Probe sequence
ttcgtcgcaatatgattactatgat

SEQ ID NO: 17993 - DNA, 25 bp, Probe sequence
attcgtcgcaatatgattactatga

SEQ ID NO: 17994 - DNA, 25 bp, Probe sequence
cattcgtcgcaatatgattactatg

SEQ ID NO: 17995 - DNA, 25 bp, Probe sequence
tatatgacgaaggttatggctgttt

SEQ ID NO: 17996 - DNA, 25 bp, Probe sequence
tttatatgacgaaggttatggctgt

SEQ ID NO: 17997 - DNA, 25 bp, Probe sequence
atttatatgacgaaggttatggctg

SEQ ID NO: 17998 - DNA, 25 bp, Probe sequence
acatttatatgacgaaggttatggc

SEQ ID NO: 17999 - DNA, 25 bp, Probe sequence
tgctctgtgaacatttatatgacga

SEQ ID NO: 18000 - DNA, 25 bp, Probe sequence
agtatgaacatgcttctgatcgtat

SEQ ID NO: 18001 - DNA, 25 bp, Probe sequence
gtatgaacatgcttctgatcgtatc

SEQ ID NO: 18002 - DNA, 25 bp, Probe sequence
cagtatgaacatgcttctgatcgta

SEQ ID NO: 18003 - DNA, 25 bp, Probe sequence
tccaaatatcgttcatcatcgtaaa

SEQ ID NO: 18004 - DNA, 25 bp, Probe sequence
ttccaaatatcgttcatcatcgtaa

SEQ ID NO: 18005 - DNA, 25 bp, Probe sequence
tttccaaatatcgttcatcatcgta

SEQ ID NO: 18006 - DNA, 25 bp, Probe sequence
ctctatgatagcaaggcattgttta

SEQ ID NO: 18007 - DNA, 25 bp, Probe sequence
ttctgatcgtatcacagttgatgat

SEQ ID NO: 18008 - DNA, 25 bp, Probe sequence
cttctgatcgtatcacagttgatga

SEQ ID NO: 18009 - DNA, 25 bp, Probe sequence
atctatatcggtggtaatggtggta

SEQ ID NO: 18010 - DNA, 25 bp, Probe sequence
tagtaatgattggtaacggtatggc

SEQ ID NO: 18011 - DNA, 25 bp, Probe sequence
gaagttgtgttgaatcaggtgttaa

SEQ ID NO: 18012 - DNA, 25 bp, Probe sequence
agaagttgtgttgaatcaggtgtta

SEQ ID NO: 18013 - DNA, 25 bp, Probe sequence
gatgttaatcgtggtattgttgtca

SEQ ID NO: 18014 - DNA, 25 bp, Probe sequence
agatgttaatcgtggtattgttgtc

SEQ ID NO: 18015 - DNA, 25 bp, Probe sequence
aatctatatcggtggtaatggtggt

SEQ ID NO: 18016 - DNA, 25 bp, Probe sequence
aattgctgatatggctgatgatgaa

SEQ ID NO: 18017 - DNA, 25 bp, Probe sequence
aagaagttgtgttgaatcaggtgtt

SEQ ID NO: 18018 - DNA, 25 bp, Probe sequence
taagtaaccgtaaagcagaagacaa

SEQ ID NO: 18019 - DNA, 25 bp, Probe sequence
ttaagtaaccgtaaagcagaagaca

SEQ ID NO: 18020 - DNA, 25 bp, Probe sequence
aagtaaccgtaaagcagaagacaaa

SEQ ID NO: 18021 - DNA, 25 bp, Probe sequence
aaacaaacttactgaagaacgaagc

SEQ ID NO: 18022 - DNA, 25 bp, Probe sequence
gcatcaattaaagcaggtgttcatt

SEQ ID NO: 18023 - DNA, 25 bp, Probe sequence
ttacttggtgtagacactcagttaa

SEQ ID NO: 18024 - DNA, 25 bp, Probe sequence
caaacttactgaagaacgaagcaag

SEQ ID NO: 18025 - DNA, 25 bp, Probe sequence
attacttggtgtagacactcagtta

SEQ ID NO: 18026 - DNA, 25 bp, Probe sequence
tattacttggtgtagacactcagtt

SEQ ID NO: 18027 - DNA, 25 bp, Probe sequence
aacagtcacaagaattattggataa

SEQ ID NO: 18028 - DNA, 25 bp, Probe sequence
tggataaagaatacaagaaagcaat

SEQ ID NO: 18029 - DNA, 25 bp, Probe sequence
ttggataaagaatacaagaaagcaa

SEQ ID NO: 18030 - DNA, 25 bp, Probe sequence
attggataaagaatacaagaaagca

SEQ ID NO: 18031 - DNA, 25 bp, Probe sequence
tttgcacagttagatggtgaaataa

SEQ ID NO: 18032 - DNA, 25 bp, Probe sequence
ttgcacagttagatggtgaaataac

SEQ ID NO: 18033 - DNA, 25 bp, Probe sequence
acagtcacaagaattattggataaa

SEQ ID NO: 18034 - DNA, 25 bp, Probe sequence
aaacagtcacaagaattattggata

SEQ ID NO: 18035 - DNA, 25 bp, Probe sequence
taaacagtcacaagaattattggat

SEQ ID NO: 18036 - DNA, 25 bp, Probe sequence
ttacataaccatcctggacaatcag

SEQ ID NO: 18037 - DNA, 25 bp, Probe sequence
gttacataaccatcctggacaatca

SEQ ID NO: 18038 - DNA, 25 bp, Probe sequence
tgttacataaccatcctggacaatc

SEQ ID NO: 18039 - DNA, 25 bp, Probe sequence
atgttacataaccatcctggacaat

SEQ ID NO: 18040 - DNA, 25 bp, Probe sequence
tgagaaataatgaagcgatagttga

SEQ ID NO: 18041 - DNA, 25 bp, Probe sequence
atgagaaataatgaagcgatagttg

SEQ ID NO: 18042 - DNA, 25 bp, Probe sequence
gagaaataatgaagcgatagttgat

SEQ ID NO: 18043 - DNA, 25 bp, Probe sequence
aaatctatccaaacaacgactattg

SEQ ID NO: 18044 - DNA, 25 bp, Probe sequence
aaataaatctatccaaacaacgact

SEQ ID NO: 18045 - DNA, 25 bp, Probe sequence
atgtcaattcaacaattagatggtt

SEQ ID NO: 18046 - DNA, 25 bp, Probe sequence
tcaattcaacaattagatggttaca

SEQ ID NO: 18047 - DNA, 25 bp, Probe sequence
tgtcaattcaacaattagatggtta

SEQ ID NO: 18048 - DNA, 25 bp, Probe sequence
gtcaattcaacaattagatggttac

SEQ ID NO: 18049 - DNA, 25 bp, Probe sequence
agcatatggatgaattatcgaagaa

SEQ ID NO: 18050 - DNA, 25 bp, Probe sequence
aagcatatggatgaattatcgaaga

SEQ ID NO: 18051 - DNA, 25 bp, Probe sequence
tggatgaattatcgaagaaagaaga

SEQ ID NO: 18052 - DNA, 25 bp, Probe sequence
caattcaacaattagatggttacat

SEQ ID NO: 18053 - DNA, 25 bp, Probe sequence
taagcatatggatgaattatcgaag

SEQ ID NO: 18054 - DNA, 25 bp, Probe sequence
tacgattacggttagatatccttgg

SEQ ID NO: 18055 - DNA, 25 bp, Probe sequence
agtatgaagggaaaggctatggtag

SEQ ID NO: 18056 - DNA, 25 bp, Probe sequence
gagtatgaagggaaaggctatggta

SEQ ID NO: 18057 - DNA, 25 bp, Probe sequence
gaggttatgaaatatacagcgaaca

SEQ ID NO: 18058 - DNA, 25 bp, Probe sequence
agaggttatgaaatatacagcgaac

SEQ ID NO: 18059 - DNA, 25 bp, Probe sequence
caagattgcatccgtggttacttaa

SEQ ID NO: 18060 - DNA, 25 bp, Probe sequence
ctacgattacggttagatatccttg

SEQ ID NO: 18061 - DNA, 25 bp, Probe sequence
aagaggttatgaaatatacagcgaa

SEQ ID NO: 18062 - DNA, 25 bp, Probe sequence
aaagaggttatgaaatatacagcga

SEQ ID NO: 18063 - DNA, 25 bp, Probe sequence
atgagcattattgtagcgatatgac

SEQ ID NO: 18064 - DNA, 25 bp, Probe sequence
gagcattattgtagcgatatgacac

SEQ ID NO: 18065 - DNA, 25 bp, Probe sequence
tgagcattattgtagcgatatgaca

SEQ ID NO: 18066 - DNA, 25 bp, Probe sequence
caggtgtaagaattgaagatgacat

SEQ ID NO: 18067 - DNA, 25 bp, Probe sequence
gcaggtgtaagaattgaagatgaca

SEQ ID NO: 18068 - DNA, 25 bp, Probe sequence
tatgagcattattgtagcgatatga

SEQ ID NO: 18069 - DNA, 25 bp, Probe sequence
agcattattgtagcgatatgacacg

SEQ ID NO: 18070 - DNA, 25 bp, Probe sequence
ttgcaggtgtaagaattgaagatga

SEQ ID NO: 18071 - DNA, 25 bp, Probe sequence
gttgcaggtgtaagaattgaagatg

SEQ ID NO: 18072 - DNA, 25 bp, Probe sequence
tgtatcagaatctatcgttcgtcat

SEQ ID NO: 18073 - DNA, 25 bp, Probe sequence
ctgtatcagaatctatcgttcgtca

SEQ ID NO: 18074 - DNA, 25 bp, Probe sequence
tagttgttcgtactgaagagttacc

SEQ ID NO: 18075 - DNA, 25 bp, Probe sequence
tgttagttgttcgtactgaagagtt

SEQ ID NO: 18076 - DNA, 25 bp, Probe sequence
gattatgagtggtacatcaggctta

SEQ ID NO: 18077 - DNA, 25 bp, Probe sequence
tatcagaatctatcgttcgtcatgc

SEQ ID NO: 18078 - DNA, 25 bp, Probe sequence
gtatcagaatctatcgttcgtcatg

SEQ ID NO: 18079 - DNA, 25 bp, Probe sequence
attatgagtggtacatcaggcttaa

SEQ ID NO: 18080 - DNA, 25 bp, Probe sequence
gcagacttgattatgagtggtacat

SEQ ID NO: 18081 - DNA, 25 bp, Probe sequence
aagaacgatagaagcaccgattgaa

SEQ ID NO: 18082 - DNA, 25 bp, Probe sequence
ttcaagaacgatagaagcaccgatt

SEQ ID NO: 18083 - DNA, 25 bp, Probe sequence
cggttaagcgtccatatttaattga

SEQ ID NO: 18084 - DNA, 25 bp, Probe sequence
acagtgacatcaacatcggtatttc

SEQ ID NO: 18085 - DNA, 25 bp, Probe sequence
gacagtgacatcaacatcggtattt

SEQ ID NO: 18086 - DNA, 25 bp, Probe sequence
tgacatcaacatcggtatttccaac

SEQ ID NO: 18087 - DNA, 25 bp, Probe sequence
gtgacatcaacatcggtatttccaa

SEQ ID NO: 18088 - DNA, 25 bp, Probe sequence
caagaacgatagaagcaccgattga

SEQ ID NO: 18089 - DNA, 25 bp, Probe sequence
tcaagaacgatagaagcaccgattg

SEQ ID NO: 18090 - DNA, 25 bp, Probe sequence
tttattgtccctttcatttatccat

SEQ ID NO: 18091 - DNA, 25 bp, Probe sequence
atttattgtccctttcatttatcca

SEQ ID NO: 18092 - DNA, 25 bp, Probe sequence
acaacacatttgattacgtttatct

SEQ ID NO: 18093 - DNA, 25 bp, Probe sequence
ttattgtccctttcatttatccata

SEQ ID NO: 18094 - DNA, 25 bp, Probe sequence
aacaacacatttgattacgtttatc

SEQ ID NO: 18095 - DNA, 25 bp, Probe sequence
ttgtccctttcatttatccatataa

SEQ ID NO: 18096 - DNA, 25 bp, Probe sequence
attgtccctttcatttatccatata

SEQ ID NO: 18097 - DNA, 25 bp, Probe sequence
tattgtccctttcatttatccatat

SEQ ID NO: 18098 - DNA, 25 bp, Probe sequence
caacacatttgattacgtttatctt

SEQ ID NO: 18099 - DNA, 25 bp, Probe sequence
aaggtatcatcaatctatccagcag

SEQ ID NO: 18100 - DNA, 25 bp, Probe sequence
gaaggtatcatcaatctatccagca

SEQ ID NO: 18101 - DNA, 25 bp, Probe sequence
aggtatcatcaatctatccagcagg

SEQ ID NO: 18102 - DNA, 25 bp, Probe sequence
tgaaggtatcatcaatctatccagc

SEQ ID NO: 18103 - DNA, 25 bp, Probe sequence
cgtgaaggtatcatcaatctatcca

SEQ ID NO: 18104 - DNA, 25 bp, Probe sequence
cgcttgatgaagtgatggaacataa

SEQ ID NO: 18105 - DNA, 25 bp, Probe sequence
tatgttacttcttgtaccagccgta

SEQ ID NO: 18106 - DNA, 25 bp, Probe sequence
gtgaaggtatcatcaatctatccag

SEQ ID NO: 18107 - DNA, 25 bp, Probe sequence
aagaccgtgaattaagcgattatgc

SEQ ID NO: 18108 - DNA, 25 bp, Probe sequence
atcgcttgtgatgctaatagtaagt

SEQ ID NO: 18109 - DNA, 25 bp, Probe sequence
gcttgtgatgctaatagtaagtctg

SEQ ID NO: 18110 - DNA, 25 bp, Probe sequence
cgcttgtgatgctaatagtaagtct

SEQ ID NO: 18111 - DNA, 25 bp, Probe sequence
tcgcttgtgatgctaatagtaagtc

SEQ ID NO: 18112 - DNA, 25 bp, Probe sequence
catatcgcttgtgatgctaatagta

SEQ ID NO: 18113 - DNA, 25 bp, Probe sequence
agcaagccttattgaagatgaacat

SEQ ID NO: 18114 - DNA, 25 bp, Probe sequence
tatcgcttgtgatgctaatagtaag

SEQ ID NO: 18115 - DNA, 25 bp, Probe sequence
acatatcgcttgtgatgctaatagt

SEQ ID NO: 18116 - DNA, 25 bp, Probe sequence
gacatatcgcttgtgatgctaatag

SEQ ID NO: 18117 - DNA, 25 bp, Probe sequence
atctgactgggtattatagtagacg

SEQ ID NO: 18118 - DNA, 25 bp, Probe sequence
acgaacatagattggtttatacagt

SEQ ID NO: 18119 - DNA, 25 bp, Probe sequence
tcacgaacatagattggtttataca

SEQ ID NO: 18120 - DNA, 25 bp, Probe sequence
cacgaacatagattggtttatacag

SEQ ID NO: 18121 - DNA, 25 bp, Probe sequence
cgaatctgactgggtattatagtag

SEQ ID NO: 18122 - DNA, 25 bp, Probe sequence
agattggtttatacagtagatgaca

SEQ ID NO: 18123 - DNA, 25 bp, Probe sequence
tggtttatacagtagatgacaatca

SEQ ID NO: 18124 - DNA, 25 bp, Probe sequence
tctgactgggtattatagtagacgt

SEQ ID NO: 18125 - DNA, 25 bp, Probe sequence
atcacgaacatagattggtttatac

SEQ ID NO: 18126 - DNA, 25 bp, Probe sequence
ttaaccacggtcatatcttagtaga

SEQ ID NO: 18127 - DNA, 25 bp, Probe sequence
cgtgttgatattccatcttattctg

SEQ ID NO: 18128 - DNA, 25 bp, Probe sequence
gacgctgttgtttattcattaggtt

SEQ ID NO: 18129 - DNA, 25 bp, Probe sequence
acgctgttgtttattcattaggttt

SEQ ID NO: 18130 - DNA, 25 bp, Probe sequence
aatctcgtcgtttaggtatctcttt

SEQ ID NO: 18131 - DNA, 25 bp, Probe sequence
aaatctcgtcgtttaggtatctctt

SEQ ID NO: 18132 - DNA, 25 bp, Probe sequence
cgtttaggtatctctttaagcggta

SEQ ID NO: 18133 - DNA, 25 bp, Probe sequence
agacgctgttgtttattcattaggt

SEQ ID NO: 18134 - DNA, 25 bp, Probe sequence
tcgtcgtttaggtatctctttaagc

SEQ ID NO: 18135 - DNA, 25 bp, Probe sequence
cgtagtaatcatgtcagaatcagat

SEQ ID NO: 18136 - DNA, 25 bp, Probe sequence
acgtagtaatcatgtcagaatcaga

SEQ ID NO: 18137 - DNA, 25 bp, Probe sequence
aacgtagtaatcatgtcagaatcag

SEQ ID NO: 18138 - DNA, 25 bp, Probe sequence
tgtcagaatcagattataactccat

SEQ ID NO: 18139 - DNA, 25 bp, Probe sequence
atgtcagaatcagattataactcca

SEQ ID NO: 18140 - DNA, 25 bp, Probe sequence
gtcagaatcagattataactccatg

SEQ ID NO: 18141 - DNA, 25 bp, Probe sequence
catgtcagaatcagattataactcc

SEQ ID NO: 18142 - DNA, 25 bp, Probe sequence
aattattcatacgctcgacagaatt

SEQ ID NO: 18143 - DNA, 25 bp, Probe sequence
taatgctgaacacttagctcaatca

SEQ ID NO: 18144 - DNA, 25 bp, Probe sequence
tatgaagaagtgccagaagttgaat

SEQ ID NO: 18145 - DNA, 25 bp, Probe sequence
attatgaagaagtgccagaagttga

SEQ ID NO: 18146 - DNA, 25 bp, Probe sequence
cattatgaagaagtgccagaagttg

SEQ ID NO: 18147 - DNA, 25 bp, Probe sequence
ttatgaagaagtgccagaagttgaa

SEQ ID NO: 18148 - DNA, 25 bp, Probe sequence
ttatacaacgcacctgatgaagaag

SEQ ID NO: 18149 - DNA, 25 bp, Probe sequence
actatctacgaagacaattccaaca

SEQ ID NO: 18150 - DNA, 25 bp, Probe sequence
atgaagaagtgccagaagttgaatt

SEQ ID NO: 18151 - DNA, 25 bp, Probe sequence
cactatctacgaagacaattccaac

SEQ ID NO: 18152 - DNA, 25 bp, Probe sequence
tcactatctacgaagacaattccaa

SEQ ID NO: 18153 - DNA, 25 bp, Probe sequence
atcatctcattagcagctactcttg

SEQ ID NO: 18154 - DNA, 25 bp, Probe sequence
tatcatctcattagcagctactctt

SEQ ID NO: 18155 - DNA, 25 bp, Probe sequence
atatcatctcattagcagctactct

SEQ ID NO: 18156 - DNA, 25 bp, Probe sequence
atctcattagcagctactcttgaac

SEQ ID NO: 18157 - DNA, 25 bp, Probe sequence
catctcattagcagctactcttgaa

SEQ ID NO: 18158 - DNA, 25 bp, Probe sequence
aaggcgacatactttcagagaatat

SEQ ID NO: 18159 - DNA, 25 bp, Probe sequence
tcatctcattagcagctactcttga

SEQ ID NO: 18160 - DNA, 25 bp, Probe sequence
catgttatatcatctcattagcagc

SEQ ID NO: 18161 - DNA, 25 bp, Probe sequence
caaggcgacatactttcagagaata

SEQ ID NO: 18162 - DNA, 25 bp, Probe sequence
ttagcgatatgatagagattgtctt

SEQ ID NO: 18163 - DNA, 25 bp, Probe sequence
attagcgatatgatagagattgtct

SEQ ID NO: 18164 - DNA, 25 bp, Probe sequence
aaggcaatttctattagcgatatga

SEQ ID NO: 18165 - DNA, 25 bp, Probe sequence
aggcaatttctattagcgatatgat

SEQ ID NO: 18166 - DNA, 25 bp, Probe sequence
aaaggcaatttctattagcgatatg

SEQ ID NO: 18167 - DNA, 25 bp, Probe sequence
ttgagatcagtaagtgataccaatt

SEQ ID NO: 18168 - DNA, 25 bp, Probe sequence
tagcgatatgatagagattgtcttt

SEQ ID NO: 18169 - DNA, 25 bp, Probe sequence
ggcaatttctattagcgatatgata

SEQ ID NO: 18170 - DNA, 25 bp, Probe sequence
tattagcgatatgatagagattgtc

SEQ ID NO: 18171 - DNA, 25 bp, Probe sequence
aagcaattatgttacctccaggatt

SEQ ID NO: 18172 - DNA, 25 bp, Probe sequence
agcaattatgttacctccaggatta

SEQ ID NO: 18173 - DNA, 25 bp, Probe sequence
caattatgttacctccaggattagc

SEQ ID NO: 18174 - DNA, 25 bp, Probe sequence
gcaattatgttacctccaggattag

SEQ ID NO: 18175 - DNA, 25 bp, Probe sequence
attatgttacctccaggattagctt

SEQ ID NO: 18176 - DNA, 25 bp, Probe sequence
aattatgttacctccaggattagct

SEQ ID NO: 18177 - DNA, 25 bp, Probe sequence
attggtgctgttgatgttgacatta

SEQ ID NO: 18178 - DNA, 25 bp, Probe sequence
ttggtgctgttgatgttgacattaa

SEQ ID NO: 18179 - DNA, 25 bp, Probe sequence
gcatttcaaggtctaaagccaatat

SEQ ID NO: 18180 - DNA, 25 bp, Probe sequence
ttaatggcgagaaagttgaagatcc

SEQ ID NO: 18181 - DNA, 25 bp, Probe sequence
tggcgactataaatgtccttattgt

SEQ ID NO: 18182 - DNA, 25 bp, Probe sequence
attaatggcgagaaagttgaagatc

SEQ ID NO: 18183 - DNA, 25 bp, Probe sequence
atggcgactataaatgtccttattg

SEQ ID NO: 18184 - DNA, 25 bp, Probe sequence
ttattaatggcgagaaagttgaaga

SEQ ID NO: 18185 - DNA, 25 bp, Probe sequence
gcgagtcatgcagtattgatgtatg

SEQ ID NO: 18186 - DNA, 25 bp, Probe sequence
ggcgactataaatgtccttattgta

SEQ ID NO: 18187 - DNA, 25 bp, Probe sequence
tattaatggcgagaaagttgaagat

SEQ ID NO: 18188 - DNA, 25 bp, Probe sequence
aacgacaccaactgcatttattaat

SEQ ID NO: 18189 - DNA, 25 bp, Probe sequence
gcgacttagcctctattgatagtag

SEQ ID NO: 18190 - DNA, 25 bp, Probe sequence
cgacttagcctctattgatagtagt

SEQ ID NO: 18191 - DNA, 25 bp, Probe sequence
ttaattgatggtactgtaacgcatg

SEQ ID NO: 18192 - DNA, 25 bp, Probe sequence
gatgatcttggtcctgaagtcaata

SEQ ID NO: 18193 - DNA, 25 bp, Probe sequence
atgatcttggtcctgaagtcaatat

SEQ ID NO: 18194 - DNA, 25 bp, Probe sequence
tcggtccaagaattgttagaattaa

SEQ ID NO: 18195 - DNA, 25 bp, Probe sequence
ttcggtccaagaattgttagaatta

SEQ ID NO: 18196 - DNA, 25 bp, Probe sequence
agatgatcttggtcctgaagtcaat

SEQ ID NO: 18197 - DNA, 25 bp, Probe sequence
tgatcttggtcctgaagtcaatatt

SEQ ID NO: 18198 - DNA, 25 bp, Probe sequence
ttgtggcgacggtattattattact

SEQ ID NO: 18199 - DNA, 25 bp, Probe sequence
tgtggcgacggtattattattacta

SEQ ID NO: 18200 - DNA, 25 bp, Probe sequence
gtggcgacggtattattattactag

SEQ ID NO: 18201 - DNA, 25 bp, Probe sequence
cgagacgatattatcaacaacatga

SEQ ID NO: 18202 - DNA, 25 bp, Probe sequence
gatttgtggcgacggtattattatt

SEQ ID NO: 18203 - DNA, 25 bp, Probe sequence
tttgtggcgacggtattattattac

SEQ ID NO: 18204 - DNA, 25 bp, Probe sequence
cctttgagtaatgatgatgaagtgc

SEQ ID NO: 18205 - DNA, 25 bp, Probe sequence
tgtgaaagaaatagatgaagcagtt

SEQ ID NO: 18206 - DNA, 25 bp, Probe sequence
acctttgagtaatgatgatgaagtg

SEQ ID NO: 18207 - DNA, 25 bp, Probe sequence
gctaactctgtaacatctggtatca

SEQ ID NO: 18208 - DNA, 25 bp, Probe sequence
tgctaactctgtaacatctggtatc

SEQ ID NO: 18209 - DNA, 25 bp, Probe sequence
ttgctaactctgtaacatctggtat

SEQ ID NO: 18210 - DNA, 25 bp, Probe sequence
ctaactctgtaacatctggtatcat

SEQ ID NO: 18211 - DNA, 25 bp, Probe sequence
aaaggcaaatcatctaaaccatctg

SEQ ID NO: 18212 - DNA, 25 bp, Probe sequence
cagacaacaaataataaaggtggca

SEQ ID NO: 18213 - DNA, 25 bp, Probe sequence
tgaatcagtcactgttaccgttatc

SEQ ID NO: 18214 - DNA, 25 bp, Probe sequence
agacaacaaataataaaggtggcaa

SEQ ID NO: 18215 - DNA, 25 bp, Probe sequence
taactctgtaacatctggtatcatt

SEQ ID NO: 18216 - DNA, 25 bp, Probe sequence
gacgaatcaagacaacaatcatcaa

SEQ ID NO: 18217 - DNA, 25 bp, Probe sequence
acgaatcaagacaacaatcatcaat

SEQ ID NO: 18218 - DNA, 25 bp, Probe sequence
aacttcgcctagcaattagattaga

SEQ ID NO: 18219 - DNA, 25 bp, Probe sequence
tgaacttcgcctagcaattagatta

SEQ ID NO: 18220 - DNA, 25 bp, Probe sequence
gcctagcaattagattagaacacct

SEQ ID NO: 18221 - DNA, 25 bp, Probe sequence
gaacttcgcctagcaattagattag

SEQ ID NO: 18222 - DNA, 25 bp, Probe sequence
atgaacttcgcctagcaattagatt

SEQ ID NO: 18223 - DNA, 25 bp, Probe sequence
aatgaacttcgcctagcaattagat

SEQ ID NO: 18224 - DNA, 25 bp, Probe sequence
tcgcctagcaattagattagaacac

SEQ ID NO: 18225 - DNA, 25 bp, Probe sequence
ctgggtggtatgctttattatttca

SEQ ID NO: 18226 - DNA, 25 bp, Probe sequence
actgggtggtatgctttattatttc

SEQ ID NO: 18227 - DNA, 25 bp, Probe sequence
tgggtggtatgctttattatttcaa

SEQ ID NO: 18228 - DNA, 25 bp, Probe sequence
aatgtactgggtggtatgctttatt

SEQ ID NO: 18229 - DNA, 25 bp, Probe sequence
ctaatgtactgggtggtatgcttta

SEQ ID NO: 18230 - DNA, 25 bp, Probe sequence
tgtactgggtggtatgctttattat

SEQ ID NO: 18231 - DNA, 25 bp, Probe sequence
atgtactgggtggtatgctttatta

SEQ ID NO: 18232 - DNA, 25 bp, Probe sequence
taatgtactgggtggtatgctttat

SEQ ID NO: 18233 - DNA, 25 bp, Probe sequence
cattaaatgtaggtgcgtatgcttc

SEQ ID NO: 18234 - DNA, 25 bp, Probe sequence
attacattagaacagcaacaagcgt

SEQ ID NO: 18235 - DNA, 25 bp, Probe sequence
ttacattagaacagcaacaagcgtt

SEQ ID NO: 18236 - DNA, 25 bp, Probe sequence
aatattcgctacagatgatccagaa

SEQ ID NO: 18237 - DNA, 25 bp, Probe sequence
atacaacttagcctttctacaccag

SEQ ID NO: 18238 - DNA, 25 bp, Probe sequence
cagaaggtagaatttatgttgctcg

SEQ ID NO: 18239 - DNA, 25 bp, Probe sequence
ggttatgtcactttccactatcctg

SEQ ID NO: 18240 - DNA, 25 bp, Probe sequence
ccagaaggtagaatttatgttgctc

SEQ ID NO: 18241 - DNA, 25 bp, Probe sequence
aacaagcgtttgatgatattcgtta

SEQ ID NO: 18242 - DNA, 25 bp, Probe sequence
acaagcgtttgatgatattcgttat

SEQ ID NO: 18243 - DNA, 25 bp, Probe sequence
ttattgtctaagcgtgttgatggta

SEQ ID NO: 18244 - DNA, 25 bp, Probe sequence
tattattgtctaagcgtgttgatgg

SEQ ID NO: 18245 - DNA, 25 bp, Probe sequence
attattgtctaagcgtgttgatggt

SEQ ID NO: 18246 - DNA, 25 bp, Probe sequence
ttctaagccttacacattctcaagt

SEQ ID NO: 18247 - DNA, 25 bp, Probe sequence
tattgtctaagcgtgttgatggtac

SEQ ID NO: 18248 - DNA, 25 bp, Probe sequence
ttattattgtctaagcgtgttgatg

SEQ ID NO: 18249 - DNA, 25 bp, Probe sequence
tctaagccttacacattctcaagtg

SEQ ID NO: 18250 - DNA, 25 bp, Probe sequence
aagaaatggtttggtcaagatgttt

SEQ ID NO: 18251 - DNA, 25 bp, Probe sequence
taggtaagaaatggtttggtcaaga

SEQ ID NO: 18252 - DNA, 25 bp, Probe sequence
catatagcgagttggtacgaatcta

SEQ ID NO: 18253 - DNA, 25 bp, Probe sequence
atatagcgagttggtacgaatctac

SEQ ID NO: 18254 - DNA, 25 bp, Probe sequence
tatagcgagttggtacgaatctact

SEQ ID NO: 18255 - DNA, 25 bp, Probe sequence
acatggcattatcagtgaagatgag

SEQ ID NO: 18256 - DNA, 25 bp, Probe sequence
acattatcgtgatccactaactcat

SEQ ID NO: 18257 - DNA, 25 bp, Probe sequence
ggcattatcagtgaagatgaggcta

SEQ ID NO: 18258 - DNA, 25 bp, Probe sequence
cattatcgtgatccactaactcatc

SEQ ID NO: 18259 - DNA, 25 bp, Probe sequence
attatcgtgatccactaactcatct

SEQ ID NO: 18260 - DNA, 25 bp, Probe sequence
tacattatcgtgatccactaactca

SEQ ID NO: 18261 - DNA, 25 bp, Probe sequence
tatggcgattgttgttattactacg

SEQ ID NO: 18262 - DNA, 25 bp, Probe sequence
cgattgttgttattactacggctta

SEQ ID NO: 18263 - DNA, 25 bp, Probe sequence
ttcatatacacaagttcaatggctg

SEQ ID NO: 18264 - DNA, 25 bp, Probe sequence
ggtatggcgattgttgttattacta

SEQ ID NO: 18265 - DNA, 25 bp, Probe sequence
ttatgatgccattgatgatgacaac

SEQ ID NO: 18266 - DNA, 25 bp, Probe sequence
ggtattatgatgccattgatgatga

SEQ ID NO: 18267 - DNA, 25 bp, Probe sequence
aggtattatgatgccattgatgatg

SEQ ID NO: 18268 - DNA, 25 bp, Probe sequence
caggtattatgatgccattgatgat

SEQ ID NO: 18269 - DNA, 25 bp, Probe sequence
atggcgattgttgttattactacgg

SEQ ID NO: 18270 - DNA, 25 bp, Probe sequence
ggtgaagtcattaacattgtagagc

SEQ ID NO: 18271 - DNA, 25 bp, Probe sequence
gtgaagtcattaacattgtagagcg

SEQ ID NO: 18272 - DNA, 25 bp, Probe sequence
tgaagtcattaacattgtagagcgt

SEQ ID NO: 18273 - DNA, 25 bp, Probe sequence
gaagtcattaacattgtagagcgtt

SEQ ID NO: 18274 - DNA, 25 bp, Probe sequence
tggtgaagtcattaacattgtagag

SEQ ID NO: 18275 - DNA, 25 bp, Probe sequence
ctggtgaagtcattaacattgtaga

SEQ ID NO: 18276 - DNA, 25 bp, Probe sequence
actggtgaagtcattaacattgtag

SEQ ID NO: 18277 - DNA, 25 bp, Probe sequence
gcatatactggtgaagtcattaaca

SEQ ID NO: 18278 - DNA, 25 bp, Probe sequence
atactggtgaagtcattaacattgt

SEQ ID NO: 18279 - DNA, 25 bp, Probe sequence
cttgaagatgtgtcagatgaagata

SEQ ID NO: 18280 - DNA, 25 bp, Probe sequence
ctgaacaaggtattaatgaagcgac

SEQ ID NO: 18281 - DNA, 25 bp, Probe sequence
tctgaacaaggtattaatgaagcga

SEQ ID NO: 18282 - DNA, 25 bp, Probe sequence
acaaggtattaatgaagcgactaga

SEQ ID NO: 18283 - DNA, 25 bp, Probe sequence
aaggtattaatgaagcgactagagc

SEQ ID NO: 18284 - DNA, 25 bp, Probe sequence
tgaacaaggtattaatgaagcgact

SEQ ID NO: 18285 - DNA, 25 bp, Probe sequence
atctgaacaaggtattaatgaagcg

SEQ ID NO: 18286 - DNA, 25 bp, Probe sequence
caaggtattaatgaagcgactagag

SEQ ID NO: 18287 - DNA, 25 bp, Probe sequence
aacaaggtattaatgaagcgactag

SEQ ID NO: 18288 - DNA, 25 bp, Probe sequence
catcattattatcggacacaccaga

SEQ ID NO: 18289 - DNA, 25 bp, Probe sequence
atcattattatcggacacaccagat

SEQ ID NO: 18290 - DNA, 25 bp, Probe sequence
acatcattattatcggacacaccag

SEQ ID NO: 18291 - DNA, 25 bp, Probe sequence
tcacatcattattatcggacacacc

SEQ ID NO: 18292 - DNA, 25 bp, Probe sequence
cacatcattattatcggacacacca

SEQ ID NO: 18293 - DNA, 25 bp, Probe sequence
atcacatcattattatcggacacac

SEQ ID NO: 18294 - DNA, 25 bp, Probe sequence
catcacatcattattatcggacaca

SEQ ID NO: 18295 - DNA, 25 bp, Probe sequence
acatcacatcattattatcggacac

SEQ ID NO: 18296 - DNA, 25 bp, Probe sequence
cacatcacatcattattatcggaca

SEQ ID NO: 18297 - DNA, 25 bp, Probe sequence
cagtggtcttgtaatgttgattgta

SEQ ID NO: 18298 - DNA, 25 bp, Probe sequence
gcttaatcagtggtcttgtaatgtt

SEQ ID NO: 18299 - DNA, 25 bp, Probe sequence
agtggtcttgtaatgttgattgtat

SEQ ID NO: 18300 - DNA, 25 bp, Probe sequence
tcagtggtcttgtaatgttgattgt

SEQ ID NO: 18301 - DNA, 25 bp, Probe sequence
cttaatcagtggtcttgtaatgttg

SEQ ID NO: 18302 - DNA, 25 bp, Probe sequence
ttaatcagtggtcttgtaatgttga

SEQ ID NO: 18303 - DNA, 25 bp, Probe sequence
gtggtcttgtaatgttgattgtatt

SEQ ID NO: 18304 - DNA, 25 bp, Probe sequence
gtacctaacgcaataacaattatcg

SEQ ID NO: 18305 - DNA, 25 bp, Probe sequence
cagcttaatcagtggtcttgtaatg

SEQ ID NO: 18306 - DNA, 25 bp, Probe sequence
aacaacacatcacatcacttatcaa

SEQ ID NO: 18307 - DNA, 25 bp, Probe sequence
gatggttataagttcgcacaagatt

SEQ ID NO: 18308 - DNA, 25 bp, Probe sequence
tgatggttataagttcgcacaagat

SEQ ID NO: 18309 - DNA, 25 bp, Probe sequence
actggttcaactggtgatggttata

SEQ ID NO: 18310 - DNA, 25 bp, Probe sequence
ggttcaactggtgatggttataagt

SEQ ID NO: 18311 - DNA, 25 bp, Probe sequence
tggttcaactggtgatggttataag

SEQ ID NO: 18312 - DNA, 25 bp, Probe sequence
ctggttcaactggtgatggttataa

SEQ ID NO: 18313 - DNA, 25 bp, Probe sequence
aagtagcagtgtgttactcattgaa

SEQ ID NO: 18314 - DNA, 25 bp, Probe sequence
aactggttcaactggtgatggttat

SEQ ID NO: 18315 - DNA, 25 bp, Probe sequence
ttacaagtctaaggtgaagcaatga

SEQ ID NO: 18316 - DNA, 25 bp, Probe sequence
gttacaagtctaaggtgaagcaatg

SEQ ID NO: 18317 - DNA, 25 bp, Probe sequence
cgttacaagtctaaggtgaagcaat

SEQ ID NO: 18318 - DNA, 25 bp, Probe sequence
aagactatgacatgatgatggctac

SEQ ID NO: 18319 - DNA, 25 bp, Probe sequence
gaagactatgacatgatgatggcta

SEQ ID NO: 18320 - DNA, 25 bp, Probe sequence
gactatgacatgatgatggctactg

SEQ ID NO: 18321 - DNA, 25 bp, Probe sequence
agactatgacatgatgatggctact

SEQ ID NO: 18322 - DNA, 25 bp, Probe sequence
tgtggagtgttaataaatgggaagt

SEQ ID NO: 18323 - DNA, 25 bp, Probe sequence
caatgtggagtgttaataaatggga

SEQ ID NO: 18324 - DNA, 25 bp, Probe sequence
cgtttaattcagaacattcagcgta

SEQ ID NO: 18325 - DNA, 25 bp, Probe sequence
aagcgtttaattcagaacattcagc

SEQ ID NO: 18326 - DNA, 25 bp, Probe sequence
aaagcgtttaattcagaacattcag

SEQ ID NO: 18327 - DNA, 25 bp, Probe sequence
gtttaattcagaacattcagcgtat

SEQ ID NO: 18328 - DNA, 25 bp, Probe sequence
ttaattcagaacattcagcgtattt

SEQ ID NO: 18329 - DNA, 25 bp, Probe sequence
tttaattcagaacattcagcgtatt

SEQ ID NO: 18330 - DNA, 25 bp, Probe sequence
agcgtttaattcagaacattcagcg

SEQ ID NO: 18331 - DNA, 25 bp, Probe sequence
gcgtttaattcagaacattcagcgt

SEQ ID NO: 18332 - DNA, 25 bp, Probe sequence
tcagaacattcagcgtattttaagt

SEQ ID NO: 18333 - DNA, 25 bp, Probe sequence
gtcgtaatgatagccacctacttaa

SEQ ID NO: 18334 - DNA, 25 bp, Probe sequence
agtcgtaatgatagccacctactta

SEQ ID NO: 18335 - DNA, 25 bp, Probe sequence
aattagtgatgaagagattaacgca

SEQ ID NO: 18336 - DNA, 25 bp, Probe sequence
gaatcatcatcaagttgaacctgaa

SEQ ID NO: 18337 - DNA, 25 bp, Probe sequence
tgaatcatcatcaagttgaacctga

SEQ ID NO: 18338 - DNA, 25 bp, Probe sequence
ttagtgatgaagagattaacgcaca

SEQ ID NO: 18339 - DNA, 25 bp, Probe sequence
aatcatcatcaagttgaacctgaat

SEQ ID NO: 18340 - DNA, 25 bp, Probe sequence
tagtgatgaagagattaacgcacag

SEQ ID NO: 18341 - DNA, 25 bp, Probe sequence
attagtgatgaagagattaacgcac

SEQ ID NO: 18342 - DNA, 25 bp, Probe sequence
aagtcttgtcgtcattagcattatc

SEQ ID NO: 18343 - DNA, 25 bp, Probe sequence
agtcttgtcgtcattagcattatcg

SEQ ID NO: 18344 - DNA, 25 bp, Probe sequence
caagtcttgtcgtcattagcattat

SEQ ID NO: 18345 - DNA, 25 bp, Probe sequence
gtcttgtcgtcattagcattatcgc

SEQ ID NO: 18346 - DNA, 25 bp, Probe sequence
cttgtcgtcattagcattatcgctt

SEQ ID NO: 18347 - DNA, 25 bp, Probe sequence
tcttgtcgtcattagcattatcgct

SEQ ID NO: 18348 - DNA, 25 bp, Probe sequence
gtcgtcattagcattatcgctttaa

SEQ ID NO: 18349 - DNA, 25 bp, Probe sequence
tgtcgtcattagcattatcgcttta

SEQ ID NO: 18350 - DNA, 25 bp, Probe sequence
tcgtcattagcattatcgctttaat

SEQ ID NO: 18351 - DNA, 25 bp, Probe sequence
tgacacgacaatccaagctattaat

SEQ ID NO: 18352 - DNA, 25 bp, Probe sequence
ctgacacgacaatccaagctattaa

SEQ ID NO: 18353 - DNA, 25 bp, Probe sequence
ataaatctatcgtgacaaagcctga

SEQ ID NO: 18354 - DNA, 25 bp, Probe sequence
taaatctatcgtgacaaagcctgac

SEQ ID NO: 18355 - DNA, 25 bp, Probe sequence
gataaatctatcgtgacaaagcctg

SEQ ID NO: 18356 - DNA, 25 bp, Probe sequence
tgataaatctatcgtgacaaagcct

SEQ ID NO: 18357 - DNA, 25 bp, Probe sequence
gtgataaatctatcgtgacaaagcc

SEQ ID NO: 18358 - DNA, 25 bp, Probe sequence
ggtgataaatctatcgtgacaaagc

SEQ ID NO: 18359 - DNA, 25 bp, Probe sequence
tgcctaaaggtgataaatctatcgt

SEQ ID NO: 18360 - DNA, 25 bp, Probe sequence
ttactcaaattagtgtcattgctgc

SEQ ID NO: 18361 - DNA, 25 bp, Probe sequence
caaattagtgtcattgctgcgattt

SEQ ID NO: 18362 - DNA, 25 bp, Probe sequence
tcaaattagtgtcattgctgcgatt

SEQ ID NO: 18363 - DNA, 25 bp, Probe sequence
gattccaggcgtaatattcacttta

SEQ ID NO: 18364 - DNA, 25 bp, Probe sequence
tactcaaattagtgtcattgctgcg

SEQ ID NO: 18365 - DNA, 25 bp, Probe sequence
ccaggcgtaatattcactttaattg

SEQ ID NO: 18366 - DNA, 25 bp, Probe sequence
tccaggcgtaatattcactttaatt

SEQ ID NO: 18367 - DNA, 25 bp, Probe sequence
ttccaggcgtaatattcactttaat

SEQ ID NO: 18368 - DNA, 25 bp, Probe sequence
attccaggcgtaatattcactttaa

SEQ ID NO: 18369 - DNA, 25 bp, Probe sequence
ttatgtaccttatggcgatgattgg

SEQ ID NO: 18370 - DNA, 25 bp, Probe sequence
aatgttggtactgtaattcaagcat

SEQ ID NO: 18371 - DNA, 25 bp, Probe sequence
gaccatcgcatcattaatcatgtaa

SEQ ID NO: 18372 - DNA, 25 bp, Probe sequence
tgttggtactgtaattcaagcatat

SEQ ID NO: 18373 - DNA, 25 bp, Probe sequence
atgttggtactgtaattcaagcata

SEQ ID NO: 18374 - DNA, 25 bp, Probe sequence
tgaccatcgcatcattaatcatgta

SEQ ID NO: 18375 - DNA, 25 bp, Probe sequence
aaaggcgaatttagaaatgttggta

SEQ ID NO: 18376 - DNA, 25 bp, Probe sequence
gttggtactgtaattcaagcatatt

SEQ ID NO: 18377 - DNA, 25 bp, Probe sequence
tttatgagaagattagcagaacgcc

SEQ ID NO: 18378 - DNA, 25 bp, Probe sequence
gttaatacgagatatggaggcagaa

SEQ ID NO: 18379 - DNA, 25 bp, Probe sequence
agttaatacgagatatggaggcaga

SEQ ID NO: 18380 - DNA, 25 bp, Probe sequence
cagttaatacgagatatggaggcag

SEQ ID NO: 18381 - DNA, 25 bp, Probe sequence
aatacgagatatggaggcagaataa

SEQ ID NO: 18382 - DNA, 25 bp, Probe sequence
ttaatacgagatatggaggcagaat

SEQ ID NO: 18383 - DNA, 25 bp, Probe sequence
atacgagatatggaggcagaataat

SEQ ID NO: 18384 - DNA, 25 bp, Probe sequence
acgagatatggaggcagaataatat

SEQ ID NO: 18385 - DNA, 25 bp, Probe sequence
tacgagatatggaggcagaataata

SEQ ID NO: 18386 - DNA, 25 bp, Probe sequence
taatacgagatatggaggcagaata

SEQ ID NO: 18387 - DNA, 25 bp, Probe sequence
tttactttcttgtggagagttatgc

SEQ ID NO: 18388 - DNA, 25 bp, Probe sequence
ttactttcttgtggagagttatgcg

SEQ ID NO: 18389 - DNA, 25 bp, Probe sequence
tgagtccgtaattaataacttgtct

SEQ ID NO: 18390 - DNA, 25 bp, Probe sequence
aaaccaacttagttacgacacgaaa

SEQ ID NO: 18391 - DNA, 25 bp, Probe sequence
ttgagtccgtaattaataacttgtc

SEQ ID NO: 18392 - DNA, 25 bp, Probe sequence
actagatttactttcttgtggagag

SEQ ID NO: 18393 - DNA, 25 bp, Probe sequence
ctagatttactttcttgtggagagt

SEQ ID NO: 18394 - DNA, 25 bp, Probe sequence
ttgtcataaccttaagactggtgaa

SEQ ID NO: 18395 - DNA, 25 bp, Probe sequence
taaccttaagactggtgaatgctaa

SEQ ID NO: 18396 - DNA, 25 bp, Probe sequence
ttaaggtatccaactgtgactaagc

SEQ ID NO: 18397 - DNA, 25 bp, Probe sequence
actgtgactaagccaatgttaagaa

SEQ ID NO: 18398 - DNA, 25 bp, Probe sequence
ctgtgactaagccaatgttaagaat

SEQ ID NO: 18399 - DNA, 25 bp, Probe sequence
aactgtgactaagccaatgttaaga

SEQ ID NO: 18400 - DNA, 25 bp, Probe sequence
caactgtgactaagccaatgttaag

SEQ ID NO: 18401 - DNA, 25 bp, Probe sequence
tgcgagtattattgacggtattaag

SEQ ID NO: 18402 - DNA, 25 bp, Probe sequence
tgtggatattggtcaattagtctca

SEQ ID NO: 18403 - DNA, 25 bp, Probe sequence
gtatccaactgtgactaagccaatg

SEQ ID NO: 18404 - DNA, 25 bp, Probe sequence
cgttgtggatattggtcaattagtc

SEQ ID NO: 18405 - DNA, 25 bp, Probe sequence
ttggtatgtatatcgtcgtattcgg

SEQ ID NO: 18406 - DNA, 25 bp, Probe sequence
atgtatatcgtcgtattcggcttaa

SEQ ID NO: 18407 - DNA, 25 bp, Probe sequence
gtatgtatatcgtcgtattcggctt

SEQ ID NO: 18408 - DNA, 25 bp, Probe sequence
tatgtatatcgtcgtattcggctta

SEQ ID NO: 18409 - DNA, 25 bp, Probe sequence
ttattgctgttattactggtgttgt

SEQ ID NO: 18410 - DNA, 25 bp, Probe sequence
attggtatgtatatcgtcgtattcg

SEQ ID NO: 18411 - DNA, 25 bp, Probe sequence
tattgctgttattactggtgttgta

SEQ ID NO: 18412 - DNA, 25 bp, Probe sequence
ggtatgtatatcgtcgtattcggct

SEQ ID NO: 18413 - DNA, 25 bp, Probe sequence
tggtatgtatatcgtcgtattcggc

SEQ ID NO: 18414 - DNA, 25 bp, Probe sequence
tgtattgttatgagtggtagaggac

SEQ ID NO: 18415 - DNA, 25 bp, Probe sequence
ttaggattaacgaatgacgaacaag

SEQ ID NO: 18416 - DNA, 25 bp, Probe sequence
ccgaaccaattagactacgatatga

SEQ ID NO: 18417 - DNA, 25 bp, Probe sequence
accgaaccaattagactacgatatg

SEQ ID NO: 18418 - DNA, 25 bp, Probe sequence
aaccgaaccaattagactacgatat

SEQ ID NO: 18419 - DNA, 25 bp, Probe sequence
caaccgaaccaattagactacgata

SEQ ID NO: 18420 - DNA, 25 bp, Probe sequence
ttgtattgttatgagtggtagagga

SEQ ID NO: 18421 - DNA, 25 bp, Probe sequence
taggattaacgaatgacgaacaagc

SEQ ID NO: 18422 - DNA, 25 bp, Probe sequence
cgaaccaattagactacgatatgat

SEQ ID NO: 18423 - DNA, 25 bp, Probe sequence
atcttagcggatgattggaatgtat

SEQ ID NO: 18424 - DNA, 25 bp, Probe sequence
tcttagcggatgattggaatgtata

SEQ ID NO: 18425 - DNA, 25 bp, Probe sequence
cttagcggatgattggaatgtatat

SEQ ID NO: 18426 - DNA, 25 bp, Probe sequence
ttagcggatgattggaatgtatatt

SEQ ID NO: 18427 - DNA, 25 bp, Probe sequence
tgattggaatgtatattctgctggt

SEQ ID NO: 18428 - DNA, 25 bp, Probe sequence
cggatgattggaatgtatattctgc

SEQ ID NO: 18429 - DNA, 25 bp, Probe sequence
gcggatgattggaatgtatattctg

SEQ ID NO: 18430 - DNA, 25 bp, Probe sequence
agcggatgattggaatgtatattct

SEQ ID NO: 18431 - DNA, 25 bp, Probe sequence
aatcttagcggatgattggaatgta

SEQ ID NO: 18432 - DNA, 25 bp, Probe sequence
ttatattggaaccgttgattcaagg

SEQ ID NO: 18433 - DNA, 25 bp, Probe sequence
aatgttggtgatgtaagaggacgag

SEQ ID NO: 18434 - DNA, 25 bp, Probe sequence
atgtaagaggacgaggcttaatgtt

SEQ ID NO: 18435 - DNA, 25 bp, Probe sequence
tacctttacgatacgaatggcaata

SEQ ID NO: 18436 - DNA, 25 bp, Probe sequence
tatattggaaccgttgattcaaggt

SEQ ID NO: 18437 - DNA, 25 bp, Probe sequence
tagttacctttacgatacgaatggc

SEQ ID NO: 18438 - DNA, 25 bp, Probe sequence
gaaatgatgaaatcgcagggtttat

SEQ ID NO: 18439 - DNA, 25 bp, Probe sequence
acctttacgatacgaatggcaataa

SEQ ID NO: 18440 - DNA, 25 bp, Probe sequence
ttacctttacgatacgaatggcaat

SEQ ID NO: 18441 - DNA, 25 bp, Probe sequence
ccaacattaactgaacaaccaacat

SEQ ID NO: 18442 - DNA, 25 bp, Probe sequence
acattaactgaacaaccaacatact

SEQ ID NO: 18443 - DNA, 25 bp, Probe sequence
caccaacattaactgaacaaccaac

SEQ ID NO: 18444 - DNA, 25 bp, Probe sequence
accaacattaactgaacaaccaaca

SEQ ID NO: 18445 - DNA, 25 bp, Probe sequence
aacattaactgaacaaccaacatac

SEQ ID NO: 18446 - DNA, 25 bp, Probe sequence
caacattaactgaacaaccaacata

SEQ ID NO: 18447 - DNA, 25 bp, Probe sequence
tcaccaacattaactgaacaaccaa

SEQ ID NO: 18448 - DNA, 25 bp, Probe sequence
cattaactgaacaaccaacatactt

SEQ ID NO: 18449 - DNA, 25 bp, Probe sequence
taattaagatgtccgttaagcgtaa

SEQ ID NO: 18450 - DNA, 25 bp, Probe sequence
caagtacgaatactgatgtaggcaa

SEQ ID NO: 18451 - DNA, 25 bp, Probe sequence
tacaagtacgaatactgatgtaggc

SEQ ID NO: 18452 - DNA, 25 bp, Probe sequence
gaattgccgtaccaatatatgaagg

SEQ ID NO: 18453 - DNA, 25 bp, Probe sequence
ggaattgccgtaccaatatatgaag

SEQ ID NO: 18454 - DNA, 25 bp, Probe sequence
aattgccgtaccaatatatgaaggt

SEQ ID NO: 18455 - DNA, 25 bp, Probe sequence
ttaaaccatttcaaactgaggaacg

SEQ ID NO: 18456 - DNA, 25 bp, Probe sequence
acaagtacgaatactgatgtaggca

SEQ ID NO: 18457 - DNA, 25 bp, Probe sequence
ctatacatttgaagaacatgccacg

SEQ ID NO: 18458 - DNA, 25 bp, Probe sequence
tctatacatttgaagaacatgccac

SEQ ID NO: 18459 - DNA, 25 bp, Probe sequence
tactaactgaacagccaacatactt

SEQ ID NO: 18460 - DNA, 25 bp, Probe sequence
atactaactgaacagccaacatact

SEQ ID NO: 18461 - DNA, 25 bp, Probe sequence
aatactaactgaacagccaacatac

SEQ ID NO: 18462 - DNA, 25 bp, Probe sequence
caatactaactgaacagccaacata

SEQ ID NO: 18463 - DNA, 25 bp, Probe sequence
ccaatactaactgaacagccaacat

SEQ ID NO: 18464 - DNA, 25 bp, Probe sequence
caccaatactaactgaacagccaac

SEQ ID NO: 18465 - DNA, 25 bp, Probe sequence
accaatactaactgaacagccaaca

SEQ ID NO: 18466 - DNA, 25 bp, Probe sequence
tcaccaatactaactgaacagccaa

SEQ ID NO: 18467 - DNA, 25 bp, Probe sequence
taattaaggcatcagttaagcgtaa

SEQ ID NO: 18468 - DNA, 25 bp, Probe sequence
acattatattgttggtatgactgcc

SEQ ID NO: 18469 - DNA, 25 bp, Probe sequence
cacattatattgttggtatgactgc

SEQ ID NO: 18470 - DNA, 25 bp, Probe sequence
gcacattatattgttggtatgactg

SEQ ID NO: 18471 - DNA, 25 bp, Probe sequence
tattgttggtatgactgccatagag

SEQ ID NO: 18472 - DNA, 25 bp, Probe sequence
atattgttggtatgactgccataga

SEQ ID NO: 18473 - DNA, 25 bp, Probe sequence
gttggtatgactgccatagagaatt

SEQ ID NO: 18474 - DNA, 25 bp, Probe sequence
cattatattgttggtatgactgcca

SEQ ID NO: 18475 - DNA, 25 bp, Probe sequence
tatccaaactgctacttcaaaccat

SEQ ID NO: 18476 - DNA, 25 bp, Probe sequence
atatccaaactgctacttcaaacca

SEQ ID NO: 18477 - DNA, 25 bp, Probe sequence
ctacaccttacagatcattgcctaa

SEQ ID NO: 18478 - DNA, 25 bp, Probe sequence
actcttgtaattggtggagcattat

SEQ ID NO: 18479 - DNA, 25 bp, Probe sequence
tactcttgtaattggtggagcatta

SEQ ID NO: 18480 - DNA, 25 bp, Probe sequence
atactcttgtaattggtggagcatt

SEQ ID NO: 18481 - DNA, 25 bp, Probe sequence
ttatactcttgtaattggtggagca

SEQ ID NO: 18482 - DNA, 25 bp, Probe sequence
tatactcttgtaattggtggagcat

SEQ ID NO: 18483 - DNA, 25 bp, Probe sequence
ctcttgtaattggtggagcattatt

SEQ ID NO: 18484 - DNA, 25 bp, Probe sequence
tctacaccttacagatcattgccta

SEQ ID NO: 18485 - DNA, 25 bp, Probe sequence
tcgcatatcaaggaacagatgttat

SEQ ID NO: 18486 - DNA, 25 bp, Probe sequence
cattacacgaatctgacacttggat

SEQ ID NO: 18487 - DNA, 25 bp, Probe sequence
tatcggcatagttgtcagtgaagta

SEQ ID NO: 18488 - DNA, 25 bp, Probe sequence
catcattacacgaatctgacacttg

SEQ ID NO: 18489 - DNA, 25 bp, Probe sequence
atcattacacgaatctgacacttgg

SEQ ID NO: 18490 - DNA, 25 bp, Probe sequence
ttatcggcatagttgtcagtgaagt

SEQ ID NO: 18491 - DNA, 25 bp, Probe sequence
gcatcattacacgaatctgacactt

SEQ ID NO: 18492 - DNA, 25 bp, Probe sequence
tcattacacgaatctgacacttgga

SEQ ID NO: 18493 - DNA, 25 bp, Probe sequence
ggcatagttgtcagtgaagtacatt

SEQ ID NO: 18494 - DNA, 25 bp, Probe sequence
attacacgaatctgacacttggatt

SEQ ID NO: 18495 - DNA, 25 bp, Probe sequence
ggaggttattcgtggtattcaagta

SEQ ID NO: 18496 - DNA, 25 bp, Probe sequence
ggtattggaggttattcgtggtatt

SEQ ID NO: 18497 - DNA, 25 bp, Probe sequence
tattggaggttattcgtggtattca

SEQ ID NO: 18498 - DNA, 25 bp, Probe sequence
tcgtggcaagtatcattattagcat

SEQ ID NO: 18499 - DNA, 25 bp, Probe sequence
ttcgtggcaagtatcattattagca

SEQ ID NO: 18500 - DNA, 25 bp, Probe sequence
gtattggaggttattcgtggtattc

SEQ ID NO: 18501 - DNA, 25 bp, Probe sequence
cagattatagtgctcaatgaaggtg

SEQ ID NO: 18502 - DNA, 25 bp, Probe sequence
aggtattggaggttattcgtggtat

SEQ ID NO: 18503 - DNA, 25 bp, Probe sequence
aaggtattggaggttattcgtggta

SEQ ID NO: 18504 - DNA, 25 bp, Probe sequence
atgctgtaacaagttatgtctttgg

SEQ ID NO: 18505 - DNA, 25 bp, Probe sequence
ccaatcggaacactgatagccaatt

SEQ ID NO: 18506 - DNA, 25 bp, Probe sequence
gctgtaacaagttatgtctttggta

SEQ ID NO: 18507 - DNA, 25 bp, Probe sequence
tgctgtaacaagttatgtctttggt

SEQ ID NO: 18508 - DNA, 25 bp, Probe sequence
aatcggaacactgatagccaatttg

SEQ ID NO: 18509 - DNA, 25 bp, Probe sequence
caatcggaacactgatagccaattt

SEQ ID NO: 18510 - DNA, 25 bp, Probe sequence
ggaacactgatagccaatttgactg

SEQ ID NO: 18511 - DNA, 25 bp, Probe sequence
actatatgctgtaacaagttatgtc

SEQ ID NO: 18512 - DNA, 25 bp, Probe sequence
atcggaacactgatagccaatttga

SEQ ID NO: 18513 - DNA, 25 bp, Probe sequence
agatggatatgatacgaatgttggt

SEQ ID NO: 18514 - DNA, 25 bp, Probe sequence
agtgccttattagtaacgataccaa

SEQ ID NO: 18515 - DNA, 25 bp, Probe sequence
cagatggatatgatacgaatgttgg

SEQ ID NO: 18516 - DNA, 25 bp, Probe sequence
gtcaacgatgctatcacatattacg

SEQ ID NO: 18517 - DNA, 25 bp, Probe sequence
acaatacgcattaactgaagtgaat

SEQ ID NO: 18518 - DNA, 25 bp, Probe sequence
gtgccttattagtaacgataccaat

SEQ ID NO: 18519 - DNA, 25 bp, Probe sequence
tagtgccttattagtaacgatacca

SEQ ID NO: 18520 - DNA, 25 bp, Probe sequence
caatacgcattaactgaagtgaatc

SEQ ID NO: 18521 - DNA, 25 bp, Probe sequence
tcaacgatgctatcacatattacgg

SEQ ID NO: 18522 - DNA, 25 bp, Probe sequence
ttaggtggcttaacaactttctcaa

SEQ ID NO: 18523 - DNA, 25 bp, Probe sequence
tttaggtggcttaacaactttctca

SEQ ID NO: 18524 - DNA, 25 bp, Probe sequence
cttcaaagttacctatcgcaacatt

SEQ ID NO: 18525 - DNA, 25 bp, Probe sequence
caaagttacctatcgcaacattgat

SEQ ID NO: 18526 - DNA, 25 bp, Probe sequence
ttcaaagttacctatcgcaacattg

SEQ ID NO: 18527 - DNA, 25 bp, Probe sequence
taggtggcttaacaactttctcaac

SEQ ID NO: 18528 - DNA, 25 bp, Probe sequence
acttcaaagttacctatcgcaacat

SEQ ID NO: 18529 - DNA, 25 bp, Probe sequence
aaagttacctatcgcaacattgata

SEQ ID NO: 18530 - DNA, 25 bp, Probe sequence
ttttaggtggcttaacaactttctc

SEQ ID NO: 18531 - DNA, 25 bp, Probe sequence
gatgataatgaggtgccgaataatg

SEQ ID NO: 18532 - DNA, 25 bp, Probe sequence
agatgataatgaggtgccgaataat

SEQ ID NO: 18533 - DNA, 25 bp, Probe sequence
aagatgataatgaggtgccgaataa

SEQ ID NO: 18534 - DNA, 25 bp, Probe sequence
atagcaagagcaagtcagtacataa

SEQ ID NO: 18535 - DNA, 25 bp, Probe sequence
gatagcaagagcaagtcagtacata

SEQ ID NO: 18536 - DNA, 25 bp, Probe sequence
gcaagtcagtacataagcaacaatt

SEQ ID NO: 18537 - DNA, 25 bp, Probe sequence
atgataatgaggtgccgaataatgc

SEQ ID NO: 18538 - DNA, 25 bp, Probe sequence
tagcaagagcaagtcagtacataag

SEQ ID NO: 18539 - DNA, 25 bp, Probe sequence
agcaagtcagtacataagcaacaat

SEQ ID NO: 18540 - DNA, 25 bp, Probe sequence
ggcattaccaacctgtattgttacc

SEQ ID NO: 18541 - DNA, 25 bp, Probe sequence
ttggaaggaatcgttggctatacaa

SEQ ID NO: 18542 - DNA, 25 bp, Probe sequence
cttggaaggaatcgttggctataca

SEQ ID NO: 18543 - DNA, 25 bp, Probe sequence
ctatggtttggtattggtagtttgc

SEQ ID NO: 18544 - DNA, 25 bp, Probe sequence
ttgttgttctatggtttggtattgg

SEQ ID NO: 18545 - DNA, 25 bp, Probe sequence
tgttctatggtttggtattggtagt

SEQ ID NO: 18546 - DNA, 25 bp, Probe sequence
tgttgttctatggtttggtattggt

SEQ ID NO: 18547 - DNA, 25 bp, Probe sequence
ttagtttatggagatttgtagcggg

SEQ ID NO: 18548 - DNA, 25 bp, Probe sequence
gttgttctatggtttggtattggta

SEQ ID NO: 18549 - DNA, 25 bp, Probe sequence
attggttacgaacgcgcaacaataa

SEQ ID NO: 18550 - DNA, 25 bp, Probe sequence
ttggttacgaacgcgcaacaataaa

SEQ ID NO: 18551 - DNA, 25 bp, Probe sequence
cattggttacgaacgcgcaacaata

SEQ ID NO: 18552 - DNA, 25 bp, Probe sequence
tggttacgaacgcgcaacaataaaa

SEQ ID NO: 18553 - DNA, 25 bp, Probe sequence
atcttgttaatactggatggactgg

SEQ ID NO: 18554 - DNA, 25 bp, Probe sequence
gaacctgaaccatcattctcaacat

SEQ ID NO: 18555 - DNA, 25 bp, Probe sequence
tatcttgttaatactggatggactg

SEQ ID NO: 18556 - DNA, 25 bp, Probe sequence
gtcatcaatgaattagcatggcata

SEQ ID NO: 18557 - DNA, 25 bp, Probe sequence
tcttgttaatactggatggactggc

SEQ ID NO: 18558 - DNA, 25 bp, Probe sequence
tacagtcatcaatgaattagcatgg

SEQ ID NO: 18559 - DNA, 25 bp, Probe sequence
gtagaatcagcttacattacacacg

SEQ ID NO: 18560 - DNA, 25 bp, Probe sequence
cgtagaatcagcttacattacacac

SEQ ID NO: 18561 - DNA, 25 bp, Probe sequence
tcatcaatgaattagcatggcataa

SEQ ID NO: 18562 - DNA, 25 bp, Probe sequence
ttatcattgttggcggcattaatac

SEQ ID NO: 18563 - DNA, 25 bp, Probe sequence
aatttatcattgttggcggcattaa

SEQ ID NO: 18564 - DNA, 25 bp, Probe sequence
tatcattgttggcggcattaatacg

SEQ ID NO: 18565 - DNA, 25 bp, Probe sequence
attgttggcggcattaatacgttaa

SEQ ID NO: 18566 - DNA, 25 bp, Probe sequence
atttatcattgttggcggcattaat

SEQ ID NO: 18567 - DNA, 25 bp, Probe sequence
tttatcattgttggcggcattaata

SEQ ID NO: 18568 - DNA, 25 bp, Probe sequence
cattgttggcggcattaatacgtta

SEQ ID NO: 18569 - DNA, 25 bp, Probe sequence
aaatttatcattgttggcggcatta

SEQ ID NO: 18570 - DNA, 25 bp, Probe sequence
ttcattagttttccaattacgcaga

SEQ ID NO: 18571 - DNA, 25 bp, Probe sequence
tacactagagaagcgattcaatacc

SEQ ID NO: 18572 - DNA, 25 bp, Probe sequence
gagtacactagagaagcgattcaat

SEQ ID NO: 18573 - DNA, 25 bp, Probe sequence
gtacactagagaagcgattcaatac

SEQ ID NO: 18574 - DNA, 25 bp, Probe sequence
cactagagaagcgattcaataccac

SEQ ID NO: 18575 - DNA, 25 bp, Probe sequence
agtacactagagaagcgattcaata

SEQ ID NO: 18576 - DNA, 25 bp, Probe sequence
agagtacactagagaagcgattcaa

SEQ ID NO: 18577 - DNA, 25 bp, Probe sequence
ttcagagtacactagagaagcgatt

SEQ ID NO: 18578 - DNA, 25 bp, Probe sequence
acactagagaagcgattcaatacca

SEQ ID NO: 18579 - DNA, 25 bp, Probe sequence
tcagagtacactagagaagcgattc

SEQ ID NO: 18580 - DNA, 25 bp, Probe sequence
agaggttcatcactacatacatcaa

SEQ ID NO: 18581 - DNA, 25 bp, Probe sequence
aagaggttcatcactacatacatca

SEQ ID NO: 18582 - DNA, 25 bp, Probe sequence
ggaagaggttcatcactacatacat

SEQ ID NO: 18583 - DNA, 25 bp, Probe sequence
atggaagaggttcatcactacatac

SEQ ID NO: 18584 - DNA, 25 bp, Probe sequence
aatggaagaggttcatcactacata

SEQ ID NO: 18585 - DNA, 25 bp, Probe sequence
tggaagaggttcatcactacataca

SEQ ID NO: 18586 - DNA, 25 bp, Probe sequence
gaagaggttcatcactacatacatc

SEQ ID NO: 18587 - DNA, 25 bp, Probe sequence
atatcaattacaacaacttgcgtcg

SEQ ID NO: 18588 - DNA, 25 bp, Probe sequence
ggaatatcaattacaacaacttgcg

SEQ ID NO: 18589 - DNA, 25 bp, Probe sequence
tgaatacagagaacaacaagaatca

SEQ ID NO: 18590 - DNA, 25 bp, Probe sequence
gaatacagagaacaacaagaatcaa

SEQ ID NO: 18591 - DNA, 25 bp, Probe sequence
atcttattatcagcctgttcaatga

SEQ ID NO: 18592 - DNA, 25 bp, Probe sequence
ttgaatacagagaacaacaagaatc

SEQ ID NO: 18593 - DNA, 25 bp, Probe sequence
cagcctgttcaatgatgtttagtaa

SEQ ID NO: 18594 - DNA, 25 bp, Probe sequence
atcatcaatccacgcaacctaagac

SEQ ID NO: 18595 - DNA, 25 bp, Probe sequence
catcatcaatccacgcaacctaaga

SEQ ID NO: 18596 - DNA, 25 bp, Probe sequence
acctttgaatacagagaacaacaag

SEQ ID NO: 18597 - DNA, 25 bp, Probe sequence
agcctgttcaatgatgtttagtaat

SEQ ID NO: 18598 - DNA, 25 bp, Probe sequence
agattacttagaggcattggttgaa

SEQ ID NO: 18599 - DNA, 25 bp, Probe sequence
aagacaatggcgttcagaagatatt

SEQ ID NO: 18600 - DNA, 25 bp, Probe sequence
aagattacttagaggcattggttga

SEQ ID NO: 18601 - DNA, 25 bp, Probe sequence
gaagattacttagaggcattggttg

SEQ ID NO: 18602 - DNA, 25 bp, Probe sequence
atccgaagattacttagaggcattg

SEQ ID NO: 18603 - DNA, 25 bp, Probe sequence
catccgaagattacttagaggcatt

SEQ ID NO: 18604 - DNA, 25 bp, Probe sequence
cgaagattacttagaggcattggtt

SEQ ID NO: 18605 - DNA, 25 bp, Probe sequence
caagacaatggcgttcagaagatat

SEQ ID NO: 18606 - DNA, 25 bp, Probe sequence
acatccgaagattacttagaggcat

SEQ ID NO: 18607 - DNA, 25 bp, Probe sequence
aagacaagcaagatacagaagtagc

SEQ ID NO: 18608 - DNA, 25 bp, Probe sequence
ctactacacctgctacaacttctag

SEQ ID NO: 18609 - DNA, 25 bp, Probe sequence
gctactacacctgctacaacttcta

SEQ ID NO: 18610 - DNA, 25 bp, Probe sequence
tactacacctgctacaacttctagt

SEQ ID NO: 18611 - DNA, 25 bp, Probe sequence
gcgagttcaaatagcgataatgtaa

SEQ ID NO: 18612 - DNA, 25 bp, Probe sequence
tgcgagttcaaatagcgataatgta

SEQ ID NO: 18613 - DNA, 25 bp, Probe sequence
aaagacaagcaagatacagaagtag

SEQ ID NO: 18614 - DNA, 25 bp, Probe sequence
actacacctgctacaacttctagtg

SEQ ID NO: 18615 - DNA, 25 bp, Probe sequence
aaacatttgaagcagataatacagg

SEQ ID NO: 18616 - DNA, 25 bp, Probe sequence
taactgaatctgccaccgtattatc

SEQ ID NO: 18617 - DNA, 25 bp, Probe sequence
ttaactgaatctgccaccgtattat

SEQ ID NO: 18618 - DNA, 25 bp, Probe sequence
gaatctgccaccgtattatcctatc

SEQ ID NO: 18619 - DNA, 25 bp, Probe sequence
ctgtcgctgttagtatatcatctgg

SEQ ID NO: 18620 - DNA, 25 bp, Probe sequence
gtcgctgttagtatatcatctggtg

SEQ ID NO: 18621 - DNA, 25 bp, Probe sequence
ttcctggagtaacattattcttgct

SEQ ID NO: 18622 - DNA, 25 bp, Probe sequence
tgaatctgccaccgtattatcctat

SEQ ID NO: 18623 - DNA, 25 bp, Probe sequence
gctgttagtatatcatctggtgctg

SEQ ID NO: 18624 - DNA, 25 bp, Probe sequence
tgtcgctgttagtatatcatctggt

SEQ ID NO: 18625 - DNA, 25 bp, Probe sequence
atattatgttgaacatctagtccgc

SEQ ID NO: 18626 - DNA, 25 bp, Probe sequence
aatattatgttgaacatctagtccg

SEQ ID NO: 18627 - DNA, 25 bp, Probe sequence
tattatgttgaacatctagtccgcg

SEQ ID NO: 18628 - DNA, 25 bp, Probe sequence
ttatgttgaacatctagtccgcgat

SEQ ID NO: 18629 - DNA, 25 bp, Probe sequence
attatgttgaacatctagtccgcga

SEQ ID NO: 18630 - DNA, 25 bp, Probe sequence
ggtgctaatcaacataaagaaaata

SEQ ID NO: 18631 - DNA, 25 bp, Probe sequence
gttcgaaacgattacaaagcaagag

SEQ ID NO: 18632 - DNA, 25 bp, Probe sequence
tatgttgaacatctagtccgcgatg

SEQ ID NO: 18633 - DNA, 25 bp, Probe sequence
gaatattatgttgaacatctagtcc

SEQ ID NO: 18634 - DNA, 25 bp, Probe sequence
tttgacaccttatatgttaataggt

SEQ ID NO: 18635 - DNA, 25 bp, Probe sequence
tactacatctgagaatggtcaacaa

SEQ ID NO: 18636 - DNA, 25 bp, Probe sequence
ttactacatctgagaatggtcaaca

SEQ ID NO: 18637 - DNA, 25 bp, Probe sequence
tgatatggcagcaaatacgaaagta

SEQ ID NO: 18638 - DNA, 25 bp, Probe sequence
aaggattagcaaatgaggaaacttc

SEQ ID NO: 18639 - DNA, 25 bp, Probe sequence
gaaggattagcaaatgaggaaactt

SEQ ID NO: 18640 - DNA, 25 bp, Probe sequence
cgaaggattagcaaatgaggaaact

SEQ ID NO: 18641 - DNA, 25 bp, Probe sequence
agaaagtaattgcccaaagtattgc

SEQ ID NO: 18642 - DNA, 25 bp, Probe sequence
ttagcaaatgaggaaacttcacttg

SEQ ID NO: 18643 - DNA, 25 bp, Probe sequence
actacatctgagaatggtcaacaaa

SEQ ID NO: 18644 - DNA, 25 bp, Probe sequence
taaagatggtttgttaggttggaga

SEQ ID NO: 18645 - DNA, 25 bp, Probe sequence
aagatggtttgttaggttggagaaa

SEQ ID NO: 18646 - DNA, 25 bp, Probe sequence
aaagatggtttgttaggttggagaa

SEQ ID NO: 18647 - DNA, 25 bp, Probe sequence
gttaaagatggtttgttaggttgga

SEQ ID NO: 18648 - DNA, 25 bp, Probe sequence
agttaaagatggtttgttaggttgg

SEQ ID NO: 18649 - DNA, 25 bp, Probe sequence
ttaaagatggtttgttaggttggag

SEQ ID NO: 18650 - DNA, 25 bp, Probe sequence
gcgtggcaaacatattattagagtt

SEQ ID NO: 18651 - DNA, 25 bp, Probe sequence
ggcgtggcaaacatattattagagt

SEQ ID NO: 18652 - DNA, 25 bp, Probe sequence
tggcgtggcaaacatattattagag

SEQ ID NO: 18653 - DNA, 25 bp, Probe sequence
tcttagtgcaagcacctagattatt

SEQ ID NO: 18654 - DNA, 25 bp, Probe sequence
acaacataaatgaggaatacagaga

SEQ ID NO: 18655 - DNA, 25 bp, Probe sequence
tgaataatatcttagtgcaagcacc

SEQ ID NO: 18656 - DNA, 25 bp, Probe sequence
taatatcttagtgcaagcacctaga

SEQ ID NO: 18657 - DNA, 25 bp, Probe sequence
gaataatatcttagtgcaagcacct

SEQ ID NO: 18658 - DNA, 25 bp, Probe sequence
cttagtgcaagcacctagattatta

SEQ ID NO: 18659 - DNA, 25 bp, Probe sequence
atcttagtgcaagcacctagattat

SEQ ID NO: 18660 - DNA, 25 bp, Probe sequence
atatcttagtgcaagcacctagatt

SEQ ID NO: 18661 - DNA, 25 bp, Probe sequence
aatatcttagtgcaagcacctagat

SEQ ID NO: 18662 - DNA, 25 bp, Probe sequence
aatacttgtgatgtgatctgtgtac

SEQ ID NO: 18663 - DNA, 25 bp, Probe sequence
aaagaagatgagttgtgtgtttgtg

SEQ ID NO: 18664 - DNA, 25 bp, Probe sequence
gaagatgagttgtgtgtttgtgata

SEQ ID NO: 18665 - DNA, 25 bp, Probe sequence
agaagatgagttgtgtgtttgtgat

SEQ ID NO: 18666 - DNA, 25 bp, Probe sequence
taaagaagatgagttgtgtgtttgt

SEQ ID NO: 18667 - DNA, 25 bp, Probe sequence
tgagttgtgtgtttgtgatatttct

SEQ ID NO: 18668 - DNA, 25 bp, Probe sequence
tgcttcaacttcacatcatttaagg

SEQ ID NO: 18669 - DNA, 25 bp, Probe sequence
aagaagatgagttgtgtgtttgtga

SEQ ID NO: 18670 - DNA, 25 bp, Probe sequence
cttcaacttcacatcatttaaggct

SEQ ID NO: 18671 - DNA, 25 bp, Probe sequence
tgaatatagtcaattattagacgct

SEQ ID NO: 18672 - DNA, 25 bp, Probe sequence
gctggattatgtcaaatgatcaaac

SEQ ID NO: 18673 - DNA, 25 bp, Probe sequence
ctggattatgtcaaatgatcaaacc

SEQ ID NO: 18674 - DNA, 25 bp, Probe sequence
atgtcaaatgatcaaaccaacagtc

SEQ ID NO: 18675 - DNA, 25 bp, Probe sequence
tatgtcaaatgatcaaaccaacagt

SEQ ID NO: 18676 - DNA, 25 bp, Probe sequence
ggattatgtcaaatgatcaaaccaa

SEQ ID NO: 18677 - DNA, 25 bp, Probe sequence
tgtcaaatgatcaaaccaacagtca

SEQ ID NO: 18678 - DNA, 25 bp, Probe sequence
ttatgtcaaatgatcaaaccaacag

SEQ ID NO: 18679 - DNA, 25 bp, Probe sequence
atgaatatagtcaattattagacgc

SEQ ID NO: 18680 - DNA, 25 bp, Probe sequence
gcaggatatgatgtcacacttattg

SEQ ID NO: 18681 - DNA, 25 bp, Probe sequence
agcaggatatgatgtcacacttatt

SEQ ID NO: 18682 - DNA, 25 bp, Probe sequence
ttacttaacgaagcggaattgaatg

SEQ ID NO: 18683 - DNA, 25 bp, Probe sequence
aagcaggatatgatgtcacacttat

SEQ ID NO: 18684 - DNA, 25 bp, Probe sequence
caagcaggatatgatgtcacactta

SEQ ID NO: 18685 - DNA, 25 bp, Probe sequence
tgtagcgacgattgataatgttcat

SEQ ID NO: 18686 - DNA, 25 bp, Probe sequence
atgtagcgacgattgataatgttca

SEQ ID NO: 18687 - DNA, 25 bp, Probe sequence
cagtgttggagtgtaatatggcatc

SEQ ID NO: 18688 - DNA, 25 bp, Probe sequence
cacacttattgacggatatacatct

SEQ ID NO: 18689 - DNA, 25 bp, Probe sequence
ttaatagaagagcgtcaagcagtag

SEQ ID NO: 18690 - DNA, 25 bp, Probe sequence
aatagaagagcgtcaagcagtagta

SEQ ID NO: 18691 - DNA, 25 bp, Probe sequence
taatagaagagcgtcaagcagtagt

SEQ ID NO: 18692 - DNA, 25 bp, Probe sequence
tagtggatggataagagtacaggat

SEQ ID NO: 18693 - DNA, 25 bp, Probe sequence
atagtggatggataagagtacagga

SEQ ID NO: 18694 - DNA, 25 bp, Probe sequence
gtggatggataagagtacaggattg

SEQ ID NO: 18695 - DNA, 25 bp, Probe sequence
agtggatggataagagtacaggatt

SEQ ID NO: 18696 - DNA, 25 bp, Probe sequence
acacaatggatcaatgaatcagatg

SEQ ID NO: 18697 - DNA, 25 bp, Probe sequence
atagaagagcgtcaagcagtagtag

SEQ ID NO: 18698 - DNA, 25 bp, Probe sequence
gatgcgttcaatatccgaagttaag

SEQ ID NO: 18699 - DNA, 25 bp, Probe sequence
cgttcaatatccgaagttaagcaac

SEQ ID NO: 18700 - DNA, 25 bp, Probe sequence
tgatgcgttcaatatccgaagttaa

SEQ ID NO: 18701 - DNA, 25 bp, Probe sequence
ctgatgcgttcaatatccgaagtta

SEQ ID NO: 18702 - DNA, 25 bp, Probe sequence
atgcgttcaatatccgaagttaagc

SEQ ID NO: 18703 - DNA, 25 bp, Probe sequence
gcgttcaatatccgaagttaagcaa

SEQ ID NO: 18704 - DNA, 25 bp, Probe sequence
actgatgcgttcaatatccgaagtt

SEQ ID NO: 18705 - DNA, 25 bp, Probe sequence
aattggactgatgcgttcaatatcc

SEQ ID NO: 18706 - DNA, 25 bp, Probe sequence
gactgatgcgttcaatatccgaagt

SEQ ID NO: 18707 - DNA, 25 bp, Probe sequence
cagtcacttgttaatcttgttgtcc

SEQ ID NO: 18708 - DNA, 25 bp, Probe sequence
ggattatatgctacaccatcaactg

SEQ ID NO: 18709 - DNA, 25 bp, Probe sequence
gcagtcacttgttaatcttgttgtc

SEQ ID NO: 18710 - DNA, 25 bp, Probe sequence
aggattatatgctacaccatcaact

SEQ ID NO: 18711 - DNA, 25 bp, Probe sequence
atatgctacaccatcaactgataca

SEQ ID NO: 18712 - DNA, 25 bp, Probe sequence
gattatatgctacaccatcaactga

SEQ ID NO: 18713 - DNA, 25 bp, Probe sequence
gctacatatataggttggcgttcaa

SEQ ID NO: 18714 - DNA, 25 bp, Probe sequence
taggattatatgctacaccatcaac

SEQ ID NO: 18715 - DNA, 25 bp, Probe sequence
atgttgtaggttcattactcatcat

SEQ ID NO: 18716 - DNA, 25 bp, Probe sequence
gtgttccttttgttaagccagtaaa

SEQ ID NO: 18717 - DNA, 25 bp, Probe sequence
aaggttttgaaggtccagttaaatt

SEQ ID NO: 18718 - DNA, 25 bp, Probe sequence
caaggttttgaaggtccagttaaat

SEQ ID NO: 18719 - DNA, 25 bp, Probe sequence
tttgttaagccagtaaaaccaatcc

SEQ ID NO: 18720 - DNA, 25 bp, Probe sequence
ggtgttccttttgttaagccagtaa

SEQ ID NO: 18721 - DNA, 25 bp, Probe sequence
ccaaggttttgaaggtccagttaaa

SEQ ID NO: 18722 - DNA, 25 bp, Probe sequence
ttgttaagccagtaaaaccaatccc

SEQ ID NO: 18723 - DNA, 25 bp, Probe sequence
ttccttttgttaagccagtaaaacc

SEQ ID NO: 18724 - DNA, 25 bp, Probe sequence
ccttttgttaagccagtaaaaccaa

SEQ ID NO: 18725 - DNA, 25 bp, Probe sequence
gcgatgcctaagtctgttattgatt

SEQ ID NO: 18726 - DNA, 25 bp, Probe sequence
agcgatgcctaagtctgttattgat

SEQ ID NO: 18727 - DNA, 25 bp, Probe sequence
aagcgatgcctaagtctgttattga

SEQ ID NO: 18728 - DNA, 25 bp, Probe sequence
ctaatctatgcgacaagagctgata

SEQ ID NO: 18729 - DNA, 25 bp, Probe sequence
taatctatgcgacaagagctgataa

SEQ ID NO: 18730 - DNA, 25 bp, Probe sequence
aaggactaatctatgcgacaagagc

SEQ ID NO: 18731 - DNA, 25 bp, Probe sequence
taaagcgatgcctaagtctgttatt

SEQ ID NO: 18732 - DNA, 25 bp, Probe sequence
cgatgcctaagtctgttattgattt

SEQ ID NO: 18733 - DNA, 25 bp, Probe sequence
gttattaaagcgatgcctaagtctg

SEQ ID NO: 18734 - DNA, 25 bp, Probe sequence
taacaacattaggaacaggcttaca

SEQ ID NO: 18735 - DNA, 25 bp, Probe sequence
acaacattaggaacaggcttacatt

SEQ ID NO: 18736 - DNA, 25 bp, Probe sequence
aacaacattaggaacaggcttacat

SEQ ID NO: 18737 - DNA, 25 bp, Probe sequence
ttaacaacattaggaacaggcttac

SEQ ID NO: 18738 - DNA, 25 bp, Probe sequence
ttaggaacaggcttacattcttcat

SEQ ID NO: 18739 - DNA, 25 bp, Probe sequence
attaggaacaggcttacattcttca

SEQ ID NO: 18740 - DNA, 25 bp, Probe sequence
acattaggaacaggcttacattctt

SEQ ID NO: 18741 - DNA, 25 bp, Probe sequence
aacattaggaacaggcttacattct

SEQ ID NO: 18742 - DNA, 25 bp, Probe sequence
caacattaggaacaggcttacattc

SEQ ID NO: 18743 - DNA, 25 bp, Probe sequence
gttattatcggtggcattcgtattg

SEQ ID NO: 18744 - DNA, 25 bp, Probe sequence
aagtgctacgaatgattgaattacc

SEQ ID NO: 18745 - DNA, 25 bp, Probe sequence
ggttattatcggtggcattcgtatt

SEQ ID NO: 18746 - DNA, 25 bp, Probe sequence
agtgctacgaatgattgaattaccg

SEQ ID NO: 18747 - DNA, 25 bp, Probe sequence
cgaatgattgaattaccgttatctg

SEQ ID NO: 18748 - DNA, 25 bp, Probe sequence
caagtgctacgaatgattgaattac

SEQ ID NO: 18749 - DNA, 25 bp, Probe sequence
taatgtctgtctatggtgtgctgtt

SEQ ID NO: 18750 - DNA, 25 bp, Probe sequence
ttaatgtctgtctatggtgtgctgt

SEQ ID NO: 18751 - DNA, 25 bp, Probe sequence
gctagtgttgatgcgaatattaagg

SEQ ID NO: 18752 - DNA, 25 bp, Probe sequence
agatgacggtaacttaacttcacat

SEQ ID NO: 18753 - DNA, 25 bp, Probe sequence
tagatgacggtaacttaacttcaca

SEQ ID NO: 18754 - DNA, 25 bp, Probe sequence
gatgacggtaacttaacttcacatt

SEQ ID NO: 18755 - DNA, 25 bp, Probe sequence
agttgaaccttgaacacacttatgt

SEQ ID NO: 18756 - DNA, 25 bp, Probe sequence
ttagatgacggtaacttaacttcac

SEQ ID NO: 18757 - DNA, 25 bp, Probe sequence
attagatgacggtaacttaacttca

SEQ ID NO: 18758 - DNA, 25 bp, Probe sequence
tttagtagaagttgatgaagggacg

SEQ ID NO: 18759 - DNA, 25 bp, Probe sequence
gattgtctaatccgatgaagtcatt

SEQ ID NO: 18760 - DNA, 25 bp, Probe sequence
aattccaataggattaggctcaatt

SEQ ID NO: 18761 - DNA, 25 bp, Probe sequence
tggtcttcctatctaacagcctata

SEQ ID NO: 18762 - DNA, 25 bp, Probe sequence
atggtcttcctatctaacagcctat

SEQ ID NO: 18763 - DNA, 25 bp, Probe sequence
cttcctatctaacagcctatatccg

SEQ ID NO: 18764 - DNA, 25 bp, Probe sequence
tgttcttatggttaatgtggtctca

SEQ ID NO: 18765 - DNA, 25 bp, Probe sequence
ttgttcttatggttaatgtggtctc

SEQ ID NO: 18766 - DNA, 25 bp, Probe sequence
tcttatggttaatgtggtctcatca

SEQ ID NO: 18767 - DNA, 25 bp, Probe sequence
ggtcttcctatctaacagcctatat

SEQ ID NO: 18768 - DNA, 25 bp, Probe sequence
cttatggttaatgtggtctcatcaa

SEQ ID NO: 18769 - DNA, 25 bp, Probe sequence
gttcttatggttaatgtggtctcat

SEQ ID NO: 18770 - DNA, 25 bp, Probe sequence
cttatcgcttaccgtattatctgga

SEQ ID NO: 18771 - DNA, 25 bp, Probe sequence
tcttatcgcttaccgtattatctgg

SEQ ID NO: 18772 - DNA, 25 bp, Probe sequence
ttacagcattatcaacaagcgaatc

SEQ ID NO: 18773 - DNA, 25 bp, Probe sequence
attacagcattatcaacaagcgaat

SEQ ID NO: 18774 - DNA, 25 bp, Probe sequence
gcttaccgtattatctggatgtagt

SEQ ID NO: 18775 - DNA, 25 bp, Probe sequence
tatcgcttaccgtattatctggatg

SEQ ID NO: 18776 - DNA, 25 bp, Probe sequence
tgtcttatcgcttaccgtattatct

SEQ ID NO: 18777 - DNA, 25 bp, Probe sequence
aattacagcattatcaacaagcgaa

SEQ ID NO: 18778 - DNA, 25 bp, Probe sequence
cgcttaccgtattatctggatgtag

SEQ ID NO: 18779 - DNA, 25 bp, Probe sequence
ttaatgcctatacaggaacagacat

SEQ ID NO: 18780 - DNA, 25 bp, Probe sequence
gatattaacggtggtactcacgata

SEQ ID NO: 18781 - DNA, 25 bp, Probe sequence
atagatattaacggtggtactcacg

SEQ ID NO: 18782 - DNA, 25 bp, Probe sequence
attaacggtggtactcacgataatc

SEQ ID NO: 18783 - DNA, 25 bp, Probe sequence
tattaacggtggtactcacgataat

SEQ ID NO: 18784 - DNA, 25 bp, Probe sequence
atattaacggtggtactcacgataa

SEQ ID NO: 18785 - DNA, 25 bp, Probe sequence
tagatattaacggtggtactcacga

SEQ ID NO: 18786 - DNA, 25 bp, Probe sequence
gaatagatattaacggtggtactca

SEQ ID NO: 18787 - DNA, 25 bp, Probe sequence
taatgcctatacaggaacagacatg

SEQ ID NO: 18788 - DNA, 25 bp, Probe sequence
cattattacttgccatcattgttgc

SEQ ID NO: 18789 - DNA, 25 bp, Probe sequence
gctgtacttgctattatgataccga

SEQ ID NO: 18790 - DNA, 25 bp, Probe sequence
aattgatgaaggatgttgaattgcc

SEQ ID NO: 18791 - DNA, 25 bp, Probe sequence
atgatccactgatgattgtaactgc

SEQ ID NO: 18792 - DNA, 25 bp, Probe sequence
atgaaggatgttgaattgccgttag

SEQ ID NO: 18793 - DNA, 25 bp, Probe sequence
gatgaaggatgttgaattgccgtta

SEQ ID NO: 18794 - DNA, 25 bp, Probe sequence
cattaggtgttgatgccttattagc

SEQ ID NO: 18795 - DNA, 25 bp, Probe sequence
tatgatccactgatgattgtaactg

SEQ ID NO: 18796 - DNA, 25 bp, Probe sequence
ctgtacttgctattatgataccgat

SEQ ID NO: 18797 - DNA, 25 bp, Probe sequence
tattataggaagcagtggtgttgtt

SEQ ID NO: 18798 - DNA, 25 bp, Probe sequence
ctattataggaagcagtggtgttgt

SEQ ID NO: 18799 - DNA, 25 bp, Probe sequence
attataggaagcagtggtgttgttc

SEQ ID NO: 18800 - DNA, 25 bp, Probe sequence
ataggaagcagtggtgttgttcata

SEQ ID NO: 18801 - DNA, 25 bp, Probe sequence
tataggaagcagtggtgttgttcat

SEQ ID NO: 18802 - DNA, 25 bp, Probe sequence
taggaagcagtggtgttgttcataa

SEQ ID NO: 18803 - DNA, 25 bp, Probe sequence
ttataggaagcagtggtgttgttca

SEQ ID NO: 18804 - DNA, 25 bp, Probe sequence
ggaagcagtggtgttgttcataatt

SEQ ID NO: 18805 - DNA, 25 bp, Probe sequence
ttatacgatcagtccagagacatga

SEQ ID NO: 18806 - DNA, 25 bp, Probe sequence
tattatgtcagaaggtaaggtggtg

SEQ ID NO: 18807 - DNA, 25 bp, Probe sequence
gtattatgtcagaaggtaaggtggt

SEQ ID NO: 18808 - DNA, 25 bp, Probe sequence
tgtattatgtcagaaggtaaggtgg

SEQ ID NO: 18809 - DNA, 25 bp, Probe sequence
caagactgtagaaggtgtaatgatt

SEQ ID NO: 18810 - DNA, 25 bp, Probe sequence
ttgtattatgtcagaaggtaaggtg

SEQ ID NO: 18811 - DNA, 25 bp, Probe sequence
ttagagcgttatccagcagaactat

SEQ ID NO: 18812 - DNA, 25 bp, Probe sequence
gacaagactgtagaaggtgtaatga

SEQ ID NO: 18813 - DNA, 25 bp, Probe sequence
tgacaagactgtagaaggtgtaatg

SEQ ID NO: 18814 - DNA, 25 bp, Probe sequence
caatgacaagactgtagaaggtgta

SEQ ID NO: 18815 - DNA, 25 bp, Probe sequence
ttaatcatcagtatcgttgctggtt

SEQ ID NO: 18816 - DNA, 25 bp, Probe sequence
taatcatcagtatcgttgctggttg

SEQ ID NO: 18817 - DNA, 25 bp, Probe sequence
tttgacgaagtataaaggtggagat

SEQ ID NO: 18818 - DNA, 25 bp, Probe sequence
atttgacgaagtataaaggtggaga

SEQ ID NO: 18819 - DNA, 25 bp, Probe sequence
agatttgacgaagtataaaggtgga

SEQ ID NO: 18820 - DNA, 25 bp, Probe sequence
gatttgacgaagtataaaggtggag

SEQ ID NO: 18821 - DNA, 25 bp, Probe sequence
attaatcatcagtatcgttgctggt

SEQ ID NO: 18822 - DNA, 25 bp, Probe sequence
aagatttgacgaagtataaaggtgg

SEQ ID NO: 18823 - DNA, 25 bp, Probe sequence
ttgacgaagtataaaggtggagata

SEQ ID NO: 18824 - DNA, 25 bp, Probe sequence
ggttgtccgtctgtaacaatggatg

SEQ ID NO: 18825 - DNA, 25 bp, Probe sequence
aatggatgcgtgtgcattattacaa

SEQ ID NO: 18826 - DNA, 25 bp, Probe sequence
aacaatggatgcgtgtgcattatta

SEQ ID NO: 18827 - DNA, 25 bp, Probe sequence
taacaatggatgcgtgtgcattatt

SEQ ID NO: 18828 - DNA, 25 bp, Probe sequence
gttgtccgtctgtaacaatggatgc

SEQ ID NO: 18829 - DNA, 25 bp, Probe sequence
caatggatgcgtgtgcattattaca

SEQ ID NO: 18830 - DNA, 25 bp, Probe sequence
acaatggatgcgtgtgcattattac

SEQ ID NO: 18831 - DNA, 25 bp, Probe sequence
gtaacaatggatgcgtgtgcattat

SEQ ID NO: 18832 - DNA, 25 bp, Probe sequence
aatatttcacattttcgacactttt

SEQ ID NO: 18833 - DNA, 25 bp, Probe sequence
atcacaagttactaaaggacatacg

SEQ ID NO: 18834 - DNA, 25 bp, Probe sequence
gcttctgctaatatctttgaaactg

SEQ ID NO: 18835 - DNA, 25 bp, Probe sequence
aaactgatgaagaaacaatgaaaca

SEQ ID NO: 18836 - DNA, 25 bp, Probe sequence
tgatggatttggttataagtgggaa

SEQ ID NO: 18837 - DNA, 25 bp, Probe sequence
ttgatggatttggttataagtggga

SEQ ID NO: 18838 - DNA, 25 bp, Probe sequence
atgaagaaacaatgaaacatatcgg

SEQ ID NO: 18839 - DNA, 25 bp, Probe sequence
tgaaactgatgaagaaacaatgaaa

SEQ ID NO: 18840 - DNA, 25 bp, Probe sequence
attgatggatttggttataagtggg

SEQ ID NO: 18841 - DNA, 25 bp, Probe sequence
gatggatttggttataagtgggaaa

SEQ ID NO: 18842 - DNA, 25 bp, Probe sequence
aagagagtcaatggcaagaagaata

SEQ ID NO: 18843 - DNA, 25 bp, Probe sequence
agagagtcaatggcaagaagaatat

SEQ ID NO: 18844 - DNA, 25 bp, Probe sequence
gagagtcaatggcaagaagaatata

SEQ ID NO: 18845 - DNA, 25 bp, Probe sequence
atcatacactcattcaacagactga

SEQ ID NO: 18846 - DNA, 25 bp, Probe sequence
tatcatacactcattcaacagactg

SEQ ID NO: 18847 - DNA, 25 bp, Probe sequence
agagtcaatggcaagaagaatataa

SEQ ID NO: 18848 - DNA, 25 bp, Probe sequence
atatcatacactcattcaacagact

SEQ ID NO: 18849 - DNA, 25 bp, Probe sequence
gcatccttgttacacgttgaataat

SEQ ID NO: 18850 - DNA, 25 bp, Probe sequence
taaagagagtcaatggcaagaagaa

SEQ ID NO: 18851 - DNA, 25 bp, Probe sequence
aagcatcacgcattctattcggtat

SEQ ID NO: 18852 - DNA, 25 bp, Probe sequence
agcatcacgcattctattcggtatc

SEQ ID NO: 18853 - DNA, 25 bp, Probe sequence
ttacttggaaacttcaaatctgaca

SEQ ID NO: 18854 - DNA, 25 bp, Probe sequence
tacttggaaacttcaaatctgacat

SEQ ID NO: 18855 - DNA, 25 bp, Probe sequence
aaagtgcggaatttggtagttcaat

SEQ ID NO: 18856 - DNA, 25 bp, Probe sequence
catcacgcattctattcggtatcgg

SEQ ID NO: 18857 - DNA, 25 bp, Probe sequence
tcattacttggaaacttcaaatctg

SEQ ID NO: 18858 - DNA, 25 bp, Probe sequence
gtcattacttggaaacttcaaatct

SEQ ID NO: 18859 - DNA, 25 bp, Probe sequence
cattctattcggtatcggtgttggc

SEQ ID NO: 18860 - DNA, 25 bp, Probe sequence
aatacctacgtcaatcaacctgtac

SEQ ID NO: 18861 - DNA, 25 bp, Probe sequence
ataatacctacgtcaatcaacctgt

SEQ ID NO: 18862 - DNA, 25 bp, Probe sequence
taatacctacgtcaatcaacctgta

SEQ ID NO: 18863 - DNA, 25 bp, Probe sequence
gccgttaattatcttatctgcaatg

SEQ ID NO: 18864 - DNA, 25 bp, Probe sequence
tcttattggcattgaatttcggtat

SEQ ID NO: 18865 - DNA, 25 bp, Probe sequence
gttcttattggcattgaatttcggt

SEQ ID NO: 18866 - DNA, 25 bp, Probe sequence
tgttcttattggcattgaatttcgg

SEQ ID NO: 18867 - DNA, 25 bp, Probe sequence
ggcattgaatttcggtatttccatt

SEQ ID NO: 18868 - DNA, 25 bp, Probe sequence
attggcattgaatttcggtatttcc

SEQ ID NO: 18869 - DNA, 25 bp, Probe sequence
ttgtgagtattattgttggcttctt

SEQ ID NO: 18870 - DNA, 25 bp, Probe sequence
attgtgagtattattgttggcttct

SEQ ID NO: 18871 - DNA, 25 bp, Probe sequence
gcaggaattatgaacttgatgagtc

SEQ ID NO: 18872 - DNA, 25 bp, Probe sequence
tacaagtaagcgttggttaatgatt

SEQ ID NO: 18873 - DNA, 25 bp, Probe sequence
ggaattatgaacttgatgagtcagg

SEQ ID NO: 18874 - DNA, 25 bp, Probe sequence
ttacaagtaagcgttggttaatgat

SEQ ID NO: 18875 - DNA, 25 bp, Probe sequence
attacaagtaagcgttggttaatga

SEQ ID NO: 18876 - DNA, 25 bp, Probe sequence
caggaattatgaacttgatgagtca

SEQ ID NO: 18877 - DNA, 25 bp, Probe sequence
aattatgaacttgatgagtcaggac

SEQ ID NO: 18878 - DNA, 25 bp, Probe sequence
agatggcgaattaggttatgttctt

SEQ ID NO: 18879 - DNA, 25 bp, Probe sequence
aagatggcgaattaggttatgttct

SEQ ID NO: 18880 - DNA, 25 bp, Probe sequence
gatggcgaattaggttatgttctta

SEQ ID NO: 18881 - DNA, 25 bp, Probe sequence
atggcgaattaggttatgttcttaa

SEQ ID NO: 18882 - DNA, 25 bp, Probe sequence
aagaatcaatggatactggttcagc

SEQ ID NO: 18883 - DNA, 25 bp, Probe sequence
aatcaatggatactggttcagctaa

SEQ ID NO: 18884 - DNA, 25 bp, Probe sequence
aaagatggcgaattaggttatgttc

SEQ ID NO: 18885 - DNA, 25 bp, Probe sequence
gaatcaatggatactggttcagcta

SEQ ID NO: 18886 - DNA, 25 bp, Probe sequence
aagcaatacggcggtaaagataaat

SEQ ID NO: 18887 - DNA, 25 bp, Probe sequence
ttattcatacaactgcgaccattat

SEQ ID NO: 18888 - DNA, 25 bp, Probe sequence
gcaagacatcaattagtagcacgaa

SEQ ID NO: 18889 - DNA, 25 bp, Probe sequence
atgatgacaggcttaattattggtg

SEQ ID NO: 18890 - DNA, 25 bp, Probe sequence
tgatgacaggcttaattattggtgg

SEQ ID NO: 18891 - DNA, 25 bp, Probe sequence
tattcatacaactgcgaccattatg

SEQ ID NO: 18892 - DNA, 25 bp, Probe sequence
attcatacaactgcgaccattatgt

SEQ ID NO: 18893 - DNA, 25 bp, Probe sequence
ttcatacaactgcgaccattatgtc

SEQ ID NO: 18894 - DNA, 25 bp, Probe sequence
tatgatgacaggcttaattattggt

SEQ ID NO: 18895 - DNA, 25 bp, Probe sequence
tggtatgatgacaggcttaattatt

SEQ ID NO: 18896 - DNA, 25 bp, Probe sequence
attatgttccaagttatcgttatgc

SEQ ID NO: 18897 - DNA, 25 bp, Probe sequence
tgatcgcatgttagaagacaatgat

SEQ ID NO: 18898 - DNA, 25 bp, Probe sequence
cttgatcgcatgttagaagacaatg

SEQ ID NO: 18899 - DNA, 25 bp, Probe sequence
ttgatcgcatgttagaagacaatga

SEQ ID NO: 18900 - DNA, 25 bp, Probe sequence
gatcgcatgttagaagacaatgata

SEQ ID NO: 18901 - DNA, 25 bp, Probe sequence
tcgcatgttagaagacaatgatatt

SEQ ID NO: 18902 - DNA, 25 bp, Probe sequence
atggcaatcgtaatgaaacctaaag

SEQ ID NO: 18903 - DNA, 25 bp, Probe sequence
tatgttccaagttatcgttatgcac

SEQ ID NO: 18904 - DNA, 25 bp, Probe sequence
ggaccaggaaacagtaggattatta

SEQ ID NO: 18905 - DNA, 25 bp, Probe sequence
agtattgccattataggtccatcag

SEQ ID NO: 18906 - DNA, 25 bp, Probe sequence
gagtattgccattataggtccatca

SEQ ID NO: 18907 - DNA, 25 bp, Probe sequence
agagtattgccattataggtccatc

SEQ ID NO: 18908 - DNA, 25 bp, Probe sequence
gagagtattgccattataggtccat

SEQ ID NO: 18909 - DNA, 25 bp, Probe sequence
gtattgccattataggtccatcagg

SEQ ID NO: 18910 - DNA, 25 bp, Probe sequence
attgccattataggtccatcaggta

SEQ ID NO: 18911 - DNA, 25 bp, Probe sequence
tattgccattataggtccatcaggt

SEQ ID NO: 18912 - DNA, 25 bp, Probe sequence
ttgccattataggtccatcaggtag

SEQ ID NO: 18913 - DNA, 25 bp, Probe sequence
agcgagcgatagaatcatactagat

SEQ ID NO: 18914 - DNA, 25 bp, Probe sequence
ccattatacacgcacagagaagatt

SEQ ID NO: 18915 - DNA, 25 bp, Probe sequence
cattatacacgcacagagaagatta

SEQ ID NO: 18916 - DNA, 25 bp, Probe sequence
tccattatacacgcacagagaagat

SEQ ID NO: 18917 - DNA, 25 bp, Probe sequence
attatacacgcacagagaagattaa

SEQ ID NO: 18918 - DNA, 25 bp, Probe sequence
ctccattatacacgcacagagaaga

SEQ ID NO: 18919 - DNA, 25 bp, Probe sequence
atacacgcacagagaagattaaaca

SEQ ID NO: 18920 - DNA, 25 bp, Probe sequence
tatacacgcacagagaagattaaac

SEQ ID NO: 18921 - DNA, 25 bp, Probe sequence
tacacgcacagagaagattaaacag

SEQ ID NO: 18922 - DNA, 25 bp, Probe sequence
agatacgcatactaaagaacaacaa

SEQ ID NO: 18923 - DNA, 25 bp, Probe sequence
acagaagtagcgaacaacaatgatt

SEQ ID NO: 18924 - DNA, 25 bp, Probe sequence
aacagaagtagcgaacaacaatgat

SEQ ID NO: 18925 - DNA, 25 bp, Probe sequence
ttcaacagaagtagcgaacaacaat

SEQ ID NO: 18926 - DNA, 25 bp, Probe sequence
aagaattggtattgccgttaattgt

SEQ ID NO: 18927 - DNA, 25 bp, Probe sequence
caacagaagtagcgaacaacaatga

SEQ ID NO: 18928 - DNA, 25 bp, Probe sequence
tcaacagaagtagcgaacaacaatg

SEQ ID NO: 18929 - DNA, 25 bp, Probe sequence
agaattggtattgccgttaattgta

SEQ ID NO: 18930 - DNA, 25 bp, Probe sequence
tggtattgccgttaattgtattaga

SEQ ID NO: 18931 - DNA, 25 bp, Probe sequence
ggtattgccgttaattgtattagac

SEQ ID NO: 18932 - DNA, 25 bp, Probe sequence
tattggtgttagtagcaaggaagaa

SEQ ID NO: 18933 - DNA, 25 bp, Probe sequence
atattggtgttagtagcaaggaaga

SEQ ID NO: 18934 - DNA, 25 bp, Probe sequence
agatattggtgttagtagcaaggaa

SEQ ID NO: 18935 - DNA, 25 bp, Probe sequence
ttatgatggatgctacaagtattgc

SEQ ID NO: 18936 - DNA, 25 bp, Probe sequence
attggtgttagtagcaaggaagaag

SEQ ID NO: 18937 - DNA, 25 bp, Probe sequence
gatattggtgttagtagcaaggaag

SEQ ID NO: 18938 - DNA, 25 bp, Probe sequence
tagatattggtgttagtagcaagga

SEQ ID NO: 18939 - DNA, 25 bp, Probe sequence
atagatattggtgttagtagcaagg

SEQ ID NO: 18940 - DNA, 25 bp, Probe sequence
gccatatagtgaatttgaagtgctt

SEQ ID NO: 18941 - DNA, 25 bp, Probe sequence
caagaagaattaaccatcagcacag

SEQ ID NO: 18942 - DNA, 25 bp, Probe sequence
tcaagaagaattaaccatcagcaca

SEQ ID NO: 18943 - DNA, 25 bp, Probe sequence
ttcaagaagaattaaccatcagcac

SEQ ID NO: 18944 - DNA, 25 bp, Probe sequence
tgagcaattacacggttaagattaa

SEQ ID NO: 18945 - DNA, 25 bp, Probe sequence
aagaagaattaaccatcagcacagg

SEQ ID NO: 18946 - DNA, 25 bp, Probe sequence
atgagcaattacacggttaagatta

SEQ ID NO: 18947 - DNA, 25 bp, Probe sequence
aatactatcggcatggtcacattat

SEQ ID NO: 18948 - DNA, 25 bp, Probe sequence
ttaatactatcggcatggtcacatt

SEQ ID NO: 18949 - DNA, 25 bp, Probe sequence
atactatcggcatggtcacattatg

SEQ ID NO: 18950 - DNA, 25 bp, Probe sequence
atatgctattgaacgctatgctaag

SEQ ID NO: 18951 - DNA, 25 bp, Probe sequence
ttccgatattgagcctattgatgtg

SEQ ID NO: 18952 - DNA, 25 bp, Probe sequence
gagcgttcgtcatattgtattagat

SEQ ID NO: 18953 - DNA, 25 bp, Probe sequence
taggacacgaagatattgagacgac

SEQ ID NO: 18954 - DNA, 25 bp, Probe sequence
tctcatgcttccttgttaatcagta

SEQ ID NO: 18955 - DNA, 25 bp, Probe sequence
ttctcatgcttccttgttaatcagt

SEQ ID NO: 18956 - DNA, 25 bp, Probe sequence
attctcatgcttccttgttaatcag

SEQ ID NO: 18957 - DNA, 25 bp, Probe sequence
ctaggacacgaagatattgagacga

SEQ ID NO: 18958 - DNA, 25 bp, Probe sequence
catgcttccttgttaatcagtatgg

SEQ ID NO: 18959 - DNA, 25 bp, Probe sequence
gttgagctaggatatggaacttctt

SEQ ID NO: 18960 - DNA, 25 bp, Probe sequence
aagggcatatctactatcaatctcg

SEQ ID NO: 18961 - DNA, 25 bp, Probe sequence
aaagggcatatctactatcaatctc

SEQ ID NO: 18962 - DNA, 25 bp, Probe sequence
ttgagctaggatatggaacttcttt

SEQ ID NO: 18963 - DNA, 25 bp, Probe sequence
ggatttagttgagctaggatatgga

SEQ ID NO: 18964 - DNA, 25 bp, Probe sequence
aggatttagttgagctaggatatgg

SEQ ID NO: 18965 - DNA, 25 bp, Probe sequence
agggcatatctactatcaatctcga

SEQ ID NO: 18966 - DNA, 25 bp, Probe sequence
gggcatatctactatcaatctcgaa

SEQ ID NO: 18967 - DNA, 25 bp, Probe sequence
tgaagctgttgaagaaattctagga

SEQ ID NO: 18968 - DNA, 25 bp, Probe sequence
gataaccaagtaatcgtgaatgtcg

SEQ ID NO: 18969 - DNA, 25 bp, Probe sequence
gttgaacaagttattaccgaagaca

SEQ ID NO: 18970 - DNA, 25 bp, Probe sequence
agataaccaagtaatcgtgaatgtc

SEQ ID NO: 18971 - DNA, 25 bp, Probe sequence
aagtgaccatacagtagatacagaa

SEQ ID NO: 18972 - DNA, 25 bp, Probe sequence
aagataaccaagtaatcgtgaatgt

SEQ ID NO: 18973 - DNA, 25 bp, Probe sequence
ataaccaagtaatcgtgaatgtcgc

SEQ ID NO: 18974 - DNA, 25 bp, Probe sequence
ttgaacaagttattaccgaagacaa

SEQ ID NO: 18975 - DNA, 25 bp, Probe sequence
ttctagtgtgaacgatatacaggtg

SEQ ID NO: 18976 - DNA, 25 bp, Probe sequence
ctagtgtgaacgatatacaggtgtg

SEQ ID NO: 18977 - DNA, 25 bp, Probe sequence
cagaacaacaaggagtggatataga

SEQ ID NO: 18978 - DNA, 25 bp, Probe sequence
atacctatgaattagccgaacagtt

SEQ ID NO: 18979 - DNA, 25 bp, Probe sequence
agaacaacaaggagtggatatagat

SEQ ID NO: 18980 - DNA, 25 bp, Probe sequence
acaacaaggagtggatatagattct

SEQ ID NO: 18981 - DNA, 25 bp, Probe sequence
gtagtgtggtcttctctctcttctt

SEQ ID NO: 18982 - DNA, 25 bp, Probe sequence
tatacctatgaattagccgaacagt

SEQ ID NO: 18983 - DNA, 25 bp, Probe sequence
gcagaacaacaaggagtggatatag

SEQ ID NO: 18984 - DNA, 25 bp, Probe sequence
caacaaggagtggatatagattctg

SEQ ID NO: 18985 - DNA, 25 bp, Probe sequence
gaatggtggttggcgatataactat

SEQ ID NO: 18986 - DNA, 25 bp, Probe sequence
attaccttgattattaccgttgcct

SEQ ID NO: 18987 - DNA, 25 bp, Probe sequence
ttaccttgattattaccgttgcctt

SEQ ID NO: 18988 - DNA, 25 bp, Probe sequence
ttcctattaagtatgttgccgagtt

SEQ ID NO: 18989 - DNA, 25 bp, Probe sequence
ctatacaggattggttaagcgagaa

SEQ ID NO: 18990 - DNA, 25 bp, Probe sequence
tgatacaagcaatgaatactccaag

SEQ ID NO: 18991 - DNA, 25 bp, Probe sequence
tcattgttggaatctatgttgccta

SEQ ID NO: 18992 - DNA, 25 bp, Probe sequence
ttctcattgttggaatctatgttgc

SEQ ID NO: 18993 - DNA, 25 bp, Probe sequence
tattaccttgattattaccgttgcc

SEQ ID NO: 18994 - DNA, 25 bp, Probe sequence
ttgttggaatctatgttgcctatac

SEQ ID NO: 18995 - DNA, 25 bp, Probe sequence
gattgaacaggaagataccactact

SEQ ID NO: 18996 - DNA, 25 bp, Probe sequence
ggattgaacaggaagataccactac

SEQ ID NO: 18997 - DNA, 25 bp, Probe sequence
ttattggtgattgatgaattgcgaa

SEQ ID NO: 18998 - DNA, 25 bp, Probe sequence
gttattggtgattgatgaattgcga

SEQ ID NO: 18999 - DNA, 25 bp, Probe sequence
tcattctctaacaatatgctggtct

SEQ ID NO: 19000 - DNA, 25 bp, Probe sequence
tgttattggtgattgatgaattgcg

SEQ ID NO: 19001 - DNA, 25 bp, Probe sequence
attgaacaggaagataccactactt

SEQ ID NO: 19002 - DNA, 25 bp, Probe sequence
cgttgataccagtatgaatgttgaa

SEQ ID NO: 19003 - DNA, 25 bp, Probe sequence
ccgttgataccagtatgaatgttga

SEQ ID NO: 19004 - DNA, 25 bp, Probe sequence
tattccgacagaagttagtgagaag

SEQ ID NO: 19005 - DNA, 25 bp, Probe sequence
ttattccgacagaagttagtgagaa

SEQ ID NO: 19006 - DNA, 25 bp, Probe sequence
attccgacagaagttagtgagaaga

SEQ ID NO: 19007 - DNA, 25 bp, Probe sequence
ttccgacagaagttagtgagaagaa

SEQ ID NO: 19008 - DNA, 25 bp, Probe sequence
agatgatgaagaaactgatgaaggt

SEQ ID NO: 19009 - DNA, 25 bp, Probe sequence
aagataaaggctgggtgatagattc

SEQ ID NO: 19010 - DNA, 25 bp, Probe sequence
gaaagataaaggctgggtgatagat

SEQ ID NO: 19011 - DNA, 25 bp, Probe sequence
aaagataaaggctgggtgatagatt

SEQ ID NO: 19012 - DNA, 25 bp, Probe sequence
atgaaagataaaggctgggtgatag

SEQ ID NO: 19013 - DNA, 25 bp, Probe sequence
atattatggaacaagtagcacctct

SEQ ID NO: 19014 - DNA, 25 bp, Probe sequence
agatattatggaacaagtagcacct

SEQ ID NO: 19015 - DNA, 25 bp, Probe sequence
gatattatggaacaagtagcacctc

SEQ ID NO: 19016 - DNA, 25 bp, Probe sequence
attatggaacaagtagcacctctag

SEQ ID NO: 19017 - DNA, 25 bp, Probe sequence
tattatggaacaagtagcacctcta

SEQ ID NO: 19018 - DNA, 25 bp, Probe sequence
aagatattatggaacaagtagcacc

SEQ ID NO: 19019 - DNA, 25 bp, Probe sequence
atatattctaggcggtgtcaattcc

SEQ ID NO: 19020 - DNA, 25 bp, Probe sequence
ttatggaacaagtagcacctctagg

SEQ ID NO: 19021 - DNA, 25 bp, Probe sequence
caagatattatggaacaagtagcac

SEQ ID NO: 19022 - DNA, 25 bp, Probe sequence
ttgaatctactggtacaatggacaa

SEQ ID NO: 19023 - DNA, 25 bp, Probe sequence
tcttgaatctactggtacaatggac

SEQ ID NO: 19024 - DNA, 25 bp, Probe sequence
cttgaatctactggtacaatggaca

SEQ ID NO: 19025 - DNA, 25 bp, Probe sequence
atcttgaatctactggtacaatgga

SEQ ID NO: 19026 - DNA, 25 bp, Probe sequence
tatcttgaatctactggtacaatgg

SEQ ID NO: 19027 - DNA, 25 bp, Probe sequence
acaatggacaaagtaagagaaagag

SEQ ID NO: 19028 - DNA, 25 bp, Probe sequence
caatggacaaagtaagagaaagaga

SEQ ID NO: 19029 - DNA, 25 bp, Probe sequence
tgaatctactggtacaatggacaaa

SEQ ID NO: 19030 - DNA, 25 bp, Probe sequence
tggtacaatggacaaagtaagagaa

SEQ ID NO: 19031 - DNA, 25 bp, Probe sequence
ttaggacggtataatgaaggtgaat

SEQ ID NO: 19032 - DNA, 25 bp, Probe sequence
taggacggtataatgaaggtgaatt

SEQ ID NO: 19033 - DNA, 25 bp, Probe sequence
cggtataatgaaggtgaattagtcg

SEQ ID NO: 19034 - DNA, 25 bp, Probe sequence
ataatgaaggtgaattagtcggagc

SEQ ID NO: 19035 - DNA, 25 bp, Probe sequence
aggacggtataatgaaggtgaatta

SEQ ID NO: 19036 - DNA, 25 bp, Probe sequence
ggtataatgaaggtgaattagtcgg

SEQ ID NO: 19037 - DNA, 25 bp, Probe sequence
ggacggtataatgaaggtgaattag

SEQ ID NO: 19038 - DNA, 25 bp, Probe sequence
acggtataatgaaggtgaattagtc

SEQ ID NO: 19039 - DNA, 25 bp, Probe sequence
gacggtataatgaaggtgaattagt

SEQ ID NO: 19040 - DNA, 25 bp, Probe sequence
attatgaaggaggtaacgagattgt

SEQ ID NO: 19041 - DNA, 25 bp, Probe sequence
tgctgatatagtgaagacaacgata

SEQ ID NO: 19042 - DNA, 25 bp, Probe sequence
ttatgaaggaggtaacgagattgtt

SEQ ID NO: 19043 - DNA, 25 bp, Probe sequence
ttgctgatatagtgaagacaacgat

SEQ ID NO: 19044 - DNA, 25 bp, Probe sequence
gctgatatagtgaagacaacgataa

SEQ ID NO: 19045 - DNA, 25 bp, Probe sequence
cttgctgatatagtgaagacaacga

SEQ ID NO: 19046 - DNA, 25 bp, Probe sequence
acctactgaacttgctgatatagtg

SEQ ID NO: 19047 - DNA, 25 bp, Probe sequence
tgaacttgctgatatagtgaagaca

SEQ ID NO: 19048 - DNA, 25 bp, Probe sequence
cctactgaacttgctgatatagtga

SEQ ID NO: 19049 - DNA, 25 bp, Probe sequence
tattaccagaccttacctatcggat

SEQ ID NO: 19050 - DNA, 25 bp, Probe sequence
atattaccagaccttacctatcgga

SEQ ID NO: 19051 - DNA, 25 bp, Probe sequence
catattaccagaccttacctatcgg

SEQ ID NO: 19052 - DNA, 25 bp, Probe sequence
tggattatatgctacacgaagactt

SEQ ID NO: 19053 - DNA, 25 bp, Probe sequence
atggattatatgctacacgaagact

SEQ ID NO: 19054 - DNA, 25 bp, Probe sequence
taccagaccttacctatcggatatt

SEQ ID NO: 19055 - DNA, 25 bp, Probe sequence
ttaccagaccttacctatcggatat

SEQ ID NO: 19056 - DNA, 25 bp, Probe sequence
attaccagaccttacctatcggata

SEQ ID NO: 19057 - DNA, 25 bp, Probe sequence
cagaccttacctatcggatattgaa

SEQ ID NO: 19058 - DNA, 25 bp, Probe sequence
tctatcaacttcatacgccatactt

SEQ ID NO: 19059 - DNA, 25 bp, Probe sequence
ttctatcaacttcatacgccatact

SEQ ID NO: 19060 - DNA, 25 bp, Probe sequence
tgatgaatatgtggcaatgatggat

SEQ ID NO: 19061 - DNA, 25 bp, Probe sequence
tgaatatgtggcaatgatggatatg

SEQ ID NO: 19062 - DNA, 25 bp, Probe sequence
gatgaatatgtggcaatgatggata

SEQ ID NO: 19063 - DNA, 25 bp, Probe sequence
ggcaagcagttcagttagatacatt

SEQ ID NO: 19064 - DNA, 25 bp, Probe sequence
caggattgtattgtgaattagtgga

SEQ ID NO: 19065 - DNA, 25 bp, Probe sequence
ttgatgaatatgtggcaatgatgga

SEQ ID NO: 19066 - DNA, 25 bp, Probe sequence
atgaatatgtggcaatgatggatat

SEQ ID NO: 19067 - DNA, 25 bp, Probe sequence
tgagattagcagaaggtattgtgat

SEQ ID NO: 19068 - DNA, 25 bp, Probe sequence
atgagattagcagaaggtattgtga

SEQ ID NO: 19069 - DNA, 25 bp, Probe sequence
gattagcagaaggtattgtgattga

SEQ ID NO: 19070 - DNA, 25 bp, Probe sequence
agattagcagaaggtattgtgattg

SEQ ID NO: 19071 - DNA, 25 bp, Probe sequence
gagattagcagaaggtattgtgatt

SEQ ID NO: 19072 - DNA, 25 bp, Probe sequence
gaggttcgtatccagaatgaagatg

SEQ ID NO: 19073 - DNA, 25 bp, Probe sequence
attagcagaaggtattgtgattgaa

SEQ ID NO: 19074 - DNA, 25 bp, Probe sequence
tgaggttcgtatccagaatgaagat

SEQ ID NO: 19075 - DNA, 25 bp, Probe sequence
gactacaacgcagaagtggaattaa

SEQ ID NO: 19076 - DNA, 25 bp, Probe sequence
gacaattagaatatgctggtgaagg

SEQ ID NO: 19077 - DNA, 25 bp, Probe sequence
ggacaattagaatatgctggtgaag

SEQ ID NO: 19078 - DNA, 25 bp, Probe sequence
tggacaattagaatatgctggtgaa

SEQ ID NO: 19079 - DNA, 25 bp, Probe sequence
ttggacaattagaatatgctggtga

SEQ ID NO: 19080 - DNA, 25 bp, Probe sequence
accattctctctcgtagttacaatt

SEQ ID NO: 19081 - DNA, 25 bp, Probe sequence
caaccattctctctcgtagttacaa

SEQ ID NO: 19082 - DNA, 25 bp, Probe sequence
aaccattctctctcgtagttacaat

SEQ ID NO: 19083 - DNA, 25 bp, Probe sequence
gattcaacgagcagatgatattgtt

SEQ ID NO: 19084 - DNA, 25 bp, Probe sequence
aacgattcaacgagcagatgatatt

SEQ ID NO: 19085 - DNA, 25 bp, Probe sequence
ggtatcacacttactacagcacata

SEQ ID NO: 19086 - DNA, 25 bp, Probe sequence
cgagatggtatcacacttactacag

SEQ ID NO: 19087 - DNA, 25 bp, Probe sequence
gagatggtatcacacttactacagc

SEQ ID NO: 19088 - DNA, 25 bp, Probe sequence
gatggtatcacacttactacagcac

SEQ ID NO: 19089 - DNA, 25 bp, Probe sequence
agatggtatcacacttactacagca

SEQ ID NO: 19090 - DNA, 25 bp, Probe sequence
tggtatcacacttactacagcacat

SEQ ID NO: 19091 - DNA, 25 bp, Probe sequence
atggtatcacacttactacagcaca

SEQ ID NO: 19092 - DNA, 25 bp, Probe sequence
gtatcacacttactacagcacataa

SEQ ID NO: 19093 - DNA, 25 bp, Probe sequence
aagaatgtatagtggagacgacaac

SEQ ID NO: 19094 - DNA, 25 bp, Probe sequence
agtaatcctgaagaagacgatgaag

SEQ ID NO: 19095 - DNA, 25 bp, Probe sequence
gcataattggttcagtgtattctcc

SEQ ID NO: 19096 - DNA, 25 bp, Probe sequence
tggttcagtgtattctcctaatctt

SEQ ID NO: 19097 - DNA, 25 bp, Probe sequence
ttggttcagtgtattctcctaatct

SEQ ID NO: 19098 - DNA, 25 bp, Probe sequence
cttagttgaaggagatgctgaagaa

SEQ ID NO: 19099 - DNA, 25 bp, Probe sequence
tggtaggaagactcaatgacaatat

SEQ ID NO: 19100 - DNA, 25 bp, Probe sequence
cattggattattatctctgcgacat

SEQ ID NO: 19101 - DNA, 25 bp, Probe sequence
aacttagacgaacttggaataggtt

SEQ ID NO: 19102 - DNA, 25 bp, Probe sequence
ttatgttgattgaagaaccagaagc

SEQ ID NO: 19103 - DNA, 25 bp, Probe sequence
cattataggcggtatgttggaagaa

SEQ ID NO: 19104 - DNA, 25 bp, Probe sequence
attataggcggtatgttggaagaaa

SEQ ID NO: 19105 - DNA, 25 bp, Probe sequence
gcattataggcggtatgttggaaga

SEQ ID NO: 19106 - DNA, 25 bp, Probe sequence
agcattataggcggtatgttggaag

SEQ ID NO: 19107 - DNA, 25 bp, Probe sequence
gagcattataggcggtatgttggaa

SEQ ID NO: 19108 - DNA, 25 bp, Probe sequence
ttgagcattataggcggtatgttgg

SEQ ID NO: 19109 - DNA, 25 bp, Probe sequence
tttgagcattataggcggtatgttg

SEQ ID NO: 19110 - DNA, 25 bp, Probe sequence
tgagcattataggcggtatgttgga

SEQ ID NO: 19111 - DNA, 25 bp, Probe sequence
ttataggcggtatgttggaagaaaa

SEQ ID NO: 19112 - DNA, 25 bp, Probe sequence
atcatagaggtatcacgcattccat

SEQ ID NO: 19113 - DNA, 25 bp, Probe sequence
tcatagaggtatcacgcattccatc

SEQ ID NO: 19114 - DNA, 25 bp, Probe sequence
catcatagaggtatcacgcattcca

SEQ ID NO: 19115 - DNA, 25 bp, Probe sequence
ccttatcgttggttcattaattcct

SEQ ID NO: 19116 - DNA, 25 bp, Probe sequence
aatgagagccgtaattaagcaacaa

SEQ ID NO: 19117 - DNA, 25 bp, Probe sequence
atcgttggttcattaattcctgatg

SEQ ID NO: 19118 - DNA, 25 bp, Probe sequence
tgtcatagaccactcttatattggc

SEQ ID NO: 19119 - DNA, 25 bp, Probe sequence
tcatagaccactcttatattggctg

SEQ ID NO: 19120 - DNA, 25 bp, Probe sequence
gtcatagaccactcttatattggct

SEQ ID NO: 19121 - DNA, 25 bp, Probe sequence
gttgtttaggaccaaatgttcttgt

SEQ ID NO: 19122 - DNA, 25 bp, Probe sequence
agttgtttaggaccaaatgttcttg

SEQ ID NO: 19123 - DNA, 25 bp, Probe sequence
ttgtttaggaccaaatgttcttgtt

SEQ ID NO: 19124 - DNA, 25 bp, Probe sequence
cgagtttagttgtttaggaccaaat

SEQ ID NO: 19125 - DNA, 25 bp, Probe sequence
caaattgaagcaacctgttagcatt

SEQ ID NO: 19126 - DNA, 25 bp, Probe sequence
tgtttaggaccaaatgttcttgtta

SEQ ID NO: 19127 - DNA, 25 bp, Probe sequence
agtttagttgtttaggaccaaatgt

SEQ ID NO: 19128 - DNA, 25 bp, Probe sequence
ccgagtttagttgtttaggaccaaa

SEQ ID NO: 19129 - DNA, 25 bp, Probe sequence
tagttgtttaggaccaaatgttctt

SEQ ID NO: 19130 - DNA, 25 bp, Probe sequence
aacaatcaattcacctaaccgttac

SEQ ID NO: 19131 - DNA, 25 bp, Probe sequence
gtgaaggtggcttatcagaatatca

SEQ ID NO: 19132 - DNA, 25 bp, Probe sequence
tgaaggtggcttatcagaatatcat

SEQ ID NO: 19133 - DNA, 25 bp, Probe sequence
gaaggtggcttatcagaatatcatt

SEQ ID NO: 19134 - DNA, 25 bp, Probe sequence
ggtgaaggtggcttatcagaatatc

SEQ ID NO: 19135 - DNA, 25 bp, Probe sequence
gaattacaagatggtgttggcttac

SEQ ID NO: 19136 - DNA, 25 bp, Probe sequence
agaattacaagatggtgttggctta

SEQ ID NO: 19137 - DNA, 25 bp, Probe sequence
aggtgaaggtggcttatcagaatat

SEQ ID NO: 19138 - DNA, 25 bp, Probe sequence
atgaatacaggtgaaggtggcttat

SEQ ID NO: 19139 - DNA, 25 bp, Probe sequence
aatctgcgaacgatgtctattacag

SEQ ID NO: 19140 - DNA, 25 bp, Probe sequence
cacgtacattatcagaacaaggaat

SEQ ID NO: 19141 - DNA, 25 bp, Probe sequence
caaatctgcgaacgatgtctattac

SEQ ID NO: 19142 - DNA, 25 bp, Probe sequence
aagtatgcacatcatcgaggtatat

SEQ ID NO: 19143 - DNA, 25 bp, Probe sequence
ttgttccgagtttagttgtttaggg

SEQ ID NO: 19144 - DNA, 25 bp, Probe sequence
gcacgtacattatcagaacaaggaa

SEQ ID NO: 19145 - DNA, 25 bp, Probe sequence
agtatgcacatcatcgaggtatata

SEQ ID NO: 19146 - DNA, 25 bp, Probe sequence
ccaaatctgcgaacgatgtctatta

SEQ ID NO: 19147 - DNA, 25 bp, Probe sequence
atgcacgtacattatcagaacaagg

SEQ ID NO: 19148 - DNA, 25 bp, Probe sequence
gtaccagatccatactacacgaata

SEQ ID NO: 19149 - DNA, 25 bp, Probe sequence
aagagagtgatgtaccagatccata

SEQ ID NO: 19150 - DNA, 25 bp, Probe sequence
accagatccatactacacgaataat

SEQ ID NO: 19151 - DNA, 25 bp, Probe sequence
aatatatgtcgttctccaatggcag

SEQ ID NO: 19152 - DNA, 25 bp, Probe sequence
tgtcttggcaatatatgtcgttctc

SEQ ID NO: 19153 - DNA, 25 bp, Probe sequence
ctgtcttggcaatatatgtcgttct

SEQ ID NO: 19154 - DNA, 25 bp, Probe sequence
tctgtcttggcaatatatgtcgttc

SEQ ID NO: 19155 - DNA, 25 bp, Probe sequence
agagagtgatgtaccagatccatac

SEQ ID NO: 19156 - DNA, 25 bp, Probe sequence
caatatatgtcgttctccaatggca

SEQ ID NO: 19157 - DNA, 25 bp, Probe sequence
cagacttaggtatatcgttaggtgg

SEQ ID NO: 19158 - DNA, 25 bp, Probe sequence
gcagacttaggtatatcgttaggtg

SEQ ID NO: 19159 - DNA, 25 bp, Probe sequence
agtaggtcgtaatatgttgttaggt

SEQ ID NO: 19160 - DNA, 25 bp, Probe sequence
agacttaggtatatcgttaggtggc

SEQ ID NO: 19161 - DNA, 25 bp, Probe sequence
atcgttctgaaggtgtatcattgta

SEQ ID NO: 19162 - DNA, 25 bp, Probe sequence
gtaggtcgtaatatgttgttaggtt

SEQ ID NO: 19163 - DNA, 25 bp, Probe sequence
aaggtgtatcattgtactcgctatt

SEQ ID NO: 19164 - DNA, 25 bp, Probe sequence
gaaggtgtatcattgtactcgctat

SEQ ID NO: 19165 - DNA, 25 bp, Probe sequence
aagtaggtcgtaatatgttgttagg

SEQ ID NO: 19166 - DNA, 25 bp, Probe sequence
cgtcgtaataatcctgaattagaac

SEQ ID NO: 19167 - DNA, 25 bp, Probe sequence
tcgtcgtaataatcctgaattagaa

SEQ ID NO: 19168 - DNA, 25 bp, Probe sequence
ttcgtcgtaataatcctgaattaga

SEQ ID NO: 19169 - DNA, 25 bp, Probe sequence
aagccttctaaagtcagcaagatta

SEQ ID NO: 19170 - DNA, 25 bp, Probe sequence
taagccttctaaagtcagcaagatt

SEQ ID NO: 19171 - DNA, 25 bp, Probe sequence
tgttgttgaagaaattcgtcgtaat

SEQ ID NO: 19172 - DNA, 25 bp, Probe sequence
atgttgttgaagaaattcgtcgtaa

SEQ ID NO: 19173 - DNA, 25 bp, Probe sequence
gatgttgttgaagaaattcgtcgta

SEQ ID NO: 19174 - DNA, 25 bp, Probe sequence
agccttctaaagtcagcaagattaa

SEQ ID NO: 19175 - DNA, 25 bp, Probe sequence
aagtgacaatgcttatacaagagaa

SEQ ID NO: 19176 - DNA, 25 bp, Probe sequence
agtgacaatgcttatacaagagaat

SEQ ID NO: 19177 - DNA, 25 bp, Probe sequence
gtgacaatgcttatacaagagaatt

SEQ ID NO: 19178 - DNA, 25 bp, Probe sequence
ggtctatctaaggcatacatggata

SEQ ID NO: 19179 - DNA, 25 bp, Probe sequence
tgaagtgatgtgtcaatgtgatgga

SEQ ID NO: 19180 - DNA, 25 bp, Probe sequence
gaagtgatgtgtcaatgtgatggac

SEQ ID NO: 19181 - DNA, 25 bp, Probe sequence
atcctaatatgttatcaggtggaga

SEQ ID NO: 19182 - DNA, 25 bp, Probe sequence
aagcaattacattgttggaagaagt

SEQ ID NO: 19183 - DNA, 25 bp, Probe sequence
aatagaagaacaaattccgacaagc

SEQ ID NO: 19184 - DNA, 25 bp, Probe sequence
caatcattcatcagcgtagtgtaat

SEQ ID NO: 19185 - DNA, 25 bp, Probe sequence
tgtagaagatagccgtaatggaatc

SEQ ID NO: 19186 - DNA, 25 bp, Probe sequence
atgtagaagatagccgtaatggaat

SEQ ID NO: 19187 - DNA, 25 bp, Probe sequence
gtagaagatagccgtaatggaatcg

SEQ ID NO: 19188 - DNA, 25 bp, Probe sequence
agtggtggcttattatctatcggtt

SEQ ID NO: 19189 - DNA, 25 bp, Probe sequence
tagaagatagccgtaatggaatcgt

SEQ ID NO: 19190 - DNA, 25 bp, Probe sequence
acatcctagtgatacctatccagaa

SEQ ID NO: 19191 - DNA, 25 bp, Probe sequence
aacatcctagtgatacctatccaga

SEQ ID NO: 19192 - DNA, 25 bp, Probe sequence
aatcattcatcagcgtagtgtaatt

SEQ ID NO: 19193 - DNA, 25 bp, Probe sequence
aggaatgttacagcgattgatgatt

SEQ ID NO: 19194 - DNA, 25 bp, Probe sequence
ggaatgttacagcgattgatgattg

SEQ ID NO: 19195 - DNA, 25 bp, Probe sequence
gaggaatgttacagcgattgatgat

SEQ ID NO: 19196 - DNA, 25 bp, Probe sequence
gaatgttacagcgattgatgattgc

SEQ ID NO: 19197 - DNA, 25 bp, Probe sequence
tatcaggaggaatgttacagcgatt

SEQ ID NO: 19198 - DNA, 25 bp, Probe sequence
ttatcaggaggaatgttacagcgat

SEQ ID NO: 19199 - DNA, 25 bp, Probe sequence
atgttatcaggaggaatgttacagc

SEQ ID NO: 19200 - DNA, 25 bp, Probe sequence
acacaatatgatgtactggaagcat

SEQ ID NO: 19201 - DNA, 25 bp, Probe sequence
cacaatatgatgtactggaagcatt

SEQ ID NO: 19202 - DNA, 25 bp, Probe sequence
gtcggacaccttaatagattacctt

SEQ ID NO: 19203 - DNA, 25 bp, Probe sequence
gagtcggacaccttaatagattacc

SEQ ID NO: 19204 - DNA, 25 bp, Probe sequence
ggagtcggacaccttaatagattac

SEQ ID NO: 19205 - DNA, 25 bp, Probe sequence
agtcggacaccttaatagattacct

SEQ ID NO: 19206 - DNA, 25 bp, Probe sequence
aactattgttctactctggagcaag

SEQ ID NO: 19207 - DNA, 25 bp, Probe sequence
actattgttctactctggagcaaga

SEQ ID NO: 19208 - DNA, 25 bp, Probe sequence
acaattcaatcaattctatgaggcg

SEQ ID NO: 19209 - DNA, 25 bp, Probe sequence
gctcgttgaagaatatatagactgg

SEQ ID NO: 19210 - DNA, 25 bp, Probe sequence
aacaattcaatcaattctatgaggc

SEQ ID NO: 19211 - DNA, 25 bp, Probe sequence
tcgcttatcaaagaacaataaatgc

SEQ ID NO: 19212 - DNA, 25 bp, Probe sequence
cgatgaattccttacgacaatatct

SEQ ID NO: 19213 - DNA, 25 bp, Probe sequence
aattccttacgacaatatctaacaa

SEQ ID NO: 19214 - DNA, 25 bp, Probe sequence
acatatttcgcttatcaaagaacaa

SEQ ID NO: 19215 - DNA, 25 bp, Probe sequence
aacatatttcgcttatcaaagaaca

SEQ ID NO: 19216 - DNA, 25 bp, Probe sequence
gaattatcatcttcagtttctcgtt

SEQ ID NO: 19217 - DNA, 25 bp, Probe sequence
ttgctaagttagggaatataagtgt

SEQ ID NO: 19218 - DNA, 25 bp, Probe sequence
aaagagattgctaagttagggaata

SEQ ID NO: 19219 - DNA, 25 bp, Probe sequence
aagagattgctaagttagggaatat

SEQ ID NO: 19220 - DNA, 25 bp, Probe sequence
attaagtaagacagatgccttgatg

SEQ ID NO: 19221 - DNA, 25 bp, Probe sequence
aagtaagacagatgccttgatgtat

SEQ ID NO: 19222 - DNA, 25 bp, Probe sequence
ttaagtaagacagatgccttgatgt

SEQ ID NO: 19223 - DNA, 25 bp, Probe sequence
taagtaagacagatgccttgatgta

SEQ ID NO: 19224 - DNA, 25 bp, Probe sequence
agtaagacagatgccttgatgtata

SEQ ID NO: 19225 - DNA, 25 bp, Probe sequence
attattggactcgtgacatcaggtt

SEQ ID NO: 19226 - DNA, 25 bp, Probe sequence
aattaagtaagacagatgccttgat

SEQ ID NO: 19227 - DNA, 25 bp, Probe sequence
gtaagacagatgccttgatgtataa

SEQ ID NO: 19228 - DNA, 25 bp, Probe sequence
ctaagtattatggtcaggtcgaaga

SEQ ID NO: 19229 - DNA, 25 bp, Probe sequence
gccaggtattgccatagtgattata

SEQ ID NO: 19230 - DNA, 25 bp, Probe sequence
ccaggtattgccatagtgattatag

SEQ ID NO: 19231 - DNA, 25 bp, Probe sequence
caggtattgccatagtgattatagt

SEQ ID NO: 19232 - DNA, 25 bp, Probe sequence
cgccaggtattgccatagtgattat

SEQ ID NO: 19233 - DNA, 25 bp, Probe sequence
tcaacatctactaggtactgaccat

SEQ ID NO: 19234 - DNA, 25 bp, Probe sequence
caacatctactaggtactgaccatt

SEQ ID NO: 19235 - DNA, 25 bp, Probe sequence
ttcaacatctactaggtactgacca

SEQ ID NO: 19236 - DNA, 25 bp, Probe sequence
tttatgcgattagaccaagtttgtt

SEQ ID NO: 19237 - DNA, 25 bp, Probe sequence
tcttatccgatgctttacaaattgc

SEQ ID NO: 19238 - DNA, 25 bp, Probe sequence
tactacagcaatcaatcgttcacta

SEQ ID NO: 19239 - DNA, 25 bp, Probe sequence
attactacagcaatcaatcgttcac

SEQ ID NO: 19240 - DNA, 25 bp, Probe sequence
ttactacagcaatcaatcgttcact

SEQ ID NO: 19241 - DNA, 25 bp, Probe sequence
tagcaatcaacgaagaagtattagc

SEQ ID NO: 19242 - DNA, 25 bp, Probe sequence
tacagcaatcaatcgttcactacaa

SEQ ID NO: 19243 - DNA, 25 bp, Probe sequence
gcaatcaacgaagaagtattagcac

SEQ ID NO: 19244 - DNA, 25 bp, Probe sequence
agcaatcaacgaagaagtattagca

SEQ ID NO: 19245 - DNA, 25 bp, Probe sequence
tgatgagccaatcttagttacagac

SEQ ID NO: 19246 - DNA, 25 bp, Probe sequence
ctacagcaatcaatcgttcactaca

SEQ ID NO: 19247 - DNA, 25 bp, Probe sequence
agcagataatggtgaagacttagat

SEQ ID NO: 19248 - DNA, 25 bp, Probe sequence
gaaggtcatcgtcaatcagtagaag

SEQ ID NO: 19249 - DNA, 25 bp, Probe sequence
gaagaaggtcatcgtcaatcagtag

SEQ ID NO: 19250 - DNA, 25 bp, Probe sequence
agaaggtcatcgtcaatcagtagaa

SEQ ID NO: 19251 - DNA, 25 bp, Probe sequence
aagaaggtcatcgtcaatcagtaga

SEQ ID NO: 19252 - DNA, 25 bp, Probe sequence
tagcagataatggtgaagacttaga

SEQ ID NO: 19253 - DNA, 25 bp, Probe sequence
atccaatcaatcaacaagaccataa

SEQ ID NO: 19254 - DNA, 25 bp, Probe sequence
agatatggatgtgattattagtgcg

SEQ ID NO: 19255 - DNA, 25 bp, Probe sequence
aatcagtagaaggtgaatggaactt

SEQ ID NO: 19256 - DNA, 25 bp, Probe sequence
ctcaagaacaagaagtaacaagacg

SEQ ID NO: 19257 - DNA, 25 bp, Probe sequence
tctcaagaacaagaagtaacaagac

SEQ ID NO: 19258 - DNA, 25 bp, Probe sequence
ataactatattaacgacagaggtgc

SEQ ID NO: 19259 - DNA, 25 bp, Probe sequence
atctcaagaacaagaagtaacaaga

SEQ ID NO: 19260 - DNA, 25 bp, Probe sequence
gcttatctcaagaacaagaagtaac

SEQ ID NO: 19261 - DNA, 25 bp, Probe sequence
acagcttatctcaagaacaagaagt

SEQ ID NO: 19262 - DNA, 25 bp, Probe sequence
agacagcttatctcaagaacaagaa

SEQ ID NO: 19263 - DNA, 25 bp, Probe sequence
aagacagcttatctcaagaacaaga

SEQ ID NO: 19264 - DNA, 25 bp, Probe sequence
gacagcttatctcaagaacaagaag

SEQ ID NO: 19265 - DNA, 25 bp, Probe sequence
aacatattgccgacttctggattaa

SEQ ID NO: 19266 - DNA, 25 bp, Probe sequence
catattgccgacttctggattaaca

SEQ ID NO: 19267 - DNA, 25 bp, Probe sequence
acatattgccgacttctggattaac

SEQ ID NO: 19268 - DNA, 25 bp, Probe sequence
agttacatattgccagtgatcgtta

SEQ ID NO: 19269 - DNA, 25 bp, Probe sequence
acatattgccagtgatcgttattac

SEQ ID NO: 19270 - DNA, 25 bp, Probe sequence
gttacatattgccagtgatcgttat

SEQ ID NO: 19271 - DNA, 25 bp, Probe sequence
aagttacatattgccagtgatcgtt

SEQ ID NO: 19272 - DNA, 25 bp, Probe sequence
ttacatattgccagtgatcgttatt

SEQ ID NO: 19273 - DNA, 25 bp, Probe sequence
atattgccgacttctggattaacag

SEQ ID NO: 19274 - DNA, 25 bp, Probe sequence
agtatttgttctgtcggaatggtta

SEQ ID NO: 19275 - DNA, 25 bp, Probe sequence
atttgttctgtcggaatggttaaag

SEQ ID NO: 19276 - DNA, 25 bp, Probe sequence
gtatttgttctgtcggaatggttaa

SEQ ID NO: 19277 - DNA, 25 bp, Probe sequence
aagtatttgttctgtcggaatggtt

SEQ ID NO: 19278 - DNA, 25 bp, Probe sequence
tttgttctgtcggaatggttaaagt

SEQ ID NO: 19279 - DNA, 25 bp, Probe sequence
tatttgttctgtcggaatggttaaa

SEQ ID NO: 19280 - DNA, 25 bp, Probe sequence
gttctgtcggaatggttaaagtcat

SEQ ID NO: 19281 - DNA, 25 bp, Probe sequence
ttgttctgtcggaatggttaaagtc

SEQ ID NO: 19282 - DNA, 25 bp, Probe sequence
caagtatttgttctgtcggaatggt

SEQ ID NO: 19283 - DNA, 25 bp, Probe sequence
aagaacaagcagaatacttacaagc

SEQ ID NO: 19284 - DNA, 25 bp, Probe sequence
caagcagaatacttacaagcagaat

SEQ ID NO: 19285 - DNA, 25 bp, Probe sequence
gaacaagcagaatacttacaagcag

SEQ ID NO: 19286 - DNA, 25 bp, Probe sequence
acaagcagaatacttacaagcagaa

SEQ ID NO: 19287 - DNA, 25 bp, Probe sequence
aacaagcagaatacttacaagcaga

SEQ ID NO: 19288 - DNA, 25 bp, Probe sequence
agaacaagcagaatacttacaagca

SEQ ID NO: 19289 - DNA, 25 bp, Probe sequence
atcaagttaagcgtagtcaacctat

SEQ ID NO: 19290 - DNA, 25 bp, Probe sequence
ctatcaagttaagcgtagtcaacct

SEQ ID NO: 19291 - DNA, 25 bp, Probe sequence
tcaagttaagcgtagtcaacctatg

SEQ ID NO: 19292 - DNA, 25 bp, Probe sequence
aagaactatccttaatggaagcact

SEQ ID NO: 19293 - DNA, 25 bp, Probe sequence
ctatccttaatggaagcactagcaa

SEQ ID NO: 19294 - DNA, 25 bp, Probe sequence
aactatccttaatggaagcactagc

SEQ ID NO: 19295 - DNA, 25 bp, Probe sequence
agaactatccttaatggaagcacta

SEQ ID NO: 19296 - DNA, 25 bp, Probe sequence
gaactatccttaatggaagcactag

SEQ ID NO: 19297 - DNA, 25 bp, Probe sequence
actatccttaatggaagcactagca

SEQ ID NO: 19298 - DNA, 25 bp, Probe sequence
aagtacacaagtgctgtatgatctt

SEQ ID NO: 19299 - DNA, 25 bp, Probe sequence
caagtacacaagtgctgtatgatct

SEQ ID NO: 19300 - DNA, 25 bp, Probe sequence
acaagtgggaacaatgattgaaatt

SEQ ID NO: 19301 - DNA, 25 bp, Probe sequence
tgactatatacacacaccaatcctt

SEQ ID NO: 19302 - DNA, 25 bp, Probe sequence
actatatacacacaccaatccttga

SEQ ID NO: 19303 - DNA, 25 bp, Probe sequence
ttgactatatacacacaccaatcct

SEQ ID NO: 19304 - DNA, 25 bp, Probe sequence
gactatatacacacaccaatccttg

SEQ ID NO: 19305 - DNA, 25 bp, Probe sequence
ctatatacacacaccaatccttgaa

SEQ ID NO: 19306 - DNA, 25 bp, Probe sequence
aaagatggcaaatcacatactatcg

SEQ ID NO: 19307 - DNA, 25 bp, Probe sequence
ggagacaactcgaatatagatgtgt

SEQ ID NO: 19308 - DNA, 25 bp, Probe sequence
tggagacaactcgaatatagatgtg

SEQ ID NO: 19309 - DNA, 25 bp, Probe sequence
atggagacaactcgaatatagatgt

SEQ ID NO: 19310 - DNA, 25 bp, Probe sequence
gattgccgtctacttcttgatacta

SEQ ID NO: 19311 - DNA, 25 bp, Probe sequence
ttatgattgccgtctacttcttgat

SEQ ID NO: 19312 - DNA, 25 bp, Probe sequence
attatgattgccgtctacttcttga

SEQ ID NO: 19313 - DNA, 25 bp, Probe sequence
ttgccgtctacttcttgatactaat

SEQ ID NO: 19314 - DNA, 25 bp, Probe sequence
attgccgtctacttcttgatactaa

SEQ ID NO: 19315 - DNA, 25 bp, Probe sequence
tgccgtctacttcttgatactaatc

SEQ ID NO: 19316 - DNA, 25 bp, Probe sequence
ccgtctacttcttgatactaatcgt

SEQ ID NO: 19317 - DNA, 25 bp, Probe sequence
tatgattgccgtctacttcttgata

SEQ ID NO: 19318 - DNA, 25 bp, Probe sequence
atgattgccgtctacttcttgatac

SEQ ID NO: 19319 - DNA, 25 bp, Probe sequence
ttggatgaaggtgatattgagcatt

SEQ ID NO: 19320 - DNA, 25 bp, Probe sequence
cagatgcttattatgacacactaca

SEQ ID NO: 19321 - DNA, 25 bp, Probe sequence
agatgcttattatgacacactacag

SEQ ID NO: 19322 - DNA, 25 bp, Probe sequence
gcagatgcttattatgacacactac

SEQ ID NO: 19323 - DNA, 25 bp, Probe sequence
aactcaacaatgtgtcaacgaatct

SEQ ID NO: 19324 - DNA, 25 bp, Probe sequence
ctcaacaatgtgtcaacgaatctct

SEQ ID NO: 19325 - DNA, 25 bp, Probe sequence
tcaacaatgtgtcaacgaatctctg

SEQ ID NO: 19326 - DNA, 25 bp, Probe sequence
actcaacaatgtgtcaacgaatctc

SEQ ID NO: 19327 - DNA, 25 bp, Probe sequence
cttattatgacacactacagcaatt

SEQ ID NO: 19328 - DNA, 25 bp, Probe sequence
aggtatgattacaactactgctcag

SEQ ID NO: 19329 - DNA, 25 bp, Probe sequence
caggtatgattacaactactgctca

SEQ ID NO: 19330 - DNA, 25 bp, Probe sequence
acaggtatgattacaactactgctc

SEQ ID NO: 19331 - DNA, 25 bp, Probe sequence
aacaggtatgattacaactactgct

SEQ ID NO: 19332 - DNA, 25 bp, Probe sequence
caacaggtatgattacaactactgc

SEQ ID NO: 19333 - DNA, 25 bp, Probe sequence
ctaagagtacaggtcaacacactac

SEQ ID NO: 19334 - DNA, 25 bp, Probe sequence
tctaagagtacaggtcaacacacta

SEQ ID NO: 19335 - DNA, 25 bp, Probe sequence
aacaacaggtatgattacaactact

SEQ ID NO: 19336 - DNA, 25 bp, Probe sequence
ttctaagagtacaggtcaacacact

SEQ ID NO: 19337 - DNA, 25 bp, Probe sequence
tactggcaataatgtaacgcaacta

SEQ ID NO: 19338 - DNA, 25 bp, Probe sequence
atacctactggcaataatgtaacgc

SEQ ID NO: 19339 - DNA, 25 bp, Probe sequence
actggcaataatgtaacgcaactaa

SEQ ID NO: 19340 - DNA, 25 bp, Probe sequence
ctactggcaataatgtaacgcaact

SEQ ID NO: 19341 - DNA, 25 bp, Probe sequence
tatacctactggcaataatgtaacg

SEQ ID NO: 19342 - DNA, 25 bp, Probe sequence
tacctactggcaataatgtaacgca

SEQ ID NO: 19343 - DNA, 25 bp, Probe sequence
cctactggcaataatgtaacgcaac

SEQ ID NO: 19344 - DNA, 25 bp, Probe sequence
caatgttattccagtatccaatggc

SEQ ID NO: 19345 - DNA, 25 bp, Probe sequence
acaatgttattccagtatccaatgg

SEQ ID NO: 19346 - DNA, 25 bp, Probe sequence
gaagataagtggcaatgtgtgaata

SEQ ID NO: 19347 - DNA, 25 bp, Probe sequence
aattattgttagttggttcaggtgc

SEQ ID NO: 19348 - DNA, 25 bp, Probe sequence
aagataagtggcaatgtgtgaataa

SEQ ID NO: 19349 - DNA, 25 bp, Probe sequence
ggaagataagtggcaatgtgtgaat

SEQ ID NO: 19350 - DNA, 25 bp, Probe sequence
aagatgtgacgcatatcatattcag

SEQ ID NO: 19351 - DNA, 25 bp, Probe sequence
agatgtgacgcatatcatattcagc

SEQ ID NO: 19352 - DNA, 25 bp, Probe sequence
ggtgcttcagttatcggtattgata

SEQ ID NO: 19353 - DNA, 25 bp, Probe sequence
tattgatattgatccacaagccgtt

SEQ ID NO: 19354 - DNA, 25 bp, Probe sequence
tcggtattgatattgatccacaagc

SEQ ID NO: 19355 - DNA, 25 bp, Probe sequence
gggtcttcagttggatataaggaaa

SEQ ID NO: 19356 - DNA, 25 bp, Probe sequence
aaagggtcttcagttggatataagg

SEQ ID NO: 19357 - DNA, 25 bp, Probe sequence
agggtcttcagttggatataaggaa

SEQ ID NO: 19358 - DNA, 25 bp, Probe sequence
aagggtcttcagttggatataagga

SEQ ID NO: 19359 - DNA, 25 bp, Probe sequence
agccttgatgaaagagaaacagaaa

SEQ ID NO: 19360 - DNA, 25 bp, Probe sequence
aagccttgatgaaagagaaacagaa

SEQ ID NO: 19361 - DNA, 25 bp, Probe sequence
aaagccttgatgaaagagaaacaga

SEQ ID NO: 19362 - DNA, 25 bp, Probe sequence
aatagaaatactaggaccacaaccg

SEQ ID NO: 19363 - DNA, 25 bp, Probe sequence
gaaagggtcttcagttggatataag

SEQ ID NO: 19364 - DNA, 25 bp, Probe sequence
tattctcagtacctcagacgattct

SEQ ID NO: 19365 - DNA, 25 bp, Probe sequence
ttattctcagtacctcagacgattc

SEQ ID NO: 19366 - DNA, 25 bp, Probe sequence
tactaacaattatgaacacagaagc

SEQ ID NO: 19367 - DNA, 25 bp, Probe sequence
actaacaattatgaacacagaagct

SEQ ID NO: 19368 - DNA, 25 bp, Probe sequence
aaatacagaacacaaacaactcaca

SEQ ID NO: 19369 - DNA, 25 bp, Probe sequence
acagaacacaaacaactcacattat

SEQ ID NO: 19370 - DNA, 25 bp, Probe sequence
atacagaacacaaacaactcacatt

SEQ ID NO: 19371 - DNA, 25 bp, Probe sequence
aatacagaacacaaacaactcacat

SEQ ID NO: 19372 - DNA, 25 bp, Probe sequence
tacagaacacaaacaactcacatta

SEQ ID NO: 19373 - DNA, 25 bp, Probe sequence
cacttagttatgagcggtaatgaat

SEQ ID NO: 19374 - DNA, 25 bp, Probe sequence
tcacttagttatgagcggtaatgaa

SEQ ID NO: 19375 - DNA, 25 bp, Probe sequence
ttcacttagttatgagcggtaatga

SEQ ID NO: 19376 - DNA, 25 bp, Probe sequence
acttagttatgagcggtaatgaatt

SEQ ID NO: 19377 - DNA, 25 bp, Probe sequence
ggtaatgcgacgatgtcatatatac

SEQ ID NO: 19378 - DNA, 25 bp, Probe sequence
cggtaatgcgacgatgtcatatata

SEQ ID NO: 19379 - DNA, 25 bp, Probe sequence
gtaatgcgacgatgtcatatataca

SEQ ID NO: 19380 - DNA, 25 bp, Probe sequence
aggtaggctttatagaatcaacaca

SEQ ID NO: 19381 - DNA, 25 bp, Probe sequence
acaggtaggctttatagaatcaaca

SEQ ID NO: 19382 - DNA, 25 bp, Probe sequence
taacggttggtatatggtaactgaa

SEQ ID NO: 19383 - DNA, 25 bp, Probe sequence
ttaacggttggtatatggtaactga

SEQ ID NO: 19384 - DNA, 25 bp, Probe sequence
cttgttgaattgaactatgctgtgt

SEQ ID NO: 19385 - DNA, 25 bp, Probe sequence
acttgttgaattgaactatgctgtg

SEQ ID NO: 19386 - DNA, 25 bp, Probe sequence
cacttgttgaattgaactatgctgt

SEQ ID NO: 19387 - DNA, 25 bp, Probe sequence
tgaactatgctgtgtatcattcctt

SEQ ID NO: 19388 - DNA, 25 bp, Probe sequence
ttgaactatgctgtgtatcattcct

SEQ ID NO: 19389 - DNA, 25 bp, Probe sequence
ttgttgaattgaactatgctgtgta

SEQ ID NO: 19390 - DNA, 25 bp, Probe sequence
tgttgaattgaactatgctgtgtat

SEQ ID NO: 19391 - DNA, 25 bp, Probe sequence
catattgaagactatccacataacg

SEQ ID NO: 19392 - DNA, 25 bp, Probe sequence
acacatattgaagactatccacata

SEQ ID NO: 19393 - DNA, 25 bp, Probe sequence
tacacatattgaagactatccacat

SEQ ID NO: 19394 - DNA, 25 bp, Probe sequence
atacacatattgaagactatccaca

SEQ ID NO: 19395 - DNA, 25 bp, Probe sequence
ctgattctgcaattacaaccgatat

SEQ ID NO: 19396 - DNA, 25 bp, Probe sequence
catatttggcttgtcgtcagtattt

SEQ ID NO: 19397 - DNA, 25 bp, Probe sequence
tcatatttggcttgtcgtcagtatt

SEQ ID NO: 19398 - DNA, 25 bp, Probe sequence
ttcatatttggcttgtcgtcagtat

SEQ ID NO: 19399 - DNA, 25 bp, Probe sequence
tttcatatttggcttgtcgtcagta

SEQ ID NO: 19400 - DNA, 25 bp, Probe sequence
atagagaacataagtcatagtgagc

SEQ ID NO: 19401 - DNA, 25 bp, Probe sequence
agagaacataagtcatagtgagctt

SEQ ID NO: 19402 - DNA, 25 bp, Probe sequence
tcaagctataagagagattgcagat

SEQ ID NO: 19403 - DNA, 25 bp, Probe sequence
atcaagctataagagagattgcaga

SEQ ID NO: 19404 - DNA, 25 bp, Probe sequence
tagagaacataagtcatagtgagct

SEQ ID NO: 19405 - DNA, 25 bp, Probe sequence
cctgaattacaagtattagcaaacg

SEQ ID NO: 19406 - DNA, 25 bp, Probe sequence
ccctgaattacaagtattagcaaac

SEQ ID NO: 19407 - DNA, 25 bp, Probe sequence
tccctgaattacaagtattagcaaa

SEQ ID NO: 19408 - DNA, 25 bp, Probe sequence
ttccctgaattacaagtattagcaa

SEQ ID NO: 19409 - DNA, 25 bp, Probe sequence
acaagtggtagagaattatacggta

SEQ ID NO: 19410 - DNA, 25 bp, Probe sequence
tacaagtggtagagaattatacggt

SEQ ID NO: 19411 - DNA, 25 bp, Probe sequence
tcgtagatacaagtggtagagaatt

SEQ ID NO: 19412 - DNA, 25 bp, Probe sequence
atcgtagatacaagtggtagagaat

SEQ ID NO: 19413 - DNA, 25 bp, Probe sequence
accacacaatatcgtagatacaagt

SEQ ID NO: 19414 - DNA, 25 bp, Probe sequence
ccaccacacaatatcgtagatacaa

SEQ ID NO: 19415 - DNA, 25 bp, Probe sequence
caccacacaatatcgtagatacaag

SEQ ID NO: 19416 - DNA, 25 bp, Probe sequence
acacaatatcgtagatacaagtggt

SEQ ID NO: 19417 - DNA, 25 bp, Probe sequence
caagtggtagagaattatacggtaa

SEQ ID NO: 19418 - DNA, 25 bp, Probe sequence
tcattcataactggagagacgattc

SEQ ID NO: 19419 - DNA, 25 bp, Probe sequence
ttcattcataactggagagacgatt

SEQ ID NO: 19420 - DNA, 25 bp, Probe sequence
gagatgttaagtgatgattcgtgga

SEQ ID NO: 19421 - DNA, 25 bp, Probe sequence
gatgttaagtgatgattcgtggaag

SEQ ID NO: 19422 - DNA, 25 bp, Probe sequence
agatgttaagtgatgattcgtggaa

SEQ ID NO: 19423 - DNA, 25 bp, Probe sequence
gttcattcataactggagagacgat

SEQ ID NO: 19424 - DNA, 25 bp, Probe sequence
tgaatcaaggtggctctattgttaa

SEQ ID NO: 19425 - DNA, 25 bp, Probe sequence
atgaatcaaggtggctctattgtta

SEQ ID NO: 19426 - DNA, 25 bp, Probe sequence
tcaaggtggctctattgttaatacg

SEQ ID NO: 19427 - DNA, 25 bp, Probe sequence
ttatgaatgtagatatgcgtggaac

SEQ ID NO: 19428 - DNA, 25 bp, Probe sequence
gattatgaatgtagatatgcgtgga

SEQ ID NO: 19429 - DNA, 25 bp, Probe sequence
attatgaatgtagatatgcgtggaa

SEQ ID NO: 19430 - DNA, 25 bp, Probe sequence
tatgaatgtagatatgcgtggaaca

SEQ ID NO: 19431 - DNA, 25 bp, Probe sequence
ttgtatcgctcaggatataatgctg

SEQ ID NO: 19432 - DNA, 25 bp, Probe sequence
gatgttgagtgatgattcgtggaag

SEQ ID NO: 19433 - DNA, 25 bp, Probe sequence
agatgttgagtgatgattcgtggaa

SEQ ID NO: 19434 - DNA, 25 bp, Probe sequence
tgagtatccaacagatgtatatgac

SEQ ID NO: 19435 - DNA, 25 bp, Probe sequence
gagatgttgagtgatgattcgtgga

SEQ ID NO: 19436 - DNA, 25 bp, Probe sequence
gcgaagcattcaatgttcaattaga

SEQ ID NO: 19437 - DNA, 25 bp, Probe sequence
cgaagcattcaatgttcaattagaa

SEQ ID NO: 19438 - DNA, 25 bp, Probe sequence
ggcgaagcattcaatgttcaattag

SEQ ID NO: 19439 - DNA, 25 bp, Probe sequence
gacataagaatccagacactgatgc

SEQ ID NO: 19440 - DNA, 25 bp, Probe sequence
ggacataagaatccagacactgatg

SEQ ID NO: 19441 - DNA, 25 bp, Probe sequence
ttatgttatcgtgctgaaccagttg

SEQ ID NO: 19442 - DNA, 25 bp, Probe sequence
tgtacttgttgttactgacatcatt

SEQ ID NO: 19443 - DNA, 25 bp, Probe sequence
ttgtacttgttgttactgacatcat

SEQ ID NO: 19444 - DNA, 25 bp, Probe sequence
gttaatgctgttgaccttgacgaag

SEQ ID NO: 19445 - DNA, 25 bp, Probe sequence
gagttaatgtctgtaatgagccaag

SEQ ID NO: 19446 - DNA, 25 bp, Probe sequence
agttaatgtctgtaatgagccaagg

SEQ ID NO: 19447 - DNA, 25 bp, Probe sequence
ttaatgtctgtaatgagccaaggtg

SEQ ID NO: 19448 - DNA, 25 bp, Probe sequence
gttaatgtctgtaatgagccaaggt

SEQ ID NO: 19449 - DNA, 25 bp, Probe sequence
agagttaatgtctgtaatgagccaa

SEQ ID NO: 19450 - DNA, 25 bp, Probe sequence
gagagttaatgtctgtaatgagcca

SEQ ID NO: 19451 - DNA, 25 bp, Probe sequence
tggagagttaatgtctgtaatgagc

SEQ ID NO: 19452 - DNA, 25 bp, Probe sequence
ggagagttaatgtctgtaatgagcc

SEQ ID NO: 19453 - DNA, 25 bp, Probe sequence
ttaacggttgtcattattgtgttga

SEQ ID NO: 19454 - DNA, 25 bp, Probe sequence
atagaaccaacattgttagatcacg

SEQ ID NO: 19455 - DNA, 25 bp, Probe sequence
gctactgaaattggcataactttga

SEQ ID NO: 19456 - DNA, 25 bp, Probe sequence
aaccaacattgttagatcacgttac

SEQ ID NO: 19457 - DNA, 25 bp, Probe sequence
tagaaccaacattgttagatcacgt

SEQ ID NO: 19458 - DNA, 25 bp, Probe sequence
gaaccaacattgttagatcacgtta

SEQ ID NO: 19459 - DNA, 25 bp, Probe sequence
gaagcaatagcctttattcaccaaa

SEQ ID NO: 19460 - DNA, 25 bp, Probe sequence
acctagcgaatcctaaattaccatt

SEQ ID NO: 19461 - DNA, 25 bp, Probe sequence
agaaccaacattgttagatcacgtt

SEQ ID NO: 19462 - DNA, 25 bp, Probe sequence
acgattagaatcaggtgtccattta

SEQ ID NO: 19463 - DNA, 25 bp, Probe sequence
ttatgataattgcgactgtaggtga

SEQ ID NO: 19464 - DNA, 25 bp, Probe sequence
cattgttaggtggcttgatgtatgg

SEQ ID NO: 19465 - DNA, 25 bp, Probe sequence
cttgctaatgattaatacggtcgtc

SEQ ID NO: 19466 - DNA, 25 bp, Probe sequence
tcttgctaatgattaatacggtcgt

SEQ ID NO: 19467 - DNA, 25 bp, Probe sequence
atcttgctaatgattaatacggtcg

SEQ ID NO: 19468 - DNA, 25 bp, Probe sequence
gatggtgataatgcttgtgttcatg

SEQ ID NO: 19469 - DNA, 25 bp, Probe sequence
cgatggtgataatgcttgtgttcat

SEQ ID NO: 19470 - DNA, 25 bp, Probe sequence
gacgatggtgataatgcttgtgttc

SEQ ID NO: 19471 - DNA, 25 bp, Probe sequence
ttgctaatgattaatacggtcgtcg

SEQ ID NO: 19472 - DNA, 25 bp, Probe sequence
ggattaactgaactcgctctaagat

SEQ ID NO: 19473 - DNA, 25 bp, Probe sequence
aaggattaactgaactcgctctaag

SEQ ID NO: 19474 - DNA, 25 bp, Probe sequence
ttagttaatggtcaggcaatcaatg

SEQ ID NO: 19475 - DNA, 25 bp, Probe sequence
tacttagttaatggtcaggcaatca

SEQ ID NO: 19476 - DNA, 25 bp, Probe sequence
acttagttaatggtcaggcaatcaa

SEQ ID NO: 19477 - DNA, 25 bp, Probe sequence
gtaacactcgcagataattcattgg

SEQ ID NO: 19478 - DNA, 25 bp, Probe sequence
ggtaacactcgcagataattcattg

SEQ ID NO: 19479 - DNA, 25 bp, Probe sequence
cacacatattgaattaccagagcac

SEQ ID NO: 19480 - DNA, 25 bp, Probe sequence
cttagttaatggtcaggcaatcaat

SEQ ID NO: 19481 - DNA, 25 bp, Probe sequence
tgtagattcagtacgcttaaccatt

SEQ ID NO: 19482 - DNA, 25 bp, Probe sequence
ttgtagattcagtacgcttaaccat

SEQ ID NO: 19483 - DNA, 25 bp, Probe sequence
tatgcccaacctgtagaagttaaat

SEQ ID NO: 19484 - DNA, 25 bp, Probe sequence
atatgcccaacctgtagaagttaaa

SEQ ID NO: 19485 - DNA, 25 bp, Probe sequence
aatatgcccaacctgtagaagttaa

SEQ ID NO: 19486 - DNA, 25 bp, Probe sequence
caatatgcccaacctgtagaagtta

SEQ ID NO: 19487 - DNA, 25 bp, Probe sequence
gcttaaccatttatcgtattgatgc

SEQ ID NO: 19488 - DNA, 25 bp, Probe sequence
atgcccaacctgtagaagttaaatt

SEQ ID NO: 19489 - DNA, 25 bp, Probe sequence
cgcttaaccatttatcgtattgatg

SEQ ID NO: 19490 - DNA, 25 bp, Probe sequence
aactggaagaatggatggtatgaat

SEQ ID NO: 19491 - DNA, 25 bp, Probe sequence
gtaactggaagaatggatggtatga

SEQ ID NO: 19492 - DNA, 25 bp, Probe sequence
ggaagaatggatggtatgaatgagt

SEQ ID NO: 19493 - DNA, 25 bp, Probe sequence
tggaagaatggatggtatgaatgag

SEQ ID NO: 19494 - DNA, 25 bp, Probe sequence
ctggaagaatggatggtatgaatga

SEQ ID NO: 19495 - DNA, 25 bp, Probe sequence
actggaagaatggatggtatgaatg

SEQ ID NO: 19496 - DNA, 25 bp, Probe sequence
taactggaagaatggatggtatgaa

SEQ ID NO: 19497 - DNA, 25 bp, Probe sequence
gaagaatggatggtatgaatgagtc

SEQ ID NO: 19498 - DNA, 25 bp, Probe sequence
ggtaactggaagaatggatggtatg

SEQ ID NO: 19499 - DNA, 25 bp, Probe sequence
accgttctcagtatctatcaatcat

SEQ ID NO: 19500 - DNA, 25 bp, Probe sequence
taccgttctcagtatctatcaatca

SEQ ID NO: 19501 - DNA, 25 bp, Probe sequence
gcgtgttccatagagatgatgatac

SEQ ID NO: 19502 - DNA, 25 bp, Probe sequence
aattactgaagactggtgtggagat

SEQ ID NO: 19503 - DNA, 25 bp, Probe sequence
ttgagttaccagaagatgattcacg

SEQ ID NO: 19504 - DNA, 25 bp, Probe sequence
ccgttctcagtatctatcaatcatt

SEQ ID NO: 19505 - DNA, 25 bp, Probe sequence
gcaattcctatcttcgtattcttga

SEQ ID NO: 19506 - DNA, 25 bp, Probe sequence
cgtgttccatagagatgatgataca

SEQ ID NO: 19507 - DNA, 25 bp, Probe sequence
attactgaagactggtgtggagatg

SEQ ID NO: 19508 - DNA, 25 bp, Probe sequence
gcagttcacactattactcaaggat

SEQ ID NO: 19509 - DNA, 25 bp, Probe sequence
cagttcacactattactcaaggatt

SEQ ID NO: 19510 - DNA, 25 bp, Probe sequence
aagatagtgtgaaggtagtgccaac

SEQ ID NO: 19511 - DNA, 25 bp, Probe sequence
caagatagtgtgaaggtagtgccaa

SEQ ID NO: 19512 - DNA, 25 bp, Probe sequence
accaactatgttagaacaatcaagt

SEQ ID NO: 19513 - DNA, 25 bp, Probe sequence
gctgcattaccaactatgttagaac

SEQ ID NO: 19514 - DNA, 25 bp, Probe sequence
tctatttctggctttgaagtaacga

SEQ ID NO: 19515 - DNA, 25 bp, Probe sequence
ctatttctggctttgaagtaacgaa

SEQ ID NO: 19516 - DNA, 25 bp, Probe sequence
gcatctatttctggctttgaagtaa

SEQ ID NO: 19517 - DNA, 25 bp, Probe sequence
gaacgctatgaagtcactaaggaag

SEQ ID NO: 19518 - DNA, 25 bp, Probe sequence
cactaaggaagttgtctatgctgat

SEQ ID NO: 19519 - DNA, 25 bp, Probe sequence
aagtcactaaggaagttgtctatgc

SEQ ID NO: 19520 - DNA, 25 bp, Probe sequence
gctatgaagtcactaaggaagttgt

SEQ ID NO: 19521 - DNA, 25 bp, Probe sequence
agaacgctatgaagtcactaaggaa

SEQ ID NO: 19522 - DNA, 25 bp, Probe sequence
aagaacgctatgaagtcactaagga

SEQ ID NO: 19523 - DNA, 25 bp, Probe sequence
tgaagtcactaaggaagttgtctat

SEQ ID NO: 19524 - DNA, 25 bp, Probe sequence
atgaagtcactaaggaagttgtcta

SEQ ID NO: 19525 - DNA, 25 bp, Probe sequence
tatgaagtcactaaggaagttgtct

SEQ ID NO: 19526 - DNA, 25 bp, Probe sequence
gattctatgccttacattgatgctg

SEQ ID NO: 19527 - DNA, 25 bp, Probe sequence
ttgattctatgccttacattgatgc

SEQ ID NO: 19528 - DNA, 25 bp, Probe sequence
attctatgccttacattgatgctga

SEQ ID NO: 19529 - DNA, 25 bp, Probe sequence
tgattctatgccttacattgatgct

SEQ ID NO: 19530 - DNA, 25 bp, Probe sequence
ttctatgccttacattgatgctgag

SEQ ID NO: 19531 - DNA, 25 bp, Probe sequence
attgattctatgccttacattgatg

SEQ ID NO: 19532 - DNA, 25 bp, Probe sequence
atcaaggattaattggtgacatcaa

SEQ ID NO: 19533 - DNA, 25 bp, Probe sequence
acctaactattgattctatgcctta

SEQ ID NO: 19534 - DNA, 25 bp, Probe sequence
tacctaactattgattctatgcctt

SEQ ID NO: 19535 - DNA, 25 bp, Probe sequence
gtggattcgataatgatagcaacaa

SEQ ID NO: 19536 - DNA, 25 bp, Probe sequence
ggttgtggattcgataatgatagca

SEQ ID NO: 19537 - DNA, 25 bp, Probe sequence
ttgtggattcgataatgatagcaac

SEQ ID NO: 19538 - DNA, 25 bp, Probe sequence
gttgtggattcgataatgatagcaa

SEQ ID NO: 19539 - DNA, 25 bp, Probe sequence
tggcgtagcgattgtaagtaaatat

SEQ ID NO: 19540 - DNA, 25 bp, Probe sequence
tgtggattcgataatgatagcaaca

SEQ ID NO: 19541 - DNA, 25 bp, Probe sequence
gtggcgtagcgattgtaagtaaata

SEQ ID NO: 19542 - DNA, 25 bp, Probe sequence
cggttgtggattcgataatgatagc

SEQ ID NO: 19543 - DNA, 25 bp, Probe sequence
gcggttgtggattcgataatgatag

SEQ ID NO: 19544 - DNA, 25 bp, Probe sequence
ctactcatcaactgttgctgaagat

SEQ ID NO: 19545 - DNA, 25 bp, Probe sequence
aagaatatccttaccaaacacctgt

SEQ ID NO: 19546 - DNA, 25 bp, Probe sequence
agaatatccttaccaaacacctgta

SEQ ID NO: 19547 - DNA, 25 bp, Probe sequence
ggactccaaacccaataaatactgt

SEQ ID NO: 19548 - DNA, 25 bp, Probe sequence
aaagaatatccttaccaaacacctg

SEQ ID NO: 19549 - DNA, 25 bp, Probe sequence
gactccaaacccaataaatactgtt

SEQ ID NO: 19550 - DNA, 25 bp, Probe sequence
ctccaaacccaataaatactgttgt

SEQ ID NO: 19551 - DNA, 25 bp, Probe sequence
actccaaacccaataaatactgttg

SEQ ID NO: 19552 - DNA, 25 bp, Probe sequence
atatccttaccaaacacctgtactc

SEQ ID NO: 19553 - DNA, 25 bp, Probe sequence
tcattagtaatccgccctttcaata

SEQ ID NO: 19554 - DNA, 25 bp, Probe sequence
taatcattagtaatccgccctttca

SEQ ID NO: 19555 - DNA, 25 bp, Probe sequence
atcattagtaatccgccctttcaat

SEQ ID NO: 19556 - DNA, 25 bp, Probe sequence
tgtttaatcattagtaatccgccct

SEQ ID NO: 19557 - DNA, 25 bp, Probe sequence
aatcattagtaatccgccctttcaa

SEQ ID NO: 19558 - DNA, 25 bp, Probe sequence
ttgtttaatcattagtaatccgccc

SEQ ID NO: 19559 - DNA, 25 bp, Probe sequence
gtttaatcattagtaatccgccctt

SEQ ID NO: 19560 - DNA, 25 bp, Probe sequence
agtagtcgatagtgctaacgtacaa

SEQ ID NO: 19561 - DNA, 25 bp, Probe sequence
aagtagtcgatagtgctaacgtaca

SEQ ID NO: 19562 - DNA, 25 bp, Probe sequence
agaacagattagtgaggttattgcg

SEQ ID NO: 19563 - DNA, 25 bp, Probe sequence
aagaacagattagtgaggttattgc

SEQ ID NO: 19564 - DNA, 25 bp, Probe sequence
gcagtattggaacaaatgaaggaaa

SEQ ID NO: 19565 - DNA, 25 bp, Probe sequence
tagcagtattggaacaaatgaagga

SEQ ID NO: 19566 - DNA, 25 bp, Probe sequence
ttagcagtattggaacaaatgaagg

SEQ ID NO: 19567 - DNA, 25 bp, Probe sequence
agcagtattggaacaaatgaaggaa

SEQ ID NO: 19568 - DNA, 25 bp, Probe sequence
tttagcagtattggaacaaatgaag

SEQ ID NO: 19569 - DNA, 25 bp, Probe sequence
taccagatttagcagtattggaaca

SEQ ID NO: 19570 - DNA, 25 bp, Probe sequence
ggtttaccagatttagcagtattgg

SEQ ID NO: 19571 - DNA, 25 bp, Probe sequence
tggcacatcaaatcgatgaatatat

SEQ ID NO: 19572 - DNA, 25 bp, Probe sequence
atggcacatcaaatcgatgaatata

SEQ ID NO: 19573 - DNA, 25 bp, Probe sequence
ggcacatcaaatcgatgaatatatt

SEQ ID NO: 19574 - DNA, 25 bp, Probe sequence
gcacatcaaatcgatgaatatattg

SEQ ID NO: 19575 - DNA, 25 bp, Probe sequence
cacatcaaatcgatgaatatattga

SEQ ID NO: 19576 - DNA, 25 bp, Probe sequence
acatcaaatcgatgaatatattgaa

SEQ ID NO: 19577 - DNA, 25 bp, Probe sequence
ctgacagaattgaaggagatgaata

SEQ ID NO: 19578 - DNA, 25 bp, Probe sequence
tctgacagaattgaaggagatgaat

SEQ ID NO: 19579 - DNA, 25 bp, Probe sequence
tgacagaattgaaggagatgaataa

SEQ ID NO: 19580 - DNA, 25 bp, Probe sequence
ttaagacatcaaacacgcaagaaat

SEQ ID NO: 19581 - DNA, 25 bp, Probe sequence
attaagacatcaaacacgcaagaaa

SEQ ID NO: 19582 - DNA, 25 bp, Probe sequence
cgcaagaaatgtgaacaaatgtatg

SEQ ID NO: 19583 - DNA, 25 bp, Probe sequence
aattaagacatcaaacacgcaagaa

SEQ ID NO: 19584 - DNA, 25 bp, Probe sequence
acgcaagaaatgtgaacaaatgtat

SEQ ID NO: 19585 - DNA, 25 bp, Probe sequence
gaattaagacatcaaacacgcaaga

SEQ ID NO: 19586 - DNA, 25 bp, Probe sequence
gcctcaaggaacgataagattacta

SEQ ID NO: 19587 - DNA, 25 bp, Probe sequence
attgcctcaaggaacgataagatta

SEQ ID NO: 19588 - DNA, 25 bp, Probe sequence
ctcaaggaacgataagattactagc

SEQ ID NO: 19589 - DNA, 25 bp, Probe sequence
aattgcctcaaggaacgataagatt

SEQ ID NO: 19590 - DNA, 25 bp, Probe sequence
ttgcctcaaggaacgataagattac

SEQ ID NO: 19591 - DNA, 25 bp, Probe sequence
tgcctcaaggaacgataagattact

SEQ ID NO: 19592 - DNA, 25 bp, Probe sequence
ttggtcatcacactcattgaattaa

SEQ ID NO: 19593 - DNA, 25 bp, Probe sequence
acgatgtagatggcttaattattgc

SEQ ID NO: 19594 - DNA, 25 bp, Probe sequence
aattattgctgaaccaactggatct

SEQ ID NO: 19595 - DNA, 25 bp, Probe sequence
tcttctctacaactatcataggtgc

SEQ ID NO: 19596 - DNA, 25 bp, Probe sequence
agtatgaaccttaccacagaatatc

SEQ ID NO: 19597 - DNA, 25 bp, Probe sequence
ttacatggaatattgacgaacctgg

SEQ ID NO: 19598 - DNA, 25 bp, Probe sequence
gttacatggaatattgacgaacctg

SEQ ID NO: 19599 - DNA, 25 bp, Probe sequence
gtatgaaccttaccacagaatatca

SEQ ID NO: 19600 - DNA, 25 bp, Probe sequence
atggttacatggaatattgacgaac

SEQ ID NO: 19601 - DNA, 25 bp, Probe sequence
gttaagtatgaaccttaccacagaa

SEQ ID NO: 19602 - DNA, 25 bp, Probe sequence
ttcttctctacaactatcataggtg

SEQ ID NO: 19603 - DNA, 25 bp, Probe sequence
aagtatgaaccttaccacagaatat

SEQ ID NO: 19604 - DNA, 25 bp, Probe sequence
atcaaggaacatctaaagaggcaat

SEQ ID NO: 19605 - DNA, 25 bp, Probe sequence
tatcaaggaacatctaaagaggcaa

SEQ ID NO: 19606 - DNA, 25 bp, Probe sequence
atatcaaggaacatctaaagaggca

SEQ ID NO: 19607 - DNA, 25 bp, Probe sequence
tcaaggaacatctaaagaggcaatt

SEQ ID NO: 19608 - DNA, 25 bp, Probe sequence
caaggaacatctaaagaggcaatta

SEQ ID NO: 19609 - DNA, 25 bp, Probe sequence
aaggaacatctaaagaggcaattaa

SEQ ID NO: 19610 - DNA, 25 bp, Probe sequence
tatatcaaggaacatctaaagaggc

SEQ ID NO: 19611 - DNA, 25 bp, Probe sequence
acatctaaagaggcaattaatccaa

SEQ ID NO: 19612 - DNA, 25 bp, Probe sequence
aacatctaaagaggcaattaatcca

SEQ ID NO: 19613 - DNA, 25 bp, Probe sequence
acaatatagtggcatagaactgact

SEQ ID NO: 19614 - DNA, 25 bp, Probe sequence
tacaatatagtggcatagaactgac

SEQ ID NO: 19615 - DNA, 25 bp, Probe sequence
gtacaatatagtggcatagaactga

SEQ ID NO: 19616 - DNA, 25 bp, Probe sequence
caatatagtggcatagaactgacta

SEQ ID NO: 19617 - DNA, 25 bp, Probe sequence
aaagcagtcatttacatacaacttg

SEQ ID NO: 19618 - DNA, 25 bp, Probe sequence
agcagtcatttacatacaacttgtt

SEQ ID NO: 19619 - DNA, 25 bp, Probe sequence
aagcagtcatttacatacaacttgt

SEQ ID NO: 19620 - DNA, 25 bp, Probe sequence
gcagtcatttacatacaacttgttc

SEQ ID NO: 19621 - DNA, 25 bp, Probe sequence
atagtggcatagaactgactaaagc

SEQ ID NO: 19622 - DNA, 25 bp, Probe sequence
agaagagaagttagcacgattagaa

SEQ ID NO: 19623 - DNA, 25 bp, Probe sequence
ctacctgaagaagtgagacaagaac

SEQ ID NO: 19624 - DNA, 25 bp, Probe sequence
aagagaagttagcacgattagaaca

SEQ ID NO: 19625 - DNA, 25 bp, Probe sequence
agagaagttagcacgattagaacag

SEQ ID NO: 19626 - DNA, 25 bp, Probe sequence
gaagagaagttagcacgattagaac

SEQ ID NO: 19627 - DNA, 25 bp, Probe sequence
tagaagagaagttagcacgattaga

SEQ ID NO: 19628 - DNA, 25 bp, Probe sequence
ccactctatgattcttcaacattcc

SEQ ID NO: 19629 - DNA, 25 bp, Probe sequence
ccaccactctatgattcttcaacat

SEQ ID NO: 19630 - DNA, 25 bp, Probe sequence
gagaagttagcacgattagaacagg

SEQ ID NO: 19631 - DNA, 25 bp, Probe sequence
tagcgatgacgaattagaatcaatg

SEQ ID NO: 19632 - DNA, 25 bp, Probe sequence
agcgatgacgaattagaatcaatga

SEQ ID NO: 19633 - DNA, 25 bp, Probe sequence
ttagcgatgacgaattagaatcaat

SEQ ID NO: 19634 - DNA, 25 bp, Probe sequence
attagcgatgacgaattagaatcaa

SEQ ID NO: 19635 - DNA, 25 bp, Probe sequence
gcgatgacgaattagaatcaatgat

SEQ ID NO: 19636 - DNA, 25 bp, Probe sequence
tgcttcattacaacactataatcca

SEQ ID NO: 19637 - DNA, 25 bp, Probe sequence
gcttcattacaacactataatccac

SEQ ID NO: 19638 - DNA, 25 bp, Probe sequence
aattagcgatgacgaattagaatca

SEQ ID NO: 19639 - DNA, 25 bp, Probe sequence
tcaattagcgatgacgaattagaat

SEQ ID NO: 19640 - DNA, 25 bp, Probe sequence
tattcattcagcaacttggtagagg

SEQ ID NO: 19641 - DNA, 25 bp, Probe sequence
acgaaggtattgatattccagaagt

SEQ ID NO: 19642 - DNA, 25 bp, Probe sequence
atattcattcagcaacttggtagag

SEQ ID NO: 19643 - DNA, 25 bp, Probe sequence
cgaaggtattgatattccagaagtc

SEQ ID NO: 19644 - DNA, 25 bp, Probe sequence
caagcagaagcattaaggtcattaa

SEQ ID NO: 19645 - DNA, 25 bp, Probe sequence
tccagaagtcaatcaagttgtaatg

SEQ ID NO: 19646 - DNA, 25 bp, Probe sequence
aacgaaggtattgatattccagaag

SEQ ID NO: 19647 - DNA, 25 bp, Probe sequence
aggaactgctggatatatagaaggt

SEQ ID NO: 19648 - DNA, 25 bp, Probe sequence
ttccagaagtcaatcaagttgtaat

SEQ ID NO: 19649 - DNA, 25 bp, Probe sequence
tcattggaactaatagcactggatt

SEQ ID NO: 19650 - DNA, 25 bp, Probe sequence
atgaatgctgaagtagatgtagtcg

SEQ ID NO: 19651 - DNA, 25 bp, Probe sequence
gtcattggaactaatagcactggat

SEQ ID NO: 19652 - DNA, 25 bp, Probe sequence
gaatgctgaagtagatgtagtcgtt

SEQ ID NO: 19653 - DNA, 25 bp, Probe sequence
cattggaactaatagcactggattc

SEQ ID NO: 19654 - DNA, 25 bp, Probe sequence
ttgtcattggaactaatagcactgg

SEQ ID NO: 19655 - DNA, 25 bp, Probe sequence
attggaactaatagcactggattcg

SEQ ID NO: 19656 - DNA, 25 bp, Probe sequence
tgaatgctgaagtagatgtagtcgt

SEQ ID NO: 19657 - DNA, 25 bp, Probe sequence
tgtcattggaactaatagcactgga

SEQ ID NO: 19658 - DNA, 25 bp, Probe sequence
actgaacataagagtattgaatggt

SEQ ID NO: 19659 - DNA, 25 bp, Probe sequence
acataagagtattgaatggttgtca

SEQ ID NO: 19660 - DNA, 25 bp, Probe sequence
tgaacataagagtattgaatggttg

SEQ ID NO: 19661 - DNA, 25 bp, Probe sequence
ctgaacataagagtattgaatggtt

SEQ ID NO: 19662 - DNA, 25 bp, Probe sequence
gaatggttgtcaataaacgaacttg

SEQ ID NO: 19663 - DNA, 25 bp, Probe sequence
tgaatggttgtcaataaacgaactt

SEQ ID NO: 19664 - DNA, 25 bp, Probe sequence
acgaacttgataaattaaattgggc

SEQ ID NO: 19665 - DNA, 25 bp, Probe sequence
aacataagagtattgaatggttgtc

SEQ ID NO: 19666 - DNA, 25 bp, Probe sequence
gaacataagagtattgaatggttgt

SEQ ID NO: 19667 - DNA, 25 bp, Probe sequence
atctgacgcttctaaccatatctac

SEQ ID NO: 19668 - DNA, 25 bp, Probe sequence
tcaccattattaactgctatacgga

SEQ ID NO: 19669 - DNA, 25 bp, Probe sequence
tctgacgcttctaaccatatctaca

SEQ ID NO: 19670 - DNA, 25 bp, Probe sequence
ttatctgacgcttctaaccatatct

SEQ ID NO: 19671 - DNA, 25 bp, Probe sequence
caccattattaactgctatacggat

SEQ ID NO: 19672 - DNA, 25 bp, Probe sequence
atcaccattattaactgctatacgg

SEQ ID NO: 19673 - DNA, 25 bp, Probe sequence
tatctgacgcttctaaccatatcta

SEQ ID NO: 19674 - DNA, 25 bp, Probe sequence
attatctgacgcttctaaccatatc

SEQ ID NO: 19675 - DNA, 25 bp, Probe sequence
ctgacgcttctaaccatatctacag

SEQ ID NO: 19676 - DNA, 25 bp, Probe sequence
attggctcgtagaagaaagaattaa

SEQ ID NO: 19677 - DNA, 25 bp, Probe sequence
ttattggctcgtagaagaaagaatt

SEQ ID NO: 19678 - DNA, 25 bp, Probe sequence
tattggctcgtagaagaaagaatta

SEQ ID NO: 19679 - DNA, 25 bp, Probe sequence
gcggacaattcaactaatacatcag

SEQ ID NO: 19680 - DNA, 25 bp, Probe sequence
ctatgcggacaattcaactaataca

SEQ ID NO: 19681 - DNA, 25 bp, Probe sequence
actatgcggacaattcaactaatac

SEQ ID NO: 19682 - DNA, 25 bp, Probe sequence
tgcggacaattcaactaatacatca

SEQ ID NO: 19683 - DNA, 25 bp, Probe sequence
atgcggacaattcaactaatacatc

SEQ ID NO: 19684 - DNA, 25 bp, Probe sequence
cggacaattcaactaatacatcaga

SEQ ID NO: 19685 - DNA, 25 bp, Probe sequence
ggacaaggttatagaggatacggag

SEQ ID NO: 19686 - DNA, 25 bp, Probe sequence
aactatgcggacaattcaactaata

SEQ ID NO: 19687 - DNA, 25 bp, Probe sequence
ctggacaaggttatagaggatacgg

SEQ ID NO: 19688 - DNA, 25 bp, Probe sequence
ataatcatcaatcggtaacaactgg

SEQ ID NO: 19689 - DNA, 25 bp, Probe sequence
taatcatcaatcggtaacaactggc

SEQ ID NO: 19690 - DNA, 25 bp, Probe sequence
aataatcatcaatcggtaacaactg

SEQ ID NO: 19691 - DNA, 25 bp, Probe sequence
gctaataatcatcaatcggtaacaa

SEQ ID NO: 19692 - DNA, 25 bp, Probe sequence
aagcggataattcattccaatatgc

SEQ ID NO: 19693 - DNA, 25 bp, Probe sequence
ggaattaagaatccagacacaggaa

SEQ ID NO: 19694 - DNA, 25 bp, Probe sequence
aaccaggaattaagaatccagacac

SEQ ID NO: 19695 - DNA, 25 bp, Probe sequence
aggaattaagaatccagacacagga

SEQ ID NO: 19696 - DNA, 25 bp, Probe sequence
caggaattaagaatccagacacagg

SEQ ID NO: 19697 - DNA, 25 bp, Probe sequence
acttgaataaatgtagagacccaca

SEQ ID NO: 19698 - DNA, 25 bp, Probe sequence
tacttgaataaatgtagagacccac

SEQ ID NO: 19699 - DNA, 25 bp, Probe sequence
agtattaactacatatgagctgcgt

SEQ ID NO: 19700 - DNA, 25 bp, Probe sequence
agagacccacatgatagtagaaatg

SEQ ID NO: 19701 - DNA, 25 bp, Probe sequence
gtagagacccacatgatagtagaaa

SEQ ID NO: 19702 - DNA, 25 bp, Probe sequence
gagtattaactacatatgagctgcg

SEQ ID NO: 19703 - DNA, 25 bp, Probe sequence
gtattaactacatatgagctgcgta

SEQ ID NO: 19704 - DNA, 25 bp, Probe sequence
tgtagagacccacatgatagtagaa

SEQ ID NO: 19705 - DNA, 25 bp, Probe sequence
tagagacccacatgatagtagaaat

SEQ ID NO: 19706 - DNA, 25 bp, Probe sequence
ggcagtaattcagtgtatgttcaat

SEQ ID NO: 19707 - DNA, 25 bp, Probe sequence
tggcagtaattcagtgtatgttcaa

SEQ ID NO: 19708 - DNA, 25 bp, Probe sequence
gtggcagtaattcagtgtatgttca

SEQ ID NO: 19709 - DNA, 25 bp, Probe sequence
agaactgagtcaattagatgatcgt

SEQ ID NO: 19710 - DNA, 25 bp, Probe sequence
gaactgagtcaattagatgatcgtt

SEQ ID NO: 19711 - DNA, 25 bp, Probe sequence
cgtggcagtaattcagtgtatgttc

SEQ ID NO: 19712 - DNA, 25 bp, Probe sequence
aagaactgagtcaattagatgatcg

SEQ ID NO: 19713 - DNA, 25 bp, Probe sequence
gcagtaattcagtgtatgttcaata

SEQ ID NO: 19714 - DNA, 25 bp, Probe sequence
cagactcattgcccatttagataac

SEQ ID NO: 19715 - DNA, 25 bp, Probe sequence
tgcggtattattaggtgacgatatt

SEQ ID NO: 19716 - DNA, 25 bp, Probe sequence
ttgcggtattattaggtgacgatat

SEQ ID NO: 19717 - DNA, 25 bp, Probe sequence
ggtgacgatattgttgaatctgaag

SEQ ID NO: 19718 - DNA, 25 bp, Probe sequence
gcggtattattaggtgacgatattg

SEQ ID NO: 19719 - DNA, 25 bp, Probe sequence
aggtgacgatattgttgaatctgaa

SEQ ID NO: 19720 - DNA, 25 bp, Probe sequence
taggtgacgatattgttgaatctga

SEQ ID NO: 19721 - DNA, 25 bp, Probe sequence
gacagtatgcgagaagaattaacac

SEQ ID NO: 19722 - DNA, 25 bp, Probe sequence
gtatgcgagaagaattaacacgatt

SEQ ID NO: 19723 - DNA, 25 bp, Probe sequence
gacgatattgttgaatctgaagtgc

SEQ ID NO: 19724 - DNA, 25 bp, Probe sequence
tgatgtaacgtctctttgtatacct

SEQ ID NO: 19725 - DNA, 25 bp, Probe sequence
aacgtctctttgtatacctattcct

SEQ ID NO: 19726 - DNA, 25 bp, Probe sequence
atgatgtaacgtctctttgtatacc

SEQ ID NO: 19727 - DNA, 25 bp, Probe sequence
acgtctctttgtatacctattccta

SEQ ID NO: 19728 - DNA, 25 bp, Probe sequence
taacgtctctttgtatacctattcc

SEQ ID NO: 19729 - DNA, 25 bp, Probe sequence
gatgtaacgtctctttgtataccta

SEQ ID NO: 19730 - DNA, 25 bp, Probe sequence
cgtctctttgtatacctattcctat

SEQ ID NO: 19731 - DNA, 25 bp, Probe sequence
tgtaacgtctctttgtatacctatt

SEQ ID NO: 19732 - DNA, 25 bp, Probe sequence
atgtaacgtctctttgtatacctat

SEQ ID NO: 19733 - DNA, 25 bp, Probe sequence
ggaacaatcgtcgtatcataaccaa

SEQ ID NO: 19734 - DNA, 25 bp, Probe sequence
atggaacaatcgtcgtatcataacc

SEQ ID NO: 19735 - DNA, 25 bp, Probe sequence
aaggcgatcatatagcaatcattgg

SEQ ID NO: 19736 - DNA, 25 bp, Probe sequence
ctaccaaccacctcgatatagattc

SEQ ID NO: 19737 - DNA, 25 bp, Probe sequence
taccaaccacctcgatatagattca

SEQ ID NO: 19738 - DNA, 25 bp, Probe sequence
agatgaacctactaaccacttagat

SEQ ID NO: 19739 - DNA, 25 bp, Probe sequence
cctaccaaccacctcgatatagatt

SEQ ID NO: 19740 - DNA, 25 bp, Probe sequence
gaacaatcgtcgtatcataaccaaa

SEQ ID NO: 19741 - DNA, 25 bp, Probe sequence
accaaccacctcgatatagattcaa

SEQ ID NO: 19742 - DNA, 25 bp, Probe sequence
gtatatcaacctggaattgtgttca

SEQ ID NO: 19743 - DNA, 25 bp, Probe sequence
tgtatatcaacctggaattgtgttc

SEQ ID NO: 19744 - DNA, 25 bp, Probe sequence
tatatcaacctggaattgtgttcac

SEQ ID NO: 19745 - DNA, 25 bp, Probe sequence
ttgtatatcaacctggaattgtgtt

SEQ ID NO: 19746 - DNA, 25 bp, Probe sequence
gatgtgttatcaggcgatagttatt

SEQ ID NO: 19747 - DNA, 25 bp, Probe sequence
atatcaacctggaattgtgttcacg

SEQ ID NO: 19748 - DNA, 25 bp, Probe sequence
gtaataggaattgttggacgataca

SEQ ID NO: 19749 - DNA, 25 bp, Probe sequence
ataggaattgttggacgatacatga

SEQ ID NO: 19750 - DNA, 25 bp, Probe sequence
taggaattgttggacgatacatgag

SEQ ID NO: 19751 - DNA, 25 bp, Probe sequence
ttagcacctacttcctctattgttg

SEQ ID NO: 19752 - DNA, 25 bp, Probe sequence
gttagcacctacttcctctattgtt

SEQ ID NO: 19753 - DNA, 25 bp, Probe sequence
atgttagcacctacttcctctattg

SEQ ID NO: 19754 - DNA, 25 bp, Probe sequence
aatgttagcacctacttcctctatt

SEQ ID NO: 19755 - DNA, 25 bp, Probe sequence
ctggtattgattatgacttagagcg

SEQ ID NO: 19756 - DNA, 25 bp, Probe sequence
tgttagcacctacttcctctattgt

SEQ ID NO: 19757 - DNA, 25 bp, Probe sequence
tagcacctagttcatcgtattcaat

SEQ ID NO: 19758 - DNA, 25 bp, Probe sequence
atagcacctagttcatcgtattcaa

SEQ ID NO: 19759 - DNA, 25 bp, Probe sequence
tagcacctacttcctctattgttgg

SEQ ID NO: 19760 - DNA, 25 bp, Probe sequence
acagaaggtatattggtttaacaca

SEQ ID NO: 19761 - DNA, 25 bp, Probe sequence
agcaattacagaaggtatattggtt

SEQ ID NO: 19762 - DNA, 25 bp, Probe sequence
aagcaattacagaaggtatattggt

SEQ ID NO: 19763 - DNA, 25 bp, Probe sequence
ccatttaaagattcagagaaggtgt

SEQ ID NO: 19764 - DNA, 25 bp, Probe sequence
acaccatttaaagattcagagaagg

SEQ ID NO: 19765 - DNA, 25 bp, Probe sequence
cagaaggtatattggtttaacacaa

SEQ ID NO: 19766 - DNA, 25 bp, Probe sequence
tggtttaacacaaaatcaaatggct

SEQ ID NO: 19767 - DNA, 25 bp, Probe sequence
aaagaaagaggaataacaccattta

SEQ ID NO: 19768 - DNA, 25 bp, Probe sequence
taaagaaagaggaataacaccattt

SEQ ID NO: 19769 - DNA, 25 bp, Probe sequence
tattagtccacaacgctaccagtta

SEQ ID NO: 19770 - DNA, 25 bp, Probe sequence
attagtccacaacgctaccagttaa

SEQ ID NO: 19771 - DNA, 25 bp, Probe sequence
gtattagtccacaacgctaccagtt

SEQ ID NO: 19772 - DNA, 25 bp, Probe sequence
cagttaaaggaaagtggtaaagcaa

SEQ ID NO: 19773 - DNA, 25 bp, Probe sequence
agttaaaggaaagtggtaaagcaat

SEQ ID NO: 19774 - DNA, 25 bp, Probe sequence
aacttggtattagtccacaacgcta

SEQ ID NO: 19775 - DNA, 25 bp, Probe sequence
gttaaaggaaagtggtaaagcaata

SEQ ID NO: 19776 - DNA, 25 bp, Probe sequence
ttagtccacaacgctaccagttaaa

SEQ ID NO: 19777 - DNA, 25 bp, Probe sequence
acttggtattagtccacaacgctac

SEQ ID NO: 19778 - DNA, 25 bp, Probe sequence
cacggaatatgttgatggtattgaa

SEQ ID NO: 19779 - DNA, 25 bp, Probe sequence
cggaatatgttgatggtattgaagt

SEQ ID NO: 19780 - DNA, 25 bp, Probe sequence
acggaatatgttgatggtattgaag

SEQ ID NO: 19781 - DNA, 25 bp, Probe sequence
atatgttgatggtattgaagtggtt

SEQ ID NO: 19782 - DNA, 25 bp, Probe sequence
aatatgttgatggtattgaagtggt

SEQ ID NO: 19783 - DNA, 25 bp, Probe sequence
acacggaatatgttgatggtattga

SEQ ID NO: 19784 - DNA, 25 bp, Probe sequence
cacacggaatatgttgatggtattg

SEQ ID NO: 19785 - DNA, 25 bp, Probe sequence
acacacggaatatgttgatggtatt

SEQ ID NO: 19786 - DNA, 25 bp, Probe sequence
gaatatgttgatggtattgaagtgg

SEQ ID NO: 19787 - DNA, 25 bp, Probe sequence
tatccttatatcgtgtgtgttgtcg

SEQ ID NO: 19788 - DNA, 25 bp, Probe sequence
gttatccttatatcgtgtgtgttgt

SEQ ID NO: 19789 - DNA, 25 bp, Probe sequence
ttatccttatatcgtgtgtgttgtc

SEQ ID NO: 19790 - DNA, 25 bp, Probe sequence
agttatccttatatcgtgtgtgttg

SEQ ID NO: 19791 - DNA, 25 bp, Probe sequence
tagttatccttatatcgtgtgtgtt

SEQ ID NO: 19792 - DNA, 25 bp, Probe sequence
ctctacaaacgaagcacatcaaata

SEQ ID NO: 19793 - DNA, 25 bp, Probe sequence
atagttatccttatatcgtgtgtgt

SEQ ID NO: 19794 - DNA, 25 bp, Probe sequence
tctacaaacgaagcacatcaaatat

SEQ ID NO: 19795 - DNA, 25 bp, Probe sequence
tctctacaaacgaagcacatcaaat

SEQ ID NO: 19796 - DNA, 25 bp, Probe sequence
agaaggtgctgatatagtcttacat

SEQ ID NO: 19797 - DNA, 25 bp, Probe sequence
aggtgctgatatagtcttacattca

SEQ ID NO: 19798 - DNA, 25 bp, Probe sequence
aaggtgctgatatagtcttacattc

SEQ ID NO: 19799 - DNA, 25 bp, Probe sequence
gaaggtgctgatatagtcttacatt

SEQ ID NO: 19800 - DNA, 25 bp, Probe sequence
cagaaggtgctgatatagtcttaca

SEQ ID NO: 19801 - DNA, 25 bp, Probe sequence
ttaatccgcttatcactaggtgttg

SEQ ID NO: 19802 - DNA, 25 bp, Probe sequence
taatccgcttatcactaggtgttga

SEQ ID NO: 19803 - DNA, 25 bp, Probe sequence
ccaatccatttatctactgcctaca

SEQ ID NO: 19804 - DNA, 25 bp, Probe sequence
tccaatccatttatctactgcctac

SEQ ID NO: 19805 - DNA, 25 bp, Probe sequence
tccaggttatgaagttgttacagaa

SEQ ID NO: 19806 - DNA, 25 bp, Probe sequence
ttccaggttatgaagttgttacaga

SEQ ID NO: 19807 - DNA, 25 bp, Probe sequence
ccaggttatgaagttgttacagaac

SEQ ID NO: 19808 - DNA, 25 bp, Probe sequence
attccaggttatgaagttgttacag

SEQ ID NO: 19809 - DNA, 25 bp, Probe sequence
gttatgaagttgttacagaaccaga

SEQ ID NO: 19810 - DNA, 25 bp, Probe sequence
agaacaactggaagaacaattagat

SEQ ID NO: 19811 - DNA, 25 bp, Probe sequence
taatcaacgcttctcacactcagta

SEQ ID NO: 19812 - DNA, 25 bp, Probe sequence
tcaggatcagaagtgctagtagaag

SEQ ID NO: 19813 - DNA, 25 bp, Probe sequence
ttcaggatcagaagtgctagtagaa

SEQ ID NO: 19814 - DNA, 25 bp, Probe sequence
ttgaatgctacgaccttgttgataa

SEQ ID NO: 19815 - DNA, 25 bp, Probe sequence
gttgaatgctacgaccttgttgata

SEQ ID NO: 19816 - DNA, 25 bp, Probe sequence
tgaatgctacgaccttgttgataac

SEQ ID NO: 19817 - DNA, 25 bp, Probe sequence
gaatgctacgaccttgttgataacg

SEQ ID NO: 19818 - DNA, 25 bp, Probe sequence
aattacaagttgcggatcaagtcag

SEQ ID NO: 19819 - DNA, 25 bp, Probe sequence
atgctacgaccttgttgataacgaa

SEQ ID NO: 19820 - DNA, 25 bp, Probe sequence
aatgctacgaccttgttgataacga

SEQ ID NO: 19821 - DNA, 25 bp, Probe sequence
ctgaacaacctgggatttctaacat

SEQ ID NO: 19822 - DNA, 25 bp, Probe sequence
tgctacgaccttgttgataacgaag

SEQ ID NO: 19823 - DNA, 25 bp, Probe sequence
atgatgttattgattattggcggtg

SEQ ID NO: 19824 - DNA, 25 bp, Probe sequence
aatgatgttattgattattggcggt

SEQ ID NO: 19825 - DNA, 25 bp, Probe sequence
atattatggaatcagtgacgaatgc

SEQ ID NO: 19826 - DNA, 25 bp, Probe sequence
gaatgatgttattgattattggcgg

SEQ ID NO: 19827 - DNA, 25 bp, Probe sequence
ggaatgatgttattgattattggcg

SEQ ID NO: 19828 - DNA, 25 bp, Probe sequence
cggaatgatgttattgattattggc

SEQ ID NO: 19829 - DNA, 25 bp, Probe sequence
atgattattgccattccagttacac

SEQ ID NO: 19830 - DNA, 25 bp, Probe sequence
ggtatgattattgccattccagtta

SEQ ID NO: 19831 - DNA, 25 bp, Probe sequence
tattatggaatcagtgacgaatgcg

SEQ ID NO: 19832 - DNA, 25 bp, Probe sequence
aagttagtgaagagtacgaaggttc

SEQ ID NO: 19833 - DNA, 25 bp, Probe sequence
gcaaagaacacataacatcaaatgg

SEQ ID NO: 19834 - DNA, 25 bp, Probe sequence
gcagcaaagaacacataacatcaaa

SEQ ID NO: 19835 - DNA, 25 bp, Probe sequence
cagcaaagaacacataacatcaaat

SEQ ID NO: 19836 - DNA, 25 bp, Probe sequence
agcaaagaacacataacatcaaatg

SEQ ID NO: 19837 - DNA, 25 bp, Probe sequence
aaagttagtgaagagtacgaaggtt

SEQ ID NO: 19838 - DNA, 25 bp, Probe sequence
gaaagttagtgaagagtacgaaggt

SEQ ID NO: 19839 - DNA, 25 bp, Probe sequence
tgaaagttagtgaagagtacgaagg

SEQ ID NO: 19840 - DNA, 25 bp, Probe sequence
caaagaacacataacatcaaatggt

SEQ ID NO: 19841 - DNA, 25 bp, Probe sequence
cagtagtaggttatggatcacaagg

SEQ ID NO: 19842 - DNA, 25 bp, Probe sequence
gcagtagtaggttatggatcacaag

SEQ ID NO: 19843 - DNA, 25 bp, Probe sequence
taagcaagctgatgtaattatggtg

SEQ ID NO: 19844 - DNA, 25 bp, Probe sequence
ttaagcaagctgatgtaattatggt

SEQ ID NO: 19845 - DNA, 25 bp, Probe sequence
attgcagtagtaggttatggatcac

SEQ ID NO: 19846 - DNA, 25 bp, Probe sequence
gttaagcaagctgatgtaattatgg

SEQ ID NO: 19847 - DNA, 25 bp, Probe sequence
aattgcagtagtaggttatggatca

SEQ ID NO: 19848 - DNA, 25 bp, Probe sequence
gctaaagaagatggatttgatgtgt

SEQ ID NO: 19849 - DNA, 25 bp, Probe sequence
ggtaacttcagtaatcgctttatcg

SEQ ID NO: 19850 - DNA, 25 bp, Probe sequence
ataatggtggtgtcgtattgagatg

SEQ ID NO: 19851 - DNA, 25 bp, Probe sequence
aataatggtggtgtcgtattgagat

SEQ ID NO: 19852 - DNA, 25 bp, Probe sequence
acgagtaccaagtcagtcttatatg

SEQ ID NO: 19853 - DNA, 25 bp, Probe sequence
ttatgtcttaacagaggaccactac

SEQ ID NO: 19854 - DNA, 25 bp, Probe sequence
cgagtaccaagtcagtcttatatga

SEQ ID NO: 19855 - DNA, 25 bp, Probe sequence
taatggtggtgtcgtattgagatgg

SEQ ID NO: 19856 - DNA, 25 bp, Probe sequence
tatgtcttaacagaggaccactacg

SEQ ID NO: 19857 - DNA, 25 bp, Probe sequence
gttatgtcttaacagaggaccacta

SEQ ID NO: 19858 - DNA, 25 bp, Probe sequence
gacgagtaccaagtcagtcttatat

SEQ ID NO: 19859 - DNA, 25 bp, Probe sequence
tagcaacatcacctattcatcttga

SEQ ID NO: 19860 - DNA, 25 bp, Probe sequence
attcatgcgattattcaaggttctg

SEQ ID NO: 19861 - DNA, 25 bp, Probe sequence
cggctacagttaccatgatgaatat

SEQ ID NO: 19862 - DNA, 25 bp, Probe sequence
gtaagcacgactgaacttccattag

SEQ ID NO: 19863 - DNA, 25 bp, Probe sequence
gctacagttaccatgatgaatatgc

SEQ ID NO: 19864 - DNA, 25 bp, Probe sequence
ggctacagttaccatgatgaatatg

SEQ ID NO: 19865 - DNA, 25 bp, Probe sequence
atagcaacatcacctattcatcttg

SEQ ID NO: 19866 - DNA, 25 bp, Probe sequence
aattctgtcactgaaggtactgatg

SEQ ID NO: 19867 - DNA, 25 bp, Probe sequence
ttaattctgtcactgaaggtactga

SEQ ID NO: 19868 - DNA, 25 bp, Probe sequence
acgcatacatcataatcatcaagtg

SEQ ID NO: 19869 - DNA, 25 bp, Probe sequence
aaggtatgacaactggagaaggtat

SEQ ID NO: 19870 - DNA, 25 bp, Probe sequence
aacgcatacatcataatcatcaagt

SEQ ID NO: 19871 - DNA, 25 bp, Probe sequence
aggtatgacaactggagaaggtatc

SEQ ID NO: 19872 - DNA, 25 bp, Probe sequence
gaacgcatacatcataatcatcaag

SEQ ID NO: 19873 - DNA, 25 bp, Probe sequence
gaaggtatgacaactggagaaggta

SEQ ID NO: 19874 - DNA, 25 bp, Probe sequence
tgaacgcatacatcataatcatcaa

SEQ ID NO: 19875 - DNA, 25 bp, Probe sequence
ttgaacgcatacatcataatcatca

SEQ ID NO: 19876 - DNA, 25 bp, Probe sequence
cgcatacatcataatcatcaagtgt

SEQ ID NO: 19877 - DNA, 25 bp, Probe sequence
ggtccaagattgtatgagcctattc

SEQ ID NO: 19878 - DNA, 25 bp, Probe sequence
taacgatggtccaagattgtatgag

SEQ ID NO: 19879 - DNA, 25 bp, Probe sequence
ttagtaacgatggtccaagattgta

SEQ ID NO: 19880 - DNA, 25 bp, Probe sequence
agtaacgatggtccaagattgtatg

SEQ ID NO: 19881 - DNA, 25 bp, Probe sequence
gtaacgatggtccaagattgtatga

SEQ ID NO: 19882 - DNA, 25 bp, Probe sequence
tagtaacgatggtccaagattgtat

SEQ ID NO: 19883 - DNA, 25 bp, Probe sequence
gtccaagattgtatgagcctattca

SEQ ID NO: 19884 - DNA, 25 bp, Probe sequence
atggtccaagattgtatgagcctat

SEQ ID NO: 19885 - DNA, 25 bp, Probe sequence
tggtccaagattgtatgagcctatt

SEQ ID NO: 19886 - DNA, 25 bp, Probe sequence
tgtgcgttaagcgatatagatatgt

SEQ ID NO: 19887 - DNA, 25 bp, Probe sequence
gcgttaagcgatatagatatgttgc

SEQ ID NO: 19888 - DNA, 25 bp, Probe sequence
tgcgttaagcgatatagatatgttg

SEQ ID NO: 19889 - DNA, 25 bp, Probe sequence
gtgcgttaagcgatatagatatgtt

SEQ ID NO: 19890 - DNA, 25 bp, Probe sequence
ttgtgcgttaagcgatatagatatg

SEQ ID NO: 19891 - DNA, 25 bp, Probe sequence
gttgtgcgttaagcgatatagatat

SEQ ID NO: 19892 - DNA, 25 bp, Probe sequence
ggttgtgcgttaagcgatatagata

SEQ ID NO: 19893 - DNA, 25 bp, Probe sequence
ttaggttgtgcgttaagcgatatag

SEQ ID NO: 19894 - DNA, 25 bp, Probe sequence
taggttgtgcgttaagcgatataga

SEQ ID NO: 19895 - DNA, 25 bp, Probe sequence
cggcataatccaacctgatgatata

SEQ ID NO: 19896 - DNA, 25 bp, Probe sequence
cgaaccgcaactattatacattgat

SEQ ID NO: 19897 - DNA, 25 bp, Probe sequence
aattggaacaagtgaagttgaacat

SEQ ID NO: 19898 - DNA, 25 bp, Probe sequence
gaattggaacaagtgaagttgaaca

SEQ ID NO: 19899 - DNA, 25 bp, Probe sequence
tacggcataatccaacctgatgata

SEQ ID NO: 19900 - DNA, 25 bp, Probe sequence
ggaattggaacaagtgaagttgaac

SEQ ID NO: 19901 - DNA, 25 bp, Probe sequence
tcaacattagaaccacaagtgacat

SEQ ID NO: 19902 - DNA, 25 bp, Probe sequence
ggcataatccaacctgatgatataa

SEQ ID NO: 19903 - DNA, 25 bp, Probe sequence
ttgatcgtgtaattgaacttgatgt

SEQ ID NO: 19904 - DNA, 25 bp, Probe sequence
gaatgtgcgacagagattactgaag

SEQ ID NO: 19905 - DNA, 25 bp, Probe sequence
tatggatatgtgggcaagtttagaa

SEQ ID NO: 19906 - DNA, 25 bp, Probe sequence
gtatggatatgtgggcaagtttaga

SEQ ID NO: 19907 - DNA, 25 bp, Probe sequence
agaatgtgcgacagagattactgaa

SEQ ID NO: 19908 - DNA, 25 bp, Probe sequence
aagaatgtgcgacagagattactga

SEQ ID NO: 19909 - DNA, 25 bp, Probe sequence
tgcgacagagattactgaagttgaa

SEQ ID NO: 19910 - DNA, 25 bp, Probe sequence
ggtatggatatgtgggcaagtttag

SEQ ID NO: 19911 - DNA, 25 bp, Probe sequence
cactatatttagaggatttgcgaca

SEQ ID NO: 19912 - DNA, 25 bp, Probe sequence
atgtgcgacagagattactgaagtt

SEQ ID NO: 19913 - DNA, 25 bp, Probe sequence
tagaaccgaagaataacaaccaaca

SEQ ID NO: 19914 - DNA, 25 bp, Probe sequence
ttagaaccgaagaataacaaccaac

SEQ ID NO: 19915 - DNA, 25 bp, Probe sequence
acagaacagtattagtaggacgatt

SEQ ID NO: 19916 - DNA, 25 bp, Probe sequence
aacagaacagtattagtaggacgat

SEQ ID NO: 19917 - DNA, 25 bp, Probe sequence
gaaccgaagaataacaaccaacaac

SEQ ID NO: 19918 - DNA, 25 bp, Probe sequence
agaaccgaagaataacaaccaacaa

SEQ ID NO: 19919 - DNA, 25 bp, Probe sequence
cttagaaccgaagaataacaaccaa

SEQ ID NO: 19920 - DNA, 25 bp, Probe sequence
accgaagaataacaaccaacaacaa

SEQ ID NO: 19921 - DNA, 25 bp, Probe sequence
aaccgaagaataacaaccaacaaca

SEQ ID NO: 19922 - DNA, 25 bp, Probe sequence
ggcagaagtcatagttatattagcg

SEQ ID NO: 19923 - DNA, 25 bp, Probe sequence
gcagaagtcatagttatattagcga

SEQ ID NO: 19924 - DNA, 25 bp, Probe sequence
aggcagaagtcatagttatattagc

SEQ ID NO: 19925 - DNA, 25 bp, Probe sequence
tcttgaatggtgtaatcacttggaa

SEQ ID NO: 19926 - DNA, 25 bp, Probe sequence
atcttgaatggtgtaatcacttgga

SEQ ID NO: 19927 - DNA, 25 bp, Probe sequence
aatcttgaatggtgtaatcacttgg

SEQ ID NO: 19928 - DNA, 25 bp, Probe sequence
cctaatggtcgagatgtaagagtaa

SEQ ID NO: 19929 - DNA, 25 bp, Probe sequence
agttacttggtctaaccgttatcaa

SEQ ID NO: 19930 - DNA, 25 bp, Probe sequence
cgaagtaagcagtaaaggtagagtt

SEQ ID NO: 19931 - DNA, 25 bp, Probe sequence
gcagaagtgaataaccaatatgtcg

SEQ ID NO: 19932 - DNA, 25 bp, Probe sequence
agatacgataaccgacttactgaca

SEQ ID NO: 19933 - DNA, 25 bp, Probe sequence
agcagaagtgaataaccaatatgtc

SEQ ID NO: 19934 - DNA, 25 bp, Probe sequence
gatacgataaccgacttactgacag

SEQ ID NO: 19935 - DNA, 25 bp, Probe sequence
aagcagaagtgaataaccaatatgt

SEQ ID NO: 19936 - DNA, 25 bp, Probe sequence
atgtcagatacgataaccgacttac

SEQ ID NO: 19937 - DNA, 25 bp, Probe sequence
cagatacgataaccgacttactgac

SEQ ID NO: 19938 - DNA, 25 bp, Probe sequence
gtcagatacgataaccgacttactg

SEQ ID NO: 19939 - DNA, 25 bp, Probe sequence
aatgtcagatacgataaccgactta

SEQ ID NO: 19940 - DNA, 25 bp, Probe sequence
atacaacactaatcaagatggacgg

SEQ ID NO: 19941 - DNA, 25 bp, Probe sequence
aatacaacactaatcaagatggacg

SEQ ID NO: 19942 - DNA, 25 bp, Probe sequence
aatcgctactaattcaaggctcatt

SEQ ID NO: 19943 - DNA, 25 bp, Probe sequence
caatcgctactaattcaaggctcat

SEQ ID NO: 19944 - DNA, 25 bp, Probe sequence
aacaatcgctactaattcaaggctc

SEQ ID NO: 19945 - DNA, 25 bp, Probe sequence
tacaacactaatcaagatggacggt

SEQ ID NO: 19946 - DNA, 25 bp, Probe sequence
aaggctacacagtgctatatatgaa

SEQ ID NO: 19947 - DNA, 25 bp, Probe sequence
actaatcaagatggacggtcaagat

SEQ ID NO: 19948 - DNA, 25 bp, Probe sequence
ggctacacagtgctatatatgaatg

SEQ ID NO: 19949 - DNA, 25 bp, Probe sequence
cgagaagatggcacagaagatatta

SEQ ID NO: 19950 - DNA, 25 bp, Probe sequence
agatggcacagaagatattaaggtc

SEQ ID NO: 19951 - DNA, 25 bp, Probe sequence
aagatggcacagaagatattaaggt

SEQ ID NO: 19952 - DNA, 25 bp, Probe sequence
gatggcacagaagatattaaggtca

SEQ ID NO: 19953 - DNA, 25 bp, Probe sequence
ggcacagaagatattaaggtcatca

SEQ ID NO: 19954 - DNA, 25 bp, Probe sequence
tggcacagaagatattaaggtcatc

SEQ ID NO: 19955 - DNA, 25 bp, Probe sequence
gaagatggcacagaagatattaagg

SEQ ID NO: 19956 - DNA, 25 bp, Probe sequence
atggcacagaagatattaaggtcat

SEQ ID NO: 19957 - DNA, 25 bp, Probe sequence
gcacagaagatattaaggtcatcaa

SEQ ID NO: 19958 - DNA, 25 bp, Probe sequence
acatggattacttacgaggaattaa

SEQ ID NO: 19959 - DNA, 25 bp, Probe sequence
aacatggattacttacgaggaatta

SEQ ID NO: 19960 - DNA, 25 bp, Probe sequence
tgagtaaatacaacgctaagaaagt

SEQ ID NO: 19961 - DNA, 25 bp, Probe sequence
aacgctaagaaagttgagtacaaag

SEQ ID NO: 19962 - DNA, 25 bp, Probe sequence
aattggatatgtaaagcacctaagt

SEQ ID NO: 19963 - DNA, 25 bp, Probe sequence
gctaagaaagttgagtacaaaggaa

SEQ ID NO: 19964 - DNA, 25 bp, Probe sequence
cgctaagaaagttgagtacaaagga

SEQ ID NO: 19965 - DNA, 25 bp, Probe sequence
ttggatatgtaaagcacctaagtac

SEQ ID NO: 19966 - DNA, 25 bp, Probe sequence
agattgaatatattgcagacttcgc

SEQ ID NO: 19967 - DNA, 25 bp, Probe sequence
gcagcaatcaaacctattacaacat

SEQ ID NO: 19968 - DNA, 25 bp, Probe sequence
tttaccaaatcaaactgtgtcatca

SEQ ID NO: 19969 - DNA, 25 bp, Probe sequence
atggcagcaatcaaacctattacaa

SEQ ID NO: 19970 - DNA, 25 bp, Probe sequence
ggcagcaatcaaacctattacaaca

SEQ ID NO: 19971 - DNA, 25 bp, Probe sequence
tggcagcaatcaaacctattacaac

SEQ ID NO: 19972 - DNA, 25 bp, Probe sequence
gcaatcaccctacaatatgaatcat

SEQ ID NO: 19973 - DNA, 25 bp, Probe sequence
aaacttgtaaatggcttagatgaca

SEQ ID NO: 19974 - DNA, 25 bp, Probe sequence
ttaccaaatcaaactgtgtcatcac

SEQ ID NO: 19975 - DNA, 25 bp, Probe sequence
aacttgtaaatggcttagatgacat

SEQ ID NO: 19976 - DNA, 25 bp, Probe sequence
agagaacttcgtacaattccataca

SEQ ID NO: 19977 - DNA, 25 bp, Probe sequence
gagaacttcgtacaattccatacag

SEQ ID NO: 19978 - DNA, 25 bp, Probe sequence
tcgtacaattccatacagcaacaat

SEQ ID NO: 19979 - DNA, 25 bp, Probe sequence
aacttcgtacaattccatacagcaa

SEQ ID NO: 19980 - DNA, 25 bp, Probe sequence
ttcgtacaattccatacagcaacaa

SEQ ID NO: 19981 - DNA, 25 bp, Probe sequence
cgtacaattccatacagcaacaatg

SEQ ID NO: 19982 - DNA, 25 bp, Probe sequence
agaacttcgtacaattccatacagc

SEQ ID NO: 19983 - DNA, 25 bp, Probe sequence
aagagaacttcgtacaattccatac

SEQ ID NO: 19984 - DNA, 25 bp, Probe sequence
gaacttcgtacaattccatacagca

SEQ ID NO: 19985 - DNA, 25 bp, Probe sequence
tgatactggagatgacaatgatgat

SEQ ID NO: 19986 - DNA, 25 bp, Probe sequence
acagtcctatgatggctaatatgaa

SEQ ID NO: 19987 - DNA, 25 bp, Probe sequence
ttgatactggagatgacaatgatga

SEQ ID NO: 19988 - DNA, 25 bp, Probe sequence
gatactggagatgacaatgatgatt

SEQ ID NO: 19989 - DNA, 25 bp, Probe sequence
gctatgttaagaatgatgcctagtt

SEQ ID NO: 19990 - DNA, 25 bp, Probe sequence
tacagtcctatgatggctaatatga

SEQ ID NO: 19991 - DNA, 25 bp, Probe sequence
gtcctatgatggctaatatgaatga

SEQ ID NO: 19992 - DNA, 25 bp, Probe sequence
agtcctatgatggctaatatgaatg

SEQ ID NO: 19993 - DNA, 25 bp, Probe sequence
cagtcctatgatggctaatatgaat

SEQ ID NO: 19994 - DNA, 25 bp, Probe sequence
aatctaccgcttatgatatgaggaa

SEQ ID NO: 19995 - DNA, 25 bp, Probe sequence
ccgtggagtcaacaagatactaata

SEQ ID NO: 19996 - DNA, 25 bp, Probe sequence
tcaacaagatactaatatcggtgga

SEQ ID NO: 19997 - DNA, 25 bp, Probe sequence
gtcaacaagatactaatatcggtgg

SEQ ID NO: 19998 - DNA, 25 bp, Probe sequence
caacaagatactaatatcggtggag

SEQ ID NO: 19999 - DNA, 25 bp, Probe sequence
aacaagatactaatatcggtggaga

SEQ ID NO: 20000 - DNA, 25 bp, Probe sequence
acaagatactaatatcggtggagat

SEQ ID NO: 20001 - DNA, 25 bp, Probe sequence
ggagtcaacaagatactaatatcgg

SEQ ID NO: 20002 - DNA, 25 bp, Probe sequence
cgtggagtcaacaagatactaatat

SEQ ID NO: 20003 - DNA, 25 bp, Probe sequence
ttgtgtcattagtggtggtaataat

SEQ ID NO: 20004 - DNA, 25 bp, Probe sequence
ttatctttatgccagtcactacacc

SEQ ID NO: 20005 - DNA, 25 bp, Probe sequence
caggtactgtcattattggtattca

SEQ ID NO: 20006 - DNA, 25 bp, Probe sequence
ctttatgccagtcactacaccttta

SEQ ID NO: 20007 - DNA, 25 bp, Probe sequence
gttatctttatgccagtcactacac

SEQ ID NO: 20008 - DNA, 25 bp, Probe sequence
ggtactgtcattattggtattcaac

SEQ ID NO: 20009 - DNA, 25 bp, Probe sequence
tttatgccagtcactacacctttac

SEQ ID NO: 20010 - DNA, 25 bp, Probe sequence
aggtactgtcattattggtattcaa

SEQ ID NO: 20011 - DNA, 25 bp, Probe sequence
tatctttatgccagtcactacacct

SEQ ID NO: 20012 - DNA, 25 bp, Probe sequence
cagcgattatgatgatagcgatatt

SEQ ID NO: 20013 - DNA, 25 bp, Probe sequence
atgtaatggctgaagttgttcgtaa

SEQ ID NO: 20014 - DNA, 25 bp, Probe sequence
accattgccagatgagttaattgaa

SEQ ID NO: 20015 - DNA, 25 bp, Probe sequence
gaccattgccagatgagttaattga

SEQ ID NO: 20016 - DNA, 25 bp, Probe sequence
gacattcttcattgtgacattcagt

SEQ ID NO: 20017 - DNA, 25 bp, Probe sequence
cgacattcttcattgtgacattcag

SEQ ID NO: 20018 - DNA, 25 bp, Probe sequence
tcctagcttattcgcattagaagaa

SEQ ID NO: 20019 - DNA, 25 bp, Probe sequence
gatctaagctgcgaactgtaataat

SEQ ID NO: 20020 - DNA, 25 bp, Probe sequence
atcctagcttattcgcattagaaga

SEQ ID NO: 20021 - DNA, 25 bp, Probe sequence
gaagaattaagtcgtcgtatgaagc

SEQ ID NO: 20022 - DNA, 25 bp, Probe sequence
aagataacaacgatgatgaaggcaa

SEQ ID NO: 20023 - DNA, 25 bp, Probe sequence
aattaagtcgtcgtatgaagcagaa

SEQ ID NO: 20024 - DNA, 25 bp, Probe sequence
aagaattaagtcgtcgtatgaagca

SEQ ID NO: 20025 - DNA, 25 bp, Probe sequence
gaattaagtcgtcgtatgaagcaga

SEQ ID NO: 20026 - DNA, 25 bp, Probe sequence
agaattaagtcgtcgtatgaagcag

SEQ ID NO: 20027 - DNA, 25 bp, Probe sequence
agaagaattaagtcgtcgtatgaag

SEQ ID NO: 20028 - DNA, 25 bp, Probe sequence
actacaagaagaatataacaagcgt

SEQ ID NO: 20029 - DNA, 25 bp, Probe sequence
tgaagaatcagatggagataatgga

SEQ ID NO: 20030 - DNA, 25 bp, Probe sequence
atcaaggtaacaatccattcggtaa

SEQ ID NO: 20031 - DNA, 25 bp, Probe sequence
aatcaaggtaacaatccattcggta

SEQ ID NO: 20032 - DNA, 25 bp, Probe sequence
ttagaggcattacttgaagatgacg

SEQ ID NO: 20033 - DNA, 25 bp, Probe sequence
acttgaagatgacgaattagaagca

SEQ ID NO: 20034 - DNA, 25 bp, Probe sequence
ggcattacttgaagatgacgaatta

SEQ ID NO: 20035 - DNA, 25 bp, Probe sequence
aggcattacttgaagatgacgaatt

SEQ ID NO: 20036 - DNA, 25 bp, Probe sequence
gaggcattacttgaagatgacgaat

SEQ ID NO: 20037 - DNA, 25 bp, Probe sequence
tacttgaagatgacgaattagaagc

SEQ ID NO: 20038 - DNA, 25 bp, Probe sequence
tagaggcattacttgaagatgacga

SEQ ID NO: 20039 - DNA, 25 bp, Probe sequence
tatagacgaaggacctggaattagt

SEQ ID NO: 20040 - DNA, 25 bp, Probe sequence
gttatagacgaaggacctggaatta

SEQ ID NO: 20041 - DNA, 25 bp, Probe sequence
ttatagacgaaggacctggaattag

SEQ ID NO: 20042 - DNA, 25 bp, Probe sequence
gcaaccttatctcgttagtgaatta

SEQ ID NO: 20043 - DNA, 25 bp, Probe sequence
tgataagcatgagtctagtacgatt

SEQ ID NO: 20044 - DNA, 25 bp, Probe sequence
ttgataagcatgagtctagtacgat

SEQ ID NO: 20045 - DNA, 25 bp, Probe sequence
cttgataagcatgagtctagtacga

SEQ ID NO: 20046 - DNA, 25 bp, Probe sequence
acttgataagcatgagtctagtacg

SEQ ID NO: 20047 - DNA, 25 bp, Probe sequence
tcaacttgataagcatgagtctagt

SEQ ID NO: 20048 - DNA, 25 bp, Probe sequence
cgtgtattaggattaggtcgttcaa

SEQ ID NO: 20049 - DNA, 25 bp, Probe sequence
aagacttacctgagcaacatagaat

SEQ ID NO: 20050 - DNA, 25 bp, Probe sequence
atagaatggttaatgaagcggagaa

SEQ ID NO: 20051 - DNA, 25 bp, Probe sequence
attgttaatcgttccagcagtaatc

SEQ ID NO: 20052 - DNA, 25 bp, Probe sequence
gctgtgattatgtggttctatgtga

SEQ ID NO: 20053 - DNA, 25 bp, Probe sequence
agacttacctgagcaacatagaatg

SEQ ID NO: 20054 - DNA, 25 bp, Probe sequence
aattgttaatcgttccagcagtaat

SEQ ID NO: 20055 - DNA, 25 bp, Probe sequence
ggacctgtattagcaccaatagtta

SEQ ID NO: 20056 - DNA, 25 bp, Probe sequence
atcgctgtgattatgtggttctatg

SEQ ID NO: 20057 - DNA, 25 bp, Probe sequence
tatctaacaacacactgaatcaagc

SEQ ID NO: 20058 - DNA, 25 bp, Probe sequence
aatcatctgaacagtcaatagaagc

SEQ ID NO: 20059 - DNA, 25 bp, Probe sequence
cgaatcatctgaacagtcaatagaa

SEQ ID NO: 20060 - DNA, 25 bp, Probe sequence
aagacacgctaactcatctatgatt

SEQ ID NO: 20061 - DNA, 25 bp, Probe sequence
ttaagacacgctaactcatctatga

SEQ ID NO: 20062 - DNA, 25 bp, Probe sequence
agacacgctaactcatctatgatta

SEQ ID NO: 20063 - DNA, 25 bp, Probe sequence
taagacacgctaactcatctatgat

SEQ ID NO: 20064 - DNA, 25 bp, Probe sequence
tctaacaacacactgaatcaagcta

SEQ ID NO: 20065 - DNA, 25 bp, Probe sequence
ctaacaacacactgaatcaagctaa

SEQ ID NO: 20066 - DNA, 25 bp, Probe sequence
ttagataacggtgcgaatgactata

SEQ ID NO: 20067 - DNA, 25 bp, Probe sequence
gataacggtgcgaatgactatatga

SEQ ID NO: 20068 - DNA, 25 bp, Probe sequence
agataacggtgcgaatgactatatg

SEQ ID NO: 20069 - DNA, 25 bp, Probe sequence
tagataacggtgcgaatgactatat

SEQ ID NO: 20070 - DNA, 25 bp, Probe sequence
ataacggtgcgaatgactatatgac

SEQ ID NO: 20071 - DNA, 25 bp, Probe sequence
ggcaacatactgacattcctatcat

SEQ ID NO: 20072 - DNA, 25 bp, Probe sequence
gcaacatactgacattcctatcatt

SEQ ID NO: 20073 - DNA, 25 bp, Probe sequence
acggtgcgaatgactatatgactaa

SEQ ID NO: 20074 - DNA, 25 bp, Probe sequence
aacggtgcgaatgactatatgacta

SEQ ID NO: 20075 - DNA, 25 bp, Probe sequence
atatacacgcctattattccgagac

SEQ ID NO: 20076 - DNA, 25 bp, Probe sequence
catatacacgcctattattccgaga

SEQ ID NO: 20077 - DNA, 25 bp, Probe sequence
acatatacacgcctattattccgag

SEQ ID NO: 20078 - DNA, 25 bp, Probe sequence
aacatatacacgcctattattccga

SEQ ID NO: 20079 - DNA, 25 bp, Probe sequence
acgcctattattccgagactatatg

SEQ ID NO: 20080 - DNA, 25 bp, Probe sequence
cacgcctattattccgagactatat

SEQ ID NO: 20081 - DNA, 25 bp, Probe sequence
cgcctattattccgagactatatga

SEQ ID NO: 20082 - DNA, 25 bp, Probe sequence
acacgcctattattccgagactata

SEQ ID NO: 20083 - DNA, 25 bp, Probe sequence
tacacgcctattattccgagactat

SEQ ID NO: 20084 - DNA, 25 bp, Probe sequence
catacacctctcaatatctatcgga

SEQ ID NO: 20085 - DNA, 25 bp, Probe sequence
tcatacacctctcaatatctatcgg

SEQ ID NO: 20086 - DNA, 25 bp, Probe sequence
acacctctcaatatctatcggaatt

SEQ ID NO: 20087 - DNA, 25 bp, Probe sequence
cattcggatcatacacctctcaata

SEQ ID NO: 20088 - DNA, 25 bp, Probe sequence
tacacctctcaatatctatcggaat

SEQ ID NO: 20089 - DNA, 25 bp, Probe sequence
atacacctctcaatatctatcggaa

SEQ ID NO: 20090 - DNA, 25 bp, Probe sequence
ttcggatcatacacctctcaatatc

SEQ ID NO: 20091 - DNA, 25 bp, Probe sequence
tcggatcatacacctctcaatatct

SEQ ID NO: 20092 - DNA, 25 bp, Probe sequence
attcggatcatacacctctcaatat

SEQ ID NO: 20093 - DNA, 25 bp, Probe sequence
tagagactgagagcgttatcaacaa

SEQ ID NO: 20094 - DNA, 25 bp, Probe sequence
ttagagactgagagcgttatcaaca

SEQ ID NO: 20095 - DNA, 25 bp, Probe sequence
tgaagaaagcctaagatgtggattt

SEQ ID NO: 20096 - DNA, 25 bp, Probe sequence
ctgaagaaagcctaagatgtggatt

SEQ ID NO: 20097 - DNA, 25 bp, Probe sequence
gaagaaagcctaagatgtggattta

SEQ ID NO: 20098 - DNA, 25 bp, Probe sequence
atgatggttcggtatttatagcaaa

SEQ ID NO: 20099 - DNA, 25 bp, Probe sequence
aagcctaagatgtggatttaatgtt

SEQ ID NO: 20100 - DNA, 25 bp, Probe sequence
aaagcctaagatgtggatttaatgt

SEQ ID NO: 20101 - DNA, 25 bp, Probe sequence
ctgagagcgttatcaacaaagtaaa

SEQ ID NO: 20102 - DNA, 25 bp, Probe sequence
cgttcttgtcgtgatgattattgtt

SEQ ID NO: 20103 - DNA, 25 bp, Probe sequence
cttgtcgtgatgattattgttagca

SEQ ID NO: 20104 - DNA, 25 bp, Probe sequence
tcttgtcgtgatgattattgttagc

SEQ ID NO: 20105 - DNA, 25 bp, Probe sequence
atcgttcttgtcgtgatgattattg

SEQ ID NO: 20106 - DNA, 25 bp, Probe sequence
atctatcgttcttgtcgtgatgatt

SEQ ID NO: 20107 - DNA, 25 bp, Probe sequence
tctatcgttcttgtcgtgatgatta

SEQ ID NO: 20108 - DNA, 25 bp, Probe sequence
gacatctaagacaaccgtagtgatt

SEQ ID NO: 20109 - DNA, 25 bp, Probe sequence
tcgttcttgtcgtgatgattattgt

SEQ ID NO: 20110 - DNA, 25 bp, Probe sequence
aacaattaagtaggagtgaagatgc

SEQ ID NO: 20111 - DNA, 25 bp, Probe sequence
acgcacctgtttatagtaagcatta

SEQ ID NO: 20112 - DNA, 25 bp, Probe sequence
atacgcacctgtttatagtaagcat

SEQ ID NO: 20113 - DNA, 25 bp, Probe sequence
tacgcacctgtttatagtaagcatt

SEQ ID NO: 20114 - DNA, 25 bp, Probe sequence
tatacgcacctgtttatagtaagca

SEQ ID NO: 20115 - DNA, 25 bp, Probe sequence
cgcacctgtttatagtaagcattat

SEQ ID NO: 20116 - DNA, 25 bp, Probe sequence
gcacctgtttatagtaagcattatt

SEQ ID NO: 20117 - DNA, 25 bp, Probe sequence
gtatacgcacctgtttatagtaagc

SEQ ID NO: 20118 - DNA, 25 bp, Probe sequence
ggtatacgcacctgtttatagtaag

SEQ ID NO: 20119 - DNA, 25 bp, Probe sequence
cacctgtttatagtaagcattattt

SEQ ID NO: 20120 - DNA, 25 bp, Probe sequence
ttatactggcgaaggcaaacaattt

SEQ ID NO: 20121 - DNA, 25 bp, Probe sequence
cttatactggcgaaggcaaacaatt

SEQ ID NO: 20122 - DNA, 25 bp, Probe sequence
tattgtgcaaaggctaatcttgttt

SEQ ID NO: 20123 - DNA, 25 bp, Probe sequence
ttattgtgcaaaggctaatcttgtt

SEQ ID NO: 20124 - DNA, 25 bp, Probe sequence
tttattgtgcaaaggctaatcttgt

SEQ ID NO: 20125 - DNA, 25 bp, Probe sequence
atcctgaatggctttattgtgcaaa

SEQ ID NO: 20126 - DNA, 25 bp, Probe sequence
cttgttttagagcctgcttatactg

SEQ ID NO: 20127 - DNA, 25 bp, Probe sequence
ttgttttagagcctgcttatactgg

SEQ ID NO: 20128 - DNA, 25 bp, Probe sequence
catcctgaatggctttattgtgcaa

SEQ ID NO: 20129 - DNA, 25 bp, Probe sequence
caggtgtgatgttagtaagtggtat

SEQ ID NO: 20130 - DNA, 25 bp, Probe sequence
tcctgagtcacctattacacctatt

SEQ ID NO: 20131 - DNA, 25 bp, Probe sequence
ttcctgagtcacctattacacctat

SEQ ID NO: 20132 - DNA, 25 bp, Probe sequence
attcctgagtcacctattacaccta

SEQ ID NO: 20133 - DNA, 25 bp, Probe sequence
tattcctgagtcacctattacacct

SEQ ID NO: 20134 - DNA, 25 bp, Probe sequence
cgttattcctgagtcacctattaca

SEQ ID NO: 20135 - DNA, 25 bp, Probe sequence
tcgttattcctgagtcacctattac

SEQ ID NO: 20136 - DNA, 25 bp, Probe sequence
ttattcctgagtcacctattacacc

SEQ ID NO: 20137 - DNA, 25 bp, Probe sequence
aggtgtgatgttagtaagtggtata

SEQ ID NO: 20138 - DNA, 25 bp, Probe sequence
cttagtagttgaatcgcacaatgaa

SEQ ID NO: 20139 - DNA, 25 bp, Probe sequence
gacttagtagttgaatcgcacaatg

SEQ ID NO: 20140 - DNA, 25 bp, Probe sequence
agacttagtagttgaatcgcacaat

SEQ ID NO: 20141 - DNA, 25 bp, Probe sequence
acttagtagttgaatcgcacaatga

SEQ ID NO: 20142 - DNA, 25 bp, Probe sequence
aagacttagtagttgaatcgcacaa

SEQ ID NO: 20143 - DNA, 25 bp, Probe sequence
ttagtagttgaatcgcacaatgaat

SEQ ID NO: 20144 - DNA, 25 bp, Probe sequence
tagtagttgaatcgcacaatgaatt

SEQ ID NO: 20145 - DNA, 25 bp, Probe sequence
ctttgatgatgatgaaatggcagtt

SEQ ID NO: 20146 - DNA, 25 bp, Probe sequence
aagtctttgatgatgatgaaatggc

SEQ ID NO: 20147 - DNA, 25 bp, Probe sequence
aatacaagacatccgtaatgctact

SEQ ID NO: 20148 - DNA, 25 bp, Probe sequence
atacaagacatccgtaatgctactg

SEQ ID NO: 20149 - DNA, 25 bp, Probe sequence
aagacatccgtaatgctactgatta

SEQ ID NO: 20150 - DNA, 25 bp, Probe sequence
agacatccgtaatgctactgattat

SEQ ID NO: 20151 - DNA, 25 bp, Probe sequence
caagacatccgtaatgctactgatt

SEQ ID NO: 20152 - DNA, 25 bp, Probe sequence
agttaatcgttgatgagcaattagc

SEQ ID NO: 20153 - DNA, 25 bp, Probe sequence
tacaagacatccgtaatgctactga

SEQ ID NO: 20154 - DNA, 25 bp, Probe sequence
taatacaagacatccgtaatgctac

SEQ ID NO: 20155 - DNA, 25 bp, Probe sequence
ttagagttaatcgttgatgagcaat

SEQ ID NO: 20156 - DNA, 25 bp, Probe sequence
tagcgattaacttaatgttgcgttc

SEQ ID NO: 20157 - DNA, 25 bp, Probe sequence
atagcgattaacttaatgttgcgtt

SEQ ID NO: 20158 - DNA, 25 bp, Probe sequence
tatagcgattaacttaatgttgcgt

SEQ ID NO: 20159 - DNA, 25 bp, Probe sequence
atatagcgattaacttaatgttgcg

SEQ ID NO: 20160 - DNA, 25 bp, Probe sequence
ggtgaaggtgtttatgatgaagaag

SEQ ID NO: 20161 - DNA, 25 bp, Probe sequence
tggtgaaggtgtttatgatgaagaa

SEQ ID NO: 20162 - DNA, 25 bp, Probe sequence
ttggtgaaggtgtttatgatgaaga

SEQ ID NO: 20163 - DNA, 25 bp, Probe sequence
cttggtgaaggtgtttatgatgaag

SEQ ID NO: 20164 - DNA, 25 bp, Probe sequence
tcttggtgaaggtgtttatgatgaa

SEQ ID NO: 20165 - DNA, 25 bp, Probe sequence
aatgttgcgataggtaactttgaag

SEQ ID NO: 20166 - DNA, 25 bp, Probe sequence
caatgttgcgataggtaactttgaa

SEQ ID NO: 20167 - DNA, 25 bp, Probe sequence
atcaatgttgcgataggtaactttg

SEQ ID NO: 20168 - DNA, 25 bp, Probe sequence
aaccatgagattgaaattgataggc

SEQ ID NO: 20169 - DNA, 25 bp, Probe sequence
agggaaccatgagattgaaattgat

SEQ ID NO: 20170 - DNA, 25 bp, Probe sequence
gggaaccatgagattgaaattgata

SEQ ID NO: 20171 - DNA, 25 bp, Probe sequence
tgttgcgataggtaactttgaagta

SEQ ID NO: 20172 - DNA, 25 bp, Probe sequence
gttgcgataggtaactttgaagtaa

SEQ ID NO: 20173 - DNA, 25 bp, Probe sequence
atgttgcgataggtaactttgaagt

SEQ ID NO: 20174 - DNA, 25 bp, Probe sequence
atcactatcaaccgaagatcaagag

SEQ ID NO: 20175 - DNA, 25 bp, Probe sequence
tatcactatcaaccgaagatcaaga

SEQ ID NO: 20176 - DNA, 25 bp, Probe sequence
catacagatacggcgaagatgattg

SEQ ID NO: 20177 - DNA, 25 bp, Probe sequence
ttatcactatcaaccgaagatcaag

SEQ ID NO: 20178 - DNA, 25 bp, Probe sequence
atgatgatttagttgaacagttgcc

SEQ ID NO: 20179 - DNA, 25 bp, Probe sequence
tttagaaggtcaaattgtcagggat

SEQ ID NO: 20180 - DNA, 25 bp, Probe sequence
tcactatcaaccgaagatcaagagc

SEQ ID NO: 20181 - DNA, 25 bp, Probe sequence
gatgatttagttgaacagttgccac

SEQ ID NO: 20182 - DNA, 25 bp, Probe sequence
cagatacggcgaagatgattgctaa

SEQ ID NO: 20183 - DNA, 25 bp, Probe sequence
tcaaggttatggtgaggtacatcat

SEQ ID NO: 20184 - DNA, 25 bp, Probe sequence
caaggttatggtgaggtacatcatg

SEQ ID NO: 20185 - DNA, 25 bp, Probe sequence
gttatggtgaggtacatcatgtgtc

SEQ ID NO: 20186 - DNA, 25 bp, Probe sequence
tatggtgaggtacatcatgtgtcat

SEQ ID NO: 20187 - DNA, 25 bp, Probe sequence
ttatggtgaggtacatcatgtgtca

SEQ ID NO: 20188 - DNA, 25 bp, Probe sequence
aaggttatggtgaggtacatcatgt

SEQ ID NO: 20189 - DNA, 25 bp, Probe sequence
ggcaacgaaatataaagaggtaggt

SEQ ID NO: 20190 - DNA, 25 bp, Probe sequence
tgggcaacgaaatataaagaggtag

SEQ ID NO: 20191 - DNA, 25 bp, Probe sequence
gtcaaggttatggtgaggtacatca

SEQ ID NO: 20192 - DNA, 25 bp, Probe sequence
atggattaacctgtgcatattctac

SEQ ID NO: 20193 - DNA, 25 bp, Probe sequence
catggattaacctgtgcatattcta

SEQ ID NO: 20194 - DNA, 25 bp, Probe sequence
tggattaacctgtgcatattctaca

SEQ ID NO: 20195 - DNA, 25 bp, Probe sequence
acatggattaacctgtgcatattct

SEQ ID NO: 20196 - DNA, 25 bp, Probe sequence
aacatggattaacctgtgcatattc

SEQ ID NO: 20197 - DNA, 25 bp, Probe sequence
ggattaacctgtgcatattctacat

SEQ ID NO: 20198 - DNA, 25 bp, Probe sequence
ttatgaaaggttatcaacggttgtc

SEQ ID NO: 20199 - DNA, 25 bp, Probe sequence
tttatgaaaggttatcaacggttgt

SEQ ID NO: 20200 - DNA, 25 bp, Probe sequence
aagataaacatggattaacctgtgc

SEQ ID NO: 20201 - DNA, 25 bp, Probe sequence
agttattggatattcgtgtcgtcat

SEQ ID NO: 20202 - DNA, 25 bp, Probe sequence
gttattggatattcgtgtcgtcatc

SEQ ID NO: 20203 - DNA, 25 bp, Probe sequence
ttattggatattcgtgtcgtcatca

SEQ ID NO: 20204 - DNA, 25 bp, Probe sequence
tgaatgaacacggcagaattataga

SEQ ID NO: 20205 - DNA, 25 bp, Probe sequence
gaatgaacacggcagaattatagaa

SEQ ID NO: 20206 - DNA, 25 bp, Probe sequence
cagttattggatattcgtgtcgtca

SEQ ID NO: 20207 - DNA, 25 bp, Probe sequence
tgatgatggattatctggtgaagaa

SEQ ID NO: 20208 - DNA, 25 bp, Probe sequence
ttgatgatggattatctggtgaaga

SEQ ID NO: 20209 - DNA, 25 bp, Probe sequence
aatgaacacggcagaattatagaat

SEQ ID NO: 20210 - DNA, 25 bp, Probe sequence
gaattaacaatcttacaacaagcgt

SEQ ID NO: 20211 - DNA, 25 bp, Probe sequence
tgaattaacaatcttacaacaagcg

SEQ ID NO: 20212 - DNA, 25 bp, Probe sequence
aattaacaatcttacaacaagcgtt

SEQ ID NO: 20213 - DNA, 25 bp, Probe sequence
caaccaattcaacgtattagagacc

SEQ ID NO: 20214 - DNA, 25 bp, Probe sequence
gcaaccaattcaacgtattagagac

SEQ ID NO: 20215 - DNA, 25 bp, Probe sequence
gaatagggcgttagacacattagag

SEQ ID NO: 20216 - DNA, 25 bp, Probe sequence
gcgttagacacattagagcaaatta

SEQ ID NO: 20217 - DNA, 25 bp, Probe sequence
aaccaattcaacgtattagagaccg

SEQ ID NO: 20218 - DNA, 25 bp, Probe sequence
atgaatagggcgttagacacattag

SEQ ID NO: 20219 - DNA, 25 bp, Probe sequence
aactgatcgtgtattattattcgca

SEQ ID NO: 20220 - DNA, 25 bp, Probe sequence
caactgatcgtgtattattattcgc

SEQ ID NO: 20221 - DNA, 25 bp, Probe sequence
atcgtgtattattattcgcaccatt

SEQ ID NO: 20222 - DNA, 25 bp, Probe sequence
ctgatcgtgtattattattcgcacc

SEQ ID NO: 20223 - DNA, 25 bp, Probe sequence
gatcgtgtattattattcgcaccat

SEQ ID NO: 20224 - DNA, 25 bp, Probe sequence
tgatcgtgtattattattcgcacca

SEQ ID NO: 20225 - DNA, 25 bp, Probe sequence
ttgactcaactgatcgtgtattatt

SEQ ID NO: 20226 - DNA, 25 bp, Probe sequence
aattgactcaactgatcgtgtatta

SEQ ID NO: 20227 - DNA, 25 bp, Probe sequence
actgatcgtgtattattattcgcac

SEQ ID NO: 20228 - DNA, 25 bp, Probe sequence
aggtagattgtctccaagttctctt

SEQ ID NO: 20229 - DNA, 25 bp, Probe sequence
attagagtcaggtagattgtctcca

SEQ ID NO: 20230 - DNA, 25 bp, Probe sequence
ttagagtcaggtagattgtctccaa

SEQ ID NO: 20231 - DNA, 25 bp, Probe sequence
tgttaggtattgattcatgtccgat

SEQ ID NO: 20232 - DNA, 25 bp, Probe sequence
ttgttaggtattgattcatgtccga

SEQ ID NO: 20233 - DNA, 25 bp, Probe sequence
tagagtcaggtagattgtctccaag

SEQ ID NO: 20234 - DNA, 25 bp, Probe sequence
caggtagattgtctccaagttctct

SEQ ID NO: 20235 - DNA, 25 bp, Probe sequence
tcaggtagattgtctccaagttctc

SEQ ID NO: 20236 - DNA, 25 bp, Probe sequence
attgttaggtattgattcatgtccg

SEQ ID NO: 20237 - DNA, 25 bp, Probe sequence
aattatgcttaactggaggtaatgc

SEQ ID NO: 20238 - DNA, 25 bp, Probe sequence
aatcgttcaagagcaagataaccaa

SEQ ID NO: 20239 - DNA, 25 bp, Probe sequence
atcgttcaagagcaagataaccaac

SEQ ID NO: 20240 - DNA, 25 bp, Probe sequence
ttattacgcaaagttgtggaagatt

SEQ ID NO: 20241 - DNA, 25 bp, Probe sequence
tgattcaaggactcggttatttact

SEQ ID NO: 20242 - DNA, 25 bp, Probe sequence
tttattacgcaaagttgtggaagat

SEQ ID NO: 20243 - DNA, 25 bp, Probe sequence
ttcaagagcaagataaccaacgtac

SEQ ID NO: 20244 - DNA, 25 bp, Probe sequence
atgattcaaggactcggttatttac

SEQ ID NO: 20245 - DNA, 25 bp, Probe sequence
tattacgcaaagttgtggaagatta

SEQ ID NO: 20246 - DNA, 25 bp, Probe sequence
gttaaggctattgcggtagatatgg

SEQ ID NO: 20247 - DNA, 25 bp, Probe sequence
ggttaaggctattgcggtagatatg

SEQ ID NO: 20248 - DNA, 25 bp, Probe sequence
ttaaggctattgcggtagatatgga

SEQ ID NO: 20249 - DNA, 25 bp, Probe sequence
tggttaaggctattgcggtagatat

SEQ ID NO: 20250 - DNA, 25 bp, Probe sequence
atggttaaggctattgcggtagata

SEQ ID NO: 20251 - DNA, 25 bp, Probe sequence
caacgcaattcagcaatgatattaa

SEQ ID NO: 20252 - DNA, 25 bp, Probe sequence
taaggctattgcggtagatatggac

SEQ ID NO: 20253 - DNA, 25 bp, Probe sequence
cgctaagcatagttatgtgatggaa

SEQ ID NO: 20254 - DNA, 25 bp, Probe sequence
ttcgctaagcatagttatgtgatgg

SEQ ID NO: 20255 - DNA, 25 bp, Probe sequence
caagtcattcattagaaggtgctaa

SEQ ID NO: 20256 - DNA, 25 bp, Probe sequence
gcagcaagtcattcattagaaggtg

SEQ ID NO: 20257 - DNA, 25 bp, Probe sequence
aaggattaaacggagatgtcattca

SEQ ID NO: 20258 - DNA, 25 bp, Probe sequence
tttattagattagcgggaacgatgg

SEQ ID NO: 20259 - DNA, 25 bp, Probe sequence
ccatttattagattagcgggaacga

SEQ ID NO: 20260 - DNA, 25 bp, Probe sequence
atttattagattagcgggaacgatg

SEQ ID NO: 20261 - DNA, 25 bp, Probe sequence
catttattagattagcgggaacgat

SEQ ID NO: 20262 - DNA, 25 bp, Probe sequence
gaaggattaaacggagatgtcattc

SEQ ID NO: 20263 - DNA, 25 bp, Probe sequence
aggattaaacggagatgtcattcac

SEQ ID NO: 20264 - DNA, 25 bp, Probe sequence
tgacaagtataagagatgttaagcc

SEQ ID NO: 20265 - DNA, 25 bp, Probe sequence
aggctatattgaaattccagatgct

SEQ ID NO: 20266 - DNA, 25 bp, Probe sequence
caggctatattgaaattccagatgc

SEQ ID NO: 20267 - DNA, 25 bp, Probe sequence
gcaggctatattgaaattccagatg

SEQ ID NO: 20268 - DNA, 25 bp, Probe sequence
aaagtggcaggctatattgaaattc

SEQ ID NO: 20269 - DNA, 25 bp, Probe sequence
ccgtccgaactatcaatttacaaat

SEQ ID NO: 20270 - DNA, 25 bp, Probe sequence
accgtccgaactatcaatttacaaa

SEQ ID NO: 20271 - DNA, 25 bp, Probe sequence
taaagaaccagtatatccaggacca

SEQ ID NO: 20272 - DNA, 25 bp, Probe sequence
ttaaagaaccagtatatccaggacc

SEQ ID NO: 20273 - DNA, 25 bp, Probe sequence
tattgtacttcagtggtgctattcg

SEQ ID NO: 20274 - DNA, 25 bp, Probe sequence
ctattgtacttcagtggtgctattc

SEQ ID NO: 20275 - DNA, 25 bp, Probe sequence
actattgtacttcagtggtgctatt

SEQ ID NO: 20276 - DNA, 25 bp, Probe sequence
aactattgtacttcagtggtgctat

SEQ ID NO: 20277 - DNA, 25 bp, Probe sequence
attgtacttcagtggtgctattcgt

SEQ ID NO: 20278 - DNA, 25 bp, Probe sequence
aagtgactgggaatgaaagtttgaa

SEQ ID NO: 20279 - DNA, 25 bp, Probe sequence
ttgtacttcagtggtgctattcgtg

SEQ ID NO: 20280 - DNA, 25 bp, Probe sequence
aaactattgtacttcagtggtgcta

SEQ ID NO: 20281 - DNA, 25 bp, Probe sequence
agtgactgggaatgaaagtttgaac

SEQ ID NO: 20282 - DNA, 25 bp, Probe sequence
atacaatcattcgtatcggttcttg

SEQ ID NO: 20283 - DNA, 25 bp, Probe sequence
caatcattcgtatcggttcttgtgg

SEQ ID NO: 20284 - DNA, 25 bp, Probe sequence
atgatggaaatcgctttagaaatcg

SEQ ID NO: 20285 - DNA, 25 bp, Probe sequence
cacaaatgatggaaatcgctttaga

SEQ ID NO: 20286 - DNA, 25 bp, Probe sequence
ttacacaaatgatggaaatcgcttt

SEQ ID NO: 20287 - DNA, 25 bp, Probe sequence
tttacacaaatgatggaaatcgctt

SEQ ID NO: 20288 - DNA, 25 bp, Probe sequence
acacaaatgatggaaatcgctttag

SEQ ID NO: 20289 - DNA, 25 bp, Probe sequence
acaaatgatggaaatcgctttagaa

SEQ ID NO: 20290 - DNA, 25 bp, Probe sequence
aatcgctttagaaatcgcagagtaa

SEQ ID NO: 20291 - DNA, 25 bp, Probe sequence
gtacttatcctagtggcagcatatt

SEQ ID NO: 20292 - DNA, 25 bp, Probe sequence
ggtacttatcctagtggcagcatat

SEQ ID NO: 20293 - DNA, 25 bp, Probe sequence
tatcctagtggcagcatatttgttt

SEQ ID NO: 20294 - DNA, 25 bp, Probe sequence
ttatcctagtggcagcatatttgtt

SEQ ID NO: 20295 - DNA, 25 bp, Probe sequence
cttatcctagtggcagcatatttgt

SEQ ID NO: 20296 - DNA, 25 bp, Probe sequence
tggtacttatcctagtggcagcata

SEQ ID NO: 20297 - DNA, 25 bp, Probe sequence
aatcgctggtgtggtacttatccta

SEQ ID NO: 20298 - DNA, 25 bp, Probe sequence
acttatcctagtggcagcatatttg

SEQ ID NO: 20299 - DNA, 25 bp, Probe sequence
tacttatcctagtggcagcatattt

SEQ ID NO: 20300 - DNA, 25 bp, Probe sequence
cgtatcatggaattgttatcagtca

SEQ ID NO: 20301 - DNA, 25 bp, Probe sequence
ttcaaggcattaggcgattacaatc

SEQ ID NO: 20302 - DNA, 25 bp, Probe sequence
tttatctcaatcaaatgtctcgcac

SEQ ID NO: 20303 - DNA, 25 bp, Probe sequence
aatcaaatgtctcgcaccaattaaa

SEQ ID NO: 20304 - DNA, 25 bp, Probe sequence
acgtatcatggaattgttatcagtc

SEQ ID NO: 20305 - DNA, 25 bp, Probe sequence
cgaatcatcctaaagaaagtgggtt

SEQ ID NO: 20306 - DNA, 25 bp, Probe sequence
caatcaaatgtctcgcaccaattaa

SEQ ID NO: 20307 - DNA, 25 bp, Probe sequence
tagatgacatccacgtagcaactat

SEQ ID NO: 20308 - DNA, 25 bp, Probe sequence
gtatcatggaattgttatcagtcag

SEQ ID NO: 20309 - DNA, 25 bp, Probe sequence
agcattcatcattaacacaacgatt

SEQ ID NO: 20310 - DNA, 25 bp, Probe sequence
atagcattcatcattaacacaacga

SEQ ID NO: 20311 - DNA, 25 bp, Probe sequence
tagcattcatcattaacacaacgat

SEQ ID NO: 20312 - DNA, 25 bp, Probe sequence
gcattcatcattaacacaacgatta

SEQ ID NO: 20313 - DNA, 25 bp, Probe sequence
tatagcattcatcattaacacaacg

SEQ ID NO: 20314 - DNA, 25 bp, Probe sequence
ttcatcattaacacaacgattacat

SEQ ID NO: 20315 - DNA, 25 bp, Probe sequence
attcatcattaacacaacgattaca

SEQ ID NO: 20316 - DNA, 25 bp, Probe sequence
cattcatcattaacacaacgattac

SEQ ID NO: 20317 - DNA, 25 bp, Probe sequence
atatggatatacgactgagggaacg

SEQ ID NO: 20318 - DNA, 25 bp, Probe sequence
ttcaggaacacatagtcattcacat

SEQ ID NO: 20319 - DNA, 25 bp, Probe sequence
tgttatcggagacttattaggttca

SEQ ID NO: 20320 - DNA, 25 bp, Probe sequence
tcaggaacacatagtcattcacata

SEQ ID NO: 20321 - DNA, 25 bp, Probe sequence
gttatcggagacttattaggttcag

SEQ ID NO: 20322 - DNA, 25 bp, Probe sequence
atcggagacttattaggttcagttg

SEQ ID NO: 20323 - DNA, 25 bp, Probe sequence
tatcggagacttattaggttcagtt

SEQ ID NO: 20324 - DNA, 25 bp, Probe sequence
ttatcggagacttattaggttcagt

SEQ ID NO: 20325 - DNA, 25 bp, Probe sequence
atgttatcggagacttattaggttc

SEQ ID NO: 20326 - DNA, 25 bp, Probe sequence
gttcaggaacacatagtcattcaca

SEQ ID NO: 20327 - DNA, 25 bp, Probe sequence
aagcatctgtctggatcattagtac

SEQ ID NO: 20328 - DNA, 25 bp, Probe sequence
gaagcatctgtctggatcattagta

SEQ ID NO: 20329 - DNA, 25 bp, Probe sequence
aagaagcatctgtctggatcattag

SEQ ID NO: 20330 - DNA, 25 bp, Probe sequence
ggatcattagtaccagatagatgct

SEQ ID NO: 20331 - DNA, 25 bp, Probe sequence
agaagcatctgtctggatcattagt

SEQ ID NO: 20332 - DNA, 25 bp, Probe sequence
agcatctgtctggatcattagtacc

SEQ ID NO: 20333 - DNA, 25 bp, Probe sequence
tcattagtaccagatagatgcttct

SEQ ID NO: 20334 - DNA, 25 bp, Probe sequence
cattagtaccagatagatgcttctt

SEQ ID NO: 20335 - DNA, 25 bp, Probe sequence
atcattagtaccagatagatgcttc

SEQ ID NO: 20336 - DNA, 25 bp, Probe sequence
gatgaagcgtatattaagcgaatga

SEQ ID NO: 20337 - DNA, 25 bp, Probe sequence
agatgaagcgtatattaagcgaatg

SEQ ID NO: 20338 - DNA, 25 bp, Probe sequence
ggtgtatctgaagtgttagttggag

SEQ ID NO: 20339 - DNA, 25 bp, Probe sequence
gacttacctcatagatgctaatcca

SEQ ID NO: 20340 - DNA, 25 bp, Probe sequence
tgaagcgtatattaagcgaatgatt

SEQ ID NO: 20341 - DNA, 25 bp, Probe sequence
ctggtgtatctgaagtgttagttgg

SEQ ID NO: 20342 - DNA, 25 bp, Probe sequence
tgtatctgaagtgttagttggagac

SEQ ID NO: 20343 - DNA, 25 bp, Probe sequence
gtgtatctgaagtgttagttggaga

SEQ ID NO: 20344 - DNA, 25 bp, Probe sequence
ataccagaagaagatgacgagacaa

SEQ ID NO: 20345 - DNA, 25 bp, Probe sequence
tgacgaagaattgagagttgctaat

SEQ ID NO: 20346 - DNA, 25 bp, Probe sequence
atgacgaagaattgagagttgctaa

SEQ ID NO: 20347 - DNA, 25 bp, Probe sequence
aatgacgaagaattgagagttgcta

SEQ ID NO: 20348 - DNA, 25 bp, Probe sequence
tcgctacgctagaattacataatca

SEQ ID NO: 20349 - DNA, 25 bp, Probe sequence
gacgaagaattgagagttgctaata

SEQ ID NO: 20350 - DNA, 25 bp, Probe sequence
ttcaagaacaccagaagaagttatg

SEQ ID NO: 20351 - DNA, 25 bp, Probe sequence
cgctacgctagaattacataatcaa

SEQ ID NO: 20352 - DNA, 25 bp, Probe sequence
ttcgctacgctagaattacataatc

SEQ ID NO: 20353 - DNA, 25 bp, Probe sequence
acgaagaattgagagttgctaatat

SEQ ID NO: 20354 - DNA, 25 bp, Probe sequence
cctgttgatgaagttattgaagcaa

SEQ ID NO: 20355 - DNA, 25 bp, Probe sequence
agcattagcaggtattgaaagtaga

SEQ ID NO: 20356 - DNA, 25 bp, Probe sequence
atttcagcagatttagcattagcag

SEQ ID NO: 20357 - DNA, 25 bp, Probe sequence
tcttattcacttcagcattgtttgg

SEQ ID NO: 20358 - DNA, 25 bp, Probe sequence
aagcaatggataaggttggtcgtaa

SEQ ID NO: 20359 - DNA, 25 bp, Probe sequence
agcagatttagcattagcaggtatt

SEQ ID NO: 20360 - DNA, 25 bp, Probe sequence
gcagatttagcattagcaggtattg

SEQ ID NO: 20361 - DNA, 25 bp, Probe sequence
gcattagcaggtattgaaagtagaa

SEQ ID NO: 20362 - DNA, 25 bp, Probe sequence
ctatattcggaggatcaccagaagc

SEQ ID NO: 20363 - DNA, 25 bp, Probe sequence
catttaatacgcaatcactctctca

SEQ ID NO: 20364 - DNA, 25 bp, Probe sequence
ttaatacgcaatcactctctcaaag

SEQ ID NO: 20365 - DNA, 25 bp, Probe sequence
aatgttatgaaacgagcaatgagtc

SEQ ID NO: 20366 - DNA, 25 bp, Probe sequence
aaatgttatgaaacgagcaatgagt

SEQ ID NO: 20367 - DNA, 25 bp, Probe sequence
tcatttaatacgcaatcactctctc

SEQ ID NO: 20368 - DNA, 25 bp, Probe sequence
caaatgttatgaaacgagcaatgag

SEQ ID NO: 20369 - DNA, 25 bp, Probe sequence
acaaatgttatgaaacgagcaatga

SEQ ID NO: 20370 - DNA, 25 bp, Probe sequence
tttaatacgcaatcactctctcaaa

SEQ ID NO: 20371 - DNA, 25 bp, Probe sequence
taatacgcaatcactctctcaaagt

SEQ ID NO: 20372 - DNA, 25 bp, Probe sequence
gaagaagaaggcgatagtattggtc

SEQ ID NO: 20373 - DNA, 25 bp, Probe sequence
aagaagaaggcgatagtattggtca

SEQ ID NO: 20374 - DNA, 25 bp, Probe sequence
gaagaaggcgatagtattggtcaac

SEQ ID NO: 20375 - DNA, 25 bp, Probe sequence
agaagaaggcgatagtattggtcaa

SEQ ID NO: 20376 - DNA, 25 bp, Probe sequence
gaaggcgatagtattggtcaacatc

SEQ ID NO: 20377 - DNA, 25 bp, Probe sequence
agaaggcgatagtattggtcaacat

SEQ ID NO: 20378 - DNA, 25 bp, Probe sequence
aagaaggcgatagtattggtcaaca

SEQ ID NO: 20379 - DNA, 25 bp, Probe sequence
cgaagaagaaggcgatagtattggt

SEQ ID NO: 20380 - DNA, 25 bp, Probe sequence
aaggcgatagtattggtcaacatcc

SEQ ID NO: 20381 - DNA, 25 bp, Probe sequence
ttatcagtggcagttgaagcattag

SEQ ID NO: 20382 - DNA, 25 bp, Probe sequence
ttacctgatacaccaatgttacttg

SEQ ID NO: 20383 - DNA, 25 bp, Probe sequence
cgctattggataattacaacactga

SEQ ID NO: 20384 - DNA, 25 bp, Probe sequence
aagatgctcaattagttatcactca

SEQ ID NO: 20385 - DNA, 25 bp, Probe sequence
atcagtggcagttgaagcattagta

SEQ ID NO: 20386 - DNA, 25 bp, Probe sequence
tatcagtggcagttgaagcattagt

SEQ ID NO: 20387 - DNA, 25 bp, Probe sequence
attacctgatacaccaatgttactt

SEQ ID NO: 20388 - DNA, 25 bp, Probe sequence
agtggcagttgaagcattagtacat

SEQ ID NO: 20389 - DNA, 25 bp, Probe sequence
gcattacctgatacaccaatgttac

SEQ ID NO: 20390 - DNA, 25 bp, Probe sequence
ttattgtcagcattgtcttagccta

SEQ ID NO: 20391 - DNA, 25 bp, Probe sequence
attgtcagcattgtcttagcctata

SEQ ID NO: 20392 - DNA, 25 bp, Probe sequence
tattgtcagcattgtcttagcctat

SEQ ID NO: 20393 - DNA, 25 bp, Probe sequence
gattattgtcagcattgtcttagcc

SEQ ID NO: 20394 - DNA, 25 bp, Probe sequence
tgtcagcattgtcttagcctatatt

SEQ ID NO: 20395 - DNA, 25 bp, Probe sequence
ttgtcagcattgtcttagcctatat

SEQ ID NO: 20396 - DNA, 25 bp, Probe sequence
attattgtcagcattgtcttagcct

SEQ ID NO: 20397 - DNA, 25 bp, Probe sequence
ccgctaagttcaatggtattaacaa

SEQ ID NO: 20398 - DNA, 25 bp, Probe sequence
cagtgattattgtcagcattgtctt

SEQ ID NO: 20399 - DNA, 25 bp, Probe sequence
tatcactatacacgacattgctcag

SEQ ID NO: 20400 - DNA, 25 bp, Probe sequence
atatcactatacacgacattgctca

SEQ ID NO: 20401 - DNA, 25 bp, Probe sequence
accacacctaagagacaatatgatt

SEQ ID NO: 20402 - DNA, 25 bp, Probe sequence
taccacacctaagagacaatatgat

SEQ ID NO: 20403 - DNA, 25 bp, Probe sequence
ataccacacctaagagacaatatga

SEQ ID NO: 20404 - DNA, 25 bp, Probe sequence
ccattgacttatctgttgaagagca

SEQ ID NO: 20405 - DNA, 25 bp, Probe sequence
accattgacttatctgttgaagagc

SEQ ID NO: 20406 - DNA, 25 bp, Probe sequence
aaccattgacttatctgttgaagag

SEQ ID NO: 20407 - DNA, 25 bp, Probe sequence
aactactagagcaacgattgattga

SEQ ID NO: 20408 - DNA, 25 bp, Probe sequence
aagattccgcatcaagattatcaag

SEQ ID NO: 20409 - DNA, 25 bp, Probe sequence
gaagattccgcatcaagattatcaa

SEQ ID NO: 20410 - DNA, 25 bp, Probe sequence
cgaagattccgcatcaagattatca

SEQ ID NO: 20411 - DNA, 25 bp, Probe sequence
agattccgcatcaagattatcaagc

SEQ ID NO: 20412 - DNA, 25 bp, Probe sequence
tatatccgaagattccgcatcaaga

SEQ ID NO: 20413 - DNA, 25 bp, Probe sequence
gtatatccgaagattccgcatcaag

SEQ ID NO: 20414 - DNA, 25 bp, Probe sequence
agtatatccgaagattccgcatcaa

SEQ ID NO: 20415 - DNA, 25 bp, Probe sequence
atcatgccagtatatccgaagattc

SEQ ID NO: 20416 - DNA, 25 bp, Probe sequence
catcatgccagtatatccgaagatt

SEQ ID NO: 20417 - DNA, 25 bp, Probe sequence
cttagttgatagtggtgctgtaaca

SEQ ID NO: 20418 - DNA, 25 bp, Probe sequence
ccttagttgatagtggtgctgtaac

SEQ ID NO: 20419 - DNA, 25 bp, Probe sequence
gccttagttgatagtggtgctgtaa

SEQ ID NO: 20420 - DNA, 25 bp, Probe sequence
ggtgctgtaacagatgcttatattc

SEQ ID NO: 20421 - DNA, 25 bp, Probe sequence
tggtgctgtaacagatgcttatatt

SEQ ID NO: 20422 - DNA, 25 bp, Probe sequence
ttagttgatagtggtgctgtaacag

SEQ ID NO: 20423 - DNA, 25 bp, Probe sequence
gtgctgtaacagatgcttatattca

SEQ ID NO: 20424 - DNA, 25 bp, Probe sequence
gtggtgctgtaacagatgcttatat

SEQ ID NO: 20425 - DNA, 25 bp, Probe sequence
aacattattacaaatccctgaaggc

SEQ ID NO: 20426 - DNA, 25 bp, Probe sequence
tcatcaatatccgttagcagttgta

SEQ ID NO: 20427 - DNA, 25 bp, Probe sequence
attcatcaatatccgttagcagttg

SEQ ID NO: 20428 - DNA, 25 bp, Probe sequence
ttcatcaatatccgttagcagttgt

SEQ ID NO: 20429 - DNA, 25 bp, Probe sequence
catcaatatccgttagcagttgtac

SEQ ID NO: 20430 - DNA, 25 bp, Probe sequence
tattcatcaatatccgttagcagtt

SEQ ID NO: 20431 - DNA, 25 bp, Probe sequence
ttattcatcaatatccgttagcagt

SEQ ID NO: 20432 - DNA, 25 bp, Probe sequence
ttaccacaaattgaagacttgatgc

SEQ ID NO: 20433 - DNA, 25 bp, Probe sequence
tttaccacaaattgaagacttgatg

SEQ ID NO: 20434 - DNA, 25 bp, Probe sequence
caatgtgccattagctgtgattaat

SEQ ID NO: 20435 - DNA, 25 bp, Probe sequence
aagtatggagagcgttatgtatgaa

SEQ ID NO: 20436 - DNA, 25 bp, Probe sequence
agtatggagagcgttatgtatgaat

SEQ ID NO: 20437 - DNA, 25 bp, Probe sequence
atggagagcgttatgtatgaattgg

SEQ ID NO: 20438 - DNA, 25 bp, Probe sequence
tatggagagcgttatgtatgaattg

SEQ ID NO: 20439 - DNA, 25 bp, Probe sequence
gtatggagagcgttatgtatgaatt

SEQ ID NO: 20440 - DNA, 25 bp, Probe sequence
cgttatgtatgaattggctggaatt

SEQ ID NO: 20441 - DNA, 25 bp, Probe sequence
atgtatgaattggctggaattgatg

SEQ ID NO: 20442 - DNA, 25 bp, Probe sequence
gtatgaattggctggaattgatgag

SEQ ID NO: 20443 - DNA, 25 bp, Probe sequence
tgtatgaattggctggaattgatga

SEQ ID NO: 20444 - DNA, 25 bp, Probe sequence
tgttgcttgtgagaatgctattatg

SEQ ID NO: 20445 - DNA, 25 bp, Probe sequence
gttgcttgtgagaatgctattatgg

SEQ ID NO: 20446 - DNA, 25 bp, Probe sequence
ttgttgcttgtgagaatgctattat

SEQ ID NO: 20447 - DNA, 25 bp, Probe sequence
attgttgcttgtgagaatgctatta

SEQ ID NO: 20448 - DNA, 25 bp, Probe sequence
tattgttgcttgtgagaatgctatt

SEQ ID NO: 20449 - DNA, 25 bp, Probe sequence
atattgttgcttgtgagaatgctat

SEQ ID NO: 20450 - DNA, 25 bp, Probe sequence
gctattatggcaactgatacattga

SEQ ID NO: 20451 - DNA, 25 bp, Probe sequence
cagcagttgatagaattgtaccatt

SEQ ID NO: 20452 - DNA, 25 bp, Probe sequence
ttgcttgtgagaatgctattatggc

SEQ ID NO: 20453 - DNA, 25 bp, Probe sequence
cagcacatgaattactcaacaatga

SEQ ID NO: 20454 - DNA, 25 bp, Probe sequence
tcagcacatgaattactcaacaatg

SEQ ID NO: 20455 - DNA, 25 bp, Probe sequence
aatcagcacatgaattactcaacaa

SEQ ID NO: 20456 - DNA, 25 bp, Probe sequence
agcacatgaattactcaacaatgat

SEQ ID NO: 20457 - DNA, 25 bp, Probe sequence
atcagcacatgaattactcaacaat

SEQ ID NO: 20458 - DNA, 25 bp, Probe sequence
gcacatgaattactcaacaatgatc

SEQ ID NO: 20459 - DNA, 25 bp, Probe sequence
taatcagcacatgaattactcaaca

SEQ ID NO: 20460 - DNA, 25 bp, Probe sequence
atgggtgtcgttagtaatatcgttt

SEQ ID NO: 20461 - DNA, 25 bp, Probe sequence
tgggtgtcgttagtaatatcgttta

SEQ ID NO: 20462 - DNA, 25 bp, Probe sequence
tcttgctgaattattggataatgct

SEQ ID NO: 20463 - DNA, 25 bp, Probe sequence
cagaactgtatgatttagcgaaaga

SEQ ID NO: 20464 - DNA, 25 bp, Probe sequence
agaactgtatgatttagcgaaagaa

SEQ ID NO: 20465 - DNA, 25 bp, Probe sequence
gcgaaagaaattaagagagaaactg

SEQ ID NO: 20466 - DNA, 25 bp, Probe sequence
agcgaaagaaattaagagagaaact

SEQ ID NO: 20467 - DNA, 25 bp, Probe sequence
tgctgaattattggataatgctact

SEQ ID NO: 20468 - DNA, 25 bp, Probe sequence
cctcagaactgtatgatttagcgaa

SEQ ID NO: 20469 - DNA, 25 bp, Probe sequence
tcagaactgtatgatttagcgaaag

SEQ ID NO: 20470 - DNA, 25 bp, Probe sequence
ctcagaactgtatgatttagcgaaa

SEQ ID NO: 20471 - DNA, 25 bp, Probe sequence
cacgcattattagttattccagtcg

SEQ ID NO: 20472 - DNA, 25 bp, Probe sequence
agtcggtattgtatatgctatcgtg

SEQ ID NO: 20473 - DNA, 25 bp, Probe sequence
cagtcggtattgtatatgctatcgt

SEQ ID NO: 20474 - DNA, 25 bp, Probe sequence
gtcggtattgtatatgctatcgtgt

SEQ ID NO: 20475 - DNA, 25 bp, Probe sequence
tccagtcggtattgtatatgctatc

SEQ ID NO: 20476 - DNA, 25 bp, Probe sequence
cacacgcattattagttattccagt

SEQ ID NO: 20477 - DNA, 25 bp, Probe sequence
acacgcattattagttattccagtc

SEQ ID NO: 20478 - DNA, 25 bp, Probe sequence
tcacacgcattattagttattccag

SEQ ID NO: 20479 - DNA, 25 bp, Probe sequence
gcatcaggtgtattagaagttggaa

SEQ ID NO: 20480 - DNA, 25 bp, Probe sequence
gtaggtgacggttatgattcagtaa

SEQ ID NO: 20481 - DNA, 25 bp, Probe sequence
atattgtaggtgacggttatgattc

SEQ ID NO: 20482 - DNA, 25 bp, Probe sequence
tattgtaggtgacggttatgattca

SEQ ID NO: 20483 - DNA, 25 bp, Probe sequence
attgtaggtgacggttatgattcag

SEQ ID NO: 20484 - DNA, 25 bp, Probe sequence
tgtaggtgacggttatgattcagta

SEQ ID NO: 20485 - DNA, 25 bp, Probe sequence
ttgccttataccaacttataccaag

SEQ ID NO: 20486 - DNA, 25 bp, Probe sequence
ttgtaggtgacggttatgattcagt

SEQ ID NO: 20487 - DNA, 25 bp, Probe sequence
tgaagatattgagagtaacgaagtt

SEQ ID NO: 20488 - DNA, 25 bp, Probe sequence
taaatctcaaaggcatctgggttat

SEQ ID NO: 20489 - DNA, 25 bp, Probe sequence
cgatactgaagaccacgaatacatt

SEQ ID NO: 20490 - DNA, 25 bp, Probe sequence
cgtattcaatggagagttgctgata

SEQ ID NO: 20491 - DNA, 25 bp, Probe sequence
gatactgaagaccacgaatacatta

SEQ ID NO: 20492 - DNA, 25 bp, Probe sequence
gtattcaatggagagttgctgatat

SEQ ID NO: 20493 - DNA, 25 bp, Probe sequence
atactgaagaccacgaatacattat

SEQ ID NO: 20494 - DNA, 25 bp, Probe sequence
tactgaagaccacgaatacattatt

SEQ ID NO: 20495 - DNA, 25 bp, Probe sequence
gaagtgcgtattcaatggagagttg

SEQ ID NO: 20496 - DNA, 25 bp, Probe sequence
gcagttcctaaattagacagcaaag

SEQ ID NO: 20497 - DNA, 25 bp, Probe sequence
cagttcctaaattagacagcaaaga

SEQ ID NO: 20498 - DNA, 25 bp, Probe sequence
aaccagtagatacatcaagaccaac

SEQ ID NO: 20499 - DNA, 25 bp, Probe sequence
aaaccagtagatacatcaagaccaa

SEQ ID NO: 20500 - DNA, 25 bp, Probe sequence
tgggataaatggatggaacaagata

SEQ ID NO: 20501 - DNA, 25 bp, Probe sequence
gttcatcatttcaagttggttaggt

SEQ ID NO: 20502 - DNA, 25 bp, Probe sequence
agttcatcatttcaagttggttagg

SEQ ID NO: 20503 - DNA, 25 bp, Probe sequence
agcattagttaaagcattacaagca

SEQ ID NO: 20504 - DNA, 25 bp, Probe sequence
agcaggtggtaaaggttatacaatt

SEQ ID NO: 20505 - DNA, 25 bp, Probe sequence
cagcaggtggtaaaggttatacaat

SEQ ID NO: 20506 - DNA, 25 bp, Probe sequence
aaattatgtgaagatgtagccgttt

SEQ ID NO: 20507 - DNA, 25 bp, Probe sequence
tgaatgactgtccaattatgaatgt

SEQ ID NO: 20508 - DNA, 25 bp, Probe sequence
gtgaatgactgtccaattatgaatg

SEQ ID NO: 20509 - DNA, 25 bp, Probe sequence
cctgaatggagtaagttggttaata

SEQ ID NO: 20510 - DNA, 25 bp, Probe sequence
gagtgaatgactgtccaattatgaa

SEQ ID NO: 20511 - DNA, 25 bp, Probe sequence
cgagtgaatgactgtccaattatga

SEQ ID NO: 20512 - DNA, 25 bp, Probe sequence
ccaattatgaatgttgatatgctcg

SEQ ID NO: 20513 - DNA, 25 bp, Probe sequence
tgactgtccaattatgaatgttgat

SEQ ID NO: 20514 - DNA, 25 bp, Probe sequence
atgactgtccaattatgaatgttga

SEQ ID NO: 20515 - DNA, 25 bp, Probe sequence
gtgttgctgtgtacggtgatattaa

SEQ ID NO: 20516 - DNA, 25 bp, Probe sequence
tttgaatttgaagtaaaggaggcat

SEQ ID NO: 20517 - DNA, 25 bp, Probe sequence
atttgaatttgaagtaaaggaggca

SEQ ID NO: 20518 - DNA, 25 bp, Probe sequence
tgaatttgaagtaaaggaggcataa

SEQ ID NO: 20519 - DNA, 25 bp, Probe sequence
ttgaatttgaagtaaaggaggcata

SEQ ID NO: 20520 - DNA, 25 bp, Probe sequence
ggtgttggaatttcttatttaagcc

SEQ ID NO: 20521 - DNA, 25 bp, Probe sequence
aggtgttggaatttcttatttaagc

SEQ ID NO: 20522 - DNA, 25 bp, Probe sequence
tatttgaatttgaagtaaaggaggc

SEQ ID NO: 20523 - DNA, 25 bp, Probe sequence
aaacaggtgttggaatttcttattt

SEQ ID NO: 20524 - DNA, 25 bp, Probe sequence
acaggtgttggaatttcttatttaa

SEQ ID NO: 20525 - DNA, 25 bp, Probe sequence
atatgtggtatatcgttcgtgatgt

SEQ ID NO: 20526 - DNA, 25 bp, Probe sequence
tatgtggtatatcgttcgtgatgta

SEQ ID NO: 20527 - DNA, 25 bp, Probe sequence
aatagcgaagatagttacttgcgtt

SEQ ID NO: 20528 - DNA, 25 bp, Probe sequence
atagcgaagatagttacttgcgttc

SEQ ID NO: 20529 - DNA, 25 bp, Probe sequence
ctgaacgaagtgaacaattaggtac

SEQ ID NO: 20530 - DNA, 25 bp, Probe sequence
actgaacgaagtgaacaattaggta

SEQ ID NO: 20531 - DNA, 25 bp, Probe sequence
tgaacgaagtgaacaattaggtaca

SEQ ID NO: 20532 - DNA, 25 bp, Probe sequence
gtggtatatcgttcgtgatgtacta

SEQ ID NO: 20533 - DNA, 25 bp, Probe sequence
tggtatatcgttcgtgatgtactag

SEQ ID NO: 20534 - DNA, 25 bp, Probe sequence
cagttgtaggtattatggatgttgc

SEQ ID NO: 20535 - DNA, 25 bp, Probe sequence
cgtcagttgtaggtattatggatgt

SEQ ID NO: 20536 - DNA, 25 bp, Probe sequence
agttgtaggtattatggatgttgct

SEQ ID NO: 20537 - DNA, 25 bp, Probe sequence
ccgtcagttgtaggtattatggatg

SEQ ID NO: 20538 - DNA, 25 bp, Probe sequence
gttgtaggtattatggatgttgctt

SEQ ID NO: 20539 - DNA, 25 bp, Probe sequence
ttgtaggtattatggatgttgcttc

SEQ ID NO: 20540 - DNA, 25 bp, Probe sequence
tcagttgtaggtattatggatgttg

SEQ ID NO: 20541 - DNA, 25 bp, Probe sequence
gtcagttgtaggtattatggatgtt

SEQ ID NO: 20542 - DNA, 25 bp, Probe sequence
tgtaggtattatggatgttgcttcc

SEQ ID NO: 20543 - DNA, 25 bp, Probe sequence
atgatgaagtagatataggcgtgac

SEQ ID NO: 20544 - DNA, 25 bp, Probe sequence
aatgatgaagtagatataggcgtga

SEQ ID NO: 20545 - DNA, 25 bp, Probe sequence
caatgatgaagtagatataggcgtg

SEQ ID NO: 20546 - DNA, 25 bp, Probe sequence
gatgaagtagatataggcgtgacca

SEQ ID NO: 20547 - DNA, 25 bp, Probe sequence
tgatgaagtagatataggcgtgacc

SEQ ID NO: 20548 - DNA, 25 bp, Probe sequence
tcaatgatgaagtagatataggcgt

SEQ ID NO: 20549 - DNA, 25 bp, Probe sequence
atgaagtagatataggcgtgaccac

SEQ ID NO: 20550 - DNA, 25 bp, Probe sequence
aacaattaagtcatgccacaacgaa

SEQ ID NO: 20551 - DNA, 25 bp, Probe sequence
atcaatgatgaagtagatataggcg

SEQ ID NO: 20552 - DNA, 25 bp, Probe sequence
aatcggtgctacaacagtatctatt

SEQ ID NO: 20553 - DNA, 25 bp, Probe sequence
agcaatcagagatagacaaccttag

SEQ ID NO: 20554 - DNA, 25 bp, Probe sequence
gagcaatcagagatagacaacctta

SEQ ID NO: 20555 - DNA, 25 bp, Probe sequence
caatcggtgctacaacagtatctat

SEQ ID NO: 20556 - DNA, 25 bp, Probe sequence
ttataggtattattgctggtggaca

SEQ ID NO: 20557 - DNA, 25 bp, Probe sequence
tatgatgaagcaatggcgttatatc

SEQ ID NO: 20558 - DNA, 25 bp, Probe sequence
aagcaatggcgttatatcaggtatc

SEQ ID NO: 20559 - DNA, 25 bp, Probe sequence
gaagcaatggcgttatatcaggtat

SEQ ID NO: 20560 - DNA, 25 bp, Probe sequence
gaagaagcaacaagacggttattaa

SEQ ID NO: 20561 - DNA, 25 bp, Probe sequence
cagaatacttgttaagccgtgatta

SEQ ID NO: 20562 - DNA, 25 bp, Probe sequence
ccagaatacttgttaagccgtgatt

SEQ ID NO: 20563 - DNA, 25 bp, Probe sequence
agaatacttgttaagccgtgattat

SEQ ID NO: 20564 - DNA, 25 bp, Probe sequence
gaatacttgttaagccgtgattatt

SEQ ID NO: 20565 - DNA, 25 bp, Probe sequence
gttgatgaattacatggcacgttaa

SEQ ID NO: 20566 - DNA, 25 bp, Probe sequence
aacattgtgataattgtggtggtgc

SEQ ID NO: 20567 - DNA, 25 bp, Probe sequence
aagccgtgattatttagaagatgat

SEQ ID NO: 20568 - DNA, 25 bp, Probe sequence
gccgtgattatttagaagatgatcc

SEQ ID NO: 20569 - DNA, 25 bp, Probe sequence
tgttaagccgtgattatttagaaga

SEQ ID NO: 20570 - DNA, 25 bp, Probe sequence
aatggtcatggaatcgctataactg

SEQ ID NO: 20571 - DNA, 25 bp, Probe sequence
atggtcatggaatcgctataactgg

SEQ ID NO: 20572 - DNA, 25 bp, Probe sequence
aaatggtcatggaatcgctataact

SEQ ID NO: 20573 - DNA, 25 bp, Probe sequence
atggaatcgctataactgggattat

SEQ ID NO: 20574 - DNA, 25 bp, Probe sequence
tggaatcgctataactgggattata

SEQ ID NO: 20575 - DNA, 25 bp, Probe sequence
ggaatcgctataactgggattatac

SEQ ID NO: 20576 - DNA, 25 bp, Probe sequence
gtcatggaatcgctataactgggat

SEQ ID NO: 20577 - DNA, 25 bp, Probe sequence
catggaatcgctataactgggatta

SEQ ID NO: 20578 - DNA, 25 bp, Probe sequence
tcatggaatcgctataactgggatt

SEQ ID NO: 20579 - DNA, 25 bp, Probe sequence
aaactatttggataagacgcaatga

SEQ ID NO: 20580 - DNA, 25 bp, Probe sequence
taattgacaaggtcttaagcactga

SEQ ID NO: 20581 - DNA, 25 bp, Probe sequence
ataattgacaaggtcttaagcactg

SEQ ID NO: 20582 - DNA, 25 bp, Probe sequence
acaataattgacaaggtcttaagca

SEQ ID NO: 20583 - DNA, 25 bp, Probe sequence
aataattgacaaggtcttaagcact

SEQ ID NO: 20584 - DNA, 25 bp, Probe sequence
caataattgacaaggtcttaagcac

SEQ ID NO: 20585 - DNA, 25 bp, Probe sequence
actgacgttacaaatagccatgata

SEQ ID NO: 20586 - DNA, 25 bp, Probe sequence
aattgacaaggtcttaagcactgac

SEQ ID NO: 20587 - DNA, 25 bp, Probe sequence
ctgacgttacaaatagccatgatat

SEQ ID NO: 20588 - DNA, 25 bp, Probe sequence
tggtattactgcattacatcgaact

SEQ ID NO: 20589 - DNA, 25 bp, Probe sequence
aatcatttgttactgccactttagc

SEQ ID NO: 20590 - DNA, 25 bp, Probe sequence
ggtattactgcattacatcgaactt

SEQ ID NO: 20591 - DNA, 25 bp, Probe sequence
atggtattactgcattacatcgaac

SEQ ID NO: 20592 - DNA, 25 bp, Probe sequence
ttactgcattacatcgaacttactt

SEQ ID NO: 20593 - DNA, 25 bp, Probe sequence
attactgcattacatcgaacttact

SEQ ID NO: 20594 - DNA, 25 bp, Probe sequence
aaatcatttgttactgccactttag

SEQ ID NO: 20595 - DNA, 25 bp, Probe sequence
tattactgcattacatcgaacttac

SEQ ID NO: 20596 - DNA, 25 bp, Probe sequence
gtattactgcattacatcgaactta

SEQ ID NO: 20597 - DNA, 25 bp, Probe sequence
attaccgaatatcattgtggacgat

SEQ ID NO: 20598 - DNA, 25 bp, Probe sequence
tattaccgaatatcattgtggacga

SEQ ID NO: 20599 - DNA, 25 bp, Probe sequence
ttattaccgaatatcattgtggacg

SEQ ID NO: 20600 - DNA, 25 bp, Probe sequence
ccgttggattattaccgaatatcat

SEQ ID NO: 20601 - DNA, 25 bp, Probe sequence
taccgaatatcattgtggacgataa

SEQ ID NO: 20602 - DNA, 25 bp, Probe sequence
ttaccgaatatcattgtggacgata

SEQ ID NO: 20603 - DNA, 25 bp, Probe sequence
caagaattaggtcatgtagttgctg

SEQ ID NO: 20604 - DNA, 25 bp, Probe sequence
aagaattaggtcatgtagttgctgc

SEQ ID NO: 20605 - DNA, 25 bp, Probe sequence
ggattattaccgaatatcattgtgg

SEQ ID NO: 20606 - DNA, 25 bp, Probe sequence
aagctgttagagttggagaatatcg

SEQ ID NO: 20607 - DNA, 25 bp, Probe sequence
agctgttagagttggagaatatcga

SEQ ID NO: 20608 - DNA, 25 bp, Probe sequence
gacaatcctgaaatcacaatacctt

SEQ ID NO: 20609 - DNA, 25 bp, Probe sequence
aattaagctgttagagttggagaat

SEQ ID NO: 20610 - DNA, 25 bp, Probe sequence
acaatcctgaaatcacaataccttt

SEQ ID NO: 20611 - DNA, 25 bp, Probe sequence
cagtgtgtttggaatgaattaagac

SEQ ID NO: 20612 - DNA, 25 bp, Probe sequence
tgacaatcctgaaatcacaatacct

SEQ ID NO: 20613 - DNA, 25 bp, Probe sequence
taagctgttagagttggagaatatc

SEQ ID NO: 20614 - DNA, 25 bp, Probe sequence
ttaagctgttagagttggagaatat

SEQ ID NO: 20615 - DNA, 25 bp, Probe sequence
ttaataagccacagcaagacttaga

SEQ ID NO: 20616 - DNA, 25 bp, Probe sequence
taataagccacagcaagacttagat

SEQ ID NO: 20617 - DNA, 25 bp, Probe sequence
aataagccacagcaagacttagatc

SEQ ID NO: 20618 - DNA, 25 bp, Probe sequence
cgattaataagccacagcaagactt

SEQ ID NO: 20619 - DNA, 25 bp, Probe sequence
gattaataagccacagcaagactta

SEQ ID NO: 20620 - DNA, 25 bp, Probe sequence
attaataagccacagcaagacttag

SEQ ID NO: 20621 - DNA, 25 bp, Probe sequence
ttcgattaataagccacagcaagac

SEQ ID NO: 20622 - DNA, 25 bp, Probe sequence
tcgattaataagccacagcaagact

SEQ ID NO: 20623 - DNA, 25 bp, Probe sequence
tttcgattaataagccacagcaaga

SEQ ID NO: 20624 - DNA, 25 bp, Probe sequence
acacacaatacaaagatggacatag

SEQ ID NO: 20625 - DNA, 25 bp, Probe sequence
tttacacacaatacaaagatggaca

SEQ ID NO: 20626 - DNA, 25 bp, Probe sequence
cacacaatacaaagatggacataga

SEQ ID NO: 20627 - DNA, 25 bp, Probe sequence
ttacacacaatacaaagatggacat

SEQ ID NO: 20628 - DNA, 25 bp, Probe sequence
acacaatacaaagatggacatagag

SEQ ID NO: 20629 - DNA, 25 bp, Probe sequence
atttgtcctagttgtattatcagcg

SEQ ID NO: 20630 - DNA, 25 bp, Probe sequence
cacaatacaaagatggacatagaga

SEQ ID NO: 20631 - DNA, 25 bp, Probe sequence
tacacacaatacaaagatggacata

SEQ ID NO: 20632 - DNA, 25 bp, Probe sequence
atttacacacaatacaaagatggac

SEQ ID NO: 20633 - DNA, 25 bp, Probe sequence
ttatggtgagaagattgaagagaca

SEQ ID NO: 20634 - DNA, 25 bp, Probe sequence
atggcgattatctattcatcaggtg

SEQ ID NO: 20635 - DNA, 25 bp, Probe sequence
tatggtgagaagattgaagagacaa

SEQ ID NO: 20636 - DNA, 25 bp, Probe sequence
attatggtgagaagattgaagagac

SEQ ID NO: 20637 - DNA, 25 bp, Probe sequence
atgaatatataggcaactggagtgg

SEQ ID NO: 20638 - DNA, 25 bp, Probe sequence
ggctattaagttatgtaggaccaca

SEQ ID NO: 20639 - DNA, 25 bp, Probe sequence
atggatcgtattatggaatcgttcg

SEQ ID NO: 20640 - DNA, 25 bp, Probe sequence
aatggatcgtattatggaatcgttc

SEQ ID NO: 20641 - DNA, 25 bp, Probe sequence
tcgtatgaatatataggcaactgga

SEQ ID NO: 20642 - DNA, 25 bp, Probe sequence
ttaataaccgatgcgattgaatcac

SEQ ID NO: 20643 - DNA, 25 bp, Probe sequence
taataaccgatgcgattgaatcacc

SEQ ID NO: 20644 - DNA, 25 bp, Probe sequence
cgtggctgacaattatgtattatct

SEQ ID NO: 20645 - DNA, 25 bp, Probe sequence
tcgtggctgacaattatgtattatc

SEQ ID NO: 20646 - DNA, 25 bp, Probe sequence
cttcagttctcatgtagattaccgt

SEQ ID NO: 20647 - DNA, 25 bp, Probe sequence
acttcagttctcatgtagattaccg

SEQ ID NO: 20648 - DNA, 25 bp, Probe sequence
ttcagttctcatgtagattaccgtt

SEQ ID NO: 20649 - DNA, 25 bp, Probe sequence
ttcgtggctgacaattatgtattat

SEQ ID NO: 20650 - DNA, 25 bp, Probe sequence
attaataaccgatgcgattgaatca

SEQ ID NO: 20651 - DNA, 25 bp, Probe sequence
aatatgttgtatcgtctaagtgcct

SEQ ID NO: 20652 - DNA, 25 bp, Probe sequence
gaatatgttgtatcgtctaagtgcc

SEQ ID NO: 20653 - DNA, 25 bp, Probe sequence
gcgaatggatattgctaatgagaat

SEQ ID NO: 20654 - DNA, 25 bp, Probe sequence
atatgttgtatcgtctaagtgcctt

SEQ ID NO: 20655 - DNA, 25 bp, Probe sequence
agaatatgttgtatcgtctaagtgc

SEQ ID NO: 20656 - DNA, 25 bp, Probe sequence
tgctaatgagaatatgttgtatcgt

SEQ ID NO: 20657 - DNA, 25 bp, Probe sequence
gctaatgagaatatgttgtatcgtc

SEQ ID NO: 20658 - DNA, 25 bp, Probe sequence
ttgctaatgagaatatgttgtatcg

SEQ ID NO: 20659 - DNA, 25 bp, Probe sequence
tgagaatatgttgtatcgtctaagt

SEQ ID NO: 20660 - DNA, 25 bp, Probe sequence
ggaattggtaacttgttcatgttct

SEQ ID NO: 20661 - DNA, 25 bp, Probe sequence
tcctactgtaattattgtcggtctt

SEQ ID NO: 20662 - DNA, 25 bp, Probe sequence
gtgtcgttcttattaatgtgttcgt

SEQ ID NO: 20663 - DNA, 25 bp, Probe sequence
atcctactgtaattattgtcggtct

SEQ ID NO: 20664 - DNA, 25 bp, Probe sequence
tgtcgttcttattaatgtgttcgtc

SEQ ID NO: 20665 - DNA, 25 bp, Probe sequence
agtgtcgttcttattaatgtgttcg

SEQ ID NO: 20666 - DNA, 25 bp, Probe sequence
tagttactggtgtagcacttacttc

SEQ ID NO: 20667 - DNA, 25 bp, Probe sequence
cttgttcatgttctattctcaacca

SEQ ID NO: 20668 - DNA, 25 bp, Probe sequence
acttgttcatgttctattctcaacc

SEQ ID NO: 20669 - DNA, 25 bp, Probe sequence
ttattccacgagttgatattgaagg

SEQ ID NO: 20670 - DNA, 25 bp, Probe sequence
tacaggaatgacatctacagaagta

SEQ ID NO: 20671 - DNA, 25 bp, Probe sequence
gtacaggaatgacatctacagaagt

SEQ ID NO: 20672 - DNA, 25 bp, Probe sequence
ggtacaggaatgacatctacagaag

SEQ ID NO: 20673 - DNA, 25 bp, Probe sequence
gccttcgtagtcagaatgatgttaa

SEQ ID NO: 20674 - DNA, 25 bp, Probe sequence
gtaatgattggactagcagttggta

SEQ ID NO: 20675 - DNA, 25 bp, Probe sequence
tggtacaggaatgacatctacagaa

SEQ ID NO: 20676 - DNA, 25 bp, Probe sequence
taatgattggactagcagttggtat

SEQ ID NO: 20677 - DNA, 25 bp, Probe sequence
aatgattggactagcagttggtatc

SEQ ID NO: 20678 - DNA, 25 bp, Probe sequence
atgattatgttcgtcttcaaggtga

SEQ ID NO: 20679 - DNA, 25 bp, Probe sequence
tatgattatgttcgtcttcaaggtg

SEQ ID NO: 20680 - DNA, 25 bp, Probe sequence
tgattatgttcgtcttcaaggtgac

SEQ ID NO: 20681 - DNA, 25 bp, Probe sequence
atatgattatgttcgtcttcaaggt

SEQ ID NO: 20682 - DNA, 25 bp, Probe sequence
accaactagccgaacttaaatatga

SEQ ID NO: 20683 - DNA, 25 bp, Probe sequence
aatatgattatgttcgtcttcaagg

SEQ ID NO: 20684 - DNA, 25 bp, Probe sequence
aaccaactagccgaacttaaatatg

SEQ ID NO: 20685 - DNA, 25 bp, Probe sequence
ccaactagccgaacttaaatatgat

SEQ ID NO: 20686 - DNA, 25 bp, Probe sequence
aaaccaactagccgaacttaaatat

SEQ ID NO: 20687 - DNA, 25 bp, Probe sequence
agtcaaagtcatttagatagcggat

SEQ ID NO: 20688 - DNA, 25 bp, Probe sequence
gagtcaaagtcatttagatagcgga

SEQ ID NO: 20689 - DNA, 25 bp, Probe sequence
gtcaaagtcatttagatagcggatt

SEQ ID NO: 20690 - DNA, 25 bp, Probe sequence
tcaaagtcatttagatagcggattt

SEQ ID NO: 20691 - DNA, 25 bp, Probe sequence
ctgagtcaaagtcatttagatagcg

SEQ ID NO: 20692 - DNA, 25 bp, Probe sequence
tgagtcaaagtcatttagatagcgg

SEQ ID NO: 20693 - DNA, 25 bp, Probe sequence
actgagtcaaagtcatttagatagc

SEQ ID NO: 20694 - DNA, 25 bp, Probe sequence
aacaactgagtcaaagtcatttaga

SEQ ID NO: 20695 - DNA, 25 bp, Probe sequence
acaactgagtcaaagtcatttagat

SEQ ID NO: 20696 - DNA, 25 bp, Probe sequence
tgagaattattatgggtgtgttgtt

SEQ ID NO: 20697 - DNA, 25 bp, Probe sequence
ttgagaattattatgggtgtgttgt

SEQ ID NO: 20698 - DNA, 25 bp, Probe sequence
tttgagaattattatgggtgtgttg

SEQ ID NO: 20699 - DNA, 25 bp, Probe sequence
gagaattattatgggtgtgttgtta

SEQ ID NO: 20700 - DNA, 25 bp, Probe sequence
agaattattatgggtgtgttgttat

SEQ ID NO: 20701 - DNA, 25 bp, Probe sequence
gaattattatgggtgtgttgttatt

SEQ ID NO: 20702 - DNA, 25 bp, Probe sequence
ttttgagaattattatgggtgtgtt

SEQ ID NO: 20703 - DNA, 25 bp, Probe sequence
attttgagaattattatgggtgtgt

SEQ ID NO: 20704 - DNA, 25 bp, Probe sequence
gcaattttatctgattttactagca

SEQ ID NO: 20705 - DNA, 25 bp, Probe sequence
ctgaggatacaccttatatcgctta

SEQ ID NO: 20706 - DNA, 25 bp, Probe sequence
aacctgctgaggatacaccttatat

SEQ ID NO: 20707 - DNA, 25 bp, Probe sequence
acctgctgaggatacaccttatatc

SEQ ID NO: 20708 - DNA, 25 bp, Probe sequence
tgaggatacaccttatatcgcttat

SEQ ID NO: 20709 - DNA, 25 bp, Probe sequence
aggtcaagacataccattagtgatt

SEQ ID NO: 20710 - DNA, 25 bp, Probe sequence
ttgatcgtgaaggtgaacacaataa

SEQ ID NO: 20711 - DNA, 25 bp, Probe sequence
aatactatgcacgttcaatgatgga

SEQ ID NO: 20712 - DNA, 25 bp, Probe sequence
ttaggtcaagacataccattagtga

SEQ ID NO: 20713 - DNA, 25 bp, Probe sequence
attatggtttatgaagcaggtaagc

SEQ ID NO: 20714 - DNA, 25 bp, Probe sequence
gcaagaaaccataaatgtgatgaat

SEQ ID NO: 20715 - DNA, 25 bp, Probe sequence
acacctaaagggcatgaattatatg

SEQ ID NO: 20716 - DNA, 25 bp, Probe sequence
cacctaaagggcatgaattatatga

SEQ ID NO: 20717 - DNA, 25 bp, Probe sequence
ttaacacctaaagggcatgaattat

SEQ ID NO: 20718 - DNA, 25 bp, Probe sequence
acctaaagggcatgaattatatgag

SEQ ID NO: 20719 - DNA, 25 bp, Probe sequence
aacacctaaagggcatgaattatat

SEQ ID NO: 20720 - DNA, 25 bp, Probe sequence
tttaacacctaaagggcatgaatta

SEQ ID NO: 20721 - DNA, 25 bp, Probe sequence
agggcatgaattatatgagattgtt

SEQ ID NO: 20722 - DNA, 25 bp, Probe sequence
aagggcatgaattatatgagattgt

SEQ ID NO: 20723 - DNA, 25 bp, Probe sequence
ttatggatggtggacagattacaat

SEQ ID NO: 20724 - DNA, 25 bp, Probe sequence
tatggatggtggacagattacaatt

SEQ ID NO: 20725 - DNA, 25 bp, Probe sequence
taggacctaattgtggattctacac

SEQ ID NO: 20726 - DNA, 25 bp, Probe sequence
ataggacctaattgtggattctaca

SEQ ID NO: 20727 - DNA, 25 bp, Probe sequence
ttgatacagattatggttggaacgt

SEQ ID NO: 20728 - DNA, 25 bp, Probe sequence
tttatggatggtggacagattacaa

SEQ ID NO: 20729 - DNA, 25 bp, Probe sequence
tttgatacagattatggttggaacg

SEQ ID NO: 20730 - DNA, 25 bp, Probe sequence
aaacccttgtaaagtcgttcgtaaa

SEQ ID NO: 20731 - DNA, 25 bp, Probe sequence
aacaacaacagacaatgtaagtatt

SEQ ID NO: 20732 - DNA, 25 bp, Probe sequence
tacagtgaataatcagttgcctcaa

SEQ ID NO: 20733 - DNA, 25 bp, Probe sequence
tgatgattcctaatatggctctcaa

SEQ ID NO: 20734 - DNA, 25 bp, Probe sequence
ttgatgattcctaatatggctctca

SEQ ID NO: 20735 - DNA, 25 bp, Probe sequence
attgatgattcctaatatggctctc

SEQ ID NO: 20736 - DNA, 25 bp, Probe sequence
acagtgaataatcagttgcctcaag

SEQ ID NO: 20737 - DNA, 25 bp, Probe sequence
gtacagtgaataatcagttgcctca

SEQ ID NO: 20738 - DNA, 25 bp, Probe sequence
aattgatgattcctaatatggctct

SEQ ID NO: 20739 - DNA, 25 bp, Probe sequence
tgagatatactcgatatgctgatga

SEQ ID NO: 20740 - DNA, 25 bp, Probe sequence
cagtgaataatcagttgcctcaagg

SEQ ID NO: 20741 - DNA, 25 bp, Probe sequence
taagagtaacggattacatcagcag

SEQ ID NO: 20742 - DNA, 25 bp, Probe sequence
ttaagagtaacggattacatcagca

SEQ ID NO: 20743 - DNA, 25 bp, Probe sequence
agagtaacggattacatcagcagaa

SEQ ID NO: 20744 - DNA, 25 bp, Probe sequence
aagagtaacggattacatcagcaga

SEQ ID NO: 20745 - DNA, 25 bp, Probe sequence
actccaaataatacactgagccttt

SEQ ID NO: 20746 - DNA, 25 bp, Probe sequence
tactccaaataatacactgagcctt

SEQ ID NO: 20747 - DNA, 25 bp, Probe sequence
atactccaaataatacactgagcct

SEQ ID NO: 20748 - DNA, 25 bp, Probe sequence
aatactccaaataatacactgagcc

SEQ ID NO: 20749 - DNA, 25 bp, Probe sequence
tcatattattagatggtttctggca

SEQ ID NO: 20750 - DNA, 25 bp, Probe sequence
aaagagcacagaaatcaaatcaatg

SEQ ID NO: 20751 - DNA, 25 bp, Probe sequence
aagagcacagaaatcaaatcaatga

SEQ ID NO: 20752 - DNA, 25 bp, Probe sequence
aaacaaggaaatatatggagatgga

SEQ ID NO: 20753 - DNA, 25 bp, Probe sequence
aaatgtagaatttaatcaagcggtt

SEQ ID NO: 20754 - DNA, 25 bp, Probe sequence
aacaaggaaatatatggagatggat

SEQ ID NO: 20755 - DNA, 25 bp, Probe sequence
tgtagaatttaatcaagcggttatt

SEQ ID NO: 20756 - DNA, 25 bp, Probe sequence
aatgtagaatttaatcaagcggtta

SEQ ID NO: 20757 - DNA, 25 bp, Probe sequence
atgtagaatttaatcaagcggttat

SEQ ID NO: 20758 - DNA, 25 bp, Probe sequence
caggaaaatcaatcagcgactttat

SEQ ID NO: 20759 - DNA, 25 bp, Probe sequence
agtcaaccgctctaatatgattaca

SEQ ID NO: 20760 - DNA, 25 bp, Probe sequence
gtcaaccgctctaatatgattacat

SEQ ID NO: 20761 - DNA, 25 bp, Probe sequence
aagtcaaccgctctaatatgattac

SEQ ID NO: 20762 - DNA, 25 bp, Probe sequence
aagtccaatcaatattcagcatcag

SEQ ID NO: 20763 - DNA, 25 bp, Probe sequence
agtccaatcaatattcagcatcagc

SEQ ID NO: 20764 - DNA, 25 bp, Probe sequence
taagtccaatcaatattcagcatca

SEQ ID NO: 20765 - DNA, 25 bp, Probe sequence
tgaaagtcaaccgctctaatatgat

SEQ ID NO: 20766 - DNA, 25 bp, Probe sequence
gaaagtcaaccgctctaatatgatt

SEQ ID NO: 20767 - DNA, 25 bp, Probe sequence
tcaaccgctctaatatgattacata

SEQ ID NO: 20768 - DNA, 25 bp, Probe sequence
atattattgtaacgccgactattgc

SEQ ID NO: 20769 - DNA, 25 bp, Probe sequence
taacttaatggtggcaggctatatt

SEQ ID NO: 20770 - DNA, 25 bp, Probe sequence
gattgatattattgtaacgccgact

SEQ ID NO: 20771 - DNA, 25 bp, Probe sequence
cgattgatattattgtaacgccgac

SEQ ID NO: 20772 - DNA, 25 bp, Probe sequence
gtaacttaatggtggcaggctatat

SEQ ID NO: 20773 - DNA, 25 bp, Probe sequence
ataggtggaattggacatattggtg

SEQ ID NO: 20774 - DNA, 25 bp, Probe sequence
cggaattattagtattggtggcgta

SEQ ID NO: 20775 - DNA, 25 bp, Probe sequence
aataggtggaattggacatattggt

SEQ ID NO: 20776 - DNA, 25 bp, Probe sequence
taacggaattattagtattggtggc

SEQ ID NO: 20777 - DNA, 25 bp, Probe sequence
aagaagtcgatattcgcatggataa

SEQ ID NO: 20778 - DNA, 25 bp, Probe sequence
gaagaagtcgatattcgcatggata

SEQ ID NO: 20779 - DNA, 25 bp, Probe sequence
ttagaagaagtcgatattcgcatgg

SEQ ID NO: 20780 - DNA, 25 bp, Probe sequence
tggtactaaatatgaagcacatcaa

SEQ ID NO: 20781 - DNA, 25 bp, Probe sequence
atggtactaaatatgaagcacatca

SEQ ID NO: 20782 - DNA, 25 bp, Probe sequence
aaatttgggaatgggagaatcatca

SEQ ID NO: 20783 - DNA, 25 bp, Probe sequence
tagaagaagtcgatattcgcatgga

SEQ ID NO: 20784 - DNA, 25 bp, Probe sequence
tatcagaaacatttagaagaagtcg

SEQ ID NO: 20785 - DNA, 25 bp, Probe sequence
tcagaaacatttagaagaagtcgat

SEQ ID NO: 20786 - DNA, 25 bp, Probe sequence
ttgctggtagattgatggatgataa

SEQ ID NO: 20787 - DNA, 25 bp, Probe sequence
ctattgctggtagattgatggatga

SEQ ID NO: 20788 - DNA, 25 bp, Probe sequence
attgctggtagattgatggatgata

SEQ ID NO: 20789 - DNA, 25 bp, Probe sequence
tattgctggtagattgatggatgat

SEQ ID NO: 20790 - DNA, 25 bp, Probe sequence
cctattgctggtagattgatggatg

SEQ ID NO: 20791 - DNA, 25 bp, Probe sequence
tgttacttgtagttattgctggcta

SEQ ID NO: 20792 - DNA, 25 bp, Probe sequence
ttgttacttgtagttattgctggct

SEQ ID NO: 20793 - DNA, 25 bp, Probe sequence
gttacttgtagttattgctggctat

SEQ ID NO: 20794 - DNA, 25 bp, Probe sequence
cgttaattactagacctattgctgg

SEQ ID NO: 20795 - DNA, 25 bp, Probe sequence
gtcatattaacaccacatattgcgt

SEQ ID NO: 20796 - DNA, 25 bp, Probe sequence
ctggttatgatggcttatcgctatc

SEQ ID NO: 20797 - DNA, 25 bp, Probe sequence
ttaactgatgacaatgttgaaggtg

SEQ ID NO: 20798 - DNA, 25 bp, Probe sequence
tcatattaacaccacatattgcgtt

SEQ ID NO: 20799 - DNA, 25 bp, Probe sequence
attaactgatgacaatgttgaaggt

SEQ ID NO: 20800 - DNA, 25 bp, Probe sequence
cagactggagatactaggttacgag

SEQ ID NO: 20801 - DNA, 25 bp, Probe sequence
tgtcatattaacaccacatattgcg

SEQ ID NO: 20802 - DNA, 25 bp, Probe sequence
taactgatgacaatgttgaaggtgt

SEQ ID NO: 20803 - DNA, 25 bp, Probe sequence
agactggagatactaggttacgagt

SEQ ID NO: 20804 - DNA, 25 bp, Probe sequence
agaacttggtgaagatgacgaatat

SEQ ID NO: 20805 - DNA, 25 bp, Probe sequence
aagaacttggtgaagatgacgaata

SEQ ID NO: 20806 - DNA, 25 bp, Probe sequence
gaacttggtgaagatgacgaatata

SEQ ID NO: 20807 - DNA, 25 bp, Probe sequence
aacttggtgaagatgacgaatataa

SEQ ID NO: 20808 - DNA, 25 bp, Probe sequence
aaagaacttggtgaagatgacgaat

SEQ ID NO: 20809 - DNA, 25 bp, Probe sequence
acttggtgaagatgacgaatataaa

SEQ ID NO: 20810 - DNA, 25 bp, Probe sequence
gatgacgaatataaatatgttgcca

SEQ ID NO: 20811 - DNA, 25 bp, Probe sequence
agatgacgaatataaatatgttgcc

SEQ ID NO: 20812 - DNA, 25 bp, Probe sequence
tgacgaatataaatatgttgccaaa

SEQ ID NO: 20813 - DNA, 25 bp, Probe sequence
atatattacaactcaatggcatgga

SEQ ID NO: 20814 - DNA, 25 bp, Probe sequence
tatattacaactcaatggcatggag

SEQ ID NO: 20815 - DNA, 25 bp, Probe sequence
gatatattacaactcaatggcatgg

SEQ ID NO: 20816 - DNA, 25 bp, Probe sequence
gcatggagtgtgacatcaatgttaa

SEQ ID NO: 20817 - DNA, 25 bp, Probe sequence
agatatattacaactcaatggcatg

SEQ ID NO: 20818 - DNA, 25 bp, Probe sequence
gtgtgacatcaatgttaaagaacca

SEQ ID NO: 20819 - DNA, 25 bp, Probe sequence
agtgtgacatcaatgttaaagaacc

SEQ ID NO: 20820 - DNA, 25 bp, Probe sequence
atggagtgtgacatcaatgttaaag

SEQ ID NO: 20821 - DNA, 25 bp, Probe sequence
ggagtgtgacatcaatgttaaagaa

SEQ ID NO: 20822 - DNA, 25 bp, Probe sequence
ggagagaatggtaatcgttatgtga

SEQ ID NO: 20823 - DNA, 25 bp, Probe sequence
ttggagagaatggtaatcgttatgt

SEQ ID NO: 20824 - DNA, 25 bp, Probe sequence
tggagagaatggtaatcgttatgtg

SEQ ID NO: 20825 - DNA, 25 bp, Probe sequence
agagaatggtaatcgttatgtgaga

SEQ ID NO: 20826 - DNA, 25 bp, Probe sequence
gagagaatggtaatcgttatgtgag

SEQ ID NO: 20827 - DNA, 25 bp, Probe sequence
tgtgttatcaatccaggagactatg

SEQ ID NO: 20828 - DNA, 25 bp, Probe sequence
gtgttatcaatccaggagactatgt

SEQ ID NO: 20829 - DNA, 25 bp, Probe sequence
gagaatggtaatcgttatgtgagaa

SEQ ID NO: 20830 - DNA, 25 bp, Probe sequence
atgtgttatcaatccaggagactat

SEQ ID NO: 20831 - DNA, 25 bp, Probe sequence
agacttagattactcttgttcagca

SEQ ID NO: 20832 - DNA, 25 bp, Probe sequence
cagacttagattactcttgttcagc

SEQ ID NO: 20833 - DNA, 25 bp, Probe sequence
gcagacttagattactcttgttcag

SEQ ID NO: 20834 - DNA, 25 bp, Probe sequence
tcggtatagatattgatgtgacaga

SEQ ID NO: 20835 - DNA, 25 bp, Probe sequence
gacttagattactcttgttcagcat

SEQ ID NO: 20836 - DNA, 25 bp, Probe sequence
acttagattactcttgttcagcatt

SEQ ID NO: 20837 - DNA, 25 bp, Probe sequence
cggtatagatattgatgtgacagat

SEQ ID NO: 20838 - DNA, 25 bp, Probe sequence
atcggtatagatattgatgtgacag

SEQ ID NO: 20839 - DNA, 25 bp, Probe sequence
gcccgtcactatattcaattattcc

SEQ ID NO: 20840 - DNA, 25 bp, Probe sequence
attgactggcatagatgttcacttc

SEQ ID NO: 20841 - DNA, 25 bp, Probe sequence
cattgactggcatagatgttcactt

SEQ ID NO: 20842 - DNA, 25 bp, Probe sequence
attaccattgactggcatagatgtt

SEQ ID NO: 20843 - DNA, 25 bp, Probe sequence
ttgactggcatagatgttcacttca

SEQ ID NO: 20844 - DNA, 25 bp, Probe sequence
ttaccattgactggcatagatgttc

SEQ ID NO: 20845 - DNA, 25 bp, Probe sequence
cattaccattgactggcatagatgt

SEQ ID NO: 20846 - DNA, 25 bp, Probe sequence
tatgattattggcgaaacctacctt

SEQ ID NO: 20847 - DNA, 25 bp, Probe sequence
tctaataacaccaataccaaaggca

SEQ ID NO: 20848 - DNA, 25 bp, Probe sequence
gacgaaagcagttgataaaggtatg

SEQ ID NO: 20849 - DNA, 25 bp, Probe sequence
acaattatggtgaatggtgaagaat

SEQ ID NO: 20850 - DNA, 25 bp, Probe sequence
acttacaattatggtgaatggtgaa

SEQ ID NO: 20851 - DNA, 25 bp, Probe sequence
tacaattatggtgaatggtgaagaa

SEQ ID NO: 20852 - DNA, 25 bp, Probe sequence
ttacaattatggtgaatggtgaaga

SEQ ID NO: 20853 - DNA, 25 bp, Probe sequence
cttacaattatggtgaatggtgaag

SEQ ID NO: 20854 - DNA, 25 bp, Probe sequence
accttgaggagttagtcattggatt

SEQ ID NO: 20855 - DNA, 25 bp, Probe sequence
aaccttgaggagttagtcattggat

SEQ ID NO: 20856 - DNA, 25 bp, Probe sequence
cacttacaattatggtgaatggtga

SEQ ID NO: 20857 - DNA, 25 bp, Probe sequence
ccacttacaattatggtgaatggtg

SEQ ID NO: 20858 - DNA, 25 bp, Probe sequence
tattcggatattgttatggtgttgc

SEQ ID NO: 20859 - DNA, 25 bp, Probe sequence
ggatattgttatggtgttgctggta

SEQ ID NO: 20860 - DNA, 25 bp, Probe sequence
attcggatattgttatggtgttgct

SEQ ID NO: 20861 - DNA, 25 bp, Probe sequence
tgagacaggctaactatacattaca

SEQ ID NO: 20862 - DNA, 25 bp, Probe sequence
gtgagacaggctaactatacattac

SEQ ID NO: 20863 - DNA, 25 bp, Probe sequence
gacgctgaattattcggatattgtt

SEQ ID NO: 20864 - DNA, 25 bp, Probe sequence
atgaagttgatattgctgaagtgta

SEQ ID NO: 20865 - DNA, 25 bp, Probe sequence
tatgaagttgatattgctgaagtgt

SEQ ID NO: 20866 - DNA, 25 bp, Probe sequence
gaagtgagacaggctaactatacat

SEQ ID NO: 20867 - DNA, 25 bp, Probe sequence
gcagagttaatgagttatggtagac

SEQ ID NO: 20868 - DNA, 25 bp, Probe sequence
atcagcgatgaattattagaaggtg

SEQ ID NO: 20869 - DNA, 25 bp, Probe sequence
tcagcgatgaattattagaaggtgc

SEQ ID NO: 20870 - DNA, 25 bp, Probe sequence
ccgatggtactaagttaatcacagt

SEQ ID NO: 20871 - DNA, 25 bp, Probe sequence
cagagttaatgagttatggtagaca

SEQ ID NO: 20872 - DNA, 25 bp, Probe sequence
aatcagcgatgaattattagaaggt

SEQ ID NO: 20873 - DNA, 25 bp, Probe sequence
actaagttaatcacagtacatcacc

SEQ ID NO: 20874 - DNA, 25 bp, Probe sequence
agagttaatgagttatggtagacaa

SEQ ID NO: 20875 - DNA, 25 bp, Probe sequence
tgcagagttaatgagttatggtaga

SEQ ID NO: 20876 - DNA, 25 bp, Probe sequence
cgactgtagtagatgttgttgatga

SEQ ID NO: 20877 - DNA, 25 bp, Probe sequence
ttaatgacagtcgttggtatgaatg

SEQ ID NO: 20878 - DNA, 25 bp, Probe sequence
aatacaacagcaagttccagtagat

SEQ ID NO: 20879 - DNA, 25 bp, Probe sequence
taatacaacagcaagttccagtaga

SEQ ID NO: 20880 - DNA, 25 bp, Probe sequence
atacaacagcaagttccagtagatg

SEQ ID NO: 20881 - DNA, 25 bp, Probe sequence
atatggtgcgactgtagtagatgtt

SEQ ID NO: 20882 - DNA, 25 bp, Probe sequence
ataatacaacagcaagttccagtag

SEQ ID NO: 20883 - DNA, 25 bp, Probe sequence
gataatacaacagcaagttccagta

SEQ ID NO: 20884 - DNA, 25 bp, Probe sequence
agttccagtagatgtcattgttatg

SEQ ID NO: 20885 - DNA, 25 bp, Probe sequence
aatacaggagatcgaccaattcaag

SEQ ID NO: 20886 - DNA, 25 bp, Probe sequence
atacaggagatcgaccaattcaagt

SEQ ID NO: 20887 - DNA, 25 bp, Probe sequence
ttcgtggtatggtcaatggtcctat

SEQ ID NO: 20888 - DNA, 25 bp, Probe sequence
tacaggagatcgaccaattcaagtg

SEQ ID NO: 20889 - DNA, 25 bp, Probe sequence
caattagttgaatatgctggcaaac

SEQ ID NO: 20890 - DNA, 25 bp, Probe sequence
aattagttgaatatgctggcaaacg

SEQ ID NO: 20891 - DNA, 25 bp, Probe sequence
tcgtggtatggtcaatggtcctatc

SEQ ID NO: 20892 - DNA, 25 bp, Probe sequence
aaccatcatcctgaaacagttatcg

SEQ ID NO: 20893 - DNA, 25 bp, Probe sequence
aaatacaggagatcgaccaattcaa

SEQ ID NO: 20894 - DNA, 25 bp, Probe sequence
gtgtcagattagatacaggtgagtt

SEQ ID NO: 20895 - DNA, 25 bp, Probe sequence
gaagaaggtgtcacaattcatacag

SEQ ID NO: 20896 - DNA, 25 bp, Probe sequence
aagaaggtgtcacaattcatacagg

SEQ ID NO: 20897 - DNA, 25 bp, Probe sequence
ggtgtcagattagatacaggtgagt

SEQ ID NO: 20898 - DNA, 25 bp, Probe sequence
gcaatatatggtgttgtagcagata

SEQ ID NO: 20899 - DNA, 25 bp, Probe sequence
agaaggtgtcacaattcatacaggt

SEQ ID NO: 20900 - DNA, 25 bp, Probe sequence
ttctaatcgtggtgcaatatatggt

SEQ ID NO: 20901 - DNA, 25 bp, Probe sequence
gttctaatcgtggtgcaatatatgg

SEQ ID NO: 20902 - DNA, 25 bp, Probe sequence
cgttctaatcgtggtgcaatatatg

SEQ ID NO: 20903 - DNA, 25 bp, Probe sequence
attacgactcatattggtggtggta

SEQ ID NO: 20904 - DNA, 25 bp, Probe sequence
tcagtatgattagttccgattcaca

SEQ ID NO: 20905 - DNA, 25 bp, Probe sequence
ggtgtattcagtatgattagttccg

SEQ ID NO: 20906 - DNA, 25 bp, Probe sequence
ttcagtatgattagttccgattcac

SEQ ID NO: 20907 - DNA, 25 bp, Probe sequence
gtgtattcagtatgattagttccga

SEQ ID NO: 20908 - DNA, 25 bp, Probe sequence
tggtggtattgatactcatgttcat

SEQ ID NO: 20909 - DNA, 25 bp, Probe sequence
ctggtggtattgatactcatgttca

SEQ ID NO: 20910 - DNA, 25 bp, Probe sequence
atcaatatacgagcttatacggtcc

SEQ ID NO: 20911 - DNA, 25 bp, Probe sequence
aatatacgagcttatacggtccaac

SEQ ID NO: 20912 - DNA, 25 bp, Probe sequence
gattaacgcagttactacgcatatt

SEQ ID NO: 20913 - DNA, 25 bp, Probe sequence
agattaacgcagttactacgcatat

SEQ ID NO: 20914 - DNA, 25 bp, Probe sequence
gagattaacgcagttactacgcata

SEQ ID NO: 20915 - DNA, 25 bp, Probe sequence
ttaacgcagttactacgcatattaa

SEQ ID NO: 20916 - DNA, 25 bp, Probe sequence
attaacgcagttactacgcatatta

SEQ ID NO: 20917 - DNA, 25 bp, Probe sequence
gattatagagacaaagagggcagag

SEQ ID NO: 20918 - DNA, 25 bp, Probe sequence
atgattatagagacaaagagggcag

SEQ ID NO: 20919 - DNA, 25 bp, Probe sequence
aatgattatagagacaaagagggca

SEQ ID NO: 20920 - DNA, 25 bp, Probe sequence
attatagagacaaagagggcagagt

SEQ ID NO: 20921 - DNA, 25 bp, Probe sequence
ttagtgattcaaccaagaacattgc

SEQ ID NO: 20922 - DNA, 25 bp, Probe sequence
atacgcagatgaccataatatgatt

SEQ ID NO: 20923 - DNA, 25 bp, Probe sequence
agaagaccgtaaagttaataaggct

SEQ ID NO: 20924 - DNA, 25 bp, Probe sequence
ttatacgcagatgaccataatatga

SEQ ID NO: 20925 - DNA, 25 bp, Probe sequence
gagaagaccgtaaagttaataaggc

SEQ ID NO: 20926 - DNA, 25 bp, Probe sequence
cgagaagaccgtaaagttaataagg

SEQ ID NO: 20927 - DNA, 25 bp, Probe sequence
tatagcccatcaattaggaaatcgt

SEQ ID NO: 20928 - DNA, 25 bp, Probe sequence
atagcccatcaattaggaaatcgtc

SEQ ID NO: 20929 - DNA, 25 bp, Probe sequence
tatacgcagatgaccataatatgat

SEQ ID NO: 20930 - DNA, 25 bp, Probe sequence
aattatcattacacttggacaggaa

SEQ ID NO: 20931 - DNA, 25 bp, Probe sequence
atcatctggctatacagtgaacaat

SEQ ID NO: 20932 - DNA, 25 bp, Probe sequence
atctggctatacagtgaacaataca

SEQ ID NO: 20933 - DNA, 25 bp, Probe sequence
catcatctggctatacagtgaacaa

SEQ ID NO: 20934 - DNA, 25 bp, Probe sequence
catctggctatacagtgaacaatac

SEQ ID NO: 20935 - DNA, 25 bp, Probe sequence
tcatctggctatacagtgaacaata

SEQ ID NO: 20936 - DNA, 25 bp, Probe sequence
tctggctatacagtgaacaatacac

SEQ ID NO: 20937 - DNA, 25 bp, Probe sequence
ggctatacagtgaacaatacaccaa

SEQ ID NO: 20938 - DNA, 25 bp, Probe sequence
ataatgttcatgtgactacaactgc

SEQ ID NO: 20939 - DNA, 25 bp, Probe sequence
aagagcaacttacctattctgatgg

SEQ ID NO: 20940 - DNA, 25 bp, Probe sequence
acaagagcaacttacctattctgat

SEQ ID NO: 20941 - DNA, 25 bp, Probe sequence
caagagcaacttacctattctgatg

SEQ ID NO: 20942 - DNA, 25 bp, Probe sequence
tacaagagcaacttacctattctga

SEQ ID NO: 20943 - DNA, 25 bp, Probe sequence
atggattgcttggtatcatcaacaa

SEQ ID NO: 20944 - DNA, 25 bp, Probe sequence
ttacaagagcaacttacctattctg

SEQ ID NO: 20945 - DNA, 25 bp, Probe sequence
gagcaacttacctattctgatggtt

SEQ ID NO: 20946 - DNA, 25 bp, Probe sequence
catggattgcttggtatcatcaaca

SEQ ID NO: 20947 - DNA, 25 bp, Probe sequence
agagcaacttacctattctgatggt

SEQ ID NO: 20948 - DNA, 25 bp, Probe sequence
aagataagcaagaggataagcagac

SEQ ID NO: 20949 - DNA, 25 bp, Probe sequence
gcattcgcagttataggaatcatta

SEQ ID NO: 20950 - DNA, 25 bp, Probe sequence
aaagataagcaagaggataagcaga

SEQ ID NO: 20951 - DNA, 25 bp, Probe sequence
gcggttctaatgactttgttcttta

SEQ ID NO: 20952 - DNA, 25 bp, Probe sequence
gagaagaaagagaagaagacggaat

SEQ ID NO: 20953 - DNA, 25 bp, Probe sequence
atcgctttattgaaacacctatacg

SEQ ID NO: 20954 - DNA, 25 bp, Probe sequence
cgtatcgctttattgaaacacctat

SEQ ID NO: 20955 - DNA, 25 bp, Probe sequence
tcgtatcgctttattgaaacaccta

SEQ ID NO: 20956 - DNA, 25 bp, Probe sequence
actcaaacatttatggtctttagcc

SEQ ID NO: 20957 - DNA, 25 bp, Probe sequence
atagaatctggtggcgataacttag

SEQ ID NO: 20958 - DNA, 25 bp, Probe sequence
catagaatctggtggcgataactta

SEQ ID NO: 20959 - DNA, 25 bp, Probe sequence
gtggtcaaggtatgattaagtcaga

SEQ ID NO: 20960 - DNA, 25 bp, Probe sequence
aaggtggtcaaggtatgattaagtc

SEQ ID NO: 20961 - DNA, 25 bp, Probe sequence
tggtcaaggtatgattaagtcagat

SEQ ID NO: 20962 - DNA, 25 bp, Probe sequence
ggtggtcaaggtatgattaagtcag

SEQ ID NO: 20963 - DNA, 25 bp, Probe sequence
tcatagaatctggtggcgataactt

SEQ ID NO: 20964 - DNA, 25 bp, Probe sequence
aggtggtcaaggtatgattaagtca

SEQ ID NO: 20965 - DNA, 25 bp, Probe sequence
ttcatagaatctggtggcgataact

SEQ ID NO: 20966 - DNA, 25 bp, Probe sequence
ttaagcgaggagatttaccaagtag

SEQ ID NO: 20967 - DNA, 25 bp, Probe sequence
attaagcgaggagatttaccaagta

SEQ ID NO: 20968 - DNA, 25 bp, Probe sequence
aattaagcgaggagatttaccaagt

SEQ ID NO: 20969 - DNA, 25 bp, Probe sequence
taagcgaggagatttaccaagtagt

SEQ ID NO: 20970 - DNA, 25 bp, Probe sequence
ttggagaacatcgaacataactatt

SEQ ID NO: 20971 - DNA, 25 bp, Probe sequence
agcgaggagatttaccaagtagttt

SEQ ID NO: 20972 - DNA, 25 bp, Probe sequence
aagcgaggagatttaccaagtagtt

SEQ ID NO: 20973 - DNA, 25 bp, Probe sequence
gtgaaattaagcgaggagatttacc

SEQ ID NO: 20974 - DNA, 25 bp, Probe sequence
tgaaattaagcgaggagatttacca

SEQ ID NO: 20975 - DNA, 25 bp, Probe sequence
acgaatcaaggtagtcatagtgaat

SEQ ID NO: 20976 - DNA, 25 bp, Probe sequence
aatcaaggtagtcatagtgaattgc

SEQ ID NO: 20977 - DNA, 25 bp, Probe sequence
cgaatcaaggtagtcatagtgaatt

SEQ ID NO: 20978 - DNA, 25 bp, Probe sequence
gacgaatcaaggtagtcatagtgaa

SEQ ID NO: 20979 - DNA, 25 bp, Probe sequence
agatgttacgaatgttagtacagca

SEQ ID NO: 20980 - DNA, 25 bp, Probe sequence
cagatgttacgaatgttagtacagc

SEQ ID NO: 20981 - DNA, 25 bp, Probe sequence
gcagatgttacgaatgttagtacag

SEQ ID NO: 20982 - DNA, 25 bp, Probe sequence
gcacagttattcacggtagatatat

SEQ ID NO: 20983 - DNA, 25 bp, Probe sequence
tgttacgaatgttagtacagcatca

SEQ ID NO: 20984 - DNA, 25 bp, Probe sequence
atcattgatattatcgctcacacaa

SEQ ID NO: 20985 - DNA, 25 bp, Probe sequence
tattatcgctcacacaatttacacc

SEQ ID NO: 20986 - DNA, 25 bp, Probe sequence
attatcgctcacacaatttacacct

SEQ ID NO: 20987 - DNA, 25 bp, Probe sequence
tatcgctcacacaatttacaccttt

SEQ ID NO: 20988 - DNA, 25 bp, Probe sequence
ttatcgctcacacaatttacacctt

SEQ ID NO: 20989 - DNA, 25 bp, Probe sequence
tcattgatattatcgctcacacaat

SEQ ID NO: 20990 - DNA, 25 bp, Probe sequence
tatcattgatattatcgctcacaca

SEQ ID NO: 20991 - DNA, 25 bp, Probe sequence
cattgatattatcgctcacacaatt

SEQ ID NO: 20992 - DNA, 25 bp, Probe sequence
atattatcgctcacacaatttacac

SEQ ID NO: 20993 - DNA, 25 bp, Probe sequence
atcgttaccgtatgaatgtgaatgt

SEQ ID NO: 20994 - DNA, 25 bp, Probe sequence
tcgttaccgtatgaatgtgaatgtc

SEQ ID NO: 20995 - DNA, 25 bp, Probe sequence
gatcgttaccgtatgaatgtgaatg

SEQ ID NO: 20996 - DNA, 25 bp, Probe sequence
agatcgttaccgtatgaatgtgaat

SEQ ID NO: 20997 - DNA, 25 bp, Probe sequence
gagatcgttaccgtatgaatgtgaa

SEQ ID NO: 20998 - DNA, 25 bp, Probe sequence
tagatggagatcgttaccgtatgaa

SEQ ID NO: 20999 - DNA, 25 bp, Probe sequence
ttagatggagatcgttaccgtatga

SEQ ID NO: 21000 - DNA, 25 bp, Probe sequence
gatggagatcgttaccgtatgaatg

SEQ ID NO: 21001 - DNA, 25 bp, Probe sequence
agatggagatcgttaccgtatgaat

SEQ ID NO: 21002 - DNA, 25 bp, Probe sequence
ttaccataactacagcacttcaact

SEQ ID NO: 21003 - DNA, 25 bp, Probe sequence
acttaccataactacagcacttcaa

SEQ ID NO: 21004 - DNA, 25 bp, Probe sequence
aacttaccataactacagcacttca

SEQ ID NO: 21005 - DNA, 25 bp, Probe sequence
cagactacactacttcatacaacca

SEQ ID NO: 21006 - DNA, 25 bp, Probe sequence
aactacagcacttcaactacttcaa

SEQ ID NO: 21007 - DNA, 25 bp, Probe sequence
ccataactacagcacttcaactact

SEQ ID NO: 21008 - DNA, 25 bp, Probe sequence
cttaccataactacagcacttcaac

SEQ ID NO: 21009 - DNA, 25 bp, Probe sequence
caacttaccataactacagcacttc

SEQ ID NO: 21010 - DNA, 25 bp, Probe sequence
taactacagcacttcaactacttca

SEQ ID NO: 21011 - DNA, 25 bp, Probe sequence
cgtaacttatacacttctggtcaat

SEQ ID NO: 21012 - DNA, 25 bp, Probe sequence
ttcaagtaactacaactatggctcc

SEQ ID NO: 21013 - DNA, 25 bp, Probe sequence
gttcaagtaactacaactatggctc

SEQ ID NO: 21014 - DNA, 25 bp, Probe sequence
ccgttcaatctcaagtggttatact

SEQ ID NO: 21015 - DNA, 25 bp, Probe sequence
tgttcaagtaactacaactatggct

SEQ ID NO: 21016 - DNA, 25 bp, Probe sequence
gccgttcaatctcaagtggttatac

SEQ ID NO: 21017 - DNA, 25 bp, Probe sequence
ttcaagcaacaatgttcaagtaact

SEQ ID NO: 21018 - DNA, 25 bp, Probe sequence
cttcaagcaacaatgttcaagtaac

SEQ ID NO: 21019 - DNA, 25 bp, Probe sequence
atgttcaagtaactacaactatggc

SEQ ID NO: 21020 - DNA, 25 bp, Probe sequence
tggtatcagcattagtaggtattca

SEQ ID NO: 21021 - DNA, 25 bp, Probe sequence
taatacaatgattacagcagcgatt

SEQ ID NO: 21022 - DNA, 25 bp, Probe sequence
ttaatacaatgattacagcagcgat

SEQ ID NO: 21023 - DNA, 25 bp, Probe sequence
gcttggttgagtgtcttactaattg

SEQ ID NO: 21024 - DNA, 25 bp, Probe sequence
tgcttggttgagtgtcttactaatt

SEQ ID NO: 21025 - DNA, 25 bp, Probe sequence
ctgcttggttgagtgtcttactaat

SEQ ID NO: 21026 - DNA, 25 bp, Probe sequence
gattctgcttggttgagtgtcttac

SEQ ID NO: 21027 - DNA, 25 bp, Probe sequence
cttggttgagtgtcttactaattgt

SEQ ID NO: 21028 - DNA, 25 bp, Probe sequence
gcattagtaggtattcatggaacga

SEQ ID NO: 21029 - DNA, 25 bp, Probe sequence
agaacattatggcgatgcttatcta

SEQ ID NO: 21030 - DNA, 25 bp, Probe sequence
atgagaacattatggcgatgcttat

SEQ ID NO: 21031 - DNA, 25 bp, Probe sequence
gaacattatggcgatgcttatctat

SEQ ID NO: 21032 - DNA, 25 bp, Probe sequence
aacattatggcgatgcttatctatt

SEQ ID NO: 21033 - DNA, 25 bp, Probe sequence
gagaacattatggcgatgcttatct

SEQ ID NO: 21034 - DNA, 25 bp, Probe sequence
tgagaacattatggcgatgcttatc

SEQ ID NO: 21035 - DNA, 25 bp, Probe sequence
gatgagaacattatggcgatgctta

SEQ ID NO: 21036 - DNA, 25 bp, Probe sequence
attcacatctattattggtccactg

SEQ ID NO: 21037 - DNA, 25 bp, Probe sequence
ttcacatctattattggtccactga

SEQ ID NO: 21038 - DNA, 25 bp, Probe sequence
agttggtgaataaagtgaaagaagc

SEQ ID NO: 21039 - DNA, 25 bp, Probe sequence
cagtcgttcaagaaccaacagtaag

SEQ ID NO: 21040 - DNA, 25 bp, Probe sequence
gttggtgaataaagtgaaagaagcg

SEQ ID NO: 21041 - DNA, 25 bp, Probe sequence
ccagttggtgaataaagtgaaagaa

SEQ ID NO: 21042 - DNA, 25 bp, Probe sequence
cagttggtgaataaagtgaaagaag

SEQ ID NO: 21043 - DNA, 25 bp, Probe sequence
gttcaagaaccaacagtaagccaag

SEQ ID NO: 21044 - DNA, 25 bp, Probe sequence
ttcaagaaccaacagtaagccaagg

SEQ ID NO: 21045 - DNA, 25 bp, Probe sequence
aagaagttgaccagttggtgaataa

SEQ ID NO: 21046 - DNA, 25 bp, Probe sequence
gaagaagttgaccagttggtgaata

SEQ ID NO: 21047 - DNA, 25 bp, Probe sequence
ctgttagtggtgaagatagttggaa

SEQ ID NO: 21048 - DNA, 25 bp, Probe sequence
tactgttagtggtgaagatagttgg

SEQ ID NO: 21049 - DNA, 25 bp, Probe sequence
ctgcctatggtaataataatgacga

SEQ ID NO: 21050 - DNA, 25 bp, Probe sequence
tctgcctatggtaataataatgacg

SEQ ID NO: 21051 - DNA, 25 bp, Probe sequence
actgttagtggtgaagatagttgga

SEQ ID NO: 21052 - DNA, 25 bp, Probe sequence
ctactgttagtggtgaagatagttg

SEQ ID NO: 21053 - DNA, 25 bp, Probe sequence
agtattaacaacattaggaacaggt

SEQ ID NO: 21054 - DNA, 25 bp, Probe sequence
tgcctatggtaataataatgacgat

SEQ ID NO: 21055 - DNA, 25 bp, Probe sequence
tgttagtggtgaagatagttggaaa

SEQ ID NO: 21056 - DNA, 25 bp, Probe sequence
ttcagagaatgccgttacaactata

SEQ ID NO: 21057 - DNA, 25 bp, Probe sequence
tcagagaatgccgttacaactatag

SEQ ID NO: 21058 - DNA, 25 bp, Probe sequence
gagaatgccgttacaactatagctt

SEQ ID NO: 21059 - DNA, 25 bp, Probe sequence
agacgaaacttgtaagggagatatt

SEQ ID NO: 21060 - DNA, 25 bp, Probe sequence
attagacgaaacttgtaagggagat

SEQ ID NO: 21061 - DNA, 25 bp, Probe sequence
aattagacgaaacttgtaagggaga

SEQ ID NO: 21062 - DNA, 25 bp, Probe sequence
tttcagagaatgccgttacaactat

SEQ ID NO: 21063 - DNA, 25 bp, Probe sequence
atttcagagaatgccgttacaacta

SEQ ID NO: 21064 - DNA, 25 bp, Probe sequence
ttagacgaaacttgtaagggagata

SEQ ID NO: 21065 - DNA, 25 bp, Probe sequence
acaagatgatattagcgaagcagta

SEQ ID NO: 21066 - DNA, 25 bp, Probe sequence
aacaacaagatgatattagcgaagc

SEQ ID NO: 21067 - DNA, 25 bp, Probe sequence
tattagcgaagcagtatcaacaatg

SEQ ID NO: 21068 - DNA, 25 bp, Probe sequence
caacaagatgatattagcgaagcag

SEQ ID NO: 21069 - DNA, 25 bp, Probe sequence
acagaacaacaagatgatattagcg

SEQ ID NO: 21070 - DNA, 25 bp, Probe sequence
aacaagatgatattagcgaagcagt

SEQ ID NO: 21071 - DNA, 25 bp, Probe sequence
cagaacaacaagatgatattagcga

SEQ ID NO: 21072 - DNA, 25 bp, Probe sequence
acaacaagatgatattagcgaagca

SEQ ID NO: 21073 - DNA, 25 bp, Probe sequence
caagatgatattagcgaagcagtat

SEQ ID NO: 21074 - DNA, 25 bp, Probe sequence
taatggacaatcacacacaactaca

SEQ ID NO: 21075 - DNA, 25 bp, Probe sequence
ataatggacaatcacacacaactac

SEQ ID NO: 21076 - DNA, 25 bp, Probe sequence
aatggacaatcacacacaactacaa

SEQ ID NO: 21077 - DNA, 25 bp, Probe sequence
tataatggacaatcacacacaacta
